United States Patent Application Publication US 2005/0244851 A1 - sequence listing, part 137

SEQ ID NO: 5348221 - DNA, 25 bp, Homo sapien
ctttgagtgaccagagcgggtctga

SEQ ID NO: 5348222 - DNA, 25 bp, Homo sapien
ctgagaactttgagtgaccagagcg

SEQ ID NO: 5348223 - DNA, 25 bp, Homo sapien
gagctaggcggtggaggaacatttg

SEQ ID NO: 5348224 - DNA, 25 bp, Homo sapien
ccagagcgggtctgaggaacacaga

SEQ ID NO: 5348225 - DNA, 25 bp, Homo sapien
tcactgggaaaaacgtaattgaggc

SEQ ID NO: 5348226 - DNA, 25 bp, Homo sapien
tagaacacgttctcccacatgacac

SEQ ID NO: 5348227 - DNA, 25 bp, Homo sapien
tatctgccatggatttacaaagtct

SEQ ID NO: 5348228 - DNA, 25 bp, Homo sapien
tgaggacagcttgtatagaacacgt

SEQ ID NO: 5348229 - DNA, 25 bp, Homo sapien
cccggctgattttcagtgtgaaatc

SEQ ID NO: 5348230 - DNA, 25 bp, Homo sapien
cacccggctgattttcagtgtgaaa

SEQ ID NO: 5348231 - DNA, 25 bp, Homo sapien
ccacccggctgattttcagtgtgaa

SEQ ID NO: 5348232 - DNA, 25 bp, Homo sapien
tccacccggctgattttcagtgtga

SEQ ID NO: 5348233 - DNA, 25 bp, Homo sapien
caggtaccaatacaaataggtcttt

SEQ ID NO: 5348234 - DNA, 25 bp, Homo sapien
gcactccagagaaccggctggaaac

SEQ ID NO: 5348235 - DNA, 25 bp, Homo sapien
gagtctgggtcatcacaatatccgc

SEQ ID NO: 5348236 - DNA, 25 bp, Homo sapien
tatctggcactccagagaaccggct

SEQ ID NO: 5348237 - DNA, 25 bp, Homo sapien
tgcaaggttatgtgaaagcataatg

SEQ ID NO: 5348238 - DNA, 25 bp, Homo sapien
gtgaaagcataatgaacaacttttg

SEQ ID NO: 5348239 - DNA, 25 bp, Homo sapien
ggttatgtgaaagcataatgaacaa

SEQ ID NO: 5348240 - DNA, 25 bp, Homo sapien
gaagtgcaaggttatgtgaaagcat

SEQ ID NO: 5348241 - DNA, 25 bp, Homo sapien
gggagcctcatggtgagaagatgaa

SEQ ID NO: 5348242 - DNA, 25 bp, Homo sapien
cagggagcctcatggtgagaagatg

SEQ ID NO: 5348243 - DNA, 25 bp, Homo sapien
cagggatccagagcattagcagccc

SEQ ID NO: 5348244 - DNA, 25 bp, Homo sapien
agcagggagcctcatggtgagaaga

SEQ ID NO: 5348245 - DNA, 25 bp, Homo sapien
cctgacatacaagtacaagaagagc

SEQ ID NO: 5348246 - DNA, 25 bp, Homo sapien
ttttcaaaccgatcccctgagctgc

SEQ ID NO: 5348247 - DNA, 25 bp, Homo sapien
ggaaatcacatcagcctggaaataa

SEQ ID NO: 5348248 - DNA, 25 bp, Homo sapien
cacatgtctagtattgcagcaagga

SEQ ID NO: 5348249 - DNA, 25 bp, Homo sapien
aggcagcaggtgaggtcacgaccca

SEQ ID NO: 5348250 - DNA, 25 bp, Homo sapien
ggcagcaggtgaggtcacgacccac

SEQ ID NO: 5348251 - DNA, 25 bp, Homo sapien
gtgacgtgaacgagcatccctgaag

SEQ ID NO: 5348252 - DNA, 25 bp, Homo sapien
gggccctggccctgttcgcacagaa

SEQ ID NO: 5348253 - DNA, 25 bp, Homo sapien
gaagtagagcccatgcctgtaagtg

SEQ ID NO: 5348254 - DNA, 25 bp, Homo sapien
gcctgaacaccctaagttgggagga

SEQ ID NO: 5348255 - DNA, 25 bp, Homo sapien
catagccgccaagtttgcctgtgga

SEQ ID NO: 5348256 - DNA, 25 bp, Homo sapien
tctgacttggtacaggcagaggagc

SEQ ID NO: 5348257 - DNA, 25 bp, Homo sapien
ggaaacaagctctgacttggtacag

SEQ ID NO: 5348258 - DNA, 25 bp, Homo sapien
tgccatagccgccaagtttgcctgt

SEQ ID NO: 5348259 - DNA, 25 bp, Homo sapien
tgctgggctacaaggacataaaact

SEQ ID NO: 5348260 - DNA, 25 bp, Homo sapien
cacagggcagcctctataagtggcc

SEQ ID NO: 5348261 - DNA, 25 bp, Homo sapien
ggcccgtgctttccatgggacacat

SEQ ID NO: 5348262 - DNA, 25 bp, Homo sapien
caaccagcagtctctagggacagaa

SEQ ID NO: 5348263 - DNA, 25 bp, Homo sapien
ttttcagtgtgaaatcagtgcctga

SEQ ID NO: 5348264 - DNA, 25 bp, Homo sapien
tcagtgtgaaatcagtgcctgaccc

SEQ ID NO: 5348265 - DNA, 25 bp, Homo sapien
gctgattttcagtgtgaaatcagtg

SEQ ID NO: 5348266 - DNA, 25 bp, Homo sapien
gattttcagtgtgaaatcagtgcct

SEQ ID NO: 5348267 - DNA, 25 bp, Homo sapien
attaggcgccttggagattggcctg

SEQ ID NO: 5348268 - DNA, 25 bp, Homo sapien
gagactgagtcatcacaacatcccc

SEQ ID NO: 5348269 - DNA, 25 bp, Homo sapien
tggagactgagtcatcacaacatcc

SEQ ID NO: 5348270 - DNA, 25 bp, Homo sapien
cttataaattaggcgccttggagat

SEQ ID NO: 5348271 - DNA, 25 bp, Homo sapien
tagcagccccaggagctgagcaggg

SEQ ID NO: 5348272 - DNA, 25 bp, Homo sapien
ccaggagctgagcagggagcctcat

SEQ ID NO: 5348273 - DNA, 25 bp, Homo sapien
tgggacccagagcattagcagcccc

SEQ ID NO: 5348274 - DNA, 25 bp, Homo sapien
ctgggacccagagcattagcagccc

SEQ ID NO: 5348275 - DNA, 25 bp, Homo sapien
taaactcctgttgccctatctagtg

SEQ ID NO: 5348276 - DNA, 25 bp, Homo sapien
ttgaagcatttatgtgacaaccact

SEQ ID NO: 5348277 - DNA, 25 bp, Homo sapien
taggaacagtcaagagtcagcttcc

SEQ ID NO: 5348278 - DNA, 25 bp, Homo sapien
caggctcattgatgcttctgccaac

SEQ ID NO: 5348279 - DNA, 25 bp, Homo sapien
gataacagtgttaaagtgcaaaatc

SEQ ID NO: 5348280 - DNA, 25 bp, Homo sapien
ttctcttttgttgtatgaacctgga

SEQ ID NO: 5348281 - DNA, 25 bp, Homo sapien
tgttgtatgaacctggaccagtgct

SEQ ID NO: 5348282 - DNA, 25 bp, Homo sapien
gaccagtgctgtaacccagagtcct

SEQ ID NO: 5348283 - DNA, 25 bp, Homo sapien
tcttctatgaaattaggagaggcat

SEQ ID NO: 5348284 - DNA, 25 bp, Homo sapien
ggctgctgatggtgaaagtaaaatc

SEQ ID NO: 5348285 - DNA, 25 bp, Homo sapien
gtgaaagtaaaatctgtcccagatc

SEQ ID NO: 5348286 - DNA, 25 bp, Homo sapien
tgttgacagtaatatgttgcaatat

SEQ ID NO: 5348287 - DNA, 25 bp, Homo sapien
tgacagtaatatgttgcaatatctt

SEQ ID NO: 5348288 - DNA, 25 bp, Homo sapien
caatttaaatagttgctaatgtcct

SEQ ID NO: 5348289 - DNA, 25 bp, Homo sapien
tttaaatagttgctaatgtcctgac

SEQ ID NO: 5348290 - DNA, 25 bp, Homo sapien
gtttccaaattggatgcatcgtaga

SEQ ID NO: 5348291 - DNA, 25 bp, Homo sapien
tccaaattggatgcatcgtagatca

SEQ ID NO: 5348292 - DNA, 25 bp, Homo sapien
gagactgggtcatctggatgtcaca

SEQ ID NO: 5348293 - DNA, 25 bp, Homo sapien
ggtcatctggatgtcacatctggca

SEQ ID NO: 5348294 - DNA, 25 bp, Homo sapien
tcgcctggcaagtgatggtgactct

SEQ ID NO: 5348295 - DNA, 25 bp, Homo sapien
gtgactctgtctcctacagatgcag

SEQ ID NO: 5348296 - DNA, 25 bp, Homo sapien
gccccaggagctgagcagggaccct

SEQ ID NO: 5348297 - DNA, 25 bp, Homo sapien
ccaggagctgagcagggaccctcat

SEQ ID NO: 5348298 - DNA, 25 bp, Homo sapien
ctgagagccagagcagcaggagccc

SEQ ID NO: 5348299 - DNA, 25 bp, Homo sapien
ggagccccaggagctgagcagggac

SEQ ID NO: 5348300 - DNA, 25 bp, Homo sapien
cacagggtgcgaccagcctattaat

SEQ ID NO: 5348301 - DNA, 25 bp, Homo sapien
ggtgcgaccagcctattaataagtc

SEQ ID NO: 5348302 - DNA, 25 bp, Homo sapien
accagcctattaataagtcttcagg

SEQ ID NO: 5348303 - DNA, 25 bp, Homo sapien
tgcacagggtgcgaccagcctatta

SEQ ID NO: 5348304 - DNA, 25 bp, Homo sapien
ctgggatcctaggtcgactttcctc

SEQ ID NO: 5348305 - DNA, 25 bp, Homo sapien
tctgagagaccaaagccgtagcgca

SEQ ID NO: 5348306 - DNA, 25 bp, Homo sapien
cctcactggtcctgagtggccagga

SEQ ID NO: 5348307 - DNA, 25 bp, Homo sapien
accaaagccgtagcgcagggcctgg

SEQ ID NO: 5348308 - DNA, 25 bp, Homo sapien
tcagccctgctggtgaaagtgaccc

SEQ ID NO: 5348309 - DNA, 25 bp, Homo sapien
taggatgctgttcatactctggtca

SEQ ID NO: 5348310 - DNA, 25 bp, Homo sapien
gggtccacacgatgttgccactggc

SEQ ID NO: 5348311 - DNA, 25 bp, Homo sapien
aaagtgaccctctcacttgggacgc

SEQ ID NO: 5348312 - DNA, 25 bp, Homo sapien
accttcactcggtggcctttacttg

SEQ ID NO: 5348313 - DNA, 25 bp, Homo sapien
gtgcacctaaccttcactcggtggc

SEQ ID NO: 5348314 - DNA, 25 bp, Homo sapien
tacttgttcgtgaaaatgctgccat

SEQ ID NO: 5348315 - DNA, 25 bp, Homo sapien
tcggtggcctttacttgttcgtgaa

SEQ ID NO: 5348316 - DNA, 25 bp, Homo sapien
gttggggtaaagtctgcctcaggcc

SEQ ID NO: 5348317 - DNA, 25 bp, Homo sapien
tgctggtagccttggtagatgccct

SEQ ID NO: 5348318 - DNA, 25 bp, Homo sapien
accaccactgaaccgggctgggatg

SEQ ID NO: 5348319 - DNA, 25 bp, Homo sapien
tgggacacccactgctgtactgatg

SEQ ID NO: 5348320 - DNA, 25 bp, Homo sapien
ggagaggagctgagctggaacttcc

SEQ ID NO: 5348321 - DNA, 25 bp, Homo sapien
aggagaggagctgagctggaacttc

SEQ ID NO: 5348322 - DNA, 25 bp, Homo sapien
tccctctgggtcctaaccgagcagc

SEQ ID NO: 5348323 - DNA, 25 bp, Homo sapien
gagaggagctgagctggaacttcca

SEQ ID NO: 5348324 - DNA, 25 bp, Homo sapien
gatccccgaggacaatcagacatcc

SEQ ID NO: 5348325 - DNA, 25 bp, Homo sapien
agcccacagcaaatatacttccttg

SEQ ID NO: 5348326 - DNA, 25 bp, Homo sapien
agacaaaccctccatgagggctgag

SEQ ID NO: 5348327 - DNA, 25 bp, Homo sapien
tgaggaccacagatccccgaggaca

SEQ ID NO: 5348328 - DNA, 25 bp, Homo sapien
gatagtgaaggcatagctggttcca

SEQ ID NO: 5348329 - DNA, 25 bp, Homo sapien
catgcagttatactccccgtagtcc

SEQ ID NO: 5348330 - DNA, 25 bp, Homo sapien
ctacccatagtcaagcatgcagtta

SEQ ID NO: 5348331 - DNA, 25 bp, Homo sapien
cattgatagtgaaggcatagctggt

SEQ ID NO: 5348332 - DNA, 25 bp, Homo sapien
tgtaaggggttcaagtctttgtcca

SEQ ID NO: 5348333 - DNA, 25 bp, Homo sapien
gaccaaggtagtgacatgagatgta

SEQ ID NO: 5348334 - DNA, 25 bp, Homo sapien
aaaaactctctttcctgaatgtact

SEQ ID NO: 5348335 - DNA, 25 bp, Homo sapien
tgctggcttagcaggagacaaaaac

SEQ ID NO: 5348336 - DNA, 25 bp, Homo sapien
cccagcatccaacagtaactgtctg

SEQ ID NO: 5348337 - DNA, 25 bp, Homo sapien
caacagtaactgtctggaagctttt

SEQ ID NO: 5348338 - DNA, 25 bp, Homo sapien
catccaacagtaactgtctggaagc

SEQ ID NO: 5348339 - DNA, 25 bp, Homo sapien
cagcatccaacagtaactgtctgga

SEQ ID NO: 5348340 - DNA, 25 bp, Homo sapien
gtgattaaggctctgcacatgagat

SEQ ID NO: 5348341 - DNA, 25 bp, Homo sapien
atgtgattaaggctctgcacatgag

SEQ ID NO: 5348342 - DNA, 25 bp, Homo sapien
tgtgattaaggctctgcacatgaga

SEQ ID NO: 5348343 - DNA, 25 bp, Homo sapien
gatgtgattaaggctctgcacatga

SEQ ID NO: 5348344 - DNA, 25 bp, Homo sapien
tcctgtcacaatcagaggatttttc

SEQ ID NO: 5348345 - DNA, 25 bp, Homo sapien
taaacgcgagtttgcttcaccagcc

SEQ ID NO: 5348346 - DNA, 25 bp, Homo sapien
tttccatctggcttagttcacctaa

SEQ ID NO: 5348347 - DNA, 25 bp, Homo sapien
cctaatccatgacaataaacgcgag

SEQ ID NO: 5348348 - DNA, 25 bp, Homo sapien
agctgttagtctgatctcagatgtg

SEQ ID NO: 5348349 - DNA, 25 bp, Homo sapien
tcagatgtgtagtacaatgttaggg

SEQ ID NO: 5348350 - DNA, 25 bp, Homo sapien
agtacaatgttagggtttcaggaag

SEQ ID NO: 5348351 - DNA, 25 bp, Homo sapien
tagtctgatctcagatgtgtagtac

SEQ ID NO: 5348352 - DNA, 25 bp, Homo sapien
cgaagagacattgccatgagaggaa

SEQ ID NO: 5348353 - DNA, 25 bp, Homo sapien
aaagagacttagggtggagagacac

SEQ ID NO: 5348354 - DNA, 25 bp, Homo sapien
tttactaaattcgaagagacattgc

SEQ ID NO: 5348355 - DNA, 25 bp, Homo sapien
ccatgagaggaaagagacttagggt

SEQ ID NO: 5348356 - DNA, 25 bp, Homo sapien
gcccagcgtcacatgtctgctttcc

SEQ ID NO: 5348357 - DNA, 25 bp, Homo sapien
ttccgtaatctcccaataaccctca

SEQ ID NO: 5348358 - DNA, 25 bp, Homo sapien
gatggctgcacaaagaagagcaggt

SEQ ID NO: 5348359 - DNA, 25 bp, Homo sapien
gctgagtctgagaagtgttgtcacc

SEQ ID NO: 5348360 - DNA, 25 bp, Homo sapien
gcaacatctttaggctgcaggattc

SEQ ID NO: 5348361 - DNA, 25 bp, Homo sapien
aattactaccaatgctctgactcgc

SEQ ID NO: 5348362 - DNA, 25 bp, Homo sapien
gagccccagattgcaaactggatgc

SEQ ID NO: 5348363 - DNA, 25 bp, Homo sapien
tgcaggattctgatggtgagagtaa

SEQ ID NO: 5348364 - DNA, 25 bp, Homo sapien
gggtgactggatgtcacttctggtc

SEQ ID NO: 5348365 - DNA, 25 bp, Homo sapien
ggtgactggatgtcacttctggtcc

SEQ ID NO: 5348366 - DNA, 25 bp, Homo sapien
ctgggtgactggatgtcacttctgg

SEQ ID NO: 5348367 - DNA, 25 bp, Homo sapien
agactgggtgactggatgtcacttc

SEQ ID NO: 5348368 - DNA, 25 bp, Homo sapien
cagactccatggtcatgctgctgct

SEQ ID NO: 5348369 - DNA, 25 bp, Homo sapien
gactccatggtcatgctgctgctct

SEQ ID NO: 5348370 - DNA, 25 bp, Homo sapien
agactccatggtcatgctgctgctc

SEQ ID NO: 5348371 - DNA, 25 bp, Homo sapien
ctgagatgggcagactccatggtca

SEQ ID NO: 5348372 - DNA, 25 bp, Homo sapien
tgagatgggcagactccatggtcat

SEQ ID NO: 5348373 - DNA, 25 bp, Homo sapien
ggctacaggattcaccaggactttc

SEQ ID NO: 5348374 - DNA, 25 bp, Homo sapien
gtcttcatggagggtgtaggtggcc

SEQ ID NO: 5348375 - DNA, 25 bp, Homo sapien
ggcccctggctacaggattcaccag

SEQ ID NO: 5348376 - DNA, 25 bp, Homo sapien
taggtggcccctggctacaggattc

SEQ ID NO: 5348377 - DNA, 25 bp, Homo sapien
acaggtctgagttctaaggtctttc

SEQ ID NO: 5348378 - DNA, 25 bp, Homo sapien
tgccagtagcttttctttgtaaacc

SEQ ID NO: 5348379 - DNA, 25 bp, Homo sapien
tgttccttgataagtggtccccact

SEQ ID NO: 5348380 - DNA, 25 bp, Homo sapien
aatgcaacctctaacaggaacctgg

SEQ ID NO: 5348381 - DNA, 25 bp, Homo sapien
tggccccttccatcaaaacttttca

SEQ ID NO: 5348382 - DNA, 25 bp, Homo sapien
gcaggccagccccatacatctgctt

SEQ ID NO: 5348383 - DNA, 25 bp, Homo sapien
gaatatgagaaaccctctgagcagc

SEQ ID NO: 5348384 - DNA, 25 bp, Homo sapien
gtgactttcaaagcttgactggaat

SEQ ID NO: 5348385 - DNA, 25 bp, Homo sapien
tccgttgaccgtaataagttgcaac

SEQ ID NO: 5348386 - DNA, 25 bp, Homo sapien
atgggactccagattgcaaattgga

SEQ ID NO: 5348387 - DNA, 25 bp, Homo sapien
gggcattgtaagtccgttgaccgta

SEQ ID NO: 5348388 - DNA, 25 bp, Homo sapien
ggactccagattgcaaattggatgc

SEQ ID NO: 5348389 - DNA, 25 bp, Homo sapien
acagatgcagacagggaggatggag

SEQ ID NO: 5348390 - DNA, 25 bp, Homo sapien
cagatgcagacagggaggatggaga

SEQ ID NO: 5348391 - DNA, 25 bp, Homo sapien
tacagatgcagacagggaggatgga

SEQ ID NO: 5348392 - DNA, 25 bp, Homo sapien
ctacagatgcagacagggaggatgg

SEQ ID NO: 5348393 - DNA, 25 bp, Homo sapien
gtcaactggatgtcacatctggcac

SEQ ID NO: 5348394 - DNA, 25 bp, Homo sapien
tgaagagccaggctatactgagcgc

SEQ ID NO: 5348395 - DNA, 25 bp, Homo sapien
agccaggctatactgagcgcaccag

SEQ ID NO: 5348396 - DNA, 25 bp, Homo sapien
gttataagaagacctccctgaagag

SEQ ID NO: 5348397 - DNA, 25 bp, Homo sapien
catccattcaatccatcatgttata

SEQ ID NO: 5348398 - DNA, 25 bp, Homo sapien
actgggactgactgctgcacggggt

SEQ ID NO: 5348399 - DNA, 25 bp, Homo sapien
cctgactgggactgactgctgcacg

SEQ ID NO: 5348400 - DNA, 25 bp, Homo sapien
tgggacccagagcagtaggagcccc

SEQ ID NO: 5348401 - DNA, 25 bp, Homo sapien
ggactgactgctgcacggggtgtga

SEQ ID NO: 5348402 - DNA, 25 bp, Homo sapien
ggttggagcagtccctgtctgcact

SEQ ID NO: 5348403 - DNA, 25 bp, Homo sapien
tctgcactgaggactttccctttca

SEQ ID NO: 5348404 - DNA, 25 bp, Homo sapien
ctgtctgcactgaggactttccctt

SEQ ID NO: 5348405 - DNA, 25 bp, Homo sapien
tgcttttttctaaacggttggagca

SEQ ID NO: 5348406 - DNA, 25 bp, Homo sapien
cgtacttctgctgattccccatggc

SEQ ID NO: 5348407 - DNA, 25 bp, Homo sapien
gtacttctgctgattccccatggcc

SEQ ID NO: 5348408 - DNA, 25 bp, Homo sapien
tacttctgctgattccccatggcca

SEQ ID NO: 5348409 - DNA, 25 bp, Homo sapien
acttctgctgattccccatggccat

SEQ ID NO: 5348410 - DNA, 25 bp, Homo sapien
ggagatgtgtacagtccacagattt

SEQ ID NO: 5348411 - DNA, 25 bp, Homo sapien
gcactaactgcctggaagcttttct

SEQ ID NO: 5348412 - DNA, 25 bp, Homo sapien
cctggttggaggagttagcatcttc

SEQ ID NO: 5348413 - DNA, 25 bp, Homo sapien
cctccaaacgcaacctctgatagat

SEQ ID NO: 5348414 - DNA, 25 bp, Homo sapien
gctgatggtgagagtgaaatctgtc

SEQ ID NO: 5348415 - DNA, 25 bp, Homo sapien
aaatctgtcccagatccactgccac

SEQ ID NO: 5348416 - DNA, 25 bp, Homo sapien
gttgcaaaatcttcaggttgcagac

SEQ ID NO: 5348417 - DNA, 25 bp, Homo sapien
ttcaggttgcagactgctgatggtg

SEQ ID NO: 5348418 - DNA, 25 bp, Homo sapien
tttaaatagctgctaatgctctgac

SEQ ID NO: 5348419 - DNA, 25 bp, Homo sapien
tgcagcatagatcaggagcttaggg

SEQ ID NO: 5348420 - DNA, 25 bp, Homo sapien
gataccaatttaaatagctgctaat

SEQ ID NO: 5348421 - DNA, 25 bp, Homo sapien
gatcaggagcttaggggctttccct

SEQ ID NO: 5348422 - DNA, 25 bp, Homo sapien
tgcccggcaagtgatggtgactctg

SEQ ID NO: 5348423 - DNA, 25 bp, Homo sapien
cccggcaagtgatggtgactctgtc

SEQ ID NO: 5348424 - DNA, 25 bp, Homo sapien
ttgcccggcaagtgatggtgactct

SEQ ID NO: 5348425 - DNA, 25 bp, Homo sapien
cggcaagtgatggtgactctgtctc

SEQ ID NO: 5348426 - DNA, 25 bp, Homo sapien
gactgggtcatctggatgtcacatc

SEQ ID NO: 5348427 - DNA, 25 bp, Homo sapien
gagactgggtcatctggatgtcaca

SEQ ID NO: 5348428 - DNA, 25 bp, Homo sapien
tggagactgggtcatctggatgtca

SEQ ID NO: 5348429 - DNA, 25 bp, Homo sapien
atggagactgggtcatctggatgtc

SEQ ID NO: 5348430 - DNA, 25 bp, Homo sapien
ccccaggagctgagcggggaccctc

SEQ ID NO: 5348431 - DNA, 25 bp, Homo sapien
ccaggagctgagcggggaccctcat

SEQ ID NO: 5348432 - DNA, 25 bp, Homo sapien
gccagagtagcaggagccccaggag

SEQ ID NO: 5348433 - DNA, 25 bp, Homo sapien
ggagccagagtagcaggagccccag

SEQ ID NO: 5348434 - DNA, 25 bp, Homo sapien
aagcccagcctcagatgtcattttc

SEQ ID NO: 5348435 - DNA, 25 bp, Homo sapien
ttttcagatttttcattgtgttagc

SEQ ID NO: 5348436 - DNA, 25 bp, Homo sapien
cctcagatgtcattttcaactaaga

SEQ ID NO: 5348437 - DNA, 25 bp, Homo sapien
accaagcccagcctcagatgtcatt

SEQ ID NO: 5348438 - DNA, 25 bp, Homo sapien
taggaaagcgtatagatcaggagct

SEQ ID NO: 5348439 - DNA, 25 bp, Homo sapien
cccgataggaaagcgtatagatcag

SEQ ID NO: 5348440 - DNA, 25 bp, Homo sapien
ctccagaggcccgataggaaagcgt

SEQ ID NO: 5348441 - DNA, 25 bp, Homo sapien
gaggcccgataggaaagcgtataga

SEQ ID NO: 5348442 - DNA, 25 bp, Homo sapien
aggtgtccccggatgcttcctcagc

SEQ ID NO: 5348443 - DNA, 25 bp, Homo sapien
ttcctcagctcggaaagctactgtg

SEQ ID NO: 5348444 - DNA, 25 bp, Homo sapien
ggtgtccccggatgcttcctcagct

SEQ ID NO: 5348445 - DNA, 25 bp, Homo sapien
cggaaagctactgtggttctcagag

SEQ ID NO: 5348446 - DNA, 25 bp, Homo sapien
ctcgtggacatggggcccgcctttg

SEQ ID NO: 5348447 - DNA, 25 bp, Homo sapien
cctctctgagtaggatcagtatcag

SEQ ID NO: 5348448 - DNA, 25 bp, Homo sapien
gctgaccagcaagaaggaactatgt

SEQ ID NO: 5348449 - DNA, 25 bp, Homo sapien
ggctgaccagcaagaaggaactatg

SEQ ID NO: 5348450 - DNA, 25 bp, Homo sapien
ttgttccacattgaactgggctgac

SEQ ID NO: 5348451 - DNA, 25 bp, Homo sapien
ccacattgaactgggctgaccagca

SEQ ID NO: 5348452 - DNA, 25 bp, Homo sapien
ttcttgttactctggctcccaggtg

SEQ ID NO: 5348453 - DNA, 25 bp, Homo sapien
ctttctcaaccttgttgagtcctgt

SEQ ID NO: 5348454 - DNA, 25 bp, Homo sapien
tcttgttactctggctcccaggtgc

SEQ ID NO: 5348455 - DNA, 25 bp, Homo sapien
taatatttcttgtcgaggatcacag

SEQ ID NO: 5348456 - DNA, 25 bp, Homo sapien
tatttcttgtcgaggatcacagcag

SEQ ID NO: 5348457 - DNA, 25 bp, Homo sapien
actggtgcttttgcctggacggtta

SEQ ID NO: 5348458 - DNA, 25 bp, Homo sapien
ttgtcgaggatcacagcagcctgct

SEQ ID NO: 5348459 - DNA, 25 bp, Homo sapien
ctgctatacgcactccgcagtgagg

SEQ ID NO: 5348460 - DNA, 25 bp, Homo sapien
tacgcactccgcagtgaggagccat

SEQ ID NO: 5348461 - DNA, 25 bp, Homo sapien
tagtcgcacactccccagagaggga

SEQ ID NO: 5348462 - DNA, 25 bp, Homo sapien
tgcagccatagtcgcacactcccca

SEQ ID NO: 5348463 - DNA, 25 bp, Homo sapien
gcacgggccacgtatagaggctgcc

SEQ ID NO: 5348464 - DNA, 25 bp, Homo sapien
tctgcctgcaccaagtcagagcttg

SEQ ID NO: 5348465 - DNA, 25 bp, Homo sapien
tcagacctcaacatgtgtcccatgg

SEQ ID NO: 5348466 - DNA, 25 bp, Homo sapien
gtgtcccatggaaagcacgggccac

SEQ ID NO: 5348467 - DNA, 25 bp, Homo sapien
ttgaatcaaatagaggctgttcttc

SEQ ID NO: 5348468 - DNA, 25 bp, Homo sapien
catggtccagattcgagaaatacag

SEQ ID NO: 5348469 - DNA, 25 bp, Homo sapien
gaggccgctccacaattgaatcaaa

SEQ ID NO: 5348470 - DNA, 25 bp, Homo sapien
gatgagtccttcctcattcgactga

SEQ ID NO: 5348471 - DNA, 25 bp, Homo sapien
gcctctgtgtactctatttaaacct

SEQ ID NO: 5348472 - DNA, 25 bp, Homo sapien
tactctatttaaaccttcaggagag

SEQ ID NO: 5348473 - DNA, 25 bp, Homo sapien
tgctgttgtgaagcctctgtgtact

SEQ ID NO: 5348474 - DNA, 25 bp, Homo sapien
ccagctttgtctgctgttgtgaagc

SEQ ID NO: 5348475 - DNA, 25 bp, Homo sapien
atatccaggccttcctcaaaaagct

SEQ ID NO: 5348476 - DNA, 25 bp, Homo sapien
gggcctgcacataatattccttccc

SEQ ID NO: 5348477 - DNA, 25 bp, Homo sapien
tgcttggggcctgcacataatattc

SEQ ID NO: 5348478 - DNA, 25 bp, Homo sapien
agaggtgctatgattttccatagct

SEQ ID NO: 5348479 - DNA, 25 bp, Homo sapien
ggtgcccagaggatgcatccacacc

SEQ ID NO: 5348480 - DNA, 25 bp, Homo sapien
tggtgcccagaggatgcatccacac

SEQ ID NO: 5348481 - DNA, 25 bp, Homo sapien
gtggtgcccagaggatgcatccaca

SEQ ID NO: 5348482 - DNA, 25 bp, Homo sapien
ggggagctcgactgcaccaaaatta

SEQ ID NO: 5348483 - DNA, 25 bp, Homo sapien
tggggagctcgactgcaccaaaatt

SEQ ID NO: 5348484 - DNA, 25 bp, Homo sapien
gggagctcgactgcaccaaaattat

SEQ ID NO: 5348485 - DNA, 25 bp, Homo sapien
gcagacaacttcaatctcacgtgcc

SEQ ID NO: 5348486 - DNA, 25 bp, Homo sapien
ggatatttatccatgaatctgtgct

SEQ ID NO: 5348487 - DNA, 25 bp, Homo sapien
gatgagataatgcagacaacttcaa

SEQ ID NO: 5348488 - DNA, 25 bp, Homo sapien
tgctccagttggtcacaattttcag

SEQ ID NO: 5348489 - DNA, 25 bp, Homo sapien
ctgtggagccacctgcttcgtccat

SEQ ID NO: 5348490 - DNA, 25 bp, Homo sapien
ccactgtggagccacctgcttcgtc

SEQ ID NO: 5348491 - DNA, 25 bp, Homo sapien
tgtccactgtggagccacctgcttc

SEQ ID NO: 5348492 - DNA, 25 bp, Homo sapien
gtccactgtggagccacctgcttcg

SEQ ID NO: 5348493 - DNA, 25 bp, Homo sapien
gtgatgggcttggacagagttcact

SEQ ID NO: 5348494 - DNA, 25 bp, Homo sapien
gaagaggatgtcagcagccacatga

SEQ ID NO: 5348495 - DNA, 25 bp, Homo sapien
tgaagaggatgtcagcagccacatg

SEQ ID NO: 5348496 - DNA, 25 bp, Homo sapien
ggacagagttcactcgggccatcag

SEQ ID NO: 5348497 - DNA, 25 bp, Homo sapien
ctgggcagagagatcccacatcact

SEQ ID NO: 5348498 - DNA, 25 bp, Homo sapien
ttcctgaccttcaggaagtcaggaa

SEQ ID NO: 5348499 - DNA, 25 bp, Homo sapien
gcttcctgaccttcaggaagtcagg

SEQ ID NO: 5348500 - DNA, 25 bp, Homo sapien
gagcttcctgaccttcaggaagtca

SEQ ID NO: 5348501 - DNA, 25 bp, Homo sapien
tgagcttcctgaccttcaggaagtc

SEQ ID NO: 5348502 - DNA, 25 bp, Homo sapien
tgggcttggtgtggcacccgtgggt

SEQ ID NO: 5348503 - DNA, 25 bp, Homo sapien
tgtggcacccgtgggtgtgtgagca

SEQ ID NO: 5348504 - DNA, 25 bp, Homo sapien
cacccgtgggtgtgtgagcagtttc

SEQ ID NO: 5348505 - DNA, 25 bp, Homo sapien
gcttggtgtggcacccgtgggtgtg

SEQ ID NO: 5348506 - DNA, 25 bp, Homo sapien
ggcagcttgggtaatgcaaacatta

SEQ ID NO: 5348507 - DNA, 25 bp, Homo sapien
cagccccgtggatagggcctgtggt

SEQ ID NO: 5348508 - DNA, 25 bp, Homo sapien
agaccagggccagtgaccggcagct

SEQ ID NO: 5348509 - DNA, 25 bp, Homo sapien
aggtcctcagccccatggttcagga

SEQ ID NO: 5348510 - DNA, 25 bp, Homo sapien
ttagtcttgatactccgtgccagtc

SEQ ID NO: 5348511 - DNA, 25 bp, Homo sapien
cttcattagtcttgatactccgtgc

SEQ ID NO: 5348512 - DNA, 25 bp, Homo sapien
agtcttgatactccgtgccagtcca

SEQ ID NO: 5348513 - DNA, 25 bp, Homo sapien
cattagtcttgatactccgtgccag

SEQ ID NO: 5348514 - DNA, 25 bp, Homo sapien
tgacattagcaacagtgtcctccac

SEQ ID NO: 5348515 - DNA, 25 bp, Homo sapien
ctgacattagcaacagtgtcctcca

SEQ ID NO: 5348516 - DNA, 25 bp, Homo sapien
gcatggacatgagggcccccgctca

SEQ ID NO: 5348517 - DNA, 25 bp, Homo sapien
tggacatgagggcccccgctcagct

SEQ ID NO: 5348518 - DNA, 25 bp, Homo sapien
acagcatggacatgagggcccccgc

SEQ ID NO: 5348519 - DNA, 25 bp, Homo sapien
gctcctgggactcctgctgctctgg

SEQ ID NO: 5348520 - DNA, 25 bp, Homo sapien
ggcgagtcagggcattagcaattat

SEQ ID NO: 5348521 - DNA, 25 bp, Homo sapien
tagcaattatttagcctggtatcag

SEQ ID NO: 5348522 - DNA, 25 bp, Homo sapien
gatgtgacatccagatgacccagtc

SEQ ID NO: 5348523 - DNA, 25 bp, Homo sapien
tcaccatcacttgccgggcgagtca

SEQ ID NO: 5348524 - DNA, 25 bp, Homo sapien
tccttgccaggattagtgacagtgg

SEQ ID NO: 5348525 - DNA, 25 bp, Homo sapien
tagctgcctgaattggagccaacaa

SEQ ID NO: 5348526 - DNA, 25 bp, Homo sapien
gtcaacaacataggagcttgcctgt

SEQ ID NO: 5348527 - DNA, 25 bp, Homo sapien
gacagtgggtggactgatttcatcc

SEQ ID NO: 5348528 - DNA, 25 bp, Homo sapien
gaggcacagacatagtggaaactgc

SEQ ID NO: 5348529 - DNA, 25 bp, Homo sapien
cacagacatagtggaaactgcccac

SEQ ID NO: 5348530 - DNA, 25 bp, Homo sapien
ccagaggcacagacatagtggaaac

SEQ ID NO: 5348531 - DNA, 25 bp, Homo sapien
ggcacagacatagtggaaactgccc

SEQ ID NO: 5348532 - DNA, 25 bp, Homo sapien
ggaaatcccaattcataggtattaa

SEQ ID NO: 5348533 - DNA, 25 bp, Homo sapien
gagcgttggacagcaacatattgtg

SEQ ID NO: 5348534 - DNA, 25 bp, Homo sapien
attgctaactagagagcgttggaca

SEQ ID NO: 5348535 - DNA, 25 bp, Homo sapien
gaaagctacccaccactcgcttatg

SEQ ID NO: 5348536 - DNA, 25 bp, Homo sapien
tctcggattaacaagggcccagagt

SEQ ID NO: 5348537 - DNA, 25 bp, Homo sapien
ggtgtcttggcggagttgaccacaa

SEQ ID NO: 5348538 - DNA, 25 bp, Homo sapien
caatagcgatcctagagagggctct

SEQ ID NO: 5348539 - DNA, 25 bp, Homo sapien
cagagtcccggccggttctgggtat

SEQ ID NO: 5348540 - DNA, 25 bp, Homo sapien
cacactgaaaatcagccgggtggag

SEQ ID NO: 5348541 - DNA, 25 bp, Homo sapien
ctatgaagtttccaaccggttctct

SEQ ID NO: 5348542 - DNA, 25 bp, Homo sapien
agtgccagataggttcagtggcagc

SEQ ID NO: 5348543 - DNA, 25 bp, Homo sapien
caaccggttctctggagtgccagat

SEQ ID NO: 5348544 - DNA, 25 bp, Homo sapien
tctctagggtcatgaaatatgcttc

SEQ ID NO: 5348545 - DNA, 25 bp, Homo sapien
aatgggcctcaactttattaactga

SEQ ID NO: 5348546 - DNA, 25 bp, Homo sapien
caacatatccagtttgaggttctcc

SEQ ID NO: 5348547 - DNA, 25 bp, Homo sapien
gttactatcctgcaaaacaaccact

SEQ ID NO: 5348548 - DNA, 25 bp, Homo sapien
gcctccaagactcctaatttataag

SEQ ID NO: 5348549 - DNA, 25 bp, Homo sapien
gccagcctccaagactcctaattta

SEQ ID NO: 5348550 - DNA, 25 bp, Homo sapien
aggccagcctccaagactcctaatt

SEQ ID NO: 5348551 - DNA, 25 bp, Homo sapien
gactccactctcctcgcctgtcacc

SEQ ID NO: 5348552 - DNA, 25 bp, Homo sapien
tctcctttcacagatgagtttctct

SEQ ID NO: 5348553 - DNA, 25 bp, Homo sapien
gttccatggagaacactatctgtga

SEQ ID NO: 5348554 - DNA, 25 bp, Homo sapien
tgccaaagcagaacttgggtccaaa

SEQ ID NO: 5348555 - DNA, 25 bp, Homo sapien
tgcattgtgcaaccaaagaggcaca

SEQ ID NO: 5348556 - DNA, 25 bp, Homo sapien
gcttttaaccacaatgttattgtac

SEQ ID NO: 5348557 - DNA, 25 bp, Homo sapien
cttttgcagcagttgctttagggct

SEQ ID NO: 5348558 - DNA, 25 bp, Homo sapien
tgcagcagttgctttagggctttta

SEQ ID NO: 5348559 - DNA, 25 bp, Homo sapien
tgctttagggcttttaaccacaatg

SEQ ID NO: 5348560 - DNA, 25 bp, Homo sapien
tgatgactttcagggcacctctttc

SEQ ID NO: 5348561 - DNA, 25 bp, Homo sapien
ccactgatgactttcagggcacctc

SEQ ID NO: 5348562 - DNA, 25 bp, Homo sapien
actgatgactttcagggcacctctt

SEQ ID NO: 5348563 - DNA, 25 bp, Homo sapien
cactgatgactttcagggcacctct

SEQ ID NO: 5348564 - DNA, 25 bp, Homo sapien
gagaatggaaagctgcctgcaatgc

SEQ ID NO: 5348565 - DNA, 25 bp, Homo sapien
caggagaatggaaagctgcctgcaa

SEQ ID NO: 5348566 - DNA, 25 bp, Homo sapien
ggagaatggaaagctgcctgcaatg

SEQ ID NO: 5348567 - DNA, 25 bp, Homo sapien
gaatggaaagctgcctgcaatgcat

SEQ ID NO: 5348568 - DNA, 25 bp, Homo sapien
gatctatgctgcatccagtttgcaa

SEQ ID NO: 5348569 - DNA, 25 bp, Homo sapien
taagctcctgatctatgctgcatcc

SEQ ID NO: 5348570 - DNA, 25 bp, Homo sapien
tcctaagctcctgatctatgctgca

SEQ ID NO: 5348571 - DNA, 25 bp, Homo sapien
gctcctgatctatgctgcatccagt

SEQ ID NO: 5348572 - DNA, 25 bp, Homo sapien
tccagtggcaacattgtgggcccca

SEQ ID NO: 5348573 - DNA, 25 bp, Homo sapien
tggcaacattgtgggccccagattc

SEQ ID NO: 5348574 - DNA, 25 bp, Homo sapien
cagagagagagtttccatcaccagc

SEQ ID NO: 5348575 - DNA, 25 bp, Homo sapien
tcagattccagtggcaacattgtgg

SEQ ID NO: 5348576 - DNA, 25 bp, Homo sapien
tgttaccacacagccactgggccat

SEQ ID NO: 5348577 - DNA, 25 bp, Homo sapien
ctgatgtgggctgaatccaggcaga

SEQ ID NO: 5348578 - DNA, 25 bp, Homo sapien
tgccaatggtccctggaatggtttc

SEQ ID NO: 5348579 - DNA, 25 bp, Homo sapien
tccctggaatggtttctccctgtta

SEQ ID NO: 5348580 - DNA, 25 bp, Homo sapien
agcatgtgttctttttctttctaac

SEQ ID NO: 5348581 - DNA, 25 bp, Homo sapien
tagcatgtgttctttttctttctaa

SEQ ID NO: 5348582 - DNA, 25 bp, Homo sapien
ttagcatgtgttctttttctttcta

SEQ ID NO: 5348583 - DNA, 25 bp, Homo sapien
gaagtatgagcagtttccttccctg

SEQ ID NO: 5348584 - DNA, 25 bp, Homo sapien
cagccatgcagaatcagtgaggaca

SEQ ID NO: 5348585 - DNA, 25 bp, Homo sapien
ggtgcagcgcccatagaagtatgag

SEQ ID NO: 5348586 - DNA, 25 bp, Homo sapien
agccctaagggtcgtgtatctgaga

SEQ ID NO: 5348587 - DNA, 25 bp, Homo sapien
ctttgtctccaggggaaagagccac

SEQ ID NO: 5348588 - DNA, 25 bp, Homo sapien
tttgtctccaggggaaagagccacc

SEQ ID NO: 5348589 - DNA, 25 bp, Homo sapien
tgtctccaggggaaagagccaccct

SEQ ID NO: 5348590 - DNA, 25 bp, Homo sapien
ttgtctccaggggaaagagccaccc

SEQ ID NO: 5348591 - DNA, 25 bp, Homo sapien
catagtaatggatatacctatttgc

SEQ ID NO: 5348592 - DNA, 25 bp, Homo sapien
tcctgatttatagggtttccagtcg

SEQ ID NO: 5348593 - DNA, 25 bp, Homo sapien
agctcctgatttatagggtttccag

SEQ ID NO: 5348594 - DNA, 25 bp, Homo sapien
tacctatttgcattggtacccgcag

SEQ ID NO: 5348595 - DNA, 25 bp, Homo sapien
aagatttggtgatactaaaacagtt

SEQ ID NO: 5348596 - DNA, 25 bp, Homo sapien
gacaagatttggtgatactaaaaca

SEQ ID NO: 5348597 - DNA, 25 bp, Homo sapien
caagatttggtgatactaaaacagt

SEQ ID NO: 5348598 - DNA, 25 bp, Homo sapien
tgacaagatttggtgatactaaaac

SEQ ID NO: 5348599 - DNA, 25 bp, Homo sapien
taacagggatcttggtgtctgggtc

SEQ ID NO: 5348600 - DNA, 25 bp, Homo sapien
tgatgtagttggatccacttcccct

SEQ ID NO: 5348601 - DNA, 25 bp, Homo sapien
ccaggccgggacatttttgggcaca

SEQ ID NO: 5348602 - DNA, 25 bp, Homo sapien
taacgagtgcaaatccctgtccagt

SEQ ID NO: 5348603 - DNA, 25 bp, Homo sapien
gatctgggacagatttcactctcac

SEQ ID NO: 5348604 - DNA, 25 bp, Homo sapien
gggtcccatcaaggttcagcggcag

SEQ ID NO: 5348605 - DNA, 25 bp, Homo sapien
cccatcaaggttcagcggcagtgga

SEQ ID NO: 5348606 - DNA, 25 bp, Homo sapien
catcaaggttcagcggcagtggatc

SEQ ID NO: 5348607 - DNA, 25 bp, Homo sapien
cctgcagtctgaagattttgcagtt

SEQ ID NO: 5348608 - DNA, 25 bp, Homo sapien
attttgcagtttattactgtcagca

SEQ ID NO: 5348609 - DNA, 25 bp, Homo sapien
tttgcagtttattactgtcagcagt

SEQ ID NO: 5348610 - DNA, 25 bp, Homo sapien
tgcagtctgaagattttgcagttta

SEQ ID NO: 5348611 - DNA, 25 bp, Homo sapien
tgcatttcagaggataacaataact

SEQ ID NO: 5348612 - DNA, 25 bp, Homo sapien
gagctgagctgtactgttgggccac

SEQ ID NO: 5348613 - DNA, 25 bp, Homo sapien
ccctggggagatcttggttatataa

SEQ ID NO: 5348614 - DNA, 25 bp, Homo sapien
ggttatataagatgcatttcagagg

SEQ ID NO: 5348615 - DNA, 25 bp, Homo sapien
aataaggattcctgtttaggcagca

SEQ ID NO: 5348616 - DNA, 25 bp, Homo sapien
tcaggagaactgaagatcaaccacc

SEQ ID NO: 5348617 - DNA, 25 bp, Homo sapien
tgtaaaagacgcatcaacaacccac

SEQ ID NO: 5348618 - DNA, 25 bp, Homo sapien
caaatttacgctgggagaaaaggag

SEQ ID NO: 5348619 - DNA, 25 bp, Homo sapien
caggaagctagaggtcagttaggca

SEQ ID NO: 5348620 - DNA, 25 bp, Homo sapien
ccttgatagtatctagaggcctgat

SEQ ID NO: 5348621 - DNA, 25 bp, Homo sapien
caatcataatgggtgaagggtctga

SEQ ID NO: 5348622 - DNA, 25 bp, Homo sapien
gaagataatttagtcaacaggaagc

SEQ ID NO: 5348623 - DNA, 25 bp, Homo sapien
ggacttgtctatgctgagctctgga

SEQ ID NO: 5348624 - DNA, 25 bp, Homo sapien
tgtgattccgtagacccccctcagg

SEQ ID NO: 5348625 - DNA, 25 bp, Homo sapien
gggtcctgagctttatgaccctcag

SEQ ID NO: 5348626 - DNA, 25 bp, Homo sapien
tcagggcccagacccactatccatt

SEQ ID NO: 5348627 - DNA, 25 bp, Homo sapien
tcacaagcgtatgacgcgttcacac

SEQ ID NO: 5348628 - DNA, 25 bp, Homo sapien
gaaaaatggcataataaccaacgtg

SEQ ID NO: 5348629 - DNA, 25 bp, Homo sapien
cttcaaatcaaggagacgggaggcc

SEQ ID NO: 5348630 - DNA, 25 bp, Homo sapien
catgggaggccagcttcattccagt

SEQ ID NO: 5348631 - DNA, 25 bp, Homo sapien
ctctgagaagtcaagcaaaagagaa

SEQ ID NO: 5348632 - DNA, 25 bp, Homo sapien
gacgacacacactcttttaactctg

SEQ ID NO: 5348633 - DNA, 25 bp, Homo sapien
gtgggagcagctaaggacgacacac

SEQ ID NO: 5348634 - DNA, 25 bp, Homo sapien
gctaaggacgacacacactctttta

SEQ ID NO: 5348635 - DNA, 25 bp, Homo sapien
cttttaactctgttcctgcgttgtc

SEQ ID NO: 5348636 - DNA, 25 bp, Homo sapien
ctgcgcctctccgagccagagccgg

SEQ ID NO: 5348637 - DNA, 25 bp, Homo sapien
gcgcctcgccgccactgtctgcctc

SEQ ID NO: 5348638 - DNA, 25 bp, Homo sapien
agagccggcgccagcgcctctccgc

SEQ ID NO: 5348639 - DNA, 25 bp, Homo sapien
gctgtccgtctctccgctgcgctgc

SEQ ID NO: 5348640 - DNA, 25 bp, Homo sapien
cgtggttcctgggcctgtgtactgt

SEQ ID NO: 5348641 - DNA, 25 bp, Homo sapien
tcctgggcctgtgtactgtgggtct

SEQ ID NO: 5348642 - DNA, 25 bp, Homo sapien
ctgtgggtctgtgcctcagaggctg

SEQ ID NO: 5348643 - DNA, 25 bp, Homo sapien
ggttcctgggcctgtgtactgtggg

SEQ ID NO: 5348644 - DNA, 25 bp, Homo sapien
ctccctgaggagtgcagcccagtgg

SEQ ID NO: 5348645 - DNA, 25 bp, Homo sapien
ggccctgtgcgtggaggcgtccgga

SEQ ID NO: 5348646 - DNA, 25 bp, Homo sapien
tgctccctgaggagtgcagcccagt

SEQ ID NO: 5348647 - DNA, 25 bp, Homo sapien
caggaattggcacctgggtgtggag

SEQ ID NO: 5348648 - DNA, 25 bp, Homo sapien
aatggccctggacctgccttgccat

SEQ ID NO: 5348649 - DNA, 25 bp, Homo sapien
gaaatggccctggacctgccttgcc

SEQ ID NO: 5348650 - DNA, 25 bp, Homo sapien
cgagtccatgaaatggccctggacc

SEQ ID NO: 5348651 - DNA, 25 bp, Homo sapien
agtccatgaaatggccctggacctg

SEQ ID NO: 5348652 - DNA, 25 bp, Homo sapien
ttctagctggatcaagagagctctt

SEQ ID NO: 5348653 - DNA, 25 bp, Homo sapien
gagagctcttctgggcaggcctgaa

SEQ ID NO: 5348654 - DNA, 25 bp, Homo sapien
ctagctggatcaagagagctcttct

SEQ ID NO: 5348655 - DNA, 25 bp, Homo sapien
gctcttctgggcaggcctgaagagc

SEQ ID NO: 5348656 - DNA, 25 bp, Homo sapien
ttcacctgcttgaggagggccaaag

SEQ ID NO: 5348657 - DNA, 25 bp, Homo sapien
acttccttcacctgcttgaggaggg

SEQ ID NO: 5348658 - DNA, 25 bp, Homo sapien
ttccttcacctgcttgaggagggcc

SEQ ID NO: 5348659 - DNA, 25 bp, Homo sapien
ccttcacctgcttgaggagggccaa

SEQ ID NO: 5348660 - DNA, 25 bp, Homo sapien
tcaaagtgtccgtgatgtccctgct

SEQ ID NO: 5348661 - DNA, 25 bp, Homo sapien
gctggtctcggggtgtgagctgctg

SEQ ID NO: 5348662 - DNA, 25 bp, Homo sapien
tctgagctggtctcggggtgtgagc

SEQ ID NO: 5348663 - DNA, 25 bp, Homo sapien
tgctgctggtagtaggctctgccct

SEQ ID NO: 5348664 - DNA, 25 bp, Homo sapien
ccaaagtgctgcttgggctcaaggt

SEQ ID NO: 5348665 - DNA, 25 bp, Homo sapien
cgagccgcttcgtggtcccaaacca

SEQ ID NO: 5348666 - DNA, 25 bp, Homo sapien
agccgcttcgtggtcccaaaccagg

SEQ ID NO: 5348667 - DNA, 25 bp, Homo sapien
ctcaaggttgtaattatttgcagtc

SEQ ID NO: 5348668 - DNA, 25 bp, Homo sapien
ggagcagtggacctccttgcttact

SEQ ID NO: 5348669 - DNA, 25 bp, Homo sapien
gcagtggacctccttgcttactttg

SEQ ID NO: 5348670 - DNA, 25 bp, Homo sapien
tggacctccttgcttactttgaatt

SEQ ID NO: 5348671 - DNA, 25 bp, Homo sapien
ctggagcagtggacctccttgctta

SEQ ID NO: 5348672 - DNA, 25 bp, Homo sapien
ctgggtggtgacagggactggacag

SEQ ID NO: 5348673 - DNA, 25 bp, Homo sapien
acagggactggacagggatgccaca

SEQ ID NO: 5348674 - DNA, 25 bp, Homo sapien
ggtgacagggactggacagggatgc

SEQ ID NO: 5348675 - DNA, 25 bp, Homo sapien
gactggacagggatgccacaggggc

SEQ ID NO: 5348676 - DNA, 25 bp, Homo sapien
tcctggagtgtctcctctttctctc

SEQ ID NO: 5348677 - DNA, 25 bp, Homo sapien
ctgcaggtcttcctggagtgtctcc

SEQ ID NO: 5348678 - DNA, 25 bp, Homo sapien
ggtcttcctggagtgtctcctcttt

SEQ ID NO: 5348679 - DNA, 25 bp, Homo sapien
cttcctggagtgtctcctctttctc

SEQ ID NO: 5348680 - DNA, 25 bp, Homo sapien
gtgaggttgatcagtctcccctgga

SEQ ID NO: 5348681 - DNA, 25 bp, Homo sapien
agtctcccctggaaggccaacagct

SEQ ID NO: 5348682 - DNA, 25 bp, Homo sapien
atcagtctcccctggaaggccaaca

SEQ ID NO: 5348683 - DNA, 25 bp, Homo sapien
gttgatcagtctcccctggaaggcc

SEQ ID NO: 5348684 - DNA, 25 bp, Homo sapien
ctagccaaaacctagtgccttggat

SEQ ID NO: 5348685 - DNA, 25 bp, Homo sapien
cctagccaaaacctagtgccttgga

SEQ ID NO: 5348686 - DNA, 25 bp, Homo sapien
aacctagccaaaacctagtgccttg

SEQ ID NO: 5348687 - DNA, 25 bp, Homo sapien
gcaacctagccaaaacctagtgcct

SEQ ID NO: 5348688 - DNA, 25 bp, Homo sapien
agattcagtgctgggagtccagtgt

SEQ ID NO: 5348689 - DNA, 25 bp, Homo sapien
ccagattcagtgctgggagtccagt

SEQ ID NO: 5348690 - DNA, 25 bp, Homo sapien
cagattcagtgctgggagtccagtg

SEQ ID NO: 5348691 - DNA, 25 bp, Homo sapien
tgggcatccgtctcctctgcagcat

SEQ ID NO: 5348692 - DNA, 25 bp, Homo sapien
ttagtgagcattgtgtccgctcagg

SEQ ID NO: 5348693 - DNA, 25 bp, Homo sapien
cacttagtgagcattgtgtccgctc

SEQ ID NO: 5348694 - DNA, 25 bp, Homo sapien
tagtgagcattgtgtccgctcaggg

SEQ ID NO: 5348695 - DNA, 25 bp, Homo sapien
tccccagatagtgaagctgcacaaa

SEQ ID NO: 5348696 - DNA, 25 bp, Homo sapien
gggccaagcgtgaaaccagtgatcg

SEQ ID NO: 5348697 - DNA, 25 bp, Homo sapien
tcttgccggccacaaaaggttatag

SEQ ID NO: 5348698 - DNA, 25 bp, Homo sapien
caaaaggttatagccagaattccac

SEQ ID NO: 5348699 - DNA, 25 bp, Homo sapien
ctattcgattcaattcagtgatggt

SEQ ID NO: 5348700 - DNA, 25 bp, Homo sapien
gtgatggttacattcgtgtccactc

SEQ ID NO: 5348701 - DNA, 25 bp, Homo sapien
tctattcgattcaattcagtgatgg

SEQ ID NO: 5348702 - DNA, 25 bp, Homo sapien
ttcgatgattattccattagactcc

SEQ ID NO: 5348703 - DNA, 25 bp, Homo sapien
attcgatgattattccattagactc

SEQ ID NO: 5348704 - DNA, 25 bp, Homo sapien
cattcgatgattattccattagact

SEQ ID NO: 5348705 - DNA, 25 bp, Homo sapien
tgcattcgagttcatttgatgattc

SEQ ID NO: 5348706 - DNA, 25 bp, Homo sapien
attcgttgatattcaatgattccat

SEQ ID NO: 5348707 - DNA, 25 bp, Homo sapien
cattcgagtccttttgatgattctg

SEQ ID NO: 5348708 - DNA, 25 bp, Homo sapien
ccattcgttgatattcaatgattcc

SEQ ID NO: 5348709 - DNA, 25 bp, Homo sapien
ttcgatgattattccattagactcc

SEQ ID NO: 5348710 - DNA, 25 bp, Homo sapien
attcgatgattattccattagactc

SEQ ID NO: 5348711 - DNA, 25 bp, Homo sapien
cattcgatgattattccattagact

SEQ ID NO: 5348712 - DNA, 25 bp, Homo sapien
caagtctattcgctgattctattag

SEQ ID NO: 5348713 - DNA, 25 bp, Homo sapien
cattgaatgattgcttttgattcca

SEQ ID NO: 5348714 - DNA, 25 bp, Homo sapien
gataccattctatgattcctttaga

SEQ ID NO: 5348715 - DNA, 25 bp, Homo sapien
ttagagtccattgaatgattgcttt

SEQ ID NO: 5348716 - DNA, 25 bp, Homo sapien
ttccacagcaaacatagggtttggc

SEQ ID NO: 5348717 - DNA, 25 bp, Homo sapien
agcaaacatagggtttggcattccc

SEQ ID NO: 5348718 - DNA, 25 bp, Homo sapien
gtttggcattccctccaatattgca

SEQ ID NO: 5348719 - DNA, 25 bp, Homo sapien
tggcattccctccaatattgcaaaa

SEQ ID NO: 5348720 - DNA, 25 bp, Homo sapien
ataggtcagtatctgttaactataa

SEQ ID NO: 5348721 - DNA, 25 bp, Homo sapien
tattattctgttctccatatgttca

SEQ ID NO: 5348722 - DNA, 25 bp, Homo sapien
tcttagattgtctcacagcatcatt

SEQ ID NO: 5348723 - DNA, 25 bp, Homo sapien
gacagaaaatttataggtcagtatc

SEQ ID NO: 5348724 - DNA, 25 bp, Homo sapien
tcactctcttttgagttcccatagt

SEQ ID NO: 5348725 - DNA, 25 bp, Homo sapien
tctcttttgagttcccatagtatca

SEQ ID NO: 5348726 - DNA, 25 bp, Homo sapien
ttgagttcccatagtatcaaataag

SEQ ID NO: 5348727 - DNA, 25 bp, Homo sapien
gagttcccatagtatcaaataagct

SEQ ID NO: 5348728 - DNA, 25 bp, Homo sapien
ccattgaggtggaacacatgttctc

SEQ ID NO: 5348729 - DNA, 25 bp, Homo sapien
tgctctctggttgcccgtaaattat

SEQ ID NO: 5348730 - DNA, 25 bp, Homo sapien
cactcggccagaatgtaacctgtca

SEQ ID NO: 5348731 - DNA, 25 bp, Homo sapien
cataggttgtactcacactcggcca

SEQ ID NO: 5348732 - DNA, 25 bp, Homo sapien
gccattgtgaggccaagtctctcct

SEQ ID NO: 5348733 - DNA, 25 bp, Homo sapien
gcaagggtcatttcttcagacgcct

SEQ ID NO: 5348734 - DNA, 25 bp, Homo sapien
gggtcatttcttcagacgccttgag

SEQ ID NO: 5348735 - DNA, 25 bp, Homo sapien
atttcttcagacgccttgagcttca

SEQ ID NO: 5348736 - DNA, 25 bp, Homo sapien
agggtcatttcttcagacgccttga

SEQ ID NO: 5348737 - DNA, 25 bp, Homo sapien
ttttgccccgtatgcggcttccggc

SEQ ID NO: 5348738 - DNA, 25 bp, Homo sapien
accgcggagttttgccccgtatgcg

SEQ ID NO: 5348739 - DNA, 25 bp, Homo sapien
tgccaccgcggagttttgccccgta

SEQ ID NO: 5348740 - DNA, 25 bp, Homo sapien
tttgcacctgccaccgcggagtttt

SEQ ID NO: 5348741 - DNA, 25 bp, Homo sapien
tttggcacccgtcgccgcagctttt

SEQ ID NO: 5348742 - DNA, 25 bp, Homo sapien
ctttctgcccctgccgacgagggtt

SEQ ID NO: 5348743 - DNA, 25 bp, Homo sapien
ttttcaggcttttggtgaccgccgc

SEQ ID NO: 5348744 - DNA, 25 bp, Homo sapien
tttttgcggctttatatccccgctg

SEQ ID NO: 5348745 - DNA, 25 bp, Homo sapien
tctgagggctggatccgcagacttg

SEQ ID NO: 5348746 - DNA, 25 bp, Homo sapien
cacggctatcgcgtagggaggcaca

SEQ ID NO: 5348747 - DNA, 25 bp, Homo sapien
cgtcctgactaaggcagcgccaagg

SEQ ID NO: 5348748 - DNA, 25 bp, Homo sapien
gctgcgctcggctgcaatgggagag

SEQ ID NO: 5348749 - DNA, 25 bp, Homo sapien
cttggcctccaaaatagttaggaca

SEQ ID NO: 5348750 - DNA, 25 bp, Homo sapien
tttaacttttgatagagactgggtc

SEQ ID NO: 5348751 - DNA, 25 bp, Homo sapien
catgaaccaccacatgggctggaag

SEQ ID NO: 5348752 - DNA, 25 bp, Homo sapien
catttaagcctcttcaactgctggt

SEQ ID NO: 5348753 - DNA, 25 bp, Homo sapien
gactcagttcttggcaacctcgttg

SEQ ID NO: 5348754 - DNA, 25 bp, Homo sapien
ttacttgtcatagtggtgtctattt

SEQ ID NO: 5348755 - DNA, 25 bp, Homo sapien
ttctccttgcaggtgcttgttttcc

SEQ ID NO: 5348756 - DNA, 25 bp, Homo sapien
ttttgactcagttcttggcaacctc

SEQ ID NO: 5348757 - DNA, 25 bp, Homo sapien
ggagacatacacacagggagagtac

SEQ ID NO: 5348758 - DNA, 25 bp, Homo sapien
ggtcaacgctttaggaagacatagc

SEQ ID NO: 5348759 - DNA, 25 bp, Homo sapien
tcccaatatacgctgagatgcaagg

SEQ ID NO: 5348760 - DNA, 25 bp, Homo sapien
gttaagatacaatcagatgagcctg

SEQ ID NO: 5348761 - DNA, 25 bp, Homo sapien
tatggttttttgctcccactgcttt

SEQ ID NO: 5348762 - DNA, 25 bp, Homo sapien
cccgccgccgcgacgttatatggtt

SEQ ID NO: 5348763 - DNA, 25 bp, Homo sapien
gccgcgacgttatatggttttttgc

SEQ ID NO: 5348764 - DNA, 25 bp, Homo sapien
gacgttatatggttttttgctccca

SEQ ID NO: 5348765 - DNA, 25 bp, Homo sapien
accgcagctttttgcgcctcggctt

SEQ ID NO: 5348766 - DNA, 25 bp, Homo sapien
ccgcagctttttgcgcctcggcttt

SEQ ID NO: 5348767 - DNA, 25 bp, Homo sapien
tttctccctgtagaaaggtaatctg

SEQ ID NO: 5348768 - DNA, 25 bp, Homo sapien
ctttcctgttcaagagcatactcca

SEQ ID NO: 5348769 - DNA, 25 bp, Homo sapien
ttgatcctcctcacaagatccttct

SEQ ID NO: 5348770 - DNA, 25 bp, Homo sapien
ctccctgtagaaaggtaatctgggc

SEQ ID NO: 5348771 - DNA, 25 bp, Homo sapien
atgatcagggtatatccatagataa

SEQ ID NO: 5348772 - DNA, 25 bp, Homo sapien
ggtatatccatagataatcatcaca

SEQ ID NO: 5348773 - DNA, 25 bp, Homo sapien
cctgctgatgatcagggtatatcca

SEQ ID NO: 5348774 - DNA, 25 bp, Homo sapien
tcctgctgatgatcagggtatatcc

SEQ ID NO: 5348775 - DNA, 25 bp, Homo sapien
aataaagcatggtgtctgcgcccgg

SEQ ID NO: 5348776 - DNA, 25 bp, Homo sapien
tcaatgatcacaccctatagaggtg

SEQ ID NO: 5348777 - DNA, 25 bp, Homo sapien
tattgcagactgcaagagacgcttc

SEQ ID NO: 5348778 - DNA, 25 bp, Homo sapien
tgaagtacttcacggcagcaggaat

SEQ ID NO: 5348779 - DNA, 25 bp, Homo sapien
gaggtgggcaaattctgtatgagga

SEQ ID NO: 5348780 - DNA, 25 bp, Homo sapien
tctgtatgaggaccgaggagcaaac

SEQ ID NO: 5348781 - DNA, 25 bp, Homo sapien
cgtcgcagtcgctgtgctggaagca

SEQ ID NO: 5348782 - DNA, 25 bp, Homo sapien
aggagcaaacaccacgtcgcagtcg

SEQ ID NO: 5348783 - DNA, 25 bp, Homo sapien
caatgaactgtgcggtgctggagac

SEQ ID NO: 5348784 - DNA, 25 bp, Homo sapien
aatgaactgtgcggtgctggagaca

SEQ ID NO: 5348785 - DNA, 25 bp, Homo sapien
gcaatgaactgtgcggtgctggaga

SEQ ID NO: 5348786 - DNA, 25 bp, Homo sapien
agggaacacggagattccctaatca

SEQ ID NO: 5348787 - DNA, 25 bp, Homo sapien
gggaacacggagattccctaatcac

SEQ ID NO: 5348788 - DNA, 25 bp, Homo sapien
ctgcagctcttaattccccagtaac

SEQ ID NO: 5348789 - DNA, 25 bp, Homo sapien
cagctcttaattccccagtaacctc

SEQ ID NO: 5348790 - DNA, 25 bp, Homo sapien
tgcagctcttaattccccagtaacc

SEQ ID NO: 5348791 - DNA, 25 bp, Homo sapien
gcagctcttaattccccagtaacct

SEQ ID NO: 5348792 - DNA, 25 bp, Homo sapien
aatttctttgtatatttagtactga

SEQ ID NO: 5348793 - DNA, 25 bp, Homo sapien
attgccctggttggagttcttcttt

SEQ ID NO: 5348794 - DNA, 25 bp, Homo sapien
gttgtccagggttcagtgcagtggt

SEQ ID NO: 5348795 - DNA, 25 bp, Homo sapien
actgatggggtttcgacaggctggt

SEQ ID NO: 5348796 - DNA, 25 bp, Homo sapien
accagactggagtgcttcttttttt

SEQ ID NO: 5348797 - DNA, 25 bp, Homo sapien
tgttgaccagactggagtgcttctt

SEQ ID NO: 5348798 - DNA, 25 bp, Homo sapien
gactggagtgcttcttttttttcag

SEQ ID NO: 5348799 - DNA, 25 bp, Homo sapien
catgtcggccaacctggtctttttt

SEQ ID NO: 5348800 - DNA, 25 bp, Homo sapien
agtctggagtgcttcttttttttca

SEQ ID NO: 5348801 - DNA, 25 bp, Homo sapien
cccagtctggagtgcttcttttttt

SEQ ID NO: 5348802 - DNA, 25 bp, Homo sapien
tctggagtgcttcttttttttcaga

SEQ ID NO: 5348803 - DNA, 25 bp, Homo sapien
cctcctgtctgggactcccgagtag

SEQ ID NO: 5348804 - DNA, 25 bp, Homo sapien
cactctgacaccaccgtggagtaca

SEQ ID NO: 5348805 - DNA, 25 bp, Homo sapien
tgacaccaccgtggagtacagtggc

SEQ ID NO: 5348806 - DNA, 25 bp, Homo sapien
gtatcactctgacaccaccgtggag

SEQ ID NO: 5348807 - DNA, 25 bp, Homo sapien
gagatgtagtatcactctgacacca

SEQ ID NO: 5348808 - DNA, 25 bp, Homo sapien
tcacaccgtgcacttctccctttcc

SEQ ID NO: 5348809 - DNA, 25 bp, Homo sapien
acaccgtgcacttctccctttcctt

SEQ ID NO: 5348810 - DNA, 25 bp, Homo sapien
caccgtgcacttctccctttcctta

SEQ ID NO: 5348811 - DNA, 25 bp, Homo sapien
cgtgcacttctccctttccttaaag

SEQ ID NO: 5348812 - DNA, 25 bp, Homo sapien
ggctaataatgtatacttcgctggc

SEQ ID NO: 5348813 - DNA, 25 bp, Homo sapien
taatgtatacttcgctggcttttga

SEQ ID NO: 5348814 - DNA, 25 bp, Homo sapien
gtatacttcgctggcttttgaatgc

SEQ ID NO: 5348815 - DNA, 25 bp, Homo sapien
acaggctaataatgtatacttcgct

SEQ ID NO: 5348816 - DNA, 25 bp, Homo sapien
ctggatgctaagtccaaaagacata

SEQ ID NO: 5348817 - DNA, 25 bp, Homo sapien
tggatgctaagtccaaaagacataa

SEQ ID NO: 5348818 - DNA, 25 bp, Homo sapien
tactggatgctaagtccaaaagaca

SEQ ID NO: 5348819 - DNA, 25 bp, Homo sapien
ggatgctaagtccaaaagacataaa

SEQ ID NO: 5348820 - DNA, 25 bp, Homo sapien
taaccaaaactctactatctacttc

SEQ ID NO: 5348821 - DNA, 25 bp, Homo sapien
gatatggtaaccaaaactctactat

SEQ ID NO: 5348822 - DNA, 25 bp, Homo sapien
gtgagaacacgtagttatgtggtgt

SEQ ID NO: 5348823 - DNA, 25 bp, Homo sapien
caggatatggtaaccaaaactctac

SEQ ID NO: 5348824 - DNA, 25 bp, Homo sapien
tactgcgaacaagaaaaagatttta

SEQ ID NO: 5348825 - DNA, 25 bp, Homo sapien
atatatgccttaaaacagaaggaca

SEQ ID NO: 5348826 - DNA, 25 bp, Homo sapien
catcggggtgcaggtaagtctttga

SEQ ID NO: 5348827 - DNA, 25 bp, Homo sapien
gtaagtctttgatatactggttttc

SEQ ID NO: 5348828 - DNA, 25 bp, Homo sapien
ccaggacaattaggtgagagaaaga

SEQ ID NO: 5348829 - DNA, 25 bp, Homo sapien
gccaggacaattaggtgagagaaag

SEQ ID NO: 5348830 - DNA, 25 bp, Homo sapien
catgaaatgaaatggataggatgcc

SEQ ID NO: 5348831 - DNA, 25 bp, Homo sapien
tgaaatgaaatggataggatgccct

SEQ ID NO: 5348832 - DNA, 25 bp, Homo sapien
gaaatgaaatggataggatgccctc

SEQ ID NO: 5348833 - DNA, 25 bp, Homo sapien
aaatgaaatggataggatgccctca

SEQ ID NO: 5348834 - DNA, 25 bp, Homo sapien
cacccagatccccactccacaggaa

SEQ ID NO: 5348835 - DNA, 25 bp, Homo sapien
tcaacttgtcatgccggccactggg

SEQ ID NO: 5348836 - DNA, 25 bp, Homo sapien
cacaggaaccattgggcccactggg

SEQ ID NO: 5348837 - DNA, 25 bp, Homo sapien
ccaagctgggcaggaactggggtct

SEQ ID NO: 5348838 - DNA, 25 bp, Homo sapien
tccagtatgaccaagagtgggtcgc

SEQ ID NO: 5348839 - DNA, 25 bp, Homo sapien
agtatgaccaagagtgggtcgccct

SEQ ID NO: 5348840 - DNA, 25 bp, Homo sapien
tgcactccagtatgaccaagagtgg

SEQ ID NO: 5348841 - DNA, 25 bp, Homo sapien
cactccagtatgaccaagagtgggt

SEQ ID NO: 5348842 - DNA, 25 bp, Homo sapien
ctcgggctctgggtgcgccgtcgct

SEQ ID NO: 5348843 - DNA, 25 bp, Homo sapien
tggctccatgggaccctcgggctct

SEQ ID NO: 5348844 - DNA, 25 bp, Homo sapien
ggctctgggtgcgccgtcgctgcag

SEQ ID NO: 5348845 - DNA, 25 bp, Homo sapien
ggctccatgggaccctcgggctctg

SEQ ID NO: 5348846 - DNA, 25 bp, Homo sapien
gcttctgccgcggtagaggtttcca

SEQ ID NO: 5348847 - DNA, 25 bp, Homo sapien
ggcctcggttttcacgtctgaaata

SEQ ID NO: 5348848 - DNA, 25 bp, Homo sapien
caatcagcagagacgttggacaggg

SEQ ID NO: 5348849 - DNA, 25 bp, Homo sapien
tggctgtctctttcgggcctcggtt

SEQ ID NO: 5348850 - DNA, 25 bp, Homo sapien
agcagccttgcctacagctgtggcc

SEQ ID NO: 5348851 - DNA, 25 bp, Homo sapien
gtggcgccgcagactcgctacggcg

SEQ ID NO: 5348852 - DNA, 25 bp, Homo sapien
gcagactcgctacggcggagcgcgg

SEQ ID NO: 5348853 - DNA, 25 bp, Homo sapien
gaggtggcgccgcagactcgctacg

SEQ ID NO: 5348854 - DNA, 25 bp, Homo sapien
gcatagcctattgctgctctgctct

SEQ ID NO: 5348855 - DNA, 25 bp, Homo sapien
tctttgggtaagctcctttgctctg

SEQ ID NO: 5348856 - DNA, 25 bp, Homo sapien
ttgggtaagctcctttgctctgatt

SEQ ID NO: 5348857 - DNA, 25 bp, Homo sapien
ctttgggtaagctcctttgctctga

SEQ ID NO: 5348858 - DNA, 25 bp, Homo sapien
taagatgtaaattacaatgaagtca

SEQ ID NO: 5348859 - DNA, 25 bp, Homo sapien
gatgtaaattacaatgaagtcatac

SEQ ID NO: 5348860 - DNA, 25 bp, Homo sapien
gtaaattacaatgaagtcatactgg

SEQ ID NO: 5348861 - DNA, 25 bp, Homo sapien
ttaagatgtaaattacaatgaagtc

SEQ ID NO: 5348862 - DNA, 25 bp, Homo sapien
cactgatgtaaggtccagcttcggg

SEQ ID NO: 5348863 - DNA, 25 bp, Homo sapien
tcaatgggttaaggtactgctagct

SEQ ID NO: 5348864 - DNA, 25 bp, Homo sapien
tcagactttggtggcttagcacaat

SEQ ID NO: 5348865 - DNA, 25 bp, Homo sapien
tgcaggtagcccagagataggcatt

SEQ ID NO: 5348866 - DNA, 25 bp, Homo sapien
tacagaaatacgcagggacaaggac

SEQ ID NO: 5348867 - DNA, 25 bp, Homo sapien
agagtgaccggcacagagaagacaa

SEQ ID NO: 5348868 - DNA, 25 bp, Homo sapien
ggacaaggacagaccatcggacgct

SEQ ID NO: 5348869 - DNA, 25 bp, Homo sapien
agacacacccgaaaacagacggcca

SEQ ID NO: 5348870 - DNA, 25 bp, Homo sapien
tgccagtcttgaatgggagacagac

SEQ ID NO: 5348871 - DNA, 25 bp, Homo sapien
gcctcgttgtgttgtctcctgttct

SEQ ID NO: 5348872 - DNA, 25 bp, Homo sapien
tattttgtacagatagagcctcgtt

SEQ ID NO: 5348873 - DNA, 25 bp, Homo sapien
aaagcttctgtctgagtcaccttcc

SEQ ID NO: 5348874 - DNA, 25 bp, Homo sapien
tatcacattgtttgcagtcattacc

SEQ ID NO: 5348875 - DNA, 25 bp, Homo sapien
cctgggatgccttaaaattagatac

SEQ ID NO: 5348876 - DNA, 25 bp, Homo sapien
tactttgttgcaggtaaaccactga

SEQ ID NO: 5348877 - DNA, 25 bp, Homo sapien
tatcccacatttaggtagtatcaca

SEQ ID NO: 5348878 - DNA, 25 bp, Homo sapien
gctacagtgcaatggtgctcactgc

SEQ ID NO: 5348879 - DNA, 25 bp, Homo sapien
ccacagttggctaatttttgaaaat

SEQ ID NO: 5348880 - DNA, 25 bp, Homo sapien
acagttggctaatttttgaaaatat

SEQ ID NO: 5348881 - DNA, 25 bp, Homo sapien
taggctacagtgcaatggtgctcac

SEQ ID NO: 5348882 - DNA, 25 bp, Homo sapien
tgcaactcgcaaagggtgacagatg

SEQ ID NO: 5348883 - DNA, 25 bp, Homo sapien
tctgtggcatccaaatggacgaacc

SEQ ID NO: 5348884 - DNA, 25 bp, Homo sapien
tgacagatgccaaacatgacccctg

SEQ ID NO: 5348885 - DNA, 25 bp, Homo sapien
tattgccgtgcgatgaactaccact

SEQ ID NO: 5348886 - DNA, 25 bp, Homo sapien
ggtgggtctccagcatgacgtctca

SEQ ID NO: 5348887 - DNA, 25 bp, Homo sapien
tgggcttggaaactgcatggtgtca

SEQ ID NO: 5348888 - DNA, 25 bp, Homo sapien
gagctgaccctccaaaagactgaac

SEQ ID NO: 5348889 - DNA, 25 bp, Homo sapien
gacgtctcagggtggttggactcca

SEQ ID NO: 5348890 - DNA, 25 bp, Homo sapien
gattcaaagaaagaggtcataggcc

SEQ ID NO: 5348891 - DNA, 25 bp, Homo sapien
gaatttccagccaactaaacagcac

SEQ ID NO: 5348892 - DNA, 25 bp, Homo sapien
agccaactaaacagcacatataaag

SEQ ID NO: 5348893 - DNA, 25 bp, Homo sapien
tctcaataggataagtaacaagaat

SEQ ID NO: 5348894 - DNA, 25 bp, Homo sapien
caaggcttgactttccgagaggtgg

SEQ ID NO: 5348895 - DNA, 25 bp, Homo sapien
gatacctcccgcttttggctgtcga

SEQ ID NO: 5348896 - DNA, 25 bp, Homo sapien
caaagagcgctcattagggatggat

SEQ ID NO: 5348897 - DNA, 25 bp, Homo sapien
gaagtgagtcgttaggtgcatccca

SEQ ID NO: 5348898 - DNA, 25 bp, Homo sapien
ggtgtatttcttccgaccatgttga

SEQ ID NO: 5348899 - DNA, 25 bp, Homo sapien
gaattacaattaggatgcctagtcc

SEQ ID NO: 5348900 - DNA, 25 bp, Homo sapien
aaagtcacctacgatgccattgttc

SEQ ID NO: 5348901 - DNA, 25 bp, Homo sapien
taacaatatggcataaaccttgccc

SEQ ID NO: 5348902 - DNA, 25 bp, Homo sapien
aaagtcttcgggctgattgtcaatg

SEQ ID NO: 5348903 - DNA, 25 bp, Homo sapien
aacccaggtgcggtggagtatgcct

SEQ ID NO: 5348904 - DNA, 25 bp, Homo sapien
tacactactgcacccagggatactg

SEQ ID NO: 5348905 - DNA, 25 bp, Homo sapien
ggtgacagatattcataccctcagg

SEQ ID NO: 5348906 - DNA, 25 bp, Homo sapien
atactgcgtttgtatgtaacttgct

SEQ ID NO: 5348907 - DNA, 25 bp, Homo sapien
aaggcggtgtttttatgtatactgc

SEQ ID NO: 5348908 - DNA, 25 bp, Homo sapien
cacccacatgaaggcggtgttttta

SEQ ID NO: 5348909 - DNA, 25 bp, Homo sapien
tttttcaaaagtacgcatacaccca

SEQ ID NO: 5348910 - DNA, 25 bp, Homo sapien
caaaggagctatcataatgctggga

SEQ ID NO: 5348911 - DNA, 25 bp, Homo sapien
agcacattagaaaagccctgaggcc

SEQ ID NO: 5348912 - DNA, 25 bp, Homo sapien
tatgctgactaagcagtgactgagc

SEQ ID NO: 5348913 - DNA, 25 bp, Homo sapien
tcaaccagcgtaggtggcaaggaaa

SEQ ID NO: 5348914 - DNA, 25 bp, Homo sapien
gatagacacactagggacaatttcc

SEQ ID NO: 5348915 - DNA, 25 bp, Homo sapien
tcaggaatgttcactcagcataact

SEQ ID NO: 5348916 - DNA, 25 bp, Homo sapien
gactaaggctggaggtacacattcc

SEQ ID NO: 5348917 - DNA, 25 bp, Homo sapien
tgcctgtcaattaggagtgcagata

SEQ ID NO: 5348918 - DNA, 25 bp, Homo sapien
ctgagttcatgctgtgtccgaaata

SEQ ID NO: 5348919 - DNA, 25 bp, Homo sapien
gtaagattacaaacacacctgaaga

SEQ ID NO: 5348920 - DNA, 25 bp, Homo sapien
gcttggaaccagcaactgagttcat

SEQ ID NO: 5348921 - DNA, 25 bp, Homo sapien
gaaagaatgcatgccaagttcagtg

SEQ ID NO: 5348922 - DNA, 25 bp, Homo sapien
tcatgacggtaggacccttgtgaat

SEQ ID NO: 5348923 - DNA, 25 bp, Homo sapien
tatcaggacaatctgcaatggactg

SEQ ID NO: 5348924 - DNA, 25 bp, Homo sapien
tagctggtaagatcaccggactcac

SEQ ID NO: 5348925 - DNA, 25 bp, Homo sapien
gactccgtgcacattaggaaacctg

SEQ ID NO: 5348926 - DNA, 25 bp, Homo sapien
gttgttgattagccacccagcttgt

SEQ ID NO: 5348927 - DNA, 25 bp, Homo sapien
tgttgttgattagccacccagcttg

SEQ ID NO: 5348928 - DNA, 25 bp, Homo sapien
tgcctgttgttgattagccacccag

SEQ ID NO: 5348929 - DNA, 25 bp, Homo sapien
gcctgttgttgattagccacccagc

SEQ ID NO: 5348930 - DNA, 25 bp, Homo sapien
gaggtcctcactatccagctcatta

SEQ ID NO: 5348931 - DNA, 25 bp, Homo sapien
caggctgtgtgtagatagatgtccc

SEQ ID NO: 5348932 - DNA, 25 bp, Homo sapien
attacgcttcacttcggcaccctgt

SEQ ID NO: 5348933 - DNA, 25 bp, Homo sapien
ctcagggcaaggatccatctttctc

SEQ ID NO: 5348934 - DNA, 25 bp, Homo sapien
gaatgggtacacctatgttccaata

SEQ ID NO: 5348935 - DNA, 25 bp, Homo sapien
tgcctcagctcagaagcgtccttgg

SEQ ID NO: 5348936 - DNA, 25 bp, Homo sapien
gttacttgcagctgacctatcctaa

SEQ ID NO: 5348937 - DNA, 25 bp, Homo sapien
catgagatctctgttggcactacaa

SEQ ID NO: 5348938 - DNA, 25 bp, Homo sapien
tgatgacacgatgctcattcagacc

SEQ ID NO: 5348939 - DNA, 25 bp, Homo sapien
gatgacacgatgctcattcagacca

SEQ ID NO: 5348940 - DNA, 25 bp, Homo sapien
taggatctggttgctccttgttccc

SEQ ID NO: 5348941 - DNA, 25 bp, Homo sapien
gatctggttgctccttgttccctaa

SEQ ID NO: 5348942 - DNA, 25 bp, Homo sapien
agaaatacgtaagggctctgtcctt

SEQ ID NO: 5348943 - DNA, 25 bp, Homo sapien
gctctgtccttggaggtaggatctg

SEQ ID NO: 5348944 - DNA, 25 bp, Homo sapien
ccagggagacgaggcttcaaggcca

SEQ ID NO: 5348945 - DNA, 25 bp, Homo sapien
tcagattgcccctcgtgcttgtgtt

SEQ ID NO: 5348946 - DNA, 25 bp, Homo sapien
ttgcccctcgtgcttgtgttcagat

SEQ ID NO: 5348947 - DNA, 25 bp, Homo sapien
gctgattggttgttccccagggaga

SEQ ID NO: 5348948 - DNA, 25 bp, Homo sapien
tcagttttagtccaggaagactcgt

SEQ ID NO: 5348949 - DNA, 25 bp, Homo sapien
gaagactcgttttggatttgtgacc

SEQ ID NO: 5348950 - DNA, 25 bp, Homo sapien
cagcgtggaaaatccattgagtccc

SEQ ID NO: 5348951 - DNA, 25 bp, Homo sapien
tagggcttctaccaagggtcctggc

SEQ ID NO: 5348952 - DNA, 25 bp, Homo sapien
atgcatccacctctatgcctggcta

SEQ ID NO: 5348953 - DNA, 25 bp, Homo sapien
gaactacatgcatccacctctatgc

SEQ ID NO: 5348954 - DNA, 25 bp, Homo sapien
tggaactacatgcatccacctctat

SEQ ID NO: 5348955 - DNA, 25 bp, Homo sapien
tacatgcatccacctctatgcctgg

SEQ ID NO: 5348956 - DNA, 25 bp, Homo sapien
caaatatgaattatggcacacactg

SEQ ID NO: 5348957 - DNA, 25 bp, Homo sapien
gcagttcctttgcttgctaacagaa

SEQ ID NO: 5348958 - DNA, 25 bp, Homo sapien
tgcttttggaaaaactcgagtcagc

SEQ ID NO: 5348959 - DNA, 25 bp, Homo sapien
atgaggaggttaccgggattgccct

SEQ ID NO: 5348960 - DNA, 25 bp, Homo sapien
cagggaccggaatgctacagaagca

SEQ ID NO: 5348961 - DNA, 25 bp, Homo sapien
gacctgctgggtttctctactgtta

SEQ ID NO: 5348962 - DNA, 25 bp, Homo sapien
tttgttcagctcattaagggaggac

SEQ ID NO: 5348963 - DNA, 25 bp, Homo sapien
ttaaggcacgtttcccctgatccag

SEQ ID NO: 5348964 - DNA, 25 bp, Homo sapien
attattaatttggatgctcacatca

SEQ ID NO: 5348965 - DNA, 25 bp, Homo sapien
tgattgatgtgtcctttgacatgtc

SEQ ID NO: 5348966 - DNA, 25 bp, Homo sapien
actggaagccccttgaagttgattg

SEQ ID NO: 5348967 - DNA, 25 bp, Homo sapien
caatagactataatctaccattatc

SEQ ID NO: 5348968 - DNA, 25 bp, Homo sapien
ttagtcaagcaacttaatgctaggc

SEQ ID NO: 5348969 - DNA, 25 bp, Homo sapien
tagtcaagcaacttaatgctaggct

SEQ ID NO: 5348970 - DNA, 25 bp, Homo sapien
tcaagcaacttaatgctaggctaag

SEQ ID NO: 5348971 - DNA, 25 bp, Homo sapien
tattagtcaagcaacttaatgctag

SEQ ID NO: 5348972 - DNA, 25 bp, Homo sapien
atcttgacacgaggtcattgcagaa

SEQ ID NO: 5348973 - DNA, 25 bp, Homo sapien
gccatcttgacacgaggtcattgca

SEQ ID NO: 5348974 - DNA, 25 bp, Homo sapien
tgccatcttgacacgaggtcattgc

SEQ ID NO: 5348975 - DNA, 25 bp, Homo sapien
catcttgacacgaggtcattgcaga

SEQ ID NO: 5348976 - DNA, 25 bp, Homo sapien
cagtcaggctgactccaagaggcta

SEQ ID NO: 5348977 - DNA, 25 bp, Homo sapien
ggaagcatagagagtacacggatag

SEQ ID NO: 5348978 - DNA, 25 bp, Homo sapien
caatacatatcaatgggttcacccc

SEQ ID NO: 5348979 - DNA, 25 bp, Homo sapien
catagagagtacacggatagctgga

SEQ ID NO: 5348980 - DNA, 25 bp, Homo sapien
cattcacttcagtgggctgtcgagc

SEQ ID NO: 5348981 - DNA, 25 bp, Homo sapien
cacttcagtgggctgtcgagctgtg

SEQ ID NO: 5348982 - DNA, 25 bp, Homo sapien
ttcagtgggctgtcgagctgtgcta

SEQ ID NO: 5348983 - DNA, 25 bp, Homo sapien
gatcgaacagatcattcacttcagt

SEQ ID NO: 5348984 - DNA, 25 bp, Homo sapien
gtcaagatgtattattggctcacaa

SEQ ID NO: 5348985 - DNA, 25 bp, Homo sapien
cgtcgaggacctgaattagaaggtg

SEQ ID NO: 5348986 - DNA, 25 bp, Homo sapien
tggattgtcaagatgtattattggc

SEQ ID NO: 5348987 - DNA, 25 bp, Homo sapien
tagcttccatctattgtggattgtc

SEQ ID NO: 5348988 - DNA, 25 bp, Homo sapien
aaacacttgttttgagctgctgagc

SEQ ID NO: 5348989 - DNA, 25 bp, Homo sapien
cagctttggctagagatgcatgagc

SEQ ID NO: 5348990 - DNA, 25 bp, Homo sapien
gaaccaccggcctgtgaatgagaca

SEQ ID NO: 5348991 - DNA, 25 bp, Homo sapien
gatttcttgctgtgcacatgaccag

SEQ ID NO: 5348992 - DNA, 25 bp, Homo sapien
aggctgaggtctgacaagtcaacat

SEQ ID NO: 5348993 - DNA, 25 bp, Homo sapien
gctgaggtctgacaagtcaacatca

SEQ ID NO: 5348994 - DNA, 25 bp, Homo sapien
ttagctgcttagctgattagagcct

SEQ ID NO: 5348995 - DNA, 25 bp, Homo sapien
gctgcttagctgattagagcctgtg

SEQ ID NO: 5348996 - DNA, 25 bp, Homo sapien
gggtcatgggccttccctgtagcta

SEQ ID NO: 5348997 - DNA, 25 bp, Homo sapien
tccaggccagaactccatctgaccc

SEQ ID NO: 5348998 - DNA, 25 bp, Homo sapien
agctcagttgtgctctagaccagaa

SEQ ID NO: 5348999 - DNA, 25 bp, Homo sapien
ggccagaactccatctgacccttgt

SEQ ID NO: 5349000 - DNA, 25 bp, Homo sapien
tgtaagcttcctaggccgccttaga

SEQ ID NO: 5349001 - DNA, 25 bp, Homo sapien
gatgtgcctgctcatgattgtaagc

SEQ ID NO: 5349002 - DNA, 25 bp, Homo sapien
gaacaatgagccaatacaaatcttt

SEQ ID NO: 5349003 - DNA, 25 bp, Homo sapien
caccatgcttcttgtgaagcccgca

SEQ ID NO: 5349004 - DNA, 25 bp, Homo sapien
tcccttggccactattgctacagat

SEQ ID NO: 5349005 - DNA, 25 bp, Homo sapien
tctgattgcaaagaggcttccttga

SEQ ID NO: 5349006 - DNA, 25 bp, Homo sapien
aatttactcctgatatttgcctgac

SEQ ID NO: 5349007 - DNA, 25 bp, Homo sapien
gcatgggcttactttcctccaagaa

SEQ ID NO: 5349008 - DNA, 25 bp, Homo sapien
tcttgtgctaactggaagaaaagag

SEQ ID NO: 5349009 - DNA, 25 bp, Homo sapien
gcaatcttgtgctaactggaagaaa

SEQ ID NO: 5349010 - DNA, 25 bp, Homo sapien
aatcttgtgctaactggaagaaaag

SEQ ID NO: 5349011 - DNA, 25 bp, Homo sapien
caatcttgtgctaactggaagaaaa

SEQ ID NO: 5349012 - DNA, 25 bp, Homo sapien
aggatggagaggtttgaaaattgct

SEQ ID NO: 5349013 - DNA, 25 bp, Homo sapien
gctaagtgctttgtacaacttataa

SEQ ID NO: 5349014 - DNA, 25 bp, Homo sapien
caggatggagaggtttgaaaattgc

SEQ ID NO: 5349015 - DNA, 25 bp, Homo sapien
acctctctatctttctgtagctggg

SEQ ID NO: 5349016 - DNA, 25 bp, Homo sapien
ccacctctctatctttctgtagctg

SEQ ID NO: 5349017 - DNA, 25 bp, Homo sapien
gcctgactaacccagatggggtttc

SEQ ID NO: 5349018 - DNA, 25 bp, Homo sapien
ctctctatctttctgtagctgggat

SEQ ID NO: 5349019 - DNA, 25 bp, Homo sapien
catagatacagcagagggagaaacg

SEQ ID NO: 5349020 - DNA, 25 bp, Homo sapien
gaagctcagaaagatcaagcgacct

SEQ ID NO: 5349021 - DNA, 25 bp, Homo sapien
caagctagaatcctctttggagcac

SEQ ID NO: 5349022 - DNA, 25 bp, Homo sapien
gcacagcccaggtcaagaaactgca

SEQ ID NO: 5349023 - DNA, 25 bp, Homo sapien
cccctgctgtgattctatattgaaa

SEQ ID NO: 5349024 - DNA, 25 bp, Homo sapien
ttttcccaccatggctgtaagcacc

SEQ ID NO: 5349025 - DNA, 25 bp, Homo sapien
aaccaacttagttctgtgagaagag

SEQ ID NO: 5349026 - DNA, 25 bp, Homo sapien
tattcccagtattgcaccccaaaaa

SEQ ID NO: 5349027 - DNA, 25 bp, Homo sapien
agcctaggaccaactgtgcagacag

SEQ ID NO: 5349028 - DNA, 25 bp, Homo sapien
gaattattctccattataggcaggc

SEQ ID NO: 5349029 - DNA, 25 bp, Homo sapien
caatggcaaaagacactgacagagt

SEQ ID NO: 5349030 - DNA, 25 bp, Homo sapien
catgattaccagttagggaaccctc

SEQ ID NO: 5349031 - DNA, 25 bp, Homo sapien
tatgatgcctaatcccctgaataaa

SEQ ID NO: 5349032 - DNA, 25 bp, Homo sapien
aaccagttgtccgaggcaccattct

SEQ ID NO: 5349033 - DNA, 25 bp, Homo sapien
gatgtaattactgtagtagcaacaa

SEQ ID NO: 5349034 - DNA, 25 bp, Homo sapien
taatgtgctgtccttagtatatgaa

SEQ ID NO: 5349035 - DNA, 25 bp, Homo sapien
tcttacgagtcagcaagttaacact

SEQ ID NO: 5349036 - DNA, 25 bp, Homo sapien
tgttaccagccccagaaatagcatt

SEQ ID NO: 5349037 - DNA, 25 bp, Homo sapien
gaaattcatactcatggaacacgat

SEQ ID NO: 5349038 - DNA, 25 bp, Homo sapien
tttcactcttaacgataaatggtgc

SEQ ID NO: 5349039 - DNA, 25 bp, Homo sapien
tgaaatgagttaatatttcctgcct

SEQ ID NO: 5349040 - DNA, 25 bp, Homo sapien
tgcaccaaccacatttaggctctac

SEQ ID NO: 5349041 - DNA, 25 bp, Homo sapien
tgcctgcaccaaccacatttaggct

SEQ ID NO: 5349042 - DNA, 25 bp, Homo sapien
atgagttaatatttcctgcctgcac

SEQ ID NO: 5349043 - DNA, 25 bp, Homo sapien
ttgctcatgtctccagccacaatat

SEQ ID NO: 5349044 - DNA, 25 bp, Homo sapien
tgctcatgtctccagccacaatatc

SEQ ID NO: 5349045 - DNA, 25 bp, Homo sapien
aactcttggtactggacgcagccat

SEQ ID NO: 5349046 - DNA, 25 bp, Homo sapien
ccaccaactcttggtactggacgca

SEQ ID NO: 5349047 - DNA, 25 bp, Homo sapien
accaactcttggtactggacgcagc

SEQ ID NO: 5349048 - DNA, 25 bp, Homo sapien
caactcttggtactggacgcagcca

SEQ ID NO: 5349049 - DNA, 25 bp, Homo sapien
cacgagcccacgctccggccacaca

SEQ ID NO: 5349050 - DNA, 25 bp, Homo sapien
tgcaccccatgctcatacaaatatg

SEQ ID NO: 5349051 - DNA, 25 bp, Homo sapien
accccatgctcatacaaatatgcac

SEQ ID NO: 5349052 - DNA, 25 bp, Homo sapien
tccacgagcccacgctccggccaca

SEQ ID NO: 5349053 - DNA, 25 bp, Homo sapien
ctccagggatcccttcagggtgctg

SEQ ID NO: 5349054 - DNA, 25 bp, Homo sapien
ggaacccttgacatccacgtgcatg

SEQ ID NO: 5349055 - DNA, 25 bp, Homo sapien
gggaacccttgacatccacgtgcat

SEQ ID NO: 5349056 - DNA, 25 bp, Homo sapien
tccagggatcccttcagggtgctgc

SEQ ID NO: 5349057 - DNA, 25 bp, Homo sapien
gacaacggcggtgccggccctggca

SEQ ID NO: 5349058 - DNA, 25 bp, Homo sapien
gcacgaggcccaggtgtgtactctg

SEQ ID NO: 5349059 - DNA, 25 bp, Homo sapien
gcccctggaggatcactctgactga

SEQ ID NO: 5349060 - DNA, 25 bp, Homo sapien
aggcaaacattgactgtttgccttg

SEQ ID NO: 5349061 - DNA, 25 bp, Homo sapien
gctgggctccgttctgggaactgaa

SEQ ID NO: 5349062 - DNA, 25 bp, Homo sapien
gaactgaaaggggggcagctctcct

SEQ ID NO: 5349063 - DNA, 25 bp, Homo sapien
cgcatcactattccacagctgggct

SEQ ID NO: 5349064 - DNA, 25 bp, Homo sapien
ggcctctggcctgggaaaggcgccc

SEQ ID NO: 5349065 - DNA, 25 bp, Homo sapien
ccactgagggcctgacaatgcccat

SEQ ID NO: 5349066 - DNA, 25 bp, Homo sapien
caatgcccatcttcggcccagcact

SEQ ID NO: 5349067 - DNA, 25 bp, Homo sapien
acaatgcccatcttcggcccagcac

SEQ ID NO: 5349068 - DNA, 25 bp, Homo sapien
cactgagggcctgacaatgcccatc

SEQ ID NO: 5349069 - DNA, 25 bp, Homo sapien
cagaatgggtgtccggctcggtccc

SEQ ID NO: 5349070 - DNA, 25 bp, Homo sapien
cagggccttccaccagggtggttcg

SEQ ID NO: 5349071 - DNA, 25 bp, Homo sapien
tctggtcccctcattagcccagcct

SEQ ID NO: 5349072 - DNA, 25 bp, Homo sapien
ccagcctcccgtgggatcatagact

SEQ ID NO: 5349073 - DNA, 25 bp, Homo sapien
gggatcatagacttgaaccctcaag

SEQ ID NO: 5349074 - DNA, 25 bp, Homo sapien
caggccccttggttgtgccacaggc

SEQ ID NO: 5349075 - DNA, 25 bp, Homo sapien
gcactgctcacatgagcccccatca

SEQ ID NO: 5349076 - DNA, 25 bp, Homo sapien
atcagcaggccccttggttgtgcca

SEQ ID NO: 5349077 - DNA, 25 bp, Homo sapien
ttcatgatacagcttcggagtgtgg

SEQ ID NO: 5349078 - DNA, 25 bp, Homo sapien
tgtcactcctccctggagaggcagc

SEQ ID NO: 5349079 - DNA, 25 bp, Homo sapien
gtggcacaggccagctgtcactcct

SEQ ID NO: 5349080 - DNA, 25 bp, Homo sapien
gtgtggcacaggccagctgtcactc

SEQ ID NO: 5349081 - DNA, 25 bp, Homo sapien
ggggggggctcgagggtgtggcaca

SEQ ID NO: 5349082 - DNA, 25 bp, Homo sapien
gacagaactcctcagcgggttgatg

SEQ ID NO: 5349083 - DNA, 25 bp, Homo sapien
gacttggacataggcctgcagagct

SEQ ID NO: 5349084 - DNA, 25 bp, Homo sapien
tgcagagctgatttctctcacaacc

SEQ ID NO: 5349085 - DNA, 25 bp, Homo sapien
gctttacatgccgaagccccatggc

SEQ ID NO: 5349086 - DNA, 25 bp, Homo sapien
tctcccgtgcgcctctcggcgcctg

SEQ ID NO: 5349087 - DNA, 25 bp, Homo sapien
gaggtctcccgtgcgcctctcggcg

SEQ ID NO: 5349088 - DNA, 25 bp, Homo sapien
ggtctcccgtgcgcctctcggcgcc

SEQ ID NO: 5349089 - DNA, 25 bp, Homo sapien
ctgaggtctcccgtgcgcctctcgg

SEQ ID NO: 5349090 - DNA, 25 bp, Homo sapien
cattaatataagatccacaatcccc

SEQ ID NO: 5349091 - DNA, 25 bp, Homo sapien
gcactgcctcgacacaaaaacatta

SEQ ID NO: 5349092 - DNA, 25 bp, Homo sapien
tataagatccacaatcccctcgctg

SEQ ID NO: 5349093 - DNA, 25 bp, Homo sapien
ctgtagtgctaatgcactgcctcga

SEQ ID NO: 5349094 - DNA, 25 bp, Homo sapien
catctttccaaccctcagtaacggt

SEQ ID NO: 5349095 - DNA, 25 bp, Homo sapien
aaccctcagtaacggttctcttgct

SEQ ID NO: 5349096 - DNA, 25 bp, Homo sapien
ccaaccctcagtaacggttctcttg

SEQ ID NO: 5349097 - DNA, 25 bp, Homo sapien
caaccctcagtaacggttctcttgc

SEQ ID NO: 5349098 - DNA, 25 bp, Homo sapien
tgcagtggtgcatcctttcctgtta

SEQ ID NO: 5349099 - DNA, 25 bp, Homo sapien
atatgcagtggtgcatcctttcctg

SEQ ID NO: 5349100 - DNA, 25 bp, Homo sapien
catatatgcagtggtgcatcctttc

SEQ ID NO: 5349101 - DNA, 25 bp, Homo sapien
gcagtggtgcatcctttcctgttac

SEQ ID NO: 5349102 - DNA, 25 bp, Homo sapien
ggtattttcttaatggccctgcagc

SEQ ID NO: 5349103 - DNA, 25 bp, Homo sapien
tattttcttaatggccctgcagccc

SEQ ID NO: 5349104 - DNA, 25 bp, Homo sapien
tttggatcagcaattaaggctttag

SEQ ID NO: 5349105 - DNA, 25 bp, Homo sapien
ggatcagcaattaaggctttagtct

SEQ ID NO: 5349106 - DNA, 25 bp, Homo sapien
tctcacaggatcattgttccatctc

SEQ ID NO: 5349107 - DNA, 25 bp, Homo sapien
cttctctcacaggatcattgttcca

SEQ ID NO: 5349108 - DNA, 25 bp, Homo sapien
ttctctcacaggatcattgttccat

SEQ ID NO: 5349109 - DNA, 25 bp, Homo sapien
tctctcacaggatcattgttccatc

SEQ ID NO: 5349110 - DNA, 25 bp, Homo sapien
gtaggagatgagctcattgctgatg

SEQ ID NO: 5349111 - DNA, 25 bp, Homo sapien
tggatgtaggcagctgcgatttcct

SEQ ID NO: 5349112 - DNA, 25 bp, Homo sapien
ttgtaggagatgagctcattgctga

SEQ ID NO: 5349113 - DNA, 25 bp, Homo sapien
tgtggatgtaggcagctgcgatttc

SEQ ID NO: 5349114 - DNA, 25 bp, Homo sapien
tgcaccccagcagctgggcaaacac

SEQ ID NO: 5349115 - DNA, 25 bp, Homo sapien
ctgcaccccagcagctgggcaaaca

SEQ ID NO: 5349116 - DNA, 25 bp, Homo sapien
tccggaagtcggcgttgaaggcata

SEQ ID NO: 5349117 - DNA, 25 bp, Homo sapien
cggaagtcggcgttgaaggcatagt

SEQ ID NO: 5349118 - DNA, 25 bp, Homo sapien
gaagtcggcgttgaaggcatagtga

SEQ ID NO: 5349119 - DNA, 25 bp, Homo sapien
cttccggaagtcggcgttgaaggca

SEQ ID NO: 5349120 - DNA, 25 bp, Homo sapien
gggttgagtgaggagttggcccagc

SEQ ID NO: 5349121 - DNA, 25 bp, Homo sapien
tgagtgaggagttggcccagcagaa

SEQ ID NO: 5349122 - DNA, 25 bp, Homo sapien
ctgggttgagtgaggagttggccca

SEQ ID NO: 5349123 - DNA, 25 bp, Homo sapien
gttgagtgaggagttggcccagcag

SEQ ID NO: 5349124 - DNA, 25 bp, Homo sapien
ggaggaaatcctgcggatctgcacc

SEQ ID NO: 5349125 - DNA, 25 bp, Homo sapien
catgcagttaaggatgaagaagggc

SEQ ID NO: 5349126 - DNA, 25 bp, Homo sapien
tagatgcgcgtgtaggtcacgatca

SEQ ID NO: 5349127 - DNA, 25 bp, Homo sapien
tgatcaccgacagggtcttgagaac

SEQ ID NO: 5349128 - DNA, 25 bp, Homo sapien
gatggcgtaggttcgattcaggctg

SEQ ID NO: 5349129 - DNA, 25 bp, Homo sapien
cgtaggttcgattcaggctggagtc

SEQ ID NO: 5349130 - DNA, 25 bp, Homo sapien
tggcgtaggttcgattcaggctgga

SEQ ID NO: 5349131 - DNA, 25 bp, Homo sapien
taggttcgattcaggctggagtcac

SEQ ID NO: 5349132 - DNA, 25 bp, Homo sapien
agctggaccggaatgaaggagatga

SEQ ID NO: 5349133 - DNA, 25 bp, Homo sapien
tgagctggaccggaatgaaggagat

SEQ ID NO: 5349134 - DNA, 25 bp, Homo sapien
ccagttgagctggaccggaatgaag

SEQ ID NO: 5349135 - DNA, 25 bp, Homo sapien
ctggaccggaatgaaggagatgagg

SEQ ID NO: 5349136 - DNA, 25 bp, Homo sapien
cgctgggtcatcttgcgctcgtagc

SEQ ID NO: 5349137 - DNA, 25 bp, Homo sapien
ggtcatcttgcgctcgtagcggaag

SEQ ID NO: 5349138 - DNA, 25 bp, Homo sapien
catcttgcgctcgtagcggaagggc

SEQ ID NO: 5349139 - DNA, 25 bp, Homo sapien
catgaccaaggccatgcgctgggtc

SEQ ID NO: 5349140 - DNA, 25 bp, Homo sapien
ggagatggcccagtagcgggccacg

SEQ ID NO: 5349141 - DNA, 25 bp, Homo sapien
tggagatggcccagtagcgggccac

SEQ ID NO: 5349142 - DNA, 25 bp, Homo sapien
ctggagatggcccagtagcgggcca

SEQ ID NO: 5349143 - DNA, 25 bp, Homo sapien
tgacacaggtagagacacgatgaag

SEQ ID NO: 5349144 - DNA, 25 bp, Homo sapien
gaggtctgacacaggtagagacacg

SEQ ID NO: 5349145 - DNA, 25 bp, Homo sapien
cgaagaggtctgacacaggtagaga

SEQ ID NO: 5349146 - DNA, 25 bp, Homo sapien
gcgccacgaagaggtctgacacagg

SEQ ID NO: 5349147 - DNA, 25 bp, Homo sapien
gttctcgggagtctgcggcgcgcca

SEQ ID NO: 5349148 - DNA, 25 bp, Homo sapien
agaagagagcaagccgccactgagg

SEQ ID NO: 5349149 - DNA, 25 bp, Homo sapien
gagaagagagcaagccgccactgag

SEQ ID NO: 5349150 - DNA, 25 bp, Homo sapien
atttgtgaagtgtttcggcctctgc

SEQ ID NO: 5349151 - DNA, 25 bp, Homo sapien
tgctggcgttaagctcagctgaagg

SEQ ID NO: 5349152 - DNA, 25 bp, Homo sapien
aagtgtttcggcctctgctggcgtt

SEQ ID NO: 5349153 - DNA, 25 bp, Homo sapien
tcccagctgacaagttgcatttgtg

SEQ ID NO: 5349154 - DNA, 25 bp, Homo sapien
tcctccaccctgtttgaaggtggca

SEQ ID NO: 5349155 - DNA, 25 bp, Homo sapien
cctcctccaccctgtttgaaggtgg

SEQ ID NO: 5349156 - DNA, 25 bp, Homo sapien
ctcctccaccctgtttgaaggtggc

SEQ ID NO: 5349157 - DNA, 25 bp, Homo sapien
gcctcctccaccctgtttgaaggtg

SEQ ID NO: 5349158 - DNA, 25 bp, Homo sapien
tcgactatcatccatatcaccatcc

SEQ ID NO: 5349159 - DNA, 25 bp, Homo sapien
tatcaccatcccttgaatgttctga

SEQ ID NO: 5349160 - DNA, 25 bp, Homo sapien
tatcatccatatcaccatcccttga

SEQ ID NO: 5349161 - DNA, 25 bp, Homo sapien
ccatcccttgaatgttctgattgga

SEQ ID NO: 5349162 - DNA, 25 bp, Homo sapien
ttcttggaactgtaactgtgaggct

SEQ ID NO: 5349163 - DNA, 25 bp, Homo sapien
ccatcctgggtataagtcttgggtg

SEQ ID NO: 5349164 - DNA, 25 bp, Homo sapien
tgagtcatccctgattcagtcaaac

SEQ ID NO: 5349165 - DNA, 25 bp, Homo sapien
gattcagtcaaacacacaccatcct

SEQ ID NO: 5349166 - DNA, 25 bp, Homo sapien
tgtaactgagtcatccctgattcag

SEQ ID NO: 5349167 - DNA, 25 bp, Homo sapien
aaaaccaatgtctgctacattttcc

SEQ ID NO: 5349168 - DNA, 25 bp, Homo sapien
caaaaccaatgtctgctacattttc

SEQ ID NO: 5349169 - DNA, 25 bp, Homo sapien
atcaaaaccaatgtctgctacattt

SEQ ID NO: 5349170 - DNA, 25 bp, Homo sapien
tcaaaaccaatgtctgctacatttt

SEQ ID NO: 5349171 - DNA, 25 bp, Homo sapien
ataagatcttcttctctatagtttc

SEQ ID NO: 5349172 - DNA, 25 bp, Homo sapien
agacctgcagatgttgctccacagt

SEQ ID NO: 5349173 - DNA, 25 bp, Homo sapien
ttgcacaaggagcgcactgtgtgta

SEQ ID NO: 5349174 - DNA, 25 bp, Homo sapien
caaggagcgcactgtgtgtaattgt

SEQ ID NO: 5349175 - DNA, 25 bp, Homo sapien
gccattcacatcttagacctgcaga

SEQ ID NO: 5349176 - DNA, 25 bp, Homo sapien
gacacctccaacctttgctaagaac

SEQ ID NO: 5349177 - DNA, 25 bp, Homo sapien
cagttgccttcccacaggcctcaca

SEQ ID NO: 5349178 - DNA, 25 bp, Homo sapien
tgtctgcaatggagggtctaggcag

SEQ ID NO: 5349179 - DNA, 25 bp, Homo sapien
gagggtctaggcagtaggtgtgata

SEQ ID NO: 5349180 - DNA, 25 bp, Homo sapien
gcaaaaggctcaaagacaagtgaag

SEQ ID NO: 5349181 - DNA, 25 bp, Homo sapien
tgtaagctgcacaattaccagagct

SEQ ID NO: 5349182 - DNA, 25 bp, Homo sapien
agaagcccaaagacccacaaccagg

SEQ ID NO: 5349183 - DNA, 25 bp, Homo sapien
tgaagcacaaccagtcagagtacaa

SEQ ID NO: 5349184 - DNA, 25 bp, Homo sapien
gtatggatggtaacactgaccacac

SEQ ID NO: 5349185 - DNA, 25 bp, Homo sapien
cagtatggatggtaacactgaccac

SEQ ID NO: 5349186 - DNA, 25 bp, Homo sapien
cacagtatggatggtaacactgacc

SEQ ID NO: 5349187 - DNA, 25 bp, Homo sapien
atggatggtaacactgaccacactg

SEQ ID NO: 5349188 - DNA, 25 bp, Homo sapien
aacacaaccatatcgagcacagagt

SEQ ID NO: 5349189 - DNA, 25 bp, Homo sapien
caaccatatcgagcacagagttttc

SEQ ID NO: 5349190 - DNA, 25 bp, Homo sapien
accatatcgagcacagagttttctt

SEQ ID NO: 5349191 - DNA, 25 bp, Homo sapien
catatcgagcacagagttttcttca

SEQ ID NO: 5349192 - DNA, 25 bp, Homo sapien
aacagctccgattccacttttcagc

SEQ ID NO: 5349193 - DNA, 25 bp, Homo sapien
caacagctccgattccacttttcag

SEQ ID NO: 5349194 - DNA, 25 bp, Homo sapien
tacaacagctccgattccacttttc

SEQ ID NO: 5349195 - DNA, 25 bp, Homo sapien
aatacaacagctccgattccacttt

SEQ ID NO: 5349196 - DNA, 25 bp, Homo sapien
cttagaatcatactttcgggctgtc

SEQ ID NO: 5349197 - DNA, 25 bp, Homo sapien
ccttagaatcatactttcgggctgt

SEQ ID NO: 5349198 - DNA, 25 bp, Homo sapien
tagaatcatactttcgggctgtcac

SEQ ID NO: 5349199 - DNA, 25 bp, Homo sapien
aaccttagaatcatactttcgggct

SEQ ID NO: 5349200 - DNA, 25 bp, Homo sapien
cattttgatgctccaaatggcactg

SEQ ID NO: 5349201 - DNA, 25 bp, Homo sapien
caggaagctgcctgggtttaaaaat

SEQ ID NO: 5349202 - DNA, 25 bp, Homo sapien
aaatggcactgccaggaagctgcct

SEQ ID NO: 5349203 - DNA, 25 bp, Homo sapien
ttttgatgctccaaatggcactgcc

SEQ ID NO: 5349204 - DNA, 25 bp, Homo sapien
aatattccaaactcaatctacaggt

SEQ ID NO: 5349205 - DNA, 25 bp, Homo sapien
tattccaaactcaatctacaggtgt

SEQ ID NO: 5349206 - DNA, 25 bp, Homo sapien
atattccaaactcaatctacaggtg

SEQ ID NO: 5349207 - DNA, 25 bp, Homo sapien
ctagccaatttcctgcgcctcgtgg

SEQ ID NO: 5349208 - DNA, 25 bp, Homo sapien
tagccaatttcctgcgcctcgtggc

SEQ ID NO: 5349209 - DNA, 25 bp, Homo sapien
agccaatttcctgcgcctcgtggcg

SEQ ID NO: 5349210 - DNA, 25 bp, Homo sapien
cagctatgggagcaaagtcttcctg

SEQ ID NO: 5349211 - DNA, 25 bp, Homo sapien
ggaggaggcagctttgacttcatca

SEQ ID NO: 5349212 - DNA, 25 bp, Homo sapien
tccgcttcctgttcgccagctatgg

SEQ ID NO: 5349213 - DNA, 25 bp, Homo sapien
atccagggatggagaatcgccgggc

SEQ ID NO: 5349214 - DNA, 25 bp, Homo sapien
gggctcgggacccactgcagcctgt

SEQ ID NO: 5349215 - DNA, 25 bp, Homo sapien
tcggcagccgcgatcttggtcagga

SEQ ID NO: 5349216 - DNA, 25 bp, Homo sapien
ctcggcagccgcgatcttggtcagg

SEQ ID NO: 5349217 - DNA, 25 bp, Homo sapien
ggcagccgcgatcttggtcaggacc

SEQ ID NO: 5349218 - DNA, 25 bp, Homo sapien
cagttgcgtccttgcaggaggacac

SEQ ID NO: 5349219 - DNA, 25 bp, Homo sapien
agttgcgtccttgcaggaggacact

SEQ ID NO: 5349220 - DNA, 25 bp, Homo sapien
tcacagttaaggtgaaaaccttagc

SEQ ID NO: 5349221 - DNA, 25 bp, Homo sapien
gttgcgtccttgcaggaggacactg

SEQ ID NO: 5349222 - DNA, 25 bp, Homo sapien
aaattcaattccctttgagggcact

SEQ ID NO: 5349223 - DNA, 25 bp, Homo sapien
aaaacatctgaagtaatccgctaag

SEQ ID NO: 5349224 - DNA, 25 bp, Homo sapien
tcaatggaagccttgctgcggtccc

SEQ ID NO: 5349225 - DNA, 25 bp, Homo sapien
gggcttcaatggaagccttgctgcg

SEQ ID NO: 5349226 - DNA, 25 bp, Homo sapien
gccgtcgatgtcgtgcagtttggtt

SEQ ID NO: 5349227 - DNA, 25 bp, Homo sapien
cagtaggttttgctcagatactgaa

SEQ ID NO: 5349228 - DNA, 25 bp, Homo sapien
tagtacatgtagcagcccgtggaag

SEQ ID NO: 5349229 - DNA, 25 bp, Homo sapien
agcagcccgtggaagggtcctgtgc

SEQ ID NO: 5349230 - DNA, 25 bp, Homo sapien
gaggtccccgtggtattccaccaca

SEQ ID NO: 5349231 - DNA, 25 bp, Homo sapien
tgcttggtggcaatcacacccctgc

SEQ ID NO: 5349232 - DNA, 25 bp, Homo sapien
tgcctttgccatcgatgaggtcaat

SEQ ID NO: 5349233 - DNA, 25 bp, Homo sapien
gcgtcggtgatctcgatgaggtccc

SEQ ID NO: 5349234 - DNA, 25 bp, Homo sapien
catagattcttagccctgctctggt

SEQ ID NO: 5349235 - DNA, 25 bp, Homo sapien
agcttctgccacaaggtggctctaa

SEQ ID NO: 5349236 - DNA, 25 bp, Homo sapien
tggtagaggttcctcaagacacagt

SEQ ID NO: 5349237 - DNA, 25 bp, Homo sapien
tgctgatggtgtagaagttttatct

SEQ ID NO: 5349238 - DNA, 25 bp, Homo sapien
ggagcccttagaacgtagacccaga

SEQ ID NO: 5349239 - DNA, 25 bp, Homo sapien
agcaacagtgggcttattacacagg

SEQ ID NO: 5349240 - DNA, 25 bp, Homo sapien
tagacccagacacacgatgcgtgca

SEQ ID NO: 5349241 - DNA, 25 bp, Homo sapien
gggcttattacacaggtggaacctc

SEQ ID NO: 5349242 - DNA, 25 bp, Homo sapien
gcttgattttatactcagttaatgg

SEQ ID NO: 5349243 - DNA, 25 bp, Homo sapien
tcccattatgcataaagtggttaca

SEQ ID NO: 5349244 - DNA, 25 bp, Homo sapien
gttaatggcatgcttaatggagaga

SEQ ID NO: 5349245 - DNA, 25 bp, Homo sapien
gtagtttacataattgcagcttgat

SEQ ID NO: 5349246 - DNA, 25 bp, Homo sapien
aagccaacctgtgccggccttctac

SEQ ID NO: 5349247 - DNA, 25 bp, Homo sapien
ccactattttgccccgcgtcgccgc

SEQ ID NO: 5349248 - DNA, 25 bp, Homo sapien
gcggctttttgcgcgccttggcttt

SEQ ID NO: 5349249 - DNA, 25 bp, Homo sapien
cacggcttttagttccctgccgccg

SEQ ID NO: 5349250 - DNA, 25 bp, Homo sapien
cgcctcgggtttatgcctaccacgg

SEQ ID NO: 5349251 - DNA, 25 bp, Homo sapien
ggctttttgaccctcatcgccgcag

SEQ ID NO: 5349252 - DNA, 25 bp, Homo sapien
gccgccgtggctttttgccccatgg

SEQ ID NO: 5349253 - DNA, 25 bp, Homo sapien
ccgtggctttttgccccatggccat

SEQ ID NO: 5349254 - DNA, 25 bp, Homo sapien
cggcggcggctctttgcacccccgc

SEQ ID NO: 5349255 - DNA, 25 bp, Homo sapien
ggcggcggctctttgcacccccgcc

SEQ ID NO: 5349256 - DNA, 25 bp, Homo sapien
ggtggttcgaggtatgacattttga

SEQ ID NO: 5349257 - DNA, 25 bp, Homo sapien
tggttcgaggtatgacattttgaaa

SEQ ID NO: 5349258 - DNA, 25 bp, Homo sapien
gctgagaaagcattatatggtggca

SEQ ID NO: 5349259 - DNA, 25 bp, Homo sapien
ggtggtggttcgaggtatgacattt

SEQ ID NO: 5349260 - DNA, 25 bp, Homo sapien
taagctccttaggacagcatacacg

SEQ ID NO: 5349261 - DNA, 25 bp, Homo sapien
attagccaccgacaccagacagtct

SEQ ID NO: 5349262 - DNA, 25 bp, Homo sapien
gctcagatcttgtcattggctccca

SEQ ID NO: 5349263 - DNA, 25 bp, Homo sapien
cgttgcttagcctaggtgtaatcca

SEQ ID NO: 5349264 - DNA, 25 bp, Homo sapien
agatgtctctgcaatataatgcttt

SEQ ID NO: 5349265 - DNA, 25 bp, Homo sapien
gcagatgtctctgcaatataatgct

SEQ ID NO: 5349266 - DNA, 25 bp, Homo sapien
cagatgtctctgcaatataatgctt

SEQ ID NO: 5349267 - DNA, 25 bp, Homo sapien
tgcagatgtctctgcaatataatgc

SEQ ID NO: 5349268 - DNA, 25 bp, Homo sapien
taatttgcataccatgtatctgaca

SEQ ID NO: 5349269 - DNA, 25 bp, Homo sapien
tcttgagaccttgggctaggcaaat

SEQ ID NO: 5349270 - DNA, 25 bp, Homo sapien
atttttaggcttgatgtcgaaaaca

SEQ ID NO: 5349271 - DNA, 25 bp, Homo sapien
gcttgatgtcgaaaacaaaatctac

SEQ ID NO: 5349272 - DNA, 25 bp, Homo sapien
caaggacgcaggcattgccctgctc

SEQ ID NO: 5349273 - DNA, 25 bp, Homo sapien
catcgacgtggaaggcaagatcttc

SEQ ID NO: 5349274 - DNA, 25 bp, Homo sapien
ccaagtacgccctcctggatgaatg

SEQ ID NO: 5349275 - DNA, 25 bp, Homo sapien
tgcaccagtgctgtgagcatcgacg

SEQ ID NO: 5349276 - DNA, 25 bp, Homo sapien
cacacacttgctacagttcgatggg

SEQ ID NO: 5349277 - DNA, 25 bp, Homo sapien
cacacacacttgctacagttcgatg

SEQ ID NO: 5349278 - DNA, 25 bp, Homo sapien
acacacacttgctacagttcgatgg

SEQ ID NO: 5349279 - DNA, 25 bp, Homo sapien
gctgagagtgtggagtatgttctcc

SEQ ID NO: 5349280 - DNA, 25 bp, Homo sapien
tctcccaagtggttagtgctgagag

SEQ ID NO: 5349281 - DNA, 25 bp, Homo sapien
ttctcccaagtggttagtgctgaga

SEQ ID NO: 5349282 - DNA, 25 bp, Homo sapien
gtggagtatgttctccaggatcagc

SEQ ID NO: 5349283 - DNA, 25 bp, Homo sapien
gcactttcagaaatgaatggtagaa

SEQ ID NO: 5349284 - DNA, 25 bp, Homo sapien
caatgcaaaggttatgaaggatggt

SEQ ID NO: 5349285 - DNA, 25 bp, Homo sapien
tggttgtcacaacaaagggtttgat

SEQ ID NO: 5349286 - DNA, 25 bp, Homo sapien
aatggtagaattgtgggcactgagc

SEQ ID NO: 5349287 - DNA, 25 bp, Homo sapien
gttctaatgttgacaattgcagttt

SEQ ID NO: 5349288 - DNA, 25 bp, Homo sapien
atgatgttctaatgttgacaattgc

SEQ ID NO: 5349289 - DNA, 25 bp, Homo sapien
tgttgacaattgcagttttatttta

SEQ ID NO: 5349290 - DNA, 25 bp, Homo sapien
gttgacaattgcagttttattttac

SEQ ID NO: 5349291 - DNA, 25 bp, Homo sapien
gcccataagtagagctccatttgga

SEQ ID NO: 5349292 - DNA, 25 bp, Homo sapien
gaatgcccataagtagagctccatt

SEQ ID NO: 5349293 - DNA, 25 bp, Homo sapien
cataagtagagctccatttggagct

SEQ ID NO: 5349294 - DNA, 25 bp, Homo sapien
cagaatgcccataagtagagctcca

SEQ ID NO: 5349295 - DNA, 25 bp, Homo sapien
cttagttgcctttatcgtgtaccag

SEQ ID NO: 5349296 - DNA, 25 bp, Homo sapien
gcttagttgcctttatcgtgtacca

SEQ ID NO: 5349297 - DNA, 25 bp, Homo sapien
ttgcttagttgcctttatcgtgtac

SEQ ID NO: 5349298 - DNA, 25 bp, Homo sapien
gttttgcttagttgcctttatcgtg

SEQ ID NO: 5349299 - DNA, 25 bp, Homo sapien
ttcctggaaccagcttgatattctt

SEQ ID NO: 5349300 - DNA, 25 bp, Homo sapien
cctggaaccagcttgatattctttg

SEQ ID NO: 5349301 - DNA, 25 bp, Homo sapien
gccagttcctggaaccagcttgata

SEQ ID NO: 5349302 - DNA, 25 bp, Homo sapien
agttcctggaaccagcttgatattc

SEQ ID NO: 5349303 - DNA, 25 bp, Homo sapien
taaaattcgaacacataatgccaaa

SEQ ID NO: 5349304 - DNA, 25 bp, Homo sapien
gatatgtggttaaaattcgaacaca

SEQ ID NO: 5349305 - DNA, 25 bp, Homo sapien
tttgggcatccatgctaaagcaata

SEQ ID NO: 5349306 - DNA, 25 bp, Homo sapien
ttgggcatccatgctaaagcaataa

SEQ ID NO: 5349307 - DNA, 25 bp, Homo sapien
atacttctgctccaactaaaccaaa

SEQ ID NO: 5349308 - DNA, 25 bp, Homo sapien
tacttctgctccaactaaaccaaaa

SEQ ID NO: 5349309 - DNA, 25 bp, Homo sapien
gcataatcctccagatccatgtaaa

SEQ ID NO: 5349310 - DNA, 25 bp, Homo sapien
tgtgcataatcctccagatccatgt

SEQ ID NO: 5349311 - DNA, 25 bp, Homo sapien
taatcctccagatccatgtaaacca

SEQ ID NO: 5349312 - DNA, 25 bp, Homo sapien
tcctccagatccatgtaaaccaata

SEQ ID NO: 5349313 - DNA, 25 bp, Homo sapien
agtcaaaacaaggaatcctctcttc

SEQ ID NO: 5349314 - DNA, 25 bp, Homo sapien
tacatacgttccctatagaggctat

SEQ ID NO: 5349315 - DNA, 25 bp, Homo sapien
tacgttccctatagaggctatggcg

SEQ ID NO: 5349316 - DNA, 25 bp, Homo sapien
ccctatagaggctatggcgttatta

SEQ ID NO: 5349317 - DNA, 25 bp, Homo sapien
taatacatacgttccctatagaggc

SEQ ID NO: 5349318 - DNA, 25 bp, Homo sapien
tgtcatccatactgctagcagccat

SEQ ID NO: 5349319 - DNA, 25 bp, Homo sapien
gtcatccatactgctagcagccatt

SEQ ID NO: 5349320 - DNA, 25 bp, Homo sapien
tcatccatactgctagcagccatta

SEQ ID NO: 5349321 - DNA, 25 bp, Homo sapien
gaacaacaacagcaggagagacagc

SEQ ID NO: 5349322 - DNA, 25 bp, Homo sapien
aggagagacagcacctagaacaaaa

SEQ ID NO: 5349323 - DNA, 25 bp, Homo sapien
taaagaacaacaacagcaggagaga

SEQ ID NO: 5349324 - DNA, 25 bp, Homo sapien
cgtgtaaagaacaacaacagcagga

SEQ ID NO: 5349325 - DNA, 25 bp, Homo sapien
tagccaatctgaaacaaaccacctt

SEQ ID NO: 5349326 - DNA, 25 bp, Homo sapien
aatagaattgcccattgccaggaaa

SEQ ID NO: 5349327 - DNA, 25 bp, Homo sapien
ttgcctccataaggcatggacctat

SEQ ID NO: 5349328 - DNA, 25 bp, Homo sapien
ggacctatagccaatctgaaacaaa

SEQ ID NO: 5349329 - DNA, 25 bp, Homo sapien
taattatttgtgctcgagctatttc

SEQ ID NO: 5349330 - DNA, 25 bp, Homo sapien
ttatttgtgctcgagctatttctat

SEQ ID NO: 5349331 - DNA, 25 bp, Homo sapien
atttgtgctcgagctatttctatta

SEQ ID NO: 5349332 - DNA, 25 bp, Homo sapien
tataattatttgtgctcgagctatt

SEQ ID NO: 5349333 - DNA, 25 bp, Homo sapien
gatggaatttatgatccctagaatg

SEQ ID NO: 5349334 - DNA, 25 bp, Homo sapien
cttatagatggaatttatgatccct

SEQ ID NO: 5349335 - DNA, 25 bp, Homo sapien
ggaatttatgatccctagaatgtaa

SEQ ID NO: 5349336 - DNA, 25 bp, Homo sapien
aataatgcaaagataatcaggaaca

SEQ ID NO: 5349337 - DNA, 25 bp, Homo sapien
gaacattcctaattgtaaaaccagc

SEQ ID NO: 5349338 - DNA, 25 bp, Homo sapien
caagcccagctcgtattagaataat

SEQ ID NO: 5349339 - DNA, 25 bp, Homo sapien
gttcattgatgaatggaacattcct

SEQ ID NO: 5349340 - DNA, 25 bp, Homo sapien
taaaattgaagaccatgcgttagga

SEQ ID NO: 5349341 - DNA, 25 bp, Homo sapien
ttatgttgtaatatacaggtcagag

SEQ ID NO: 5349342 - DNA, 25 bp, Homo sapien
gcatttgttgcttgctggagtagtc

SEQ ID NO: 5349343 - DNA, 25 bp, Homo sapien
gttgtaatatacaggtcagagtgca

SEQ ID NO: 5349344 - DNA, 25 bp, Homo sapien
tgctggagtagtcaagctttatttc

SEQ ID NO: 5349345 - DNA, 25 bp, Homo sapien
ttaaatataggcctgattaggcttg

SEQ ID NO: 5349346 - DNA, 25 bp, Homo sapien
gattaggcttgtggccactctgttt

SEQ ID NO: 5349347 - DNA, 25 bp, Homo sapien
aatataggcctgattaggcttgtgg

SEQ ID NO: 5349348 - DNA, 25 bp, Homo sapien
ataggcctgattaggcttgtggcca

SEQ ID NO: 5349349 - DNA, 25 bp, Homo sapien
aagagatggacttttgagagtgaca

SEQ ID NO: 5349350 - DNA, 25 bp, Homo sapien
ccaagagatggacttttgagagtga

SEQ ID NO: 5349351 - DNA, 25 bp, Homo sapien
tgccaagagatggacttttgagagt

SEQ ID NO: 5349352 - DNA, 25 bp, Homo sapien
tcactgaagggctgccaagagatgg

SEQ ID NO: 5349353 - DNA, 25 bp, Homo sapien
tgcaagataattgagatcctaagta

SEQ ID NO: 5349354 - DNA, 25 bp, Homo sapien
aagataattgagatcctaagtaagg

SEQ ID NO: 5349355 - DNA, 25 bp, Homo sapien
gcaagataattgagatcctaagtaa

SEQ ID NO: 5349356 - DNA, 25 bp, Homo sapien
ctgcaagataattgagatcctaagt

SEQ ID NO: 5349357 - DNA, 25 bp, Homo sapien
catgaaacacctgtaatgctttgtt

SEQ ID NO: 5349358 - DNA, 25 bp, Homo sapien
cccggaaggatttgaagagctgcat

SEQ ID NO: 5349359 - DNA, 25 bp, Homo sapien
tagacctgagctctgggatattgtg

SEQ ID NO: 5349360 - DNA, 25 bp, Homo sapien
tattgtgggcttaagtacttctgaa

SEQ ID NO: 5349361 - DNA, 25 bp, Homo sapien
tgacccactgagagcttttaggcat

SEQ ID NO: 5349362 - DNA, 25 bp, Homo sapien
gaggctgtgattgacccactgagag

SEQ ID NO: 5349363 - DNA, 25 bp, Homo sapien
ggatctgggatgctaattcagaaac

SEQ ID NO: 5349364 - DNA, 25 bp, Homo sapien
gaaactcttgactgctggaggctgt

SEQ ID NO: 5349365 - DNA, 25 bp, Homo sapien
ccttcagtgggccagtgtctctgtg

SEQ ID NO: 5349366 - DNA, 25 bp, Homo sapien
gctttgagtcatcacttacacagtg

SEQ ID NO: 5349367 - DNA, 25 bp, Homo sapien
tgccctccagctttcaaagtgcttt

SEQ ID NO: 5349368 - DNA, 25 bp, Homo sapien
agtgctttgagtcatcacttacaca

SEQ ID NO: 5349369 - DNA, 25 bp, Homo sapien
tctgttgacagtaataagctgcaaa

SEQ ID NO: 5349370 - DNA, 25 bp, Homo sapien
tgtgggaggggtactgtcactctgt

SEQ ID NO: 5349371 - DNA, 25 bp, Homo sapien
tgttatgacttgtaacactgtggga

SEQ ID NO: 5349372 - DNA, 25 bp, Homo sapien
gagagtgtaatctgccccagatcca

SEQ ID NO: 5349373 - DNA, 25 bp, Homo sapien
gaaccgagagggaatcccactttgc

SEQ ID NO: 5349374 - DNA, 25 bp, Homo sapien
actgaaccgagagggaatcccactt

SEQ ID NO: 5349375 - DNA, 25 bp, Homo sapien
gtcactgaaccgagagggaatccca

SEQ ID NO: 5349376 - DNA, 25 bp, Homo sapien
tgtcactgaaccgagagggaatccc

SEQ ID NO: 5349377 - DNA, 25 bp, Homo sapien
ggagactgggtcatctggatgtcac

SEQ ID NO: 5349378 - DNA, 25 bp, Homo sapien
gagactgggtcatctggatgtcaca

SEQ ID NO: 5349379 - DNA, 25 bp, Homo sapien
actgggtcatctggatgtcacatct

SEQ ID NO: 5349380 - DNA, 25 bp, Homo sapien
ggtcatctggatgtcacatctggca

SEQ ID NO: 5349381 - DNA, 25 bp, Homo sapien
gggccctcacgtccgtgctgtgtcc

SEQ ID NO: 5349382 - DNA, 25 bp, Homo sapien
ggggccctcacgtccgtgctgtgtc

SEQ ID NO: 5349383 - DNA, 25 bp, Homo sapien
gggggccctcacgtccgtgctgtgt

SEQ ID NO: 5349384 - DNA, 25 bp, Homo sapien
gagtaatgctctgagctgcgctccc

SEQ ID NO: 5349385 - DNA, 25 bp, Homo sapien
tcaaagtaggatgacaaaggccaca

SEQ ID NO: 5349386 - DNA, 25 bp, Homo sapien
atgacaaaggccacatcccctgagt

SEQ ID NO: 5349387 - DNA, 25 bp, Homo sapien
cacatcccctgagtaatgctctgag

SEQ ID NO: 5349388 - DNA, 25 bp, Homo sapien
ctcaggagcatctgccctagagtct

SEQ ID NO: 5349389 - DNA, 25 bp, Homo sapien
tcaggagcatctgccctagagtctg

SEQ ID NO: 5349390 - DNA, 25 bp, Homo sapien
ggagcatctgccctagagtctggct

SEQ ID NO: 5349391 - DNA, 25 bp, Homo sapien
agcatctgccctagagtctggcttt

SEQ ID NO: 5349392 - DNA, 25 bp, Homo sapien
tggatctctgggaaatggctactga

SEQ ID NO: 5349393 - DNA, 25 bp, Homo sapien
gatacatctctggattcaaatgcac

SEQ ID NO: 5349394 - DNA, 25 bp, Homo sapien
gctgccaggatccatatatccagat

SEQ ID NO: 5349395 - DNA, 25 bp, Homo sapien
tctttgtgcataattttagcagtca

SEQ ID NO: 5349396 - DNA, 25 bp, Homo sapien
tgtctcctgttgtcatgcacaagga

SEQ ID NO: 5349397 - DNA, 25 bp, Homo sapien
gcagggctgcttacagaccttctat

SEQ ID NO: 5349398 - DNA, 25 bp, Homo sapien
cagtgggtgatatgacagcacagag

SEQ ID NO: 5349399 - DNA, 25 bp, Homo sapien
tgctcagaacctggcttgcagggct

SEQ ID NO: 5349400 - DNA, 25 bp, Homo sapien
ctaaaggagttgatcagaagcagca

SEQ ID NO: 5349401 - DNA, 25 bp, Homo sapien
ttgaattgaagtagccatatacagc

SEQ ID NO: 5349402 - DNA, 25 bp, Homo sapien
tccctcctaggttgagtgaacttag

SEQ ID NO: 5349403 - DNA, 25 bp, Homo sapien
ccctcctgtggtgtgatatttcgtt

SEQ ID NO: 5349404 - DNA, 25 bp, Homo sapien
tatgttaagtgcacaaaaggacaaa

SEQ ID NO: 5349405 - DNA, 25 bp, Homo sapien
actcataactggacaccaaattttc

SEQ ID NO: 5349406 - DNA, 25 bp, Homo sapien
gcattatgttaagtgcacaaaagga

SEQ ID NO: 5349407 - DNA, 25 bp, Homo sapien
actttatgcataatgggattttgga

SEQ ID NO: 5349408 - DNA, 25 bp, Homo sapien
agcaaacacaaatccagtggtgaaa

SEQ ID NO: 5349409 - DNA, 25 bp, Homo sapien
tggagcaaacacaaatccagtggtg

SEQ ID NO: 5349410 - DNA, 25 bp, Homo sapien
ggagcaaacacaaatccagtggtga

SEQ ID NO: 5349411 - DNA, 25 bp, Homo sapien
gagcaaacacaaatccagtggtgaa

SEQ ID NO: 5349412 - DNA, 25 bp, Homo sapien
aaaatatgtggtgtacaggcataga

SEQ ID NO: 5349413 - DNA, 25 bp, Homo sapien
cactctgacaataatgaacaggggg

SEQ ID NO: 5349414 - DNA, 25 bp, Homo sapien
ctctgacaataatgaacagggggat

SEQ ID NO: 5349415 - DNA, 25 bp, Homo sapien
gaaaatatgtggtgtacaggcatag

SEQ ID NO: 5349416 - DNA, 25 bp, Homo sapien
ggggttgtggatgcttaacatgtgc

SEQ ID NO: 5349417 - DNA, 25 bp, Homo sapien
agatgcctggtgactgttgcctgac

SEQ ID NO: 5349418 - DNA, 25 bp, Homo sapien
aacatctgttgagactaggagatgc

SEQ ID NO: 5349419 - DNA, 25 bp, Homo sapien
tgcctggtgactgttgcctgacctg

SEQ ID NO: 5349420 - DNA, 25 bp, Homo sapien
tctttaccggtggtgtgaaaatgga

SEQ ID NO: 5349421 - DNA, 25 bp, Homo sapien
atgtctttaccggtggtgtgaaaat

SEQ ID NO: 5349422 - DNA, 25 bp, Homo sapien
gggcatgtctttaccggtggtgtga

SEQ ID NO: 5349423 - DNA, 25 bp, Homo sapien
ggcatgtctttaccggtggtgtgaa

SEQ ID NO: 5349424 - DNA, 25 bp, Homo sapien
ttgactcccgctgcaaccgagcagg

SEQ ID NO: 5349425 - DNA, 25 bp, Homo sapien
tgactcccgctgcaaccgagcaggt

SEQ ID NO: 5349426 - DNA, 25 bp, Homo sapien
ggtgagtcaggtaggttgtatccaa

SEQ ID NO: 5349427 - DNA, 25 bp, Homo sapien
agtcaggtaggttgtatccaacggt

SEQ ID NO: 5349428 - DNA, 25 bp, Homo sapien
tcaaatagcgcattttttcacagac

SEQ ID NO: 5349429 - DNA, 25 bp, Homo sapien
caagtatcaattttttcgtatggcc

SEQ ID NO: 5349430 - DNA, 25 bp, Homo sapien
tcaacgttctagttctgccatacca

SEQ ID NO: 5349431 - DNA, 25 bp, Homo sapien
aggttcaaaagttggcagtctctct

SEQ ID NO: 5349432 - DNA, 25 bp, Homo sapien
ttttcagcggcctaatacgcatgta

SEQ ID NO: 5349433 - DNA, 25 bp, Homo sapien
tctcctcgtcttggtactgagccct

SEQ ID NO: 5349434 - DNA, 25 bp, Homo sapien
cattgtgaggccaagtctctcctcg

SEQ ID NO: 5349435 - DNA, 25 bp, Homo sapien
gccaagtctctcctcgtcttggtac

SEQ ID NO: 5349436 - DNA, 25 bp, Homo sapien
tggtactgagccctccgttctgcct

SEQ ID NO: 5349437 - DNA, 25 bp, Homo sapien
cgggtttctcccgccacagattttg

SEQ ID NO: 5349438 - DNA, 25 bp, Homo sapien
gctgcgggtttctcccgccacagat

SEQ ID NO: 5349439 - DNA, 25 bp, Homo sapien
gccgctgcgggtttctcccgccaca

SEQ ID NO: 5349440 - DNA, 25 bp, Homo sapien
ggtttctcccgccacagattttgcc

SEQ ID NO: 5349441 - DNA, 25 bp, Homo sapien
cccgccaatatggctttttgctgct

SEQ ID NO: 5349442 - DNA, 25 bp, Homo sapien
ccccgccaatatggctttttgctgc

SEQ ID NO: 5349443 - DNA, 25 bp, Homo sapien
gccgctgctgctttttggggctttt

SEQ ID NO: 5349444 - DNA, 25 bp, Homo sapien
ggctttttgctcctgctgctgaggc

SEQ ID NO: 5349445 - DNA, 25 bp, Homo sapien
ctgctgctgaggctttttgccgccg

SEQ ID NO: 5349446 - DNA, 25 bp, Homo sapien
cccgccgctgctgctttttggggct

SEQ ID NO: 5349447 - DNA, 25 bp, Homo sapien
ttgcctgcgccaccacggctttatg

SEQ ID NO: 5349448 - DNA, 25 bp, Homo sapien
ttgccccacaactacggctttttgc

SEQ ID NO: 5349449 - DNA, 25 bp, Homo sapien
ccaccacggctttatgcccctgccg

SEQ ID NO: 5349450 - DNA, 25 bp, Homo sapien
ttttgcctgcgccaccacggcttta

SEQ ID NO: 5349451 - DNA, 25 bp, Homo sapien
cgcggctttttgtgcccgcagccgt

SEQ ID NO: 5349452 - DNA, 25 bp, Homo sapien
tttttgtgcccgcagccgtggcttt

SEQ ID NO: 5349453 - DNA, 25 bp, Homo sapien
ctttttgtgcccgcagccgtggctt

SEQ ID NO: 5349454 - DNA, 25 bp, Homo sapien
ttttgtgcccgcagccgtggctttt

SEQ ID NO: 5349455 - DNA, 25 bp, Homo sapien
attttactatccgccacggtggctt

SEQ ID NO: 5349456 - DNA, 25 bp, Homo sapien
ggcattttactatccgccacggtgg

SEQ ID NO: 5349457 - DNA, 25 bp, Homo sapien
gcattttactatccgccacggtggc

SEQ ID NO: 5349458 - DNA, 25 bp, Homo sapien
gcggcattttactatccgccacggt

SEQ ID NO: 5349459 - DNA, 25 bp, Homo sapien
cattggtgtattctcataaccttga

SEQ ID NO: 5349460 - DNA, 25 bp, Homo sapien
accttgaaacactaacgtcacgttg

SEQ ID NO: 5349461 - DNA, 25 bp, Homo sapien
cataaccttgaaacactaacgtcac

SEQ ID NO: 5349462 - DNA, 25 bp, Homo sapien
catcattggtgtattctcataacct

SEQ ID NO: 5349463 - DNA, 25 bp, Homo sapien
atatcttcccacaaaaactacacag

SEQ ID NO: 5349464 - DNA, 25 bp, Homo sapien
cccacaaaaactacacagaagcatt

SEQ ID NO: 5349465 - DNA, 25 bp, Homo sapien
gaaatatcttcccacaaaaactaca

SEQ ID NO: 5349466 - DNA, 25 bp, Homo sapien
ttcccacaaaaactacacagaagca

SEQ ID NO: 5349467 - DNA, 25 bp, Homo sapien
gtgcgccctcaactaacagtgttga

SEQ ID NO: 5349468 - DNA, 25 bp, Homo sapien
gcgccctcaactaacagtgttgaac

SEQ ID NO: 5349469 - DNA, 25 bp, Homo sapien
gattgtcttcatataaactctagac

SEQ ID NO: 5349470 - DNA, 25 bp, Homo sapien
tgcgccctcaactaacagtgttgaa

SEQ ID NO: 5349471 - DNA, 25 bp, Homo sapien
agcagacagcagcattcccagaaac

SEQ ID NO: 5349472 - DNA, 25 bp, Homo sapien
ttccctttcatagagcaggtttgaa

SEQ ID NO: 5349473 - DNA, 25 bp, Homo sapien
aaaagcagacagcagcattcccaga

SEQ ID NO: 5349474 - DNA, 25 bp, Homo sapien
ttttgtagtatctggatgtggacat

SEQ ID NO: 5349475 - DNA, 25 bp, Homo sapien
aacagaattgaaccatcgttttgaa

SEQ ID NO: 5349476 - DNA, 25 bp, Homo sapien
tcaactaacagaattgaaccatcgt

SEQ ID NO: 5349477 - DNA, 25 bp, Homo sapien
actaacagaattgaaccatcgtttt

SEQ ID NO: 5349478 - DNA, 25 bp, Homo sapien
caactaacagaattgaaccatcgtt

SEQ ID NO: 5349479 - DNA, 25 bp, Homo sapien
tgatgtgcgccctcaactaacagtg

SEQ ID NO: 5349480 - DNA, 25 bp, Homo sapien
tatttgtgatgtgcgccctcaacta

SEQ ID NO: 5349481 - DNA, 25 bp, Homo sapien
tgcgccctcaactaacagtgttgaa

SEQ ID NO: 5349482 - DNA, 25 bp, Homo sapien
cttatttgtgatgtgcgccctcaac

SEQ ID NO: 5349483 - DNA, 25 bp, Homo sapien
taacagagttgaacatttcttttga

SEQ ID NO: 5349484 - DNA, 25 bp, Homo sapien
gagttgaacatttcttttgacagaa

SEQ ID NO: 5349485 - DNA, 25 bp, Homo sapien
actaacagagttgaacatttctttt

SEQ ID NO: 5349486 - DNA, 25 bp, Homo sapien
cagagttgaacatttcttttgacag

SEQ ID NO: 5349487 - DNA, 25 bp, Homo sapien
gattacatataaaaagcagacagca

SEQ ID NO: 5349488 - DNA, 25 bp, Homo sapien
ggattacatataaaaagcagacagc

SEQ ID NO: 5349489 - DNA, 25 bp, Homo sapien
caattgaagtcacagtgttgaacag

SEQ ID NO: 5349490 - DNA, 25 bp, Homo sapien
tcagaaacttcattgggatgtttca

SEQ ID NO: 5349491 - DNA, 25 bp, Homo sapien
tgggatgtttcaattgaagtcacag

SEQ ID NO: 5349492 - DNA, 25 bp, Homo sapien
gaagtcacagtgttgaacagtccct

SEQ ID NO: 5349493 - DNA, 25 bp, Homo sapien
gattgtcttcatataaactctagac

SEQ ID NO: 5349494 - DNA, 25 bp, Homo sapien
acactctttttgtagtatctggatg

SEQ ID NO: 5349495 - DNA, 25 bp, Homo sapien
gaacattccctttcatagagcaggt

SEQ ID NO: 5349496 - DNA, 25 bp, Homo sapien
tttgtagtatctggatgtggacatt

SEQ ID NO: 5349497 - DNA, 25 bp, Homo sapien
ttccctttcatagagcaggtttgaa

SEQ ID NO: 5349498 - DNA, 25 bp, Homo sapien
attgaaccatcggtttgaaagagca

SEQ ID NO: 5349499 - DNA, 25 bp, Homo sapien
gaattgaaccatcggtttgaaagag

SEQ ID NO: 5349500 - DNA, 25 bp, Homo sapien
gaaccatcggtttgaaagagcagtt

SEQ ID NO: 5349501 - DNA, 25 bp, Homo sapien
catcggtttgaaagagcagttttga

SEQ ID NO: 5349502 - DNA, 25 bp, Homo sapien
gattgtcttcatataaactctagac

SEQ ID NO: 5349503 - DNA, 25 bp, Homo sapien
aaacataatgtgtaatagtggaacc

SEQ ID NO: 5349504 - DNA, 25 bp, Homo sapien
acagcaaaagtctatacgggctaca

SEQ ID NO: 5349505 - DNA, 25 bp, Homo sapien
tacgggctacagaaacataatgtgt

SEQ ID NO: 5349506 - DNA, 25 bp, Homo sapien
tagtaggttcttaaatatgaatctg

SEQ ID NO: 5349507 - DNA, 25 bp, Homo sapien
tagccatcttggaactgacccagag

SEQ ID NO: 5349508 - DNA, 25 bp, Homo sapien
tgacccagagtgtaaaggtcttgag

SEQ ID NO: 5349509 - DNA, 25 bp, Homo sapien
aaggtcttgaggattctcttcatca

SEQ ID NO: 5349510 - DNA, 25 bp, Homo sapien
tcagtattacctgaatacaagcctt

SEQ ID NO: 5349511 - DNA, 25 bp, Homo sapien
aattcctcaggggtcagttccttgt

SEQ ID NO: 5349512 - DNA, 25 bp, Homo sapien
cttcaattcctcaggggtcagttcc

SEQ ID NO: 5349513 - DNA, 25 bp, Homo sapien
gggtcagttccttgtacataaataa

SEQ ID NO: 5349514 - DNA, 25 bp, Homo sapien
ctcaggggtcagttccttgtacata

SEQ ID NO: 5349515 - DNA, 25 bp, Homo sapien
ggatattctgcctcactatcagttt

SEQ ID NO: 5349516 - DNA, 25 bp, Homo sapien
ctgataacggattctttcactgtta

SEQ ID NO: 5349517 - DNA, 25 bp, Homo sapien
tcttctcttacaataagaagaccag

SEQ ID NO: 5349518 - DNA, 25 bp, Homo sapien
cctatgttctgataacggattcttt

SEQ ID NO: 5349519 - DNA, 25 bp, Homo sapien
gaacttcttcgaacattccttgcaa

SEQ ID NO: 5349520 - DNA, 25 bp, Homo sapien
tcttctacactattgcaggataatt

SEQ ID NO: 5349521 - DNA, 25 bp, Homo sapien
ccttgcaaggcatgtctactgacca

SEQ ID NO: 5349522 - DNA, 25 bp, Homo sapien
gaaatgtaggccagatgcgacggct

SEQ ID NO: 5349523 - DNA, 25 bp, Homo sapien
actgggcctccccagtagtacttgg

SEQ ID NO: 5349524 - DNA, 25 bp, Homo sapien
tcaccggagcccgagggagcgccat

SEQ ID NO: 5349525 - DNA, 25 bp, Homo sapien
tatctgtgggcccaggccgaaggcc

SEQ ID NO: 5349526 - DNA, 25 bp, Homo sapien
tgatgagcgccctgactgtatccca

SEQ ID NO: 5349527 - DNA, 25 bp, Homo sapien
gcaaaaaatccagctagtgttataa

SEQ ID NO: 5349528 - DNA, 25 bp, Homo sapien
tagtgttataaatcctgatcagctg

SEQ ID NO: 5349529 - DNA, 25 bp, Homo sapien
caagttattcatcgcagaggccagc

SEQ ID NO: 5349530 - DNA, 25 bp, Homo sapien
ctttcacatgttgcaggctgactca

SEQ ID NO: 5349531 - DNA, 25 bp, Homo sapien
gcagatataatctcaagaccttgtg

SEQ ID NO: 5349532 - DNA, 25 bp, Homo sapien
cctatcttgatcaacagccagcagc

SEQ ID NO: 5349533 - DNA, 25 bp, Homo sapien
aacacattgcagatataatctcaag

SEQ ID NO: 5349534 - DNA, 25 bp, Homo sapien
cagcctatcttgatcaacagccagc

SEQ ID NO: 5349535 - DNA, 25 bp, Homo sapien
gaagataatcgtttagcagctggga

SEQ ID NO: 5349536 - DNA, 25 bp, Homo sapien
ggaaggtactcactcacatcaaccc

SEQ ID NO: 5349537 - DNA, 25 bp, Homo sapien
taactgccacgattttcacaagtga

SEQ ID NO: 5349538 - DNA, 25 bp, Homo sapien
tcacaggacgtgtatagcttctgca

SEQ ID NO: 5349539 - DNA, 25 bp, Homo sapien
ttccagaatgcccagtaaagctgaa

SEQ ID NO: 5349540 - DNA, 25 bp, Homo sapien
tttatcatcagcataacatattttg

SEQ ID NO: 5349541 - DNA, 25 bp, Homo sapien
ttatcatcagcataacatattttgc

SEQ ID NO: 5349542 - DNA, 25 bp, Homo sapien
ttttgcttccagaatgcccagtaaa

SEQ ID NO: 5349543 - DNA, 25 bp, Homo sapien
ttcctctttcttatacagctcaatt

SEQ ID NO: 5349544 - DNA, 25 bp, Homo sapien
gaaacagaactgtttctactcctgt

SEQ ID NO: 5349545 - DNA, 25 bp, Homo sapien
cagaactgtttctactcctgtagac

SEQ ID NO: 5349546 - DNA, 25 bp, Homo sapien
aacagaactgtttctactcctgtag

SEQ ID NO: 5349547 - DNA, 25 bp, Homo sapien
cgtctgagtgtttgcactgtgtttg

SEQ ID NO: 5349548 - DNA, 25 bp, Homo sapien
cactgtgtttgaagtacgttttctt

SEQ ID NO: 5349549 - DNA, 25 bp, Homo sapien
ctgtgtttgaagtacgttttcttca

SEQ ID NO: 5349550 - DNA, 25 bp, Homo sapien
ttgcactgtgtttgaagtacgtttt

SEQ ID NO: 5349551 - DNA, 25 bp, Homo sapien
accactcttgagagtatgagtcaac

SEQ ID NO: 5349552 - DNA, 25 bp, Homo sapien
tcttgagagtatgagtcaacagaag

SEQ ID NO: 5349553 - DNA, 25 bp, Homo sapien
taacttattcttcattacctgaaaa

SEQ ID NO: 5349554 - DNA, 25 bp, Homo sapien
ttttaacttattcttcattacctga

SEQ ID NO: 5349555 - DNA, 25 bp, Homo sapien
ctctgttcccgtgaaaaataaagat

SEQ ID NO: 5349556 - DNA, 25 bp, Homo sapien
cctaaaagaacaatttctcagtgct

SEQ ID NO: 5349557 - DNA, 25 bp, Homo sapien
gaacattgtcatcctaaaagaacaa

SEQ ID NO: 5349558 - DNA, 25 bp, Homo sapien
tattcatgaatgaacattgtcatcc

SEQ ID NO: 5349559 - DNA, 25 bp, Homo sapien
aaaacatgatatccaacagatcttg

SEQ ID NO: 5349560 - DNA, 25 bp, Homo sapien
tgaaaaaacatgatatccaacagat

SEQ ID NO: 5349561 - DNA, 25 bp, Homo sapien
catgatatccaacagatcttgatcg

SEQ ID NO: 5349562 - DNA, 25 bp, Homo sapien
tatccaacagatcttgatcgcccat

SEQ ID NO: 5349563 - DNA, 25 bp, Homo sapien
atgcctagcaaagcgactataccat

SEQ ID NO: 5349564 - DNA, 25 bp, Homo sapien
ctatttgacgttccttgtgttctgg

SEQ ID NO: 5349565 - DNA, 25 bp, Homo sapien
aagcgactataccatcctatttgac

SEQ ID NO: 5349566 - DNA, 25 bp, Homo sapien
accatcctatttgacgttccttgtg

SEQ ID NO: 5349567 - DNA, 25 bp, Homo sapien
tttaaaaaggctatcagtgtgagag

SEQ ID NO: 5349568 - DNA, 25 bp, Homo sapien
ttttaaaaaggctatcagtgtgaga

SEQ ID NO: 5349569 - DNA, 25 bp, Homo sapien
tcttcagaaataactcagtccgtgc

SEQ ID NO: 5349570 - DNA, 25 bp, Homo sapien
gaaataactcagtccgtgctgtcca

SEQ ID NO: 5349571 - DNA, 25 bp, Homo sapien
tcaatgtgaaaacatcttcagaaat

SEQ ID NO: 5349572 - DNA, 25 bp, Homo sapien
cgtgctgtccagatgcagtcctgta

SEQ ID NO: 5349573 - DNA, 25 bp, Homo sapien
catcaaagtggaaaaacctctgtcc

SEQ ID NO: 5349574 - DNA, 25 bp, Homo sapien
catcttaagatttacaatagtgaga

SEQ ID NO: 5349575 - DNA, 25 bp, Homo sapien
aaacatgcacatataaggagtcatg

SEQ ID NO: 5349576 - DNA, 25 bp, Homo sapien
ttaaaagccatcttaagatttacaa

SEQ ID NO: 5349577 - DNA, 25 bp, Homo sapien
ttaagatttacaatagtgagaagcc

SEQ ID NO: 5349578 - DNA, 25 bp, Homo sapien
gagttcccaaggaatgtttcattct

SEQ ID NO: 5349579 - DNA, 25 bp, Homo sapien
ccgagttcccaaggaatgtttcatt

SEQ ID NO: 5349580 - DNA, 25 bp, Homo sapien
cgagttcccaaggaatgtttcattc

SEQ ID NO: 5349581 - DNA, 25 bp, Homo sapien
catctcaggattaaagacccagcag

SEQ ID NO: 5349582 - DNA, 25 bp, Homo sapien
catgggacaattctgtgcaggtcca

SEQ ID NO: 5349583 - DNA, 25 bp, Homo sapien
ctcagtggtgcccaaacaaacagaa

SEQ ID NO: 5349584 - DNA, 25 bp, Homo sapien
ggattaaagacccagcagcaggagg

SEQ ID NO: 5349585 - DNA, 25 bp, Homo sapien
gtgatatggactcccagatctttct

SEQ ID NO: 5349586 - DNA, 25 bp, Homo sapien
caaattctcccttgttaggcaggct

SEQ ID NO: 5349587 - DNA, 25 bp, Homo sapien
tgtctcagcaagttagtgggtgata

SEQ ID NO: 5349588 - DNA, 25 bp, Homo sapien
tgtccacaaagcctacaaattctcc

SEQ ID NO: 5349589 - DNA, 25 bp, Homo sapien
tcatggcagaattgacagagacgtc

SEQ ID NO: 5349590 - DNA, 25 bp, Homo sapien
ggcagaattgacagagacgtcatcc

SEQ ID NO: 5349591 - DNA, 25 bp, Homo sapien
cagagacgtcatcccccttcaccag

SEQ ID NO: 5349592 - DNA, 25 bp, Homo sapien
gacgtcatcccccttcaccagctgg

SEQ ID NO: 5349593 - DNA, 25 bp, Homo sapien
ggggctggggaacagccacgaggcc

SEQ ID NO: 5349594 - DNA, 25 bp, Homo sapien
tggggaacagccacgaggcctggca

SEQ ID NO: 5349595 - DNA, 25 bp, Homo sapien
gctggggaacagccacgaggcctgg

SEQ ID NO: 5349596 - DNA, 25 bp, Homo sapien
gggaacagccacgaggcctggcacc

SEQ ID NO: 5349597 - DNA, 25 bp, Homo sapien
taaaacatatacgactgtccctcct

SEQ ID NO: 5349598 - DNA, 25 bp, Homo sapien
tctaaaacatatacgactgtccctc

SEQ ID NO: 5349599 - DNA, 25 bp, Homo sapien
ctaaaacatatacgactgtccctcc

SEQ ID NO: 5349600 - DNA, 25 bp, Homo sapien
aaacatatacgactgtccctccttt

SEQ ID NO: 5349601 - DNA, 25 bp, Homo sapien
ctcctgaactaaaatcccggagaag

SEQ ID NO: 5349602 - DNA, 25 bp, Homo sapien
tgaactaaaatcccggagaagccca

SEQ ID NO: 5349603 - DNA, 25 bp, Homo sapien
tcctgaactaaaatcccggagaagc

SEQ ID NO: 5349604 - DNA, 25 bp, Homo sapien
caacaccccggcaagtgagggtgag

SEQ ID NO: 5349605 - DNA, 25 bp, Homo sapien
ccccggcaagtgagggtgaggtgct

SEQ ID NO: 5349606 - DNA, 25 bp, Homo sapien
tcaacaccccggcaagtgagggtga

SEQ ID NO: 5349607 - DNA, 25 bp, Homo sapien
acaccccggcaagtgagggtgaggt

SEQ ID NO: 5349608 - DNA, 25 bp, Homo sapien
aaagttgtgcaccaggtcataggcc

SEQ ID NO: 5349609 - DNA, 25 bp, Homo sapien
taaagttgtgcaccaggtcataggc

SEQ ID NO: 5349610 - DNA, 25 bp, Homo sapien
ctaaagttgtgcaccaggtcatagg

SEQ ID NO: 5349611 - DNA, 25 bp, Homo sapien
catctcccctcaggagtgaggtagt

SEQ ID NO: 5349612 - DNA, 25 bp, Homo sapien
ccagaaactcaggaccacactacat

SEQ ID NO: 5349613 - DNA, 25 bp, Homo sapien
gccagaaactcaggaccacactaca

SEQ ID NO: 5349614 - DNA, 25 bp, Homo sapien
cagaaactcaggaccacactacatc

SEQ ID NO: 5349615 - DNA, 25 bp, Homo sapien
agaaactcaggaccacactacatcc

SEQ ID NO: 5349616 - DNA, 25 bp, Homo sapien
catctgtagatgtttgctgcggacc

SEQ ID NO: 5349617 - DNA, 25 bp, Homo sapien
tctgtagatgtttgctgcggacctc

SEQ ID NO: 5349618 - DNA, 25 bp, Homo sapien
tagatgtttgctgcggacctcttgc

SEQ ID NO: 5349619 - DNA, 25 bp, Homo sapien
tgtagatgtttgctgcggacctctt

SEQ ID NO: 5349620 - DNA, 25 bp, Homo sapien
tgcttctggatgaaaaacaggtttc

SEQ ID NO: 5349621 - DNA, 25 bp, Homo sapien
tttggcttatttttgaagccaggga

SEQ ID NO: 5349622 - DNA, 25 bp, Homo sapien
gggaggggtaccaagctcagcttac

SEQ ID NO: 5349623 - DNA, 25 bp, Homo sapien
tggcttatttttgaagccagggagg

SEQ ID NO: 5349624 - DNA, 25 bp, Homo sapien
cgcggtgcctacattagcatctgtg

SEQ ID NO: 5349625 - DNA, 25 bp, Homo sapien
tgcctaggatgcgtgatgggctccc

SEQ ID NO: 5349626 - DNA, 25 bp, Homo sapien
aggatgcgtgatgggctcccactgc

SEQ ID NO: 5349627 - DNA, 25 bp, Homo sapien
ctgtgcctaggatgcgtgatgggct

SEQ ID NO: 5349628 - DNA, 25 bp, Homo sapien
ccagacatccagcaggagtgaccat

SEQ ID NO: 5349629 - DNA, 25 bp, Homo sapien
gtccttggttttcaccttccagaca

SEQ ID NO: 5349630 - DNA, 25 bp, Homo sapien
ttccagacatccagcaggagtgacc

SEQ ID NO: 5349631 - DNA, 25 bp, Homo sapien
ccttggttttcaccttccagacatc

SEQ ID NO: 5349632 - DNA, 25 bp, Homo sapien
gggactcccttgtacagcagctgaa

SEQ ID NO: 5349633 - DNA, 25 bp, Homo sapien
ctcccttgtacagcagctgaaacat

SEQ ID NO: 5349634 - DNA, 25 bp, Homo sapien
aaatgggactcccttgtacagcagc

SEQ ID NO: 5349635 - DNA, 25 bp, Homo sapien
cagccccacacctgaaatgggactc

SEQ ID NO: 5349636 - DNA, 25 bp, Homo sapien
ctggtgagacaggccacaggggtcc

SEQ ID NO: 5349637 - DNA, 25 bp, Homo sapien
atgtttgtcttgtgagaatctctga

SEQ ID NO: 5349638 - DNA, 25 bp, Homo sapien
cctttatgtttgtcttgtgagaatc

SEQ ID NO: 5349639 - DNA, 25 bp, Homo sapien
atctctccgaccactctggcccttc

SEQ ID NO: 5349640 - DNA, 25 bp, Homo sapien
tggcccttcctttatgtttgtcttg

SEQ ID NO: 5349641 - DNA, 25 bp, Homo sapien
ccacttttgactgggccattggaca

SEQ ID NO: 5349642 - DNA, 25 bp, Homo sapien
ttttgactgggccattggacaccac

SEQ ID NO: 5349643 - DNA, 25 bp, Homo sapien
gtccacttttgactgggccattgga

SEQ ID NO: 5349644 - DNA, 25 bp, Homo sapien
acttttgactgggccattggacacc

SEQ ID NO: 5349645 - DNA, 25 bp, Homo sapien
ccacagggaccttgataacatgcat

SEQ ID NO: 5349646 - DNA, 25 bp, Homo sapien
gctgtccacagggaccttgataaca

SEQ ID NO: 5349647 - DNA, 25 bp, Homo sapien
tgtccacagggaccttgataacatg

SEQ ID NO: 5349648 - DNA, 25 bp, Homo sapien
cagctgtccacagggaccttgataa

SEQ ID NO: 5349649 - DNA, 25 bp, Homo sapien
caagacctcactgacctggacctta

SEQ ID NO: 5349650 - DNA, 25 bp, Homo sapien
tgttccaccgatcatgaccctattg

SEQ ID NO: 5349651 - DNA, 25 bp, Homo sapien
ctgacaagcgctcactgaccacgtt

SEQ ID NO: 5349652 - DNA, 25 bp, Homo sapien
taggactccataaaccaggacttta

SEQ ID NO: 5349653 - DNA, 25 bp, Homo sapien
gctcccaaattcagtatggaaaagc

SEQ ID NO: 5349654 - DNA, 25 bp, Homo sapien
atccacccccgactgtttccaagca

SEQ ID NO: 5349655 - DNA, 25 bp, Homo sapien
atatccacccccgactgtttccaag

SEQ ID NO: 5349656 - DNA, 25 bp, Homo sapien
caagcagaaacctgaggcagaggca

SEQ ID NO: 5349657 - DNA, 25 bp, Homo sapien
ctgaagtggtgaaagaattcctgtt

SEQ ID NO: 5349658 - DNA, 25 bp, Homo sapien
ttaatttccactgaagtggtgaaag

SEQ ID NO: 5349659 - DNA, 25 bp, Homo sapien
ccactgaagtggtgaaagaattcct

SEQ ID NO: 5349660 - DNA, 25 bp, Homo sapien
aagtggtgaaagaattcctgttcct

SEQ ID NO: 5349661 - DNA, 25 bp, Homo sapien
aagagctcactgacagtgttgaagg

SEQ ID NO: 5349662 - DNA, 25 bp, Homo sapien
tggatgatgttcaggatgttggtct

SEQ ID NO: 5349663 - DNA, 25 bp, Homo sapien
gaacttccttgtgtatgtggatgat

SEQ ID NO: 5349664 - DNA, 25 bp, Homo sapien
ggtaagaacttccttgtgtatgtgg

SEQ ID NO: 5349665 - DNA, 25 bp, Homo sapien
ggcctggtccagctccaaggcctgg

SEQ ID NO: 5349666 - DNA, 25 bp, Homo sapien
tgtggtgaagtggatggcctggtcc

SEQ ID NO: 5349667 - DNA, 25 bp, Homo sapien
ctgtggtgaagtggatggcctggtc

SEQ ID NO: 5349668 - DNA, 25 bp, Homo sapien
ggtgaagtggatggcctggtccagc

SEQ ID NO: 5349669 - DNA, 25 bp, Homo sapien
tactgacaagctgctccgagtgagc

SEQ ID NO: 5349670 - DNA, 25 bp, Homo sapien
cccgggtactgacaagctgctccga

SEQ ID NO: 5349671 - DNA, 25 bp, Homo sapien
caagctgctccgagtgagcttgtct

SEQ ID NO: 5349672 - DNA, 25 bp, Homo sapien
cacaggccccgggtactgacaagct

SEQ ID NO: 5349673 - DNA, 25 bp, Homo sapien
cacctagaaaatggtccttcacgca

SEQ ID NO: 5349674 - DNA, 25 bp, Homo sapien
gagtctgatcagtcagctgtgttga

SEQ ID NO: 5349675 - DNA, 25 bp, Homo sapien
gttgagatgtgcctctcacctagaa

SEQ ID NO: 5349676 - DNA, 25 bp, Homo sapien
acggctgtgtgtctctaactgctcc

SEQ ID NO: 5349677 - DNA, 25 bp, Homo sapien
caggtcatcactgagggctcatggc

SEQ ID NO: 5349678 - DNA, 25 bp, Homo sapien
cactgagggctcatggccagcatta

SEQ ID NO: 5349679 - DNA, 25 bp, Homo sapien
ctcatggccagcattagagcttcta

SEQ ID NO: 5349680 - DNA, 25 bp, Homo sapien
gcattagagcttctataggtgttcc

SEQ ID NO: 5349681 - DNA, 25 bp, Homo sapien
gtgagtatgtgctggggagggctgg

SEQ ID NO: 5349682 - DNA, 25 bp, Homo sapien
tcttctgttggggaccagtgagtat

SEQ ID NO: 5349683 - DNA, 25 bp, Homo sapien
ctcatggaggcggcagcggttcttc

SEQ ID NO: 5349684 - DNA, 25 bp, Homo sapien
tcatggaggcggcagcggttcttct

SEQ ID NO: 5349685 - DNA, 25 bp, Homo sapien
aagtaagtagatgggagcaagtgtc

SEQ ID NO: 5349686 - DNA, 25 bp, Homo sapien
taagtagatgggagcaagtgtccaa

SEQ ID NO: 5349687 - DNA, 25 bp, Homo sapien
gagcaagtgtccaacacagcaacag

SEQ ID NO: 5349688 - DNA, 25 bp, Homo sapien
cagtggattatagagaagtaagtag

SEQ ID NO: 5349689 - DNA, 25 bp, Homo sapien
ttctctagttatctgttctacatag

SEQ ID NO: 5349690 - DNA, 25 bp, Homo sapien
tctagttatctgttctacatagtcc

SEQ ID NO: 5349691 - DNA, 25 bp, Homo sapien
tagttatctgttctacatagtccgg

SEQ ID NO: 5349692 - DNA, 25 bp, Homo sapien
gttatctgttctacatagtccggct

SEQ ID NO: 5349693 - DNA, 25 bp, Homo sapien
cataaggagctccatgctgatcgtt

SEQ ID NO: 5349694 - DNA, 25 bp, Homo sapien
gctccatgctgatcgttgctatttt

SEQ ID NO: 5349695 - DNA, 25 bp, Homo sapien
taaggagctccatgctgatcgttgc

SEQ ID NO: 5349696 - DNA, 25 bp, Homo sapien
ggagctccatgctgatcgttgctat

SEQ ID NO: 5349697 - DNA, 25 bp, Homo sapien
ttcttacttagtgaagccatattat

SEQ ID NO: 5349698 - DNA, 25 bp, Homo sapien
attatattcttctaattcggttgta

SEQ ID NO: 5349699 - DNA, 25 bp, Homo sapien
cttacttagtgaagccatattatcc

SEQ ID NO: 5349700 - DNA, 25 bp, Homo sapien
acttagtgaagccatattatccttg

SEQ ID NO: 5349701 - DNA, 25 bp, Homo sapien
ttttcatctagctccgatttatatt

SEQ ID NO: 5349702 - DNA, 25 bp, Homo sapien
actgcctgcattgccttttcatcta

SEQ ID NO: 5349703 - DNA, 25 bp, Homo sapien
ccgatttatattcttgtagtttact

SEQ ID NO: 5349704 - DNA, 25 bp, Homo sapien
ttttctactgcctgcattgcctttt

SEQ ID NO: 5349705 - DNA, 25 bp, Homo sapien
gatttaatatttcttctttcaacat

SEQ ID NO: 5349706 - DNA, 25 bp, Homo sapien
taagatttaatatttcttctttcaa

SEQ ID NO: 5349707 - DNA, 25 bp, Homo sapien
tatgtgtcttaagatttaatatttc

SEQ ID NO: 5349708 - DNA, 25 bp, Homo sapien
attgttttccatatgtgtcttaaga

SEQ ID NO: 5349709 - DNA, 25 bp, Homo sapien
tatcctcctcaagtttttcattcct

SEQ ID NO: 5349710 - DNA, 25 bp, Homo sapien
tttatcctcctcaagtttttcattc

SEQ ID NO: 5349711 - DNA, 25 bp, Homo sapien
cctcaagtttttcattcctgttgta

SEQ ID NO: 5349712 - DNA, 25 bp, Homo sapien
ctcctcaagtttttcattcctgttg

SEQ ID NO: 5349713 - DNA, 25 bp, Homo sapien
gataaagcttccttctctgccgtaa

SEQ ID NO: 5349714 - DNA, 25 bp, Homo sapien
taaagcttccttctctgccgtaaga

SEQ ID NO: 5349715 - DNA, 25 bp, Homo sapien
gaagataaagcttccttctctgccg

SEQ ID NO: 5349716 - DNA, 25 bp, Homo sapien
aagataaagcttccttctctgccgt

SEQ ID NO: 5349717 - DNA, 25 bp, Homo sapien
aagtctccatggcaatcaaagtctg

SEQ ID NO: 5349718 - DNA, 25 bp, Homo sapien
atttattgtcatttccaggagtttc

SEQ ID NO: 5349719 - DNA, 25 bp, Homo sapien
ccatggcaatcaaagtctgcatttc

SEQ ID NO: 5349720 - DNA, 25 bp, Homo sapien
gtctccatggcaatcaaagtctgca

SEQ ID NO: 5349721 - DNA, 25 bp, Homo sapien
tttctttcttattcgattcacatta

SEQ ID NO: 5349722 - DNA, 25 bp, Homo sapien
tcttattcgattcacattatacttc

SEQ ID NO: 5349723 - DNA, 25 bp, Homo sapien
tatacttcagtgatgatattaactc

SEQ ID NO: 5349724 - DNA, 25 bp, Homo sapien
cttcagtgatgatattaactcaaaa

SEQ ID NO: 5349725 - DNA, 25 bp, Homo sapien
catctcctgtgttagactaattggg

SEQ ID NO: 5349726 - DNA, 25 bp, Homo sapien
gattgaacgcatctcctgtgttaga

SEQ ID NO: 5349727 - DNA, 25 bp, Homo sapien
taaacacgtgattgaacgcatctcc

SEQ ID NO: 5349728 - DNA, 25 bp, Homo sapien
cctgtgttagactaattgggttaga

SEQ ID NO: 5349729 - DNA, 25 bp, Homo sapien
tgtgacaatgtgatataccttccag

SEQ ID NO: 5349730 - DNA, 25 bp, Homo sapien
aaattaatgtgacaatgtgatatac

SEQ ID NO: 5349731 - DNA, 25 bp, Homo sapien
taatgtgacaatgtgatataccttc

SEQ ID NO: 5349732 - DNA, 25 bp, Homo sapien
aattaatgtgacaatgtgatatacc

SEQ ID NO: 5349733 - DNA, 25 bp, Homo sapien
ttttttacgctgtcagccacttctt

SEQ ID NO: 5349734 - DNA, 25 bp, Homo sapien
ttttacgctgtcagccacttcttgt

SEQ ID NO: 5349735 - DNA, 25 bp, Homo sapien
atttttttacgctgtcagccacttc

SEQ ID NO: 5349736 - DNA, 25 bp, Homo sapien
tgttaatttttttacgctgtcagcc

SEQ ID NO: 5349737 - DNA, 25 bp, Homo sapien
gaaaatatttatcttccttgatact

SEQ ID NO: 5349738 - DNA, 25 bp, Homo sapien
gtttgaaaatatttatcttccttga

SEQ ID NO: 5349739 - DNA, 25 bp, Homo sapien
agtttgaaaatatttatcttccttg

SEQ ID NO: 5349740 - DNA, 25 bp, Homo sapien
aatatttatcttccttgatacttac

SEQ ID NO: 5349741 - DNA, 25 bp, Homo sapien
actccttctgctttctctctctcat

SEQ ID NO: 5349742 - DNA, 25 bp, Homo sapien
ctccttctgctttctctctctcata

SEQ ID NO: 5349743 - DNA, 25 bp, Homo sapien
tactccttctgctttctctctctca

SEQ ID NO: 5349744 - DNA, 25 bp, Homo sapien
tctagttgctgtacaagccacgcat

SEQ ID NO: 5349745 - DNA, 25 bp, Homo sapien
gaacgtcatctagttgctgtacaag

SEQ ID NO: 5349746 - DNA, 25 bp, Homo sapien
gtcatctagttgctgtacaagccac

SEQ ID NO: 5349747 - DNA, 25 bp, Homo sapien
catctagttgctgtacaagccacgc

SEQ ID NO: 5349748 - DNA, 25 bp, Homo sapien
ttgttcacacgtatttggacagata

SEQ ID NO: 5349749 - DNA, 25 bp, Homo sapien
cctctttataatattaggtgcagta

SEQ ID NO: 5349750 - DNA, 25 bp, Homo sapien
gagctcttcttagaatatcatgaga

SEQ ID NO: 5349751 - DNA, 25 bp, Homo sapien
atacatcaatacgaaagaaaacttt

SEQ ID NO: 5349752 - DNA, 25 bp, Homo sapien
tagtgactgaacagttggttcaagt

SEQ ID NO: 5349753 - DNA, 25 bp, Homo sapien
tggagtatttcttgcagtctttgat

SEQ ID NO: 5349754 - DNA, 25 bp, Homo sapien
agtctttgatttcatctctagtgac

SEQ ID NO: 5349755 - DNA, 25 bp, Homo sapien
ccgatttggagtatttcttgcagtc

SEQ ID NO: 5349756 - DNA, 25 bp, Homo sapien
caacttctttcttatattgtttctc

SEQ ID NO: 5349757 - DNA, 25 bp, Homo sapien
ctttcctttctaattcttctctatt

SEQ ID NO: 5349758 - DNA, 25 bp, Homo sapien
ttttgtacagcatattaacatttgt

SEQ ID NO: 5349759 - DNA, 25 bp, Homo sapien
ttttttttgtacagcatattaacat

SEQ ID NO: 5349760 - DNA, 25 bp, Homo sapien
cagcagcagaagatgtactatcaca

SEQ ID NO: 5349761 - DNA, 25 bp, Homo sapien
tttgttgggttaatctgccagcagc

SEQ ID NO: 5349762 - DNA, 25 bp, Homo sapien
aaattgctgaggatacgttttccca

SEQ ID NO: 5349763 - DNA, 25 bp, Homo sapien
tgaggatacgttttcccaatctttc

SEQ ID NO: 5349764 - DNA, 25 bp, Homo sapien
aatttttatgctatctggctggcag

SEQ ID NO: 5349765 - DNA, 25 bp, Homo sapien
taaatttttatgctatctggctggc

SEQ ID NO: 5349766 - DNA, 25 bp, Homo sapien
tttttatgctatctggctggcagaa

SEQ ID NO: 5349767 - DNA, 25 bp, Homo sapien
ataaatttttatgctatctggctgg

SEQ ID NO: 5349768 - DNA, 25 bp, Homo sapien
tctgaagccactggtaaggcttgtt

SEQ ID NO: 5349769 - DNA, 25 bp, Homo sapien
cctctgaagccactggtaaggcttg

SEQ ID NO: 5349770 - DNA, 25 bp, Homo sapien
ctgtggttgcttcttttcacttctt

SEQ ID NO: 5349771 - DNA, 25 bp, Homo sapien
tctttcatgcctttcttgctcttcc

SEQ ID NO: 5349772 - DNA, 25 bp, Homo sapien
tgctagactgtagaggacaatcttt

SEQ ID NO: 5349773 - DNA, 25 bp, Homo sapien
gctgctagactgtagaggacaatct

SEQ ID NO: 5349774 - DNA, 25 bp, Homo sapien
tgcacatcatgtcttaacatgtcga

SEQ ID NO: 5349775 - DNA, 25 bp, Homo sapien
ttaacatgtcgatcccctttgctgc

SEQ ID NO: 5349776 - DNA, 25 bp, Homo sapien
caggatcttccactccagtggtagg

SEQ ID NO: 5349777 - DNA, 25 bp, Homo sapien
gctctcaatgtctgtacattctttc

SEQ ID NO: 5349778 - DNA, 25 bp, Homo sapien
tctttgtactgctcctttcacagca

SEQ ID NO: 5349779 - DNA, 25 bp, Homo sapien
cagcaggatcttccactccagtggt

SEQ ID NO: 5349780 - DNA, 25 bp, Homo sapien
ttcaaggaaggatgttttgcaggag

SEQ ID NO: 5349781 - DNA, 25 bp, Homo sapien
aaggaaggatgttttgcaggaggcc

SEQ ID NO: 5349782 - DNA, 25 bp, Homo sapien
cttcaaggaaggatgttttgcagga

SEQ ID NO: 5349783 - DNA, 25 bp, Homo sapien
caaggaaggatgttttgcaggaggc

SEQ ID NO: 5349784 - DNA, 25 bp, Homo sapien
cctttttcatgcgaaggtccaggta

SEQ ID NO: 5349785 - DNA, 25 bp, Homo sapien
ttttcatgcgaaggtccaggtaaag

SEQ ID NO: 5349786 - DNA, 25 bp, Homo sapien
tttcctttttcatgcgaaggtccag

SEQ ID NO: 5349787 - DNA, 25 bp, Homo sapien
ctttttcatgcgaaggtccaggtaa

SEQ ID NO: 5349788 - DNA, 25 bp, Homo sapien
tctttgtcatccgatgcaggcaatg

SEQ ID NO: 5349789 - DNA, 25 bp, Homo sapien
actgcagattcatcagaacttccaa

SEQ ID NO: 5349790 - DNA, 25 bp, Homo sapien
ctgactgcagattcatcagaacttc

SEQ ID NO: 5349791 - DNA, 25 bp, Homo sapien
gcagattcatcagaacttccaacat

SEQ ID NO: 5349792 - DNA, 25 bp, Homo sapien
tgactgcagattcatcagaacttcc

SEQ ID NO: 5349793 - DNA, 25 bp, Homo sapien
tttctgcaactaaactgggcttcat

SEQ ID NO: 5349794 - DNA, 25 bp, Homo sapien
tgaaataagcagcaatcctctttta

SEQ ID NO: 5349795 - DNA, 25 bp, Homo sapien
tccaattgaataaagccatagaagg

SEQ ID NO: 5349796 - DNA, 25 bp, Homo sapien
tgaaaaagtggtcaattttctgcaa

SEQ ID NO: 5349797 - DNA, 25 bp, Homo sapien
ttcttatcaagagtaggaccaccaa

SEQ ID NO: 5349798 - DNA, 25 bp, Homo sapien
tttcttatcaagagtaggaccacca

SEQ ID NO: 5349799 - DNA, 25 bp, Homo sapien
tcttatcaagagtaggaccaccaag

SEQ ID NO: 5349800 - DNA, 25 bp, Homo sapien
cttatcaagagtaggaccaccaaga

SEQ ID NO: 5349801 - DNA, 25 bp, Homo sapien
atgttccaaaatttgttgttgaatt

SEQ ID NO: 5349802 - DNA, 25 bp, Homo sapien
ctgatttctcctttttaagtatctt

SEQ ID NO: 5349803 - DNA, 25 bp, Homo sapien
aagtatcttctgtttatgttccaaa

SEQ ID NO: 5349804 - DNA, 25 bp, Homo sapien
tgatttctcctttttaagtatcttc

SEQ ID NO: 5349805 - DNA, 25 bp, Homo sapien
tttaaaatatgtgctgttgaaataa

SEQ ID NO: 5349806 - DNA, 25 bp, Homo sapien
aaaatatgtgctgttgaaataagta

SEQ ID NO: 5349807 - DNA, 25 bp, Homo sapien
ggcagtagccatgcttatctgctct

SEQ ID NO: 5349808 - DNA, 25 bp, Homo sapien
aatttgtgtgccatccctaggcagt

SEQ ID NO: 5349809 - DNA, 25 bp, Homo sapien
cacacatgtcttgagcgaagacatc

SEQ ID NO: 5349810 - DNA, 25 bp, Homo sapien
caatacctggtgagtcatagtatac

SEQ ID NO: 5349811 - DNA, 25 bp, Homo sapien
cctggtgagtcatagtatacagcaa

SEQ ID NO: 5349812 - DNA, 25 bp, Homo sapien
cttgagcgaagacatcaatattttg

SEQ ID NO: 5349813 - DNA, 25 bp, Homo sapien
gcttgggtctataagcatctagggt

SEQ ID NO: 5349814 - DNA, 25 bp, Homo sapien
catgtactagcttgggtctataagc

SEQ ID NO: 5349815 - DNA, 25 bp, Homo sapien
tttgcatgtactagcttgggtctat

SEQ ID NO: 5349816 - DNA, 25 bp, Homo sapien
tactagcttgggtctataagcatct

SEQ ID NO: 5349817 - DNA, 25 bp, Homo sapien
gtctcagcctatcaacggcatgtgt

SEQ ID NO: 5349818 - DNA, 25 bp, Homo sapien
tctcagcctatcaacggcatgtgta

SEQ ID NO: 5349819 - DNA, 25 bp, Homo sapien
ctcagcctatcaacggcatgtgtac

SEQ ID NO: 5349820 - DNA, 25 bp, Homo sapien
cgtctcagcctatcaacggcatgtg

SEQ ID NO: 5349821 - DNA, 25 bp, Homo sapien
tctctttcttgcaaattatagcgaa

SEQ ID NO: 5349822 - DNA, 25 bp, Homo sapien
tctttcttgcaaattatagcgaata

SEQ ID NO: 5349823 - DNA, 25 bp, Homo sapien
agcgaataaaagtggggtattactg

SEQ ID NO: 5349824 - DNA, 25 bp, Homo sapien
gcaaattatagcgaataaaagtggg

SEQ ID NO: 5349825 - DNA, 25 bp, Homo sapien
cccctcattatctaatatccaagtg

SEQ ID NO: 5349826 - DNA, 25 bp, Homo sapien
taggcaagttgcaactcattctttt

SEQ ID NO: 5349827 - DNA, 25 bp, Homo sapien
tcctcctaaaattcgtctctaggca

SEQ ID NO: 5349828 - DNA, 25 bp, Homo sapien
tgagaggaggctttaggttcttatt

SEQ ID NO: 5349829 - DNA, 25 bp, Homo sapien
ggcgccatgtttcagcagaataacg

SEQ ID NO: 5349830 - DNA, 25 bp, Homo sapien
aatgtgtgcaccatgggaaagcagt

SEQ ID NO: 5349831 - DNA, 25 bp, Homo sapien
cgccatgtttcagcagaataacggc

SEQ ID NO: 5349832 - DNA, 25 bp, Homo sapien
gtgcttcaatgtgtgcaccatggga

SEQ ID NO: 5349833 - DNA, 25 bp, Homo sapien
tcaaaggcgttctgttttctttgtc

SEQ ID NO: 5349834 - DNA, 25 bp, Homo sapien
ctgtatcaaaggcgttctgttttct

SEQ ID NO: 5349835 - DNA, 25 bp, Homo sapien
tgtcacagatatcaatctggcattt

SEQ ID NO: 5349836 - DNA, 25 bp, Homo sapien
gtgaccacttgcacatggccactgg

SEQ ID NO: 5349837 - DNA, 25 bp, Homo sapien
ggtctatggagccctcggccgtctg

SEQ ID NO: 5349838 - DNA, 25 bp, Homo sapien
gtggtctatggagccctcggccgtc

SEQ ID NO: 5349839 - DNA, 25 bp, Homo sapien
acgtggtctatggagccctcggccg

SEQ ID NO: 5349840 - DNA, 25 bp, Homo sapien
tgtagacgtggtctatggagccctc

SEQ ID NO: 5349841 - DNA, 25 bp, Homo sapien
ctccaagaacgcaggggccgccggg

SEQ ID NO: 5349842 - DNA, 25 bp, Homo sapien
cctccaagaacgcaggggccgccgg

SEQ ID NO: 5349843 - DNA, 25 bp, Homo sapien
agtggttgagttctccatggaaact

SEQ ID NO: 5349844 - DNA, 25 bp, Homo sapien
atgactataccacaggtttgaggcc

SEQ ID NO: 5349845 - DNA, 25 bp, Homo sapien
tttaagtacataagagtggattttc

SEQ ID NO: 5349846 - DNA, 25 bp, Homo sapien
cttgagtttaagtacataagagtgg

SEQ ID NO: 5349847 - DNA, 25 bp, Homo sapien
tataccacaggtttgaggcctttgc

SEQ ID NO: 5349848 - DNA, 25 bp, Homo sapien
gctcctccgaggaggacacggcaca

SEQ ID NO: 5349849 - DNA, 25 bp, Homo sapien
ggaggacacggcacaggcgagtgac

SEQ ID NO: 5349850 - DNA, 25 bp, Homo sapien
aggaggacacggcacaggcgagtga

SEQ ID NO: 5349851 - DNA, 25 bp, Homo sapien
cctccgaggaggacacggcacaggc

SEQ ID NO: 5349852 - DNA, 25 bp, Homo sapien
gtttggaggttcctctaaacactga

SEQ ID NO: 5349853 - DNA, 25 bp, Homo sapien
ttggaggttcctctaaacactgaaa

SEQ ID NO: 5349854 - DNA, 25 bp, Homo sapien
tttggaggttcctctaaacactgaa

SEQ ID NO: 5349855 - DNA, 25 bp, Homo sapien
ttaaagaaaatctggtagatacaca

SEQ ID NO: 5349856 - DNA, 25 bp, Homo sapien
catcaataacttaatgtattaaaga

SEQ ID NO: 5349857 - DNA, 25 bp, Homo sapien
gaaaatctggtagatacacacagtg

SEQ ID NO: 5349858 - DNA, 25 bp, Homo sapien
gtattaaagaaaatctggtagatac

SEQ ID NO: 5349859 - DNA, 25 bp, Homo sapien
tctgctctgcctaaagagaggtgcc

SEQ ID NO: 5349860 - DNA, 25 bp, Homo sapien
gacagtaagaagaggttcccaggcc

SEQ ID NO: 5349861 - DNA, 25 bp, Homo sapien
gaaactgagtcatggcgaggctcga

SEQ ID NO: 5349862 - DNA, 25 bp, Homo sapien
gatgggtccctaaagctgagatcca

SEQ ID NO: 5349863 - DNA, 25 bp, Homo sapien
gagatcccgtttcttggcaacagga

SEQ ID NO: 5349864 - DNA, 25 bp, Homo sapien
aacctcgtgcgcgaccatgtggaaa

SEQ ID NO: 5349865 - DNA, 25 bp, Homo sapien
gctgccctgcaaagagtacgacgtg

SEQ ID NO: 5349866 - DNA, 25 bp, Homo sapien
tgctcccaaggtggaaacccaggtc

SEQ ID NO: 5349867 - DNA, 25 bp, Homo sapien
gctctggtgctcagggcgtctcctc

SEQ ID NO: 5349868 - DNA, 25 bp, Homo sapien
tcaggcccggcattcaactccttgt

SEQ ID NO: 5349869 - DNA, 25 bp, Homo sapien
cgagctcatccggaacattcaggag

SEQ ID NO: 5349870 - DNA, 25 bp, Homo sapien
ctcctgggatcctcaccagggactg

SEQ ID NO: 5349871 - DNA, 25 bp, Homo sapien
ccaggtcacagtggagcgcaggact

SEQ ID NO: 5349872 - DNA, 25 bp, Homo sapien
cacaaggagacctgcgagatggact

SEQ ID NO: 5349873 - DNA, 25 bp, Homo sapien
agactgaaccgggagcacaaggaga

SEQ ID NO: 5349874 - DNA, 25 bp, Homo sapien
gatggaggcctacaacatcgacgag

SEQ ID NO: 5349875 - DNA, 25 bp, Homo sapien
tggaagaagcaaggatcctccccaa

SEQ ID NO: 5349876 - DNA, 25 bp, Homo sapien
caagagtctgcagagggagcgcatt

SEQ ID NO: 5349877 - DNA, 25 bp, Homo sapien
cagagggagcgcatttctgcccaca

SEQ ID NO: 5349878 - DNA, 25 bp, Homo sapien
caggaaccacagtcgcagacctgga

SEQ ID NO: 5349879 - DNA, 25 bp, Homo sapien
tgaatatgctaaaaccactgacctg

SEQ ID NO: 5349880 - DNA, 25 bp, Homo sapien
gaaacacacgcaatagggaatccag

SEQ ID NO: 5349881 - DNA, 25 bp, Homo sapien
aattagacagttatcacgcatccga

SEQ ID NO: 5349882 - DNA, 25 bp, Homo sapien
tgatttccagcgctacaactgcggg

SEQ ID NO: 5349883 - DNA, 25 bp, Homo sapien
tagcttctgaacatacagccaaaaa

SEQ ID NO: 5349884 - DNA, 25 bp, Homo sapien
atcttctgtcactgctttaaacgaa

SEQ ID NO: 5349885 - DNA, 25 bp, Homo sapien
tccatcttctgtcactgctttaaac

SEQ ID NO: 5349886 - DNA, 25 bp, Homo sapien
ctttagcttctgaacatacagccaa

SEQ ID NO: 5349887 - DNA, 25 bp, Homo sapien
attcaaattcaaaatagtgttgcac

SEQ ID NO: 5349888 - DNA, 25 bp, Homo sapien
taaagacgaaggattatctcaccat

SEQ ID NO: 5349889 - DNA, 25 bp, Homo sapien
gcagaatccagtaaaacaaatgcaa

SEQ ID NO: 5349890 - DNA, 25 bp, Homo sapien
catccaacacacaaattgtttgctc

SEQ ID NO: 5349891 - DNA, 25 bp, Homo sapien
tttcaccattgtaacagagccacgt

SEQ ID NO: 5349892 - DNA, 25 bp, Homo sapien
tagatttcaccattgtaacagagcc

SEQ ID NO: 5349893 - DNA, 25 bp, Homo sapien
ggttgtagatttcaccattgtaaca

SEQ ID NO: 5349894 - DNA, 25 bp, Homo sapien
ttcttatggttgtagatttcaccat

SEQ ID NO: 5349895 - DNA, 25 bp, Homo sapien
ggctgcattccaaacagcgggtcaa

SEQ ID NO: 5349896 - DNA, 25 bp, Homo sapien
ttaaattggctgcattccaaacagc

SEQ ID NO: 5349897 - DNA, 25 bp, Homo sapien
taaattggctgcattccaaacagcg

SEQ ID NO: 5349898 - DNA, 25 bp, Homo sapien
gcattccaaacagcgggtcaactac

SEQ ID NO: 5349899 - DNA, 25 bp, Homo sapien
caccaaccggtgaaatccaaagcag

SEQ ID NO: 5349900 - DNA, 25 bp, Homo sapien
gcagcagctagtgtatccattgaca

SEQ ID NO: 5349901 - DNA, 25 bp, Homo sapien
caaagcagcagctagtgtatccatt

SEQ ID NO: 5349902 - DNA, 25 bp, Homo sapien
ccattgacattctcaaaacagaatg

SEQ ID NO: 5349903 - DNA, 25 bp, Homo sapien
ggaccccgtttgcaatcttcatagc

SEQ ID NO: 5349904 - DNA, 25 bp, Homo sapien
cgtttgcaatcttcatagcacacag

SEQ ID NO: 5349905 - DNA, 25 bp, Homo sapien
tttgcaatcttcatagcacacagac

SEQ ID NO: 5349906 - DNA, 25 bp, Homo sapien
ctggaccccgtttgcaatcttcata

SEQ ID NO: 5349907 - DNA, 25 bp, Homo sapien
agtcattgctgccaaacaggaccca

SEQ ID NO: 5349908 - DNA, 25 bp, Homo sapien
gtcattgctgccaaacaggacccaa

SEQ ID NO: 5349909 - DNA, 25 bp, Homo sapien
cagtcattgctgccaaacaggaccc

SEQ ID NO: 5349910 - DNA, 25 bp, Homo sapien
tgcggttcccttgacagttaaacgc

SEQ ID NO: 5349911 - DNA, 25 bp, Homo sapien
tctctgcatcccaaaatcgctcaaa

SEQ ID NO: 5349912 - DNA, 25 bp, Homo sapien
tcaaagatccgagagactttccgga

SEQ ID NO: 5349913 - DNA, 25 bp, Homo sapien
aacgccctctctttacctcaactag

SEQ ID NO: 5349914 - DNA, 25 bp, Homo sapien
aacagcccaagttcagtgactcaag

SEQ ID NO: 5349915 - DNA, 25 bp, Homo sapien
gtgactcaagagtgcccgtgtctcc

SEQ ID NO: 5349916 - DNA, 25 bp, Homo sapien
tgacagtgagatgtaaaaggtctca

SEQ ID NO: 5349917 - DNA, 25 bp, Homo sapien
tctccccaagaggttgcttagcagg

SEQ ID NO: 5349918 - DNA, 25 bp, Homo sapien
gatggaggtatataggctgggcaag

SEQ ID NO: 5349919 - DNA, 25 bp, Homo sapien
ccagagtttgctgaagatggaggta

SEQ ID NO: 5349920 - DNA, 25 bp, Homo sapien
ttagagggatataaagcaccgccaa

SEQ ID NO: 5349921 - DNA, 25 bp, Homo sapien
taaattggggtttatcgattataga

SEQ ID NO: 5349922 - DNA, 25 bp, Homo sapien
gaggatgtagacttcagggtaacca

SEQ ID NO: 5349923 - DNA, 25 bp, Homo sapien
cgccagccaggtagaaaaaagtagt

SEQ ID NO: 5349924 - DNA, 25 bp, Homo sapien
gaaattatcccaaagcccagtcgga

SEQ ID NO: 5349925 - DNA, 25 bp, Homo sapien
taggcccatatacccgaatggttct

SEQ ID NO: 5349926 - DNA, 25 bp, Homo sapien
cttgaggccaggaacttgacaccat

SEQ ID NO: 5349927 - DNA, 25 bp, Homo sapien
ttgaggccaggaacttgacaccatc

SEQ ID NO: 5349928 - DNA, 25 bp, Homo sapien
acttgaggccaggaacttgacacca

SEQ ID NO: 5349929 - DNA, 25 bp, Homo sapien
gcagttagctacgactgcatcattg

SEQ ID NO: 5349930 - DNA, 25 bp, Homo sapien
ctgcagttagctacgactgcatcat

SEQ ID NO: 5349931 - DNA, 25 bp, Homo sapien
gttagctacgactgcatcattgcac

SEQ ID NO: 5349932 - DNA, 25 bp, Homo sapien
agttagctacgactgcatcattgca

SEQ ID NO: 5349933 - DNA, 25 bp, Homo sapien
tcatcctgctctccaaggactcctc

SEQ ID NO: 5349934 - DNA, 25 bp, Homo sapien
ggactcgagagctgacattaggaat

SEQ ID NO: 5349935 - DNA, 25 bp, Homo sapien
tgacattaggaatgtcaccatcatc

SEQ ID NO: 5349936 - DNA, 25 bp, Homo sapien
tcatcttcaacagactcctcatctt

SEQ ID NO: 5349937 - DNA, 25 bp, Homo sapien
gcatcctgctctccgcggactcatc

SEQ ID NO: 5349938 - DNA, 25 bp, Homo sapien
caacggactcctcgtcttcaacaga

SEQ ID NO: 5349939 - DNA, 25 bp, Homo sapien
agcatcctgctctccgcggactcat

SEQ ID NO: 5349940 - DNA, 25 bp, Homo sapien
ttcaacggactcctcgtcttcaaca

SEQ ID NO: 5349941 - DNA, 25 bp, Homo sapien
tttctgctggtactgcttggtcatt

SEQ ID NO: 5349942 - DNA, 25 bp, Homo sapien
ttgccctttaaagaatgatggcttc

SEQ ID NO: 5349943 - DNA, 25 bp, Homo sapien
gctggtactgcttggtcattgccct

SEQ ID NO: 5349944 - DNA, 25 bp, Homo sapien
tactgcttggtcattgccctttaaa

SEQ ID NO: 5349945 - DNA, 25 bp, Homo sapien
taagcaatgattctgtagttcctct

SEQ ID NO: 5349946 - DNA, 25 bp, Homo sapien
atgtaagcaatgattctgtagttcc

SEQ ID NO: 5349947 - DNA, 25 bp, Homo sapien
ccattcaattgtgtcaatgtaagca

SEQ ID NO: 5349948 - DNA, 25 bp, Homo sapien
agcaatgattctgtagttcctcttt

SEQ ID NO: 5349949 - DNA, 25 bp, Homo sapien
tgtaaatgtcaccaacccagtaggt

SEQ ID NO: 5349950 - DNA, 25 bp, Homo sapien
ttgtaaatgtcaccaacccagtagg

SEQ ID NO: 5349951 - DNA, 25 bp, Homo sapien
cttgtaaatgtcaccaacccagtag

SEQ ID NO: 5349952 - DNA, 25 bp, Homo sapien
tcttgtaaatgtcaccaacccagta

SEQ ID NO: 5349953 - DNA, 25 bp, Homo sapien
gcaggcctttgtagaccacactggt

SEQ ID NO: 5349954 - DNA, 25 bp, Homo sapien
taccagccttgtgggttaggtctcc

SEQ ID NO: 5349955 - DNA, 25 bp, Homo sapien
caaagcttagggcttgtggttcaaa

SEQ ID NO: 5349956 - DNA, 25 bp, Homo sapien
tgtcatctgggaacgctatcagccc

SEQ ID NO: 5349957 - DNA, 25 bp, Homo sapien
aagcagaggagcgttttaagtttat

SEQ ID NO: 5349958 - DNA, 25 bp, Homo sapien
gaagcagaggagcgttttaagttta

SEQ ID NO: 5349959 - DNA, 25 bp, Homo sapien
gcagaggagcgttttaagtttatct

SEQ ID NO: 5349960 - DNA, 25 bp, Homo sapien
agaggagcgttttaagtttatctgg

SEQ ID NO: 5349961 - DNA, 25 bp, Homo sapien
gagttgtatctaaataattggctac

SEQ ID NO: 5349962 - DNA, 25 bp, Homo sapien
agttgtatctaaataattggctaca

SEQ ID NO: 5349963 - DNA, 25 bp, Homo sapien
cgagttgtatctaaataattggcta

SEQ ID NO: 5349964 - DNA, 25 bp, Homo sapien
ccgcagcaaggcgagttgcgccgca

SEQ ID NO: 5349965 - DNA, 25 bp, Homo sapien
agaaaccctaacctctcttcggcat

SEQ ID NO: 5349966 - DNA, 25 bp, Homo sapien
aaggcgagttgcgccgcagtgctca

SEQ ID NO: 5349967 - DNA, 25 bp, Homo sapien
agttgcgccgcagtgctcaacagga

SEQ ID NO: 5349968 - DNA, 25 bp, Homo sapien
tgcattgtgtctggaggtggtgaat

SEQ ID NO: 5349969 - DNA, 25 bp, Homo sapien
ggtaccaccactgctaataactgag

SEQ ID NO: 5349970 - DNA, 25 bp, Homo sapien
gcctggcggacccaatccatggtat

SEQ ID NO: 5349971 - DNA, 25 bp, Homo sapien
tagtatatggtaccaccactgctaa

SEQ ID NO: 5349972 - DNA, 25 bp, Homo sapien
tgtgtcttgcactgtaatatatggc

SEQ ID NO: 5349973 - DNA, 25 bp, Homo sapien
tgcactgtaatatatggccgtgtcc

SEQ ID NO: 5349974 - DNA, 25 bp, Homo sapien
tcttgcactgtaatatatggccgtg

SEQ ID NO: 5349975 - DNA, 25 bp, Homo sapien
ctgtgtgtcttgcactgtaatatat

SEQ ID NO: 5349976 - DNA, 25 bp, Homo sapien
ctgtagacatgcctgcggtcatggt

SEQ ID NO: 5349977 - DNA, 25 bp, Homo sapien
gacatgcctgcggtcatggtgactc

SEQ ID NO: 5349978 - DNA, 25 bp, Homo sapien
tagacatgcctgcggtcatggtgac

SEQ ID NO: 5349979 - DNA, 25 bp, Homo sapien
tgtagacatgcctgcggtcatggtg

SEQ ID NO: 5349980 - DNA, 25 bp, Homo sapien
cagactgcacttgctggacctggga

SEQ ID NO: 5349981 - DNA, 25 bp, Homo sapien
cccagactgcacttgctggacctgg

SEQ ID NO: 5349982 - DNA, 25 bp, Homo sapien
agccccagactgcacttgctggacc

SEQ ID NO: 5349983 - DNA, 25 bp, Homo sapien
agactgcacttgctggacctgggac

SEQ ID NO: 5349984 - DNA, 25 bp, Homo sapien
gaggaggatcctccaggtccagtcc

SEQ ID NO: 5349985 - DNA, 25 bp, Homo sapien
atggtgatgtgctgtgctctgggga

SEQ ID NO: 5349986 - DNA, 25 bp, Homo sapien
tgctgccaccaagaggaggatcctc

SEQ ID NO: 5349987 - DNA, 25 bp, Homo sapien
cagtccatggtgatgtgctgtgctc

SEQ ID NO: 5349988 - DNA, 25 bp, Homo sapien
taaatatcaatgacgccagtgtctt

SEQ ID NO: 5349989 - DNA, 25 bp, Homo sapien
ggtgtggcaggccataaatatcaat

SEQ ID NO: 5349990 - DNA, 25 bp, Homo sapien
atgacgccagtgtctttgaggatgg

SEQ ID NO: 5349991 - DNA, 25 bp, Homo sapien
gtgtggcaggccataaatatcaatg

SEQ ID NO: 5349992 - DNA, 25 bp, Homo sapien
cagactccaccagctgcacctcaca

SEQ ID NO: 5349993 - DNA, 25 bp, Homo sapien
ccccagactccaccagctgcacctc

SEQ ID NO: 5349994 - DNA, 25 bp, Homo sapien
caagcctcccccagactccaccagc

SEQ ID NO: 5349995 - DNA, 25 bp, Homo sapien
aagcctcccccagactccaccagct

SEQ ID NO: 5349996 - DNA, 25 bp, Homo sapien
ggtctggttggactgattcctgagg

SEQ ID NO: 5349997 - DNA, 25 bp, Homo sapien
tctggttggactgattcctgagggt

SEQ ID NO: 5349998 - DNA, 25 bp, Homo sapien
gtctggttggactgattcctgaggg

SEQ ID NO: 5349999 - DNA, 25 bp, Homo sapien
ccgcccgcccatagggaccctgtct

SEQ ID NO: 5350000 - DNA, 25 bp, Homo sapien
tctacctcggcactgttcgcagctt

SEQ ID NO: 5350001 - DNA, 25 bp, Homo sapien
gcgctttgcttctctacctcggcac

SEQ ID NO: 5350002 - DNA, 25 bp, Homo sapien
tgcttctctacctcggcactgttcg

SEQ ID NO: 5350003 - DNA, 25 bp, Homo sapien
ttccagtaagaaccggcagcatggc

SEQ ID NO: 5350004 - DNA, 25 bp, Homo sapien
gagagttccagtaagaaccggcagc

SEQ ID NO: 5350005 - DNA, 25 bp, Homo sapien
ctggagagttccagtaagaaccggc

SEQ ID NO: 5350006 - DNA, 25 bp, Homo sapien
gtaagaaccggcagcatggctcctc

SEQ ID NO: 5350007 - DNA, 25 bp, Homo sapien
ggcatgttgagggtgacagccctac

SEQ ID NO: 5350008 - DNA, 25 bp, Homo sapien
aaggcatgttgagggtgacagccct

SEQ ID NO: 5350009 - DNA, 25 bp, Homo sapien
gcctggaaggcatgttgagggtgac

SEQ ID NO: 5350010 - DNA, 25 bp, Homo sapien
tggaaggcatgttgagggtgacagc

SEQ ID NO: 5350011 - DNA, 25 bp, Homo sapien
acggcttcagcatggggcacacgat

SEQ ID NO: 5350012 - DNA, 25 bp, Homo sapien
ccgagaaaacagcagcgccatcgca

SEQ ID NO: 5350013 - DNA, 25 bp, Homo sapien
agcgccatcgcacggcttcagcatg

SEQ ID NO: 5350014 - DNA, 25 bp, Homo sapien
gcacacgatcgtgttttcctctggg

SEQ ID NO: 5350015 - DNA, 25 bp, Homo sapien
cccttaggcttgtgaggaacgtcgg

SEQ ID NO: 5350016 - DNA, 25 bp, Homo sapien
tgagacagggttacgtgtggcttcc

SEQ ID NO: 5350017 - DNA, 25 bp, Homo sapien
gagaagcaggcgctcagagcacagt

SEQ ID NO: 5350018 - DNA, 25 bp, Homo sapien
gccagtggttgctatctcaggccag

SEQ ID NO: 5350019 - DNA, 25 bp, Homo sapien
tatttctcgccgcagagcaaggctc

SEQ ID NO: 5350020 - DNA, 25 bp, Homo sapien
ggtgacattccttcagccatgagag

SEQ ID NO: 5350021 - DNA, 25 bp, Homo sapien
cctggcggaaacctgaacggtgaca

SEQ ID NO: 5350022 - DNA, 25 bp, Homo sapien
aactgtcattactggattggcatcg

SEQ ID NO: 5350023 - DNA, 25 bp, Homo sapien
gcagttcctatgacttcccacagtg

SEQ ID NO: 5350024 - DNA, 25 bp, Homo sapien
gcagatctttgtgcctgcactggcc

SEQ ID NO: 5350025 - DNA, 25 bp, Homo sapien
ggtttaagcagcgagtggcagatct

SEQ ID NO: 5350026 - DNA, 25 bp, Homo sapien
gagcgtgaagaggatcacaggcaca

SEQ ID NO: 5350027 - DNA, 25 bp, Homo sapien
tcagttgatgtggcaggtattacat

SEQ ID NO: 5350028 - DNA, 25 bp, Homo sapien
cagttgatgtggcaggtattacatg

SEQ ID NO: 5350029 - DNA, 25 bp, Homo sapien
tgatgtggcaggtattacatgacac

SEQ ID NO: 5350030 - DNA, 25 bp, Homo sapien
gttgatgtggcaggtattacatgac

SEQ ID NO: 5350031 - DNA, 25 bp, Homo sapien
ccataggttcccagggattgctgac

SEQ ID NO: 5350032 - DNA, 25 bp, Homo sapien
cccataggttcccagggattgctga

SEQ ID NO: 5350033 - DNA, 25 bp, Homo sapien
ccccataggttcccagggattgctg

SEQ ID NO: 5350034 - DNA, 25 bp, Homo sapien
gcaaaggggttggccctagtcagaa

SEQ ID NO: 5350035 - DNA, 25 bp, Homo sapien
tgcaaaggggttggccctagtcaga

SEQ ID NO: 5350036 - DNA, 25 bp, Homo sapien
tccttgatgacttgtgagctctgag

SEQ ID NO: 5350037 - DNA, 25 bp, Homo sapien
tgtcatccctgcatagagcccacat

SEQ ID NO: 5350038 - DNA, 25 bp, Homo sapien
gtccagtggtcatatctctgagggc

SEQ ID NO: 5350039 - DNA, 25 bp, Homo sapien
ccagacattggcttctgtcatccct

SEQ ID NO: 5350040 - DNA, 25 bp, Homo sapien
agacaccagaaaacgacaaaccagg

SEQ ID NO: 5350041 - DNA, 25 bp, Homo sapien
tgctggccagcaggactgtgaaccc

SEQ ID NO: 5350042 - DNA, 25 bp, Homo sapien
gctggccagcaggactgtgaacccc

SEQ ID NO: 5350043 - DNA, 25 bp, Homo sapien
tggatacccaattggcacagcacac

SEQ ID NO: 5350044 - DNA, 25 bp, Homo sapien
taggcaatccagtgcttccctgctc

SEQ ID NO: 5350045 - DNA, 25 bp, Homo sapien
ttgaccttttccatctctgacctgg

SEQ ID NO: 5350046 - DNA, 25 bp, Homo sapien
cctccttaggcaatccagtgcttcc

SEQ ID NO: 5350047 - DNA, 25 bp, Homo sapien
atttgggaggctgccgatgtctgca

SEQ ID NO: 5350048 - DNA, 25 bp, Homo sapien
ctgagatgaccatgaagactggatt

SEQ ID NO: 5350049 - DNA, 25 bp, Homo sapien
tgagcagggttttcatcgagggctc

SEQ ID NO: 5350050 - DNA, 25 bp, Homo sapien
tttgactggcaattgcccatcttga

SEQ ID NO: 5350051 - DNA, 25 bp, Homo sapien
accaaaatatggtcctgggcttctg

SEQ ID NO: 5350052 - DNA, 25 bp, Homo sapien
gataagtatcaaccacctcattcac

SEQ ID NO: 5350053 - DNA, 25 bp, Homo sapien
tgctggggaatgaagacaggcccat

SEQ ID NO: 5350054 - DNA, 25 bp, Homo sapien
aagtatcaaccacctcattcaccag

SEQ ID NO: 5350055 - DNA, 25 bp, Homo sapien
ggactcgggcggatttcaggcttca

SEQ ID NO: 5350056 - DNA, 25 bp, Homo sapien
gatgaacgtcgagcggagaactcca

SEQ ID NO: 5350057 - DNA, 25 bp, Homo sapien
ggtaacgtcccttcctgtcgcatgg

SEQ ID NO: 5350058 - DNA, 25 bp, Homo sapien
cttttggcaggcgagaatccggact

SEQ ID NO: 5350059 - DNA, 25 bp, Homo sapien
cctcgaagaggttcagggcggtgcc

SEQ ID NO: 5350060 - DNA, 25 bp, Homo sapien
cgaggagcgcctgaccaaagtggtt

SEQ ID NO: 5350061 - DNA, 25 bp, Homo sapien
ttcccgcaagaggtggcacccacgg

SEQ ID NO: 5350062 - DNA, 25 bp, Homo sapien
ggaacgcaggagtcagacccacagt

SEQ ID NO: 5350063 - DNA, 25 bp, Homo sapien
agtttctggcgagggaacgtatttg

SEQ ID NO: 5350064 - DNA, 25 bp, Homo sapien
ctgaatccggtttattttcttctgg

SEQ ID NO: 5350065 - DNA, 25 bp, Homo sapien
gagagggagctgaatccggtttatt

SEQ ID NO: 5350066 - DNA, 25 bp, Homo sapien
gggaacgtatttgcgaccaattcga

SEQ ID NO: 5350067 - DNA, 25 bp, Homo sapien
tgcacctgcggtcggtcccgccttg

SEQ ID NO: 5350068 - DNA, 25 bp, Homo sapien
gccttgcacgcacggtctctgcctg

SEQ ID NO: 5350069 - DNA, 25 bp, Homo sapien
gcaggaaagcgcttcctactgagaa

SEQ ID NO: 5350070 - DNA, 25 bp, Homo sapien
gaactcctgataagcgctcacggtg

SEQ ID NO: 5350071 - DNA, 25 bp, Homo sapien
tgctgtgtctaacctccaactgctg

SEQ ID NO: 5350072 - DNA, 25 bp, Homo sapien
tccatggtggaagacgataaccctg

SEQ ID NO: 5350073 - DNA, 25 bp, Homo sapien
aaaagccctgccctgttgctcgtgg

SEQ ID NO: 5350074 - DNA, 25 bp, Homo sapien
tggagcagctctcgagaactacctg

SEQ ID NO: 5350075 - DNA, 25 bp, Homo sapien
ttaacggctttgtctcctaatacag

SEQ ID NO: 5350076 - DNA, 25 bp, Homo sapien
gaattcgagggaacaaaatacagcc

SEQ ID NO: 5350077 - DNA, 25 bp, Homo sapien
tgccttgtcacatgattggccctct

SEQ ID NO: 5350078 - DNA, 25 bp, Homo sapien
tctgtccacttgtagctctcggtgc

SEQ ID NO: 5350079 - DNA, 25 bp, Homo sapien
tcaccaggcagtaacgaggcagtgc

SEQ ID NO: 5350080 - DNA, 25 bp, Homo sapien
gatgaccaggatacagccaaagtca

SEQ ID NO: 5350081 - DNA, 25 bp, Homo sapien
cgaggacagcgacaggaggaaacct

SEQ ID NO: 5350082 - DNA, 25 bp, Homo sapien
caccagacaacgtcacaggctgaaa

SEQ ID NO: 5350083 - DNA, 25 bp, Homo sapien
atgcttcagtgagcaattataaaca

SEQ ID NO: 5350084 - DNA, 25 bp, Homo sapien
tgcttcagtgagcaattataaacac

SEQ ID NO: 5350085 - DNA, 25 bp, Homo sapien
aaaaaagtctcagcaaatagcctca

SEQ ID NO: 5350086 - DNA, 25 bp, Homo sapien
gcttcagtgagcaattataaacact

SEQ ID NO: 5350087 - DNA, 25 bp, Homo sapien
ctcacgggacaatagtaaaagattc

SEQ ID NO: 5350088 - DNA, 25 bp, Homo sapien
tggaagttcctcacggtagtcaagt

SEQ ID NO: 5350089 - DNA, 25 bp, Homo sapien
cattggcatataacatgtgctcaac

SEQ ID NO: 5350090 - DNA, 25 bp, Homo sapien
gtaaaggttctatcacattggcata

SEQ ID NO: 5350091 - DNA, 25 bp, Homo sapien
acaaaaggcaaggtaacatcccaag

SEQ ID NO: 5350092 - DNA, 25 bp, Homo sapien
caaaaggcaaggtaacatcccaagc

SEQ ID NO: 5350093 - DNA, 25 bp, Homo sapien
aaaggcaaggtaacatcccaagctg

SEQ ID NO: 5350094 - DNA, 25 bp, Homo sapien
aggcaaggtaacatcccaagctgtg

SEQ ID NO: 5350095 - DNA, 25 bp, Homo sapien
cacagagcgcttcattccctgtgca

SEQ ID NO: 5350096 - DNA, 25 bp, Homo sapien
tagaccacacagagcgcttcattcc

SEQ ID NO: 5350097 - DNA, 25 bp, Homo sapien
ccacacagagcgcttcattccctgt

SEQ ID NO: 5350098 - DNA, 25 bp, Homo sapien
ttagaccacacagagcgcttcattc

SEQ ID NO: 5350099 - DNA, 25 bp, Homo sapien
tgtggctaaactctaataacctgtc

SEQ ID NO: 5350100 - DNA, 25 bp, Homo sapien
acttccacaggccacaacagtacag

SEQ ID NO: 5350101 - DNA, 25 bp, Homo sapien
ccaaattcagaacaggttaggtctg

SEQ ID NO: 5350102 - DNA, 25 bp, Homo sapien
catgggtggagtcatttcagcctca

SEQ ID NO: 5350103 - DNA, 25 bp, Homo sapien
tgtctttgatgccaatgagccggca

SEQ ID NO: 5350104 - DNA, 25 bp, Homo sapien
ccaatgagccggcagatggtgatga

SEQ ID NO: 5350105 - DNA, 25 bp, Homo sapien
tttgatgccaatgagccggcagatg

SEQ ID NO: 5350106 - DNA, 25 bp, Homo sapien
gagcccacggaagaggccctgggtg

SEQ ID NO: 5350107 - DNA, 25 bp, Homo sapien
gatagttccgttgccctgagcagag

SEQ ID NO: 5350108 - DNA, 25 bp, Homo sapien
gaatgactgtggcaagaagatccct

SEQ ID NO: 5350109 - DNA, 25 bp, Homo sapien
tgattagggcactcaacgaaacctg

SEQ ID NO: 5350110 - DNA, 25 bp, Homo sapien
tatgtacacacagaacaggtgccgc

SEQ ID NO: 5350111 - DNA, 25 bp, Homo sapien
caagccatggctctagcaacgttgt

SEQ ID NO: 5350112 - DNA, 25 bp, Homo sapien
catattacgtgctcaatagccaggc

SEQ ID NO: 5350113 - DNA, 25 bp, Homo sapien
actcagagaccactaggcatgactg

SEQ ID NO: 5350114 - DNA, 25 bp, Homo sapien
tatgggacagcacagatctaaacct

SEQ ID NO: 5350115 - DNA, 25 bp, Homo sapien
aatcttaatgaaatatcatggaata

SEQ ID NO: 5350116 - DNA, 25 bp, Homo sapien
tcatcttgatatgcgtccttttaaa

SEQ ID NO: 5350117 - DNA, 25 bp, Homo sapien
cttgatatgcgtccttttaaatctt

SEQ ID NO: 5350118 - DNA, 25 bp, Homo sapien
ttcttcatcttgatatgcgtccttt

SEQ ID NO: 5350119 - DNA, 25 bp, Homo sapien
tatggtcttcatatcgttctatata

SEQ ID NO: 5350120 - DNA, 25 bp, Homo sapien
tatataatgcaaatggtgaactgct

SEQ ID NO: 5350121 - DNA, 25 bp, Homo sapien
taatgcaaatggtgaactgctctgt

SEQ ID NO: 5350122 - DNA, 25 bp, Homo sapien
ttctatataatgcaaatggtgaact

SEQ ID NO: 5350123 - DNA, 25 bp, Homo sapien
cctgaaagcatccatccgatcagta

SEQ ID NO: 5350124 - DNA, 25 bp, Homo sapien
tccgatcagtagctttcccaataga

SEQ ID NO: 5350125 - DNA, 25 bp, Homo sapien
gatcagtagctttcccaatagaaaa

SEQ ID NO: 5350126 - DNA, 25 bp, Homo sapien
gcatccatccgatcagtagctttcc

SEQ ID NO: 5350127 - DNA, 25 bp, Homo sapien
tatacaaaaccattaataggctggg

SEQ ID NO: 5350128 - DNA, 25 bp, Homo sapien
aatgattcacatccgtaatctcagc

SEQ ID NO: 5350129 - DNA, 25 bp, Homo sapien
gtttctgctcctacaatatttcaca

SEQ ID NO: 5350130 - DNA, 25 bp, Homo sapien
atttcacagcacttcatctttccac

SEQ ID NO: 5350131 - DNA, 25 bp, Homo sapien
tgctctataagatacaagggacctc

SEQ ID NO: 5350132 - DNA, 25 bp, Homo sapien
cagtttaccagcagttacagagata

SEQ ID NO: 5350133 - DNA, 25 bp, Homo sapien
tgcaactacactccatcccaggtga

SEQ ID NO: 5350134 - DNA, 25 bp, Homo sapien
agctcagagagttgagactgcagta

SEQ ID NO: 5350135 - DNA, 25 bp, Homo sapien
tgcaaccagtacaacgaatcaagga

SEQ ID NO: 5350136 - DNA, 25 bp, Homo sapien
caaaagtagctgttaggcctggttt

SEQ ID NO: 5350137 - DNA, 25 bp, Homo sapien
ggtctgatgaaacccgaagttggca

SEQ ID NO: 5350138 - DNA, 25 bp, Homo sapien
aaatgtcagtatgggctaactaggc

SEQ ID NO: 5350139 - DNA, 25 bp, Homo sapien
tcatggacttaccacaagctttgtg

SEQ ID NO: 5350140 - DNA, 25 bp, Homo sapien
aaccatggccctattgaacatttag

SEQ ID NO: 5350141 - DNA, 25 bp, Homo sapien
tctcttttctctctaagggaagtca

SEQ ID NO: 5350142 - DNA, 25 bp, Homo sapien
cagaatattacagtgtatggctaca

SEQ ID NO: 5350143 - DNA, 25 bp, Homo sapien
cgcagtcatagtgaaaacgtttctt

SEQ ID NO: 5350144 - DNA, 25 bp, Homo sapien
tctttcgcagtcatagtgaaaacgt

SEQ ID NO: 5350145 - DNA, 25 bp, Homo sapien
tcttccctctttcgcagtcatagtg

SEQ ID NO: 5350146 - DNA, 25 bp, Homo sapien
tccctctttcgcagtcatagtgaaa

SEQ ID NO: 5350147 - DNA, 25 bp, Homo sapien
tacacggtgaacaggcacacacaga

SEQ ID NO: 5350148 - DNA, 25 bp, Homo sapien
tgcaggcatacacggtgaacaggca

SEQ ID NO: 5350149 - DNA, 25 bp, Homo sapien
tccttgcaggcatacacggtgaaca

SEQ ID NO: 5350150 - DNA, 25 bp, Homo sapien
ggcatacacggtgaacaggcacaca

SEQ ID NO: 5350151 - DNA, 25 bp, Homo sapien
aaaagttgctgatcaaactttgatg

SEQ ID NO: 5350152 - DNA, 25 bp, Homo sapien
aaggaatttgacattatacatctcg

SEQ ID NO: 5350153 - DNA, 25 bp, Homo sapien
catctcgatataccctatcttaatg

SEQ ID NO: 5350154 - DNA, 25 bp, Homo sapien
ggcttatgataactgagaaaacctt

SEQ ID NO: 5350155 - DNA, 25 bp, Homo sapien
tatagacataaccagcacaggactg

SEQ ID NO: 5350156 - DNA, 25 bp, Homo sapien
ggcctctacgctaaggattaacata

SEQ ID NO: 5350157 - DNA, 25 bp, Homo sapien
tgtacacctcagaaattatgatatg

SEQ ID NO: 5350158 - DNA, 25 bp, Homo sapien
acaggactggcctctacgctaagga

SEQ ID NO: 5350159 - DNA, 25 bp, Homo sapien
gaatgctccgcaaagtgactatagt

SEQ ID NO: 5350160 - DNA, 25 bp, Homo sapien
tcagaaatagtcatgcatccaaggc

SEQ ID NO: 5350161 - DNA, 25 bp, Homo sapien
tacagactttagtttcaagggcctg

SEQ ID NO: 5350162 - DNA, 25 bp, Homo sapien
taaactgcttacgtggcagctggct

SEQ ID NO: 5350163 - DNA, 25 bp, Homo sapien
ctggtatcaaaatcctcatatgttt

SEQ ID NO: 5350164 - DNA, 25 bp, Homo sapien
gtatcctggtatcaaaatcctcata

SEQ ID NO: 5350165 - DNA, 25 bp, Homo sapien
ctcaagtatcctggtatcaaaatcc

SEQ ID NO: 5350166 - DNA, 25 bp, Homo sapien
tcctggtatcaaaatcctcatatgt

SEQ ID NO: 5350167 - DNA, 25 bp, Homo sapien
cagggatacagatgaaatgtgtgta

SEQ ID NO: 5350168 - DNA, 25 bp, Homo sapien
ccagtcacccctcatcactagagac

SEQ ID NO: 5350169 - DNA, 25 bp, Homo sapien
agatcttttggtcccactctcaagg

SEQ ID NO: 5350170 - DNA, 25 bp, Homo sapien
gacctttcggggagaaagaatctca

SEQ ID NO: 5350171 - DNA, 25 bp, Homo sapien
tacaagtactctctgtcacaaaggc

SEQ ID NO: 5350172 - DNA, 25 bp, Homo sapien
aattctaaactacaagtactctctg

SEQ ID NO: 5350173 - DNA, 25 bp, Homo sapien
tgttatttcaaagatgttcaaatct

SEQ ID NO: 5350174 - DNA, 25 bp, Homo sapien
tggaaaaaggtagtataaacagaca

SEQ ID NO: 5350175 - DNA, 25 bp, Homo sapien
aggggggccaagactgatgcctccc

SEQ ID NO: 5350176 - DNA, 25 bp, Homo sapien
ggggggccaagactgatgcctcccc

SEQ ID NO: 5350177 - DNA, 25 bp, Homo sapien
caggggggccaagactgatgcctcc

SEQ ID NO: 5350178 - DNA, 25 bp, Homo sapien
aagagggacattcagtccgggccat

SEQ ID NO: 5350179 - DNA, 25 bp, Homo sapien
ttcagtccgggccatagaaaaccat

SEQ ID NO: 5350180 - DNA, 25 bp, Homo sapien
gggacattcagtccgggccatagaa

SEQ ID NO: 5350181 - DNA, 25 bp, Homo sapien
tcagtccgggccatagaaaaccata

SEQ ID NO: 5350182 - DNA, 25 bp, Homo sapien
tcagcaagcacagtacaagacgggc

SEQ ID NO: 5350183 - DNA, 25 bp, Homo sapien
ccaagtagacatgcgatgctggaag

SEQ ID NO: 5350184 - DNA, 25 bp, Homo sapien
ggaaacacaccaatatgaggccagt

SEQ ID NO: 5350185 - DNA, 25 bp, Homo sapien
gtttccttgagggagacaataggat

SEQ ID NO: 5350186 - DNA, 25 bp, Homo sapien
tgatctgacccctgttcagatcctt

SEQ ID NO: 5350187 - DNA, 25 bp, Homo sapien
gatctgacccctgttcagatccttt

SEQ ID NO: 5350188 - DNA, 25 bp, Homo sapien
atctgacccctgttcagatcctttc

SEQ ID NO: 5350189 - DNA, 25 bp, Homo sapien
tatatggtctatactgctggctcat

SEQ ID NO: 5350190 - DNA, 25 bp, Homo sapien
tcaggtgactgggagaagaaataca

SEQ ID NO: 5350191 - DNA, 25 bp, Homo sapien
ttgtgtctgcagtgcacggctcaag

SEQ ID NO: 5350192 - DNA, 25 bp, Homo sapien
tttagtgaagaaactatatggtcta

SEQ ID NO: 5350193 - DNA, 25 bp, Homo sapien
tggcgtagggatgggtgtctctggt

SEQ ID NO: 5350194 - DNA, 25 bp, Homo sapien
gtctctggttcccagtgatgacaaa

SEQ ID NO: 5350195 - DNA, 25 bp, Homo sapien
ctggttcccagtgatgacaaatggc

SEQ ID NO: 5350196 - DNA, 25 bp, Homo sapien
ctggcgtagggatgggtgtctctgg

SEQ ID NO: 5350197 - DNA, 25 bp, Homo sapien
ctgctggtaaggtgtttagggaaca

SEQ ID NO: 5350198 - DNA, 25 bp, Homo sapien
ggaacactgcctccccaataaatga

SEQ ID NO: 5350199 - DNA, 25 bp, Homo sapien
gagaacactcttccatgccaaaatg

SEQ ID NO: 5350200 - DNA, 25 bp, Homo sapien
cattgccgagaacactcttccatgc

SEQ ID NO: 5350201 - DNA, 25 bp, Homo sapien
tgccgtcccgctacacagcacgggg

SEQ ID NO: 5350202 - DNA, 25 bp, Homo sapien
ctgccgtcccgctacacagcacggg

SEQ ID NO: 5350203 - DNA, 25 bp, Homo sapien
ccgtcccgctacacagcacggggag

SEQ ID NO: 5350204 - DNA, 25 bp, Homo sapien
gccgtcccgctacacagcacgggga

SEQ ID NO: 5350205 - DNA, 25 bp, Homo sapien
agggactgtccggacgggccacact

SEQ ID NO: 5350206 - DNA, 25 bp, Homo sapien
ccttgggccgcagcggaattcctga

SEQ ID NO: 5350207 - DNA, 25 bp, Homo sapien
tcgtcaaacggcaagccttgggccg

SEQ ID NO: 5350208 - DNA, 25 bp, Homo sapien
gcgactgctcctcgtcaaacggcaa

SEQ ID NO: 5350209 - DNA, 25 bp, Homo sapien
gaccagctaattccatgagcaagga

SEQ ID NO: 5350210 - DNA, 25 bp, Homo sapien
tacacctatgtgtaaagccaactgc

SEQ ID NO: 5350211 - DNA, 25 bp, Homo sapien
tgagcaaggacctactgccacactt

SEQ ID NO: 5350212 - DNA, 25 bp, Homo sapien
ggagtgagttcctaagtcagaggca

SEQ ID NO: 5350213 - DNA, 25 bp, Homo sapien
catttggctaagtaaagaggctgac

SEQ ID NO: 5350214 - DNA, 25 bp, Homo sapien
ccccaggagtgttgccatatcagga

SEQ ID NO: 5350215 - DNA, 25 bp, Homo sapien
tgaaagtccacgttgaccccatgtg

SEQ ID NO: 5350216 - DNA, 25 bp, Homo sapien
tacaaccagatagctggctgagccc

SEQ ID NO: 5350217 - DNA, 25 bp, Homo sapien
acagggtcctggaacgatatacatc

SEQ ID NO: 5350218 - DNA, 25 bp, Homo sapien
tattacagggtcctggaacgatata

SEQ ID NO: 5350219 - DNA, 25 bp, Homo sapien
agataacatgacagataacaggccc

SEQ ID NO: 5350220 - DNA, 25 bp, Homo sapien
tacaaaaacatgcagtcggaagcac

SEQ ID NO: 5350221 - DNA, 25 bp, Homo sapien
taacaggccctgagagaaatctaag

SEQ ID NO: 5350222 - DNA, 25 bp, Homo sapien
tcggaagcactgagaaaactgggca

SEQ ID NO: 5350223 - DNA, 25 bp, Homo sapien
taaaatacgactgggctagatcatg

SEQ ID NO: 5350224 - DNA, 25 bp, Homo sapien
ggcccagcccagttaggactatagg

SEQ ID NO: 5350225 - DNA, 25 bp, Homo sapien
caggcagaaaatcaccagacaaggt

SEQ ID NO: 5350226 - DNA, 25 bp, Homo sapien
catgaggaggcaatgcacaagtgtc

SEQ ID NO: 5350227 - DNA, 25 bp, Homo sapien
gatcaaagcgttcccacattcatta

SEQ ID NO: 5350228 - DNA, 25 bp, Homo sapien
gattctcccatgtttggtaagagag

SEQ ID NO: 5350229 - DNA, 25 bp, Homo sapien
cccagtgtcggctgtctgatgctga

SEQ ID NO: 5350230 - DNA, 25 bp, Homo sapien
cctgatgtggaacaagatgtggtct

SEQ ID NO: 5350231 - DNA, 25 bp, Homo sapien
tgatatgaattctttaagttccagt

SEQ ID NO: 5350232 - DNA, 25 bp, Homo sapien
tctgatatgaattctttaagttcca

SEQ ID NO: 5350233 - DNA, 25 bp, Homo sapien
ctgatatgaattctttaagttccag

SEQ ID NO: 5350234 - DNA, 25 bp, Homo sapien
agctgaaagcccttctatattcact

SEQ ID NO: 5350235 - DNA, 25 bp, Homo sapien
gaaagcccttctatattcactgaat

SEQ ID NO: 5350236 - DNA, 25 bp, Homo sapien
tgaaagcccttctatattcactgaa

SEQ ID NO: 5350237 - DNA, 25 bp, Homo sapien
gctgaaagcccttctatattcactg

SEQ ID NO: 5350238 - DNA, 25 bp, Homo sapien
tgatggcgcctaagttctgactgga

SEQ ID NO: 5350239 - DNA, 25 bp, Homo sapien
tataatctctgctaagggtggtggc

SEQ ID NO: 5350240 - DNA, 25 bp, Homo sapien
tgaagtgtgaccaaaggctcgtcca

SEQ ID NO: 5350241 - DNA, 25 bp, Homo sapien
cgcaggctgctttcaacttcgagaa

SEQ ID NO: 5350242 - DNA, 25 bp, Homo sapien
ctttggaaattccccaacttggcat

SEQ ID NO: 5350243 - DNA, 25 bp, Homo sapien
ttggatttagaccttctcttccagt

SEQ ID NO: 5350244 - DNA, 25 bp, Homo sapien
actggcagatcacatatggtttgga

SEQ ID NO: 5350245 - DNA, 25 bp, Homo sapien
ggcagatcacatatggtttggatac

SEQ ID NO: 5350246 - DNA, 25 bp, Homo sapien
tccaccatgaagggctcaccccctt

SEQ ID NO: 5350247 - DNA, 25 bp, Homo sapien
ctggcagatcacatatggtttggat

SEQ ID NO: 5350248 - DNA, 25 bp, Homo sapien
aggaaatcaagaagtcctgctgggt

SEQ ID NO: 5350249 - DNA, 25 bp, Homo sapien
tgggctttggagggcttgtgctcac

SEQ ID NO: 5350250 - DNA, 25 bp, Homo sapien
atcaaggaaatcaagaagtcctgct

SEQ ID NO: 5350251 - DNA, 25 bp, Homo sapien
gtgggctttggagggcttgtgctca

SEQ ID NO: 5350252 - DNA, 25 bp, Homo sapien
gaatggccaagttcctgaagttctc

SEQ ID NO: 5350253 - DNA, 25 bp, Homo sapien
cagaatggccaagttcctgaagttc

SEQ ID NO: 5350254 - DNA, 25 bp, Homo sapien
ccagaatggccaagttcctgaagtt

SEQ ID NO: 5350255 - DNA, 25 bp, Homo sapien
agaatggccaagttcctgaagttct

SEQ ID NO: 5350256 - DNA, 25 bp, Homo sapien
aacttattggcaaggtggcaaccca

SEQ ID NO: 5350257 - DNA, 25 bp, Homo sapien
aatttcacgactgttatggacccgg

SEQ ID NO: 5350258 - DNA, 25 bp, Homo sapien
taaagctgagcatgagaccctggat

SEQ ID NO: 5350259 - DNA, 25 bp, Homo sapien
caataaaggctttcagtgggaccaa

SEQ ID NO: 5350260 - DNA, 25 bp, Homo sapien
agactatcgcgccatccaggacttt

SEQ ID NO: 5350261 - DNA, 25 bp, Homo sapien
aggactttgatcatgatgctctgac

SEQ ID NO: 5350262 - DNA, 25 bp, Homo sapien
tgggttatttctcttggagggcatt

SEQ ID NO: 5350263 - DNA, 25 bp, Homo sapien
gggaagtgaacatctatgggtaaga

SEQ ID NO: 5350264 - DNA, 25 bp, Homo sapien
ggaatgaattggttgttccctcttc

SEQ ID NO: 5350265 - DNA, 25 bp, Homo sapien
gaatgaattggttgttccctcttct

SEQ ID NO: 5350266 - DNA, 25 bp, Homo sapien
tggaggaagagcaggattctgagaa

SEQ ID NO: 5350267 - DNA, 25 bp, Homo sapien
gaggaagagcaggattctgagaagg

SEQ ID NO: 5350268 - DNA, 25 bp, Homo sapien
ctggaggaagagcaggattctgaga

SEQ ID NO: 5350269 - DNA, 25 bp, Homo sapien
ggaagagcaggattctgagaagggg

SEQ ID NO: 5350270 - DNA, 25 bp, Homo sapien
tgagctagaacgactggaagaacct

SEQ ID NO: 5350271 - DNA, 25 bp, Homo sapien
ggaaggttagatgtcgccacacgga

SEQ ID NO: 5350272 - DNA, 25 bp, Homo sapien
tggatgacaaggctccaaatggccc

SEQ ID NO: 5350273 - DNA, 25 bp, Homo sapien
ccacacggaaggcagatgaagtaca

SEQ ID NO: 5350274 - DNA, 25 bp, Homo sapien
ttcagtgggattccccggcctcttc

SEQ ID NO: 5350275 - DNA, 25 bp, Homo sapien
cagagccaaacctgatgctgtggag

SEQ ID NO: 5350276 - DNA, 25 bp, Homo sapien
gtactagctccccaagagggctcct

SEQ ID NO: 5350277 - DNA, 25 bp, Homo sapien
gggtcctcctgatatcgggctcggt

SEQ ID NO: 5350278 - DNA, 25 bp, Homo sapien
aaatctctgtctttcggccacagcc

SEQ ID NO: 5350279 - DNA, 25 bp, Homo sapien
gcggcgtcctttcactaggtccaaa

SEQ ID NO: 5350280 - DNA, 25 bp, Homo sapien
ggacacggggcatccccactaggcg

SEQ ID NO: 5350281 - DNA, 25 bp, Homo sapien
gggtcgtgctcttccctcgccaagt

SEQ ID NO: 5350282 - DNA, 25 bp, Homo sapien
ggaccaggctctggaacccagctcc

SEQ ID NO: 5350283 - DNA, 25 bp, Homo sapien
cgtggatccacacgcacagtgggct

SEQ ID NO: 5350284 - DNA, 25 bp, Homo sapien
aacccagctcccacgtggatccaca

SEQ ID NO: 5350285 - DNA, 25 bp, Homo sapien
agccacgcccgcgacgcgagggccc

SEQ ID NO: 5350286 - DNA, 25 bp, Homo sapien
gctgcccggaaacagcagggattcg

SEQ ID NO: 5350287 - DNA, 25 bp, Homo sapien
acaggagcagggaccgactctatca

SEQ ID NO: 5350288 - DNA, 25 bp, Homo sapien
gcagggattcggtgagagcctcaca

SEQ ID NO: 5350289 - DNA, 25 bp, Homo sapien
tgcacagtccctagcggggggcact

SEQ ID NO: 5350290 - DNA, 25 bp, Homo sapien
cgccccgcgccagcccccgcgtccg

SEQ ID NO: 5350291 - DNA, 25 bp, Homo sapien
cgcgtccgccccgcgccagcccccg

SEQ ID NO: 5350292 - DNA, 25 bp, Homo sapien
cgtccgccccgcgccagcccccgcg

SEQ ID NO: 5350293 - DNA, 25 bp, Homo sapien
tccgccccgcgccagcccccgcgtc

SEQ ID NO: 5350294 - DNA, 25 bp, Homo sapien
tcaagatagttattggcccctaaac

SEQ ID NO: 5350295 - DNA, 25 bp, Homo sapien
ggatatcccatttgtcctgatgaga

SEQ ID NO: 5350296 - DNA, 25 bp, Homo sapien
taactgtgccttgcttatggtgagc

SEQ ID NO: 5350297 - DNA, 25 bp, Homo sapien
gctctaatctcctaggaaggtccaa

SEQ ID NO: 5350298 - DNA, 25 bp, Homo sapien
tctccgggtgattccagcttgcagc

SEQ ID NO: 5350299 - DNA, 25 bp, Homo sapien
caagcggaagcggaaataagccctc

SEQ ID NO: 5350300 - DNA, 25 bp, Homo sapien
ggagtcggaccagctgcacagttaa

SEQ ID NO: 5350301 - DNA, 25 bp, Homo sapien
gcatcaatgtcgaaagctctccggg

SEQ ID NO: 5350302 - DNA, 25 bp, Homo sapien
tggatcctgttcagccacgggaagc

SEQ ID NO: 5350303 - DNA, 25 bp, Homo sapien
ggaagccggcgtttgcacacatttt

SEQ ID NO: 5350304 - DNA, 25 bp, Homo sapien
agagagacacattccctgcggacgg

SEQ ID NO: 5350305 - DNA, 25 bp, Homo sapien
ccatcggatactggagggacgcgac

SEQ ID NO: 5350306 - DNA, 25 bp, Homo sapien
tgaagtccttgcgaaggccccgcat

SEQ ID NO: 5350307 - DNA, 25 bp, Homo sapien
gatgaagtccttgcgaaggccccgc

SEQ ID NO: 5350308 - DNA, 25 bp, Homo sapien
cggacgccgagacttctgggagatg

SEQ ID NO: 5350309 - DNA, 25 bp, Homo sapien
gacgccgagacttctgggagatgaa

SEQ ID NO: 5350310 - DNA, 25 bp, Homo sapien
gttgccctgacttccctttagagag

SEQ ID NO: 5350311 - DNA, 25 bp, Homo sapien
catattccactgctctaagccaaga

SEQ ID NO: 5350312 - DNA, 25 bp, Homo sapien
cctgaggtgtggaaccttctccata

SEQ ID NO: 5350313 - DNA, 25 bp, Homo sapien
tcatcagggaaagaacacgtgaacc

SEQ ID NO: 5350314 - DNA, 25 bp, Homo sapien
gagtcctttgcagcatccaggcgca

SEQ ID NO: 5350315 - DNA, 25 bp, Homo sapien
ctttgcagcatccaggcgcagccgt

SEQ ID NO: 5350316 - DNA, 25 bp, Homo sapien
tgttcatcccaaaaagttcggagtc

SEQ ID NO: 5350317 - DNA, 25 bp, Homo sapien
caaaaagttcggagtcctttgcagc

SEQ ID NO: 5350318 - DNA, 25 bp, Homo sapien
tcagaagctttacggtcagctccag

SEQ ID NO: 5350319 - DNA, 25 bp, Homo sapien
ggcctgacctcagaagctttacggt

SEQ ID NO: 5350320 - DNA, 25 bp, Homo sapien
tgtagctcataagggcagaataata

SEQ ID NO: 5350321 - DNA, 25 bp, Homo sapien
ggtcagctccagagcactgacacct

SEQ ID NO: 5350322 - DNA, 25 bp, Homo sapien
tctgtgttggccacgaagggccgat

SEQ ID NO: 5350323 - DNA, 25 bp, Homo sapien
ggatttcagcaagacctccaggctc

SEQ ID NO: 5350324 - DNA, 25 bp, Homo sapien
tagcggagatgcgaaaagtcccacg

SEQ ID NO: 5350325 - DNA, 25 bp, Homo sapien
caacggtaccaggtgcaaggcttta

SEQ ID NO: 5350326 - DNA, 25 bp, Homo sapien
gatagatgaggcaataagaaagccc

SEQ ID NO: 5350327 - DNA, 25 bp, Homo sapien
tggcctcgattgacagcatgctgtg

SEQ ID NO: 5350328 - DNA, 25 bp, Homo sapien
tgggaattggtataagtcctgaccc

SEQ ID NO: 5350329 - DNA, 25 bp, Homo sapien
tcttctctgataccaccccagggta

SEQ ID NO: 5350330 - DNA, 25 bp, Homo sapien
tagagatgtgtcaactttactagtc

SEQ ID NO: 5350331 - DNA, 25 bp, Homo sapien
cttgttctatttgaacttagtccct

SEQ ID NO: 5350332 - DNA, 25 bp, Homo sapien
gctatgtttgacgaagatattaccc

SEQ ID NO: 5350333 - DNA, 25 bp, Homo sapien
cctgatattgcttatttgtatcctc

SEQ ID NO: 5350334 - DNA, 25 bp, Homo sapien
ttgctccataatttgccaacaccag

SEQ ID NO: 5350335 - DNA, 25 bp, Homo sapien
taatttgccaacaccaggtattctc

SEQ ID NO: 5350336 - DNA, 25 bp, Homo sapien
gccaacaccaggtattctcattgtt

SEQ ID NO: 5350337 - DNA, 25 bp, Homo sapien
gctccataatttgccaacaccaggt

SEQ ID NO: 5350338 - DNA, 25 bp, Homo sapien
gaatactttaaacagttctatgcac

SEQ ID NO: 5350339 - DNA, 25 bp, Homo sapien
aaataggctactagctagactataa

SEQ ID NO: 5350340 - DNA, 25 bp, Homo sapien
gaaatacaaacaacgatcaagaata

SEQ ID NO: 5350341 - DNA, 25 bp, Homo sapien
aaaataggctactagctagactata

SEQ ID NO: 5350342 - DNA, 25 bp, Homo sapien
tagccagctttgaccttgcaacaca

SEQ ID NO: 5350343 - DNA, 25 bp, Homo sapien
gaacttctgcaactttctatattca

SEQ ID NO: 5350344 - DNA, 25 bp, Homo sapien
tttcacctaatggaaacatgccctt

SEQ ID NO: 5350345 - DNA, 25 bp, Homo sapien
aacacattctacttttttgcatacc

SEQ ID NO: 5350346 - DNA, 25 bp, Homo sapien
aacagcagatagtggtaaacagcaa

SEQ ID NO: 5350347 - DNA, 25 bp, Homo sapien
gcagaacagcagatagtggtaaaca

SEQ ID NO: 5350348 - DNA, 25 bp, Homo sapien
cattctgtgaccagctttgttccat

SEQ ID NO: 5350349 - DNA, 25 bp, Homo sapien
cagcagatagtggtaaacagcaaat

SEQ ID NO: 5350350 - DNA, 25 bp, Homo sapien
gctccactgccgtcttgattttgag

SEQ ID NO: 5350351 - DNA, 25 bp, Homo sapien
tgcccagaccttggcagggagcgtc

SEQ ID NO: 5350352 - DNA, 25 bp, Homo sapien
tcactgacttcatctattttcctgc

SEQ ID NO: 5350353 - DNA, 25 bp, Homo sapien
cagcggaactgctttggtcactgac

SEQ ID NO: 5350354 - DNA, 25 bp, Homo sapien
taaaactcagtcctgtctatgtggg

SEQ ID NO: 5350355 - DNA, 25 bp, Homo sapien
gggatgccttgaaaggacccctcac

SEQ ID NO: 5350356 - DNA, 25 bp, Homo sapien
gtgaccactgaaccaagcttaaagg

SEQ ID NO: 5350357 - DNA, 25 bp, Homo sapien
tcgagactggagaatatgctgagaa

SEQ ID NO: 5350358 - DNA, 25 bp, Homo sapien
ctttcttaggagtgatctggtggcc

SEQ ID NO: 5350359 - DNA, 25 bp, Homo sapien
tttatcctgcgcatgtggcctaggg

SEQ ID NO: 5350360 - DNA, 25 bp, Homo sapien
caggtaacgccactaatcaggcagg

SEQ ID NO: 5350361 - DNA, 25 bp, Homo sapien
cagaacaggattttgcacggcccct

SEQ ID NO: 5350362 - DNA, 25 bp, Homo sapien
gaggcaaaatgtccggtccaggtcc

SEQ ID NO: 5350363 - DNA, 25 bp, Homo sapien
tggccacatctagagtaggtcctga

SEQ ID NO: 5350364 - DNA, 25 bp, Homo sapien
ggaggtttgttccaagtgctcagcc

SEQ ID NO: 5350365 - DNA, 25 bp, Homo sapien
tacattcccgcagtgacagttttct

SEQ ID NO: 5350366 - DNA, 25 bp, Homo sapien
gccccggatggagccccagagacaa

SEQ ID NO: 5350367 - DNA, 25 bp, Homo sapien
cctatcacagggcaggcgccccgga

SEQ ID NO: 5350368 - DNA, 25 bp, Homo sapien
gcgccccggatggagccccagagac

SEQ ID NO: 5350369 - DNA, 25 bp, Homo sapien
tatcacagggcaggcgccccggatg

SEQ ID NO: 5350370 - DNA, 25 bp, Homo sapien
gagggcgggtgcggaaacctgtgcc

SEQ ID NO: 5350371 - DNA, 25 bp, Homo sapien
aggagggcgggtgcggaaacctgtg

SEQ ID NO: 5350372 - DNA, 25 bp, Homo sapien
ggcgggtgcggaaacctgtgcccgc

SEQ ID NO: 5350373 - DNA, 25 bp, Homo sapien
gcaggagggcgggtgcggaaacctg

SEQ ID NO: 5350374 - DNA, 25 bp, Homo sapien
accggaagcagtggctgttgttttc

SEQ ID NO: 5350375 - DNA, 25 bp, Homo sapien
gccacagttgatgtggcttctgagc

SEQ ID NO: 5350376 - DNA, 25 bp, Homo sapien
atgcaccggaagcagtggctgttgt

SEQ ID NO: 5350377 - DNA, 25 bp, Homo sapien
ttttcatttgtagccacagttgatg

SEQ ID NO: 5350378 - DNA, 25 bp, Homo sapien
gggcttgctcacatgccctgacatg

SEQ ID NO: 5350379 - DNA, 25 bp, Homo sapien
aggccaacaggactggcattcgctg

SEQ ID NO: 5350380 - DNA, 25 bp, Homo sapien
cctgacatgggcatcactagcccat

SEQ ID NO: 5350381 - DNA, 25 bp, Homo sapien
gactggcattcgctgggcactggcc

SEQ ID NO: 5350382 - DNA, 25 bp, Homo sapien
gcagcagaagtgagctgggagtaat

SEQ ID NO: 5350383 - DNA, 25 bp, Homo sapien
gtgagctgggagtaattgagttgca

SEQ ID NO: 5350384 - DNA, 25 bp, Homo sapien
gaagtgagctgggagtaattgagtt

SEQ ID NO: 5350385 - DNA, 25 bp, Homo sapien
cagaagtgagctgggagtaattgag

SEQ ID NO: 5350386 - DNA, 25 bp, Homo sapien
cctgaagtgatactgggcagggagg

SEQ ID NO: 5350387 - DNA, 25 bp, Homo sapien
tgccctgaagtgatactgggcaggg

SEQ ID NO: 5350388 - DNA, 25 bp, Homo sapien
ctgaagtgatactgggcagggaggg

SEQ ID NO: 5350389 - DNA, 25 bp, Homo sapien
gccctgaagtgatactgggcaggga

SEQ ID NO: 5350390 - DNA, 25 bp, Homo sapien
tggccagtcacgacaggaataccca

SEQ ID NO: 5350391 - DNA, 25 bp, Homo sapien
gctggccagtcacgacaggaatacc

SEQ ID NO: 5350392 - DNA, 25 bp, Homo sapien
cagctggccagtcacgacaggaata

SEQ ID NO: 5350393 - DNA, 25 bp, Homo sapien
agctggccagtcacgacaggaatac

SEQ ID NO: 5350394 - DNA, 25 bp, Homo sapien
tgtgacagggttcctacactttggc

SEQ ID NO: 5350395 - DNA, 25 bp, Homo sapien
tcacctggaagtatgctgtgtcact

SEQ ID NO: 5350396 - DNA, 25 bp, Homo sapien
ttagaaccagcgtgcactcagacat

SEQ ID NO: 5350397 - DNA, 25 bp, Homo sapien
ggttgcactgtgtatggccaaggaa

SEQ ID NO: 5350398 - DNA, 25 bp, Homo sapien
tgtcctaggtacaagcagtttctcc

SEQ ID NO: 5350399 - DNA, 25 bp, Homo sapien
caaaggtactcagtgcgcagcctct

SEQ ID NO: 5350400 - DNA, 25 bp, Homo sapien
gtgtctacacccaaacaaccactgg

SEQ ID NO: 5350401 - DNA, 25 bp, Homo sapien
tatgtgacttttgcctggcatggcc

SEQ ID NO: 5350402 - DNA, 25 bp, Homo sapien
tgtcacgatcgaggaggtcttaccc

SEQ ID NO: 5350403 - DNA, 25 bp, Homo sapien
tgatctgtgggacaagcagcccagc

SEQ ID NO: 5350404 - DNA, 25 bp, Homo sapien
tggcctggtcacagataaacaaggg

SEQ ID NO: 5350405 - DNA, 25 bp, Homo sapien
aatagggaaacgttgcagtgcggcc

SEQ ID NO: 5350406 - DNA, 25 bp, Homo sapien
tttctgtctgtatatcttatttgat

SEQ ID NO: 5350407 - DNA, 25 bp, Homo sapien
gcccagccttcatgtcccaattttc

SEQ ID NO: 5350408 - DNA, 25 bp, Homo sapien
ccagccttcatgtcccaattttctg

SEQ ID NO: 5350409 - DNA, 25 bp, Homo sapien
tgcgcccagccttcatgtcccaatt

SEQ ID NO: 5350410 - DNA, 25 bp, Homo sapien
gaaagagacagacatgtgccctgga

SEQ ID NO: 5350411 - DNA, 25 bp, Homo sapien
cccaaattgttagggatatcacgca

SEQ ID NO: 5350412 - DNA, 25 bp, Homo sapien
cccagggagatgacaagtgatggct

SEQ ID NO: 5350413 - DNA, 25 bp, Homo sapien
tagaagactgggacagcctggtaga

SEQ ID NO: 5350414 - DNA, 25 bp, Homo sapien
cacgcttggccctgctgagtcaatc

SEQ ID NO: 5350415 - DNA, 25 bp, Homo sapien
aacatcctctcaacccatccctgtt

SEQ ID NO: 5350416 - DNA, 25 bp, Homo sapien
gccggatgaactgttctagtttttc

SEQ ID NO: 5350417 - DNA, 25 bp, Homo sapien
cagggctcggcgtctgctgcagaac

SEQ ID NO: 5350418 - DNA, 25 bp, Homo sapien
gcagggctcggcgtctgctgcagaa

SEQ ID NO: 5350419 - DNA, 25 bp, Homo sapien
tgaactgccggatgaactgttctag

SEQ ID NO: 5350420 - DNA, 25 bp, Homo sapien
cactgatggcaagctttgggtctgc

SEQ ID NO: 5350421 - DNA, 25 bp, Homo sapien
ccctaggtctctgaaggtccagata

SEQ ID NO: 5350422 - DNA, 25 bp, Homo sapien
tagcactgatggcaagctttgggtc

SEQ ID NO: 5350423 - DNA, 25 bp, Homo sapien
gtctctgaaggtccagatagcactg

SEQ ID NO: 5350424 - DNA, 25 bp, Homo sapien
caaagatcccttcttcctgggcggt

SEQ ID NO: 5350425 - DNA, 25 bp, Homo sapien
ccttcttcctgggcggtggcctgca

SEQ ID NO: 5350426 - DNA, 25 bp, Homo sapien
cttcctgggcggtggcctgcaggaa

SEQ ID NO: 5350427 - DNA, 25 bp, Homo sapien
cttcttcctgggcggtggcctgcag

SEQ ID NO: 5350428 - DNA, 25 bp, Homo sapien
acaaaggtagagacggagccctcca

SEQ ID NO: 5350429 - DNA, 25 bp, Homo sapien
caaatactgcaaccctgacccaatg

SEQ ID NO: 5350430 - DNA, 25 bp, Homo sapien
tcctgtctgtccaaagccaaggaca

SEQ ID NO: 5350431 - DNA, 25 bp, Homo sapien
gtatgccaactccatgtccaccaag

SEQ ID NO: 5350432 - DNA, 25 bp, Homo sapien
gtgcgcaggaggtcacactcccatg

SEQ ID NO: 5350433 - DNA, 25 bp, Homo sapien
ggcggcccgtgcagtccgtgcgcag

SEQ ID NO: 5350434 - DNA, 25 bp, Homo sapien
caggaggtcacactcccatgctgca

SEQ ID NO: 5350435 - DNA, 25 bp, Homo sapien
gcagtccgtgcgcaggaggtcacac

SEQ ID NO: 5350436 - DNA, 25 bp, Homo sapien
cacaagggcctaaatagtgggaggc

SEQ ID NO: 5350437 - DNA, 25 bp, Homo sapien
tgtcaaccagtcctacagtcatatg

SEQ ID NO: 5350438 - DNA, 25 bp, Homo sapien
tcagacatctattcctgagggtcag

SEQ ID NO: 5350439 - DNA, 25 bp, Homo sapien
catatgaaatcttgactgaggctga

SEQ ID NO: 5350440 - DNA, 25 bp, Homo sapien
caggacgtgcatcctaagcttctgt

SEQ ID NO: 5350441 - DNA, 25 bp, Homo sapien
ggacgtgcatcctaagcttctgtac

SEQ ID NO: 5350442 - DNA, 25 bp, Homo sapien
acgtgcatcctaagcttctgtacac

SEQ ID NO: 5350443 - DNA, 25 bp, Homo sapien
tcaggacgtgcatcctaagcttctg

SEQ ID NO: 5350444 - DNA, 25 bp, Homo sapien
gactggggaatctctccaggtactc

SEQ ID NO: 5350445 - DNA, 25 bp, Homo sapien
cttggtcactgcctggaaaatggca

SEQ ID NO: 5350446 - DNA, 25 bp, Homo sapien
gggaatctctccaggtactcccttc

SEQ ID NO: 5350447 - DNA, 25 bp, Homo sapien
ccttcttacgcttccctacctgctt

SEQ ID NO: 5350448 - DNA, 25 bp, Homo sapien
ttcggatcgatcgcagccgctgcca

SEQ ID NO: 5350449 - DNA, 25 bp, Homo sapien
ggccccttcggatcgatcgcagccg

SEQ ID NO: 5350450 - DNA, 25 bp, Homo sapien
tgcgccccggcctgcaagacaccac

SEQ ID NO: 5350451 - DNA, 25 bp, Homo sapien
tggaggggccccttcggatcgatcg

SEQ ID NO: 5350452 - DNA, 25 bp, Homo sapien
catttacctgggctggcttggaaat

SEQ ID NO: 5350453 - DNA, 25 bp, Homo sapien
tcatttacctgggctggcttggaaa

SEQ ID NO: 5350454 - DNA, 25 bp, Homo sapien
catattttggtagcggttcaattgt

SEQ ID NO: 5350455 - DNA, 25 bp, Homo sapien
tctgattcctcatggatattgctgt

SEQ ID NO: 5350456 - DNA, 25 bp, Homo sapien
attgctgttgcacctgatttgtctg

SEQ ID NO: 5350457 - DNA, 25 bp, Homo sapien
gacttggggcgttctcaaatctaca

SEQ ID NO: 5350458 - DNA, 25 bp, Homo sapien
tttctaatgaatcctcgttgctgac

SEQ ID NO: 5350459 - DNA, 25 bp, Homo sapien
cgggcctcccatcatcgccatattc

SEQ ID NO: 5350460 - DNA, 25 bp, Homo sapien
tctgtttgtttcaagctgggggccg

SEQ ID NO: 5350461 - DNA, 25 bp, Homo sapien
ccgggcctcccatcatcgccatatt

SEQ ID NO: 5350462 - DNA, 25 bp, Homo sapien
ggccgggcctcccatcatcgccata

SEQ ID NO: 5350463 - DNA, 25 bp, Homo sapien
tcccagggtacatttgggagtactg

SEQ ID NO: 5350464 - DNA, 25 bp, Homo sapien
agcgtctgccaatctctaccatgcg

SEQ ID NO: 5350465 - DNA, 25 bp, Homo sapien
aaagtcttgagccagagatccaatt

SEQ ID NO: 5350466 - DNA, 25 bp, Homo sapien
ccttagcataggtcgattctttgta

SEQ ID NO: 5350467 - DNA, 25 bp, Homo sapien
gaaatgctcttggacagtatctgtc

SEQ ID NO: 5350468 - DNA, 25 bp, Homo sapien
cactgatagtttggtaagctggagc

SEQ ID NO: 5350469 - DNA, 25 bp, Homo sapien
tggagcttgtaccatcactgcaaca

SEQ ID NO: 5350470 - DNA, 25 bp, Homo sapien
tccaggtgcatggaaggatacacta

SEQ ID NO: 5350471 - DNA, 25 bp, Homo sapien
tcatgtatgccttcgctttagtaga

SEQ ID NO: 5350472 - DNA, 25 bp, Homo sapien
tatgccttcgctttagtagatcctg

SEQ ID NO: 5350473 - DNA, 25 bp, Homo sapien
caggtacacgtgcacctgtgtaata

SEQ ID NO: 5350474 - DNA, 25 bp, Homo sapien
tgctaaaatccaggtacacgtgcac

SEQ ID NO: 5350475 - DNA, 25 bp, Homo sapien
ctgtgcacatgaatgttccacatcc

SEQ ID NO: 5350476 - DNA, 25 bp, Homo sapien
gtgcacatgaatgttccacatcctg

SEQ ID NO: 5350477 - DNA, 25 bp, Homo sapien
tgtgcacatgaatgttccacatcct

SEQ ID NO: 5350478 - DNA, 25 bp, Homo sapien
ttaaaatctccctctcatgggccat

SEQ ID NO: 5350479 - DNA, 25 bp, Homo sapien
catctggtttatgggacttttcctt

SEQ ID NO: 5350480 - DNA, 25 bp, Homo sapien
ccttttaaaatctccctctcatggg

SEQ ID NO: 5350481 - DNA, 25 bp, Homo sapien
tggtttatgggacttttccttcagc

SEQ ID NO: 5350482 - DNA, 25 bp, Homo sapien
gtgttcataatgattgtccagttga

SEQ ID NO: 5350483 - DNA, 25 bp, Homo sapien
tactccagtgtcatgtgcatcttcc

SEQ ID NO: 5350484 - DNA, 25 bp, Homo sapien
caggaatctggaacttgaatggtgt

SEQ ID NO: 5350485 - DNA, 25 bp, Homo sapien
ccaaaagaatatttacctggtcaat

SEQ ID NO: 5350486 - DNA, 25 bp, Homo sapien
tctctggatatagatcctcagtgtc

SEQ ID NO: 5350487 - DNA, 25 bp, Homo sapien
tataaggggctcgttggatctcatg

SEQ ID NO: 5350488 - DNA, 25 bp, Homo sapien
ttacaggacccccagtctctggata

SEQ ID NO: 5350489 - DNA, 25 bp, Homo sapien
ctcgttggatctcatgttttacagg

SEQ ID NO: 5350490 - DNA, 25 bp, Homo sapien
aaaaagcctgaacagtatgatttct

SEQ ID NO: 5350491 - DNA, 25 bp, Homo sapien
gggctcccttgtatatggagttccc

SEQ ID NO: 5350492 - DNA, 25 bp, Homo sapien
aagtacaaaaaagcctgaacagtat

SEQ ID NO: 5350493 - DNA, 25 bp, Homo sapien
aacagtgaagggctcccttgtatat

SEQ ID NO: 5350494 - DNA, 25 bp, Homo sapien
tgtcctcagagttaaccattgtgct

SEQ ID NO: 5350495 - DNA, 25 bp, Homo sapien
tcaaaggtccacgtctaaacatcca

SEQ ID NO: 5350496 - DNA, 25 bp, Homo sapien
tattgtgattggttacttcaaaatg

SEQ ID NO: 5350497 - DNA, 25 bp, Homo sapien
cccggcccagaggtttctctatgta

SEQ ID NO: 5350498 - DNA, 25 bp, Homo sapien
atgttccagtgaaaatcagtttgta

SEQ ID NO: 5350499 - DNA, 25 bp, Homo sapien
tgttccagtgaaaatcagtttgtaa

SEQ ID NO: 5350500 - DNA, 25 bp, Homo sapien
tgtacaccagtccagtgatgggtcc

SEQ ID NO: 5350501 - DNA, 25 bp, Homo sapien
cggaagcggttgagcctgtacacca

SEQ ID NO: 5350502 - DNA, 25 bp, Homo sapien
gttgagcctgtacaccagtccagtg

SEQ ID NO: 5350503 - DNA, 25 bp, Homo sapien
ccagtccagtgatgggtcctgcagt

SEQ ID NO: 5350504 - DNA, 25 bp, Homo sapien
ctgatcatctgtgcccgtaaaacca

SEQ ID NO: 5350505 - DNA, 25 bp, Homo sapien
tatggagaaccggatgcagcttcct

SEQ ID NO: 5350506 - DNA, 25 bp, Homo sapien
ttcttccttatggagaaccggatgc

SEQ ID NO: 5350507 - DNA, 25 bp, Homo sapien
gcagcttcctatactcattcctgat

SEQ ID NO: 5350508 - DNA, 25 bp, Homo sapien
ccataaaatcctcatttgctttaag

SEQ ID NO: 5350509 - DNA, 25 bp, Homo sapien
cataaaatcctcatttgctttaaga

SEQ ID NO: 5350510 - DNA, 25 bp, Homo sapien
gcctatgggtcccacatatttgttt

SEQ ID NO: 5350511 - DNA, 25 bp, Homo sapien
tcttctttgtttgcctatgggtccc

SEQ ID NO: 5350512 - DNA, 25 bp, Homo sapien
agcagaggagactcttgtccatgtc

SEQ ID NO: 5350513 - DNA, 25 bp, Homo sapien
aggagactcttgtccatgtcacaga

SEQ ID NO: 5350514 - DNA, 25 bp, Homo sapien
tgacagggtctaccaggtagttcaa

SEQ ID NO: 5350515 - DNA, 25 bp, Homo sapien
atggtgacagggtctaccaggtagt

SEQ ID NO: 5350516 - DNA, 25 bp, Homo sapien
gacagggtctaccaggtagttcaaa

SEQ ID NO: 5350517 - DNA, 25 bp, Homo sapien
ggtgacagggtctaccaggtagttc

SEQ ID NO: 5350518 - DNA, 25 bp, Homo sapien
aggcatgtgagaagtctgagtccat

SEQ ID NO: 5350519 - DNA, 25 bp, Homo sapien
gagtctcacagtgcagtgctggtag

SEQ ID NO: 5350520 - DNA, 25 bp, Homo sapien
ggaagtccccaaagccagttgcaaa

SEQ ID NO: 5350521 - DNA, 25 bp, Homo sapien
gctggtagctttcggaagtccccaa

SEQ ID NO: 5350522 - DNA, 25 bp, Homo sapien
ccagttgcaaagctactctgtgggc

SEQ ID NO: 5350523 - DNA, 25 bp, Homo sapien
acgcatttgttcattagggctcagg

SEQ ID NO: 5350524 - DNA, 25 bp, Homo sapien
cctgtggatcccacgcatttgttca

SEQ ID NO: 5350525 - DNA, 25 bp, Homo sapien
tttgtctccctgtggatcccacgca

SEQ ID NO: 5350526 - DNA, 25 bp, Homo sapien
ggatcccacgcatttgttcattagg

SEQ ID NO: 5350527 - DNA, 25 bp, Homo sapien
ttcgagcagccacagcaagtattca

SEQ ID NO: 5350528 - DNA, 25 bp, Homo sapien
tccaggaatttctaatgctctgttt

SEQ ID NO: 5350529 - DNA, 25 bp, Homo sapien
ccaggaatttctaatgctctgtttg

SEQ ID NO: 5350530 - DNA, 25 bp, Homo sapien
ctatgcttcgagcagccacagcaag

SEQ ID NO: 5350531 - DNA, 25 bp, Homo sapien
caaggaagcaatggcagtatttgtc

SEQ ID NO: 5350532 - DNA, 25 bp, Homo sapien
tactaccagattgaaaattccaagg

SEQ ID NO: 5350533 - DNA, 25 bp, Homo sapien
ggttgctctgctataacatcttctc

SEQ ID NO: 5350534 - DNA, 25 bp, Homo sapien
cagtttttcagtgctgggttgctct

SEQ ID NO: 5350535 - DNA, 25 bp, Homo sapien
gctttttaccactgtcaaggtgtcc

SEQ ID NO: 5350536 - DNA, 25 bp, Homo sapien
tgcctaaggttagcaccagatctta

SEQ ID NO: 5350537 - DNA, 25 bp, Homo sapien
caaatagacaagttgctgcctaagg

SEQ ID NO: 5350538 - DNA, 25 bp, Homo sapien
ttattgccacgtcccatgcagcagg

SEQ ID NO: 5350539 - DNA, 25 bp, Homo sapien
tgaaataaatcaaagagggaccact

SEQ ID NO: 5350540 - DNA, 25 bp, Homo sapien
tagaatatcaccaagaattacttac

SEQ ID NO: 5350541 - DNA, 25 bp, Homo sapien
gaacattgtcaatcattaatccaga

SEQ ID NO: 5350542 - DNA, 25 bp, Homo sapien
tatttatcaatagccttgttacaga

SEQ ID NO: 5350543 - DNA, 25 bp, Homo sapien
tgggtcagtaataacattgctttgc

SEQ ID NO: 5350544 - DNA, 25 bp, Homo sapien
cttccatgtcagctgaaaataagtg

SEQ ID NO: 5350545 - DNA, 25 bp, Homo sapien
gaatctgatgtacaacctgtaggca

SEQ ID NO: 5350546 - DNA, 25 bp, Homo sapien
tgatctaaggctggtaacagtggcc

SEQ ID NO: 5350547 - DNA, 25 bp, Homo sapien
ttcattaattagtctttattatgtg

SEQ ID NO: 5350548 - DNA, 25 bp, Homo sapien
cattaattagtctttattatgtgaa

SEQ ID NO: 5350549 - DNA, 25 bp, Homo sapien
ttaattagtctttattatgtgaaaa

SEQ ID NO: 5350550 - DNA, 25 bp, Homo sapien
tcattaattagtctttattatgtga

SEQ ID NO: 5350551 - DNA, 25 bp, Homo sapien
tctgtaccctttccaggacgaggag

SEQ ID NO: 5350552 - DNA, 25 bp, Homo sapien
tgactacaaagagttccagggcccc

SEQ ID NO: 5350553 - DNA, 25 bp, Homo sapien
agcatagcctgggacgactctgtac

SEQ ID NO: 5350554 - DNA, 25 bp, Homo sapien
gctggaccagccttaatgtcgcctg

SEQ ID NO: 5350555 - DNA, 25 bp, Homo sapien
aaccccacactgacgtcaactggca

SEQ ID NO: 5350556 - DNA, 25 bp, Homo sapien
taaccccacactgacgtcaactggc

SEQ ID NO: 5350557 - DNA, 25 bp, Homo sapien
gtaaccccacactgacgtcaactgg

SEQ ID NO: 5350558 - DNA, 25 bp, Homo sapien
accccacactgacgtcaactggcag

SEQ ID NO: 5350559 - DNA, 25 bp, Homo sapien
gatctggtggaaacacaggctgcca

SEQ ID NO: 5350560 - DNA, 25 bp, Homo sapien
ttttactaaagaggctatcctggcc

SEQ ID NO: 5350561 - DNA, 25 bp, Homo sapien
gctggcccagggttctcacgttgag

SEQ ID NO: 5350562 - DNA, 25 bp, Homo sapien
ggagtggccacttatacgtccgcct

SEQ ID NO: 5350563 - DNA, 25 bp, Homo sapien
aggtccgcctcagcaaggtgcccgc

SEQ ID NO: 5350564 - DNA, 25 bp, Homo sapien
ggacgtgagagtccgcgggtgcttg

SEQ ID NO: 5350565 - DNA, 25 bp, Homo sapien
gcagcataaaggcagcggccacctg

SEQ ID NO: 5350566 - DNA, 25 bp, Homo sapien
tggtggtgcccaggtccgcctcagc

SEQ ID NO: 5350567 - DNA, 25 bp, Homo sapien
attgtcattggaacagccagtgtca

SEQ ID NO: 5350568 - DNA, 25 bp, Homo sapien
tgtcattggaacagccagtgtcagg

SEQ ID NO: 5350569 - DNA, 25 bp, Homo sapien
cattggaacagccagtgtcaggcag

SEQ ID NO: 5350570 - DNA, 25 bp, Homo sapien
attggaacagccagtgtcaggcagc

SEQ ID NO: 5350571 - DNA, 25 bp, Homo sapien
tcaggctgatgtggcgtctgaccct

SEQ ID NO: 5350572 - DNA, 25 bp, Homo sapien
ctgatgtggcgtctgacccttggtg

SEQ ID NO: 5350573 - DNA, 25 bp, Homo sapien
ggttgccagacattccttcctgttt

SEQ ID NO: 5350574 - DNA, 25 bp, Homo sapien
gtctgacccttggtgggttgccaga

SEQ ID NO: 5350575 - DNA, 25 bp, Homo sapien
cacgctcttgcggagtgagtatgtt

SEQ ID NO: 5350576 - DNA, 25 bp, Homo sapien
caggtcccacgctcttgcggagtga

SEQ ID NO: 5350577 - DNA, 25 bp, Homo sapien
agccactacggcaccacaacccatg

SEQ ID NO: 5350578 - DNA, 25 bp, Homo sapien
catttctgatactgcccagccacta

SEQ ID NO: 5350579 - DNA, 25 bp, Homo sapien
gctcctggtgttcacaaaatggctc

SEQ ID NO: 5350580 - DNA, 25 bp, Homo sapien
tgatgctcctggtgttcacaaaatg

SEQ ID NO: 5350581 - DNA, 25 bp, Homo sapien
aaaagcctgccgagccagcaagtgt

SEQ ID NO: 5350582 - DNA, 25 bp, Homo sapien
caagtgtagggcaggacccggattt

SEQ ID NO: 5350583 - DNA, 25 bp, Homo sapien
tgcatggggcgctctggtgggactg

SEQ ID NO: 5350584 - DNA, 25 bp, Homo sapien
gcatggggcgctctggtgggactgg

SEQ ID NO: 5350585 - DNA, 25 bp, Homo sapien
ggatgggttgagcacggatctctga

SEQ ID NO: 5350586 - DNA, 25 bp, Homo sapien
agtggatgggttgagcacggatctc

SEQ ID NO: 5350587 - DNA, 25 bp, Homo sapien
ccagtggatgggttgagcacggatc

SEQ ID NO: 5350588 - DNA, 25 bp, Homo sapien
tccagtggatgggttgagcacggat

SEQ ID NO: 5350589 - DNA, 25 bp, Homo sapien
tgagaccgcagaattctaaccacta

SEQ ID NO: 5350590 - DNA, 25 bp, Homo sapien
cgcggctgtgagaccgcagaattct

SEQ ID NO: 5350591 - DNA, 25 bp, Homo sapien
tgtgagaccgcagaattctaaccac

SEQ ID NO: 5350592 - DNA, 25 bp, Homo sapien
ccgggccgcggctgtgagaccgcag

SEQ ID NO: 5350593 - DNA, 25 bp, Homo sapien
cagactgtgaattctcattgacaac

SEQ ID NO: 5350594 - DNA, 25 bp, Homo sapien
tcacacagactgtgaattctcattg

SEQ ID NO: 5350595 - DNA, 25 bp, Homo sapien
acacagactgtgaattctcattgac

SEQ ID NO: 5350596 - DNA, 25 bp, Homo sapien
cacagactgtgaattctcattgaca

SEQ ID NO: 5350597 - DNA, 25 bp, Homo sapien
gagagacactggctttaacctcaga

SEQ ID NO: 5350598 - DNA, 25 bp, Homo sapien
tgtctgagaccagcaatgcagatgc

SEQ ID NO: 5350599 - DNA, 25 bp, Homo sapien
gagataggccctgtcttgtcgcagt

SEQ ID NO: 5350600 - DNA, 25 bp, Homo sapien
tctggcccgtactgaaccatgatgc

SEQ ID NO: 5350601 - DNA, 25 bp, Homo sapien
ctgagcattctctattgacactaaa

SEQ ID NO: 5350602 - DNA, 25 bp, Homo sapien
tcctgagcattctctattgacacta

SEQ ID NO: 5350603 - DNA, 25 bp, Homo sapien
gttcctgagcattctctattgacac

SEQ ID NO: 5350604 - DNA, 25 bp, Homo sapien
ctctattgacactaaaatttccata

SEQ ID NO: 5350605 - DNA, 25 bp, Homo sapien
taaaaatactatcagacgtgggagc

SEQ ID NO: 5350606 - DNA, 25 bp, Homo sapien
gaagggatttacctgtcgatgagcc

SEQ ID NO: 5350607 - DNA, 25 bp, Homo sapien
tgttatccagaaagcccagaggaca

SEQ ID NO: 5350608 - DNA, 25 bp, Homo sapien
catgtgttagaattatccccagggc

SEQ ID NO: 5350609 - DNA, 25 bp, Homo sapien
cagatacggtgtcttgtcgcccagg

SEQ ID NO: 5350610 - DNA, 25 bp, Homo sapien
cagggtcaggcagagtttctccgca

SEQ ID NO: 5350611 - DNA, 25 bp, Homo sapien
gaaaatggcgatactcagggcactg

SEQ ID NO: 5350612 - DNA, 25 bp, Homo sapien
ttatgctgcgtacaaagaatcgacc

SEQ ID NO: 5350613 - DNA, 25 bp, Homo sapien
ggaaacagcataccgaaacactcga

SEQ ID NO: 5350614 - DNA, 25 bp, Homo sapien
cacattgagatccagtttagaggca

SEQ ID NO: 5350615 - DNA, 25 bp, Homo sapien
tgtagatttgagaacgccccaagtc

SEQ ID NO: 5350616 - DNA, 25 bp, Homo sapien
tcgaagagaagaaggccgtgatgcc

SEQ ID NO: 5350617 - DNA, 25 bp, Homo sapien
gaaccctatcatatggagggccaac

SEQ ID NO: 5350618 - DNA, 25 bp, Homo sapien
tgttaacttggtatgaagcctttcc

SEQ ID NO: 5350619 - DNA, 25 bp, Homo sapien
aagcctttccttaagtatcgactgg

SEQ ID NO: 5350620 - DNA, 25 bp, Homo sapien
gatgctaataatcctcagatgtcct

SEQ ID NO: 5350621 - DNA, 25 bp, Homo sapien
tactggcagtgtgacaccatgagca

SEQ ID NO: 5350622 - DNA, 25 bp, Homo sapien
gaactctgctgaccgatgctttagg

SEQ ID NO: 5350623 - DNA, 25 bp, Homo sapien
catgagcacgctcctaggctaatgg

SEQ ID NO: 5350624 - DNA, 25 bp, Homo sapien
tcacacagaggtagcagtcatcagg

SEQ ID NO: 5350625 - DNA, 25 bp, Homo sapien
cagttcagggtaatcagacgcattc

SEQ ID NO: 5350626 - DNA, 25 bp, Homo sapien
tagcagtgtccatatagatccaaga

SEQ ID NO: 5350627 - DNA, 25 bp, Homo sapien
tactaagactttgatcagggacagg

SEQ ID NO: 5350628 - DNA, 25 bp, Homo sapien
gattcacatgcagagcgccagatta

SEQ ID NO: 5350629 - DNA, 25 bp, Homo sapien
cagcagctcaatgggctgccaagtt

SEQ ID NO: 5350630 - DNA, 25 bp, Homo sapien
gaatagaagataccattcccatggc

SEQ ID NO: 5350631 - DNA, 25 bp, Homo sapien
gttctactgtctgagaactctctga

SEQ ID NO: 5350632 - DNA, 25 bp, Homo sapien
tgagagagtgttccatgctaccagg

SEQ ID NO: 5350633 - DNA, 25 bp, Homo sapien
gggagtagtagttcaggccggtgat

SEQ ID NO: 5350634 - DNA, 25 bp, Homo sapien
ttctagagacaagtcagaaagaatg

SEQ ID NO: 5350635 - DNA, 25 bp, Homo sapien
tttctagagacaagtcagaaagaat

SEQ ID NO: 5350636 - DNA, 25 bp, Homo sapien
gttcaggccggtgatacttcccttc

SEQ ID NO: 5350637 - DNA, 25 bp, Homo sapien
gctgcaggaatcacaaagggaccgg

SEQ ID NO: 5350638 - DNA, 25 bp, Homo sapien
ttggtgaccttgtcctccctcaaca

SEQ ID NO: 5350639 - DNA, 25 bp, Homo sapien
tactcactgcatatggactcatttg

SEQ ID NO: 5350640 - DNA, 25 bp, Homo sapien
cctccatgtacccaatatctaggtc

SEQ ID NO: 5350641 - DNA, 25 bp, Homo sapien
tgagatgagttgaggtaagctcgca

SEQ ID NO: 5350642 - DNA, 25 bp, Homo sapien
ttggtgccagcccttccacaaccag

SEQ ID NO: 5350643 - DNA, 25 bp, Homo sapien
cctcgcagccggcatggtgaggtga

SEQ ID NO: 5350644 - DNA, 25 bp, Homo sapien
aggtaagctcgcagctccttggtgc

SEQ ID NO: 5350645 - DNA, 25 bp, Homo sapien
agagagtgaggactgcacggctggc

SEQ ID NO: 5350646 - DNA, 25 bp, Homo sapien
agagtgaggactgcacggctggcga

SEQ ID NO: 5350647 - DNA, 25 bp, Homo sapien
gagtgaggactgcacggctggcgag

SEQ ID NO: 5350648 - DNA, 25 bp, Homo sapien
atgtcacggacatcagagggcttga

SEQ ID NO: 5350649 - DNA, 25 bp, Homo sapien
tgtcacggacatcagagggcttgag

SEQ ID NO: 5350650 - DNA, 25 bp, Homo sapien
gggtccctctagtttgcttctctga

SEQ ID NO: 5350651 - DNA, 25 bp, Homo sapien
gatgtcacggacatcagagggcttg

SEQ ID NO: 5350652 - DNA, 25 bp, Homo sapien
ttggatcaggaacccagacacactc

SEQ ID NO: 5350653 - DNA, 25 bp, Homo sapien
tctgtatgcatctcacacttgcaat

SEQ ID NO: 5350654 - DNA, 25 bp, Homo sapien
cacttgcaatttgggttttgtctac

SEQ ID NO: 5350655 - DNA, 25 bp, Homo sapien
cagacacactcatgtcagctcctag

SEQ ID NO: 5350656 - DNA, 25 bp, Homo sapien
ttatgatcttatgactgcaggcccc

SEQ ID NO: 5350657 - DNA, 25 bp, Homo sapien
tgatcttatgactgcaggccccctt

SEQ ID NO: 5350658 - DNA, 25 bp, Homo sapien
tatgatcttatgactgcaggccccc

SEQ ID NO: 5350659 - DNA, 25 bp, Homo sapien
atcttatgactgcaggcccccttga

SEQ ID NO: 5350660 - DNA, 25 bp, Homo sapien
ggatggtgagagaggaaaagcacag

SEQ ID NO: 5350661 - DNA, 25 bp, Homo sapien
ctggatggtgagagaggaaaagcac

SEQ ID NO: 5350662 - DNA, 25 bp, Homo sapien
tggatggtgagagaggaaaagcaca

SEQ ID NO: 5350663 - DNA, 25 bp, Homo sapien
cattctcaggccattgccagcattt

SEQ ID NO: 5350664 - DNA, 25 bp, Homo sapien
tttgggtggtcttatctccaatgga

SEQ ID NO: 5350665 - DNA, 25 bp, Homo sapien
ggtggtcttatctccaatggaaaga

SEQ ID NO: 5350666 - DNA, 25 bp, Homo sapien
taaaatttgggtggtcttatctcca

SEQ ID NO: 5350667 - DNA, 25 bp, Homo sapien
atttgagggctgacttttggaacat

SEQ ID NO: 5350668 - DNA, 25 bp, Homo sapien
gaccttcaaggattccgcctgtcca

SEQ ID NO: 5350669 - DNA, 25 bp, Homo sapien
tttgctctcacctgcactgtgtctg

SEQ ID NO: 5350670 - DNA, 25 bp, Homo sapien
taggacaaggtcaggtcagctttca

SEQ ID NO: 5350671 - DNA, 25 bp, Homo sapien
tgctaaaagccacttctcactgcag

SEQ ID NO: 5350672 - DNA, 25 bp, Homo sapien
cctcattggcctggttgcacacagc

SEQ ID NO: 5350673 - DNA, 25 bp, Homo sapien
acagcttcgagtgcccacagaccaa

SEQ ID NO: 5350674 - DNA, 25 bp, Homo sapien
acctcattggcctggttgcacacag

SEQ ID NO: 5350675 - DNA, 25 bp, Homo sapien
ttttcccaggacctgtaatgtgtca

SEQ ID NO: 5350676 - DNA, 25 bp, Homo sapien
ccaggataactgcttagcatgcatt

SEQ ID NO: 5350677 - DNA, 25 bp, Homo sapien
taatgtgtcaggtaccatcaaggtc

SEQ ID NO: 5350678 - DNA, 25 bp, Homo sapien
tcctgtgtcctttagttggcctctc

SEQ ID NO: 5350679 - DNA, 25 bp, Homo sapien
aagagagtggaacttgagttggacc

SEQ ID NO: 5350680 - DNA, 25 bp, Homo sapien
ttgagttggacctgccatgaactgt

SEQ ID NO: 5350681 - DNA, 25 bp, Homo sapien
tcccaggcagaaagagagtggaact

SEQ ID NO: 5350682 - DNA, 25 bp, Homo sapien
ggaacttgagttggacctgccatga

SEQ ID NO: 5350683 - DNA, 25 bp, Homo sapien
ccacattcccgtaatgtttgggtgg

SEQ ID NO: 5350684 - DNA, 25 bp, Homo sapien
gacctggtggcctcatggcgatagt

SEQ ID NO: 5350685 - DNA, 25 bp, Homo sapien
tctgtgttctgaccctgagttgtcc

SEQ ID NO: 5350686 - DNA, 25 bp, Homo sapien
ccaactagatgctcattcctggtga

SEQ ID NO: 5350687 - DNA, 25 bp, Homo sapien
catttaatgctgaaatcagacaatg

SEQ ID NO: 5350688 - DNA, 25 bp, Homo sapien
caaaaggatcgcttgggtgccaaga

SEQ ID NO: 5350689 - DNA, 25 bp, Homo sapien
aatctgacactttgggattccaggc

SEQ ID NO: 5350690 - DNA, 25 bp, Homo sapien
aacagagctcttgacctataaagta

SEQ ID NO: 5350691 - DNA, 25 bp, Homo sapien
tatcctagaacaactctcccaggga

SEQ ID NO: 5350692 - DNA, 25 bp, Homo sapien
tgtgggccttcactaactaggaccc

SEQ ID NO: 5350693 - DNA, 25 bp, Homo sapien
gtattaaacttgacccttgcatggg

SEQ ID NO: 5350694 - DNA, 25 bp, Homo sapien
cactggccccttctttagtgtttgg

SEQ ID NO: 5350695 - DNA, 25 bp, Homo sapien
gggcaaatgagtgagaatccatctt

SEQ ID NO: 5350696 - DNA, 25 bp, Homo sapien
caaatgagtgagaatccatctttaa

SEQ ID NO: 5350697 - DNA, 25 bp, Homo sapien
cctgggcaaatgagtgagaatccat

SEQ ID NO: 5350698 - DNA, 25 bp, Homo sapien
tgggcaaatgagtgagaatccatct

SEQ ID NO: 5350699 - DNA, 25 bp, Homo sapien
ttttctgttctagtatacatcctag

SEQ ID NO: 5350700 - DNA, 25 bp, Homo sapien
agtgctgaaacagggtatattaaaa

SEQ ID NO: 5350701 - DNA, 25 bp, Homo sapien
tgagagagactccaagtcagtaagt

SEQ ID NO: 5350702 - DNA, 25 bp, Homo sapien
caacatagattacaagaggaagact

SEQ ID NO: 5350703 - DNA, 25 bp, Homo sapien
ttgttgaatgggctactgtgggcct

SEQ ID NO: 5350704 - DNA, 25 bp, Homo sapien
tcttatgaccatctggcacctaata

SEQ ID NO: 5350705 - DNA, 25 bp, Homo sapien
taaatccatcaggaatagttttact

SEQ ID NO: 5350706 - DNA, 25 bp, Homo sapien
tctttgttgaatgggctactgtggg

SEQ ID NO: 5350707 - DNA, 25 bp, Homo sapien
gatgtgtttcaccatactgaaggca

SEQ ID NO: 5350708 - DNA, 25 bp, Homo sapien
tcctatgctgtgtcaggcaagagaa

SEQ ID NO: 5350709 - DNA, 25 bp, Homo sapien
gagcatctcatgtttattaaggaga

SEQ ID NO: 5350710 - DNA, 25 bp, Homo sapien
tgtagaaagtcctgccatgcacaac

SEQ ID NO: 5350711 - DNA, 25 bp, Homo sapien
ggtgttagccccacaaacagtgctg

SEQ ID NO: 5350712 - DNA, 25 bp, Homo sapien
caacattgttgggaaacattgactc

SEQ ID NO: 5350713 - DNA, 25 bp, Homo sapien
tgacaggagggaaacaaagcttagg

SEQ ID NO: 5350714 - DNA, 25 bp, Homo sapien
tgctgggccaagttaattccctgtt

SEQ ID NO: 5350715 - DNA, 25 bp, Homo sapien
tcatttccttgccctagtccaatgt

SEQ ID NO: 5350716 - DNA, 25 bp, Homo sapien
catttccttgccctagtccaatgtg

SEQ ID NO: 5350717 - DNA, 25 bp, Homo sapien
atttccttgccctagtccaatgtga

SEQ ID NO: 5350718 - DNA, 25 bp, Homo sapien
ctggaatccccaaagaggcccgctt

SEQ ID NO: 5350719 - DNA, 25 bp, Homo sapien
tgcttcagatgaaaattttcaggtc

SEQ ID NO: 5350720 - DNA, 25 bp, Homo sapien
tgccactgtagtgaaggactgcttt

SEQ ID NO: 5350721 - DNA, 25 bp, Homo sapien
tgactctgcagttcactctgctgct

SEQ ID NO: 5350722 - DNA, 25 bp, Homo sapien
gaaaattttcaggtctgtctgccac

SEQ ID NO: 5350723 - DNA, 25 bp, Homo sapien
atattgtgctacaaaccaattcttg

SEQ ID NO: 5350724 - DNA, 25 bp, Homo sapien
aatattgtgctacaaaccaattctt

SEQ ID NO: 5350725 - DNA, 25 bp, Homo sapien
aaatattgtgctacaaaccaattct

SEQ ID NO: 5350726 - DNA, 25 bp, Homo sapien
ctcagcttctctattctaggagact

SEQ ID NO: 5350727 - DNA, 25 bp, Homo sapien
gtcactcagttatccccactgtctt

SEQ ID NO: 5350728 - DNA, 25 bp, Homo sapien
tgattatctgtcactcagttatccc

SEQ ID NO: 5350729 - DNA, 25 bp, Homo sapien
aacctcagcttctctattctaggag

SEQ ID NO: 5350730 - DNA, 25 bp, Homo sapien
gcatgtgtccagctagtctatcctt

SEQ ID NO: 5350731 - DNA, 25 bp, Homo sapien
tgtgtccagctagtctatccttcag

SEQ ID NO: 5350732 - DNA, 25 bp, Homo sapien
ccagctagtctatccttcagccaaa

SEQ ID NO: 5350733 - DNA, 25 bp, Homo sapien
tagtctatccttcagccaaacttcc

SEQ ID NO: 5350734 - DNA, 25 bp, Homo sapien
tcagttcctatatgttatcacacat

SEQ ID NO: 5350735 - DNA, 25 bp, Homo sapien
gtgggcttcttattgtctgctcact

SEQ ID NO: 5350736 - DNA, 25 bp, Homo sapien
tgggcttcttattgtctgctcactc

SEQ ID NO: 5350737 - DNA, 25 bp, Homo sapien
cgcacttctagtcggaagtgccaaa

SEQ ID NO: 5350738 - DNA, 25 bp, Homo sapien
gtgcaaaaattcctagcagtaaagc

SEQ ID NO: 5350739 - DNA, 25 bp, Homo sapien
tcctagcagtaaagcagagagtcaa

SEQ ID NO: 5350740 - DNA, 25 bp, Homo sapien
ccctctcgcacttctagtcggaagt

SEQ ID NO: 5350741 - DNA, 25 bp, Homo sapien
tattagtctgctagcagactttctt

SEQ ID NO: 5350742 - DNA, 25 bp, Homo sapien
tgtattagtctgctagcagactttc

SEQ ID NO: 5350743 - DNA, 25 bp, Homo sapien
gctagcagactttcttattaatatt

SEQ ID NO: 5350744 - DNA, 25 bp, Homo sapien
agtctgctagcagactttcttatta

SEQ ID NO: 5350745 - DNA, 25 bp, Homo sapien
ctgtgaaacatactttgtaggtctc

SEQ ID NO: 5350746 - DNA, 25 bp, Homo sapien
actgtgaaacatactttgtaggtct

SEQ ID NO: 5350747 - DNA, 25 bp, Homo sapien
ttactgtgaaacatactttgtaggt

SEQ ID NO: 5350748 - DNA, 25 bp, Homo sapien
tactgtgaaacatactttgtaggtc

SEQ ID NO: 5350749 - DNA, 25 bp, Homo sapien
tccggtgtgtgttctgcccctccgt

SEQ ID NO: 5350750 - DNA, 25 bp, Homo sapien
gtgtgttctgcccctccgtgtccat

SEQ ID NO: 5350751 - DNA, 25 bp, Homo sapien
aacaggctccggtgtgtgttctgcc

SEQ ID NO: 5350752 - DNA, 25 bp, Homo sapien
aggctccggtgtgtgttctgcccct

SEQ ID NO: 5350753 - DNA, 25 bp, Homo sapien
gatttctttggatataaacctagta

SEQ ID NO: 5350754 - DNA, 25 bp, Homo sapien
cattgatagaaatttgggttgatgc

SEQ ID NO: 5350755 - DNA, 25 bp, Homo sapien
tgatagaaatttgggttgatgccat

SEQ ID NO: 5350756 - DNA, 25 bp, Homo sapien
tatcattgatagaaatttgggttga

SEQ ID NO: 5350757 - DNA, 25 bp, Homo sapien
ctttccctgtgcagaagtgcttacg

SEQ ID NO: 5350758 - DNA, 25 bp, Homo sapien
tatgtcctgaatggaacttcctaga

SEQ ID NO: 5350759 - DNA, 25 bp, Homo sapien
cttttcagaatgtctgttcatggcc

SEQ ID NO: 5350760 - DNA, 25 bp, Homo sapien
aatagggaatcctggccaagtgcgg

SEQ ID NO: 5350761 - DNA, 25 bp, Homo sapien
tgtgtgtctgttttggtatcagtac

SEQ ID NO: 5350762 - DNA, 25 bp, Homo sapien
tggtctgtgtgtctgttttggtatc

SEQ ID NO: 5350763 - DNA, 25 bp, Homo sapien
tgtggtcttatttctgagatctcta

SEQ ID NO: 5350764 - DNA, 25 bp, Homo sapien
gtggtcttatttctgagatctctat

SEQ ID NO: 5350765 - DNA, 25 bp, Homo sapien
gaattgaagaatattgtctattgct

SEQ ID NO: 5350766 - DNA, 25 bp, Homo sapien
tgtctccgactattgttgtatggga

SEQ ID NO: 5350767 - DNA, 25 bp, Homo sapien
gactattgttgtatgggagcctgag

SEQ ID NO: 5350768 - DNA, 25 bp, Homo sapien
atgtctccgactattgttgtatggg

SEQ ID NO: 5350769 - DNA, 25 bp, Homo sapien
ccgactattgttgtatgggagcctg

SEQ ID NO: 5350770 - DNA, 25 bp, Homo sapien
atatgcagcgttatttctggggctc

SEQ ID NO: 5350771 - DNA, 25 bp, Homo sapien
gatatgcagcgttatttctggggct

SEQ ID NO: 5350772 - DNA, 25 bp, Homo sapien
tatgcagcgttatttctggggctct

SEQ ID NO: 5350773 - DNA, 25 bp, Homo sapien
taacaggagctgaaattgtggcaat

SEQ ID NO: 5350774 - DNA, 25 bp, Homo sapien
aatctctgggatgcattcaaagcag

SEQ ID NO: 5350775 - DNA, 25 bp, Homo sapien
ttgtggcaataatcaatagtttacc

SEQ ID NO: 5350776 - DNA, 25 bp, Homo sapien
ccaataacaggagctgaaattgtgg

SEQ ID NO: 5350777 - DNA, 25 bp, Homo sapien
aatgtgttgggttagaacgtgctcc

SEQ ID NO: 5350778 - DNA, 25 bp, Homo sapien
ctgagaggcccacggttagtctgac

SEQ ID NO: 5350779 - DNA, 25 bp, Homo sapien
tgtgctttatagttggctccggtca

SEQ ID NO: 5350780 - DNA, 25 bp, Homo sapien
tgggccatgccaactacctagtcag

SEQ ID NO: 5350781 - DNA, 25 bp, Homo sapien
ccccggagaatacaggtcagcaact

SEQ ID NO: 5350782 - DNA, 25 bp, Homo sapien
tgtgctggtgggctatatccaccct

SEQ ID NO: 5350783 - DNA, 25 bp, Homo sapien
tgttatttggcgctttcagatcagt

SEQ ID NO: 5350784 - DNA, 25 bp, Homo sapien
gaaaagttggcagcctactgctccc

SEQ ID NO: 5350785 - DNA, 25 bp, Homo sapien
gcctcttccctaggaatatgtatga

SEQ ID NO: 5350786 - DNA, 25 bp, Homo sapien
tcccaggtgggctgtcattttgcct

SEQ ID NO: 5350787 - DNA, 25 bp, Homo sapien
gaagatctcccaacccaaggattgc

SEQ ID NO: 5350788 - DNA, 25 bp, Homo sapien
gattccacatagctccatcagactg

SEQ ID NO: 5350789 - DNA, 25 bp, Homo sapien
tgctactccggcaggtgctctcagg

SEQ ID NO: 5350790 - DNA, 25 bp, Homo sapien
aactggggcctgctgctactccggc

SEQ ID NO: 5350791 - DNA, 25 bp, Homo sapien
gctgctactccggcaggtgctctca

SEQ ID NO: 5350792 - DNA, 25 bp, Homo sapien
gggcctgctgctactccggcaggtg

SEQ ID NO: 5350793 - DNA, 25 bp, Homo sapien
gactctcttgtctattatcagacat

SEQ ID NO: 5350794 - DNA, 25 bp, Homo sapien
ctgactctcttgtctattatcagac

SEQ ID NO: 5350795 - DNA, 25 bp, Homo sapien
tctctgactctcttgtctattatca

SEQ ID NO: 5350796 - DNA, 25 bp, Homo sapien
tcttgtctattatcagacatttggc

SEQ ID NO: 5350797 - DNA, 25 bp, Homo sapien
tatgggactcaatcaaacaacccaa

SEQ ID NO: 5350798 - DNA, 25 bp, Homo sapien
gcatatggcaattatgggactcaat

SEQ ID NO: 5350799 - DNA, 25 bp, Homo sapien
ataacaaatgcatatggcaattatg

SEQ ID NO: 5350800 - DNA, 25 bp, Homo sapien
ccaactttcatataatatcagtttc

SEQ ID NO: 5350801 - DNA, 25 bp, Homo sapien
cagcaaccatgtgctaaggtactag

SEQ ID NO: 5350802 - DNA, 25 bp, Homo sapien
gtagaggcaattcataggttgatat

SEQ ID NO: 5350803 - DNA, 25 bp, Homo sapien
atattgtaggctttttggtagaggc

SEQ ID NO: 5350804 - DNA, 25 bp, Homo sapien
agaacaaaggtgcagagtatggtaa

SEQ ID NO: 5350805 - DNA, 25 bp, Homo sapien
gagagttttgattccatgctaagga

SEQ ID NO: 5350806 - DNA, 25 bp, Homo sapien
aacaaaggtgcagagtatggtaagt

SEQ ID NO: 5350807 - DNA, 25 bp, Homo sapien
gtgagagttttgattccatgctaag

SEQ ID NO: 5350808 - DNA, 25 bp, Homo sapien
cttcatctagctctcaaacacctgc

SEQ ID NO: 5350809 - DNA, 25 bp, Homo sapien
tcatctagctctcaaacacctgcag

SEQ ID NO: 5350810 - DNA, 25 bp, Homo sapien
tctagctctcaaacacctgcagcat

SEQ ID NO: 5350811 - DNA, 25 bp, Homo sapien
atctagctctcaaacacctgcagca

SEQ ID NO: 5350812 - DNA, 25 bp, Homo sapien
gattttctcaaaccgctcaatttgt

SEQ ID NO: 5350813 - DNA, 25 bp, Homo sapien
tttctcaaaccgctcaatttgttca

SEQ ID NO: 5350814 - DNA, 25 bp, Homo sapien
tctcaaaccgctcaatttgttcatc

SEQ ID NO: 5350815 - DNA, 25 bp, Homo sapien
caaaccgctcaatttgttcatcctg

SEQ ID NO: 5350816 - DNA, 25 bp, Homo sapien
ctaaacaaacttctgaaggtataat

SEQ ID NO: 5350817 - DNA, 25 bp, Homo sapien
tctgaaggtataattacacaaattc

SEQ ID NO: 5350818 - DNA, 25 bp, Homo sapien
tctaaacaaacttctgaaggtataa

SEQ ID NO: 5350819 - DNA, 25 bp, Homo sapien
caaacttacaaactggtaaaatgtg

SEQ ID NO: 5350820 - DNA, 25 bp, Homo sapien
taattttagtgggacactgctacac

SEQ ID NO: 5350821 - DNA, 25 bp, Homo sapien
agtgggacactgctacaccccttca

SEQ ID NO: 5350822 - DNA, 25 bp, Homo sapien
tcatcccattacctgttttttgtaa

SEQ ID NO: 5350823 - DNA, 25 bp, Homo sapien
gcttgcctcaccatgccaatagaga

SEQ ID NO: 5350824 - DNA, 25 bp, Homo sapien
ctggcttgcctcaccatgccaatag

SEQ ID NO: 5350825 - DNA, 25 bp, Homo sapien
tcaccatgccaatagagaaatcatt

SEQ ID NO: 5350826 - DNA, 25 bp, Homo sapien
gaaagccatccactataaaatttta

SEQ ID NO: 5350827 - DNA, 25 bp, Homo sapien
tgctgatcgtttgtttaagacatca

SEQ ID NO: 5350828 - DNA, 25 bp, Homo sapien
ttctaaatagatgcagtgacgcgat

SEQ ID NO: 5350829 - DNA, 25 bp, Homo sapien
caaagcttttgttgctgatcgtttg

SEQ ID NO: 5350830 - DNA, 25 bp, Homo sapien
gcgatgaagcatccagcaaagcttt

SEQ ID NO: 5350831 - DNA, 25 bp, Homo sapien
tctctttttcatattggcatttttt

SEQ ID NO: 5350832 - DNA, 25 bp, Homo sapien
ctttctctttttcatattggcattt

SEQ ID NO: 5350833 - DNA, 25 bp, Homo sapien
tttctctttttcatattggcatttt

SEQ ID NO: 5350834 - DNA, 25 bp, Homo sapien
ctctttttcatattggcattttttt

SEQ ID NO: 5350835 - DNA, 25 bp, Homo sapien
ttccattgtattgtatccacttttg

SEQ ID NO: 5350836 - DNA, 25 bp, Homo sapien
ttttgctttagctcactttgcacgt

SEQ ID NO: 5350837 - DNA, 25 bp, Homo sapien
tttgctttagctcactttgcacgtg

SEQ ID NO: 5350838 - DNA, 25 bp, Homo sapien
ccattgtattgtatccacttttgta

SEQ ID NO: 5350839 - DNA, 25 bp, Homo sapien
catcagcttctatcctatattgctc

SEQ ID NO: 5350840 - DNA, 25 bp, Homo sapien
tccacctctgctgatttgagagccg

SEQ ID NO: 5350841 - DNA, 25 bp, Homo sapien
tcacatcagcttctatcctatattg

SEQ ID NO: 5350842 - DNA, 25 bp, Homo sapien
gctgatttgagagccggtttaattg

SEQ ID NO: 5350843 - DNA, 25 bp, Homo sapien
ttcgaatttttactctaagttgctc

SEQ ID NO: 5350844 - DNA, 25 bp, Homo sapien
cgaatttttactctaagttgctcac

SEQ ID NO: 5350845 - DNA, 25 bp, Homo sapien
catgctttaactgcgattttatttc

SEQ ID NO: 5350846 - DNA, 25 bp, Homo sapien
tttttactctaagttgctcacagtg

SEQ ID NO: 5350847 - DNA, 25 bp, Homo sapien
gaaaagtgcttgtgtgctaggaaac

SEQ ID NO: 5350848 - DNA, 25 bp, Homo sapien
tcacacaatgactggaagagggtcc

SEQ ID NO: 5350849 - DNA, 25 bp, Homo sapien
agagggtccattcccatgagccagg

SEQ ID NO: 5350850 - DNA, 25 bp, Homo sapien
ctgagaggccagtaaaacgaaagca

SEQ ID NO: 5350851 - DNA, 25 bp, Homo sapien
ctcacctcactccatagacaaaagg

SEQ ID NO: 5350852 - DNA, 25 bp, Homo sapien
tcacctcactccatagacaaaagga

SEQ ID NO: 5350853 - DNA, 25 bp, Homo sapien
acctcactccatagacaaaaggaaa

SEQ ID NO: 5350854 - DNA, 25 bp, Homo sapien
cacctcactccatagacaaaaggaa

SEQ ID NO: 5350855 - DNA, 25 bp, Homo sapien
caaagcgagtcaccgtcctctgaga

SEQ ID NO: 5350856 - DNA, 25 bp, Homo sapien
aatatgacattcttacaattacagc

SEQ ID NO: 5350857 - DNA, 25 bp, Homo sapien
catgttgatcaatgagtaatatgac

SEQ ID NO: 5350858 - DNA, 25 bp, Homo sapien
ggtcatccctagaatgtatttggtt

SEQ ID NO: 5350859 - DNA, 25 bp, Homo sapien
catccatagctacttctgggtttct

SEQ ID NO: 5350860 - DNA, 25 bp, Homo sapien
tggtttgttgtcgttttcacagtct

SEQ ID NO: 5350861 - DNA, 25 bp, Homo sapien
ctggtttgttgtcgttttcacagtc

SEQ ID NO: 5350862 - DNA, 25 bp, Homo sapien
tgtaatatgattgacagtgttatat

SEQ ID NO: 5350863 - DNA, 25 bp, Homo sapien
atgattgacagtgttatatatttat

SEQ ID NO: 5350864 - DNA, 25 bp, Homo sapien
ttaagttctaaggtctactaatgac

SEQ ID NO: 5350865 - DNA, 25 bp, Homo sapien
ttatatagattataggcttaagttc

SEQ ID NO: 5350866 - DNA, 25 bp, Homo sapien
ctgtggctggttattttcatattct

SEQ ID NO: 5350867 - DNA, 25 bp, Homo sapien
cctcttttgctctccctctgatgcc

SEQ ID NO: 5350868 - DNA, 25 bp, Homo sapien
ttcatattcttcaagcctcttttgc

SEQ ID NO: 5350869 - DNA, 25 bp, Homo sapien
tcttttgctctccctctgatgccat

SEQ ID NO: 5350870 - DNA, 25 bp, Homo sapien
tttggtggctgtattcagaacagaa

SEQ ID NO: 5350871 - DNA, 25 bp, Homo sapien
ttggtggctgtattcagaacagaat

SEQ ID NO: 5350872 - DNA, 25 bp, Homo sapien
tcaaggtgggcagattctcaggata

SEQ ID NO: 5350873 - DNA, 25 bp, Homo sapien
caaggtgggcagattctcaggatac

SEQ ID NO: 5350874 - DNA, 25 bp, Homo sapien
aaggtgggcagattctcaggatact

SEQ ID NO: 5350875 - DNA, 25 bp, Homo sapien
cttcaaggtgggcagattctcagga

SEQ ID NO: 5350876 - DNA, 25 bp, Homo sapien
tcttgtggcaatattcaaaagagaa

SEQ ID NO: 5350877 - DNA, 25 bp, Homo sapien
ttattcttgtggcaatattcaaaag

SEQ ID NO: 5350878 - DNA, 25 bp, Homo sapien
ttcttgtggcaatattcaaaagaga

SEQ ID NO: 5350879 - DNA, 25 bp, Homo sapien
tattcttgtggcaatattcaaaaga

SEQ ID NO: 5350880 - DNA, 25 bp, Homo sapien
cttctgggccgattgtttctgagga

SEQ ID NO: 5350881 - DNA, 25 bp, Homo sapien
ctgggccgattgtttctgaggagac

SEQ ID NO: 5350882 - DNA, 25 bp, Homo sapien
tgggccgattgtttctgaggagaca

SEQ ID NO: 5350883 - DNA, 25 bp, Homo sapien
tctgggccgattgtttctgaggaga

SEQ ID NO: 5350884 - DNA, 25 bp, Homo sapien
gtttttaggaacacgatgtaatgtc

SEQ ID NO: 5350885 - DNA, 25 bp, Homo sapien
aatttctacatcagcggtctcgtta

SEQ ID NO: 5350886 - DNA, 25 bp, Homo sapien
tatgcatctgaactcacgtttcctc

SEQ ID NO: 5350887 - DNA, 25 bp, Homo sapien
gcaaaattatgctgtaccctgagcc

SEQ ID NO: 5350888 - DNA, 25 bp, Homo sapien
tggctatattcgaaacagaatcttt

SEQ ID NO: 5350889 - DNA, 25 bp, Homo sapien
ggctatattcgaaacagaatctttc

SEQ ID NO: 5350890 - DNA, 25 bp, Homo sapien
gctatattcgaaacagaatctttct

SEQ ID NO: 5350891 - DNA, 25 bp, Homo sapien
tcaaggctggttgtctctgagaaga

SEQ ID NO: 5350892 - DNA, 25 bp, Homo sapien
caaggctggttgtctctgagaagac

SEQ ID NO: 5350893 - DNA, 25 bp, Homo sapien
aaggctggttgtctctgagaagaca

SEQ ID NO: 5350894 - DNA, 25 bp, Homo sapien
gtcccacgtatttgtccatccttta

SEQ ID NO: 5350895 - DNA, 25 bp, Homo sapien
tgtcccacgtatttgtccatccttt

SEQ ID NO: 5350896 - DNA, 25 bp, Homo sapien
ccaggccagttgtttctgagaagac

SEQ ID NO: 5350897 - DNA, 25 bp, Homo sapien
tccaggccagttgtttctgagaaga

SEQ ID NO: 5350898 - DNA, 25 bp, Homo sapien
caggccagttgtttctgagaagaca

SEQ ID NO: 5350899 - DNA, 25 bp, Homo sapien
cttccaggccagttgtttctgagaa

SEQ ID NO: 5350900 - DNA, 25 bp, Homo sapien
ctgttccagattgttgtccatcctt

SEQ ID NO: 5350901 - DNA, 25 bp, Homo sapien
tgtgggtatattcgaaacagaatct

SEQ ID NO: 5350902 - DNA, 25 bp, Homo sapien
ggtatattcgaaacagaatctttct

SEQ ID NO: 5350903 - DNA, 25 bp, Homo sapien
ttatttctgtgggtatattcgaaac

SEQ ID NO: 5350904 - DNA, 25 bp, Homo sapien
aaggctggttgtttctgagaagaca

SEQ ID NO: 5350905 - DNA, 25 bp, Homo sapien
tcaaggctggttgtttctgagaaga

SEQ ID NO: 5350906 - DNA, 25 bp, Homo sapien
cttcaaggctggttgtttctgagaa

SEQ ID NO: 5350907 - DNA, 25 bp, Homo sapien
caaggctggttgtttctgagaagac

SEQ ID NO: 5350908 - DNA, 25 bp, Homo sapien
ggatttacaccattatagtacaaac

SEQ ID NO: 5350909 - DNA, 25 bp, Homo sapien
aaggatttacaccattatagtacaa

SEQ ID NO: 5350910 - DNA, 25 bp, Homo sapien
aggatttacaccattatagtacaaa

SEQ ID NO: 5350911 - DNA, 25 bp, Homo sapien
ggccatattcggaacagaattttcc

SEQ ID NO: 5350912 - DNA, 25 bp, Homo sapien
tcggaacagaattttccttgtcact

SEQ ID NO: 5350913 - DNA, 25 bp, Homo sapien
ttgttcatcctttgtttctgtggcc

SEQ ID NO: 5350914 - DNA, 25 bp, Homo sapien
gtttctgtggccatattcggaacag

SEQ ID NO: 5350915 - DNA, 25 bp, Homo sapien
caaggctggttgtttatgagaagac

SEQ ID NO: 5350916 - DNA, 25 bp, Homo sapien
cttcaaggctggttgtttatgagaa

SEQ ID NO: 5350917 - DNA, 25 bp, Homo sapien
tcaaggctggttgtttatgagaaga

SEQ ID NO: 5350918 - DNA, 25 bp, Homo sapien
aaggctggttgtttatgagaagaca

SEQ ID NO: 5350919 - DNA, 25 bp, Homo sapien
aaaacagaatctttctcgtcacttg

SEQ ID NO: 5350920 - DNA, 25 bp, Homo sapien
gcttttttcctctggctatattcaa

SEQ ID NO: 5350921 - DNA, 25 bp, Homo sapien
ttttcctctggctatattcaaaaca

SEQ ID NO: 5350922 - DNA, 25 bp, Homo sapien
tctcctagttttttctccatgcttt

SEQ ID NO: 5350923 - DNA, 25 bp, Homo sapien
cttcaagcctgatggtttctcagaa

SEQ ID NO: 5350924 - DNA, 25 bp, Homo sapien
tcaagcctgatggtttctcagaaga

SEQ ID NO: 5350925 - DNA, 25 bp, Homo sapien
aagcctgatggtttctcagaagaca

SEQ ID NO: 5350926 - DNA, 25 bp, Homo sapien
caagcctgatggtttctcagaagac

SEQ ID NO: 5350927 - DNA, 25 bp, Homo sapien
tcaaaacagaatcttcctcgtcacc

SEQ ID NO: 5350928 - DNA, 25 bp, Homo sapien
tttttttctctggctatattcaaaa

SEQ ID NO: 5350929 - DNA, 25 bp, Homo sapien
cagaatcttcctcgtcacctgtagc

SEQ ID NO: 5350930 - DNA, 25 bp, Homo sapien
ttttttctctggctatattcaaaac

SEQ ID NO: 5350931 - DNA, 25 bp, Homo sapien
tcaaggctggtggtttctgagaaga

SEQ ID NO: 5350932 - DNA, 25 bp, Homo sapien
aaggctggtggtttctgagaagaca

SEQ ID NO: 5350933 - DNA, 25 bp, Homo sapien
cttcaaggctggtggtttctgagaa

SEQ ID NO: 5350934 - DNA, 25 bp, Homo sapien
caaggctggtggtttctgagaagac

SEQ ID NO: 5350935 - DNA, 25 bp, Homo sapien
cgatttctcatatgtcaaaaactaa

SEQ ID NO: 5350936 - DNA, 25 bp, Homo sapien
gcaatttcaaacatggtacgatttc

SEQ ID NO: 5350937 - DNA, 25 bp, Homo sapien
caaagatatccatagattcatgcag

SEQ ID NO: 5350938 - DNA, 25 bp, Homo sapien
ggtgctacatgatcccacatttctt

SEQ ID NO: 5350939 - DNA, 25 bp, Homo sapien
gtggaagagtcctgaattgatcaca

SEQ ID NO: 5350940 - DNA, 25 bp, Homo sapien
acattggacacctgtttgctgatac

SEQ ID NO: 5350941 - DNA, 25 bp, Homo sapien
cacattggacacctgtttgctgata

SEQ ID NO: 5350942 - DNA, 25 bp, Homo sapien
cctgaattgatcacattggacacct

SEQ ID NO: 5350943 - DNA, 25 bp, Homo sapien
aagaatctttctcatcacttgtagc

SEQ ID NO: 5350944 - DNA, 25 bp, Homo sapien
cctagatgtttctccatcctttctt

SEQ ID NO: 5350945 - DNA, 25 bp, Homo sapien
gtcctagatgtttctccatcctttc

SEQ ID NO: 5350946 - DNA, 25 bp, Homo sapien
ctttctctggttatatttgaaaaag

SEQ ID NO: 5350947 - DNA, 25 bp, Homo sapien
caaggctgcttttttccgagaagac

SEQ ID NO: 5350948 - DNA, 25 bp, Homo sapien
cttcaaggctgcttttttccgagaa

SEQ ID NO: 5350949 - DNA, 25 bp, Homo sapien
aaggctgcttttttccgagaagaca

SEQ ID NO: 5350950 - DNA, 25 bp, Homo sapien
tcaaggctgcttttttccgagaaga

SEQ ID NO: 5350951 - DNA, 25 bp, Homo sapien
tattcaaaagagaatctttctcatc

SEQ ID NO: 5350952 - DNA, 25 bp, Homo sapien
gcttttttcctctggctatattcaa

SEQ ID NO: 5350953 - DNA, 25 bp, Homo sapien
tcaaaagagaatctttctcatctct

SEQ ID NO: 5350954 - DNA, 25 bp, Homo sapien
ctctcctagttttttctccatgctt

SEQ ID NO: 5350955 - DNA, 25 bp, Homo sapien
cttcaagcctggtggttgctcagaa

SEQ ID NO: 5350956 - DNA, 25 bp, Homo sapien
caagcctggtggttgctcagaagac

SEQ ID NO: 5350957 - DNA, 25 bp, Homo sapien
aagcctggtggttgctcagaagaca

SEQ ID NO: 5350958 - DNA, 25 bp, Homo sapien
tcaagcctggtggttgctcagaaga

SEQ ID NO: 5350959 - DNA, 25 bp, Homo sapien
ggatttacaccattataatacaaac

SEQ ID NO: 5350960 - DNA, 25 bp, Homo sapien
tacaaacattcatcgtgctctttaa

SEQ ID NO: 5350961 - DNA, 25 bp, Homo sapien
ttcatcgtgctctttaacttgccca

SEQ ID NO: 5350962 - DNA, 25 bp, Homo sapien
tttcatgcaacaaattaaaaggatt

SEQ ID NO: 5350963 - DNA, 25 bp, Homo sapien
ttttttctctggctatattcaaaac

SEQ ID NO: 5350964 - DNA, 25 bp, Homo sapien
caaaacagaatcttcctcgtcactt

SEQ ID NO: 5350965 - DNA, 25 bp, Homo sapien
cagaatcttcctcgtcacttgtagc

SEQ ID NO: 5350966 - DNA, 25 bp, Homo sapien
tttttttctctggctatattcaaaa

SEQ ID NO: 5350967 - DNA, 25 bp, Homo sapien
caaggctggtggtttctgagaagac

SEQ ID NO: 5350968 - DNA, 25 bp, Homo sapien
tcaaggctggtggtttctgagaaga

SEQ ID NO: 5350969 - DNA, 25 bp, Homo sapien
aaggctggtggtttctgagaagaca

SEQ ID NO: 5350970 - DNA, 25 bp, Homo sapien
cttcaaggctggtggtttctgagaa

SEQ ID NO: 5350971 - DNA, 25 bp, Homo sapien
gtggaagagtcctgaattgatcaca

SEQ ID NO: 5350972 - DNA, 25 bp, Homo sapien
cctgaattgatcacattggacacct

SEQ ID NO: 5350973 - DNA, 25 bp, Homo sapien
cacattggacacctgtttgctgata

SEQ ID NO: 5350974 - DNA, 25 bp, Homo sapien
acattggacacctgtttgctgatac

SEQ ID NO: 5350975 - DNA, 25 bp, Homo sapien
gaaatgaagaatctcaggcctactg

SEQ ID NO: 5350976 - DNA, 25 bp, Homo sapien
gagaacttcttatctggactgaaca

SEQ ID NO: 5350977 - DNA, 25 bp, Homo sapien
agaatgtgcagtttcgaccagcccc

SEQ ID NO: 5350978 - DNA, 25 bp, Homo sapien
cagcataacccaagaacttattaga

SEQ ID NO: 5350979 - DNA, 25 bp, Homo sapien
aagaatctttctcatcacttgtagc

SEQ ID NO: 5350980 - DNA, 25 bp, Homo sapien
gtcctagatgtttctccatcctttc

SEQ ID NO: 5350981 - DNA, 25 bp, Homo sapien
cctagatgtttctccatcctttctt

SEQ ID NO: 5350982 - DNA, 25 bp, Homo sapien
ctttctctggttatatttgaaaaag

SEQ ID NO: 5350983 - DNA, 25 bp, Homo sapien
tcaaggctgcttttttccgagaaga

SEQ ID NO: 5350984 - DNA, 25 bp, Homo sapien
cttcaaggctgcttttttccgagaa

SEQ ID NO: 5350985 - DNA, 25 bp, Homo sapien
aaggctgcttttttccgagaagaca

SEQ ID NO: 5350986 - DNA, 25 bp, Homo sapien
caaggctgcttttttccgagaagac

SEQ ID NO: 5350987 - DNA, 25 bp, Homo sapien
ttcacacggtgttagcatcaacctc

SEQ ID NO: 5350988 - DNA, 25 bp, Homo sapien
tgatggcttctactttgtctctggg

SEQ ID NO: 5350989 - DNA, 25 bp, Homo sapien
tgtcctcctgcctgtattagtggag

SEQ ID NO: 5350990 - DNA, 25 bp, Homo sapien
tatccatacattcacacggtgttag

SEQ ID NO: 5350991 - DNA, 25 bp, Homo sapien
tcaaaagagaatctttctcgtctct

SEQ ID NO: 5350992 - DNA, 25 bp, Homo sapien
attcaaaagagaatctttctcgtct

SEQ ID NO: 5350993 - DNA, 25 bp, Homo sapien
acttttttcctctggctatattcaa

SEQ ID NO: 5350994 - DNA, 25 bp, Homo sapien
ctctcctagttttttctccatactt

SEQ ID NO: 5350995 - DNA, 25 bp, Homo sapien
cttcaagcctggtggttgctctgaa

SEQ ID NO: 5350996 - DNA, 25 bp, Homo sapien
caagcctggtggttgctctgaagac

SEQ ID NO: 5350997 - DNA, 25 bp, Homo sapien
aagcctggtggttgctctgaagaca

SEQ ID NO: 5350998 - DNA, 25 bp, Homo sapien
tcaagcctggtggttgctctgaaga

SEQ ID NO: 5350999 - DNA, 25 bp, Homo sapien
caaaacagaatcttcctcgtcactt

SEQ ID NO: 5351000 - DNA, 25 bp, Homo sapien
tttttttctctggctatattcaaaa

SEQ ID NO: 5351001 - DNA, 25 bp, Homo sapien
cagaatcttcctcgtcacttgtagc

SEQ ID NO: 5351002 - DNA, 25 bp, Homo sapien
ttttttctctggctatattcaaaac

SEQ ID NO: 5351003 - DNA, 25 bp, Homo sapien
caaggctggtggtttctgagaagac

SEQ ID NO: 5351004 - DNA, 25 bp, Homo sapien
aaggctggtggtttctgagaagaca

SEQ ID NO: 5351005 - DNA, 25 bp, Homo sapien
tcaaggctggtggtttctgagaaga

SEQ ID NO: 5351006 - DNA, 25 bp, Homo sapien
cttcaaggctggtggtttctgagaa

SEQ ID NO: 5351007 - DNA, 25 bp, Homo sapien
cctgaattgatcacattggacacct

SEQ ID NO: 5351008 - DNA, 25 bp, Homo sapien
cacattggacacctgtttgctgata

SEQ ID NO: 5351009 - DNA, 25 bp, Homo sapien
acattggacacctgtttgctgatac

SEQ ID NO: 5351010 - DNA, 25 bp, Homo sapien
gtggaagagtcctgaattgatcaca

SEQ ID NO: 5351011 - DNA, 25 bp, Homo sapien
cagcataacccaagaacttattaga

SEQ ID NO: 5351012 - DNA, 25 bp, Homo sapien
gagaacttcttatctggactgaaca

SEQ ID NO: 5351013 - DNA, 25 bp, Homo sapien
gaaatgaagaatctcaggcctactg

SEQ ID NO: 5351014 - DNA, 25 bp, Homo sapien
agaatgtgcagtttcgaccagcccc

SEQ ID NO: 5351015 - DNA, 25 bp, Homo sapien
ttctttctctggttatatttgaaaa

SEQ ID NO: 5351016 - DNA, 25 bp, Homo sapien
ctttctctggttatatttgaaaaag

SEQ ID NO: 5351017 - DNA, 25 bp, Homo sapien
tgtcctagatgtttctccatccttt

SEQ ID NO: 5351018 - DNA, 25 bp, Homo sapien
cctagatgtttctccatcctttctt

SEQ ID NO: 5351019 - DNA, 25 bp, Homo sapien
tcaaggctgcttttttccgagaaga

SEQ ID NO: 5351020 - DNA, 25 bp, Homo sapien
cttcaaggctgcttttttccgagaa

SEQ ID NO: 5351021 - DNA, 25 bp, Homo sapien
aaggctgcttttttccgagaagaca

SEQ ID NO: 5351022 - DNA, 25 bp, Homo sapien
caaggctgcttttttccgagaagac

SEQ ID NO: 5351023 - DNA, 25 bp, Homo sapien
caattacgatgacactccagctgaa

SEQ ID NO: 5351024 - DNA, 25 bp, Homo sapien
ctctcacacccatgtagtgtaataa

SEQ ID NO: 5351025 - DNA, 25 bp, Homo sapien
cagctgaacgtacacttaacatatc

SEQ ID NO: 5351026 - DNA, 25 bp, Homo sapien
atccactagtttaggcttccgaaag

SEQ ID NO: 5351027 - DNA, 25 bp, Homo sapien
cttcaagcctggtggttgctcagaa

SEQ ID NO: 5351028 - DNA, 25 bp, Homo sapien
aagcctggtggttgctcagaagaca

SEQ ID NO: 5351029 - DNA, 25 bp, Homo sapien
caagcctggtggttgctcagaagac

SEQ ID NO: 5351030 - DNA, 25 bp, Homo sapien
tcaagcctggtggttgctcagaaga

SEQ ID NO: 5351031 - DNA, 25 bp, Homo sapien
ttcttctctggctatactcaaaaca

SEQ ID NO: 5351032 - DNA, 25 bp, Homo sapien
tatactcaaaacagaatcttcctcg

SEQ ID NO: 5351033 - DNA, 25 bp, Homo sapien
cttttcttctctggctatactcaaa

SEQ ID NO: 5351034 - DNA, 25 bp, Homo sapien
ctatactcaaaacagaatcttcctc

SEQ ID NO: 5351035 - DNA, 25 bp, Homo sapien
caaggctggtggtttctgagaagac

SEQ ID NO: 5351036 - DNA, 25 bp, Homo sapien
aaggctggtggtttctgagaagaca

SEQ ID NO: 5351037 - DNA, 25 bp, Homo sapien
tcaaggctggtggtttctgagaaga

SEQ ID NO: 5351038 - DNA, 25 bp, Homo sapien
cttcaaggctggtggtttctgagaa

SEQ ID NO: 5351039 - DNA, 25 bp, Homo sapien
ctctggttatattcgaaaaagaatc

SEQ ID NO: 5351040 - DNA, 25 bp, Homo sapien
ttctctggttatattcgaaaaagaa

SEQ ID NO: 5351041 - DNA, 25 bp, Homo sapien
tttctctggttatattcgaaaaaga

SEQ ID NO: 5351042 - DNA, 25 bp, Homo sapien
tctctggttatattcgaaaaagaat

SEQ ID NO: 5351043 - DNA, 25 bp, Homo sapien
tcaaggctggttttttccgagaaga

SEQ ID NO: 5351044 - DNA, 25 bp, Homo sapien
cagaatcttcctcgtcacttgtagc

SEQ ID NO: 5351045 - DNA, 25 bp, Homo sapien
ctcttttcctctggctatattcaaa

SEQ ID NO: 5351046 - DNA, 25 bp, Homo sapien
atcctcttttcctctggctatattc

SEQ ID NO: 5351047 - DNA, 25 bp, Homo sapien
cttttcctctggctatattcaaaac

SEQ ID NO: 5351048 - DNA, 25 bp, Homo sapien
aagcctgctggtttctcagaagtca

SEQ ID NO: 5351049 - DNA, 25 bp, Homo sapien
cttcaagcctgctggtttctcagaa

SEQ ID NO: 5351050 - DNA, 25 bp, Homo sapien
caagcctgctggtttctcagaagtc

SEQ ID NO: 5351051 - DNA, 25 bp, Homo sapien
tcaagcctgctggtttctcagaagt

SEQ ID NO: 5351052 - DNA, 25 bp, Homo sapien
tctctggttatattcgaaaaagaat

SEQ ID NO: 5351053 - DNA, 25 bp, Homo sapien
ttctctggttatattcgaaaaagaa

SEQ ID NO: 5351054 - DNA, 25 bp, Homo sapien
ctctggttatattcgaaaaagaatc

SEQ ID NO: 5351055 - DNA, 25 bp, Homo sapien
tttctctggttatattcgaaaaaga

SEQ ID NO: 5351056 - DNA, 25 bp, Homo sapien
tcaaggctggttttttccgagaaga

SEQ ID NO: 5351057 - DNA, 25 bp, Homo sapien
caattccgatgacccttcagttgaa

SEQ ID NO: 5351058 - DNA, 25 bp, Homo sapien
aaggcacacaattccgatgaccctt

SEQ ID NO: 5351059 - DNA, 25 bp, Homo sapien
gttgaatgtacactcacatctcttc

SEQ ID NO: 5351060 - DNA, 25 bp, Homo sapien
gacccttcagttgaatgtacactca

SEQ ID NO: 5351061 - DNA, 25 bp, Homo sapien
ttatttctgtggctataatcgaaac

SEQ ID NO: 5351062 - DNA, 25 bp, Homo sapien
gtggctataatcgaaacagaatctt

SEQ ID NO: 5351063 - DNA, 25 bp, Homo sapien
ctgtcccagatttttctccgtcctt

SEQ ID NO: 5351064 - DNA, 25 bp, Homo sapien
atcgaaacagaatcttcctcgtcag

SEQ ID NO: 5351065 - DNA, 25 bp, Homo sapien
caaggctggttgtttctgagaagac

SEQ ID NO: 5351066 - DNA, 25 bp, Homo sapien
cttcaaggctggttgtttctgagaa

SEQ ID NO: 5351067 - DNA, 25 bp, Homo sapien
tcaaggctggttgtttctgagaaga

SEQ ID NO: 5351068 - DNA, 25 bp, Homo sapien
aaggctggttgtttctgagaagaca

SEQ ID NO: 5351069 - DNA, 25 bp, Homo sapien
tatttctgtggctatattcaaaaca

SEQ ID NO: 5351070 - DNA, 25 bp, Homo sapien
tcctttatttctgtggctatattca

SEQ ID NO: 5351071 - DNA, 25 bp, Homo sapien
aaaacagaatcttcctcgtcagttg

SEQ ID NO: 5351072 - DNA, 25 bp, Homo sapien
tcaaaacagaatcttcctcgtcagt

SEQ ID NO: 5351073 - DNA, 25 bp, Homo sapien
caaggctggttgtttctgagaagac

SEQ ID NO: 5351074 - DNA, 25 bp, Homo sapien
aaggctggttgtttctgagaagaca

SEQ ID NO: 5351075 - DNA, 25 bp, Homo sapien
cttcaaggctggttgtttctgagaa

SEQ ID NO: 5351076 - DNA, 25 bp, Homo sapien
tcaaggctggttgtttctgagaaga

SEQ ID NO: 5351077 - DNA, 25 bp, Homo sapien
tctgtggctatattcgaaacagaat

SEQ ID NO: 5351078 - DNA, 25 bp, Homo sapien
gtggctatattcgaaacagaatctt

SEQ ID NO: 5351079 - DNA, 25 bp, Homo sapien
ctgtggctatattcgaaacagaatc

SEQ ID NO: 5351080 - DNA, 25 bp, Homo sapien
tgtggctatattcgaaacagaatct

SEQ ID NO: 5351081 - DNA, 25 bp, Homo sapien
caaggctggttgtttctgagaagac

SEQ ID NO: 5351082 - DNA, 25 bp, Homo sapien
cttcaaggctggttgtttctgagaa

SEQ ID NO: 5351083 - DNA, 25 bp, Homo sapien
tcaaggctggttgtttctgagaaga

SEQ ID NO: 5351084 - DNA, 25 bp, Homo sapien
aaggctggttgtttctgagaagaca

SEQ ID NO: 5351085 - DNA, 25 bp, Homo sapien
ctgtcccacattgtagtccatcctt

SEQ ID NO: 5351086 - DNA, 25 bp, Homo sapien
gtagctatattcaaagcagaatctg

SEQ ID NO: 5351087 - DNA, 25 bp, Homo sapien
tattcaaagcagaatctgtcttgtc

SEQ ID NO: 5351088 - DNA, 25 bp, Homo sapien
tatttctgtagctatattcaaagca

SEQ ID NO: 5351089 - DNA, 25 bp, Homo sapien
ctttgagggtggttgtttctgagaa

SEQ ID NO: 5351090 - DNA, 25 bp, Homo sapien
ttgagggtggttgtttctgagaaga

SEQ ID NO: 5351091 - DNA, 25 bp, Homo sapien
gagggtggttgtttctgagaagaca

SEQ ID NO: 5351092 - DNA, 25 bp, Homo sapien
tgagggtggttgtttctgagaagac

SEQ ID NO: 5351093 - DNA, 25 bp, Homo sapien
ttcttgtggcaatattcaaaagaga

SEQ ID NO: 5351094 - DNA, 25 bp, Homo sapien
tattcttgtggcaatattcaaaaga

SEQ ID NO: 5351095 - DNA, 25 bp, Homo sapien
tcttgtggcaatattcaaaagagaa

SEQ ID NO: 5351096 - DNA, 25 bp, Homo sapien
ttattcttgtggcaatattcaaaag

SEQ ID NO: 5351097 - DNA, 25 bp, Homo sapien
caggctgattgtttctgaggagaca

SEQ ID NO: 5351098 - DNA, 25 bp, Homo sapien
tccaggctgattgtttctgaggaga

SEQ ID NO: 5351099 - DNA, 25 bp, Homo sapien
ccaggctgattgtttctgaggagac

SEQ ID NO: 5351100 - DNA, 25 bp, Homo sapien
cttccaggctgattgtttctgagga

SEQ ID NO: 5351101 - DNA, 25 bp, Homo sapien
tacttttctatcttgactgaacatg

SEQ ID NO: 5351102 - DNA, 25 bp, Homo sapien
cccgctgatttattccagggaagag

SEQ ID NO: 5351103 - DNA, 25 bp, Homo sapien
acttttctatcttgactgaacatga

SEQ ID NO: 5351104 - DNA, 25 bp, Homo sapien
gaatgtgcagcttcaatgaatcccc

SEQ ID NO: 5351105 - DNA, 25 bp, Homo sapien
gtcccagattgttgtccctccttta

SEQ ID NO: 5351106 - DNA, 25 bp, Homo sapien
atttctgtggctatatttgaaacag

SEQ ID NO: 5351107 - DNA, 25 bp, Homo sapien
ccagattgttgtccctcctttattt

SEQ ID NO: 5351108 - DNA, 25 bp, Homo sapien
ctgtcccagattgttgtccctcctt

SEQ ID NO: 5351109 - DNA, 25 bp, Homo sapien
tcagctggttgtttctgagaagaca

SEQ ID NO: 5351110 - DNA, 25 bp, Homo sapien
cttctcagctggttgtttctgagaa

SEQ ID NO: 5351111 - DNA, 25 bp, Homo sapien
ctcagctggttgtttctgagaagac

SEQ ID NO: 5351112 - DNA, 25 bp, Homo sapien
tctcagctggttgtttctgagaaga

SEQ ID NO: 5351113 - DNA, 25 bp, Homo sapien
tcccagatattggtccctcctttat

SEQ ID NO: 5351114 - DNA, 25 bp, Homo sapien
ccagatattggtccctcctttattt

SEQ ID NO: 5351115 - DNA, 25 bp, Homo sapien
cagaatctttgtcgtcacttgtagc

SEQ ID NO: 5351116 - DNA, 25 bp, Homo sapien
ctgtcccagatattggtccctcctt

SEQ ID NO: 5351117 - DNA, 25 bp, Homo sapien
tcagctggttgtttctgagaagaca

SEQ ID NO: 5351118 - DNA, 25 bp, Homo sapien
ctcagctggttgtttctgagaagac

SEQ ID NO: 5351119 - DNA, 25 bp, Homo sapien
cttctcagctggttgtttctgagaa

SEQ ID NO: 5351120 - DNA, 25 bp, Homo sapien
tctcagctggttgtttctgagaaga

SEQ ID NO: 5351121 - DNA, 25 bp, Homo sapien
cttttcctggaggtggtgaatcctt

SEQ ID NO: 5351122 - DNA, 25 bp, Homo sapien
tttcctggaggtggtgaatccttcc

SEQ ID NO: 5351123 - DNA, 25 bp, Homo sapien
tggaggtggtgaatccttccttctc

SEQ ID NO: 5351124 - DNA, 25 bp, Homo sapien
gaggtggtgaatccttccttctcat

SEQ ID NO: 5351125 - DNA, 25 bp, Homo sapien
ttgaactgggatctgcctctttcag

SEQ ID NO: 5351126 - DNA, 25 bp, Homo sapien
ttttgaactgggatctgcctctttc

SEQ ID NO: 5351127 - DNA, 25 bp, Homo sapien
ggctgcttttgaactgggatctgcc

SEQ ID NO: 5351128 - DNA, 25 bp, Homo sapien
tgcttttgaactgggatctgcctct

SEQ ID NO: 5351129 - DNA, 25 bp, Homo sapien
ggataaaggaggtcgctcagaagat

SEQ ID NO: 5351130 - DNA, 25 bp, Homo sapien
cgtggataaaggaggtcgctcagaa

SEQ ID NO: 5351131 - DNA, 25 bp, Homo sapien
gataaaggaggtcgctcagaagatt

SEQ ID NO: 5351132 - DNA, 25 bp, Homo sapien
tggataaaggaggtcgctcagaaga

SEQ ID NO: 5351133 - DNA, 25 bp, Homo sapien
tggactaacttgtacaaattccttc

SEQ ID NO: 5351134 - DNA, 25 bp, Homo sapien
tcacatcagtttcatcgagtatcaa

SEQ ID NO: 5351135 - DNA, 25 bp, Homo sapien
catagtttctattcactcacatcag

SEQ ID NO: 5351136 - DNA, 25 bp, Homo sapien
ctgtgatcaaaccagtaaaatctca

SEQ ID NO: 5351137 - DNA, 25 bp, Homo sapien
tatgtacattgtgtgaaagcgtaca

SEQ ID NO: 5351138 - DNA, 25 bp, Homo sapien
tgtactcaatacagctatggcagtg

SEQ ID NO: 5351139 - DNA, 25 bp, Homo sapien
atcagagtgccatggacaaaaacaa

SEQ ID NO: 5351140 - DNA, 25 bp, Homo sapien
cattgtgtgaaagcgtacagaagac

SEQ ID NO: 5351141 - DNA, 25 bp, Homo sapien
tattcatttttaatcagagatacac

SEQ ID NO: 5351142 - DNA, 25 bp, Homo sapien
ttcatttttaatcagagatacacac

SEQ ID NO: 5351143 - DNA, 25 bp, Homo sapien
attttattcatttttaatcagagat

SEQ ID NO: 5351144 - DNA, 25 bp, Homo sapien
tttattcatttttaatcagagatac

SEQ ID NO: 5351145 - DNA, 25 bp, Homo sapien
tgtaacaacactgacataaagtcgt

SEQ ID NO: 5351146 - DNA, 25 bp, Homo sapien
catgcagaaactcaatccggtaatc

SEQ ID NO: 5351147 - DNA, 25 bp, Homo sapien
caattgtaatgtcagcaggtatagc

SEQ ID NO: 5351148 - DNA, 25 bp, Homo sapien
actgacataaagtcgttgaagttct

SEQ ID NO: 5351149 - DNA, 25 bp, Homo sapien
aaaggaattcaacactgggatcttt

SEQ ID NO: 5351150 - DNA, 25 bp, Homo sapien
gatgaagaagagagtattgcaatca

SEQ ID NO: 5351151 - DNA, 25 bp, Homo sapien
tagtgtcaaaatacacctactcaaa

SEQ ID NO: 5351152 - DNA, 25 bp, Homo sapien
tactcaaatccctaacatgcaaagg

SEQ ID NO: 5351153 - DNA, 25 bp, Homo sapien
gttagtgaatccatacttcctaaga

SEQ ID NO: 5351154 - DNA, 25 bp, Homo sapien
gaagttagtgaatccatacttccta

SEQ ID NO: 5351155 - DNA, 25 bp, Homo sapien
agtgaatccatacttcctaagaatc

SEQ ID NO: 5351156 - DNA, 25 bp, Homo sapien
aatccatacttcctaagaatctagt

SEQ ID NO: 5351157 - DNA, 25 bp, Homo sapien
tgaataaaggcggttgctcaggaga

SEQ ID NO: 5351158 - DNA, 25 bp, Homo sapien
aataaaggcggttgctcaggagaca

SEQ ID NO: 5351159 - DNA, 25 bp, Homo sapien
gtgaataaaggcggttgctcaggag

SEQ ID NO: 5351160 - DNA, 25 bp, Homo sapien
gaataaaggcggttgctcaggagac

SEQ ID NO: 5351161 - DNA, 25 bp, Homo sapien
tccagttgctggtagtgcttttcct

SEQ ID NO: 5351162 - DNA, 25 bp, Homo sapien
gtccagttgctggtagtgcttttcc

SEQ ID NO: 5351163 - DNA, 25 bp, Homo sapien
ttgtccagttgctggtagtgctttt

SEQ ID NO: 5351164 - DNA, 25 bp, Homo sapien
tgtccagttgctggtagtgcttttc

SEQ ID NO: 5351165 - DNA, 25 bp, Homo sapien
tcaacattttggtcttcaaacaagg

SEQ ID NO: 5351166 - DNA, 25 bp, Homo sapien
gttttgtcaatgccacatgcagcat

SEQ ID NO: 5351167 - DNA, 25 bp, Homo sapien
ttctgttttgtcaatgccacatgca

SEQ ID NO: 5351168 - DNA, 25 bp, Homo sapien
tgttttgtcaatgccacatgcagca

SEQ ID NO: 5351169 - DNA, 25 bp, Homo sapien
ctgcagattgttgagaaatagtcct

SEQ ID NO: 5351170 - DNA, 25 bp, Homo sapien
caaaacggtccagtaggtagagaca

SEQ ID NO: 5351171 - DNA, 25 bp, Homo sapien
tgcaaaacggtccagtaggtagaga

SEQ ID NO: 5351172 - DNA, 25 bp, Homo sapien
tgtgcaaaacggtccagtaggtaga

SEQ ID NO: 5351173 - DNA, 25 bp, Homo sapien
gcaaaacggtccagtaggtagagac

SEQ ID NO: 5351174 - DNA, 25 bp, Homo sapien
tcaacagcctcttcaacaggaggaa

SEQ ID NO: 5351175 - DNA, 25 bp, Homo sapien
tgtcaacagcctcttcaacaggagg

SEQ ID NO: 5351176 - DNA, 25 bp, Homo sapien
ctgtcaacagcctcttcaacaggag

SEQ ID NO: 5351177 - DNA, 25 bp, Homo sapien
aacagcctcttcaacaggaggaagc

SEQ ID NO: 5351178 - DNA, 25 bp, Homo sapien
ctctttgggatgtatagttttgaaa

SEQ ID NO: 5351179 - DNA, 25 bp, Homo sapien
tctctttgggatgtatagttttgaa

SEQ ID NO: 5351180 - DNA, 25 bp, Homo sapien
ctttgggatgtatagttttgaaata

SEQ ID NO: 5351181 - DNA, 25 bp, Homo sapien
ttctctttgggatgtatagttttga

SEQ ID NO: 5351182 - DNA, 25 bp, Homo sapien
gctgtgcaacagcatccggtctgta

SEQ ID NO: 5351183 - DNA, 25 bp, Homo sapien
acaggctgtgcaacagcatccggtc

SEQ ID NO: 5351184 - DNA, 25 bp, Homo sapien
aacagcatccggtctgtagagactc

SEQ ID NO: 5351185 - DNA, 25 bp, Homo sapien
tgtgcaacagcatccggtctgtaga

SEQ ID NO: 5351186 - DNA, 25 bp, Homo sapien
agttgatatctgacacaacttttgt

SEQ ID NO: 5351187 - DNA, 25 bp, Homo sapien
ttgttactgaactggagtcaacctg

SEQ ID NO: 5351188 - DNA, 25 bp, Homo sapien
actgaactggagtcaacctgataac

SEQ ID NO: 5351189 - DNA, 25 bp, Homo sapien
acttttgttactgaactggagtcaa

SEQ ID NO: 5351190 - DNA, 25 bp, Homo sapien
ctgtttaaacactgttcaacagcag

SEQ ID NO: 5351191 - DNA, 25 bp, Homo sapien
gctgtgttcgaaacagaatcgttct

SEQ ID NO: 5351192 - DNA, 25 bp, Homo sapien
tgtgttcgaaacagaatcgttcttg

SEQ ID NO: 5351193 - DNA, 25 bp, Homo sapien
tgtggctgtgttcgaaacagaatcg

SEQ ID NO: 5351194 - DNA, 25 bp, Homo sapien
tggctgtgttcgaaacagaatcgtt

SEQ ID NO: 5351195 - DNA, 25 bp, Homo sapien
tcaaggccggttgtttctgagaaga

SEQ ID NO: 5351196 - DNA, 25 bp, Homo sapien
caaggccggttgtttctgagaagac

SEQ ID NO: 5351197 - DNA, 25 bp, Homo sapien
cttcaaggccggttgtttctgagaa

SEQ ID NO: 5351198 - DNA, 25 bp, Homo sapien
aaggccggttgtttctgagaagaca

SEQ ID NO: 5351199 - DNA, 25 bp, Homo sapien
tgtgttcgaaacagaatcgttcttg

SEQ ID NO: 5351200 - DNA, 25 bp, Homo sapien
tggctgtgttcgaaacagaatcgtt

SEQ ID NO: 5351201 - DNA, 25 bp, Homo sapien
gctgtgttcgaaacagaatcgttct

SEQ ID NO: 5351202 - DNA, 25 bp, Homo sapien
tgtggctgtgttcgaaacagaatcg

SEQ ID NO: 5351203 - DNA, 25 bp, Homo sapien
tcaaggccggttgtttctgagaaga

SEQ ID NO: 5351204 - DNA, 25 bp, Homo sapien
cttcaaggccggttgtttctgagaa

SEQ ID NO: 5351205 - DNA, 25 bp, Homo sapien
aaggccggttgtttctgagaagaca

SEQ ID NO: 5351206 - DNA, 25 bp, Homo sapien
caaggccggttgtttctgagaagac

SEQ ID NO: 5351207 - DNA, 25 bp, Homo sapien
tattcgagatagaatcttccttgcc

SEQ ID NO: 5351208 - DNA, 25 bp, Homo sapien
ttcgagatagaatcttccttgccac

SEQ ID NO: 5351209 - DNA, 25 bp, Homo sapien
gctatattcgagatagaatcttcct

SEQ ID NO: 5351210 - DNA, 25 bp, Homo sapien
gagatagaatcttccttgccacttg

SEQ ID NO: 5351211 - DNA, 25 bp, Homo sapien
caaggctggttgtttctgagaagac

SEQ ID NO: 5351212 - DNA, 25 bp, Homo sapien
cttcaaggctggttgtttctgagaa

SEQ ID NO: 5351213 - DNA, 25 bp, Homo sapien
aaggctggttgtttctgagaagaca

SEQ ID NO: 5351214 - DNA, 25 bp, Homo sapien
tcaaggctggttgtttctgagaaga

SEQ ID NO: 5351215 - DNA, 25 bp, Homo sapien
tctctgaaaagcacacaatggattt

SEQ ID NO: 5351216 - DNA, 25 bp, Homo sapien
ggtcatgacatgtcgaaaagacatg

SEQ ID NO: 5351217 - DNA, 25 bp, Homo sapien
attctctgaaaagcacacaatggat

SEQ ID NO: 5351218 - DNA, 25 bp, Homo sapien
tctcagggtcatgacatgtcgaaaa

SEQ ID NO: 5351219 - DNA, 25 bp, Homo sapien
ccatttgagccagtaatcacattac

SEQ ID NO: 5351220 - DNA, 25 bp, Homo sapien
ttactgggcatatactcggtgtgtg

SEQ ID NO: 5351221 - DNA, 25 bp, Homo sapien
gagccagtaatcacattactgggca

SEQ ID NO: 5351222 - DNA, 25 bp, Homo sapien
tatatgtacagtggctcgttcctgt

SEQ ID NO: 5351223 - DNA, 25 bp, Homo sapien
gatcactctgatgatgagccccacc

SEQ ID NO: 5351224 - DNA, 25 bp, Homo sapien
tctgcccaagatgtgaatcgtccct

SEQ ID NO: 5351225 - DNA, 25 bp, Homo sapien
tatcgtcatggttcacggatccaag

SEQ ID NO: 5351226 - DNA, 25 bp, Homo sapien
gatccaagatcacgtgaagcagatg

SEQ ID NO: 5351227 - DNA, 25 bp, Homo sapien
ttatagaaagctcttcatgtttctt

SEQ ID NO: 5351228 - DNA, 25 bp, Homo sapien
gctatttatagaaagctcttcatgt

SEQ ID NO: 5351229 - DNA, 25 bp, Homo sapien
tcatattcataaattagttcaaaaa

SEQ ID NO: 5351230 - DNA, 25 bp, Homo sapien
ctggattgctatttatagaaagctc

SEQ ID NO: 5351231 - DNA, 25 bp, Homo sapien
actctgttcttagcctcgctggcat

SEQ ID NO: 5351232 - DNA, 25 bp, Homo sapien
tgttcttagcctcgctggcataatc

SEQ ID NO: 5351233 - DNA, 25 bp, Homo sapien
gttcttagcctcgctggcataatct

SEQ ID NO: 5351234 - DNA, 25 bp, Homo sapien
tctgttcttagcctcgctggcataa

SEQ ID NO: 5351235 - DNA, 25 bp, Homo sapien
caagataatcaacggcatttatatt

SEQ ID NO: 5351236 - DNA, 25 bp, Homo sapien
gataatcaacggcatttatatttgc

SEQ ID NO: 5351237 - DNA, 25 bp, Homo sapien
ctgccaagataatcaacggcattta

SEQ ID NO: 5351238 - DNA, 25 bp, Homo sapien
gccaagataatcaacggcatttata

SEQ ID NO: 5351239 - DNA, 25 bp, Homo sapien
actcacagcaaggaacagtggcgga

SEQ ID NO: 5351240 - DNA, 25 bp, Homo sapien
cagcaaggaacagtggcggatattc

SEQ ID NO: 5351241 - DNA, 25 bp, Homo sapien
caaggaacagtggcggatattcatc

SEQ ID NO: 5351242 - DNA, 25 bp, Homo sapien
cacagcaaggaacagtggcggatat

SEQ ID NO: 5351243 - DNA, 25 bp, Homo sapien
gatcggcgccattttgcagcagaag

SEQ ID NO: 5351244 - DNA, 25 bp, Homo sapien
catccgtaatatttggatcggcgcc

SEQ ID NO: 5351245 - DNA, 25 bp, Homo sapien
tacacagcgtagtgcagagcagtcc

SEQ ID NO: 5351246 - DNA, 25 bp, Homo sapien
gagcagtccttccaaagacatccgt

SEQ ID NO: 5351247 - DNA, 25 bp, Homo sapien
gtcgcagaggttaagctcacatctt

SEQ ID NO: 5351248 - DNA, 25 bp, Homo sapien
cggtcgcagaggttaagctcacatc

SEQ ID NO: 5351249 - DNA, 25 bp, Homo sapien
cacggtcgcagaggttaagctcaca

SEQ ID NO: 5351250 - DNA, 25 bp, Homo sapien
ttcacggtcgcagaggttaagctca

SEQ ID NO: 5351251 - DNA, 25 bp, Homo sapien
ttccggttggccagtggcacaggcc

SEQ ID NO: 5351252 - DNA, 25 bp, Homo sapien
tggcacaggccaaatgtagggcggt

SEQ ID NO: 5351253 - DNA, 25 bp, Homo sapien
ggcacaggccaaatgtagggcggtc

SEQ ID NO: 5351254 - DNA, 25 bp, Homo sapien
cggttggccagtggcacaggccaaa

SEQ ID NO: 5351255 - DNA, 25 bp, Homo sapien
gagtgacaggactttttaaaacatg

SEQ ID NO: 5351256 - DNA, 25 bp, Homo sapien
tgagagtgacaggactttttaaaac

SEQ ID NO: 5351257 - DNA, 25 bp, Homo sapien
gagagtgacaggactttttaaaaca

SEQ ID NO: 5351258 - DNA, 25 bp, Homo sapien
ctgtgagagtgacaggactttttaa

SEQ ID NO: 5351259 - DNA, 25 bp, Homo sapien
tagatgtatcgttgtatttcagtca

SEQ ID NO: 5351260 - DNA, 25 bp, Homo sapien
tgatacaatcatatctacattgagg

SEQ ID NO: 5351261 - DNA, 25 bp, Homo sapien
catctcctaacattggaatactgtt

SEQ ID NO: 5351262 - DNA, 25 bp, Homo sapien
tttcagtcattctcagatgctcatt

SEQ ID NO: 5351263 - DNA, 25 bp, Homo sapien
ccatattgtcccatcctatggatgc

SEQ ID NO: 5351264 - DNA, 25 bp, Homo sapien
tgtgtatgtataatcaaaccaactt

SEQ ID NO: 5351265 - DNA, 25 bp, Homo sapien
ttttcagagtacatcttcacacctc

SEQ ID NO: 5351266 - DNA, 25 bp, Homo sapien
ttcacacctcaacatacatctgtat

SEQ ID NO: 5351267 - DNA, 25 bp, Homo sapien
cgtgagcagaacgaacttcagttcc

SEQ ID NO: 5351268 - DNA, 25 bp, Homo sapien
tcctccagatcacgatagaagacag

SEQ ID NO: 5351269 - DNA, 25 bp, Homo sapien
ctcttattgatgtcataacgcgtga

SEQ ID NO: 5351270 - DNA, 25 bp, Homo sapien
agttcctccagatcacgatagaaga

SEQ ID NO: 5351271 - DNA, 25 bp, Homo sapien
gctccttgtcatccataatggtcgg

SEQ ID NO: 5351272 - DNA, 25 bp, Homo sapien
cttcggctccttgtcatccataatg

SEQ ID NO: 5351273 - DNA, 25 bp, Homo sapien
ccttgtcatccataatggtcggctg

SEQ ID NO: 5351274 - DNA, 25 bp, Homo sapien
tgtcatccataatggtcggctgcaa

SEQ ID NO: 5351275 - DNA, 25 bp, Homo sapien
ctgcagccgtatttcagctcgcctt

SEQ ID NO: 5351276 - DNA, 25 bp, Homo sapien
gcagccgtatttcagctcgccttcg

SEQ ID NO: 5351277 - DNA, 25 bp, Homo sapien
ttcagctcgccttcggggatcgccg

SEQ ID NO: 5351278 - DNA, 25 bp, Homo sapien
atttcagctcgccttcggggatcgc

SEQ ID NO: 5351279 - DNA, 25 bp, Homo sapien
agcgagcacgcgcaccttagccggc

SEQ ID NO: 5351280 - DNA, 25 bp, Homo sapien
gttagaaccagcgagcacgcgcacc

SEQ ID NO: 5351281 - DNA, 25 bp, Homo sapien
gaaccagcgagcacgcgcaccttag

SEQ ID NO: 5351282 - DNA, 25 bp, Homo sapien
tagaaccagcgagcacgcgcacctt

SEQ ID NO: 5351283 - DNA, 25 bp, Homo sapien
tgcgaggcgggaggacgggatctgg

SEQ ID NO: 5351284 - DNA, 25 bp, Homo sapien
ggtccgcgctgatgggtgcgaggcg

SEQ ID NO: 5351285 - DNA, 25 bp, Homo sapien
gcccgacatcgccactgcgtcgccc

SEQ ID NO: 5351286 - DNA, 25 bp, Homo sapien
gctgatgggtgcgaggcgggaggac

SEQ ID NO: 5351287 - DNA, 25 bp, Homo sapien
aagcccatgcccggcgctcctgccg

SEQ ID NO: 5351288 - DNA, 25 bp, Homo sapien
agcccatgcccggcgctcctgccgc

SEQ ID NO: 5351289 - DNA, 25 bp, Homo sapien
gaagcccatgcccggcgctcctgcc

SEQ ID NO: 5351290 - DNA, 25 bp, Homo sapien
tccaaatccggtgattttgagcata

SEQ ID NO: 5351291 - DNA, 25 bp, Homo sapien
cctccaaatccggtgattttgagca

SEQ ID NO: 5351292 - DNA, 25 bp, Homo sapien
tgattttgagcatagtgaagcacac

SEQ ID NO: 5351293 - DNA, 25 bp, Homo sapien
ttgagcatagtgaagcacactgaca

SEQ ID NO: 5351294 - DNA, 25 bp, Homo sapien
tgtggtcagcaagggaattttgacc

SEQ ID NO: 5351295 - DNA, 25 bp, Homo sapien
gtggcctttcacaggtgtggtcagc

SEQ ID NO: 5351296 - DNA, 25 bp, Homo sapien
cagaactcctgtacagactcaagca

SEQ ID NO: 5351297 - DNA, 25 bp, Homo sapien
cacaggtgtggtcagcaagggaatt

SEQ ID NO: 5351298 - DNA, 25 bp, Homo sapien
gctcctccagaagccctgtctccat

SEQ ID NO: 5351299 - DNA, 25 bp, Homo sapien
tgtcatctccccagacccgctgctc

SEQ ID NO: 5351300 - DNA, 25 bp, Homo sapien
ctgctcctccagaagccctgtctcc

SEQ ID NO: 5351301 - DNA, 25 bp, Homo sapien
cccgctgctcctccagaagccctgt

SEQ ID NO: 5351302 - DNA, 25 bp, Homo sapien
tgccaagtcacgaagcacccctata

SEQ ID NO: 5351303 - DNA, 25 bp, Homo sapien
gcacccctatagttgtgtttgtaaa

SEQ ID NO: 5351304 - DNA, 25 bp, Homo sapien
cacgaagcacccctatagttgtgtt

SEQ ID NO: 5351305 - DNA, 25 bp, Homo sapien
tcaatgtgggcactttaaagccctt

SEQ ID NO: 5351306 - DNA, 25 bp, Homo sapien
gcagctaagggtttgcagcctcctc

SEQ ID NO: 5351307 - DNA, 25 bp, Homo sapien
tcttctggctctaggacacagctgt

SEQ ID NO: 5351308 - DNA, 25 bp, Homo sapien
aaagacaactcgtctcgtccccttg

SEQ ID NO: 5351309 - DNA, 25 bp, Homo sapien
tggcaagggacaatcaagcctcaat

SEQ ID NO: 5351310 - DNA, 25 bp, Homo sapien
gccggatgaactgttctagtttttc

SEQ ID NO: 5351311 - DNA, 25 bp, Homo sapien
tgaactgccggatgaactgttctag

SEQ ID NO: 5351312 - DNA, 25 bp, Homo sapien
cagggctcggcgtctgctgcagaac

SEQ ID NO: 5351313 - DNA, 25 bp, Homo sapien
gcagggctcggcgtctgctgcagaa

SEQ ID NO: 5351314 - DNA, 25 bp, Homo sapien
ctactctattggggtgggagcaggg

SEQ ID NO: 5351315 - DNA, 25 bp, Homo sapien
agcagggggacagaagatggtgaca

SEQ ID NO: 5351316 - DNA, 25 bp, Homo sapien
agatggtgacagtggctcctctcac

SEQ ID NO: 5351317 - DNA, 25 bp, Homo sapien
tgggagcagggggacagaagatggt

SEQ ID NO: 5351318 - DNA, 25 bp, Homo sapien
cagacagcactgatggcgagctttg

SEQ ID NO: 5351319 - DNA, 25 bp, Homo sapien
taggtctctgaaggtccagacagca

SEQ ID NO: 5351320 - DNA, 25 bp, Homo sapien
gatggcgagctttgggtccgcacac

SEQ ID NO: 5351321 - DNA, 25 bp, Homo sapien
tgaaggtccagacagcactgatggc

SEQ ID NO: 5351322 - DNA, 25 bp, Homo sapien
aactggaacagctgctctgtgtagc

SEQ ID NO: 5351323 - DNA, 25 bp, Homo sapien
caggaactggaacagctgctctgtg

SEQ ID NO: 5351324 - DNA, 25 bp, Homo sapien
ctgcaggaactggaacagctgctct

SEQ ID NO: 5351325 - DNA, 25 bp, Homo sapien
cgaagatcccttcttcctgggcggt

SEQ ID NO: 5351326 - DNA, 25 bp, Homo sapien
agcctgcctcgaggactgcaaggga

SEQ ID NO: 5351327 - DNA, 25 bp, Homo sapien
cagcctgcctcgaggactgcaaggg

SEQ ID NO: 5351328 - DNA, 25 bp, Homo sapien
gcctgcctcgaggactgcaagggaa

SEQ ID NO: 5351329 - DNA, 25 bp, Homo sapien
ctgcctcgaggactgcaagggaaca

SEQ ID NO: 5351330 - DNA, 25 bp, Homo sapien
cttgagcagcgggctgagcaggcgg

SEQ ID NO: 5351331 - DNA, 25 bp, Homo sapien
ggccttgagcagcgggctgagcagg

SEQ ID NO: 5351332 - DNA, 25 bp, Homo sapien
gccttgagcagcgggctgagcaggc

SEQ ID NO: 5351333 - DNA, 25 bp, Homo sapien
ccttgagcagcgggctgagcaggcg

SEQ ID NO: 5351334 - DNA, 25 bp, Homo sapien
tggaggggacaggccggggtgagtg

SEQ ID NO: 5351335 - DNA, 25 bp, Homo sapien
cctccaggggcagctttttgaaaca

SEQ ID NO: 5351336 - DNA, 25 bp, Homo sapien
gacaggccggggtgagtgcagctcc

SEQ ID NO: 5351337 - DNA, 25 bp, Homo sapien
tccaggggcagctttttgaaacaca

SEQ ID NO: 5351338 - DNA, 25 bp, Homo sapien
gctcaatcgctgtcgccctgtgtca

SEQ ID NO: 5351339 - DNA, 25 bp, Homo sapien
cctgaagtaccggccgtcagcctct

SEQ ID NO: 5351340 - DNA, 25 bp, Homo sapien
gctttctgctcaatcgctgtcgccc

SEQ ID NO: 5351341 - DNA, 25 bp, Homo sapien
tttctgctcaatcgctgtcgccctg

SEQ ID NO: 5351342 - DNA, 25 bp, Homo sapien
gctccaggcaaggatcttgtctcca

SEQ ID NO: 5351343 - DNA, 25 bp, Homo sapien
gtaaaagcagacctagagacccaag

SEQ ID NO: 5351344 - DNA, 25 bp, Homo sapien
cataggtggctatatcccaaggcac

SEQ ID NO: 5351345 - DNA, 25 bp, Homo sapien
agcagaggtgcgagctaggcttccc

SEQ ID NO: 5351346 - DNA, 25 bp, Homo sapien
caaccaggagcccgcattggatgag

SEQ ID NO: 5351347 - DNA, 25 bp, Homo sapien
tcagcaaccaggagcccgcattgga

SEQ ID NO: 5351348 - DNA, 25 bp, Homo sapien
accaggagcccgcattggatgagcc

SEQ ID NO: 5351349 - DNA, 25 bp, Homo sapien
cagcaaccaggagcccgcattggat

SEQ ID NO: 5351350 - DNA, 25 bp, Homo sapien
tcagcagcaatatgccctgcagctc

SEQ ID NO: 5351351 - DNA, 25 bp, Homo sapien
ctcagcactcagttgtgccaggtgt

SEQ ID NO: 5351352 - DNA, 25 bp, Homo sapien
cagctcagcactcagttgtgccagg

SEQ ID NO: 5351353 - DNA, 25 bp, Homo sapien
acagcctcgctcaggaagacgggca

SEQ ID NO: 5351354 - DNA, 25 bp, Homo sapien
cactcagttgtgccaggtgtgtgag

SEQ ID NO: 5351355 - DNA, 25 bp, Homo sapien
ttctgatgcttgaagagcagcagcg

SEQ ID NO: 5351356 - DNA, 25 bp, Homo sapien
ataatggccgtgctcatcaccgcag

SEQ ID NO: 5351357 - DNA, 25 bp, Homo sapien
cgttgccataatggccgtgctcatc

SEQ ID NO: 5351358 - DNA, 25 bp, Homo sapien
cagcagcgttgccataatggccgtg

SEQ ID NO: 5351359 - DNA, 25 bp, Homo sapien
tagctgctcccttatgatggccctg

SEQ ID NO: 5351360 - DNA, 25 bp, Homo sapien
tataagggccctctgtggaggcgct

SEQ ID NO: 5351361 - DNA, 25 bp, Homo sapien
tgcagacacttggaatggagaaccc

SEQ ID NO: 5351362 - DNA, 25 bp, Homo sapien
gatgtccccaaggtatcacagagca

SEQ ID NO: 5351363 - DNA, 25 bp, Homo sapien
gaggcccagttatgggggtccactc

SEQ ID NO: 5351364 - DNA, 25 bp, Homo sapien
cactcaggacatgacagctcagtct

SEQ ID NO: 5351365 - DNA, 25 bp, Homo sapien
ggagaggcccagttatgggggtcca

SEQ ID NO: 5351366 - DNA, 25 bp, Homo sapien
cagttatgggggtccactcctgctc

SEQ ID NO: 5351367 - DNA, 25 bp, Homo sapien
gcagcttctggcactgacgatgtat

SEQ ID NO: 5351368 - DNA, 25 bp, Homo sapien
cagcagcttctggcactgacgatgt

SEQ ID NO: 5351369 - DNA, 25 bp, Homo sapien
agcagcttctggcactgacgatgta

SEQ ID NO: 5351370 - DNA, 25 bp, Homo sapien
agcttctggcactgacgatgtattc

SEQ ID NO: 5351371 - DNA, 25 bp, Homo sapien
tccacaagctacgtaggacagccag

SEQ ID NO: 5351372 - DNA, 25 bp, Homo sapien
cagcggctccacaagctacgtagga

SEQ ID NO: 5351373 - DNA, 25 bp, Homo sapien
caagctacgtaggacagccagagct

SEQ ID NO: 5351374 - DNA, 25 bp, Homo sapien
ggctccacaagctacgtaggacagc

SEQ ID NO: 5351375 - DNA, 25 bp, Homo sapien
acaatattgtgcctcctatcgggag

SEQ ID NO: 5351376 - DNA, 25 bp, Homo sapien
aaggataactatactcgccgaggac

SEQ ID NO: 5351377 - DNA, 25 bp, Homo sapien
taatggccttgacaggtgctgccag

SEQ ID NO: 5351378 - DNA, 25 bp, Homo sapien
caaactggtgcgtgaccttgtccca

SEQ ID NO: 5351379 - DNA, 25 bp, Homo sapien
agcagagcatctgggacgatgccca

SEQ ID NO: 5351380 - DNA, 25 bp, Homo sapien
tggtctatgtcacacggtgcatccg

SEQ ID NO: 5351381 - DNA, 25 bp, Homo sapien
ggggctgcccactaaccagcagctg

SEQ ID NO: 5351382 - DNA, 25 bp, Homo sapien
accaggtcataggtgacggccactg

SEQ ID NO: 5351383 - DNA, 25 bp, Homo sapien
ggtgttaaggccagagcagaaacag

SEQ ID NO: 5351384 - DNA, 25 bp, Homo sapien
agcagaaacagacccctgtcccctt

SEQ ID NO: 5351385 - DNA, 25 bp, Homo sapien
tcagagggggtgttaaggccagagc

SEQ ID NO: 5351386 - DNA, 25 bp, Homo sapien
tccccttagcctggcccatatgtaa

SEQ ID NO: 5351387 - DNA, 25 bp, Homo sapien
acagccctggcaaggagcccctcag

SEQ ID NO: 5351388 - DNA, 25 bp, Homo sapien
cagccctggcaaggagcccctcaga

SEQ ID NO: 5351389 - DNA, 25 bp, Homo sapien
aggccacacgaagcacacccaggcc

SEQ ID NO: 5351390 - DNA, 25 bp, Homo sapien
ccaggccacacgaagcacacccagg

SEQ ID NO: 5351391 - DNA, 25 bp, Homo sapien
agcaggcgcgggagtcccaggccac

SEQ ID NO: 5351392 - DNA, 25 bp, Homo sapien
gcaggcgcgggagtcccaggccaca

SEQ ID NO: 5351393 - DNA, 25 bp, Homo sapien
ggatcccatccaggagggttttgtg

SEQ ID NO: 5351394 - DNA, 25 bp, Homo sapien
tagagaggaggacaagcggcaagcc

SEQ ID NO: 5351395 - DNA, 25 bp, Homo sapien
gagcagcataaagggcagcaggatc

SEQ ID NO: 5351396 - DNA, 25 bp, Homo sapien
tgggagagcagcataaagggcagca

SEQ ID NO: 5351397 - DNA, 25 bp, Homo sapien
agagccagagggaagtgccaacctg

SEQ ID NO: 5351398 - DNA, 25 bp, Homo sapien
acgttagaggaagccccatgggagc

SEQ ID NO: 5351399 - DNA, 25 bp, Homo sapien
ttaaggtaactgcaccgacgcactg

SEQ ID NO: 5351400 - DNA, 25 bp, Homo sapien
cataagggaaggtcggcaaagagca

SEQ ID NO: 5351401 - DNA, 25 bp, Homo sapien
gacgcactgacgtcatggttgttaa

SEQ ID NO: 5351402 - DNA, 25 bp, Homo sapien
cagctgatggggactggactgctgt

SEQ ID NO: 5351403 - DNA, 25 bp, Homo sapien
agctgatggggactggactgctgta

SEQ ID NO: 5351404 - DNA, 25 bp, Homo sapien
ctcctgacttaagggcttggcccag

SEQ ID NO: 5351405 - DNA, 25 bp, Homo sapien
tgctcctgacttaagggcttggccc

SEQ ID NO: 5351406 - DNA, 25 bp, Homo sapien
gactgctcctgacttaagggcttgg

SEQ ID NO: 5351407 - DNA, 25 bp, Homo sapien
gatggggactgctcctgacttaagg

SEQ ID NO: 5351408 - DNA, 25 bp, Homo sapien
tctgacccttgtggagctgcacatt

SEQ ID NO: 5351409 - DNA, 25 bp, Homo sapien
ggaacctcagcagcgcccagctgaa

SEQ ID NO: 5351410 - DNA, 25 bp, Homo sapien
aggcagttcaggaacctcagcagcg

SEQ ID NO: 5351411 - DNA, 25 bp, Homo sapien
ctgacccttgtggagctgcacattc

SEQ ID NO: 5351412 - DNA, 25 bp, Homo sapien
gatgcgctgtacctccttcttcaca

SEQ ID NO: 5351413 - DNA, 25 bp, Homo sapien
ccaggatgcgctgtacctccttctt

SEQ ID NO: 5351414 - DNA, 25 bp, Homo sapien
gcgctgtacctccttcttcacaagg

SEQ ID NO: 5351415 - DNA, 25 bp, Homo sapien
cctggatgtgacccaggatgcgctg

SEQ ID NO: 5351416 - DNA, 25 bp, Homo sapien
tagcagagcctccgaaccagccagc

SEQ ID NO: 5351417 - DNA, 25 bp, Homo sapien
gcctccgaaccagccagccccgaaa

SEQ ID NO: 5351418 - DNA, 25 bp, Homo sapien
agagcctccgaaccagccagccccg

SEQ ID NO: 5351419 - DNA, 25 bp, Homo sapien
catcctggcagggggggatgtgctg

SEQ ID NO: 5351420 - DNA, 25 bp, Homo sapien
ccaggatcacattgcagaagcctag

SEQ ID NO: 5351421 - DNA, 25 bp, Homo sapien
ggatcacattgcagaagcctaggtc

SEQ ID NO: 5351422 - DNA, 25 bp, Homo sapien
tgcagaagcctaggtccgttatgct

SEQ ID NO: 5351423 - DNA, 25 bp, Homo sapien
cacattgcagaagcctaggtccgtt

SEQ ID NO: 5351424 - DNA, 25 bp, Homo sapien
tcccaaagcctgacgaccacaggct

SEQ ID NO: 5351425 - DNA, 25 bp, Homo sapien
cagcgacccacaaaggggcgatact

SEQ ID NO: 5351426 - DNA, 25 bp, Homo sapien
gggggtgcaggtctggcaacagcga

SEQ ID NO: 5351427 - DNA, 25 bp, Homo sapien
gtgcaggtctggcaacagcgaccca

SEQ ID NO: 5351428 - DNA, 25 bp, Homo sapien
ttggctgagtttggcatctgccttc

SEQ ID NO: 5351429 - DNA, 25 bp, Homo sapien
tccttggctgagtttggcatctgcc

SEQ ID NO: 5351430 - DNA, 25 bp, Homo sapien
ggctgagtttggcatctgccttcca

SEQ ID NO: 5351431 - DNA, 25 bp, Homo sapien
gagtttggcatctgccttccaacat

SEQ ID NO: 5351432 - DNA, 25 bp, Homo sapien
aagaaccatgaaccagtcacctctg

SEQ ID NO: 5351433 - DNA, 25 bp, Homo sapien
gaaccatgaaccagtcacctctggc

SEQ ID NO: 5351434 - DNA, 25 bp, Homo sapien
agaagaaccatgaaccagtcacctc

SEQ ID NO: 5351435 - DNA, 25 bp, Homo sapien
atgaaccagtcacctctggcactct

SEQ ID NO: 5351436 - DNA, 25 bp, Homo sapien
tagcacagatgggggctgtaccgga

SEQ ID NO: 5351437 - DNA, 25 bp, Homo sapien
gatgggggctgtaccggagatgctg

SEQ ID NO: 5351438 - DNA, 25 bp, Homo sapien
cacagatgggggctgtaccggagat

SEQ ID NO: 5351439 - DNA, 25 bp, Homo sapien
gggctgtaccggagatgctgatcct

SEQ ID NO: 5351440 - DNA, 25 bp, Homo sapien
tcgccggggagcgaccaccgcgcct

SEQ ID NO: 5351441 - DNA, 25 bp, Homo sapien
cctcgccggggagcgaccaccgcgc

SEQ ID NO: 5351442 - DNA, 25 bp, Homo sapien
gccggggagcgaccaccgcgcctct

SEQ ID NO: 5351443 - DNA, 25 bp, Homo sapien
ggggagcgaccaccgcgcctctcac

SEQ ID NO: 5351444 - DNA, 25 bp, Homo sapien
agcagctccgcaaagccgccacaag

SEQ ID NO: 5351445 - DNA, 25 bp, Homo sapien
ccgcaaagccgccacaaggcgtgga

SEQ ID NO: 5351446 - DNA, 25 bp, Homo sapien
cagcttccaactcccgccaaagcag

SEQ ID NO: 5351447 - DNA, 25 bp, Homo sapien
aagccgccacaaggcgtggactgct

SEQ ID NO: 5351448 - DNA, 25 bp, Homo sapien
agccaattgggatgcgcgctggtcc

SEQ ID NO: 5351449 - DNA, 25 bp, Homo sapien
gggatggcctgctccgttttccagt

SEQ ID NO: 5351450 - DNA, 25 bp, Homo sapien
cgtactctgcgacactcaacgtggc

SEQ ID NO: 5351451 - DNA, 25 bp, Homo sapien
gtccggctaaaaggcagccccgaga

SEQ ID NO: 5351452 - DNA, 25 bp, Homo sapien
ccccgggtgcttgagcttcgagcag

SEQ ID NO: 5351453 - DNA, 25 bp, Homo sapien
gaggccccgggtgcttgagcttcga

SEQ ID NO: 5351454 - DNA, 25 bp, Homo sapien
gcttgagcttcgagcagggactcag

SEQ ID NO: 5351455 - DNA, 25 bp, Homo sapien
gtgcttgagcttcgagcagggactc

SEQ ID NO: 5351456 - DNA, 25 bp, Homo sapien
cttcattgggatttgcaacgtcctc

SEQ ID NO: 5351457 - DNA, 25 bp, Homo sapien
atttgcaacgtcctcccggtacctg

SEQ ID NO: 5351458 - DNA, 25 bp, Homo sapien
tgggatttgcaacgtcctcccggta

SEQ ID NO: 5351459 - DNA, 25 bp, Homo sapien
ctgcagaatccattttgtaccccat

SEQ ID NO: 5351460 - DNA, 25 bp, Homo sapien
ctctgaaggtggctgtgctcagaac

SEQ ID NO: 5351461 - DNA, 25 bp, Homo sapien
ggtggctgtgctcagaacacctggg

SEQ ID NO: 5351462 - DNA, 25 bp, Homo sapien
tgaaggtggctgtgctcagaacacc

SEQ ID NO: 5351463 - DNA, 25 bp, Homo sapien
aaggtggctgtgctcagaacacctg

SEQ ID NO: 5351464 - DNA, 25 bp, Homo sapien
aatagacaaaggacacgagcaggca

SEQ ID NO: 5351465 - DNA, 25 bp, Homo sapien
cgaggaactcctgaaaattaacaag

SEQ ID NO: 5351466 - DNA, 25 bp, Homo sapien
gatctgttgcaagtgacacatggca

SEQ ID NO: 5351467 - DNA, 25 bp, Homo sapien
tgtgcagtctaaaactgacaagaga

SEQ ID NO: 5351468 - DNA, 25 bp, Homo sapien
ttggccttctccccatctggggcaa

SEQ ID NO: 5351469 - DNA, 25 bp, Homo sapien
acttggccttctccccatctggggc

SEQ ID NO: 5351470 - DNA, 25 bp, Homo sapien
tcacttggccttctccccatctggg

SEQ ID NO: 5351471 - DNA, 25 bp, Homo sapien
tggccttctccccatctggggcaat

SEQ ID NO: 5351472 - DNA, 25 bp, Homo sapien
tggcccatcgctgcaggacttccca

SEQ ID NO: 5351473 - DNA, 25 bp, Homo sapien
tcgctgcaggacttcccactgtgca

SEQ ID NO: 5351474 - DNA, 25 bp, Homo sapien
gctgcaggacttcccactgtgcagg

SEQ ID NO: 5351475 - DNA, 25 bp, Homo sapien
catcgctgcaggacttcccactgtg

SEQ ID NO: 5351476 - DNA, 25 bp, Homo sapien
gccaggttccggaagatcccatgag

SEQ ID NO: 5351477 - DNA, 25 bp, Homo sapien
agccaggttccggaagatcccatga

SEQ ID NO: 5351478 - DNA, 25 bp, Homo sapien
ctgcaagcaggagatgtcgtatggt

SEQ ID NO: 5351479 - DNA, 25 bp, Homo sapien
ctaacaagctaggaagggtcacaac

SEQ ID NO: 5351480 - DNA, 25 bp, Homo sapien
ggccagatctgcaagcaggagatgt

SEQ ID NO: 5351481 - DNA, 25 bp, Homo sapien
agatctgcaagcaggagatgtcgta

SEQ ID NO: 5351482 - DNA, 25 bp, Homo sapien
ggtaaaggtgtaatctgaaggtgga

SEQ ID NO: 5351483 - DNA, 25 bp, Homo sapien
taaaggtgtaatctgaaggtggact

SEQ ID NO: 5351484 - DNA, 25 bp, Homo sapien
gtaaaggtgtaatctgaaggtggac

SEQ ID NO: 5351485 - DNA, 25 bp, Homo sapien
aggtaaaggtgtaatctgaaggtgg

SEQ ID NO: 5351486 - DNA, 25 bp, Homo sapien
ctgctcaatgaggatgcccagggaa

SEQ ID NO: 5351487 - DNA, 25 bp, Homo sapien
gctcaatgaggatgcccagggaatc

SEQ ID NO: 5351488 - DNA, 25 bp, Homo sapien
tgctcaatgaggatgcccagggaat

SEQ ID NO: 5351489 - DNA, 25 bp, Homo sapien
gtgtccccaggctactgcagacaca

SEQ ID NO: 5351490 - DNA, 25 bp, Homo sapien
cacaaggtcgtaccttggtgccttg

SEQ ID NO: 5351491 - DNA, 25 bp, Homo sapien
ttccaggcaaaaggtaagagtattg

SEQ ID NO: 5351492 - DNA, 25 bp, Homo sapien
gtattggcttgtgcggctcccgtga

SEQ ID NO: 5351493 - DNA, 25 bp, Homo sapien
gcagtcctgcgagtgccacacttct

SEQ ID NO: 5351494 - DNA, 25 bp, Homo sapien
ggatgtccttgaatacacgtgcatc

SEQ ID NO: 5351495 - DNA, 25 bp, Homo sapien
aatacacgtgcatcctcaaaactgt

SEQ ID NO: 5351496 - DNA, 25 bp, Homo sapien
catgaggggccactaacataattta

SEQ ID NO: 5351497 - DNA, 25 bp, Homo sapien
ccttgaatacacgtgcatcctcaaa

SEQ ID NO: 5351498 - DNA, 25 bp, Homo sapien
ctagtagccaaaaccggggataatg

SEQ ID NO: 5351499 - DNA, 25 bp, Homo sapien
gggataatggatgagcacgagttct

SEQ ID NO: 5351500 - DNA, 25 bp, Homo sapien
tgagcacgagttctaacccagcagt

SEQ ID NO: 5351501 - DNA, 25 bp, Homo sapien
ttctaacccagcagtcacaaaggcc

SEQ ID NO: 5351502 - DNA, 25 bp, Homo sapien
gctttatgtccctgcaagtaggtgg

SEQ ID NO: 5351503 - DNA, 25 bp, Homo sapien
gagtacctggataccacccatcagg

SEQ ID NO: 5351504 - DNA, 25 bp, Homo sapien
ctttatgtccctgcaagtaggtggg

SEQ ID NO: 5351505 - DNA, 25 bp, Homo sapien
gctgcaggggagtacctggatacca

SEQ ID NO: 5351506 - DNA, 25 bp, Homo sapien
agcgtcctcacccagctggaatggg

SEQ ID NO: 5351507 - DNA, 25 bp, Homo sapien
tacaccggcactacctgtgatccag

SEQ ID NO: 5351508 - DNA, 25 bp, Homo sapien
agttctgccagtacaccccatagag

SEQ ID NO: 5351509 - DNA, 25 bp, Homo sapien
gctgacatggattagaacgccccgg

SEQ ID NO: 5351510 - DNA, 25 bp, Homo sapien
gcagtggcctcgagcggcaggctgg

SEQ ID NO: 5351511 - DNA, 25 bp, Homo sapien
tcataaagatgctctgacgaaggtg

SEQ ID NO: 5351512 - DNA, 25 bp, Homo sapien
cgaaggtgacagtgtatcttttgaa

SEQ ID NO: 5351513 - DNA, 25 bp, Homo sapien
tgctctgacgaaggtgacagtgtat

SEQ ID NO: 5351514 - DNA, 25 bp, Homo sapien
tcttttgaaagtcctaaaagcatct

SEQ ID NO: 5351515 - DNA, 25 bp, Homo sapien
gtgttccaaggccaggctactctcc

SEQ ID NO: 5351516 - DNA, 25 bp, Homo sapien
gttccaaggccaggctactctccag

SEQ ID NO: 5351517 - DNA, 25 bp, Homo sapien
ctccatcatcccgacagccgcgctc

SEQ ID NO: 5351518 - DNA, 25 bp, Homo sapien
atcatcccgacagccgcgctccggg

SEQ ID NO: 5351519 - DNA, 25 bp, Homo sapien
taagatgttgttatgacaacagatg

SEQ ID NO: 5351520 - DNA, 25 bp, Homo sapien
gatgggtaagatgttgttatgacaa

SEQ ID NO: 5351521 - DNA, 25 bp, Homo sapien
tatgacaacagatgtagcatttagg

SEQ ID NO: 5351522 - DNA, 25 bp, Homo sapien
acagatgtagcatttagggtaattc

SEQ ID NO: 5351523 - DNA, 25 bp, Homo sapien
gctgcctgagaaccttcccctacta

SEQ ID NO: 5351524 - DNA, 25 bp, Homo sapien
gggcctgctgaagctctccatggga

SEQ ID NO: 5351525 - DNA, 25 bp, Homo sapien
ccttcccctactagctccacactgg

SEQ ID NO: 5351526 - DNA, 25 bp, Homo sapien
tgtggcacatttgacacagctgcct

SEQ ID NO: 5351527 - DNA, 25 bp, Homo sapien
aacagggaccagtggagcctgctgc

SEQ ID NO: 5351528 - DNA, 25 bp, Homo sapien
agctgaacagctgcatcaaagctgc

SEQ ID NO: 5351529 - DNA, 25 bp, Homo sapien
gcagcctgaggggatttgcagctga

SEQ ID NO: 5351530 - DNA, 25 bp, Homo sapien
caaagctgcacctgacaaacaggga

SEQ ID NO: 5351531 - DNA, 25 bp, Homo sapien
gggcaggggcgttgctggactggga

SEQ ID NO: 5351532 - DNA, 25 bp, Homo sapien
agaggcagaggttgatgctggaggc

SEQ ID NO: 5351533 - DNA, 25 bp, Homo sapien
tgggaaggacccagagcctgagctc

SEQ ID NO: 5351534 - DNA, 25 bp, Homo sapien
aggggcgttgctggactgggaagga

SEQ ID NO: 5351535 - DNA, 25 bp, Homo sapien
agagcttcaggaatggagcatgaga

SEQ ID NO: 5351536 - DNA, 25 bp, Homo sapien
agaagaaagcctgatcgggagccag

SEQ ID NO: 5351537 - DNA, 25 bp, Homo sapien
aagcctgatcgggagccaggtcctg

SEQ ID NO: 5351538 - DNA, 25 bp, Homo sapien
ccagctgcaccccgttagtcaaggg

SEQ ID NO: 5351539 - DNA, 25 bp, Homo sapien
acttccaactgttctgggtgccagg

SEQ ID NO: 5351540 - DNA, 25 bp, Homo sapien
tcggtgcccttccaaatctagcagg

SEQ ID NO: 5351541 - DNA, 25 bp, Homo sapien
cagggcgatactctggcctcaacaa

SEQ ID NO: 5351542 - DNA, 25 bp, Homo sapien
catgtcgcaataagaggtcacaggc

SEQ ID NO: 5351543 - DNA, 25 bp, Homo sapien
agccccatcagcattgcggggagca

SEQ ID NO: 5351544 - DNA, 25 bp, Homo sapien
ctgggtccgaggcagtccacaagca

SEQ ID NO: 5351545 - DNA, 25 bp, Homo sapien
tggctgggtccgaggcagtccacaa

SEQ ID NO: 5351546 - DNA, 25 bp, Homo sapien
gccccatcagcattgcggggagcag

SEQ ID NO: 5351547 - DNA, 25 bp, Homo sapien
catcttagactgttgccgaggtgtg

SEQ ID NO: 5351548 - DNA, 25 bp, Homo sapien
tgctgggtaaggaagccgatccatt

SEQ ID NO: 5351549 - DNA, 25 bp, Homo sapien
taagatgaggcctacaggatctggg

SEQ ID NO: 5351550 - DNA, 25 bp, Homo sapien
gcagtgagctattgtcgccccgatt

SEQ ID NO: 5351551 - DNA, 25 bp, Homo sapien
agtgcttcgggcagatggctcccag

SEQ ID NO: 5351552 - DNA, 25 bp, Homo sapien
cagggttcagtgagctgttgcagta

SEQ ID NO: 5351553 - DNA, 25 bp, Homo sapien
cacggcggaagtcctggttgaagat

SEQ ID NO: 5351554 - DNA, 25 bp, Homo sapien
gcagagcacaaaaacgccaatgacc

SEQ ID NO: 5351555 - DNA, 25 bp, Homo sapien
gcactgcctggggttcacactcttc

SEQ ID NO: 5351556 - DNA, 25 bp, Homo sapien
ggccggagacactggcactgcctgg

SEQ ID NO: 5351557 - DNA, 25 bp, Homo sapien
ctgaggccggagacactggcactgc

SEQ ID NO: 5351558 - DNA, 25 bp, Homo sapien
gaggccggagacactggcactgcct

SEQ ID NO: 5351559 - DNA, 25 bp, Homo sapien
tccttctccccagtggacttcgagt

SEQ ID NO: 5351560 - DNA, 25 bp, Homo sapien
cagcccaactgggtggcaaggcccg

SEQ ID NO: 5351561 - DNA, 25 bp, Homo sapien
caaggcccgggtcccagtatcttca

SEQ ID NO: 5351562 - DNA, 25 bp, Homo sapien
cgagtgtccgttgacctctctggca

SEQ ID NO: 5351563 - DNA, 25 bp, Homo sapien
caaagccccaccatggtcgggtcgg

SEQ ID NO: 5351564 - DNA, 25 bp, Homo sapien
tcgggtcggggctgcttggactcac

SEQ ID NO: 5351565 - DNA, 25 bp, Homo sapien
atggtcgggtcggggctgcttggac

SEQ ID NO: 5351566 - DNA, 25 bp, Homo sapien
gtcgggtcggggctgcttggactca

SEQ ID NO: 5351567 - DNA, 25 bp, Homo sapien
gccctggtcgcccttgtagatgagg

SEQ ID NO: 5351568 - DNA, 25 bp, Homo sapien
aagaaagatccgatgctggaggcca

SEQ ID NO: 5351569 - DNA, 25 bp, Homo sapien
gatgaccagagcgttgccgaagatg

SEQ ID NO: 5351570 - DNA, 25 bp, Homo sapien
cctctgcggttgctgcgtttggcga

SEQ ID NO: 5351571 - DNA, 25 bp, Homo sapien
ggggcgggaggtgggcagagggagc

SEQ ID NO: 5351572 - DNA, 25 bp, Homo sapien
cggggcgggaggtgggcagagggag

SEQ ID NO: 5351573 - DNA, 25 bp, Homo sapien
gggcgggaggtgggcagagggagcg

SEQ ID NO: 5351574 - DNA, 25 bp, Homo sapien
tggcaccctggatgctttcttcatg

SEQ ID NO: 5351575 - DNA, 25 bp, Homo sapien
agctgaggttcccattgtgcaatct

SEQ ID NO: 5351576 - DNA, 25 bp, Homo sapien
ggaggacaagccaggtaaccccagc

SEQ ID NO: 5351577 - DNA, 25 bp, Homo sapien
aatagcggtgtagggtggagacaac

SEQ ID NO: 5351578 - DNA, 25 bp, Homo sapien
caaaagccgctgcagagatagggag

SEQ ID NO: 5351579 - DNA, 25 bp, Homo sapien
aggactgctcctgagcaacaccggg

SEQ ID NO: 5351580 - DNA, 25 bp, Homo sapien
gactggctggattcctgcttctgaa

SEQ ID NO: 5351581 - DNA, 25 bp, Homo sapien
gggctcctggattccgccgacagtg

SEQ ID NO: 5351582 - DNA, 25 bp, Homo sapien
gctgcagccgtagagtttgaggacc

SEQ ID NO: 5351583 - DNA, 25 bp, Homo sapien
ggttccatcgctggccgatgtggac

SEQ ID NO: 5351584 - DNA, 25 bp, Homo sapien
gacccgggtgatgtccgaggcactc

SEQ ID NO: 5351585 - DNA, 25 bp, Homo sapien
tgcagccgtagagtttgaggacccg

SEQ ID NO: 5351586 - DNA, 25 bp, Homo sapien
gcagcccacgccggctgaaggcgag

SEQ ID NO: 5351587 - DNA, 25 bp, Homo sapien
cagcccacgccggctgaaggcgagc

SEQ ID NO: 5351588 - DNA, 25 bp, Homo sapien
ctgagtccagatcaccacgggagag

SEQ ID NO: 5351589 - DNA, 25 bp, Homo sapien
tgagtccagatcaccacgggagagg

SEQ ID NO: 5351590 - DNA, 25 bp, Homo sapien
gtcatagggcgtcagcatgttgctg

SEQ ID NO: 5351591 - DNA, 25 bp, Homo sapien
ctcccatagtgcatcacagaggagt

SEQ ID NO: 5351592 - DNA, 25 bp, Homo sapien
catagtgcatcacagaggagtagtc

SEQ ID NO: 5351593 - DNA, 25 bp, Homo sapien
aggagtagtcatagggcgtcagcat

SEQ ID NO: 5351594 - DNA, 25 bp, Homo sapien
caggatctcgttccagttgacacgg

SEQ ID NO: 5351595 - DNA, 25 bp, Homo sapien
gcccagcacatgcatgagctcatga

SEQ ID NO: 5351596 - DNA, 25 bp, Homo sapien
ttgacacggatatagcggtcccggt

SEQ ID NO: 5351597 - DNA, 25 bp, Homo sapien
agctcatgaaggacaatgccccggc

SEQ ID NO: 5351598 - DNA, 25 bp, Homo sapien
tctctctggtcctgataggtgacaa

SEQ ID NO: 5351599 - DNA, 25 bp, Homo sapien
gaacgttcaaactccgcaagagcct

SEQ ID NO: 5351600 - DNA, 25 bp, Homo sapien
gacaaacctgatgcacgtggaacgt

SEQ ID NO: 5351601 - DNA, 25 bp, Homo sapien
caagagcctccaggatgacctggcg

SEQ ID NO: 5351602 - DNA, 25 bp, Homo sapien
catctgtggacaggttcttcgggtg

SEQ ID NO: 5351603 - DNA, 25 bp, Homo sapien
tcgacataccttcccatcagatttt

SEQ ID NO: 5351604 - DNA, 25 bp, Homo sapien
gagaccttcagcaacagaagggcat

SEQ ID NO: 5351605 - DNA, 25 bp, Homo sapien
gaacacctgccgcattaggaagaag

SEQ ID NO: 5351606 - DNA, 25 bp, Homo sapien
gttgctggttgctgacagcagtcgg

SEQ ID NO: 5351607 - DNA, 25 bp, Homo sapien
cacgacaccactaccacccatgggc

SEQ ID NO: 5351608 - DNA, 25 bp, Homo sapien
ttgctgacagcagtcggaagggact

SEQ ID NO: 5351609 - DNA, 25 bp, Homo sapien
tccacgacaccactaccacccatgg

SEQ ID NO: 5351610 - DNA, 25 bp, Homo sapien
cggccggatgatgtccccctcgatg

SEQ ID NO: 5351611 - DNA, 25 bp, Homo sapien
gtgataggatagttgttggggtcac

SEQ ID NO: 5351612 - DNA, 25 bp, Homo sapien
gataggatagttgttggggtcacca

SEQ ID NO: 5351613 - DNA, 25 bp, Homo sapien
taggatagttgttggggtcaccagc

SEQ ID NO: 5351614 - DNA, 25 bp, Homo sapien
cgtaggtgataggatagttgttggg

SEQ ID NO: 5351615 - DNA, 25 bp, Homo sapien
ggttaattgcaggaatgtccttgtc

SEQ ID NO: 5351616 - DNA, 25 bp, Homo sapien
caggaatgtccttgtccccggaggc

SEQ ID NO: 5351617 - DNA, 25 bp, Homo sapien
cttggttaattgcaggaatgtcctt

SEQ ID NO: 5351618 - DNA, 25 bp, Homo sapien
gaatgtccttgtccccggaggcctg

SEQ ID NO: 5351619 - DNA, 25 bp, Homo sapien
gccatctgggaagctggtaccacag

SEQ ID NO: 5351620 - DNA, 25 bp, Homo sapien
gctggtaccacaggctcctgcgcag

SEQ ID NO: 5351621 - DNA, 25 bp, Homo sapien
caggggtgaggccatctgggaagct

SEQ ID NO: 5351622 - DNA, 25 bp, Homo sapien
ctcaggggtgaggccatctgggaag

SEQ ID NO: 5351623 - DNA, 25 bp, Homo sapien
tggaggccaggggcgctcctaggat

SEQ ID NO: 5351624 - DNA, 25 bp, Homo sapien
gccaggggcgctcctaggatcacac

SEQ ID NO: 5351625 - DNA, 25 bp, Homo sapien
gaggccaggggcgctcctaggatca

SEQ ID NO: 5351626 - DNA, 25 bp, Homo sapien
aggccaggggcgctcctaggatcac

SEQ ID NO: 5351627 - DNA, 25 bp, Homo sapien
agatgcctggagcacccaccggtga

SEQ ID NO: 5351628 - DNA, 25 bp, Homo sapien
ctggtccagacagacaggggcatac

SEQ ID NO: 5351629 - DNA, 25 bp, Homo sapien
cagacaggggcatacacagatgcct

SEQ ID NO: 5351630 - DNA, 25 bp, Homo sapien
cctggagcacccaccggtgagacca

SEQ ID NO: 5351631 - DNA, 25 bp, Homo sapien
ggcaaggagagcagacccagcaccc

SEQ ID NO: 5351632 - DNA, 25 bp, Homo sapien
caaggccagagaccccctacaccct

SEQ ID NO: 5351633 - DNA, 25 bp, Homo sapien
ctggcaaggagagcagacccagcac

SEQ ID NO: 5351634 - DNA, 25 bp, Homo sapien
agcacccaaggccagagacccccta

SEQ ID NO: 5351635 - DNA, 25 bp, Homo sapien
gccccagagccaggtcactcagggc

SEQ ID NO: 5351636 - DNA, 25 bp, Homo sapien
tgagccccagagccaggtcactcag

SEQ ID NO: 5351637 - DNA, 25 bp, Homo sapien
cagagccaggtcactcagggcccca

SEQ ID NO: 5351638 - DNA, 25 bp, Homo sapien
agagccaggtcactcagggccccac

SEQ ID NO: 5351639 - DNA, 25 bp, Homo sapien
ggattgaaatcccagaggcggagca

SEQ ID NO: 5351640 - DNA, 25 bp, Homo sapien
ctggattgaaatcccagaggcggag

SEQ ID NO: 5351641 - DNA, 25 bp, Homo sapien
tggattgaaatcccagaggcggagc

SEQ ID NO: 5351642 - DNA, 25 bp, Homo sapien
gattgaaatcccagaggcggagcat

SEQ ID NO: 5351643 - DNA, 25 bp, Homo sapien
caaataattttccagcgccagcaca

SEQ ID NO: 5351644 - DNA, 25 bp, Homo sapien
gagtccacggtatagcgtctagctg

SEQ ID NO: 5351645 - DNA, 25 bp, Homo sapien
tgtgaaaggctcacagacagacaca

SEQ ID NO: 5351646 - DNA, 25 bp, Homo sapien
caagggcttcaacatggtggtggac

SEQ ID NO: 5351647 - DNA, 25 bp, Homo sapien
ggcattcctagagcccccatgtggg

SEQ ID NO: 5351648 - DNA, 25 bp, Homo sapien
agaagagcaccaggtcggaaagacc

SEQ ID NO: 5351649 - DNA, 25 bp, Homo sapien
gaaagaccagcatgccggcattcct

SEQ ID NO: 5351650 - DNA, 25 bp, Homo sapien
ttcccgaccccgaatgagggccagc

SEQ ID NO: 5351651 - DNA, 25 bp, Homo sapien
gccgcacacggcgactctgcatgag

SEQ ID NO: 5351652 - DNA, 25 bp, Homo sapien
gtggcagagcgcgagatacccgcct

SEQ ID NO: 5351653 - DNA, 25 bp, Homo sapien
tgcttaacgaagtcaaaggcctcgt

SEQ ID NO: 5351654 - DNA, 25 bp, Homo sapien
catgaggtatgccagacagatggtg

SEQ ID NO: 5351655 - DNA, 25 bp, Homo sapien
tctggagcccctcgggatttctggg

SEQ ID NO: 5351656 - DNA, 25 bp, Homo sapien
ctctggagcccctcgggatttctgg

SEQ ID NO: 5351657 - DNA, 25 bp, Homo sapien
gtgtcagacggaatgtgcacagccc

SEQ ID NO: 5351658 - DNA, 25 bp, Homo sapien
gggagtggtgtcagacggaatgtgc

SEQ ID NO: 5351659 - DNA, 25 bp, Homo sapien
ccaggaacaggtagggcaagatctc

SEQ ID NO: 5351660 - DNA, 25 bp, Homo sapien
gatactcttgtagcggaaaaggccc

SEQ ID NO: 5351661 - DNA, 25 bp, Homo sapien
caatgaagcctatggcctcctggaa

SEQ ID NO: 5351662 - DNA, 25 bp, Homo sapien
gtctgacgagtgactgcagctgccc

SEQ ID NO: 5351663 - DNA, 25 bp, Homo sapien
aatgtgcggaggacacaccgggaca

SEQ ID NO: 5351664 - DNA, 25 bp, Homo sapien
accccatgggctggccgagacaaga

SEQ ID NO: 5351665 - DNA, 25 bp, Homo sapien
gtctcaggaatgtgcggaggacaca

SEQ ID NO: 5351666 - DNA, 25 bp, Homo sapien
agaggggcggtgaggcctttccagc

SEQ ID NO: 5351667 - DNA, 25 bp, Homo sapien
caaacatacacagacccatacaggc

SEQ ID NO: 5351668 - DNA, 25 bp, Homo sapien
ttcatgctcccaacatacacatgca

SEQ ID NO: 5351669 - DNA, 25 bp, Homo sapien
gcaaacatacacagacccatacagg

SEQ ID NO: 5351670 - DNA, 25 bp, Homo sapien
gctcccaacatacacatgcaaacat

SEQ ID NO: 5351671 - DNA, 25 bp, Homo sapien
gttttgtcccctgttggcggcagcg

SEQ ID NO: 5351672 - DNA, 25 bp, Homo sapien
tcagagcacagatcgggacagcagc

SEQ ID NO: 5351673 - DNA, 25 bp, Homo sapien
tttgtcccctgttggcggcagcgca

SEQ ID NO: 5351674 - DNA, 25 bp, Homo sapien
ctcagagcacagatcgggacagcag

SEQ ID NO: 5351675 - DNA, 25 bp, Homo sapien
caccgaggcactgccctcgtccagc

SEQ ID NO: 5351676 - DNA, 25 bp, Homo sapien
agcagcacatgagccgggctgtcgg

SEQ ID NO: 5351677 - DNA, 25 bp, Homo sapien
aagtacacggcagtgggccccgcgc

SEQ ID NO: 5351678 - DNA, 25 bp, Homo sapien
cggagctccgccaccgaggcactgc

SEQ ID NO: 5351679 - DNA, 25 bp, Homo sapien
tccaaggcactggccgcgcggcgcg

SEQ ID NO: 5351680 - DNA, 25 bp, Homo sapien
ctccccgcggaccaggcgcgtccgc

SEQ ID NO: 5351681 - DNA, 25 bp, Homo sapien
gaccaggcgcgtccgcagcgcgcgg

SEQ ID NO: 5351682 - DNA, 25 bp, Homo sapien
aggcaggcgagaacggcggcaggag

SEQ ID NO: 5351683 - DNA, 25 bp, Homo sapien
ccgcctcccgcggatcccgcagcag

SEQ ID NO: 5351684 - DNA, 25 bp, Homo sapien
agcagcgtgcgttccgcctcccgcg

SEQ ID NO: 5351685 - DNA, 25 bp, Homo sapien
gtggcgccggcagaaggccaggaag

SEQ ID NO: 5351686 - DNA, 25 bp, Homo sapien
cctcccgcggatcccgcagcagcgt

SEQ ID NO: 5351687 - DNA, 25 bp, Homo sapien
ttcccgcgtcccgggctctcgtggc

SEQ ID NO: 5351688 - DNA, 25 bp, Homo sapien
tcccgcgtcccgggctctcgtggcg

SEQ ID NO: 5351689 - DNA, 25 bp, Homo sapien
ctgcccgagcggtcgactccgggcg

SEQ ID NO: 5351690 - DNA, 25 bp, Homo sapien
tgcccgagcggtcgactccgggcgc

SEQ ID NO: 5351691 - DNA, 25 bp, Homo sapien
gcccgagcggtcgactccgggcgcc

SEQ ID NO: 5351692 - DNA, 25 bp, Homo sapien
cacaccgggaggaggcggggaccag

SEQ ID NO: 5351693 - DNA, 25 bp, Homo sapien
caccgggaggaggcggggaccagcg

SEQ ID NO: 5351694 - DNA, 25 bp, Homo sapien
gtcagagccgatgcagaggagaaaa

SEQ ID NO: 5351695 - DNA, 25 bp, Homo sapien
gtgctggggtcagagccgatgcaga

SEQ ID NO: 5351696 - DNA, 25 bp, Homo sapien
gggtcagagccgatgcagaggagaa

SEQ ID NO: 5351697 - DNA, 25 bp, Homo sapien
gcagttccactatgtgtgagaagga

SEQ ID NO: 5351698 - DNA, 25 bp, Homo sapien
aggctcctgccaggcgccaggctcc

SEQ ID NO: 5351699 - DNA, 25 bp, Homo sapien
gatgcggcggccacccccacaggct

SEQ ID NO: 5351700 - DNA, 25 bp, Homo sapien
ccacaggctcctgccaggcgccagg

SEQ ID NO: 5351701 - DNA, 25 bp, Homo sapien
cgatgcggcggccacccccacaggc

SEQ ID NO: 5351702 - DNA, 25 bp, Homo sapien
ttcctcctttccctgatcggcagcc

SEQ ID NO: 5351703 - DNA, 25 bp, Homo sapien
catctccgggctgcttatgctaaga

SEQ ID NO: 5351704 - DNA, 25 bp, Homo sapien
tgcttatgctaagagaaccttcctc

SEQ ID NO: 5351705 - DNA, 25 bp, Homo sapien
tccctgatcggcagccccttctgta

SEQ ID NO: 5351706 - DNA, 25 bp, Homo sapien
tctggactgtgaaggaggaccccga

SEQ ID NO: 5351707 - DNA, 25 bp, Homo sapien
ccactaagtgagacttgactgtggt

SEQ ID NO: 5351708 - DNA, 25 bp, Homo sapien
cttccactaagtgagacttgactgt

SEQ ID NO: 5351709 - DNA, 25 bp, Homo sapien
aagccttccactaagtgagacttga

SEQ ID NO: 5351710 - DNA, 25 bp, Homo sapien
cctgtttctccattggtggccttgg

SEQ ID NO: 5351711 - DNA, 25 bp, Homo sapien
tggccttgggtaggtaccaggcctc

SEQ ID NO: 5351712 - DNA, 25 bp, Homo sapien
tgtttctccattggtggccttgggt

SEQ ID NO: 5351713 - DNA, 25 bp, Homo sapien
attggtggccttgggtaggtaccag

SEQ ID NO: 5351714 - DNA, 25 bp, Homo sapien
tcatcctctgccatgtcgatggagg

SEQ ID NO: 5351715 - DNA, 25 bp, Homo sapien
taaaaagccctgtgcgattttccca

SEQ ID NO: 5351716 - DNA, 25 bp, Homo sapien
tcgatggaggagatcttgagttctc

SEQ ID NO: 5351717 - DNA, 25 bp, Homo sapien
agtcggccgcatccgaagggctctg

SEQ ID NO: 5351718 - DNA, 25 bp, Homo sapien
gaaattcggtatctcactgagctaa

SEQ ID NO: 5351719 - DNA, 25 bp, Homo sapien
caccatcgattgtgcagcgctttgg

SEQ ID NO: 5351720 - DNA, 25 bp, Homo sapien
gaggagagatgcatcgagcagtccc

SEQ ID NO: 5351721 - DNA, 25 bp, Homo sapien
caagtttcctgtgaatcggccagtt

SEQ ID NO: 5351722 - DNA, 25 bp, Homo sapien
agttgcggttgctccatgttctgac

SEQ ID NO: 5351723 - DNA, 25 bp, Homo sapien
tttgtgccaaggaagtagctgcccc

SEQ ID NO: 5351724 - DNA, 25 bp, Homo sapien
tgaccataagcaaaaccagctcggt

SEQ ID NO: 5351725 - DNA, 25 bp, Homo sapien
gaaggaaatccaaagcgctgcacaa

SEQ ID NO: 5351726 - DNA, 25 bp, Homo sapien
taagtcagaacatggagcaaccgca

SEQ ID NO: 5351727 - DNA, 25 bp, Homo sapien
ttccaacaatgacgcggagaaggca

SEQ ID NO: 5351728 - DNA, 25 bp, Homo sapien
caatgaatatagaagaactggccga

SEQ ID NO: 5351729 - DNA, 25 bp, Homo sapien
gagaagcaaatggaggtcatcccct

SEQ ID NO: 5351730 - DNA, 25 bp, Homo sapien
tctagccctgtctcagtccgttatc

SEQ ID NO: 5351731 - DNA, 25 bp, Homo sapien
tttgggataagaagggacaaggtgc

SEQ ID NO: 5351732 - DNA, 25 bp, Homo sapien
agccctgtctcagtccgttatcact

SEQ ID NO: 5351733 - DNA, 25 bp, Homo sapien
cctgtctcagtccgttatcactctg

SEQ ID NO: 5351734 - DNA, 25 bp, Homo sapien
ttctagccctgtctcagtccgttat

SEQ ID NO: 5351735 - DNA, 25 bp, Homo sapien
tagccctgtctcagtccgttatcac

SEQ ID NO: 5351736 - DNA, 25 bp, Homo sapien
gtgataacggactgagacagggcta

SEQ ID NO: 5351737 - DNA, 25 bp, Homo sapien
agtgataacggactgagacagggct

SEQ ID NO: 5351738 - DNA, 25 bp, Homo sapien
gataacggactgagacagggctaga

SEQ ID NO: 5351739 - DNA, 25 bp, Homo sapien
gcaccttgtcccttcttatcccaaa

SEQ ID NO: 5351740 - DNA, 25 bp, Homo sapien
tgataacggactgagacagggctag

SEQ ID NO: 5351741 - DNA, 25 bp, Homo sapien
cagagtgataacggactgagacagg

SEQ ID NO: 5351742 - DNA, 25 bp, Homo sapien
ccctgctcggattgagtatgcttga

SEQ ID NO: 5351743 - DNA, 25 bp, Homo sapien
gccagtcctctgagcgaaagaacga

SEQ ID NO: 5351744 - DNA, 25 bp, Homo sapien
tggccctgctcggattgagtatgct

SEQ ID NO: 5351745 - DNA, 25 bp, Homo sapien
tctgagcgaaagaacgagggcagct

SEQ ID NO: 5351746 - DNA, 25 bp, Homo sapien
gctgtggccctgctcggattgagta

SEQ ID NO: 5351747 - DNA, 25 bp, Homo sapien
tcctctgagcgaaagaacgagggca

SEQ ID NO: 5351748 - DNA, 25 bp, Homo sapien
tcaagcatactcaatccgagcaggg

SEQ ID NO: 5351749 - DNA, 25 bp, Homo sapien
tcgttctttcgctcagaggactggc

SEQ ID NO: 5351750 - DNA, 25 bp, Homo sapien
tgccctcgttctttcgctcagagga

SEQ ID NO: 5351751 - DNA, 25 bp, Homo sapien
agcatactcaatccgagcagggcca

SEQ ID NO: 5351752 - DNA, 25 bp, Homo sapien
atactcaatccgagcagggccacag

SEQ ID NO: 5351753 - DNA, 25 bp, Homo sapien
agctgccctcgttctttcgctcaga

SEQ ID NO: 5351754 - DNA, 25 bp, Homo sapien
ttaaagtaaaggactacatctcagc

SEQ ID NO: 5351755 - DNA, 25 bp, Homo sapien
atgccagatttcctggagaagctgc

SEQ ID NO: 5351756 - DNA, 25 bp, Homo sapien
ggactacatctcagctaagcctctg

SEQ ID NO: 5351757 - DNA, 25 bp, Homo sapien
gcacatggccactctgaaagccaag

SEQ ID NO: 5351758 - DNA, 25 bp, Homo sapien
gagaagctgcacatggccactctga

SEQ ID NO: 5351759 - DNA, 25 bp, Homo sapien
gaaagccaagaatatggagattaaa

SEQ ID NO: 5351760 - DNA, 25 bp, Homo sapien
cagaggcttagctgagatgtagtcc

SEQ ID NO: 5351761 - DNA, 25 bp, Homo sapien
tcagagtggccatgtgcagcttctc

SEQ ID NO: 5351762 - DNA, 25 bp, Homo sapien
gcagcttctccaggaaatctggcat

SEQ ID NO: 5351763 - DNA, 25 bp, Homo sapien
gatgtagtcctttactttaatctcc

SEQ ID NO: 5351764 - DNA, 25 bp, Homo sapien
taatctccatattcttggctttcag

SEQ ID NO: 5351765 - DNA, 25 bp, Homo sapien
cttggctttcagagtggccatgtgc

SEQ ID NO: 5351766 - DNA, 25 bp, Homo sapien
ggtgtttcctcgctactgtgttagt

SEQ ID NO: 5351767 - DNA, 25 bp, Homo sapien
tcctcgctactgtgttagttggatg

SEQ ID NO: 5351768 - DNA, 25 bp, Homo sapien
caaacggtgtttcctcgctactgtg

SEQ ID NO: 5351769 - DNA, 25 bp, Homo sapien
cccaaacggtgtttcctcgctactg

SEQ ID NO: 5351770 - DNA, 25 bp, Homo sapien
tactgtgttagttggatggtttcca

SEQ ID NO: 5351771 - DNA, 25 bp, Homo sapien
acggtgtttcctcgctactgtgtta

SEQ ID NO: 5351772 - DNA, 25 bp, Homo sapien
cagtagcgaggaaacaccgtttggg

SEQ ID NO: 5351773 - DNA, 25 bp, Homo sapien
cacagtagcgaggaaacaccgtttg

SEQ ID NO: 5351774 - DNA, 25 bp, Homo sapien
taacacagtagcgaggaaacaccgt

SEQ ID NO: 5351775 - DNA, 25 bp, Homo sapien
ggaaaccatccaactaacacagtag

SEQ ID NO: 5351776 - DNA, 25 bp, Homo sapien
caactaacacagtagcgaggaaaca

SEQ ID NO: 5351777 - DNA, 25 bp, Homo sapien
catccaactaacacagtagcgagga

SEQ ID NO: 5351778 - DNA, 25 bp, Homo sapien
tggctttgactacttactaacatac

SEQ ID NO: 5351779 - DNA, 25 bp, Homo sapien
gctttgactacttactaacatacag

SEQ ID NO: 5351780 - DNA, 25 bp, Homo sapien
ggctttgactacttactaacataca

SEQ ID NO: 5351781 - DNA, 25 bp, Homo sapien
atggctttgactacttactaacata

SEQ ID NO: 5351782 - DNA, 25 bp, Homo sapien
aatggctttgactacttactaacat

SEQ ID NO: 5351783 - DNA, 25 bp, Homo sapien
ctgtatgttagtaagtagtcaaagc

SEQ ID NO: 5351784 - DNA, 25 bp, Homo sapien
tatgttagtaagtagtcaaagccat

SEQ ID NO: 5351785 - DNA, 25 bp, Homo sapien
gtatgttagtaagtagtcaaagcca

SEQ ID NO: 5351786 - DNA, 25 bp, Homo sapien
tgtatgttagtaagtagtcaaagcc

SEQ ID NO: 5351787 - DNA, 25 bp, Homo sapien
atgttagtaagtagtcaaagccatt

SEQ ID NO: 5351788 - DNA, 25 bp, Homo sapien
cagctaactgttgactgggagcgaa

SEQ ID NO: 5351789 - DNA, 25 bp, Homo sapien
gcatagtctatgcacagggagccac

SEQ ID NO: 5351790 - DNA, 25 bp, Homo sapien
tggccaagggtcaacattgcaagga

SEQ ID NO: 5351791 - DNA, 25 bp, Homo sapien
gggagccacccatatcagctaactg

SEQ ID NO: 5351792 - DNA, 25 bp, Homo sapien
tattgggagctggtcacttagtacc

SEQ ID NO: 5351793 - DNA, 25 bp, Homo sapien
agatagtagtctctcaggccttcag

SEQ ID NO: 5351794 - DNA, 25 bp, Homo sapien
cagttagctgatatgggtggctccc

SEQ ID NO: 5351795 - DNA, 25 bp, Homo sapien
tccttgcaatgttgacccttggcca

SEQ ID NO: 5351796 - DNA, 25 bp, Homo sapien
ttcgctcccagtcaacagttagctg

SEQ ID NO: 5351797 - DNA, 25 bp, Homo sapien
catagactatgcaaacaacgtggtt

SEQ ID NO: 5351798 - DNA, 25 bp, Homo sapien
taagcagacggtactaagtgaccag

SEQ ID NO: 5351799 - DNA, 25 bp, Homo sapien
gaaggcctgagagactactatctat

SEQ ID NO: 5351800 - DNA, 25 bp, Homo sapien
agaatcacttgaactcaggaggtgg

SEQ ID NO: 5351801 - DNA, 25 bp, Homo sapien
tgtgccattgccctccatcctgggc

SEQ ID NO: 5351802 - DNA, 25 bp, Homo sapien
aatcacttgaactcaggaggtggag

SEQ ID NO: 5351803 - DNA, 25 bp, Homo sapien
gaatcacttgaactcaggaggtgga

SEQ ID NO: 5351804 - DNA, 25 bp, Homo sapien
gagaatcacttgaactcaggaggtg

SEQ ID NO: 5351805 - DNA, 25 bp, Homo sapien
gaggttgtggtgagccgagattgtg

SEQ ID NO: 5351806 - DNA, 25 bp, Homo sapien
gcccaggatggagggcaatggcaca

SEQ ID NO: 5351807 - DNA, 25 bp, Homo sapien
cacaatctcggctcaccacaacctc

SEQ ID NO: 5351808 - DNA, 25 bp, Homo sapien
ccacctcctgagttcaagtgattct

SEQ ID NO: 5351809 - DNA, 25 bp, Homo sapien
cacctcctgagttcaagtgattctc

SEQ ID NO: 5351810 - DNA, 25 bp, Homo sapien
ctccacctcctgagttcaagtgatt

SEQ ID NO: 5351811 - DNA, 25 bp, Homo sapien
tccacctcctgagttcaagtgattc

SEQ ID NO: 5351812 - DNA, 25 bp, Homo sapien
ggctgtactgagtcgagattgcatc

SEQ ID NO: 5351813 - DNA, 25 bp, Homo sapien
aggctgtactgagtcgagattgcat

SEQ ID NO: 5351814 - DNA, 25 bp, Homo sapien
atgcaatctcgactcagtacagcct

SEQ ID NO: 5351815 - DNA, 25 bp, Homo sapien
gatgcaatctcgactcagtacagcc

SEQ ID NO: 5351816 - DNA, 25 bp, Homo sapien
gattataggcgtgtgccaacatgtc

SEQ ID NO: 5351817 - DNA, 25 bp, Homo sapien
cgtgtgccaacatgtcaggctaatt

SEQ ID NO: 5351818 - DNA, 25 bp, Homo sapien
ttggaaacagggtctcccactgtta

SEQ ID NO: 5351819 - DNA, 25 bp, Homo sapien
tggtacaatcacaactcactgcagc

SEQ ID NO: 5351820 - DNA, 25 bp, Homo sapien
aacagggtctcccactgttacccag

SEQ ID NO: 5351821 - DNA, 25 bp, Homo sapien
gtctcaccatgctgcgcaggctggt

SEQ ID NO: 5351822 - DNA, 25 bp, Homo sapien
gctgcagtgagttgtgattgtacca

SEQ ID NO: 5351823 - DNA, 25 bp, Homo sapien
catgttggcacacgcctataatccc

SEQ ID NO: 5351824 - DNA, 25 bp, Homo sapien
aattagcctgacatgttggcacacg

SEQ ID NO: 5351825 - DNA, 25 bp, Homo sapien
taacagtgggagaccctgtttccaa

SEQ ID NO: 5351826 - DNA, 25 bp, Homo sapien
accagcctgcgcagcatggtgagac

SEQ ID NO: 5351827 - DNA, 25 bp, Homo sapien
tgcgcagcatggtgagaccccatct

SEQ ID NO: 5351828 - DNA, 25 bp, Homo sapien
ttcaggaactagagcgagtacctcc

SEQ ID NO: 5351829 - DNA, 25 bp, Homo sapien
cattttttgggaactcctgacgtag

SEQ ID NO: 5351830 - DNA, 25 bp, Homo sapien
gatgtcttacctgaactagggagga

SEQ ID NO: 5351831 - DNA, 25 bp, Homo sapien
caacattttactacagtgggcagag

SEQ ID NO: 5351832 - DNA, 25 bp, Homo sapien
tccccaaggacaaagtagtggcaat

SEQ ID NO: 5351833 - DNA, 25 bp, Homo sapien
catagccactgacgcattagcctgt

SEQ ID NO: 5351834 - DNA, 25 bp, Homo sapien
tctctcagataagagggaaccaatg

SEQ ID NO: 5351835 - DNA, 25 bp, Homo sapien
tcacctacgtcaggagttcccaaaa

SEQ ID NO: 5351836 - DNA, 25 bp, Homo sapien
taaaatgttgacaggaggtactcgc

SEQ ID NO: 5351837 - DNA, 25 bp, Homo sapien
tgaagtggaactaaaaccagcagcc

SEQ ID NO: 5351838 - DNA, 25 bp, Homo sapien
tagttcaggtaagacatcccttgag

SEQ ID NO: 5351839 - DNA, 25 bp, Homo sapien
gatacaggctaatgcgtcagtggct

SEQ ID NO: 5351840 - DNA, 25 bp, Homo sapien
gttatccgtccccacaagtcatttg

SEQ ID NO: 5351841 - DNA, 25 bp, Homo sapien
gagtctccagaattcgtcagggtca

SEQ ID NO: 5351842 - DNA, 25 bp, Homo sapien
tgctgtggagcatccgagtgtgcca

SEQ ID NO: 5351843 - DNA, 25 bp, Homo sapien
gaattcgtcagggtcagatcatatg

SEQ ID NO: 5351844 - DNA, 25 bp, Homo sapien
tatgaatcccaaatggttatccgtc

SEQ ID NO: 5351845 - DNA, 25 bp, Homo sapien
tccgagtgtgccagagtctccagaa

SEQ ID NO: 5351846 - DNA, 25 bp, Homo sapien
ttctggagactctggcacactcgga

SEQ ID NO: 5351847 - DNA, 25 bp, Homo sapien
gatctgaccctgacgaattctggag

SEQ ID NO: 5351848 - DNA, 25 bp, Homo sapien
gacggataaccatttgggattcata

SEQ ID NO: 5351849 - DNA, 25 bp, Homo sapien
caaatgacttgtggggacggataac

SEQ ID NO: 5351850 - DNA, 25 bp, Homo sapien
ttcatatgatctgaccctgacgaat

SEQ ID NO: 5351851 - DNA, 25 bp, Homo sapien
tggcacactcggatgctccacagca

SEQ ID NO: 5351852 - DNA, 25 bp, Homo sapien
ttaacttagctctcctgttgtttta

SEQ ID NO: 5351853 - DNA, 25 bp, Homo sapien
tatatagacattactaagagtttgc

SEQ ID NO: 5351854 - DNA, 25 bp, Homo sapien
tccccttaacttagctctcctgttg

SEQ ID NO: 5351855 - DNA, 25 bp, Homo sapien
tttattcatcttagtgactcctttg

SEQ ID NO: 5351856 - DNA, 25 bp, Homo sapien
catcttagtgactcctttgttttgt

SEQ ID NO: 5351857 - DNA, 25 bp, Homo sapien
cccttaacttagctctcctgttgtt

SEQ ID NO: 5351858 - DNA, 25 bp, Homo sapien
acaaaacaaaggagtcactaagatg

SEQ ID NO: 5351859 - DNA, 25 bp, Homo sapien
aacaacaggagagctaagttaaggg

SEQ ID NO: 5351860 - DNA, 25 bp, Homo sapien
gcaaactcttagtaatgtctatata

SEQ ID NO: 5351861 - DNA, 25 bp, Homo sapien
caaaacaaaggagtcactaagatga

SEQ ID NO: 5351862 - DNA, 25 bp, Homo sapien
taaaacaacaggagagctaagttaa

SEQ ID NO: 5351863 - DNA, 25 bp, Homo sapien
caaaggagtcactaagatgaataaa

SEQ ID NO: 5351864 - DNA, 25 bp, Homo sapien
tgtactcacgggattatgtttatgt

SEQ ID NO: 5351865 - DNA, 25 bp, Homo sapien
ccaatgtactcacgggattatgttt

SEQ ID NO: 5351866 - DNA, 25 bp, Homo sapien
tatgttcggcggtatagtgtggatc

SEQ ID NO: 5351867 - DNA, 25 bp, Homo sapien
tatccaatgtactcacgggattatg

SEQ ID NO: 5351868 - DNA, 25 bp, Homo sapien
ggattatgtttatgttcggcggtat

SEQ ID NO: 5351869 - DNA, 25 bp, Homo sapien
tcggcggtatagtgtggatcaggaa

SEQ ID NO: 5351870 - DNA, 25 bp, Homo sapien
tgatccacactataccgccgaacat

SEQ ID NO: 5351871 - DNA, 25 bp, Homo sapien
aaacataatcccgtgagtacattgg

SEQ ID NO: 5351872 - DNA, 25 bp, Homo sapien
cactataccgccgaacataaacata

SEQ ID NO: 5351873 - DNA, 25 bp, Homo sapien
cataaacataatcccgtgagtacat

SEQ ID NO: 5351874 - DNA, 25 bp, Homo sapien
cataatcccgtgagtacattggata

SEQ ID NO: 5351875 - DNA, 25 bp, Homo sapien
tataccgccgaacataaacataatc

SEQ ID NO: 5351876 - DNA, 25 bp, Homo sapien
gatgcagaacactaatcctgctcct

SEQ ID NO: 5351877 - DNA, 25 bp, Homo sapien
gaacactaatcctgctcctccattt

SEQ ID NO: 5351878 - DNA, 25 bp, Homo sapien
tgtgatgcagaacactaatcctgct

SEQ ID NO: 5351879 - DNA, 25 bp, Homo sapien
taatcctgctcctccatttctttag

SEQ ID NO: 5351880 - DNA, 25 bp, Homo sapien
ttgtgtgatgcagaacactaatcct

SEQ ID NO: 5351881 - DNA, 25 bp, Homo sapien
tttgtgtgatgcagaacactaatcc

SEQ ID NO: 5351882 - DNA, 25 bp, Homo sapien
gaggagcaggattagtgttctgcat

SEQ ID NO: 5351883 - DNA, 25 bp, Homo sapien
gagcaggattagtgttctgcatcac

SEQ ID NO: 5351884 - DNA, 25 bp, Homo sapien
aggattagtgttctgcatcacacaa

SEQ ID NO: 5351885 - DNA, 25 bp, Homo sapien
aaatggaggagcaggattagtgttc

SEQ ID NO: 5351886 - DNA, 25 bp, Homo sapien
ctaaagaaatggaggagcaggatta

SEQ ID NO: 5351887 - DNA, 25 bp, Homo sapien
gattagtgttctgcatcacacaaac

SEQ ID NO: 5351888 - DNA, 25 bp, Homo sapien
tacttctgattttatttctgtccag

SEQ ID NO: 5351889 - DNA, 25 bp, Homo sapien
tttacttctgattttatttctgtcc

SEQ ID NO: 5351890 - DNA, 25 bp, Homo sapien
tgagtatttttacttctgattttat

SEQ ID NO: 5351891 - DNA, 25 bp, Homo sapien
ttacttctgattttatttctgtcca

SEQ ID NO: 5351892 - DNA, 25 bp, Homo sapien
ttttacttctgattttatttctgtc

SEQ ID NO: 5351893 - DNA, 25 bp, Homo sapien
gtgagtatttttacttctgatttta

SEQ ID NO: 5351894 - DNA, 25 bp, Homo sapien
tggacagaaataaaatcagaagtaa

SEQ ID NO: 5351895 - DNA, 25 bp, Homo sapien
ataaaatcagaagtaaaaatactca

SEQ ID NO: 5351896 - DNA, 25 bp, Homo sapien
ctggacagaaataaaatcagaagta

SEQ ID NO: 5351897 - DNA, 25 bp, Homo sapien
taaaatcagaagtaaaaatactcac

SEQ ID NO: 5351898 - DNA, 25 bp, Homo sapien
ggacagaaataaaatcagaagtaaa

SEQ ID NO: 5351899 - DNA, 25 bp, Homo sapien
cagaaataaaatcagaagtaaaaat

SEQ ID NO: 5351900 - DNA, 25 bp, Homo sapien
ttgagagggatgtggttagtggttc

SEQ ID NO: 5351901 - DNA, 25 bp, Homo sapien
gagggatgtggttagtggttccgag

SEQ ID NO: 5351902 - DNA, 25 bp, Homo sapien
tggttagtggttccgaggttcttca

SEQ ID NO: 5351903 - DNA, 25 bp, Homo sapien
agggatgtggttagtggttccgagg

SEQ ID NO: 5351904 - DNA, 25 bp, Homo sapien
tgattgagagggatgtggttagtgg

SEQ ID NO: 5351905 - DNA, 25 bp, Homo sapien
atgtggttagtggttccgaggttct

SEQ ID NO: 5351906 - DNA, 25 bp, Homo sapien
ccactaaccacatccctctcaatca

SEQ ID NO: 5351907 - DNA, 25 bp, Homo sapien
gaaccactaaccacatccctctcaa

SEQ ID NO: 5351908 - DNA, 25 bp, Homo sapien
accactaaccacatccctctcaatc

SEQ ID NO: 5351909 - DNA, 25 bp, Homo sapien
aaccactaaccacatccctctcaat

SEQ ID NO: 5351910 - DNA, 25 bp, Homo sapien
agaacctcggaaccactaaccacat

SEQ ID NO: 5351911 - DNA, 25 bp, Homo sapien
tgaagaacctcggaaccactaacca

SEQ ID NO: 5351912 - DNA, 25 bp, Homo sapien
tagtggttccgaggttcttcactgg

SEQ ID NO: 5351913 - DNA, 25 bp, Homo sapien
tggttagtggttccgaggttcttca

SEQ ID NO: 5351914 - DNA, 25 bp, Homo sapien
tggttccgaggttcttcactgggta

SEQ ID NO: 5351915 - DNA, 25 bp, Homo sapien
tgattgagagggatgtggttagtgg

SEQ ID NO: 5351916 - DNA, 25 bp, Homo sapien
cgaggttcttcactgggtaacccat

SEQ ID NO: 5351917 - DNA, 25 bp, Homo sapien
atgtggttagtggttccgaggttct

SEQ ID NO: 5351918 - DNA, 25 bp, Homo sapien
atgggttacccagtgaagaacctcg

SEQ ID NO: 5351919 - DNA, 25 bp, Homo sapien
ccactaaccacatccctctcaatca

SEQ ID NO: 5351920 - DNA, 25 bp, Homo sapien
agaacctcggaaccactaaccacat

SEQ ID NO: 5351921 - DNA, 25 bp, Homo sapien
tacccagtgaagaacctcggaacca

SEQ ID NO: 5351922 - DNA, 25 bp, Homo sapien
cagtgaagaacctcggaaccactaa

SEQ ID NO: 5351923 - DNA, 25 bp, Homo sapien
tgaagaacctcggaaccactaacca

SEQ ID NO: 5351924 - DNA, 25 bp, Homo sapien
aatgggatgccctggtaatcaagct

SEQ ID NO: 5351925 - DNA, 25 bp, Homo sapien
ggatgccctggtaatcaagctggag

SEQ ID NO: 5351926 - DNA, 25 bp, Homo sapien
aaaaaatgggatgccctggtaatca

SEQ ID NO: 5351927 - DNA, 25 bp, Homo sapien
tgggatgccctggtaatcaagctgg

SEQ ID NO: 5351928 - DNA, 25 bp, Homo sapien
gggatgccctggtaatcaagctgga

SEQ ID NO: 5351929 - DNA, 25 bp, Homo sapien
aaatgggatgccctggtaatcaagc

SEQ ID NO: 5351930 - DNA, 25 bp, Homo sapien
cagcttgattaccagggcatcccat

SEQ ID NO: 5351931 - DNA, 25 bp, Homo sapien
gcttgattaccagggcatcccattt

SEQ ID NO: 5351932 - DNA, 25 bp, Homo sapien
ctccagcttgattaccagggcatcc

SEQ ID NO: 5351933 - DNA, 25 bp, Homo sapien
tccagcttgattaccagggcatccc

SEQ ID NO: 5351934 - DNA, 25 bp, Homo sapien
ccagcttgattaccagggcatccca

SEQ ID NO: 5351935 - DNA, 25 bp, Homo sapien
tgattaccagggcatcccatttttt

SEQ ID NO: 5351936 - DNA, 25 bp, Homo sapien
agttttatcagttgactcaatgtcc

SEQ ID NO: 5351937 - DNA, 25 bp, Homo sapien
gtagtcctctgtttgtatttatcag

SEQ ID NO: 5351938 - DNA, 25 bp, Homo sapien
tagttgtcacatctgtttaacctca

SEQ ID NO: 5351939 - DNA, 25 bp, Homo sapien
actgtgttggcccaatgtttatttc

SEQ ID NO: 5351940 - DNA, 25 bp, Homo sapien
tgtttaacctcaaatcaagaacatt

SEQ ID NO: 5351941 - DNA, 25 bp, Homo sapien
gaacactttcatgtagtcctctgtt

SEQ ID NO: 5351942 - DNA, 25 bp, Homo sapien
taaaggacattgagtcaactgataa

SEQ ID NO: 5351943 - DNA, 25 bp, Homo sapien
tgttcttgatttgaggttaaacaga

SEQ ID NO: 5351944 - DNA, 25 bp, Homo sapien
tgataaatacaaacagaggactaca

SEQ ID NO: 5351945 - DNA, 25 bp, Homo sapien
gaaataaacattgggccaacacagt

SEQ ID NO: 5351946 - DNA, 25 bp, Homo sapien
aacagaggactacatgaaagtgttc

SEQ ID NO: 5351947 - DNA, 25 bp, Homo sapien
gaggttaaacagatgtgacaactaa

SEQ ID NO: 5351948 - DNA, 25 bp, Homo sapien
tgtgacacctcggcagttcttcaat

SEQ ID NO: 5351949 - DNA, 25 bp, Homo sapien
cacagatgtgacacctcggcagttc

SEQ ID NO: 5351950 - DNA, 25 bp, Homo sapien
gatgtgacacctcggcagttcttca

SEQ ID NO: 5351951 - DNA, 25 bp, Homo sapien
gtgacacctcggcagttcttcaatg

SEQ ID NO: 5351952 - DNA, 25 bp, Homo sapien
tgacacctcggcagttcttcaatgt

SEQ ID NO: 5351953 - DNA, 25 bp, Homo sapien
agatgtgacacctcggcagttcttc

SEQ ID NO: 5351954 - DNA, 25 bp, Homo sapien
acattgaagaactgccgaggtgtca

SEQ ID NO: 5351955 - DNA, 25 bp, Homo sapien
gaactgccgaggtgtcacatctgtg

SEQ ID NO: 5351956 - DNA, 25 bp, Homo sapien
tgaagaactgccgaggtgtcacatc

SEQ ID NO: 5351957 - DNA, 25 bp, Homo sapien
attgaagaactgccgaggtgtcaca

SEQ ID NO: 5351958 - DNA, 25 bp, Homo sapien
cattgaagaactgccgaggtgtcac

SEQ ID NO: 5351959 - DNA, 25 bp, Homo sapien
gaagaactgccgaggtgtcacatct

SEQ ID NO: 5351960 - DNA, 25 bp, Homo sapien
ttcatacttctctaaactgttctgg

SEQ ID NO: 5351961 - DNA, 25 bp, Homo sapien
gggttccatagttgcacaggtgcat

SEQ ID NO: 5351962 - DNA, 25 bp, Homo sapien
tttgttgctctactaagacttctag

SEQ ID NO: 5351963 - DNA, 25 bp, Homo sapien
tacttctctaaactgttctggttgt

SEQ ID NO: 5351964 - DNA, 25 bp, Homo sapien
agcccagtgtggctatcttttgggt

SEQ ID NO: 5351965 - DNA, 25 bp, Homo sapien
cttttgggttccatagttgcacagg

SEQ ID NO: 5351966 - DNA, 25 bp, Homo sapien
aacaaccagaacagtttagagaagt

SEQ ID NO: 5351967 - DNA, 25 bp, Homo sapien
cctgtgcaactatggaacccaaaag

SEQ ID NO: 5351968 - DNA, 25 bp, Homo sapien
tagaagtcttagtagagcaacaaag

SEQ ID NO: 5351969 - DNA, 25 bp, Homo sapien
tgcacctgtgcaactatggaaccca

SEQ ID NO: 5351970 - DNA, 25 bp, Homo sapien
aacccaaaagatagccacactgggc

SEQ ID NO: 5351971 - DNA, 25 bp, Homo sapien
cagtttagagaagtatgaagaacag

SEQ ID NO: 5351972 - DNA, 25 bp, Homo sapien
tgtggcggcgcccaattacaggcac

SEQ ID NO: 5351973 - DNA, 25 bp, Homo sapien
taagaaacactttaagctgtggcgg

SEQ ID NO: 5351974 - DNA, 25 bp, Homo sapien
gcaaagagcaacgttgggaaatggt

SEQ ID NO: 5351975 - DNA, 25 bp, Homo sapien
ctattaatgagatgaagcggttgga

SEQ ID NO: 5351976 - DNA, 25 bp, Homo sapien
aacactttaagctgtggcggcgccc

SEQ ID NO: 5351977 - DNA, 25 bp, Homo sapien
caacgttgggaaatggtgatggata

SEQ ID NO: 5351978 - DNA, 25 bp, Homo sapien
ttgggcgccgccacagcttaaagtg

SEQ ID NO: 5351979 - DNA, 25 bp, Homo sapien
tatccatcaccatttcccaacgttg

SEQ ID NO: 5351980 - DNA, 25 bp, Homo sapien
ggtgcctgtaattgggcgccgccac

SEQ ID NO: 5351981 - DNA, 25 bp, Homo sapien
atttcccaacgttgctctttgccct

SEQ ID NO: 5351982 - DNA, 25 bp, Homo sapien
tccaaccgcttcatctcattaatag

SEQ ID NO: 5351983 - DNA, 25 bp, Homo sapien
ggcgccgccacagcttaaagtgttt

SEQ ID NO: 5351984 - DNA, 25 bp, Homo sapien
ttttagtacgacattccaccagtgg

SEQ ID NO: 5351985 - DNA, 25 bp, Homo sapien
tacattttcgtgaagcagtcttgct

SEQ ID NO: 5351986 - DNA, 25 bp, Homo sapien
ggtcagatgctctgaaccaccttga

SEQ ID NO: 5351987 - DNA, 25 bp, Homo sapien
caagaatgataattcgggccaggtg

SEQ ID NO: 5351988 - DNA, 25 bp, Homo sapien
cagtggaaacatgctcccctttatt

SEQ ID NO: 5351989 - DNA, 25 bp, Homo sapien
gagcttgattaagcagtgggtcaga

SEQ ID NO: 5351990 - DNA, 25 bp, Homo sapien
gaatcaaggtggttcagagcatctg

SEQ ID NO: 5351991 - DNA, 25 bp, Homo sapien
gagacacagtatgaatgatagagca

SEQ ID NO: 5351992 - DNA, 25 bp, Homo sapien
gcaagactgcttcacgaaaatgtaa

SEQ ID NO: 5351993 - DNA, 25 bp, Homo sapien
cacctggcccgaattatcattcttg

SEQ ID NO: 5351994 - DNA, 25 bp, Homo sapien
cactggtggaatgtcgtactaaaac

SEQ ID NO: 5351995 - DNA, 25 bp, Homo sapien
tatgaaaagggacggaaatgtcttg

SEQ ID NO: 5351996 - DNA, 25 bp, Homo sapien
agccaggcgcctggctctatgtctt

SEQ ID NO: 5351997 - DNA, 25 bp, Homo sapien
ccaggcgcctggctctatgtctttt

SEQ ID NO: 5351998 - DNA, 25 bp, Homo sapien
ggcgcctggctctatgtcttttttt

SEQ ID NO: 5351999 - DNA, 25 bp, Homo sapien
aggcgcctggctctatgtctttttt

SEQ ID NO: 5352000 - DNA, 25 bp, Homo sapien
caggcgcctggctctatgtcttttt

SEQ ID NO: 5352001 - DNA, 25 bp, Homo sapien
tggctgggtctacagcgggggtgcc

SEQ ID NO: 5352002 - DNA, 25 bp, Homo sapien
aaaaaagacatagagccaggcgcct

SEQ ID NO: 5352003 - DNA, 25 bp, Homo sapien
aaaaaaagacatagagccaggcgcc

SEQ ID NO: 5352004 - DNA, 25 bp, Homo sapien
gtggcacccccgctgtagacccagc

SEQ ID NO: 5352005 - DNA, 25 bp, Homo sapien
aaaaagacatagagccaggcgcctg

SEQ ID NO: 5352006 - DNA, 25 bp, Homo sapien
aaaagacatagagccaggcgcctgg

SEQ ID NO: 5352007 - DNA, 25 bp, Homo sapien
aagacatagagccaggcgcctggct

SEQ ID NO: 5352008 - DNA, 25 bp, Homo sapien
tccaaagtgctgagagccaggcgcc

SEQ ID NO: 5352009 - DNA, 25 bp, Homo sapien
tggttccagctattctcgtgcctca

SEQ ID NO: 5352010 - DNA, 25 bp, Homo sapien
caggcgcctggctctatgtcttttt

SEQ ID NO: 5352011 - DNA, 25 bp, Homo sapien
tcgtgcctcagccttgccagtggct

SEQ ID NO: 5352012 - DNA, 25 bp, Homo sapien
taagacataatctcactctgtcgcc

SEQ ID NO: 5352013 - DNA, 25 bp, Homo sapien
catgagacatcacgcccagactctt

SEQ ID NO: 5352014 - DNA, 25 bp, Homo sapien
gggcgctgcggcgagctctttctgg

SEQ ID NO: 5352015 - DNA, 25 bp, Homo sapien
ggcgctgcggcgagctctttctggg

SEQ ID NO: 5352016 - DNA, 25 bp, Homo sapien
gggcctgccctgtggtcgttggccc

SEQ ID NO: 5352017 - DNA, 25 bp, Homo sapien
gctgcggcgagctctttctgggccg

SEQ ID NO: 5352018 - DNA, 25 bp, Homo sapien
gcgctgcggcgagctctttctgggc

SEQ ID NO: 5352019 - DNA, 25 bp, Homo sapien
cgctgcggcgagctctttctgggcc

SEQ ID NO: 5352020 - DNA, 25 bp, Homo sapien
ccagaaagagctcgccgcagcgccc

SEQ ID NO: 5352021 - DNA, 25 bp, Homo sapien
cccagaaagagctcgccgcagcgcc

SEQ ID NO: 5352022 - DNA, 25 bp, Homo sapien
ggcccagaaagagctcgccgcagcg

SEQ ID NO: 5352023 - DNA, 25 bp, Homo sapien
gggccaacgaccacagggcaggccc

SEQ ID NO: 5352024 - DNA, 25 bp, Homo sapien
gcccagaaagagctcgccgcagcgc

SEQ ID NO: 5352025 - DNA, 25 bp, Homo sapien
cggcccagaaagagctcgccgcagc

SEQ ID NO: 5352026 - DNA, 25 bp, Homo sapien
ggtcttttaattggcaatacagtcg

SEQ ID NO: 5352027 - DNA, 25 bp, Homo sapien
gcctgccctgtggtcgttggccctt

SEQ ID NO: 5352028 - DNA, 25 bp, Homo sapien
cggtggtcttttaattggcaataca

SEQ ID NO: 5352029 - DNA, 25 bp, Homo sapien
cgctgcggcgagctctttctgggcc

SEQ ID NO: 5352030 - DNA, 25 bp, Homo sapien
tgccctgtggtcgttggcccttgtt

SEQ ID NO: 5352031 - DNA, 25 bp, Homo sapien
ggcttgtgaaccctggggcctgccc

SEQ ID NO: 5352032 - DNA, 25 bp, Homo sapien
cgactgtattgccaattaaaagacc

SEQ ID NO: 5352033 - DNA, 25 bp, Homo sapien
ggcccagaaagagctcgccgcagcg

SEQ ID NO: 5352034 - DNA, 25 bp, Homo sapien
gggcaggccccagggttcacaagcc

SEQ ID NO: 5352035 - DNA, 25 bp, Homo sapien
agggccaacgaccacagggcaggcc

SEQ ID NO: 5352036 - DNA, 25 bp, Homo sapien
tgtattgccaattaaaagaccaccg

SEQ ID NO: 5352037 - DNA, 25 bp, Homo sapien
aacaagggccaacgaccacagggca

SEQ ID NO: 5352038 - DNA, 25 bp, Homo sapien
cgtcttcgtttgggacgaggagagg

SEQ ID NO: 5352039 - DNA, 25 bp, Homo sapien
gcgtcttcgtttgggacgaggagag

SEQ ID NO: 5352040 - DNA, 25 bp, Homo sapien
ctctcctcgtcccaaacgaagacgc

SEQ ID NO: 5352041 - DNA, 25 bp, Homo sapien
cctctcctcgtcccaaacgaagacg

SEQ ID NO: 5352042 - DNA, 25 bp, Homo sapien
tagccggcgtcttcgtttgggacga

SEQ ID NO: 5352043 - DNA, 25 bp, Homo sapien
ggatccaggaggaggagttgcagag

SEQ ID NO: 5352044 - DNA, 25 bp, Homo sapien
tcgtttgggacgaggagaggatcca

SEQ ID NO: 5352045 - DNA, 25 bp, Homo sapien
gcgtcttcgtttgggacgaggagag

SEQ ID NO: 5352046 - DNA, 25 bp, Homo sapien
atggcggcgttagccggcgtcttcg

SEQ ID NO: 5352047 - DNA, 25 bp, Homo sapien
tttgggacgaggagaggatccagga

SEQ ID NO: 5352048 - DNA, 25 bp, Homo sapien
ctctcctcgtcccaaacgaagacgc

SEQ ID NO: 5352049 - DNA, 25 bp, Homo sapien
cgaagacgccggctaacgccgccat

SEQ ID NO: 5352050 - DNA, 25 bp, Homo sapien
gatcctctcctcgtcccaaacgaag

SEQ ID NO: 5352051 - DNA, 25 bp, Homo sapien
tctgcaactcctcctcctggatcct

SEQ ID NO: 5352052 - DNA, 25 bp, Homo sapien
tggatcctctcctcgtcccaaacga

SEQ ID NO: 5352053 - DNA, 25 bp, Homo sapien
tcgtcccaaacgaagacgccggcta

SEQ ID NO: 5352054 - DNA, 25 bp, Homo sapien
gccgcgttctcctcggccgcctctg

SEQ ID NO: 5352055 - DNA, 25 bp, Homo sapien
ctctggcgccggctgcacggccgtc

SEQ ID NO: 5352056 - DNA, 25 bp, Homo sapien
ctactccgagagctcacgccgcgtt

SEQ ID NO: 5352057 - DNA, 25 bp, Homo sapien
agcagatcgcgcagctctacggccg

SEQ ID NO: 5352058 - DNA, 25 bp, Homo sapien
caatcagtgccgcttcgtcacgggc

SEQ ID NO: 5352059 - DNA, 25 bp, Homo sapien
gggcctgcgcgtgcggcgcgcgcag

SEQ ID NO: 5352060 - DNA, 25 bp, Homo sapien
cggccgtagagctgcgcgatctgct

SEQ ID NO: 5352061 - DNA, 25 bp, Homo sapien
gtagaggcggccgtagagctgcgcg

SEQ ID NO: 5352062 - DNA, 25 bp, Homo sapien
gcccgtgacgaagcggcactgattg

SEQ ID NO: 5352063 - DNA, 25 bp, Homo sapien
cagaggcggccgaggagaacgcggc

SEQ ID NO: 5352064 - DNA, 25 bp, Homo sapien
agaacgcggcgtgagctctcggagt

SEQ ID NO: 5352065 - DNA, 25 bp, Homo sapien
cgtgagctctcggagtagaggcggc

SEQ ID NO: 5352066 - DNA, 25 bp, Homo sapien
cccggaagctcgcggcgggccctgc

SEQ ID NO: 5352067 - DNA, 25 bp, Homo sapien
ccccggaagctcgcggcgggccctg

SEQ ID NO: 5352068 - DNA, 25 bp, Homo sapien
ccggaagctcgcggcgggccctgcg

SEQ ID NO: 5352069 - DNA, 25 bp, Homo sapien
gcagggcccgccgcgagcttccggg

SEQ ID NO: 5352070 - DNA, 25 bp, Homo sapien
cagggcccgccgcgagcttccgggg

SEQ ID NO: 5352071 - DNA, 25 bp, Homo sapien
cgcagggcccgccgcgagcttccgg

SEQ ID NO: 5352072 - DNA, 25 bp, Homo sapien
ccccggaagctcgcggcgggccctg

SEQ ID NO: 5352073 - DNA, 25 bp, Homo sapien
cttgggccccggaagctcgcggcgg

SEQ ID NO: 5352074 - DNA, 25 bp, Homo sapien
gaagctcgcggcgggccctgcggga

SEQ ID NO: 5352075 - DNA, 25 bp, Homo sapien
tcgcggcgggccctgcgggaggcgg

SEQ ID NO: 5352076 - DNA, 25 bp, Homo sapien
cggaagctcgcggcgggccctgcgg

SEQ ID NO: 5352077 - DNA, 25 bp, Homo sapien
tgggccccggaagctcgcggcgggc

SEQ ID NO: 5352078 - DNA, 25 bp, Homo sapien
gcagggcccgccgcgagcttccggg

SEQ ID NO: 5352079 - DNA, 25 bp, Homo sapien
tcccgcagggcccgccgcgagcttc

SEQ ID NO: 5352080 - DNA, 25 bp, Homo sapien
ccgccgcgagcttccggggcccaag

SEQ ID NO: 5352081 - DNA, 25 bp, Homo sapien
ctcccgcagggcccgccgcgagctt

SEQ ID NO: 5352082 - DNA, 25 bp, Homo sapien
gcccgccgcgagcttccggggccca

SEQ ID NO: 5352083 - DNA, 25 bp, Homo sapien
cgcagggcccgccgcgagcttccgg

SEQ ID NO: 5352084 - DNA, 25 bp, Homo sapien
ccatttagggggacgctgcgaccac

SEQ ID NO: 5352085 - DNA, 25 bp, Homo sapien
tttagggggacgctgcgaccaccgc

SEQ ID NO: 5352086 - DNA, 25 bp, Homo sapien
gggacgctgcgaccaccgcctgcgc

SEQ ID NO: 5352087 - DNA, 25 bp, Homo sapien
tagggggacgctgcgaccaccgcct

SEQ ID NO: 5352088 - DNA, 25 bp, Homo sapien
catttagggggacgctgcgaccacc

SEQ ID NO: 5352089 - DNA, 25 bp, Homo sapien
gccatttagggggacgctgcgacca

SEQ ID NO: 5352090 - DNA, 25 bp, Homo sapien
gggcgcaggcggtggtcgcagcgtc

SEQ ID NO: 5352091 - DNA, 25 bp, Homo sapien
gcggtggtcgcagcgtccccctaaa

SEQ ID NO: 5352092 - DNA, 25 bp, Homo sapien
ggtggtcgcagcgtccccctaaatg

SEQ ID NO: 5352093 - DNA, 25 bp, Homo sapien
aggcggtggtcgcagcgtcccccta

SEQ ID NO: 5352094 - DNA, 25 bp, Homo sapien
tggtcgcagcgtccccctaaatggc

SEQ ID NO: 5352095 - DNA, 25 bp, Homo sapien
gcgcaggcggtggtcgcagcgtccc

SEQ ID NO: 5352096 - DNA, 25 bp, Homo sapien
ggcgtctgctgccatgaccgactct

SEQ ID NO: 5352097 - DNA, 25 bp, Homo sapien
gtagcagtcgcggagccatcccggc

SEQ ID NO: 5352098 - DNA, 25 bp, Homo sapien
tggtgtagcagtcgcggagccatcc

SEQ ID NO: 5352099 - DNA, 25 bp, Homo sapien
cctggtgtagcagtcgcggagccat

SEQ ID NO: 5352100 - DNA, 25 bp, Homo sapien
gccatgaccgactctcccctcagag

SEQ ID NO: 5352101 - DNA, 25 bp, Homo sapien
agtcgcggagccatcccggcgtctg

SEQ ID NO: 5352102 - DNA, 25 bp, Homo sapien
gccgggatggctccgcgactgctac

SEQ ID NO: 5352103 - DNA, 25 bp, Homo sapien
ggatggctccgcgactgctacacca

SEQ ID NO: 5352104 - DNA, 25 bp, Homo sapien
atggctccgcgactgctacaccagg

SEQ ID NO: 5352105 - DNA, 25 bp, Homo sapien
gggagagtcggtcatggcagcagac

SEQ ID NO: 5352106 - DNA, 25 bp, Homo sapien
agagtcggtcatggcagcagacgcc

SEQ ID NO: 5352107 - DNA, 25 bp, Homo sapien
cagacgccgggatggctccgcgact

SEQ ID NO: 5352108 - DNA, 25 bp, Homo sapien
cggaaggcgcgggagcttgcgtgct

SEQ ID NO: 5352109 - DNA, 25 bp, Homo sapien
ctggaggtcgccgaggagccacagg

SEQ ID NO: 5352110 - DNA, 25 bp, Homo sapien
gcagtcgcggaaggcgcgggagctt

SEQ ID NO: 5352111 - DNA, 25 bp, Homo sapien
ggcgcgggagcttgcgtgctgctgg

SEQ ID NO: 5352112 - DNA, 25 bp, Homo sapien
gcgtgtggcagtcgcggaaggcgcg

SEQ ID NO: 5352113 - DNA, 25 bp, Homo sapien
gtctcgtttctgtccgcgcgccctg

SEQ ID NO: 5352114 - DNA, 25 bp, Homo sapien
cgcgccttccgcgactgccacacgc

SEQ ID NO: 5352115 - DNA, 25 bp, Homo sapien
cctgtggctcctcggcgacctccag

SEQ ID NO: 5352116 - DNA, 25 bp, Homo sapien
agcagcacgcaagctcccgcgcctt

SEQ ID NO: 5352117 - DNA, 25 bp, Homo sapien
ggccgggatgcagggcgcgcggaca

SEQ ID NO: 5352118 - DNA, 25 bp, Homo sapien
cagggcgcgcggacagaaacgagac

SEQ ID NO: 5352119 - DNA, 25 bp, Homo sapien
aagctcccgcgccttccgcgactgc

SEQ ID NO: 5352120 - DNA, 25 bp, Homo sapien
gagacagacagctcaggcccagcag

SEQ ID NO: 5352121 - DNA, 25 bp, Homo sapien
agcagcacgcaagctcccgcgcctt

SEQ ID NO: 5352122 - DNA, 25 bp, Homo sapien
agtcagccctgtggctcctcggcga

SEQ ID NO: 5352123 - DNA, 25 bp, Homo sapien
gcggacagaaacgagacagacagct

SEQ ID NO: 5352124 - DNA, 25 bp, Homo sapien
ggccgggatgcagggcgcgcggaca

SEQ ID NO: 5352125 - DNA, 25 bp, Homo sapien
gcgcgcggacagaaacgagacagac

SEQ ID NO: 5352126 - DNA, 25 bp, Homo sapien
gaggcttgctccgtcacctagactg

SEQ ID NO: 5352127 - DNA, 25 bp, Homo sapien
gcttgaacattactctgggtccatc

SEQ ID NO: 5352128 - DNA, 25 bp, Homo sapien
catctttcttaagtgggcccaaggt

SEQ ID NO: 5352129 - DNA, 25 bp, Homo sapien
tttgttagatatcgagcatgtgctg

SEQ ID NO: 5352130 - DNA, 25 bp, Homo sapien
tatatctccacatcttattgttctg

SEQ ID NO: 5352131 - DNA, 25 bp, Homo sapien
gccttcagactagaactacaacctc

SEQ ID NO: 5352132 - DNA, 25 bp, Homo sapien
tctacatttgtatgagccaattcct

SEQ ID NO: 5352133 - DNA, 25 bp, Homo sapien
agaactacaacctcggctctcctgg

SEQ ID NO: 5352134 - DNA, 25 bp, Homo sapien
tgttgctgtcccactcagctgaagg

SEQ ID NO: 5352135 - DNA, 25 bp, Homo sapien
tggtctatctcgctacacaaggagg

SEQ ID NO: 5352136 - DNA, 25 bp, Homo sapien
tgagatcagccaatcttccctgggc

SEQ ID NO: 5352137 - DNA, 25 bp, Homo sapien
cactagacatatactgagagacccc

SEQ ID NO: 5352138 - DNA, 25 bp, Homo sapien
tcaaaccagtaaccctaatgaagcg

SEQ ID NO: 5352139 - DNA, 25 bp, Homo sapien
agtaaccctaatgaagcgtcttcgt

SEQ ID NO: 5352140 - DNA, 25 bp, Homo sapien
gaagcgtcttcgtttcaggtgggct

SEQ ID NO: 5352141 - DNA, 25 bp, Homo sapien
ttcgtttcaggtgggctcattcaaa

SEQ ID NO: 5352142 - DNA, 25 bp, Homo sapien
gcaggagtgtccctatcccagttca

SEQ ID NO: 5352143 - DNA, 25 bp, Homo sapien
actgggccctgggattgactgtgac

SEQ ID NO: 5352144 - DNA, 25 bp, Homo sapien
cacatcaagtgtggctcaagctgcg

SEQ ID NO: 5352145 - DNA, 25 bp, Homo sapien
aaagagacctaaatgggctgctccc

SEQ ID NO: 5352146 - DNA, 25 bp, Homo sapien
tgaaaatgccatgcacggagctggc

SEQ ID NO: 5352147 - DNA, 25 bp, Homo sapien
tcttttaccgtgatgcacactcggg

SEQ ID NO: 5352148 - DNA, 25 bp, Homo sapien
tgtgaaaacaggattaggaagctct

SEQ ID NO: 5352149 - DNA, 25 bp, Homo sapien
gccttgggcgggagtcagctactat

SEQ ID NO: 5352150 - DNA, 25 bp, Homo sapien
aaatcaggaaaatcgtgacagaaaa

SEQ ID NO: 5352151 - DNA, 25 bp, Homo sapien
caaatcaggaaaatcgtgacagaaa

SEQ ID NO: 5352152 - DNA, 25 bp, Homo sapien
atcaggaaaatcgtgacagaaaaat

SEQ ID NO: 5352153 - DNA, 25 bp, Homo sapien
ccaaatcaggaaaatcgtgacagaa

SEQ ID NO: 5352154 - DNA, 25 bp, Homo sapien
tgtggcccctgttcctaaactgagg

SEQ ID NO: 5352155 - DNA, 25 bp, Homo sapien
tgtggagcaaacactgatccctgtg

SEQ ID NO: 5352156 - DNA, 25 bp, Homo sapien
taaaaccagggcacacgtgaggaga

SEQ ID NO: 5352157 - DNA, 25 bp, Homo sapien
ggccatctggatctacactgaaggt

SEQ ID NO: 5352158 - DNA, 25 bp, Homo sapien
taacggcgaaggtgacatagacctg

SEQ ID NO: 5352159 - DNA, 25 bp, Homo sapien
ccaccaggtagaagctaacggcgaa

SEQ ID NO: 5352160 - DNA, 25 bp, Homo sapien
gaaaagccaatgacggtggcacact

SEQ ID NO: 5352161 - DNA, 25 bp, Homo sapien
gatgacctcatattccgccgggtag

SEQ ID NO: 5352162 - DNA, 25 bp, Homo sapien
gagagactacacaggatgcccagga

SEQ ID NO: 5352163 - DNA, 25 bp, Homo sapien
tccagaaggaaagcggagagactac

SEQ ID NO: 5352164 - DNA, 25 bp, Homo sapien
tagcgacgagtgatcttcagagcag

SEQ ID NO: 5352165 - DNA, 25 bp, Homo sapien
atgacccgcaggagcagcactgtct

SEQ ID NO: 5352166 - DNA, 25 bp, Homo sapien
tggcctgttgattttggtaaacact

SEQ ID NO: 5352167 - DNA, 25 bp, Homo sapien
ttggtaaacactgcttggcggtgcc

SEQ ID NO: 5352168 - DNA, 25 bp, Homo sapien
cttggcggtgccctctagtcatcag

SEQ ID NO: 5352169 - DNA, 25 bp, Homo sapien
ggtgccctctagtcatcagggaagt

SEQ ID NO: 5352170 - DNA, 25 bp, Homo sapien
caggatactacatgtctgaaggccc

SEQ ID NO: 5352171 - DNA, 25 bp, Homo sapien
tcaggtcaggatatctgttaggccc

SEQ ID NO: 5352172 - DNA, 25 bp, Homo sapien
tgatagctcatgaggcaccactgcc

SEQ ID NO: 5352173 - DNA, 25 bp, Homo sapien
gaatactccaggctctcaggtcagg

SEQ ID NO: 5352174 - DNA, 25 bp, Homo sapien
tgcacagcgccgtgatagacagggc

SEQ ID NO: 5352175 - DNA, 25 bp, Homo sapien
ctttcagcaggtccgggtgcacata

SEQ ID NO: 5352176 - DNA, 25 bp, Homo sapien
gtgcacatagcccaacacgtcggag

SEQ ID NO: 5352177 - DNA, 25 bp, Homo sapien
gtgcctccgtggatgtgcaaccagg

SEQ ID NO: 5352178 - DNA, 25 bp, Homo sapien
gcccgccgtcgctccgcagtcgctg

SEQ ID NO: 5352179 - DNA, 25 bp, Homo sapien
ccgtcgctccgcagtcgctgctggt

SEQ ID NO: 5352180 - DNA, 25 bp, Homo sapien
cagtcgctgctggtcgccgccgacc

SEQ ID NO: 5352181 - DNA, 25 bp, Homo sapien
gtcgctgctggtcgccgccgacctc

SEQ ID NO: 5352182 - DNA, 25 bp, Homo sapien
tggaggatagcaacgctccgggttc

SEQ ID NO: 5352183 - DNA, 25 bp, Homo sapien
acagtccggtggaggatagcaacgc

SEQ ID NO: 5352184 - DNA, 25 bp, Homo sapien
agtccggtggaggatagcaacgctc

SEQ ID NO: 5352185 - DNA, 25 bp, Homo sapien
tccggtggaggatagcaacgctccg

SEQ ID NO: 5352186 - DNA, 25 bp, Homo sapien
gggatcggctactgctagagcaaag

SEQ ID NO: 5352187 - DNA, 25 bp, Homo sapien
agacccggagtcagggtctcagcca

SEQ ID NO: 5352188 - DNA, 25 bp, Homo sapien
atgggactgcgggacgacaaccgaa

SEQ ID NO: 5352189 - DNA, 25 bp, Homo sapien
agacaggagactccggaatgggact

SEQ ID NO: 5352190 - DNA, 25 bp, Homo sapien
agacccggggccgatgcacttccgg

SEQ ID NO: 5352191 - DNA, 25 bp, Homo sapien
tgctgctcagcccagtcacgggctt

SEQ ID NO: 5352192 - DNA, 25 bp, Homo sapien
gccgagcgttcccaggccccaatcc

SEQ ID NO: 5352193 - DNA, 25 bp, Homo sapien
ttcccaggccccaatcccgcaacgc

SEQ ID NO: 5352194 - DNA, 25 bp, Homo sapien
cggcgaccggagaatccgcatctgg

SEQ ID NO: 5352195 - DNA, 25 bp, Homo sapien
cgcgcggtgagacccgctgtctgct

SEQ ID NO: 5352196 - DNA, 25 bp, Homo sapien
gacatgaaggactcgctggtgctgc

SEQ ID NO: 5352197 - DNA, 25 bp, Homo sapien
tgtcggccgcggaagcctggagtgg

SEQ ID NO: 5352198 - DNA, 25 bp, Homo sapien
tgagctacctcgactttggacagag

SEQ ID NO: 5352199 - DNA, 25 bp, Homo sapien
gactccccagaaaacgtcatataag

SEQ ID NO: 5352200 - DNA, 25 bp, Homo sapien
caggatgtcaactgtgtggcctgga

SEQ ID NO: 5352201 - DNA, 25 bp, Homo sapien
ccttctggaagtatcagcggcctga

SEQ ID NO: 5352202 - DNA, 25 bp, Homo sapien
cacttgtagtcttggtgtggtatca

SEQ ID NO: 5352203 - DNA, 25 bp, Homo sapien
tccaactgcgtatctgtgtgaagtc

SEQ ID NO: 5352204 - DNA, 25 bp, Homo sapien
gaattcaactgtttattataacaag

SEQ ID NO: 5352205 - DNA, 25 bp, Homo sapien
caattagctgaaaaggctattttaa

SEQ ID NO: 5352206 - DNA, 25 bp, Homo sapien
taccacaagaaccaacactgagcct

SEQ ID NO: 5352207 - DNA, 25 bp, Homo sapien
gaaatgtactagctggatgtgaccc

SEQ ID NO: 5352208 - DNA, 25 bp, Homo sapien
cactgagcctcggaagctagatcac

SEQ ID NO: 5352209 - DNA, 25 bp, Homo sapien
cccagaggagggtacatgcgactgt

SEQ ID NO: 5352210 - DNA, 25 bp, Homo sapien
ctgtagcctcgtgagtcagcccaga

SEQ ID NO: 5352211 - DNA, 25 bp, Homo sapien
gagggcacggccaaaaagatctggt

SEQ ID NO: 5352212 - DNA, 25 bp, Homo sapien
taaccagatctttttggccgtgccc

SEQ ID NO: 5352213 - DNA, 25 bp, Homo sapien
acagtcgcatgtaccctcctctggg

SEQ ID NO: 5352214 - DNA, 25 bp, Homo sapien
gaaacccctaacctgtgatctagct

SEQ ID NO: 5352215 - DNA, 25 bp, Homo sapien
gggtcacatccagctagtacatttc

SEQ ID NO: 5352216 - DNA, 25 bp, Homo sapien
tctgggctgactcacgaggctacag

SEQ ID NO: 5352217 - DNA, 25 bp, Homo sapien
tctagcttccgaggctcagtgttgg

SEQ ID NO: 5352218 - DNA, 25 bp, Homo sapien
tatatagcattttcaggcatgttcc

SEQ ID NO: 5352219 - DNA, 25 bp, Homo sapien
ttcctttcccttgctcactctggat

SEQ ID NO: 5352220 - DNA, 25 bp, Homo sapien
tcactctggatccagtgacagcagg

SEQ ID NO: 5352221 - DNA, 25 bp, Homo sapien
gacagcaggtgtcatgggtcaagca

SEQ ID NO: 5352222 - DNA, 25 bp, Homo sapien
gtcatgggtcaagcataaatcatat

SEQ ID NO: 5352223 - DNA, 25 bp, Homo sapien
catgttcctggtagttcttttgagt

SEQ ID NO: 5352224 - DNA, 25 bp, Homo sapien
cctgctgtcactggatccagagtga

SEQ ID NO: 5352225 - DNA, 25 bp, Homo sapien
gaatgtcagactcaaaagaactacc

SEQ ID NO: 5352226 - DNA, 25 bp, Homo sapien
ggaacatgcctgaaaatgctatata

SEQ ID NO: 5352227 - DNA, 25 bp, Homo sapien
atccagagtgagcaagggaaaggaa

SEQ ID NO: 5352228 - DNA, 25 bp, Homo sapien
tcaaaagaactaccaggaacatgcc

SEQ ID NO: 5352229 - DNA, 25 bp, Homo sapien
tatgcttgacccatgacacctgctg

SEQ ID NO: 5352230 - DNA, 25 bp, Homo sapien
taggaatcctggttgtggggaccag

SEQ ID NO: 5352231 - DNA, 25 bp, Homo sapien
tgtacattgtaggaatcctggttgt

SEQ ID NO: 5352232 - DNA, 25 bp, Homo sapien
acattgtaggaatcctggttgtggg

SEQ ID NO: 5352233 - DNA, 25 bp, Homo sapien
tacattgtaggaatcctggttgtgg

SEQ ID NO: 5352234 - DNA, 25 bp, Homo sapien
tgtgtacattgtaggaatcctggtt

SEQ ID NO: 5352235 - DNA, 25 bp, Homo sapien
gtgtacattgtaggaatcctggttg

SEQ ID NO: 5352236 - DNA, 25 bp, Homo sapien
aaccaggattcctacaatgtacaca

SEQ ID NO: 5352237 - DNA, 25 bp, Homo sapien
cacaaccaggattcctacaatgtac

SEQ ID NO: 5352238 - DNA, 25 bp, Homo sapien
ccacaaccaggattcctacaatgta

SEQ ID NO: 5352239 - DNA, 25 bp, Homo sapien
tggtccccacaaccaggattcctac

SEQ ID NO: 5352240 - DNA, 25 bp, Homo sapien
caaccaggattcctacaatgtacac

SEQ ID NO: 5352241 - DNA, 25 bp, Homo sapien
cccacaaccaggattcctacaatgt

SEQ ID NO: 5352242 - DNA, 25 bp, Homo sapien
acatgggatgtgaccaggagtacaa

SEQ ID NO: 5352243 - DNA, 25 bp, Homo sapien
tacatgggatgtgaccaggagtaca

SEQ ID NO: 5352244 - DNA, 25 bp, Homo sapien
catgggatgtgaccaggagtacaaa

SEQ ID NO: 5352245 - DNA, 25 bp, Homo sapien
ttacatgggatgtgaccaggagtac

SEQ ID NO: 5352246 - DNA, 25 bp, Homo sapien
tgtactcctggtcacatcccatgta

SEQ ID NO: 5352247 - DNA, 25 bp, Homo sapien
gtactcctggtcacatcccatgtaa

SEQ ID NO: 5352248 - DNA, 25 bp, Homo sapien
tttgtactcctggtcacatcccatg

SEQ ID NO: 5352249 - DNA, 25 bp, Homo sapien
ttgtactcctggtcacatcccatgt

SEQ ID NO: 5352250 - DNA, 25 bp, Homo sapien
tctgtacttcatgagtgacgcttac

SEQ ID NO: 5352251 - DNA, 25 bp, Homo sapien
gaagttggactttgtggccccagcc

SEQ ID NO: 5352252 - DNA, 25 bp, Homo sapien
aattcagcgtggatgtgaaagaagc

SEQ ID NO: 5352253 - DNA, 25 bp, Homo sapien
tgtgaccaggagtacaaattcagcg

SEQ ID NO: 5352254 - DNA, 25 bp, Homo sapien
ctggtgcccacaactacactctgta

SEQ ID NO: 5352255 - DNA, 25 bp, Homo sapien
tgacgcttacatgggatgtgaccag

SEQ ID NO: 5352256 - DNA, 25 bp, Homo sapien
cacgctgaatttgtactcctggtca

SEQ ID NO: 5352257 - DNA, 25 bp, Homo sapien
gcttctttcacatccacgctgaatt

SEQ ID NO: 5352258 - DNA, 25 bp, Homo sapien
tacagagtgtagttgtgggcaccag

SEQ ID NO: 5352259 - DNA, 25 bp, Homo sapien
tggtcacatcccatgtaagcgtcac

SEQ ID NO: 5352260 - DNA, 25 bp, Homo sapien
taagcgtcactcatgaagtacagag

SEQ ID NO: 5352261 - DNA, 25 bp, Homo sapien
tgaatcactgtctgtctcagcttct

SEQ ID NO: 5352262 - DNA, 25 bp, Homo sapien
tccatgctcatcttgatttctgcct

SEQ ID NO: 5352263 - DNA, 25 bp, Homo sapien
gtgtccatgctcatcttgatttctg

SEQ ID NO: 5352264 - DNA, 25 bp, Homo sapien
tgtccatgctcatcttgatttctgc

SEQ ID NO: 5352265 - DNA, 25 bp, Homo sapien
cctgtgtccatgctcatcttgattt

SEQ ID NO: 5352266 - DNA, 25 bp, Homo sapien
tcctgtgtccatgctcatcttgatt

SEQ ID NO: 5352267 - DNA, 25 bp, Homo sapien
ttcctgtgtccatgctcatcttgat

SEQ ID NO: 5352268 - DNA, 25 bp, Homo sapien
aggcagaaatcaagatgagcatgga

SEQ ID NO: 5352269 - DNA, 25 bp, Homo sapien
aaatcaagatgagcatggacacagg

SEQ ID NO: 5352270 - DNA, 25 bp, Homo sapien
gaaatcaagatgagcatggacacag

SEQ ID NO: 5352271 - DNA, 25 bp, Homo sapien
cagaaatcaagatgagcatggacac

SEQ ID NO: 5352272 - DNA, 25 bp, Homo sapien
ggcagaaatcaagatgagcatggac

SEQ ID NO: 5352273 - DNA, 25 bp, Homo sapien
atcaagatgagcatggacacaggaa

SEQ ID NO: 5352274 - DNA, 25 bp, Homo sapien
aagtccaatagcctcatctccatca

SEQ ID NO: 5352275 - DNA, 25 bp, Homo sapien
agtccaatagcctcatctccatcaa

SEQ ID NO: 5352276 - DNA, 25 bp, Homo sapien
tgatggagatgaggctattggactt

SEQ ID NO: 5352277 - DNA, 25 bp, Homo sapien
ttgatggagatgaggctattggact

SEQ ID NO: 5352278 - DNA, 25 bp, Homo sapien
aagtccaatagcctcatctccatca

SEQ ID NO: 5352279 - DNA, 25 bp, Homo sapien
ggctgaccttgcagcagaaggccaa

SEQ ID NO: 5352280 - DNA, 25 bp, Homo sapien
ccaatagcctcatctccatcaagag

SEQ ID NO: 5352281 - DNA, 25 bp, Homo sapien
tccatcaagaggctgaccttgcagc

SEQ ID NO: 5352282 - DNA, 25 bp, Homo sapien
gctgaccttgcagcagaaggccaag

SEQ ID NO: 5352283 - DNA, 25 bp, Homo sapien
caagaggctgaccttgcagcagaag

SEQ ID NO: 5352284 - DNA, 25 bp, Homo sapien
gggctggtgggtggtgattggagat

SEQ ID NO: 5352285 - DNA, 25 bp, Homo sapien
cgtgaagagggctggtgggtggtga

SEQ ID NO: 5352286 - DNA, 25 bp, Homo sapien
gtgaagagggctggtgggtggtgat

SEQ ID NO: 5352287 - DNA, 25 bp, Homo sapien
gaagagggctggtgggtggtgattg

SEQ ID NO: 5352288 - DNA, 25 bp, Homo sapien
aaacgtgaagagggctggtgggtgg

SEQ ID NO: 5352289 - DNA, 25 bp, Homo sapien
acgtgaagagggctggtgggtggtg

SEQ ID NO: 5352290 - DNA, 25 bp, Homo sapien
atcaccacccaccagccctcttcac

SEQ ID NO: 5352291 - DNA, 25 bp, Homo sapien
tcaccacccaccagccctcttcacg

SEQ ID NO: 5352292 - DNA, 25 bp, Homo sapien
ccacccaccagccctcttcacgttt

SEQ ID NO: 5352293 - DNA, 25 bp, Homo sapien
caccacccaccagccctcttcacgt

SEQ ID NO: 5352294 - DNA, 25 bp, Homo sapien
atctccaatcaccacccaccagccc

SEQ ID NO: 5352295 - DNA, 25 bp, Homo sapien
ccaatcaccacccaccagccctctt

SEQ ID NO: 5352296 - DNA, 25 bp, Homo sapien
aggccctgtcattgcgcctctcttc

SEQ ID NO: 5352297 - DNA, 25 bp, Homo sapien
tgtcattgcgcctctcttcccgcag

SEQ ID NO: 5352298 - DNA, 25 bp, Homo sapien
acaggccctgtcattgcgcctctct

SEQ ID NO: 5352299 - DNA, 25 bp, Homo sapien
caggccctgtcattgcgcctctctt

SEQ ID NO: 5352300 - DNA, 25 bp, Homo sapien
cacaggccctgtcattgcgcctctc

SEQ ID NO: 5352301 - DNA, 25 bp, Homo sapien
ggccctgtcattgcgcctctcttcc

SEQ ID NO: 5352302 - DNA, 25 bp, Homo sapien
tgcgggaagagaggcgcaatgacag

SEQ ID NO: 5352303 - DNA, 25 bp, Homo sapien
gagaggcgcaatgacagggcctgtg

SEQ ID NO: 5352304 - DNA, 25 bp, Homo sapien
gaagagaggcgcaatgacagggcct

SEQ ID NO: 5352305 - DNA, 25 bp, Homo sapien
aagagaggcgcaatgacagggcctg

SEQ ID NO: 5352306 - DNA, 25 bp, Homo sapien
ggaagagaggcgcaatgacagggcc

SEQ ID NO: 5352307 - DNA, 25 bp, Homo sapien
ctgcgggaagagaggcgcaatgaca

SEQ ID NO: 5352308 - DNA, 25 bp, Homo sapien
gatgaagaacggaacgcgttgcttc

SEQ ID NO: 5352309 - DNA, 25 bp, Homo sapien
tgaagaacggaacgcgttgcttcag

SEQ ID NO: 5352310 - DNA, 25 bp, Homo sapien
ggaacgcgttgcttcagctgactga

SEQ ID NO: 5352311 - DNA, 25 bp, Homo sapien
gaacggaacgcgttgcttcagctga

SEQ ID NO: 5352312 - DNA, 25 bp, Homo sapien
gaacgcgttgcttcagctgactgac

SEQ ID NO: 5352313 - DNA, 25 bp, Homo sapien
aacggaacgcgttgcttcagctgac

SEQ ID NO: 5352314 - DNA, 25 bp, Homo sapien
gagtgttttcgacatcatggagatg

SEQ ID NO: 5352315 - DNA, 25 bp, Homo sapien
gctaccctaatatcgaactatctta

SEQ ID NO: 5352316 - DNA, 25 bp, Homo sapien
gtgttttcgacatcatggagatgga

SEQ ID NO: 5352317 - DNA, 25 bp, Homo sapien
agagtgttttcgacatcatggagat

SEQ ID NO: 5352318 - DNA, 25 bp, Homo sapien
catctccatgatgtcgaaaacactc

SEQ ID NO: 5352319 - DNA, 25 bp, Homo sapien
atctccatgatgtcgaaaacactct

SEQ ID NO: 5352320 - DNA, 25 bp, Homo sapien
taagatagttcgatattagggtagc

SEQ ID NO: 5352321 - DNA, 25 bp, Homo sapien
tccatctccatgatgtcgaaaacac

SEQ ID NO: 5352322 - DNA, 25 bp, Homo sapien
tcagtcagctgaagcaacgcgttcc

SEQ ID NO: 5352323 - DNA, 25 bp, Homo sapien
gtcagctgaagcaacgcgttccgtt

SEQ ID NO: 5352324 - DNA, 25 bp, Homo sapien
gtcagtcagctgaagcaacgcgttc

SEQ ID NO: 5352325 - DNA, 25 bp, Homo sapien
cagctgaagcaacgcgttccgttct

SEQ ID NO: 5352326 - DNA, 25 bp, Homo sapien
cagtcagctgaagcaacgcgttccg

SEQ ID NO: 5352327 - DNA, 25 bp, Homo sapien
gaagcaacgcgttccgttcttcatc

SEQ ID NO: 5352328 - DNA, 25 bp, Homo sapien
tctgcagctgttttatctagatgac

SEQ ID NO: 5352329 - DNA, 25 bp, Homo sapien
gtaaaattagtagctctttgctgcc

SEQ ID NO: 5352330 - DNA, 25 bp, Homo sapien
tatggttcctccgaaggtgctccct

SEQ ID NO: 5352331 - DNA, 25 bp, Homo sapien
tttcctgacgtctgaatactcactg

SEQ ID NO: 5352332 - DNA, 25 bp, Homo sapien
gctagagagcctgccaactgtgggc

SEQ ID NO: 5352333 - DNA, 25 bp, Homo sapien
ggcccgtgttctctctttcctgacg

SEQ ID NO: 5352334 - DNA, 25 bp, Homo sapien
gcaccttcggaggaaccataactaa

SEQ ID NO: 5352335 - DNA, 25 bp, Homo sapien
cgtcaggaaagagagaacacgggcc

SEQ ID NO: 5352336 - DNA, 25 bp, Homo sapien
cagtgagtattcagacgtcaggaaa

SEQ ID NO: 5352337 - DNA, 25 bp, Homo sapien
agtcatctagataaaacagctgcag

SEQ ID NO: 5352338 - DNA, 25 bp, Homo sapien
ccacagttggcaggctctctagcat

SEQ ID NO: 5352339 - DNA, 25 bp, Homo sapien
tcaacagggagcaccttcggaggaa

SEQ ID NO: 5352340 - DNA, 25 bp, Homo sapien
gtgagccgggtcagcctagagggtc

SEQ ID NO: 5352341 - DNA, 25 bp, Homo sapien
tgagccgggtcagcctagagggtca

SEQ ID NO: 5352342 - DNA, 25 bp, Homo sapien
gagccgggtcagcctagagggtcag

SEQ ID NO: 5352343 - DNA, 25 bp, Homo sapien
ctgaccctctaggctgacccggctc

SEQ ID NO: 5352344 - DNA, 25 bp, Homo sapien
gaccctctaggctgacccggctcac

SEQ ID NO: 5352345 - DNA, 25 bp, Homo sapien
tgaccctctaggctgacccggctca

SEQ ID NO: 5352346 - DNA, 25 bp, Homo sapien
tgagcatatcaaacgttgcacagac

SEQ ID NO: 5352347 - DNA, 25 bp, Homo sapien
tctgagcatatcaaacgttgcacag

SEQ ID NO: 5352348 - DNA, 25 bp, Homo sapien
agcatatcaaacgttgcacagacaa

SEQ ID NO: 5352349 - DNA, 25 bp, Homo sapien
catgtggtccaaggactcatacctg

SEQ ID NO: 5352350 - DNA, 25 bp, Homo sapien
ccatgtggtccaaggactcatacct

SEQ ID NO: 5352351 - DNA, 25 bp, Homo sapien
ctctgagcatatcaaacgttgcaca

SEQ ID NO: 5352352 - DNA, 25 bp, Homo sapien
tctgtgcaacgtttgatatgctcag

SEQ ID NO: 5352353 - DNA, 25 bp, Homo sapien
tgtctgtgcaacgtttgatatgctc

SEQ ID NO: 5352354 - DNA, 25 bp, Homo sapien
caggtatgagtccttggaccacatg

SEQ ID NO: 5352355 - DNA, 25 bp, Homo sapien
ttgtctgtgcaacgtttgatatgct

SEQ ID NO: 5352356 - DNA, 25 bp, Homo sapien
aggtatgagtccttggaccacatgg

SEQ ID NO: 5352357 - DNA, 25 bp, Homo sapien
tgtgcaacgtttgatatgctcagag

SEQ ID NO: 5352358 - DNA, 25 bp, Homo sapien
taaccctaagttcaatgatccgcac

SEQ ID NO: 5352359 - DNA, 25 bp, Homo sapien
gagttgcagtcagatacggaggaaa

SEQ ID NO: 5352360 - DNA, 25 bp, Homo sapien
tgagtgctgagttgcagtcagatac

SEQ ID NO: 5352361 - DNA, 25 bp, Homo sapien
tgctgagttgcagtcagatacggag

SEQ ID NO: 5352362 - DNA, 25 bp, Homo sapien
acaagctgaataaccctaagttcaa

SEQ ID NO: 5352363 - DNA, 25 bp, Homo sapien
gaataaccctaagttcaatgatccg

SEQ ID NO: 5352364 - DNA, 25 bp, Homo sapien
tccgtatctgactgcaactcagcac

SEQ ID NO: 5352365 - DNA, 25 bp, Homo sapien
tatctgactgcaactcagcactcag

SEQ ID NO: 5352366 - DNA, 25 bp, Homo sapien
atcattgaacttagggttattcagc

SEQ ID NO: 5352367 - DNA, 25 bp, Homo sapien
tttcctccgtatctgactgcaactc

SEQ ID NO: 5352368 - DNA, 25 bp, Homo sapien
ttgaacttagggttattcagcttgt

SEQ ID NO: 5352369 - DNA, 25 bp, Homo sapien
gtgcggatcattgaacttagggtta

SEQ ID NO: 5352370 - DNA, 25 bp, Homo sapien
cagagcacatggcatccctgccacc

SEQ ID NO: 5352371 - DNA, 25 bp, Homo sapien
atgtcctcccgctccatacctccct

SEQ ID NO: 5352372 - DNA, 25 bp, Homo sapien
cctgggaacaacaaactcggcctgt

SEQ ID NO: 5352373 - DNA, 25 bp, Homo sapien
ctgggaacaacaaactcggcctgtg

SEQ ID NO: 5352374 - DNA, 25 bp, Homo sapien
agcacatggcatccctgccaccaac

SEQ ID NO: 5352375 - DNA, 25 bp, Homo sapien
ccgccatatgtcctcccgctccata

SEQ ID NO: 5352376 - DNA, 25 bp, Homo sapien
gttggtggcagggatgccatgtgct

SEQ ID NO: 5352377 - DNA, 25 bp, Homo sapien
agggaggtatggagcgggaggacat

SEQ ID NO: 5352378 - DNA, 25 bp, Homo sapien
tatggagcgggaggacatatggcgg

SEQ ID NO: 5352379 - DNA, 25 bp, Homo sapien
cacaggccgagtttgttgttcccag

SEQ ID NO: 5352380 - DNA, 25 bp, Homo sapien
acaggccgagtttgttgttcccagg

SEQ ID NO: 5352381 - DNA, 25 bp, Homo sapien
ggtggcagggatgccatgtgctctg

SEQ ID NO: 5352382 - DNA, 25 bp, Homo sapien
atgcagcagagtatgagaacattcc

SEQ ID NO: 5352383 - DNA, 25 bp, Homo sapien
gcagcagagtatgagaacattccca

SEQ ID NO: 5352384 - DNA, 25 bp, Homo sapien
cagcagagtatgagaacattcccat

SEQ ID NO: 5352385 - DNA, 25 bp, Homo sapien
tgcagcagagtatgagaacattccc

SEQ ID NO: 5352386 - DNA, 25 bp, Homo sapien
ccaatgcagcagagtatgagaacat

SEQ ID NO: 5352387 - DNA, 25 bp, Homo sapien
caatgcagcagagtatgagaacatt

SEQ ID NO: 5352388 - DNA, 25 bp, Homo sapien
atgggaatgttctcatactctgctg

SEQ ID NO: 5352389 - DNA, 25 bp, Homo sapien
ggaatgttctcatactctgctgcat

SEQ ID NO: 5352390 - DNA, 25 bp, Homo sapien
atgttctcatactctgctgcattgg

SEQ ID NO: 5352391 - DNA, 25 bp, Homo sapien
tgggaatgttctcatactctgctgc

SEQ ID NO: 5352392 - DNA, 25 bp, Homo sapien
aatgttctcatactctgctgcattg

SEQ ID NO: 5352393 - DNA, 25 bp, Homo sapien
gggaatgttctcatactctgctgca

SEQ ID NO: 5352394 - DNA, 25 bp, Homo sapien
gagcctttttacacgggtcaggagc

SEQ ID NO: 5352395 - DNA, 25 bp, Homo sapien
ttttacacgggtcaggagcccactg

SEQ ID NO: 5352396 - DNA, 25 bp, Homo sapien
ttacacgggtcaggagcccactggg

SEQ ID NO: 5352397 - DNA, 25 bp, Homo sapien
tttacacgggtcaggagcccactgg

SEQ ID NO: 5352398 - DNA, 25 bp, Homo sapien
gctcctgacccgtgtaaaaaggctc

SEQ ID NO: 5352399 - DNA, 25 bp, Homo sapien
cccagtgggctcctgacccgtgtaa

SEQ ID NO: 5352400 - DNA, 25 bp, Homo sapien
cagtgggctcctgacccgtgtaaaa

SEQ ID NO: 5352401 - DNA, 25 bp, Homo sapien
ccagtgggctcctgacccgtgtaaa

SEQ ID NO: 5352402 - DNA, 25 bp, Homo sapien
tattacatcaactacaccaccattg

SEQ ID NO: 5352403 - DNA, 25 bp, Homo sapien
gacgtggcgcctctgaacctaggca

SEQ ID NO: 5352404 - DNA, 25 bp, Homo sapien
tctgaacctaggcatgatcgccgcc

SEQ ID NO: 5352405 - DNA, 25 bp, Homo sapien
acgagatggacgtggcgcctctgaa

SEQ ID NO: 5352406 - DNA, 25 bp, Homo sapien
gatcgccgcctactattacatcaac

SEQ ID NO: 5352407 - DNA, 25 bp, Homo sapien
gtcacttgtcggaccacttgtcaga

SEQ ID NO: 5352408 - DNA, 25 bp, Homo sapien
tagttgatgtaatagtaggcggcga

SEQ ID NO: 5352409 - DNA, 25 bp, Homo sapien
ttcagaggcgccacgtccatctcgt

SEQ ID NO: 5352410 - DNA, 25 bp, Homo sapien
taggcggcgatcatgcctaggttca

SEQ ID NO: 5352411 - DNA, 25 bp, Homo sapien
gacaagtggtccgacaagtgacgat

SEQ ID NO: 5352412 - DNA, 25 bp, Homo sapien
gatcatgcctaggttcagaggcgcc

SEQ ID NO: 5352413 - DNA, 25 bp, Homo sapien
caatggtggtgtagttgatgtaata

SEQ ID NO: 5352414 - DNA, 25 bp, Homo sapien
gagccattgccagtagaatctcacc

SEQ ID NO: 5352415 - DNA, 25 bp, Homo sapien
gctgtggactacctcacctggacct

SEQ ID NO: 5352416 - DNA, 25 bp, Homo sapien
tggacctttctgtaccgccgcatga

SEQ ID NO: 5352417 - DNA, 25 bp, Homo sapien
gaaccccaattactacaacctgcag

SEQ ID NO: 5352418 - DNA, 25 bp, Homo sapien
caatgctgagatcgtcaccaagacc

SEQ ID NO: 5352419 - DNA, 25 bp, Homo sapien
ggaccactgtatgcatgaccacttc

SEQ ID NO: 5352420 - DNA, 25 bp, Homo sapien
caggtgagattctactggcaatggc

SEQ ID NO: 5352421 - DNA, 25 bp, Homo sapien
gtcatgcggcggtacagaaaggtcc

SEQ ID NO: 5352422 - DNA, 25 bp, Homo sapien
aaggtccaggtgaggtagtccacag

SEQ ID NO: 5352423 - DNA, 25 bp, Homo sapien
gacgatctcagcattgaagtggtca

SEQ ID NO: 5352424 - DNA, 25 bp, Homo sapien
gaagtggtcatgcatacagtggtcc

SEQ ID NO: 5352425 - DNA, 25 bp, Homo sapien
tggcaatggctcatataagaacttc

SEQ ID NO: 5352426 - DNA, 25 bp, Homo sapien
catcatgtgtcagggctccaagaag

SEQ ID NO: 5352427 - DNA, 25 bp, Homo sapien
tggattaccccatctatgacgtgct

SEQ ID NO: 5352428 - DNA, 25 bp, Homo sapien
tgtcatcatgtgtcagggctccaag

SEQ ID NO: 5352429 - DNA, 25 bp, Homo sapien
gcttcagatggtgggccacgccaac

SEQ ID NO: 5352430 - DNA, 25 bp, Homo sapien
gcgctgtgtcatcatgtgtcagggc

SEQ ID NO: 5352431 - DNA, 25 bp, Homo sapien
gtggattaccccatctatgacgtgc

SEQ ID NO: 5352432 - DNA, 25 bp, Homo sapien
tgacacatgatgacacagcgcccct

SEQ ID NO: 5352433 - DNA, 25 bp, Homo sapien
cttcttggagccctgacacatgatg

SEQ ID NO: 5352434 - DNA, 25 bp, Homo sapien
gttggcgtggcccaccatctgaagc

SEQ ID NO: 5352435 - DNA, 25 bp, Homo sapien
gcgcccctcatcgtcctgcaaaggg

SEQ ID NO: 5352436 - DNA, 25 bp, Homo sapien
gcacgtcatagatggggtaatccac

SEQ ID NO: 5352437 - DNA, 25 bp, Homo sapien
ttggagccctgacacatgatgacac

SEQ ID NO: 5352438 - DNA, 25 bp, Homo sapien
gatttgtccgtgtctccccgtatta

SEQ ID NO: 5352439 - DNA, 25 bp, Homo sapien
ggttcatggcacttgagcagcaaat

SEQ ID NO: 5352440 - DNA, 25 bp, Homo sapien
taaaatgttatacaggccagccagt

SEQ ID NO: 5352441 - DNA, 25 bp, Homo sapien
tcctgagcatggtctccgtgttgag

SEQ ID NO: 5352442 - DNA, 25 bp, Homo sapien
gattcataaacagagtcgtcccgtg

SEQ ID NO: 5352443 - DNA, 25 bp, Homo sapien
tgcctggcccaacgcttaataactt

SEQ ID NO: 5352444 - DNA, 25 bp, Homo sapien
gaatttgctgctcaagtgccatgaa

SEQ ID NO: 5352445 - DNA, 25 bp, Homo sapien
gagacacggacaaatcacgggacga

SEQ ID NO: 5352446 - DNA, 25 bp, Homo sapien
cacgggacgactctgtttatgaatc

SEQ ID NO: 5352447 - DNA, 25 bp, Homo sapien
cattttagtattcagtgtaagggcc

SEQ ID NO: 5352448 - DNA, 25 bp, Homo sapien
aagttattaagcgttgggccaggca

SEQ ID NO: 5352449 - DNA, 25 bp, Homo sapien
ctcaacacggagaccatgctcagga

SEQ ID NO: 5352450 - DNA, 25 bp, Homo sapien
gacgttacgtcattaatctcagaca

SEQ ID NO: 5352451 - DNA, 25 bp, Homo sapien
aaaagtgacttggtcgaggtcatac

SEQ ID NO: 5352452 - DNA, 25 bp, Homo sapien
tctcagacatcttgtagattaggaa

SEQ ID NO: 5352453 - DNA, 25 bp, Homo sapien
gtctcaatacctaggctcacatttg

SEQ ID NO: 5352454 - DNA, 25 bp, Homo sapien
ctgtgttagcacagacctccttcct

SEQ ID NO: 5352455 - DNA, 25 bp, Homo sapien
gaggtcatacacctatatagtgaca

SEQ ID NO: 5352456 - DNA, 25 bp, Homo sapien
tttcctaatctacaagatgtctgag

SEQ ID NO: 5352457 - DNA, 25 bp, Homo sapien
aggaaggaggtctgtgctaacacag

SEQ ID NO: 5352458 - DNA, 25 bp, Homo sapien
caaatgtgagcctaggtattgagac

SEQ ID NO: 5352459 - DNA, 25 bp, Homo sapien
tgtctgagattaatgacgtaacgtc

SEQ ID NO: 5352460 - DNA, 25 bp, Homo sapien
gtcactatataggtgtatgacctcg

SEQ ID NO: 5352461 - DNA, 25 bp, Homo sapien
ggtgtatgacctcgaccaagtcact

SEQ ID NO: 5352462 - DNA, 25 bp, Homo sapien
ggtaatcatcatggatacccagtac

SEQ ID NO: 5352463 - DNA, 25 bp, Homo sapien
cagtactacaatggcaagatccacg

SEQ ID NO: 5352464 - DNA, 25 bp, Homo sapien
tggtggcttctcggagtctctgctg

SEQ ID NO: 5352465 - DNA, 25 bp, Homo sapien
tgcccacctggtaatcatcatggat

SEQ ID NO: 5352466 - DNA, 25 bp, Homo sapien
ggatacccagtactacaatggcaag

SEQ ID NO: 5352467 - DNA, 25 bp, Homo sapien
tcatggatacccagtactacaatgg

SEQ ID NO: 5352468 - DNA, 25 bp, Homo sapien
tggatcttgccattgtagtactggg

SEQ ID NO: 5352469 - DNA, 25 bp, Homo sapien
tatccatgatgattaccaggtgggc

SEQ ID NO: 5352470 - DNA, 25 bp, Homo sapien
cagcagagactccgagaagccacca

SEQ ID NO: 5352471 - DNA, 25 bp, Homo sapien
ccattgtagtactgggtatccatga

SEQ ID NO: 5352472 - DNA, 25 bp, Homo sapien
gggcagccacgttcatgccccagca

SEQ ID NO: 5352473 - DNA, 25 bp, Homo sapien
tactgggtatccatgatgattacca

SEQ ID NO: 5352474 - DNA, 25 bp, Homo sapien
catagcaagggtatcaccaagtggt

SEQ ID NO: 5352475 - DNA, 25 bp, Homo sapien
ttctggtcagaggagcagtccatca

SEQ ID NO: 5352476 - DNA, 25 bp, Homo sapien
tcactagacagtaccaagggtgggt

SEQ ID NO: 5352477 - DNA, 25 bp, Homo sapien
gaaacatagcacagggtaagccacg

SEQ ID NO: 5352478 - DNA, 25 bp, Homo sapien
ttgatcctcccaagaacctcgtgag

SEQ ID NO: 5352479 - DNA, 25 bp, Homo sapien
gcagtgagcctacttcacccggaga

SEQ ID NO: 5352480 - DNA, 25 bp, Homo sapien
cacagggcaacaagagacagtggcc

SEQ ID NO: 5352481 - DNA, 25 bp, Homo sapien
tctccgggtgaagtaggctcactgc

SEQ ID NO: 5352482 - DNA, 25 bp, Homo sapien
tgatggactgctcctctgaccagaa

SEQ ID NO: 5352483 - DNA, 25 bp, Homo sapien
ggtatgctgtagagaaaacactgcc

SEQ ID NO: 5352484 - DNA, 25 bp, Homo sapien
gacagtggccagcaagagtgagctc

SEQ ID NO: 5352485 - DNA, 25 bp, Homo sapien
tatccacggagaatcagcggtctgg

SEQ ID NO: 5352486 - DNA, 25 bp, Homo sapien
tcagccccatggagcgacgcctggt

SEQ ID NO: 5352487 - DNA, 25 bp, Homo sapien
gctaaatggggtgggctacctgcat

SEQ ID NO: 5352488 - DNA, 25 bp, Homo sapien
gaagctaagtgacagcacgctcaag

SEQ ID NO: 5352489 - DNA, 25 bp, Homo sapien
cacgctcaaggaaacgctgctaaat

SEQ ID NO: 5352490 - DNA, 25 bp, Homo sapien
ctgattccgtacctggagaagctaa

SEQ ID NO: 5352491 - DNA, 25 bp, Homo sapien
gaaggatctgattccgtacctggag

SEQ ID NO: 5352492 - DNA, 25 bp, Homo sapien
tccttgagcgtgctgtcacttagct

SEQ ID NO: 5352493 - DNA, 25 bp, Homo sapien
atgcaggtagcccaccccatttagc

SEQ ID NO: 5352494 - DNA, 25 bp, Homo sapien
catttagcagcgtttccttgagcgt

SEQ ID NO: 5352495 - DNA, 25 bp, Homo sapien
ttagcttctccaggtacggaatcag

SEQ ID NO: 5352496 - DNA, 25 bp, Homo sapien
tctccaggtacggaatcagatcctt

SEQ ID NO: 5352497 - DNA, 25 bp, Homo sapien
accccatttagcagcgtttccttga

SEQ ID NO: 5352498 - DNA, 25 bp, Homo sapien
gggtctgcttgcgagacggcacaaa

SEQ ID NO: 5352499 - DNA, 25 bp, Homo sapien
aatgacaggcttcttgggcgagtgc

SEQ ID NO: 5352500 - DNA, 25 bp, Homo sapien
tctgccgttggatgtctgctgcaca

SEQ ID NO: 5352501 - DNA, 25 bp, Homo sapien
tgatagcatggtacacaggcttggc

SEQ ID NO: 5352502 - DNA, 25 bp, Homo sapien
caggcgggtttgtgtatggctgatg

SEQ ID NO: 5352503 - DNA, 25 bp, Homo sapien
cgggtttgtgtatggctgatgttga

SEQ ID NO: 5352504 - DNA, 25 bp, Homo sapien
tttgtgtatggctgatgttgaagcc

SEQ ID NO: 5352505 - DNA, 25 bp, Homo sapien
gagcaggcgggtttgtgtatggctg

SEQ ID NO: 5352506 - DNA, 25 bp, Homo sapien
gctgagtgccacaatgcgaatgggc

SEQ ID NO: 5352507 - DNA, 25 bp, Homo sapien
gccgctcaatctgggaggagatgta

SEQ ID NO: 5352508 - DNA, 25 bp, Homo sapien
cacatccttggcattggagagcgaa

SEQ ID NO: 5352509 - DNA, 25 bp, Homo sapien
gcgcattcgggagcagatcacttct

SEQ ID NO: 5352510 - DNA, 25 bp, Homo sapien
tcatctgtgctgcaaggtcacgcca

SEQ ID NO: 5352511 - DNA, 25 bp, Homo sapien
taacattgtccctttggaatagggc

SEQ ID NO: 5352512 - DNA, 25 bp, Homo sapien
aaggccacttggtcagtcccagtcc

SEQ ID NO: 5352513 - DNA, 25 bp, Homo sapien
aacattaggtccaatgccaaggcca

SEQ ID NO: 5352514 - DNA, 25 bp, Homo sapien
tctgtgctggtctcgcctgtcagga

SEQ ID NO: 5352515 - DNA, 25 bp, Homo sapien
accttcttgttgagcctgtcctgga

SEQ ID NO: 5352516 - DNA, 25 bp, Homo sapien
ttgcgctgcttccatcgccgggaaa

SEQ ID NO: 5352517 - DNA, 25 bp, Homo sapien
gggaaagtatgtcccacttctcagg

SEQ ID NO: 5352518 - DNA, 25 bp, Homo sapien
ggaaattcacatgacacagcgccac

SEQ ID NO: 5352519 - DNA, 25 bp, Homo sapien
tacacaaactgaggaaatgaccctg

SEQ ID NO: 5352520 - DNA, 25 bp, Homo sapien
tagcagcctctatgcgatgcgatgg

SEQ ID NO: 5352521 - DNA, 25 bp, Homo sapien
caaacagacctgttgacctgcagat

SEQ ID NO: 5352522 - DNA, 25 bp, Homo sapien
cacgttgtcgtcactgttgtataca

SEQ ID NO: 5352523 - DNA, 25 bp, Homo sapien
ggcaaactctgcacaaatagtcttc

SEQ ID NO: 5352524 - DNA, 25 bp, Homo sapien
cagcagcattcgcaggatggcaaac

SEQ ID NO: 5352525 - DNA, 25 bp, Homo sapien
acaaatagtcttcccgctgcccgtg

SEQ ID NO: 5352526 - DNA, 25 bp, Homo sapien
ctcctgggcccgagaaatgaccatg

SEQ ID NO: 5352527 - DNA, 25 bp, Homo sapien
aaaacaccggtgatgtactcagcca

SEQ ID NO: 5352528 - DNA, 25 bp, Homo sapien
tgcagacagaggagctaaggcatcc

SEQ ID NO: 5352529 - DNA, 25 bp, Homo sapien
cttctcagggactaggatgcgggac

SEQ ID NO: 5352530 - DNA, 25 bp, Homo sapien
gctgcaggtccaaaagttcggttgg

SEQ ID NO: 5352531 - DNA, 25 bp, Homo sapien
ggggggtacttctccggcaagatca

SEQ ID NO: 5352532 - DNA, 25 bp, Homo sapien
tgtttctcagagcagacacgggcaa

SEQ ID NO: 5352533 - DNA, 25 bp, Homo sapien
gatcaggtgccggaaggagacaggc

SEQ ID NO: 5352534 - DNA, 25 bp, Homo sapien
ggtcagacaccactcggatgaagta

SEQ ID NO: 5352535 - DNA, 25 bp, Homo sapien
aatgtaatgaggtgctcgtcctggg

SEQ ID NO: 5352536 - DNA, 25 bp, Homo sapien
tacttggccttgaggagaaaatact

SEQ ID NO: 5352537 - DNA, 25 bp, Homo sapien
ggcagcggttcaaagacaggcacga

SEQ ID NO: 5352538 - DNA, 25 bp, Homo sapien
caccttcagggtggagcgtgtgata

SEQ ID NO: 5352539 - DNA, 25 bp, Homo sapien
aagtctggcgtgatggtcagctcca

SEQ ID NO: 5352540 - DNA, 25 bp, Homo sapien
ggtgcactgacaactccaacttggg

SEQ ID NO: 5352541 - DNA, 25 bp, Homo sapien
catctttggcatgcggataagctcc

SEQ ID NO: 5352542 - DNA, 25 bp, Homo sapien
ccggaactggcgcagaggacacatg

SEQ ID NO: 5352543 - DNA, 25 bp, Homo sapien
tcgtacagacgctcaaaggggaaat

SEQ ID NO: 5352544 - DNA, 25 bp, Homo sapien
gcgcagaggacacatggactgccac

SEQ ID NO: 5352545 - DNA, 25 bp, Homo sapien
tctcattatgattcaggtcgtacag

SEQ ID NO: 5352546 - DNA, 25 bp, Homo sapien
ttgtcgatcatcttgcagaggttca

SEQ ID NO: 5352547 - DNA, 25 bp, Homo sapien
tcttgtctgtaagctgtgcccaacc

SEQ ID NO: 5352548 - DNA, 25 bp, Homo sapien
tcaaatatcgctcgcatcaaccggc

SEQ ID NO: 5352549 - DNA, 25 bp, Homo sapien
caacctcggttcaggacaatttcaa

SEQ ID NO: 5352550 - DNA, 25 bp, Homo sapien
ctgtgtgacatacaccatgtcagcc

SEQ ID NO: 5352551 - DNA, 25 bp, Homo sapien
accatgtcagccatcagtgcaaagc

SEQ ID NO: 5352552 - DNA, 25 bp, Homo sapien
tgaaggcttgcagaagaacgttgat

SEQ ID NO: 5352553 - DNA, 25 bp, Homo sapien
gatgaaggcttgcagaagaacgttg

SEQ ID NO: 5352554 - DNA, 25 bp, Homo sapien
ttcctcaatgctctcctttacaggg

SEQ ID NO: 5352555 - DNA, 25 bp, Homo sapien
cttagcactgggttcctcaatgctc

SEQ ID NO: 5352556 - DNA, 25 bp, Homo sapien
caatgctctcctttacagggatagg

SEQ ID NO: 5352557 - DNA, 25 bp, Homo sapien
cctcaatgctctcctttacagggat

SEQ ID NO: 5352558 - DNA, 25 bp, Homo sapien
tgatgtagtagtggctggctatacg

SEQ ID NO: 5352559 - DNA, 25 bp, Homo sapien
tggctggctatacggcccagttctg

SEQ ID NO: 5352560 - DNA, 25 bp, Homo sapien
cagctggttgtaagtctgcactgta

SEQ ID NO: 5352561 - DNA, 25 bp, Homo sapien
tgtgatgttcttgaactcagaggac

SEQ ID NO: 5352562 - DNA, 25 bp, Homo sapien
gaaatgatgtctgcacggacaagac

SEQ ID NO: 5352563 - DNA, 25 bp, Homo sapien
aagtcacagcagtacaagtgccagg

SEQ ID NO: 5352564 - DNA, 25 bp, Homo sapien
cacctcaagttatgggaaaagctac

SEQ ID NO: 5352565 - DNA, 25 bp, Homo sapien
caacaggtgattagataggcagtac

SEQ ID NO: 5352566 - DNA, 25 bp, Homo sapien
gaagttgcccgtcttcttgtcgtac

SEQ ID NO: 5352567 - DNA, 25 bp, Homo sapien
gggatctcccttgaggtcatcatga

SEQ ID NO: 5352568 - DNA, 25 bp, Homo sapien
tcggatatagaggtaggcatagccc

SEQ ID NO: 5352569 - DNA, 25 bp, Homo sapien
gaaccagatctagtcggcgctggtc

SEQ ID NO: 5352570 - DNA, 25 bp, Homo sapien
acaagacacagctcatggttcttag

SEQ ID NO: 5352571 - DNA, 25 bp, Homo sapien
tacaagacacagctcatggttctta

SEQ ID NO: 5352572 - DNA, 25 bp, Homo sapien
caagacacagctcatggttcttagc

SEQ ID NO: 5352573 - DNA, 25 bp, Homo sapien
ctacaagacacagctcatggttctt

SEQ ID NO: 5352574 - DNA, 25 bp, Homo sapien
tggacatttcctagcacgatttctg

SEQ ID NO: 5352575 - DNA, 25 bp, Homo sapien
ggtagtactgtagctccccatgaga

SEQ ID NO: 5352576 - DNA, 25 bp, Homo sapien
ccccatgagatgtgatgagtatgcc

SEQ ID NO: 5352577 - DNA, 25 bp, Homo sapien
ggaagctttgaaaccatctggcttt

SEQ ID NO: 5352578 - DNA, 25 bp, Homo sapien
tgtatgtgcagggagattcacaccc

SEQ ID NO: 5352579 - DNA, 25 bp, Homo sapien
cctgggtgcctttgatgatgactgt

SEQ ID NO: 5352580 - DNA, 25 bp, Homo sapien
cagttctgtccaacgccccttctct

SEQ ID NO: 5352581 - DNA, 25 bp, Homo sapien
tctggactgtacacctgggtgcctt

SEQ ID NO: 5352582 - DNA, 25 bp, Homo sapien
aaaaagatcctccacgagtgttcgg

SEQ ID NO: 5352583 - DNA, 25 bp, Homo sapien
gagtgttcggtcaaccctggtcatg

SEQ ID NO: 5352584 - DNA, 25 bp, Homo sapien
ggcagaagatccttcagctctaggt

SEQ ID NO: 5352585 - DNA, 25 bp, Homo sapien
cctgcgtgatgaatagcaaagccat

SEQ ID NO: 5352586 - DNA, 25 bp, Homo sapien
ccttccgggagtggacaaacaccag

SEQ ID NO: 5352587 - DNA, 25 bp, Homo sapien
agcttctgttcgcaggacttctgtg

SEQ ID NO: 5352588 - DNA, 25 bp, Homo sapien
gctcagcttctgttcgcaggacttc

SEQ ID NO: 5352589 - DNA, 25 bp, Homo sapien
tccttccgggagtggacaaacacca

SEQ ID NO: 5352590 - DNA, 25 bp, Homo sapien
catgatctggaaacgcttgatagct

SEQ ID NO: 5352591 - DNA, 25 bp, Homo sapien
tttttctctgtgatacccacatatg

SEQ ID NO: 5352592 - DNA, 25 bp, Homo sapien
tacccacatatgtctgttccagagg

SEQ ID NO: 5352593 - DNA, 25 bp, Homo sapien
catagacgatttcattcatgatctg

SEQ ID NO: 5352594 - DNA, 25 bp, Homo sapien
tggcagaactttgcccagtctttcc

SEQ ID NO: 5352595 - DNA, 25 bp, Homo sapien
cagaactttgcccagtctttcctga

SEQ ID NO: 5352596 - DNA, 25 bp, Homo sapien
ttggcagaactttgcccagtctttc

SEQ ID NO: 5352597 - DNA, 25 bp, Homo sapien
aactttgcccagtctttcctgatac

SEQ ID NO: 5352598 - DNA, 25 bp, Homo sapien
cccttggcagggtcaacacgtagaa

SEQ ID NO: 5352599 - DNA, 25 bp, Homo sapien
ctcaatgtttcggatggccctggcc

SEQ ID NO: 5352600 - DNA, 25 bp, Homo sapien
ctgttgtcaaagtaaaagagaccct

SEQ ID NO: 5352601 - DNA, 25 bp, Homo sapien
gagaccaatgagtcggacatcctct

SEQ ID NO: 5352602 - DNA, 25 bp, Homo sapien
tataatgttttggatggccctggcc

SEQ ID NO: 5352603 - DNA, 25 bp, Homo sapien
ctgtcatcgtggagaagatggatct

SEQ ID NO: 5352604 - DNA, 25 bp, Homo sapien
cctctgtcatcgtggagaagatgga

SEQ ID NO: 5352605 - DNA, 25 bp, Homo sapien
acctctgtcatcgtggagaagatgg

SEQ ID NO: 5352606 - DNA, 25 bp, Homo sapien
tctgtcatcgtggagaagatggatc

SEQ ID NO: 5352607 - DNA, 25 bp, Homo sapien
caccagctgggtgtaggtgcgctca

SEQ ID NO: 5352608 - DNA, 25 bp, Homo sapien
tgcagacgatgatctgagtggcact

SEQ ID NO: 5352609 - DNA, 25 bp, Homo sapien
ggtggtccccagtcagttcagcaac

SEQ ID NO: 5352610 - DNA, 25 bp, Homo sapien
cccttgcgggtgatgatgtcccact

SEQ ID NO: 5352611 - DNA, 25 bp, Homo sapien
gaagtcatccacattgatggtgccg

SEQ ID NO: 5352612 - DNA, 25 bp, Homo sapien
gtttatgtgtttcccaatctctcgg

SEQ ID NO: 5352613 - DNA, 25 bp, Homo sapien
tctcctgcaccaaggagcgcatggg

SEQ ID NO: 5352614 - DNA, 25 bp, Homo sapien
gcatgcacatcagggccacgttggt

SEQ ID NO: 5352615 - DNA, 25 bp, Homo sapien
ggcagcacggtagagcttactctgg

SEQ ID NO: 5352616 - DNA, 25 bp, Homo sapien
ctggatccgattcagtgttttgaag

SEQ ID NO: 5352617 - DNA, 25 bp, Homo sapien
cagcagcagattctcatccgtctca

SEQ ID NO: 5352618 - DNA, 25 bp, Homo sapien
cctgggcatactttggcagcttttc

SEQ ID NO: 5352619 - DNA, 25 bp, Homo sapien
gcaggcacatgcacctcttcatagc

SEQ ID NO: 5352620 - DNA, 25 bp, Homo sapien
cgacggaaggatccatcaggaagct

SEQ ID NO: 5352621 - DNA, 25 bp, Homo sapien
tagcccttacgctggcgacggaagg

SEQ ID NO: 5352622 - DNA, 25 bp, Homo sapien
gatccatcaggaagctgacagcgtt

SEQ ID NO: 5352623 - DNA, 25 bp, Homo sapien
gatctgtgtccattcgagactgacg

SEQ ID NO: 5352624 - DNA, 25 bp, Homo sapien
ccctggtcgagatccatggtttcca

SEQ ID NO: 5352625 - DNA, 25 bp, Homo sapien
cattcgagactgacgcactcgctct

SEQ ID NO: 5352626 - DNA, 25 bp, Homo sapien
tctccaccctggtcgagatccatgg

SEQ ID NO: 5352627 - DNA, 25 bp, Homo sapien
ggaacttggatagctctgggtcagc

SEQ ID NO: 5352628 - DNA, 25 bp, Homo sapien
ttcatgaagctggtagaggaacttg

SEQ ID NO: 5352629 - DNA, 25 bp, Homo sapien
tgtgcactggccagcaaggtacagt

SEQ ID NO: 5352630 - DNA, 25 bp, Homo sapien
tcggatcagatcctccttctcggtt

SEQ ID NO: 5352631 - DNA, 25 bp, Homo sapien
caaaggtgttgaaaccaagcagcag

SEQ ID NO: 5352632 - DNA, 25 bp, Homo sapien
tttcacattcccgatcatcactggc

SEQ ID NO: 5352633 - DNA, 25 bp, Homo sapien
tgattttcacattcccgatcatcac

SEQ ID NO: 5352634 - DNA, 25 bp, Homo sapien
ctgtgctgccgcaacactttaatga

SEQ ID NO: 5352635 - DNA, 25 bp, Homo sapien
caccattaaggccaaagccatctgc

SEQ ID NO: 5352636 - DNA, 25 bp, Homo sapien
ctgcagagagcaggtaacaccacca

SEQ ID NO: 5352637 - DNA, 25 bp, Homo sapien
gagcaggtaacaccaccattaaggc

SEQ ID NO: 5352638 - DNA, 25 bp, Homo sapien
agccatctgccacttcatacgctgt

SEQ ID NO: 5352639 - DNA, 25 bp, Homo sapien
tatcccgagggtgcaaatccttctt

SEQ ID NO: 5352640 - DNA, 25 bp, Homo sapien
ttggaactcatcagttcacctgagg

SEQ ID NO: 5352641 - DNA, 25 bp, Homo sapien
tctgccttcttctgcgacacgatgg

SEQ ID NO: 5352642 - DNA, 25 bp, Homo sapien
tcatagaaacgactgagctgccgct

SEQ ID NO: 5352643 - DNA, 25 bp, Homo sapien
cttcttgtgaggactttccagagga

SEQ ID NO: 5352644 - DNA, 25 bp, Homo sapien
gtctctgccagcctcgatcactttg

SEQ ID NO: 5352645 - DNA, 25 bp, Homo sapien
accagactaagatttcatcaacata

SEQ ID NO: 5352646 - DNA, 25 bp, Homo sapien
tacttgacaatccatagcccacctt

SEQ ID NO: 5352647 - DNA, 25 bp, Homo sapien
ttagccgagagggtgcagcgcacga

SEQ ID NO: 5352648 - DNA, 25 bp, Homo sapien
agggtgcagcgcacgacagcctcgt

SEQ ID NO: 5352649 - DNA, 25 bp, Homo sapien
tcatcagatgcctcttctcgaacct

SEQ ID NO: 5352650 - DNA, 25 bp, Homo sapien
tcgaacctccccgtatacgtcttca

SEQ ID NO: 5352651 - DNA, 25 bp, Homo sapien
gaccccaactcaaccatgatctgga

SEQ ID NO: 5352652 - DNA, 25 bp, Homo sapien
ggaaatgaccccaactcaaccatga

SEQ ID NO: 5352653 - DNA, 25 bp, Homo sapien
atgaccccaactcaaccatgatctg

SEQ ID NO: 5352654 - DNA, 25 bp, Homo sapien
aaccatgatctggagctgatcctgc

SEQ ID NO: 5352655 - DNA, 25 bp, Homo sapien
aaaacaagaatggactgggtatgtt

SEQ ID NO: 5352656 - DNA, 25 bp, Homo sapien
cgtcaaaaacaagaatggactgggt

SEQ ID NO: 5352657 - DNA, 25 bp, Homo sapien
ttaatcaacgtcaaaaacaagaatg

SEQ ID NO: 5352658 - DNA, 25 bp, Homo sapien
tcaacgtcaaaaacaagaatggact

SEQ ID NO: 5352659 - DNA, 25 bp, Homo sapien
acaccgtatgtctcatcaatgttgt

SEQ ID NO: 5352660 - DNA, 25 bp, Homo sapien
ttcacaccgtatgtctcatcaatgt

SEQ ID NO: 5352661 - DNA, 25 bp, Homo sapien
cattcacaccgtatgtctcatcaat

SEQ ID NO: 5352662 - DNA, 25 bp, Homo sapien
cacattcacaccgtatgtctcatca

SEQ ID NO: 5352663 - DNA, 25 bp, Homo sapien
ccatagtctgtgatctttttgccca

SEQ ID NO: 5352664 - DNA, 25 bp, Homo sapien
tttgcccaggttcactagcacatgg

SEQ ID NO: 5352665 - DNA, 25 bp, Homo sapien
tatctggtatcatctgtttgaccca

SEQ ID NO: 5352666 - DNA, 25 bp, Homo sapien
tgtcccgcagcttttcattctttag

SEQ ID NO: 5352667 - DNA, 25 bp, Homo sapien
cctggatgaagctgagtagcacctc

SEQ ID NO: 5352668 - DNA, 25 bp, Homo sapien
gatgtcatgccggtcctcatcacgc

SEQ ID NO: 5352669 - DNA, 25 bp, Homo sapien
gtagcacctcataggtctcccgagt

SEQ ID NO: 5352670 - DNA, 25 bp, Homo sapien
tcaatgccctccgacagcagagtat

SEQ ID NO: 5352671 - DNA, 25 bp, Homo sapien
aatgagagaacggtcagcttggagc

SEQ ID NO: 5352672 - DNA, 25 bp, Homo sapien
cctgcatctgcggtttggtccgttg

SEQ ID NO: 5352673 - DNA, 25 bp, Homo sapien
tttggtccgttgagccttgtctccc

SEQ ID NO: 5352674 - DNA, 25 bp, Homo sapien
tcatcccggcgggtccggtcaatga

SEQ ID NO: 5352675 - DNA, 25 bp, Homo sapien
gactacgggcggttacatccgccat

SEQ ID NO: 5352676 - DNA, 25 bp, Homo sapien
tattgcagactacgggcggttacat

SEQ ID NO: 5352677 - DNA, 25 bp, Homo sapien
tgtactcgtattgcagactacgggc

SEQ ID NO: 5352678 - DNA, 25 bp, Homo sapien
cgccttgtactcgtattgcagacta

SEQ ID NO: 5352679 - DNA, 25 bp, Homo sapien
gcaagctgcaaacggccgcagatct

SEQ ID NO: 5352680 - DNA, 25 bp, Homo sapien
tcggaggcttcagaccaccacgcct

SEQ ID NO: 5352681 - DNA, 25 bp, Homo sapien
cggaacgacgcaggaaagacgcact

SEQ ID NO: 5352682 - DNA, 25 bp, Homo sapien
cgccgcgccggaacgacgcaggaaa

SEQ ID NO: 5352683 - DNA, 25 bp, Homo sapien
tccactctgtttctgtagaagtagc

SEQ ID NO: 5352684 - DNA, 25 bp, Homo sapien
gaagtagcattcatgttcacagatg

SEQ ID NO: 5352685 - DNA, 25 bp, Homo sapien
ctcaaaggtatttcggagattccac

SEQ ID NO: 5352686 - DNA, 25 bp, Homo sapien
cacccacctgacacgaaagggtctc

SEQ ID NO: 5352687 - DNA, 25 bp, Homo sapien
gtctttgcccttaaggatcccagtg

SEQ ID NO: 5352688 - DNA, 25 bp, Homo sapien
ccagtgtgatgctgtaaggacccag

SEQ ID NO: 5352689 - DNA, 25 bp, Homo sapien
gtgactaatccgtgagccaggtgct

SEQ ID NO: 5352690 - DNA, 25 bp, Homo sapien
gccaccagagcaggataagtttttg

SEQ ID NO: 5352691 - DNA, 25 bp, Homo sapien
tccagatcggtcgaaggcaggtctt

SEQ ID NO: 5352692 - DNA, 25 bp, Homo sapien
tccacgcggttaggaagcatcgctt

SEQ ID NO: 5352693 - DNA, 25 bp, Homo sapien
tctagggaccggtagctcagaggaa

SEQ ID NO: 5352694 - DNA, 25 bp, Homo sapien
gatttacaaacaagacgagcgctcg

SEQ ID NO: 5352695 - DNA, 25 bp, Homo sapien
gcaggcgcgtgcacaggctcgcatt

SEQ ID NO: 5352696 - DNA, 25 bp, Homo sapien
agcgccagcgggaacagcgcatcgc

SEQ ID NO: 5352697 - DNA, 25 bp, Homo sapien
tcataatgcggtcactagagcctcg

SEQ ID NO: 5352698 - DNA, 25 bp, Homo sapien
catcgcggacgctgcagggagtgtg

SEQ ID NO: 5352699 - DNA, 25 bp, Homo sapien
tggaggcggcggaaaaggcgcgtcc

SEQ ID NO: 5352700 - DNA, 25 bp, Homo sapien
ggccccgcggctgctcttggaggcg

SEQ ID NO: 5352701 - DNA, 25 bp, Homo sapien
gtgcgcccggtccttgccaccccaa

SEQ ID NO: 5352702 - DNA, 25 bp, Homo sapien
caaactccggcagcgaacaacgcgt

SEQ ID NO: 5352703 - DNA, 25 bp, Homo sapien
agcaagactccgtcacacacacaca

SEQ ID NO: 5352704 - DNA, 25 bp, Homo sapien
cacacaaaataataatagtaataat

SEQ ID NO: 5352705 - DNA, 25 bp, Homo sapien
taatagtaataatatatagtttcaa

SEQ ID NO: 5352706 - DNA, 25 bp, Homo sapien
acacacacaaaataataatagtaat

SEQ ID NO: 5352707 - DNA, 25 bp, Homo sapien
cagcggagagtgtgtggccacggcc

SEQ ID NO: 5352708 - DNA, 25 bp, Homo sapien
aggcacggcggtgccccatttgcca

SEQ ID NO: 5352709 - DNA, 25 bp, Homo sapien
ttacacccgaatcctagtaagtctg

SEQ ID NO: 5352710 - DNA, 25 bp, Homo sapien
gaatcctagtaagtctgttctccac

SEQ ID NO: 5352711 - DNA, 25 bp, Homo sapien
gaggagcttgtactgggtgggcggg

SEQ ID NO: 5352712 - DNA, 25 bp, Homo sapien
gcgctcagccagacgttcagacgct

SEQ ID NO: 5352713 - DNA, 25 bp, Homo sapien
caagcatggtctataacccaggaaa

SEQ ID NO: 5352714 - DNA, 25 bp, Homo sapien
tcggtgcggacagagacccggtgtg

SEQ ID NO: 5352715 - DNA, 25 bp, Homo sapien
gggtatccactagccccttaggagc

SEQ ID NO: 5352716 - DNA, 25 bp, Homo sapien
agctggcggcactgtgcctctcttg

SEQ ID NO: 5352717 - DNA, 25 bp, Homo sapien
agagagggcaccgtagcaagcagct

SEQ ID NO: 5352718 - DNA, 25 bp, Homo sapien
ttctgaactaagaagtgaagctagc

SEQ ID NO: 5352719 - DNA, 25 bp, Homo sapien
tctggctataaaagggagcctctgg

SEQ ID NO: 5352720 - DNA, 25 bp, Homo sapien
tttctggctataaaagggagcctct

SEQ ID NO: 5352721 - DNA, 25 bp, Homo sapien
ttctggctataaaagggagcctctg

SEQ ID NO: 5352722 - DNA, 25 bp, Homo sapien
tggctataaaagggagcctctggga

SEQ ID NO: 5352723 - DNA, 25 bp, Homo sapien
cagattgatttttagtgaggctaca

SEQ ID NO: 5352724 - DNA, 25 bp, Homo sapien
cctgcattctagagtgtttccttgt

SEQ ID NO: 5352725 - DNA, 25 bp, Homo sapien
tcacattgtgtcacatgaagagatg

SEQ ID NO: 5352726 - DNA, 25 bp, Homo sapien
tctgtttgccaagatatggaggagc

SEQ ID NO: 5352727 - DNA, 25 bp, Homo sapien
ttggtatttgcagaacatttgctgt

SEQ ID NO: 5352728 - DNA, 25 bp, Homo sapien
tctagaccagttgagagcacttctt

SEQ ID NO: 5352729 - DNA, 25 bp, Homo sapien
tatgagccgatctcttttggacaca

SEQ ID NO: 5352730 - DNA, 25 bp, Homo sapien
tgctgtcatagaggattcaaacatg

SEQ ID NO: 5352731 - DNA, 25 bp, Homo sapien
aaggagaatcctgaagtgccagctg

SEQ ID NO: 5352732 - DNA, 25 bp, Homo sapien
ggcagactcctgtgctaggccagcc

SEQ ID NO: 5352733 - DNA, 25 bp, Homo sapien
gaagctccgtgctcaactgattaaa

SEQ ID NO: 5352734 - DNA, 25 bp, Homo sapien
ctccatcatagtctgggtgccagcg

SEQ ID NO: 5352735 - DNA, 25 bp, Homo sapien
tgtagccaactaccaacgtgcctgt

SEQ ID NO: 5352736 - DNA, 25 bp, Homo sapien
gattaaactttactgccctatggtg

SEQ ID NO: 5352737 - DNA, 25 bp, Homo sapien
acagcgaatcttccccgcagagctg

SEQ ID NO: 5352738 - DNA, 25 bp, Homo sapien
gagctgggagtctgcgtgggcctgc

SEQ ID NO: 5352739 - DNA, 25 bp, Homo sapien
tgggagtctgcgtgggcctgcagct

SEQ ID NO: 5352740 - DNA, 25 bp, Homo sapien
taaaaaaactcacagcgaatcttcc

SEQ ID NO: 5352741 - DNA, 25 bp, Homo sapien
aaggggcatcttggagcctctctca

SEQ ID NO: 5352742 - DNA, 25 bp, Homo sapien
ttactggaaatttctgccaaggggc

SEQ ID NO: 5352743 - DNA, 25 bp, Homo sapien
aatttctgccaaggggcatcttgga

SEQ ID NO: 5352744 - DNA, 25 bp, Homo sapien
ccaaggggcatcttggagcctctct

SEQ ID NO: 5352745 - DNA, 25 bp, Homo sapien
caagtcaacagcaagcacgaagcag

SEQ ID NO: 5352746 - DNA, 25 bp, Homo sapien
cggcagagggcgcagatttagcttc

SEQ ID NO: 5352747 - DNA, 25 bp, Homo sapien
tgaagcacgcagtacaaggttccaa

SEQ ID NO: 5352748 - DNA, 25 bp, Homo sapien
gatttagcttctgtcctgcgaatga

SEQ ID NO: 5352749 - DNA, 25 bp, Homo sapien
ggtggtgcccttgccgctgcatttg

SEQ ID NO: 5352750 - DNA, 25 bp, Homo sapien
caaggtggtgcccttgccgctgcat

SEQ ID NO: 5352751 - DNA, 25 bp, Homo sapien
tgcccttgccgctgcatttgctctt

SEQ ID NO: 5352752 - DNA, 25 bp, Homo sapien
gtgcccttgccgctgcatttgctct

SEQ ID NO: 5352753 - DNA, 25 bp, Homo sapien
gtttaccaaaacctgaagcagtgcc

SEQ ID NO: 5352754 - DNA, 25 bp, Homo sapien
ttagtacaggttgccaaattgctgt

SEQ ID NO: 5352755 - DNA, 25 bp, Homo sapien
caggttgccaaattgctgtttacca

SEQ ID NO: 5352756 - DNA, 25 bp, Homo sapien
tgtttaccaaaacctgaagcagtgc

SEQ ID NO: 5352757 - DNA, 25 bp, Homo sapien
gtccgcggtactaggagcctgcagg

SEQ ID NO: 5352758 - DNA, 25 bp, Homo sapien
gcagggtccgcggtactaggagcct

SEQ ID NO: 5352759 - DNA, 25 bp, Homo sapien
cgaagctgcagggtccgcggtacta

SEQ ID NO: 5352760 - DNA, 25 bp, Homo sapien
cccgaagctgcagggtccgcggtac

SEQ ID NO: 5352761 - DNA, 25 bp, Homo sapien
gcagggttccagccccgcgacccac

SEQ ID NO: 5352762 - DNA, 25 bp, Homo sapien
tgcgcagggttccagccccgcgacc

SEQ ID NO: 5352763 - DNA, 25 bp, Homo sapien
gcgcagggttccagccccgcgaccc

SEQ ID NO: 5352764 - DNA, 25 bp, Homo sapien
ctgcgcagggttccagccccgcgac

SEQ ID NO: 5352765 - DNA, 25 bp, Homo sapien
gtgcgggcttctcggtccctggcaa

SEQ ID NO: 5352766 - DNA, 25 bp, Homo sapien
tcttccaggactggtagagggcggc

SEQ ID NO: 5352767 - DNA, 25 bp, Homo sapien
ctggcaacccgctggtcactgtctt

SEQ ID NO: 5352768 - DNA, 25 bp, Homo sapien
gcagagggcggtaccaaggagggtc

SEQ ID NO: 5352769 - DNA, 25 bp, Homo sapien
agccgcggtgccagcggtgccagcc

SEQ ID NO: 5352770 - DNA, 25 bp, Homo sapien
gagccgcggtgccagcggtgccagc

SEQ ID NO: 5352771 - DNA, 25 bp, Homo sapien
agagccgcggtgccagcggtgccag

SEQ ID NO: 5352772 - DNA, 25 bp, Homo sapien
cagagccgcggtgccagcggtgcca

SEQ ID NO: 5352773 - DNA, 25 bp, Homo sapien
tccagccgcggacaccccaggggcc

SEQ ID NO: 5352774 - DNA, 25 bp, Homo sapien
agtccggccaggaatccgaaatcgg

SEQ ID NO: 5352775 - DNA, 25 bp, Homo sapien
ccaggggaaagcgcttccctccagc

SEQ ID NO: 5352776 - DNA, 25 bp, Homo sapien
ccaggaatccgaaatcgggttccag

SEQ ID NO: 5352777 - DNA, 25 bp, Homo sapien
tgttcttgttccagcacggcactct

SEQ ID NO: 5352778 - DNA, 25 bp, Homo sapien
tcgtgaatatagacgtctgcctcca

SEQ ID NO: 5352779 - DNA, 25 bp, Homo sapien
tggaatgagctaccacaaacgtggt

SEQ ID NO: 5352780 - DNA, 25 bp, Homo sapien
gagtgccctagtgctgctggaatga

SEQ ID NO: 5352781 - DNA, 25 bp, Homo sapien
gcatgtgccgcgcctgctgtctgga

SEQ ID NO: 5352782 - DNA, 25 bp, Homo sapien
tgtgccgcgcctgctgtctggaaga

SEQ ID NO: 5352783 - DNA, 25 bp, Homo sapien
atgtgccgcgcctgctgtctggaag

SEQ ID NO: 5352784 - DNA, 25 bp, Homo sapien
gtgccgcgcctgctgtctggaagac

SEQ ID NO: 5352785 - DNA, 25 bp, Homo sapien
tccctgtaggaccagctcaaaaggc

SEQ ID NO: 5352786 - DNA, 25 bp, Homo sapien
actctccctgtaggaccagctcaaa

SEQ ID NO: 5352787 - DNA, 25 bp, Homo sapien
tctccctgtaggaccagctcaaaag

SEQ ID NO: 5352788 - DNA, 25 bp, Homo sapien
cctgtaggaccagctcaaaaggcat

SEQ ID NO: 5352789 - DNA, 25 bp, Homo sapien
tcaggaaacacaaactttattttga

SEQ ID NO: 5352790 - DNA, 25 bp, Homo sapien
acacaaactttattttgatatctca

SEQ ID NO: 5352791 - DNA, 25 bp, Homo sapien
aaacacaaactttattttgatatct

SEQ ID NO: 5352792 - DNA, 25 bp, Homo sapien
acaaactttattttgatatctcaga

SEQ ID NO: 5352793 - DNA, 25 bp, Homo sapien
caggttcttcaatacccaggaggta

SEQ ID NO: 5352794 - DNA, 25 bp, Homo sapien
ccgggctgccactcatactgggaag

SEQ ID NO: 5352795 - DNA, 25 bp, Homo sapien
ggaggcaacccagcttccatgtgga

SEQ ID NO: 5352796 - DNA, 25 bp, Homo sapien
gcagggcgggtaactacagatccac

SEQ ID NO: 5352797 - DNA, 25 bp, Homo sapien
acacagggcacttggccgtatcgct

SEQ ID NO: 5352798 - DNA, 25 bp, Homo sapien
ctgaagacccgccaggcacagtatc

SEQ ID NO: 5352799 - DNA, 25 bp, Homo sapien
agaagtatgtgtggccgcagggcac

SEQ ID NO: 5352800 - DNA, 25 bp, Homo sapien
cgtgatagaagcagatggcacactc

SEQ ID NO: 5352801 - DNA, 25 bp, Homo sapien
aaatgctctcgaaggcagagatgcc

SEQ ID NO: 5352802 - DNA, 25 bp, Homo sapien
tcgaaggcagagatgccaggttgct

SEQ ID NO: 5352803 - DNA, 25 bp, Homo sapien
gatgccaggttgcttttaggtttcc

SEQ ID NO: 5352804 - DNA, 25 bp, Homo sapien
ttgcttttaggtttccagtaggcag

SEQ ID NO: 5352805 - DNA, 25 bp, Homo sapien
cccatggcatgggtgttgggagccg

SEQ ID NO: 5352806 - DNA, 25 bp, Homo sapien
gaggtcccatggcatgggtgttggg

SEQ ID NO: 5352807 - DNA, 25 bp, Homo sapien
catggcatgggtgttgggagccggc

SEQ ID NO: 5352808 - DNA, 25 bp, Homo sapien
gtcccatggcatgggtgttgggagc

SEQ ID NO: 5352809 - DNA, 25 bp, Homo sapien
ttgccacctttgtatctagtgaact

SEQ ID NO: 5352810 - DNA, 25 bp, Homo sapien
gccacctttgtatctagtgaactcc

SEQ ID NO: 5352811 - DNA, 25 bp, Homo sapien
aactcctatttaggctgcaaagcca

SEQ ID NO: 5352812 - DNA, 25 bp, Homo sapien
cctttgtatctagtgaactcctatt

SEQ ID NO: 5352813 - DNA, 25 bp, Homo sapien
caggggctgatggaataactgaatg

SEQ ID NO: 5352814 - DNA, 25 bp, Homo sapien
ctctggatcggtgtggggtgccact

SEQ ID NO: 5352815 - DNA, 25 bp, Homo sapien
cttcctgtggctctggatcggtgtg

SEQ ID NO: 5352816 - DNA, 25 bp, Homo sapien
taactgaatgtgaacgttcttcctg

SEQ ID NO: 5352817 - DNA, 25 bp, Homo sapien
gctcgatggccttagtggtcccata

SEQ ID NO: 5352818 - DNA, 25 bp, Homo sapien
tggccttagtggtcccatacacgtc

SEQ ID NO: 5352819 - DNA, 25 bp, Homo sapien
gatggccttagtggtcccatacacg

SEQ ID NO: 5352820 - DNA, 25 bp, Homo sapien
agcagctcgatggccttagtggtcc

SEQ ID NO: 5352821 - DNA, 25 bp, Homo sapien
tgtgcgcgatgcagccacgcgtgtc

SEQ ID NO: 5352822 - DNA, 25 bp, Homo sapien
gctggctgaacacgatgccgtcgtg

SEQ ID NO: 5352823 - DNA, 25 bp, Homo sapien
acgcgtgtccagacgcacctgtgcg

SEQ ID NO: 5352824 - DNA, 25 bp, Homo sapien
cagccggcgttgaccttggcgaaga

SEQ ID NO: 5352825 - DNA, 25 bp, Homo sapien
aagtgcctctcggggcgccttggcg

SEQ ID NO: 5352826 - DNA, 25 bp, Homo sapien
agtgcctctcggggcgccttggcgt

SEQ ID NO: 5352827 - DNA, 25 bp, Homo sapien
tccccacagagtatgggtgcaggct

SEQ ID NO: 5352828 - DNA, 25 bp, Homo sapien
tatgcacctaaaaatgacggaagag

SEQ ID NO: 5352829 - DNA, 25 bp, Homo sapien
caatggtgacatccttgtcctggga

SEQ ID NO: 5352830 - DNA, 25 bp, Homo sapien
tggagaggaagtcccaggttagccc

SEQ ID NO: 5352831 - DNA, 25 bp, Homo sapien
agagatgcacaaccccaatagctgg

SEQ ID NO: 5352832 - DNA, 25 bp, Homo sapien
gatgcacaaccccaatagctggtgc

SEQ ID NO: 5352833 - DNA, 25 bp, Homo sapien
ccagagatgcacaaccccaatagct

SEQ ID NO: 5352834 - DNA, 25 bp, Homo sapien
gtccagagatgcacaaccccaatag

SEQ ID NO: 5352835 - DNA, 25 bp, Homo sapien
ggtccccaggtctagaaggaactgc

SEQ ID NO: 5352836 - DNA, 25 bp, Homo sapien
gagctgggcacccatcagtctaagg

SEQ ID NO: 5352837 - DNA, 25 bp, Homo sapien
cacccatcagtctaaggtcctcggg

SEQ ID NO: 5352838 - DNA, 25 bp, Homo sapien
agtctaaggtcctcgggcacaggtc

SEQ ID NO: 5352839 - DNA, 25 bp, Homo sapien
tggtatagttgcatcagtgggacct

SEQ ID NO: 5352840 - DNA, 25 bp, Homo sapien
agttgcatcagtgggaccttgggcc

SEQ ID NO: 5352841 - DNA, 25 bp, Homo sapien
tatagttgcatcagtgggaccttgg

SEQ ID NO: 5352842 - DNA, 25 bp, Homo sapien
gggtggtatagttgcatcagtggga

SEQ ID NO: 5352843 - DNA, 25 bp, Homo sapien
cactaggcatgacgtgacaggctgg

SEQ ID NO: 5352844 - DNA, 25 bp, Homo sapien
cccaggtatcgtggctggagaccgt

SEQ ID NO: 5352845 - DNA, 25 bp, Homo sapien
tgaggcacacgacagttacgcagct

SEQ ID NO: 5352846 - DNA, 25 bp, Homo sapien
tagataggcctaacttgctgctgag

SEQ ID NO: 5352847 - DNA, 25 bp, Homo sapien
cagcccagagttattaacaggtctg

SEQ ID NO: 5352848 - DNA, 25 bp, Homo sapien
tgtgctgtcacttccgctctgctgc

SEQ ID NO: 5352849 - DNA, 25 bp, Homo sapien
tgggtcctgattctgccgagcgcct

SEQ ID NO: 5352850 - DNA, 25 bp, Homo sapien
cacgggagcgcccactgggcatgaa

SEQ ID NO: 5352851 - DNA, 25 bp, Homo sapien
ctgcatgcacatcgcctggcaccca

SEQ ID NO: 5352852 - DNA, 25 bp, Homo sapien
ctggcacccagcccgcaggaactca

SEQ ID NO: 5352853 - DNA, 25 bp, Homo sapien
tggcacccagcccgcaggaactcag

SEQ ID NO: 5352854 - DNA, 25 bp, Homo sapien
gtgctgcatgcacatcgcctggcac

SEQ ID NO: 5352855 - DNA, 25 bp, Homo sapien
gggggactttagtgtctcatcaatc

SEQ ID NO: 5352856 - DNA, 25 bp, Homo sapien
agtgtctcatcaatcctttcagcca

SEQ ID NO: 5352857 - DNA, 25 bp, Homo sapien
gggactttagtgtctcatcaatcct

SEQ ID NO: 5352858 - DNA, 25 bp, Homo sapien
ttagtgtctcatcaatcctttcagc

SEQ ID NO: 5352859 - DNA, 25 bp, Homo sapien
tgcatgagtcactccgcgtggaggc

SEQ ID NO: 5352860 - DNA, 25 bp, Homo sapien
ctttggatggaactgcagacatagc

SEQ ID NO: 5352861 - DNA, 25 bp, Homo sapien
gaggcaaggcttacagtgcagctca

SEQ ID NO: 5352862 - DNA, 25 bp, Homo sapien
tttgagccgaagtaaggagactgcc

SEQ ID NO: 5352863 - DNA, 25 bp, Homo sapien
tcctgagcttgggtatcatctattt

SEQ ID NO: 5352864 - DNA, 25 bp, Homo sapien
tatcatctatttcgggcatttgttg

SEQ ID NO: 5352865 - DNA, 25 bp, Homo sapien
tccattcctgagcttgggtatcatc

SEQ ID NO: 5352866 - DNA, 25 bp, Homo sapien
ggtatcatctatttcgggcatttgt

SEQ ID NO: 5352867 - DNA, 25 bp, Homo sapien
ttgtgacagctgtcggcagccgccc

SEQ ID NO: 5352868 - DNA, 25 bp, Homo sapien
tgttgtgacagctgtcggcagccgc

SEQ ID NO: 5352869 - DNA, 25 bp, Homo sapien
cagctgtcggcagccgcccctccgc

SEQ ID NO: 5352870 - DNA, 25 bp, Homo sapien
gacagctgtcggcagccgcccctcc

SEQ ID NO: 5352871 - DNA, 25 bp, Homo sapien
caatgcgctttgtaggatccactgt

SEQ ID NO: 5352872 - DNA, 25 bp, Homo sapien
tcttgggccagtaaggagtgctccg

SEQ ID NO: 5352873 - DNA, 25 bp, Homo sapien
tctgccccgtaggtgaaatgggaac

SEQ ID NO: 5352874 - DNA, 25 bp, Homo sapien
tacaggcaacgctagagcacaggag

SEQ ID NO: 5352875 - DNA, 25 bp, Homo sapien
tccttataagcactgacattatggg

SEQ ID NO: 5352876 - DNA, 25 bp, Homo sapien
agtagcattttacaccattggagga

SEQ ID NO: 5352877 - DNA, 25 bp, Homo sapien
aggggaaagtatggctaggatccct

SEQ ID NO: 5352878 - DNA, 25 bp, Homo sapien
gaaatagtcccagatgtgttcctta

SEQ ID NO: 5352879 - DNA, 25 bp, Homo sapien
catgtaaggcattgtgccagaaaag

SEQ ID NO: 5352880 - DNA, 25 bp, Homo sapien
ctatcaggggcaagtgggtttctcc

SEQ ID NO: 5352881 - DNA, 25 bp, Homo sapien
ggcctccagctccataagccttttc

SEQ ID NO: 5352882 - DNA, 25 bp, Homo sapien
aaacatgtaaggcattgtgccagaa

SEQ ID NO: 5352883 - DNA, 25 bp, Homo sapien
tggcaagcagaacggaatccagaac

SEQ ID NO: 5352884 - DNA, 25 bp, Homo sapien
agaaccccatctcgctggaggtgag

SEQ ID NO: 5352885 - DNA, 25 bp, Homo sapien
gccctctggcaactccaattgggag

SEQ ID NO: 5352886 - DNA, 25 bp, Homo sapien
tgcagcagcccctgtcaaagggaac

SEQ ID NO: 5352887 - DNA, 25 bp, Homo sapien
tccaggcttggtgctaggcaggtcc

SEQ ID NO: 5352888 - DNA, 25 bp, Homo sapien
agttctgttctcatcccgggttcca

SEQ ID NO: 5352889 - DNA, 25 bp, Homo sapien
ggagttatttcttctcacagccccc

SEQ ID NO: 5352890 - DNA, 25 bp, Homo sapien
tattccgtactgactttgctccagg

SEQ ID NO: 5352891 - DNA, 25 bp, Homo sapien
ttttgatcactgacatctttgtggc

SEQ ID NO: 5352892 - DNA, 25 bp, Homo sapien
catggccatctccagagtggtccag

SEQ ID NO: 5352893 - DNA, 25 bp, Homo sapien
catctccagagtggtccagtactac

SEQ ID NO: 5352894 - DNA, 25 bp, Homo sapien
cagagtggtccagtactacccgacc

SEQ ID NO: 5352895 - DNA, 25 bp, Homo sapien
gatggtgaacattcaagagccccag

SEQ ID NO: 5352896 - DNA, 25 bp, Homo sapien
ccttctttggatataagctagccag

SEQ ID NO: 5352897 - DNA, 25 bp, Homo sapien
cagcagaggcacgtctatggagata

SEQ ID NO: 5352898 - DNA, 25 bp, Homo sapien
cagatatccaggtgtcccagatggt

SEQ ID NO: 5352899 - DNA, 25 bp, Homo sapien
tcggcttcccaaactaaggggatca

SEQ ID NO: 5352900 - DNA, 25 bp, Homo sapien
ctcaggttgagggtgggccaatact

SEQ ID NO: 5352901 - DNA, 25 bp, Homo sapien
caagaaatcctccaggctcggcttc

SEQ ID NO: 5352902 - DNA, 25 bp, Homo sapien
tgggccaatacttaggagccttggg

SEQ ID NO: 5352903 - DNA, 25 bp, Homo sapien
attcaaccatttgttgagtgtgaag

SEQ ID NO: 5352904 - DNA, 25 bp, Homo sapien
aatgtatgaggtggccacagaagag

SEQ ID NO: 5352905 - DNA, 25 bp, Homo sapien
tttgttgagtgtgaagtcctggaaa

SEQ ID NO: 5352906 - DNA, 25 bp, Homo sapien
ctttgattttgccttagtagctgca

SEQ ID NO: 5352907 - DNA, 25 bp, Homo sapien
agcagaagaaggtgccaaagccaaa

SEQ ID NO: 5352908 - DNA, 25 bp, Homo sapien
caacagcagaagaaggtgccaaagc

SEQ ID NO: 5352909 - DNA, 25 bp, Homo sapien
agcaacagcagaagaaggtgccaaa

SEQ ID NO: 5352910 - DNA, 25 bp, Homo sapien
agaagaaggtgccaaagccaaacat

SEQ ID NO: 5352911 - DNA, 25 bp, Homo sapien
ccagctctctctgcagcctctccat

SEQ ID NO: 5352912 - DNA, 25 bp, Homo sapien
gcagagtacaatatttcaaagcgtg

SEQ ID NO: 5352913 - DNA, 25 bp, Homo sapien
ttatggggcagagtacaatatttca

SEQ ID NO: 5352914 - DNA, 25 bp, Homo sapien
gtcagcctatagtgttatagaacac

SEQ ID NO: 5352915 - DNA, 25 bp, Homo sapien
ttattcatcccacctacactcccta

SEQ ID NO: 5352916 - DNA, 25 bp, Homo sapien
atttttctgtccagacttacttcac

SEQ ID NO: 5352917 - DNA, 25 bp, Homo sapien
acacgcagtatttttctgtccagac

SEQ ID NO: 5352918 - DNA, 25 bp, Homo sapien
gaacacgcagtatttttctgtccag

SEQ ID NO: 5352919 - DNA, 25 bp, Homo sapien
tttctgtccagacttacttcactta

SEQ ID NO: 5352920 - DNA, 25 bp, Homo sapien
taaagagttaatgaccaagagccca

SEQ ID NO: 5352921 - DNA, 25 bp, Homo sapien
cgctgcggtggatgtggattttctc

SEQ ID NO: 5352922 - DNA, 25 bp, Homo sapien
tgattctggctcaaacgctgcggtg

SEQ ID NO: 5352923 - DNA, 25 bp, Homo sapien
gggcaagggacattaccagacaatt

SEQ ID NO: 5352924 - DNA, 25 bp, Homo sapien
gaccagccatccataaagggttctg

SEQ ID NO: 5352925 - DNA, 25 bp, Homo sapien
gaggcaagtaccaaaaccgtgaggc

SEQ ID NO: 5352926 - DNA, 25 bp, Homo sapien
tcaaaactggatcccggcaagtcca

SEQ ID NO: 5352927 - DNA, 25 bp, Homo sapien
taaggagaaccaacccacaagtgag

SEQ ID NO: 5352928 - DNA, 25 bp, Homo sapien
ttctagtggtgaaaccaagagtaga

SEQ ID NO: 5352929 - DNA, 25 bp, Homo sapien
cagcccaagactgttctagtggtga

SEQ ID NO: 5352930 - DNA, 25 bp, Homo sapien
tcagctctataacccatccagccca

SEQ ID NO: 5352931 - DNA, 25 bp, Homo sapien
ctataacccatccagcccaagactg

SEQ ID NO: 5352932 - DNA, 25 bp, Homo sapien
tacacactgtactgtgggccagaac

SEQ ID NO: 5352933 - DNA, 25 bp, Homo sapien
ggaaggctcccagattgaacacagg

SEQ ID NO: 5352934 - DNA, 25 bp, Homo sapien
taagccatgttgtgggcccttcctg

SEQ ID NO: 5352935 - DNA, 25 bp, Homo sapien
aatttatcataaaggcaggtcggct

SEQ ID NO: 5352936 - DNA, 25 bp, Homo sapien
tgggtcaaaccacagcttaagcggg

SEQ ID NO: 5352937 - DNA, 25 bp, Homo sapien
taaacaggtcttccgacacgtggac

SEQ ID NO: 5352938 - DNA, 25 bp, Homo sapien
gaggcagccatcaccaacttggtaa

SEQ ID NO: 5352939 - DNA, 25 bp, Homo sapien
gtgatgtccaaaacaagcccgtccg

SEQ ID NO: 5352940 - DNA, 25 bp, Homo sapien
ttttgaagggcagttagtgagcagc

SEQ ID NO: 5352941 - DNA, 25 bp, Homo sapien
caagtgttcaccagagcattattta

SEQ ID NO: 5352942 - DNA, 25 bp, Homo sapien
catcaccgtggctagaactgtaaag

SEQ ID NO: 5352943 - DNA, 25 bp, Homo sapien
gctgcccagatattagaggtacaca

SEQ ID NO: 5352944 - DNA, 25 bp, Homo sapien
gggaaacgtgtcacgacatgattta

SEQ ID NO: 5352945 - DNA, 25 bp, Homo sapien
aaaaggtagctatgatcccaacgaa

SEQ ID NO: 5352946 - DNA, 25 bp, Homo sapien
tctaggagtagcatcatgggaaact

SEQ ID NO: 5352947 - DNA, 25 bp, Homo sapien
ggatccatatcaggctattaacagt

SEQ ID NO: 5352948 - DNA, 25 bp, Homo sapien
gaaggaaagcacactcagtactaga

SEQ ID NO: 5352949 - DNA, 25 bp, Homo sapien
tcttcacaatatcaagggagggatg

SEQ ID NO: 5352950 - DNA, 25 bp, Homo sapien
gccttggctgtatagcggatactga

SEQ ID NO: 5352951 - DNA, 25 bp, Homo sapien
gaaactaatcatgacttcctgggtg

SEQ ID NO: 5352952 - DNA, 25 bp, Homo sapien
catgtcctcagtccttcctggcaga

SEQ ID NO: 5352953 - DNA, 25 bp, Homo sapien
tcccaataatgaagcccatgtcctc

SEQ ID NO: 5352954 - DNA, 25 bp, Homo sapien
acttcccaataatgaagcccatgtc

SEQ ID NO: 5352955 - DNA, 25 bp, Homo sapien
ctggtcttaaacttcccaataatga

SEQ ID NO: 5352956 - DNA, 25 bp, Homo sapien
tagggctcagtgtagtgatcctgct

SEQ ID NO: 5352957 - DNA, 25 bp, Homo sapien
ggctcagtgtagtgatcctgctcgg

SEQ ID NO: 5352958 - DNA, 25 bp, Homo sapien
gagcccatagggctcagtgtagtga

SEQ ID NO: 5352959 - DNA, 25 bp, Homo sapien
cccatagggctcagtgtagtgatcc

SEQ ID NO: 5352960 - DNA, 25 bp, Homo sapien
gccacgaagtgtcagagtaatggtg

SEQ ID NO: 5352961 - DNA, 25 bp, Homo sapien
tggccacgaagtgtcagagtaatgg

SEQ ID NO: 5352962 - DNA, 25 bp, Homo sapien
cacgaagtgtcagagtaatggtggt

SEQ ID NO: 5352963 - DNA, 25 bp, Homo sapien
ctggccacgaagtgtcagagtaatg

SEQ ID NO: 5352964 - DNA, 25 bp, Homo sapien
actctccaccttctactgaggcttt

SEQ ID NO: 5352965 - DNA, 25 bp, Homo sapien
gaagcagaatttttgagtcacactc

SEQ ID NO: 5352966 - DNA, 25 bp, Homo sapien
cagaatttttgagtcacactctcca

SEQ ID NO: 5352967 - DNA, 25 bp, Homo sapien
tctcccccacataacacagtccctt

SEQ ID NO: 5352968 - DNA, 25 bp, Homo sapien
tgatgcttggttagagatctgagcc

SEQ ID NO: 5352969 - DNA, 25 bp, Homo sapien
aggcccccattggtcagcagctggt

SEQ ID NO: 5352970 - DNA, 25 bp, Homo sapien
acaggaatggtacggacaatggtgc

SEQ ID NO: 5352971 - DNA, 25 bp, Homo sapien
gggaggctgcttgccaacttagcga

SEQ ID NO: 5352972 - DNA, 25 bp, Homo sapien
ttgctgctgatatcctgcaagctga

SEQ ID NO: 5352973 - DNA, 25 bp, Homo sapien
gggagggatttgctggaaggccaga

SEQ ID NO: 5352974 - DNA, 25 bp, Homo sapien
gctgctgatatcctgcaagctgaag

SEQ ID NO: 5352975 - DNA, 25 bp, Homo sapien
tgctgatatcctgcaagctgaagct

SEQ ID NO: 5352976 - DNA, 25 bp, Homo sapien
tcaaagcagtaaggaagtagcctca

SEQ ID NO: 5352977 - DNA, 25 bp, Homo sapien
caatggatgccacacaggaaaggta

SEQ ID NO: 5352978 - DNA, 25 bp, Homo sapien
gatttgcagattcaaacaaccacgg

SEQ ID NO: 5352979 - DNA, 25 bp, Homo sapien
agagggtttctgcaatgccttggcc

SEQ ID NO: 5352980 - DNA, 25 bp, Homo sapien
tactcacttgcagaccaggacattt

SEQ ID NO: 5352981 - DNA, 25 bp, Homo sapien
catcctatggatttagctccaggga

SEQ ID NO: 5352982 - DNA, 25 bp, Homo sapien
cttacagtagaggatacagcacctg

SEQ ID NO: 5352983 - DNA, 25 bp, Homo sapien
tattcaaggccaaggaatccctctg

SEQ ID NO: 5352984 - DNA, 25 bp, Homo sapien
agtgctgctggagaccactgaaggg

SEQ ID NO: 5352985 - DNA, 25 bp, Homo sapien
cagtgctgctggagaccactgaagg

SEQ ID NO: 5352986 - DNA, 25 bp, Homo sapien
ctgtggtgagaagtcctgtgagctc

SEQ ID NO: 5352987 - DNA, 25 bp, Homo sapien
gagaagtcctgtgagctccttggcc

SEQ ID NO: 5352988 - DNA, 25 bp, Homo sapien
gtggtgagaagtcctgtgagctcct

SEQ ID NO: 5352989 - DNA, 25 bp, Homo sapien
ggtgagaagtcctgtgagctccttg

SEQ ID NO: 5352990 - DNA, 25 bp, Homo sapien
aatgctgtgtacctgagagagctca

SEQ ID NO: 5352991 - DNA, 25 bp, Homo sapien
tataggatgctttgaacgatggcac

SEQ ID NO: 5352992 - DNA, 25 bp, Homo sapien
cagttctcatttaacgtaccaagag

SEQ ID NO: 5352993 - DNA, 25 bp, Homo sapien
actcatgtcttctttgctccgggca

SEQ ID NO: 5352994 - DNA, 25 bp, Homo sapien
gctgtgtccccttgggagataaggg

SEQ ID NO: 5352995 - DNA, 25 bp, Homo sapien
acaccttgatcttcggtcgtttgga

SEQ ID NO: 5352996 - DNA, 25 bp, Homo sapien
tgggagataagggacaccttgatct

SEQ ID NO: 5352997 - DNA, 25 bp, Homo sapien
cttgatcttcggtcgtttggaggtc

SEQ ID NO: 5352998 - DNA, 25 bp, Homo sapien
gggatggtgtcgcttcagctgaacc

SEQ ID NO: 5352999 - DNA, 25 bp, Homo sapien
actcgagggatggtgtcgcttcagc

SEQ ID NO: 5353000 - DNA, 25 bp, Homo sapien
ggtgtcgcttcagctgaaccctaag

SEQ ID NO: 5353001 - DNA, 25 bp, Homo sapien
gcttcagctgaaccctaagatcctc

SEQ ID NO: 5353002 - DNA, 25 bp, Homo sapien
gcagcagagccaagaccgtagtgaa

SEQ ID NO: 5353003 - DNA, 25 bp, Homo sapien
caggataaccactctacgtacaggg

SEQ ID NO: 5353004 - DNA, 25 bp, Homo sapien
ggagactgcccatgcttcaggacca

SEQ ID NO: 5353005 - DNA, 25 bp, Homo sapien
tagctactaggagagagagtacctc

SEQ ID NO: 5353006 - DNA, 25 bp, Homo sapien
ggaggaagagctttcctcaccagca

SEQ ID NO: 5353007 - DNA, 25 bp, Homo sapien
gaggaagagctttcctcaccagcat

SEQ ID NO: 5353008 - DNA, 25 bp, Homo sapien
aggaagagctttcctcaccagcata

SEQ ID NO: 5353009 - DNA, 25 bp, Homo sapien
aggtctgggtttcggttctgatcat

SEQ ID NO: 5353010 - DNA, 25 bp, Homo sapien
ggtctgggtttcggttctgatcatt

SEQ ID NO: 5353011 - DNA, 25 bp, Homo sapien
ccgctgcacatgtctcttcagcagc

SEQ ID NO: 5353012 - DNA, 25 bp, Homo sapien
tgagaacttccaatctgactggact

SEQ ID NO: 5353013 - DNA, 25 bp, Homo sapien
cagctgagaacttccaatctgactg

SEQ ID NO: 5353014 - DNA, 25 bp, Homo sapien
cttccaatctgactggacttctggg

SEQ ID NO: 5353015 - DNA, 25 bp, Homo sapien
agggtgaggcgggcagcttggcagc

SEQ ID NO: 5353016 - DNA, 25 bp, Homo sapien
tgaggcgggcagcttggcagctggg

SEQ ID NO: 5353017 - DNA, 25 bp, Homo sapien
ggtgaggcgggcagcttggcagctg

SEQ ID NO: 5353018 - DNA, 25 bp, Homo sapien
ctctgagcctgagggtgaggcgggc

SEQ ID NO: 5353019 - DNA, 25 bp, Homo sapien
tgccccgctcagggacttcaaaggc

SEQ ID NO: 5353020 - DNA, 25 bp, Homo sapien
aggccaagtctctgcgggccacatc

SEQ ID NO: 5353021 - DNA, 25 bp, Homo sapien
tgaccctcagcacgagtgagcactc

SEQ ID NO: 5353022 - DNA, 25 bp, Homo sapien
tcctgatcccgaggttcagagccca

SEQ ID NO: 5353023 - DNA, 25 bp, Homo sapien
gaatacatctgtccaccatgctctg

SEQ ID NO: 5353024 - DNA, 25 bp, Homo sapien
ctgaatacatctgtccaccatgctc

SEQ ID NO: 5353025 - DNA, 25 bp, Homo sapien
accatgctctgagtcaacccttctg

SEQ ID NO: 5353026 - DNA, 25 bp, Homo sapien
catgctctgagtcaacccttctgat

SEQ ID NO: 5353027 - DNA, 25 bp, Homo sapien
ctgtaacacagctctcttgcagctc

SEQ ID NO: 5353028 - DNA, 25 bp, Homo sapien
ggcttatctctaacactgtaacaca

SEQ ID NO: 5353029 - DNA, 25 bp, Homo sapien
gactggtctgtagttacattgccag

SEQ ID NO: 5353030 - DNA, 25 bp, Homo sapien
gctgtcttttaactgaaccagactg

SEQ ID NO: 5353031 - DNA, 25 bp, Homo sapien
actggagtcttcatatccaagaggg

SEQ ID NO: 5353032 - DNA, 25 bp, Homo sapien
gaattctgaccaatgacaaagagga

SEQ ID NO: 5353033 - DNA, 25 bp, Homo sapien
tcagctcgaatcttctcccggaagt

SEQ ID NO: 5353034 - DNA, 25 bp, Homo sapien
tgttctcagctcgaatcttctcccg

SEQ ID NO: 5353035 - DNA, 25 bp, Homo sapien
ccatccacagtaagcagaggaaacc

SEQ ID NO: 5353036 - DNA, 25 bp, Homo sapien
acaactgcagtgacatactccatta

SEQ ID NO: 5353037 - DNA, 25 bp, Homo sapien
gaaacccaaggcagacaactgcagt

SEQ ID NO: 5353038 - DNA, 25 bp, Homo sapien
acagtaagcagaggaaacccaaggc

SEQ ID NO: 5353039 - DNA, 25 bp, Homo sapien
acaggccaccaaagctcctgtgttc

SEQ ID NO: 5353040 - DNA, 25 bp, Homo sapien
ggccaccaaagctcctgtgttccag

SEQ ID NO: 5353041 - DNA, 25 bp, Homo sapien
atgacaggccaccaaagctcctgtg

SEQ ID NO: 5353042 - DNA, 25 bp, Homo sapien
tgacaggccaccaaagctcctgtgt

SEQ ID NO: 5353043 - DNA, 25 bp, Homo sapien
gagacactgtagaactcctacccca

SEQ ID NO: 5353044 - DNA, 25 bp, Homo sapien
ttgcttctcactgccccaatcatat

SEQ ID NO: 5353045 - DNA, 25 bp, Homo sapien
cattgttcagcagatgggtggctac

SEQ ID NO: 5353046 - DNA, 25 bp, Homo sapien
caatcatatgctcgagacactgtag

SEQ ID NO: 5353047 - DNA, 25 bp, Homo sapien
gctgagattgccagaagcggtggcg

SEQ ID NO: 5353048 - DNA, 25 bp, Homo sapien
agggaccagaggaggcgatgagaat

SEQ ID NO: 5353049 - DNA, 25 bp, Homo sapien
ggcgtgaagtgggaaacacagagct

SEQ ID NO: 5353050 - DNA, 25 bp, Homo sapien
ggcgatgagaatcagcggagagcca

SEQ ID NO: 5353051 - DNA, 25 bp, Homo sapien
aagcatccggtcaatcaaggttggg

SEQ ID NO: 5353052 - DNA, 25 bp, Homo sapien
ttgttatgagaaagcacacccacag

SEQ ID NO: 5353053 - DNA, 25 bp, Homo sapien
ttggatgacacaagcatccggtcaa

SEQ ID NO: 5353054 - DNA, 25 bp, Homo sapien
gttatgagaaagcacacccacagca

SEQ ID NO: 5353055 - DNA, 25 bp, Homo sapien
cctcctaaggatcaagaatatatat

SEQ ID NO: 5353056 - DNA, 25 bp, Homo sapien
aataagcgggtgaaaagtatgctcc

SEQ ID NO: 5353057 - DNA, 25 bp, Homo sapien
tagacagacttcaactaagcctctg

SEQ ID NO: 5353058 - DNA, 25 bp, Homo sapien
taagcctctgaaaacctcctaagga

SEQ ID NO: 5353059 - DNA, 25 bp, Homo sapien
tatgtgcatatgtaagggagtagtt

SEQ ID NO: 5353060 - DNA, 25 bp, Homo sapien
caaaaggatggggacaattatgcac

SEQ ID NO: 5353061 - DNA, 25 bp, Homo sapien
ttagtcaactatctacctaattgga

SEQ ID NO: 5353062 - DNA, 25 bp, Homo sapien
gggacaattatgcacagagacaaat

SEQ ID NO: 5353063 - DNA, 25 bp, Homo sapien
tatctgcgaattccatgctacccac

SEQ ID NO: 5353064 - DNA, 25 bp, Homo sapien
gaagaaatatctgcgaattccatgc

SEQ ID NO: 5353065 - DNA, 25 bp, Homo sapien
tccatgctacccacaaaaggtcaaa

SEQ ID NO: 5353066 - DNA, 25 bp, Homo sapien
gaattccatgctacccacaaaaggt

SEQ ID NO: 5353067 - DNA, 25 bp, Homo sapien
aacacggcgcagcactggctcatta

SEQ ID NO: 5353068 - DNA, 25 bp, Homo sapien
cttcagcgtctgcaaagcatccagg

SEQ ID NO: 5353069 - DNA, 25 bp, Homo sapien
agactcaaggtctccacaagggtgg

SEQ ID NO: 5353070 - DNA, 25 bp, Homo sapien
gccactggatcagcttggtatccca

SEQ ID NO: 5353071 - DNA, 25 bp, Homo sapien
cccttcgttggccaagcgggcaagc

SEQ ID NO: 5353072 - DNA, 25 bp, Homo sapien
cttcgttggccaagcgggcaagccg

SEQ ID NO: 5353073 - DNA, 25 bp, Homo sapien
ccaagcgggcaagccggtcagactg

SEQ ID NO: 5353074 - DNA, 25 bp, Homo sapien
cttgttgaatagcttgttctgggcc

SEQ ID NO: 5353075 - DNA, 25 bp, Homo sapien
agattatgccatagttttatgtctc

SEQ ID NO: 5353076 - DNA, 25 bp, Homo sapien
tgtacaccatataaagaagattatg

SEQ ID NO: 5353077 - DNA, 25 bp, Homo sapien
tatagtcaaaccctggggacgctcc

SEQ ID NO: 5353078 - DNA, 25 bp, Homo sapien
gggacgctccccatgtatgtacacc

SEQ ID NO: 5353079 - DNA, 25 bp, Homo sapien
gaggcctgctccatataagctaata

SEQ ID NO: 5353080 - DNA, 25 bp, Homo sapien
tgttatcatcccagcatacggcact

SEQ ID NO: 5353081 - DNA, 25 bp, Homo sapien
gatgctctaactctggctagtgacc

SEQ ID NO: 5353082 - DNA, 25 bp, Homo sapien
tgtgtgttgcagacatctatcctac

SEQ ID NO: 5353083 - DNA, 25 bp, Homo sapien
aactccagagttctagggagccgac

SEQ ID NO: 5353084 - DNA, 25 bp, Homo sapien
gagccgacctacaccgttcatggag

SEQ ID NO: 5353085 - DNA, 25 bp, Homo sapien
gcgagagctactgcgcctagcctat

SEQ ID NO: 5353086 - DNA, 25 bp, Homo sapien
gagcaatcagtaaactctccgggaa

SEQ ID NO: 5353087 - DNA, 25 bp, Homo sapien
tcaatctgtggcaatgtggcaatgt

SEQ ID NO: 5353088 - DNA, 25 bp, Homo sapien
caatctgtggcaatgtggcaatgtc

SEQ ID NO: 5353089 - DNA, 25 bp, Homo sapien
atcaatctgtggcaatgtggcaatg

SEQ ID NO: 5353090 - DNA, 25 bp, Homo sapien
atctgtggcaatgtggcaatgtcat

SEQ ID NO: 5353091 - DNA, 25 bp, Homo sapien
cagaagggtggtggtccacaaggag

SEQ ID NO: 5353092 - DNA, 25 bp, Homo sapien
acagaagggtggtggtccacaagga

SEQ ID NO: 5353093 - DNA, 25 bp, Homo sapien
agaagggtggtggtccacaaggaga

SEQ ID NO: 5353094 - DNA, 25 bp, Homo sapien
aacagaagggtggtggtccacaagg

SEQ ID NO: 5353095 - DNA, 25 bp, Homo sapien
ctggagaaagataagccaaagacaa

SEQ ID NO: 5353096 - DNA, 25 bp, Homo sapien
aagacaagaatctgtcagtgtttct

SEQ ID NO: 5353097 - DNA, 25 bp, Homo sapien
taagccaaagacaagaatctgtcag

SEQ ID NO: 5353098 - DNA, 25 bp, Homo sapien
aagataagccaaagacaagaatctg

SEQ ID NO: 5353099 - DNA, 25 bp, Homo sapien
agtcctggaggtcaaggcttgtagt

SEQ ID NO: 5353100 - DNA, 25 bp, Homo sapien
gagctgagatcgtgccactgcactg

SEQ ID NO: 5353101 - DNA, 25 bp, Homo sapien
ctgagtcctggaggtcaaggcttgt

SEQ ID NO: 5353102 - DNA, 25 bp, Homo sapien
gcagtctgggtgacagagtgagacc

SEQ ID NO: 5353103 - DNA, 25 bp, Homo sapien
gatgtaagccctactctcaaggagc

SEQ ID NO: 5353104 - DNA, 25 bp, Homo sapien
tgtgagactttggagaacactctga

SEQ ID NO: 5353105 - DNA, 25 bp, Homo sapien
tatacaacagaagctactacagagc

SEQ ID NO: 5353106 - DNA, 25 bp, Homo sapien
tgtgtgccagacaacgtcctagtgt

SEQ ID NO: 5353107 - DNA, 25 bp, Homo sapien
cattcatcacgctgcgtgccttctg

SEQ ID NO: 5353108 - DNA, 25 bp, Homo sapien
tcacactcattcatcacgctgcgtg

SEQ ID NO: 5353109 - DNA, 25 bp, Homo sapien
atgccgttcacactcattcatcacg

SEQ ID NO: 5353110 - DNA, 25 bp, Homo sapien
atcacgctgcgtgccttctgattgt

SEQ ID NO: 5353111 - DNA, 25 bp, Homo sapien
aggcgttgatgtgaccgtctccaca

SEQ ID NO: 5353112 - DNA, 25 bp, Homo sapien
tctccacatctattgggacgtctga

SEQ ID NO: 5353113 - DNA, 25 bp, Homo sapien
gtgaccgtctccacatctattggga

SEQ ID NO: 5353114 - DNA, 25 bp, Homo sapien
cacatctattgggacgtctgattca

SEQ ID NO: 5353115 - DNA, 25 bp, Homo sapien
cacacatacttcacaggtatttaac

SEQ ID NO: 5353116 - DNA, 25 bp, Homo sapien
ataggaccgggccacacatacttca

SEQ ID NO: 5353117 - DNA, 25 bp, Homo sapien
cacatacttcacaggtatttaacaa

SEQ ID NO: 5353118 - DNA, 25 bp, Homo sapien
caggtgaggaaataggaccgggcca

SEQ ID NO: 5353119 - DNA, 25 bp, Homo sapien
cagctttaaattacgcataagcaca

SEQ ID NO: 5353120 - DNA, 25 bp, Homo sapien
cttgtctagatctctgccctctcag

SEQ ID NO: 5353121 - DNA, 25 bp, Homo sapien
gatggtatgtactggaagaacacaa

SEQ ID NO: 5353122 - DNA, 25 bp, Homo sapien
gtatctttaatacagtcagctttaa

SEQ ID NO: 5353123 - DNA, 25 bp, Homo sapien
agtcccagaaactgaagtgggagga

SEQ ID NO: 5353124 - DNA, 25 bp, Homo sapien
taaatgacaaatatagccaggcaca

SEQ ID NO: 5353125 - DNA, 25 bp, Homo sapien
ggactgctggaacccgggaagtcaa

SEQ ID NO: 5353126 - DNA, 25 bp, Homo sapien
taaatgacaaatacagccagacaca

SEQ ID NO: 5353127 - DNA, 25 bp, Homo sapien
tagctacttagctcattttgtacag

SEQ ID NO: 5353128 - DNA, 25 bp, Homo sapien
cttagctacttagctcattttgtac

SEQ ID NO: 5353129 - DNA, 25 bp, Homo sapien
ctacttagctcattttgtacagagc

SEQ ID NO: 5353130 - DNA, 25 bp, Homo sapien
gctacttagctcattttgtacagag

SEQ ID NO: 5353131 - DNA, 25 bp, Homo sapien
tttcgtgctgccgccggggagtgac

SEQ ID NO: 5353132 - DNA, 25 bp, Homo sapien
atggtactttcgtgctgccgccggg

SEQ ID NO: 5353133 - DNA, 25 bp, Homo sapien
gtactttcgtgctgccgccggggag

SEQ ID NO: 5353134 - DNA, 25 bp, Homo sapien
tactttcgtgctgccgccggggagt

SEQ ID NO: 5353135 - DNA, 25 bp, Homo sapien
ccgttcatgcactgaaagctggaag

SEQ ID NO: 5353136 - DNA, 25 bp, Homo sapien
catgcgtcgagctgaagtctggaag

SEQ ID NO: 5353137 - DNA, 25 bp, Homo sapien
catctgggtgggcactccaaggctt

SEQ ID NO: 5353138 - DNA, 25 bp, Homo sapien
aaggcttggcatagctatgatccag

SEQ ID NO: 5353139 - DNA, 25 bp, Homo sapien
aaagtcagagcatgggtatctgcat

SEQ ID NO: 5353140 - DNA, 25 bp, Homo sapien
gaaagtcagagcatgggtatctgca

SEQ ID NO: 5353141 - DNA, 25 bp, Homo sapien
gcagtgaaaagtttcagtttaggtc

SEQ ID NO: 5353142 - DNA, 25 bp, Homo sapien
cagtgaaaagtttcagtttaggtca

SEQ ID NO: 5353143 - DNA, 25 bp, Homo sapien
ctgcagtgaaaagtttcagtttagg

SEQ ID NO: 5353144 - DNA, 25 bp, Homo sapien
tgcagtgaaaagtttcagtttaggt

SEQ ID NO: 5353145 - DNA, 25 bp, Homo sapien
tctaacgacaatgcgaagggagccg

SEQ ID NO: 5353146 - DNA, 25 bp, Homo sapien
aaagacctcgcgtggacagacagta

SEQ ID NO: 5353147 - DNA, 25 bp, Homo sapien
gaaattacctaacgggagagctcac

SEQ ID NO: 5353148 - DNA, 25 bp, Homo sapien
tgagtatccatttcacggcagacct

SEQ ID NO: 5353149 - DNA, 25 bp, Homo sapien
cgccagctcggggaactgaagcgat

SEQ ID NO: 5353150 - DNA, 25 bp, Homo sapien
gaactgaagcgatttggccaaggtc

SEQ ID NO: 5353151 - DNA, 25 bp, Homo sapien
attttacagacgaagtcgccagctc

SEQ ID NO: 5353152 - DNA, 25 bp, Homo sapien
ttttacagacgaagtcgccagctcg

SEQ ID NO: 5353153 - DNA, 25 bp, Homo sapien
cgcgctcggccacggccggatccct

SEQ ID NO: 5353154 - DNA, 25 bp, Homo sapien
ccgcggtcttacggccgcgcgctcg

SEQ ID NO: 5353155 - DNA, 25 bp, Homo sapien
tccctaagcgcgtgcgcgttaacgc

SEQ ID NO: 5353156 - DNA, 25 bp, Homo sapien
aagcgcgtgcgcgttaacgcctcca

SEQ ID NO: 5353157 - DNA, 25 bp, Homo sapien
tcacccatggtgttcctagggcaag

SEQ ID NO: 5353158 - DNA, 25 bp, Homo sapien
ggaagccttaatcaagccagccggg

SEQ ID NO: 5353159 - DNA, 25 bp, Homo sapien
caaatggcgcttgtcggtaggagct

SEQ ID NO: 5353160 - DNA, 25 bp, Homo sapien
tctttaccatggactacctggcggc

SEQ ID NO: 5353161 - DNA, 25 bp, Homo sapien
cagctcaggttgcacacagagagga

SEQ ID NO: 5353162 - DNA, 25 bp, Homo sapien
ggtcagttgcacagctaatccatgg

SEQ ID NO: 5353163 - DNA, 25 bp, Homo sapien
gtcaaatgcaaaacccaacgaatgg

SEQ ID NO: 5353164 - DNA, 25 bp, Homo sapien
gacttgattgggaaggccatggaca

SEQ ID NO: 5353165 - DNA, 25 bp, Homo sapien
gggccttctgagtcaaacaacacgg

SEQ ID NO: 5353166 - DNA, 25 bp, Homo sapien
tagatgtccccatgcacaaccatgg

SEQ ID NO: 5353167 - DNA, 25 bp, Homo sapien
tcaaaactgaagtagaagggccttc

SEQ ID NO: 5353168 - DNA, 25 bp, Homo sapien
gacagaatatagtccccaaccagct

SEQ ID NO: 5353169 - DNA, 25 bp, Homo sapien
caccagggagaaaaagacgatgagg

SEQ ID NO: 5353170 - DNA, 25 bp, Homo sapien
ccatttgttgtagagtatgatacca

SEQ ID NO: 5353171 - DNA, 25 bp, Homo sapien
tgttgtagagtatgataccaatgac

SEQ ID NO: 5353172 - DNA, 25 bp, Homo sapien
tcagtagaagcgctttcggctctgt

SEQ ID NO: 5353173 - DNA, 25 bp, Homo sapien
agagagaagcaagtcagaaaacagg

SEQ ID NO: 5353174 - DNA, 25 bp, Homo sapien
aagcaagagagaagcaagtcagaaa

SEQ ID NO: 5353175 - DNA, 25 bp, Homo sapien
aggaagcaagagagaagcaagtcag

SEQ ID NO: 5353176 - DNA, 25 bp, Homo sapien
caagagagaagcaagtcagaaaaca

SEQ ID NO: 5353177 - DNA, 25 bp, Homo sapien
cacatctcgatggagcttttcctct

SEQ ID NO: 5353178 - DNA, 25 bp, Homo sapien
actgagggcaagaacacatctcgat

SEQ ID NO: 5353179 - DNA, 25 bp, Homo sapien
gggttctctccactgtcagttcaaa

SEQ ID NO: 5353180 - DNA, 25 bp, Homo sapien
tccactgtcagttcaaacaacttca

SEQ ID NO: 5353181 - DNA, 25 bp, Homo sapien
cccagtgatggaggaggtgccgaag

SEQ ID NO: 5353182 - DNA, 25 bp, Homo sapien
tgatggaggaggtgccgaagtagta

SEQ ID NO: 5353183 - DNA, 25 bp, Homo sapien
gaggaggtgccgaagtagtagccgc

SEQ ID NO: 5353184 - DNA, 25 bp, Homo sapien
agtccctccactcatgcttgccatc

SEQ ID NO: 5353185 - DNA, 25 bp, Homo sapien
catctggtccaggacaaggactctc

SEQ ID NO: 5353186 - DNA, 25 bp, Homo sapien
tctggtccaggacaaggactctcac

SEQ ID NO: 5353187 - DNA, 25 bp, Homo sapien
caccatctggtccaggacaaggact

SEQ ID NO: 5353188 - DNA, 25 bp, Homo sapien
ccatctggtccaggacaaggactct

SEQ ID NO: 5353189 - DNA, 25 bp, Homo sapien
ccaggaaggtgtcgtaatgaagatt

SEQ ID NO: 5353190 - DNA, 25 bp, Homo sapien
gaagattgcggacaatggctgtgca

SEQ ID NO: 5353191 - DNA, 25 bp, Homo sapien
tcatgatcatagctgagggagccgt

SEQ ID NO: 5353192 - DNA, 25 bp, Homo sapien
tgacgtagcgaatcaccaggaaggt

SEQ ID NO: 5353193 - DNA, 25 bp, Homo sapien
tggaaagcagagagggggaagcaga

SEQ ID NO: 5353194 - DNA, 25 bp, Homo sapien
gaaagcagagagggggaagcagaca

SEQ ID NO: 5353195 - DNA, 25 bp, Homo sapien
ctggaaagcagagagggggaagcag

SEQ ID NO: 5353196 - DNA, 25 bp, Homo sapien
ggaaagcagagagggggaagcagac

SEQ ID NO: 5353197 - DNA, 25 bp, Homo sapien
cattcaggatagctcttttcaattc

SEQ ID NO: 5353198 - DNA, 25 bp, Homo sapien
tccattcaggatagctcttttcaat

SEQ ID NO: 5353199 - DNA, 25 bp, Homo sapien
ccattcaggatagctcttttcaatt

SEQ ID NO: 5353200 - DNA, 25 bp, Homo sapien
ttcaggatagctcttttcaattcta

SEQ ID NO: 5353201 - DNA, 25 bp, Homo sapien
ggggctccgaaacgcagacgcgccg

SEQ ID NO: 5353202 - DNA, 25 bp, Homo sapien
cggcgcgtctgcgtttcggagcccc

SEQ ID NO: 5353203 - DNA, 25 bp, Homo sapien
tcctggagaatatcgcctcttctgg

SEQ ID NO: 5353204 - DNA, 25 bp, Homo sapien
cctggagaatatcgcctcttctggg

SEQ ID NO: 5353205 - DNA, 25 bp, Homo sapien
ctggagaatatcgcctcttctgggc

SEQ ID NO: 5353206 - DNA, 25 bp, Homo sapien
actcctggagaatatcgcctcttct

SEQ ID NO: 5353207 - DNA, 25 bp, Homo sapien
tctaaagcacgaattcccagaccac

SEQ ID NO: 5353208 - DNA, 25 bp, Homo sapien
cactggctgtgatcaaccattaata

SEQ ID NO: 5353209 - DNA, 25 bp, Homo sapien
gccaaacatacatcttctaaagcac

SEQ ID NO: 5353210 - DNA, 25 bp, Homo sapien
cagaccactggctgtgatcaaccat

SEQ ID NO: 5353211 - DNA, 25 bp, Homo sapien
gcaccagtgaaaactctgttaccac

SEQ ID NO: 5353212 - DNA, 25 bp, Homo sapien
cataccattgtctagtaagctgacc

SEQ ID NO: 5353213 - DNA, 25 bp, Homo sapien
tctaggagccactcttttagagcag

SEQ ID NO: 5353214 - DNA, 25 bp, Homo sapien
cacaactggagttcatacactggca

SEQ ID NO: 5353215 - DNA, 25 bp, Homo sapien
ccctgggatcactagcggaacacac

SEQ ID NO: 5353216 - DNA, 25 bp, Homo sapien
caaatgccttctactagatgctact

SEQ ID NO: 5353217 - DNA, 25 bp, Homo sapien
ggatcactagcggaacacactgtca

SEQ ID NO: 5353218 - DNA, 25 bp, Homo sapien
cttctactagatgctactaaatgtg

SEQ ID NO: 5353219 - DNA, 25 bp, Homo sapien
tcaaagctgtataagctgctggtcc

SEQ ID NO: 5353220 - DNA, 25 bp, Homo sapien
ggtcctacaataatcttcatctagc

SEQ ID NO: 5353221 - DNA, 25 bp, Homo sapien
tctagccctttatgcagaaatccag

SEQ ID NO: 5353222 - DNA, 25 bp, Homo sapien
gctgctggtcctacaataatcttca

SEQ ID NO: 5353223 - DNA, 25 bp, Homo sapien
ctgtgcctggcaattactcctactt

SEQ ID NO: 5353224 - DNA, 25 bp, Homo sapien
ctggcaattactcctactttgtttt

SEQ ID NO: 5353225 - DNA, 25 bp, Homo sapien
gtgcctggcaattactcctactttg

SEQ ID NO: 5353226 - DNA, 25 bp, Homo sapien
gcctggcaattactcctactttgtt

SEQ ID NO: 5353227 - DNA, 25 bp, Homo sapien
cagctaagtttttgagaggtaggga

SEQ ID NO: 5353228 - DNA, 25 bp, Homo sapien
gcattccaacttcactgtttgtcaa

SEQ ID NO: 5353229 - DNA, 25 bp, Homo sapien
aggtagggactgcatagagcaatgt

SEQ ID NO: 5353230 - DNA, 25 bp, Homo sapien
tatggatgttaagatcagcttgtga

SEQ ID NO: 5353231 - DNA, 25 bp, Homo sapien
catggtgaaatggaagctaacagag

SEQ ID NO: 5353232 - DNA, 25 bp, Homo sapien
tcctcagcatgactacaaatccagt

SEQ ID NO: 5353233 - DNA, 25 bp, Homo sapien
tcttgtcaggccctaaagctgataa

SEQ ID NO: 5353234 - DNA, 25 bp, Homo sapien
gaattactactatctcatggtgaaa

SEQ ID NO: 5353235 - DNA, 25 bp, Homo sapien
caaacatgctcaattttagtggcta

SEQ ID NO: 5353236 - DNA, 25 bp, Homo sapien
caatcaaccaaacatgctcaatttt

SEQ ID NO: 5353237 - DNA, 25 bp, Homo sapien
caaccaaacatgctcaattttagtg

SEQ ID NO: 5353238 - DNA, 25 bp, Homo sapien
atcaccaatcaaccaaacatgctca

SEQ ID NO: 5353239 - DNA, 25 bp, Homo sapien
taggtgtctacaaatactcccagcc

SEQ ID NO: 5353240 - DNA, 25 bp, Homo sapien
ggtaggtgtctacaaatactcccag

SEQ ID NO: 5353241 - DNA, 25 bp, Homo sapien
tggggtaggtgtctacaaatactcc

SEQ ID NO: 5353242 - DNA, 25 bp, Homo sapien
attggggtaggtgtctacaaatact

SEQ ID NO: 5353243 - DNA, 25 bp, Homo sapien
caagccatccccatgcagattcttc

SEQ ID NO: 5353244 - DNA, 25 bp, Homo sapien
ctggctgcatccgatcctttgtgta

SEQ ID NO: 5353245 - DNA, 25 bp, Homo sapien
ccatggattttgaagtgcacctgca

SEQ ID NO: 5353246 - DNA, 25 bp, Homo sapien
tgtgtaccagattgccaagccatcc

SEQ ID NO: 5353247 - DNA, 25 bp, Homo sapien
acttgtacaaaatcacagtgcagcc

SEQ ID NO: 5353248 - DNA, 25 bp, Homo sapien
acttcttgtcgccatacctcaagga

SEQ ID NO: 5353249 - DNA, 25 bp, Homo sapien
cttgtcgccatacctcaaggaagac

SEQ ID NO: 5353250 - DNA, 25 bp, Homo sapien
atactgcattcacttcttgtcgcca

SEQ ID NO: 5353251 - DNA, 25 bp, Homo sapien
ggcggatatactgggtcatcaccat

SEQ ID NO: 5353252 - DNA, 25 bp, Homo sapien
accatggcattgcccatcagattcc

SEQ ID NO: 5353253 - DNA, 25 bp, Homo sapien
ctttgcatatctggggtaaggcgga

SEQ ID NO: 5353254 - DNA, 25 bp, Homo sapien
caaggcaccctgtttactttgcata

SEQ ID NO: 5353255 - DNA, 25 bp, Homo sapien
accaccgccagcagtttcctccggg

SEQ ID NO: 5353256 - DNA, 25 bp, Homo sapien
cccaaacgcggagggagtctccgtg

SEQ ID NO: 5353257 - DNA, 25 bp, Homo sapien
acacctaactcctgcctttcagacc

SEQ ID NO: 5353258 - DNA, 25 bp, Homo sapien
cagcagtttcctccgggccacgaag

SEQ ID NO: 5353259 - DNA, 25 bp, Homo sapien
gaagaaggagtaacatcctggaccc

SEQ ID NO: 5353260 - DNA, 25 bp, Homo sapien
agtaacatcctggacccatcccgag

SEQ ID NO: 5353261 - DNA, 25 bp, Homo sapien
tcaagtactcgaacgtttgacccgc

SEQ ID NO: 5353262 - DNA, 25 bp, Homo sapien
gtagggcttcgacagcgagtgctcc

SEQ ID NO: 5353263 - DNA, 25 bp, Homo sapien
gattcgcactgtttacaaccgggag

SEQ ID NO: 5353264 - DNA, 25 bp, Homo sapien
tgctcctagggaacgtgctggtcaa

SEQ ID NO: 5353265 - DNA, 25 bp, Homo sapien
gctcaatatgatccagggtgccctg

SEQ ID NO: 5353266 - DNA, 25 bp, Homo sapien
ggtgacggagccctataatgacctc

SEQ ID NO: 5353267 - DNA, 25 bp, Homo sapien
aattatggagtggaaccctcccagg

SEQ ID NO: 5353268 - DNA, 25 bp, Homo sapien
tgctcaggccgacctagggcttgga

SEQ ID NO: 5353269 - DNA, 25 bp, Homo sapien
ttcggaatcctagcagggagtgagc

SEQ ID NO: 5353270 - DNA, 25 bp, Homo sapien
taggagagctcctactggctgaggc

SEQ ID NO: 5353271 - DNA, 25 bp, Homo sapien
tagtctgagattacccaggacacag

SEQ ID NO: 5353272 - DNA, 25 bp, Homo sapien
cacctagtgtacatctgcaatttaa

SEQ ID NO: 5353273 - DNA, 25 bp, Homo sapien
ccccattctcagaggtcttggaaaa

SEQ ID NO: 5353274 - DNA, 25 bp, Homo sapien
agttttaactcattgcacaccgggt

SEQ ID NO: 5353275 - DNA, 25 bp, Homo sapien
aagccaccattgtcatcctggcccg

SEQ ID NO: 5353276 - DNA, 25 bp, Homo sapien
caaagccaccattgtcatcctggcc

SEQ ID NO: 5353277 - DNA, 25 bp, Homo sapien
cacaaagccaccattgtcatcctgg

SEQ ID NO: 5353278 - DNA, 25 bp, Homo sapien
agccaccattgtcatcctggcccgt

SEQ ID NO: 5353279 - DNA, 25 bp, Homo sapien
aaaattgtattggtcattgagtcac

SEQ ID NO: 5353280 - DNA, 25 bp, Homo sapien
cactagattcagtatgtttgttctc

SEQ ID NO: 5353281 - DNA, 25 bp, Homo sapien
cgcgcgcgcgcccttagttaaaaat

SEQ ID NO: 5353282 - DNA, 25 bp, Homo sapien
gcaaatcagcttagtccgcttcctg

SEQ ID NO: 5353283 - DNA, 25 bp, Homo sapien
catcggagtggcctttggcatgaca

SEQ ID NO: 5353284 - DNA, 25 bp, Homo sapien
tccgggcactcgtggacttgcagta

SEQ ID NO: 5353285 - DNA, 25 bp, Homo sapien
gcaggcagcagcaaccagtttggca

SEQ ID NO: 5353286 - DNA, 25 bp, Homo sapien
gcagtacatcaaggtgagtgcctca

SEQ ID NO: 5353287 - DNA, 25 bp, Homo sapien
tagtcttgtacaggagcagcttgct

SEQ ID NO: 5353288 - DNA, 25 bp, Homo sapien
gaaatctagaactctgccgacagcc

SEQ ID NO: 5353289 - DNA, 25 bp, Homo sapien
cactgtgtcttccacgtaagggaga

SEQ ID NO: 5353290 - DNA, 25 bp, Homo sapien
cttatctgacaacgctgaggccacg

SEQ ID NO: 5353291 - DNA, 25 bp, Homo sapien
tctcggggagttttgttgttatgac

SEQ ID NO: 5353292 - DNA, 25 bp, Homo sapien
gttgttatgactcttgtgtcttttg

SEQ ID NO: 5353293 - DNA, 25 bp, Homo sapien
tggcgttatgagtttgactctcggg

SEQ ID NO: 5353294 - DNA, 25 bp, Homo sapien
tttattttggcgttatgagtttgac

SEQ ID NO: 5353295 - DNA, 25 bp, Homo sapien
tcctggtgaatctacaacttgcctg

SEQ ID NO: 5353296 - DNA, 25 bp, Homo sapien
tggctgctggcagacatacaggaca

SEQ ID NO: 5353297 - DNA, 25 bp, Homo sapien
ggcccttggcttgtgagtactggaa

SEQ ID NO: 5353298 - DNA, 25 bp, Homo sapien
gctgccataagcatgagtcctgtga

SEQ ID NO: 5353299 - DNA, 25 bp, Homo sapien
taaccttgagccaacctagtcgagg

SEQ ID NO: 5353300 - DNA, 25 bp, Homo sapien
tagaatctagcctcacaagggtagg

SEQ ID NO: 5353301 - DNA, 25 bp, Homo sapien
ctagtcgagggtcaaggaagatcac

SEQ ID NO: 5353302 - DNA, 25 bp, Homo sapien
caaggactgttgaggcctctactgc

SEQ ID NO: 5353303 - DNA, 25 bp, Homo sapien
tctgctggcggcttactctgtaatc

SEQ ID NO: 5353304 - DNA, 25 bp, Homo sapien
aaaggcccagtaatgtctttattgc

SEQ ID NO: 5353305 - DNA, 25 bp, Homo sapien
acctgttgaaggtgagagctctgtc

SEQ ID NO: 5353306 - DNA, 25 bp, Homo sapien
cagtattttatcttgacgtggagac

SEQ ID NO: 5353307 - DNA, 25 bp, Homo sapien
gaacttcccagagaattggctcggc

SEQ ID NO: 5353308 - DNA, 25 bp, Homo sapien
taattcctgacagaactgccgcctg

SEQ ID NO: 5353309 - DNA, 25 bp, Homo sapien
ggtcggcgcgctgaaaacctttctg

SEQ ID NO: 5353310 - DNA, 25 bp, Homo sapien
tctagtagggtacggcgcgatgaac

SEQ ID NO: 5353311 - DNA, 25 bp, Homo sapien
tgtacgaggaggagcgctccaacat

SEQ ID NO: 5353312 - DNA, 25 bp, Homo sapien
tcaacgacaccaagctggacgctgt

SEQ ID NO: 5353313 - DNA, 25 bp, Homo sapien
tcgtggacatgctctacctcaagga

SEQ ID NO: 5353314 - DNA, 25 bp, Homo sapien
cctacagcgatctcagcaagggcgt

SEQ ID NO: 5353315 - DNA, 25 bp, Homo sapien
ccttgtgcagatgggcatgagccca

SEQ ID NO: 5353316 - DNA, 25 bp, Homo sapien
tccagagtcagtgcccttgttagcc

SEQ ID NO: 5353317 - DNA, 25 bp, Homo sapien
gacttaggaaatcctcccaaggaca

SEQ ID NO: 5353318 - DNA, 25 bp, Homo sapien
agctgccccgtgtggactgtcgcag

SEQ ID NO: 5353319 - DNA, 25 bp, Homo sapien
gcctggcacgttgtaggagcatgaa

SEQ ID NO: 5353320 - DNA, 25 bp, Homo sapien
tcaccctggaggacgtgatcgagga

SEQ ID NO: 5353321 - DNA, 25 bp, Homo sapien
caagctgttccatgagtgtcctccc

SEQ ID NO: 5353322 - DNA, 25 bp, Homo sapien
tccgagatcctggacgagtctgaag

SEQ ID NO: 5353323 - DNA, 25 bp, Homo sapien
tttgtacattacagaaatgtcccct

SEQ ID NO: 5353324 - DNA, 25 bp, Homo sapien
ctgaaagaacccactgtttgccatg

SEQ ID NO: 5353325 - DNA, 25 bp, Homo sapien
gtttgccatgaagaaagtcttcctg

SEQ ID NO: 5353326 - DNA, 25 bp, Homo sapien
ttgtttttgcaggttcttttgtaca

SEQ ID NO: 5353327 - DNA, 25 bp, Homo sapien
gcatggtaaaagtgtccgcctgtta

SEQ ID NO: 5353328 - DNA, 25 bp, Homo sapien
taaagtaacaatctcgcctcagctg

SEQ ID NO: 5353329 - DNA, 25 bp, Homo sapien
gatgcagccccttagtgtggtcgtg

SEQ ID NO: 5353330 - DNA, 25 bp, Homo sapien
gatagtcacccctctctctgtgtgg

SEQ ID NO: 5353331 - DNA, 25 bp, Homo sapien
aagtggatgtattcagcccgctgcg

SEQ ID NO: 5353332 - DNA, 25 bp, Homo sapien
catctctgagaaggtcctgctgcac

SEQ ID NO: 5353333 - DNA, 25 bp, Homo sapien
ttctgacgggaaaggtaatctggcc

SEQ ID NO: 5353334 - DNA, 25 bp, Homo sapien
tgaggtttgacgagagcaaccggct

SEQ ID NO: 5353335 - DNA, 25 bp, Homo sapien
tggagatcgggaaagagggtctgaa

SEQ ID NO: 5353336 - DNA, 25 bp, Homo sapien
gagtgtcggccctaactgtgccatc

SEQ ID NO: 5353337 - DNA, 25 bp, Homo sapien
gggccttcacgtactatggagtgtc

SEQ ID NO: 5353338 - DNA, 25 bp, Homo sapien
ggcagggttgaagtggagatcggga

SEQ ID NO: 5353339 - DNA, 25 bp, Homo sapien
tttgatagttcaccagtccccggtg

SEQ ID NO: 5353340 - DNA, 25 bp, Homo sapien
tattgtcccgactacaccgtgaggg

SEQ ID NO: 5353341 - DNA, 25 bp, Homo sapien
gaccaggctccttggtgagaagacc

SEQ ID NO: 5353342 - DNA, 25 bp, Homo sapien
aactgtacagttgtccccaccaggg

SEQ ID NO: 5353343 - DNA, 25 bp, Homo sapien
tcctagacactagaagggcatttgt

SEQ ID NO: 5353344 - DNA, 25 bp, Homo sapien
caaggacgtcttagaatggattgac

SEQ ID NO: 5353345 - DNA, 25 bp, Homo sapien
taagtcggtatttctctcaaggacg

SEQ ID NO: 5353346 - DNA, 25 bp, Homo sapien
taatatttaagcgtggcccatccag

SEQ ID NO: 5353347 - DNA, 25 bp, Homo sapien
gaggtcgtgctgcttaagtcttgga

SEQ ID NO: 5353348 - DNA, 25 bp, Homo sapien
gctagtgccgcaccttttagggttg

SEQ ID NO: 5353349 - DNA, 25 bp, Homo sapien
gaggcttctgtgcttacccactgtg

SEQ ID NO: 5353350 - DNA, 25 bp, Homo sapien
gagatctctctaaggatggtgctgc

SEQ ID NO: 5353351 - DNA, 25 bp, Homo sapien
acccaggcgtttaacggctcactag

SEQ ID NO: 5353352 - DNA, 25 bp, Homo sapien
cagctttgatgttaattctccttcc

SEQ ID NO: 5353353 - DNA, 25 bp, Homo sapien
cttcccttgtctcctgtagggtcca

SEQ ID NO: 5353354 - DNA, 25 bp, Homo sapien
cgtttaacggctcactaggcagccc

SEQ ID NO: 5353355 - DNA, 25 bp, Homo sapien
cactttttgagcaagccgagagcac

SEQ ID NO: 5353356 - DNA, 25 bp, Homo sapien
caggcccgcctcaggaaggaatgaa

SEQ ID NO: 5353357 - DNA, 25 bp, Homo sapien
tgagcagaagttttgtgcccgcctg

SEQ ID NO: 5353358 - DNA, 25 bp, Homo sapien
taatttgccaacctatcgctgctgg

SEQ ID NO: 5353359 - DNA, 25 bp, Homo sapien
tgttctgagaagaggtcatgcctgg

SEQ ID NO: 5353360 - DNA, 25 bp, Homo sapien
gggttcatgaaccaggtggatcctc

SEQ ID NO: 5353361 - DNA, 25 bp, Homo sapien
tgagttgccactcgcagtgttgtca

SEQ ID NO: 5353362 - DNA, 25 bp, Homo sapien
ggaagggatcgtcatgctgcatcga

SEQ ID NO: 5353363 - DNA, 25 bp, Homo sapien
tgggactgaaggtcaaaacaacagt

SEQ ID NO: 5353364 - DNA, 25 bp, Homo sapien
tatccttgcttagaaattgtcctca

SEQ ID NO: 5353365 - DNA, 25 bp, Homo sapien
gcccgggttggaaacagatgcttta

SEQ ID NO: 5353366 - DNA, 25 bp, Homo sapien
taaactctgagagcaagcccgggtt

SEQ ID NO: 5353367 - DNA, 25 bp, Homo sapien
cacaccagaatcacctggcaaatta

SEQ ID NO: 5353368 - DNA, 25 bp, Homo sapien
accagaatcacctggcaaattaaaa

SEQ ID NO: 5353369 - DNA, 25 bp, Homo sapien
tcttaaccttggctgcacaccagaa

SEQ ID NO: 5353370 - DNA, 25 bp, Homo sapien
ggattcttaaccttggctgcacacc

SEQ ID NO: 5353371 - DNA, 25 bp, Homo sapien
attccgtggtgtatgcattggcccc

SEQ ID NO: 5353372 - DNA, 25 bp, Homo sapien
tcactcggcgtcattctcgggagat

SEQ ID NO: 5353373 - DNA, 25 bp, Homo sapien
gatgccatactgcacttagagctgt

SEQ ID NO: 5353374 - DNA, 25 bp, Homo sapien
tagtgtgtaagcattcgggattgtc

SEQ ID NO: 5353375 - DNA, 25 bp, Homo sapien
catgtttttacttcagccgttctga

SEQ ID NO: 5353376 - DNA, 25 bp, Homo sapien
gcacctggccacaaactgtcaaact

SEQ ID NO: 5353377 - DNA, 25 bp, Homo sapien
tctgacaggtgtgtcgtgatgcctc

SEQ ID NO: 5353378 - DNA, 25 bp, Homo sapien
tgtcctcaccggcaacctaggatga

SEQ ID NO: 5353379 - DNA, 25 bp, Homo sapien
tcttaacagggttttatacagagca

SEQ ID NO: 5353380 - DNA, 25 bp, Homo sapien
tctacctagtcttagatcccaaagg

SEQ ID NO: 5353381 - DNA, 25 bp, Homo sapien
taagtatgcatgtgagccatgttaa

SEQ ID NO: 5353382 - DNA, 25 bp, Homo sapien
tgcatttaagaacaactctacctag

SEQ ID NO: 5353383 - DNA, 25 bp, Homo sapien
ttctgtctagcaatccatgaacatg

SEQ ID NO: 5353384 - DNA, 25 bp, Homo sapien
taacctgtatgttaatttgaggaga

SEQ ID NO: 5353385 - DNA, 25 bp, Homo sapien
gaacatggcatgtctatttaaatct

SEQ ID NO: 5353386 - DNA, 25 bp, Homo sapien
gatatctttactgtattctgtctag

SEQ ID NO: 5353387 - DNA, 25 bp, Homo sapien
tggctaacaggcgtgggccctatca

SEQ ID NO: 5353388 - DNA, 25 bp, Homo sapien
tgacttagggtctggacatcaggac

SEQ ID NO: 5353389 - DNA, 25 bp, Homo sapien
cacatagacaagcatggcctctgca

SEQ ID NO: 5353390 - DNA, 25 bp, Homo sapien
ggccctatcagacagtccctggtga

SEQ ID NO: 5353391 - DNA, 25 bp, Homo sapien
tggcaccagcgtctgggtgcacgct

SEQ ID NO: 5353392 - DNA, 25 bp, Homo sapien
gtcttgaacgcctgcttcgccatgg

SEQ ID NO: 5353393 - DNA, 25 bp, Homo sapien
taatgaacagaggatactgattggt

SEQ ID NO: 5353394 - DNA, 25 bp, Homo sapien
tctagatgaggagttgtcttctcca

SEQ ID NO: 5353395 - DNA, 25 bp, Homo sapien
agtgtgcagcactggtcagcttttc

SEQ ID NO: 5353396 - DNA, 25 bp, Homo sapien
tgtgtgcccctagtgtgcagcactg

SEQ ID NO: 5353397 - DNA, 25 bp, Homo sapien
cctagtgtgcagcactggtcagctt

SEQ ID NO: 5353398 - DNA, 25 bp, Homo sapien
gcccctagtgtgcagcactggtcag

SEQ ID NO: 5353399 - DNA, 25 bp, Homo sapien
tagggcagagcttcttaagattcac

SEQ ID NO: 5353400 - DNA, 25 bp, Homo sapien
agcagtacaggcctacaccagtgta

SEQ ID NO: 5353401 - DNA, 25 bp, Homo sapien
tacctaatgtaacccaggacccatg

SEQ ID NO: 5353402 - DNA, 25 bp, Homo sapien
caaatgcctatcaatcagcccggta

SEQ ID NO: 5353403 - DNA, 25 bp, Homo sapien
tgggtccttagaccaccagggagca

SEQ ID NO: 5353404 - DNA, 25 bp, Homo sapien
ggtccttagaccaccagggagcagg

SEQ ID NO: 5353405 - DNA, 25 bp, Homo sapien
gggtccttagaccaccagggagcag

SEQ ID NO: 5353406 - DNA, 25 bp, Homo sapien
cctaacctgggacaagtggacactg

SEQ ID NO: 5353407 - DNA, 25 bp, Homo sapien
tcaggcaaactagggttacgggcca

SEQ ID NO: 5353408 - DNA, 25 bp, Homo sapien
cagtgggtgcgaggcttctctcaaa

SEQ ID NO: 5353409 - DNA, 25 bp, Homo sapien
gacactgccagggttgctactgaca

SEQ ID NO: 5353410 - DNA, 25 bp, Homo sapien
cgggtgcggggatgcgccacgtggg

SEQ ID NO: 5353411 - DNA, 25 bp, Homo sapien
agggcctcccggatgccgcgctgcc

SEQ ID NO: 5353412 - DNA, 25 bp, Homo sapien
ccagtctcgagccagctgcaccggg

SEQ ID NO: 5353413 - DNA, 25 bp, Homo sapien
gcggggatgcgccacgtgggcctgc

SEQ ID NO: 5353414 - DNA, 25 bp, Homo sapien
gccgcacggcctcgtgcagagccgt

SEQ ID NO: 5353415 - DNA, 25 bp, Homo sapien
ctcggccccatagagcagcagtagc

SEQ ID NO: 5353416 - DNA, 25 bp, Homo sapien
ggccccatagagcagcagtagcttc

SEQ ID NO: 5353417 - DNA, 25 bp, Homo sapien
atggctttgtagctgccgtgccgca

SEQ ID NO: 5353418 - DNA, 25 bp, Homo sapien
gtgcgttcaggtgggcgccacactc

SEQ ID NO: 5353419 - DNA, 25 bp, Homo sapien
tgccgggtgcgcactgccacgtgca

SEQ ID NO: 5353420 - DNA, 25 bp, Homo sapien
cacactcgatgaggtgctccaggca

SEQ ID NO: 5353421 - DNA, 25 bp, Homo sapien
tgggcgccacactcgatgaggtgct

SEQ ID NO: 5353422 - DNA, 25 bp, Homo sapien
ccgggcattgacccgggctccctgg

SEQ ID NO: 5353423 - DNA, 25 bp, Homo sapien
cgggcattgacccgggctccctggt

SEQ ID NO: 5353424 - DNA, 25 bp, Homo sapien
cattgacccgggctccctggttaag

SEQ ID NO: 5353425 - DNA, 25 bp, Homo sapien
ggcattgacccgggctccctggtta

SEQ ID NO: 5353426 - DNA, 25 bp, Homo sapien
aagtctcgcgcgtccactgtggcac

SEQ ID NO: 5353427 - DNA, 25 bp, Homo sapien
gtctcgcgcgtccactgtggcacct

SEQ ID NO: 5353428 - DNA, 25 bp, Homo sapien
caagtctcgcgcgtccactgtggca

SEQ ID NO: 5353429 - DNA, 25 bp, Homo sapien
tctcgcgcgtccactgtggcacctg

SEQ ID NO: 5353430 - DNA, 25 bp, Homo sapien
caggacttgaacacactgaaggcag

SEQ ID NO: 5353431 - DNA, 25 bp, Homo sapien
caggtccctgaatggaattgccact

SEQ ID NO: 5353432 - DNA, 25 bp, Homo sapien
caggtgccactggattcatgcccat

SEQ ID NO: 5353433 - DNA, 25 bp, Homo sapien
tcatgcccataagagtgaaaatccc

SEQ ID NO: 5353434 - DNA, 25 bp, Homo sapien
ggtactcctggttctcagcagctgc

SEQ ID NO: 5353435 - DNA, 25 bp, Homo sapien
ctgtcaagtacttgtcaatcaggta

SEQ ID NO: 5353436 - DNA, 25 bp, Homo sapien
gtcccctccgtctgtcaagtacttg

SEQ ID NO: 5353437 - DNA, 25 bp, Homo sapien
caggtactcctggttctcagcagct

SEQ ID NO: 5353438 - DNA, 25 bp, Homo sapien
gaacactgctggctcgtactaatgc

SEQ ID NO: 5353439 - DNA, 25 bp, Homo sapien
tgaagacaagaccaaatcactcccg

SEQ ID NO: 5353440 - DNA, 25 bp, Homo sapien
gattcgtatgaagtactaaccccag

SEQ ID NO: 5353441 - DNA, 25 bp, Homo sapien
gcaggtgcccaagatgtcacagctt

SEQ ID NO: 5353442 - DNA, 25 bp, Homo sapien
tgaaccaagttttccaagtcagcca

SEQ ID NO: 5353443 - DNA, 25 bp, Homo sapien
gtgtctcagtcgctttttccgtctt

SEQ ID NO: 5353444 - DNA, 25 bp, Homo sapien
atctggtactgttaaatctttcaag

SEQ ID NO: 5353445 - DNA, 25 bp, Homo sapien
agtcagccaggttatccagattaaa

SEQ ID NO: 5353446 - DNA, 25 bp, Homo sapien
ctccagtcactaggccaggctccag

SEQ ID NO: 5353447 - DNA, 25 bp, Homo sapien
tccagtcactaggccaggctccagg

SEQ ID NO: 5353448 - DNA, 25 bp, Homo sapien
tcctccagtcactaggccaggctcc

SEQ ID NO: 5353449 - DNA, 25 bp, Homo sapien
ggtcaggaactccatgtccaaatcc

SEQ ID NO: 5353450 - DNA, 25 bp, Homo sapien
actgctgaatgctgatgaagtccat

SEQ ID NO: 5353451 - DNA, 25 bp, Homo sapien
caactgctgaatgctgatgaagtcc

SEQ ID NO: 5353452 - DNA, 25 bp, Homo sapien
aactgctgaatgctgatgaagtcca

SEQ ID NO: 5353453 - DNA, 25 bp, Homo sapien
gaatagtaaccatgaaatccagccg

SEQ ID NO: 5353454 - DNA, 25 bp, Homo sapien
tgtgaacctgaaagcccagcctagg

SEQ ID NO: 5353455 - DNA, 25 bp, Homo sapien
tcaggtcccgggatggaatagtaac

SEQ ID NO: 5353456 - DNA, 25 bp, Homo sapien
gaaaccgtgatctcccaacttgcag

SEQ ID NO: 5353457 - DNA, 25 bp, Homo sapien
ccttcacccagctgaaccttgaact

SEQ ID NO: 5353458 - DNA, 25 bp, Homo sapien
gctgaaccttgaactccgccttggc

SEQ ID NO: 5353459 - DNA, 25 bp, Homo sapien
ggaagccaggcatgcccttcaccca

SEQ ID NO: 5353460 - DNA, 25 bp, Homo sapien
tcacccagctgaaccttgaactccg

SEQ ID NO: 5353461 - DNA, 25 bp, Homo sapien
gcagcttctcacatagtccctactt

SEQ ID NO: 5353462 - DNA, 25 bp, Homo sapien
cagcttctcacatagtccctacttt

SEQ ID NO: 5353463 - DNA, 25 bp, Homo sapien
tagatctttaatcttgcaatttatc

SEQ ID NO: 5353464 - DNA, 25 bp, Homo sapien
aatcttgcaatttatctttgggtgt

SEQ ID NO: 5353465 - DNA, 25 bp, Homo sapien
ttgcaatttatctttgggtgtggga

SEQ ID NO: 5353466 - DNA, 25 bp, Homo sapien
tttaatcttgcaatttatctttggg

SEQ ID NO: 5353467 - DNA, 25 bp, Homo sapien
tctactccctcgcttccacagtgac

SEQ ID NO: 5353468 - DNA, 25 bp, Homo sapien
taaacacttttagccacaccaaatc

SEQ ID NO: 5353469 - DNA, 25 bp, Homo sapien
agcatggatgctgaccaaggcaggg

SEQ ID NO: 5353470 - DNA, 25 bp, Homo sapien
gatcatctgtccagtcttaaacact

SEQ ID NO: 5353471 - DNA, 25 bp, Homo sapien
caggtcccgcaggtcactgttgcaa

SEQ ID NO: 5353472 - DNA, 25 bp, Homo sapien
aggtcccgcaggtcactgttgcaag

SEQ ID NO: 5353473 - DNA, 25 bp, Homo sapien
agggagcagatgtccccgtgacccc

SEQ ID NO: 5353474 - DNA, 25 bp, Homo sapien
tagccgtgcctttcggtcccggatg

SEQ ID NO: 5353475 - DNA, 25 bp, Homo sapien
cgtgcctttcggtcccggatggcct

SEQ ID NO: 5353476 - DNA, 25 bp, Homo sapien
ggtcacatgctagccgtgcctttcg

SEQ ID NO: 5353477 - DNA, 25 bp, Homo sapien
aggctggaatcaaagggcatacccc

SEQ ID NO: 5353478 - DNA, 25 bp, Homo sapien
gaaaggctggaatcaaagggcatac

SEQ ID NO: 5353479 - DNA, 25 bp, Homo sapien
gggcatacccccccactgggctctg

SEQ ID NO: 5353480 - DNA, 25 bp, Homo sapien
agggcatacccccccactgggctct

SEQ ID NO: 5353481 - DNA, 25 bp, Homo sapien
gttggacccatgtgatagcaggagc

SEQ ID NO: 5353482 - DNA, 25 bp, Homo sapien
tatgcagactggtcatgccgtcgtc

SEQ ID NO: 5353483 - DNA, 25 bp, Homo sapien
caggagccgcgcgatttcagtgtgc

SEQ ID NO: 5353484 - DNA, 25 bp, Homo sapien
tcagtgtgcccgcagtagctggctc

SEQ ID NO: 5353485 - DNA, 25 bp, Homo sapien
tagccggccgagtcgggctgacttg

SEQ ID NO: 5353486 - DNA, 25 bp, Homo sapien
gattaaatgcttcactcggcccagg

SEQ ID NO: 5353487 - DNA, 25 bp, Homo sapien
ccattcagggctgccgaccagattc

SEQ ID NO: 5353488 - DNA, 25 bp, Homo sapien
tgggtcctcggccttctggattaaa

SEQ ID NO: 5353489 - DNA, 25 bp, Homo sapien
tgtctcctggccgagctcgtgcggg

SEQ ID NO: 5353490 - DNA, 25 bp, Homo sapien
cgcccgcgggacaggtgtctcctgg

SEQ ID NO: 5353491 - DNA, 25 bp, Homo sapien
cgccgcccgcgggacaggtgtctcc

SEQ ID NO: 5353492 - DNA, 25 bp, Homo sapien
caggtgtctcctggccgagctcgtg

SEQ ID NO: 5353493 - DNA, 25 bp, Homo sapien
ggccccgttcatccgcctctccttg

SEQ ID NO: 5353494 - DNA, 25 bp, Homo sapien
cctggtgagaaccacgagggccgcg

SEQ ID NO: 5353495 - DNA, 25 bp, Homo sapien
ctggtgagaaccacgagggccgcgc

SEQ ID NO: 5353496 - DNA, 25 bp, Homo sapien
agctctcggggccccgttcatccgc

SEQ ID NO: 5353497 - DNA, 25 bp, Homo sapien
tgggatgcgagcagcagggcccgtc

SEQ ID NO: 5353498 - DNA, 25 bp, Homo sapien
accgcgctgggatgcgagcagcagg

SEQ ID NO: 5353499 - DNA, 25 bp, Homo sapien
tgtacgccgagcaccgcgctgggat

SEQ ID NO: 5353500 - DNA, 25 bp, Homo sapien
ccagcgtctgctgtacgccgagcac

SEQ ID NO: 5353501 - DNA, 25 bp, Homo sapien
ccggcgtcagtcgatccgccccggg

SEQ ID NO: 5353502 - DNA, 25 bp, Homo sapien
ggccccggcgtcagtcgatccgccc

SEQ ID NO: 5353503 - DNA, 25 bp, Homo sapien
cccggccccggcgtcagtcgatccg

SEQ ID NO: 5353504 - DNA, 25 bp, Homo sapien
gcgtcagtcgatccgccccgggtct

SEQ ID NO: 5353505 - DNA, 25 bp, Homo sapien
gggacacaataagttacactgttag

SEQ ID NO: 5353506 - DNA, 25 bp, Homo sapien
tacgcggggacacaataagttacac

SEQ ID NO: 5353507 - DNA, 25 bp, Homo sapien
taagttacactgttaggagccctcc

SEQ ID NO: 5353508 - DNA, 25 bp, Homo sapien
caacaaataaatacgcggggacaca

SEQ ID NO: 5353509 - DNA, 25 bp, Homo sapien
acaggaaggctatgccacaagcgcg

SEQ ID NO: 5353510 - DNA, 25 bp, Homo sapien
gagagacaaagtgatacgacccctt

SEQ ID NO: 5353511 - DNA, 25 bp, Homo sapien
tccatatgtacatcgctgcccgaca

SEQ ID NO: 5353512 - DNA, 25 bp, Homo sapien
catagctccaatgactcaccaggag

SEQ ID NO: 5353513 - DNA, 25 bp, Homo sapien
tgggtgctgggcagtatctgtccca

SEQ ID NO: 5353514 - DNA, 25 bp, Homo sapien
tgtgcaaaagtaggagctacacctc

SEQ ID NO: 5353515 - DNA, 25 bp, Homo sapien
tccctgaggtagctggtgcctgtgc

SEQ ID NO: 5353516 - DNA, 25 bp, Homo sapien
gggtcccgcgtgtctgtgattcaca

SEQ ID NO: 5353517 - DNA, 25 bp, Homo sapien
gatgactcctcggggttggagtcgg

SEQ ID NO: 5353518 - DNA, 25 bp, Homo sapien
tgatgactcctcggggttggagtcg

SEQ ID NO: 5353519 - DNA, 25 bp, Homo sapien
gactcctcggggttggagtcgggca

SEQ ID NO: 5353520 - DNA, 25 bp, Homo sapien
tgactcctcggggttggagtcgggc

SEQ ID NO: 5353521 - DNA, 25 bp, Homo sapien
ggtactatcttaagggagccatctg

SEQ ID NO: 5353522 - DNA, 25 bp, Homo sapien
gaatagtagtaaccgacaggatccc

SEQ ID NO: 5353523 - DNA, 25 bp, Homo sapien
tcatctggttcaggacagggccgga

SEQ ID NO: 5353524 - DNA, 25 bp, Homo sapien
tgtaagcgcacgtaaccattggcat

SEQ ID NO: 5353525 - DNA, 25 bp, Homo sapien
gtgcccgccaccaccgtgatgtttt

SEQ ID NO: 5353526 - DNA, 25 bp, Homo sapien
caccaccgtgatgtttttgggagtg

SEQ ID NO: 5353527 - DNA, 25 bp, Homo sapien
ccgccaccaccgtgatgtttttggg

SEQ ID NO: 5353528 - DNA, 25 bp, Homo sapien
aggtctgtgcccgccaccaccgtga

SEQ ID NO: 5353529 - DNA, 25 bp, Homo sapien
agtgcatgttagtgcaggaaagcag

SEQ ID NO: 5353530 - DNA, 25 bp, Homo sapien
tgcatgttagtgcaggaaagcaggg

SEQ ID NO: 5353531 - DNA, 25 bp, Homo sapien
gtgcatgttagtgcaggaaagcagg

SEQ ID NO: 5353532 - DNA, 25 bp, Homo sapien
tcagcccgatgcgacgggaatgaaa

SEQ ID NO: 5353533 - DNA, 25 bp, Homo sapien
atgcgacgggaatgaaaaagctcac

SEQ ID NO: 5353534 - DNA, 25 bp, Homo sapien
ggctcagcccgatgcgacgggaatg

SEQ ID NO: 5353535 - DNA, 25 bp, Homo sapien
ccgatgcgacgggaatgaaaaagct

SEQ ID NO: 5353536 - DNA, 25 bp, Homo sapien
cacggaggttgcagatgcctgaagt

SEQ ID NO: 5353537 - DNA, 25 bp, Homo sapien
tgcctgaagtgtccgaggtcatcac

SEQ ID NO: 5353538 - DNA, 25 bp, Homo sapien
catcacatgctggatcagtagagat

SEQ ID NO: 5353539 - DNA, 25 bp, Homo sapien
ctttcttactgccacggaggttgca

SEQ ID NO: 5353540 - DNA, 25 bp, Homo sapien
cggctggtgttgacgctccaggcgc

SEQ ID NO: 5353541 - DNA, 25 bp, Homo sapien
cacacagcggctggtgttgacgctc

SEQ ID NO: 5353542 - DNA, 25 bp, Homo sapien
cacggccacacagcggctggtgttg

SEQ ID NO: 5353543 - DNA, 25 bp, Homo sapien
ggctggtgttgacgctccaggcgca

SEQ ID NO: 5353544 - DNA, 25 bp, Homo sapien
ctgcaccagctgagagcgggagccg

SEQ ID NO: 5353545 - DNA, 25 bp, Homo sapien
gccacgggcagctgcaccagctgag

SEQ ID NO: 5353546 - DNA, 25 bp, Homo sapien
gcagtcggccacgggcagctgcacc

SEQ ID NO: 5353547 - DNA, 25 bp, Homo sapien
agcgggagccggcaaagagcagctt

SEQ ID NO: 5353548 - DNA, 25 bp, Homo sapien
cggaccagaacgcagcatggggaca

SEQ ID NO: 5353549 - DNA, 25 bp, Homo sapien
cggccggaccagaacgcagcatggg

SEQ ID NO: 5353550 - DNA, 25 bp, Homo sapien
gaggggcggccggaccagaacgcag

SEQ ID NO: 5353551 - DNA, 25 bp, Homo sapien
tgcgagaaaagcggggcgcaggagg

SEQ ID NO: 5353552 - DNA, 25 bp, Homo sapien
taagaaccgcagaactcagagggct

SEQ ID NO: 5353553 - DNA, 25 bp, Homo sapien
aagcacttcagggaaacagtcacgg

SEQ ID NO: 5353554 - DNA, 25 bp, Homo sapien
caaggcaactaggaacagcaggtca

SEQ ID NO: 5353555 - DNA, 25 bp, Homo sapien
taagccccttatcgacgtgacgtta

SEQ ID NO: 5353556 - DNA, 25 bp, Homo sapien
ctcctcaatcaggtgaacccagggc

SEQ ID NO: 5353557 - DNA, 25 bp, Homo sapien
tgctctgagatagcaccaggcttct

SEQ ID NO: 5353558 - DNA, 25 bp, Homo sapien
cttgctctgagatagcaccaggctt

SEQ ID NO: 5353559 - DNA, 25 bp, Homo sapien
gctctgagatagcaccaggcttctc

SEQ ID NO: 5353560 - DNA, 25 bp, Homo sapien
gaacagcactgtataggtggctcca

SEQ ID NO: 5353561 - DNA, 25 bp, Homo sapien
cgtggcgccgatgccagttgttaat

SEQ ID NO: 5353562 - DNA, 25 bp, Homo sapien
gctccatcaagtcctgtaacccggt

SEQ ID NO: 5353563 - DNA, 25 bp, Homo sapien
agcgggtgcttcttgacgaagttga

SEQ ID NO: 5353564 - DNA, 25 bp, Homo sapien
cagatggccgacaggtacatgtcac

SEQ ID NO: 5353565 - DNA, 25 bp, Homo sapien
gtacagggtcagtgtagcggtccca

SEQ ID NO: 5353566 - DNA, 25 bp, Homo sapien
gatctcttccaactggtactcacag

SEQ ID NO: 5353567 - DNA, 25 bp, Homo sapien
ggcttcctcatggtactccttatag

SEQ ID NO: 5353568 - DNA, 25 bp, Homo sapien
gcagctggttgaagtagagctgcca

SEQ ID NO: 5353569 - DNA, 25 bp, Homo sapien
tgcagggtgtgcatcgcctgcagct

SEQ ID NO: 5353570 - DNA, 25 bp, Homo sapien
gcagagcatgccagccgcgccttca

SEQ ID NO: 5353571 - DNA, 25 bp, Homo sapien
gaacgtggtccacttcctctgcagg

SEQ ID NO: 5353572 - DNA, 25 bp, Homo sapien
ctgctcggcatagcagtcggactcc

SEQ ID NO: 5353573 - DNA, 25 bp, Homo sapien
ccacctgctcggcatagcagtcgga

SEQ ID NO: 5353574 - DNA, 25 bp, Homo sapien
agcagtcggactccactgcccgctc

SEQ ID NO: 5353575 - DNA, 25 bp, Homo sapien
ttgtcgtcgtcccccgtgaagctgc

SEQ ID NO: 5353576 - DNA, 25 bp, Homo sapien
caaaaggccaggtactctgtcttca

SEQ ID NO: 5353577 - DNA, 25 bp, Homo sapien
tgagtgtggccgagtacagctcacc

SEQ ID NO: 5353578 - DNA, 25 bp, Homo sapien
gggccccatgttacgcaggataatg

SEQ ID NO: 5353579 - DNA, 25 bp, Homo sapien
ggataatgggttccgtgcccaggaa

SEQ ID NO: 5353580 - DNA, 25 bp, Homo sapien
ccatgctccaaagtgaaggtgagca

SEQ ID NO: 5353581 - DNA, 25 bp, Homo sapien
aactctccatgctccaaagtgaagg

SEQ ID NO: 5353582 - DNA, 25 bp, Homo sapien
cagcatggcccttagctgggtcata

SEQ ID NO: 5353583 - DNA, 25 bp, Homo sapien
ggtcatagggacacttgcccttccc

SEQ ID NO: 5353584 - DNA, 25 bp, Homo sapien
taggtgccacagacgtacaggtggg

SEQ ID NO: 5353585 - DNA, 25 bp, Homo sapien
ggctggaaggcgtaggtgccacaga

SEQ ID NO: 5353586 - DNA, 25 bp, Homo sapien
ggtgccacagacgtacaggtgggag

SEQ ID NO: 5353587 - DNA, 25 bp, Homo sapien
gtaggtgccacagacgtacaggtgg

SEQ ID NO: 5353588 - DNA, 25 bp, Homo sapien
aagcggatgaagttgaagcactcgg

SEQ ID NO: 5353589 - DNA, 25 bp, Homo sapien
gaagcggatgaagttgaagcactcg

SEQ ID NO: 5353590 - DNA, 25 bp, Homo sapien
agcggatgaagttgaagcactcggt

SEQ ID NO: 5353591 - DNA, 25 bp, Homo sapien
aaaggtgtccggttagtgagagcgc

SEQ ID NO: 5353592 - DNA, 25 bp, Homo sapien
gggcagaaaggtgtccggttagtga

SEQ ID NO: 5353593 - DNA, 25 bp, Homo sapien
tccggttagtgagagcgcgagggcc

SEQ ID NO: 5353594 - DNA, 25 bp, Homo sapien
gagcgcgagggccagaatgggagga

SEQ ID NO: 5353595 - DNA, 25 bp, Homo sapien
ccaggagcagcgtccaagcacccac

SEQ ID NO: 5353596 - DNA, 25 bp, Homo sapien
tgaaggcagcaccaggagcagcgtc

SEQ ID NO: 5353597 - DNA, 25 bp, Homo sapien
ctggggtgaaggcagcaccaggagc

SEQ ID NO: 5353598 - DNA, 25 bp, Homo sapien
gcaccaggagcagcgtccaagcacc

SEQ ID NO: 5353599 - DNA, 25 bp, Homo sapien
ctggatacactcagtcttcttctcc

SEQ ID NO: 5353600 - DNA, 25 bp, Homo sapien
cctttctggatacactcagtcttct

SEQ ID NO: 5353601 - DNA, 25 bp, Homo sapien
ttccctttctggatacactcagtct

SEQ ID NO: 5353602 - DNA, 25 bp, Homo sapien
tgttcttccctttctggatacactc

SEQ ID NO: 5353603 - DNA, 25 bp, Homo sapien
agaaccgccgtactaccgtggccag

SEQ ID NO: 5353604 - DNA, 25 bp, Homo sapien
gcgcccacgtacagaagcccagtgg

SEQ ID NO: 5353605 - DNA, 25 bp, Homo sapien
gaagtcctggatgccggtctgggag

SEQ ID NO: 5353606 - DNA, 25 bp, Homo sapien
tcagcgtcagtgtcaggaagtcctg

SEQ ID NO: 5353607 - DNA, 25 bp, Homo sapien
gcacagacggctatgagtactccct

SEQ ID NO: 5353608 - DNA, 25 bp, Homo sapien
catcagactgatggctcttgctctc

SEQ ID NO: 5353609 - DNA, 25 bp, Homo sapien
cagtcttgctccacgagagccagca

SEQ ID NO: 5353610 - DNA, 25 bp, Homo sapien
tgctctcagggtcaatggcacctcc

SEQ ID NO: 5353611 - DNA, 25 bp, Homo sapien
gacactgtcttacgcggcacaaggt

SEQ ID NO: 5353612 - DNA, 25 bp, Homo sapien
cagaagacactgtcttacgcggcac

SEQ ID NO: 5353613 - DNA, 25 bp, Homo sapien
tgtcttacgcggcacaaggttccac

SEQ ID NO: 5353614 - DNA, 25 bp, Homo sapien
ccccagaagacactgtcttacgcgg

SEQ ID NO: 5353615 - DNA, 25 bp, Homo sapien
ccggctctgagcttcaggccagctg

SEQ ID NO: 5353616 - DNA, 25 bp, Homo sapien
ccccggctctgagcttcaggccagc

SEQ ID NO: 5353617 - DNA, 25 bp, Homo sapien
ggctctgagcttcaggccagctgtc

SEQ ID NO: 5353618 - DNA, 25 bp, Homo sapien
ggcgcacgccccggctctgagcttc

SEQ ID NO: 5353619 - DNA, 25 bp, Homo sapien
ggcagcggtgctcccacccgcagct

SEQ ID NO: 5353620 - DNA, 25 bp, Homo sapien
cagggcgaggaaacgggcagccggg

SEQ ID NO: 5353621 - DNA, 25 bp, Homo sapien
tgctccgaggatccgcccggcagcg

SEQ ID NO: 5353622 - DNA, 25 bp, Homo sapien
aggatcgggccgcaccccgtggcgt

SEQ ID NO: 5353623 - DNA, 25 bp, Homo sapien
gcgttcggctctgaccgccgtccac

SEQ ID NO: 5353624 - DNA, 25 bp, Homo sapien
gccctccgcggcctctctgccaccg

SEQ ID NO: 5353625 - DNA, 25 bp, Homo sapien
attgcgcgcagctccagtccccggg

SEQ ID NO: 5353626 - DNA, 25 bp, Homo sapien
gggcgccgccctcgcgttcggctct

SEQ ID NO: 5353627 - DNA, 25 bp, Homo sapien
ggccgcgaaggctcgctcaggaggg

SEQ ID NO: 5353628 - DNA, 25 bp, Homo sapien
atggccacgggggaatcacactcac

SEQ ID NO: 5353629 - DNA, 25 bp, Homo sapien
gcgacccgcagcgacctgtggaccc

SEQ ID NO: 5353630 - DNA, 25 bp, Homo sapien
gcctctctgggtgcccggacctcaa

SEQ ID NO: 5353631 - DNA, 25 bp, Homo sapien
gaaaatgactcctcgtgccactgga

SEQ ID NO: 5353632 - DNA, 25 bp, Homo sapien
caaagcgcctatccccagaaaatga

SEQ ID NO: 5353633 - DNA, 25 bp, Homo sapien
ggaagacccttcaatcaacagaaag

SEQ ID NO: 5353634 - DNA, 25 bp, Homo sapien
gagccacgtcgaggcgagtatccag

SEQ ID NO: 5353635 - DNA, 25 bp, Homo sapien
tttgctggtacacataatggcccct

SEQ ID NO: 5353636 - DNA, 25 bp, Homo sapien
gagataattgagaaaagcagcccag

SEQ ID NO: 5353637 - DNA, 25 bp, Homo sapien
taaatcagtccgacagcagcttttg

SEQ ID NO: 5353638 - DNA, 25 bp, Homo sapien
cagtttggtttcagtaacaatcggg

SEQ ID NO: 5353639 - DNA, 25 bp, Homo sapien
tgtcaccctcgtgtttagtttattc

SEQ ID NO: 5353640 - DNA, 25 bp, Homo sapien
gacaaggtgggagaaggtgtgtcac

SEQ ID NO: 5353641 - DNA, 25 bp, Homo sapien
agaaggtgtgtcaccctcgtgttta

SEQ ID NO: 5353642 - DNA, 25 bp, Homo sapien
ctgacaaggtgggagaaggtgtgtc

SEQ ID NO: 5353643 - DNA, 25 bp, Homo sapien
aggaaaacatccgtcatcacagccc

SEQ ID NO: 5353644 - DNA, 25 bp, Homo sapien
cagtggctcctatcaggatatcccc

SEQ ID NO: 5353645 - DNA, 25 bp, Homo sapien
gccccggatgcggattttccagtgg

SEQ ID NO: 5353646 - DNA, 25 bp, Homo sapien
aagcaggaaaacatccgtcatcaca

SEQ ID NO: 5353647 - DNA, 25 bp, Homo sapien
cactggaggatctgaggttgacctg

SEQ ID NO: 5353648 - DNA, 25 bp, Homo sapien
tccctgctcgttcactggaggatct

SEQ ID NO: 5353649 - DNA, 25 bp, Homo sapien
ttgacctgatgctgccggggcttcg

SEQ ID NO: 5353650 - DNA, 25 bp, Homo sapien
ctgaggttgacctgatgctgccggg

SEQ ID NO: 5353651 - DNA, 25 bp, Homo sapien
acgcagccaggaacagaaacttgaa

SEQ ID NO: 5353652 - DNA, 25 bp, Homo sapien
gggggcatgtgacgcagccaggaac

SEQ ID NO: 5353653 - DNA, 25 bp, Homo sapien
gacgcagccaggaacagaaacttga

SEQ ID NO: 5353654 - DNA, 25 bp, Homo sapien
ggcatgtgacgcagccaggaacaga

SEQ ID NO: 5353655 - DNA, 25 bp, Homo sapien
ccagagctatggagacagaggcctt

SEQ ID NO: 5353656 - DNA, 25 bp, Homo sapien
acctcacattagtgacagggagaca

SEQ ID NO: 5353657 - DNA, 25 bp, Homo sapien
tttaatgtgcacaaagaaacctcac

SEQ ID NO: 5353658 - DNA, 25 bp, Homo sapien
aaaccagagctatggagacagaggc

SEQ ID NO: 5353659 - DNA, 25 bp, Homo sapien
gagagggggtcggggcggtggcaga

SEQ ID NO: 5353660 - DNA, 25 bp, Homo sapien
agagggggtcggggcggtggcagag

SEQ ID NO: 5353661 - DNA, 25 bp, Homo sapien
gggggtcggggcggtggcagaggca

SEQ ID NO: 5353662 - DNA, 25 bp, Homo sapien
ggtcggggcggtggcagaggcaggc

SEQ ID NO: 5353663 - DNA, 25 bp, Homo sapien
ctctggccttgatgcttcgcttcct

SEQ ID NO: 5353664 - DNA, 25 bp, Homo sapien
tcttgcctcatcaggctggtcagca

SEQ ID NO: 5353665 - DNA, 25 bp, Homo sapien
tctggccttgatgcttcgcttcctc

SEQ ID NO: 5353666 - DNA, 25 bp, Homo sapien
aggctcttgcctcatcaggctggtc

SEQ ID NO: 5353667 - DNA, 25 bp, Homo sapien
ttagatgtctttccaggggctgaaa

SEQ ID NO: 5353668 - DNA, 25 bp, Homo sapien
tctttccaggggctgaaatactggg

SEQ ID NO: 5353669 - DNA, 25 bp, Homo sapien
gatgtctttccaggggctgaaatac

SEQ ID NO: 5353670 - DNA, 25 bp, Homo sapien
ctttccaggggctgaaatactgggc

SEQ ID NO: 5353671 - DNA, 25 bp, Homo sapien
cattcagcacccatcgcaggctcat

SEQ ID NO: 5353672 - DNA, 25 bp, Homo sapien
ttcagcacccatcgcaggctcatgc

SEQ ID NO: 5353673 - DNA, 25 bp, Homo sapien
attcagcacccatcgcaggctcatg

SEQ ID NO: 5353674 - DNA, 25 bp, Homo sapien
tctgcgtgctgatgtggcggtccaa

SEQ ID NO: 5353675 - DNA, 25 bp, Homo sapien
caacggatgtaggtctgggtagcca

SEQ ID NO: 5353676 - DNA, 25 bp, Homo sapien
ggcggtccaactgcatgcacagcag

SEQ ID NO: 5353677 - DNA, 25 bp, Homo sapien
ggtccttgagcatggtgcggtgcat

SEQ ID NO: 5353678 - DNA, 25 bp, Homo sapien
tggcagctaacaactaccccggcca

SEQ ID NO: 5353679 - DNA, 25 bp, Homo sapien
agctaacaactaccccggccagcat

SEQ ID NO: 5353680 - DNA, 25 bp, Homo sapien
atgtcctggcagctaacaactaccc

SEQ ID NO: 5353681 - DNA, 25 bp, Homo sapien
gatgtcctggcagctaacaactacc

SEQ ID NO: 5353682 - DNA, 25 bp, Homo sapien
gcaagctgtggcacaggtagcaggc

SEQ ID NO: 5353683 - DNA, 25 bp, Homo sapien
cagcaagctgtggcacaggtagcag

SEQ ID NO: 5353684 - DNA, 25 bp, Homo sapien
agcaagctgtggcacaggtagcagg

SEQ ID NO: 5353685 - DNA, 25 bp, Homo sapien
tcataaagcaagtctgggcctgcgt

SEQ ID NO: 5353686 - DNA, 25 bp, Homo sapien
ggacactataccttgactgagacat

SEQ ID NO: 5353687 - DNA, 25 bp, Homo sapien
gcctgcgtgccggacactatacctt

SEQ ID NO: 5353688 - DNA, 25 bp, Homo sapien
ataaagcaagtctgggcctgcgtgc

SEQ ID NO: 5353689 - DNA, 25 bp, Homo sapien
ctgactcccaccagaacttggcttt

SEQ ID NO: 5353690 - DNA, 25 bp, Homo sapien
ggggcaccttgttgctcctgactcc

SEQ ID NO: 5353691 - DNA, 25 bp, Homo sapien
cctggggcaccttgttgctcctgac

SEQ ID NO: 5353692 - DNA, 25 bp, Homo sapien
ggccctggggcaccttgttgctcct

SEQ ID NO: 5353693 - DNA, 25 bp, Homo sapien
cacagagtccaggtattgcctgaga

SEQ ID NO: 5353694 - DNA, 25 bp, Homo sapien
tattgcctgagagatgatggcctca

SEQ ID NO: 5353695 - DNA, 25 bp, Homo sapien
ggctgttgctcctggcagggtggca

SEQ ID NO: 5353696 - DNA, 25 bp, Homo sapien
tgttgctcctggcagggtggcaagg

SEQ ID NO: 5353697 - DNA, 25 bp, Homo sapien
ccaggagccggctgagcgaggacag

SEQ ID NO: 5353698 - DNA, 25 bp, Homo sapien
ggcccaggagccggctgagcgagga

SEQ ID NO: 5353699 - DNA, 25 bp, Homo sapien
cccaggagccggctgagcgaggaca

SEQ ID NO: 5353700 - DNA, 25 bp, Homo sapien
gaggcccaggagccggctgagcgag

SEQ ID NO: 5353701 - DNA, 25 bp, Homo sapien
accatcatcttcattccgcctggcc

SEQ ID NO: 5353702 - DNA, 25 bp, Homo sapien
cttcattccgcctggcctgtgtctt

SEQ ID NO: 5353703 - DNA, 25 bp, Homo sapien
tcttcattccgcctggcctgtgtct

SEQ ID NO: 5353704 - DNA, 25 bp, Homo sapien
atcatcttcattccgcctggcctgt

SEQ ID NO: 5353705 - DNA, 25 bp, Homo sapien
cctctccaggataaggggttgtttg

SEQ ID NO: 5353706 - DNA, 25 bp, Homo sapien
aacactcggccgcttagggcagaca

SEQ ID NO: 5353707 - DNA, 25 bp, Homo sapien
ttgcaggaaccagcggggatgggcc

SEQ ID NO: 5353708 - DNA, 25 bp, Homo sapien
tccctacaccgacatcactgctggc

SEQ ID NO: 5353709 - DNA, 25 bp, Homo sapien
cagcttgtgggagatacagagccca

SEQ ID NO: 5353710 - DNA, 25 bp, Homo sapien
agcagcttggccatcagggactcct

SEQ ID NO: 5353711 - DNA, 25 bp, Homo sapien
tgtgacctcaatgctgtaagtcctg

SEQ ID NO: 5353712 - DNA, 25 bp, Homo sapien
tcaagttcagttctccaacgtgtgc

SEQ ID NO: 5353713 - DNA, 25 bp, Homo sapien
attcgagcaatgaccacaaggctga

SEQ ID NO: 5353714 - DNA, 25 bp, Homo sapien
tcctgctggcccagcattcgagcaa

SEQ ID NO: 5353715 - DNA, 25 bp, Homo sapien
ccagcattcgagcaatgaccacaag

SEQ ID NO: 5353716 - DNA, 25 bp, Homo sapien
tggcccagcattcgagcaatgacca

SEQ ID NO: 5353717 - DNA, 25 bp, Homo sapien
cctgagagagggtgtgctggaagtc

SEQ ID NO: 5353718 - DNA, 25 bp, Homo sapien
cagcctgagagagggtgtgctggaa

SEQ ID NO: 5353719 - DNA, 25 bp, Homo sapien
aaagcgacagcctgagagagggtgt

SEQ ID NO: 5353720 - DNA, 25 bp, Homo sapien
tgggggaaaagcgacagcctgagag

SEQ ID NO: 5353721 - DNA, 25 bp, Homo sapien
ccagtcactgagaggtggcctcggg

SEQ ID NO: 5353722 - DNA, 25 bp, Homo sapien
cagtcactgagaggtggcctcgggc

SEQ ID NO: 5353723 - DNA, 25 bp, Homo sapien
cagcagggccgccactacagccact

SEQ ID NO: 5353724 - DNA, 25 bp, Homo sapien
tgatgctcacggcccgcgtcagtga

SEQ ID NO: 5353725 - DNA, 25 bp, Homo sapien
tgcaacaagggctgctcgaagagga

SEQ ID NO: 5353726 - DNA, 25 bp, Homo sapien
ccttggccggagcctcgtcttgagg

SEQ ID NO: 5353727 - DNA, 25 bp, Homo sapien
ggacagcctgatgggcctgcaacaa

SEQ ID NO: 5353728 - DNA, 25 bp, Homo sapien
ctgacgagcgtgaggctgctctctc

SEQ ID NO: 5353729 - DNA, 25 bp, Homo sapien
cgcaaggacctgacgagcgtgaggc

SEQ ID NO: 5353730 - DNA, 25 bp, Homo sapien
tctctccctagcctgtctgcacttc

SEQ ID NO: 5353731 - DNA, 25 bp, Homo sapien
tctgcacttccgctccatcagtcag

SEQ ID NO: 5353732 - DNA, 25 bp, Homo sapien
gcttaaccagtcagtcgagcagaca

SEQ ID NO: 5353733 - DNA, 25 bp, Homo sapien
ccatgaagtcttgaacgctgaggca

SEQ ID NO: 5353734 - DNA, 25 bp, Homo sapien
agcagacaaagagtgtgacagccct

SEQ ID NO: 5353735 - DNA, 25 bp, Homo sapien
caggagttctcgctttgtgcttaac

SEQ ID NO: 5353736 - DNA, 25 bp, Homo sapien
gatccctacaagaccccgaagagat

SEQ ID NO: 5353737 - DNA, 25 bp, Homo sapien
agaccccgaagagatgcgtgtgaga

SEQ ID NO: 5353738 - DNA, 25 bp, Homo sapien
gggaggactctggatccctacaaga

SEQ ID NO: 5353739 - DNA, 25 bp, Homo sapien
tgtaaagaactcattagtgagttat

SEQ ID NO: 5353740 - DNA, 25 bp, Homo sapien
aagaactgcacgagggccagcaggt

SEQ ID NO: 5353741 - DNA, 25 bp, Homo sapien
ctgggaagaactgcacgagggccag

SEQ ID NO: 5353742 - DNA, 25 bp, Homo sapien
ggaagaactgcacgagggccagcag

SEQ ID NO: 5353743 - DNA, 25 bp, Homo sapien
agaactgcacgagggccagcaggtt

SEQ ID NO: 5353744 - DNA, 25 bp, Homo sapien
tgctggaggtcaactttgggcagca

SEQ ID NO: 5353745 - DNA, 25 bp, Homo sapien
tctcatcagtgtaggcccccggctg

SEQ ID NO: 5353746 - DNA, 25 bp, Homo sapien
gaagctgctggaggtcaactttggg

SEQ ID NO: 5353747 - DNA, 25 bp, Homo sapien
agctgctggaggtcaactttgggca

SEQ ID NO: 5353748 - DNA, 25 bp, Homo sapien
ggctgatgtccaaggcaatctcttg

SEQ ID NO: 5353749 - DNA, 25 bp, Homo sapien
tgtccaaggcaatctcttggggagc

SEQ ID NO: 5353750 - DNA, 25 bp, Homo sapien
tggcccaggctgatgtccaaggcaa

SEQ ID NO: 5353751 - DNA, 25 bp, Homo sapien
ccaaggcaatctcttggggagcgtc

SEQ ID NO: 5353752 - DNA, 25 bp, Homo sapien
ctcattctcattcaggccagcctcg

SEQ ID NO: 5353753 - DNA, 25 bp, Homo sapien
tctcattcaggccagcctcgcctgg

SEQ ID NO: 5353754 - DNA, 25 bp, Homo sapien
tcctcattctcattcaggccagcct

SEQ ID NO: 5353755 - DNA, 25 bp, Homo sapien
ttcaggccagcctcgcctggaagca

SEQ ID NO: 5353756 - DNA, 25 bp, Homo sapien
tgacggacccaatctggctgagcac

SEQ ID NO: 5353757 - DNA, 25 bp, Homo sapien
tgtcaccctgagctgatgtgctgtc

SEQ ID NO: 5353758 - DNA, 25 bp, Homo sapien
gcaccagatgatgttagagaccagg

SEQ ID NO: 5353759 - DNA, 25 bp, Homo sapien
tgtctgctgataagacctgcatggc

SEQ ID NO: 5353760 - DNA, 25 bp, Homo sapien
catcaccctttccacaagcctccct

SEQ ID NO: 5353761 - DNA, 25 bp, Homo sapien
agagcctgggcgggatcaccttcat

SEQ ID NO: 5353762 - DNA, 25 bp, Homo sapien
gagagcctgggcgggatcaccttca

SEQ ID NO: 5353763 - DNA, 25 bp, Homo sapien
acgagagcctgggcgggatcacctt

SEQ ID NO: 5353764 - DNA, 25 bp, Homo sapien
aggacgagagcctgggcgggatcac

SEQ ID NO: 5353765 - DNA, 25 bp, Homo sapien
cagccttgagcgtgcaacacgcgca

SEQ ID NO: 5353766 - DNA, 25 bp, Homo sapien
aacacgcgcagccataggtgggtgt

SEQ ID NO: 5353767 - DNA, 25 bp, Homo sapien
gggcactcagagtcgactacaaaca

SEQ ID NO: 5353768 - DNA, 25 bp, Homo sapien
caggtttctcagcacggggcactca

SEQ ID NO: 5353769 - DNA, 25 bp, Homo sapien
gccaggagatctgcatggcccagct

SEQ ID NO: 5353770 - DNA, 25 bp, Homo sapien
ttgcagcgtgggcatgagcccctct

SEQ ID NO: 5353771 - DNA, 25 bp, Homo sapien
cagctgcggaaggactgcatctttc

SEQ ID NO: 5353772 - DNA, 25 bp, Homo sapien
tctcatcattgagcagagggccact

SEQ ID NO: 5353773 - DNA, 25 bp, Homo sapien
tctgaatcctctgatgggaaatggt

SEQ ID NO: 5353774 - DNA, 25 bp, Homo sapien
tcagccctgcggctgtcagccaggt

SEQ ID NO: 5353775 - DNA, 25 bp, Homo sapien
ggaaatggtgtcaacgccaggccaa

SEQ ID NO: 5353776 - DNA, 25 bp, Homo sapien
aggtcctcgagggtagttctgaatc

SEQ ID NO: 5353777 - DNA, 25 bp, Homo sapien
acttcttgcagtgaggggcaccaca

SEQ ID NO: 5353778 - DNA, 25 bp, Homo sapien
gctgtggaatgcctccctgacttct

SEQ ID NO: 5353779 - DNA, 25 bp, Homo sapien
caccgtgccaaaagggccccagagg

SEQ ID NO: 5353780 - DNA, 25 bp, Homo sapien
gaggggcaccacaggtgcttgtctt

SEQ ID NO: 5353781 - DNA, 25 bp, Homo sapien
tcaaggtatggctgcacttgggtca

SEQ ID NO: 5353782 - DNA, 25 bp, Homo sapien
ttcaaggtatggctgcacttgggtc

SEQ ID NO: 5353783 - DNA, 25 bp, Homo sapien
cagcagtgcccactctgccagcctc

SEQ ID NO: 5353784 - DNA, 25 bp, Homo sapien
actctgccagcctccagctgggcat

SEQ ID NO: 5353785 - DNA, 25 bp, Homo sapien
ccactctgccagcctccagctgggc

SEQ ID NO: 5353786 - DNA, 25 bp, Homo sapien
aggcagcagtgcccactctgccagc

SEQ ID NO: 5353787 - DNA, 25 bp, Homo sapien
ctagaagtgggccatgcactcagct

SEQ ID NO: 5353788 - DNA, 25 bp, Homo sapien
ttcctgagctctgtttgtccccgat

SEQ ID NO: 5353789 - DNA, 25 bp, Homo sapien
tagaagtgggccatgcactcagctt

SEQ ID NO: 5353790 - DNA, 25 bp, Homo sapien
gagctctgtttgtccccgatgaggg

SEQ ID NO: 5353791 - DNA, 25 bp, Homo sapien
ggacaatgggaccagccctgtggaa

SEQ ID NO: 5353792 - DNA, 25 bp, Homo sapien
ggactatgccaagcacatgacagct

SEQ ID NO: 5353793 - DNA, 25 bp, Homo sapien
ttggagactttgaaaggactatgcc

SEQ ID NO: 5353794 - DNA, 25 bp, Homo sapien
gggtctagacaacattctcacagca

SEQ ID NO: 5353795 - DNA, 25 bp, Homo sapien
catgagaacggtatggggtccaggg

SEQ ID NO: 5353796 - DNA, 25 bp, Homo sapien
tgagaacggtatggggtccagggcc

SEQ ID NO: 5353797 - DNA, 25 bp, Homo sapien
ccggcatgagaacggtatggggtcc

SEQ ID NO: 5353798 - DNA, 25 bp, Homo sapien
ggcatgagaacggtatggggtccag

SEQ ID NO: 5353799 - DNA, 25 bp, Homo sapien
tgactggctcgcttcccacctcctg

SEQ ID NO: 5353800 - DNA, 25 bp, Homo sapien
gatgagaaggtcgtggggcctccac

SEQ ID NO: 5353801 - DNA, 25 bp, Homo sapien
gctctgactggctcgcttcccacct

SEQ ID NO: 5353802 - DNA, 25 bp, Homo sapien
ccaccgccacaggagacgcgacctg

SEQ ID NO: 5353803 - DNA, 25 bp, Homo sapien
acaatgagatcccacagaagaccaa

SEQ ID NO: 5353804 - DNA, 25 bp, Homo sapien
aaggaagattccatccacaatgaga

SEQ ID NO: 5353805 - DNA, 25 bp, Homo sapien
caatgagatcccacagaagaccaaa

SEQ ID NO: 5353806 - DNA, 25 bp, Homo sapien
aggaagattccatccacaatgagat

SEQ ID NO: 5353807 - DNA, 25 bp, Homo sapien
catacattcattgagggtgtacacc

SEQ ID NO: 5353808 - DNA, 25 bp, Homo sapien
ggtgtacacctcctgctgatgtcca

SEQ ID NO: 5353809 - DNA, 25 bp, Homo sapien
catggctgaacacttgagtctctcc

SEQ ID NO: 5353810 - DNA, 25 bp, Homo sapien
gagtctctcccaacaagaacataca

SEQ ID NO: 5353811 - DNA, 25 bp, Homo sapien
gagtacacgggatcgagtccctgag

SEQ ID NO: 5353812 - DNA, 25 bp, Homo sapien
cccgagttgcctttgactggacaag

SEQ ID NO: 5353813 - DNA, 25 bp, Homo sapien
tccaagaacatcgaaggagcagggt

SEQ ID NO: 5353814 - DNA, 25 bp, Homo sapien
tgcacaccctattaaagccccaggg

SEQ ID NO: 5353815 - DNA, 25 bp, Homo sapien
gcttggaccgattcactgagaggtt

SEQ ID NO: 5353816 - DNA, 25 bp, Homo sapien
taagtccactgggtacaccaggtcc

SEQ ID NO: 5353817 - DNA, 25 bp, Homo sapien
tgtgatcgctggtgaagaaattagc

SEQ ID NO: 5353818 - DNA, 25 bp, Homo sapien
ctgagaggttagaccgtaagtccac

SEQ ID NO: 5353819 - DNA, 25 bp, Homo sapien
ctagtggcaggcctgcggtcctcac

SEQ ID NO: 5353820 - DNA, 25 bp, Homo sapien
ataccgggcagtcaggcatgtgcag

SEQ ID NO: 5353821 - DNA, 25 bp, Homo sapien
tcaggcatgtgcaggtagaggatgt

SEQ ID NO: 5353822 - DNA, 25 bp, Homo sapien
agggataccgggcagtcaggcatgt

SEQ ID NO: 5353823 - DNA, 25 bp, Homo sapien
actggagcagggataccgggcagtc

SEQ ID NO: 5353824 - DNA, 25 bp, Homo sapien
gcgcaggaaggagagctgttgggct

SEQ ID NO: 5353825 - DNA, 25 bp, Homo sapien
caggaaggagagctgttgggctggc

SEQ ID NO: 5353826 - DNA, 25 bp, Homo sapien
ggaaggagagctgttgggctggcgg

SEQ ID NO: 5353827 - DNA, 25 bp, Homo sapien
ctgcgcaggaaggagagctgttggg

SEQ ID NO: 5353828 - DNA, 25 bp, Homo sapien
tcaagaacacggatgctgggtccaa

SEQ ID NO: 5353829 - DNA, 25 bp, Homo sapien
gttatcctgagaatgttggagggcc

SEQ ID NO: 5353830 - DNA, 25 bp, Homo sapien
tctgtccacggccaagccaatgctg

SEQ ID NO: 5353831 - DNA, 25 bp, Homo sapien
caagccaatgctgaggtccgaagtt

SEQ ID NO: 5353832 - DNA, 25 bp, Homo sapien
tgctcagcctctgagatgagagaac

SEQ ID NO: 5353833 - DNA, 25 bp, Homo sapien
tgagatgagagaacatccagcatgt

SEQ ID NO: 5353834 - DNA, 25 bp, Homo sapien
gatgagagaacatccagcatgttca

SEQ ID NO: 5353835 - DNA, 25 bp, Homo sapien
cctctgagatgagagaacatccagc

SEQ ID NO: 5353836 - DNA, 25 bp, Homo sapien
aggtggccgaagagaccacagcagc

SEQ ID NO: 5353837 - DNA, 25 bp, Homo sapien
cacctctgtgttcctcaccaggtgg

SEQ ID NO: 5353838 - DNA, 25 bp, Homo sapien
ctaaggtggccgaagagaccacagc

SEQ ID NO: 5353839 - DNA, 25 bp, Homo sapien
ggtgggcaaggacagccccttctcc

SEQ ID NO: 5353840 - DNA, 25 bp, Homo sapien
gacaatgtcacctatatctctaaaa

SEQ ID NO: 5353841 - DNA, 25 bp, Homo sapien
taaaaactgacacattcaaattggc

SEQ ID NO: 5353842 - DNA, 25 bp, Homo sapien
cacattcaaattggcctgatcacct

SEQ ID NO: 5353843 - DNA, 25 bp, Homo sapien
aattatgtgcaacaaaattagtaaa

SEQ ID NO: 5353844 - DNA, 25 bp, Homo sapien
gcttcaggagtgaggagtccaggat

SEQ ID NO: 5353845 - DNA, 25 bp, Homo sapien
ttcaggagtgaggagtccaggatgc

SEQ ID NO: 5353846 - DNA, 25 bp, Homo sapien
caggagtgaggagtccaggatgcat

SEQ ID NO: 5353847 - DNA, 25 bp, Homo sapien
agtgaggagtccaggatgcatggca

SEQ ID NO: 5353848 - DNA, 25 bp, Homo sapien
acactgagtacttttccaccagcat

SEQ ID NO: 5353849 - DNA, 25 bp, Homo sapien
tggatggaccggcgggatggtctgc

SEQ ID NO: 5353850 - DNA, 25 bp, Homo sapien
ctggatggaccggcgggatggtctg

SEQ ID NO: 5353851 - DNA, 25 bp, Homo sapien
gggacactgagtacttttccaccag

SEQ ID NO: 5353852 - DNA, 25 bp, Homo sapien
gggccgggcatcagcagatgcacct

SEQ ID NO: 5353853 - DNA, 25 bp, Homo sapien
gcagatgcacctcggcctgaggcat

SEQ ID NO: 5353854 - DNA, 25 bp, Homo sapien
caggagggccgggcatcagcagatg

SEQ ID NO: 5353855 - DNA, 25 bp, Homo sapien
ggagggccgggcatcagcagatgca

SEQ ID NO: 5353856 - DNA, 25 bp, Homo sapien
cctgccttgcagtccttgcggcaaa

SEQ ID NO: 5353857 - DNA, 25 bp, Homo sapien
cttgcagtccttgcggcaaaccaag

SEQ ID NO: 5353858 - DNA, 25 bp, Homo sapien
aaccaaggggacagcgccacctgct

SEQ ID NO: 5353859 - DNA, 25 bp, Homo sapien
aagagcccacctaggcacgcaggag

SEQ ID NO: 5353860 - DNA, 25 bp, Homo sapien
aaagcccacatgattagagcccaca

SEQ ID NO: 5353861 - DNA, 25 bp, Homo sapien
ccccagcgttagcctttctcaggag

SEQ ID NO: 5353862 - DNA, 25 bp, Homo sapien
tagcctttctcaggagcccttgcag

SEQ ID NO: 5353863 - DNA, 25 bp, Homo sapien
cacatcatcagagcccacacctttc

SEQ ID NO: 5353864 - DNA, 25 bp, Homo sapien
tccaaggagttgagattgagacact

SEQ ID NO: 5353865 - DNA, 25 bp, Homo sapien
aaggagttgagattgagacactcct

SEQ ID NO: 5353866 - DNA, 25 bp, Homo sapien
tcatcaagatccaaggagttgagat

SEQ ID NO: 5353867 - DNA, 25 bp, Homo sapien
catcaagatccaaggagttgagatt

SEQ ID NO: 5353868 - DNA, 25 bp, Homo sapien
tcgagggccagagccgggggtcagt

SEQ ID NO: 5353869 - DNA, 25 bp, Homo sapien
cagagccgggggtcagtgttgttcc

SEQ ID NO: 5353870 - DNA, 25 bp, Homo sapien
gggccagagccgggggtcagtgttg

SEQ ID NO: 5353871 - DNA, 25 bp, Homo sapien
gtcgagggccagagccgggggtcag

SEQ ID NO: 5353872 - DNA, 25 bp, Homo sapien
taagtagtccaggttgttgaagtag

SEQ ID NO: 5353873 - DNA, 25 bp, Homo sapien
gttgttgaagtagcttcctgagccc

SEQ ID NO: 5353874 - DNA, 25 bp, Homo sapien
tgcagtaagtagtccaggttgttga

SEQ ID NO: 5353875 - DNA, 25 bp, Homo sapien
tcttctcctgcagtaagtagtccag

SEQ ID NO: 5353876 - DNA, 25 bp, Homo sapien
tcttcgggtccaagtccaggtgttc

SEQ ID NO: 5353877 - DNA, 25 bp, Homo sapien
ccaggtgcctgtatcttgggcttct

SEQ ID NO: 5353878 - DNA, 25 bp, Homo sapien
tcaggcctgacgtgttccagaacag

SEQ ID NO: 5353879 - DNA, 25 bp, Homo sapien
caccctcgggttgaggaattccacg

SEQ ID NO: 5353880 - DNA, 25 bp, Homo sapien
agacaggacagaatactgtggtccc

SEQ ID NO: 5353881 - DNA, 25 bp, Homo sapien
cagacaggacagaatactgtggtcc

SEQ ID NO: 5353882 - DNA, 25 bp, Homo sapien
gccactgtcccagacgtcaagccac

SEQ ID NO: 5353883 - DNA, 25 bp, Homo sapien
tgccactgtcccagacgtcaagcca

SEQ ID NO: 5353884 - DNA, 25 bp, Homo sapien
ccactgtcccagacgtcaagccaca

SEQ ID NO: 5353885 - DNA, 25 bp, Homo sapien
gcaaatgggtgagagaacaacttgg

SEQ ID NO: 5353886 - DNA, 25 bp, Homo sapien
cagcaaatgggtgagagaacaactt

SEQ ID NO: 5353887 - DNA, 25 bp, Homo sapien
agaggaagggctagcaccgtctcct

SEQ ID NO: 5353888 - DNA, 25 bp, Homo sapien
aggaagggctagcaccgtctcctgg

SEQ ID NO: 5353889 - DNA, 25 bp, Homo sapien
tctcagaggaagggctagcaccgtc

SEQ ID NO: 5353890 - DNA, 25 bp, Homo sapien
tcagaggaagggctagcaccgtctc

SEQ ID NO: 5353891 - DNA, 25 bp, Homo sapien
ggcctttgttctactccagcgttga

SEQ ID NO: 5353892 - DNA, 25 bp, Homo sapien
cgttgacggtttttgctgttccagt

SEQ ID NO: 5353893 - DNA, 25 bp, Homo sapien
cttctcaagatcacgaagcccaggg

SEQ ID NO: 5353894 - DNA, 25 bp, Homo sapien
ccagggcactctgcaagggtttctg

SEQ ID NO: 5353895 - DNA, 25 bp, Homo sapien
ggggggcgaccggcaagagggagca

SEQ ID NO: 5353896 - DNA, 25 bp, Homo sapien
ggcgaccggcaagagggagcacttt

SEQ ID NO: 5353897 - DNA, 25 bp, Homo sapien
gggcgaccggcaagagggagcactt

SEQ ID NO: 5353898 - DNA, 25 bp, Homo sapien
ggggcgaccggcaagagggagcact

SEQ ID NO: 5353899 - DNA, 25 bp, Homo sapien
caaatgggtaatacgttgacttcgt

SEQ ID NO: 5353900 - DNA, 25 bp, Homo sapien
tacgttgacttcgtaacgaggtctc

SEQ ID NO: 5353901 - DNA, 25 bp, Homo sapien
acttcgtaacgaggtctcagggtgg

SEQ ID NO: 5353902 - DNA, 25 bp, Homo sapien
ctcaaatgggtaatacgttgacttc

SEQ ID NO: 5353903 - DNA, 25 bp, Homo sapien
tggtcacctcagctaacaaagcgct

SEQ ID NO: 5353904 - DNA, 25 bp, Homo sapien
cagggttcttgctaccttgaccagg

SEQ ID NO: 5353905 - DNA, 25 bp, Homo sapien
cagactcggatggtgtgataacagc

SEQ ID NO: 5353906 - DNA, 25 bp, Homo sapien
caaaggttatactactctgcctcta

SEQ ID NO: 5353907 - DNA, 25 bp, Homo sapien
cctgcctcctgagttgtggagcgag

SEQ ID NO: 5353908 - DNA, 25 bp, Homo sapien
ctgagttgtggagcgaggcccgcac

SEQ ID NO: 5353909 - DNA, 25 bp, Homo sapien
tcctgagttgtggagcgaggcccgc

SEQ ID NO: 5353910 - DNA, 25 bp, Homo sapien
gcctcctgagttgtggagcgaggcc

SEQ ID NO: 5353911 - DNA, 25 bp, Homo sapien
gtgagggagggtggcgggaattcgc

SEQ ID NO: 5353912 - DNA, 25 bp, Homo sapien
cttggccacatagggcgggaagggc

SEQ ID NO: 5353913 - DNA, 25 bp, Homo sapien
agccttggccacatagggcgggaag

SEQ ID NO: 5353914 - DNA, 25 bp, Homo sapien
aattcgcacggcctcagaggacggg

SEQ ID NO: 5353915 - DNA, 25 bp, Homo sapien
tgggaggaccccaagagttgcgtcc

SEQ ID NO: 5353916 - DNA, 25 bp, Homo sapien
tggaacctaaagatccagttctggg

SEQ ID NO: 5353917 - DNA, 25 bp, Homo sapien
agttgcgtccctagatccagggccg

SEQ ID NO: 5353918 - DNA, 25 bp, Homo sapien
tgagttccgactccaaaccaagcgg

SEQ ID NO: 5353919 - DNA, 25 bp, Homo sapien
tagggatccactgccctaacttctt

SEQ ID NO: 5353920 - DNA, 25 bp, Homo sapien
tctttgtgttcaggctctgtgtcct

SEQ ID NO: 5353921 - DNA, 25 bp, Homo sapien
ctgtgtccttgagaccctccacatt

SEQ ID NO: 5353922 - DNA, 25 bp, Homo sapien
cttgagaccctccacattcctccca

SEQ ID NO: 5353923 - DNA, 25 bp, Homo sapien
tgggagtggatgtcaaggcccttaa

SEQ ID NO: 5353924 - DNA, 25 bp, Homo sapien
agggcaggacagaatccagttcagg

SEQ ID NO: 5353925 - DNA, 25 bp, Homo sapien
ttgtaaaattgagtgtgggagtgga

SEQ ID NO: 5353926 - DNA, 25 bp, Homo sapien
caggttcaggactcaaggaacagag

SEQ ID NO: 5353927 - DNA, 25 bp, Homo sapien
tgacttctttgatgtcctggatttt

SEQ ID NO: 5353928 - DNA, 25 bp, Homo sapien
caagaggagcttgaataagataaat

SEQ ID NO: 5353929 - DNA, 25 bp, Homo sapien
ttgcctgcaagaggagcttgaataa

SEQ ID NO: 5353930 - DNA, 25 bp, Homo sapien
gacttctttgatgtcctggattttc

SEQ ID NO: 5353931 - DNA, 25 bp, Homo sapien
tggaccactctcgatataagaagct

SEQ ID NO: 5353932 - DNA, 25 bp, Homo sapien
taccctttatacttatgaagatgtg

SEQ ID NO: 5353933 - DNA, 25 bp, Homo sapien
tgaagatgtgagttgcagaaaaaca

SEQ ID NO: 5353934 - DNA, 25 bp, Homo sapien
gatatccatgagctgtattctgaga

SEQ ID NO: 5353935 - DNA, 25 bp, Homo sapien
gttttctcgctgaacagcagatggc

SEQ ID NO: 5353936 - DNA, 25 bp, Homo sapien
ccagttgttgaaagtaacagtcgtt

SEQ ID NO: 5353937 - DNA, 25 bp, Homo sapien
gaaatccagttgttgaaagtaacag

SEQ ID NO: 5353938 - DNA, 25 bp, Homo sapien
tttttcagttttctcgctgaacagc

SEQ ID NO: 5353939 - DNA, 25 bp, Homo sapien
ccacacattaggcttctgtgctaat

SEQ ID NO: 5353940 - DNA, 25 bp, Homo sapien
cacacattaggcttctgtgctaata

SEQ ID NO: 5353941 - DNA, 25 bp, Homo sapien
ggctatactctacccacaaagtagc

SEQ ID NO: 5353942 - DNA, 25 bp, Homo sapien
gtagcatgagttatggaaatgtgtt

SEQ ID NO: 5353943 - DNA, 25 bp, Homo sapien
aaagtagcatgagttatggaaatgt

SEQ ID NO: 5353944 - DNA, 25 bp, Homo sapien
cctgggaggggctatactctaccca

SEQ ID NO: 5353945 - DNA, 25 bp, Homo sapien
ttaaaatctccctctcatgggccat

SEQ ID NO: 5353946 - DNA, 25 bp, Homo sapien
ccttttaaaatctccctctcatggg

SEQ ID NO: 5353947 - DNA, 25 bp, Homo sapien
catctggtttatgggacttttcctt

SEQ ID NO: 5353948 - DNA, 25 bp, Homo sapien
tggtttatgggacttttccttcagc

SEQ ID NO: 5353949 - DNA, 25 bp, Homo sapien
tccttttgaagcatctccaagtgat

SEQ ID NO: 5353950 - DNA, 25 bp, Homo sapien
attgtcttcgtcctccttttgaagc

SEQ ID NO: 5353951 - DNA, 25 bp, Homo sapien
aattgtcttcgtcctccttttgaag

SEQ ID NO: 5353952 - DNA, 25 bp, Homo sapien
ttttgaagcatctccaagtgatgtt

SEQ ID NO: 5353953 - DNA, 25 bp, Homo sapien
ctactccagtgtcatgtgcatcttc

SEQ ID NO: 5353954 - DNA, 25 bp, Homo sapien
tgttcataatgattgtccagttgat

SEQ ID NO: 5353955 - DNA, 25 bp, Homo sapien
tactccagtgtcatgtgcatcttcc

SEQ ID NO: 5353956 - DNA, 25 bp, Homo sapien
tgtgttcataatgattgtccagttg

SEQ ID NO: 5353957 - DNA, 25 bp, Homo sapien
caggaatctggaacttgaatggtgt

SEQ ID NO: 5353958 - DNA, 25 bp, Homo sapien
tccaggaatctggaacttgaatggt

SEQ ID NO: 5353959 - DNA, 25 bp, Homo sapien
ggaatctggaacttgaatggtgttt

SEQ ID NO: 5353960 - DNA, 25 bp, Homo sapien
ccaggaatctggaacttgaatggtg

SEQ ID NO: 5353961 - DNA, 25 bp, Homo sapien
ctataaggggctcgttggatctcat

SEQ ID NO: 5353962 - DNA, 25 bp, Homo sapien
ggacccccagtctctggatatagat

SEQ ID NO: 5353963 - DNA, 25 bp, Homo sapien
tctctggatatagatcctcagtgtc

SEQ ID NO: 5353964 - DNA, 25 bp, Homo sapien
ccccagtctctggatatagatcctc

SEQ ID NO: 5353965 - DNA, 25 bp, Homo sapien
ttacaggacccccagtctctggata

SEQ ID NO: 5353966 - DNA, 25 bp, Homo sapien
ccatatgagggaactcttggtgaca

SEQ ID NO: 5353967 - DNA, 25 bp, Homo sapien
ccagtgtaaaagaaaggcctgacag

SEQ ID NO: 5353968 - DNA, 25 bp, Homo sapien
gaaaagttaaggagccagctgggta

SEQ ID NO: 5353969 - DNA, 25 bp, Homo sapien
gagccagctgggtaactccatatga

SEQ ID NO: 5353970 - DNA, 25 bp, Homo sapien
ttccactttcaaaatcaagaaacac

SEQ ID NO: 5353971 - DNA, 25 bp, Homo sapien
tccactttcaaaatcaagaaacaca

SEQ ID NO: 5353972 - DNA, 25 bp, Homo sapien
cttccactttcaaaatcaagaaaca

SEQ ID NO: 5353973 - DNA, 25 bp, Homo sapien
ccactttcaaaatcaagaaacacac

SEQ ID NO: 5353974 - DNA, 25 bp, Homo sapien
tattgtgattggttacttcacaatg

SEQ ID NO: 5353975 - DNA, 25 bp, Homo sapien
ctctatatagtgaggaaactctggg

SEQ ID NO: 5353976 - DNA, 25 bp, Homo sapien
gtgattggttacttcacaatggaag

SEQ ID NO: 5353977 - DNA, 25 bp, Homo sapien
tgtcctcagagttaaccattgtgct

SEQ ID NO: 5353978 - DNA, 25 bp, Homo sapien
aagaaagagattctcactagaaaac

SEQ ID NO: 5353979 - DNA, 25 bp, Homo sapien
aagcggttgagcctgtacaccagtc

SEQ ID NO: 5353980 - DNA, 25 bp, Homo sapien
gcggttgagcctgtacaccagtcca

SEQ ID NO: 5353981 - DNA, 25 bp, Homo sapien
cggaagcggttgagcctgtacacca

SEQ ID NO: 5353982 - DNA, 25 bp, Homo sapien
ttgagcctgtacaccagtccagtga

SEQ ID NO: 5353983 - DNA, 25 bp, Homo sapien
ctgcaaggaagtaggttgagttggt

SEQ ID NO: 5353984 - DNA, 25 bp, Homo sapien
tgcaaggaagtaggttgagttggtt

SEQ ID NO: 5353985 - DNA, 25 bp, Homo sapien
gcaaggaagtaggttgagttggtta

SEQ ID NO: 5353986 - DNA, 25 bp, Homo sapien
ctgatcatctgtgcccgtaaaacca

SEQ ID NO: 5353987 - DNA, 25 bp, Homo sapien
ttcttccttatggagaaccggatgc

SEQ ID NO: 5353988 - DNA, 25 bp, Homo sapien
gcagcttcctatactcattcctgat

SEQ ID NO: 5353989 - DNA, 25 bp, Homo sapien
tatggagaaccggatgcagcttcct

SEQ ID NO: 5353990 - DNA, 25 bp, Homo sapien
cataaaatcctcatttgctttaaga

SEQ ID NO: 5353991 - DNA, 25 bp, Homo sapien
ccataaaatcctcatttgctttaag

SEQ ID NO: 5353992 - DNA, 25 bp, Homo sapien
aggagactcttgtccatgtcacaga

SEQ ID NO: 5353993 - DNA, 25 bp, Homo sapien
tcttctttgtttgcctatgggtccc

SEQ ID NO: 5353994 - DNA, 25 bp, Homo sapien
gcctatgggtcccacatatttgttt

SEQ ID NO: 5353995 - DNA, 25 bp, Homo sapien
agcagaggagactcttgtccatgtc

SEQ ID NO: 5353996 - DNA, 25 bp, Homo sapien
tgcacggcagttggcaggactttgg

SEQ ID NO: 5353997 - DNA, 25 bp, Homo sapien
catgcacggcagttggcaggacttt

SEQ ID NO: 5353998 - DNA, 25 bp, Homo sapien
ctgcatgcacggcagttggcaggac

SEQ ID NO: 5353999 - DNA, 25 bp, Homo sapien
cacggcagttggcaggactttgggc

SEQ ID NO: 5354000 - DNA, 25 bp, Homo sapien
ccacagcagatggtgacagggtcta

SEQ ID NO: 5354001 - DNA, 25 bp, Homo sapien
aaggcagagagggcctgcagaagct

SEQ ID NO: 5354002 - DNA, 25 bp, Homo sapien
caggaaaggcagagagggcctgcag

SEQ ID NO: 5354003 - DNA, 25 bp, Homo sapien
gcagagagggcctgcagaagctgtg

SEQ ID NO: 5354004 - DNA, 25 bp, Homo sapien
aggcatgtgagaagtctgagtccat

SEQ ID NO: 5354005 - DNA, 25 bp, Homo sapien
ccagttgcaaagctactctgtgggc

SEQ ID NO: 5354006 - DNA, 25 bp, Homo sapien
ggaagtccccaaagccagttgcaaa

SEQ ID NO: 5354007 - DNA, 25 bp, Homo sapien
gagtctcacagtgcagtgctggtag

SEQ ID NO: 5354008 - DNA, 25 bp, Homo sapien
gctggtagctttcggaagtccccaa

SEQ ID NO: 5354009 - DNA, 25 bp, Homo sapien
ccatacatttgctcattaggactca

SEQ ID NO: 5354010 - DNA, 25 bp, Homo sapien
gggttccatacatttgctcattagg

SEQ ID NO: 5354011 - DNA, 25 bp, Homo sapien
acatttgctcattaggactcaggaa

SEQ ID NO: 5354012 - DNA, 25 bp, Homo sapien
ccatgggttccatacatttgctcat

SEQ ID NO: 5354013 - DNA, 25 bp, Homo sapien
agtgcaccttctcgcaatgaggctc

SEQ ID NO: 5354014 - DNA, 25 bp, Homo sapien
cttgccttgactgatcaggactcct

SEQ ID NO: 5354015 - DNA, 25 bp, Homo sapien
tgatcaggactcctcagtgcacctt

SEQ ID NO: 5354016 - DNA, 25 bp, Homo sapien
ctcagtgcaccttctcgcaatgagg

SEQ ID NO: 5354017 - DNA, 25 bp, Homo sapien
cgcgagtagggctttaggtctgtaa

SEQ ID NO: 5354018 - DNA, 25 bp, Homo sapien
tgcgaagaaccacagagttgaaggc

SEQ ID NO: 5354019 - DNA, 25 bp, Homo sapien
cactgggagtctcacaggaaagtaa

SEQ ID NO: 5354020 - DNA, 25 bp, Homo sapien
gagccaaatatgtttcttgcgaaga

SEQ ID NO: 5354021 - DNA, 25 bp, Homo sapien
tgtccacagagagtcgagtcaggtg

SEQ ID NO: 5354022 - DNA, 25 bp, Homo sapien
cagtgtgatggccccaaacataaag

SEQ ID NO: 5354023 - DNA, 25 bp, Homo sapien
ccaggggatgtgtccacagagagtc

SEQ ID NO: 5354024 - DNA, 25 bp, Homo sapien
ggatgtgtccacagagagtcgagtc

SEQ ID NO: 5354025 - DNA, 25 bp, Homo sapien
tccagtgttggctgccacatcctca

SEQ ID NO: 5354026 - DNA, 25 bp, Homo sapien
ctccagtgttggctgccacatcctc

SEQ ID NO: 5354027 - DNA, 25 bp, Homo sapien
ccagtgttggctgccacatcctcac

SEQ ID NO: 5354028 - DNA, 25 bp, Homo sapien
cctccagtgttggctgccacatcct

SEQ ID NO: 5354029 - DNA, 25 bp, Homo sapien
cgctaaggtttcctgctgtcgtcat

SEQ ID NO: 5354030 - DNA, 25 bp, Homo sapien
gaccagccgctaaggtttcctgctg

SEQ ID NO: 5354031 - DNA, 25 bp, Homo sapien
cagccgctaaggtttcctgctgtcg

SEQ ID NO: 5354032 - DNA, 25 bp, Homo sapien
tggaccagccgctaaggtttcctgc

SEQ ID NO: 5354033 - DNA, 25 bp, Homo sapien
ctctggtgaagagggagaactcggg

SEQ ID NO: 5354034 - DNA, 25 bp, Homo sapien
acgtggggacctggtgttgctcctc

SEQ ID NO: 5354035 - DNA, 25 bp, Homo sapien
caggagaccctcgtggacgtgggga

SEQ ID NO: 5354036 - DNA, 25 bp, Homo sapien
agagggagaactcgggcttcacctt

SEQ ID NO: 5354037 - DNA, 25 bp, Homo sapien
tccttcaagatgaagtctgtcgccc

SEQ ID NO: 5354038 - DNA, 25 bp, Homo sapien
cttcaagatgaagtctgtcgcccat

SEQ ID NO: 5354039 - DNA, 25 bp, Homo sapien
ccttcaagatgaagtctgtcgccca

SEQ ID NO: 5354040 - DNA, 25 bp, Homo sapien
ggcatctgaagataagcagaggtcc

SEQ ID NO: 5354041 - DNA, 25 bp, Homo sapien
ccagagaatgatagcccctgactgt

SEQ ID NO: 5354042 - DNA, 25 bp, Homo sapien
cccagatggctgaggactatctttg

SEQ ID NO: 5354043 - DNA, 25 bp, Homo sapien
gctgaggactatctttggctgtgtc

SEQ ID NO: 5354044 - DNA, 25 bp, Homo sapien
gagtaatgctccctggactccccag

SEQ ID NO: 5354045 - DNA, 25 bp, Homo sapien
gtcgatgtagttgattccacttccc

SEQ ID NO: 5354046 - DNA, 25 bp, Homo sapien
cttctcatgtcgatgtagttgattc

SEQ ID NO: 5354047 - DNA, 25 bp, Homo sapien
ccaggttctagtcttctcatgtcga

SEQ ID NO: 5354048 - DNA, 25 bp, Homo sapien
ccagattcaaagtatttcttcacgt

SEQ ID NO: 5354049 - DNA, 25 bp, Homo sapien
tatccagattcaaagtatttcttca

SEQ ID NO: 5354050 - DNA, 25 bp, Homo sapien
agattcaaagtatttcttcacgtac

SEQ ID NO: 5354051 - DNA, 25 bp, Homo sapien
tccagattcaaagtatttcttcacg

SEQ ID NO: 5354052 - DNA, 25 bp, Homo sapien
taaggatgatgtccccacatactgc

SEQ ID NO: 5354053 - DNA, 25 bp, Homo sapien
agtggcatcgatggtgcagggcaga

SEQ ID NO: 5354054 - DNA, 25 bp, Homo sapien
gaggctggcgtctgggtaaggatga

SEQ ID NO: 5354055 - DNA, 25 bp, Homo sapien
agaggaaagtggcatcgatggtgca

SEQ ID NO: 5354056 - DNA, 25 bp, Homo sapien
ctgccctcactgaagagaaagtgtt

SEQ ID NO: 5354057 - DNA, 25 bp, Homo sapien
gctgccctcactgaagagaaagtgt

SEQ ID NO: 5354058 - DNA, 25 bp, Homo sapien
tgccctcactgaagagaaagtgttc

SEQ ID NO: 5354059 - DNA, 25 bp, Homo sapien
gagacaattgatcatatgggtcagc

SEQ ID NO: 5354060 - DNA, 25 bp, Homo sapien
aattgatcatatgggtcagcaagac

SEQ ID NO: 5354061 - DNA, 25 bp, Homo sapien
tgtggagacaattgatcatatgggt

SEQ ID NO: 5354062 - DNA, 25 bp, Homo sapien
cctgtggagacaattgatcatatgg

SEQ ID NO: 5354063 - DNA, 25 bp, Homo sapien
ctgtctctgagttagcagcatcagg

SEQ ID NO: 5354064 - DNA, 25 bp, Homo sapien
caaaggtcgtgatcttattcttact

SEQ ID NO: 5354065 - DNA, 25 bp, Homo sapien
ctttctttgcgtccatatgttctca

SEQ ID NO: 5354066 - DNA, 25 bp, Homo sapien
tcctttctttgcgtccatatgttct

SEQ ID NO: 5354067 - DNA, 25 bp, Homo sapien
cctgcaaaggtcgtgatcttattct

SEQ ID NO: 5354068 - DNA, 25 bp, Homo sapien
aagggaacggctccttcctcataat

SEQ ID NO: 5354069 - DNA, 25 bp, Homo sapien
acttcccttgttacctgaattgcca

SEQ ID NO: 5354070 - DNA, 25 bp, Homo sapien
cagggcatattgctgctgagccaga

SEQ ID NO: 5354071 - DNA, 25 bp, Homo sapien
gaatgagctgtaccgccagatcctg

SEQ ID NO: 5354072 - DNA, 25 bp, Homo sapien
gctcagcccgctgctcaaggccttt

SEQ ID NO: 5354073 - DNA, 25 bp, Homo sapien
cctttgcacaggctgccgccttcct

SEQ ID NO: 5354074 - DNA, 25 bp, Homo sapien
tgccgccttcctccgccagggccag

SEQ ID NO: 5354075 - DNA, 25 bp, Homo sapien
tgccgcctgctcagcccgctgctca

SEQ ID NO: 5354076 - DNA, 25 bp, Homo sapien
tgggtgccaggtctaggtcttctct

SEQ ID NO: 5354077 - DNA, 25 bp, Homo sapien
gggtgccaggtctaggtcttctctc

SEQ ID NO: 5354078 - DNA, 25 bp, Homo sapien
ggtgccaggtctaggtcttctctct

SEQ ID NO: 5354079 - DNA, 25 bp, Homo sapien
cctcatcctatgtcgggcctgtgca

SEQ ID NO: 5354080 - DNA, 25 bp, Homo sapien
tgggcctttccctgggctaggctga

SEQ ID NO: 5354081 - DNA, 25 bp, Homo sapien
ttgacccgacgcatttattgaagag

SEQ ID NO: 5354082 - DNA, 25 bp, Homo sapien
gcagatgccctcatcctatgtcggg

SEQ ID NO: 5354083 - DNA, 25 bp, Homo sapien
gttgatgatgacacctagttcttca

SEQ ID NO: 5354084 - DNA, 25 bp, Homo sapien
accttgttgatgatgacacctagtt

SEQ ID NO: 5354085 - DNA, 25 bp, Homo sapien
tagttcttcaatctcacactggact

SEQ ID NO: 5354086 - DNA, 25 bp, Homo sapien
ttcttcaatctcacactggacttca

SEQ ID NO: 5354087 - DNA, 25 bp, Homo sapien
tgtcagcccttccgtcagacacata

SEQ ID NO: 5354088 - DNA, 25 bp, Homo sapien
tgtacttctcaagtctgagccaagc

SEQ ID NO: 5354089 - DNA, 25 bp, Homo sapien
cagagcaggccatgacggtgtcagc

SEQ ID NO: 5354090 - DNA, 25 bp, Homo sapien
cgtcagacacatacacaagcctgta

SEQ ID NO: 5354091 - DNA, 25 bp, Homo sapien
tttcctgaatacaccgacacctggg

SEQ ID NO: 5354092 - DNA, 25 bp, Homo sapien
gggtcccagttaggatgacatcccc

SEQ ID NO: 5354093 - DNA, 25 bp, Homo sapien
ggaggtttcctgaatacaccgacac

SEQ ID NO: 5354094 - DNA, 25 bp, Homo sapien
gttaggatgacatcccctgggtaaa

SEQ ID NO: 5354095 - DNA, 25 bp, Homo sapien
tggcaggacagcccttgtcactcac

SEQ ID NO: 5354096 - DNA, 25 bp, Homo sapien
gggctcaggtcagcctccacatgtg

SEQ ID NO: 5354097 - DNA, 25 bp, Homo sapien
ccacagccaaaggtggagggctcag

SEQ ID NO: 5354098 - DNA, 25 bp, Homo sapien
ggagcaaagcaaaaggacccagtga

SEQ ID NO: 5354099 - DNA, 25 bp, Homo sapien
tgttgctgctctggacgacttcccc

SEQ ID NO: 5354100 - DNA, 25 bp, Homo sapien
gggagacccaggctatcaggtcctc

SEQ ID NO: 5354101 - DNA, 25 bp, Homo sapien
atcaggtcctctgtcttgaatacca

SEQ ID NO: 5354102 - DNA, 25 bp, Homo sapien
cagcagatctttaagttgtgtggat

SEQ ID NO: 5354103 - DNA, 25 bp, Homo sapien
tttgggagggcaaaacaggtgagaa

SEQ ID NO: 5354104 - DNA, 25 bp, Homo sapien
ctttgggagggcaaaacaggtgaga

SEQ ID NO: 5354105 - DNA, 25 bp, Homo sapien
tgtgtggtcaatgctgttgtttcca

SEQ ID NO: 5354106 - DNA, 25 bp, Homo sapien
acttagattatttcagatggtggca

SEQ ID NO: 5354107 - DNA, 25 bp, Homo sapien
atgcctgggccttgcgatagctatg

SEQ ID NO: 5354108 - DNA, 25 bp, Homo sapien
gggccttgcgatagctatgctccat

SEQ ID NO: 5354109 - DNA, 25 bp, Homo sapien
acagtgaagccggccacgtgggcca

SEQ ID NO: 5354110 - DNA, 25 bp, Homo sapien
agccacagtgaagccggccacgtgg

SEQ ID NO: 5354111 - DNA, 25 bp, Homo sapien
cgagcactcacgtcatgagccacag

SEQ ID NO: 5354112 - DNA, 25 bp, Homo sapien
tcacgagcactcacgtcatgagcca

SEQ ID NO: 5354113 - DNA, 25 bp, Homo sapien
gggatttggccatacaggaggttag

SEQ ID NO: 5354114 - DNA, 25 bp, Homo sapien
gatcacgggtgacaccaacacctgt

SEQ ID NO: 5354115 - DNA, 25 bp, Homo sapien
ccatacaggaggttagatcacgggt

SEQ ID NO: 5354116 - DNA, 25 bp, Homo sapien
caggaggttagatcacgggtgacac

SEQ ID NO: 5354117 - DNA, 25 bp, Homo sapien
gcactctggcctgggagcccaccct

SEQ ID NO: 5354118 - DNA, 25 bp, Homo sapien
ctctggcctgggagcccaccctttc

SEQ ID NO: 5354119 - DNA, 25 bp, Homo sapien
tggggcctctgctgcactctggcct

SEQ ID NO: 5354120 - DNA, 25 bp, Homo sapien
gctggggcctctgctgcactctggc

SEQ ID NO: 5354121 - DNA, 25 bp, Homo sapien
gccagctccacttcccaatctacct

SEQ ID NO: 5354122 - DNA, 25 bp, Homo sapien
ttgcctttctttccaatgaccacgg

SEQ ID NO: 5354123 - DNA, 25 bp, Homo sapien
ggccagctccacttcccaatctacc

SEQ ID NO: 5354124 - DNA, 25 bp, Homo sapien
ctttccaatgaccacggccagctcc

SEQ ID NO: 5354125 - DNA, 25 bp, Homo sapien
tgggagaggaatagtgagccgcagt

SEQ ID NO: 5354126 - DNA, 25 bp, Homo sapien
ggagaggaatagtgagccgcagtgg

SEQ ID NO: 5354127 - DNA, 25 bp, Homo sapien
ggtgggagaggaatagtgagccgca

SEQ ID NO: 5354128 - DNA, 25 bp, Homo sapien
tgtagggtgggagaggaatagtgag

SEQ ID NO: 5354129 - DNA, 25 bp, Homo sapien
tccagtaggctcaatactgagctca

SEQ ID NO: 5354130 - DNA, 25 bp, Homo sapien
tatctctgttttatctacagtgaag

SEQ ID NO: 5354131 - DNA, 25 bp, Homo sapien
ggaatataaactaccctgtacatca

SEQ ID NO: 5354132 - DNA, 25 bp, Homo sapien
ggtaacctaaatatgtcagggagaa

SEQ ID NO: 5354133 - DNA, 25 bp, Homo sapien
tcatcatagggccccacgatggagc

SEQ ID NO: 5354134 - DNA, 25 bp, Homo sapien
gaccacctcatcatagggccccacg

SEQ ID NO: 5354135 - DNA, 25 bp, Homo sapien
ctggagccaggaaggttacctccga

SEQ ID NO: 5354136 - DNA, 25 bp, Homo sapien
tggagccaggaaggttacctccgac

SEQ ID NO: 5354137 - DNA, 25 bp, Homo sapien
tgcccggaactgcactagtctcatg

SEQ ID NO: 5354138 - DNA, 25 bp, Homo sapien
ctgcgtcatcgtctttgggagtgtg

SEQ ID NO: 5354139 - DNA, 25 bp, Homo sapien
tgctctaggaactgcgtcatcgtct

SEQ ID NO: 5354140 - DNA, 25 bp, Homo sapien
tgagtaatcttcttctaccagacac

SEQ ID NO: 5354141 - DNA, 25 bp, Homo sapien
tggaggatctcagagccatcatcag

SEQ ID NO: 5354142 - DNA, 25 bp, Homo sapien
gaggatctcagagccatcatcagca

SEQ ID NO: 5354143 - DNA, 25 bp, Homo sapien
gagatggaggatctcagagccatca

SEQ ID NO: 5354144 - DNA, 25 bp, Homo sapien
gaaaaacacaggatccaggagatgg

SEQ ID NO: 5354145 - DNA, 25 bp, Homo sapien
gctacgcagtaagtcccagggattc

SEQ ID NO: 5354146 - DNA, 25 bp, Homo sapien
gtgctttctgaaagttcccactgtg

SEQ ID NO: 5354147 - DNA, 25 bp, Homo sapien
gcaactactacatgctacgcagtaa

SEQ ID NO: 5354148 - DNA, 25 bp, Homo sapien
tttctgaaagttcccactgtgcttg

SEQ ID NO: 5354149 - DNA, 25 bp, Homo sapien
aagtcactgccgctcggtgcgcact

SEQ ID NO: 5354150 - DNA, 25 bp, Homo sapien
ggcagccggtcctcctgcgctgagt

SEQ ID NO: 5354151 - DNA, 25 bp, Homo sapien
ctcctgcgctgagttagggctcgcg

SEQ ID NO: 5354152 - DNA, 25 bp, Homo sapien
gggaactacagcagcggcgaagtca

SEQ ID NO: 5354153 - DNA, 25 bp, Homo sapien
agtctggacctcgtttaagtgcaca

SEQ ID NO: 5354154 - DNA, 25 bp, Homo sapien
ctctggccacccgtctaaggaaagg

SEQ ID NO: 5354155 - DNA, 25 bp, Homo sapien
gccatggcccgacttctatttgaga

SEQ ID NO: 5354156 - DNA, 25 bp, Homo sapien
tggaaggtcctcagtggcgtgccat

SEQ ID NO: 5354157 - DNA, 25 bp, Homo sapien
cctccggccggatgggggcgcactc

SEQ ID NO: 5354158 - DNA, 25 bp, Homo sapien
gcgcactcagggcccaggaggccat

SEQ ID NO: 5354159 - DNA, 25 bp, Homo sapien
tccggccggatgggggcgcactcag

SEQ ID NO: 5354160 - DNA, 25 bp, Homo sapien
gggcgcactcagggcccaggaggcc

SEQ ID NO: 5354161 - DNA, 25 bp, Homo sapien
aatacggctgcaggctacaatttgc

SEQ ID NO: 5354162 - DNA, 25 bp, Homo sapien
ttatgacgccaataagagagacagg

SEQ ID NO: 5354163 - DNA, 25 bp, Homo sapien
ttgcagccgacgattatggaagacg

SEQ ID NO: 5354164 - DNA, 25 bp, Homo sapien
cattaaaccgtatcatctgaagagg

SEQ ID NO: 5354165 - DNA, 25 bp, Homo sapien
gaggtttgaatctacatatgagtga

SEQ ID NO: 5354166 - DNA, 25 bp, Homo sapien
gatttcaacgtccatacttttcctg

SEQ ID NO: 5354167 - DNA, 25 bp, Homo sapien
caatcataaccatcaccccatgtga

SEQ ID NO: 5354168 - DNA, 25 bp, Homo sapien
catgtagtaatggtgggtattatcc

SEQ ID NO: 5354169 - DNA, 25 bp, Homo sapien
ttaaagccccaaccatgttctatta

SEQ ID NO: 5354170 - DNA, 25 bp, Homo sapien
taggaaaggcggatacagcgtgttt

SEQ ID NO: 5354171 - DNA, 25 bp, Homo sapien
ccaactggaagcttagattaggatt

SEQ ID NO: 5354172 - DNA, 25 bp, Homo sapien
tatttttcaggacatacattactct

SEQ ID NO: 5354173 - DNA, 25 bp, Homo sapien
cagataccccgagtatagctgtata

SEQ ID NO: 5354174 - DNA, 25 bp, Homo sapien
gaaatgctctataatgcctcaccgc

SEQ ID NO: 5354175 - DNA, 25 bp, Homo sapien
ttccaggtgtcaaatgatagtctcc

SEQ ID NO: 5354176 - DNA, 25 bp, Homo sapien
tgatcaaatcacagtttagaacccc

SEQ ID NO: 5354177 - DNA, 25 bp, Homo sapien
gcctggctttggtatcagaatgata

SEQ ID NO: 5354178 - DNA, 25 bp, Homo sapien
tggctttggtatcagaatgatactg

SEQ ID NO: 5354179 - DNA, 25 bp, Homo sapien
cctggctttggtatcagaatgatac

SEQ ID NO: 5354180 - DNA, 25 bp, Homo sapien
ctggctttggtatcagaatgatact

SEQ ID NO: 5354181 - DNA, 25 bp, Homo sapien
tcaatgtaggacacttccactgaag

SEQ ID NO: 5354182 - DNA, 25 bp, Homo sapien
tgtaagttcaactgaagcatcatcg

SEQ ID NO: 5354183 - DNA, 25 bp, Homo sapien
tcgcaattgtgtgccttctcagtta

SEQ ID NO: 5354184 - DNA, 25 bp, Homo sapien
cactgaagagatgtgaagtgtaagt

SEQ ID NO: 5354185 - DNA, 25 bp, Homo sapien
tctgattcagcaggccggagattct

SEQ ID NO: 5354186 - DNA, 25 bp, Homo sapien
taatgccatgttcagtcgagataga

SEQ ID NO: 5354187 - DNA, 25 bp, Homo sapien
gggctcatcgaagctgcactttctg

SEQ ID NO: 5354188 - DNA, 25 bp, Homo sapien
tgctggtctggaacatgatcttcgc

SEQ ID NO: 5354189 - DNA, 25 bp, Homo sapien
cactgtgagcaacttagagtaaaaa

SEQ ID NO: 5354190 - DNA, 25 bp, Homo sapien
gaaataaaatcgcagttaaagcatg

SEQ ID NO: 5354191 - DNA, 25 bp, Homo sapien
gcagaccttactataatatcttcca

SEQ ID NO: 5354192 - DNA, 25 bp, Homo sapien
tatcttccaccttgtaggcactcaa

SEQ ID NO: 5354193 - DNA, 25 bp, Homo sapien
atacatttcaacttatacatgccct

SEQ ID NO: 5354194 - DNA, 25 bp, Homo sapien
cttatgcaggatgttcttttatcaa

SEQ ID NO: 5354195 - DNA, 25 bp, Homo sapien
tttgctagagttactagtaatagaa

SEQ ID NO: 5354196 - DNA, 25 bp, Homo sapien
caacttatacatgccctttggatga

SEQ ID NO: 5354197 - DNA, 25 bp, Homo sapien
gagcagactcacgtgccttggaaga

SEQ ID NO: 5354198 - DNA, 25 bp, Homo sapien
ttctctcctgagacaagagcttggg

SEQ ID NO: 5354199 - DNA, 25 bp, Homo sapien
tgcaccgagcctgaaaatcttacta

SEQ ID NO: 5354200 - DNA, 25 bp, Homo sapien
tagatggcctaagatactaacaggg

SEQ ID NO: 5354201 - DNA, 25 bp, Homo sapien
tgggtcaccagacaccttatacagg

SEQ ID NO: 5354202 - DNA, 25 bp, Homo sapien
ttcccaaagggacaatcaaagtgct

SEQ ID NO: 5354203 - DNA, 25 bp, Homo sapien
ggctgttgtctccacaaaccggaag

SEQ ID NO: 5354204 - DNA, 25 bp, Homo sapien
tggtcccaagaggtattccccacag

SEQ ID NO: 5354205 - DNA, 25 bp, Homo sapien
aaagctagacatatctcaaattgac

SEQ ID NO: 5354206 - DNA, 25 bp, Homo sapien
ataaagctagacatatctcaaattg

SEQ ID NO: 5354207 - DNA, 25 bp, Homo sapien
gctagacatatctcaaattgacacc

SEQ ID NO: 5354208 - DNA, 25 bp, Homo sapien
aagctagacatatctcaaattgaca

SEQ ID NO: 5354209 - DNA, 25 bp, Homo sapien
ccactgcacttggccaggattccct

SEQ ID NO: 5354210 - DNA, 25 bp, Homo sapien
actgcacttggccaggattccctat

SEQ ID NO: 5354211 - DNA, 25 bp, Homo sapien
gcacttggccaggattccctattta

SEQ ID NO: 5354212 - DNA, 25 bp, Homo sapien
tgcacttggccaggattccctattt

SEQ ID NO: 5354213 - DNA, 25 bp, Homo sapien
tctaggaagttccattcaggacata

SEQ ID NO: 5354214 - DNA, 25 bp, Homo sapien
atctaggaagttccattcaggacat

SEQ ID NO: 5354215 - DNA, 25 bp, Homo sapien
tgcttgacttgatgtataggactgc

SEQ ID NO: 5354216 - DNA, 25 bp, Homo sapien
ttgacttgatgtataggactgctag

SEQ ID NO: 5354217 - DNA, 25 bp, Homo sapien
tctctgcttgacttgatgtatagga

SEQ ID NO: 5354218 - DNA, 25 bp, Homo sapien
gacttgatgtataggactgctagta

SEQ ID NO: 5354219 - DNA, 25 bp, Homo sapien
tattcctggtctcgaatcatcctga

SEQ ID NO: 5354220 - DNA, 25 bp, Homo sapien
agtattcctggtctcgaatcatcct

SEQ ID NO: 5354221 - DNA, 25 bp, Homo sapien
tctcgaatcatcctgatattcttca

SEQ ID NO: 5354222 - DNA, 25 bp, Homo sapien
ctggtctcgaatcatcctgatattc

SEQ ID NO: 5354223 - DNA, 25 bp, Homo sapien
tttaaatgggccataggcaccacct

SEQ ID NO: 5354224 - DNA, 25 bp, Homo sapien
tatacgaggacacttggaagatgta

SEQ ID NO: 5354225 - DNA, 25 bp, Homo sapien
tggatacacatcagagcctcagagt

SEQ ID NO: 5354226 - DNA, 25 bp, Homo sapien
catactctaaccagatggatacaca

SEQ ID NO: 5354227 - DNA, 25 bp, Homo sapien
tcaagtgaggtgcagaagcagcagc

SEQ ID NO: 5354228 - DNA, 25 bp, Homo sapien
cgaggaagcacttttgaagggaaca

SEQ ID NO: 5354229 - DNA, 25 bp, Homo sapien
taaaagcagcggaagctggcttggc

SEQ ID NO: 5354230 - DNA, 25 bp, Homo sapien
gaagattctcgccactcaagtgagg

SEQ ID NO: 5354231 - DNA, 25 bp, Homo sapien
tctctggggagagcctcttctctac

SEQ ID NO: 5354232 - DNA, 25 bp, Homo sapien
ggtcttcagaaggagagcacctatc

SEQ ID NO: 5354233 - DNA, 25 bp, Homo sapien
tcttctctacccacttgaaccggaa

SEQ ID NO: 5354234 - DNA, 25 bp, Homo sapien
tgaaccggaactccacgcatgtgct

SEQ ID NO: 5354235 - DNA, 25 bp, Homo sapien
gtgtagagcaggggacttagggagt

SEQ ID NO: 5354236 - DNA, 25 bp, Homo sapien
ggtgtagagcaggggacttagggag

SEQ ID NO: 5354237 - DNA, 25 bp, Homo sapien
ttcaaagtacttagctgtgccgtgt

SEQ ID NO: 5354238 - DNA, 25 bp, Homo sapien
ttttcaaagtacttagctgtgccgt

SEQ ID NO: 5354239 - DNA, 25 bp, Homo sapien
atgttttcaaagtacttagctgtgc

SEQ ID NO: 5354240 - DNA, 25 bp, Homo sapien
caaagtacttagctgtgccgtgtga

SEQ ID NO: 5354241 - DNA, 25 bp, Homo sapien
acagcgaggcctctacagacacgtt

SEQ ID NO: 5354242 - DNA, 25 bp, Homo sapien
gcaaagagaccctggaatgcagccc

SEQ ID NO: 5354243 - DNA, 25 bp, Homo sapien
gatgatgttggagaagatccctgcc

SEQ ID NO: 5354244 - DNA, 25 bp, Homo sapien
gccaccctcgtaggaaagcagaagg

SEQ ID NO: 5354245 - DNA, 25 bp, Homo sapien
acaatagcttcaaggaccacaaatt

SEQ ID NO: 5354246 - DNA, 25 bp, Homo sapien
ccacaaatttaagggctctccagag

SEQ ID NO: 5354247 - DNA, 25 bp, Homo sapien
tagcttcaaggaccacaaatttaag

SEQ ID NO: 5354248 - DNA, 25 bp, Homo sapien
tcaaggaccacaaatttaagggctc

SEQ ID NO: 5354249 - DNA, 25 bp, Homo sapien
tgatgtcaatgtttgctcttctcgg

SEQ ID NO: 5354250 - DNA, 25 bp, Homo sapien
tgtcaatgtttgctcttctcgggct

SEQ ID NO: 5354251 - DNA, 25 bp, Homo sapien
aaagtgtgcccgtggtgtcactgct

SEQ ID NO: 5354252 - DNA, 25 bp, Homo sapien
tgtgggcagcggtggtgatgtcaat

SEQ ID NO: 5354253 - DNA, 25 bp, Homo sapien
tgcaggtgcagcctgtttggaacct

SEQ ID NO: 5354254 - DNA, 25 bp, Homo sapien
cagcctgtttggaaccttctgtgcc

SEQ ID NO: 5354255 - DNA, 25 bp, Homo sapien
ttctgtgcctgcactggaccaccct

SEQ ID NO: 5354256 - DNA, 25 bp, Homo sapien
ggtgcagcctgtttggaaccttctg

SEQ ID NO: 5354257 - DNA, 25 bp, Homo sapien
taccaagaagacaagacatagacac

SEQ ID NO: 5354258 - DNA, 25 bp, Homo sapien
cagaataccagtttctcagggtgcc

SEQ ID NO: 5354259 - DNA, 25 bp, Homo sapien
tacaaaaggatgtaccctgacatgc

SEQ ID NO: 5354260 - DNA, 25 bp, Homo sapien
tcagggtgccaatgtgaggaaaagc

SEQ ID NO: 5354261 - DNA, 25 bp, Homo sapien
tctgcaaactggatgccctataggt

SEQ ID NO: 5354262 - DNA, 25 bp, Homo sapien
tatccgctgccactgaactgagatg

SEQ ID NO: 5354263 - DNA, 25 bp, Homo sapien
aatagttgtaaatgctttgactagc

SEQ ID NO: 5354264 - DNA, 25 bp, Homo sapien
gtcaggaacttaggtgctttccctg

SEQ ID NO: 5354265 - DNA, 25 bp, Homo sapien
tggaggctgagtcatctggatgtca

SEQ ID NO: 5354266 - DNA, 25 bp, Homo sapien
gaggctgagtcatctggatgtcaca

SEQ ID NO: 5354267 - DNA, 25 bp, Homo sapien
agtcatctggatgtcacatctggca

SEQ ID NO: 5354268 - DNA, 25 bp, Homo sapien
agggaggatggaggctgagtcatct

SEQ ID NO: 5354269 - DNA, 25 bp, Homo sapien
aaggccaggagctgagcggggatcc

SEQ ID NO: 5354270 - DNA, 25 bp, Homo sapien
gaaggccaggagctgagcggggatc

SEQ ID NO: 5354271 - DNA, 25 bp, Homo sapien
aggaaggccaggagctgagcgggga

SEQ ID NO: 5354272 - DNA, 25 bp, Homo sapien
gccaggagctgagcggggatcctca

SEQ ID NO: 5354273 - DNA, 25 bp, Homo sapien
tgagctgcctttcccaccggaatgt

SEQ ID NO: 5354274 - DNA, 25 bp, Homo sapien
caccggaatgttcccaggtgttcag

SEQ ID NO: 5354275 - DNA, 25 bp, Homo sapien
caggtacagctcccaaaaaactggg

SEQ ID NO: 5354276 - DNA, 25 bp, Homo sapien
tcccaggtgttcaggtacagctccc

SEQ ID NO: 5354277 - DNA, 25 bp, Homo sapien
tcagggtggtcgtgcctcctgtcca

SEQ ID NO: 5354278 - DNA, 25 bp, Homo sapien
ctttgggatatcagcatcaggtagg

SEQ ID NO: 5354279 - DNA, 25 bp, Homo sapien
cacctcatgctgttgaggatgacca

SEQ ID NO: 5354280 - DNA, 25 bp, Homo sapien
gtttaccagcagacccgctcaatgg

SEQ ID NO: 5354281 - DNA, 25 bp, Homo sapien
gtttctctatggggctgtaccactg

SEQ ID NO: 5354282 - DNA, 25 bp, Homo sapien
ggaggtttctctatggggctgtacc

SEQ ID NO: 5354283 - DNA, 25 bp, Homo sapien
gggaggtttctctatggggctgtac

SEQ ID NO: 5354284 - DNA, 25 bp, Homo sapien
ggtttctctatggggctgtaccact

SEQ ID NO: 5354285 - DNA, 25 bp, Homo sapien
agtctgggccatcacagtatcacca

SEQ ID NO: 5354286 - DNA, 25 bp, Homo sapien
ctagaggcgacaggccaggagagtg

SEQ ID NO: 5354287 - DNA, 25 bp, Homo sapien
ggccatcacagtatcaccactggat

SEQ ID NO: 5354288 - DNA, 25 bp, Homo sapien
tggagtctgggccatcacagtatca

SEQ ID NO: 5354289 - DNA, 25 bp, Homo sapien
tgagcccacctgactcgactctctg

SEQ ID NO: 5354290 - DNA, 25 bp, Homo sapien
gagctttatgtttggggccatcaca

SEQ ID NO: 5354291 - DNA, 25 bp, Homo sapien
tgagaggcggagcttccttgagagc

SEQ ID NO: 5354292 - DNA, 25 bp, Homo sapien
gactcgactctctgtggacacatcc

SEQ ID NO: 5354293 - DNA, 25 bp, Homo sapien
ctccaggctccaaagtagtgtttgt

SEQ ID NO: 5354294 - DNA, 25 bp, Homo sapien
tccaggctccaaagtagtgtttgtg

SEQ ID NO: 5354295 - DNA, 25 bp, Homo sapien
ccaggctccaaagtagtgtttgtga

SEQ ID NO: 5354296 - DNA, 25 bp, Homo sapien
gttagatgtgagtccctgcttgtga

SEQ ID NO: 5354297 - DNA, 25 bp, Homo sapien
gcttgtgaataccttctacagacat

SEQ ID NO: 5354298 - DNA, 25 bp, Homo sapien
aattttggttagatgtgagtccctg

SEQ ID NO: 5354299 - DNA, 25 bp, Homo sapien
gagtccctgcttgtgaataccttct

SEQ ID NO: 5354300 - DNA, 25 bp, Homo sapien
tctgttccaggatgtagcactgtgg

SEQ ID NO: 5354301 - DNA, 25 bp, Homo sapien
tgcccctgagttctccaacagcctc

SEQ ID NO: 5354302 - DNA, 25 bp, Homo sapien
gagtcctcaacagcaaacctgcccc

SEQ ID NO: 5354303 - DNA, 25 bp, Homo sapien
gggcaatcccagcagagaggtttct

SEQ ID NO: 5354304 - DNA, 25 bp, Homo sapien
tgggtcaacagaatgtccccactag

SEQ ID NO: 5354305 - DNA, 25 bp, Homo sapien
gtccccactagatcctggaatgatg

SEQ ID NO: 5354306 - DNA, 25 bp, Homo sapien
ccactagatcctggaatgatgacag

SEQ ID NO: 5354307 - DNA, 25 bp, Homo sapien
cagaatgtccccactagatcctgga

SEQ ID NO: 5354308 - DNA, 25 bp, Homo sapien
ccccattctcctccctcatctccct

SEQ ID NO: 5354309 - DNA, 25 bp, Homo sapien
ccattctcctccctcatctccctgc

SEQ ID NO: 5354310 - DNA, 25 bp, Homo sapien
cattctcctccctcatctccctgct

SEQ ID NO: 5354311 - DNA, 25 bp, Homo sapien
caccccattctcctccctcatctcc

SEQ ID NO: 5354312 - DNA, 25 bp, Homo sapien
gacccggagcattagcagccccagg

SEQ ID NO: 5354313 - DNA, 25 bp, Homo sapien
ccaggagctgagcagggagcctcat

SEQ ID NO: 5354314 - DNA, 25 bp, Homo sapien
cggggacccggagcattagcagccc

SEQ ID NO: 5354315 - DNA, 25 bp, Homo sapien
ccccaggagctgagcagggagcctc

SEQ ID NO: 5354316 - DNA, 25 bp, Homo sapien
gggtttagggcaatgaagccccatc

SEQ ID NO: 5354317 - DNA, 25 bp, Homo sapien
tccacatggaggtggctcggtgtct

SEQ ID NO: 5354318 - DNA, 25 bp, Homo sapien
gtctgagttgccagccacggatgag

SEQ ID NO: 5354319 - DNA, 25 bp, Homo sapien
agcctgggtttagggcaatgaagcc

SEQ ID NO: 5354320 - DNA, 25 bp, Homo sapien
ctgtcaccatcaacaccatggaggc

SEQ ID NO: 5354321 - DNA, 25 bp, Homo sapien
tgtcaccatcaacaccatggaggct

SEQ ID NO: 5354322 - DNA, 25 bp, Homo sapien
gtcaccatcaacaccatggaggctg

SEQ ID NO: 5354323 - DNA, 25 bp, Homo sapien
caccatcaacaccatggaggctgag

SEQ ID NO: 5354324 - DNA, 25 bp, Homo sapien
ctagtaaaaggagtagacattagtg

SEQ ID NO: 5354325 - DNA, 25 bp, Homo sapien
gtccagaagtttaggagcccagaaa

SEQ ID NO: 5354326 - DNA, 25 bp, Homo sapien
cattagtgtcccagtaacttcaaat

SEQ ID NO: 5354327 - DNA, 25 bp, Homo sapien
tcttgtccagaagtttaggagccca

SEQ ID NO: 5354328 - DNA, 25 bp, Homo sapien
tgagtctgatcaaatgttgttggca

SEQ ID NO: 5354329 - DNA, 25 bp, Homo sapien
tgtgtccagggttaaggcccctgca

SEQ ID NO: 5354330 - DNA, 25 bp, Homo sapien
tgtccagggttaaggcccctgcatg

SEQ ID NO: 5354331 - DNA, 25 bp, Homo sapien
gtccagggttaaggcccctgcatgg

SEQ ID NO: 5354332 - DNA, 25 bp, Homo sapien
gtgtccagggttaaggcccctgcat

SEQ ID NO: 5354333 - DNA, 25 bp, Homo sapien
ggccaggaagcgcatcttggagggt

SEQ ID NO: 5354334 - DNA, 25 bp, Homo sapien
aagcgcatcttggagggtccaggaa

SEQ ID NO: 5354335 - DNA, 25 bp, Homo sapien
ggtccaggaaaactgctgcttctgg

SEQ ID NO: 5354336 - DNA, 25 bp, Homo sapien
ccagcaccaggaggcagacgagcag

SEQ ID NO: 5354337 - DNA, 25 bp, Homo sapien
agatggaacccccgtttgcaaactg

SEQ ID NO: 5354338 - DNA, 25 bp, Homo sapien
tcactaccactgaacagagatggaa

SEQ ID NO: 5354339 - DNA, 25 bp, Homo sapien
ccaggctaactgattggtaaaactc

SEQ ID NO: 5354340 - DNA, 25 bp, Homo sapien
taccctatatatcaggagcttagga

SEQ ID NO: 5354341 - DNA, 25 bp, Homo sapien
cggcaagtgatggtgacactgtctc

SEQ ID NO: 5354342 - DNA, 25 bp, Homo sapien
gcaagtgatggtgacactgtctcct

SEQ ID NO: 5354343 - DNA, 25 bp, Homo sapien
tcgcccggcaagtgatggtgacact

SEQ ID NO: 5354344 - DNA, 25 bp, Homo sapien
gctgggtcatctggatggcacatct

SEQ ID NO: 5354345 - DNA, 25 bp, Homo sapien
tatgttgaataactgtgaaattcca

SEQ ID NO: 5354346 - DNA, 25 bp, Homo sapien
tgttttatgttgaataactgtgaaa

SEQ ID NO: 5354347 - DNA, 25 bp, Homo sapien
tgttgaataactgtgaaattccaac

SEQ ID NO: 5354348 - DNA, 25 bp, Homo sapien
tgaataactgtgaaattccaactac

SEQ ID NO: 5354349 - DNA, 25 bp, Homo sapien
attcacagctactgagccccactgg

SEQ ID NO: 5354350 - DNA, 25 bp, Homo sapien
caggttccaggttactgttggtgag

SEQ ID NO: 5354351 - DNA, 25 bp, Homo sapien
ggtgaatgcaccatgcttgagcagc

SEQ ID NO: 5354352 - DNA, 25 bp, Homo sapien
agccagtgctctgaatgatcctgca

SEQ ID NO: 5354353 - DNA, 25 bp, Homo sapien
tggaccagccgctaaggtttcctgc

SEQ ID NO: 5354354 - DNA, 25 bp, Homo sapien
cagccgctaaggtttcctgctgtcg

SEQ ID NO: 5354355 - DNA, 25 bp, Homo sapien
atcctcactggaccagccgctaagg

SEQ ID NO: 5354356 - DNA, 25 bp, Homo sapien
cgctaaggtttcctgctgtcgtcat

SEQ ID NO: 5354357 - DNA, 25 bp, Homo sapien
caggagaccctcgtggacgtgggga

SEQ ID NO: 5354358 - DNA, 25 bp, Homo sapien
agagggagaactcgggcttcacctt

SEQ ID NO: 5354359 - DNA, 25 bp, Homo sapien
ctctggtgaagagggagaactcggg

SEQ ID NO: 5354360 - DNA, 25 bp, Homo sapien
acgtggggacctggtgttgctcctc

SEQ ID NO: 5354361 - DNA, 25 bp, Homo sapien
cagaagttgcttgagccatgaaagt

SEQ ID NO: 5354362 - DNA, 25 bp, Homo sapien
tcatgacctcccattgtgaacagag

SEQ ID NO: 5354363 - DNA, 25 bp, Homo sapien
ttggacagagaaatcccacatcact

SEQ ID NO: 5354364 - DNA, 25 bp, Homo sapien
tgtgaacagagtcccagaagttgct

SEQ ID NO: 5354365 - DNA, 25 bp, Homo sapien
cacacagaccctcactgagggctga

SEQ ID NO: 5354366 - DNA, 25 bp, Homo sapien
gccacacagaccctcactgagggct

SEQ ID NO: 5354367 - DNA, 25 bp, Homo sapien
acacagaccctcactgagggctgag

SEQ ID NO: 5354368 - DNA, 25 bp, Homo sapien
cacagaccctcactgagggctgagg

SEQ ID NO: 5354369 - DNA, 25 bp, Homo sapien
tgtatagtaccaacactgaagagtc

SEQ ID NO: 5354370 - DNA, 25 bp, Homo sapien
tgtctgatgacagcctgctcctggc

SEQ ID NO: 5354371 - DNA, 25 bp, Homo sapien
tgtgctgctctaacctagacatagg

SEQ ID NO: 5354372 - DNA, 25 bp, Homo sapien
tgatcaggctgtattccatggaaac

SEQ ID NO: 5354373 - DNA, 25 bp, Homo sapien
gagtaatgctccctggactccccag

SEQ ID NO: 5354374 - DNA, 25 bp, Homo sapien
ccaggttctagtcttctcatgtcga

SEQ ID NO: 5354375 - DNA, 25 bp, Homo sapien
gtcgatgtagttgattccacttccc

SEQ ID NO: 5354376 - DNA, 25 bp, Homo sapien
cttctcatgtcgatgtagttgattc

SEQ ID NO: 5354377 - DNA, 25 bp, Homo sapien
agaggaaagtggcatcgatggtgca

SEQ ID NO: 5354378 - DNA, 25 bp, Homo sapien
agtggcatcgatggtgcagggcaga

SEQ ID NO: 5354379 - DNA, 25 bp, Homo sapien
taaggatgatgtccccacatactgc

SEQ ID NO: 5354380 - DNA, 25 bp, Homo sapien
gaggctggcgtctgggtaaggatga

SEQ ID NO: 5354381 - DNA, 25 bp, Homo sapien
gctgccctcactgaagagaaagtgt

SEQ ID NO: 5354382 - DNA, 25 bp, Homo sapien
tgccctcactgaagagaaagtgttc

SEQ ID NO: 5354383 - DNA, 25 bp, Homo sapien
ctgccctcactgaagagaaagtgtt

SEQ ID NO: 5354384 - DNA, 25 bp, Homo sapien
cctgtggagacaattgatcatatgg

SEQ ID NO: 5354385 - DNA, 25 bp, Homo sapien
gagacaattgatcatatgggtcagc

SEQ ID NO: 5354386 - DNA, 25 bp, Homo sapien
aattgatcatatgggtcagcaagac

SEQ ID NO: 5354387 - DNA, 25 bp, Homo sapien
tgtggagacaattgatcatatgggt

SEQ ID NO: 5354388 - DNA, 25 bp, Homo sapien
tctgagcagcctgtaggaaggacag

SEQ ID NO: 5354389 - DNA, 25 bp, Homo sapien
tagagcaagggatgcaccctcctct

SEQ ID NO: 5354390 - DNA, 25 bp, Homo sapien
tatgtctctcaaaggtgagtcccac

SEQ ID NO: 5354391 - DNA, 25 bp, Homo sapien
tggaagacttgcactgaacagctat

SEQ ID NO: 5354392 - DNA, 25 bp, Homo sapien
gctggctcataggaaagctgctcat

SEQ ID NO: 5354393 - DNA, 25 bp, Homo sapien
gtgactccccagtcccgaagctcag

SEQ ID NO: 5354394 - DNA, 25 bp, Homo sapien
tcccgaagctcagctgaatatctga

SEQ ID NO: 5354395 - DNA, 25 bp, Homo sapien
agctggctcataggaaagctgctca

SEQ ID NO: 5354396 - DNA, 25 bp, Homo sapien
ctgtctctgagttagcagcatcagg

SEQ ID NO: 5354397 - DNA, 25 bp, Homo sapien
tgccagctctctggaggctcttggg

SEQ ID NO: 5354398 - DNA, 25 bp, Homo sapien
gccttcttggcaggctgccagctct

SEQ ID NO: 5354399 - DNA, 25 bp, Homo sapien
catctggaagccactcttgctggct

SEQ ID NO: 5354400 - DNA, 25 bp, Homo sapien
ttgctggcttctgtggaggccaagg

SEQ ID NO: 5354401 - DNA, 25 bp, Homo sapien
agcccagaagagcttactggacaat

SEQ ID NO: 5354402 - DNA, 25 bp, Homo sapien
gaagagcttactggacaatagtcca

SEQ ID NO: 5354403 - DNA, 25 bp, Homo sapien
aaccacaggagtccggggatacaca

SEQ ID NO: 5354404 - DNA, 25 bp, Homo sapien
ccagaagagcttactggacaatagt

SEQ ID NO: 5354405 - DNA, 25 bp, Homo sapien
caggacggtgtctttaatcagagct

SEQ ID NO: 5354406 - DNA, 25 bp, Homo sapien
cggcaaacaccaggacggtgtcttt

SEQ ID NO: 5354407 - DNA, 25 bp, Homo sapien
caggccctatcctgacggcaaacac

SEQ ID NO: 5354408 - DNA, 25 bp, Homo sapien
tccaaaatggtcacaagagtcttct

SEQ ID NO: 5354409 - DNA, 25 bp, Homo sapien
ccagctgtctccatcagaaagtctg

SEQ ID NO: 5354410 - DNA, 25 bp, Homo sapien
tgctgcttctgcacctcacttgagt

SEQ ID NO: 5354411 - DNA, 25 bp, Homo sapien
gcgagaatcttctgtgaggcaagcc

SEQ ID NO: 5354412 - DNA, 25 bp, Homo sapien
caggtgttcccttcaaaagtgcttc

SEQ ID NO: 5354413 - DNA, 25 bp, Homo sapien
tttccacataggtttttactgtcat

SEQ ID NO: 5354414 - DNA, 25 bp, Homo sapien
ttttccacataggtttttactgtca

SEQ ID NO: 5354415 - DNA, 25 bp, Homo sapien
gcttttgaataaggtcatttagagg

SEQ ID NO: 5354416 - DNA, 25 bp, Homo sapien
cttttgaataaggtcatttagaggt

SEQ ID NO: 5354417 - DNA, 25 bp, Homo sapien
ttttgaataaggtcatttagaggta

SEQ ID NO: 5354418 - DNA, 25 bp, Homo sapien
ttgaataaggtcatttagaggtata

SEQ ID NO: 5354419 - DNA, 25 bp, Homo sapien
ctcaaaatacagttctgtaatcaga

SEQ ID NO: 5354420 - DNA, 25 bp, Homo sapien
ccaccaacaacaacatcagcccaac

SEQ ID NO: 5354421 - DNA, 25 bp, Homo sapien
ccactcaaaatacagttctgtaatc

SEQ ID NO: 5354422 - DNA, 25 bp, Homo sapien
ctctatgttcagcccactcaaaata

SEQ ID NO: 5354423 - DNA, 25 bp, Homo sapien
catttaatgctgaaatcagacaatg

SEQ ID NO: 5354424 - DNA, 25 bp, Homo sapien
aatctgacactttgggattccaggc

SEQ ID NO: 5354425 - DNA, 25 bp, Homo sapien
aacagagctcttgacctataaagta

SEQ ID NO: 5354426 - DNA, 25 bp, Homo sapien
caaaaggatcgcttgggtgccaaga

SEQ ID NO: 5354427 - DNA, 25 bp, Homo sapien
tcctgatgactaactggcagtaaaa

SEQ ID NO: 5354428 - DNA, 25 bp, Homo sapien
ccaggaaattatggaggtctactga

SEQ ID NO: 5354429 - DNA, 25 bp, Homo sapien
tctgagatgcactggtataattcac

SEQ ID NO: 5354430 - DNA, 25 bp, Homo sapien
cactggcttgcccagttggtactct

SEQ ID NO: 5354431 - DNA, 25 bp, Homo sapien
actgattcttagttgagctcggagg

SEQ ID NO: 5354432 - DNA, 25 bp, Homo sapien
tattctagaaactgattcttagttg

SEQ ID NO: 5354433 - DNA, 25 bp, Homo sapien
gaaactgattcttagttgagctcgg

SEQ ID NO: 5354434 - DNA, 25 bp, Homo sapien
tgattttgtaaaggacagattacaa

SEQ ID NO: 5354435 - DNA, 25 bp, Homo sapien
aatgcctgtgaactactggctagca

SEQ ID NO: 5354436 - DNA, 25 bp, Homo sapien
tcacgtgtggtcaaaagggaattag

SEQ ID NO: 5354437 - DNA, 25 bp, Homo sapien
caagtagatccccaccagttgctgg

SEQ ID NO: 5354438 - DNA, 25 bp, Homo sapien
cagggaagttcacatctcagtggtc

SEQ ID NO: 5354439 - DNA, 25 bp, Homo sapien
ccattgagctatagaattccagata

SEQ ID NO: 5354440 - DNA, 25 bp, Homo sapien
taatagtcaccaaaaccattgagct

SEQ ID NO: 5354441 - DNA, 25 bp, Homo sapien
tcatttggtaagctaacaaactgga

SEQ ID NO: 5354442 - DNA, 25 bp, Homo sapien
tagaatcaaatcatgtactaggctg

SEQ ID NO: 5354443 - DNA, 25 bp, Homo sapien
tcctatgctgtgtcaggcaagagaa

SEQ ID NO: 5354444 - DNA, 25 bp, Homo sapien
tcactgtgtggccgttcagcatctt

SEQ ID NO: 5354445 - DNA, 25 bp, Homo sapien
ttcctatgctgtgtcaggcaagaga

SEQ ID NO: 5354446 - DNA, 25 bp, Homo sapien
tgtagaaagtcctgccatgcacaac

SEQ ID NO: 5354447 - DNA, 25 bp, Homo sapien
catctcatgtttattaaggagactg

SEQ ID NO: 5354448 - DNA, 25 bp, Homo sapien
gagactgggtgtccttgtagaaagt

SEQ ID NO: 5354449 - DNA, 25 bp, Homo sapien
gagcatctcatgtttattaaggaga

SEQ ID NO: 5354450 - DNA, 25 bp, Homo sapien
gatgtgtttcaccatactgaaggca

SEQ ID NO: 5354451 - DNA, 25 bp, Homo sapien
atgtgtttcaccatactgaaggcaa

SEQ ID NO: 5354452 - DNA, 25 bp, Homo sapien
gaatactacagatgtccaacacttc

SEQ ID NO: 5354453 - DNA, 25 bp, Homo sapien
cctagtccaatgtgaataacaaaat

SEQ ID NO: 5354454 - DNA, 25 bp, Homo sapien
aagaggcccgcttttagcctccaca

SEQ ID NO: 5354455 - DNA, 25 bp, Homo sapien
ccaggaatactacagatgtccaaca

SEQ ID NO: 5354456 - DNA, 25 bp, Homo sapien
agtgaagcactgctttgggtagtgt

SEQ ID NO: 5354457 - DNA, 25 bp, Homo sapien
tctgtctgccactgtagtgaagcac

SEQ ID NO: 5354458 - DNA, 25 bp, Homo sapien
gcctctgcagttcactctgctgctt

SEQ ID NO: 5354459 - DNA, 25 bp, Homo sapien
tgcttcagatgaaaattttcaggtc

SEQ ID NO: 5354460 - DNA, 25 bp, Homo sapien
atattgtgctacaaaccaattcttg

SEQ ID NO: 5354461 - DNA, 25 bp, Homo sapien
aatattgtgctacaaaccaattctt

SEQ ID NO: 5354462 - DNA, 25 bp, Homo sapien
aaatattgtgctacaaaccaattct

SEQ ID NO: 5354463 - DNA, 25 bp, Homo sapien
tgtgaccgtgaaagacggctgtact

SEQ ID NO: 5354464 - DNA, 25 bp, Homo sapien
tctgtgaccgtgaaagacggctgta

SEQ ID NO: 5354465 - DNA, 25 bp, Homo sapien
gaccgtgaaagacggctgtactctt

SEQ ID NO: 5354466 - DNA, 25 bp, Homo sapien
cgtgaaagacggctgtactcttggc

SEQ ID NO: 5354467 - DNA, 25 bp, Homo sapien
tcttctcctgattatctgtcactca

SEQ ID NO: 5354468 - DNA, 25 bp, Homo sapien
gtgacttcctatggacacagccaaa

SEQ ID NO: 5354469 - DNA, 25 bp, Homo sapien
tagtctatccttcagccaaacttcc

SEQ ID NO: 5354470 - DNA, 25 bp, Homo sapien
gcatgtgtccagctagtctatcctt

SEQ ID NO: 5354471 - DNA, 25 bp, Homo sapien
gtgggcttcttattgtctgctcact

SEQ ID NO: 5354472 - DNA, 25 bp, Homo sapien
tgggcttcttattgtctgctcactc

SEQ ID NO: 5354473 - DNA, 25 bp, Homo sapien
aaattactagcagtcctatacatca

SEQ ID NO: 5354474 - DNA, 25 bp, Homo sapien
cagtcctatacatcaagtcaagcag

SEQ ID NO: 5354475 - DNA, 25 bp, Homo sapien
tactagcagtcctatacatcaagtc

SEQ ID NO: 5354476 - DNA, 25 bp, Homo sapien
tgcccttctagtcagaagtgccaaa

SEQ ID NO: 5354477 - DNA, 25 bp, Homo sapien
catatgatgatgtgaggaatgcata

SEQ ID NO: 5354478 - DNA, 25 bp, Homo sapien
atttttactgcactgtgatctcagt

SEQ ID NO: 5354479 - DNA, 25 bp, Homo sapien
agagtatgtggcatatgatgatgtg

SEQ ID NO: 5354480 - DNA, 25 bp, Homo sapien
gatgatgtgaggaatgcatattctg

SEQ ID NO: 5354481 - DNA, 25 bp, Homo sapien
tgtgttaattagctgaagtttatgg

SEQ ID NO: 5354482 - DNA, 25 bp, Homo sapien
taattagctgaagtttatggcttcc

SEQ ID NO: 5354483 - DNA, 25 bp, Homo sapien
tagctgaagtttatggcttccagct

SEQ ID NO: 5354484 - DNA, 25 bp, Homo sapien
tgttaattagctgaagtttatggct

SEQ ID NO: 5354485 - DNA, 25 bp, Homo sapien
taataaacactagtgttgagctttt

SEQ ID NO: 5354486 - DNA, 25 bp, Homo sapien
tctaataaacactagtgttgagctt

SEQ ID NO: 5354487 - DNA, 25 bp, Homo sapien
ataaacactagtgttgagctttttt

SEQ ID NO: 5354488 - DNA, 25 bp, Homo sapien
ctctaataaacactagtgttgagct

SEQ ID NO: 5354489 - DNA, 25 bp, Homo sapien
cactcttagtcagatgggcttcccg

SEQ ID NO: 5354490 - DNA, 25 bp, Homo sapien
tgttctctatgggtcacggcaacca

SEQ ID NO: 5354491 - DNA, 25 bp, Homo sapien
aatatgttgggttagagcgtactcc

SEQ ID NO: 5354492 - DNA, 25 bp, Homo sapien
gaactcggtagttttaggcagactc

SEQ ID NO: 5354493 - DNA, 25 bp, Homo sapien
gtggtggtaatgaattacctcagaa

SEQ ID NO: 5354494 - DNA, 25 bp, Homo sapien
ctgttggctggttattatgttggct

SEQ ID NO: 5354495 - DNA, 25 bp, Homo sapien
tgaagacgacataccattgggtctc

SEQ ID NO: 5354496 - DNA, 25 bp, Homo sapien
gatcttgtcattgtgctgttggctg

SEQ ID NO: 5354497 - DNA, 25 bp, Homo sapien
tactggctcaacagttctggtaggg

SEQ ID NO: 5354498 - DNA, 25 bp, Homo sapien
tttcctaactttgaggcagaagagg

SEQ ID NO: 5354499 - DNA, 25 bp, Homo sapien
tgttcttcggcgctttcagatcggt

SEQ ID NO: 5354500 - DNA, 25 bp, Homo sapien
gagtgtgtagaacccatgagagatg

SEQ ID NO: 5354501 - DNA, 25 bp, Homo sapien
aaaacatcaaatatggcggcccacg

SEQ ID NO: 5354502 - DNA, 25 bp, Homo sapien
catatccgccctaagtcagctggga

SEQ ID NO: 5354503 - DNA, 25 bp, Homo sapien
tcagggcactccatctcagggagaa

SEQ ID NO: 5354504 - DNA, 25 bp, Homo sapien
tcagctgggactccttaaagcccaa

SEQ ID NO: 5354505 - DNA, 25 bp, Homo sapien
tgaaacaaccaggtactcgcattac

SEQ ID NO: 5354506 - DNA, 25 bp, Homo sapien
aacaaccaggtactcgcattactca

SEQ ID NO: 5354507 - DNA, 25 bp, Homo sapien
caaccaggtactcgcattactcaca

SEQ ID NO: 5354508 - DNA, 25 bp, Homo sapien
caggtactcgcattactcacataat

SEQ ID NO: 5354509 - DNA, 25 bp, Homo sapien
ctggaggtcccagtgcggtgatccc

SEQ ID NO: 5354510 - DNA, 25 bp, Homo sapien
gctggagtggctaagttgcacaaac

SEQ ID NO: 5354511 - DNA, 25 bp, Homo sapien
gccatttcatcccaagaattcaaat

SEQ ID NO: 5354512 - DNA, 25 bp, Homo sapien
gaccgccatgccagggataattgaa

SEQ ID NO: 5354513 - DNA, 25 bp, Homo sapien
gaagtccttcactgggccagacgct

SEQ ID NO: 5354514 - DNA, 25 bp, Homo sapien
tctgtcatcccaagaacaccggtgg

SEQ ID NO: 5354515 - DNA, 25 bp, Homo sapien
tagggaggtccctcactaagcagga

SEQ ID NO: 5354516 - DNA, 25 bp, Homo sapien
caattgggaggtcactcacttggca

SEQ ID NO: 5354517 - DNA, 25 bp, Homo sapien
tttgaaagggttatccacatccggc

SEQ ID NO: 5354518 - DNA, 25 bp, Homo sapien
aatttgaaagggttatccacatccg

SEQ ID NO: 5354519 - DNA, 25 bp, Homo sapien
tgaaagggttatccacatccggctg

SEQ ID NO: 5354520 - DNA, 25 bp, Homo sapien
aaagggttatccacatccggctgct

SEQ ID NO: 5354521 - DNA, 25 bp, Homo sapien
gaacatcctatccaacagcagaagt

SEQ ID NO: 5354522 - DNA, 25 bp, Homo sapien
gaaatgtgggtggaacattctccag

SEQ ID NO: 5354523 - DNA, 25 bp, Homo sapien
tagatttgaatcacactttggagca

SEQ ID NO: 5354524 - DNA, 25 bp, Homo sapien
gaaaatttttgcatcccaatggcat

SEQ ID NO: 5354525 - DNA, 25 bp, Homo sapien
tagagttaaagctccacaacactgg

SEQ ID NO: 5354526 - DNA, 25 bp, Homo sapien
gatgcaaccctgatagcagtcaaca

SEQ ID NO: 5354527 - DNA, 25 bp, Homo sapien
catggtagtggcatataaatggaca

SEQ ID NO: 5354528 - DNA, 25 bp, Homo sapien
cacttcatggttacaagtaccagcc

SEQ ID NO: 5354529 - DNA, 25 bp, Homo sapien
tatgcagactctacttaccgacagc

SEQ ID NO: 5354530 - DNA, 25 bp, Homo sapien
gaaatgtaatgctctggaaccctag

SEQ ID NO: 5354531 - DNA, 25 bp, Homo sapien
ggaaccctaggcatatatgaaccag

SEQ ID NO: 5354532 - DNA, 25 bp, Homo sapien
ggtgtggactgataacaaacctctc

SEQ ID NO: 5354533 - DNA, 25 bp, Homo sapien
tctgttcaggttatcggagtctccc

SEQ ID NO: 5354534 - DNA, 25 bp, Homo sapien
gatgattcccctcacaattgcttga

SEQ ID NO: 5354535 - DNA, 25 bp, Homo sapien
tatttgtgagaagaccgaaggtgtt

SEQ ID NO: 5354536 - DNA, 25 bp, Homo sapien
aaggtagccgctagaagaattgact

SEQ ID NO: 5354537 - DNA, 25 bp, Homo sapien
tctagtgcagaagctatagagcagc

SEQ ID NO: 5354538 - DNA, 25 bp, Homo sapien
gtttcaggatggtgattcaagcgta

SEQ ID NO: 5354539 - DNA, 25 bp, Homo sapien
gcatgtcacacatttaacgggaaac

SEQ ID NO: 5354540 - DNA, 25 bp, Homo sapien
tactcattagtagattctagtgcag

SEQ ID NO: 5354541 - DNA, 25 bp, Homo sapien
tgtgacctagatcccttgaacgagc

SEQ ID NO: 5354542 - DNA, 25 bp, Homo sapien
cgagcagttcacagtaggattttca

SEQ ID NO: 5354543 - DNA, 25 bp, Homo sapien
cgtgaagagataggagacaatgaca

SEQ ID NO: 5354544 - DNA, 25 bp, Homo sapien
gatggtcccatcgtgaagagatagg

SEQ ID NO: 5354545 - DNA, 25 bp, Homo sapien
atattgtaggctttttggtagaggc

SEQ ID NO: 5354546 - DNA, 25 bp, Homo sapien
gtagaggcaattcataggttgatat

SEQ ID NO: 5354547 - DNA, 25 bp, Homo sapien
ctgtggagctccatgtagtctagtt

SEQ ID NO: 5354548 - DNA, 25 bp, Homo sapien
aaacacatgtaggatagagggaaga

SEQ ID NO: 5354549 - DNA, 25 bp, Homo sapien
gtgaagacgatcactgtggagctcc

SEQ ID NO: 5354550 - DNA, 25 bp, Homo sapien
gctggaggtgaagacgatcactgtg

SEQ ID NO: 5354551 - DNA, 25 bp, Homo sapien
tgagaagttgataatgcctttgttt

SEQ ID NO: 5354552 - DNA, 25 bp, Homo sapien
cagtttcagtgtgcaggctgatagt

SEQ ID NO: 5354553 - DNA, 25 bp, Homo sapien
tcactaccttaaccttgagaagttg

SEQ ID NO: 5354554 - DNA, 25 bp, Homo sapien
tgcctttgttttgtgagaacagttt

SEQ ID NO: 5354555 - DNA, 25 bp, Homo sapien
ttgaatttaattcataaattttggc

SEQ ID NO: 5354556 - DNA, 25 bp, Homo sapien
taattcataaattttggcaacatac

SEQ ID NO: 5354557 - DNA, 25 bp, Homo sapien
tcagaaatcaatgatttgaatttaa

SEQ ID NO: 5354558 - DNA, 25 bp, Homo sapien
tatttcagaaatcaatgatttgaat

SEQ ID NO: 5354559 - DNA, 25 bp, Homo sapien
ttggacaagggatatttaacccatc

SEQ ID NO: 5354560 - DNA, 25 bp, Homo sapien
gacaagggatatttaacccatccta

SEQ ID NO: 5354561 - DNA, 25 bp, Homo sapien
gatatttaacccatcctactggaaa

SEQ ID NO: 5354562 - DNA, 25 bp, Homo sapien
gacagaaattaagagatcagcttac

SEQ ID NO: 5354563 - DNA, 25 bp, Homo sapien
acttgaatgctgcaggattttctca

SEQ ID NO: 5354564 - DNA, 25 bp, Homo sapien
ttttctcaagccgctcaatttggtc

SEQ ID NO: 5354565 - DNA, 25 bp, Homo sapien
caggattttctcaagccgctcaatt

SEQ ID NO: 5354566 - DNA, 25 bp, Homo sapien
ctcaagccgctcaatttggtcatcc

SEQ ID NO: 5354567 - DNA, 25 bp, Homo sapien
tttcatactacagtgctcttttgct

SEQ ID NO: 5354568 - DNA, 25 bp, Homo sapien
ttttcatactacagtgctcttttgc

SEQ ID NO: 5354569 - DNA, 25 bp, Homo sapien
ttttgtgtgtcgccttccatctcct

SEQ ID NO: 5354570 - DNA, 25 bp, Homo sapien
gtgtgtcgccttccatctccttagt

SEQ ID NO: 5354571 - DNA, 25 bp, Homo sapien
tcttatagtagctgtaagttgatcc

SEQ ID NO: 5354572 - DNA, 25 bp, Homo sapien
tgtcgccttccatctccttagtaca

SEQ ID NO: 5354573 - DNA, 25 bp, Homo sapien
tttattatagcaaagcaacttgcac

SEQ ID NO: 5354574 - DNA, 25 bp, Homo sapien
gaattccaaacactaccacatcaac

SEQ ID NO: 5354575 - DNA, 25 bp, Homo sapien
caaaattaaaatcgacaaagtcagt

SEQ ID NO: 5354576 - DNA, 25 bp, Homo sapien
tacaggatcttattgactctcccat

SEQ ID NO: 5354577 - DNA, 25 bp, Homo sapien
gaaagccatccactaaaattagtac

SEQ ID NO: 5354578 - DNA, 25 bp, Homo sapien
gccatccactaaaattagtacccca

SEQ ID NO: 5354579 - DNA, 25 bp, Homo sapien
acaaaagaaagccatccactaaaat

SEQ ID NO: 5354580 - DNA, 25 bp, Homo sapien
aaagaaagccatccactaaaattag

SEQ ID NO: 5354581 - DNA, 25 bp, Homo sapien
cagattaacagttgttggtgtgcaa

SEQ ID NO: 5354582 - DNA, 25 bp, Homo sapien
agattaacagttgttggtgtgcaaa

SEQ ID NO: 5354583 - DNA, 25 bp, Homo sapien
ctacagattaacagttgttggtgtg

SEQ ID NO: 5354584 - DNA, 25 bp, Homo sapien
cagttgttggtgtgcaaagttgcat

SEQ ID NO: 5354585 - DNA, 25 bp, Homo sapien
gacatcatctcgtttttgttgaagc

SEQ ID NO: 5354586 - DNA, 25 bp, Homo sapien
ttctaaataggtgcagtgacgcgat

SEQ ID NO: 5354587 - DNA, 25 bp, Homo sapien
ccagcagagcttttgttgctgatcc

SEQ ID NO: 5354588 - DNA, 25 bp, Homo sapien
tgacgcgatgaagcatccagcagag

SEQ ID NO: 5354589 - DNA, 25 bp, Homo sapien
gaatgattcagttcattgaccaaca

SEQ ID NO: 5354590 - DNA, 25 bp, Homo sapien
tcgaatgattcagttcattgaccaa

SEQ ID NO: 5354591 - DNA, 25 bp, Homo sapien
tctttcgaatgattcagttcattga

SEQ ID NO: 5354592 - DNA, 25 bp, Homo sapien
tttcgaatgattcagttcattgacc

SEQ ID NO: 5354593 - DNA, 25 bp, Homo sapien
ttcatttgactctgtttttgcttta

SEQ ID NO: 5354594 - DNA, 25 bp, Homo sapien
ttccattgtattgtatccacttttg

SEQ ID NO: 5354595 - DNA, 25 bp, Homo sapien
tttgctttagctcactttgcacgtg

SEQ ID NO: 5354596 - DNA, 25 bp, Homo sapien
ccattgtattgtatccacttttgta

SEQ ID NO: 5354597 - DNA, 25 bp, Homo sapien
ttttagagccttttgaaggtcttca

SEQ ID NO: 5354598 - DNA, 25 bp, Homo sapien
catcagcttctatcctatattgctc

SEQ ID NO: 5354599 - DNA, 25 bp, Homo sapien
gctgatttgagagccggtttaattg

SEQ ID NO: 5354600 - DNA, 25 bp, Homo sapien
tccacctctgctgatttgagagccg

SEQ ID NO: 5354601 - DNA, 25 bp, Homo sapien
tcacatcagcttctatcctatattg

SEQ ID NO: 5354602 - DNA, 25 bp, Homo sapien
ttaaaacctgaaattcaattcatca

SEQ ID NO: 5354603 - DNA, 25 bp, Homo sapien
cagaagaatttatccaatgtaaata

SEQ ID NO: 5354604 - DNA, 25 bp, Homo sapien
gaagtattcacaattaagaacttgt

SEQ ID NO: 5354605 - DNA, 25 bp, Homo sapien
cgaatttttactctaagttgctcac

SEQ ID NO: 5354606 - DNA, 25 bp, Homo sapien
tttttactctaagttgctcacagtg

SEQ ID NO: 5354607 - DNA, 25 bp, Homo sapien
catgctttaactgcgattttatttc

SEQ ID NO: 5354608 - DNA, 25 bp, Homo sapien
ttcgaatttttactctaagttgctc

SEQ ID NO: 5354609 - DNA, 25 bp, Homo sapien
aaaacaaactagagataaaatacat

SEQ ID NO: 5354610 - DNA, 25 bp, Homo sapien
caaacacactgtgtgtatcattcac

SEQ ID NO: 5354611 - DNA, 25 bp, Homo sapien
acaaacacactgtgtgtatcattca

SEQ ID NO: 5354612 - DNA, 25 bp, Homo sapien
aaacacactgtgtgtatcattcaca

SEQ ID NO: 5354613 - DNA, 25 bp, Homo sapien
aacacactgtgtgtatcattcacac

SEQ ID NO: 5354614 - DNA, 25 bp, Homo sapien
caaagcgagtcaccgtcctctgaga

SEQ ID NO: 5354615 - DNA, 25 bp, Homo sapien
aatatgacattcttacaattacagc

SEQ ID NO: 5354616 - DNA, 25 bp, Homo sapien
ggtcatccctagaatgtatttggtt

SEQ ID NO: 5354617 - DNA, 25 bp, Homo sapien
catgttgatcaatgagtaatatgac

SEQ ID NO: 5354618 - DNA, 25 bp, Homo sapien
aataaatgtaatccagcttataaac

SEQ ID NO: 5354619 - DNA, 25 bp, Homo sapien
atcaataaatgtaatccagcttata

SEQ ID NO: 5354620 - DNA, 25 bp, Homo sapien
aatgtaatccagcttataaacagaa

SEQ ID NO: 5354621 - DNA, 25 bp, Homo sapien
ttcaatatacgcaaatcaataaatg

SEQ ID NO: 5354622 - DNA, 25 bp, Homo sapien
cctcttttgctctccctctgatgcc

SEQ ID NO: 5354623 - DNA, 25 bp, Homo sapien
ctgtggctggttattttcatattct

SEQ ID NO: 5354624 - DNA, 25 bp, Homo sapien
ttcatattcttcaagcctcttttgc

SEQ ID NO: 5354625 - DNA, 25 bp, Homo sapien
tcttttgctctccctctgatgccat

SEQ ID NO: 5354626 - DNA, 25 bp, Homo sapien
tttggtggctgtattcagaacagaa

SEQ ID NO: 5354627 - DNA, 25 bp, Homo sapien
ttggtggctgtattcagaacagaat

SEQ ID NO: 5354628 - DNA, 25 bp, Homo sapien
aaggtgcgcagattctcaggatact

SEQ ID NO: 5354629 - DNA, 25 bp, Homo sapien
ttcaaggtgcgcagattctcaggat

SEQ ID NO: 5354630 - DNA, 25 bp, Homo sapien
caaggtgcgcagattctcaggatac

SEQ ID NO: 5354631 - DNA, 25 bp, Homo sapien
cttcaaggtgcgcagattctcagga

SEQ ID NO: 5354632 - DNA, 25 bp, Homo sapien
ttattcttgtggcaatattcaaaag

SEQ ID NO: 5354633 - DNA, 25 bp, Homo sapien
tcttgtggcaatattcaaaagagaa

SEQ ID NO: 5354634 - DNA, 25 bp, Homo sapien
tattcttgtggcaatattcaaaaga

SEQ ID NO: 5354635 - DNA, 25 bp, Homo sapien
ttcttgtggcaatattcaaaagaga

SEQ ID NO: 5354636 - DNA, 25 bp, Homo sapien
cttctgggccgattgtttctgagga

SEQ ID NO: 5354637 - DNA, 25 bp, Homo sapien
tgggccgattgtttctgaggagaca

SEQ ID NO: 5354638 - DNA, 25 bp, Homo sapien
tctgggccgattgtttctgaggaga

SEQ ID NO: 5354639 - DNA, 25 bp, Homo sapien
ctgggccgattgtttctgaggagac

SEQ ID NO: 5354640 - DNA, 25 bp, Homo sapien
gctatattcgaaacagaatctttct

SEQ ID NO: 5354641 - DNA, 25 bp, Homo sapien
ggctatattcgaaacagaatctttc

SEQ ID NO: 5354642 - DNA, 25 bp, Homo sapien
tggctatattcgaaacagaatcttt

SEQ ID NO: 5354643 - DNA, 25 bp, Homo sapien
tcaaggctggtcgtctctgagaaga

SEQ ID NO: 5354644 - DNA, 25 bp, Homo sapien
cttcaaggctggtcgtctctgagaa

SEQ ID NO: 5354645 - DNA, 25 bp, Homo sapien
caaggctggtcgtctctgagaagac

SEQ ID NO: 5354646 - DNA, 25 bp, Homo sapien
aaggctggtcgtctctgagaagaca

SEQ ID NO: 5354647 - DNA, 25 bp, Homo sapien
tcccacgtatttgtccatcctttat

SEQ ID NO: 5354648 - DNA, 25 bp, Homo sapien
tgtcccacgtatttgtccatccttt

SEQ ID NO: 5354649 - DNA, 25 bp, Homo sapien
gtcccacgtatttgtccatccttta

SEQ ID NO: 5354650 - DNA, 25 bp, Homo sapien
tccaggccggttgtttctgagaaga

SEQ ID NO: 5354651 - DNA, 25 bp, Homo sapien
caggccggttgtttctgagaagaca

SEQ ID NO: 5354652 - DNA, 25 bp, Homo sapien
cttccaggccggttgtttctgagaa

SEQ ID NO: 5354653 - DNA, 25 bp, Homo sapien
ccaggccggttgtttctgagaagac

SEQ ID NO: 5354654 - DNA, 25 bp, Homo sapien
ggtatattcgaaacagaatctttct

SEQ ID NO: 5354655 - DNA, 25 bp, Homo sapien
tgtgggtatattcgaaacagaatct

SEQ ID NO: 5354656 - DNA, 25 bp, Homo sapien
ttatttctgtgggtatattcgaaac

SEQ ID NO: 5354657 - DNA, 25 bp, Homo sapien
ctgttccagattgttgtccatcctt

SEQ ID NO: 5354658 - DNA, 25 bp, Homo sapien
cttcaaggctggttgtttctgacaa

SEQ ID NO: 5354659 - DNA, 25 bp, Homo sapien
tcaaggctggttgtttctgacaaga

SEQ ID NO: 5354660 - DNA, 25 bp, Homo sapien
aaggctggttgtttctgacaagaca

SEQ ID NO: 5354661 - DNA, 25 bp, Homo sapien
caaggctggttgtttctgacaagac

SEQ ID NO: 5354662 - DNA, 25 bp, Homo sapien
agcaggttctacatgatgccacatg

SEQ ID NO: 5354663 - DNA, 25 bp, Homo sapien
tgttttctactttgtgactcgggac

SEQ ID NO: 5354664 - DNA, 25 bp, Homo sapien
gactcgggactggaatatgacagaa

SEQ ID NO: 5354665 - DNA, 25 bp, Homo sapien
tacattcctgcactgttggcatcaa

SEQ ID NO: 5354666 - DNA, 25 bp, Homo sapien
gcctaagtttcttgtatccactcat

SEQ ID NO: 5354667 - DNA, 25 bp, Homo sapien
ttgcctaagtttcttgtatccactc

SEQ ID NO: 5354668 - DNA, 25 bp, Homo sapien
cacccctgtggtgtaataatttgcc

SEQ ID NO: 5354669 - DNA, 25 bp, Homo sapien
cttgtatccactcatttagccttct

SEQ ID NO: 5354670 - DNA, 25 bp, Homo sapien
tggccatattcggaacagaatcttc

SEQ ID NO: 5354671 - DNA, 25 bp, Homo sapien
tgtttctgtggccatattcggaaca

SEQ ID NO: 5354672 - DNA, 25 bp, Homo sapien
ttgttcatcctttgtttctgtggcc

SEQ ID NO: 5354673 - DNA, 25 bp, Homo sapien
gccatattcggaacagaatcttcct

SEQ ID NO: 5354674 - DNA, 25 bp, Homo sapien
caaggatggttgtttatgagaagac

SEQ ID NO: 5354675 - DNA, 25 bp, Homo sapien
cttcaaggatggttgtttatgagaa

SEQ ID NO: 5354676 - DNA, 25 bp, Homo sapien
aaggatggttgtttatgagaagaca

SEQ ID NO: 5354677 - DNA, 25 bp, Homo sapien
tcaaggatggttgtttatgagaaga

SEQ ID NO: 5354678 - DNA, 25 bp, Homo sapien
tcaaaagagaatctttctcgtctct

SEQ ID NO: 5354679 - DNA, 25 bp, Homo sapien
tctttttttcctctggctatattca

SEQ ID NO: 5354680 - DNA, 25 bp, Homo sapien
ttttttcctctggctatattcaaaa

SEQ ID NO: 5354681 - DNA, 25 bp, Homo sapien
tattcaaaagagaatctttctcgtc

SEQ ID NO: 5354682 - DNA, 25 bp, Homo sapien
cttcaagcctggtggttgctcaaaa

SEQ ID NO: 5354683 - DNA, 25 bp, Homo sapien
aagcctggtggttgctcaaaagaca

SEQ ID NO: 5354684 - DNA, 25 bp, Homo sapien
caagcctggtggttgctcaaaagac

SEQ ID NO: 5354685 - DNA, 25 bp, Homo sapien
tcaagcctggtggttgctcaaaaga

SEQ ID NO: 5354686 - DNA, 25 bp, Homo sapien
ttttttctctggctatattcaaaac

SEQ ID NO: 5354687 - DNA, 25 bp, Homo sapien
caaaacagaatcttccttgacactt

SEQ ID NO: 5354688 - DNA, 25 bp, Homo sapien
attcaaaacagaatcttccttgaca

SEQ ID NO: 5354689 - DNA, 25 bp, Homo sapien
tttttttctctggctatattcaaaa

SEQ ID NO: 5354690 - DNA, 25 bp, Homo sapien
aaggctggtggtttctgagaagaca

SEQ ID NO: 5354691 - DNA, 25 bp, Homo sapien
tcaaggctggtggtttctgagaaga

SEQ ID NO: 5354692 - DNA, 25 bp, Homo sapien
cttcaaggctggtggtttctgagaa

SEQ ID NO: 5354693 - DNA, 25 bp, Homo sapien
caaggctggtggtttctgagaagac

SEQ ID NO: 5354694 - DNA, 25 bp, Homo sapien
gtggaagagtcctgaattgatcacc

SEQ ID NO: 5354695 - DNA, 25 bp, Homo sapien
aagagtcctgaattgatcaccttgg

SEQ ID NO: 5354696 - DNA, 25 bp, Homo sapien
tcctgaattgatcaccttggacacc

SEQ ID NO: 5354697 - DNA, 25 bp, Homo sapien
gaattgatcaccttggacacctgtt

SEQ ID NO: 5354698 - DNA, 25 bp, Homo sapien
gccaagatcatattccagaccagca

SEQ ID NO: 5354699 - DNA, 25 bp, Homo sapien
agaatgtgcagcttcgaccagcccc

SEQ ID NO: 5354700 - DNA, 25 bp, Homo sapien
tcagcataacccaagaacttattag

SEQ ID NO: 5354701 - DNA, 25 bp, Homo sapien
gggatgtgtataatcttacagccaa

SEQ ID NO: 5354702 - DNA, 25 bp, Homo sapien
gtcctagatatttctccatcctttt

SEQ ID NO: 5354703 - DNA, 25 bp, Homo sapien
tttctctggttatattcgaaaaaga

SEQ ID NO: 5354704 - DNA, 25 bp, Homo sapien
ctctggttatattcgaaaaagaatc

SEQ ID NO: 5354705 - DNA, 25 bp, Homo sapien
ctggttatattcgaaaaagaatctt

SEQ ID NO: 5354706 - DNA, 25 bp, Homo sapien
tcaaggctggttttttctgagaaga

SEQ ID NO: 5354707 - DNA, 25 bp, Homo sapien
cttcaaggctggttttttctgagaa

SEQ ID NO: 5354708 - DNA, 25 bp, Homo sapien
aaggctggttttttctgagaagaca

SEQ ID NO: 5354709 - DNA, 25 bp, Homo sapien
caaggctggttttttctgagaagac

SEQ ID NO: 5354710 - DNA, 25 bp, Homo sapien
cagaaccttcctcgtcagttgtagc

SEQ ID NO: 5354711 - DNA, 25 bp, Homo sapien
tagaaacagaaccttcctcgtcagt

SEQ ID NO: 5354712 - DNA, 25 bp, Homo sapien
tggctatattagaaacagaaccttc

SEQ ID NO: 5354713 - DNA, 25 bp, Homo sapien
gaaacagaaccttcctcgtcagttg

SEQ ID NO: 5354714 - DNA, 25 bp, Homo sapien
caaggcttgttgtttctgagaagac

SEQ ID NO: 5354715 - DNA, 25 bp, Homo sapien
aaggcttgttgtttctgagaagaca

SEQ ID NO: 5354716 - DNA, 25 bp, Homo sapien
tcaaggcttgttgtttctgagaaga

SEQ ID NO: 5354717 - DNA, 25 bp, Homo sapien
cttcaaggcttgttgtttctgagaa

SEQ ID NO: 5354718 - DNA, 25 bp, Homo sapien
cacatgtcttttatgcaagatatcc

SEQ ID NO: 5354719 - DNA, 25 bp, Homo sapien
gcaggtggcacatgcacccacatgt

SEQ ID NO: 5354720 - DNA, 25 bp, Homo sapien
aggtggcacatgcacccacatgtct

SEQ ID NO: 5354721 - DNA, 25 bp, Homo sapien
acatgtcttttatgcaagatatcca

SEQ ID NO: 5354722 - DNA, 25 bp, Homo sapien
tttatttctgtagctgtattcaaag

SEQ ID NO: 5354723 - DNA, 25 bp, Homo sapien
ctgtcccacattgtagtccatcctt

SEQ ID NO: 5354724 - DNA, 25 bp, Homo sapien
tatttctgtagctgtattcaaagca

SEQ ID NO: 5354725 - DNA, 25 bp, Homo sapien
attcaaagcagaatctgtcttgtca

SEQ ID NO: 5354726 - DNA, 25 bp, Homo sapien
ttgaggctggttgtttctgagaaga

SEQ ID NO: 5354727 - DNA, 25 bp, Homo sapien
tgaggctggttgtttctgagaagac

SEQ ID NO: 5354728 - DNA, 25 bp, Homo sapien
gaggctggttgtttctgagaagaca

SEQ ID NO: 5354729 - DNA, 25 bp, Homo sapien
ctttgaggctggttgtttctgagaa

SEQ ID NO: 5354730 - DNA, 25 bp, Homo sapien
tcttgtggcaatattcaaaagagaa

SEQ ID NO: 5354731 - DNA, 25 bp, Homo sapien
ttattcttgtggcaatattcaaaag

SEQ ID NO: 5354732 - DNA, 25 bp, Homo sapien
ttcttgtggcaatattcaaaagaga

SEQ ID NO: 5354733 - DNA, 25 bp, Homo sapien
tattcttgtggcaatattcaaaaga

SEQ ID NO: 5354734 - DNA, 25 bp, Homo sapien
cttctgggccgattgtttctgagga

SEQ ID NO: 5354735 - DNA, 25 bp, Homo sapien
tctgggccgattgtttctgaggaga

SEQ ID NO: 5354736 - DNA, 25 bp, Homo sapien
tgggccgattgtttctgaggagaca

SEQ ID NO: 5354737 - DNA, 25 bp, Homo sapien
ctgggccgattgtttctgaggagac

SEQ ID NO: 5354738 - DNA, 25 bp, Homo sapien
cagaatctttctcgtcacttgtagc

SEQ ID NO: 5354739 - DNA, 25 bp, Homo sapien
atttctgtggctatatttgaaacag

SEQ ID NO: 5354740 - DNA, 25 bp, Homo sapien
ccagattgttgtccctcctttattt

SEQ ID NO: 5354741 - DNA, 25 bp, Homo sapien
ctgtcccagattgttgtccctcctt

SEQ ID NO: 5354742 - DNA, 25 bp, Homo sapien
cttctcagctggttgtttctgagaa

SEQ ID NO: 5354743 - DNA, 25 bp, Homo sapien
ctcagctggttgtttctgagaagac

SEQ ID NO: 5354744 - DNA, 25 bp, Homo sapien
tcagctggttgtttctgagaagaca

SEQ ID NO: 5354745 - DNA, 25 bp, Homo sapien
tctcagctggttgtttctgagaaga

SEQ ID NO: 5354746 - DNA, 25 bp, Homo sapien
cagaatctttgtcgtcacttgtagc

SEQ ID NO: 5354747 - DNA, 25 bp, Homo sapien
atttctgtggctatatttgaaacag

SEQ ID NO: 5354748 - DNA, 25 bp, Homo sapien
ccagatataggtccctcctttattt

SEQ ID NO: 5354749 - DNA, 25 bp, Homo sapien
ctgtcccagatataggtccctcctt

SEQ ID NO: 5354750 - DNA, 25 bp, Homo sapien
tcagctcgttgtttctgaggagaca

SEQ ID NO: 5354751 - DNA, 25 bp, Homo sapien
tgacctgtgactacgatcagaaggc

SEQ ID NO: 5354752 - DNA, 25 bp, Homo sapien
caaacacagaggtggtcttggaaac

SEQ ID NO: 5354753 - DNA, 25 bp, Homo sapien
ggtagacaatattgcccatgtgctg

SEQ ID NO: 5354754 - DNA, 25 bp, Homo sapien
tcttggaaactctgacatagtggca

SEQ ID NO: 5354755 - DNA, 25 bp, Homo sapien
gtaccgaaatggagatatagaccaa

SEQ ID NO: 5354756 - DNA, 25 bp, Homo sapien
gctgcatgtctacaactatcgatct

SEQ ID NO: 5354757 - DNA, 25 bp, Homo sapien
catggtactggtaccgaaatggaga

SEQ ID NO: 5354758 - DNA, 25 bp, Homo sapien
tattgtgaatagctacaaaccactg

SEQ ID NO: 5354759 - DNA, 25 bp, Homo sapien
tcaagcatcgaactacaaggaaact

SEQ ID NO: 5354760 - DNA, 25 bp, Homo sapien
tattttaccgtggatgggtgaacac

SEQ ID NO: 5354761 - DNA, 25 bp, Homo sapien
gggtgaacaccttacactagattga

SEQ ID NO: 5354762 - DNA, 25 bp, Homo sapien
caaaaaggtcatctagaatactagg

SEQ ID NO: 5354763 - DNA, 25 bp, Homo sapien
tgcaagctttccatacacatctcga

SEQ ID NO: 5354764 - DNA, 25 bp, Homo sapien
ttctgcaagctttccatacacatct

SEQ ID NO: 5354765 - DNA, 25 bp, Homo sapien
aatcttctgcaagctttccatacac

SEQ ID NO: 5354766 - DNA, 25 bp, Homo sapien
aagctttccatacacatctcgagaa

SEQ ID NO: 5354767 - DNA, 25 bp, Homo sapien
attttcacttttcttcgactcacag

SEQ ID NO: 5354768 - DNA, 25 bp, Homo sapien
caagtaacagtggctgatattcatt

SEQ ID NO: 5354769 - DNA, 25 bp, Homo sapien
cttcgactcacagcaagtaacagtg

SEQ ID NO: 5354770 - DNA, 25 bp, Homo sapien
gccaagataatcaatggcatttaca

SEQ ID NO: 5354771 - DNA, 25 bp, Homo sapien
ataaagcctatttataagggacaat

SEQ ID NO: 5354772 - DNA, 25 bp, Homo sapien
gtcacttcacactgattagaaaaaa

SEQ ID NO: 5354773 - DNA, 25 bp, Homo sapien
cctttcccaaattcagttgtcatga

SEQ ID NO: 5354774 - DNA, 25 bp, Homo sapien
ctattacctttcccaaattcagttg

SEQ ID NO: 5354775 - DNA, 25 bp, Homo sapien
gagcagtccttccaaagacatccgt

SEQ ID NO: 5354776 - DNA, 25 bp, Homo sapien
tacacagcgtagtgcagagcagtcc

SEQ ID NO: 5354777 - DNA, 25 bp, Homo sapien
gaagagttgcacaagcctcctgcct

SEQ ID NO: 5354778 - DNA, 25 bp, Homo sapien
ggatcggcgccattttgcagcagaa

SEQ ID NO: 5354779 - DNA, 25 bp, Homo sapien
gtcgcagaggttaagctcacatctt

SEQ ID NO: 5354780 - DNA, 25 bp, Homo sapien
cggtcgcagaggttaagctcacatc

SEQ ID NO: 5354781 - DNA, 25 bp, Homo sapien
cacggtcgcagaggttaagctcaca

SEQ ID NO: 5354782 - DNA, 25 bp, Homo sapien
ttcacggtcgcagaggttaagctca

SEQ ID NO: 5354783 - DNA, 25 bp, Homo sapien
ttccggttggccagtggcacaggcc

SEQ ID NO: 5354784 - DNA, 25 bp, Homo sapien
cggttggccagtggcacaggccaaa

SEQ ID NO: 5354785 - DNA, 25 bp, Homo sapien
tggcacaggccaaatgtagggcagt

SEQ ID NO: 5354786 - DNA, 25 bp, Homo sapien
ggcacaggccaaatgtagggcagtc

SEQ ID NO: 5354787 - DNA, 25 bp, Homo sapien
ccatattgtcccatcctatggatgc

SEQ ID NO: 5354788 - DNA, 25 bp, Homo sapien
tgtgtatgtataatcaaaccaactt

SEQ ID NO: 5354789 - DNA, 25 bp, Homo sapien
ttttcagagtacatcttcacacctc

SEQ ID NO: 5354790 - DNA, 25 bp, Homo sapien
ttcacacctcaacatacatctgtat

SEQ ID NO: 5354791 - DNA, 25 bp, Homo sapien
tggtgagtgattggaaaccagctga

SEQ ID NO: 5354792 - DNA, 25 bp, Homo sapien
taaaacgctgtacatgctgaatttt

SEQ ID NO: 5354793 - DNA, 25 bp, Homo sapien
agcatggtgagtgattggaaaccag

SEQ ID NO: 5354794 - DNA, 25 bp, Homo sapien
aataaaacgctgtacatgctgaatt

SEQ ID NO: 5354795 - DNA, 25 bp, Homo sapien
tgatacggtttaatgtagtaatggg

SEQ ID NO: 5354796 - DNA, 25 bp, Homo sapien
ggccacctctcccgctcgtcgtctt

SEQ ID NO: 5354797 - DNA, 25 bp, Homo sapien
gtgggccacctctcccgctcgtcgt

SEQ ID NO: 5354798 - DNA, 25 bp, Homo sapien
gggtgggccacctctcccgctcgtc

SEQ ID NO: 5354799 - DNA, 25 bp, Homo sapien
ccacctctcccgctcgtcgtcttcc

SEQ ID NO: 5354800 - DNA, 25 bp, Homo sapien
ttaatcgtcggctgcaaattgtagc

SEQ ID NO: 5354801 - DNA, 25 bp, Homo sapien
gggatcgccgcctccgaagagcaac

SEQ ID NO: 5354802 - DNA, 25 bp, Homo sapien
cctccgaagagcaacaacaggcaaa

SEQ ID NO: 5354803 - DNA, 25 bp, Homo sapien
caacaggcaaagcagtctgtgcacg

SEQ ID NO: 5354804 - DNA, 25 bp, Homo sapien
caggcaaagcagtctgtgcacggac

SEQ ID NO: 5354805 - DNA, 25 bp, Homo sapien
gaaccagcgagcacgcgcaccttag

SEQ ID NO: 5354806 - DNA, 25 bp, Homo sapien
tagaaccagcgagcacgcgcacctt

SEQ ID NO: 5354807 - DNA, 25 bp, Homo sapien
gttagaaccagcgagcacgcgcacc

SEQ ID NO: 5354808 - DNA, 25 bp, Homo sapien
agcgagcacgcgcaccttagccggc

SEQ ID NO: 5354809 - DNA, 25 bp, Homo sapien
tgctgcggaggtgccgcgggagggc

SEQ ID NO: 5354810 - DNA, 25 bp, Homo sapien
cctagcagctctcgcgcgcccggtg

SEQ ID NO: 5354811 - DNA, 25 bp, Homo sapien
gctcccgacgctcggagccccccgc

SEQ ID NO: 5354812 - DNA, 25 bp, Homo sapien
ggcctgtttaactgtcgcccgcgcg

SEQ ID NO: 5354813 - DNA, 25 bp, Homo sapien
gctgagcgccggttttcggcctcgt

SEQ ID NO: 5354814 - DNA, 25 bp, Homo sapien
gtgcgaggcgggaggacggtatccg

SEQ ID NO: 5354815 - DNA, 25 bp, Homo sapien
ggacccctgctccatgtgctggtgg

SEQ ID NO: 5354816 - DNA, 25 bp, Homo sapien
gtgcgccgccatccggccggagggt

SEQ ID NO: 5354817 - DNA, 25 bp, Homo sapien
tgtgaggaggggcaatcggggttcc

SEQ ID NO: 5354818 - DNA, 25 bp, Homo sapien
gggcaatcggggttcccaaggctgc

SEQ ID NO: 5354819 - DNA, 25 bp, Homo sapien
tgaggaggggcaatcggggttccca

SEQ ID NO: 5354820 - DNA, 25 bp, Homo sapien
cctccaaatccggtgattttgagca

SEQ ID NO: 5354821 - DNA, 25 bp, Homo sapien
tgattttgagcatagtgaagcacac

SEQ ID NO: 5354822 - DNA, 25 bp, Homo sapien
tccaaatccggtgattttgagcata

SEQ ID NO: 5354823 - DNA, 25 bp, Homo sapien
ttgagcatagtgaagcacactgaca

SEQ ID NO: 5354824 - DNA, 25 bp, Homo sapien
tttcttagacaaaatttcaaagcag

SEQ ID NO: 5354825 - DNA, 25 bp, Homo sapien
aaatttcaaagcagaaaccataagg

SEQ ID NO: 5354826 - DNA, 25 bp, Homo sapien
gacaaaatttcaaagcagaaaccat

SEQ ID NO: 5354827 - DNA, 25 bp, Homo sapien
agatttcttagacaaaatttcaaag

SEQ ID NO: 5354828 - DNA, 25 bp, Homo sapien
gccagtctctctgaattcgtatttc

SEQ ID NO: 5354829 - DNA, 25 bp, Homo sapien
gtctctctgaattcgtatttcacat

SEQ ID NO: 5354830 - DNA, 25 bp, Homo sapien
tgccagtctctctgaattcgtattt

SEQ ID NO: 5354831 - DNA, 25 bp, Homo sapien
cagtctctctgaattcgtatttcac

SEQ ID NO: 5354832 - DNA, 25 bp, Homo sapien
gatcttcactgtttggattatttca

SEQ ID NO: 5354833 - DNA, 25 bp, Homo sapien
ggatcttcactgtttggattatttc

SEQ ID NO: 5354834 - DNA, 25 bp, Homo sapien
agtggatcttcactgtttggattat

SEQ ID NO: 5354835 - DNA, 25 bp, Homo sapien
gtggatcttcactgtttggattatt

SEQ ID NO: 5354836 - DNA, 25 bp, Homo sapien
aagagcccctgcccactccatttca

SEQ ID NO: 5354837 - DNA, 25 bp, Homo sapien
caagagcccctgcccactccatttc

SEQ ID NO: 5354838 - DNA, 25 bp, Homo sapien
agagcccctgcccactccatttcac

SEQ ID NO: 5354839 - DNA, 25 bp, Homo sapien
catcgctgcaggacttcccactgtg

SEQ ID NO: 5354840 - DNA, 25 bp, Homo sapien
gctgcaggacttcccactgtgcagg

SEQ ID NO: 5354841 - DNA, 25 bp, Homo sapien
tcgctgcaggacttcccactgtgca

SEQ ID NO: 5354842 - DNA, 25 bp, Homo sapien
tggcccatcgctgcaggacttccca

SEQ ID NO: 5354843 - DNA, 25 bp, Homo sapien
cttggggtccccataaaatgcaggc

SEQ ID NO: 5354844 - DNA, 25 bp, Homo sapien
tccaagacactaccccatggcaggg

SEQ ID NO: 5354845 - DNA, 25 bp, Homo sapien
aaatgcaggcatcgccagacagaga

SEQ ID NO: 5354846 - DNA, 25 bp, Homo sapien
cccaggatgggaagatttacttagg

SEQ ID NO: 5354847 - DNA, 25 bp, Homo sapien
tggtggggaaagggggctccagcag

SEQ ID NO: 5354848 - DNA, 25 bp, Homo sapien
atggtggggaaagggggctccagca

SEQ ID NO: 5354849 - DNA, 25 bp, Homo sapien
gagatggacagaaccgagtgttgtc

SEQ ID NO: 5354850 - DNA, 25 bp, Homo sapien
gggagtggccccacagaggtctgca

SEQ ID NO: 5354851 - DNA, 25 bp, Homo sapien
aggtctgcaggctcctaaggcagga

SEQ ID NO: 5354852 - DNA, 25 bp, Homo sapien
agaaccgagtgttgtccactgcggg

SEQ ID NO: 5354853 - DNA, 25 bp, Homo sapien
ctaacaagctaggaagggtcacaac

SEQ ID NO: 5354854 - DNA, 25 bp, Homo sapien
ctgcaagcaggagatgtcgtatggt

SEQ ID NO: 5354855 - DNA, 25 bp, Homo sapien
ggccagatctgcaagcaggagatgt

SEQ ID NO: 5354856 - DNA, 25 bp, Homo sapien
agatctgcaagcaggagatgtcgta

SEQ ID NO: 5354857 - DNA, 25 bp, Homo sapien
ggtaaaggtgtaatctgaaggtgga

SEQ ID NO: 5354858 - DNA, 25 bp, Homo sapien
aggtaaaggtgtaatctgaaggtgg

SEQ ID NO: 5354859 - DNA, 25 bp, Homo sapien
gtaaaggtgtaatctgaaggtggac

SEQ ID NO: 5354860 - DNA, 25 bp, Homo sapien
taaaggtgtaatctgaaggtggact

SEQ ID NO: 5354861 - DNA, 25 bp, Homo sapien
ttggaccagagccttcccacacttg

SEQ ID NO: 5354862 - DNA, 25 bp, Homo sapien
tggaccagagccttcccacacttgg

SEQ ID NO: 5354863 - DNA, 25 bp, Homo sapien
ggaccagagccttcccacacttggt

SEQ ID NO: 5354864 - DNA, 25 bp, Homo sapien
ccttggaccagagccttcccacact

SEQ ID NO: 5354865 - DNA, 25 bp, Homo sapien
ctgtggatctgggccttgtcctcag

SEQ ID NO: 5354866 - DNA, 25 bp, Homo sapien
gccactgtggatctgggccttgtcc

SEQ ID NO: 5354867 - DNA, 25 bp, Homo sapien
agagcctccctggtagtgaaaggga

SEQ ID NO: 5354868 - DNA, 25 bp, Homo sapien
cagagcctccctggtagtgaaaggg

SEQ ID NO: 5354869 - DNA, 25 bp, Homo sapien
gtgaaagggaagggcgctagtgact

SEQ ID NO: 5354870 - DNA, 25 bp, Homo sapien
agggaagggcgctagtgactcaggg

SEQ ID NO: 5354871 - DNA, 25 bp, Homo sapien
aggatgaccagggaatcctgtgggt

SEQ ID NO: 5354872 - DNA, 25 bp, Homo sapien
ctgctcaatgaggatgaccagggaa

SEQ ID NO: 5354873 - DNA, 25 bp, Homo sapien
aatgaggatgaccagggaatcctgt

SEQ ID NO: 5354874 - DNA, 25 bp, Homo sapien
ccagggaatcctgtgggttttggca

SEQ ID NO: 5354875 - DNA, 25 bp, Homo sapien
tgggagatggtgtggtaacagcact

SEQ ID NO: 5354876 - DNA, 25 bp, Homo sapien
ctgtgggagatggtgtggtaacagc

SEQ ID NO: 5354877 - DNA, 25 bp, Homo sapien
ggagatggtgtggtaacagcacttg

SEQ ID NO: 5354878 - DNA, 25 bp, Homo sapien
gatggtgtggtaacagcacttggcc

SEQ ID NO: 5354879 - DNA, 25 bp, Homo sapien
cctagattaagtgcaggagtcctga

SEQ ID NO: 5354880 - DNA, 25 bp, Homo sapien
tcccaggcatgcaagtgaccaactc

SEQ ID NO: 5354881 - DNA, 25 bp, Homo sapien
agaaatattgctgcctactcccagg

SEQ ID NO: 5354882 - DNA, 25 bp, Homo sapien
gatgctgcacccaatgtcataaggg

SEQ ID NO: 5354883 - DNA, 25 bp, Homo sapien
cgggcctcccatcatcgccatattc

SEQ ID NO: 5354884 - DNA, 25 bp, Homo sapien
tctgtttgtttcaagctgggggccg

SEQ ID NO: 5354885 - DNA, 25 bp, Homo sapien
ggccgggcctcccatcatcgccata

SEQ ID NO: 5354886 - DNA, 25 bp, Homo sapien
ccgggcctcccatcatcgccatatt

SEQ ID NO: 5354887 - DNA, 25 bp, Homo sapien
gatccaattccactttgtattcctt

SEQ ID NO: 5354888 - DNA, 25 bp, Homo sapien
ttctcgaggtcccagtggccgcttt

SEQ ID NO: 5354889 - DNA, 25 bp, Homo sapien
ggctctgcaggcatctccctgtaat

SEQ ID NO: 5354890 - DNA, 25 bp, Homo sapien
ctcaagcagagtgggttctacatgc

SEQ ID NO: 5354891 - DNA, 25 bp, Homo sapien
cgctgcgaaagtatcctaaacggag

SEQ ID NO: 5354892 - DNA, 25 bp, Homo sapien
agatacgcacaggaataagggaggg

SEQ ID NO: 5354893 - DNA, 25 bp, Homo sapien
tgagatacgcacaggaataagggag

SEQ ID NO: 5354894 - DNA, 25 bp, Homo sapien
gcttgagatacgcacaggaataagg

SEQ ID NO: 5354895 - DNA, 25 bp, Homo sapien
acctgtgacaccttgggacaagtta

SEQ ID NO: 5354896 - DNA, 25 bp, Homo sapien
tagatccacgagcaaatagattggg

SEQ ID NO: 5354897 - DNA, 25 bp, Homo sapien
tacagaagaaccacacaacctggtg

SEQ ID NO: 5354898 - DNA, 25 bp, Homo sapien
tggataaggctctaacctgggaggc

SEQ ID NO: 5354899 - DNA, 25 bp, Homo sapien
tggagttctccgtgcaaattctgct

SEQ ID NO: 5354900 - DNA, 25 bp, Homo sapien
cactcctacctcatctcctcagtcc

SEQ ID NO: 5354901 - DNA, 25 bp, Homo sapien
ctcctacctcatctcctcagtcctg

SEQ ID NO: 5354902 - DNA, 25 bp, Homo sapien
cctacctcatctcctcagtcctggg

SEQ ID NO: 5354903 - DNA, 25 bp, Homo sapien
tcctacctcatctcctcagtcctgg

SEQ ID NO: 5354904 - DNA, 25 bp, Homo sapien
ctgctgactgggcattgggtccctg

SEQ ID NO: 5354905 - DNA, 25 bp, Homo sapien
atctcccaggacacagctaacaatc

SEQ ID NO: 5354906 - DNA, 25 bp, Homo sapien
gtgccagctcaacccaccttttttg

SEQ ID NO: 5354907 - DNA, 25 bp, Homo sapien
actggtcccaggtgcttctttgggc

SEQ ID NO: 5354908 - DNA, 25 bp, Homo sapien
tataacttgttgaccattggcccca

SEQ ID NO: 5354909 - DNA, 25 bp, Homo sapien
tctggatccttgcaagtcggcctgc

SEQ ID NO: 5354910 - DNA, 25 bp, Homo sapien
cacctgtcgggccagatgactaacg

SEQ ID NO: 5354911 - DNA, 25 bp, Homo sapien
cagaggtgctcaaataggcctgtcc

SEQ ID NO: 5354912 - DNA, 25 bp, Homo sapien
gagcccagcctcctgaggctttttg

SEQ ID NO: 5354913 - DNA, 25 bp, Homo sapien
ggtgagagcccagcctcctgaggct

SEQ ID NO: 5354914 - DNA, 25 bp, Homo sapien
tgagagcccagcctcctgaggcttt

SEQ ID NO: 5354915 - DNA, 25 bp, Homo sapien
gagagcccagcctcctgaggctttt

SEQ ID NO: 5354916 - DNA, 25 bp, Homo sapien
tcatgccgctaagctagagccagtg

SEQ ID NO: 5354917 - DNA, 25 bp, Homo sapien
ttcatgccgctaagctagagccagt

SEQ ID NO: 5354918 - DNA, 25 bp, Homo sapien
cttcatgccgctaagctagagccag

SEQ ID NO: 5354919 - DNA, 25 bp, Homo sapien
tctgaaaaggatagtgcagcggctc

SEQ ID NO: 5354920 - DNA, 25 bp, Homo sapien
cacagagagccacaagaaaacagag

SEQ ID NO: 5354921 - DNA, 25 bp, Homo sapien
taagcctagtatacgagccaagacc

SEQ ID NO: 5354922 - DNA, 25 bp, Homo sapien
cctgagagtcggagcagggaaccac

SEQ ID NO: 5354923 - DNA, 25 bp, Homo sapien
gatgaatagcacgggagccatcctc

SEQ ID NO: 5354924 - DNA, 25 bp, Homo sapien
cgatgaatagcacgggagccatcct

SEQ ID NO: 5354925 - DNA, 25 bp, Homo sapien
tgaatagcacgggagccatcctctt

SEQ ID NO: 5354926 - DNA, 25 bp, Homo sapien
tgcgatgaatagcacgggagccatc

SEQ ID NO: 5354927 - DNA, 25 bp, Homo sapien
aatccatgtggagtacagccgttcc

SEQ ID NO: 5354928 - DNA, 25 bp, Homo sapien
ccaatccatgtggagtacagccgtt

SEQ ID NO: 5354929 - DNA, 25 bp, Homo sapien
atgtggagtacagccgttcctgcgg

SEQ ID NO: 5354930 - DNA, 25 bp, Homo sapien
tccatgtggagtacagccgttcctg

SEQ ID NO: 5354931 - DNA, 25 bp, Homo sapien
gcagcattcaaccttcctccccatg

SEQ ID NO: 5354932 - DNA, 25 bp, Homo sapien
ccttgggaagaacaggactaggtgg

SEQ ID NO: 5354933 - DNA, 25 bp, Homo sapien
tgccaaggctgccagcgccctagtg

SEQ ID NO: 5354934 - DNA, 25 bp, Homo sapien
actaggtggacgtgagctggtgagc

SEQ ID NO: 5354935 - DNA, 25 bp, Homo sapien
tcactgagtaatcggtctccgaagc

SEQ ID NO: 5354936 - DNA, 25 bp, Homo sapien
acttcactgagtaatcggtctccga

SEQ ID NO: 5354937 - DNA, 25 bp, Homo sapien
tcacttcactgagtaatcggtctcc

SEQ ID NO: 5354938 - DNA, 25 bp, Homo sapien
ttcactgagtaatcggtctccgaag

SEQ ID NO: 5354939 - DNA, 25 bp, Homo sapien
tactgctggtcctctatcagcagct

SEQ ID NO: 5354940 - DNA, 25 bp, Homo sapien
tgctggtcctctatcagcagctctt

SEQ ID NO: 5354941 - DNA, 25 bp, Homo sapien
ccagctactgctggtcctctatcag

SEQ ID NO: 5354942 - DNA, 25 bp, Homo sapien
tgcgggccctgcgtcctcacagagg

SEQ ID NO: 5354943 - DNA, 25 bp, Homo sapien
ttgtgtatggcgaaggccaccacct

SEQ ID NO: 5354944 - DNA, 25 bp, Homo sapien
ccatgtcggacttgtgtatggcgaa

SEQ ID NO: 5354945 - DNA, 25 bp, Homo sapien
tgagagcacgatgttggcgaacagc

SEQ ID NO: 5354946 - DNA, 25 bp, Homo sapien
gacaaggtccggctggaacagcagc

SEQ ID NO: 5354947 - DNA, 25 bp, Homo sapien
cctcatccttctgtgggttgatgga

SEQ ID NO: 5354948 - DNA, 25 bp, Homo sapien
gcaacgtgtactgcaccttctccgt

SEQ ID NO: 5354949 - DNA, 25 bp, Homo sapien
ccttctgtgggttgatggacaggta

SEQ ID NO: 5354950 - DNA, 25 bp, Homo sapien
atcaagcgtgctgccgtctggcaac

SEQ ID NO: 5354951 - DNA, 25 bp, Homo sapien
gtgtccacaccctctcgccccttgt

SEQ ID NO: 5354952 - DNA, 25 bp, Homo sapien
gtccacaccctctcgccccttgtca

SEQ ID NO: 5354953 - DNA, 25 bp, Homo sapien
aggtcgtgtccacaccctctcgccc

SEQ ID NO: 5354954 - DNA, 25 bp, Homo sapien
ccaggtcgtgtccacaccctctcgc

SEQ ID NO: 5354955 - DNA, 25 bp, Homo sapien
tcagccgaggtatggaagtcaaccc

SEQ ID NO: 5354956 - DNA, 25 bp, Homo sapien
tcctgtcgtgcgtcctgttgcgtac

SEQ ID NO: 5354957 - DNA, 25 bp, Homo sapien
ccacccgcatgatggagtgaggcat

SEQ ID NO: 5354958 - DNA, 25 bp, Homo sapien
ccttccttgcgcagcaggagtcgga

SEQ ID NO: 5354959 - DNA, 25 bp, Homo sapien
tggtcatggcaagcaggacggcaca

SEQ ID NO: 5354960 - DNA, 25 bp, Homo sapien
tttccagggaagtcagaccctggtc

SEQ ID NO: 5354961 - DNA, 25 bp, Homo sapien
gagggactccctagaggaacagtca

SEQ ID NO: 5354962 - DNA, 25 bp, Homo sapien
tgaagagaggacacgagggactccc

SEQ ID NO: 5354963 - DNA, 25 bp, Homo sapien
gcacagcctgcatggagatgaacag

SEQ ID NO: 5354964 - DNA, 25 bp, Homo sapien
tcttactcgggttgagcggggcctc

SEQ ID NO: 5354965 - DNA, 25 bp, Homo sapien
agatgaacagggccggcacgttgaa

SEQ ID NO: 5354966 - DNA, 25 bp, Homo sapien
gttgaaggtctcaaagaacacctct

SEQ ID NO: 5354967 - DNA, 25 bp, Homo sapien
tagcggatggtcagcagcccccggt

SEQ ID NO: 5354968 - DNA, 25 bp, Homo sapien
gcagctgatccttggagtagacgta

SEQ ID NO: 5354969 - DNA, 25 bp, Homo sapien
gtactgccagatgcgttccatgtcg

SEQ ID NO: 5354970 - DNA, 25 bp, Homo sapien
atgtcgttccagtctcgcaccacgc

SEQ ID NO: 5354971 - DNA, 25 bp, Homo sapien
gcttttggtccgatgaagaggtccc

SEQ ID NO: 5354972 - DNA, 25 bp, Homo sapien
ctccagccatcacccgcatgtgctt

SEQ ID NO: 5354973 - DNA, 25 bp, Homo sapien
ctctgcttttggtccgatgaagagg

SEQ ID NO: 5354974 - DNA, 25 bp, Homo sapien
atcacccgcatgtgcttcggccgcc

SEQ ID NO: 5354975 - DNA, 25 bp, Homo sapien
gcttgtgtccagaaaaaccgaaatc

SEQ ID NO: 5354976 - DNA, 25 bp, Homo sapien
cgaaatccaaccatagtcgcccaga

SEQ ID NO: 5354977 - DNA, 25 bp, Homo sapien
tagtcgcccagagggtacctggcct

SEQ ID NO: 5354978 - DNA, 25 bp, Homo sapien
ctgttaggacggataacgtcagcaa

SEQ ID NO: 5354979 - DNA, 25 bp, Homo sapien
caggctctctgggtttgcaattctt

SEQ ID NO: 5354980 - DNA, 25 bp, Homo sapien
tttgtgaagaggtgcccctaagggc

SEQ ID NO: 5354981 - DNA, 25 bp, Homo sapien
tctagagtctgaaaacaagcccggc

SEQ ID NO: 5354982 - DNA, 25 bp, Homo sapien
caccagtaccatacagggcaaagga

SEQ ID NO: 5354983 - DNA, 25 bp, Homo sapien
ccaaaacgagagactcccaagacaa

SEQ ID NO: 5354984 - DNA, 25 bp, Homo sapien
tggctcaacaagaccaaaacgagag

SEQ ID NO: 5354985 - DNA, 25 bp, Homo sapien
cttgctggctcaacaagaccaaaac

SEQ ID NO: 5354986 - DNA, 25 bp, Homo sapien
tcaacaagaccaaaacgagagactc

SEQ ID NO: 5354987 - DNA, 25 bp, Homo sapien
caaagccagctttaatcacccccga

SEQ ID NO: 5354988 - DNA, 25 bp, Homo sapien
ggaaacagtatttgggaatctggtc

SEQ ID NO: 5354989 - DNA, 25 bp, Homo sapien
tgcaaagccagctttaatcaccccc

SEQ ID NO: 5354990 - DNA, 25 bp, Homo sapien
aaacagtatttgggaatctggtctc

SEQ ID NO: 5354991 - DNA, 25 bp, Homo sapien
tgcacgtcaagaaaggaagtagcct

SEQ ID NO: 5354992 - DNA, 25 bp, Homo sapien
ccacccagcgaagggataagcttct

SEQ ID NO: 5354993 - DNA, 25 bp, Homo sapien
tgcatgggatgaccggcagcttccc

SEQ ID NO: 5354994 - DNA, 25 bp, Homo sapien
catggaacatggacgacctacaggg

SEQ ID NO: 5354995 - DNA, 25 bp, Homo sapien
gggcgacggccacgcagtgagcgga

SEQ ID NO: 5354996 - DNA, 25 bp, Homo sapien
aagaggctctgcgacgcgggcgagg

SEQ ID NO: 5354997 - DNA, 25 bp, Homo sapien
gggctcgccccatggccggccttac

SEQ ID NO: 5354998 - DNA, 25 bp, Homo sapien
agtgagcggaggacgcgccgaggcg

SEQ ID NO: 5354999 - DNA, 25 bp, Homo sapien
tggcgatgatgtcgtaggactccat

SEQ ID NO: 5355000 - DNA, 25 bp, Homo sapien
aggctggttggcgatgatgtcgtag

SEQ ID NO: 5355001 - DNA, 25 bp, Homo sapien
tggttggcgatgatgtcgtaggact

SEQ ID NO: 5355002 - DNA, 25 bp, Homo sapien
ggttggcgatgatgtcgtaggactc

SEQ ID NO: 5355003 - DNA, 25 bp, Homo sapien
gccgcgccggccctgcccagcaggc

SEQ ID NO: 5355004 - DNA, 25 bp, Homo sapien
ggccgggccgcgccggccctgccca

SEQ ID NO: 5355005 - DNA, 25 bp, Homo sapien
cgcgccggccctgcccagcaggcgg

SEQ ID NO: 5355006 - DNA, 25 bp, Homo sapien
cgggccgcgccggccctgcccagca

SEQ ID NO: 5355007 - DNA, 25 bp, Homo sapien
gaggcaccggatgggcgggcgggcg

SEQ ID NO: 5355008 - DNA, 25 bp, Homo sapien
caggaggcaccggatgggcgggcgg

SEQ ID NO: 5355009 - DNA, 25 bp, Homo sapien
ctgcaggaggcaccggatgggcggg

SEQ ID NO: 5355010 - DNA, 25 bp, Homo sapien
ggcggctcccgacgcggcgccgctg

SEQ ID NO: 5355011 - DNA, 25 bp, Homo sapien
aggctggccagccaattgaggtcgt

SEQ ID NO: 5355012 - DNA, 25 bp, Homo sapien
cagccaattgaggtcgtccggaaaa

SEQ ID NO: 5355013 - DNA, 25 bp, Homo sapien
tgccaaggtaggctgcgcagtgtct

SEQ ID NO: 5355014 - DNA, 25 bp, Homo sapien
gaaaaaagtggtcgcggcgttgcca

SEQ ID NO: 5355015 - DNA, 25 bp, Homo sapien
agcaccggtccagaaagacgtcttt

SEQ ID NO: 5355016 - DNA, 25 bp, Homo sapien
tctttcccgcgtcccagcacctcgg

SEQ ID NO: 5355017 - DNA, 25 bp, Homo sapien
tctttcccgcgtcccagcaccggtc

SEQ ID NO: 5355018 - DNA, 25 bp, Homo sapien
tcgggccacgctccttcgtgagagc

SEQ ID NO: 5355019 - DNA, 25 bp, Homo sapien
gactgttaaaaattgccgatgtcga

SEQ ID NO: 5355020 - DNA, 25 bp, Homo sapien
taaaaattgccgatgtcgactatat

SEQ ID NO: 5355021 - DNA, 25 bp, Homo sapien
gagactgttaaaaattgccgatgtc

SEQ ID NO: 5355022 - DNA, 25 bp, Homo sapien
ctgttaaaaattgccgatgtcgact

SEQ ID NO: 5355023 - DNA, 25 bp, Homo sapien
catggttgagcaggctccacctcac

SEQ ID NO: 5355024 - DNA, 25 bp, Homo sapien
tcatggttgagcaggctccacctca

SEQ ID NO: 5355025 - DNA, 25 bp, Homo sapien
gttccgtggtaccctggagtccaca

SEQ ID NO: 5355026 - DNA, 25 bp, Homo sapien
ttccgtgtatgacttcatagaccgt

SEQ ID NO: 5355027 - DNA, 25 bp, Homo sapien
catgatggtttatggactaaggcaa

SEQ ID NO: 5355028 - DNA, 25 bp, Homo sapien
gaagggccatcagaagactggcttc

SEQ ID NO: 5355029 - DNA, 25 bp, Homo sapien
gatccaaggtatattgctgtggcag

SEQ ID NO: 5355030 - DNA, 25 bp, Homo sapien
tctgctggatccaaggtatattgct

SEQ ID NO: 5355031 - DNA, 25 bp, Homo sapien
gctggatccaaggtatattgctgtg

SEQ ID NO: 5355032 - DNA, 25 bp, Homo sapien
tctctgctggatccaaggtatattg

SEQ ID NO: 5355033 - DNA, 25 bp, Homo sapien
gatgggcctctattccgttccggca

SEQ ID NO: 5355034 - DNA, 25 bp, Homo sapien
gcttgcaagggagcagatctctcga

SEQ ID NO: 5355035 - DNA, 25 bp, Homo sapien
ccttgcaggtgaccccagtgtctct

SEQ ID NO: 5355036 - DNA, 25 bp, Homo sapien
gaattcggccccatatgtgtaggag

SEQ ID NO: 5355037 - DNA, 25 bp, Homo sapien
tccgttccggcagctgtccgtgtca

SEQ ID NO: 5355038 - DNA, 25 bp, Homo sapien
gatgggcctctattccgttccggca

SEQ ID NO: 5355039 - DNA, 25 bp, Homo sapien
tgcttgcaagggagcagatctctcg

SEQ ID NO: 5355040 - DNA, 25 bp, Homo sapien
agcagatctctcgacacccgatggg

SEQ ID NO: 5355041 - DNA, 25 bp, Homo sapien
agtccccctagctgtgccctcagca

SEQ ID NO: 5355042 - DNA, 25 bp, Homo sapien
ccttgcaggtgaccccagtgtctct

SEQ ID NO: 5355043 - DNA, 25 bp, Homo sapien
gccttgttctcggccttgcaggtga

SEQ ID NO: 5355044 - DNA, 25 bp, Homo sapien
gaattcggccccatatgtgtaggag

SEQ ID NO: 5355045 - DNA, 25 bp, Homo sapien
agatgggagtctggttgggggtttg

SEQ ID NO: 5355046 - DNA, 25 bp, Homo sapien
ctgaagatgggagtctggttggggg

SEQ ID NO: 5355047 - DNA, 25 bp, Homo sapien
tgaagatgggagtctggttgggggt

SEQ ID NO: 5355048 - DNA, 25 bp, Homo sapien
tccatactgacgataagaataggca

SEQ ID NO: 5355049 - DNA, 25 bp, Homo sapien
cgtgtcaggtctaccattgctgcag

SEQ ID NO: 5355050 - DNA, 25 bp, Homo sapien
tcttgcctctggtagagaaagagag

SEQ ID NO: 5355051 - DNA, 25 bp, Homo sapien
aaagagagtgaaaatgtgttcccgt

SEQ ID NO: 5355052 - DNA, 25 bp, Homo sapien
tgtgtttgcctcgtgctggtgcaga

SEQ ID NO: 5355053 - DNA, 25 bp, Homo sapien
gacatgaaatctcccaaacctacac

SEQ ID NO: 5355054 - DNA, 25 bp, Homo sapien
cgaggcagattgtgtatgcagtaca

SEQ ID NO: 5355055 - DNA, 25 bp, Homo sapien
cacacacgaggcagattgtgtatgc

SEQ ID NO: 5355056 - DNA, 25 bp, Homo sapien
tcctgatcttctccgtgatcctgca

SEQ ID NO: 5355057 - DNA, 25 bp, Homo sapien
ggcacagccgtggccctccaaggct

SEQ ID NO: 5355058 - DNA, 25 bp, Homo sapien
cacagccgtggccctccaaggctct

SEQ ID NO: 5355059 - DNA, 25 bp, Homo sapien
caaatgaaggattagtgcctggcac

SEQ ID NO: 5355060 - DNA, 25 bp, Homo sapien
tgtcttcgcatccaggaaataggtt

SEQ ID NO: 5355061 - DNA, 25 bp, Homo sapien
tgcagggaaatccaaaccggctttg

SEQ ID NO: 5355062 - DNA, 25 bp, Homo sapien
agagaccccgcaagtggcctgtttg

SEQ ID NO: 5355063 - DNA, 25 bp, Homo sapien
cattggcattgggaccagagacccc

SEQ ID NO: 5355064 - DNA, 25 bp, Homo sapien
cagcacccagaccaccccgtgctga

SEQ ID NO: 5355065 - DNA, 25 bp, Homo sapien
tggactccacagttcctgtatgctc

SEQ ID NO: 5355066 - DNA, 25 bp, Homo sapien
tctggactccacagttcctgtatgc

SEQ ID NO: 5355067 - DNA, 25 bp, Homo sapien
ctggactccacagttcctgtatgct

SEQ ID NO: 5355068 - DNA, 25 bp, Homo sapien
ggaggtctggcgagcttcactcgct

SEQ ID NO: 5355069 - DNA, 25 bp, Homo sapien
tgcactgtgaccatgtggtgggtcc

SEQ ID NO: 5355070 - DNA, 25 bp, Homo sapien
tctggcgagcttcactcgctgctga

SEQ ID NO: 5355071 - DNA, 25 bp, Homo sapien
ccacgattccatgatttgaatccaa

SEQ ID NO: 5355072 - DNA, 25 bp, Homo sapien
taggatctctgaactgtgagctcaa

SEQ ID NO: 5355073 - DNA, 25 bp, Homo sapien
tctgggaaggccaaactaggatctc

SEQ ID NO: 5355074 - DNA, 25 bp, Homo sapien
gccaaactaggatctctgaactgtg

SEQ ID NO: 5355075 - DNA, 25 bp, Homo sapien
ctctgaactgtgagctcaagaggaa

SEQ ID NO: 5355076 - DNA, 25 bp, Homo sapien
caatcaatcgggttacagtgcagat

SEQ ID NO: 5355077 - DNA, 25 bp, Homo sapien
gtaactgttgggacatccaggaccc

SEQ ID NO: 5355078 - DNA, 25 bp, Homo sapien
ctactctgacccagacttcacctga

SEQ ID NO: 5355079 - DNA, 25 bp, Homo sapien
acctcactgtcacaatcaatcgggt

SEQ ID NO: 5355080 - DNA, 25 bp, Homo sapien
gcagagggagctttcacaaaagcat

SEQ ID NO: 5355081 - DNA, 25 bp, Homo sapien
ggcagagggagctttcacaaaagca

SEQ ID NO: 5355082 - DNA, 25 bp, Homo sapien
gaggacttggtttacagacccaaca

SEQ ID NO: 5355083 - DNA, 25 bp, Homo sapien
tatcccaaggccaatatgtaagagg

SEQ ID NO: 5355084 - DNA, 25 bp, Homo sapien
tgtaagaggcaactctattggcagc

SEQ ID NO: 5355085 - DNA, 25 bp, Homo sapien
tgtgctgggtgcctcgaacacacaa

SEQ ID NO: 5355086 - DNA, 25 bp, Homo sapien
cctacaaggctaaacatgggctgac

SEQ ID NO: 5355087 - DNA, 25 bp, Homo sapien
taggatggccgtgtgcacacaccgt

SEQ ID NO: 5355088 - DNA, 25 bp, Homo sapien
ccgtaactacggctgctgagggtgt

SEQ ID NO: 5355089 - DNA, 25 bp, Homo sapien
taaaggacatcatcaaagggtagcc

SEQ ID NO: 5355090 - DNA, 25 bp, Homo sapien
tctgtgagagttgctaggagcatgc

SEQ ID NO: 5355091 - DNA, 25 bp, Homo sapien
gtgagagttgctaggagcatgcatt

SEQ ID NO: 5355092 - DNA, 25 bp, Homo sapien
ctgctggctttggagttccgggtgg

SEQ ID NO: 5355093 - DNA, 25 bp, Homo sapien
tccgggtgggcaatgactgtcaggg

SEQ ID NO: 5355094 - DNA, 25 bp, Homo sapien
tggccagggtagtctagaacacctg

SEQ ID NO: 5355095 - DNA, 25 bp, Homo sapien
tacagatgcacagcaccacccccag

SEQ ID NO: 5355096 - DNA, 25 bp, Homo sapien
attacagatgcacagcaccaccccc

SEQ ID NO: 5355097 - DNA, 25 bp, Homo sapien
gggtagtctagaacacctgacctca

SEQ ID NO: 5355098 - DNA, 25 bp, Homo sapien
gacaggtggtgaaaacgcagtaacg

SEQ ID NO: 5355099 - DNA, 25 bp, Homo sapien
gccctgcttgggtctgttttgcaaa

SEQ ID NO: 5355100 - DNA, 25 bp, Homo sapien
cgcagtaacgggaaaggttctcaga

SEQ ID NO: 5355101 - DNA, 25 bp, Homo sapien
aaagaagcgagtggtctgagcctgc

SEQ ID NO: 5355102 - DNA, 25 bp, Homo sapien
tgtctcagaaactggcacatcatga

SEQ ID NO: 5355103 - DNA, 25 bp, Homo sapien
tgatctagacgagggcccactatgt

SEQ ID NO: 5355104 - DNA, 25 bp, Homo sapien
agatgtctcagaaactggcacatca

SEQ ID NO: 5355105 - DNA, 25 bp, Homo sapien
tggcacatcatgatctagacgaggg

SEQ ID NO: 5355106 - DNA, 25 bp, Homo sapien
caagggtccgagcttcttcttccaa

SEQ ID NO: 5355107 - DNA, 25 bp, Homo sapien
aagtgcgaattagaccaagggtccg

SEQ ID NO: 5355108 - DNA, 25 bp, Homo sapien
gttgtaggtctgtcccaagtcgtca

SEQ ID NO: 5355109 - DNA, 25 bp, Homo sapien
tccatatccgccacgggttgtaggt

SEQ ID NO: 5355110 - DNA, 25 bp, Homo sapien
gctgctaaggttgctggaccaaatg

SEQ ID NO: 5355111 - DNA, 25 bp, Homo sapien
catgaggccgatgcttgccagcgtg

SEQ ID NO: 5355112 - DNA, 25 bp, Homo sapien
agtggtgaagggaagggcgctgcta

SEQ ID NO: 5355113 - DNA, 25 bp, Homo sapien
ccagcgtgtttgctggagtggtgaa

SEQ ID NO: 5355114 - DNA, 25 bp, Homo sapien
tgcgacaaaacagaaagcgtccagc

SEQ ID NO: 5355115 - DNA, 25 bp, Homo sapien
gcgacaaaacagaaagcgtccagca

SEQ ID NO: 5355116 - DNA, 25 bp, Homo sapien
ctgcgacaaaacagaaagcgtccag

SEQ ID NO: 5355117 - DNA, 25 bp, Homo sapien
gcaggcagagggtcaagtgggtaag

SEQ ID NO: 5355118 - DNA, 25 bp, Homo sapien
caggcagagggtcaagtgggtaagg

SEQ ID NO: 5355119 - DNA, 25 bp, Homo sapien
ttgtggaagccaaaaccactaatta

SEQ ID NO: 5355120 - DNA, 25 bp, Homo sapien
gcaaacaaatgcactcttgaaaatc

SEQ ID NO: 5355121 - DNA, 25 bp, Homo sapien
gagacaggtgcttctcagcaacaaa

SEQ ID NO: 5355122 - DNA, 25 bp, Homo sapien
tctgagaacaaagaggcaaacacag

SEQ ID NO: 5355123 - DNA, 25 bp, Homo sapien
ttataactatgtcagtgccatccat

SEQ ID NO: 5355124 - DNA, 25 bp, Homo sapien
tataactatgtcagtgccatccatg

SEQ ID NO: 5355125 - DNA, 25 bp, Homo sapien
aactatgtcagtgccatccatgtca

SEQ ID NO: 5355126 - DNA, 25 bp, Homo sapien
cagcaatggcagatggcgagtgggt

SEQ ID NO: 5355127 - DNA, 25 bp, Homo sapien
agggccactattaaactcgttccag

SEQ ID NO: 5355128 - DNA, 25 bp, Homo sapien
cgactcccaaaggtatgaagggcca

SEQ ID NO: 5355129 - DNA, 25 bp, Homo sapien
tgggatctgtcgctggcgactccca

SEQ ID NO: 5355130 - DNA, 25 bp, Homo sapien
cactattaaactcgttccagctcct

SEQ ID NO: 5355131 - DNA, 25 bp, Homo sapien
tgcacgatcgagataatccgagttt

SEQ ID NO: 5355132 - DNA, 25 bp, Homo sapien
cgagataatccgagtttgctgaaaa

SEQ ID NO: 5355133 - DNA, 25 bp, Homo sapien
gcctgattgcacgatcgagataatc

SEQ ID NO: 5355134 - DNA, 25 bp, Homo sapien
gatcgagataatccgagtttgctga

SEQ ID NO: 5355135 - DNA, 25 bp, Homo sapien
ttgccatgatcactatagcatatgg

SEQ ID NO: 5355136 - DNA, 25 bp, Homo sapien
actatagcatatggggcttcactca

SEQ ID NO: 5355137 - DNA, 25 bp, Homo sapien
caatggcatacctccaaccactgct

SEQ ID NO: 5355138 - DNA, 25 bp, Homo sapien
agtcatcaagtccatatttggtttt

SEQ ID NO: 5355139 - DNA, 25 bp, Homo sapien
tagtgcacgagctgatatgccacca

SEQ ID NO: 5355140 - DNA, 25 bp, Homo sapien
tctagttctggacagcaagaagagg

SEQ ID NO: 5355141 - DNA, 25 bp, Homo sapien
tctcacatgatagctaatgggaagc

SEQ ID NO: 5355142 - DNA, 25 bp, Homo sapien
ccagaactcaaacgcatagtgcacg

SEQ ID NO: 5355143 - DNA, 25 bp, Homo sapien
tttccaaaggcggagaacgaattga

SEQ ID NO: 5355144 - DNA, 25 bp, Homo sapien
tgaagtcagggctgcttgggttgct

SEQ ID NO: 5355145 - DNA, 25 bp, Homo sapien
tccaaaggcggagaacgaattgagg

SEQ ID NO: 5355146 - DNA, 25 bp, Homo sapien
ggttgctgacgggactccacaaacc

SEQ ID NO: 5355147 - DNA, 25 bp, Homo sapien
caaacggatccatagtgcacagctt

SEQ ID NO: 5355148 - DNA, 25 bp, Homo sapien
caaaaatgtatggtggttagtgcaa

SEQ ID NO: 5355149 - DNA, 25 bp, Homo sapien
aaacaggagacactgcttcaactgg

SEQ ID NO: 5355150 - DNA, 25 bp, Homo sapien
tacaagaggaaaacgcaacacacaa

SEQ ID NO: 5355151 - DNA, 25 bp, Homo sapien
agggagccccagagctccggatgcc

SEQ ID NO: 5355152 - DNA, 25 bp, Homo sapien
tatcactagctcacagccaggttca

SEQ ID NO: 5355153 - DNA, 25 bp, Homo sapien
agagctccggatgccctatcactag

SEQ ID NO: 5355154 - DNA, 25 bp, Homo sapien
agggttgagtcggagggagccccag

SEQ ID NO: 5355155 - DNA, 25 bp, Homo sapien
ttctagcggttagtggtggtctacc

SEQ ID NO: 5355156 - DNA, 25 bp, Homo sapien
gaggcgtggccagtgatttactata

SEQ ID NO: 5355157 - DNA, 25 bp, Homo sapien
ggtgctaacccgacttgagaagcct

SEQ ID NO: 5355158 - DNA, 25 bp, Homo sapien
gtgtaacgtgtgtctgcctggctga

SEQ ID NO: 5355159 - DNA, 25 bp, Homo sapien
ctgtctgagccatcgctgtcaacag

SEQ ID NO: 5355160 - DNA, 25 bp, Homo sapien
tgtttgaagaaactttagcaaagcc

SEQ ID NO: 5355161 - DNA, 25 bp, Homo sapien
gtctgagccatcgctgtcaacagga

SEQ ID NO: 5355162 - DNA, 25 bp, Homo sapien
gtttgaagaaactttagcaaagcca

SEQ ID NO: 5355163 - DNA, 25 bp, Homo sapien
aacaatggacgttcaatcaatggaa

SEQ ID NO: 5355164 - DNA, 25 bp, Homo sapien
gtcattccaccaggcctggcgcctg

SEQ ID NO: 5355165 - DNA, 25 bp, Homo sapien
tggcgtggcaggtctctgaagcaaa

SEQ ID NO: 5355166 - DNA, 25 bp, Homo sapien
gaaggcacattaggacagaggtcat

SEQ ID NO: 5355167 - DNA, 25 bp, Homo sapien
cttgtcgtagccagccgtgactgca

SEQ ID NO: 5355168 - DNA, 25 bp, Homo sapien
ctgggctcttgtcgtagccagccgt

SEQ ID NO: 5355169 - DNA, 25 bp, Homo sapien
gttgccgttcttgcccgggagcgag

SEQ ID NO: 5355170 - DNA, 25 bp, Homo sapien
tgcagcaaaagtggggttgccgttc

SEQ ID NO: 5355171 - DNA, 25 bp, Homo sapien
cacaatttagggactggcagaggct

SEQ ID NO: 5355172 - DNA, 25 bp, Homo sapien
cactcggcaggaaatgcagagggca

SEQ ID NO: 5355173 - DNA, 25 bp, Homo sapien
ggcagaggcttcgatcacacttttg

SEQ ID NO: 5355174 - DNA, 25 bp, Homo sapien
gaagaatgctagagagccactcggc

SEQ ID NO: 5355175 - DNA, 25 bp, Homo sapien
tccgtgcctcggagaacagcatgct

SEQ ID NO: 5355176 - DNA, 25 bp, Homo sapien
tacactgtggcaggcggacacgagt

SEQ ID NO: 5355177 - DNA, 25 bp, Homo sapien
gactgtcaggcttgcggtacactgt

SEQ ID NO: 5355178 - DNA, 25 bp, Homo sapien
cgaggcacacggtgagagtgccatc

SEQ ID NO: 5355179 - DNA, 25 bp, Homo sapien
ccaaaggccaaaattagtgtcacat

SEQ ID NO: 5355180 - DNA, 25 bp, Homo sapien
cacaacggtcttggaccaggtcctg

SEQ ID NO: 5355181 - DNA, 25 bp, Homo sapien
tctaagtcctaagccaaattgtcca

SEQ ID NO: 5355182 - DNA, 25 bp, Homo sapien
aatggtgcatttctcggtccacagg

SEQ ID NO: 5355183 - DNA, 25 bp, Homo sapien
gtgtgacatcgggttttaggcacat

SEQ ID NO: 5355184 - DNA, 25 bp, Homo sapien
gtggccgctaagtgtttccatttaa

SEQ ID NO: 5355185 - DNA, 25 bp, Homo sapien
tcagaagtaacaccagacagtggcc

SEQ ID NO: 5355186 - DNA, 25 bp, Homo sapien
tccatttaaagggtgtgacatcggg

SEQ ID NO: 5355187 - DNA, 25 bp, Homo sapien
ctgagaaccggaaaggaagcagcag

SEQ ID NO: 5355188 - DNA, 25 bp, Homo sapien
gctgttgacgatgctgctgtagctg

SEQ ID NO: 5355189 - DNA, 25 bp, Homo sapien
gtcggtgaggtctggcgttgtttta

SEQ ID NO: 5355190 - DNA, 25 bp, Homo sapien
aagcaggtgtcggtgaggtctggcg

SEQ ID NO: 5355191 - DNA, 25 bp, Homo sapien
ggtgtcggtgaggtctggcgttgtt

SEQ ID NO: 5355192 - DNA, 25 bp, Homo sapien
caggtgtcggtgaggtctggcgttg

SEQ ID NO: 5355193 - DNA, 25 bp, Homo sapien
gaaagtttataaagactatcagtag

SEQ ID NO: 5355194 - DNA, 25 bp, Homo sapien
gagaaagtttataaagactatcagt

SEQ ID NO: 5355195 - DNA, 25 bp, Homo sapien
ctgcgttgagggtttgcagagaaag

SEQ ID NO: 5355196 - DNA, 25 bp, Homo sapien
tgcagagaaagtttataaagactat

SEQ ID NO: 5355197 - DNA, 25 bp, Homo sapien
tgttgtgtggcggacagtcaatgtc

SEQ ID NO: 5355198 - DNA, 25 bp, Homo sapien
tctaagactatgcataactcaagcc

SEQ ID NO: 5355199 - DNA, 25 bp, Homo sapien
aaacaaacgaaagctcttagatgtg

SEQ ID NO: 5355200 - DNA, 25 bp, Homo sapien
caaacgggctcgttagtgtggtgtt

SEQ ID NO: 5355201 - DNA, 25 bp, Homo sapien
cctggaaaatccttgtgcctacacg

SEQ ID NO: 5355202 - DNA, 25 bp, Homo sapien
cttgtgcctacacgcaggtttacag

SEQ ID NO: 5355203 - DNA, 25 bp, Homo sapien
gaaaatccttgtgcctacacgcagg

SEQ ID NO: 5355204 - DNA, 25 bp, Homo sapien
gggacctggaaaatccttgtgccta

SEQ ID NO: 5355205 - DNA, 25 bp, Homo sapien
tctattgtgtgcaacttggtgctgc

SEQ ID NO: 5355206 - DNA, 25 bp, Homo sapien
tgtgcagctctgatccctattaagc

SEQ ID NO: 5355207 - DNA, 25 bp, Homo sapien
gctgtagctactgcaagaggaagaa

SEQ ID NO: 5355208 - DNA, 25 bp, Homo sapien
taaagcctctccattggcgtgactg

SEQ ID NO: 5355209 - DNA, 25 bp, Homo sapien
tcactgccacattgcagccgctctg

SEQ ID NO: 5355210 - DNA, 25 bp, Homo sapien
cctgccttgtgagatttccgcgtac

SEQ ID NO: 5355211 - DNA, 25 bp, Homo sapien
ttgcttccctggtcacaccctgtag

SEQ ID NO: 5355212 - DNA, 25 bp, Homo sapien
tgagatttccgcgtaccctgagtac

SEQ ID NO: 5355213 - DNA, 25 bp, Homo sapien
tggccctgccgagcaaagcagcctt

SEQ ID NO: 5355214 - DNA, 25 bp, Homo sapien
tgtcttggctaggtcaagcctccag

SEQ ID NO: 5355215 - DNA, 25 bp, Homo sapien
tggtgccagactcacggtcctgtct

SEQ ID NO: 5355216 - DNA, 25 bp, Homo sapien
tgctggtactggtgccagactcacg

SEQ ID NO: 5355217 - DNA, 25 bp, Homo sapien
tacgagccctgctcgaatctttgtc

SEQ ID NO: 5355218 - DNA, 25 bp, Homo sapien
tgatgcccacactcaggacgtgtct

SEQ ID NO: 5355219 - DNA, 25 bp, Homo sapien
gatgacatgggcccctcctcgctgg

SEQ ID NO: 5355220 - DNA, 25 bp, Homo sapien
tgtggatctgctgacctgatgccca

SEQ ID NO: 5355221 - DNA, 25 bp, Homo sapien
ggtggaatgtgtttcacagggccca

SEQ ID NO: 5355222 - DNA, 25 bp, Homo sapien
gttttgtgtgcgctcgatcctcccg

SEQ ID NO: 5355223 - DNA, 25 bp, Homo sapien
ggaagttagcaaaagcccctactga

SEQ ID NO: 5355224 - DNA, 25 bp, Homo sapien
agaactacagatgctcccaagacag

SEQ ID NO: 5355225 - DNA, 25 bp, Homo sapien
taagcaagacgaaacaccaagggag

SEQ ID NO: 5355226 - DNA, 25 bp, Homo sapien
aacagcgctcgcagaacttcaggtc

SEQ ID NO: 5355227 - DNA, 25 bp, Homo sapien
tcttgggtgggaccaacgctttcac

SEQ ID NO: 5355228 - DNA, 25 bp, Homo sapien
gagcatgtgggaccgactcttctgg

SEQ ID NO: 5355229 - DNA, 25 bp, Homo sapien
aaactgaggcatgcggcactgggcc

SEQ ID NO: 5355230 - DNA, 25 bp, Homo sapien
ccctgaggcgccatgctcagatgca

SEQ ID NO: 5355231 - DNA, 25 bp, Homo sapien
acattttagtaacgctggcagtgag

SEQ ID NO: 5355232 - DNA, 25 bp, Homo sapien
gggactgcttggctagaaaaacaca

SEQ ID NO: 5355233 - DNA, 25 bp, Homo sapien
tgggcctcagaacacccctgtgaaa

SEQ ID NO: 5355234 - DNA, 25 bp, Homo sapien
gccccgaggagtggcaccaaaatct

SEQ ID NO: 5355235 - DNA, 25 bp, Homo sapien
tgcctaaatcgtggagtgttaagcc

SEQ ID NO: 5355236 - DNA, 25 bp, Homo sapien
gcatgcttgtgtcattacgtcacca

SEQ ID NO: 5355237 - DNA, 25 bp, Homo sapien
cacccacggtcttcttcaagatttg

SEQ ID NO: 5355238 - DNA, 25 bp, Homo sapien
gaaggatttaggattgtatcccacc

SEQ ID NO: 5355239 - DNA, 25 bp, Homo sapien
gacacacggaccacccacggtcttc

SEQ ID NO: 5355240 - DNA, 25 bp, Homo sapien
gtgaaggatttaggattgtatccca

SEQ ID NO: 5355241 - DNA, 25 bp, Homo sapien
tagtactaaaaggtgccagaaagtc

SEQ ID NO: 5355242 - DNA, 25 bp, Homo sapien
gatgtatctacacattccggcgaga

SEQ ID NO: 5355243 - DNA, 25 bp, Homo sapien
cagaaagtctcatggcaaatagggc

SEQ ID NO: 5355244 - DNA, 25 bp, Homo sapien
gctacaggatgtatctcagagagca

SEQ ID NO: 5355245 - DNA, 25 bp, Homo sapien
tgcctaattcttgactattcgggag

SEQ ID NO: 5355246 - DNA, 25 bp, Homo sapien
tattcgggaggaattttgctagggc

SEQ ID NO: 5355247 - DNA, 25 bp, Homo sapien
tgtgaactggaacggaatcccactc

SEQ ID NO: 5355248 - DNA, 25 bp, Homo sapien
ccctctgagctactggtgttgccta

SEQ ID NO: 5355249 - DNA, 25 bp, Homo sapien
cagttggaagaggaatcttgcttgg

SEQ ID NO: 5355250 - DNA, 25 bp, Homo sapien
tgttttctgggcatttcgtgatttg

SEQ ID NO: 5355251 - DNA, 25 bp, Homo sapien
gcatttcgtgatttggatccacttg

SEQ ID NO: 5355252 - DNA, 25 bp, Homo sapien
tgggagatttctacgttgcttactt

SEQ ID NO: 5355253 - DNA, 25 bp, Homo sapien
aacggccaacttaattgaagcgatt

SEQ ID NO: 5355254 - DNA, 25 bp, Homo sapien
taacggccaacttaattgaagcgat

SEQ ID NO: 5355255 - DNA, 25 bp, Homo sapien
acggccaacttaattgaagcgattc

SEQ ID NO: 5355256 - DNA, 25 bp, Homo sapien
gtaacggccaacttaattgaagcga

SEQ ID NO: 5355257 - DNA, 25 bp, Homo sapien
gaaaaacaggtggttcagatgccag

SEQ ID NO: 5355258 - DNA, 25 bp, Homo sapien
aaggaaaaacaggtggttcagatgc

SEQ ID NO: 5355259 - DNA, 25 bp, Homo sapien
aaaacaggtggttcagatgccaggc

SEQ ID NO: 5355260 - DNA, 25 bp, Homo sapien
aaacaggtggttcagatgccaggct

SEQ ID NO: 5355261 - DNA, 25 bp, Homo sapien
cctgagttgagagtgttatttaagc

SEQ ID NO: 5355262 - DNA, 25 bp, Homo sapien
tgttcacagcccttgggcctgagtt

SEQ ID NO: 5355263 - DNA, 25 bp, Homo sapien
tcagggtcctaaaccagggatgccc

SEQ ID NO: 5355264 - DNA, 25 bp, Homo sapien
tggttctgcagaaaccttcagtgcc

SEQ ID NO: 5355265 - DNA, 25 bp, Homo sapien
tatggctattccgagtcaacaacag

SEQ ID NO: 5355266 - DNA, 25 bp, Homo sapien
catggaactctagatcccaactggg

SEQ ID NO: 5355267 - DNA, 25 bp, Homo sapien
gaaccgtctgactggtgacacctgc

SEQ ID NO: 5355268 - DNA, 25 bp, Homo sapien
ggttaacaattcgacagactcagag

SEQ ID NO: 5355269 - DNA, 25 bp, Homo sapien
ttcaggcatggcttgttttcccttt

SEQ ID NO: 5355270 - DNA, 25 bp, Homo sapien
tttcaggcatggcttgttttccctt

SEQ ID NO: 5355271 - DNA, 25 bp, Homo sapien
ttgcttcacttgagacatttcactt

SEQ ID NO: 5355272 - DNA, 25 bp, Homo sapien
cttcacttgagacatttcactttca

SEQ ID NO: 5355273 - DNA, 25 bp, Homo sapien
taaaccatgagcttttcgaggacaa

SEQ ID NO: 5355274 - DNA, 25 bp, Homo sapien
tctgagctgcacaaatagcacggaa

SEQ ID NO: 5355275 - DNA, 25 bp, Homo sapien
tgttgttgcctacgcacctagcacg

SEQ ID NO: 5355276 - DNA, 25 bp, Homo sapien
tgtgtactaaaagcaacctggttct

SEQ ID NO: 5355277 - DNA, 25 bp, Homo sapien
tgcttgggagtaagcggccaccaaa

SEQ ID NO: 5355278 - DNA, 25 bp, Homo sapien
tggacccgacactttgcactgctct

SEQ ID NO: 5355279 - DNA, 25 bp, Homo sapien
tccaacgggcgaggcagcttcttgg

SEQ ID NO: 5355280 - DNA, 25 bp, Homo sapien
ggcggtcaccactctactgcttggg

SEQ ID NO: 5355281 - DNA, 25 bp, Homo sapien
aggacatggagccattcatccccac

SEQ ID NO: 5355282 - DNA, 25 bp, Homo sapien
gactgttgtctgcaggggaatgact

SEQ ID NO: 5355283 - DNA, 25 bp, Homo sapien
tgactgttgtctgcaggggaatgac

SEQ ID NO: 5355284 - DNA, 25 bp, Homo sapien
ggacatggagccattcatccccaca

SEQ ID NO: 5355285 - DNA, 25 bp, Homo sapien
caccttgcgctgaagaggttttcct

SEQ ID NO: 5355286 - DNA, 25 bp, Homo sapien
tcttaggtggtttcaccttgcgctg

SEQ ID NO: 5355287 - DNA, 25 bp, Homo sapien
tccttgaggagcggttctgtgtcag

SEQ ID NO: 5355288 - DNA, 25 bp, Homo sapien
ggaggagctatcatcatcagccaaa

SEQ ID NO: 5355289 - DNA, 25 bp, Homo sapien
gatttttaaatagctagcttggaaa

SEQ ID NO: 5355290 - DNA, 25 bp, Homo sapien
caaatccatttgactttgtgatgag

SEQ ID NO: 5355291 - DNA, 25 bp, Homo sapien
ataatagaacacacccattttaagg

SEQ ID NO: 5355292 - DNA, 25 bp, Homo sapien
tctctaattaaagctttccaaatcc

SEQ ID NO: 5355293 - DNA, 25 bp, Homo sapien
tggtcaccataaatgctgtgcatgt

SEQ ID NO: 5355294 - DNA, 25 bp, Homo sapien
ccatggtcaccataaatgctgtgca

SEQ ID NO: 5355295 - DNA, 25 bp, Homo sapien
gtcaccataaatgctgtgcatgtgg

SEQ ID NO: 5355296 - DNA, 25 bp, Homo sapien
catggtcaccataaatgctgtgcat

SEQ ID NO: 5355297 - DNA, 25 bp, Homo sapien
ctgagaggcacggtgtaggtgagga

SEQ ID NO: 5355298 - DNA, 25 bp, Homo sapien
gagaggcacggtgtaggtgaggagc

SEQ ID NO: 5355299 - DNA, 25 bp, Homo sapien
gaggcacggtgtaggtgaggagctc

SEQ ID NO: 5355300 - DNA, 25 bp, Homo sapien
aggcacggtgtaggtgaggagctct

SEQ ID NO: 5355301 - DNA, 25 bp, Homo sapien
tgctggcatcacacttacggacttc

SEQ ID NO: 5355302 - DNA, 25 bp, Homo sapien
ggtgctggcatcacacttacggact

SEQ ID NO: 5355303 - DNA, 25 bp, Homo sapien
gcatcacacttacggacttcttctt

SEQ ID NO: 5355304 - DNA, 25 bp, Homo sapien
tggcatcacacttacggacttcttc

SEQ ID NO: 5355305 - DNA, 25 bp, Homo sapien
aacgagaatggccacagacgccatc

SEQ ID NO: 5355306 - DNA, 25 bp, Homo sapien
ttctctggttaacagacactgagac

SEQ ID NO: 5355307 - DNA, 25 bp, Homo sapien
tgggttttagccctcaatcctgcag

SEQ ID NO: 5355308 - DNA, 25 bp, Homo sapien
ggccacagacgccatcatttctctg

SEQ ID NO: 5355309 - DNA, 25 bp, Homo sapien
ccagaggaacctactgaattagttg

SEQ ID NO: 5355310 - DNA, 25 bp, Homo sapien
tctccattttactcctgtgctcaaa

SEQ ID NO: 5355311 - DNA, 25 bp, Homo sapien
agttgaagtccaacactggagataa

SEQ ID NO: 5355312 - DNA, 25 bp, Homo sapien
gatttggcccgctaactgtagtctg

SEQ ID NO: 5355313 - DNA, 25 bp, Homo sapien
atcacggatctccggcagtgggaga

SEQ ID NO: 5355314 - DNA, 25 bp, Homo sapien
tcacggatctccggcagtgggagat

SEQ ID NO: 5355315 - DNA, 25 bp, Homo sapien
cactgggtcgggatgatgaaccgcc

SEQ ID NO: 5355316 - DNA, 25 bp, Homo sapien
ggaccgatgggccacactgcttatg

SEQ ID NO: 5355317 - DNA, 25 bp, Homo sapien
actgcttatgactcccggcactggg

SEQ ID NO: 5355318 - DNA, 25 bp, Homo sapien
caatggcgatggaggctgctctgta

SEQ ID NO: 5355319 - DNA, 25 bp, Homo sapien
gggaaatttctacaactctctaaca

SEQ ID NO: 5355320 - DNA, 25 bp, Homo sapien
tcaacttcatcagtacagccaccat

SEQ ID NO: 5355321 - DNA, 25 bp, Homo sapien
gaaaaagggaccaactgcagatcag

SEQ ID NO: 5355322 - DNA, 25 bp, Homo sapien
tcagtaaatagcaacctacaaaatc

SEQ ID NO: 5355323 - DNA, 25 bp, Homo sapien
tatcagccaaatctatgtacactag

SEQ ID NO: 5355324 - DNA, 25 bp, Homo sapien
tagggaatttattgccagcatgtga

SEQ ID NO: 5355325 - DNA, 25 bp, Homo sapien
gccaaatctatgtacactagggaat

SEQ ID NO: 5355326 - DNA, 25 bp, Homo sapien
tacactagggaatttattgccagca

SEQ ID NO: 5355327 - DNA, 25 bp, Homo sapien
ttcgaggcctcaaaggatagccgcc

SEQ ID NO: 5355328 - DNA, 25 bp, Homo sapien
tgagcttccaaataggctgttccaa

SEQ ID NO: 5355329 - DNA, 25 bp, Homo sapien
tgaaataccaacgattctcctgaga

SEQ ID NO: 5355330 - DNA, 25 bp, Homo sapien
ttcccacatcgaagggcgggttcga

SEQ ID NO: 5355331 - DNA, 25 bp, Homo sapien
gatgatatacagagccagttcccag

SEQ ID NO: 5355332 - DNA, 25 bp, Homo sapien
tcccgaataactctagaagctgtaa

SEQ ID NO: 5355333 - DNA, 25 bp, Homo sapien
gagccactggttgttataaacttca

SEQ ID NO: 5355334 - DNA, 25 bp, Homo sapien
caggttgctaacatatggtaaggaa

SEQ ID NO: 5355335 - DNA, 25 bp, Homo sapien
tttaaagccatatccttcacatgag

SEQ ID NO: 5355336 - DNA, 25 bp, Homo sapien
tatgattatatctctagaagcattg

SEQ ID NO: 5355337 - DNA, 25 bp, Homo sapien
gaagcattggcacttagagtaaact

SEQ ID NO: 5355338 - DNA, 25 bp, Homo sapien
tgaagttgtcctgtattctctacct

SEQ ID NO: 5355339 - DNA, 25 bp, Homo sapien
acaatgcttccgtgattttaaagcg

SEQ ID NO: 5355340 - DNA, 25 bp, Homo sapien
cttgtccttggaccatcacagcatc

SEQ ID NO: 5355341 - DNA, 25 bp, Homo sapien
ctggacctggaagcttgcctgccac

SEQ ID NO: 5355342 - DNA, 25 bp, Homo sapien
ggaagcttgcctgccaccctcaagt

SEQ ID NO: 5355343 - DNA, 25 bp, Homo sapien
attaaatgtcgagagaggccctcca

SEQ ID NO: 5355344 - DNA, 25 bp, Homo sapien
gaaacagttctgttgtgaactggag

SEQ ID NO: 5355345 - DNA, 25 bp, Homo sapien
gttctgttgtgaactggagtaaact

SEQ ID NO: 5355346 - DNA, 25 bp, Homo sapien
ttaaaattaaatgtcgagagaggcc

SEQ ID NO: 5355347 - DNA, 25 bp, Homo sapien
gttctcaaatctatctttgccacct

SEQ ID NO: 5355348 - DNA, 25 bp, Homo sapien
tagtgttctcaaatctatctttgcc

SEQ ID NO: 5355349 - DNA, 25 bp, Homo sapien
tgaaattctagtgttctcaaatcta

SEQ ID NO: 5355350 - DNA, 25 bp, Homo sapien
caaatctatctttgccaccttactc

SEQ ID NO: 5355351 - DNA, 25 bp, Homo sapien
cacatttttagaagggagttccata

SEQ ID NO: 5355352 - DNA, 25 bp, Homo sapien
tatgaccagatttatagccttaaga

SEQ ID NO: 5355353 - DNA, 25 bp, Homo sapien
ccttatagatccagaacttctcgtc

SEQ ID NO: 5355354 - DNA, 25 bp, Homo sapien
ggatgctttgcacagtatcaaccta

SEQ ID NO: 5355355 - DNA, 25 bp, Homo sapien
ctaacttatctacaaacactgaagg

SEQ ID NO: 5355356 - DNA, 25 bp, Homo sapien
ggaacatctgcaggattttctaaag

SEQ ID NO: 5355357 - DNA, 25 bp, Homo sapien
actgaagggttggaatataaagcca

SEQ ID NO: 5355358 - DNA, 25 bp, Homo sapien
taaactgaacatagacaggaacatc

SEQ ID NO: 5355359 - DNA, 25 bp, Homo sapien
tggaaatttcaagtgccggggtgag

SEQ ID NO: 5355360 - DNA, 25 bp, Homo sapien
ggagcagtttgtattagtaagtgga

SEQ ID NO: 5355361 - DNA, 25 bp, Homo sapien
gtggaaatttcaagtgccggggtga

SEQ ID NO: 5355362 - DNA, 25 bp, Homo sapien
tgaggagcagtttgtattagtaagt

SEQ ID NO: 5355363 - DNA, 25 bp, Homo sapien
agagctcagcagtgatttttgatat

SEQ ID NO: 5355364 - DNA, 25 bp, Homo sapien
gagctcagcagtgatttttgatatt

SEQ ID NO: 5355365 - DNA, 25 bp, Homo sapien
agctcagcagtgatttttgatatta

SEQ ID NO: 5355366 - DNA, 25 bp, Homo sapien
gctcagcagtgatttttgatattat

SEQ ID NO: 5355367 - DNA, 25 bp, Homo sapien
aaaaacaatttgtaagtcactgtat

SEQ ID NO: 5355368 - DNA, 25 bp, Homo sapien
gaaaaacaatttgtaagtcactgta

SEQ ID NO: 5355369 - DNA, 25 bp, Homo sapien
ctagaaaaacaatttgtaagtcact

SEQ ID NO: 5355370 - DNA, 25 bp, Homo sapien
tagaaaaacaatttgtaagtcactg

SEQ ID NO: 5355371 - DNA, 25 bp, Homo sapien
gcttgtaatgctatatgatgtctct

SEQ ID NO: 5355372 - DNA, 25 bp, Homo sapien
atatctgtcacagatcctctgtttc

SEQ ID NO: 5355373 - DNA, 25 bp, Homo sapien
cttaggaataataccaatggcatta

SEQ ID NO: 5355374 - DNA, 25 bp, Homo sapien
tatagaaaggatgataaatcttagg

SEQ ID NO: 5355375 - DNA, 25 bp, Homo sapien
tgatgcaaatcccagtcagcatccc

SEQ ID NO: 5355376 - DNA, 25 bp, Homo sapien
ctgtccatcccttgaacaggctttg

SEQ ID NO: 5355377 - DNA, 25 bp, Homo sapien
catcccttgaacaggctttgatgca

SEQ ID NO: 5355378 - DNA, 25 bp, Homo sapien
tttattcctgtccatcccttgaaca

SEQ ID NO: 5355379 - DNA, 25 bp, Homo sapien
gctacaccaggctgcactttgggtt

SEQ ID NO: 5355380 - DNA, 25 bp, Homo sapien
acaccaggctgcactttgggttcag

SEQ ID NO: 5355381 - DNA, 25 bp, Homo sapien
ggctacaccaggctgcactttgggt

SEQ ID NO: 5355382 - DNA, 25 bp, Homo sapien
tacaccaggctgcactttgggttca

SEQ ID NO: 5355383 - DNA, 25 bp, Homo sapien
tagcaatgatccccacactgtagtc

SEQ ID NO: 5355384 - DNA, 25 bp, Homo sapien
agcaatgatccccacactgtagtcc

SEQ ID NO: 5355385 - DNA, 25 bp, Homo sapien
tccaagtcttccttattgccccgta

SEQ ID NO: 5355386 - DNA, 25 bp, Homo sapien
tctgacaaagatcgtatttgctgta

SEQ ID NO: 5355387 - DNA, 25 bp, Homo sapien
tattgccccgtaatcgtttatagta

SEQ ID NO: 5355388 - DNA, 25 bp, Homo sapien
cgtttatagtaaaatcgcacatctt

SEQ ID NO: 5355389 - DNA, 25 bp, Homo sapien
cttctgtgagaaggaattcataata

SEQ ID NO: 5355390 - DNA, 25 bp, Homo sapien
taatatttaaactttgatgaactat

SEQ ID NO: 5355391 - DNA, 25 bp, Homo sapien
aattcataatatttaaactttgatg

SEQ ID NO: 5355392 - DNA, 25 bp, Homo sapien
tcataatatttaaactttgatgaac

SEQ ID NO: 5355393 - DNA, 25 bp, Homo sapien
tttttccatgttatcacccccacag

SEQ ID NO: 5355394 - DNA, 25 bp, Homo sapien
tttccatgttatcacccccacagac

SEQ ID NO: 5355395 - DNA, 25 bp, Homo sapien
ttttccatgttatcacccccacaga

SEQ ID NO: 5355396 - DNA, 25 bp, Homo sapien
ttttttccatgttatcacccccaca

SEQ ID NO: 5355397 - DNA, 25 bp, Homo sapien
tcaattcttgccaaactggacaact

SEQ ID NO: 5355398 - DNA, 25 bp, Homo sapien
attcttgccaaactggacaactcac

SEQ ID NO: 5355399 - DNA, 25 bp, Homo sapien
tttctcaattcttgccaaactggac

SEQ ID NO: 5355400 - DNA, 25 bp, Homo sapien
ctcaattcttgccaaactggacaac

SEQ ID NO: 5355401 - DNA, 25 bp, Homo sapien
tattgcctgaaccaacttcagactt

SEQ ID NO: 5355402 - DNA, 25 bp, Homo sapien
tggccctagattcacgtctctgcca

SEQ ID NO: 5355403 - DNA, 25 bp, Homo sapien
tgcatccctgttgagcttgcgccct

SEQ ID NO: 5355404 - DNA, 25 bp, Homo sapien
ttcagactttactgcctctgcatcc

SEQ ID NO: 5355405 - DNA, 25 bp, Homo sapien
ggtcagtgagcctactgcaatcaca

SEQ ID NO: 5355406 - DNA, 25 bp, Homo sapien
ggaaggtggaagaaccacgtgctta

SEQ ID NO: 5355407 - DNA, 25 bp, Homo sapien
accacgtgcttagggaagcaggtca

SEQ ID NO: 5355408 - DNA, 25 bp, Homo sapien
tactgcaatcacagccttcacaggg

SEQ ID NO: 5355409 - DNA, 25 bp, Homo sapien
ctggatggctccatcatgaatcccc

SEQ ID NO: 5355410 - DNA, 25 bp, Homo sapien
tgtagttctattgcctctttccaca

SEQ ID NO: 5355411 - DNA, 25 bp, Homo sapien
ctttccacagctacaagttctattg

SEQ ID NO: 5355412 - DNA, 25 bp, Homo sapien
ctctggcaggcttgaaattattgta

SEQ ID NO: 5355413 - DNA, 25 bp, Homo sapien
ttctattgataaaccgtctcctatg

SEQ ID NO: 5355414 - DNA, 25 bp, Homo sapien
caattggattgctgtttataattgc

SEQ ID NO: 5355415 - DNA, 25 bp, Homo sapien
tctatgaaacgttcctctattttgg

SEQ ID NO: 5355416 - DNA, 25 bp, Homo sapien
ctcaattggattgctgtttataatt

SEQ ID NO: 5355417 - DNA, 25 bp, Homo sapien
ctatgaaacgttcctctattttggg

SEQ ID NO: 5355418 - DNA, 25 bp, Homo sapien
ggaagaattaagactggtttgctga

SEQ ID NO: 5355419 - DNA, 25 bp, Homo sapien
tgtgtatacccgcacgggtaaatga

SEQ ID NO: 5355420 - DNA, 25 bp, Homo sapien
aaaaatgtatcctgattcattagga

SEQ ID NO: 5355421 - DNA, 25 bp, Homo sapien
gcataaaaagcagggtaaaaatgta

SEQ ID NO: 5355422 - DNA, 25 bp, Homo sapien
tgaggatcgcaaaactgaaagtgtt

SEQ ID NO: 5355423 - DNA, 25 bp, Homo sapien
tgttgcagcatgatcaaatcccaaa

SEQ ID NO: 5355424 - DNA, 25 bp, Homo sapien
cagcagggctgtctcggatgtgaaa

SEQ ID NO: 5355425 - DNA, 25 bp, Homo sapien
tctggtagcaacacatcgtgaatga

SEQ ID NO: 5355426 - DNA, 25 bp, Homo sapien
tttcccagaaaactgagatggcttt

SEQ ID NO: 5355427 - DNA, 25 bp, Homo sapien
tgatatggtatttcaagtttagaat

SEQ ID NO: 5355428 - DNA, 25 bp, Homo sapien
ccatctaaaacttctgcttgatatg

SEQ ID NO: 5355429 - DNA, 25 bp, Homo sapien
tgctttaactgttattttcccagaa

SEQ ID NO: 5355430 - DNA, 25 bp, Homo sapien
tgaaaggaagcataaaaaataatct

SEQ ID NO: 5355431 - DNA, 25 bp, Homo sapien
ctgaaaggaagcataaaaaataatc

SEQ ID NO: 5355432 - DNA, 25 bp, Homo sapien
agagcagctcttcacccttgcagac

SEQ ID NO: 5355433 - DNA, 25 bp, Homo sapien
tgcagagcagctcttcacccttgca

SEQ ID NO: 5355434 - DNA, 25 bp, Homo sapien
ccttgcagagcagctcttcaccctt

SEQ ID NO: 5355435 - DNA, 25 bp, Homo sapien
cagagcagctcttcacccttgcaga

SEQ ID NO: 5355436 - DNA, 25 bp, Homo sapien
aaaactaatgcttgcaaccttggtg

SEQ ID NO: 5355437 - DNA, 25 bp, Homo sapien
atgcttgcaaccttggtgtatttac

SEQ ID NO: 5355438 - DNA, 25 bp, Homo sapien
atcaaaactaatgcttgcaaccttg

SEQ ID NO: 5355439 - DNA, 25 bp, Homo sapien
ctaatgcttgcaaccttggtgtatt

SEQ ID NO: 5355440 - DNA, 25 bp, Homo sapien
ttaaagtgtaccgttatagcatcat

SEQ ID NO: 5355441 - DNA, 25 bp, Homo sapien
cattttgtggtgtaggtcgaacact

SEQ ID NO: 5355442 - DNA, 25 bp, Homo sapien
tttctgatgcttttaatgtaattgg

SEQ ID NO: 5355443 - DNA, 25 bp, Homo sapien
ttatagcatcattttgtggtgtagg

SEQ ID NO: 5355444 - DNA, 25 bp, Homo sapien
ctctctgccagaattgtgtgcactc

SEQ ID NO: 5355445 - DNA, 25 bp, Homo sapien
tgttattggtacatcttttgttcct

SEQ ID NO: 5355446 - DNA, 25 bp, Homo sapien
ggtacatcttttgttcctgaattta

SEQ ID NO: 5355447 - DNA, 25 bp, Homo sapien
tattggtacatcttttgttcctgaa

SEQ ID NO: 5355448 - DNA, 25 bp, Homo sapien
tggtacatcttttgttcctgaattt

SEQ ID NO: 5355449 - DNA, 25 bp, Homo sapien
gtgctttttagccaagttagaatct

SEQ ID NO: 5355450 - DNA, 25 bp, Homo sapien
tgctttttagccaagttagaatctt

SEQ ID NO: 5355451 - DNA, 25 bp, Homo sapien
aggtgctttttagccaagttagaat

SEQ ID NO: 5355452 - DNA, 25 bp, Homo sapien
ggtgctttttagccaagttagaatc

SEQ ID NO: 5355453 - DNA, 25 bp, Homo sapien
catcccaaattacaagtgctcttag

SEQ ID NO: 5355454 - DNA, 25 bp, Homo sapien
gaactgatgagcaactggattaaga

SEQ ID NO: 5355455 - DNA, 25 bp, Homo sapien
gatgacttaaattatcccatggcct

SEQ ID NO: 5355456 - DNA, 25 bp, Homo sapien
ttccaacctgttaagcaatgccacc

SEQ ID NO: 5355457 - DNA, 25 bp, Homo sapien
ggtataaacctgtaaaggcgctgag

SEQ ID NO: 5355458 - DNA, 25 bp, Homo sapien
gggtataaacctgtaaaggcgctga

SEQ ID NO: 5355459 - DNA, 25 bp, Homo sapien
gtataaacctgtaaaggcgctgagt

SEQ ID NO: 5355460 - DNA, 25 bp, Homo sapien
cttgtgttcttagtgtaccaaaatc

SEQ ID NO: 5355461 - DNA, 25 bp, Homo sapien
tcagttgaggaataaattccaggag

SEQ ID NO: 5355462 - DNA, 25 bp, Homo sapien
ttgtgttcttagtgtaccaaaatct

SEQ ID NO: 5355463 - DNA, 25 bp, Homo sapien
gctgtctgaagcattagtctttatt

SEQ ID NO: 5355464 - DNA, 25 bp, Homo sapien
tctctagatgaaaaactggctctca

SEQ ID NO: 5355465 - DNA, 25 bp, Homo sapien
tatgaaggctgtgtgattatctgct

SEQ ID NO: 5355466 - DNA, 25 bp, Homo sapien
tcaacctcaacaggaagaatgataa

SEQ ID NO: 5355467 - DNA, 25 bp, Homo sapien
tcctccactagagtacatttctaca

SEQ ID NO: 5355468 - DNA, 25 bp, Homo sapien
cctccactagagtacatttctacaa

SEQ ID NO: 5355469 - DNA, 25 bp, Homo sapien
ctccactagagtacatttctacaac

SEQ ID NO: 5355470 - DNA, 25 bp, Homo sapien
tctcctccactagagtacatttcta

SEQ ID NO: 5355471 - DNA, 25 bp, Homo sapien
tggccccaaggaacggcctcaatcg

SEQ ID NO: 5355472 - DNA, 25 bp, Homo sapien
tgctattcacagggactctggcccc

SEQ ID NO: 5355473 - DNA, 25 bp, Homo sapien
caatcgatatggatttggaactcca

SEQ ID NO: 5355474 - DNA, 25 bp, Homo sapien
ctcactgtgaggattgtggatgttt

SEQ ID NO: 5355475 - DNA, 25 bp, Homo sapien
taagtaaataccccatgattagatg

SEQ ID NO: 5355476 - DNA, 25 bp, Homo sapien
ctggtaagtaaataccccatgatta

SEQ ID NO: 5355477 - DNA, 25 bp, Homo sapien
agtaaataccccatgattagatgta

SEQ ID NO: 5355478 - DNA, 25 bp, Homo sapien
ggtaagtaaataccccatgattaga

SEQ ID NO: 5355479 - DNA, 25 bp, Homo sapien
aatttcaagttgcaagtcttcttat

SEQ ID NO: 5355480 - DNA, 25 bp, Homo sapien
gaagatgcacgttgttttcatgact

SEQ ID NO: 5355481 - DNA, 25 bp, Homo sapien
agaaatacactgcttaaggctatag

SEQ ID NO: 5355482 - DNA, 25 bp, Homo sapien
cagtggtgggacgggcctataatcc

SEQ ID NO: 5355483 - DNA, 25 bp, Homo sapien
tgtagcagatattgatactaaagta

SEQ ID NO: 5355484 - DNA, 25 bp, Homo sapien
gaaaatgtgatgttgtagcagatat

SEQ ID NO: 5355485 - DNA, 25 bp, Homo sapien
tactaaagtaatcgtttcttcagaa

SEQ ID NO: 5355486 - DNA, 25 bp, Homo sapien
cagaactaggattatgtaagtagac

SEQ ID NO: 5355487 - DNA, 25 bp, Homo sapien
caattgtgtcctcttctcaaattcc

SEQ ID NO: 5355488 - DNA, 25 bp, Homo sapien
attgtgtcctcttctcaaattccac

SEQ ID NO: 5355489 - DNA, 25 bp, Homo sapien
gtgtcctcttctcaaattccacaga

SEQ ID NO: 5355490 - DNA, 25 bp, Homo sapien
aattccacagatacgtgctcttcat

SEQ ID NO: 5355491 - DNA, 25 bp, Homo sapien
tactaactaggaaagccgtgcccac

SEQ ID NO: 5355492 - DNA, 25 bp, Homo sapien
tgcactggagaggtaggatcccaca

SEQ ID NO: 5355493 - DNA, 25 bp, Homo sapien
tagattgcacattatgaggtccaca

SEQ ID NO: 5355494 - DNA, 25 bp, Homo sapien
aatcctggccaaaaatcattctgtg

SEQ ID NO: 5355495 - DNA, 25 bp, Homo sapien
tatttctttaagttgctccttgttc

SEQ ID NO: 5355496 - DNA, 25 bp, Homo sapien
tttctttaagttgctccttgttcat

SEQ ID NO: 5355497 - DNA, 25 bp, Homo sapien
ttgtcatagactgattcttttattt

SEQ ID NO: 5355498 - DNA, 25 bp, Homo sapien
ctgattcttttatttctttaagttg

SEQ ID NO: 5355499 - DNA, 25 bp, Homo sapien
tctgaaccagagactacaacaagcg

SEQ ID NO: 5355500 - DNA, 25 bp, Homo sapien
tttcccacatagatgtaacacaggc

SEQ ID NO: 5355501 - DNA, 25 bp, Homo sapien
tagtttaatgggaaagtacagtcca

SEQ ID NO: 5355502 - DNA, 25 bp, Homo sapien
gatgactagaacatgtaactttccc

SEQ ID NO: 5355503 - DNA, 25 bp, Homo sapien
agcattggtggctcaaatcgtatgg

SEQ ID NO: 5355504 - DNA, 25 bp, Homo sapien
tggtggctcaaatcgtatgggcctg

SEQ ID NO: 5355505 - DNA, 25 bp, Homo sapien
gctcaaatcgtatgggcctgcaatt

SEQ ID NO: 5355506 - DNA, 25 bp, Homo sapien
gggcctgcaattcccccggtagaga

SEQ ID NO: 5355507 - DNA, 25 bp, Homo sapien
tggtgagtttaattccaacagtctg

SEQ ID NO: 5355508 - DNA, 25 bp, Homo sapien
gtgagtttaattccaacagtctgtc

SEQ ID NO: 5355509 - DNA, 25 bp, Homo sapien
caccttggtgagtttaattccaaca

SEQ ID NO: 5355510 - DNA, 25 bp, Homo sapien
agtcaccttggtgagtttaattcca

SEQ ID NO: 5355511 - DNA, 25 bp, Homo sapien
accatcatttcatctgcgaacagag

SEQ ID NO: 5355512 - DNA, 25 bp, Homo sapien
ttcatctgcgaacagagacaacttg

SEQ ID NO: 5355513 - DNA, 25 bp, Homo sapien
tgtgaagaaaagtcaatagtagctt

SEQ ID NO: 5355514 - DNA, 25 bp, Homo sapien
tggctgtctgttattagcgtatagg

SEQ ID NO: 5355515 - DNA, 25 bp, Homo sapien
tctggaggatattggagacaccact

SEQ ID NO: 5355516 - DNA, 25 bp, Homo sapien
gataagcctctgtagcacaaagcct

SEQ ID NO: 5355517 - DNA, 25 bp, Homo sapien
ttataaacggatgctgtaagcctct

SEQ ID NO: 5355518 - DNA, 25 bp, Homo sapien
tactactgtaccagaggtcaccaag

SEQ ID NO: 5355519 - DNA, 25 bp, Homo sapien
ctttacatctatggtcctccgggga

SEQ ID NO: 5355520 - DNA, 25 bp, Homo sapien
tttacatctatggtcctccggggag

SEQ ID NO: 5355521 - DNA, 25 bp, Homo sapien
aagctaacttcctttacatctatgg

SEQ ID NO: 5355522 - DNA, 25 bp, Homo sapien
aactgagtccaagtgttgtctcggt

SEQ ID NO: 5355523 - DNA, 25 bp, Homo sapien
gaactgagtccaagtgttgtctcgg

SEQ ID NO: 5355524 - DNA, 25 bp, Homo sapien
taatgattaaaaaactgaagccaaa

SEQ ID NO: 5355525 - DNA, 25 bp, Homo sapien
aaaaactgaagccaaatatttatat

SEQ ID NO: 5355526 - DNA, 25 bp, Homo sapien
atgattaaaaaactgaagccaaata

SEQ ID NO: 5355527 - DNA, 25 bp, Homo sapien
aataatgattaaaaaactgaagcca

SEQ ID NO: 5355528 - DNA, 25 bp, Homo sapien
catccccaaattctttggtctttcg

SEQ ID NO: 5355529 - DNA, 25 bp, Homo sapien
agctgaagttggctatattattgct

SEQ ID NO: 5355530 - DNA, 25 bp, Homo sapien
tgagctgaagttggctatattattg

SEQ ID NO: 5355531 - DNA, 25 bp, Homo sapien
atgagctgaagttggctatattatt

SEQ ID NO: 5355532 - DNA, 25 bp, Homo sapien
ctgaagttggctatattattgctaa

SEQ ID NO: 5355533 - DNA, 25 bp, Homo sapien
gtttaaggtgtgagatctttctata

SEQ ID NO: 5355534 - DNA, 25 bp, Homo sapien
tcctttatacattgcacatctggta

SEQ ID NO: 5355535 - DNA, 25 bp, Homo sapien
gcctaagctggtcttaattaaactc

SEQ ID NO: 5355536 - DNA, 25 bp, Homo sapien
cgtctggcccagagcaagttttaaa

SEQ ID NO: 5355537 - DNA, 25 bp, Homo sapien
atagaattctagtttggcaaatttt

SEQ ID NO: 5355538 - DNA, 25 bp, Homo sapien
ttttaaaatgtcgatttcactttca

SEQ ID NO: 5355539 - DNA, 25 bp, Homo sapien
tgtttcagtctataagtcagctgtc

SEQ ID NO: 5355540 - DNA, 25 bp, Homo sapien
tctagttgcttttagaatgtatctc

SEQ ID NO: 5355541 - DNA, 25 bp, Homo sapien
ccaggaaagatcttgtattcagaac

SEQ ID NO: 5355542 - DNA, 25 bp, Homo sapien
gctgtgaggttacggctccaggaaa

SEQ ID NO: 5355543 - DNA, 25 bp, Homo sapien
gccaaaagggcaatccatccagtga

SEQ ID NO: 5355544 - DNA, 25 bp, Homo sapien
tacgggagaatatcttcacgacctt

SEQ ID NO: 5355545 - DNA, 25 bp, Homo sapien
tattctggcaggatagtgaaaaaaa

SEQ ID NO: 5355546 - DNA, 25 bp, Homo sapien
aaattctgtttgtgttttcaactca

SEQ ID NO: 5355547 - DNA, 25 bp, Homo sapien
actcacaaacattctagagcttgct

SEQ ID NO: 5355548 - DNA, 25 bp, Homo sapien
gagaacctacctctataaaaaatga

SEQ ID NO: 5355549 - DNA, 25 bp, Homo sapien
gcagtacttctattatgctctctga

SEQ ID NO: 5355550 - DNA, 25 bp, Homo sapien
tcaaaacgcagtacttctattatgc

SEQ ID NO: 5355551 - DNA, 25 bp, Homo sapien
cctccatcatcaaaacgcagtactt

SEQ ID NO: 5355552 - DNA, 25 bp, Homo sapien
gtacttctattatgctctctgactg

SEQ ID NO: 5355553 - DNA, 25 bp, Homo sapien
ctgtgaagaaaacaaaacataccat

SEQ ID NO: 5355554 - DNA, 25 bp, Homo sapien
tctcagaaatcatgtagaagttgaa

SEQ ID NO: 5355555 - DNA, 25 bp, Homo sapien
tgctcagccatcaacttgtaaccaa

SEQ ID NO: 5355556 - DNA, 25 bp, Homo sapien
gccagaactagggcatgggtctgct

SEQ ID NO: 5355557 - DNA, 25 bp, Homo sapien
gactccaatatctaccacatctgca

SEQ ID NO: 5355558 - DNA, 25 bp, Homo sapien
gacaccaggaatgatgaatctggat

SEQ ID NO: 5355559 - DNA, 25 bp, Homo sapien
gctgctaagcaccaagtggacacca

SEQ ID NO: 5355560 - DNA, 25 bp, Homo sapien
tggatggctgtgacaagccccatgg

SEQ ID NO: 5355561 - DNA, 25 bp, Homo sapien
aagggccacgctgctaagcaccaag

SEQ ID NO: 5355562 - DNA, 25 bp, Homo sapien
gacggtctcagacagtaacagtaga

SEQ ID NO: 5355563 - DNA, 25 bp, Homo sapien
cagtctcaagtagtagcagtgacag

SEQ ID NO: 5355564 - DNA, 25 bp, Homo sapien
gccactaagggctgcataatctgca

SEQ ID NO: 5355565 - DNA, 25 bp, Homo sapien
caagttcctgtctaggcgccactaa

SEQ ID NO: 5355566 - DNA, 25 bp, Homo sapien
gaatggcctgtgattacttaaactg

SEQ ID NO: 5355567 - DNA, 25 bp, Homo sapien
tagtttggctcaagggacagatgtc

SEQ ID NO: 5355568 - DNA, 25 bp, Homo sapien
tatttaccagccctatcacgctggg

SEQ ID NO: 5355569 - DNA, 25 bp, Homo sapien
tgtcttagggcggaatcctggctcc

SEQ ID NO: 5355570 - DNA, 25 bp, Homo sapien
gccgggagcgacaacggttgcgagc

SEQ ID NO: 5355571 - DNA, 25 bp, Homo sapien
cggcggacgtggagacggcggcggt

SEQ ID NO: 5355572 - DNA, 25 bp, Homo sapien
ggcgcggcccttctcggcgaggcgg

SEQ ID NO: 5355573 - DNA, 25 bp, Homo sapien
cactacgagggtcatcaccaggtgc

SEQ ID NO: 5355574 - DNA, 25 bp, Homo sapien
tcgatctccgagcgtgggcctgggt

SEQ ID NO: 5355575 - DNA, 25 bp, Homo sapien
ctcgatctccgagcgtgggcctggg

SEQ ID NO: 5355576 - DNA, 25 bp, Homo sapien
gggcctgggtccgtgcgtgcgtgtg

SEQ ID NO: 5355577 - DNA, 25 bp, Homo sapien
cgtgggcctgggtccgtgcgtgcgt

SEQ ID NO: 5355578 - DNA, 25 bp, Homo sapien
tctttgcctgggcatcgcctacaag

SEQ ID NO: 5355579 - DNA, 25 bp, Homo sapien
tttgcctgggcatcgcctacaagca

SEQ ID NO: 5355580 - DNA, 25 bp, Homo sapien
cctgggcatcgcctacaagcagtcg

SEQ ID NO: 5355581 - DNA, 25 bp, Homo sapien
catcgcctacaagcagtcggagcgg

SEQ ID NO: 5355582 - DNA, 25 bp, Homo sapien
cggccatactggaaacgggcacggc

SEQ ID NO: 5355583 - DNA, 25 bp, Homo sapien
ccatactggaaacgggcacggcccg

SEQ ID NO: 5355584 - DNA, 25 bp, Homo sapien
cgggcggccatactggaaacgggca

SEQ ID NO: 5355585 - DNA, 25 bp, Homo sapien
gcggcgggcggccatactggaaacg

SEQ ID NO: 5355586 - DNA, 25 bp, Homo sapien
cctgcggcttcacggccagacagaa

SEQ ID NO: 5355587 - DNA, 25 bp, Homo sapien
gtcccgctctcggaggcctgcggct

SEQ ID NO: 5355588 - DNA, 25 bp, Homo sapien
tcgtcccgctctcggaggcctgcgg

SEQ ID NO: 5355589 - DNA, 25 bp, Homo sapien
gctgtccggcggtcagtctgtccgc

SEQ ID NO: 5355590 - DNA, 25 bp, Homo sapien
cagagttcgatttcccatgcagcta

SEQ ID NO: 5355591 - DNA, 25 bp, Homo sapien
ctactccggaggcaggaaaaacgct

SEQ ID NO: 5355592 - DNA, 25 bp, Homo sapien
ctaatgaagcttaagccgcagggcc

SEQ ID NO: 5355593 - DNA, 25 bp, Homo sapien
gctccatgggaaataacttgcacct

SEQ ID NO: 5355594 - DNA, 25 bp, Homo sapien
aataagtgggcccatcagtgaacag

SEQ ID NO: 5355595 - DNA, 25 bp, Homo sapien
ggagggtctcctaatgtcgatttaa

SEQ ID NO: 5355596 - DNA, 25 bp, Homo sapien
caaggtaccagggaagttcaatcct

SEQ ID NO: 5355597 - DNA, 25 bp, Homo sapien
cagtgaacagccctagtgactacca

SEQ ID NO: 5355598 - DNA, 25 bp, Homo sapien
ggtgcatcacccgtttgttctccct

SEQ ID NO: 5355599 - DNA, 25 bp, Homo sapien
agtctggtgcatcacccgtttgttc

SEQ ID NO: 5355600 - DNA, 25 bp, Homo sapien
tgcccacagcggtggacctctggca

SEQ ID NO: 5355601 - DNA, 25 bp, Homo sapien
agggtgaagtctggtgcatcacccg

SEQ ID NO: 5355602 - DNA, 25 bp, Homo sapien
cattggcccaaccagattctcttga

SEQ ID NO: 5355603 - DNA, 25 bp, Homo sapien
tatgaacttttgctacagaggtacc

SEQ ID NO: 5355604 - DNA, 25 bp, Homo sapien
tgccttccctgccatagttaattgg

SEQ ID NO: 5355605 - DNA, 25 bp, Homo sapien
tgtgaagcttacatgactgtctatg

SEQ ID NO: 5355606 - DNA, 25 bp, Homo sapien
ccactgggtgctatgacaagaaggt

SEQ ID NO: 5355607 - DNA, 25 bp, Homo sapien
gaaggtgctttctctacagctatct

SEQ ID NO: 5355608 - DNA, 25 bp, Homo sapien
ccctgatgtaagacctgattctgag

SEQ ID NO: 5355609 - DNA, 25 bp, Homo sapien
ttggagactcctacactgccctttt

SEQ ID NO: 5355610 - DNA, 25 bp, Homo sapien
cagggctggagattaccctggagcc

SEQ ID NO: 5355611 - DNA, 25 bp, Homo sapien
tgaccaggtctccttgctttccctt

SEQ ID NO: 5355612 - DNA, 25 bp, Homo sapien
ctatgtgagtaacgcatctgacggc

SEQ ID NO: 5355613 - DNA, 25 bp, Homo sapien
gccctccggcttcatctgaccaggt

SEQ ID NO: 5355614 - DNA, 25 bp, Homo sapien
ccctggagcagcatcaacttttgaa

SEQ ID NO: 5355615 - DNA, 25 bp, Homo sapien
cctggagcagcatcaacttttgaaa

SEQ ID NO: 5355616 - DNA, 25 bp, Homo sapien
ttccctggagcagcatcaacttttg

SEQ ID NO: 5355617 - DNA, 25 bp, Homo sapien
tggagcagcatcaacttttgaaagg

SEQ ID NO: 5355618 - DNA, 25 bp, Homo sapien
tatacaggccggcttgggctcagag

SEQ ID NO: 5355619 - DNA, 25 bp, Homo sapien
tcaggataaaacatgggcttagaac

SEQ ID NO: 5355620 - DNA, 25 bp, Homo sapien
tcagcaagctggtccgtaacgaact

SEQ ID NO: 5355621 - DNA, 25 bp, Homo sapien
aagcccgcttttcaagacaactcag

SEQ ID NO: 5355622 - DNA, 25 bp, Homo sapien
ctctctgtgggaacgattgaaggaa

SEQ ID NO: 5355623 - DNA, 25 bp, Homo sapien
ggaatagagttcaaagccaatttaa

SEQ ID NO: 5355624 - DNA, 25 bp, Homo sapien
tccttctatggaatagagttcaaag

SEQ ID NO: 5355625 - DNA, 25 bp, Homo sapien
gagcaaagtggatcccagcagtttg

SEQ ID NO: 5355626 - DNA, 25 bp, Homo sapien
gcagagcaaagtggatcccagcagt

SEQ ID NO: 5355627 - DNA, 25 bp, Homo sapien
taggctgctacttcatgtttctaga

SEQ ID NO: 5355628 - DNA, 25 bp, Homo sapien
acacagtaggctgctacttcatgtt

SEQ ID NO: 5355629 - DNA, 25 bp, Homo sapien
gtacacagtaggctgctacttcatg

SEQ ID NO: 5355630 - DNA, 25 bp, Homo sapien
agtaggctgctacttcatgtttcta

SEQ ID NO: 5355631 - DNA, 25 bp, Homo sapien
ttgagtttcatgagctttttctata

SEQ ID NO: 5355632 - DNA, 25 bp, Homo sapien
tcataatgcagccatgagcttgtct

SEQ ID NO: 5355633 - DNA, 25 bp, Homo sapien
gagtttcatgagctttttctatagc

SEQ ID NO: 5355634 - DNA, 25 bp, Homo sapien
ataatgcagccatgagcttgtctct

SEQ ID NO: 5355635 - DNA, 25 bp, Homo sapien
ttgttgtgctgacgaagccccgtgc

SEQ ID NO: 5355636 - DNA, 25 bp, Homo sapien
tcagaaagaccgtctggagatgatc

SEQ ID NO: 5355637 - DNA, 25 bp, Homo sapien
gagggcccagttgttgtaatcgcag

SEQ ID NO: 5355638 - DNA, 25 bp, Homo sapien
tagcttgttcggtctgtaaagaaac

SEQ ID NO: 5355639 - DNA, 25 bp, Homo sapien
taattttcccattgacagtaggcgc

SEQ ID NO: 5355640 - DNA, 25 bp, Homo sapien
tgtgattggccgtgtccaggcaacc

SEQ ID NO: 5355641 - DNA, 25 bp, Homo sapien
catcgccccagtgagggcgcggtct

SEQ ID NO: 5355642 - DNA, 25 bp, Homo sapien
cggagacgccgtcgtcaacagaccg

SEQ ID NO: 5355643 - DNA, 25 bp, Homo sapien
cgcccgccctctcgggtcaggcggg

SEQ ID NO: 5355644 - DNA, 25 bp, Homo sapien
tcgcccgccctctcgggtcaggcgg

SEQ ID NO: 5355645 - DNA, 25 bp, Homo sapien
gcccgccctctcgggtcaggcgggc

SEQ ID NO: 5355646 - DNA, 25 bp, Homo sapien
ctcgcccgccctctcgggtcaggcg

SEQ ID NO: 5355647 - DNA, 25 bp, Homo sapien
gccttccaacaagcggcctagggag

SEQ ID NO: 5355648 - DNA, 25 bp, Homo sapien
tagtaagtgtgggagcgatgcctgc

SEQ ID NO: 5355649 - DNA, 25 bp, Homo sapien
agcgatgcctgccgcacgagagccg

SEQ ID NO: 5355650 - DNA, 25 bp, Homo sapien
agagccgccgaggtgccgagccttc

SEQ ID NO: 5355651 - DNA, 25 bp, Homo sapien
atttttccctattgatatatgcttt

SEQ ID NO: 5355652 - DNA, 25 bp, Homo sapien
gatgagaaaaccactatcattagaa

SEQ ID NO: 5355653 - DNA, 25 bp, Homo sapien
ttattatcttcgaatttcactcaga

SEQ ID NO: 5355654 - DNA, 25 bp, Homo sapien
gagaaaaccactatcattagaattt

SEQ ID NO: 5355655 - DNA, 25 bp, Homo sapien
gaagccgtttaaatgtgtctcccac

SEQ ID NO: 5355656 - DNA, 25 bp, Homo sapien
tattggctggctacaaggaatctgg

SEQ ID NO: 5355657 - DNA, 25 bp, Homo sapien
caaggtcatgcatcagaccaggaga

SEQ ID NO: 5355658 - DNA, 25 bp, Homo sapien
aacagaacgcatctgctggaagagc

SEQ ID NO: 5355659 - DNA, 25 bp, Homo sapien
caatttcatcttaactgctgtgatt

SEQ ID NO: 5355660 - DNA, 25 bp, Homo sapien
tcacagtgagttccatagcactttt

SEQ ID NO: 5355661 - DNA, 25 bp, Homo sapien
tggtgtatctcctttaacagtcttc

SEQ ID NO: 5355662 - DNA, 25 bp, Homo sapien
tttatttctgcctgcgttcaccctc

SEQ ID NO: 5355663 - DNA, 25 bp, Homo sapien
acagcccttttgaccactctgggta

SEQ ID NO: 5355664 - DNA, 25 bp, Homo sapien
cacagcccttttgaccactctgggt

SEQ ID NO: 5355665 - DNA, 25 bp, Homo sapien
ctgccacagcccttttgaccactct

SEQ ID NO: 5355666 - DNA, 25 bp, Homo sapien
gccacagcccttttgaccactctgg

SEQ ID NO: 5355667 - DNA, 25 bp, Homo sapien
tacaggtccatagtaccaggagggc

SEQ ID NO: 5355668 - DNA, 25 bp, Homo sapien
agatctagcaagctgccattccgca

SEQ ID NO: 5355669 - DNA, 25 bp, Homo sapien
gagaaatgtctcatgagtctggtgc

SEQ ID NO: 5355670 - DNA, 25 bp, Homo sapien
cattccgcacactggttcgaggtca

SEQ ID NO: 5355671 - DNA, 25 bp, Homo sapien
gagaatcttaattgcgtcctcctcc

SEQ ID NO: 5355672 - DNA, 25 bp, Homo sapien
cacatctgtctgcatagagttgtaa

SEQ ID NO: 5355673 - DNA, 25 bp, Homo sapien
catagagttgtaaagcagtgtctgg

SEQ ID NO: 5355674 - DNA, 25 bp, Homo sapien
tcctgtgttctgtgcacggccacat

SEQ ID NO: 5355675 - DNA, 25 bp, Homo sapien
tagaaaagcaagagcaaacacattc

SEQ ID NO: 5355676 - DNA, 25 bp, Homo sapien
tgaaggaaatagagacacaaaaaac

SEQ ID NO: 5355677 - DNA, 25 bp, Homo sapien
aaaagctagcagaaggcaagaaata

SEQ ID NO: 5355678 - DNA, 25 bp, Homo sapien
actaaaatcagagcagaactgaagg

SEQ ID NO: 5355679 - DNA, 25 bp, Homo sapien
catgcaaattctccacgtaaaggtc

SEQ ID NO: 5355680 - DNA, 25 bp, Homo sapien
tttaagcatgtgaacatatgagact

SEQ ID NO: 5355681 - DNA, 25 bp, Homo sapien
atgcaaattctccacgtaaaggtct

SEQ ID NO: 5355682 - DNA, 25 bp, Homo sapien
gcatgcaaattctccacgtaaaggt

SEQ ID NO: 5355683 - DNA, 25 bp, Homo sapien
aattcttttagcaaaggccaaagct

SEQ ID NO: 5355684 - DNA, 25 bp, Homo sapien
tctggcctgctccagggtgcgttat

SEQ ID NO: 5355685 - DNA, 25 bp, Homo sapien
gccaaagcttttgatggatgagtat

SEQ ID NO: 5355686 - DNA, 25 bp, Homo sapien
attgccatgaaagagcccctctgtt

SEQ ID NO: 5355687 - DNA, 25 bp, Homo sapien
ttagccattcgcacggcacaaagcg

SEQ ID NO: 5355688 - DNA, 25 bp, Homo sapien
gaatgtttcctggttcggggatctg

SEQ ID NO: 5355689 - DNA, 25 bp, Homo sapien
caaagcgctaccagctgggatgagg

SEQ ID NO: 5355690 - DNA, 25 bp, Homo sapien
tttcttgtgcctcttagccattcgc

SEQ ID NO: 5355691 - DNA, 25 bp, Homo sapien
gggttttgggatgcgtgttactggc

SEQ ID NO: 5355692 - DNA, 25 bp, Homo sapien
gctgtgtgttttcacgagttatgct

SEQ ID NO: 5355693 - DNA, 25 bp, Homo sapien
gtgttttcacgagttatgctatgcc

SEQ ID NO: 5355694 - DNA, 25 bp, Homo sapien
ttttgggatgcgtgttactggctgt

SEQ ID NO: 5355695 - DNA, 25 bp, Homo sapien
ggatggcacctctagctgccctggg

SEQ ID NO: 5355696 - DNA, 25 bp, Homo sapien
caaagttgtcaatattctggctgaa

SEQ ID NO: 5355697 - DNA, 25 bp, Homo sapien
gggatggcacctctagctgccctgg

SEQ ID NO: 5355698 - DNA, 25 bp, Homo sapien
tggaacaaagttgtcaatattctgg

SEQ ID NO: 5355699 - DNA, 25 bp, Homo sapien
tgaaggggagtgatacttgtaacca

SEQ ID NO: 5355700 - DNA, 25 bp, Homo sapien
gaaggggagtgatacttgtaaccat

SEQ ID NO: 5355701 - DNA, 25 bp, Homo sapien
cttgaaggggagtgatacttgtaac

SEQ ID NO: 5355702 - DNA, 25 bp, Homo sapien
gacttgaaggggagtgatacttgta

SEQ ID NO: 5355703 - DNA, 25 bp, Homo sapien
tacttctcacatccgcttcttgtcg

SEQ ID NO: 5355704 - DNA, 25 bp, Homo sapien
taggcatctccctaccttgttcttt

SEQ ID NO: 5355705 - DNA, 25 bp, Homo sapien
tgcttttaatgcctgaaaatctctc

SEQ ID NO: 5355706 - DNA, 25 bp, Homo sapien
ggaaccagcacagcgccagagtcct

SEQ ID NO: 5355707 - DNA, 25 bp, Homo sapien
caggcattgatggtcagacagtaga

SEQ ID NO: 5355708 - DNA, 25 bp, Homo sapien
gatggtcagacagtagaaatttgga

SEQ ID NO: 5355709 - DNA, 25 bp, Homo sapien
ggtcttaagggcagcccctatagcg

SEQ ID NO: 5355710 - DNA, 25 bp, Homo sapien
tatagcgactgtttgcaaagctgac

SEQ ID NO: 5355711 - DNA, 25 bp, Homo sapien
tgcacataacaactgaggcacgtgg

SEQ ID NO: 5355712 - DNA, 25 bp, Homo sapien
taattgaggcacgtggagattccct

SEQ ID NO: 5355713 - DNA, 25 bp, Homo sapien
tgcatgaactcgatgaacttaagcc

SEQ ID NO: 5355714 - DNA, 25 bp, Homo sapien
tcccttgaatctgaacgactaagcc

SEQ ID NO: 5355715 - DNA, 25 bp, Homo sapien
tccttcagcagtcgccgagcagagt

SEQ ID NO: 5355716 - DNA, 25 bp, Homo sapien
ccttcagcagtcgccgagcagagtc

SEQ ID NO: 5355717 - DNA, 25 bp, Homo sapien
cgcagcccccggtgctgaaacgggc

SEQ ID NO: 5355718 - DNA, 25 bp, Homo sapien
tgtccgcagcccccggtgctgaaac

SEQ ID NO: 5355719 - DNA, 25 bp, Homo sapien
tccgcagcccccggtgctgaaacgg

SEQ ID NO: 5355720 - DNA, 25 bp, Homo sapien
cagcccccggtgctgaaacgggccg

SEQ ID NO: 5355721 - DNA, 25 bp, Homo sapien
ccggctccaagtcgggagcgggcgc

SEQ ID NO: 5355722 - DNA, 25 bp, Homo sapien
tacatttcctcctgtcacgctgtcc

SEQ ID NO: 5355723 - DNA, 25 bp, Homo sapien
agcgggcgccgcgtcttctcgagtc

SEQ ID NO: 5355724 - DNA, 25 bp, Homo sapien
acgctgtccccggaccgccagtccg

SEQ ID NO: 5355725 - DNA, 25 bp, Homo sapien
ggactttaacttcggccctctgcag

SEQ ID NO: 5355726 - DNA, 25 bp, Homo sapien
tgaatggcgctggaacctagaggac

SEQ ID NO: 5355727 - DNA, 25 bp, Homo sapien
catcacatcttccaaaggggcgagg

SEQ ID NO: 5355728 - DNA, 25 bp, Homo sapien
tctttggcctgaaccaggtgcctct

SEQ ID NO: 5355729 - DNA, 25 bp, Homo sapien
cattccgggtgtaaatggaggtgat

SEQ ID NO: 5355730 - DNA, 25 bp, Homo sapien
cctgcattccgggtgtaaatggagg

SEQ ID NO: 5355731 - DNA, 25 bp, Homo sapien
ccgggtgtaaatggaggtgataaca

SEQ ID NO: 5355732 - DNA, 25 bp, Homo sapien
ggtggcctgcattccgggtgtaaat

SEQ ID NO: 5355733 - DNA, 25 bp, Homo sapien
taggaatgtcagtgtggtgcccacg

SEQ ID NO: 5355734 - DNA, 25 bp, Homo sapien
tctcagggtaattaagtgcttcagc

SEQ ID NO: 5355735 - DNA, 25 bp, Homo sapien
ggttttctctctccataagcctagg

SEQ ID NO: 5355736 - DNA, 25 bp, Homo sapien
cctctttgccggctgtaggaatgtc

SEQ ID NO: 5355737 - DNA, 25 bp, Homo sapien
ctgggaagcctccttaatggtccct

SEQ ID NO: 5355738 - DNA, 25 bp, Homo sapien
gcctccttaatggtccctaaggcag

SEQ ID NO: 5355739 - DNA, 25 bp, Homo sapien
tggtccctaaggcagaattaaggat

SEQ ID NO: 5355740 - DNA, 25 bp, Homo sapien
gcagaattaaggatttcctccccat

SEQ ID NO: 5355741 - DNA, 25 bp, Homo sapien
caggctggagggcaggagtgcagtg

SEQ ID NO: 5355742 - DNA, 25 bp, Homo sapien
acagagtttcaccatgttagccagg

SEQ ID NO: 5355743 - DNA, 25 bp, Homo sapien
ccaggctggagggcaggagtgcagt

SEQ ID NO: 5355744 - DNA, 25 bp, Homo sapien
gacagagtttcaccatgttagccag

SEQ ID NO: 5355745 - DNA, 25 bp, Homo sapien
tccggtgagatacccactggagtag

SEQ ID NO: 5355746 - DNA, 25 bp, Homo sapien
gacctgtatcctgttgaagcttgca

SEQ ID NO: 5355747 - DNA, 25 bp, Homo sapien
tagtgggatctcagtccggctcctt

SEQ ID NO: 5355748 - DNA, 25 bp, Homo sapien
tgcctgacttgacagcaccgtggtc

SEQ ID NO: 5355749 - DNA, 25 bp, Homo sapien
tggaatgcacactgacaagggtcac

SEQ ID NO: 5355750 - DNA, 25 bp, Homo sapien
ggaatgcacactgacaagggtcaca

SEQ ID NO: 5355751 - DNA, 25 bp, Homo sapien
ctggaatgcacactgacaagggtca

SEQ ID NO: 5355752 - DNA, 25 bp, Homo sapien
taaagtgtcgtattccccagccttg

SEQ ID NO: 5355753 - DNA, 25 bp, Homo sapien
gaactgtctggcatatctgtgagga

SEQ ID NO: 5355754 - DNA, 25 bp, Homo sapien
gaaacctgcgtgtgggtatggcccc

SEQ ID NO: 5355755 - DNA, 25 bp, Homo sapien
catgtggccaatagcagtgggttcc

SEQ ID NO: 5355756 - DNA, 25 bp, Homo sapien
tccatctgcctggtaaaatcagttt

SEQ ID NO: 5355757 - DNA, 25 bp, Homo sapien
ctgtgtgtccttggggactccaaat

SEQ ID NO: 5355758 - DNA, 25 bp, Homo sapien
ggactccaaatgtcacctcagacat

SEQ ID NO: 5355759 - DNA, 25 bp, Homo sapien
acctcagacatcagttcctctcctc

SEQ ID NO: 5355760 - DNA, 25 bp, Homo sapien
ccatccttgggattgcctccagatc

SEQ ID NO: 5355761 - DNA, 25 bp, Homo sapien
atccttgggattgcctccagatctt

SEQ ID NO: 5355762 - DNA, 25 bp, Homo sapien
tccttgggattgcctccagatcttc

SEQ ID NO: 5355763 - DNA, 25 bp, Homo sapien
catccttgggattgcctccagatct

SEQ ID NO: 5355764 - DNA, 25 bp, Homo sapien
ctatccttggatcatgtgagggtga

SEQ ID NO: 5355765 - DNA, 25 bp, Homo sapien
tatccttggatcatgtgagggtgaa

SEQ ID NO: 5355766 - DNA, 25 bp, Homo sapien
ctttcctaactgaatcagaggagag

SEQ ID NO: 5355767 - DNA, 25 bp, Homo sapien
actgttgtatacaaagacaggctaa

SEQ ID NO: 5355768 - DNA, 25 bp, Homo sapien
caaagacaggctaataatcagggaa

SEQ ID NO: 5355769 - DNA, 25 bp, Homo sapien
tgcacatcttcccacccattatctc

SEQ ID NO: 5355770 - DNA, 25 bp, Homo sapien
cagccaccgttgaagttaggctgat

SEQ ID NO: 5355771 - DNA, 25 bp, Homo sapien
tgtcggtgtctgagtgtgactgtcc

SEQ ID NO: 5355772 - DNA, 25 bp, Homo sapien
gcagaagtggtgtcggtgtctgagt

SEQ ID NO: 5355773 - DNA, 25 bp, Homo sapien
caccgttgaagttaggctgatgagg

SEQ ID NO: 5355774 - DNA, 25 bp, Homo sapien
gactcaaagataaggatacattcag

SEQ ID NO: 5355775 - DNA, 25 bp, Homo sapien
ctgttgcaagtctgttagtgcacac

SEQ ID NO: 5355776 - DNA, 25 bp, Homo sapien
ccagtatttgcccttgctcaaggag

SEQ ID NO: 5355777 - DNA, 25 bp, Homo sapien
aggccagaacaggtccggaaggaca

SEQ ID NO: 5355778 - DNA, 25 bp, Homo sapien
gaagtgctcttgtccggagggcaaa

SEQ ID NO: 5355779 - DNA, 25 bp, Homo sapien
cctagcagtaggaattggcgcgagc

SEQ ID NO: 5355780 - DNA, 25 bp, Homo sapien
tgccatcgctcagtcaagtccagaa

SEQ ID NO: 5355781 - DNA, 25 bp, Homo sapien
tgagtacgtctgcacttcaggaagt

SEQ ID NO: 5355782 - DNA, 25 bp, Homo sapien
attgttcgtggtagtaagccatctg

SEQ ID NO: 5355783 - DNA, 25 bp, Homo sapien
agcaggcacaaagtcctgagcctgg

SEQ ID NO: 5355784 - DNA, 25 bp, Homo sapien
ggtagtaagccatctgagccaaatc

SEQ ID NO: 5355785 - DNA, 25 bp, Homo sapien
tgctctggcgtattgttcgtggtag

SEQ ID NO: 5355786 - DNA, 25 bp, Homo sapien
cattcttcctggtccagctagagcg

SEQ ID NO: 5355787 - DNA, 25 bp, Homo sapien
tatgcacacttatcttctggttcag

SEQ ID NO: 5355788 - DNA, 25 bp, Homo sapien
tcccattgactgatggagaccactt

SEQ ID NO: 5355789 - DNA, 25 bp, Homo sapien
tagagcgtcccgtgcctttccttgg

SEQ ID NO: 5355790 - DNA, 25 bp, Homo sapien
acaggtccagtgaacctagcatcat

SEQ ID NO: 5355791 - DNA, 25 bp, Homo sapien
gttagcgacaccgtccacatgtggg

SEQ ID NO: 5355792 - DNA, 25 bp, Homo sapien
gaacctagcatcatcagtgtccttt

SEQ ID NO: 5355793 - DNA, 25 bp, Homo sapien
aagctgtcagcaatgttagcgacac

SEQ ID NO: 5355794 - DNA, 25 bp, Homo sapien
tgaactgtgatgtgcagagctgcag

SEQ ID NO: 5355795 - DNA, 25 bp, Homo sapien
ctgtgaaggtgaactgtgatgtgca

SEQ ID NO: 5355796 - DNA, 25 bp, Homo sapien
tcaggctgtgaaggtgaactgtgat

SEQ ID NO: 5355797 - DNA, 25 bp, Homo sapien
aaggtgaactgtgatgtgcagagct

SEQ ID NO: 5355798 - DNA, 25 bp, Homo sapien
cttccctccgcagggaggcatggcc

SEQ ID NO: 5355799 - DNA, 25 bp, Homo sapien
ggggcctttcgccttctcagccagg

SEQ ID NO: 5355800 - DNA, 25 bp, Homo sapien
tgtcccttccctccgcagggaggca

SEQ ID NO: 5355801 - DNA, 25 bp, Homo sapien
gtggggcctttcgccttctcagcca

SEQ ID NO: 5355802 - DNA, 25 bp, Homo sapien
tgggcattggtctgctccaacaagg

SEQ ID NO: 5355803 - DNA, 25 bp, Homo sapien
cccacaaggagggtgtaggaatcaa

SEQ ID NO: 5355804 - DNA, 25 bp, Homo sapien
gcctgtttctgcctgccgtggagca

SEQ ID NO: 5355805 - DNA, 25 bp, Homo sapien
taggaatcaagagtttcagctgggc

SEQ ID NO: 5355806 - DNA, 25 bp, Homo sapien
agctgttcttcatgtgtcctctgtc

SEQ ID NO: 5355807 - DNA, 25 bp, Homo sapien
tggacagatgagctctgtggcaagt

SEQ ID NO: 5355808 - DNA, 25 bp, Homo sapien
acggcagcgtgcacagactcgagtc

SEQ ID NO: 5355809 - DNA, 25 bp, Homo sapien
agtggagaagccaatctgatgtgga

SEQ ID NO: 5355810 - DNA, 25 bp, Homo sapien
tcttctggagtgtgcattcgtttga

SEQ ID NO: 5355811 - DNA, 25 bp, Homo sapien
cattcgtttgagcagcttgtttgga

SEQ ID NO: 5355812 - DNA, 25 bp, Homo sapien
gacatggacgttttcataccctctt

SEQ ID NO: 5355813 - DNA, 25 bp, Homo sapien
ccagcatttttgtgagcccttcggg

SEQ ID NO: 5355814 - DNA, 25 bp, Homo sapien
tgtccctcgggagggttcacaccca

SEQ ID NO: 5355815 - DNA, 25 bp, Homo sapien
gccccctttaggtatctggtctcca

SEQ ID NO: 5355816 - DNA, 25 bp, Homo sapien
gaagagctctccttcaccaagcccc

SEQ ID NO: 5355817 - DNA, 25 bp, Homo sapien
gcagtaatggccctgtttgctgtcc

SEQ ID NO: 5355818 - DNA, 25 bp, Homo sapien
tctgcgctcatggtttccacagtgg

SEQ ID NO: 5355819 - DNA, 25 bp, Homo sapien
tggtttccacagtggtttgcctcat

SEQ ID NO: 5355820 - DNA, 25 bp, Homo sapien
cgctcatggtttccacagtggtttg

SEQ ID NO: 5355821 - DNA, 25 bp, Homo sapien
cctctgcgctcatggtttccacagt

SEQ ID NO: 5355822 - DNA, 25 bp, Homo sapien
tgctgtccttgatccagcggcatgg

SEQ ID NO: 5355823 - DNA, 25 bp, Homo sapien
tgtccttgatccagcggcatggcct

SEQ ID NO: 5355824 - DNA, 25 bp, Homo sapien
ctgtccttgatccagcggcatggcc

SEQ ID NO: 5355825 - DNA, 25 bp, Homo sapien
ccttgctgtccttgatccagcggca

SEQ ID NO: 5355826 - DNA, 25 bp, Homo sapien
aggaccaccagcagccgtgctagct

SEQ ID NO: 5355827 - DNA, 25 bp, Homo sapien
agctcttgaggcctaggtcttctgg

SEQ ID NO: 5355828 - DNA, 25 bp, Homo sapien
caggagacagcggttggatgaggga

SEQ ID NO: 5355829 - DNA, 25 bp, Homo sapien
gagccacatggcatggattggaaat

SEQ ID NO: 5355830 - DNA, 25 bp, Homo sapien
tggccaccagagaggaggattcctg

SEQ ID NO: 5355831 - DNA, 25 bp, Homo sapien
tgctcttggtggaggcctcgtcatg

SEQ ID NO: 5355832 - DNA, 25 bp, Homo sapien
tggtggaggcctcgtcatgactgat

SEQ ID NO: 5355833 - DNA, 25 bp, Homo sapien
gattcctgtcgcttgggaccaggac

SEQ ID NO: 5355834 - DNA, 25 bp, Homo sapien
tgagtgcctctccaccagacctgcg

SEQ ID NO: 5355835 - DNA, 25 bp, Homo sapien
gagtgcctctccaccagacctgcgc

SEQ ID NO: 5355836 - DNA, 25 bp, Homo sapien
ctgttagagtcaaggcgaggcaggg

SEQ ID NO: 5355837 - DNA, 25 bp, Homo sapien
ccatgactttctgtggtggtgctat

SEQ ID NO: 5355838 - DNA, 25 bp, Homo sapien
gaaataattgtgtaagtcttcaggc

SEQ ID NO: 5355839 - DNA, 25 bp, Homo sapien
gaatgcagcccgcacccatgacttt

SEQ ID NO: 5355840 - DNA, 25 bp, Homo sapien
tgtagattgttaggacttaactgga

SEQ ID NO: 5355841 - DNA, 25 bp, Homo sapien
tgtgttaggaacatcatcactgact

SEQ ID NO: 5355842 - DNA, 25 bp, Homo sapien
cattctgggcattaagggctgagtc

SEQ ID NO: 5355843 - DNA, 25 bp, Homo sapien
tggttcccctgcactgacattctgg

SEQ ID NO: 5355844 - DNA, 25 bp, Homo sapien
gagtctgggctctttctcctatggg

SEQ ID NO: 5355845 - DNA, 25 bp, Homo sapien
tggcagcctcagaccggagagcact

SEQ ID NO: 5355846 - DNA, 25 bp, Homo sapien
cttgccaggcagaatgtgcccgtct

SEQ ID NO: 5355847 - DNA, 25 bp, Homo sapien
cactgaatcttccactagcctgtct

SEQ ID NO: 5355848 - DNA, 25 bp, Homo sapien
gtgtgtccgtctccgcagccaaact

SEQ ID NO: 5355849 - DNA, 25 bp, Homo sapien
aaacataatttaatcagagcactgt

SEQ ID NO: 5355850 - DNA, 25 bp, Homo sapien
ataatttaatcagagcactgtgaac

SEQ ID NO: 5355851 - DNA, 25 bp, Homo sapien
aacataatttaatcagagcactgtg

SEQ ID NO: 5355852 - DNA, 25 bp, Homo sapien
cataatttaatcagagcactgtgaa

SEQ ID NO: 5355853 - DNA, 25 bp, Homo sapien
tctgacacgtccctctcaaggtgga

SEQ ID NO: 5355854 - DNA, 25 bp, Homo sapien
ttttcctgcatctgacacgtccctc

SEQ ID NO: 5355855 - DNA, 25 bp, Homo sapien
tgcatctgacacgtccctctcaagg

SEQ ID NO: 5355856 - DNA, 25 bp, Homo sapien
tgacacgtccctctcaaggtggagg

SEQ ID NO: 5355857 - DNA, 25 bp, Homo sapien
caggagacttggaggaatgtggacc

SEQ ID NO: 5355858 - DNA, 25 bp, Homo sapien
gtggagcaaggatgtcttcctctga

SEQ ID NO: 5355859 - DNA, 25 bp, Homo sapien
ctgtgtggagcaaggatgtcttcct

SEQ ID NO: 5355860 - DNA, 25 bp, Homo sapien
gaacaggagacttggaggaatgtgg

SEQ ID NO: 5355861 - DNA, 25 bp, Homo sapien
ggcttggtcccttggcacgcataaa

SEQ ID NO: 5355862 - DNA, 25 bp, Homo sapien
aatcgaccactcttggcagccagaa

SEQ ID NO: 5355863 - DNA, 25 bp, Homo sapien
ggctcttggataatcctgtggtctc

SEQ ID NO: 5355864 - DNA, 25 bp, Homo sapien
ggcacgcataaatcgaccactcttg

SEQ ID NO: 5355865 - DNA, 25 bp, Homo sapien
tgaggcttcacttttccacaccttc

SEQ ID NO: 5355866 - DNA, 25 bp, Homo sapien
caaagcagcgatgcatctgaaatgg

SEQ ID NO: 5355867 - DNA, 25 bp, Homo sapien
agatgaggcttcacttttccacacc

SEQ ID NO: 5355868 - DNA, 25 bp, Homo sapien
aaagcagcgatgcatctgaaatggc

SEQ ID NO: 5355869 - DNA, 25 bp, Homo sapien
gggtgtctgatggtactcctctcat

SEQ ID NO: 5355870 - DNA, 25 bp, Homo sapien
aggaatctgtgggccctgacctgga

SEQ ID NO: 5355871 - DNA, 25 bp, Homo sapien
tgatggtactcctctcatggcctca

SEQ ID NO: 5355872 - DNA, 25 bp, Homo sapien
cctcttgggtgtctgatggtactcc

SEQ ID NO: 5355873 - DNA, 25 bp, Homo sapien
tgggctttacccacacagttttcta

SEQ ID NO: 5355874 - DNA, 25 bp, Homo sapien
gcagacctgttgtgcacctcattcg

SEQ ID NO: 5355875 - DNA, 25 bp, Homo sapien
cagttttctagttgcagacctgttg

SEQ ID NO: 5355876 - DNA, 25 bp, Homo sapien
gacctgttgtgcacctcattcggag

SEQ ID NO: 5355877 - DNA, 25 bp, Homo sapien
tagtgaaaaagagggtgacaaaagc

SEQ ID NO: 5355878 - DNA, 25 bp, Homo sapien
aaaagcagagagtctcaaagagggg

SEQ ID NO: 5355879 - DNA, 25 bp, Homo sapien
cagagagtctcaaagaggggacaga

SEQ ID NO: 5355880 - DNA, 25 bp, Homo sapien
tttggagcctgttgccttagctctg

SEQ ID NO: 5355881 - DNA, 25 bp, Homo sapien
gaggtgtcagatacatctgagctcc

SEQ ID NO: 5355882 - DNA, 25 bp, Homo sapien
tctgagctcccaagaatggtggtac

SEQ ID NO: 5355883 - DNA, 25 bp, Homo sapien
ttggaaagaggtgtcagatacatct

SEQ ID NO: 5355884 - DNA, 25 bp, Homo sapien
catctgagctcccaagaatggtggt

SEQ ID NO: 5355885 - DNA, 25 bp, Homo sapien
tccctgtaggatccaagtgcttgtg

SEQ ID NO: 5355886 - DNA, 25 bp, Homo sapien
catggccgcttacttggagaatggc

SEQ ID NO: 5355887 - DNA, 25 bp, Homo sapien
ctcagtcttgtagatggcttgggca

SEQ ID NO: 5355888 - DNA, 25 bp, Homo sapien
gacactttagaagggcctagggtga

SEQ ID NO: 5355889 - DNA, 25 bp, Homo sapien
gtatttgcgacctggtttagtcctg

SEQ ID NO: 5355890 - DNA, 25 bp, Homo sapien
cctgacccctttattgttctcgtgg

SEQ ID NO: 5355891 - DNA, 25 bp, Homo sapien
tattgttctcgtggagatactttcc

SEQ ID NO: 5355892 - DNA, 25 bp, Homo sapien
tgcgacctggtttagtcctgacccc

SEQ ID NO: 5355893 - DNA, 25 bp, Homo sapien
caaccacttccctgaaagcatgctg

SEQ ID NO: 5355894 - DNA, 25 bp, Homo sapien
aaccacttccctgaaagcatgctgc

SEQ ID NO: 5355895 - DNA, 25 bp, Homo sapien
gcaaccacttccctgaaagcatgct

SEQ ID NO: 5355896 - DNA, 25 bp, Homo sapien
tcctggacgcagcgccacgtagggc

SEQ ID NO: 5355897 - DNA, 25 bp, Homo sapien
gagaagctatgaagagtgaccaaga

SEQ ID NO: 5355898 - DNA, 25 bp, Homo sapien
taagttcccatcaagggctatggta

SEQ ID NO: 5355899 - DNA, 25 bp, Homo sapien
gaaatttgccgtatatcctaagggc

SEQ ID NO: 5355900 - DNA, 25 bp, Homo sapien
tgtggacttgttgctcagtgaaaca

SEQ ID NO: 5355901 - DNA, 25 bp, Homo sapien
ggtctggcggagccatataagatgt

SEQ ID NO: 5355902 - DNA, 25 bp, Homo sapien
catataagatgtcagtggcagactc

SEQ ID NO: 5355903 - DNA, 25 bp, Homo sapien
gactcatatctaattccgggggaaa

SEQ ID NO: 5355904 - DNA, 25 bp, Homo sapien
gtccagcagggtgtacttgtgtccg

SEQ ID NO: 5355905 - DNA, 25 bp, Homo sapien
cgagtagctgaagccatagaaccct

SEQ ID NO: 5355906 - DNA, 25 bp, Homo sapien
tcaccaaacacggaacgctgaacaa

SEQ ID NO: 5355907 - DNA, 25 bp, Homo sapien
caacacagccgagtagctgaagcca

SEQ ID NO: 5355908 - DNA, 25 bp, Homo sapien
gaacgctgaacaaccagcaacacag

SEQ ID NO: 5355909 - DNA, 25 bp, Homo sapien
ctggcaatggcaagggggatctaca

SEQ ID NO: 5355910 - DNA, 25 bp, Homo sapien
taacgtggcgctgtagaaggaaatg

SEQ ID NO: 5355911 - DNA, 25 bp, Homo sapien
gtgtgtggtgttaatcttcagtgcc

SEQ ID NO: 5355912 - DNA, 25 bp, Homo sapien
ttcaggcccacgtgccatcctgctg

SEQ ID NO: 5355913 - DNA, 25 bp, Homo sapien
tgcgtttcccatgtggggcctgact

SEQ ID NO: 5355914 - DNA, 25 bp, Homo sapien
gctcgttcactttccctgcagtgct

SEQ ID NO: 5355915 - DNA, 25 bp, Homo sapien
ccagccagagtgatgagctcgttca

SEQ ID NO: 5355916 - DNA, 25 bp, Homo sapien
cctgactttttatgtgtccagccag

SEQ ID NO: 5355917 - DNA, 25 bp, Homo sapien
ttggcctgagaagttcttggtctcc

SEQ ID NO: 5355918 - DNA, 25 bp, Homo sapien
cattgtgagaaactacgtcccttgc

SEQ ID NO: 5355919 - DNA, 25 bp, Homo sapien
tacgtcccttgcttgcattggcagc

SEQ ID NO: 5355920 - DNA, 25 bp, Homo sapien
tgaccctcttctgtggattggaaac

SEQ ID NO: 5355921 - DNA, 25 bp, Homo sapien
caaatagctgggtggaccctgaagg

SEQ ID NO: 5355922 - DNA, 25 bp, Homo sapien
gaccaaatagctgggtggaccctga

SEQ ID NO: 5355923 - DNA, 25 bp, Homo sapien
ttttgaccaaatagctgggtggacc

SEQ ID NO: 5355924 - DNA, 25 bp, Homo sapien
ctgttttgaccaaatagctgggtgg

SEQ ID NO: 5355925 - DNA, 25 bp, Homo sapien
caaggttatgcgtgactgatccttt

SEQ ID NO: 5355926 - DNA, 25 bp, Homo sapien
tagtgtcaaggttatgcgtgactga

SEQ ID NO: 5355927 - DNA, 25 bp, Homo sapien
tgtagtgtcaaggttatgcgtgact

SEQ ID NO: 5355928 - DNA, 25 bp, Homo sapien
tgtcaaggttatgcgtgactgatcc

SEQ ID NO: 5355929 - DNA, 25 bp, Homo sapien
atatagtgtcttagccaggctagca

SEQ ID NO: 5355930 - DNA, 25 bp, Homo sapien
caggagttcccatgactgtccttac

SEQ ID NO: 5355931 - DNA, 25 bp, Homo sapien
agcgtcctggctgctctatatagtg

SEQ ID NO: 5355932 - DNA, 25 bp, Homo sapien
ggctagcaggagttcccatgactgt

SEQ ID NO: 5355933 - DNA, 25 bp, Homo sapien
catgatggcatcgtcactgcatccc

SEQ ID NO: 5355934 - DNA, 25 bp, Homo sapien
tggctgggatgtgggccgcccactt

SEQ ID NO: 5355935 - DNA, 25 bp, Homo sapien
caaggcaaaggacattgctgtggct

SEQ ID NO: 5355936 - DNA, 25 bp, Homo sapien
tgtacggcaaggcaaaggacattgc

SEQ ID NO: 5355937 - DNA, 25 bp, Homo sapien
gggtgaatgcaaaacactgtacggc

SEQ ID NO: 5355938 - DNA, 25 bp, Homo sapien
gacttagctgtagagaaagggcttc

SEQ ID NO: 5355939 - DNA, 25 bp, Homo sapien
ctcacagatggctccagtacaagcg

SEQ ID NO: 5355940 - DNA, 25 bp, Homo sapien
ccaggctcacagatggctccagtac

SEQ ID NO: 5355941 - DNA, 25 bp, Homo sapien
agaaagggcttccaggctcacagat

SEQ ID NO: 5355942 - DNA, 25 bp, Homo sapien
agcctccagtttgctggtcaccttg

SEQ ID NO: 5355943 - DNA, 25 bp, Homo sapien
gagctgttgtggcaagcctgcacac

SEQ ID NO: 5355944 - DNA, 25 bp, Homo sapien
tggtgacagacctgagcggatgctt

SEQ ID NO: 5355945 - DNA, 25 bp, Homo sapien
gacctgagcggatgcttgggagcag

SEQ ID NO: 5355946 - DNA, 25 bp, Homo sapien
caccatcgacgtggcggccgacatg

SEQ ID NO: 5355947 - DNA, 25 bp, Homo sapien
tatgagctcacagcacctgggctcc

SEQ ID NO: 5355948 - DNA, 25 bp, Homo sapien
caatgcagcgggcttccaccatcga

SEQ ID NO: 5355949 - DNA, 25 bp, Homo sapien
gcaccgggctccaggtatgagctca

SEQ ID NO: 5355950 - DNA, 25 bp, Homo sapien
gctgggccaagaagtcgtggcttca

SEQ ID NO: 5355951 - DNA, 25 bp, Homo sapien
tgaggatgcactcctcagcggccac

SEQ ID NO: 5355952 - DNA, 25 bp, Homo sapien
gaagcagtgggaaaaaagacgcctc

SEQ ID NO: 5355953 - DNA, 25 bp, Homo sapien
ggttcatctagcaagagtgtgcggt

SEQ ID NO: 5355954 - DNA, 25 bp, Homo sapien
tcaaaggtccgagggaaggagaaca

SEQ ID NO: 5355955 - DNA, 25 bp, Homo sapien
caaagactgtcagcaacttgaggga

SEQ ID NO: 5355956 - DNA, 25 bp, Homo sapien
ccctggaatggaccactttgtccca

SEQ ID NO: 5355957 - DNA, 25 bp, Homo sapien
gccatgggagtgctcaaaggtccga

SEQ ID NO: 5355958 - DNA, 25 bp, Homo sapien
cagccaaggagccacgaaggtgagc

SEQ ID NO: 5355959 - DNA, 25 bp, Homo sapien
gggagtagggggcgcgtgctgaggc

SEQ ID NO: 5355960 - DNA, 25 bp, Homo sapien
ttccaggagtggttgatttttcctc

SEQ ID NO: 5355961 - DNA, 25 bp, Homo sapien
tggttgatttttcctcagttttgtc

SEQ ID NO: 5355962 - DNA, 25 bp, Homo sapien
tgatttttcctcagttttgtctggg

SEQ ID NO: 5355963 - DNA, 25 bp, Homo sapien
tgtctggggtttcttggtaaggtga

SEQ ID NO: 5355964 - DNA, 25 bp, Homo sapien
tgatggatcttcaggcccaaggggt

SEQ ID NO: 5355965 - DNA, 25 bp, Homo sapien
ctgatggatcttcaggcccaagggg

SEQ ID NO: 5355966 - DNA, 25 bp, Homo sapien
gatggatcttcaggcccaaggggtc

SEQ ID NO: 5355967 - DNA, 25 bp, Homo sapien
aagggcctagagactgccagagtgg

SEQ ID NO: 5355968 - DNA, 25 bp, Homo sapien
gaagggcctagagactgccagagtg

SEQ ID NO: 5355969 - DNA, 25 bp, Homo sapien
gggcctagagactgccagagtggag

SEQ ID NO: 5355970 - DNA, 25 bp, Homo sapien
ggcctagagactgccagagtggagg

SEQ ID NO: 5355971 - DNA, 25 bp, Homo sapien
tcagaacgtgcatgcccggaagaat

SEQ ID NO: 5355972 - DNA, 25 bp, Homo sapien
gggagttcctgggtgcgtcacccac

SEQ ID NO: 5355973 - DNA, 25 bp, Homo sapien
tgctgcggtttctgggtcagaacgt

SEQ ID NO: 5355974 - DNA, 25 bp, Homo sapien
ctcggtctcgcagtcagacgtgcct

SEQ ID NO: 5355975 - DNA, 25 bp, Homo sapien
agtttacttgtggaattccaagcca

SEQ ID NO: 5355976 - DNA, 25 bp, Homo sapien
tacttgtggaattccaagccactgc

SEQ ID NO: 5355977 - DNA, 25 bp, Homo sapien
caaagtttacttgtggaattccaag

SEQ ID NO: 5355978 - DNA, 25 bp, Homo sapien
tctccaaagtttacttgtggaattc

SEQ ID NO: 5355979 - DNA, 25 bp, Homo sapien
cacttcgggttggttattagtcctg

SEQ ID NO: 5355980 - DNA, 25 bp, Homo sapien
tcatgaagccgcactttttgaatgt

SEQ ID NO: 5355981 - DNA, 25 bp, Homo sapien
ctcatggtgcatggccgccacttcg

SEQ ID NO: 5355982 - DNA, 25 bp, Homo sapien
tcctgtgttcaagccgggcttcatg

SEQ ID NO: 5355983 - DNA, 25 bp, Homo sapien
ggttcttagcactgtaccatgttcg

SEQ ID NO: 5355984 - DNA, 25 bp, Homo sapien
ccatgttcgtgtctagtgatgatcc

SEQ ID NO: 5355985 - DNA, 25 bp, Homo sapien
agcaggtgttgtgccatcttcagga

SEQ ID NO: 5355986 - DNA, 25 bp, Homo sapien
gatgatcctggtagtgactggcatg

SEQ ID NO: 5355987 - DNA, 25 bp, Homo sapien
ctgaacgtgataagagggcccaggc

SEQ ID NO: 5355988 - DNA, 25 bp, Homo sapien
cagtgggtcatatttgccgccctct

SEQ ID NO: 5355989 - DNA, 25 bp, Homo sapien
ttccagggagacctagagacctggc

SEQ ID NO: 5355990 - DNA, 25 bp, Homo sapien
ggacagcggactgcaaaagagtgtc

SEQ ID NO: 5355991 - DNA, 25 bp, Homo sapien
ttcaccagctgcaagagcgctaagg

SEQ ID NO: 5355992 - DNA, 25 bp, Homo sapien
taagcacggcccatgtttctgttgg

SEQ ID NO: 5355993 - DNA, 25 bp, Homo sapien
caaaagggctggtgtctgtaagtga

SEQ ID NO: 5355994 - DNA, 25 bp, Homo sapien
gctaaggaccgtacagccatgtcgg

SEQ ID NO: 5355995 - DNA, 25 bp, Homo sapien
atggccccgcaggtcttcacccagg

SEQ ID NO: 5355996 - DNA, 25 bp, Homo sapien
atggcatggccccgcaggtcttcac

SEQ ID NO: 5355997 - DNA, 25 bp, Homo sapien
gcaacacgagcatggcatggccccg

SEQ ID NO: 5355998 - DNA, 25 bp, Homo sapien
ctgcaacacgagcatggcatggccc

SEQ ID NO: 5355999 - DNA, 25 bp, Homo sapien
tgcaggttgcatcggtctgctctgc

SEQ ID NO: 5356000 - DNA, 25 bp, Homo sapien
tctgctgttgtcgtcgtgtatatat

SEQ ID NO: 5356001 - DNA, 25 bp, Homo sapien
tagggccagtgctttctcagcaggc

SEQ ID NO: 5356002 - DNA, 25 bp, Homo sapien
tttccaaacttgagtgaagcaacgc

SEQ ID NO: 5356003 - DNA, 25 bp, Homo sapien
tgttttcgatacgatcccatgaggg

SEQ ID NO: 5356004 - DNA, 25 bp, Homo sapien
gggaagacatgtacctgttcaggcg

SEQ ID NO: 5356005 - DNA, 25 bp, Homo sapien
tgagccaacccttgcaggtctgagg

SEQ ID NO: 5356006 - DNA, 25 bp, Homo sapien
tgggtcacaagctagcagctctggc

SEQ ID NO: 5356007 - DNA, 25 bp, Homo sapien
gaggacattttggttcctggctttc

SEQ ID NO: 5356008 - DNA, 25 bp, Homo sapien
caccctgcccgtgggtgcaggagga

SEQ ID NO: 5356009 - DNA, 25 bp, Homo sapien
ccccagaaggcagcataaacttcca

SEQ ID NO: 5356010 - DNA, 25 bp, Homo sapien
gcagcataaacttccaccctgcccg

SEQ ID NO: 5356011 - DNA, 25 bp, Homo sapien
cttatcagacggaagagtagagcat

SEQ ID NO: 5356012 - DNA, 25 bp, Homo sapien
ggaattgtgccctctcagaatggca

SEQ ID NO: 5356013 - DNA, 25 bp, Homo sapien
ctcgaagtaggccttcctgagtagc

SEQ ID NO: 5356014 - DNA, 25 bp, Homo sapien
tccgcagcttgggaattgtgccctc

SEQ ID NO: 5356015 - DNA, 25 bp, Homo sapien
gtggcagtgggtcggtgctccgcag

SEQ ID NO: 5356016 - DNA, 25 bp, Homo sapien
tgtaaccttaacacccatgtagggc

SEQ ID NO: 5356017 - DNA, 25 bp, Homo sapien
gtggcattccctgcagcgcgatgaa

SEQ ID NO: 5356018 - DNA, 25 bp, Homo sapien
cagcgcgatgaagtgtaaccttaac

SEQ ID NO: 5356019 - DNA, 25 bp, Homo sapien
catgtagggcagagggtaattgtcc

SEQ ID NO: 5356020 - DNA, 25 bp, Homo sapien
cagcagcttctctgttttccagttc

SEQ ID NO: 5356021 - DNA, 25 bp, Homo sapien
gcagcttctctgttttccagttcat

SEQ ID NO: 5356022 - DNA, 25 bp, Homo sapien
cctgtgcaggacggtcagcagcttc

SEQ ID NO: 5356023 - DNA, 25 bp, Homo sapien
tgtgcaggacggtcagcagcttctc

SEQ ID NO: 5356024 - DNA, 25 bp, Homo sapien
taattgccttgttcagaaacctgcc

SEQ ID NO: 5356025 - DNA, 25 bp, Homo sapien
ttttaggaacgcacaactcacagcc

SEQ ID NO: 5356026 - DNA, 25 bp, Homo sapien
tttgttgtaaatgagtccggcaccc

SEQ ID NO: 5356027 - DNA, 25 bp, Homo sapien
cagacagtgcatgaacccattggat

SEQ ID NO: 5356028 - DNA, 25 bp, Homo sapien
ggaaagaagctagcactatctcatg

SEQ ID NO: 5356029 - DNA, 25 bp, Homo sapien
aatagtgtggatagtaacaactgcc

SEQ ID NO: 5356030 - DNA, 25 bp, Homo sapien
ctcatgcagtgagaataacgggttc

SEQ ID NO: 5356031 - DNA, 25 bp, Homo sapien
tggatcctaggcataccaataaatg

SEQ ID NO: 5356032 - DNA, 25 bp, Homo sapien
aagattgataaatcaacgggagata

SEQ ID NO: 5356033 - DNA, 25 bp, Homo sapien
tctgctgctccctcaaagctgagtt

SEQ ID NO: 5356034 - DNA, 25 bp, Homo sapien
cactttaatgaaggacgaagctctc

SEQ ID NO: 5356035 - DNA, 25 bp, Homo sapien
gctgctgctggtatcagattctcct

SEQ ID NO: 5356036 - DNA, 25 bp, Homo sapien
ttttgctctatgtaatgggtcacca

SEQ ID NO: 5356037 - DNA, 25 bp, Homo sapien
taagagcacggactttgggagcaca

SEQ ID NO: 5356038 - DNA, 25 bp, Homo sapien
tagttctatgtgaccagcctgtgac

SEQ ID NO: 5356039 - DNA, 25 bp, Homo sapien
caacagcgttgaggttaagagcacg

SEQ ID NO: 5356040 - DNA, 25 bp, Homo sapien
aacatgggaccatgggagacttcca

SEQ ID NO: 5356041 - DNA, 25 bp, Homo sapien
tgttgccctccaggctacgacaggg

SEQ ID NO: 5356042 - DNA, 25 bp, Homo sapien
tggctccaaagaggatgcctgtgtt

SEQ ID NO: 5356043 - DNA, 25 bp, Homo sapien
tacgacagggttcccagggtgtagc

SEQ ID NO: 5356044 - DNA, 25 bp, Homo sapien
tctcctggtggtcctacgtctctga

SEQ ID NO: 5356045 - DNA, 25 bp, Homo sapien
cacgtccctgctactacataacaag

SEQ ID NO: 5356046 - DNA, 25 bp, Homo sapien
tgagtgatgaaccttacttcttcca

SEQ ID NO: 5356047 - DNA, 25 bp, Homo sapien
tgtattaaataggttgacttctgag

SEQ ID NO: 5356048 - DNA, 25 bp, Homo sapien
cctgctactacataacaaggtttat

SEQ ID NO: 5356049 - DNA, 25 bp, Homo sapien
caaagctggaggtcgcatacttcct

SEQ ID NO: 5356050 - DNA, 25 bp, Homo sapien
ggaaagacatcttgcgcacatggat

SEQ ID NO: 5356051 - DNA, 25 bp, Homo sapien
tttgtattcctaagattgtggccag

SEQ ID NO: 5356052 - DNA, 25 bp, Homo sapien
tagagctgtagtttgcacgatagaa

SEQ ID NO: 5356053 - DNA, 25 bp, Homo sapien
caaaatgacttgagacatctctcca

SEQ ID NO: 5356054 - DNA, 25 bp, Homo sapien
cagttacccaaaggcacaagcaacc

SEQ ID NO: 5356055 - DNA, 25 bp, Homo sapien
ctgtggaaaacagtacggctgatcc

SEQ ID NO: 5356056 - DNA, 25 bp, Homo sapien
tggccaacaagtacatgaaattatg

SEQ ID NO: 5356057 - DNA, 25 bp, Homo sapien
actcttacagaagcatatgtccatg

SEQ ID NO: 5356058 - DNA, 25 bp, Homo sapien
cgaactgaaaactggactaaggact

SEQ ID NO: 5356059 - DNA, 25 bp, Homo sapien
tgtgtaaacaaaccagtctgccaac

SEQ ID NO: 5356060 - DNA, 25 bp, Homo sapien
caaattgggagaatctgtgaatcac

SEQ ID NO: 5356061 - DNA, 25 bp, Homo sapien
caacaaagatgacagggctttataa

SEQ ID NO: 5356062 - DNA, 25 bp, Homo sapien
tcaacaaagatgacagggctttata

SEQ ID NO: 5356063 - DNA, 25 bp, Homo sapien
taaagctattactcaacaaagatga

SEQ ID NO: 5356064 - DNA, 25 bp, Homo sapien
tcaataaagctattactcaacaaag

SEQ ID NO: 5356065 - DNA, 25 bp, Homo sapien
cagggactggtccaatgcaagggca

SEQ ID NO: 5356066 - DNA, 25 bp, Homo sapien
tgaaccacggaggtataaagacgct

SEQ ID NO: 5356067 - DNA, 25 bp, Homo sapien
ccattatgtagagcgggccagactg

SEQ ID NO: 5356068 - DNA, 25 bp, Homo sapien
tgtggacttggagctgacactggcc

SEQ ID NO: 5356069 - DNA, 25 bp, Homo sapien
tatacatattcgaaaacaactcatc

SEQ ID NO: 5356070 - DNA, 25 bp, Homo sapien
actttatacatattcgaaaacaact

SEQ ID NO: 5356071 - DNA, 25 bp, Homo sapien
catattcgaaaacaactcatccact

SEQ ID NO: 5356072 - DNA, 25 bp, Homo sapien
ttgtgttaatgaccagggaaaatat

SEQ ID NO: 5356073 - DNA, 25 bp, Homo sapien
cctctgaatcttgccctgttatcca

SEQ ID NO: 5356074 - DNA, 25 bp, Homo sapien
ctctgaatcttgccctgttatccaa

SEQ ID NO: 5356075 - DNA, 25 bp, Homo sapien
cattcaagggatctaggtggtacgt

SEQ ID NO: 5356076 - DNA, 25 bp, Homo sapien
aggaagcaggccacacaggtggtca

SEQ ID NO: 5356077 - DNA, 25 bp, Homo sapien
gcatagtcaatgtcactccccaaaa

SEQ ID NO: 5356078 - DNA, 25 bp, Homo sapien
gcagtcatttcttaagggtagtagg

SEQ ID NO: 5356079 - DNA, 25 bp, Homo sapien
cttttacactcaaaaaatgcgtact

SEQ ID NO: 5356080 - DNA, 25 bp, Homo sapien
tgcgtacttcaaagagttgcagtat

SEQ ID NO: 5356081 - DNA, 25 bp, Homo sapien
aaatgcgtacttcaaagagttgcag

SEQ ID NO: 5356082 - DNA, 25 bp, Homo sapien
cactcaaaaaatgcgtacttcaaag

SEQ ID NO: 5356083 - DNA, 25 bp, Homo sapien
caagcagattttgactctacagccg

SEQ ID NO: 5356084 - DNA, 25 bp, Homo sapien
gaacctttatgttgcaagtgccagg

SEQ ID NO: 5356085 - DNA, 25 bp, Homo sapien
gaaatgtgtgaactgggtaccctaa

SEQ ID NO: 5356086 - DNA, 25 bp, Homo sapien
tattaacaaggcaggctggaatact

SEQ ID NO: 5356087 - DNA, 25 bp, Homo sapien
tgggttggtccttaaagaggcttgc

SEQ ID NO: 5356088 - DNA, 25 bp, Homo sapien
cactccataaggttgccgggcctga

SEQ ID NO: 5356089 - DNA, 25 bp, Homo sapien
tagacgcccttgcatctagctgtgg

SEQ ID NO: 5356090 - DNA, 25 bp, Homo sapien
tgtggaagcaaaccagtcttggacc

SEQ ID NO: 5356091 - DNA, 25 bp, Homo sapien
gggcagcagtggaatctgtactttt

SEQ ID NO: 5356092 - DNA, 25 bp, Homo sapien
gagggcagcagtggaatctgtactt

SEQ ID NO: 5356093 - DNA, 25 bp, Homo sapien
cagcagtggaatctgtacttttaaa

SEQ ID NO: 5356094 - DNA, 25 bp, Homo sapien
ggcagcagtggaatctgtactttta

SEQ ID NO: 5356095 - DNA, 25 bp, Homo sapien
tgaggccctctaactccttgacagt

SEQ ID NO: 5356096 - DNA, 25 bp, Homo sapien
gataccctatgatgagtgaagttcc

SEQ ID NO: 5356097 - DNA, 25 bp, Homo sapien
gttagtggagacgaagataccctat

SEQ ID NO: 5356098 - DNA, 25 bp, Homo sapien
cccaaagcagcacctagaactaaat

SEQ ID NO: 5356099 - DNA, 25 bp, Homo sapien
tcaatggcgggaaaagcaaagtctg

SEQ ID NO: 5356100 - DNA, 25 bp, Homo sapien
caaactgagcactggtaaggccaca

SEQ ID NO: 5356101 - DNA, 25 bp, Homo sapien
gcatcacgttttctggctgaccaaa

SEQ ID NO: 5356102 - DNA, 25 bp, Homo sapien
gagcctggcgctccgtacatgtttg

SEQ ID NO: 5356103 - DNA, 25 bp, Homo sapien
gagctggctgaacggcagcaccagt

SEQ ID NO: 5356104 - DNA, 25 bp, Homo sapien
tataaggaagttgggcgagataatc

SEQ ID NO: 5356105 - DNA, 25 bp, Homo sapien
gcaggaatttagacccttagatgtc

SEQ ID NO: 5356106 - DNA, 25 bp, Homo sapien
gttatcaccagtgtcaggtaccatg

SEQ ID NO: 5356107 - DNA, 25 bp, Homo sapien
caggggtcgtcaccaccgggagcgc

SEQ ID NO: 5356108 - DNA, 25 bp, Homo sapien
ggcttgtcctcataatacttaggca

SEQ ID NO: 5356109 - DNA, 25 bp, Homo sapien
tggaccacacagtccgactgcagca

SEQ ID NO: 5356110 - DNA, 25 bp, Homo sapien
acagtccgactgcagcagacacgcg

SEQ ID NO: 5356111 - DNA, 25 bp, Homo sapien
cgccctgcggcttgtcctcataata

SEQ ID NO: 5356112 - DNA, 25 bp, Homo sapien
cctccgatgcggacgcgactttctc

SEQ ID NO: 5356113 - DNA, 25 bp, Homo sapien
acggcgcttcccctccgatgcggac

SEQ ID NO: 5356114 - DNA, 25 bp, Homo sapien
tttctcccaccgcaacacttgcaac

SEQ ID NO: 5356115 - DNA, 25 bp, Homo sapien
tcgggagcgagcgaggccccagtct

SEQ ID NO: 5356116 - DNA, 25 bp, Homo sapien
ggactttgaatttgctgcctggcag

SEQ ID NO: 5356117 - DNA, 25 bp, Homo sapien
gagaaggcttttccgctttcggcaa

SEQ ID NO: 5356118 - DNA, 25 bp, Homo sapien
gcctggcagatgctctacctgttca

SEQ ID NO: 5356119 - DNA, 25 bp, Homo sapien
ggccagagatgaccctgctttcttg

SEQ ID NO: 5356120 - DNA, 25 bp, Homo sapien
tctggatgatagcatggttttctgc

SEQ ID NO: 5356121 - DNA, 25 bp, Homo sapien
tctgcatttgtcaatagagaccact

SEQ ID NO: 5356122 - DNA, 25 bp, Homo sapien
caatttacttgtgagaggcaggtac

SEQ ID NO: 5356123 - DNA, 25 bp, Homo sapien
gagaccacttcttgatattcattgt

SEQ ID NO: 5356124 - DNA, 25 bp, Homo sapien
aatggcctagctggtatataacaga

SEQ ID NO: 5356125 - DNA, 25 bp, Homo sapien
tacataggtctatgaactgaagttc

SEQ ID NO: 5356126 - DNA, 25 bp, Homo sapien
gttaaaccatactggttatctccag

SEQ ID NO: 5356127 - DNA, 25 bp, Homo sapien
aagcaacttacccatggtcatgcag

SEQ ID NO: 5356128 - DNA, 25 bp, Homo sapien
aatcacagaagatcgggcccaacat

SEQ ID NO: 5356129 - DNA, 25 bp, Homo sapien
ctcaggacatgtttgcagatttact

SEQ ID NO: 5356130 - DNA, 25 bp, Homo sapien
caacatttattgtcctcaggacatg

SEQ ID NO: 5356131 - DNA, 25 bp, Homo sapien
ctgttaaatcctgttgtcagttcat

SEQ ID NO: 5356132 - DNA, 25 bp, Homo sapien
acagatggctctgactatgcctggc

SEQ ID NO: 5356133 - DNA, 25 bp, Homo sapien
cccttggctggtttgtcagggaaca

SEQ ID NO: 5356134 - DNA, 25 bp, Homo sapien
tactgtagatgattagggcctaact

SEQ ID NO: 5356135 - DNA, 25 bp, Homo sapien
tatttgaacactcctggtaacgacc

SEQ ID NO: 5356136 - DNA, 25 bp, Homo sapien
gattcaatcgtaactgtgtcaacag

SEQ ID NO: 5356137 - DNA, 25 bp, Homo sapien
gattctgctctacgggctttccctg

SEQ ID NO: 5356138 - DNA, 25 bp, Homo sapien
ctggcactgggatggaacttcaccc

SEQ ID NO: 5356139 - DNA, 25 bp, Homo sapien
cactgtggtcaggtacattccttaa

SEQ ID NO: 5356140 - DNA, 25 bp, Homo sapien
tttattagaaggaatcttgaattca

SEQ ID NO: 5356141 - DNA, 25 bp, Homo sapien
tatttttattagaaggaatcttgaa

SEQ ID NO: 5356142 - DNA, 25 bp, Homo sapien
cctatttttattagaaggaatcttg

SEQ ID NO: 5356143 - DNA, 25 bp, Homo sapien
ttttattagaaggaatcttgaattc

SEQ ID NO: 5356144 - DNA, 25 bp, Homo sapien
tacacatgaacggtcgtggcacaga

SEQ ID NO: 5356145 - DNA, 25 bp, Homo sapien
tgatctagttagtgcccaaaccggg

SEQ ID NO: 5356146 - DNA, 25 bp, Homo sapien
tacagtactgtcgatagcagccatt

SEQ ID NO: 5356147 - DNA, 25 bp, Homo sapien
aaaaatctggtacaacctggcaagg

SEQ ID NO: 5356148 - DNA, 25 bp, Homo sapien
taccttaaaacagcaatggtgcctg

SEQ ID NO: 5356149 - DNA, 25 bp, Homo sapien
tcccgtggctgtaggactgcagttc

SEQ ID NO: 5356150 - DNA, 25 bp, Homo sapien
caaggctggattcaaagtgttggcc

SEQ ID NO: 5356151 - DNA, 25 bp, Homo sapien
caagcaggcttaagtgagttctcgg

SEQ ID NO: 5356152 - DNA, 25 bp, Homo sapien
gacagcactgttgggagacaacctc

SEQ ID NO: 5356153 - DNA, 25 bp, Homo sapien
tagaatcctagaaatgggtcctcag

SEQ ID NO: 5356154 - DNA, 25 bp, Homo sapien
ggtaaaatgattcggcgccctctca

SEQ ID NO: 5356155 - DNA, 25 bp, Homo sapien
tgactacacagtatggtacagcgcg

SEQ ID NO: 5356156 - DNA, 25 bp, Homo sapien
tgccctcacactgctcttaagggcg

SEQ ID NO: 5356157 - DNA, 25 bp, Homo sapien
cctcacactgctcttaagggcgacc

SEQ ID NO: 5356158 - DNA, 25 bp, Homo sapien
gccctcacactgctcttaagggcga

SEQ ID NO: 5356159 - DNA, 25 bp, Homo sapien
ctcacactgctcttaagggcgacca

SEQ ID NO: 5356160 - DNA, 25 bp, Homo sapien
ggctgcttctactagttgagtgcag

SEQ ID NO: 5356161 - DNA, 25 bp, Homo sapien
tggctgcttctactagttgagtgca

SEQ ID NO: 5356162 - DNA, 25 bp, Homo sapien
ctgcttctactagttgagtgcagaa

SEQ ID NO: 5356163 - DNA, 25 bp, Homo sapien
gctgcttctactagttgagtgcaga

SEQ ID NO: 5356164 - DNA, 25 bp, Homo sapien
tatgcaagagtatggcaacgacagc

SEQ ID NO: 5356165 - DNA, 25 bp, Homo sapien
cagtatgagctgcaggctcgcctca

SEQ ID NO: 5356166 - DNA, 25 bp, Homo sapien
ctgagcacccaccataggagaggac

SEQ ID NO: 5356167 - DNA, 25 bp, Homo sapien
gagtaactaacagtgagaggccctg

SEQ ID NO: 5356168 - DNA, 25 bp, Homo sapien
cacagcgcctggtgataattcatca

SEQ ID NO: 5356169 - DNA, 25 bp, Homo sapien
taaatacagtctcttggacacggga

SEQ ID NO: 5356170 - DNA, 25 bp, Homo sapien
gatcactgattgctgagaccggtaa

SEQ ID NO: 5356171 - DNA, 25 bp, Homo sapien
ggtaactagatgaagctcctccagg

SEQ ID NO: 5356172 - DNA, 25 bp, Homo sapien
cacaggaaaaaatgtgttggtttct

SEQ ID NO: 5356173 - DNA, 25 bp, Homo sapien
catgcttaactatctttaattaaca

SEQ ID NO: 5356174 - DNA, 25 bp, Homo sapien
aaaaatgtgttggtttctcagatga

SEQ ID NO: 5356175 - DNA, 25 bp, Homo sapien
ggaaaaaatgtgttggtttctcaga

SEQ ID NO: 5356176 - DNA, 25 bp, Homo sapien
tcagttggtggcttttttaatatga

SEQ ID NO: 5356177 - DNA, 25 bp, Homo sapien
cagttggtggcttttttaatatgaa

SEQ ID NO: 5356178 - DNA, 25 bp, Homo sapien
agttggtggcttttttaatatgaat

SEQ ID NO: 5356179 - DNA, 25 bp, Homo sapien
tttcactgatttgatatatgcttac

SEQ ID NO: 5356180 - DNA, 25 bp, Homo sapien
ctaagttgtttcactgatttgatat

SEQ ID NO: 5356181 - DNA, 25 bp, Homo sapien
taagttgtttcactgatttgatata

SEQ ID NO: 5356182 - DNA, 25 bp, Homo sapien
gttgtttcactgatttgatatatgc

SEQ ID NO: 5356183 - DNA, 25 bp, Homo sapien
ttaagaatggcccaaacagcagaat

SEQ ID NO: 5356184 - DNA, 25 bp, Homo sapien
tgaataactgaaagtcgaaaggctg

SEQ ID NO: 5356185 - DNA, 25 bp, Homo sapien
agtcgaaaggctgaaatgggattga

SEQ ID NO: 5356186 - DNA, 25 bp, Homo sapien
taagaatggcccaaacagcagaatt

SEQ ID NO: 5356187 - DNA, 25 bp, Homo sapien
ccttctgcaacaccattctcaaatt

SEQ ID NO: 5356188 - DNA, 25 bp, Homo sapien
cttctgcaacaccattctcaaattt

SEQ ID NO: 5356189 - DNA, 25 bp, Homo sapien
tctgcaacaccattctcaaattttc

SEQ ID NO: 5356190 - DNA, 25 bp, Homo sapien
tccttctgcaacaccattctcaaat

SEQ ID NO: 5356191 - DNA, 25 bp, Homo sapien
ggctatgtcagtggacatctcaaca

SEQ ID NO: 5356192 - DNA, 25 bp, Homo sapien
tatgtggctgccaggtataaggcta

SEQ ID NO: 5356193 - DNA, 25 bp, Homo sapien
tgtcagtggacatctcaacacagat

SEQ ID NO: 5356194 - DNA, 25 bp, Homo sapien
ataaggctatgtcagtggacatctc

SEQ ID NO: 5356195 - DNA, 25 bp, Homo sapien
ctgaaatagccatcttctaatcgtt

SEQ ID NO: 5356196 - DNA, 25 bp, Homo sapien
aatagccatcttctaatcgtttgtc

SEQ ID NO: 5356197 - DNA, 25 bp, Homo sapien
catcttctaatcgtttgtctttggt

SEQ ID NO: 5356198 - DNA, 25 bp, Homo sapien
gccatcttctaatcgtttgtctttg

SEQ ID NO: 5356199 - DNA, 25 bp, Homo sapien
gcaaaacttccacagttgtgtttag

SEQ ID NO: 5356200 - DNA, 25 bp, Homo sapien
atctccaggatgttcttggttgccg

SEQ ID NO: 5356201 - DNA, 25 bp, Homo sapien
cacagttgtgtttagcagaatatct

SEQ ID NO: 5356202 - DNA, 25 bp, Homo sapien
cagaatatctccaggatgttcttgg

SEQ ID NO: 5356203 - DNA, 25 bp, Homo sapien
caacattttgggccccactgtgtcc

SEQ ID NO: 5356204 - DNA, 25 bp, Homo sapien
gtccccacatctgtcaggcacacac

SEQ ID NO: 5356205 - DNA, 25 bp, Homo sapien
tttacatgtaatttaaagcccaaca

SEQ ID NO: 5356206 - DNA, 25 bp, Homo sapien
tataaatcacattacgaataagaga

SEQ ID NO: 5356207 - DNA, 25 bp, Homo sapien
tgtaagttttctccagcgtatgccc

SEQ ID NO: 5356208 - DNA, 25 bp, Homo sapien
tatcggtgtgatagcccagaagaaa

SEQ ID NO: 5356209 - DNA, 25 bp, Homo sapien
tcaaggaagtagatacctccgcagg

SEQ ID NO: 5356210 - DNA, 25 bp, Homo sapien
gcgtatgcccttggtagaccttcaa

SEQ ID NO: 5356211 - DNA, 25 bp, Homo sapien
aaggtctgaagcgaattcgcagatt

SEQ ID NO: 5356212 - DNA, 25 bp, Homo sapien
tttcctgatagtgatgagtgcagac

SEQ ID NO: 5356213 - DNA, 25 bp, Homo sapien
gaagcgaattcgcagatttgctttc

SEQ ID NO: 5356214 - DNA, 25 bp, Homo sapien
cagaccaacatgttggaaaagggaa

SEQ ID NO: 5356215 - DNA, 25 bp, Homo sapien
gaaatcgtccaaaagttcatgtacc

SEQ ID NO: 5356216 - DNA, 25 bp, Homo sapien
aaattgcacaggacgaatggaatgc

SEQ ID NO: 5356217 - DNA, 25 bp, Homo sapien
aattgtcggaaaacagatactctgc

SEQ ID NO: 5356218 - DNA, 25 bp, Homo sapien
aaatgtgcataaggactgagatctc

SEQ ID NO: 5356219 - DNA, 25 bp, Homo sapien
atctttttcagggttgcagactttc

SEQ ID NO: 5356220 - DNA, 25 bp, Homo sapien
tccaggagccaatcaatgggtttct

SEQ ID NO: 5356221 - DNA, 25 bp, Homo sapien
atcagagtaagatccggcgcttgaa

SEQ ID NO: 5356222 - DNA, 25 bp, Homo sapien
tatgaattctacaatcagagtaaga

SEQ ID NO: 5356223 - DNA, 25 bp, Homo sapien
ctgaaaagatattcccagtcaatag

SEQ ID NO: 5356224 - DNA, 25 bp, Homo sapien
acctcccccgttcaagcaattatct

SEQ ID NO: 5356225 - DNA, 25 bp, Homo sapien
ccccaaggctggaatgcaggggcgc

SEQ ID NO: 5356226 - DNA, 25 bp, Homo sapien
gatctcagctcactacaacctccac

SEQ ID NO: 5356227 - DNA, 25 bp, Homo sapien
tcccccgttcaagcaattatcttgc

SEQ ID NO: 5356228 - DNA, 25 bp, Homo sapien
tctagaatcatccattcctcagaag

SEQ ID NO: 5356229 - DNA, 25 bp, Homo sapien
tcctcagaagaaagttgaagtgcaa

SEQ ID NO: 5356230 - DNA, 25 bp, Homo sapien
cccagctgggaaaactctagaatca

SEQ ID NO: 5356231 - DNA, 25 bp, Homo sapien
catccattcctcagaagaaagttga

SEQ ID NO: 5356232 - DNA, 25 bp, Homo sapien
taataaaagggtcagtcaaatctct

SEQ ID NO: 5356233 - DNA, 25 bp, Homo sapien
gaggtctcagatatatgaagtcaac

SEQ ID NO: 5356234 - DNA, 25 bp, Homo sapien
cactataatcaaacggacccgacag

SEQ ID NO: 5356235 - DNA, 25 bp, Homo sapien
gaccacatgttaggccccataatat

SEQ ID NO: 5356236 - DNA, 25 bp, Homo sapien
gatctcagagggtttgcactttcaa

SEQ ID NO: 5356237 - DNA, 25 bp, Homo sapien
tgaaaacatacccttgataacactt

SEQ ID NO: 5356238 - DNA, 25 bp, Homo sapien
gagcccacatgctcagttaccatgg

SEQ ID NO: 5356239 - DNA, 25 bp, Homo sapien
ctggcttccctactcagtggagaaa

SEQ ID NO: 5356240 - DNA, 25 bp, Homo sapien
aaacagtaatctaggttttgctttg

SEQ ID NO: 5356241 - DNA, 25 bp, Homo sapien
atgcccttttcttgagcatacatca

SEQ ID NO: 5356242 - DNA, 25 bp, Homo sapien
tatgcccttttcttgagcatacatc

SEQ ID NO: 5356243 - DNA, 25 bp, Homo sapien
aacagtaatctaggttttgctttgt

SEQ ID NO: 5356244 - DNA, 25 bp, Homo sapien
ctttaggtttgtcaagtcaggataa

SEQ ID NO: 5356245 - DNA, 25 bp, Homo sapien
ttggagtctccaaatgtctccttta

SEQ ID NO: 5356246 - DNA, 25 bp, Homo sapien
ggtgatatgacttccaccaagccag

SEQ ID NO: 5356247 - DNA, 25 bp, Homo sapien
caggataatagctttcagggggtga

SEQ ID NO: 5356248 - DNA, 25 bp, Homo sapien
tctccaggttggctacaacaccatg

SEQ ID NO: 5356249 - DNA, 25 bp, Homo sapien
ggttggctacaacaccatgtacata

SEQ ID NO: 5356250 - DNA, 25 bp, Homo sapien
tccaggttggctacaacaccatgta

SEQ ID NO: 5356251 - DNA, 25 bp, Homo sapien
caggttggctacaacaccatgtaca

SEQ ID NO: 5356252 - DNA, 25 bp, Homo sapien
tctatgaggtaagatttaacttctc

SEQ ID NO: 5356253 - DNA, 25 bp, Homo sapien
tactataacacagtccaacttctct

SEQ ID NO: 5356254 - DNA, 25 bp, Homo sapien
tctcctatgaagactactataacac

SEQ ID NO: 5356255 - DNA, 25 bp, Homo sapien
acttctcttcaggatacaggttatc

SEQ ID NO: 5356256 - DNA, 25 bp, Homo sapien
tcctgttcttccgttgccaatctgt

SEQ ID NO: 5356257 - DNA, 25 bp, Homo sapien
tgttcttccgttgccaatctgtaca

SEQ ID NO: 5356258 - DNA, 25 bp, Homo sapien
ttcttccgttgccaatctgtacagc

SEQ ID NO: 5356259 - DNA, 25 bp, Homo sapien
ttccgttgccaatctgtacagcagg

SEQ ID NO: 5356260 - DNA, 25 bp, Homo sapien
tacaagaattaccttacagaagttg

SEQ ID NO: 5356261 - DNA, 25 bp, Homo sapien
acaagaattaccttacagaagttgc

SEQ ID NO: 5356262 - DNA, 25 bp, Homo sapien
tatacaagaattaccttacagaagt

SEQ ID NO: 5356263 - DNA, 25 bp, Homo sapien
atacaagaattaccttacagaagtt

SEQ ID NO: 5356264 - DNA, 25 bp, Homo sapien
tgcccctttgcaaatctaatctttt

SEQ ID NO: 5356265 - DNA, 25 bp, Homo sapien
tgaaaacttattcaacgcatcctta

SEQ ID NO: 5356266 - DNA, 25 bp, Homo sapien
gaaaacttattcaacgcatccttac

SEQ ID NO: 5356267 - DNA, 25 bp, Homo sapien
ctgaaaacttattcaacgcatcctt

SEQ ID NO: 5356268 - DNA, 25 bp, Homo sapien
gcaaggaattctcgttgataagcaa

SEQ ID NO: 5356269 - DNA, 25 bp, Homo sapien
tttaattcagaagagcgctgtgaga

SEQ ID NO: 5356270 - DNA, 25 bp, Homo sapien
tgtttctgctcctacacgcttgaac

SEQ ID NO: 5356271 - DNA, 25 bp, Homo sapien
tgtgttcagctattcgaagacgttc

SEQ ID NO: 5356272 - DNA, 25 bp, Homo sapien
tcaatggaactgtaaaattacaaag

SEQ ID NO: 5356273 - DNA, 25 bp, Homo sapien
taaacaatataatctcaatggaact

SEQ ID NO: 5356274 - DNA, 25 bp, Homo sapien
gcaaaaccaaaacagttatagtata

SEQ ID NO: 5356275 - DNA, 25 bp, Homo sapien
aaccaaaacagttatagtatatgtc

SEQ ID NO: 5356276 - DNA, 25 bp, Homo sapien
atccgtcctttgtttctaactccat

SEQ ID NO: 5356277 - DNA, 25 bp, Homo sapien
tgcaggcccagaccaaaatcacagc

SEQ ID NO: 5356278 - DNA, 25 bp, Homo sapien
ttcagtatttgtgaaggctatggca

SEQ ID NO: 5356279 - DNA, 25 bp, Homo sapien
aaggctatggcagtctacagtggtg

SEQ ID NO: 5356280 - DNA, 25 bp, Homo sapien
tataaactgagtatatccttagttc

SEQ ID NO: 5356281 - DNA, 25 bp, Homo sapien
agccactacccctagccaggttaat

SEQ ID NO: 5356282 - DNA, 25 bp, Homo sapien
tataaacaggctaggcaacaaagcg

SEQ ID NO: 5356283 - DNA, 25 bp, Homo sapien
tctgatgtggttctcaatgtaaaag

SEQ ID NO: 5356284 - DNA, 25 bp, Homo sapien
atctgtggtcccacatacttgcggg

SEQ ID NO: 5356285 - DNA, 25 bp, Homo sapien
gagacattccttttctcgagttttc

SEQ ID NO: 5356286 - DNA, 25 bp, Homo sapien
taaatgcatgcagggtgttatcctt

SEQ ID NO: 5356287 - DNA, 25 bp, Homo sapien
gatacactgaagactcagacagccc

SEQ ID NO: 5356288 - DNA, 25 bp, Homo sapien
tcatcatgcagttgctgagagacaa

SEQ ID NO: 5356289 - DNA, 25 bp, Homo sapien
tagctggactacatgtgctcaccat

SEQ ID NO: 5356290 - DNA, 25 bp, Homo sapien
gcagttctggtattcactttactat

SEQ ID NO: 5356291 - DNA, 25 bp, Homo sapien
ctttgcagttctggtattcacttta

SEQ ID NO: 5356292 - DNA, 25 bp, Homo sapien
tcactttactatgtaatagaagtag

SEQ ID NO: 5356293 - DNA, 25 bp, Homo sapien
tgcagttctggtattcactttacta

SEQ ID NO: 5356294 - DNA, 25 bp, Homo sapien
tatgcacagtatgaggccaatccca

SEQ ID NO: 5356295 - DNA, 25 bp, Homo sapien
ttgccatttccgcttgaaccccgag

SEQ ID NO: 5356296 - DNA, 25 bp, Homo sapien
tttcttataggatacgtgacccgtc

SEQ ID NO: 5356297 - DNA, 25 bp, Homo sapien
caaaatagggtagagcacatggccc

SEQ ID NO: 5356298 - DNA, 25 bp, Homo sapien
gagtggctacagaaacgataacatt

SEQ ID NO: 5356299 - DNA, 25 bp, Homo sapien
aacagtttgagtggctacagaaacg

SEQ ID NO: 5356300 - DNA, 25 bp, Homo sapien
tttgagtggctacagaaacgataac

SEQ ID NO: 5356301 - DNA, 25 bp, Homo sapien
tggctacagaaacgataacatttaa

SEQ ID NO: 5356302 - DNA, 25 bp, Homo sapien
taaacacggttcaacagtctaaaca

SEQ ID NO: 5356303 - DNA, 25 bp, Homo sapien
ggttacaaagcaatcttttcagttg

SEQ ID NO: 5356304 - DNA, 25 bp, Homo sapien
tcaaatagcccaggtgatgacagat

SEQ ID NO: 5356305 - DNA, 25 bp, Homo sapien
tcagttgtcttcatgagtcaataaa

SEQ ID NO: 5356306 - DNA, 25 bp, Homo sapien
ccagggtatttgacctaagcattta

SEQ ID NO: 5356307 - DNA, 25 bp, Homo sapien
taagcatttaggcaccttaaccaag

SEQ ID NO: 5356308 - DNA, 25 bp, Homo sapien
gaaactgccagcagatagcatgtaa

SEQ ID NO: 5356309 - DNA, 25 bp, Homo sapien
catgtaacatgcagattgccagggt

SEQ ID NO: 5356310 - DNA, 25 bp, Homo sapien
tgtagtataccaagacaaagtaagg

SEQ ID NO: 5356311 - DNA, 25 bp, Homo sapien
ttgccatgtagtataccaagacaaa

SEQ ID NO: 5356312 - DNA, 25 bp, Homo sapien
ggctacagttccattgcggagcctc

SEQ ID NO: 5356313 - DNA, 25 bp, Homo sapien
taaatgctaaagcagtggctacagt

SEQ ID NO: 5356314 - DNA, 25 bp, Homo sapien
ctcatttcaccatcacactggtcca

SEQ ID NO: 5356315 - DNA, 25 bp, Homo sapien
tgaatgcagtactcctggctctagg

SEQ ID NO: 5356316 - DNA, 25 bp, Homo sapien
aagtcaactgaatgcagtactcctg

SEQ ID NO: 5356317 - DNA, 25 bp, Homo sapien
tgtttatgatgacaacaaccaggac

SEQ ID NO: 5356318 - DNA, 25 bp, Homo sapien
actgtactcgggatcgtctttgcgg

SEQ ID NO: 5356319 - DNA, 25 bp, Homo sapien
caggaggagcctagcagcaatgctg

SEQ ID NO: 5356320 - DNA, 25 bp, Homo sapien
gcagcaatgctgttcacaactgtac

SEQ ID NO: 5356321 - DNA, 25 bp, Homo sapien
ggtcttcacacgctgatgcctcggc

SEQ ID NO: 5356322 - DNA, 25 bp, Homo sapien
tgtaagtttcttcatttactattca

SEQ ID NO: 5356323 - DNA, 25 bp, Homo sapien
agacttttggcagggctaaattgca

SEQ ID NO: 5356324 - DNA, 25 bp, Homo sapien
aagtcaagctcattcggtaatgcaa

SEQ ID NO: 5356325 - DNA, 25 bp, Homo sapien
tcattcggtaatgcaaaatgtaagt

SEQ ID NO: 5356326 - DNA, 25 bp, Homo sapien
gcttctattttccaatgcggaatgt

SEQ ID NO: 5356327 - DNA, 25 bp, Homo sapien
cgccgctggcgtcgccgtgctcccg

SEQ ID NO: 5356328 - DNA, 25 bp, Homo sapien
ctggcgtcgccgtgctcccgcggct

SEQ ID NO: 5356329 - DNA, 25 bp, Homo sapien
gctggcgtcgccgtgctcccgcggc

SEQ ID NO: 5356330 - DNA, 25 bp, Homo sapien
ccgctggcgtcgccgtgctcccgcg

SEQ ID NO: 5356331 - DNA, 25 bp, Homo sapien
cggacggtcgcgacagccccaactt

SEQ ID NO: 5356332 - DNA, 25 bp, Homo sapien
gaggccccgcggacggtcgcgacag

SEQ ID NO: 5356333 - DNA, 25 bp, Homo sapien
tgagaaccccgcgaatcggccagaa

SEQ ID NO: 5356334 - DNA, 25 bp, Homo sapien
gcgaatcggccagaagggctgattt

SEQ ID NO: 5356335 - DNA, 25 bp, Homo sapien
tggacacaacttgggggatcacagc

SEQ ID NO: 5356336 - DNA, 25 bp, Homo sapien
gacacaacttgggggatcacagcca

SEQ ID NO: 5356337 - DNA, 25 bp, Homo sapien
acacaacttgggggatcacagccat

SEQ ID NO: 5356338 - DNA, 25 bp, Homo sapien
tgtggacacaacttgggggatcaca

SEQ ID NO: 5356339 - DNA, 25 bp, Homo sapien
gattccaaggcaaagcagggactga

SEQ ID NO: 5356340 - DNA, 25 bp, Homo sapien
ccagagggcatttgtgagcgtgact

SEQ ID NO: 5356341 - DNA, 25 bp, Homo sapien
caagcgcaagcatagaaagtgtgga

SEQ ID NO: 5356342 - DNA, 25 bp, Homo sapien
gcctttaatggatgcagtgctgcca

SEQ ID NO: 5356343 - DNA, 25 bp, Homo sapien
agttgcatttcaccagggttgataa

SEQ ID NO: 5356344 - DNA, 25 bp, Homo sapien
aggctcctggaaaggaagttgcatt

SEQ ID NO: 5356345 - DNA, 25 bp, Homo sapien
tcctggaaaggaagttgcatttcac

SEQ ID NO: 5356346 - DNA, 25 bp, Homo sapien
gctcctggaaaggaagttgcatttc

SEQ ID NO: 5356347 - DNA, 25 bp, Homo sapien
ggaagcccttgcaatctagcttaga

SEQ ID NO: 5356348 - DNA, 25 bp, Homo sapien
catctgggcaccgtgagggacagaa

SEQ ID NO: 5356349 - DNA, 25 bp, Homo sapien
tctggtaagtgttgtggaagccctt

SEQ ID NO: 5356350 - DNA, 25 bp, Homo sapien
cataaaaagggagtacatctgggca

SEQ ID NO: 5356351 - DNA, 25 bp, Homo sapien
cacctcttgaacgtttctcctcaaa

SEQ ID NO: 5356352 - DNA, 25 bp, Homo sapien
tcttgaacgtttctcctcaaaaaca

SEQ ID NO: 5356353 - DNA, 25 bp, Homo sapien
acagcacctcttgaacgtttctcct

SEQ ID NO: 5356354 - DNA, 25 bp, Homo sapien
agcacctcttgaacgtttctcctca

SEQ ID NO: 5356355 - DNA, 25 bp, Homo sapien
gggattgctagctggtctagaccca

SEQ ID NO: 5356356 - DNA, 25 bp, Homo sapien
ccaggaacgcccgtgaactgctttc

SEQ ID NO: 5356357 - DNA, 25 bp, Homo sapien
caggctgggctattggctgctgtgg

SEQ ID NO: 5356358 - DNA, 25 bp, Homo sapien
ccgtgaactgctttcgtggttgcat

SEQ ID NO: 5356359 - DNA, 25 bp, Homo sapien
tgcatatgctataaggcccaaacag

SEQ ID NO: 5356360 - DNA, 25 bp, Homo sapien
tattggtccaattcagccagccagt

SEQ ID NO: 5356361 - DNA, 25 bp, Homo sapien
catccaagctggtcgttgcctgtga

SEQ ID NO: 5356362 - DNA, 25 bp, Homo sapien
gactgtgtccaacggaagagcacct

SEQ ID NO: 5356363 - DNA, 25 bp, Homo sapien
gttgctccggatgcatcttttttgt

SEQ ID NO: 5356364 - DNA, 25 bp, Homo sapien
tcatagttgctccggatgcatcttt

SEQ ID NO: 5356365 - DNA, 25 bp, Homo sapien
ctccttttttctcgaagttctccag

SEQ ID NO: 5356366 - DNA, 25 bp, Homo sapien
tccttttttctcgaagttctccaga

SEQ ID NO: 5356367 - DNA, 25 bp, Homo sapien
gcagataactctttgccatgctgat

SEQ ID NO: 5356368 - DNA, 25 bp, Homo sapien
cagataactctttgccatgctgatt

SEQ ID NO: 5356369 - DNA, 25 bp, Homo sapien
gataactctttgccatgctgatttc

SEQ ID NO: 5356370 - DNA, 25 bp, Homo sapien
agataactctttgccatgctgattt

SEQ ID NO: 5356371 - DNA, 25 bp, Homo sapien
tgaggtcacacatattaagtcgcag

SEQ ID NO: 5356372 - DNA, 25 bp, Homo sapien
cacattaaaaggagggcaggctctg

SEQ ID NO: 5356373 - DNA, 25 bp, Homo sapien
taaacagggcagtccgtgagatgct

SEQ ID NO: 5356374 - DNA, 25 bp, Homo sapien
tggtggccacatctaaccgtaagag

SEQ ID NO: 5356375 - DNA, 25 bp, Homo sapien
cccctcacacagttttggtagcaga

SEQ ID NO: 5356376 - DNA, 25 bp, Homo sapien
tgaattctaagaaccttgggcctca

SEQ ID NO: 5356377 - DNA, 25 bp, Homo sapien
gaggaagatcttgaaggtcctgatg

SEQ ID NO: 5356378 - DNA, 25 bp, Homo sapien
gatgaggccaggtgaattctaagaa

SEQ ID NO: 5356379 - DNA, 25 bp, Homo sapien
gtggttattcaatgttggtggcctc

SEQ ID NO: 5356380 - DNA, 25 bp, Homo sapien
gccgctgtgtctaccccagtgtggt

SEQ ID NO: 5356381 - DNA, 25 bp, Homo sapien
tttcttccttgcagacatcctggga

SEQ ID NO: 5356382 - DNA, 25 bp, Homo sapien
agcaggaatctcttcgccgctgtgt

SEQ ID NO: 5356383 - DNA, 25 bp, Homo sapien
ggaagtccgagttcaaagagtcagc

SEQ ID NO: 5356384 - DNA, 25 bp, Homo sapien
gaagtccgagttcaaagagtcagca

SEQ ID NO: 5356385 - DNA, 25 bp, Homo sapien
ctggaagtccgagttcaaagagtca

SEQ ID NO: 5356386 - DNA, 25 bp, Homo sapien
ggctggaagtccgagttcaaagagt

SEQ ID NO: 5356387 - DNA, 25 bp, Homo sapien
tcatccttccaccccggaggatttc

SEQ ID NO: 5356388 - DNA, 25 bp, Homo sapien
ctgccagaaattccccgggagaagg

SEQ ID NO: 5356389 - DNA, 25 bp, Homo sapien
tggatgtgatgaaccatggctgctt

SEQ ID NO: 5356390 - DNA, 25 bp, Homo sapien
tggaaatggatgtgatgaaccatgg

SEQ ID NO: 5356391 - DNA, 25 bp, Homo sapien
gaaatggatgtgatgaaccatggct

SEQ ID NO: 5356392 - DNA, 25 bp, Homo sapien
aatggatgtgatgaaccatggctgc

SEQ ID NO: 5356393 - DNA, 25 bp, Homo sapien
tcagccttcagttctatttacagcc

SEQ ID NO: 5356394 - DNA, 25 bp, Homo sapien
tgtttcctccatggtgttcatcgta

SEQ ID NO: 5356395 - DNA, 25 bp, Homo sapien
acaaacaagccattttaacagctgt

SEQ ID NO: 5356396 - DNA, 25 bp, Homo sapien
cgtaatttggtgatcgtgatgtttc

SEQ ID NO: 5356397 - DNA, 25 bp, Homo sapien
tacgggactctgggacaacctactc

SEQ ID NO: 5356398 - DNA, 25 bp, Homo sapien
ctgtccttcctcaattcctctcctt

SEQ ID NO: 5356399 - DNA, 25 bp, Homo sapien
tgtccttcctcaattcctctccttg

SEQ ID NO: 5356400 - DNA, 25 bp, Homo sapien
cgggactctgggacaacctactcct

SEQ ID NO: 5356401 - DNA, 25 bp, Homo sapien
ggctacaccacaaagcctataggct

SEQ ID NO: 5356402 - DNA, 25 bp, Homo sapien
acaatgcgtgtttcagaatgtatcc

SEQ ID NO: 5356403 - DNA, 25 bp, Homo sapien
cctataggcttgtttaagtgcgttc

SEQ ID NO: 5356404 - DNA, 25 bp, Homo sapien
cattgcctagagtgttcagtacagt

SEQ ID NO: 5356405 - DNA, 25 bp, Homo sapien
tggagaccacagattcaccactgca

SEQ ID NO: 5356406 - DNA, 25 bp, Homo sapien
caagtgattcgctgcaccaatgctt

SEQ ID NO: 5356407 - DNA, 25 bp, Homo sapien
agtgattcgctgcaccaatgctttt

SEQ ID NO: 5356408 - DNA, 25 bp, Homo sapien
ttggagaccacagattcaccactgc

SEQ ID NO: 5356409 - DNA, 25 bp, Homo sapien
gaagacaggatccacaggcaagaga

SEQ ID NO: 5356410 - DNA, 25 bp, Homo sapien
tgctcttggaaacggcatccctgtt

SEQ ID NO: 5356411 - DNA, 25 bp, Homo sapien
cacattcgtacctttgggcacagga

SEQ ID NO: 5356412 - DNA, 25 bp, Homo sapien
tatcaagggaattcgaaaagacaca

SEQ ID NO: 5356413 - DNA, 25 bp, Homo sapien
ttctttctggcaagttccatccagg

SEQ ID NO: 5356414 - DNA, 25 bp, Homo sapien
atctgtactggcataactggctctc

SEQ ID NO: 5356415 - DNA, 25 bp, Homo sapien
tttctttctggcaagttccatccag

SEQ ID NO: 5356416 - DNA, 25 bp, Homo sapien
gtactggcataactggctctcttca

SEQ ID NO: 5356417 - DNA, 25 bp, Homo sapien
aagttctgatgggacaatgagattc

SEQ ID NO: 5356418 - DNA, 25 bp, Homo sapien
tcacaggggttatcaggaaagactt

SEQ ID NO: 5356419 - DNA, 25 bp, Homo sapien
tctgatgggacaatgagattcctct

SEQ ID NO: 5356420 - DNA, 25 bp, Homo sapien
ttccggtccacagcgggcttcacag

SEQ ID NO: 5356421 - DNA, 25 bp, Homo sapien
caaagtcagcttgcttcacaggctc

SEQ ID NO: 5356422 - DNA, 25 bp, Homo sapien
gaacaaagtcagcttgcttcacagg

SEQ ID NO: 5356423 - DNA, 25 bp, Homo sapien
ctgcgaacaaagtcagcttgcttca

SEQ ID NO: 5356424 - DNA, 25 bp, Homo sapien
gcgaacaaagtcagcttgcttcaca

SEQ ID NO: 5356425 - DNA, 25 bp, Homo sapien
acccacagaacagaagtatttgctc

SEQ ID NO: 5356426 - DNA, 25 bp, Homo sapien
cctgcacccacagaacagaagtatt

SEQ ID NO: 5356427 - DNA, 25 bp, Homo sapien
gggtcctcgccccagtcccagctgg

SEQ ID NO: 5356428 - DNA, 25 bp, Homo sapien
ctcctgcacccacagaacagaagta

SEQ ID NO: 5356429 - DNA, 25 bp, Homo sapien
cctgttgctgcaggcggcagactct

SEQ ID NO: 5356430 - DNA, 25 bp, Homo sapien
ttctgccgagtgacggtgatccagg

SEQ ID NO: 5356431 - DNA, 25 bp, Homo sapien
tccgcttctgccgagtgacggtgat

SEQ ID NO: 5356432 - DNA, 25 bp, Homo sapien
ggttcagacttcagggtccgtgccc

SEQ ID NO: 5356433 - DNA, 25 bp, Homo sapien
ggcacaagattatagaaacagtcct

SEQ ID NO: 5356434 - DNA, 25 bp, Homo sapien
ccctcttcggttgcaccctttgtgt

SEQ ID NO: 5356435 - DNA, 25 bp, Homo sapien
ctgttgggtaaaggcacaagattat

SEQ ID NO: 5356436 - DNA, 25 bp, Homo sapien
tatagaaacagtcctattccctctt

SEQ ID NO: 5356437 - DNA, 25 bp, Homo sapien
cagtatgtactggtccaaatgctga

SEQ ID NO: 5356438 - DNA, 25 bp, Homo sapien
tgtagacacactattaatctcttgt

SEQ ID NO: 5356439 - DNA, 25 bp, Homo sapien
caaatgctgattcctgctcaaatgc

SEQ ID NO: 5356440 - DNA, 25 bp, Homo sapien
tgctcaaatgctgtagacacactat

SEQ ID NO: 5356441 - DNA, 25 bp, Homo sapien
gacagtgacaccaaaaactggtcac

SEQ ID NO: 5356442 - DNA, 25 bp, Homo sapien
cagtgacaccaaaaactggtcacag

SEQ ID NO: 5356443 - DNA, 25 bp, Homo sapien
acagtgacaccaaaaactggtcaca

SEQ ID NO: 5356444 - DNA, 25 bp, Homo sapien
caataagtggcttcttacaggtaca

SEQ ID NO: 5356445 - DNA, 25 bp, Homo sapien
tacaggtacatcaaaagcatagaac

SEQ ID NO: 5356446 - DNA, 25 bp, Homo sapien
cttacaggtacatcaaaagcataga

SEQ ID NO: 5356447 - DNA, 25 bp, Homo sapien
caggtacatcaaaagcatagaaccc

SEQ ID NO: 5356448 - DNA, 25 bp, Homo sapien
ccagttcaggctggaattcttttcc

SEQ ID NO: 5356449 - DNA, 25 bp, Homo sapien
gcttccagttcaggctggaattctt

SEQ ID NO: 5356450 - DNA, 25 bp, Homo sapien
tctgcttccagttcaggctggaatt

SEQ ID NO: 5356451 - DNA, 25 bp, Homo sapien
tccagttcaggctggaattcttttc

SEQ ID NO: 5356452 - DNA, 25 bp, Homo sapien
ttgttctagaatcctccccgctggt

SEQ ID NO: 5356453 - DNA, 25 bp, Homo sapien
ccacagctcaagagaggtgacaagg

SEQ ID NO: 5356454 - DNA, 25 bp, Homo sapien
catgggctcactctgaaggttgtgt

SEQ ID NO: 5356455 - DNA, 25 bp, Homo sapien
tagctgaccatctacccaactgaag

SEQ ID NO: 5356456 - DNA, 25 bp, Homo sapien
ctggagcttgatggagaccagagag

SEQ ID NO: 5356457 - DNA, 25 bp, Homo sapien
tcgtggctgttgtgataagaaaacc

SEQ ID NO: 5356458 - DNA, 25 bp, Homo sapien
ggagaccagagagccattctgccat

SEQ ID NO: 5356459 - DNA, 25 bp, Homo sapien
ctgccatgacaacgagccctcgtgg

SEQ ID NO: 5356460 - DNA, 25 bp, Homo sapien
cccagcctcttgcagggtcaggcag

SEQ ID NO: 5356461 - DNA, 25 bp, Homo sapien
cagcctcttgcagggtcaggcagcc

SEQ ID NO: 5356462 - DNA, 25 bp, Homo sapien
cttgcagggtcaggcagccaggctg

SEQ ID NO: 5356463 - DNA, 25 bp, Homo sapien
tgcagggtcaggcagccaggctgac

SEQ ID NO: 5356464 - DNA, 25 bp, Homo sapien
ccctgctggcgctgcatcatggagg

SEQ ID NO: 5356465 - DNA, 25 bp, Homo sapien
gagaacatcgtccacgggttccagc

SEQ ID NO: 5356466 - DNA, 25 bp, Homo sapien
tgtgtgtgccagtctgcctgcaagc

SEQ ID NO: 5356467 - DNA, 25 bp, Homo sapien
tgcaagccctgtaagggcaggcgcc

SEQ ID NO: 5356468 - DNA, 25 bp, Homo sapien
cccgagatgagagccgttttcatct

SEQ ID NO: 5356469 - DNA, 25 bp, Homo sapien
agatgagagccgttttcatctgcat

SEQ ID NO: 5356470 - DNA, 25 bp, Homo sapien
ctgcccgagatgagagccgttttca

SEQ ID NO: 5356471 - DNA, 25 bp, Homo sapien
gagatgagagccgttttcatctgca

SEQ ID NO: 5356472 - DNA, 25 bp, Homo sapien
cagccagctgtgctagaacagtcac

SEQ ID NO: 5356473 - DNA, 25 bp, Homo sapien
aacaaatagaacagcggtcctctgc

SEQ ID NO: 5356474 - DNA, 25 bp, Homo sapien
tgtgcctcgttgcttcaacaaatag

SEQ ID NO: 5356475 - DNA, 25 bp, Homo sapien
tctaaagtggatccatcatcgccat

SEQ ID NO: 5356476 - DNA, 25 bp, Homo sapien
gctgatataactgtgacctcacaag

SEQ ID NO: 5356477 - DNA, 25 bp, Homo sapien
acagagacagctggtctccgctccc

SEQ ID NO: 5356478 - DNA, 25 bp, Homo sapien
cgctcccaaccagctgatataactg

SEQ ID NO: 5356479 - DNA, 25 bp, Homo sapien
ggtctccgctcccaaccagctgata

SEQ ID NO: 5356480 - DNA, 25 bp, Homo sapien
agccaccactgggactctggttgtg

SEQ ID NO: 5356481 - DNA, 25 bp, Homo sapien
ttgtgaccgcttctcattgtcccct

SEQ ID NO: 5356482 - DNA, 25 bp, Homo sapien
ctggcagacacttgaaactgacact

SEQ ID NO: 5356483 - DNA, 25 bp, Homo sapien
gcctggcagacacttgaaactgaca

SEQ ID NO: 5356484 - DNA, 25 bp, Homo sapien
ctgggagcacaagtgggtcatgtgg

SEQ ID NO: 5356485 - DNA, 25 bp, Homo sapien
gagcacaagtgggtcatgtggtggt

SEQ ID NO: 5356486 - DNA, 25 bp, Homo sapien
cacaagtgggtcatgtggtggtcct

SEQ ID NO: 5356487 - DNA, 25 bp, Homo sapien
tgggagcacaagtgggtcatgtggt

SEQ ID NO: 5356488 - DNA, 25 bp, Homo sapien
ttctgtaatctccactcctcaaggt

SEQ ID NO: 5356489 - DNA, 25 bp, Homo sapien
tttgaatcctctcagggttggcatt

SEQ ID NO: 5356490 - DNA, 25 bp, Homo sapien
taaaggatatctaactcagatgtct

SEQ ID NO: 5356491 - DNA, 25 bp, Homo sapien
ttgaatattatgctgagacttggtc

SEQ ID NO: 5356492 - DNA, 25 bp, Homo sapien
ggtgcatacttggagcagggctgga

SEQ ID NO: 5356493 - DNA, 25 bp, Homo sapien
gctggaagggctaaaggaccgttgc

SEQ ID NO: 5356494 - DNA, 25 bp, Homo sapien
gcagagggtactgctaccatcttca

SEQ ID NO: 5356495 - DNA, 25 bp, Homo sapien
gaccgttgccctgcagagggtactg

SEQ ID NO: 5356496 - DNA, 25 bp, Homo sapien
tcaagacatatgtgggtatataccc

SEQ ID NO: 5356497 - DNA, 25 bp, Homo sapien
gttaagacacacatggttgaggagc

SEQ ID NO: 5356498 - DNA, 25 bp, Homo sapien
ctgtgaagggaagggcaagacaaaa

SEQ ID NO: 5356499 - DNA, 25 bp, Homo sapien
agaggtcgctttgtactgggtgaca

SEQ ID NO: 5356500 - DNA, 25 bp, Homo sapien
gacatacaaagacaaggtggccaga

SEQ ID NO: 5356501 - DNA, 25 bp, Homo sapien
gaaaatggctgtctacactcctcca

SEQ ID NO: 5356502 - DNA, 25 bp, Homo sapien
aaagagcttgcatggcaggaggaca

SEQ ID NO: 5356503 - DNA, 25 bp, Homo sapien
tctgtgcaataaactctgagggtca

SEQ ID NO: 5356504 - DNA, 25 bp, Homo sapien
tgagtgcccaaagccgagtcatctg

SEQ ID NO: 5356505 - DNA, 25 bp, Homo sapien
aaagcagtttgagtgcccaaagccg

SEQ ID NO: 5356506 - DNA, 25 bp, Homo sapien
gtttgagtgcccaaagccgagtcat

SEQ ID NO: 5356507 - DNA, 25 bp, Homo sapien
ccaaagccgagtcatctggaacact

SEQ ID NO: 5356508 - DNA, 25 bp, Homo sapien
tcaatcatccaactttactgtacat

SEQ ID NO: 5356509 - DNA, 25 bp, Homo sapien
ggtatttgccaccacaacagcaaat

SEQ ID NO: 5356510 - DNA, 25 bp, Homo sapien
aggtggcagactatctgggagctct

SEQ ID NO: 5356511 - DNA, 25 bp, Homo sapien
tgtgaactgaattgcttctagctaa

SEQ ID NO: 5356512 - DNA, 25 bp, Homo sapien
caaatattaggtctttctggaaaca

SEQ ID NO: 5356513 - DNA, 25 bp, Homo sapien
cgtggatgtggatctccccaggccc

SEQ ID NO: 5356514 - DNA, 25 bp, Homo sapien
ccagcaagatgtgcccgtggatgtg

SEQ ID NO: 5356515 - DNA, 25 bp, Homo sapien
catttggcgagtgtccagcaagatg

SEQ ID NO: 5356516 - DNA, 25 bp, Homo sapien
aaagtttgtaccaggagcatttggc

SEQ ID NO: 5356517 - DNA, 25 bp, Homo sapien
ggctccttcctgggttcccgctctc

SEQ ID NO: 5356518 - DNA, 25 bp, Homo sapien
tccttggtcgctgggggccctggtg

SEQ ID NO: 5356519 - DNA, 25 bp, Homo sapien
cagcggccttttctccgccgtcctg

SEQ ID NO: 5356520 - DNA, 25 bp, Homo sapien
tgcgggagcgtgaagctctgcagaa

SEQ ID NO: 5356521 - DNA, 25 bp, Homo sapien
ggagcacggtcagcgacctttctaa

SEQ ID NO: 5356522 - DNA, 25 bp, Homo sapien
agcacggtcagcgacctttctaacc

SEQ ID NO: 5356523 - DNA, 25 bp, Homo sapien
gcacggtcagcgacctttctaaccg

SEQ ID NO: 5356524 - DNA, 25 bp, Homo sapien
cacggtcagcgacctttctaaccgg

SEQ ID NO: 5356525 - DNA, 25 bp, Homo sapien
gggcagggctctctcgtgccgggcg

SEQ ID NO: 5356526 - DNA, 25 bp, Homo sapien
gggctctctcgtgccgggcgcggcg

SEQ ID NO: 5356527 - DNA, 25 bp, Homo sapien
ttccgagggccaggtttcgcgtgct

SEQ ID NO: 5356528 - DNA, 25 bp, Homo sapien
tgagggctcttgcgcggcccggccg

SEQ ID NO: 5356529 - DNA, 25 bp, Homo sapien
cgcctcgctcctccagaccgggccg

SEQ ID NO: 5356530 - DNA, 25 bp, Homo sapien
gagccgcctcgctcctccagaccgg

SEQ ID NO: 5356531 - DNA, 25 bp, Homo sapien
tcaagagccgcctcgctcctccaga

SEQ ID NO: 5356532 - DNA, 25 bp, Homo sapien
gccgcctcgctcctccagaccgggc

SEQ ID NO: 5356533 - DNA, 25 bp, Homo sapien
ggcggccgctggcccgttccagcgg

SEQ ID NO: 5356534 - DNA, 25 bp, Homo sapien
tggcccgttccagcgggcgggagac

SEQ ID NO: 5356535 - DNA, 25 bp, Homo sapien
ggccgctggcccgttccagcgggcg

SEQ ID NO: 5356536 - DNA, 25 bp, Homo sapien
cgctggcccgttccagcgggcggga

SEQ ID NO: 5356537 - DNA, 25 bp, Homo sapien
gaggacaccgagaacttcttcgcgc

SEQ ID NO: 5356538 - DNA, 25 bp, Homo sapien
tcggcacgaggacaccgagaacttc

SEQ ID NO: 5356539 - DNA, 25 bp, Homo sapien
gcgctcggcacgaggacaccgagaa

SEQ ID NO: 5356540 - DNA, 25 bp, Homo sapien
ttcttcgcgcctcgcagctcggcac

SEQ ID NO: 5356541 - DNA, 25 bp, Homo sapien
gcggccgcgggccggtgtttcaggc

SEQ ID NO: 5356542 - DNA, 25 bp, Homo sapien
cgcgggccggtgtttcaggcagctc

SEQ ID NO: 5356543 - DNA, 25 bp, Homo sapien
ccgggggagactccgcagcggcaag

SEQ ID NO: 5356544 - DNA, 25 bp, Homo sapien
gggagactccgcagcggcaagcggc

SEQ ID NO: 5356545 - DNA, 25 bp, Homo sapien
ccgtggagggctcggtcccaattct

SEQ ID NO: 5356546 - DNA, 25 bp, Homo sapien
ggagggctcggtcccaattctctcg

SEQ ID NO: 5356547 - DNA, 25 bp, Homo sapien
gggcgccgtggagggctcggtccca

SEQ ID NO: 5356548 - DNA, 25 bp, Homo sapien
aattctctcgggctcggtccccgct

SEQ ID NO: 5356549 - DNA, 25 bp, Homo sapien
gggcggcgtcggctccgcttccttc

SEQ ID NO: 5356550 - DNA, 25 bp, Homo sapien
ggcgtcggctccgcttccttcggga

SEQ ID NO: 5356551 - DNA, 25 bp, Homo sapien
gcggcgtcggctccgcttccttcgg

SEQ ID NO: 5356552 - DNA, 25 bp, Homo sapien
gtcggctccgcttccttcgggacac

SEQ ID NO: 5356553 - DNA, 25 bp, Homo sapien
gttctggcccgtcgcgagcagaggg

SEQ ID NO: 5356554 - DNA, 25 bp, Homo sapien
tgcgttctggcccgtcgcgagcaga

SEQ ID NO: 5356555 - DNA, 25 bp, Homo sapien
tcgcgacgtcttcgggagcacagac

SEQ ID NO: 5356556 - DNA, 25 bp, Homo sapien
tgggaaacgggctcgcgacgtcttc

SEQ ID NO: 5356557 - DNA, 25 bp, Homo sapien
tctgtctggcgccacgtcctgctgc

SEQ ID NO: 5356558 - DNA, 25 bp, Homo sapien
cgctcagggattcagactgagcgcg

SEQ ID NO: 5356559 - DNA, 25 bp, Homo sapien
tcctctggggtgcacgtcaggtcgc

SEQ ID NO: 5356560 - DNA, 25 bp, Homo sapien
ccatcctgctttccgccgtcgggac

SEQ ID NO: 5356561 - DNA, 25 bp, Homo sapien
gcccaggctggctacatcaggtttt

SEQ ID NO: 5356562 - DNA, 25 bp, Homo sapien
cccaggctggctacatcaggttttc

SEQ ID NO: 5356563 - DNA, 25 bp, Homo sapien
tcgaccgctggttgcggggcttgac

SEQ ID NO: 5356564 - DNA, 25 bp, Homo sapien
actggtgccaggctgttgtctgaga

SEQ ID NO: 5356565 - DNA, 25 bp, Homo sapien
ctggagcttgtgcttagctgcagag

SEQ ID NO: 5356566 - DNA, 25 bp, Homo sapien
gaggaggattctgcaggataactga

SEQ ID NO: 5356567 - DNA, 25 bp, Homo sapien
tagctgcagagttgtccaggcagga

SEQ ID NO: 5356568 - DNA, 25 bp, Homo sapien
caagggcacagtcacctggtcctgt

SEQ ID NO: 5356569 - DNA, 25 bp, Homo sapien
aagggcacagtcacctggtcctgtc

SEQ ID NO: 5356570 - DNA, 25 bp, Homo sapien
ccaagggcacagtcacctggtcctg

SEQ ID NO: 5356571 - DNA, 25 bp, Homo sapien
gggcacagtcacctggtcctgtctc

SEQ ID NO: 5356572 - DNA, 25 bp, Homo sapien
gctccaccactgagtgaggtcgaag

SEQ ID NO: 5356573 - DNA, 25 bp, Homo sapien
agtcatgtgaaagaatgaaggcaat

SEQ ID NO: 5356574 - DNA, 25 bp, Homo sapien
ctgagtgaggtcgaagtgggctccc

SEQ ID NO: 5356575 - DNA, 25 bp, Homo sapien
aatgaaggcaatacccgcagatccc

SEQ ID NO: 5356576 - DNA, 25 bp, Homo sapien
agacacaagttgggatgaaactcgg

SEQ ID NO: 5356577 - DNA, 25 bp, Homo sapien
cagacacaagttgggatgaaactcg

SEQ ID NO: 5356578 - DNA, 25 bp, Homo sapien
tgcagacacaagttgggatgaaact

SEQ ID NO: 5356579 - DNA, 25 bp, Homo sapien
ctgcagacacaagttgggatgaaac

SEQ ID NO: 5356580 - DNA, 25 bp, Homo sapien
gcaggtgcccagcagcctttgctaa

SEQ ID NO: 5356581 - DNA, 25 bp, Homo sapien
caggtgcccagcagcctttgctaac

SEQ ID NO: 5356582 - DNA, 25 bp, Homo sapien
gagcaggtgcccagcagcctttgct

SEQ ID NO: 5356583 - DNA, 25 bp, Homo sapien
acagagcaggtgcccagcagccttt

SEQ ID NO: 5356584 - DNA, 25 bp, Homo sapien
tactggtgagatgggcttcgatacg

SEQ ID NO: 5356585 - DNA, 25 bp, Homo sapien
ggaaccataaggatgatcgtactgg

SEQ ID NO: 5356586 - DNA, 25 bp, Homo sapien
gttcatgtgaaggtctctcctattt

SEQ ID NO: 5356587 - DNA, 25 bp, Homo sapien
tcgatacgggaggaacaacctcttc

SEQ ID NO: 5356588 - DNA, 25 bp, Homo sapien
ccacgtcgtgcagcagagacatctc

SEQ ID NO: 5356589 - DNA, 25 bp, Homo sapien
atcctctccccgcttggcaggaagc

SEQ ID NO: 5356590 - DNA, 25 bp, Homo sapien
cctgggcagcccgtcgtcctcagag

SEQ ID NO: 5356591 - DNA, 25 bp, Homo sapien
tggccccattttcacattacactgt

SEQ ID NO: 5356592 - DNA, 25 bp, Homo sapien
tctaagaatgagtcgagatcccact

SEQ ID NO: 5356593 - DNA, 25 bp, Homo sapien
tgcagctcatttggtgtgtcctggg

SEQ ID NO: 5356594 - DNA, 25 bp, Homo sapien
cagagaactgaactgaacgtgcatc

SEQ ID NO: 5356595 - DNA, 25 bp, Homo sapien
gaaatgccttcagtatcttggtgtg

SEQ ID NO: 5356596 - DNA, 25 bp, Homo sapien
ctgcagagctttaatccgatcacac

SEQ ID NO: 5356597 - DNA, 25 bp, Homo sapien
gagctttaatccgatcacacacatt

SEQ ID NO: 5356598 - DNA, 25 bp, Homo sapien
gccgagtagcgtcctgtccggactc

SEQ ID NO: 5356599 - DNA, 25 bp, Homo sapien
aaaacacccgcacaggccgagtagc

SEQ ID NO: 5356600 - DNA, 25 bp, Homo sapien
ctgtcgtgagaaagggcccggctgc

SEQ ID NO: 5356601 - DNA, 25 bp, Homo sapien
tcgtgagaaagggcccggctgccca

SEQ ID NO: 5356602 - DNA, 25 bp, Homo sapien
gtcgtgagaaagggcccggctgccc

SEQ ID NO: 5356603 - DNA, 25 bp, Homo sapien
tgtcgtgagaaagggcccggctgcc

SEQ ID NO: 5356604 - DNA, 25 bp, Homo sapien
agctcatcctcggagtcgtagccca

SEQ ID NO: 5356605 - DNA, 25 bp, Homo sapien
gctcatcctcggagtcgtagcccac

SEQ ID NO: 5356606 - DNA, 25 bp, Homo sapien
ggacgacggcgattcttttctcttc

SEQ ID NO: 5356607 - DNA, 25 bp, Homo sapien
ggcaatgacctcattcctcgtctga

SEQ ID NO: 5356608 - DNA, 25 bp, Homo sapien
tggcccggattcgatggcaatgacc

SEQ ID NO: 5356609 - DNA, 25 bp, Homo sapien
caggtgctacttcctgtggacgacg

SEQ ID NO: 5356610 - DNA, 25 bp, Homo sapien
aggaaaatgagctgaaaggtccccg

SEQ ID NO: 5356611 - DNA, 25 bp, Homo sapien
ggaggaaaatgagctgaaaggtccc

SEQ ID NO: 5356612 - DNA, 25 bp, Homo sapien
aaggaggaaaatgagctgaaaggtc

SEQ ID NO: 5356613 - DNA, 25 bp, Homo sapien
gaaaatgagctgaaaggtccccgtg

SEQ ID NO: 5356614 - DNA, 25 bp, Homo sapien
cttctgcagcctcccgaagcttaat

SEQ ID NO: 5356615 - DNA, 25 bp, Homo sapien
tctgcagcctcccgaagcttaatgt

SEQ ID NO: 5356616 - DNA, 25 bp, Homo sapien
ctgcagcctcccgaagcttaatgtc

SEQ ID NO: 5356617 - DNA, 25 bp, Homo sapien
ccttctgcagcctcccgaagcttaa

SEQ ID NO: 5356618 - DNA, 25 bp, Homo sapien
ccttgtggaaatcatgtcaagctcg

SEQ ID NO: 5356619 - DNA, 25 bp, Homo sapien
cacccttgtggaaatcatgtcaagc

SEQ ID NO: 5356620 - DNA, 25 bp, Homo sapien
acccttgtggaaatcatgtcaagct

SEQ ID NO: 5356621 - DNA, 25 bp, Homo sapien
cccttgtggaaatcatgtcaagctc

SEQ ID NO: 5356622 - DNA, 25 bp, Homo sapien
cacccaacacattaatgcctcaagg

SEQ ID NO: 5356623 - DNA, 25 bp, Homo sapien
taatgatcacccaacacattaatgc

SEQ ID NO: 5356624 - DNA, 25 bp, Homo sapien
tgatcacccaacacattaatgcctc

SEQ ID NO: 5356625 - DNA, 25 bp, Homo sapien
ttcttaatgatcacccaacacatta

SEQ ID NO: 5356626 - DNA, 25 bp, Homo sapien
catctctcacagaagtacccgtgcg

SEQ ID NO: 5356627 - DNA, 25 bp, Homo sapien
cctgatgcactggtaaaaggcagcc

SEQ ID NO: 5356628 - DNA, 25 bp, Homo sapien
tcctggaagctagcagcagggagaa

SEQ ID NO: 5356629 - DNA, 25 bp, Homo sapien
cactggttgctgatcaagagccctt

SEQ ID NO: 5356630 - DNA, 25 bp, Homo sapien
ctatctcagtgcgagggaccctgtg

SEQ ID NO: 5356631 - DNA, 25 bp, Homo sapien
tctgtagggagttggactcgcctcc

SEQ ID NO: 5356632 - DNA, 25 bp, Homo sapien
gagaaaatcggaaacagcttctgag

SEQ ID NO: 5356633 - DNA, 25 bp, Homo sapien
agcttctgagccagacacacccagg

SEQ ID NO: 5356634 - DNA, 25 bp, Homo sapien
tatgagatcaaaccacattcgcagg

SEQ ID NO: 5356635 - DNA, 25 bp, Homo sapien
acagaccctcggctcatgaaggcaa

SEQ ID NO: 5356636 - DNA, 25 bp, Homo sapien
ccaccattagaggtagcccaaggca

SEQ ID NO: 5356637 - DNA, 25 bp, Homo sapien
tgtacaccacgagtcacagaagaga

SEQ ID NO: 5356638 - DNA, 25 bp, Homo sapien
catttgcctgcgttccttagttgac

SEQ ID NO: 5356639 - DNA, 25 bp, Homo sapien
tgcgtgtgcacggtaccaataaact

SEQ ID NO: 5356640 - DNA, 25 bp, Homo sapien
ttgactgatgcacggaagagtgacc

SEQ ID NO: 5356641 - DNA, 25 bp, Homo sapien
tgtagtcactaagggagcatttgcc

SEQ ID NO: 5356642 - DNA, 25 bp, Homo sapien
agacttgccccaatgggtcccgagg

SEQ ID NO: 5356643 - DNA, 25 bp, Homo sapien
agggaaggcaggtgtcgggagagcc

SEQ ID NO: 5356644 - DNA, 25 bp, Homo sapien
tgcatctagttgctccaagggcaag

SEQ ID NO: 5356645 - DNA, 25 bp, Homo sapien
gcaaggcactggagccaaactcaac

SEQ ID NO: 5356646 - DNA, 25 bp, Homo sapien
tcatggccaacgagtgttttccggg

SEQ ID NO: 5356647 - DNA, 25 bp, Homo sapien
catccaggcgatggaagccactcat

SEQ ID NO: 5356648 - DNA, 25 bp, Homo sapien
gagtctctgaagttgatccagtcca

SEQ ID NO: 5356649 - DNA, 25 bp, Homo sapien
cctggacaactggagttccctggga

SEQ ID NO: 5356650 - DNA, 25 bp, Homo sapien
cttttatcttgcacggacgccaaag

SEQ ID NO: 5356651 - DNA, 25 bp, Homo sapien
gcataccagattcattacatggagt

SEQ ID NO: 5356652 - DNA, 25 bp, Homo sapien
catggagtatgcagaaaatcagtga

SEQ ID NO: 5356653 - DNA, 25 bp, Homo sapien
aggtgtccttatctcagcataccag

SEQ ID NO: 5356654 - DNA, 25 bp, Homo sapien
gtgagtagtctggcaggggagaggc

SEQ ID NO: 5356655 - DNA, 25 bp, Homo sapien
acacagctggatggctccacagttt

SEQ ID NO: 5356656 - DNA, 25 bp, Homo sapien
cagctggatggctccacagtttctc

SEQ ID NO: 5356657 - DNA, 25 bp, Homo sapien
agtgagtagtctggcaggggagagg

SEQ ID NO: 5356658 - DNA, 25 bp, Homo sapien
ggtgcggtccaggacgacccagctc

SEQ ID NO: 5356659 - DNA, 25 bp, Homo sapien
gcggtccaggacgacccagctctca

SEQ ID NO: 5356660 - DNA, 25 bp, Homo sapien
agggtgcggtccaggacgacccagc

SEQ ID NO: 5356661 - DNA, 25 bp, Homo sapien
gtgcggtccaggacgacccagctct

SEQ ID NO: 5356662 - DNA, 25 bp, Homo sapien
tggctcccaagagcgtgcaccatga

SEQ ID NO: 5356663 - DNA, 25 bp, Homo sapien
gaaaatacaatgatccactcagagg

SEQ ID NO: 5356664 - DNA, 25 bp, Homo sapien
aagacaatgtgtctcctggaaccct

SEQ ID NO: 5356665 - DNA, 25 bp, Homo sapien
gcatcaggccattttgaacagtcca

SEQ ID NO: 5356666 - DNA, 25 bp, Homo sapien
ggccccactatggacgtatctggtt

SEQ ID NO: 5356667 - DNA, 25 bp, Homo sapien
tccacggctccactaatgcagagca

SEQ ID NO: 5356668 - DNA, 25 bp, Homo sapien
ccctgtggacggaggtggaggtcac

SEQ ID NO: 5356669 - DNA, 25 bp, Homo sapien
acggctccactaatgcagagcagca

SEQ ID NO: 5356670 - DNA, 25 bp, Homo sapien
ctgaattccctgcactaaatcctct

SEQ ID NO: 5356671 - DNA, 25 bp, Homo sapien
tggttcctgagcatgcggccaaggc

SEQ ID NO: 5356672 - DNA, 25 bp, Homo sapien
cagctctgcagcgtcactctgcggt

SEQ ID NO: 5356673 - DNA, 25 bp, Homo sapien
aaggcccaagcttgcaacaattctg

SEQ ID NO: 5356674 - DNA, 25 bp, Homo sapien
ggtgcagaccttgtgtgtagtcgca

SEQ ID NO: 5356675 - DNA, 25 bp, Homo sapien
agcccagtatgcctcagactccaag

SEQ ID NO: 5356676 - DNA, 25 bp, Homo sapien
tagtcgcagagttgtaatcagacca

SEQ ID NO: 5356677 - DNA, 25 bp, Homo sapien
tgtaatcagaccaagagcccagaga

SEQ ID NO: 5356678 - DNA, 25 bp, Homo sapien
gagcacacagttcagtgtctgtgga

SEQ ID NO: 5356679 - DNA, 25 bp, Homo sapien
gcctctctggtcatgtctctgtcct

SEQ ID NO: 5356680 - DNA, 25 bp, Homo sapien
aggggaagaaaccatccctgagcac

SEQ ID NO: 5356681 - DNA, 25 bp, Homo sapien
ggaagaaaccatccctgagcacaca

SEQ ID NO: 5356682 - DNA, 25 bp, Homo sapien
ctcaaaattcgcttccccactggtg

SEQ ID NO: 5356683 - DNA, 25 bp, Homo sapien
gatacatttgtatgcacgggaccag

SEQ ID NO: 5356684 - DNA, 25 bp, Homo sapien
gaaaaggtgctcgataccacgatac

SEQ ID NO: 5356685 - DNA, 25 bp, Homo sapien
caatgctggtcctctgaatccaagg

SEQ ID NO: 5356686 - DNA, 25 bp, Homo sapien
tagtgagcccagacgtggcagggca

SEQ ID NO: 5356687 - DNA, 25 bp, Homo sapien
gcccagacgtggcagggcagaacca

SEQ ID NO: 5356688 - DNA, 25 bp, Homo sapien
tgagcccagacgtggcagggcagaa

SEQ ID NO: 5356689 - DNA, 25 bp, Homo sapien
cccagacgtggcagggcagaaccat

SEQ ID NO: 5356690 - DNA, 25 bp, Homo sapien
tctccaacacgacggggcgtatgtc

SEQ ID NO: 5356691 - DNA, 25 bp, Homo sapien
acgacggggcgtatgtcttggccca

SEQ ID NO: 5356692 - DNA, 25 bp, Homo sapien
ccctgtgtctctccaacacgacggg

SEQ ID NO: 5356693 - DNA, 25 bp, Homo sapien
tgtctctccaacacgacggggcgta

SEQ ID NO: 5356694 - DNA, 25 bp, Homo sapien
gggcgacgcagcaggtggccgcgcg

SEQ ID NO: 5356695 - DNA, 25 bp, Homo sapien
gccgcggtgcgcgtctagccccagc

SEQ ID NO: 5356696 - DNA, 25 bp, Homo sapien
tggacgcgggcgctgacactaccct

SEQ ID NO: 5356697 - DNA, 25 bp, Homo sapien
cggcgagacgcgcagagaagggcac

SEQ ID NO: 5356698 - DNA, 25 bp, Homo sapien
tgctgcaataaacaagggatatctc

SEQ ID NO: 5356699 - DNA, 25 bp, Homo sapien
taattataatcactctgctacgcta

SEQ ID NO: 5356700 - DNA, 25 bp, Homo sapien
gaatttcatcactttttatgcctga

SEQ ID NO: 5356701 - DNA, 25 bp, Homo sapien
taacgtgcaatgatcaaattaaggg

SEQ ID NO: 5356702 - DNA, 25 bp, Homo sapien
tattcctactaacagtatgttaaag

SEQ ID NO: 5356703 - DNA, 25 bp, Homo sapien
ctactaacagtatgttaaagcaaac

SEQ ID NO: 5356704 - DNA, 25 bp, Homo sapien
ttatattcctactaacagtatgtta

SEQ ID NO: 5356705 - DNA, 25 bp, Homo sapien
ttcctactaacagtatgttaaagca

SEQ ID NO: 5356706 - DNA, 25 bp, Homo sapien
cccaccttctggacggggcggcagc

SEQ ID NO: 5356707 - DNA, 25 bp, Homo sapien
gccaggcagaggcaccccccacctt

SEQ ID NO: 5356708 - DNA, 25 bp, Homo sapien
ggcagaggcaccccccaccttctgg

SEQ ID NO: 5356709 - DNA, 25 bp, Homo sapien
agaggcaccccccaccttctggacg

SEQ ID NO: 5356710 - DNA, 25 bp, Homo sapien
cccattttggcacagattttccagc

SEQ ID NO: 5356711 - DNA, 25 bp, Homo sapien
catcaaagcctatggatagataagg

SEQ ID NO: 5356712 - DNA, 25 bp, Homo sapien
tatcagatcccagaccagtatcagt

SEQ ID NO: 5356713 - DNA, 25 bp, Homo sapien
gaattcatgtaaggttggttccaaa

SEQ ID NO: 5356714 - DNA, 25 bp, Homo sapien
tctttatttactccagatagtgaac

SEQ ID NO: 5356715 - DNA, 25 bp, Homo sapien
taaaagataaatgcactcatgtagc

SEQ ID NO: 5356716 - DNA, 25 bp, Homo sapien
caacatggcacattagaacagagat

SEQ ID NO: 5356717 - DNA, 25 bp, Homo sapien
tatcactgcatggatagaaagagcc

SEQ ID NO: 5356718 - DNA, 25 bp, Homo sapien
tcagaaatctctgtagcaaagattc

SEQ ID NO: 5356719 - DNA, 25 bp, Homo sapien
atatatcttggtaatcatgtttaaa

SEQ ID NO: 5356720 - DNA, 25 bp, Homo sapien
aatatatcttggtaatcatgtttaa

SEQ ID NO: 5356721 - DNA, 25 bp, Homo sapien
tatatcttggtaatcatgtttaaat

SEQ ID NO: 5356722 - DNA, 25 bp, Homo sapien
cactatactagatactgctatttga

SEQ ID NO: 5356723 - DNA, 25 bp, Homo sapien
tattaccccaaatgttcactatact

SEQ ID NO: 5356724 - DNA, 25 bp, Homo sapien
actgctatttgatctcaagagaatg

SEQ ID NO: 5356725 - DNA, 25 bp, Homo sapien
gagaatggatccttaaatagactca

SEQ ID NO: 5356726 - DNA, 25 bp, Homo sapien
tacttgaataattttggcggcgaag

SEQ ID NO: 5356727 - DNA, 25 bp, Homo sapien
ttctaatgatcgatctaggcctcgg

SEQ ID NO: 5356728 - DNA, 25 bp, Homo sapien
cattgtagaactcatatgataagca

SEQ ID NO: 5356729 - DNA, 25 bp, Homo sapien
gcgaagttcttgtacggccctctcc

SEQ ID NO: 5356730 - DNA, 25 bp, Homo sapien
ttggtaatgtctaaatcagcttcca

SEQ ID NO: 5356731 - DNA, 25 bp, Homo sapien
atgtctaaatcagcttccaattgtg

SEQ ID NO: 5356732 - DNA, 25 bp, Homo sapien
ggccaccagcaaagcttctagattc

SEQ ID NO: 5356733 - DNA, 25 bp, Homo sapien
tttcttgaagtgctatctgagactg

SEQ ID NO: 5356734 - DNA, 25 bp, Homo sapien
tagattctgcatggagattctctca

SEQ ID NO: 5356735 - DNA, 25 bp, Homo sapien
tattctttgtctcgattggccacca

SEQ ID NO: 5356736 - DNA, 25 bp, Homo sapien
tacagagttccctagtagaagacaa

SEQ ID NO: 5356737 - DNA, 25 bp, Homo sapien
tttatgtaaggtagaaatctgggac

SEQ ID NO: 5356738 - DNA, 25 bp, Homo sapien
gaagacaaatctgcaagagcggaca

SEQ ID NO: 5356739 - DNA, 25 bp, Homo sapien
tagcaaccagctgtcgattaagaag

SEQ ID NO: 5356740 - DNA, 25 bp, Homo sapien
aaatgtcttatgtaagtgcactgcc

SEQ ID NO: 5356741 - DNA, 25 bp, Homo sapien
aacacttactaatacctctgaggga

SEQ ID NO: 5356742 - DNA, 25 bp, Homo sapien
ccagccccaaaactagttgagatat

SEQ ID NO: 5356743 - DNA, 25 bp, Homo sapien
tgcactgccacctacagagaagtat

SEQ ID NO: 5356744 - DNA, 25 bp, Homo sapien
tcaaagtataaggagaatggttagc

SEQ ID NO: 5356745 - DNA, 25 bp, Homo sapien
actcttttaaatatgatgcaggatg

SEQ ID NO: 5356746 - DNA, 25 bp, Homo sapien
gattgttctggatgtagggtagata

SEQ ID NO: 5356747 - DNA, 25 bp, Homo sapien
ggttagcatgctacaattcacagta

SEQ ID NO: 5356748 - DNA, 25 bp, Homo sapien
tttaatctgttaccctctgcctcag

SEQ ID NO: 5356749 - DNA, 25 bp, Homo sapien
gcctcagcagtgataagttccagtt

SEQ ID NO: 5356750 - DNA, 25 bp, Homo sapien
tcgaagttgttccatcatttgccgg

SEQ ID NO: 5356751 - DNA, 25 bp, Homo sapien
ttgttatctgcctctgattgacggg

SEQ ID NO: 5356752 - DNA, 25 bp, Homo sapien
gcttgttaacctccaaattagtatc

SEQ ID NO: 5356753 - DNA, 25 bp, Homo sapien
tatgtcattaagttcattatgagtg

SEQ ID NO: 5356754 - DNA, 25 bp, Homo sapien
tcttcagcttgttaacctccaaatt

SEQ ID NO: 5356755 - DNA, 25 bp, Homo sapien
taagttcattatgagtgtcattcaa

SEQ ID NO: 5356756 - DNA, 25 bp, Homo sapien
gcattctggaaacgtcttgttcaca

SEQ ID NO: 5356757 - DNA, 25 bp, Homo sapien
tgagccaagatatctctttccctgg

SEQ ID NO: 5356758 - DNA, 25 bp, Homo sapien
tgttcacacacaattagggcctcag

SEQ ID NO: 5356759 - DNA, 25 bp, Homo sapien
tttccctggcgatctgggccagctc

SEQ ID NO: 5356760 - DNA, 25 bp, Homo sapien
tcttcatgcctgaaatggtcttttc

SEQ ID NO: 5356761 - DNA, 25 bp, Homo sapien
ctcagcaatgatattcttcatgcct

SEQ ID NO: 5356762 - DNA, 25 bp, Homo sapien
cagcaatgatattcttcatgcctga

SEQ ID NO: 5356763 - DNA, 25 bp, Homo sapien
attcttcatgcctgaaatggtcttt

SEQ ID NO: 5356764 - DNA, 25 bp, Homo sapien
ttataaaccacagttctcagaacat

SEQ ID NO: 5356765 - DNA, 25 bp, Homo sapien
ataaaccacagttctcagaacatac

SEQ ID NO: 5356766 - DNA, 25 bp, Homo sapien
tataaaccacagttctcagaacata

SEQ ID NO: 5356767 - DNA, 25 bp, Homo sapien
tctccaagggatgcaatattctcag

SEQ ID NO: 5356768 - DNA, 25 bp, Homo sapien
gggttccaccaagaatgctgatttc

SEQ ID NO: 5356769 - DNA, 25 bp, Homo sapien
tttttatccaaacatgcttgcaggc

SEQ ID NO: 5356770 - DNA, 25 bp, Homo sapien
cttttctttagccagatcattgagg

SEQ ID NO: 5356771 - DNA, 25 bp, Homo sapien
ctcttctgagacacaaacttaaata

SEQ ID NO: 5356772 - DNA, 25 bp, Homo sapien
ggcttcttgttactcagtcctggat

SEQ ID NO: 5356773 - DNA, 25 bp, Homo sapien
gcttaccttagatctttattgggac

SEQ ID NO: 5356774 - DNA, 25 bp, Homo sapien
catttatatgctgatgtgtcccaaa

SEQ ID NO: 5356775 - DNA, 25 bp, Homo sapien
ttagcaaggtgtcgctgagtatcag

SEQ ID NO: 5356776 - DNA, 25 bp, Homo sapien
tttcttagcaaggtgtcgctgagta

SEQ ID NO: 5356777 - DNA, 25 bp, Homo sapien
caaggtgtcgctgagtatcagaaag

SEQ ID NO: 5356778 - DNA, 25 bp, Homo sapien
agcaaggtgtcgctgagtatcagaa

SEQ ID NO: 5356779 - DNA, 25 bp, Homo sapien
ttgaccactgcctcacaacatacac

SEQ ID NO: 5356780 - DNA, 25 bp, Homo sapien
acactcctggtagggccgggtgcgg

SEQ ID NO: 5356781 - DNA, 25 bp, Homo sapien
aatacactcctggtagggccgggtg

SEQ ID NO: 5356782 - DNA, 25 bp, Homo sapien
cttgaccactgcctcacaacataca

SEQ ID NO: 5356783 - DNA, 25 bp, Homo sapien
tttgctccatacgttcatcatcaag

SEQ ID NO: 5356784 - DNA, 25 bp, Homo sapien
tccttcatcaaagtcatatttgaca

SEQ ID NO: 5356785 - DNA, 25 bp, Homo sapien
tttcggtatccattgcctttcttgc

SEQ ID NO: 5356786 - DNA, 25 bp, Homo sapien
gccaagttcactttcggtatccatt

SEQ ID NO: 5356787 - DNA, 25 bp, Homo sapien
gtacatactttgcaacctaacacca

SEQ ID NO: 5356788 - DNA, 25 bp, Homo sapien
gatgagaaagtagataagatccctg

SEQ ID NO: 5356789 - DNA, 25 bp, Homo sapien
tcgtagcaatatcaaatctgattag

SEQ ID NO: 5356790 - DNA, 25 bp, Homo sapien
tccactctttaggtagaataaacca

SEQ ID NO: 5356791 - DNA, 25 bp, Homo sapien
tatcctttgttccaggtgagccttc

SEQ ID NO: 5356792 - DNA, 25 bp, Homo sapien
ccaggtgagccttctcattaaatgc

SEQ ID NO: 5356793 - DNA, 25 bp, Homo sapien
ccagctcctctatcctttgttccag

SEQ ID NO: 5356794 - DNA, 25 bp, Homo sapien
ggtgagccttctcattaaatgctgt

SEQ ID NO: 5356795 - DNA, 25 bp, Homo sapien
atatattcacgtaaataaaatcctt

SEQ ID NO: 5356796 - DNA, 25 bp, Homo sapien
catatattcacgtaaataaaatcct

SEQ ID NO: 5356797 - DNA, 25 bp, Homo sapien
catcatttctcgtcgaagtcgggta

SEQ ID NO: 5356798 - DNA, 25 bp, Homo sapien
gcatgtgccgttgttgatttaggac

SEQ ID NO: 5356799 - DNA, 25 bp, Homo sapien
gatttaggactcttacagcttttca

SEQ ID NO: 5356800 - DNA, 25 bp, Homo sapien
tccactcgccggagaatagcatgtg

SEQ ID NO: 5356801 - DNA, 25 bp, Homo sapien
agaaggaagatcttgtctctctcag

SEQ ID NO: 5356802 - DNA, 25 bp, Homo sapien
aaatggcgctcatatttttccagca

SEQ ID NO: 5356803 - DNA, 25 bp, Homo sapien
taagaaccttgacattaccctgaat

SEQ ID NO: 5356804 - DNA, 25 bp, Homo sapien
gcatgcatttaagttcttcacgatc

SEQ ID NO: 5356805 - DNA, 25 bp, Homo sapien
tcttggacttttagacctacttcgc

SEQ ID NO: 5356806 - DNA, 25 bp, Homo sapien
ggacttttagacctacttcgcatca

SEQ ID NO: 5356807 - DNA, 25 bp, Homo sapien
tgggcgtcttggacttttagaccta

SEQ ID NO: 5356808 - DNA, 25 bp, Homo sapien
ttggtgatgggcgtcttggactttt

SEQ ID NO: 5356809 - DNA, 25 bp, Homo sapien
caaatgttgagcttcactcttatag

SEQ ID NO: 5356810 - DNA, 25 bp, Homo sapien
ctttctcaaatgttgagcttcactc

SEQ ID NO: 5356811 - DNA, 25 bp, Homo sapien
gttgagcttcactcttatagtgatc

SEQ ID NO: 5356812 - DNA, 25 bp, Homo sapien
cttcactcttatagtgatctttgtc

SEQ ID NO: 5356813 - DNA, 25 bp, Homo sapien
ctagaaggagatttattttgtgctt

SEQ ID NO: 5356814 - DNA, 25 bp, Homo sapien
ttattttgtgctttttcagtatcta

SEQ ID NO: 5356815 - DNA, 25 bp, Homo sapien
ttttgtgctttttcagtatctaaaa

SEQ ID NO: 5356816 - DNA, 25 bp, Homo sapien
tagaaggagatttattttgtgcttt

SEQ ID NO: 5356817 - DNA, 25 bp, Homo sapien
tattattttgctggcaaatgagatc

SEQ ID NO: 5356818 - DNA, 25 bp, Homo sapien
atattattttgctggcaaatgagat

SEQ ID NO: 5356819 - DNA, 25 bp, Homo sapien
ttattttgctggcaaatgagatcaa

SEQ ID NO: 5356820 - DNA, 25 bp, Homo sapien
tattttgctggcaaatgagatcaat

SEQ ID NO: 5356821 - DNA, 25 bp, Homo sapien
gaggtccacctagcaaggaacaggc

SEQ ID NO: 5356822 - DNA, 25 bp, Homo sapien
aagcaaccctagagagaggtccacc

SEQ ID NO: 5356823 - DNA, 25 bp, Homo sapien
tgagactgggtcatgctaagccctg

SEQ ID NO: 5356824 - DNA, 25 bp, Homo sapien
gaagtagatcctccagtagcagtca

SEQ ID NO: 5356825 - DNA, 25 bp, Homo sapien
tttgggaaattactctgttacagac

SEQ ID NO: 5356826 - DNA, 25 bp, Homo sapien
tatcagccattaggcagcaatggag

SEQ ID NO: 5356827 - DNA, 25 bp, Homo sapien
aacaaatagtccagaaagtcacaga

SEQ ID NO: 5356828 - DNA, 25 bp, Homo sapien
aactaaaacaatgtgatggtggcac

SEQ ID NO: 5356829 - DNA, 25 bp, Homo sapien
atgtatctattagtttgtagatatc

SEQ ID NO: 5356830 - DNA, 25 bp, Homo sapien
tgaaatcaattacatatgtgaaaat

SEQ ID NO: 5356831 - DNA, 25 bp, Homo sapien
aatgtatctattagtttgtagatat

SEQ ID NO: 5356832 - DNA, 25 bp, Homo sapien
tttaatgggtattgaaatcaattac

SEQ ID NO: 5356833 - DNA, 25 bp, Homo sapien
attcttccaagccatgatttgtctg

SEQ ID NO: 5356834 - DNA, 25 bp, Homo sapien
tggctggttaaatcatctacttgac

SEQ ID NO: 5356835 - DNA, 25 bp, Homo sapien
caaagatgctcattgtggctggtta

SEQ ID NO: 5356836 - DNA, 25 bp, Homo sapien
tccttgttggcggaatccaccacaa

SEQ ID NO: 5356837 - DNA, 25 bp, Homo sapien
tttgctgcctaatgtggaggaacac

SEQ ID NO: 5356838 - DNA, 25 bp, Homo sapien
ctgcctaatgtggaggaacacagct

SEQ ID NO: 5356839 - DNA, 25 bp, Homo sapien
ccttcccagcccactatcaaaccat

SEQ ID NO: 5356840 - DNA, 25 bp, Homo sapien
gcccactatcaaaccatcaatggat

SEQ ID NO: 5356841 - DNA, 25 bp, Homo sapien
aaaaaattagacccattgaacaatg

SEQ ID NO: 5356842 - DNA, 25 bp, Homo sapien
aaaattagacccattgaacaatgat

SEQ ID NO: 5356843 - DNA, 25 bp, Homo sapien
aaaaattagacccattgaacaatga

SEQ ID NO: 5356844 - DNA, 25 bp, Homo sapien
ctgccctcagggaactctttgttta

SEQ ID NO: 5356845 - DNA, 25 bp, Homo sapien
gacaaactacaggacgtgaaacaga

SEQ ID NO: 5356846 - DNA, 25 bp, Homo sapien
gcaacatgcacagaaactaggtaca

SEQ ID NO: 5356847 - DNA, 25 bp, Homo sapien
tatgccatgtttctcagcaacaaga

SEQ ID NO: 5356848 - DNA, 25 bp, Homo sapien
aaaatgtctgttaacttcccactgc

SEQ ID NO: 5356849 - DNA, 25 bp, Homo sapien
cagtttccgctgatagttgtgtcat

SEQ ID NO: 5356850 - DNA, 25 bp, Homo sapien
tagaactgttccattacaacgagac

SEQ ID NO: 5356851 - DNA, 25 bp, Homo sapien
gagaagtctcatacgccctttactc

SEQ ID NO: 5356852 - DNA, 25 bp, Homo sapien
tatcatacccagatacaccatgtgc

SEQ ID NO: 5356853 - DNA, 25 bp, Homo sapien
tcggcaatgcaagtgttccaatttc

SEQ ID NO: 5356854 - DNA, 25 bp, Homo sapien
cattgtaagcacatgccatattttg

SEQ ID NO: 5356855 - DNA, 25 bp, Homo sapien
cattataacaaccaccctaatgggt

SEQ ID NO: 5356856 - DNA, 25 bp, Homo sapien
gtatatacgtatctactggagtccg

SEQ ID NO: 5356857 - DNA, 25 bp, Homo sapien
tcatacatttcgtagccttttcagc

SEQ ID NO: 5356858 - DNA, 25 bp, Homo sapien
tactattccactgtataggtgtaca

SEQ ID NO: 5356859 - DNA, 25 bp, Homo sapien
gttttgacacacataggatgacatg

SEQ ID NO: 5356860 - DNA, 25 bp, Homo sapien
taggtgtacaacagtttgcttatcc

SEQ ID NO: 5356861 - DNA, 25 bp, Homo sapien
tacatgtcaagcatcaggagaacag

SEQ ID NO: 5356862 - DNA, 25 bp, Homo sapien
gatcttatgttttagcaggcctcct

SEQ ID NO: 5356863 - DNA, 25 bp, Homo sapien
gaattgagttcaaatcccggctaac

SEQ ID NO: 5356864 - DNA, 25 bp, Homo sapien
tagcagctgtctgcgacatacggag

SEQ ID NO: 5356865 - DNA, 25 bp, Homo sapien
gtaatttcagtgtcgagatgaatct

SEQ ID NO: 5356866 - DNA, 25 bp, Homo sapien
aatttcagtgtcgagatgaatctat

SEQ ID NO: 5356867 - DNA, 25 bp, Homo sapien
ctgtaatttcagtgtcgagatgaat

SEQ ID NO: 5356868 - DNA, 25 bp, Homo sapien
atttcagtgtcgagatgaatctatc

SEQ ID NO: 5356869 - DNA, 25 bp, Homo sapien
ttcagaaactggagcccctagacca

SEQ ID NO: 5356870 - DNA, 25 bp, Homo sapien
tcagaaactggagcccctagaccaa

SEQ ID NO: 5356871 - DNA, 25 bp, Homo sapien
ttgttctagctggagagtattctgg

SEQ ID NO: 5356872 - DNA, 25 bp, Homo sapien
gctggagagtattctggtagttttc

SEQ ID NO: 5356873 - DNA, 25 bp, Homo sapien
ttctgtgtgttgtccaaatggtact

SEQ ID NO: 5356874 - DNA, 25 bp, Homo sapien
gaatgaaacgactcctcactagagc

SEQ ID NO: 5356875 - DNA, 25 bp, Homo sapien
ttgcaacagttactgccccacctgg

SEQ ID NO: 5356876 - DNA, 25 bp, Homo sapien
tataaagctgcttggagatccctat

SEQ ID NO: 5356877 - DNA, 25 bp, Homo sapien
ggaacctcaacattagatctcacag

SEQ ID NO: 5356878 - DNA, 25 bp, Homo sapien
ccacaaattagttgaatttacactc

SEQ ID NO: 5356879 - DNA, 25 bp, Homo sapien
gtcttccacaaattagttgaattta

SEQ ID NO: 5356880 - DNA, 25 bp, Homo sapien
ccctaggcccccaactccctgacag

SEQ ID NO: 5356881 - DNA, 25 bp, Homo sapien
gaatatgtctttagagtgacttata

SEQ ID NO: 5356882 - DNA, 25 bp, Homo sapien
ctcggcccgccgtcctgcccagagc

SEQ ID NO: 5356883 - DNA, 25 bp, Homo sapien
tcctcggcccgccgtcctgcccaga

SEQ ID NO: 5356884 - DNA, 25 bp, Homo sapien
ccgggctcctcggcccgccgtcctg

SEQ ID NO: 5356885 - DNA, 25 bp, Homo sapien
gggctcctcggcccgccgtcctgcc

SEQ ID NO: 5356886 - DNA, 25 bp, Homo sapien
cggagtggggctcgtcttccacctc

SEQ ID NO: 5356887 - DNA, 25 bp, Homo sapien
ggcgccccagctttgcttccgtccc

SEQ ID NO: 5356888 - DNA, 25 bp, Homo sapien
cggcgccccagctttgcttccgtcc

SEQ ID NO: 5356889 - DNA, 25 bp, Homo sapien
cccagctttgcttccgtcccgctcg

SEQ ID NO: 5356890 - DNA, 25 bp, Homo sapien
ctggctcgaccttccttctcgcggg

SEQ ID NO: 5356891 - DNA, 25 bp, Homo sapien
tctcgcggggtctacaagccgtgcg

SEQ ID NO: 5356892 - DNA, 25 bp, Homo sapien
cgtgcgcgcgctcctacgcacggag

SEQ ID NO: 5356893 - DNA, 25 bp, Homo sapien
gagcgacgcgtacgtctacctgcct

SEQ ID NO: 5356894 - DNA, 25 bp, Homo sapien
ctagacgcccgagccgagcgtcccg

SEQ ID NO: 5356895 - DNA, 25 bp, Homo sapien
ttcctggcccatccgcgccgcgcag

SEQ ID NO: 5356896 - DNA, 25 bp, Homo sapien
cccacgcagcgcctagacgcccgag

SEQ ID NO: 5356897 - DNA, 25 bp, Homo sapien
gcagcgcctagacgcccgagccgag

SEQ ID NO: 5356898 - DNA, 25 bp, Homo sapien
gaaggcagtattagatattcctttg

SEQ ID NO: 5356899 - DNA, 25 bp, Homo sapien
attagatattcctttgatgaggaag

SEQ ID NO: 5356900 - DNA, 25 bp, Homo sapien
ttagatattcctttgatgaggaaga

SEQ ID NO: 5356901 - DNA, 25 bp, Homo sapien
gttatgcagcaaaacttagccgaaa

SEQ ID NO: 5356902 - DNA, 25 bp, Homo sapien
gatataaaccactatttgaggcagt

SEQ ID NO: 5356903 - DNA, 25 bp, Homo sapien
gcagcaaaacttagccgaaactatt

SEQ ID NO: 5356904 - DNA, 25 bp, Homo sapien
acccaccttgcccacgttagagata

SEQ ID NO: 5356905 - DNA, 25 bp, Homo sapien
tgatcagtagcctcagtgtgttttc

SEQ ID NO: 5356906 - DNA, 25 bp, Homo sapien
tgggaatgatcagtagcctcagtgt

SEQ ID NO: 5356907 - DNA, 25 bp, Homo sapien
tgagttggcaaatgggaatgatcag

SEQ ID NO: 5356908 - DNA, 25 bp, Homo sapien
caaatgggaatgatcagtagcctca

SEQ ID NO: 5356909 - DNA, 25 bp, Homo sapien
tgcccgtcgtgtgacctgactgctc

SEQ ID NO: 5356910 - DNA, 25 bp, Homo sapien
tgtaaagacccagcgtaatacctgt

SEQ ID NO: 5356911 - DNA, 25 bp, Homo sapien
catttggactcacttatttggagga

SEQ ID NO: 5356912 - DNA, 25 bp, Homo sapien
ctttcgagttacctgccatttggac

SEQ ID NO: 5356913 - DNA, 25 bp, Homo sapien
tattcgaacgtagcctgcgtccctg

SEQ ID NO: 5356914 - DNA, 25 bp, Homo sapien
tatgaccttcggtacttttattcga

SEQ ID NO: 5356915 - DNA, 25 bp, Homo sapien
tcacgcggggaagtcccatctgaac

SEQ ID NO: 5356916 - DNA, 25 bp, Homo sapien
gctggccgttatctctgtgctgtca

SEQ ID NO: 5356917 - DNA, 25 bp, Homo sapien
tgcgcgcccctccttctcttgcgct

SEQ ID NO: 5356918 - DNA, 25 bp, Homo sapien
gctccgcaggcggagagactaggcg

SEQ ID NO: 5356919 - DNA, 25 bp, Homo sapien
ggcggagagactaggcgcgatccct

SEQ ID NO: 5356920 - DNA, 25 bp, Homo sapien
gagactaggcgcgatccctgcgcgc

SEQ ID NO: 5356921 - DNA, 25 bp, Homo sapien
ttggctttaagatataggtaatgtg

SEQ ID NO: 5356922 - DNA, 25 bp, Homo sapien
tctcatttttctcgatgaacatttg

SEQ ID NO: 5356923 - DNA, 25 bp, Homo sapien
taagatataggtaatgtggctgagt

SEQ ID NO: 5356924 - DNA, 25 bp, Homo sapien
tataggtaatgtggctgagtgcagt

SEQ ID NO: 5356925 - DNA, 25 bp, Homo sapien
gaacagcttctaagatcggccggac

SEQ ID NO: 5356926 - DNA, 25 bp, Homo sapien
gaggaacagtctaccatgatatggg

SEQ ID NO: 5356927 - DNA, 25 bp, Homo sapien
gctggatgtgcaggctaccaaaaga

SEQ ID NO: 5356928 - DNA, 25 bp, Homo sapien
ggtaggcatcaaaatccttggcagg

SEQ ID NO: 5356929 - DNA, 25 bp, Homo sapien
atcaaattgataatcacattcacct

SEQ ID NO: 5356930 - DNA, 25 bp, Homo sapien
gctgcttatcatcaaattgataatc

SEQ ID NO: 5356931 - DNA, 25 bp, Homo sapien
atgctgcttatcatcaaattgataa

SEQ ID NO: 5356932 - DNA, 25 bp, Homo sapien
tatcatcaaattgataatcacattc

SEQ ID NO: 5356933 - DNA, 25 bp, Homo sapien
tcgggtactgggcaagataagcaaa

SEQ ID NO: 5356934 - DNA, 25 bp, Homo sapien
acgtggcatcgggtactgggcaaga

SEQ ID NO: 5356935 - DNA, 25 bp, Homo sapien
actgggcaagataagcaaagatact

SEQ ID NO: 5356936 - DNA, 25 bp, Homo sapien
tggcatcgggtactgggcaagataa

SEQ ID NO: 5356937 - DNA, 25 bp, Homo sapien
agattcagtattatcagcacctgaa

SEQ ID NO: 5356938 - DNA, 25 bp, Homo sapien
gattcagtattatcagcacctgaac

SEQ ID NO: 5356939 - DNA, 25 bp, Homo sapien
aaatccaatattcacttaaagtaga

SEQ ID NO: 5356940 - DNA, 25 bp, Homo sapien
ccaatattcacttaaagtagacata

SEQ ID NO: 5356941 - DNA, 25 bp, Homo sapien
tccaatattcacttaaagtagacat

SEQ ID NO: 5356942 - DNA, 25 bp, Homo sapien
aatccaatattcacttaaagtagac

SEQ ID NO: 5356943 - DNA, 25 bp, Homo sapien
tcttatgaaaaatgtctactgttgt

SEQ ID NO: 5356944 - DNA, 25 bp, Homo sapien
caaaatcacaatatccaagggaaaa

SEQ ID NO: 5356945 - DNA, 25 bp, Homo sapien
aatcacaatatccaagggaaaaacg

SEQ ID NO: 5356946 - DNA, 25 bp, Homo sapien
cacaatatccaagggaaaaacgact

SEQ ID NO: 5356947 - DNA, 25 bp, Homo sapien
aatcaaaatcacaatatccaaggga

SEQ ID NO: 5356948 - DNA, 25 bp, Homo sapien
tgatacaaaaacagtgctacacatt

SEQ ID NO: 5356949 - DNA, 25 bp, Homo sapien
aaacagtgctacacatttactcata

SEQ ID NO: 5356950 - DNA, 25 bp, Homo sapien
cagtgctacacatttactcataaga

SEQ ID NO: 5356951 - DNA, 25 bp, Homo sapien
caaaaacagtgctacacatttactc

SEQ ID NO: 5356952 - DNA, 25 bp, Homo sapien
aaataatcaagtccccttccaatct

SEQ ID NO: 5356953 - DNA, 25 bp, Homo sapien
cccttccaatcttaatcatccatcc

SEQ ID NO: 5356954 - DNA, 25 bp, Homo sapien
ccccttccaatcttaatcatccatc

SEQ ID NO: 5356955 - DNA, 25 bp, Homo sapien
caggcctctactttgctgcacttgc

SEQ ID NO: 5356956 - DNA, 25 bp, Homo sapien
aagagtattgaacttccaacagcac

SEQ ID NO: 5356957 - DNA, 25 bp, Homo sapien
taatttctcggtcatgtattgaaga

SEQ ID NO: 5356958 - DNA, 25 bp, Homo sapien
caacagcactccgtgactcctgagt

SEQ ID NO: 5356959 - DNA, 25 bp, Homo sapien
taatgtgaacataactccatcctgt

SEQ ID NO: 5356960 - DNA, 25 bp, Homo sapien
gctatacaatctatatcacaggtgg

SEQ ID NO: 5356961 - DNA, 25 bp, Homo sapien
aaaatacgattatctgccgcagtta

SEQ ID NO: 5356962 - DNA, 25 bp, Homo sapien
tcacaggtggattaagatggaaatg

SEQ ID NO: 5356963 - DNA, 25 bp, Homo sapien
ccttgactggactacatcttgtaac

SEQ ID NO: 5356964 - DNA, 25 bp, Homo sapien
ttctccttgactggactacatcttg

SEQ ID NO: 5356965 - DNA, 25 bp, Homo sapien
tctccttgactggactacatcttgt

SEQ ID NO: 5356966 - DNA, 25 bp, Homo sapien
tgttctccttgactggactacatct

SEQ ID NO: 5356967 - DNA, 25 bp, Homo sapien
ttcatccagagaggtgagaaggtga

SEQ ID NO: 5356968 - DNA, 25 bp, Homo sapien
gaggtgagaaggtgaatagttttta

SEQ ID NO: 5356969 - DNA, 25 bp, Homo sapien
agaggtgagaaggtgaatagttttt

SEQ ID NO: 5356970 - DNA, 25 bp, Homo sapien
atccagagaggtgagaaggtgaata

SEQ ID NO: 5356971 - DNA, 25 bp, Homo sapien
gcatctcacaaaatcgaagaaagtt

SEQ ID NO: 5356972 - DNA, 25 bp, Homo sapien
taataagcatctcacaaaatcgaag

SEQ ID NO: 5356973 - DNA, 25 bp, Homo sapien
cacaaaatcgaagaaagttatacag

SEQ ID NO: 5356974 - DNA, 25 bp, Homo sapien
tacatggtctcttaataagcatctc

SEQ ID NO: 5356975 - DNA, 25 bp, Homo sapien
ttactaatttagtacattgaatatg

SEQ ID NO: 5356976 - DNA, 25 bp, Homo sapien
ctaatttagtacattgaatatgata

SEQ ID NO: 5356977 - DNA, 25 bp, Homo sapien
gattattactaatttagtacattga

SEQ ID NO: 5356978 - DNA, 25 bp, Homo sapien
ggattattactaatttagtacattg

SEQ ID NO: 5356979 - DNA, 25 bp, Homo sapien
tcttctatccaaacttctgtaactg

SEQ ID NO: 5356980 - DNA, 25 bp, Homo sapien
tgtaactgtctcattaaggtattcg

SEQ ID NO: 5356981 - DNA, 25 bp, Homo sapien
taaggatcttctatccaaacttctg

SEQ ID NO: 5356982 - DNA, 25 bp, Homo sapien
taaggtattcgcgaaaaagtgactc

SEQ ID NO: 5356983 - DNA, 25 bp, Homo sapien
aaagtctttcttggcacgtgtacag

SEQ ID NO: 5356984 - DNA, 25 bp, Homo sapien
ttttgagggcagcagtacctttggc

SEQ ID NO: 5356985 - DNA, 25 bp, Homo sapien
aataactccctgtcgccatgggtag

SEQ ID NO: 5356986 - DNA, 25 bp, Homo sapien
taaacatgaatgcagggcagagcgc

SEQ ID NO: 5356987 - DNA, 25 bp, Homo sapien
catagggtccacacataagcttcat

SEQ ID NO: 5356988 - DNA, 25 bp, Homo sapien
taagctcccagggacaactggtcca

SEQ ID NO: 5356989 - DNA, 25 bp, Homo sapien
tgtgaaccccttaaaaatggcatgg

SEQ ID NO: 5356990 - DNA, 25 bp, Homo sapien
aaacattgggtgaatggacagtcac

SEQ ID NO: 5356991 - DNA, 25 bp, Homo sapien
ttccgctctgtccatgtatttggaa

SEQ ID NO: 5356992 - DNA, 25 bp, Homo sapien
ttcttggtccaagtacttctttatg

SEQ ID NO: 5356993 - DNA, 25 bp, Homo sapien
cttctttatgttttccgctctgtcc

SEQ ID NO: 5356994 - DNA, 25 bp, Homo sapien
tcttggtccaagtacttctttatgt

SEQ ID NO: 5356995 - DNA, 25 bp, Homo sapien
ctgagattacatctcttagtattat

SEQ ID NO: 5356996 - DNA, 25 bp, Homo sapien
catctcttagtattatctttggtac

SEQ ID NO: 5356997 - DNA, 25 bp, Homo sapien
tacatctcttagtattatctttggt

SEQ ID NO: 5356998 - DNA, 25 bp, Homo sapien
gagattacatctcttagtattatct

SEQ ID NO: 5356999 - DNA, 25 bp, Homo sapien
tcctatcctctagtatggcttgcct

SEQ ID NO: 5357000 - DNA, 25 bp, Homo sapien
gacactatgtctcatctctgggaca

SEQ ID NO: 5357001 - DNA, 25 bp, Homo sapien
tatttacacgaagcgtgatgcagct

SEQ ID NO: 5357002 - DNA, 25 bp, Homo sapien
aaaggtggctcattacatgtcaaac

SEQ ID NO: 5357003 - DNA, 25 bp, Homo sapien
ccttcattctagctatgttgaaaca

SEQ ID NO: 5357004 - DNA, 25 bp, Homo sapien
tgcacctggcatctaactgtaattt

SEQ ID NO: 5357005 - DNA, 25 bp, Homo sapien
acaatttcctacaagtttgtccatg

SEQ ID NO: 5357006 - DNA, 25 bp, Homo sapien
ccctattgtgtaataagacaccaga

SEQ ID NO: 5357007 - DNA, 25 bp, Homo sapien
taaaatctcctggtagtcaaggcca

SEQ ID NO: 5357008 - DNA, 25 bp, Homo sapien
taacctctacgggatcagtgaagca

SEQ ID NO: 5357009 - DNA, 25 bp, Homo sapien
gcttcagattcctagtgcagccaaa

SEQ ID NO: 5357010 - DNA, 25 bp, Homo sapien
tattgagaactaacaacatgcccag

SEQ ID NO: 5357011 - DNA, 25 bp, Homo sapien
ggtaacacaccagagcctgcggata

SEQ ID NO: 5357012 - DNA, 25 bp, Homo sapien
tgcaggagcagatcaatcccctctt

SEQ ID NO: 5357013 - DNA, 25 bp, Homo sapien
tactgcccgctttagcacagtggct

SEQ ID NO: 5357014 - DNA, 25 bp, Homo sapien
ggataccgcgactccgaatctagtt

SEQ ID NO: 5357015 - DNA, 25 bp, Homo sapien
ccgcctcaacccaggatgaagttga

SEQ ID NO: 5357016 - DNA, 25 bp, Homo sapien
agttgagcgggtctgctgcgcttcc

SEQ ID NO: 5357017 - DNA, 25 bp, Homo sapien
aggatgaagttgagcgggtctgctg

SEQ ID NO: 5357018 - DNA, 25 bp, Homo sapien
cgcctcaacccaggatgaagttgag

SEQ ID NO: 5357019 - DNA, 25 bp, Homo sapien
ctgcgctctctttctagggactttc

SEQ ID NO: 5357020 - DNA, 25 bp, Homo sapien
gcctgcgctctctttctagggactt

SEQ ID NO: 5357021 - DNA, 25 bp, Homo sapien
caggcgcctgcgctctctttctagg

SEQ ID NO: 5357022 - DNA, 25 bp, Homo sapien
ggcgcctgcgctctctttctaggga

SEQ ID NO: 5357023 - DNA, 25 bp, Homo sapien
tccaaagctgaccaaaacatggtcc

SEQ ID NO: 5357024 - DNA, 25 bp, Homo sapien
aacatctgcgtttgggtctactgcc

SEQ ID NO: 5357025 - DNA, 25 bp, Homo sapien
gctctttgcatgaacactgtgcaag

SEQ ID NO: 5357026 - DNA, 25 bp, Homo sapien
cactggatgccagctagattatctg

SEQ ID NO: 5357027 - DNA, 25 bp, Homo sapien
tagtgaaaatatgggcataggccag

SEQ ID NO: 5357028 - DNA, 25 bp, Homo sapien
tgtctggccaggtgctcattgtagc

SEQ ID NO: 5357029 - DNA, 25 bp, Homo sapien
cacaatgtttgtgggtcggaagtct

SEQ ID NO: 5357030 - DNA, 25 bp, Homo sapien
tcagtgctggaaaaacgtgtctggc

SEQ ID NO: 5357031 - DNA, 25 bp, Homo sapien
caatcctggaccttatcatagtggc

SEQ ID NO: 5357032 - DNA, 25 bp, Homo sapien
acctttaaggacgactgcagttctc

SEQ ID NO: 5357033 - DNA, 25 bp, Homo sapien
gattgctttgtttagtgtcacctgc

SEQ ID NO: 5357034 - DNA, 25 bp, Homo sapien
tttgcctgacatctggtggtgaccg

SEQ ID NO: 5357035 - DNA, 25 bp, Homo sapien
tccatccgacccctaccatgtgctt

SEQ ID NO: 5357036 - DNA, 25 bp, Homo sapien
ctagcctttacccactggcaaggag

SEQ ID NO: 5357037 - DNA, 25 bp, Homo sapien
caggcttcaaagcaggtaaacttct

SEQ ID NO: 5357038 - DNA, 25 bp, Homo sapien
gcttcaaagcaggtaaacttctatc

SEQ ID NO: 5357039 - DNA, 25 bp, Homo sapien
cacaggcttcaaagcaggtaaactt

SEQ ID NO: 5357040 - DNA, 25 bp, Homo sapien
ttcccaatgcacctatatccttatc

SEQ ID NO: 5357041 - DNA, 25 bp, Homo sapien
tcccaatgcacctatatccttatca

SEQ ID NO: 5357042 - DNA, 25 bp, Homo sapien
tcttcccaatgcacctatatcctta

SEQ ID NO: 5357043 - DNA, 25 bp, Homo sapien
ccctcttcccaatgcacctatatcc

SEQ ID NO: 5357044 - DNA, 25 bp, Homo sapien
tgtggagagcgttcttagaggtcac

SEQ ID NO: 5357045 - DNA, 25 bp, Homo sapien
tcttagaggtcaccggtgtggaagc

SEQ ID NO: 5357046 - DNA, 25 bp, Homo sapien
ttcttagaggtcaccggtgtggaag

SEQ ID NO: 5357047 - DNA, 25 bp, Homo sapien
tcaatcatcagtgtggagagcgttc

SEQ ID NO: 5357048 - DNA, 25 bp, Homo sapien
ccatgaagctagaattccatcccta

SEQ ID NO: 5357049 - DNA, 25 bp, Homo sapien
ctggcttacgagtcaggaacttctc

SEQ ID NO: 5357050 - DNA, 25 bp, Homo sapien
tccattgtcccatggattggctggc

SEQ ID NO: 5357051 - DNA, 25 bp, Homo sapien
tcagttggctctcagtttcccatga

SEQ ID NO: 5357052 - DNA, 25 bp, Homo sapien
tacaacacattcacgtaaaactctc

SEQ ID NO: 5357053 - DNA, 25 bp, Homo sapien
gccagtgttgtatacaacacattca

SEQ ID NO: 5357054 - DNA, 25 bp, Homo sapien
taaaactctcaaaggcggccatctg

SEQ ID NO: 5357055 - DNA, 25 bp, Homo sapien
cattcacgtaaaactctcaaaggcg

SEQ ID NO: 5357056 - DNA, 25 bp, Homo sapien
ctagaagctttgtcttttatagaac

SEQ ID NO: 5357057 - DNA, 25 bp, Homo sapien
gtccgatggggtggcaatcgcttca

SEQ ID NO: 5357058 - DNA, 25 bp, Homo sapien
acgaagtcattgtctatgtccgatg

SEQ ID NO: 5357059 - DNA, 25 bp, Homo sapien
gaagtcattgtctatgtccgatggg

SEQ ID NO: 5357060 - DNA, 25 bp, Homo sapien
caatgatatcattgacgaagtcatt

SEQ ID NO: 5357061 - DNA, 25 bp, Homo sapien
actgctgaccccgtggaaatgctcc

SEQ ID NO: 5357062 - DNA, 25 bp, Homo sapien
cagtaagcaatgaataagaacccca

SEQ ID NO: 5357063 - DNA, 25 bp, Homo sapien
tcccagggagtctcgggtcacactg

SEQ ID NO: 5357064 - DNA, 25 bp, Homo sapien
gatggaggacctctcaaagtaactc

SEQ ID NO: 5357065 - DNA, 25 bp, Homo sapien
aacaaagtactcagaatacagccta

SEQ ID NO: 5357066 - DNA, 25 bp, Homo sapien
acaaagtactcagaatacagcctac

SEQ ID NO: 5357067 - DNA, 25 bp, Homo sapien
ttaaacaaagtactcagaatacagc

SEQ ID NO: 5357068 - DNA, 25 bp, Homo sapien
taaacaaagtactcagaatacagcc

SEQ ID NO: 5357069 - DNA, 25 bp, Homo sapien
ggtgctgagcaacactccacgtggg

SEQ ID NO: 5357070 - DNA, 25 bp, Homo sapien
tctctgttagaatcccagtagcctg

SEQ ID NO: 5357071 - DNA, 25 bp, Homo sapien
cagggtggtacgtttgtttatcaag

SEQ ID NO: 5357072 - DNA, 25 bp, Homo sapien
aaaggtgctctttgctatcccaggc

SEQ ID NO: 5357073 - DNA, 25 bp, Homo sapien
tcaagccaaatttaagtcccctgtg

SEQ ID NO: 5357074 - DNA, 25 bp, Homo sapien
cagagtctggtaaggttttatggcc

SEQ ID NO: 5357075 - DNA, 25 bp, Homo sapien
cttgcaggacagatccgccatggct

SEQ ID NO: 5357076 - DNA, 25 bp, Homo sapien
cagcagggtccacgcaatgtctctg

SEQ ID NO: 5357077 - DNA, 25 bp, Homo sapien
acactgtttgcatcacaagtggccc

SEQ ID NO: 5357078 - DNA, 25 bp, Homo sapien
actgtttgcatcacaagtggcccca

SEQ ID NO: 5357079 - DNA, 25 bp, Homo sapien
tcacactgtttgcatcacaagtggc

SEQ ID NO: 5357080 - DNA, 25 bp, Homo sapien
ctgtttgcatcacaagtggccccag

SEQ ID NO: 5357081 - DNA, 25 bp, Homo sapien
ccatagcagccgtggtacaggcgtg

SEQ ID NO: 5357082 - DNA, 25 bp, Homo sapien
tacaggcgtggatgtaggtgaggct

SEQ ID NO: 5357083 - DNA, 25 bp, Homo sapien
atgtaggtgaggcttcattgagtga

SEQ ID NO: 5357084 - DNA, 25 bp, Homo sapien
gtccccatagcagccgtggtacagg

SEQ ID NO: 5357085 - DNA, 25 bp, Homo sapien
aaggggtatgagcccctggaagtgc

SEQ ID NO: 5357086 - DNA, 25 bp, Homo sapien
tgaaggggtatgagcccctggaagt

SEQ ID NO: 5357087 - DNA, 25 bp, Homo sapien
gaaggggtatgagcccctggaagtg

SEQ ID NO: 5357088 - DNA, 25 bp, Homo sapien
ctgaaggggtatgagcccctggaag

SEQ ID NO: 5357089 - DNA, 25 bp, Homo sapien
tgagggcaattagtccccaaaacac

SEQ ID NO: 5357090 - DNA, 25 bp, Homo sapien
caatgagggcaattagtccccaaaa

SEQ ID NO: 5357091 - DNA, 25 bp, Homo sapien
atgagggcaattagtccccaaaaca

SEQ ID NO: 5357092 - DNA, 25 bp, Homo sapien
ggcggggaatcttatcttccaggac

SEQ ID NO: 5357093 - DNA, 25 bp, Homo sapien
caaactgcacttcaagcttttacaa

SEQ ID NO: 5357094 - DNA, 25 bp, Homo sapien
tgcacttcaagcttttacaaagcga

SEQ ID NO: 5357095 - DNA, 25 bp, Homo sapien
agcttttacaaagcgacggcctttg

SEQ ID NO: 5357096 - DNA, 25 bp, Homo sapien
cgacggcctttgtcctgtaacatag

SEQ ID NO: 5357097 - DNA, 25 bp, Homo sapien
tcatgataggtgaacttggctcctt

SEQ ID NO: 5357098 - DNA, 25 bp, Homo sapien
gatcatgataggtgaacttggctcc

SEQ ID NO: 5357099 - DNA, 25 bp, Homo sapien
catgataggtgaacttggctcctta

SEQ ID NO: 5357100 - DNA, 25 bp, Homo sapien
atgatcatgataggtgaacttggct

SEQ ID NO: 5357101 - DNA, 25 bp, Homo sapien
tgcaaaaccagggagtagcaacgtg

SEQ ID NO: 5357102 - DNA, 25 bp, Homo sapien
ctaggagatcaatgcaaaaccaggg

SEQ ID NO: 5357103 - DNA, 25 bp, Homo sapien
aaccagggagtagcaacgtgagtgc

SEQ ID NO: 5357104 - DNA, 25 bp, Homo sapien
gatcaatgcaaaaccagggagtagc

SEQ ID NO: 5357105 - DNA, 25 bp, Homo sapien
aaagattatagccagggatgaaaac

SEQ ID NO: 5357106 - DNA, 25 bp, Homo sapien
gaggaagcatattgtgcagccccag

SEQ ID NO: 5357107 - DNA, 25 bp, Homo sapien
ttcaggcttatgtccaaaggaagag

SEQ ID NO: 5357108 - DNA, 25 bp, Homo sapien
caggaaatggaagggacgttcttga

SEQ ID NO: 5357109 - DNA, 25 bp, Homo sapien
caggaccactcttgaataagggata

SEQ ID NO: 5357110 - DNA, 25 bp, Homo sapien
tattgcaggagtctaactgccctga

SEQ ID NO: 5357111 - DNA, 25 bp, Homo sapien
tgactctcaggaaagtgacccatgg

SEQ ID NO: 5357112 - DNA, 25 bp, Homo sapien
tgaggcaggccttagaaacccatag

SEQ ID NO: 5357113 - DNA, 25 bp, Homo sapien
gaagaatctccacaaccattagcag

SEQ ID NO: 5357114 - DNA, 25 bp, Homo sapien
caataggattatttggtcaggtaat

SEQ ID NO: 5357115 - DNA, 25 bp, Homo sapien
gaccccaggcagtcacttacctaga

SEQ ID NO: 5357116 - DNA, 25 bp, Homo sapien
gaaggacttgtgtcaaagacagtcc

SEQ ID NO: 5357117 - DNA, 25 bp, Homo sapien
tctttcttgcgtgaatttgggcctc

SEQ ID NO: 5357118 - DNA, 25 bp, Homo sapien
caatccaccaatgcagaaaccatgg

SEQ ID NO: 5357119 - DNA, 25 bp, Homo sapien
aaattcacctattgacacaccctcg

SEQ ID NO: 5357120 - DNA, 25 bp, Homo sapien
gagcaatccctaataaatggccttg

SEQ ID NO: 5357121 - DNA, 25 bp, Homo sapien
ctgtgtaacatttgaggctgcatat

SEQ ID NO: 5357122 - DNA, 25 bp, Homo sapien
gattcccagttacaggtgcccttgg

SEQ ID NO: 5357123 - DNA, 25 bp, Homo sapien
gcccttggctagttttatctgtgta

SEQ ID NO: 5357124 - DNA, 25 bp, Homo sapien
taatgacttttaggtcaaactcaga

SEQ ID NO: 5357125 - DNA, 25 bp, Homo sapien
ttagaagccatgtctcttgaggtac

SEQ ID NO: 5357126 - DNA, 25 bp, Homo sapien
caggtcctggctgcttcggacatag

SEQ ID NO: 5357127 - DNA, 25 bp, Homo sapien
tcctggctgcttcggacatagccag

SEQ ID NO: 5357128 - DNA, 25 bp, Homo sapien
agcacccccactgtaggcacagagt

SEQ ID NO: 5357129 - DNA, 25 bp, Homo sapien
ggctgcttcggacatagccagcacc

SEQ ID NO: 5357130 - DNA, 25 bp, Homo sapien
caggttggaaacctcctctggattt

SEQ ID NO: 5357131 - DNA, 25 bp, Homo sapien
gagactcactaatccaggatgtggg

SEQ ID NO: 5357132 - DNA, 25 bp, Homo sapien
tcactaatccaggatgtgggagctt

SEQ ID NO: 5357133 - DNA, 25 bp, Homo sapien
cagaacttcagttgtctgggaaacc

SEQ ID NO: 5357134 - DNA, 25 bp, Homo sapien
taatccaggatgtgggagcttgaga

SEQ ID NO: 5357135 - DNA, 25 bp, Homo sapien
ttgtcaccgggagacttcctggaca

SEQ ID NO: 5357136 - DNA, 25 bp, Homo sapien
gtcctatcgcccatgttgaccagaa

SEQ ID NO: 5357137 - DNA, 25 bp, Homo sapien
accatgctagtcctatcgcccatgt

SEQ ID NO: 5357138 - DNA, 25 bp, Homo sapien
accagaattttgtcaccgggagact

SEQ ID NO: 5357139 - DNA, 25 bp, Homo sapien
gccaatggtttgcatcatgggttga

SEQ ID NO: 5357140 - DNA, 25 bp, Homo sapien
catgcagtacttttggccaatggtt

SEQ ID NO: 5357141 - DNA, 25 bp, Homo sapien
cgatcacggcaggatccatgcagta

SEQ ID NO: 5357142 - DNA, 25 bp, Homo sapien
tatttcaggaggtatggcatgtcta

SEQ ID NO: 5357143 - DNA, 25 bp, Homo sapien
ttcaggccgtgacgtcttccaatcc

SEQ ID NO: 5357144 - DNA, 25 bp, Homo sapien
ccaggggtgtccaggctttggatgt

SEQ ID NO: 5357145 - DNA, 25 bp, Homo sapien
gtagttcaggccgtgacgtcttcca

SEQ ID NO: 5357146 - DNA, 25 bp, Homo sapien
cacagtagttcaggccgtgacgtct

SEQ ID NO: 5357147 - DNA, 25 bp, Homo sapien
cagacatgagtaactactggagcta

SEQ ID NO: 5357148 - DNA, 25 bp, Homo sapien
acactctttgtaaagctctggtgcc

SEQ ID NO: 5357149 - DNA, 25 bp, Homo sapien
ggtgccctttgatgttgtcaggtgg

SEQ ID NO: 5357150 - DNA, 25 bp, Homo sapien
ggagctattgaagcagttacactct

SEQ ID NO: 5357151 - DNA, 25 bp, Homo sapien
gagaggatttgttccctgtaaagta

SEQ ID NO: 5357152 - DNA, 25 bp, Homo sapien
tttgttccctgtaaagtagtcctca

SEQ ID NO: 5357153 - DNA, 25 bp, Homo sapien
ttgttccctgtaaagtagtcctcat

SEQ ID NO: 5357154 - DNA, 25 bp, Homo sapien
agaggatttgttccctgtaaagtag

SEQ ID NO: 5357155 - DNA, 25 bp, Homo sapien
ccatcagggcaaggaggcccagcag

SEQ ID NO: 5357156 - DNA, 25 bp, Homo sapien
ggcccagcagcagccacaatgcaga

SEQ ID NO: 5357157 - DNA, 25 bp, Homo sapien
ccagcagcagccacaatgcagacat

SEQ ID NO: 5357158 - DNA, 25 bp, Homo sapien
aggcccagcagcagccacaatgcag

SEQ ID NO: 5357159 - DNA, 25 bp, Homo sapien
tgacgatctggctctacggctcctg

SEQ ID NO: 5357160 - DNA, 25 bp, Homo sapien
gatgacgatctggctctacggctcc

SEQ ID NO: 5357161 - DNA, 25 bp, Homo sapien
atgacgatctggctctacggctcct

SEQ ID NO: 5357162 - DNA, 25 bp, Homo sapien
cccaaagcactgtgtaagtttgtaa

SEQ ID NO: 5357163 - DNA, 25 bp, Homo sapien
ccactgagtactttggaattcccaa

SEQ ID NO: 5357164 - DNA, 25 bp, Homo sapien
ggcataatggaccatgtcttcttca

SEQ ID NO: 5357165 - DNA, 25 bp, Homo sapien
tgtgtaagtttgtaaggcataatgg

SEQ ID NO: 5357166 - DNA, 25 bp, Homo sapien
tatgctggagatttccccgtgaacg

SEQ ID NO: 5357167 - DNA, 25 bp, Homo sapien
tgttacgctgcgtagagctgcacct

SEQ ID NO: 5357168 - DNA, 25 bp, Homo sapien
tccctgcatagagacactgtgagct

SEQ ID NO: 5357169 - DNA, 25 bp, Homo sapien
aaatcagggagacttggcccctctg

SEQ ID NO: 5357170 - DNA, 25 bp, Homo sapien
ttcttatgcagcagagacacaatca

SEQ ID NO: 5357171 - DNA, 25 bp, Homo sapien
gcaaggtccttaagtttcgcctgag

SEQ ID NO: 5357172 - DNA, 25 bp, Homo sapien
gatcaccatacactggattttcatc

SEQ ID NO: 5357173 - DNA, 25 bp, Homo sapien
caataagcccgagtgtaagatccat

SEQ ID NO: 5357174 - DNA, 25 bp, Homo sapien
cctccttagaggtggtgagcccaca

SEQ ID NO: 5357175 - DNA, 25 bp, Homo sapien
cttcagtcagtgctcctccttagag

SEQ ID NO: 5357176 - DNA, 25 bp, Homo sapien
atatagagtcctgttctcttgttaa

SEQ ID NO: 5357177 - DNA, 25 bp, Homo sapien
gcccacagcgatttatatagagtcc

SEQ ID NO: 5357178 - DNA, 25 bp, Homo sapien
ttggagagatttatgacatctcata

SEQ ID NO: 5357179 - DNA, 25 bp, Homo sapien
ctattttggagagatttatgacatc

SEQ ID NO: 5357180 - DNA, 25 bp, Homo sapien
gagagatttatgacatctcataaat

SEQ ID NO: 5357181 - DNA, 25 bp, Homo sapien
gagatttatgacatctcataaatta

SEQ ID NO: 5357182 - DNA, 25 bp, Homo sapien
aagatgaagttttaggctgggtgga

SEQ ID NO: 5357183 - DNA, 25 bp, Homo sapien
gatgaagttttaggctgggtggagt

SEQ ID NO: 5357184 - DNA, 25 bp, Homo sapien
ttaggaggtcaaggcacttcaagac

SEQ ID NO: 5357185 - DNA, 25 bp, Homo sapien
ggaggtcaaggcacttcaagaccag

SEQ ID NO: 5357186 - DNA, 25 bp, Homo sapien
cagacagttttatgaaggccataag

SEQ ID NO: 5357187 - DNA, 25 bp, Homo sapien
tagcccaaggatgctaatgacaagc

SEQ ID NO: 5357188 - DNA, 25 bp, Homo sapien
aagaccctggcagtcatctctaagg

SEQ ID NO: 5357189 - DNA, 25 bp, Homo sapien
aagcccacaccccttattctgtgga

SEQ ID NO: 5357190 - DNA, 25 bp, Homo sapien
gcatacaatgttagaagccaccctg

SEQ ID NO: 5357191 - DNA, 25 bp, Homo sapien
caagaccatcttgtgctgggtgcag

SEQ ID NO: 5357192 - DNA, 25 bp, Homo sapien
aacagttctagcctgccattgacag

SEQ ID NO: 5357193 - DNA, 25 bp, Homo sapien
gattttgcactgattgctctgcgga

SEQ ID NO: 5357194 - DNA, 25 bp, Homo sapien
ttattataatcatcctggctggtgc

SEQ ID NO: 5357195 - DNA, 25 bp, Homo sapien
catgtacttactgcccaactgtcca

SEQ ID NO: 5357196 - DNA, 25 bp, Homo sapien
ctggtgcaaagtgggatgtcattgt

SEQ ID NO: 5357197 - DNA, 25 bp, Homo sapien
ttcttttgggaagacgtacagatcc

SEQ ID NO: 5357198 - DNA, 25 bp, Homo sapien
caagtagttatgaggtggatgccac

SEQ ID NO: 5357199 - DNA, 25 bp, Homo sapien
gaaagaattctctacacattccgga

SEQ ID NO: 5357200 - DNA, 25 bp, Homo sapien
tcaactgactacaaaacacaagggt

SEQ ID NO: 5357201 - DNA, 25 bp, Homo sapien
gccctaagttttgatatccgagtga

SEQ ID NO: 5357202 - DNA, 25 bp, Homo sapien
taagtccacttaccctgaagtatgc

SEQ ID NO: 5357203 - DNA, 25 bp, Homo sapien
cagctctggatagtaatttccctcc

SEQ ID NO: 5357204 - DNA, 25 bp, Homo sapien
tgaggactggatattttagacactg

SEQ ID NO: 5357205 - DNA, 25 bp, Homo sapien
tcctcagagtacagtctgggcgtgt

SEQ ID NO: 5357206 - DNA, 25 bp, Homo sapien
gttccttatgctgttatttcaaaag

SEQ ID NO: 5357207 - DNA, 25 bp, Homo sapien
tgagcagagacagtgaagttcctta

SEQ ID NO: 5357208 - DNA, 25 bp, Homo sapien
gaagttccttatgctgttatttcaa

SEQ ID NO: 5357209 - DNA, 25 bp, Homo sapien
gagacagtgaagttccttatgctgt

SEQ ID NO: 5357210 - DNA, 25 bp, Homo sapien
aatacaagcaatcaggaccctttaa

SEQ ID NO: 5357211 - DNA, 25 bp, Homo sapien
tcaggaccctttaaataaggcagta

SEQ ID NO: 5357212 - DNA, 25 bp, Homo sapien
taaaatacaagcaatcaggaccctt

SEQ ID NO: 5357213 - DNA, 25 bp, Homo sapien
aggaccctttaaataaggcagtatg

SEQ ID NO: 5357214 - DNA, 25 bp, Homo sapien
tcaaaaatagagaatccagaccctt

SEQ ID NO: 5357215 - DNA, 25 bp, Homo sapien
gacacttttcgatgtgatacaactg

SEQ ID NO: 5357216 - DNA, 25 bp, Homo sapien
tcatttacaagtgcagtattgcgct

SEQ ID NO: 5357217 - DNA, 25 bp, Homo sapien
cgagaatatgagtatttaggtgacc

SEQ ID NO: 5357218 - DNA, 25 bp, Homo sapien
tccagctttgtgaagtttgttccaa

SEQ ID NO: 5357219 - DNA, 25 bp, Homo sapien
ttccagctttgtgaagtttgttcca

SEQ ID NO: 5357220 - DNA, 25 bp, Homo sapien
ccagctttgtgaagtttgttccaaa

SEQ ID NO: 5357221 - DNA, 25 bp, Homo sapien
agctttgtgaagtttgttccaaatt

SEQ ID NO: 5357222 - DNA, 25 bp, Homo sapien
cagtgctcagttgtcaccggaaatg

SEQ ID NO: 5357223 - DNA, 25 bp, Homo sapien
tgcccgtcaaaaatcgataatctga

SEQ ID NO: 5357224 - DNA, 25 bp, Homo sapien
aatgagagaaaccatcacacacctc

SEQ ID NO: 5357225 - DNA, 25 bp, Homo sapien
tgctgcatttttggtatgaaggaca

SEQ ID NO: 5357226 - DNA, 25 bp, Homo sapien
tttcggcatgtctaggagagtcaga

SEQ ID NO: 5357227 - DNA, 25 bp, Homo sapien
gactctggaatggtaagtgcacaat

SEQ ID NO: 5357228 - DNA, 25 bp, Homo sapien
tctacaacataggaatgatttcggc

SEQ ID NO: 5357229 - DNA, 25 bp, Homo sapien
cctgaaaggcaccatgactctggaa

SEQ ID NO: 5357230 - DNA, 25 bp, Homo sapien
tttatcaaagagaatcacttaagtc

SEQ ID NO: 5357231 - DNA, 25 bp, Homo sapien
tcaacactggattgccattttaagt

SEQ ID NO: 5357232 - DNA, 25 bp, Homo sapien
gttaagctgaaaacttttatagtca

SEQ ID NO: 5357233 - DNA, 25 bp, Homo sapien
cactggattgccattttaagtttcc

SEQ ID NO: 5357234 - DNA, 25 bp, Homo sapien
gtaaaatcacgctaatattacacac

SEQ ID NO: 5357235 - DNA, 25 bp, Homo sapien
tattacacacttcaaaaaaacatgc

SEQ ID NO: 5357236 - DNA, 25 bp, Homo sapien
cagccaaaatgccttaatttcataa

SEQ ID NO: 5357237 - DNA, 25 bp, Homo sapien
gaaactttccacatctcagccaaaa

SEQ ID NO: 5357238 - DNA, 25 bp, Homo sapien
gaagaaccgagcctccattctaaag

SEQ ID NO: 5357239 - DNA, 25 bp, Homo sapien
tgtttcttggacaatattgccagat

SEQ ID NO: 5357240 - DNA, 25 bp, Homo sapien
cttggacaatattgccagatgtctg

SEQ ID NO: 5357241 - DNA, 25 bp, Homo sapien
agaatgtcagaagaaccgagcctcc

SEQ ID NO: 5357242 - DNA, 25 bp, Homo sapien
gaaaaactgaacagcattaccgagg

SEQ ID NO: 5357243 - DNA, 25 bp, Homo sapien
aatcagaagtgcacacatggtgcca

SEQ ID NO: 5357244 - DNA, 25 bp, Homo sapien
acttcttactcctaaatatgcaacg

SEQ ID NO: 5357245 - DNA, 25 bp, Homo sapien
ggtgccatatttggaagtcatgaag

SEQ ID NO: 5357246 - DNA, 25 bp, Homo sapien
gcccctgcctgcttaacttaatact

SEQ ID NO: 5357247 - DNA, 25 bp, Homo sapien
actctatcgctcgagctgaagtgca

SEQ ID NO: 5357248 - DNA, 25 bp, Homo sapien
catttctctagtaagccagtatatc

SEQ ID NO: 5357249 - DNA, 25 bp, Homo sapien
taaataacatatgagagagtacaat

SEQ ID NO: 5357250 - DNA, 25 bp, Homo sapien
gtctctttcactagggatttctctg

SEQ ID NO: 5357251 - DNA, 25 bp, Homo sapien
tttcactagggatttctctgtattc

SEQ ID NO: 5357252 - DNA, 25 bp, Homo sapien
aaagtctctttcactagggatttct

SEQ ID NO: 5357253 - DNA, 25 bp, Homo sapien
tctctttcactagggatttctctgt

SEQ ID NO: 5357254 - DNA, 25 bp, Homo sapien
gtactccagccagggtgtcacagcg

SEQ ID NO: 5357255 - DNA, 25 bp, Homo sapien
ctgtactccagccagggtgtcacag

SEQ ID NO: 5357256 - DNA, 25 bp, Homo sapien
gaataattgcttgaagccgggaagc

SEQ ID NO: 5357257 - DNA, 25 bp, Homo sapien
cagaataattgcttgaagccgggaa

SEQ ID NO: 5357258 - DNA, 25 bp, Homo sapien
gttatagcaatttcagaaagcaggg

SEQ ID NO: 5357259 - DNA, 25 bp, Homo sapien
ttctgctgttgagctttccttagtg

SEQ ID NO: 5357260 - DNA, 25 bp, Homo sapien
aatgttcttccaccagtttggtagt

SEQ ID NO: 5357261 - DNA, 25 bp, Homo sapien
ttcttccaccagtttggtagtctga

SEQ ID NO: 5357262 - DNA, 25 bp, Homo sapien
tgctgttgagctttccttagtgcct

SEQ ID NO: 5357263 - DNA, 25 bp, Homo sapien
ccaaatggtacagagttcagcctgg

SEQ ID NO: 5357264 - DNA, 25 bp, Homo sapien
aaatggtacagagttcagcctgggt

SEQ ID NO: 5357265 - DNA, 25 bp, Homo sapien
ttccaaatggtacagagttcagcct

SEQ ID NO: 5357266 - DNA, 25 bp, Homo sapien
tcttccaaatggtacagagttcagc

SEQ ID NO: 5357267 - DNA, 25 bp, Homo sapien
aaagacacgtccactccggcttttg

SEQ ID NO: 5357268 - DNA, 25 bp, Homo sapien
ggcggctgcaaacgggccgtcacat

SEQ ID NO: 5357269 - DNA, 25 bp, Homo sapien
ctccttattggctgcgaacctcgcg

SEQ ID NO: 5357270 - DNA, 25 bp, Homo sapien
gaacctcgcgcgatatcaccttgga

SEQ ID NO: 5357271 - DNA, 25 bp, Homo sapien
ccaggtcctaacatagaaagtggga

SEQ ID NO: 5357272 - DNA, 25 bp, Homo sapien
gaaaaagcgaaactgcggaagctga

SEQ ID NO: 5357273 - DNA, 25 bp, Homo sapien
gatactggagtaattcctgcctctg

SEQ ID NO: 5357274 - DNA, 25 bp, Homo sapien
tgggaatgaagatgatgacgcctcc

SEQ ID NO: 5357275 - DNA, 25 bp, Homo sapien
cctgtcacgtgaaatggtagagcaa

SEQ ID NO: 5357276 - DNA, 25 bp, Homo sapien
tgatgaaaggatcgcactgccatga

SEQ ID NO: 5357277 - DNA, 25 bp, Homo sapien
ccatggcgcctgtgattggcatgaa

SEQ ID NO: 5357278 - DNA, 25 bp, Homo sapien
tgacattgggtcaacagggcacttg

SEQ ID NO: 5357279 - DNA, 25 bp, Homo sapien
agctacagatattcttgttagtaag

SEQ ID NO: 5357280 - DNA, 25 bp, Homo sapien
tttgaagctacagatattcttgtta

SEQ ID NO: 5357281 - DNA, 25 bp, Homo sapien
gaagctacagatattcttgttagta

SEQ ID NO: 5357282 - DNA, 25 bp, Homo sapien
tgaagctacagatattcttgttagt

SEQ ID NO: 5357283 - DNA, 25 bp, Homo sapien
ggcagtccattgatgcactcaaaga

SEQ ID NO: 5357284 - DNA, 25 bp, Homo sapien
tggaacagacgtatttggacactga

SEQ ID NO: 5357285 - DNA, 25 bp, Homo sapien
tggtcagttacatgtccccacagtt

SEQ ID NO: 5357286 - DNA, 25 bp, Homo sapien
gcaatactgtgttgtaatatcccaa

SEQ ID NO: 5357287 - DNA, 25 bp, Homo sapien
tcagagcttagcagtctggcctgga

SEQ ID NO: 5357288 - DNA, 25 bp, Homo sapien
ggaacaagtagaatcccggtctgag

SEQ ID NO: 5357289 - DNA, 25 bp, Homo sapien
tctgatctacgggacataatgttcc

SEQ ID NO: 5357290 - DNA, 25 bp, Homo sapien
tctccgcatggaagaagtagtaaag

SEQ ID NO: 5357291 - DNA, 25 bp, Homo sapien
gagcattactatcatgcactttgca

SEQ ID NO: 5357292 - DNA, 25 bp, Homo sapien
aaatagaatctatgctacagtaaaa

SEQ ID NO: 5357293 - DNA, 25 bp, Homo sapien
gcaaatacctcacaagcacttatgg

SEQ ID NO: 5357294 - DNA, 25 bp, Homo sapien
gcacttatggcacagctatcagaga

SEQ ID NO: 5357295 - DNA, 25 bp, Homo sapien
aaatgccatattccaaaccgattcc

SEQ ID NO: 5357296 - DNA, 25 bp, Homo sapien
taaaaccacctggacattgtcaaga

SEQ ID NO: 5357297 - DNA, 25 bp, Homo sapien
cgattccaccgattgctgcatcagc

SEQ ID NO: 5357298 - DNA, 25 bp, Homo sapien
ttgttgtaaaaccacctggacattg

SEQ ID NO: 5357299 - DNA, 25 bp, Homo sapien
ttttgagacaagctgtcgatcaggc

SEQ ID NO: 5357300 - DNA, 25 bp, Homo sapien
tcagtacaccctcagccattgtgac

SEQ ID NO: 5357301 - DNA, 25 bp, Homo sapien
taatcacatgtaagaccttgagggc

SEQ ID NO: 5357302 - DNA, 25 bp, Homo sapien
cttgagggcaacatatttggaacct

SEQ ID NO: 5357303 - DNA, 25 bp, Homo sapien
tagatcagtacagtatttcacaact

SEQ ID NO: 5357304 - DNA, 25 bp, Homo sapien
tttttcttctattagatcagtacag

SEQ ID NO: 5357305 - DNA, 25 bp, Homo sapien
tacagtatttcacaacttggagaat

SEQ ID NO: 5357306 - DNA, 25 bp, Homo sapien
tctattagatcagtacagtatttca

SEQ ID NO: 5357307 - DNA, 25 bp, Homo sapien
aaaaacttcaaatgaggaccagtct

SEQ ID NO: 5357308 - DNA, 25 bp, Homo sapien
tgggccatctaacacaggccaagcc

SEQ ID NO: 5357309 - DNA, 25 bp, Homo sapien
tgagacgactacatctcagccttgg

SEQ ID NO: 5357310 - DNA, 25 bp, Homo sapien
cactaacagctatcaaaggaatggg

SEQ ID NO: 5357311 - DNA, 25 bp, Homo sapien
catcattgaattcaacagctccagc

SEQ ID NO: 5357312 - DNA, 25 bp, Homo sapien
tgagcaaggtcttcacatcattgaa

SEQ ID NO: 5357313 - DNA, 25 bp, Homo sapien
tcaacagctccagctagattgggtg

SEQ ID NO: 5357314 - DNA, 25 bp, Homo sapien
gaaattgtagttatccattctctga

SEQ ID NO: 5357315 - DNA, 25 bp, Homo sapien
ctggaggtctcacacagccagctgg

SEQ ID NO: 5357316 - DNA, 25 bp, Homo sapien
ctgaagtagaagcagagagttcttc

SEQ ID NO: 5357317 - DNA, 25 bp, Homo sapien
tcaattaacttctggggactgccac

SEQ ID NO: 5357318 - DNA, 25 bp, Homo sapien
tttgcaggactgttaagcagcttgt

SEQ ID NO: 5357319 - DNA, 25 bp, Homo sapien
ggactgttaagcagcttgttattca

SEQ ID NO: 5357320 - DNA, 25 bp, Homo sapien
caggactgttaagcagcttgttatt

SEQ ID NO: 5357321 - DNA, 25 bp, Homo sapien
tgcaggactgttaagcagcttgtta

SEQ ID NO: 5357322 - DNA, 25 bp, Homo sapien
ggcatgttgctcatctatgatgggt

SEQ ID NO: 5357323 - DNA, 25 bp, Homo sapien
caaaggacaactagctgaacaagta

SEQ ID NO: 5357324 - DNA, 25 bp, Homo sapien
taatgcaacagcttagactttgccc

SEQ ID NO: 5357325 - DNA, 25 bp, Homo sapien
ggcaatggcccaaagtacaggctct

SEQ ID NO: 5357326 - DNA, 25 bp, Homo sapien
tgctggtgagtgctgttctcgccct

SEQ ID NO: 5357327 - DNA, 25 bp, Homo sapien
tgatcatacgctgctttcagctccc

SEQ ID NO: 5357328 - DNA, 25 bp, Homo sapien
ttgtctttgatcatacgctgctttc

SEQ ID NO: 5357329 - DNA, 25 bp, Homo sapien
gctgttctcgccctgcctttgtctt

SEQ ID NO: 5357330 - DNA, 25 bp, Homo sapien
taaagaaacccactacaacagcaga

SEQ ID NO: 5357331 - DNA, 25 bp, Homo sapien
tagtggaaaagacgaggtcaaagtc

SEQ ID NO: 5357332 - DNA, 25 bp, Homo sapien
aattgtagatggtagctggtttctc

SEQ ID NO: 5357333 - DNA, 25 bp, Homo sapien
taacagttccccaatatcaaagctg

SEQ ID NO: 5357334 - DNA, 25 bp, Homo sapien
cccggagatcaggtggaagtgcttc

SEQ ID NO: 5357335 - DNA, 25 bp, Homo sapien
gactgtcccaactggttgtggcaaa

SEQ ID NO: 5357336 - DNA, 25 bp, Homo sapien
cagacttgctctacttgttcccgga

SEQ ID NO: 5357337 - DNA, 25 bp, Homo sapien
gaggttctggtatttgcaacaagac

SEQ ID NO: 5357338 - DNA, 25 bp, Homo sapien
cacacgctgaattaaaccatccaaa

SEQ ID NO: 5357339 - DNA, 25 bp, Homo sapien
ttaaaccatccaaatctccagagac

SEQ ID NO: 5357340 - DNA, 25 bp, Homo sapien
tgtacagcccacacacgctgaatta

SEQ ID NO: 5357341 - DNA, 25 bp, Homo sapien
cagcagtatatcacatgtacagccc

SEQ ID NO: 5357342 - DNA, 25 bp, Homo sapien
taagtctcgactgcacactgacagg

SEQ ID NO: 5357343 - DNA, 25 bp, Homo sapien
ctgggaaggtgacgggacctctata

SEQ ID NO: 5357344 - DNA, 25 bp, Homo sapien
tatactcaggttaagtctcgactgc

SEQ ID NO: 5357345 - DNA, 25 bp, Homo sapien
agactcagccttgttagtatcagga

SEQ ID NO: 5357346 - DNA, 25 bp, Homo sapien
caagaaagtgcaagttctagaagca

SEQ ID NO: 5357347 - DNA, 25 bp, Homo sapien
ctggtcggcagatgtgcaggaaaag

SEQ ID NO: 5357348 - DNA, 25 bp, Homo sapien
gtcggcagatgtgcaggaaaaggtg

SEQ ID NO: 5357349 - DNA, 25 bp, Homo sapien
ttctagaagcagatgatatttccag

SEQ ID NO: 5357350 - DNA, 25 bp, Homo sapien
tcttcagatcatcgggcagggcctt

SEQ ID NO: 5357351 - DNA, 25 bp, Homo sapien
gcagggcctttaatcctctgtccat

SEQ ID NO: 5357352 - DNA, 25 bp, Homo sapien
gccgtctttccaaggacataagcag

SEQ ID NO: 5357353 - DNA, 25 bp, Homo sapien
cacataaagctgtgtcaattttaaa

SEQ ID NO: 5357354 - DNA, 25 bp, Homo sapien
agacatcacggacagagtatgaccc

SEQ ID NO: 5357355 - DNA, 25 bp, Homo sapien
ctttgtgctcctcttcggtggattt

SEQ ID NO: 5357356 - DNA, 25 bp, Homo sapien
cggacagagtatgacccactaggaa

SEQ ID NO: 5357357 - DNA, 25 bp, Homo sapien
tgtgctcctcttcggtggatttctt

SEQ ID NO: 5357358 - DNA, 25 bp, Homo sapien
gattagttggaaccaactgattcac

SEQ ID NO: 5357359 - DNA, 25 bp, Homo sapien
tggaaccaactgattcacgtgaatc

SEQ ID NO: 5357360 - DNA, 25 bp, Homo sapien
ttcagattagttggaaccaactgat

SEQ ID NO: 5357361 - DNA, 25 bp, Homo sapien
tagttggaaccaactgattcacgtg

SEQ ID NO: 5357362 - DNA, 25 bp, Homo sapien
ccactgatgttctcgtcaactaagg

SEQ ID NO: 5357363 - DNA, 25 bp, Homo sapien
tcagagtatccaattctcccaaaat

SEQ ID NO: 5357364 - DNA, 25 bp, Homo sapien
gaaaatccaaacaagtggaatactg

SEQ ID NO: 5357365 - DNA, 25 bp, Homo sapien
gaggacagtctacttggaaacttca

SEQ ID NO: 5357366 - DNA, 25 bp, Homo sapien
tagtagagatgggggcaagtgcctg

SEQ ID NO: 5357367 - DNA, 25 bp, Homo sapien
tcttgggttcaagtgattctcctgc

SEQ ID NO: 5357368 - DNA, 25 bp, Homo sapien
tagagatgggggcaagtgcctgtaa

SEQ ID NO: 5357369 - DNA, 25 bp, Homo sapien
ggctcatgcaagctctgcctcttgg

SEQ ID NO: 5357370 - DNA, 25 bp, Homo sapien
catgtttagcatcgcctttccaatt

SEQ ID NO: 5357371 - DNA, 25 bp, Homo sapien
tttttgcattatctgttgcctggtc

SEQ ID NO: 5357372 - DNA, 25 bp, Homo sapien
ccctctcatatctgatatatttagt

SEQ ID NO: 5357373 - DNA, 25 bp, Homo sapien
tgttgcctggtcaagagttacagtc

SEQ ID NO: 5357374 - DNA, 25 bp, Homo sapien
agccccaggctttcgtaccatgatt

SEQ ID NO: 5357375 - DNA, 25 bp, Homo sapien
cccaggctttcgtaccatgattttg

SEQ ID NO: 5357376 - DNA, 25 bp, Homo sapien
ggctttcgtaccatgattttgagag

SEQ ID NO: 5357377 - DNA, 25 bp, Homo sapien
tgattttgagagttagacgtttacc

SEQ ID NO: 5357378 - DNA, 25 bp, Homo sapien
tcaagttctctaataactggcctcc

SEQ ID NO: 5357379 - DNA, 25 bp, Homo sapien
tagttgtagaggtaggactatgtaa

SEQ ID NO: 5357380 - DNA, 25 bp, Homo sapien
cttaaaaggccttcttaaggctctg

SEQ ID NO: 5357381 - DNA, 25 bp, Homo sapien
caagcattgagggtctaatggttta

SEQ ID NO: 5357382 - DNA, 25 bp, Homo sapien
cccaaagatgccaacttagattcca

SEQ ID NO: 5357383 - DNA, 25 bp, Homo sapien
tccatagttgatctcagctgaaaca

SEQ ID NO: 5357384 - DNA, 25 bp, Homo sapien
gccacggcagaacctataaagcatc

SEQ ID NO: 5357385 - DNA, 25 bp, Homo sapien
ggtcatatactgcaagtctccacaa

SEQ ID NO: 5357386 - DNA, 25 bp, Homo sapien
gcagaataagctactaataacaagt

SEQ ID NO: 5357387 - DNA, 25 bp, Homo sapien
atagttaagtatgcagaataagcta

SEQ ID NO: 5357388 - DNA, 25 bp, Homo sapien
taagtatgcagaataagctactaat

SEQ ID NO: 5357389 - DNA, 25 bp, Homo sapien
tgcagaataagctactaataacaag

SEQ ID NO: 5357390 - DNA, 25 bp, Homo sapien
catcctgggttgtgttagtgtgtcc

SEQ ID NO: 5357391 - DNA, 25 bp, Homo sapien
gaatgaaatggcctgaaccggaggt

SEQ ID NO: 5357392 - DNA, 25 bp, Homo sapien
gcaagagacaatcatcatcctgggt

SEQ ID NO: 5357393 - DNA, 25 bp, Homo sapien
aggcagggcatgtggtgtacctcca

SEQ ID NO: 5357394 - DNA, 25 bp, Homo sapien
ctggtagattggtcactagctggcc

SEQ ID NO: 5357395 - DNA, 25 bp, Homo sapien
tcttctggttttaggtggtactgcc

SEQ ID NO: 5357396 - DNA, 25 bp, Homo sapien
agattggtcactagctggcctctga

SEQ ID NO: 5357397 - DNA, 25 bp, Homo sapien
tttaggtggtactgcccatctggtt

SEQ ID NO: 5357398 - DNA, 25 bp, Homo sapien
gatttccatacgaacagcatttgca

SEQ ID NO: 5357399 - DNA, 25 bp, Homo sapien
catcaggagtaagtttggtctctgc

SEQ ID NO: 5357400 - DNA, 25 bp, Homo sapien
ggtaatgtctaccagcgcttcatca

SEQ ID NO: 5357401 - DNA, 25 bp, Homo sapien
cagaggcagcacatttcgtctggtc

SEQ ID NO: 5357402 - DNA, 25 bp, Homo sapien
cagagcaaaggcaacgaatcacagc

SEQ ID NO: 5357403 - DNA, 25 bp, Homo sapien
caaaggcaacgaatcacagccacag

SEQ ID NO: 5357404 - DNA, 25 bp, Homo sapien
ctatcaacacagagcaaaggcaacg

SEQ ID NO: 5357405 - DNA, 25 bp, Homo sapien
tcaacacagagcaaaggcaacgaat

SEQ ID NO: 5357406 - DNA, 25 bp, Homo sapien
gaaaatcgtatggaacagcttgaag

SEQ ID NO: 5357407 - DNA, 25 bp, Homo sapien
taggacatagttgtttagcatgccc

SEQ ID NO: 5357408 - DNA, 25 bp, Homo sapien
tgcgacttccttatatgcatgaaaa

SEQ ID NO: 5357409 - DNA, 25 bp, Homo sapien
agcatgcccaaaaaacattccgttc

SEQ ID NO: 5357410 - DNA, 25 bp, Homo sapien
ctagagcgagaacaaaacacaatgg

SEQ ID NO: 5357411 - DNA, 25 bp, Homo sapien
tctcattagggattaaagataggca

SEQ ID NO: 5357412 - DNA, 25 bp, Homo sapien
ccaaaagtcacaactgtctgaatag

SEQ ID NO: 5357413 - DNA, 25 bp, Homo sapien
caggtttggctcttgtatctgaagc

SEQ ID NO: 5357414 - DNA, 25 bp, Homo sapien
aatatgctgtcaaaaagaggttttc

SEQ ID NO: 5357415 - DNA, 25 bp, Homo sapien
atatgctgtcaaaaagaggttttct

SEQ ID NO: 5357416 - DNA, 25 bp, Homo sapien
ggaatatgctgtcaaaaagaggttt

SEQ ID NO: 5357417 - DNA, 25 bp, Homo sapien
gaatatgctgtcaaaaagaggtttt

SEQ ID NO: 5357418 - DNA, 25 bp, Homo sapien
caattgaccaattccatgctcctga

SEQ ID NO: 5357419 - DNA, 25 bp, Homo sapien
ccaattccatgctcctgaagtggct

SEQ ID NO: 5357420 - DNA, 25 bp, Homo sapien
caattcccaattgaccaattccatg

SEQ ID NO: 5357421 - DNA, 25 bp, Homo sapien
gaccaattccatgctcctgaagtgg

SEQ ID NO: 5357422 - DNA, 25 bp, Homo sapien
tgtctagccatctgaagtccaggcc

SEQ ID NO: 5357423 - DNA, 25 bp, Homo sapien
tctcatcagggaactagtaagctgt

SEQ ID NO: 5357424 - DNA, 25 bp, Homo sapien
cagattagatgcctgaatagccaca

SEQ ID NO: 5357425 - DNA, 25 bp, Homo sapien
ccttagcaagggtaaacggagctcg

SEQ ID NO: 5357426 - DNA, 25 bp, Homo sapien
catttgcttgcgcagaatctggatt

SEQ ID NO: 5357427 - DNA, 25 bp, Homo sapien
ctggcctcataactacaagatgcaa

SEQ ID NO: 5357428 - DNA, 25 bp, Homo sapien
ggcctcataactacaagatgcaatt

SEQ ID NO: 5357429 - DNA, 25 bp, Homo sapien
gaatcaattccatttgcttgcgcag

SEQ ID NO: 5357430 - DNA, 25 bp, Homo sapien
ggagagaacagtctctgtggtccat

SEQ ID NO: 5357431 - DNA, 25 bp, Homo sapien
ttatgcttgaggagagaacagtctc

SEQ ID NO: 5357432 - DNA, 25 bp, Homo sapien
ctctgtggtccatgcgcccccagtg

SEQ ID NO: 5357433 - DNA, 25 bp, Homo sapien
tctgtggtccatgcgcccccagtgc

SEQ ID NO: 5357434 - DNA, 25 bp, Homo sapien
catcgtgttcctctccattgggctg

SEQ ID NO: 5357435 - DNA, 25 bp, Homo sapien
atcgtgttcctctccattgggctgg

SEQ ID NO: 5357436 - DNA, 25 bp, Homo sapien
cgtgttcctctccattgggctggct

SEQ ID NO: 5357437 - DNA, 25 bp, Homo sapien
gttcctctccattgggctggctgac

SEQ ID NO: 5357438 - DNA, 25 bp, Homo sapien
ggtccctccacgagcggagtgagtt

SEQ ID NO: 5357439 - DNA, 25 bp, Homo sapien
gtccctccacgagcggagtgagttg

SEQ ID NO: 5357440 - DNA, 25 bp, Homo sapien
gtgggtccctccacgagcggagtga

SEQ ID NO: 5357441 - DNA, 25 bp, Homo sapien
cagcagagtgcgtgggtccctccac

SEQ ID NO: 5357442 - DNA, 25 bp, Homo sapien
catcaaaacttgacaaactagacgg

SEQ ID NO: 5357443 - DNA, 25 bp, Homo sapien
tgacaaactagacgggcacatggag

SEQ ID NO: 5357444 - DNA, 25 bp, Homo sapien
gagaatgtggaggaacggttggaga

SEQ ID NO: 5357445 - DNA, 25 bp, Homo sapien
aacttgacaaactagacgggcacat

SEQ ID NO: 5357446 - DNA, 25 bp, Homo sapien
tgcaagtatatacatggtggttttt

SEQ ID NO: 5357447 - DNA, 25 bp, Homo sapien
tgaagatgctactgcaagtatatac

SEQ ID NO: 5357448 - DNA, 25 bp, Homo sapien
ctgaagatgctactgcaagtatata

SEQ ID NO: 5357449 - DNA, 25 bp, Homo sapien
ctgcaagtatatacatggtggtttt

SEQ ID NO: 5357450 - DNA, 25 bp, Homo sapien
gttagcgccaggacgtaaaggtgcc

SEQ ID NO: 5357451 - DNA, 25 bp, Homo sapien
cgtaaaggtgcccttcctgtgcctc

SEQ ID NO: 5357452 - DNA, 25 bp, Homo sapien
tattctggtaatactgccactccag

SEQ ID NO: 5357453 - DNA, 25 bp, Homo sapien
gattttattctggtaatactgccac

SEQ ID NO: 5357454 - DNA, 25 bp, Homo sapien
tgcattatacagctctgatgtctgg

SEQ ID NO: 5357455 - DNA, 25 bp, Homo sapien
tatacccactgatacaaagaagcaa

SEQ ID NO: 5357456 - DNA, 25 bp, Homo sapien
agatctggtctatttcgtataccca

SEQ ID NO: 5357457 - DNA, 25 bp, Homo sapien
gatgtctgggagaattcaatactga

SEQ ID NO: 5357458 - DNA, 25 bp, Homo sapien
gaatgaatgctcagaatcccaacca

SEQ ID NO: 5357459 - DNA, 25 bp, Homo sapien
caactgataaggtctacgtgaggaa

SEQ ID NO: 5357460 - DNA, 25 bp, Homo sapien
tctaggacagaaccatgagcttctc

SEQ ID NO: 5357461 - DNA, 25 bp, Homo sapien
ctaatttataatgactggcccagaa

SEQ ID NO: 5357462 - DNA, 25 bp, Homo sapien
taagaagacaattttaataagtatc

SEQ ID NO: 5357463 - DNA, 25 bp, Homo sapien
aagaagacaattttaataagtatct

SEQ ID NO: 5357464 - DNA, 25 bp, Homo sapien
agaagacaattttaataagtatcta

SEQ ID NO: 5357465 - DNA, 25 bp, Homo sapien
gaagacaattttaataagtatctac

SEQ ID NO: 5357466 - DNA, 25 bp, Homo sapien
agttacaacaagtgcagacctgcct

SEQ ID NO: 5357467 - DNA, 25 bp, Homo sapien
tgtcagttacaacaagtgcagacct

SEQ ID NO: 5357468 - DNA, 25 bp, Homo sapien
ctgtgtcagttacaacaagtgcaga

SEQ ID NO: 5357469 - DNA, 25 bp, Homo sapien
tacaacaagtgcagacctgcctgtt

SEQ ID NO: 5357470 - DNA, 25 bp, Homo sapien
ggtgctgccttgctaaacgtagata

SEQ ID NO: 5357471 - DNA, 25 bp, Homo sapien
tttaaggcaccattagagctaggag

SEQ ID NO: 5357472 - DNA, 25 bp, Homo sapien
caacactgttgaccatgggcaccaa

SEQ ID NO: 5357473 - DNA, 25 bp, Homo sapien
gcttgaaggcccctgaacagtggag

SEQ ID NO: 5357474 - DNA, 25 bp, Homo sapien
tagaatattaacagccctttaggtg

SEQ ID NO: 5357475 - DNA, 25 bp, Homo sapien
gaatctataagctgtaaatacccag

SEQ ID NO: 5357476 - DNA, 25 bp, Homo sapien
tgcttggcatttactacatggtcaa

SEQ ID NO: 5357477 - DNA, 25 bp, Homo sapien
tctcatggctgaagaaaaacccaaa

SEQ ID NO: 5357478 - DNA, 25 bp, Homo sapien
tgtaggagaggagtcgtccagcttt

SEQ ID NO: 5357479 - DNA, 25 bp, Homo sapien
tgcttggacctggcagaggatcctc

SEQ ID NO: 5357480 - DNA, 25 bp, Homo sapien
acagctgatatggaatgtaggagag

SEQ ID NO: 5357481 - DNA, 25 bp, Homo sapien
cctcaggtctgcatacaggattaaa

SEQ ID NO: 5357482 - DNA, 25 bp, Homo sapien
gctcactggagcctcccatctcctg

SEQ ID NO: 5357483 - DNA, 25 bp, Homo sapien
actggagcctcccatctcctgggtt

SEQ ID NO: 5357484 - DNA, 25 bp, Homo sapien
catgcccggccaagcataaagtttc

SEQ ID NO: 5357485 - DNA, 25 bp, Homo sapien
caagctggtctctgcccacctcggc

SEQ ID NO: 5357486 - DNA, 25 bp, Homo sapien
aatccattctggtcgaattactttt

SEQ ID NO: 5357487 - DNA, 25 bp, Homo sapien
tccattctggtcgaattactttttc

SEQ ID NO: 5357488 - DNA, 25 bp, Homo sapien
caatccattctggtcgaattacttt

SEQ ID NO: 5357489 - DNA, 25 bp, Homo sapien
ttggcattgggaagatttgtggcaa

SEQ ID NO: 5357490 - DNA, 25 bp, Homo sapien
aatatacatggtattgacctccatg

SEQ ID NO: 5357491 - DNA, 25 bp, Homo sapien
aataatatacatggtattgacctcc

SEQ ID NO: 5357492 - DNA, 25 bp, Homo sapien
taatatacatggtattgacctccat

SEQ ID NO: 5357493 - DNA, 25 bp, Homo sapien
tggaataatatacatggtattgacc

SEQ ID NO: 5357494 - DNA, 25 bp, Homo sapien
tagttttctcaattcctcagcggaa

SEQ ID NO: 5357495 - DNA, 25 bp, Homo sapien
tttctcaattcctcagcggaaggat

SEQ ID NO: 5357496 - DNA, 25 bp, Homo sapien
agttttctcaattcctcagcggaag

SEQ ID NO: 5357497 - DNA, 25 bp, Homo sapien
gttttctcaattcctcagcggaagg

SEQ ID NO: 5357498 - DNA, 25 bp, Homo sapien
tgacttaaatagaaaacggctgtcc

SEQ ID NO: 5357499 - DNA, 25 bp, Homo sapien
agaaattaaacagctagccagtcag

SEQ ID NO: 5357500 - DNA, 25 bp, Homo sapien
tacaatgcattaatatgggcaccaa

SEQ ID NO: 5357501 - DNA, 25 bp, Homo sapien
caaactgggcagtgtcatacaaaga

SEQ ID NO: 5357502 - DNA, 25 bp, Homo sapien
tacattgcccttctactggatgaag

SEQ ID NO: 5357503 - DNA, 25 bp, Homo sapien
ctggatgaagttaagagggctcttt

SEQ ID NO: 5357504 - DNA, 25 bp, Homo sapien
tctttgaaaactaattactccagaa

SEQ ID NO: 5357505 - DNA, 25 bp, Homo sapien
tactccagaaatttggaactggaaa

SEQ ID NO: 5357506 - DNA, 25 bp, Homo sapien
gaacccatctctgcaatgtactgta

SEQ ID NO: 5357507 - DNA, 25 bp, Homo sapien
ccaacatcatgaaagctatatgaca

SEQ ID NO: 5357508 - DNA, 25 bp, Homo sapien
cattaaacattgtgtgacacactgc

SEQ ID NO: 5357509 - DNA, 25 bp, Homo sapien
gtggataccttgagccagagaggca

SEQ ID NO: 5357510 - DNA, 25 bp, Homo sapien
cattaacatagatggcaactccact

SEQ ID NO: 5357511 - DNA, 25 bp, Homo sapien
aaaaattgtagatgaagtcccatcc

SEQ ID NO: 5357512 - DNA, 25 bp, Homo sapien
tcgaaactgttcctccaatttctgg

SEQ ID NO: 5357513 - DNA, 25 bp, Homo sapien
tctgcatagcagcatctgatcgaaa

SEQ ID NO: 5357514 - DNA, 25 bp, Homo sapien
atggaccttattctgtgctagtgac

SEQ ID NO: 5357515 - DNA, 25 bp, Homo sapien
tgacctcataaacataaaccataag

SEQ ID NO: 5357516 - DNA, 25 bp, Homo sapien
cagaacataatgatgacctcataaa

SEQ ID NO: 5357517 - DNA, 25 bp, Homo sapien
caatcacaaaggttacattttctcc

SEQ ID NO: 5357518 - DNA, 25 bp, Homo sapien
tcagctcgcttcctccatccacctc

SEQ ID NO: 5357519 - DNA, 25 bp, Homo sapien
agctcgcttcctccatccacctcgc

SEQ ID NO: 5357520 - DNA, 25 bp, Homo sapien
cattttcagctcgcttcctccatcc

SEQ ID NO: 5357521 - DNA, 25 bp, Homo sapien
gcttcctccatccacctcgcctcat

SEQ ID NO: 5357522 - DNA, 25 bp, Homo sapien
agggattccaaaggccacagcagaa

SEQ ID NO: 5357523 - DNA, 25 bp, Homo sapien
gattccaaaggccacagcagaagag

SEQ ID NO: 5357524 - DNA, 25 bp, Homo sapien
taatacaagcatttaagtatagtag

SEQ ID NO: 5357525 - DNA, 25 bp, Homo sapien
ttataatacaagcatttaagtatag

SEQ ID NO: 5357526 - DNA, 25 bp, Homo sapien
acaagcatttaagtatagtagtagt

SEQ ID NO: 5357527 - DNA, 25 bp, Homo sapien
gcatttaagtatagtagtagtagtt

SEQ ID NO: 5357528 - DNA, 25 bp, Homo sapien
taacccacctttatctcatgccaaa

SEQ ID NO: 5357529 - DNA, 25 bp, Homo sapien
attcaattaacccacctttatctca

SEQ ID NO: 5357530 - DNA, 25 bp, Homo sapien
aatcctaagtgaacaagctaatttc

SEQ ID NO: 5357531 - DNA, 25 bp, Homo sapien
tcctaagtgaacaagctaatttcaa

SEQ ID NO: 5357532 - DNA, 25 bp, Homo sapien
gaacggcgcccagcgtatttagcga

SEQ ID NO: 5357533 - DNA, 25 bp, Homo sapien
cgaccgggtcgacattctacaaacg

SEQ ID NO: 5357534 - DNA, 25 bp, Homo sapien
ccagagcggcgtcactgtaacagta

SEQ ID NO: 5357535 - DNA, 25 bp, Homo sapien
tttagcgaacggacaagcagcaagg

SEQ ID NO: 5357536 - DNA, 25 bp, Homo sapien
cgccggcgcaggaggaaggagtttg

SEQ ID NO: 5357537 - DNA, 25 bp, Homo sapien
gaggcgccggcgcaggaggaaggag

SEQ ID NO: 5357538 - DNA, 25 bp, Homo sapien
gccggcgcaggaggaaggagtttgc

SEQ ID NO: 5357539 - DNA, 25 bp, Homo sapien
ggcgccggcgcaggaggaaggagtt

SEQ ID NO: 5357540 - DNA, 25 bp, Homo sapien
gcgcgctccgcggtggctctccgcc

SEQ ID NO: 5357541 - DNA, 25 bp, Homo sapien
ggaaggcagccccaccgctgagcag

SEQ ID NO: 5357542 - DNA, 25 bp, Homo sapien
gttgccccagaccaccatgcccggg

SEQ ID NO: 5357543 - DNA, 25 bp, Homo sapien
cggcggccttctccggccttgcgga

SEQ ID NO: 5357544 - DNA, 25 bp, Homo sapien
gactttgctgatacgattgtgatga

SEQ ID NO: 5357545 - DNA, 25 bp, Homo sapien
gattcagcaatccattggcttcaga

SEQ ID NO: 5357546 - DNA, 25 bp, Homo sapien
caaactgtcatgatcaggatagccc

SEQ ID NO: 5357547 - DNA, 25 bp, Homo sapien
aaggcaggctgaagtatctctgaag

SEQ ID NO: 5357548 - DNA, 25 bp, Homo sapien
gaaaattgatgacgaatctgaaaat

SEQ ID NO: 5357549 - DNA, 25 bp, Homo sapien
aaggtgttgaagtggtacattagac

SEQ ID NO: 5357550 - DNA, 25 bp, Homo sapien
tagagaattcctaagaatcttcagt

SEQ ID NO: 5357551 - DNA, 25 bp, Homo sapien
gtccattttggagcttcattatttg

SEQ ID NO: 5357552 - DNA, 25 bp, Homo sapien
gcttctgcagcttgcgtagtgggat

SEQ ID NO: 5357553 - DNA, 25 bp, Homo sapien
gtgggataatttctcacactcacag

SEQ ID NO: 5357554 - DNA, 25 bp, Homo sapien
gcagcttgcgtagtgggataatttc

SEQ ID NO: 5357555 - DNA, 25 bp, Homo sapien
ccagcacatctaatgagaagtgctg

SEQ ID NO: 5357556 - DNA, 25 bp, Homo sapien
gtctatttatatgaatgccttaaaa

SEQ ID NO: 5357557 - DNA, 25 bp, Homo sapien
gatgcatgtactttccagtctattt

SEQ ID NO: 5357558 - DNA, 25 bp, Homo sapien
tatcatatataatgttttggagtag

SEQ ID NO: 5357559 - DNA, 25 bp, Homo sapien
aagccaatggtctttaatgaattgc

SEQ ID NO: 5357560 - DNA, 25 bp, Homo sapien
tgtaatgttgctgcttaacagagcc

SEQ ID NO: 5357561 - DNA, 25 bp, Homo sapien
gataggagcctgcaactttctcagc

SEQ ID NO: 5357562 - DNA, 25 bp, Homo sapien
ctttctccacaatcacatccaaatg

SEQ ID NO: 5357563 - DNA, 25 bp, Homo sapien
taacagagccattacagctacttgg

SEQ ID NO: 5357564 - DNA, 25 bp, Homo sapien
gtttttgtgactgccaaagctggat

SEQ ID NO: 5357565 - DNA, 25 bp, Homo sapien
tgtttttgtgactgccaaagctgga

SEQ ID NO: 5357566 - DNA, 25 bp, Homo sapien
ttttgtgactgccaaagctggatac

SEQ ID NO: 5357567 - DNA, 25 bp, Homo sapien
tttgtttttgtgactgccaaagctg

SEQ ID NO: 5357568 - DNA, 25 bp, Homo sapien
ttctcgagggagataagctggctcc

SEQ ID NO: 5357569 - DNA, 25 bp, Homo sapien
tcccaagaccaaaacgcagaatttg

SEQ ID NO: 5357570 - DNA, 25 bp, Homo sapien
ccaagttgctgacagctttcccaag

SEQ ID NO: 5357571 - DNA, 25 bp, Homo sapien
ctggaaaattctcgagggagataag

SEQ ID NO: 5357572 - DNA, 25 bp, Homo sapien
gcaaggtctcgtgcacctgtgaaaa

SEQ ID NO: 5357573 - DNA, 25 bp, Homo sapien
taggcataaatcaggctgaaccttt

SEQ ID NO: 5357574 - DNA, 25 bp, Homo sapien
ctagaagtttttagccaactacttg

SEQ ID NO: 5357575 - DNA, 25 bp, Homo sapien
gttgccactctagaagtttttagcc

SEQ ID NO: 5357576 - DNA, 25 bp, Homo sapien
ggcagccattggaagcttggactcc

SEQ ID NO: 5357577 - DNA, 25 bp, Homo sapien
ggtgacgcttgtagcatgatgtgca

SEQ ID NO: 5357578 - DNA, 25 bp, Homo sapien
tggcagccattggaagcttggactc

SEQ ID NO: 5357579 - DNA, 25 bp, Homo sapien
gactgtgccacaggtctctggtgac

SEQ ID NO: 5357580 - DNA, 25 bp, Homo sapien
aattcttatagggacagacttcagc

SEQ ID NO: 5357581 - DNA, 25 bp, Homo sapien
aatgctgacccttgtactgactggc

SEQ ID NO: 5357582 - DNA, 25 bp, Homo sapien
gctgcctcggagtgccaattaaaat

SEQ ID NO: 5357583 - DNA, 25 bp, Homo sapien
actgtgagtaagagctgtgaaccta

SEQ ID NO: 5357584 - DNA, 25 bp, Homo sapien
gctactggttgaacaggaaccctgt

SEQ ID NO: 5357585 - DNA, 25 bp, Homo sapien
aatgacaagcaaagcggcatcccag

SEQ ID NO: 5357586 - DNA, 25 bp, Homo sapien
gacactgggagcgtgcatgtgcata

SEQ ID NO: 5357587 - DNA, 25 bp, Homo sapien
ttttcgagattataaactgggagcc

SEQ ID NO: 5357588 - DNA, 25 bp, Homo sapien
tgcaactttcaaggtgggcaggacc

SEQ ID NO: 5357589 - DNA, 25 bp, Homo sapien
taacgtgtggcaagatagaccctct

SEQ ID NO: 5357590 - DNA, 25 bp, Homo sapien
gaagcaccccagttggagacatgta

SEQ ID NO: 5357591 - DNA, 25 bp, Homo sapien
gaaactgctgtaccaacgtgctcca

SEQ ID NO: 5357592 - DNA, 25 bp, Homo sapien
tacacaggcggcttcttatataccc

SEQ ID NO: 5357593 - DNA, 25 bp, Homo sapien
caaaaacgttgagccatctgtggag

SEQ ID NO: 5357594 - DNA, 25 bp, Homo sapien
tctgtggagaccagagcccactctg

SEQ ID NO: 5357595 - DNA, 25 bp, Homo sapien
tgggagtttcagtagcacagtgtcc

SEQ ID NO: 5357596 - DNA, 25 bp, Homo sapien
accggccccatgagcagatccaggt

SEQ ID NO: 5357597 - DNA, 25 bp, Homo sapien
ttgggagtactggaccaggtgctcc

SEQ ID NO: 5357598 - DNA, 25 bp, Homo sapien
acaggtgggcgctgttccgcagcca

SEQ ID NO: 5357599 - DNA, 25 bp, Homo sapien
gagcagatccaggtcgttgaagaat

SEQ ID NO: 5357600 - DNA, 25 bp, Homo sapien
tggatgcgctgtgggatgctgacga

SEQ ID NO: 5357601 - DNA, 25 bp, Homo sapien
tgatgctgacgtggttggccgccat

SEQ ID NO: 5357602 - DNA, 25 bp, Homo sapien
tctcccagtagtcgtagctgtgcag

SEQ ID NO: 5357603 - DNA, 25 bp, Homo sapien
aggttgtcggccatctcccagtagt

SEQ ID NO: 5357604 - DNA, 25 bp, Homo sapien
ggcgggagaggggttgggagacatg

SEQ ID NO: 5357605 - DNA, 25 bp, Homo sapien
catgggggatggggttccagtgctc

SEQ ID NO: 5357606 - DNA, 25 bp, Homo sapien
tgggagacatgggggatggggttcc

SEQ ID NO: 5357607 - DNA, 25 bp, Homo sapien
gagacatgggggatggggttccagt

SEQ ID NO: 5357608 - DNA, 25 bp, Homo sapien
agatggggcttgggcggctttagat

SEQ ID NO: 5357609 - DNA, 25 bp, Homo sapien
atggggcttgggcggctttagatga

SEQ ID NO: 5357610 - DNA, 25 bp, Homo sapien
gggcttgggcggctttagatgagtt

SEQ ID NO: 5357611 - DNA, 25 bp, Homo sapien
actggccccccacggagatggggct

SEQ ID NO: 5357612 - DNA, 25 bp, Homo sapien
gaagtctccatcacagttctctgtt

SEQ ID NO: 5357613 - DNA, 25 bp, Homo sapien
ttctcttaaagggagttgctcttga

SEQ ID NO: 5357614 - DNA, 25 bp, Homo sapien
gggaagtctccatcacagttctctg

SEQ ID NO: 5357615 - DNA, 25 bp, Homo sapien
acagtatttctcttaaagggagttg

SEQ ID NO: 5357616 - DNA, 25 bp, Homo sapien
cattctgtatgtattagtgggctgc

SEQ ID NO: 5357617 - DNA, 25 bp, Homo sapien
tgggctgcagagaatattaagaact

SEQ ID NO: 5357618 - DNA, 25 bp, Homo sapien
aagtttgttgtagcccctggcggct

SEQ ID NO: 5357619 - DNA, 25 bp, Homo sapien
cacgcctggcgtgttttctacccat

SEQ ID NO: 5357620 - DNA, 25 bp, Homo sapien
cactattgatgttgactttaggcac

SEQ ID NO: 5357621 - DNA, 25 bp, Homo sapien
ggatttttgaacactattgatgttg

SEQ ID NO: 5357622 - DNA, 25 bp, Homo sapien
aacactattgatgttgactttaggc

SEQ ID NO: 5357623 - DNA, 25 bp, Homo sapien
gttctggatttttgaacactattga

SEQ ID NO: 5357624 - DNA, 25 bp, Homo sapien
acacaggacggtcaatgggctgaga

SEQ ID NO: 5357625 - DNA, 25 bp, Homo sapien
aagacacaggacggtcaatgggctg

SEQ ID NO: 5357626 - DNA, 25 bp, Homo sapien
agacacaggacggtcaatgggctga

SEQ ID NO: 5357627 - DNA, 25 bp, Homo sapien
gaagacacaggacggtcaatgggct

SEQ ID NO: 5357628 - DNA, 25 bp, Homo sapien
tcacaaatttgacagggagacaagt

SEQ ID NO: 5357629 - DNA, 25 bp, Homo sapien
gcagggagatacattagatgggctc

SEQ ID NO: 5357630 - DNA, 25 bp, Homo sapien
gggaccagaggtgacctgcattaac

SEQ ID NO: 5357631 - DNA, 25 bp, Homo sapien
caaagcaatggagtctaccaggtgc

SEQ ID NO: 5357632 - DNA, 25 bp, Homo sapien
tttgaatactttacagcgtggtccc

SEQ ID NO: 5357633 - DNA, 25 bp, Homo sapien
gaaatagtcgattagtgcttttgaa

SEQ ID NO: 5357634 - DNA, 25 bp, Homo sapien
cagcgtggtcccttttgagtcgaaa

SEQ ID NO: 5357635 - DNA, 25 bp, Homo sapien
atccgccagtacaggagggccaggc

SEQ ID NO: 5357636 - DNA, 25 bp, Homo sapien
taaggtactcaataacaataccttg

SEQ ID NO: 5357637 - DNA, 25 bp, Homo sapien
cgtgcgcaaacaagacttaaacatt

SEQ ID NO: 5357638 - DNA, 25 bp, Homo sapien
cccagaagcggctgagtgcgtcgtg

SEQ ID NO: 5357639 - DNA, 25 bp, Homo sapien
tgttgttctaaggtactcaataaca

SEQ ID NO: 5357640 - DNA, 25 bp, Homo sapien
cataatgcagccagttgtttgtctt

SEQ ID NO: 5357641 - DNA, 25 bp, Homo sapien
gggccttgttccattgcatttccac

SEQ ID NO: 5357642 - DNA, 25 bp, Homo sapien
cacactcgataaacgacaatgctgc

SEQ ID NO: 5357643 - DNA, 25 bp, Homo sapien
gaatacatcgtataaggagatttgg

SEQ ID NO: 5357644 - DNA, 25 bp, Homo sapien
gacaatgctgcttcagcatagttca

SEQ ID NO: 5357645 - DNA, 25 bp, Homo sapien
cattcgtttagcttcttgcataaaa

SEQ ID NO: 5357646 - DNA, 25 bp, Homo sapien
tcttgcataaaataatcggcactgc

SEQ ID NO: 5357647 - DNA, 25 bp, Homo sapien
gcataaaataatcggcactgcgagg

SEQ ID NO: 5357648 - DNA, 25 bp, Homo sapien
tgctttatgcttcattcgtttagct

SEQ ID NO: 5357649 - DNA, 25 bp, Homo sapien
cgaaggcccttgaccaaagtcagag

SEQ ID NO: 5357650 - DNA, 25 bp, Homo sapien
ataacatggcatcctggtccgagga

SEQ ID NO: 5357651 - DNA, 25 bp, Homo sapien
aaagtcagaggtggctcctcattgt

SEQ ID NO: 5357652 - DNA, 25 bp, Homo sapien
tggcatcctggtccgaggagctctg

SEQ ID NO: 5357653 - DNA, 25 bp, Homo sapien
tataaagccagcaggaccaatggga

SEQ ID NO: 5357654 - DNA, 25 bp, Homo sapien
taagttacccttatggatggcagtg

SEQ ID NO: 5357655 - DNA, 25 bp, Homo sapien
tagcataggtaccatctggaggcca

SEQ ID NO: 5357656 - DNA, 25 bp, Homo sapien
ggaggccacttaacgaacacatttg

SEQ ID NO: 5357657 - DNA, 25 bp, Homo sapien
gctatccgatatgtcagcttgtcat

SEQ ID NO: 5357658 - DNA, 25 bp, Homo sapien
tctgctatccgatatgtcagcttgt

SEQ ID NO: 5357659 - DNA, 25 bp, Homo sapien
catcatctgctatccgatatgtcag

SEQ ID NO: 5357660 - DNA, 25 bp, Homo sapien
aattcatcatctgctatccgatatg

SEQ ID NO: 5357661 - DNA, 25 bp, Homo sapien
ggccacatttcacatgccatggcct

SEQ ID NO: 5357662 - DNA, 25 bp, Homo sapien
cctcccggccacatttcacatgcca

SEQ ID NO: 5357663 - DNA, 25 bp, Homo sapien
ttcctcccggccacatttcacatgc

SEQ ID NO: 5357664 - DNA, 25 bp, Homo sapien
ccggccacatttcacatgccatggc

SEQ ID NO: 5357665 - DNA, 25 bp, Homo sapien
cagcgcctggcgtctatagtcagtc

SEQ ID NO: 5357666 - DNA, 25 bp, Homo sapien
gcgcctggcgtctatagtcagtctt

SEQ ID NO: 5357667 - DNA, 25 bp, Homo sapien
tcagcgcctggcgtctatagtcagt

SEQ ID NO: 5357668 - DNA, 25 bp, Homo sapien
cctggcgtctatagtcagtctttcc

SEQ ID NO: 5357669 - DNA, 25 bp, Homo sapien
ttcaggtagccgggctcctgttacg

SEQ ID NO: 5357670 - DNA, 25 bp, Homo sapien
ctgaatgtgctgattgtgactgact

SEQ ID NO: 5357671 - DNA, 25 bp, Homo sapien
caccatggggacagaagggacgttt

SEQ ID NO: 5357672 - DNA, 25 bp, Homo sapien
cgggctcctgttacgggcaccatgg

SEQ ID NO: 5357673 - DNA, 25 bp, Homo sapien
tagcacagcagaacggtgggcagga

SEQ ID NO: 5357674 - DNA, 25 bp, Homo sapien
caccacttagccctgttcaggactt

SEQ ID NO: 5357675 - DNA, 25 bp, Homo sapien
caggacttctgtacggaggccttca

SEQ ID NO: 5357676 - DNA, 25 bp, Homo sapien
tccagccaagcatctcaccaccact

SEQ ID NO: 5357677 - DNA, 25 bp, Homo sapien
gctgaagagtggtagcacgatctca

SEQ ID NO: 5357678 - DNA, 25 bp, Homo sapien
gccgtgagacgctttttctacaaaa

SEQ ID NO: 5357679 - DNA, 25 bp, Homo sapien
tgcgcccagccgtgagacgcttttt

SEQ ID NO: 5357680 - DNA, 25 bp, Homo sapien
cccaggctgaagagtggtagcacga

SEQ ID NO: 5357681 - DNA, 25 bp, Homo sapien
tggagaccacggcttcgtctgcggc

SEQ ID NO: 5357682 - DNA, 25 bp, Homo sapien
atatcatcgaagacaagtttctgcc

SEQ ID NO: 5357683 - DNA, 25 bp, Homo sapien
tgtggccgttggagcctggagacca

SEQ ID NO: 5357684 - DNA, 25 bp, Homo sapien
tcgtctgcggccgtgacttgtggag

SEQ ID NO: 5357685 - DNA, 25 bp, Homo sapien
gatgggcgaccgaagcattttttca

SEQ ID NO: 5357686 - DNA, 25 bp, Homo sapien
aagaagttaagtcctcgctggtgta

SEQ ID NO: 5357687 - DNA, 25 bp, Homo sapien
ttgtgtttagatgcatcagagaggg

SEQ ID NO: 5357688 - DNA, 25 bp, Homo sapien
taaacaaactgttgccattaggtcg

SEQ ID NO: 5357689 - DNA, 25 bp, Homo sapien
gtctgcagaccttgaccagagtagt

SEQ ID NO: 5357690 - DNA, 25 bp, Homo sapien
ttcagacccagagatctctccagct

SEQ ID NO: 5357691 - DNA, 25 bp, Homo sapien
gaaccttgcgtgagtatctggagct

SEQ ID NO: 5357692 - DNA, 25 bp, Homo sapien
cagctcacttccactttggagggaa

SEQ ID NO: 5357693 - DNA, 25 bp, Homo sapien
atgttcatgttgcagtggtttgcag

SEQ ID NO: 5357694 - DNA, 25 bp, Homo sapien
acttcttgatctccctgtagtcgtc

SEQ ID NO: 5357695 - DNA, 25 bp, Homo sapien
agacaaagtattactggtggaggtg

SEQ ID NO: 5357696 - DNA, 25 bp, Homo sapien
ccctgtagtcgtcttcgttgtcaca

SEQ ID NO: 5357697 - DNA, 25 bp, Homo sapien
ggacaaggtaacaagctgtactcct

SEQ ID NO: 5357698 - DNA, 25 bp, Homo sapien
tcatcgtggccaggacaaggtaaca

SEQ ID NO: 5357699 - DNA, 25 bp, Homo sapien
caagaaatatattcatcgtggccag

SEQ ID NO: 5357700 - DNA, 25 bp, Homo sapien
aagctgtactccttagtccccttct

SEQ ID NO: 5357701 - DNA, 25 bp, Homo sapien
tggacgtattcaaatatccctcctc

SEQ ID NO: 5357702 - DNA, 25 bp, Homo sapien
tccctcctctacagagccctgtttt

SEQ ID NO: 5357703 - DNA, 25 bp, Homo sapien
ccattcctgaccctggacgtattca

SEQ ID NO: 5357704 - DNA, 25 bp, Homo sapien
tgctgcatcagggtctgccgtattc

SEQ ID NO: 5357705 - DNA, 25 bp, Homo sapien
tgggcggtgcgctctcagagtcctt

SEQ ID NO: 5357706 - DNA, 25 bp, Homo sapien
cagctccttggcgatgtcactggtg

SEQ ID NO: 5357707 - DNA, 25 bp, Homo sapien
tcctggcgttgatggagcctacagg

SEQ ID NO: 5357708 - DNA, 25 bp, Homo sapien
gattttgacccagagagacctgatc

SEQ ID NO: 5357709 - DNA, 25 bp, Homo sapien
ccacggtctgtgctttggacagagg

SEQ ID NO: 5357710 - DNA, 25 bp, Homo sapien
cccccgttggcagcggcctccttca

SEQ ID NO: 5357711 - DNA, 25 bp, Homo sapien
cgttggcagcggcctccttcagcct

SEQ ID NO: 5357712 - DNA, 25 bp, Homo sapien
agccacggtctgtgctttggacaga

SEQ ID NO: 5357713 - DNA, 25 bp, Homo sapien
gtactgattgctctctgacccgtgg

SEQ ID NO: 5357714 - DNA, 25 bp, Homo sapien
gacccgtggctttcattttggatca

SEQ ID NO: 5357715 - DNA, 25 bp, Homo sapien
acttgttagaggatgccggttcagc

SEQ ID NO: 5357716 - DNA, 25 bp, Homo sapien
ctggacgtcctctttcaccgggttg

SEQ ID NO: 5357717 - DNA, 25 bp, Homo sapien
tgaaagcagaaaaccggtgacaaac

SEQ ID NO: 5357718 - DNA, 25 bp, Homo sapien
ctgaaagcagaaaaccggtgacaaa

SEQ ID NO: 5357719 - DNA, 25 bp, Homo sapien
gaaagcagaaaaccggtgacaaaca

SEQ ID NO: 5357720 - DNA, 25 bp, Homo sapien
agtatatgagcagaaaacgaatggg

SEQ ID NO: 5357721 - DNA, 25 bp, Homo sapien
ctaagtatatgagcagaaaacgaat

SEQ ID NO: 5357722 - DNA, 25 bp, Homo sapien
tctctaagtatatgagcagaaaacg

SEQ ID NO: 5357723 - DNA, 25 bp, Homo sapien
ttctctaagtatatgagcagaaaac

SEQ ID NO: 5357724 - DNA, 25 bp, Homo sapien
atggaagcattaagcgtgtgtggca

SEQ ID NO: 5357725 - DNA, 25 bp, Homo sapien
cctctgatgggccagaacgggttgg

SEQ ID NO: 5357726 - DNA, 25 bp, Homo sapien
caaccagagctatgacagggaccat

SEQ ID NO: 5357727 - DNA, 25 bp, Homo sapien
gtccgggcacaactcagggaaatgg

SEQ ID NO: 5357728 - DNA, 25 bp, Homo sapien
gggatcaggcaaccagagctatgac

SEQ ID NO: 5357729 - DNA, 25 bp, Homo sapien
taaatccttcaagtacccgctgcca

SEQ ID NO: 5357730 - DNA, 25 bp, Homo sapien
tacccgctgccatggacctcgtagg

SEQ ID NO: 5357731 - DNA, 25 bp, Homo sapien
ttcaagtacccgctgccatggacct

SEQ ID NO: 5357732 - DNA, 25 bp, Homo sapien
atccttcaagtacccgctgccatgg

SEQ ID NO: 5357733 - DNA, 25 bp, Homo sapien
tcagcgagcaacttgaatcacattt

SEQ ID NO: 5357734 - DNA, 25 bp, Homo sapien
ctaataaatgagaagcttgttgagt

SEQ ID NO: 5357735 - DNA, 25 bp, Homo sapien
ttgagtcagcgagcaacttgaatca

SEQ ID NO: 5357736 - DNA, 25 bp, Homo sapien
gaagcttgttgagtcagcgagcaac

SEQ ID NO: 5357737 - DNA, 25 bp, Homo sapien
ttttggatatcctcactgcctgccc

SEQ ID NO: 5357738 - DNA, 25 bp, Homo sapien
ggagctctaggacctacatttcagg

SEQ ID NO: 5357739 - DNA, 25 bp, Homo sapien
cctggatggatgatcttcacagaca

SEQ ID NO: 5357740 - DNA, 25 bp, Homo sapien
tgcaaagccacaaggaggagcctgg

SEQ ID NO: 5357741 - DNA, 25 bp, Homo sapien
acacggggatgctgatcgggcccat

SEQ ID NO: 5357742 - DNA, 25 bp, Homo sapien
caccgctataaaagctggacacggg

SEQ ID NO: 5357743 - DNA, 25 bp, Homo sapien
tgtgataacatccaaggcaccgcta

SEQ ID NO: 5357744 - DNA, 25 bp, Homo sapien
gctttcaggtgtgataacatccaag

SEQ ID NO: 5357745 - DNA, 25 bp, Homo sapien
ctccgagtcagatccggagctgctc

SEQ ID NO: 5357746 - DNA, 25 bp, Homo sapien
ccgagtcagatccggagctgctctc

SEQ ID NO: 5357747 - DNA, 25 bp, Homo sapien
ggagaagtgggggggcttgctgccc

SEQ ID NO: 5357748 - DNA, 25 bp, Homo sapien
tggagaagtgggggggcttgctgcc

SEQ ID NO: 5357749 - DNA, 25 bp, Homo sapien
aaggcaccgaggttctgcagttggg

SEQ ID NO: 5357750 - DNA, 25 bp, Homo sapien
tgctggaaggcaccgaggttctgca

SEQ ID NO: 5357751 - DNA, 25 bp, Homo sapien
gcaccgaggttctgcagttgggctg

SEQ ID NO: 5357752 - DNA, 25 bp, Homo sapien
ttgctggaaggcaccgaggttctgc

SEQ ID NO: 5357753 - DNA, 25 bp, Homo sapien
gaagggaaggtggtataacatccaa

SEQ ID NO: 5357754 - DNA, 25 bp, Homo sapien
gaaggtggtataacatccaaatggc

SEQ ID NO: 5357755 - DNA, 25 bp, Homo sapien
ggaaggtggtataacatccaaatgg

SEQ ID NO: 5357756 - DNA, 25 bp, Homo sapien
agggaaggtggtataacatccaaat

SEQ ID NO: 5357757 - DNA, 25 bp, Homo sapien
taaatctttgatacgtgctttgccc

SEQ ID NO: 5357758 - DNA, 25 bp, Homo sapien
gactttcataaatcctgggtatggg

SEQ ID NO: 5357759 - DNA, 25 bp, Homo sapien
tttctataaaaaccaccagacaaga

SEQ ID NO: 5357760 - DNA, 25 bp, Homo sapien
gaggtaatactcattggagctttgt

SEQ ID NO: 5357761 - DNA, 25 bp, Homo sapien
gattgtctgacaaaattcttcagca

SEQ ID NO: 5357762 - DNA, 25 bp, Homo sapien
tgagctgcagcgatttcttttccag

SEQ ID NO: 5357763 - DNA, 25 bp, Homo sapien
aacatctgcacatttatgccttgcc

SEQ ID NO: 5357764 - DNA, 25 bp, Homo sapien
tccaccaatgtcacggtccacactg

SEQ ID NO: 5357765 - DNA, 25 bp, Homo sapien
ttgcagctgctttacccatcgtggg

SEQ ID NO: 5357766 - DNA, 25 bp, Homo sapien
tggggtcagctgaccattctggcct

SEQ ID NO: 5357767 - DNA, 25 bp, Homo sapien
ggcctcagtgtagtgactgctccca

SEQ ID NO: 5357768 - DNA, 25 bp, Homo sapien
agtgactgctcccaccacgggtgct

SEQ ID NO: 5357769 - DNA, 25 bp, Homo sapien
gacaaaatcttggatctcacagtca

SEQ ID NO: 5357770 - DNA, 25 bp, Homo sapien
tggatctcacagtcaagggtgctcc

SEQ ID NO: 5357771 - DNA, 25 bp, Homo sapien
ccaagtgtattgtggggcctgaata

SEQ ID NO: 5357772 - DNA, 25 bp, Homo sapien
cctgcctgccaagtgtattgtgggg

SEQ ID NO: 5357773 - DNA, 25 bp, Homo sapien
cttttaactgacaagtaacttggag

SEQ ID NO: 5357774 - DNA, 25 bp, Homo sapien
tttaactgacaagtaacttggagag

SEQ ID NO: 5357775 - DNA, 25 bp, Homo sapien
actgacaagtaacttggagagaggc

SEQ ID NO: 5357776 - DNA, 25 bp, Homo sapien
taactgacaagtaacttggagagag

SEQ ID NO: 5357777 - DNA, 25 bp, Homo sapien
ctgtgggcactccactgggattgac

SEQ ID NO: 5357778 - DNA, 25 bp, Homo sapien
tgaataacaatgtttgctcctcctc

SEQ ID NO: 5357779 - DNA, 25 bp, Homo sapien
cactgggattgactgaataacaatg

SEQ ID NO: 5357780 - DNA, 25 bp, Homo sapien
tcttcaacactctttgagaacacat

SEQ ID NO: 5357781 - DNA, 25 bp, Homo sapien
accataatcagtgtcctggcaacag

SEQ ID NO: 5357782 - DNA, 25 bp, Homo sapien
tgtcctggcaacagtattcctttat

SEQ ID NO: 5357783 - DNA, 25 bp, Homo sapien
gcttgatatccaaaccataatcagt

SEQ ID NO: 5357784 - DNA, 25 bp, Homo sapien
tccaaaccataatcagtgtcctggc

SEQ ID NO: 5357785 - DNA, 25 bp, Homo sapien
tgccttctggtgatacaactcgcct

SEQ ID NO: 5357786 - DNA, 25 bp, Homo sapien
cgaacatgaattaggctgggagtcc

SEQ ID NO: 5357787 - DNA, 25 bp, Homo sapien
gcttgtccgctgtaaaaggcttctc

SEQ ID NO: 5357788 - DNA, 25 bp, Homo sapien
actttcaggcgggtggtaccactag

SEQ ID NO: 5357789 - DNA, 25 bp, Homo sapien
tactcgatggcttttcaggcaccag

SEQ ID NO: 5357790 - DNA, 25 bp, Homo sapien
agctcctactcgatggcttttcagg

SEQ ID NO: 5357791 - DNA, 25 bp, Homo sapien
gctgctggatatgggcagggaagct

SEQ ID NO: 5357792 - DNA, 25 bp, Homo sapien
gcagggaagctcctactcgatggct

SEQ ID NO: 5357793 - DNA, 25 bp, Homo sapien
ctggccactcagagtagagtgaccc

SEQ ID NO: 5357794 - DNA, 25 bp, Homo sapien
gagcaggcaatcaatggtgtctccc

SEQ ID NO: 5357795 - DNA, 25 bp, Homo sapien
cccaaacgggttctctgtgaggaag

SEQ ID NO: 5357796 - DNA, 25 bp, Homo sapien
aagtgatggatgactgctgagcagg

SEQ ID NO: 5357797 - DNA, 25 bp, Homo sapien
tcatgcggtgagtgtaggatcccac

SEQ ID NO: 5357798 - DNA, 25 bp, Homo sapien
tttagcatgtgcaaggagctcccca

SEQ ID NO: 5357799 - DNA, 25 bp, Homo sapien
ggactgcaacctttgaactgggaca

SEQ ID NO: 5357800 - DNA, 25 bp, Homo sapien
gatcccacgggtatctggaggctcg

SEQ ID NO: 5357801 - DNA, 25 bp, Homo sapien
tcaacattaaaccatgtgcaggaga

SEQ ID NO: 5357802 - DNA, 25 bp, Homo sapien
tccaacataaagatgtgtggtgctg

SEQ ID NO: 5357803 - DNA, 25 bp, Homo sapien
ctgagcatgtctggtgctgagcaca

SEQ ID NO: 5357804 - DNA, 25 bp, Homo sapien
gatactagacgaaatgacaagcgag

SEQ ID NO: 5357805 - DNA, 25 bp, Homo sapien
aagaaacaaatttaattgactcaca

SEQ ID NO: 5357806 - DNA, 25 bp, Homo sapien
taaagaaacaaatttaattgactca

SEQ ID NO: 5357807 - DNA, 25 bp, Homo sapien
aaggtgaaggggaagcaaggcacgt

SEQ ID NO: 5357808 - DNA, 25 bp, Homo sapien
cttgtagaagaagtgacgtagcaga

SEQ ID NO: 5357809 - DNA, 25 bp, Homo sapien
tgtagaagaagtgacgtagcagaga

SEQ ID NO: 5357810 - DNA, 25 bp, Homo sapien
agaagaagtgacgtagcagagaaca

SEQ ID NO: 5357811 - DNA, 25 bp, Homo sapien
tagaagaagtgacgtagcagagaac

SEQ ID NO: 5357812 - DNA, 25 bp, Homo sapien
agaaggaagcagctaccagctaagg

SEQ ID NO: 5357813 - DNA, 25 bp, Homo sapien
cagaaggaagcagctaccagctaag

SEQ ID NO: 5357814 - DNA, 25 bp, Homo sapien
cacctggcctcaacactttttaatt

SEQ ID NO: 5357815 - DNA, 25 bp, Homo sapien
gcacctggcctcaacactttttaat

SEQ ID NO: 5357816 - DNA, 25 bp, Homo sapien
tgcacctggcctcaacactttttaa

SEQ ID NO: 5357817 - DNA, 25 bp, Homo sapien
gttgaagtctcacgtaattaaaatg

SEQ ID NO: 5357818 - DNA, 25 bp, Homo sapien
ccctagttgctcactgaaagataga

SEQ ID NO: 5357819 - DNA, 25 bp, Homo sapien
tggtcacttcagtaattccttgtct

SEQ ID NO: 5357820 - DNA, 25 bp, Homo sapien
gactatctccaggtaatcaaggtgg

SEQ ID NO: 5357821 - DNA, 25 bp, Homo sapien
ttggccaggctagcttctgacctca

SEQ ID NO: 5357822 - DNA, 25 bp, Homo sapien
tggccaggctagcttctgacctcag

SEQ ID NO: 5357823 - DNA, 25 bp, Homo sapien
gtcccaggccacatcttttctttct

SEQ ID NO: 5357824 - DNA, 25 bp, Homo sapien
gccactgtcccaggccacatctttt

SEQ ID NO: 5357825 - DNA, 25 bp, Homo sapien
gcaagcatgcaaccctgagagacta

SEQ ID NO: 5357826 - DNA, 25 bp, Homo sapien
gagagactacgaggtcacatacgcc

SEQ ID NO: 5357827 - DNA, 25 bp, Homo sapien
cactcaggttgatggaagagggatc

SEQ ID NO: 5357828 - DNA, 25 bp, Homo sapien
gagggatctctcaggcatctagctc

SEQ ID NO: 5357829 - DNA, 25 bp, Homo sapien
agtaaatactgcctctcgggatgag

SEQ ID NO: 5357830 - DNA, 25 bp, Homo sapien
aatttggcggatcgaatggctgtcc

SEQ ID NO: 5357831 - DNA, 25 bp, Homo sapien
tggaaccgacctgaaattaatgagc

SEQ ID NO: 5357832 - DNA, 25 bp, Homo sapien
caaggccacggacaattacatagag

SEQ ID NO: 5357833 - DNA, 25 bp, Homo sapien
taattccaactatgagacgtcatgc

SEQ ID NO: 5357834 - DNA, 25 bp, Homo sapien
cacattccatgcagacagcaagtgc

SEQ ID NO: 5357835 - DNA, 25 bp, Homo sapien
gactaccaggtgtaccttcacatgg

SEQ ID NO: 5357836 - DNA, 25 bp, Homo sapien
tacgggcactgaaatgcatcttttt

SEQ ID NO: 5357837 - DNA, 25 bp, Homo sapien
cctgtgttcgcagactgcagcgagg

SEQ ID NO: 5357838 - DNA, 25 bp, Homo sapien
ctttcctgtgttcgcagactgcagc

SEQ ID NO: 5357839 - DNA, 25 bp, Homo sapien
ccctttcctgtgttcgcagactgca

SEQ ID NO: 5357840 - DNA, 25 bp, Homo sapien
ctagggacagtctggttccctttgg

SEQ ID NO: 5357841 - DNA, 25 bp, Homo sapien
gtttttctcgtctgtggtcacagac

SEQ ID NO: 5357842 - DNA, 25 bp, Homo sapien
agtttttctcgtctgtggtcacaga

SEQ ID NO: 5357843 - DNA, 25 bp, Homo sapien
tagtttttctcgtctgtggtcacag

SEQ ID NO: 5357844 - DNA, 25 bp, Homo sapien
agtctgtattagtcctcaggaatcc

SEQ ID NO: 5357845 - DNA, 25 bp, Homo sapien
acatcaggcagcgagtctgtattag

SEQ ID NO: 5357846 - DNA, 25 bp, Homo sapien
ggcagcgagtctgtattagtcctca

SEQ ID NO: 5357847 - DNA, 25 bp, Homo sapien
gcgagtctgtattagtcctcaggaa

SEQ ID NO: 5357848 - DNA, 25 bp, Homo sapien
tgtgattacaagggtgtgccaccgc

SEQ ID NO: 5357849 - DNA, 25 bp, Homo sapien
tgccaccgcacccagctaatttttg

SEQ ID NO: 5357850 - DNA, 25 bp, Homo sapien
gtgattacaagggtgtgccaccgca

SEQ ID NO: 5357851 - DNA, 25 bp, Homo sapien
ctgtgattacaagggtgtgccaccg

SEQ ID NO: 5357852 - DNA, 25 bp, Homo sapien
tgtgtccctccagtgacactgattt

SEQ ID NO: 5357853 - DNA, 25 bp, Homo sapien
ttcatagtctgatgcagagggctgc

SEQ ID NO: 5357854 - DNA, 25 bp, Homo sapien
gctttccagactgggggtgaattac

SEQ ID NO: 5357855 - DNA, 25 bp, Homo sapien
agtagctaagagcaccaactctgga

SEQ ID NO: 5357856 - DNA, 25 bp, Homo sapien
ttctataacatccatacaagcaggc

SEQ ID NO: 5357857 - DNA, 25 bp, Homo sapien
ctttgagccactaagcgatgagccc

SEQ ID NO: 5357858 - DNA, 25 bp, Homo sapien
cactaagcgatgagcccctcatcat

SEQ ID NO: 5357859 - DNA, 25 bp, Homo sapien
taacatccatacaagcaggcatgaa

SEQ ID NO: 5357860 - DNA, 25 bp, Homo sapien
agccacagttgcaaagaattatttc

SEQ ID NO: 5357861 - DNA, 25 bp, Homo sapien
tgcaaggatggatagccacagttgc

SEQ ID NO: 5357862 - DNA, 25 bp, Homo sapien
gattcctgaggcatctgttgcaagg

SEQ ID NO: 5357863 - DNA, 25 bp, Homo sapien
tcctcttttaagcccaaagttgcca

SEQ ID NO: 5357864 - DNA, 25 bp, Homo sapien
cacaaagcattggtctagctcatcc

SEQ ID NO: 5357865 - DNA, 25 bp, Homo sapien
tgagttgcatcacctgttcgcggct

SEQ ID NO: 5357866 - DNA, 25 bp, Homo sapien
gacttacggtgtctgctaattgcca

SEQ ID NO: 5357867 - DNA, 25 bp, Homo sapien
tattgttacgatgcaaaacgtggcc

SEQ ID NO: 5357868 - DNA, 25 bp, Homo sapien
tgcctgtcctctcacatggccaggg

SEQ ID NO: 5357869 - DNA, 25 bp, Homo sapien
ctcagggcagggttgatatgcacct

SEQ ID NO: 5357870 - DNA, 25 bp, Homo sapien
caactattagtactgtgtggcaact

SEQ ID NO: 5357871 - DNA, 25 bp, Homo sapien
tgacccttaaagaagagaccaacta

SEQ ID NO: 5357872 - DNA, 25 bp, Homo sapien
tataaagcatgcctgctcgctgaga

SEQ ID NO: 5357873 - DNA, 25 bp, Homo sapien
gacgcgcagttgctcagcttgataa

SEQ ID NO: 5357874 - DNA, 25 bp, Homo sapien
gatgtggcttctttcgcagtgcaga

SEQ ID NO: 5357875 - DNA, 25 bp, Homo sapien
gaagaaaaaacacgagaggcacaca

SEQ ID NO: 5357876 - DNA, 25 bp, Homo sapien
agagagagcgcggagagccgttctc

SEQ ID NO: 5357877 - DNA, 25 bp, Homo sapien
ctgtcagagagagcgcggagagccg

SEQ ID NO: 5357878 - DNA, 25 bp, Homo sapien
agagcgcggagagccgttctctgag

SEQ ID NO: 5357879 - DNA, 25 bp, Homo sapien
gcggagagccgttctctgagctgcc

SEQ ID NO: 5357880 - DNA, 25 bp, Homo sapien
cttagcttaaggtcatcttccagca

SEQ ID NO: 5357881 - DNA, 25 bp, Homo sapien
cactgcttagcttaaggtcatcttc

SEQ ID NO: 5357882 - DNA, 25 bp, Homo sapien
tgcttagcttaaggtcatcttccag

SEQ ID NO: 5357883 - DNA, 25 bp, Homo sapien
tcactgcttagcttaaggtcatctt

SEQ ID NO: 5357884 - DNA, 25 bp, Homo sapien
tcatctgcacggaaggactagccat

SEQ ID NO: 5357885 - DNA, 25 bp, Homo sapien
gcagaccagctaagtactttctaga

SEQ ID NO: 5357886 - DNA, 25 bp, Homo sapien
taagggatgtccgtccgtagcagac

SEQ ID NO: 5357887 - DNA, 25 bp, Homo sapien
ggctcctgagggctaagtcatctgc

SEQ ID NO: 5357888 - DNA, 25 bp, Homo sapien
tctggaagggaactcaggctcactg

SEQ ID NO: 5357889 - DNA, 25 bp, Homo sapien
ttatccaggcaacaaactgtcccag

SEQ ID NO: 5357890 - DNA, 25 bp, Homo sapien
cattcctgactgagaaccctggtga

SEQ ID NO: 5357891 - DNA, 25 bp, Homo sapien
gggagcctaccctgttctgtaataa

SEQ ID NO: 5357892 - DNA, 25 bp, Homo sapien
ttgtgcaccagaccaactgctgcct

SEQ ID NO: 5357893 - DNA, 25 bp, Homo sapien
tgtccccgcttggtgtccaaactgg

SEQ ID NO: 5357894 - DNA, 25 bp, Homo sapien
tgatgctattgtgcccttgtccccg

SEQ ID NO: 5357895 - DNA, 25 bp, Homo sapien
ggccacaaaggactcgcactattaa

SEQ ID NO: 5357896 - DNA, 25 bp, Homo sapien
gtcagtgacagggtgtggggtaatg

SEQ ID NO: 5357897 - DNA, 25 bp, Homo sapien
cagggtgtggggtaatgggatgagc

SEQ ID NO: 5357898 - DNA, 25 bp, Homo sapien
acagggtgtggggtaatgggatgag

SEQ ID NO: 5357899 - DNA, 25 bp, Homo sapien
ctgctgtcagtgacagggtgtgggg

SEQ ID NO: 5357900 - DNA, 25 bp, Homo sapien
ccagcaatatgttagtgagccagtt

SEQ ID NO: 5357901 - DNA, 25 bp, Homo sapien
aaacgtctttcatgccagccctgta

SEQ ID NO: 5357902 - DNA, 25 bp, Homo sapien
agtgcaaccgctgggtccattttca

SEQ ID NO: 5357903 - DNA, 25 bp, Homo sapien
gagccttcacgtacaagttgctgtg

SEQ ID NO: 5357904 - DNA, 25 bp, Homo sapien
ctgcagtattctaactaaatccttg

SEQ ID NO: 5357905 - DNA, 25 bp, Homo sapien
cctcttaatcatgatataccaacac

SEQ ID NO: 5357906 - DNA, 25 bp, Homo sapien
gcagtattctaactaaatccttgaa

SEQ ID NO: 5357907 - DNA, 25 bp, Homo sapien
agtatttgttacctcttaatcatga

SEQ ID NO: 5357908 - DNA, 25 bp, Homo sapien
tctagtcctagttggctgggagtgt

SEQ ID NO: 5357909 - DNA, 25 bp, Homo sapien
gcattaatatggtcacgaatcagct

SEQ ID NO: 5357910 - DNA, 25 bp, Homo sapien
catgcactcctgtgataaatcctgc

SEQ ID NO: 5357911 - DNA, 25 bp, Homo sapien
tattttcatgcgtcactgaatcaga

SEQ ID NO: 5357912 - DNA, 25 bp, Homo sapien
taaataaagtacgtatcatgtagac

SEQ ID NO: 5357913 - DNA, 25 bp, Homo sapien
tacgtatcatgtagaccgcaggcag

SEQ ID NO: 5357914 - DNA, 25 bp, Homo sapien
ggcagtcttaattttgtagctggtc

SEQ ID NO: 5357915 - DNA, 25 bp, Homo sapien
atgggcatggatgcctcataaacag

SEQ ID NO: 5357916 - DNA, 25 bp, Homo sapien
tgaatctcactctttatccgtaatg

SEQ ID NO: 5357917 - DNA, 25 bp, Homo sapien
tatcctacctacctaaaaaagctca

SEQ ID NO: 5357918 - DNA, 25 bp, Homo sapien
cctaaaaaagctcagatagatgctg

SEQ ID NO: 5357919 - DNA, 25 bp, Homo sapien
tttatccgtaatgtactgtacctca

SEQ ID NO: 5357920 - DNA, 25 bp, Homo sapien
atgtattcgatgtgccactgtctgg

SEQ ID NO: 5357921 - DNA, 25 bp, Homo sapien
tattcgatgtgccactgtctggact

SEQ ID NO: 5357922 - DNA, 25 bp, Homo sapien
gatgtattcgatgtgccactgtctg

SEQ ID NO: 5357923 - DNA, 25 bp, Homo sapien
tgtattcgatgtgccactgtctgga

SEQ ID NO: 5357924 - DNA, 25 bp, Homo sapien
cctcatgcacatgttaggagttctg

SEQ ID NO: 5357925 - DNA, 25 bp, Homo sapien
taacactccccagacagtatatgag

SEQ ID NO: 5357926 - DNA, 25 bp, Homo sapien
ttccatatggccaactttagcaggg

SEQ ID NO: 5357927 - DNA, 25 bp, Homo sapien
tctgggccttaagacttccatatgg

SEQ ID NO: 5357928 - DNA, 25 bp, Homo sapien
ttccatttctacagcttcatggcta

SEQ ID NO: 5357929 - DNA, 25 bp, Homo sapien
gcaagggtaactcttcaagacactc

SEQ ID NO: 5357930 - DNA, 25 bp, Homo sapien
caagacactctagtctgtggtgtgc

SEQ ID NO: 5357931 - DNA, 25 bp, Homo sapien
atttaaattcaatggtgagacacag

SEQ ID NO: 5357932 - DNA, 25 bp, Homo sapien
gatgctgacgtctgtataccacgac

SEQ ID NO: 5357933 - DNA, 25 bp, Homo sapien
ttattgtgtccagaggatacaagct

SEQ ID NO: 5357934 - DNA, 25 bp, Homo sapien
ggttggttccactttgccaggtgct

SEQ ID NO: 5357935 - DNA, 25 bp, Homo sapien
ttggttggttccactttgccaggtg

SEQ ID NO: 5357936 - DNA, 25 bp, Homo sapien
aatttggttggttccactttgccag

SEQ ID NO: 5357937 - DNA, 25 bp, Homo sapien
tggttccactttgccaggtgcttga

SEQ ID NO: 5357938 - DNA, 25 bp, Homo sapien
ggactcggacttgatcccacagaat

SEQ ID NO: 5357939 - DNA, 25 bp, Homo sapien
tacaagtgggccttcataaggcagg

SEQ ID NO: 5357940 - DNA, 25 bp, Homo sapien
tcacagggtgtctccaaagaaatgc

SEQ ID NO: 5357941 - DNA, 25 bp, Homo sapien
taaagggacaatctagtagcaaaag

SEQ ID NO: 5357942 - DNA, 25 bp, Homo sapien
ccctgactttaactctgatctttgg

SEQ ID NO: 5357943 - DNA, 25 bp, Homo sapien
tcaaatttttggcttcacaaccctg

SEQ ID NO: 5357944 - DNA, 25 bp, Homo sapien
gcaactgggcaatcttatgggcacc

SEQ ID NO: 5357945 - DNA, 25 bp, Homo sapien
actctgatctttggacttcgtcttg

SEQ ID NO: 5357946 - DNA, 25 bp, Homo sapien
gattctatacttgggctccttagga

SEQ ID NO: 5357947 - DNA, 25 bp, Homo sapien
tccttaggaaaggtaactgtgcaca

SEQ ID NO: 5357948 - DNA, 25 bp, Homo sapien
caatggtgggatacagaagtaggac

SEQ ID NO: 5357949 - DNA, 25 bp, Homo sapien
gacacggacttctctaaacttgggc

SEQ ID NO: 5357950 - DNA, 25 bp, Homo sapien
catgtcccactccttagccttttag

SEQ ID NO: 5357951 - DNA, 25 bp, Homo sapien
ccttctccctacacagatgtctagt

SEQ ID NO: 5357952 - DNA, 25 bp, Homo sapien
gaatccacgtatctgcctcaacaca

SEQ ID NO: 5357953 - DNA, 25 bp, Homo sapien
tagatactccaggtgatggaactga

SEQ ID NO: 5357954 - DNA, 25 bp, Homo sapien
aaatgataaggacacagaatattgc

SEQ ID NO: 5357955 - DNA, 25 bp, Homo sapien
gaatattgctcttcataactggcta

SEQ ID NO: 5357956 - DNA, 25 bp, Homo sapien
catgggccagtttccattttcacgt

SEQ ID NO: 5357957 - DNA, 25 bp, Homo sapien
aatgaaagaatagatggttaaatga

SEQ ID NO: 5357958 - DNA, 25 bp, Homo sapien
ggtgcatagactttcatgtgctcca

SEQ ID NO: 5357959 - DNA, 25 bp, Homo sapien
gtagctgaccactcttctgatgcca

SEQ ID NO: 5357960 - DNA, 25 bp, Homo sapien
tactctacagcaagactgacgccag

SEQ ID NO: 5357961 - DNA, 25 bp, Homo sapien
cccacacactgatggtgcatagact

SEQ ID NO: 5357962 - DNA, 25 bp, Homo sapien
tttagcctcaagttaaatcttcgag

SEQ ID NO: 5357963 - DNA, 25 bp, Homo sapien
aatcttcgagttcagagtgtgcagc

SEQ ID NO: 5357964 - DNA, 25 bp, Homo sapien
gacctgcaaagtctgtttagcttac

SEQ ID NO: 5357965 - DNA, 25 bp, Homo sapien
tttagcttacaataggttcaactag

SEQ ID NO: 5357966 - DNA, 25 bp, Homo sapien
caatgccacttatttagcaactaca

SEQ ID NO: 5357967 - DNA, 25 bp, Homo sapien
gcaactacatgctactcagtgctgt

SEQ ID NO: 5357968 - DNA, 25 bp, Homo sapien
ccggccaatgccacttatttagcaa

SEQ ID NO: 5357969 - DNA, 25 bp, Homo sapien
cttgtcatgtgttaccactatcaga

SEQ ID NO: 5357970 - DNA, 25 bp, Homo sapien
ctaggtttccgtgaactatgattgc

SEQ ID NO: 5357971 - DNA, 25 bp, Homo sapien
tgagcctaggaattctaggtttccg

SEQ ID NO: 5357972 - DNA, 25 bp, Homo sapien
accctgtctttaatcacaacaacaa

SEQ ID NO: 5357973 - DNA, 25 bp, Homo sapien
tagcattttgatggaaatactactg

SEQ ID NO: 5357974 - DNA, 25 bp, Homo sapien
gtttcatgctagatcccttaatttt

SEQ ID NO: 5357975 - DNA, 25 bp, Homo sapien
ttcatgctagatcccttaattttgg

SEQ ID NO: 5357976 - DNA, 25 bp, Homo sapien
tgtttcatgctagatcccttaattt

SEQ ID NO: 5357977 - DNA, 25 bp, Homo sapien
tttcatgctagatcccttaattttg

SEQ ID NO: 5357978 - DNA, 25 bp, Homo sapien
agaggatgagagtcacctgtcttat

SEQ ID NO: 5357979 - DNA, 25 bp, Homo sapien
gtcttattatctctctgtgtcaagt

SEQ ID NO: 5357980 - DNA, 25 bp, Homo sapien
cctgtcttattatctctctgtgtca

SEQ ID NO: 5357981 - DNA, 25 bp, Homo sapien
ggatgagagtcacctgtcttattat

SEQ ID NO: 5357982 - DNA, 25 bp, Homo sapien
agtgttgacagcttctggattcgac

SEQ ID NO: 5357983 - DNA, 25 bp, Homo sapien
taactagtgttgacagcttctggat

SEQ ID NO: 5357984 - DNA, 25 bp, Homo sapien
ctttataactagtgttgacagcttc

SEQ ID NO: 5357985 - DNA, 25 bp, Homo sapien
tataactagtgttgacagcttctgg

SEQ ID NO: 5357986 - DNA, 25 bp, Homo sapien
tcctctgactttggtggagccacat

SEQ ID NO: 5357987 - DNA, 25 bp, Homo sapien
acctgcagataatgtcaatggtgac

SEQ ID NO: 5357988 - DNA, 25 bp, Homo sapien
ttttatatacatgcactaagatggg

SEQ ID NO: 5357989 - DNA, 25 bp, Homo sapien
ggtgggtttgggacacatgatttca

SEQ ID NO: 5357990 - DNA, 25 bp, Homo sapien
ctttgtcctcttggatagtttccca

SEQ ID NO: 5357991 - DNA, 25 bp, Homo sapien
tttgtcctcttggatagtttcccat

SEQ ID NO: 5357992 - DNA, 25 bp, Homo sapien
gtgtagtagtatcctgccaaacctc

SEQ ID NO: 5357993 - DNA, 25 bp, Homo sapien
gaaacaagatttgggtgagtctcca

SEQ ID NO: 5357994 - DNA, 25 bp, Homo sapien
ctcgtggatggtctggaggcattct

SEQ ID NO: 5357995 - DNA, 25 bp, Homo sapien
tgagtctccacaagtctgccgtttt

SEQ ID NO: 5357996 - DNA, 25 bp, Homo sapien
tcatttgggcatgggttatagtgct

SEQ ID NO: 5357997 - DNA, 25 bp, Homo sapien
actgattggctgatgtgtgatcgaa

SEQ ID NO: 5357998 - DNA, 25 bp, Homo sapien
tagctgggcgcactagcagtgcatg

SEQ ID NO: 5357999 - DNA, 25 bp, Homo sapien
tgatcgaaggctcacagcaacttaa

SEQ ID NO: 5358000 - DNA, 25 bp, Homo sapien
cacagataggactacacagattcta

SEQ ID NO: 5358001 - DNA, 25 bp, Homo sapien
tgtacatttcccctaagctgttgaa

SEQ ID NO: 5358002 - DNA, 25 bp, Homo sapien
tcgccagaagcgaatgctagcactg

SEQ ID NO: 5358003 - DNA, 25 bp, Homo sapien
tcattgctcatattaatcattcgcg

SEQ ID NO: 5358004 - DNA, 25 bp, Homo sapien
actgcattaaaagatcaagacccaa

SEQ ID NO: 5358005 - DNA, 25 bp, Homo sapien
tctaacggaccaatcaatatgacgt

SEQ ID NO: 5358006 - DNA, 25 bp, Homo sapien
taaatgcttatgtgcctaacagcag

SEQ ID NO: 5358007 - DNA, 25 bp, Homo sapien
gatcttaacgcagccagggataaag

SEQ ID NO: 5358008 - DNA, 25 bp, Homo sapien
atcaaatctagaggtcttttggtgg

SEQ ID NO: 5358009 - DNA, 25 bp, Homo sapien
tatcaaatctagaggtcttttggtg

SEQ ID NO: 5358010 - DNA, 25 bp, Homo sapien
atttatcaaatctagaggtcttttg

SEQ ID NO: 5358011 - DNA, 25 bp, Homo sapien
tttatcaaatctagaggtcttttgg

SEQ ID NO: 5358012 - DNA, 25 bp, Homo sapien
ttgcctccattggctgtcactaatt

SEQ ID NO: 5358013 - DNA, 25 bp, Homo sapien
tgggattgctgccatttagtgccca

SEQ ID NO: 5358014 - DNA, 25 bp, Homo sapien
ccattggctgtcactaatttccagc

SEQ ID NO: 5358015 - DNA, 25 bp, Homo sapien
ggagcacaagtaaggaggaaagcta

SEQ ID NO: 5358016 - DNA, 25 bp, Homo sapien
gagcacaagtaaggaggaaagctat

SEQ ID NO: 5358017 - DNA, 25 bp, Homo sapien
gcacaagtaaggaggaaagctattt

SEQ ID NO: 5358018 - DNA, 25 bp, Homo sapien
cacaagtaaggaggaaagctatttc

SEQ ID NO: 5358019 - DNA, 25 bp, Homo sapien
gccgctttaacctcaccacacctgt

SEQ ID NO: 5358020 - DNA, 25 bp, Homo sapien
cgctttaacctcaccacacctgttc

SEQ ID NO: 5358021 - DNA, 25 bp, Homo sapien
ctggccgctttaacctcaccacacc

SEQ ID NO: 5358022 - DNA, 25 bp, Homo sapien
tggccgctttaacctcaccacacct

SEQ ID NO: 5358023 - DNA, 25 bp, Homo sapien
ccaaattctcacgtacacggcatcg

SEQ ID NO: 5358024 - DNA, 25 bp, Homo sapien
acggcatcgtccatgactctgacag

SEQ ID NO: 5358025 - DNA, 25 bp, Homo sapien
tcacgtacacggcatcgtccatgac

SEQ ID NO: 5358026 - DNA, 25 bp, Homo sapien
gactctgacagtcatattgatgaca

SEQ ID NO: 5358027 - DNA, 25 bp, Homo sapien
taccctatttctcgcagtgcaggca

SEQ ID NO: 5358028 - DNA, 25 bp, Homo sapien
cacagttttacaagtctgcgcttcc

SEQ ID NO: 5358029 - DNA, 25 bp, Homo sapien
gataatcaggaaataccgacacagt

SEQ ID NO: 5358030 - DNA, 25 bp, Homo sapien
aaggacatcagtaggtacacatgac

SEQ ID NO: 5358031 - DNA, 25 bp, Homo sapien
tctgcctaaaaaattgcctccaaca

SEQ ID NO: 5358032 - DNA, 25 bp, Homo sapien
tatgttcacactgttgtacgaccag

SEQ ID NO: 5358033 - DNA, 25 bp, Homo sapien
ccaacattacttgtagagtatgtcc

SEQ ID NO: 5358034 - DNA, 25 bp, Homo sapien
tcctgcctttggcacttactccatg

SEQ ID NO: 5358035 - DNA, 25 bp, Homo sapien
tctgacaagaagtccgctgtactac

SEQ ID NO: 5358036 - DNA, 25 bp, Homo sapien
ggattccaggtaagcacattgcatg

SEQ ID NO: 5358037 - DNA, 25 bp, Homo sapien
gtcatctaggacagtggattccagg

SEQ ID NO: 5358038 - DNA, 25 bp, Homo sapien
catctctttggcgacatggcctata

SEQ ID NO: 5358039 - DNA, 25 bp, Homo sapien
tctggcctcccctacatcttttccc

SEQ ID NO: 5358040 - DNA, 25 bp, Homo sapien
aattatagtatagtccaggggtatc

SEQ ID NO: 5358041 - DNA, 25 bp, Homo sapien
tatagtccaggggtatccaatgttt

SEQ ID NO: 5358042 - DNA, 25 bp, Homo sapien
gcagaaggaatatgctctaaaataa

SEQ ID NO: 5358043 - DNA, 25 bp, Homo sapien
taaaaaggtccgtgcataaaactca

SEQ ID NO: 5358044 - DNA, 25 bp, Homo sapien
ggaccagcttggtatagtcaataca

SEQ ID NO: 5358045 - DNA, 25 bp, Homo sapien
taaaccagtgacacaatcgctcctt

SEQ ID NO: 5358046 - DNA, 25 bp, Homo sapien
atgcagcccgcagattggaccagct

SEQ ID NO: 5358047 - DNA, 25 bp, Homo sapien
tgctgggcttttatccgactggaag

SEQ ID NO: 5358048 - DNA, 25 bp, Homo sapien
taatgccttgtgctatgacctcgtg

SEQ ID NO: 5358049 - DNA, 25 bp, Homo sapien
cacagtaggtttgccgacactaaca

SEQ ID NO: 5358050 - DNA, 25 bp, Homo sapien
tatttctaagctcactagggcccct

SEQ ID NO: 5358051 - DNA, 25 bp, Homo sapien
tcttaacaaatctctctttgtgttc

SEQ ID NO: 5358052 - DNA, 25 bp, Homo sapien
tgacaatctttctagatggctccgc

SEQ ID NO: 5358053 - DNA, 25 bp, Homo sapien
tgctgaagtgattaatcatttccac

SEQ ID NO: 5358054 - DNA, 25 bp, Homo sapien
actatccaagggctgctgacaatct

SEQ ID NO: 5358055 - DNA, 25 bp, Homo sapien
caacctccaaaagagctccgctttt

SEQ ID NO: 5358056 - DNA, 25 bp, Homo sapien
gtaactagccaacctccaaaagagc

SEQ ID NO: 5358057 - DNA, 25 bp, Homo sapien
aagagctccgcttttatttcttgcc

SEQ ID NO: 5358058 - DNA, 25 bp, Homo sapien
tccaaaagagctccgcttttatttc

SEQ ID NO: 5358059 - DNA, 25 bp, Homo sapien
ggctctcaatctgtaatctggtttc

SEQ ID NO: 5358060 - DNA, 25 bp, Homo sapien
ctctcaatctgtaatctggtttcca

SEQ ID NO: 5358061 - DNA, 25 bp, Homo sapien
gctctcaatctgtaatctggtttcc

SEQ ID NO: 5358062 - DNA, 25 bp, Homo sapien
ccaaaaataccattaggtcacaagt

SEQ ID NO: 5358063 - DNA, 25 bp, Homo sapien
cagagaagggaaagctacaatgatt

SEQ ID NO: 5358064 - DNA, 25 bp, Homo sapien
gcatgcactgttaaactgaattcaa

SEQ ID NO: 5358065 - DNA, 25 bp, Homo sapien
gtcacaagttactgccagagaaggg

SEQ ID NO: 5358066 - DNA, 25 bp, Homo sapien
cacagagcatattagcagtggaaac

SEQ ID NO: 5358067 - DNA, 25 bp, Homo sapien
caacagtcttggcagtccttggaga

SEQ ID NO: 5358068 - DNA, 25 bp, Homo sapien
aacagttttgacttccagcccttga

SEQ ID NO: 5358069 - DNA, 25 bp, Homo sapien
actcaggataaaagtggcagacaca

SEQ ID NO: 5358070 - DNA, 25 bp, Homo sapien
tatgtcccacagattgataagactg

SEQ ID NO: 5358071 - DNA, 25 bp, Homo sapien
taaatgtcaaaccacagactatggg

SEQ ID NO: 5358072 - DNA, 25 bp, Homo sapien
cttccagctgatcactttaataggg

SEQ ID NO: 5358073 - DNA, 25 bp, Homo sapien
ctttatcatggagccgcaggtttcc

SEQ ID NO: 5358074 - DNA, 25 bp, Homo sapien
ccggattatttcttcaacacagctg

SEQ ID NO: 5358075 - DNA, 25 bp, Homo sapien
ttatttcttcaacacagctgttggt

SEQ ID NO: 5358076 - DNA, 25 bp, Homo sapien
ttcaacacagctgttggtttctcca

SEQ ID NO: 5358077 - DNA, 25 bp, Homo sapien
tgttggtttctccagatctactctc

SEQ ID NO: 5358078 - DNA, 25 bp, Homo sapien
acaggactgctctggaaacatcacc

SEQ ID NO: 5358079 - DNA, 25 bp, Homo sapien
ttggaacctgatccttttccaggga

SEQ ID NO: 5358080 - DNA, 25 bp, Homo sapien
gacactctgatacaactggatcaga

SEQ ID NO: 5358081 - DNA, 25 bp, Homo sapien
cagagagctcttttggaacctgatc

SEQ ID NO: 5358082 - DNA, 25 bp, Homo sapien
cgcctggccgaacattttcctgaat

SEQ ID NO: 5358083 - DNA, 25 bp, Homo sapien
gcgcctggccgaacattttcctgaa

SEQ ID NO: 5358084 - DNA, 25 bp, Homo sapien
gcctggccgaacattttcctgaatc

SEQ ID NO: 5358085 - DNA, 25 bp, Homo sapien
gttacttgaattatacctggagcat

SEQ ID NO: 5358086 - DNA, 25 bp, Homo sapien
tccttggtgtttacagttacttgaa

SEQ ID NO: 5358087 - DNA, 25 bp, Homo sapien
aattatacctggagcataatttttg

SEQ ID NO: 5358088 - DNA, 25 bp, Homo sapien
cattgaattccttggtgtttacagt

SEQ ID NO: 5358089 - DNA, 25 bp, Homo sapien
taaccagctccctaggaaattctta

SEQ ID NO: 5358090 - DNA, 25 bp, Homo sapien
taaaattaccaattgctgggcccac

SEQ ID NO: 5358091 - DNA, 25 bp, Homo sapien
tagaggatttcgatgattatccacc

SEQ ID NO: 5358092 - DNA, 25 bp, Homo sapien
ggcggcacaagcatttagaactgct

SEQ ID NO: 5358093 - DNA, 25 bp, Homo sapien
ctacaacatgctacagaagggccag

SEQ ID NO: 5358094 - DNA, 25 bp, Homo sapien
agacgaaaccgggagcttaggcctg

SEQ ID NO: 5358095 - DNA, 25 bp, Homo sapien
tagcagaccaggctcctagaacttt

SEQ ID NO: 5358096 - DNA, 25 bp, Homo sapien
tcagccaataaagcttatggtcgcc

SEQ ID NO: 5358097 - DNA, 25 bp, Homo sapien
aaattctggagtgtattcttggcac

SEQ ID NO: 5358098 - DNA, 25 bp, Homo sapien
actagaagaggccaagacttgaaag

SEQ ID NO: 5358099 - DNA, 25 bp, Homo sapien
gatttgatcctggtcactctctgtg

SEQ ID NO: 5358100 - DNA, 25 bp, Homo sapien
gtaataacctaccacacagacctgt

SEQ ID NO: 5358101 - DNA, 25 bp, Homo sapien
taaatctgtcaaaacacggggtaga

SEQ ID NO: 5358102 - DNA, 25 bp, Homo sapien
ttcactggaatggtccagcttccgg

SEQ ID NO: 5358103 - DNA, 25 bp, Homo sapien
tcaaaccctggatcactaaaattcc

SEQ ID NO: 5358104 - DNA, 25 bp, Homo sapien
cgtacatgccttactccagccaaga

SEQ ID NO: 5358105 - DNA, 25 bp, Homo sapien
ggtcagagccaggataacctctctg

SEQ ID NO: 5358106 - DNA, 25 bp, Homo sapien
tctctggctacacagtgacgcatcc

SEQ ID NO: 5358107 - DNA, 25 bp, Homo sapien
gctacacagtgacgcatccactggg

SEQ ID NO: 5358108 - DNA, 25 bp, Homo sapien
attccagactctgggtgacacttca

SEQ ID NO: 5358109 - DNA, 25 bp, Homo sapien
aaaacgcacagatgggatctaccag

SEQ ID NO: 5358110 - DNA, 25 bp, Homo sapien
cagatcatgagaatgctttcacagc

SEQ ID NO: 5358111 - DNA, 25 bp, Homo sapien
gaagtatgtcactgaaaaacgcaca

SEQ ID NO: 5358112 - DNA, 25 bp, Homo sapien
caatgtagtaataaccaacagggca

SEQ ID NO: 5358113 - DNA, 25 bp, Homo sapien
tgtcaggagcagcaaacagtgcagt

SEQ ID NO: 5358114 - DNA, 25 bp, Homo sapien
acctctgccccagccttagcctctg

SEQ ID NO: 5358115 - DNA, 25 bp, Homo sapien
agagcttggcagattctgattcccc

SEQ ID NO: 5358116 - DNA, 25 bp, Homo sapien
gtctgaactgaacagagcttggcag

SEQ ID NO: 5358117 - DNA, 25 bp, Homo sapien
cctagctctgagaagaacctgcacc

SEQ ID NO: 5358118 - DNA, 25 bp, Homo sapien
gggttgtaccctcagcatcctagct

SEQ ID NO: 5358119 - DNA, 25 bp, Homo sapien
catcatgtgtgaaactggctgagaa

SEQ ID NO: 5358120 - DNA, 25 bp, Homo sapien
gccctgctggatctacccatgcaga

SEQ ID NO: 5358121 - DNA, 25 bp, Homo sapien
gcagacttcagagcatgtcttctta

SEQ ID NO: 5358122 - DNA, 25 bp, Homo sapien
ctgcagacttcagagcatgtcttct

SEQ ID NO: 5358123 - DNA, 25 bp, Homo sapien
gacttcagagcatgtcttcttaggg

SEQ ID NO: 5358124 - DNA, 25 bp, Homo sapien
cttcttaggggctgtcgctcaaaaa

SEQ ID NO: 5358125 - DNA, 25 bp, Homo sapien
aggaagcagaggctacccgctattc

SEQ ID NO: 5358126 - DNA, 25 bp, Homo sapien
agaggctacccgctattccaacagg

SEQ ID NO: 5358127 - DNA, 25 bp, Homo sapien
cccgctattccaacaggctttctat

SEQ ID NO: 5358128 - DNA, 25 bp, Homo sapien
aatccaaactgagctaatttgtgta

SEQ ID NO: 5358129 - DNA, 25 bp, Homo sapien
tatgggatgtgagtctattttaatc

SEQ ID NO: 5358130 - DNA, 25 bp, Homo sapien
gcaacacctgccctggacggcagtt

SEQ ID NO: 5358131 - DNA, 25 bp, Homo sapien
ggcctactgtttcggaggtcttcaa

SEQ ID NO: 5358132 - DNA, 25 bp, Homo sapien
gcctgcatcaacctgctctcaaatt

SEQ ID NO: 5358133 - DNA, 25 bp, Homo sapien
catccgatctctgtagcactgcagg

SEQ ID NO: 5358134 - DNA, 25 bp, Homo sapien
tgactgctcccacagagtgttatgg

SEQ ID NO: 5358135 - DNA, 25 bp, Homo sapien
ttcctgctcaagacagcatccgatc

SEQ ID NO: 5358136 - DNA, 25 bp, Homo sapien
ttatggcctctacgcacaccaacat

SEQ ID NO: 5358137 - DNA, 25 bp, Homo sapien
caaggaagggaatatggttgcttaa

SEQ ID NO: 5358138 - DNA, 25 bp, Homo sapien
ttgcttaattctcacctccctggcg

SEQ ID NO: 5358139 - DNA, 25 bp, Homo sapien
tgccagtgaccaaggagaagctgtt

SEQ ID NO: 5358140 - DNA, 25 bp, Homo sapien
gggtccttccatcctagaacagcat

SEQ ID NO: 5358141 - DNA, 25 bp, Homo sapien
tgctctccatccttgctgacgaaca

SEQ ID NO: 5358142 - DNA, 25 bp, Homo sapien
aaggctgacctctgacactgcaaag

SEQ ID NO: 5358143 - DNA, 25 bp, Homo sapien
cacagtgagcgtccgggctatgctc

SEQ ID NO: 5358144 - DNA, 25 bp, Homo sapien
ccttgctgacgaacagacagagcac

SEQ ID NO: 5358145 - DNA, 25 bp, Homo sapien
tctctggttcttggagttatcttcc

SEQ ID NO: 5358146 - DNA, 25 bp, Homo sapien
ccagaaatatagaaagccatcctga

SEQ ID NO: 5358147 - DNA, 25 bp, Homo sapien
gcctgatgccttttgcatgaactgt

SEQ ID NO: 5358148 - DNA, 25 bp, Homo sapien
tcctgggtcagtgcctgatgccttt

SEQ ID NO: 5358149 - DNA, 25 bp, Homo sapien
ccaggtgtacatgaactgttttgca

SEQ ID NO: 5358150 - DNA, 25 bp, Homo sapien
tcccaggtgtacatgaactgttttg

SEQ ID NO: 5358151 - DNA, 25 bp, Homo sapien
taaaaagctgaacaatagttggtta

SEQ ID NO: 5358152 - DNA, 25 bp, Homo sapien
tgttttgcaagtacaccccgtgaat

SEQ ID NO: 5358153 - DNA, 25 bp, Homo sapien
tgaaatagagtcacacggactgtgg

SEQ ID NO: 5358154 - DNA, 25 bp, Homo sapien
tggagagctcactgtctagaccact

SEQ ID NO: 5358155 - DNA, 25 bp, Homo sapien
ggcttcttatctcaccttgcaaggc

SEQ ID NO: 5358156 - DNA, 25 bp, Homo sapien
cctctgctgaggattttagtgcccg

SEQ ID NO: 5358157 - DNA, 25 bp, Homo sapien
tatcatcatttgacagtcctttctg

SEQ ID NO: 5358158 - DNA, 25 bp, Homo sapien
aataaccactcccatttactgggca

SEQ ID NO: 5358159 - DNA, 25 bp, Homo sapien
tgtgcagcacaacgtcaaacgccat

SEQ ID NO: 5358160 - DNA, 25 bp, Homo sapien
accccgtgtgcagcacaacgtcaaa

SEQ ID NO: 5358161 - DNA, 25 bp, Homo sapien
cgtcaaacgccatatgggatcatct

SEQ ID NO: 5358162 - DNA, 25 bp, Homo sapien
gagagagtgggtaccacgatgccat

SEQ ID NO: 5358163 - DNA, 25 bp, Homo sapien
cactcaagtcatagaggccagatcc

SEQ ID NO: 5358164 - DNA, 25 bp, Homo sapien
ctgaggcaccgagagagagtgggta

SEQ ID NO: 5358165 - DNA, 25 bp, Homo sapien
tgggtaccacgatgccatctcgcag

SEQ ID NO: 5358166 - DNA, 25 bp, Homo sapien
ggtgcaaacttcaagaacaagctct

SEQ ID NO: 5358167 - DNA, 25 bp, Homo sapien
gctgtgggtgcaaacttcaagaaca

SEQ ID NO: 5358168 - DNA, 25 bp, Homo sapien
ctcaggaagagtgcttctgtgagcc

SEQ ID NO: 5358169 - DNA, 25 bp, Homo sapien
cctcaggaagagtgcttctgtgagc

SEQ ID NO: 5358170 - DNA, 25 bp, Homo sapien
actgggggctgccatgggtcgcctc

SEQ ID NO: 5358171 - DNA, 25 bp, Homo sapien
tgggggctgccatgggtcgcctctg

SEQ ID NO: 5358172 - DNA, 25 bp, Homo sapien
ctgggggctgccatgggtcgcctct

SEQ ID NO: 5358173 - DNA, 25 bp, Homo sapien
ggggctgccatgggtcgcctctggc

SEQ ID NO: 5358174 - DNA, 25 bp, Homo sapien
gctgcacccggatactgaggaagcc

SEQ ID NO: 5358175 - DNA, 25 bp, Homo sapien
gcacccggatactgaggaagcccat

SEQ ID NO: 5358176 - DNA, 25 bp, Homo sapien
tgcacccggatactgaggaagccca

SEQ ID NO: 5358177 - DNA, 25 bp, Homo sapien
ctgctgcacccggatactgaggaag

SEQ ID NO: 5358178 - DNA, 25 bp, Homo sapien
ttggccaacgctgactcccactttg

SEQ ID NO: 5358179 - DNA, 25 bp, Homo sapien
cactgccttcaggcctgacatcaaa

SEQ ID NO: 5358180 - DNA, 25 bp, Homo sapien
ccccaggaagcctcttgcggccacc

SEQ ID NO: 5358181 - DNA, 25 bp, Homo sapien
cctggggctctctcgctttggccaa

SEQ ID NO: 5358182 - DNA, 25 bp, Homo sapien
gaatgtcactatttactggaatcac

SEQ ID NO: 5358183 - DNA, 25 bp, Homo sapien
gcatctccaggaaaatcaatacagg

SEQ ID NO: 5358184 - DNA, 25 bp, Homo sapien
tccccttgcacatagctcaggaatg

SEQ ID NO: 5358185 - DNA, 25 bp, Homo sapien
ggccactgaagtgtgactaaaggga

SEQ ID NO: 5358186 - DNA, 25 bp, Homo sapien
aatgcccatgacgaaaggctgtctg

SEQ ID NO: 5358187 - DNA, 25 bp, Homo sapien
ggtttgatgatctccgcaaaatagg

SEQ ID NO: 5358188 - DNA, 25 bp, Homo sapien
gcaaaataggtctggctcaattccg

SEQ ID NO: 5358189 - DNA, 25 bp, Homo sapien
cggtagccatgggtacagtcaaagg

SEQ ID NO: 5358190 - DNA, 25 bp, Homo sapien
cccatcatcctgactcccctttcct

SEQ ID NO: 5358191 - DNA, 25 bp, Homo sapien
gccccatcatcctgactcccctttc

SEQ ID NO: 5358192 - DNA, 25 bp, Homo sapien
catcatcctgactcccctttcctcc

SEQ ID NO: 5358193 - DNA, 25 bp, Homo sapien
tggccccatcatcctgactcccctt

SEQ ID NO: 5358194 - DNA, 25 bp, Homo sapien
gacagcccagaaacatgctacccat

SEQ ID NO: 5358195 - DNA, 25 bp, Homo sapien
tcctcatgccagactttgtggcctt

SEQ ID NO: 5358196 - DNA, 25 bp, Homo sapien
cacctctgccccaatgctgagacag

SEQ ID NO: 5358197 - DNA, 25 bp, Homo sapien
tcctctgtggctgtcactccagctt

SEQ ID NO: 5358198 - DNA, 25 bp, Homo sapien
tggagcccacgtcttcacagagttg

SEQ ID NO: 5358199 - DNA, 25 bp, Homo sapien
tctggctgctcacaactttgtggga

SEQ ID NO: 5358200 - DNA, 25 bp, Homo sapien
gcatcaagggttgtgttctggctgc

SEQ ID NO: 5358201 - DNA, 25 bp, Homo sapien
tgtgggaatctgatggcgcacgtct

SEQ ID NO: 5358202 - DNA, 25 bp, Homo sapien
cactgtgccttgctggaatgctact

SEQ ID NO: 5358203 - DNA, 25 bp, Homo sapien
tactggcctatgaccatgggatgcg

SEQ ID NO: 5358204 - DNA, 25 bp, Homo sapien
gattcgagtgaatgagtactggcct

SEQ ID NO: 5358205 - DNA, 25 bp, Homo sapien
tcagtctctcgattgcaggtgtgag

SEQ ID NO: 5358206 - DNA, 25 bp, Homo sapien
tcaagaaccagcaggccagtggcac

SEQ ID NO: 5358207 - DNA, 25 bp, Homo sapien
caagaaccagcaggccagtggcaca

SEQ ID NO: 5358208 - DNA, 25 bp, Homo sapien
aagaaccagcaggccagtggcacac

SEQ ID NO: 5358209 - DNA, 25 bp, Homo sapien
gaacgcatatcatggtaacactccc

SEQ ID NO: 5358210 - DNA, 25 bp, Homo sapien
tgtgaccgaatctcatcctcatgag

SEQ ID NO: 5358211 - DNA, 25 bp, Homo sapien
tcctcatgaggccacaaggcaaaga

SEQ ID NO: 5358212 - DNA, 25 bp, Homo sapien
tccagtcacgtcctgagaacgcata

SEQ ID NO: 5358213 - DNA, 25 bp, Homo sapien
cacaggtgcgcgacatcatgttcag

SEQ ID NO: 5358214 - DNA, 25 bp, Homo sapien
acaggtgcgcgacatcatgttcagc

SEQ ID NO: 5358215 - DNA, 25 bp, Homo sapien
ttttagaactacagcatgaagtata

SEQ ID NO: 5358216 - DNA, 25 bp, Homo sapien
gaactgtacacaagcatctctctaa

SEQ ID NO: 5358217 - DNA, 25 bp, Homo sapien
gcagacagtcttgggatattaaaat

SEQ ID NO: 5358218 - DNA, 25 bp, Homo sapien
tagatgaggtctacaggataaactc

SEQ ID NO: 5358219 - DNA, 25 bp, Homo sapien
gattctgggctaagagagtgtttac

SEQ ID NO: 5358220 - DNA, 25 bp, Homo sapien
tgtaccatgcggtcagccaaatgtg

SEQ ID NO: 5358221 - DNA, 25 bp, Homo sapien
tcacaagacaggcagagctgaacag

SEQ ID NO: 5358222 - DNA, 25 bp, Homo sapien
gcaggttggtctcctcaatcacaga

SEQ ID NO: 5358223 - DNA, 25 bp, Homo sapien
tctatagtaggcgagacaggcttct

SEQ ID NO: 5358224 - DNA, 25 bp, Homo sapien
ctcctggtatagatggtgtggctca

SEQ ID NO: 5358225 - DNA, 25 bp, Homo sapien
tgctgacgtccttcgctcagggagg

SEQ ID NO: 5358226 - DNA, 25 bp, Homo sapien
catgagaatgttccgctccacaggg

SEQ ID NO: 5358227 - DNA, 25 bp, Homo sapien
tagaaacccggagtgtagggactgc

SEQ ID NO: 5358228 - DNA, 25 bp, Homo sapien
taccatgaaccttactgagaagaca

SEQ ID NO: 5358229 - DNA, 25 bp, Homo sapien
gactgacaacttcctgagaccttgg

SEQ ID NO: 5358230 - DNA, 25 bp, Homo sapien
gaagacacattctcactacagtagc

SEQ ID NO: 5358231 - DNA, 25 bp, Homo sapien
atcagagtccccagcgacatggagg

SEQ ID NO: 5358232 - DNA, 25 bp, Homo sapien
tctggatctgaccaagtacggccta

SEQ ID NO: 5358233 - DNA, 25 bp, Homo sapien
caccatgcctaggtagtgatttcat

SEQ ID NO: 5358234 - DNA, 25 bp, Homo sapien
gcacccggctctactcctatttttg

SEQ ID NO: 5358235 - DNA, 25 bp, Homo sapien
tctgccaaaattgggattggagttg

SEQ ID NO: 5358236 - DNA, 25 bp, Homo sapien
tgctggagtaacaaaggcatgacct

SEQ ID NO: 5358237 - DNA, 25 bp, Homo sapien
gagagatgcaaaccgagcacacagg

SEQ ID NO: 5358238 - DNA, 25 bp, Homo sapien
tcattggacacctatgcacgtaggc

SEQ ID NO: 5358239 - DNA, 25 bp, Homo sapien
gagacctggcccttagacatgagca

SEQ ID NO: 5358240 - DNA, 25 bp, Homo sapien
gccatcatccactcgattttctctt

SEQ ID NO: 5358241 - DNA, 25 bp, Homo sapien
ccaaattgtattgtacctgcagttc

SEQ ID NO: 5358242 - DNA, 25 bp, Homo sapien
cactgacatcatgaaatcccgtatt

SEQ ID NO: 5358243 - DNA, 25 bp, Homo sapien
taacttgcctaaccctgccaaatgc

SEQ ID NO: 5358244 - DNA, 25 bp, Homo sapien
gtaatacccattctggggctctgtt

SEQ ID NO: 5358245 - DNA, 25 bp, Homo sapien
aagttatattgtaatacccattctg

SEQ ID NO: 5358246 - DNA, 25 bp, Homo sapien
agaaagttatattgtaatacccatt

SEQ ID NO: 5358247 - DNA, 25 bp, Homo sapien
gttatattgtaatacccattctggg

SEQ ID NO: 5358248 - DNA, 25 bp, Homo sapien
cacagagagcctgtatctggtaggt

SEQ ID NO: 5358249 - DNA, 25 bp, Homo sapien
taggtttgattgctggacaaggcca

SEQ ID NO: 5358250 - DNA, 25 bp, Homo sapien
tctggtaggtttgattgctggacaa

SEQ ID NO: 5358251 - DNA, 25 bp, Homo sapien
gggagacacagcaaatgctgagtaa

SEQ ID NO: 5358252 - DNA, 25 bp, Homo sapien
gtctgtgacagacaataaaccactg

SEQ ID NO: 5358253 - DNA, 25 bp, Homo sapien
gcctatggaaccctcagcatctgag

SEQ ID NO: 5358254 - DNA, 25 bp, Homo sapien
ccaggacttctaaagcaggcagcag

SEQ ID NO: 5358255 - DNA, 25 bp, Homo sapien
taaaccactgtcaggctgcgaaggt

SEQ ID NO: 5358256 - DNA, 25 bp, Homo sapien
gaaggcgttccaggactcctagagc

SEQ ID NO: 5358257 - DNA, 25 bp, Homo sapien
agagcactgtgatatgctaatcagg

SEQ ID NO: 5358258 - DNA, 25 bp, Homo sapien
gggaagagacatttgcaggttccaa

SEQ ID NO: 5358259 - DNA, 25 bp, Homo sapien
gaagaggaaggcgttccaggactcc

SEQ ID NO: 5358260 - DNA, 25 bp, Homo sapien
tcttaagcaactgaagagacatctt

SEQ ID NO: 5358261 - DNA, 25 bp, Homo sapien
gctccccacttcttaagcaactgaa

SEQ ID NO: 5358262 - DNA, 25 bp, Homo sapien
atgtgccaaaatttagcaatgtgcc

SEQ ID NO: 5358263 - DNA, 25 bp, Homo sapien
tctttgctccccacttcttaagcaa

SEQ ID NO: 5358264 - DNA, 25 bp, Homo sapien
cccacatttgtataatgttctcctc

SEQ ID NO: 5358265 - DNA, 25 bp, Homo sapien
agaaaagtgtcccacatttgtataa

SEQ ID NO: 5358266 - DNA, 25 bp, Homo sapien
agtgtcccacatttgtataatgttc

SEQ ID NO: 5358267 - DNA, 25 bp, Homo sapien
atttgtataatgttctcctcttgca

SEQ ID NO: 5358268 - DNA, 25 bp, Homo sapien
ggtacaggtcttctaggcacatttt

SEQ ID NO: 5358269 - DNA, 25 bp, Homo sapien
tgttcgctgtccctttgttgtggcc

SEQ ID NO: 5358270 - DNA, 25 bp, Homo sapien
gaaaataattgctccaggtacaggt

SEQ ID NO: 5358271 - DNA, 25 bp, Homo sapien
taattagtgggcctgcttgttcgct

SEQ ID NO: 5358272 - DNA, 25 bp, Homo sapien
caacttgattttgtgtttcaccaaa

SEQ ID NO: 5358273 - DNA, 25 bp, Homo sapien
gattttgtgtttcaccaaagctcac

SEQ ID NO: 5358274 - DNA, 25 bp, Homo sapien
tgttaggccaaggtcaacttgattt

SEQ ID NO: 5358275 - DNA, 25 bp, Homo sapien
gtttcaccaaagctcactgggtctt

SEQ ID NO: 5358276 - DNA, 25 bp, Homo sapien
attaagaaggcccaagaaggtgaca

SEQ ID NO: 5358277 - DNA, 25 bp, Homo sapien
gcccaagaaggtgacagatgtaccc

SEQ ID NO: 5358278 - DNA, 25 bp, Homo sapien
tagattataacagtctgcatcaaga

SEQ ID NO: 5358279 - DNA, 25 bp, Homo sapien
tccccacaaccagccagtggcagaa

SEQ ID NO: 5358280 - DNA, 25 bp, Homo sapien
caccatcgggataacgggaacatca

SEQ ID NO: 5358281 - DNA, 25 bp, Homo sapien
tttccaacgtggcagagaactctgc

SEQ ID NO: 5358282 - DNA, 25 bp, Homo sapien
tcagggatcctggaaaacctctggt

SEQ ID NO: 5358283 - DNA, 25 bp, Homo sapien
gacaaacccaaggtgccacgtgtgt

SEQ ID NO: 5358284 - DNA, 25 bp, Homo sapien
ggaaaaatcagtgcctaagaactag

SEQ ID NO: 5358285 - DNA, 25 bp, Homo sapien
tcaaaagatgaggaccgggactaag

SEQ ID NO: 5358286 - DNA, 25 bp, Homo sapien
ttcttgtatcgtgcaaagaccctgc

SEQ ID NO: 5358287 - DNA, 25 bp, Homo sapien
tagctcatcttagtgagaggcagcc

SEQ ID NO: 5358288 - DNA, 25 bp, Homo sapien
ttcccactataaatccactatctga

SEQ ID NO: 5358289 - DNA, 25 bp, Homo sapien
tcattccctagttctactatctcta

SEQ ID NO: 5358290 - DNA, 25 bp, Homo sapien
ccctagttctactatctctatattc

SEQ ID NO: 5358291 - DNA, 25 bp, Homo sapien
tttcccactataaatccactatctg

SEQ ID NO: 5358292 - DNA, 25 bp, Homo sapien
gctcttgtagttcatctaaggcacc

SEQ ID NO: 5358293 - DNA, 25 bp, Homo sapien
tgccaccaatcaagataagctctag

SEQ ID NO: 5358294 - DNA, 25 bp, Homo sapien
taaggcacctttaagtcacagagtt

SEQ ID NO: 5358295 - DNA, 25 bp, Homo sapien
taactcctcttcagaactatgtggt

SEQ ID NO: 5358296 - DNA, 25 bp, Homo sapien
gctgctctcgtaattaagaacagat

SEQ ID NO: 5358297 - DNA, 25 bp, Homo sapien
ctaacagctgctctcgtaattaaga

SEQ ID NO: 5358298 - DNA, 25 bp, Homo sapien
aacagctgctctcgtaattaagaac

SEQ ID NO: 5358299 - DNA, 25 bp, Homo sapien
cagctgctctcgtaattaagaacag

SEQ ID NO: 5358300 - DNA, 25 bp, Homo sapien
tttatctttacccgtggaaccatca

SEQ ID NO: 5358301 - DNA, 25 bp, Homo sapien
ttatctttacccgtggaaccatcat

SEQ ID NO: 5358302 - DNA, 25 bp, Homo sapien
tggtcaccagagaaatcacagctta

SEQ ID NO: 5358303 - DNA, 25 bp, Homo sapien
cccaaatgtcataagagaactcatg

SEQ ID NO: 5358304 - DNA, 25 bp, Homo sapien
ttttcatatcaagttaggtgagcct

SEQ ID NO: 5358305 - DNA, 25 bp, Homo sapien
ggaatccacttattatccaaagacg

SEQ ID NO: 5358306 - DNA, 25 bp, Homo sapien
gaagctgcccatcgagcagacagga

SEQ ID NO: 5358307 - DNA, 25 bp, Homo sapien
tacaggcactccacgttctaagcgg

SEQ ID NO: 5358308 - DNA, 25 bp, Homo sapien
gttgctatgccacgctgtcctgagg

SEQ ID NO: 5358309 - DNA, 25 bp, Homo sapien
ttcgggtatacgcagtacaggcact

SEQ ID NO: 5358310 - DNA, 25 bp, Homo sapien
aggctggtgccgactttcatttgga

SEQ ID NO: 5358311 - DNA, 25 bp, Homo sapien
cagatgccttttttgcccgacaggc

SEQ ID NO: 5358312 - DNA, 25 bp, Homo sapien
taattaagaaattcgactggcatga

SEQ ID NO: 5358313 - DNA, 25 bp, Homo sapien
gtacacattgctttacagatgcctt

SEQ ID NO: 5358314 - DNA, 25 bp, Homo sapien
tattattccatgagccaaagacaga

SEQ ID NO: 5358315 - DNA, 25 bp, Homo sapien
cctgtgttgtctcaatggctctgca

SEQ ID NO: 5358316 - DNA, 25 bp, Homo sapien
ggttttggaatacactgctgaagct

SEQ ID NO: 5358317 - DNA, 25 bp, Homo sapien
ccactgactaagctatgggcaccag

SEQ ID NO: 5358318 - DNA, 25 bp, Homo sapien
taatggcaaaggtgagatattttct

SEQ ID NO: 5358319 - DNA, 25 bp, Homo sapien
tgtctttgaaataatggcaaaggtg

SEQ ID NO: 5358320 - DNA, 25 bp, Homo sapien
taacacagttatatgtctttgaaat

SEQ ID NO: 5358321 - DNA, 25 bp, Homo sapien
gtgttaacacagttatatgtctttg

SEQ ID NO: 5358322 - DNA, 25 bp, Homo sapien
tgtatctgcctctctaggttaacag

SEQ ID NO: 5358323 - DNA, 25 bp, Homo sapien
gcctctctaggttaacagtccccaa

SEQ ID NO: 5358324 - DNA, 25 bp, Homo sapien
agactgcaaatttgaggtcccacaa

SEQ ID NO: 5358325 - DNA, 25 bp, Homo sapien
aagactgcaaatttgaggtcccaca

SEQ ID NO: 5358326 - DNA, 25 bp, Homo sapien
tgtacctatacgatgccaaacagct

SEQ ID NO: 5358327 - DNA, 25 bp, Homo sapien
cattctagagggcatgctttggcta

SEQ ID NO: 5358328 - DNA, 25 bp, Homo sapien
tttgccatagcagcaggtagggtgc

SEQ ID NO: 5358329 - DNA, 25 bp, Homo sapien
aaactgagtcggaaaaagccagcca

SEQ ID NO: 5358330 - DNA, 25 bp, Homo sapien
cttcagcttctatgttatgattgtg

SEQ ID NO: 5358331 - DNA, 25 bp, Homo sapien
ttcttcagcttctatgttatgattg

SEQ ID NO: 5358332 - DNA, 25 bp, Homo sapien
tcttcagcttctatgttatgattgt

SEQ ID NO: 5358333 - DNA, 25 bp, Homo sapien
tttttattgtgggagtggactgatt

SEQ ID NO: 5358334 - DNA, 25 bp, Homo sapien
tattgaacaatgcacctgcgaaaga

SEQ ID NO: 5358335 - DNA, 25 bp, Homo sapien
tcactacttggctgctgactgtgaa

SEQ ID NO: 5358336 - DNA, 25 bp, Homo sapien
gcacctgcgaaagagtatgtcttaa

SEQ ID NO: 5358337 - DNA, 25 bp, Homo sapien
caatttggaatatggtctgagacag

SEQ ID NO: 5358338 - DNA, 25 bp, Homo sapien
aacatttgaatagttcaccatattc

SEQ ID NO: 5358339 - DNA, 25 bp, Homo sapien
cagttcctaagtataatgttctaga

SEQ ID NO: 5358340 - DNA, 25 bp, Homo sapien
agacaggacaggatttccaaaacat

SEQ ID NO: 5358341 - DNA, 25 bp, Homo sapien
catggaaactgaattcacgagggtc

SEQ ID NO: 5358342 - DNA, 25 bp, Homo sapien
cacgagggtcaaattgtcacttgta

SEQ ID NO: 5358343 - DNA, 25 bp, Homo sapien
gactgctacaaatcctaccacatga

SEQ ID NO: 5358344 - DNA, 25 bp, Homo sapien
catgtgaacggtgctgataaagact

SEQ ID NO: 5358345 - DNA, 25 bp, Homo sapien
cagtgcacgctggtttccgaagacg

SEQ ID NO: 5358346 - DNA, 25 bp, Homo sapien
catacgcggtcggtttctgctggac

SEQ ID NO: 5358347 - DNA, 25 bp, Homo sapien
cagggactcccctgtatgatgtgca

SEQ ID NO: 5358348 - DNA, 25 bp, Homo sapien
gacttcagcttaggagactcatcag

SEQ ID NO: 5358349 - DNA, 25 bp, Homo sapien
tctgggctcttgaatctgcaacaaa

SEQ ID NO: 5358350 - DNA, 25 bp, Homo sapien
tgggaactccaacgagatgactctg

SEQ ID NO: 5358351 - DNA, 25 bp, Homo sapien
tgtagtgctacagatagacgagggc

SEQ ID NO: 5358352 - DNA, 25 bp, Homo sapien
gcctaaagtgttctggatccggttg

SEQ ID NO: 5358353 - DNA, 25 bp, Homo sapien
tctgtcagcacttggtgatgcacca

SEQ ID NO: 5358354 - DNA, 25 bp, Homo sapien
cataaaaagggatctatccggccgg

SEQ ID NO: 5358355 - DNA, 25 bp, Homo sapien
gagacaacagaaacaccggagataa

SEQ ID NO: 5358356 - DNA, 25 bp, Homo sapien
ggttgtcacatgcagaatgagagct

SEQ ID NO: 5358357 - DNA, 25 bp, Homo sapien
gaagaccccgtacttggtggctgag

SEQ ID NO: 5358358 - DNA, 25 bp, Homo sapien
tcttccctgggctgaacagacagaa

SEQ ID NO: 5358359 - DNA, 25 bp, Homo sapien
gatgcagtcaagtttggtcggccaa

SEQ ID NO: 5358360 - DNA, 25 bp, Homo sapien
aaggccaccgtcacagggagtgaga

SEQ ID NO: 5358361 - DNA, 25 bp, Homo sapien
ttcctccgtaatgcatttctatctg

SEQ ID NO: 5358362 - DNA, 25 bp, Homo sapien
cttgtagggctcactgaagagagag

SEQ ID NO: 5358363 - DNA, 25 bp, Homo sapien
ctttctcgttctttcctccgtaatg

SEQ ID NO: 5358364 - DNA, 25 bp, Homo sapien
tagaattaaacgtgccatcatcctg

SEQ ID NO: 5358365 - DNA, 25 bp, Homo sapien
aagagctgttaaaactgcatgctgc

SEQ ID NO: 5358366 - DNA, 25 bp, Homo sapien
cattaactagctccctaaagagctg

SEQ ID NO: 5358367 - DNA, 25 bp, Homo sapien
tgttaatcagtcaagtcgtcaaacg

SEQ ID NO: 5358368 - DNA, 25 bp, Homo sapien
tcgtcaaacgactactgaatcaatt

SEQ ID NO: 5358369 - DNA, 25 bp, Homo sapien
gaaattccacaactagagagtcatt

SEQ ID NO: 5358370 - DNA, 25 bp, Homo sapien
tcctctggtttaagatgtcttcacc

SEQ ID NO: 5358371 - DNA, 25 bp, Homo sapien
aattccacaactagagagtcattcc

SEQ ID NO: 5358372 - DNA, 25 bp, Homo sapien
ctagagagtcattcctctggtttaa

SEQ ID NO: 5358373 - DNA, 25 bp, Homo sapien
tacatggaataccaaggtagaaagc

SEQ ID NO: 5358374 - DNA, 25 bp, Homo sapien
gatgcctggcttttgatctagtgcc

SEQ ID NO: 5358375 - DNA, 25 bp, Homo sapien
gagccccagaaaggtctacatggaa

SEQ ID NO: 5358376 - DNA, 25 bp, Homo sapien
gaaccaagaaatacagatgcctggc

SEQ ID NO: 5358377 - DNA, 25 bp, Homo sapien
tcacatgcatgaagtattcaatgtc

SEQ ID NO: 5358378 - DNA, 25 bp, Homo sapien
gaagtattcaatgtcattcacatta

SEQ ID NO: 5358379 - DNA, 25 bp, Homo sapien
attaactgcctcatgtaaattttcc

SEQ ID NO: 5358380 - DNA, 25 bp, Homo sapien
taatggatgagtattgtagggcctg

SEQ ID NO: 5358381 - DNA, 25 bp, Homo sapien
tcaacaggagtaagcagacatccca

SEQ ID NO: 5358382 - DNA, 25 bp, Homo sapien
tacttggagtccacaatacgggctt

SEQ ID NO: 5358383 - DNA, 25 bp, Homo sapien
tcagccttagcgaagaagcacatgg

SEQ ID NO: 5358384 - DNA, 25 bp, Homo sapien
tactgttggtgtgcaaggagcttcc

SEQ ID NO: 5358385 - DNA, 25 bp, Homo sapien
tgtccgggctggctccctaatgggt

SEQ ID NO: 5358386 - DNA, 25 bp, Homo sapien
tgccttcgctcactttctaactttg

SEQ ID NO: 5358387 - DNA, 25 bp, Homo sapien
ccgttaatcttctgcgtgggtccat

SEQ ID NO: 5358388 - DNA, 25 bp, Homo sapien
gttcctttacatccatatgccttcg

SEQ ID NO: 5358389 - DNA, 25 bp, Homo sapien
ccagaaactgggacgtgaaaatgcc

SEQ ID NO: 5358390 - DNA, 25 bp, Homo sapien
caatttggcggtgaaaaaccctgtg

SEQ ID NO: 5358391 - DNA, 25 bp, Homo sapien
tgctatatataaggacgggacttgg

SEQ ID NO: 5358392 - DNA, 25 bp, Homo sapien
gcaaaactgtgttactcccaggctt

SEQ ID NO: 5358393 - DNA, 25 bp, Homo sapien
acaactgagctagggagcagctgag

SEQ ID NO: 5358394 - DNA, 25 bp, Homo sapien
gaagacaactgagctagggagcagc

SEQ ID NO: 5358395 - DNA, 25 bp, Homo sapien
cagaagacaactgagctagggagca

SEQ ID NO: 5358396 - DNA, 25 bp, Homo sapien
gacaactgagctagggagcagctga

SEQ ID NO: 5358397 - DNA, 25 bp, Homo sapien
ccggcgctcttttcttctcgttctg

SEQ ID NO: 5358398 - DNA, 25 bp, Homo sapien
tcaccggcgctcttttcttctcgtt

SEQ ID NO: 5358399 - DNA, 25 bp, Homo sapien
gtcgcatgttcaccggcgctctttt

SEQ ID NO: 5358400 - DNA, 25 bp, Homo sapien
gccagcaacagtcgcatgttcaccg

SEQ ID NO: 5358401 - DNA, 25 bp, Homo sapien
catactcatcccactctcgatattt

SEQ ID NO: 5358402 - DNA, 25 bp, Homo sapien
caaccaaagacgttctggtgttata

SEQ ID NO: 5358403 - DNA, 25 bp, Homo sapien
tttcatgtcaagctctactcccaac

SEQ ID NO: 5358404 - DNA, 25 bp, Homo sapien
ccaaccaaagacgttctggtgttat

SEQ ID NO: 5358405 - DNA, 25 bp, Homo sapien
gatgcaccaatttccatgcaggagc

SEQ ID NO: 5358406 - DNA, 25 bp, Homo sapien
gctgatgctgacaacctcttctggg

SEQ ID NO: 5358407 - DNA, 25 bp, Homo sapien
cagatgggcttgactgatgcaccaa

SEQ ID NO: 5358408 - DNA, 25 bp, Homo sapien
tctttaaatgtggttatcctgccgg

SEQ ID NO: 5358409 - DNA, 25 bp, Homo sapien
ccctttgtttaaatgcgcacccact

SEQ ID NO: 5358410 - DNA, 25 bp, Homo sapien
tttgtttaaatgcgcacccactccc

SEQ ID NO: 5358411 - DNA, 25 bp, Homo sapien
gcccctttgtttaaatgcgcaccca

SEQ ID NO: 5358412 - DNA, 25 bp, Homo sapien
caagcccctttgtttaaatgcgcac

SEQ ID NO: 5358413 - DNA, 25 bp, Homo sapien
aagtaatggacccttaaatgcaatc

SEQ ID NO: 5358414 - DNA, 25 bp, Homo sapien
tcttcaagacctgagatgcattcaa

SEQ ID NO: 5358415 - DNA, 25 bp, Homo sapien
aaagggcctcgggatgttcatcaca

SEQ ID NO: 5358416 - DNA, 25 bp, Homo sapien
tgcaatcaatacttctctaggctgt

SEQ ID NO: 5358417 - DNA, 25 bp, Homo sapien
ccagtacgagcttgagcatgcgcac

SEQ ID NO: 5358418 - DNA, 25 bp, Homo sapien
ttccccagtacgagcttgagcatgc

SEQ ID NO: 5358419 - DNA, 25 bp, Homo sapien
cccagtacgagcttgagcatgcgca

SEQ ID NO: 5358420 - DNA, 25 bp, Homo sapien
gccttccccagtacgagcttgagca

SEQ ID NO: 5358421 - DNA, 25 bp, Homo sapien
caggatctggcagagagactttgca

SEQ ID NO: 5358422 - DNA, 25 bp, Homo sapien
ctccatctggacaaagagtcagcca

SEQ ID NO: 5358423 - DNA, 25 bp, Homo sapien
caagaagccaactgccaggagtgga

SEQ ID NO: 5358424 - DNA, 25 bp, Homo sapien
caggagtggaagatgaccacttcca

SEQ ID NO: 5358425 - DNA, 25 bp, Homo sapien
ctttgaaagaggacaatgaaaatgt

SEQ ID NO: 5358426 - DNA, 25 bp, Homo sapien
ttgaaagaggacaatgaaaatgtat

SEQ ID NO: 5358427 - DNA, 25 bp, Homo sapien
tttgaaagaggacaatgaaaatgta

SEQ ID NO: 5358428 - DNA, 25 bp, Homo sapien
cacataatctggatggatgcctaca

SEQ ID NO: 5358429 - DNA, 25 bp, Homo sapien
cataatctggatggatgcctacagc

SEQ ID NO: 5358430 - DNA, 25 bp, Homo sapien
taatctggatggatgcctacagcca

SEQ ID NO: 5358431 - DNA, 25 bp, Homo sapien
ctcccacataatctggatggatgcc

SEQ ID NO: 5358432 - DNA, 25 bp, Homo sapien
gaagttgcttctacacattagggtg

SEQ ID NO: 5358433 - DNA, 25 bp, Homo sapien
agaagctccagatataaactcctca

SEQ ID NO: 5358434 - DNA, 25 bp, Homo sapien
ccccattctcaggtaaagataaaag

SEQ ID NO: 5358435 - DNA, 25 bp, Homo sapien
tgagtgttaagatactcccagacag

SEQ ID NO: 5358436 - DNA, 25 bp, Homo sapien
aggacagcagctatgttaataatca

SEQ ID NO: 5358437 - DNA, 25 bp, Homo sapien
ccaagagcagtctctaggacagcag

SEQ ID NO: 5358438 - DNA, 25 bp, Homo sapien
ggtccgctatttccctgcctgcatg

SEQ ID NO: 5358439 - DNA, 25 bp, Homo sapien
gttctcccaaagggagctggtccgc

SEQ ID NO: 5358440 - DNA, 25 bp, Homo sapien
accctcgatgagatgttttgtgcct

SEQ ID NO: 5358441 - DNA, 25 bp, Homo sapien
tggaggcatagtgctgtccaaatgc

SEQ ID NO: 5358442 - DNA, 25 bp, Homo sapien
catagtgctgtccaaatgctttggg

SEQ ID NO: 5358443 - DNA, 25 bp, Homo sapien
atagttcccaccctcgatgagatgt

SEQ ID NO: 5358444 - DNA, 25 bp, Homo sapien
gagggccaactgtatcatgtcaaat

SEQ ID NO: 5358445 - DNA, 25 bp, Homo sapien
tacttgagggaaatgatctgtatgt

SEQ ID NO: 5358446 - DNA, 25 bp, Homo sapien
tgaaccaagcactaaccagtgtgcc

SEQ ID NO: 5358447 - DNA, 25 bp, Homo sapien
tatatattaaggcaagactccagaa

SEQ ID NO: 5358448 - DNA, 25 bp, Homo sapien
gaggcaaaatgaaacctaccatctc

SEQ ID NO: 5358449 - DNA, 25 bp, Homo sapien
aacagaagaccttctgttgagcctc

SEQ ID NO: 5358450 - DNA, 25 bp, Homo sapien
agaagaccttctgttgagcctccac

SEQ ID NO: 5358451 - DNA, 25 bp, Homo sapien
cctgcatccggcattcctgaacgtc

SEQ ID NO: 5358452 - DNA, 25 bp, Homo sapien
attcctgaacgtcccctgacctgca

SEQ ID NO: 5358453 - DNA, 25 bp, Homo sapien
aaccatttggcctctgacccaccca

SEQ ID NO: 5358454 - DNA, 25 bp, Homo sapien
atctggcttaggaaccatttggcct

SEQ ID NO: 5358455 - DNA, 25 bp, Homo sapien
gaaccatttggcctctgacccaccc

SEQ ID NO: 5358456 - DNA, 25 bp, Homo sapien
accatttggcctctgacccacccat

SEQ ID NO: 5358457 - DNA, 25 bp, Homo sapien
taatctcacagaaagctcttgtgcg

SEQ ID NO: 5358458 - DNA, 25 bp, Homo sapien
cacacaaccccatgagttagacagg

SEQ ID NO: 5358459 - DNA, 25 bp, Homo sapien
gttagacaggatagtgtccccatcc

SEQ ID NO: 5358460 - DNA, 25 bp, Homo sapien
gattaggatcacagggcctctataa

SEQ ID NO: 5358461 - DNA, 25 bp, Homo sapien
caggtgtgatcagcctgtaccacca

SEQ ID NO: 5358462 - DNA, 25 bp, Homo sapien
cctgctgaggaataaaagtaaggaa

SEQ ID NO: 5358463 - DNA, 25 bp, Homo sapien
gtaccaccatgccttgtctaaaata

SEQ ID NO: 5358464 - DNA, 25 bp, Homo sapien
tacctaactattagaaaccaacata

SEQ ID NO: 5358465 - DNA, 25 bp, Homo sapien
tatttccagtatcaagttaagcaca

SEQ ID NO: 5358466 - DNA, 25 bp, Homo sapien
tggtgatccactacagtaaagcctc

SEQ ID NO: 5358467 - DNA, 25 bp, Homo sapien
cgctaacaatgagcctcctgggaag

SEQ ID NO: 5358468 - DNA, 25 bp, Homo sapien
tcataacgcaggtaaacagtacaga

SEQ ID NO: 5358469 - DNA, 25 bp, Homo sapien
ttgttccagcagatgttcatccccg

SEQ ID NO: 5358470 - DNA, 25 bp, Homo sapien
acaagttcctccaggaatatgcagg

SEQ ID NO: 5358471 - DNA, 25 bp, Homo sapien
taagcgattaccagaggcagaacag

SEQ ID NO: 5358472 - DNA, 25 bp, Homo sapien
agagtgcagttaatatgcttgttcc

SEQ ID NO: 5358473 - DNA, 25 bp, Homo sapien
tccagcggcgatttacctacagcag

SEQ ID NO: 5358474 - DNA, 25 bp, Homo sapien
gatttttaagacacccgcaactgga

SEQ ID NO: 5358475 - DNA, 25 bp, Homo sapien
gaattaaactgcttccagcggcgat

SEQ ID NO: 5358476 - DNA, 25 bp, Homo sapien
gacagatactaaagcagccaatggg

SEQ ID NO: 5358477 - DNA, 25 bp, Homo sapien
ccgcccgcccgaagcggccggcacg

SEQ ID NO: 5358478 - DNA, 25 bp, Homo sapien
cgcccgcccgaagcggccggcacgg

SEQ ID NO: 5358479 - DNA, 25 bp, Homo sapien
tggagcagggctaagtcgaagctgt

SEQ ID NO: 5358480 - DNA, 25 bp, Homo sapien
cacagtgactcgaggtcccattcct

SEQ ID NO: 5358481 - DNA, 25 bp, Homo sapien
gcagggctaagtcgaagctgtccat

SEQ ID NO: 5358482 - DNA, 25 bp, Homo sapien
gtgactcgaggtcccattcctggag

SEQ ID NO: 5358483 - DNA, 25 bp, Homo sapien
ggtgggaggtgtcagcgtcgccgcc

SEQ ID NO: 5358484 - DNA, 25 bp, Homo sapien
ggagcccgcaagttcagcgaaataa

SEQ ID NO: 5358485 - DNA, 25 bp, Homo sapien
ccggacctgctctccgttgcggttt

SEQ ID NO: 5358486 - DNA, 25 bp, Homo sapien
ttcagcgaaataaagcggcggcgcg

SEQ ID NO: 5358487 - DNA, 25 bp, Homo sapien
tccgttgcggtttggcctccagtgg

SEQ ID NO: 5358488 - DNA, 25 bp, Homo sapien
ggcctctgggtgtcgacttcaaact

SEQ ID NO: 5358489 - DNA, 25 bp, Homo sapien
ctgggtgtcgacttcaaacttgccg

SEQ ID NO: 5358490 - DNA, 25 bp, Homo sapien
gcccgtctccggtctggaaaggcag

SEQ ID NO: 5358491 - DNA, 25 bp, Homo sapien
ttgccgcccgtctccggtctggaaa

SEQ ID NO: 5358492 - DNA, 25 bp, Homo sapien
tgggtgcaagtgacgggatccctcc

SEQ ID NO: 5358493 - DNA, 25 bp, Homo sapien
acagctccggattctcaccagggat

SEQ ID NO: 5358494 - DNA, 25 bp, Homo sapien
ccagaaatgtaaaccctgggtgcaa

SEQ ID NO: 5358495 - DNA, 25 bp, Homo sapien
ttctgggcaagaaccgctgactggg

SEQ ID NO: 5358496 - DNA, 25 bp, Homo sapien
aaggccaatgagacttctttcctat

SEQ ID NO: 5358497 - DNA, 25 bp, Homo sapien
aaaggccaatgagacttctttccta

SEQ ID NO: 5358498 - DNA, 25 bp, Homo sapien
aaaaggccaatgagacttctttcct

SEQ ID NO: 5358499 - DNA, 25 bp, Homo sapien
caaaaggccaatgagacttctttcc

SEQ ID NO: 5358500 - DNA, 25 bp, Homo sapien
tgagttctgccataaccgcacctgg

SEQ ID NO: 5358501 - DNA, 25 bp, Homo sapien
taatacagtcccagtcggaaggcga

SEQ ID NO: 5358502 - DNA, 25 bp, Homo sapien
gttggtctgcttcaaacaggagtgc

SEQ ID NO: 5358503 - DNA, 25 bp, Homo sapien
gagtgaggcgctccttgtctctagc

SEQ ID NO: 5358504 - DNA, 25 bp, Homo sapien
gacaagcctgggcgacatggtgaga

SEQ ID NO: 5358505 - DNA, 25 bp, Homo sapien
ctgctagttctcagggaagaggctg

SEQ ID NO: 5358506 - DNA, 25 bp, Homo sapien
ggccaggcatggtggctcatgcctg

SEQ ID NO: 5358507 - DNA, 25 bp, Homo sapien
ggctggaggatcacttaagccagga

SEQ ID NO: 5358508 - DNA, 25 bp, Homo sapien
gcagcaaccgcttaacgtaactaaa

SEQ ID NO: 5358509 - DNA, 25 bp, Homo sapien
tgacttttcccctcgaatcatagga

SEQ ID NO: 5358510 - DNA, 25 bp, Homo sapien
cattgtcaccattgactgggttagc

SEQ ID NO: 5358511 - DNA, 25 bp, Homo sapien
tcagttcccctggtttcatcaacat

SEQ ID NO: 5358512 - DNA, 25 bp, Homo sapien
ggctgatcgtaaggtctaaatcata

SEQ ID NO: 5358513 - DNA, 25 bp, Homo sapien
ccagttactccggattgatgcttcc

SEQ ID NO: 5358514 - DNA, 25 bp, Homo sapien
tgcttcccgatgtaaacaatggctg

SEQ ID NO: 5358515 - DNA, 25 bp, Homo sapien
taaacaatggctgatcgtaaggtct

SEQ ID NO: 5358516 - DNA, 25 bp, Homo sapien
tctgcgcaaaagtaagagacacccg

SEQ ID NO: 5358517 - DNA, 25 bp, Homo sapien
gagacacccgctctgaagagtgcac

SEQ ID NO: 5358518 - DNA, 25 bp, Homo sapien
cgcaaaagtaagagacacccgctct

SEQ ID NO: 5358519 - DNA, 25 bp, Homo sapien
ctgtcctctgcgcaaaagtaagaga

SEQ ID NO: 5358520 - DNA, 25 bp, Homo sapien
catgaactgcctgtacagcctagac

SEQ ID NO: 5358521 - DNA, 25 bp, Homo sapien
gagtgtatcatatctgccttgcagg

SEQ ID NO: 5358522 - DNA, 25 bp, Homo sapien
tgagcctccgttctccataggtgaa

SEQ ID NO: 5358523 - DNA, 25 bp, Homo sapien
tagactcaggatcgccctaagggag

SEQ ID NO: 5358524 - DNA, 25 bp, Homo sapien
taagcaggatctaattggtaacata

SEQ ID NO: 5358525 - DNA, 25 bp, Homo sapien
catattgccgattgaattaagtgcc

SEQ ID NO: 5358526 - DNA, 25 bp, Homo sapien
gaattaagtgccatatgatagagat

SEQ ID NO: 5358527 - DNA, 25 bp, Homo sapien
tctgctggctgatggtagtttaagc

SEQ ID NO: 5358528 - DNA, 25 bp, Homo sapien
cagtgaccaactttggtcacatccc

SEQ ID NO: 5358529 - DNA, 25 bp, Homo sapien
caactttggtcacatcccatctctt

SEQ ID NO: 5358530 - DNA, 25 bp, Homo sapien
gaccaactttggtcacatcccatct

SEQ ID NO: 5358531 - DNA, 25 bp, Homo sapien
actttggtcacatcccatctcttcc

SEQ ID NO: 5358532 - DNA, 25 bp, Homo sapien
gcctggaccatctcggtgaggctga

SEQ ID NO: 5358533 - DNA, 25 bp, Homo sapien
tcaatccctctggctgttcaccagg

SEQ ID NO: 5358534 - DNA, 25 bp, Homo sapien
ggcctggaccatctcggtgaggctg

SEQ ID NO: 5358535 - DNA, 25 bp, Homo sapien
ggctgagcgtggagctctcttctcg

SEQ ID NO: 5358536 - DNA, 25 bp, Homo sapien
tggcgagctttctgaatggcacttt

SEQ ID NO: 5358537 - DNA, 25 bp, Homo sapien
gttgaacgtctttcttctgaggctg

SEQ ID NO: 5358538 - DNA, 25 bp, Homo sapien
tctccccagtaagtcgttgaacgtc

SEQ ID NO: 5358539 - DNA, 25 bp, Homo sapien
aagtgtgcaggtgttgatagaggat

SEQ ID NO: 5358540 - DNA, 25 bp, Homo sapien
tggaggcgagtgactaaaccagata

SEQ ID NO: 5358541 - DNA, 25 bp, Homo sapien
accagatacccaaccggccaactct

SEQ ID NO: 5358542 - DNA, 25 bp, Homo sapien
tgtgtggtcacaacccaagtgtgca

SEQ ID NO: 5358543 - DNA, 25 bp, Homo sapien
gggcctggtctaccagaaggctgga

SEQ ID NO: 5358544 - DNA, 25 bp, Homo sapien
gcagggcctggtctaccagaaggct

SEQ ID NO: 5358545 - DNA, 25 bp, Homo sapien
tggcagggcctggtctaccagaagg

SEQ ID NO: 5358546 - DNA, 25 bp, Homo sapien
cagggcctggtctaccagaaggctg

SEQ ID NO: 5358547 - DNA, 25 bp, Homo sapien
tgtttgacttccctgtagtgttgac

SEQ ID NO: 5358548 - DNA, 25 bp, Homo sapien
tattttcactaatgacaccagggat

SEQ ID NO: 5358549 - DNA, 25 bp, Homo sapien
caccagggattcactaatggatgct

SEQ ID NO: 5358550 - DNA, 25 bp, Homo sapien
tcagttcctgtcctatttgtctcca

SEQ ID NO: 5358551 - DNA, 25 bp, Homo sapien
tggtttttgtcaggcggtctctcac

SEQ ID NO: 5358552 - DNA, 25 bp, Homo sapien
tccattctttggtcttaattttcgc

SEQ ID NO: 5358553 - DNA, 25 bp, Homo sapien
cactctccgcctcatggttcctgtt

SEQ ID NO: 5358554 - DNA, 25 bp, Homo sapien
ttaattttcgccctcctgcaagctc

SEQ ID NO: 5358555 - DNA, 25 bp, Homo sapien
taggtgtggacatctctagccacac

SEQ ID NO: 5358556 - DNA, 25 bp, Homo sapien
ggtgtggacatctctagccacacca

SEQ ID NO: 5358557 - DNA, 25 bp, Homo sapien
gtggacatctctagccacaccacat

SEQ ID NO: 5358558 - DNA, 25 bp, Homo sapien
ttaggtgtggacatctctagccaca

SEQ ID NO: 5358559 - DNA, 25 bp, Homo sapien
tgtgcatttgtatgaggtcctcgct

SEQ ID NO: 5358560 - DNA, 25 bp, Homo sapien
ctgtgcatttgtatgaggtcctcgc

SEQ ID NO: 5358561 - DNA, 25 bp, Homo sapien
ctgccatggccagcggcttgacacg

SEQ ID NO: 5358562 - DNA, 25 bp, Homo sapien
gtgcatttgtatgaggtcctcgctg

SEQ ID NO: 5358563 - DNA, 25 bp, Homo sapien
tctgggtgtatctggactcttctcc

SEQ ID NO: 5358564 - DNA, 25 bp, Homo sapien
ttggcggcaggaacgctgtgcacca

SEQ ID NO: 5358565 - DNA, 25 bp, Homo sapien
gaagaagtgcatcttgcagccgaag

SEQ ID NO: 5358566 - DNA, 25 bp, Homo sapien
tctagaaaggtctggaagacttgtc

SEQ ID NO: 5358567 - DNA, 25 bp, Homo sapien
ctgtgattgggaatgagaccctagg

SEQ ID NO: 5358568 - DNA, 25 bp, Homo sapien
ttgggaatgagaccctaggaaacac

SEQ ID NO: 5358569 - DNA, 25 bp, Homo sapien
gggaatgagaccctaggaaacacac

SEQ ID NO: 5358570 - DNA, 25 bp, Homo sapien
gattgggaatgagaccctaggaaac

SEQ ID NO: 5358571 - DNA, 25 bp, Homo sapien
gacacagagggcctgcgtgagtctc

SEQ ID NO: 5358572 - DNA, 25 bp, Homo sapien
gaccccggaaacaggcccacacagc

SEQ ID NO: 5358573 - DNA, 25 bp, Homo sapien
cagagggcctgcgtgagtctcttcg

SEQ ID NO: 5358574 - DNA, 25 bp, Homo sapien
agggcctgcgtgagtctcttcgtga

SEQ ID NO: 5358575 - DNA, 25 bp, Homo sapien
caatgtatgcagtccagcggagaga

SEQ ID NO: 5358576 - DNA, 25 bp, Homo sapien
aatagctccttgtattctgtctctg

SEQ ID NO: 5358577 - DNA, 25 bp, Homo sapien
tcctggcctgtgctcaatgtatgca

SEQ ID NO: 5358578 - DNA, 25 bp, Homo sapien
tgcccaggcagtagacacttcctgg

SEQ ID NO: 5358579 - DNA, 25 bp, Homo sapien
gtaaaggcccagacacccgcatgca

SEQ ID NO: 5358580 - DNA, 25 bp, Homo sapien
accttgcatccgtcagacaaacgca

SEQ ID NO: 5358581 - DNA, 25 bp, Homo sapien
gatttcttcgcagtaattgggccat

SEQ ID NO: 5358582 - DNA, 25 bp, Homo sapien
cgcacaccgggttagcctttccatt

SEQ ID NO: 5358583 - DNA, 25 bp, Homo sapien
tcatggactcttctcaattctgctt

SEQ ID NO: 5358584 - DNA, 25 bp, Homo sapien
catggactcttctcaattctgcttt

SEQ ID NO: 5358585 - DNA, 25 bp, Homo sapien
tggactcttctcaattctgctttga

SEQ ID NO: 5358586 - DNA, 25 bp, Homo sapien
ggactcttctcaattctgctttgaa

SEQ ID NO: 5358587 - DNA, 25 bp, Homo sapien
tgggtaatgcgaggatgctgggatg

SEQ ID NO: 5358588 - DNA, 25 bp, Homo sapien
tgtgggtaatgcgaggatgctggga

SEQ ID NO: 5358589 - DNA, 25 bp, Homo sapien
gtgggtaatgcgaggatgctgggat

SEQ ID NO: 5358590 - DNA, 25 bp, Homo sapien
ctgtgggtaatgcgaggatgctggg

SEQ ID NO: 5358591 - DNA, 25 bp, Homo sapien
tcccctggtgttctgtgatgaacgc

SEQ ID NO: 5358592 - DNA, 25 bp, Homo sapien
ctcccctggtgttctgtgatgaacg

SEQ ID NO: 5358593 - DNA, 25 bp, Homo sapien
cccctggtgttctgtgatgaacgca

SEQ ID NO: 5358594 - DNA, 25 bp, Homo sapien
ccctggtgttctgtgatgaacgcag

SEQ ID NO: 5358595 - DNA, 25 bp, Homo sapien
tgcacagtgggggtcttagagttca

SEQ ID NO: 5358596 - DNA, 25 bp, Homo sapien
cctgcacagtgggggtcttagagtt

SEQ ID NO: 5358597 - DNA, 25 bp, Homo sapien
gcacagtgggggtcttagagttcat

SEQ ID NO: 5358598 - DNA, 25 bp, Homo sapien
acctgcacagtgggggtcttagagt

SEQ ID NO: 5358599 - DNA, 25 bp, Homo sapien
ttctgcttctgccagggccgaacat

SEQ ID NO: 5358600 - DNA, 25 bp, Homo sapien
taacatcaaacattcgtctccagct

SEQ ID NO: 5358601 - DNA, 25 bp, Homo sapien
gcatggaggtggattataacatcaa

SEQ ID NO: 5358602 - DNA, 25 bp, Homo sapien
tccatattactggatccatccagag

SEQ ID NO: 5358603 - DNA, 25 bp, Homo sapien
cctgtcaagctcacgggatggtgtc

SEQ ID NO: 5358604 - DNA, 25 bp, Homo sapien
cctttcgtatgagatctggtcagcc

SEQ ID NO: 5358605 - DNA, 25 bp, Homo sapien
cgtcagatcagtgtgaagaggtgtc

SEQ ID NO: 5358606 - DNA, 25 bp, Homo sapien
actgggctgcctctatgtttggaga

SEQ ID NO: 5358607 - DNA, 25 bp, Homo sapien
ctgagggtgtatgcattcccaatga

SEQ ID NO: 5358608 - DNA, 25 bp, Homo sapien
attgctactatacttgatatctcac

SEQ ID NO: 5358609 - DNA, 25 bp, Homo sapien
ttcccaatgacattgctactatact

SEQ ID NO: 5358610 - DNA, 25 bp, Homo sapien
gaagagagttgacaataacgactgg

SEQ ID NO: 5358611 - DNA, 25 bp, Homo sapien
gggctgtcttgtgcaggactgcctt

SEQ ID NO: 5358612 - DNA, 25 bp, Homo sapien
ggctgtcttgtgcaggactgccttc

SEQ ID NO: 5358613 - DNA, 25 bp, Homo sapien
agttgacaataacgactggactggg

SEQ ID NO: 5358614 - DNA, 25 bp, Homo sapien
cggtgcactcagctatgtccctgca

SEQ ID NO: 5358615 - DNA, 25 bp, Homo sapien
ggcggtgcactcagctatgtccctg

SEQ ID NO: 5358616 - DNA, 25 bp, Homo sapien
gcggtgcactcagctatgtccctgc

SEQ ID NO: 5358617 - DNA, 25 bp, Homo sapien
cacatgcagggcctcggaagacgta

SEQ ID NO: 5358618 - DNA, 25 bp, Homo sapien
acgtatctctttactgccactccgg

SEQ ID NO: 5358619 - DNA, 25 bp, Homo sapien
aagacgtatctctttactgccactc

SEQ ID NO: 5358620 - DNA, 25 bp, Homo sapien
cagggcctcggaagacgtatctctt

SEQ ID NO: 5358621 - DNA, 25 bp, Homo sapien
ccagcgatgacttgcagccagggga

SEQ ID NO: 5358622 - DNA, 25 bp, Homo sapien
aagatctagccccttgcattgcgct

SEQ ID NO: 5358623 - DNA, 25 bp, Homo sapien
tctagccccttgcattgcgctggac

SEQ ID NO: 5358624 - DNA, 25 bp, Homo sapien
ggcagcgtgcacacaagatctagcc

SEQ ID NO: 5358625 - DNA, 25 bp, Homo sapien
tgcaccgtgctagccccatcatcgg

SEQ ID NO: 5358626 - DNA, 25 bp, Homo sapien
gcaacccagctcctggggtcagcgg

SEQ ID NO: 5358627 - DNA, 25 bp, Homo sapien
agccagtctgtgccatgcacctccc

SEQ ID NO: 5358628 - DNA, 25 bp, Homo sapien
tcactccgcccatccttctgagagg

SEQ ID NO: 5358629 - DNA, 25 bp, Homo sapien
acagctctggcctctcgccgtggat

SEQ ID NO: 5358630 - DNA, 25 bp, Homo sapien
ttcctccgttcggaatccctgagct

SEQ ID NO: 5358631 - DNA, 25 bp, Homo sapien
gataccctgcagtactctctggaaa

SEQ ID NO: 5358632 - DNA, 25 bp, Homo sapien
taggatcgggtttaggctgagcccc

SEQ ID NO: 5358633 - DNA, 25 bp, Homo sapien
tctgctccgaactcccacggggaaa

SEQ ID NO: 5358634 - DNA, 25 bp, Homo sapien
aactctcgtctcttgccgcctcctg

SEQ ID NO: 5358635 - DNA, 25 bp, Homo sapien
ggaaagcagcgtctctaggaccagg

SEQ ID NO: 5358636 - DNA, 25 bp, Homo sapien
gagcatggcacagcgccaactctcg

SEQ ID NO: 5358637 - DNA, 25 bp, Homo sapien
gatgacaggaaccagtgccctgact

SEQ ID NO: 5358638 - DNA, 25 bp, Homo sapien
gggcctgctttgtgttgcaccggat

SEQ ID NO: 5358639 - DNA, 25 bp, Homo sapien
acttggataacttccgctcgggaga

SEQ ID NO: 5358640 - DNA, 25 bp, Homo sapien
cgtcccggagacctgaagtgtggcc

SEQ ID NO: 5358641 - DNA, 25 bp, Homo sapien
gtccaggtgcgactcctctcacacc

SEQ ID NO: 5358642 - DNA, 25 bp, Homo sapien
gggtccaggtgcgactcctctcaca

SEQ ID NO: 5358643 - DNA, 25 bp, Homo sapien
ccaggtgcgactcctctcacacctg

SEQ ID NO: 5358644 - DNA, 25 bp, Homo sapien
cctgggtccaggtgcgactcctctc

SEQ ID NO: 5358645 - DNA, 25 bp, Homo sapien
ctccatcaacgtcaatggtcaccaa

SEQ ID NO: 5358646 - DNA, 25 bp, Homo sapien
tccatcaacgtcaatggtcaccaag

SEQ ID NO: 5358647 - DNA, 25 bp, Homo sapien
tcaccatgatcagtaaaagataatc

SEQ ID NO: 5358648 - DNA, 25 bp, Homo sapien
tactatttatacagctgtgtccagg

SEQ ID NO: 5358649 - DNA, 25 bp, Homo sapien
tgcccaagagttcatttccccagac

SEQ ID NO: 5358650 - DNA, 25 bp, Homo sapien
gttcatcctcttttactatttatac

SEQ ID NO: 5358651 - DNA, 25 bp, Homo sapien
tatctgctgagcagtagcgactgct

SEQ ID NO: 5358652 - DNA, 25 bp, Homo sapien
aacatgcagatctgagcctctgcag

SEQ ID NO: 5358653 - DNA, 25 bp, Homo sapien
gctcagctggcaccttggttatctg

SEQ ID NO: 5358654 - DNA, 25 bp, Homo sapien
aggctggttccgctcagctggcacc

SEQ ID NO: 5358655 - DNA, 25 bp, Homo sapien
ttatctgccttggatagaaatgatt

SEQ ID NO: 5358656 - DNA, 25 bp, Homo sapien
tcttatctgccttggatagaaatga

SEQ ID NO: 5358657 - DNA, 25 bp, Homo sapien
tattaaatcttatctgccttggata

SEQ ID NO: 5358658 - DNA, 25 bp, Homo sapien
taaatcttatctgccttggatagaa

SEQ ID NO: 5358659 - DNA, 25 bp, Homo sapien
aaacacaaaggcctaggcactgatt

SEQ ID NO: 5358660 - DNA, 25 bp, Homo sapien
ggcctaggcactgatttgatctaat

SEQ ID NO: 5358661 - DNA, 25 bp, Homo sapien
gttagtacatccctacgacacaaac

SEQ ID NO: 5358662 - DNA, 25 bp, Homo sapien
cagtctgtggtgatgtgttagtaca

SEQ ID NO: 5358663 - DNA, 25 bp, Homo sapien
cagggttctctattatgatcagggc

SEQ ID NO: 5358664 - DNA, 25 bp, Homo sapien
gagagaacttccttagctgcagggc

SEQ ID NO: 5358665 - DNA, 25 bp, Homo sapien
tggtaaataacgaaggccccaatgc

SEQ ID NO: 5358666 - DNA, 25 bp, Homo sapien
gcctttgccatggagacacagtgga

SEQ ID NO: 5358667 - DNA, 25 bp, Homo sapien
tgcgcgtggcttactaactggaccc

SEQ ID NO: 5358668 - DNA, 25 bp, Homo sapien
gcatgtttgcactttggctgcacca

SEQ ID NO: 5358669 - DNA, 25 bp, Homo sapien
gcaccacgtatgctgtgtctgccag

SEQ ID NO: 5358670 - DNA, 25 bp, Homo sapien
catttcgataccacgggcacagtga

SEQ ID NO: 5358671 - DNA, 25 bp, Homo sapien
ggtgatgtcaatcgcagtcccctac

SEQ ID NO: 5358672 - DNA, 25 bp, Homo sapien
tcccctacacaggaccttctgggta

SEQ ID NO: 5358673 - DNA, 25 bp, Homo sapien
taagaggactgagctcattcagtcc

SEQ ID NO: 5358674 - DNA, 25 bp, Homo sapien
tcagtccttggtgctgcagactagg

SEQ ID NO: 5358675 - DNA, 25 bp, Homo sapien
agggcaatgacggtagctccctcca

SEQ ID NO: 5358676 - DNA, 25 bp, Homo sapien
ccctgtgagcttgtgttggatgaga

SEQ ID NO: 5358677 - DNA, 25 bp, Homo sapien
gacggtagctccctccacaaggagc

SEQ ID NO: 5358678 - DNA, 25 bp, Homo sapien
caaggagcaaggaacggctttccct

SEQ ID NO: 5358679 - DNA, 25 bp, Homo sapien
ctgaagtcagtggtgggctgctcac

SEQ ID NO: 5358680 - DNA, 25 bp, Homo sapien
gcatccagtgaggaattaatcgcac

SEQ ID NO: 5358681 - DNA, 25 bp, Homo sapien
gcaaaggatctgggtgttggtctcc

SEQ ID NO: 5358682 - DNA, 25 bp, Homo sapien
aaggatctgggtgttggtctccaaa

SEQ ID NO: 5358683 - DNA, 25 bp, Homo sapien
tgttggtctccaaagcgctgcaggg

SEQ ID NO: 5358684 - DNA, 25 bp, Homo sapien
tgggcaaaggatctgggtgttggtc

SEQ ID NO: 5358685 - DNA, 25 bp, Homo sapien
gcggccggtgagaggcaccctcctc

SEQ ID NO: 5358686 - DNA, 25 bp, Homo sapien
ggccggtgagaggcaccctcctcac

SEQ ID NO: 5358687 - DNA, 25 bp, Homo sapien
cggccggtgagaggcaccctcctca

SEQ ID NO: 5358688 - DNA, 25 bp, Homo sapien
gaaatgacagccgccaaaaggttta

SEQ ID NO: 5358689 - DNA, 25 bp, Homo sapien
agaaatgacagccgccaaaaggttt

SEQ ID NO: 5358690 - DNA, 25 bp, Homo sapien
gagccttgcagctgttgtgactcat

SEQ ID NO: 5358691 - DNA, 25 bp, Homo sapien
atgacagccgccaaaaggtttaaat

SEQ ID NO: 5358692 - DNA, 25 bp, Homo sapien
tcaatccggtgggatgcaaaggatc

SEQ ID NO: 5358693 - DNA, 25 bp, Homo sapien
catatgcagctaaacggaaggtccc

SEQ ID NO: 5358694 - DNA, 25 bp, Homo sapien
tgtggtcatagtacccaacgcccta

SEQ ID NO: 5358695 - DNA, 25 bp, Homo sapien
gcccctgagctacgtgagcctgtaa

SEQ ID NO: 5358696 - DNA, 25 bp, Homo sapien
gctgcttacaaatcagcttgcttta

SEQ ID NO: 5358697 - DNA, 25 bp, Homo sapien
gttctgatggcaatgtagtcctcat

SEQ ID NO: 5358698 - DNA, 25 bp, Homo sapien
tccataaacaacctctataatcaaa

SEQ ID NO: 5358699 - DNA, 25 bp, Homo sapien
aaatccatgggcactcctgttggtg

SEQ ID NO: 5358700 - DNA, 25 bp, Homo sapien
gttcacagagggtacagatggcatt

SEQ ID NO: 5358701 - DNA, 25 bp, Homo sapien
catgccctgatacgaaacggaaccc

SEQ ID NO: 5358702 - DNA, 25 bp, Homo sapien
tctggtgtattctacccacaggagg

SEQ ID NO: 5358703 - DNA, 25 bp, Homo sapien
caaaaaacaacgcatgtggccaaag

SEQ ID NO: 5358704 - DNA, 25 bp, Homo sapien
taggttccacacaatcggtttcacg

SEQ ID NO: 5358705 - DNA, 25 bp, Homo sapien
tctgcaaacagaccccgaaatgggc

SEQ ID NO: 5358706 - DNA, 25 bp, Homo sapien
ccacaggtgctacagctgggattcc

SEQ ID NO: 5358707 - DNA, 25 bp, Homo sapien
tttagggcctttcggttgactcaca

SEQ ID NO: 5358708 - DNA, 25 bp, Homo sapien
cctcgccgtgggagataactttgtc

SEQ ID NO: 5358709 - DNA, 25 bp, Homo sapien
aaccaaacgcggcaaatgctgggac

SEQ ID NO: 5358710 - DNA, 25 bp, Homo sapien
cagctcacggctgaagatgacatgg

SEQ ID NO: 5358711 - DNA, 25 bp, Homo sapien
gatacatgccctgcttctgccgaaa

SEQ ID NO: 5358712 - DNA, 25 bp, Homo sapien
atgctcttcagggcaacgtatgccc

SEQ ID NO: 5358713 - DNA, 25 bp, Homo sapien
tgggccagcctaagggactcctgta

SEQ ID NO: 5358714 - DNA, 25 bp, Homo sapien
tgagagactcagctatgggccagcc

SEQ ID NO: 5358715 - DNA, 25 bp, Homo sapien
gcaacgtatgccctactctttaaaa

SEQ ID NO: 5358716 - DNA, 25 bp, Homo sapien
gggataagctaaaaatgccacgggc

SEQ ID NO: 5358717 - DNA, 25 bp, Homo sapien
gatgattcaaatgtcctgtggtaag

SEQ ID NO: 5358718 - DNA, 25 bp, Homo sapien
acacaggcaggtttgggcgatgaat

SEQ ID NO: 5358719 - DNA, 25 bp, Homo sapien
cagaaagctgcctttgggatcttac

SEQ ID NO: 5358720 - DNA, 25 bp, Homo sapien
taacatgccgaaggagaagactcag

SEQ ID NO: 5358721 - DNA, 25 bp, Homo sapien
gatatgaccgtaggatgctgtcacc

SEQ ID NO: 5358722 - DNA, 25 bp, Homo sapien
gctttacttcaggaaggctcgtgga

SEQ ID NO: 5358723 - DNA, 25 bp, Homo sapien
aaaacgtatgttgctctcgtctgcg

SEQ ID NO: 5358724 - DNA, 25 bp, Homo sapien
tataccatcaacattgtatattatg

SEQ ID NO: 5358725 - DNA, 25 bp, Homo sapien
ccatcaacattgtatattatgagat

SEQ ID NO: 5358726 - DNA, 25 bp, Homo sapien
catcaacattgtatattatgagata

SEQ ID NO: 5358727 - DNA, 25 bp, Homo sapien
taccatcaacattgtatattatgag

SEQ ID NO: 5358728 - DNA, 25 bp, Homo sapien
aaagcacgcctttaccatctggcag

SEQ ID NO: 5358729 - DNA, 25 bp, Homo sapien
taaggactagtttgggctcctgcac

SEQ ID NO: 5358730 - DNA, 25 bp, Homo sapien
tattgtctacacactaaagcacgcc

SEQ ID NO: 5358731 - DNA, 25 bp, Homo sapien
cacatgtaaaccatctgcagggtcc

SEQ ID NO: 5358732 - DNA, 25 bp, Homo sapien
tagccagctcttgccgactattcat

SEQ ID NO: 5358733 - DNA, 25 bp, Homo sapien
agctcttgccgactattcatcttac

SEQ ID NO: 5358734 - DNA, 25 bp, Homo sapien
gcattagccagctcttgccgactat

SEQ ID NO: 5358735 - DNA, 25 bp, Homo sapien
cagctcttgccgactattcatctta

SEQ ID NO: 5358736 - DNA, 25 bp, Homo sapien
caaggagccgctctttgagcgaggt

SEQ ID NO: 5358737 - DNA, 25 bp, Homo sapien
aatatccgtcggatggcaaggagcc

SEQ ID NO: 5358738 - DNA, 25 bp, Homo sapien
ctttgagcgaggtcatgccgaggat

SEQ ID NO: 5358739 - DNA, 25 bp, Homo sapien
gatgatgactaatatccgtcggatg

SEQ ID NO: 5358740 - DNA, 25 bp, Homo sapien
gaaacagactgttgatgcacagaat

SEQ ID NO: 5358741 - DNA, 25 bp, Homo sapien
tggagagacgcgaaccaggaaacag

SEQ ID NO: 5358742 - DNA, 25 bp, Homo sapien
tgcacagaatcgtggagagcggcaa

SEQ ID NO: 5358743 - DNA, 25 bp, Homo sapien
tctttcatgcgatcctggagagacg

SEQ ID NO: 5358744 - DNA, 25 bp, Homo sapien
tcttcaagatattcaatgtccgctg

SEQ ID NO: 5358745 - DNA, 25 bp, Homo sapien
tcacgtccttaatctccagcatgca

SEQ ID NO: 5358746 - DNA, 25 bp, Homo sapien
tctctgtggcggtggcttagcactc

SEQ ID NO: 5358747 - DNA, 25 bp, Homo sapien
gatgccaatcgcgtctacaacagaa

SEQ ID NO: 5358748 - DNA, 25 bp, Homo sapien
gccaaaccgcttggtgccagtttcc

SEQ ID NO: 5358749 - DNA, 25 bp, Homo sapien
gcagataaacacatgccaaaccgct

SEQ ID NO: 5358750 - DNA, 25 bp, Homo sapien
cttcttatcataagccgatagcggg

SEQ ID NO: 5358751 - DNA, 25 bp, Homo sapien
caaaaacgtggagtggacatgggac

SEQ ID NO: 5358752 - DNA, 25 bp, Homo sapien
aaattctcttcctatcagacaattc

SEQ ID NO: 5358753 - DNA, 25 bp, Homo sapien
gaaatattaattcttcggccagaac

SEQ ID NO: 5358754 - DNA, 25 bp, Homo sapien
catccggcaaatatcgaaatattaa

SEQ ID NO: 5358755 - DNA, 25 bp, Homo sapien
ttcttcggccagaacagttatgtta

SEQ ID NO: 5358756 - DNA, 25 bp, Homo sapien
tgtatggtaattgattctaaaggac

SEQ ID NO: 5358757 - DNA, 25 bp, Homo sapien
gtcaaatgatactgtatggtaattg

SEQ ID NO: 5358758 - DNA, 25 bp, Homo sapien
tggtaattgattctaaaggacgaag

SEQ ID NO: 5358759 - DNA, 25 bp, Homo sapien
gatactgtatggtaattgattctaa

SEQ ID NO: 5358760 - DNA, 25 bp, Homo sapien
ctggatgaaggatgaggcaactcaa

SEQ ID NO: 5358761 - DNA, 25 bp, Homo sapien
aatcttgacagcatctacattttca

SEQ ID NO: 5358762 - DNA, 25 bp, Homo sapien
tttcaaccaagtgccatgatgttgg

SEQ ID NO: 5358763 - DNA, 25 bp, Homo sapien
acttttgcaatgatcagcttggaaa

SEQ ID NO: 5358764 - DNA, 25 bp, Homo sapien
acaagaggcagtgggtccgatgcat

SEQ ID NO: 5358765 - DNA, 25 bp, Homo sapien
accaaaacaagaggcagtgggtccg

SEQ ID NO: 5358766 - DNA, 25 bp, Homo sapien
cagatgagcctgttctggcccaggc

SEQ ID NO: 5358767 - DNA, 25 bp, Homo sapien
tcttgtaagaacagatgagcctgtt

SEQ ID NO: 5358768 - DNA, 25 bp, Homo sapien
gaaatgatcaagtcttcaatcctac

SEQ ID NO: 5358769 - DNA, 25 bp, Homo sapien
aatcctacgaaaaactctcaagatg

SEQ ID NO: 5358770 - DNA, 25 bp, Homo sapien
tcttcaatcctacgaaaaactctca

SEQ ID NO: 5358771 - DNA, 25 bp, Homo sapien
gatcaagtcttcaatcctacgaaaa

SEQ ID NO: 5358772 - DNA, 25 bp, Homo sapien
tcaaggcagcgctcaaggcatttta

SEQ ID NO: 5358773 - DNA, 25 bp, Homo sapien
gaaagtttgtctttgcacaaaggac

SEQ ID NO: 5358774 - DNA, 25 bp, Homo sapien
cacagggcgtagtgacaggttcaaa

SEQ ID NO: 5358775 - DNA, 25 bp, Homo sapien
ggcattttaggcaaaatgtgtgtcc

SEQ ID NO: 5358776 - DNA, 25 bp, Homo sapien
cagagggcacactcaaagtcagtta

SEQ ID NO: 5358777 - DNA, 25 bp, Homo sapien
agagggcacactcaaagtcagttac

SEQ ID NO: 5358778 - DNA, 25 bp, Homo sapien
gcagagggcacactcaaagtcagtt

SEQ ID NO: 5358779 - DNA, 25 bp, Homo sapien
tcaagcgagagcccctgactttctt

SEQ ID NO: 5358780 - DNA, 25 bp, Homo sapien
atcaagcgagagcccctgactttct

SEQ ID NO: 5358781 - DNA, 25 bp, Homo sapien
tctcagagtttgggctcctttgaag

SEQ ID NO: 5358782 - DNA, 25 bp, Homo sapien
cagagtttgggctcctttgaagtga

SEQ ID NO: 5358783 - DNA, 25 bp, Homo sapien
ctgtctcagagtttgggctcctttg

SEQ ID NO: 5358784 - DNA, 25 bp, Homo sapien
tttgggctcctttgaagtgagagat

SEQ ID NO: 5358785 - DNA, 25 bp, Homo sapien
tgttggaaggatgctttctaacgcc

SEQ ID NO: 5358786 - DNA, 25 bp, Homo sapien
tttatcctcttcaaagtgtagaccc

SEQ ID NO: 5358787 - DNA, 25 bp, Homo sapien
aactgaagaattggtatttccaagc

SEQ ID NO: 5358788 - DNA, 25 bp, Homo sapien
atcctccacgtcatccggaaactgt

SEQ ID NO: 5358789 - DNA, 25 bp, Homo sapien
tgagcctttaatctgctttggatgg

SEQ ID NO: 5358790 - DNA, 25 bp, Homo sapien
atctgctttggatggaagatgttaa

SEQ ID NO: 5358791 - DNA, 25 bp, Homo sapien
cctttaatctgctttggatggaaga

SEQ ID NO: 5358792 - DNA, 25 bp, Homo sapien
taatctgctttggatggaagatgtt

SEQ ID NO: 5358793 - DNA, 25 bp, Homo sapien
gaagtttccgtataggacaaagcag

SEQ ID NO: 5358794 - DNA, 25 bp, Homo sapien
ggtgagtgcgctagaatccatggcc

SEQ ID NO: 5358795 - DNA, 25 bp, Homo sapien
caggacaactgaatgggactaacgc

SEQ ID NO: 5358796 - DNA, 25 bp, Homo sapien
catgtctgaaaacgctccaggtaga

SEQ ID NO: 5358797 - DNA, 25 bp, Homo sapien
tcacagagttacattcaggattcag

SEQ ID NO: 5358798 - DNA, 25 bp, Homo sapien
cattcaggattcagagcaaggcagt

SEQ ID NO: 5358799 - DNA, 25 bp, Homo sapien
attcaggattcagagcaaggcagta

SEQ ID NO: 5358800 - DNA, 25 bp, Homo sapien
gagcaaggcagtagagaaattcctt

SEQ ID NO: 5358801 - DNA, 25 bp, Homo sapien
tcaaaggagttctaagggacgtgct

SEQ ID NO: 5358802 - DNA, 25 bp, Homo sapien
gagctaccgtacctgaaatgttctg

SEQ ID NO: 5358803 - DNA, 25 bp, Homo sapien
taccctggaaacttagcaaacttca

SEQ ID NO: 5358804 - DNA, 25 bp, Homo sapien
ctcatgagctaagacagacacgact

SEQ ID NO: 5358805 - DNA, 25 bp, Homo sapien
tccctgttgagattgctcttaagtc

SEQ ID NO: 5358806 - DNA, 25 bp, Homo sapien
gacttggggtctcgtgatgtttccc

SEQ ID NO: 5358807 - DNA, 25 bp, Homo sapien
taagtcaaaggtaccatattgtcct

SEQ ID NO: 5358808 - DNA, 25 bp, Homo sapien
atgcatgaaccatgaacccagccag

SEQ ID NO: 5358809 - DNA, 25 bp, Homo sapien
tgtggttctccctgatgcctatgaa

SEQ ID NO: 5358810 - DNA, 25 bp, Homo sapien
gaactcctggtactttcacgtagtg

SEQ ID NO: 5358811 - DNA, 25 bp, Homo sapien
tctgttagaactcggaactctgaac

SEQ ID NO: 5358812 - DNA, 25 bp, Homo sapien
gtagtgatcctgagtgtttgtccca

SEQ ID NO: 5358813 - DNA, 25 bp, Homo sapien
gccctctggaagagcagccatttca

SEQ ID NO: 5358814 - DNA, 25 bp, Homo sapien
tctggaagagcagccatttcaaaag

SEQ ID NO: 5358815 - DNA, 25 bp, Homo sapien
cttgcagccctctggaagagcagcc

SEQ ID NO: 5358816 - DNA, 25 bp, Homo sapien
gaagagcagccatttcaaaagacat

SEQ ID NO: 5358817 - DNA, 25 bp, Homo sapien
atcagtttcatccctgagctccctg

SEQ ID NO: 5358818 - DNA, 25 bp, Homo sapien
ctttagacaacaaatcatcagtttc

SEQ ID NO: 5358819 - DNA, 25 bp, Homo sapien
tttagacaacaaatcatcagtttca

SEQ ID NO: 5358820 - DNA, 25 bp, Homo sapien
atcatcagtttcatccctgagctcc

SEQ ID NO: 5358821 - DNA, 25 bp, Homo sapien
attaaactacgttttggctgaagct

SEQ ID NO: 5358822 - DNA, 25 bp, Homo sapien
taaactacgttttggctgaagctgc

SEQ ID NO: 5358823 - DNA, 25 bp, Homo sapien
tattaaactacgttttggctgaagc

SEQ ID NO: 5358824 - DNA, 25 bp, Homo sapien
ttaaactacgttttggctgaagctg

SEQ ID NO: 5358825 - DNA, 25 bp, Homo sapien
cattgattatctccaaagctaacaa

SEQ ID NO: 5358826 - DNA, 25 bp, Homo sapien
acattgattatctccaaagctaaca

SEQ ID NO: 5358827 - DNA, 25 bp, Homo sapien
cacattgattatctccaaagctaac

SEQ ID NO: 5358828 - DNA, 25 bp, Homo sapien
cttaatcaagagaggttcattctga

SEQ ID NO: 5358829 - DNA, 25 bp, Homo sapien
cattctgacaagctgcactggcatc

SEQ ID NO: 5358830 - DNA, 25 bp, Homo sapien
caagagaggttcattctgacaagct

SEQ ID NO: 5358831 - DNA, 25 bp, Homo sapien
ggttcattctgacaagctgcactgg

SEQ ID NO: 5358832 - DNA, 25 bp, Homo sapien
agcaataatgaattatcatcaggag

SEQ ID NO: 5358833 - DNA, 25 bp, Homo sapien
tccgcccgcagcagcaataatgaat

SEQ ID NO: 5358834 - DNA, 25 bp, Homo sapien
ggtcaaatataactccgcccgcagc

SEQ ID NO: 5358835 - DNA, 25 bp, Homo sapien
cccgcagcagcaataatgaattatc

SEQ ID NO: 5358836 - DNA, 25 bp, Homo sapien
taagtccagctacacagaagccaag

SEQ ID NO: 5358837 - DNA, 25 bp, Homo sapien
tattgacttggcagggtcccatgga

SEQ ID NO: 5358838 - DNA, 25 bp, Homo sapien
gactggcctctctttgaactgactt

SEQ ID NO: 5358839 - DNA, 25 bp, Homo sapien
gaactgacttgcagtctacgaagta

SEQ ID NO: 5358840 - DNA, 25 bp, Homo sapien
cagctgttctttggtagtatgggca

SEQ ID NO: 5358841 - DNA, 25 bp, Homo sapien
catcccacagtgtttgatatctgta

SEQ ID NO: 5358842 - DNA, 25 bp, Homo sapien
aatggaagcctaaagatcactgact

SEQ ID NO: 5358843 - DNA, 25 bp, Homo sapien
tccctctaagcactgttgcattgca

SEQ ID NO: 5358844 - DNA, 25 bp, Homo sapien
aaagacaaaaccagtggggtgcact

SEQ ID NO: 5358845 - DNA, 25 bp, Homo sapien
aaaaccagtggggtgcacttggcct

SEQ ID NO: 5358846 - DNA, 25 bp, Homo sapien
gacaaaaccagtggggtgcacttgg

SEQ ID NO: 5358847 - DNA, 25 bp, Homo sapien
ccagtggggtgcacttggcctctcc

SEQ ID NO: 5358848 - DNA, 25 bp, Homo sapien
ccatccttaggaagcaaagtgaccc

SEQ ID NO: 5358849 - DNA, 25 bp, Homo sapien
taagcctagacaaagctctcgaaag

SEQ ID NO: 5358850 - DNA, 25 bp, Homo sapien
gaagcaaagtgacccctaagcctag

SEQ ID NO: 5358851 - DNA, 25 bp, Homo sapien
aagctctcgaaagcccaaagcctcg

SEQ ID NO: 5358852 - DNA, 25 bp, Homo sapien
tgggccggacaggtgtaggggaggc

SEQ ID NO: 5358853 - DNA, 25 bp, Homo sapien
gccggacaggtgtaggggaggcgga

SEQ ID NO: 5358854 - DNA, 25 bp, Homo sapien
acgttcacgcgccgcacctgcggcc

SEQ ID NO: 5358855 - DNA, 25 bp, Homo sapien
ccacgttcacgcgccgcacctgcgg

SEQ ID NO: 5358856 - DNA, 25 bp, Homo sapien
cacgttcacgcgccgcacctgcggc

SEQ ID NO: 5358857 - DNA, 25 bp, Homo sapien
ctgtgagcccgcagggcagcgtcac

SEQ ID NO: 5358858 - DNA, 25 bp, Homo sapien
gtgagcccgcagggcagcgtcaccg

SEQ ID NO: 5358859 - DNA, 25 bp, Homo sapien
tgagcccgcagggcagcgtcaccgg

SEQ ID NO: 5358860 - DNA, 25 bp, Homo sapien
tgtgagcccgcagggcagcgtcacc

SEQ ID NO: 5358861 - DNA, 25 bp, Homo sapien
atctcgtagtcgcccgcgcggaagg

SEQ ID NO: 5358862 - DNA, 25 bp, Homo sapien
agctcggctgccatctcgtagtcgc

SEQ ID NO: 5358863 - DNA, 25 bp, Homo sapien
gccagcccggctagcatggagcgaa

SEQ ID NO: 5358864 - DNA, 25 bp, Homo sapien
gagcgaaagagctcggctgccatct

SEQ ID NO: 5358865 - DNA, 25 bp, Homo sapien
gtaacgcagtgaccgcgctccaggt

SEQ ID NO: 5358866 - DNA, 25 bp, Homo sapien
caggtcgctgcggtaacgcagtgac

SEQ ID NO: 5358867 - DNA, 25 bp, Homo sapien
tccaggtccgcgtctcttgcgatgc

SEQ ID NO: 5358868 - DNA, 25 bp, Homo sapien
ggtccgcgtctcttgcgatgcttcc

SEQ ID NO: 5358869 - DNA, 25 bp, Homo sapien
cacaaagcccggtgaccatagagac

SEQ ID NO: 5358870 - DNA, 25 bp, Homo sapien
caaatccacaaagcccggtgaccat

SEQ ID NO: 5358871 - DNA, 25 bp, Homo sapien
tgaccatagagacatatggccggtt

SEQ ID NO: 5358872 - DNA, 25 bp, Homo sapien
agcccggtgaccatagagacatatg

SEQ ID NO: 5358873 - DNA, 25 bp, Homo sapien
ctcatcaggtgctgagatacttcct

SEQ ID NO: 5358874 - DNA, 25 bp, Homo sapien
ctgtgctcatcaggtgctgagatac

SEQ ID NO: 5358875 - DNA, 25 bp, Homo sapien
catcaggtgctgagatacttccttt

SEQ ID NO: 5358876 - DNA, 25 bp, Homo sapien
tgctcatcaggtgctgagatacttc

SEQ ID NO: 5358877 - DNA, 25 bp, Homo sapien
gatttgtctcagtcttgcgcttgcc

SEQ ID NO: 5358878 - DNA, 25 bp, Homo sapien
agtataccctctccccaagtgatgc

SEQ ID NO: 5358879 - DNA, 25 bp, Homo sapien
tattggggtccatgtaagagaatcc

SEQ ID NO: 5358880 - DNA, 25 bp, Homo sapien
ctgacctgtattctgcccaaagagg

SEQ ID NO: 5358881 - DNA, 25 bp, Homo sapien
gggaactctgaatgtcgttctcgac

SEQ ID NO: 5358882 - DNA, 25 bp, Homo sapien
tcgacccaatcgcttttcaggtttc

SEQ ID NO: 5358883 - DNA, 25 bp, Homo sapien
caagcttggcaaagggccagaccta

SEQ ID NO: 5358884 - DNA, 25 bp, Homo sapien
tgtccccgaacttggaacattccca

SEQ ID NO: 5358885 - DNA, 25 bp, Homo sapien
cttcctctcaagtttggcctttggt

SEQ ID NO: 5358886 - DNA, 25 bp, Homo sapien
gcctttggtcagtggggacccatac

SEQ ID NO: 5358887 - DNA, 25 bp, Homo sapien
ctcaagtttggcctttggtcagtgg

SEQ ID NO: 5358888 - DNA, 25 bp, Homo sapien
aggtattcggtcacttcctctcaag

SEQ ID NO: 5358889 - DNA, 25 bp, Homo sapien
tgatgttcacctgcaacaattccaa

SEQ ID NO: 5358890 - DNA, 25 bp, Homo sapien
gggttcaacatgcttgttgagaagt

SEQ ID NO: 5358891 - DNA, 25 bp, Homo sapien
atgatgttcacctgcaacaattcca

SEQ ID NO: 5358892 - DNA, 25 bp, Homo sapien
gacattcttctgctattgctaggga

SEQ ID NO: 5358893 - DNA, 25 bp, Homo sapien
ttcttctgctattgctagggaatgt

SEQ ID NO: 5358894 - DNA, 25 bp, Homo sapien
agacattcttctgctattgctaggg

SEQ ID NO: 5358895 - DNA, 25 bp, Homo sapien
ctgctattgctagggaatgttcttt

SEQ ID NO: 5358896 - DNA, 25 bp, Homo sapien
aagacatgctgattcccaaatgagc

SEQ ID NO: 5358897 - DNA, 25 bp, Homo sapien
ctaccattacatcaagaagacatgc

SEQ ID NO: 5358898 - DNA, 25 bp, Homo sapien
aatgatggatgaggagtccctgtgg

SEQ ID NO: 5358899 - DNA, 25 bp, Homo sapien
gctgattcccaaatgagcaggactg

SEQ ID NO: 5358900 - DNA, 25 bp, Homo sapien
gaaaaatctgaccacgtatgtccta

SEQ ID NO: 5358901 - DNA, 25 bp, Homo sapien
tatgtcctaggcctaatctccgaac

SEQ ID NO: 5358902 - DNA, 25 bp, Homo sapien
taatctccgaacagcggtgttttgt

SEQ ID NO: 5358903 - DNA, 25 bp, Homo sapien
tgaccacgtatgtcctaggcctaat

SEQ ID NO: 5358904 - DNA, 25 bp, Homo sapien
agacagctaaggccagttctacatt

SEQ ID NO: 5358905 - DNA, 25 bp, Homo sapien
gaaagacagctaaggccagttctac

SEQ ID NO: 5358906 - DNA, 25 bp, Homo sapien
aaagacagctaaggccagttctaca

SEQ ID NO: 5358907 - DNA, 25 bp, Homo sapien
acagctaaggccagttctacattat

SEQ ID NO: 5358908 - DNA, 25 bp, Homo sapien
tttctggttatgctcagcccattcc

SEQ ID NO: 5358909 - DNA, 25 bp, Homo sapien
cttctttctggttatgctcagccca

SEQ ID NO: 5358910 - DNA, 25 bp, Homo sapien
tctttctggttatgctcagcccatt

SEQ ID NO: 5358911 - DNA, 25 bp, Homo sapien
tttcttctttctggttatgctcagc

SEQ ID NO: 5358912 - DNA, 25 bp, Homo sapien
gagcagctatgcatgcgtgcgcaca

SEQ ID NO: 5358913 - DNA, 25 bp, Homo sapien
aaataacccagtgtggcgtcctcgg

SEQ ID NO: 5358914 - DNA, 25 bp, Homo sapien
gatccacagttagattccaaacagc

SEQ ID NO: 5358915 - DNA, 25 bp, Homo sapien
taagactagctttaaggccttccat

SEQ ID NO: 5358916 - DNA, 25 bp, Homo sapien
cagggcctaccttgttgccaggaag

SEQ ID NO: 5358917 - DNA, 25 bp, Homo sapien
aaactgtcccagttctcagcggtcc

SEQ ID NO: 5358918 - DNA, 25 bp, Homo sapien
cctggctgtggacggtatctgaaat

SEQ ID NO: 5358919 - DNA, 25 bp, Homo sapien
tatctgaaatggtcgctgcggcttg

SEQ ID NO: 5358920 - DNA, 25 bp, Homo sapien
tgggcgctgggttttattgctggtg

SEQ ID NO: 5358921 - DNA, 25 bp, Homo sapien
ctgggcgctgggttttattgctggt

SEQ ID NO: 5358922 - DNA, 25 bp, Homo sapien
aatggctctggcagtgcccattttg

SEQ ID NO: 5358923 - DNA, 25 bp, Homo sapien
ttccagtcacatggtccaggatggt

SEQ ID NO: 5358924 - DNA, 25 bp, Homo sapien
caggatggtggtgtgatcagaaatg

SEQ ID NO: 5358925 - DNA, 25 bp, Homo sapien
cttccagtcacatggtccaggatgg

SEQ ID NO: 5358926 - DNA, 25 bp, Homo sapien
aagtcagaactgatgcgccgggatc

SEQ ID NO: 5358927 - DNA, 25 bp, Homo sapien
cttgtgctgaatgaaataggcgctt

SEQ ID NO: 5358928 - DNA, 25 bp, Homo sapien
tctgatgctgcaaaagtctctgcga

SEQ ID NO: 5358929 - DNA, 25 bp, Homo sapien
catggattctggaaagatggacccc

SEQ ID NO: 5358930 - DNA, 25 bp, Homo sapien
gcagggtcctcagagcatcttacat

SEQ ID NO: 5358931 - DNA, 25 bp, Homo sapien
gggttctgcgtcatatgccgaggca

SEQ ID NO: 5358932 - DNA, 25 bp, Homo sapien
ggaaacggctcctaacgctgtgtga

SEQ ID NO: 5358933 - DNA, 25 bp, Homo sapien
aaggccagcgacatcctaatgcacg

SEQ ID NO: 5358934 - DNA, 25 bp, Homo sapien
agtttagcaaaaagtctggtttctg

SEQ ID NO: 5358935 - DNA, 25 bp, Homo sapien
ttagcaaaaagtctggtttctggta

SEQ ID NO: 5358936 - DNA, 25 bp, Homo sapien
tagcaaaaagtctggtttctggtac

SEQ ID NO: 5358937 - DNA, 25 bp, Homo sapien
ttcgaaacgggcatacaggcgtcgg

SEQ ID NO: 5358938 - DNA, 25 bp, Homo sapien
tgttatacacggtaatgcccggagg

SEQ ID NO: 5358939 - DNA, 25 bp, Homo sapien
tccagggtctcgtggtgtccaatca

SEQ ID NO: 5358940 - DNA, 25 bp, Homo sapien
tagtcgggtatgacaccaggtggtc

SEQ ID NO: 5358941 - DNA, 25 bp, Homo sapien
gaactgagagttttgaggcgccgaa

SEQ ID NO: 5358942 - DNA, 25 bp, Homo sapien
tactcagtgagatctctgcaatcca

SEQ ID NO: 5358943 - DNA, 25 bp, Homo sapien
ggactccgtccttgctgcgatcagg

SEQ ID NO: 5358944 - DNA, 25 bp, Homo sapien
ggcacaatgcctctgggagaatcaa

SEQ ID NO: 5358945 - DNA, 25 bp, Homo sapien
ccgaggaaggccgttcttctcgtgg

SEQ ID NO: 5358946 - DNA, 25 bp, Homo sapien
aatttctgcatcactgaaggaagag

SEQ ID NO: 5358947 - DNA, 25 bp, Homo sapien
gggatctcctcaatggaagaaaatg

SEQ ID NO: 5358948 - DNA, 25 bp, Homo sapien
cgtggtcgtgcaccacgttttcggg

SEQ ID NO: 5358949 - DNA, 25 bp, Homo sapien
ctgccagcaggatgaacgagtgaag

SEQ ID NO: 5358950 - DNA, 25 bp, Homo sapien
caatatccaagtttaggtctttgaa

SEQ ID NO: 5358951 - DNA, 25 bp, Homo sapien
caggatgaacgagtgaagaaaagct

SEQ ID NO: 5358952 - DNA, 25 bp, Homo sapien
cccaatatccaagtttaggtctttg

SEQ ID NO: 5358953 - DNA, 25 bp, Homo sapien
gagcaggagtggaaatgctggcagt

SEQ ID NO: 5358954 - DNA, 25 bp, Homo sapien
ctagaggaaactgatgatttcaggg

SEQ ID NO: 5358955 - DNA, 25 bp, Homo sapien
agggagcaggagtggaaatgctggc

SEQ ID NO: 5358956 - DNA, 25 bp, Homo sapien
gagtggaaatgctggcagtgcctac

SEQ ID NO: 5358957 - DNA, 25 bp, Homo sapien
tggcaatggacctaactgggctaaa

SEQ ID NO: 5358958 - DNA, 25 bp, Homo sapien
actgggctaaatctgccattagagg

SEQ ID NO: 5358959 - DNA, 25 bp, Homo sapien
gacctaactgggctaaatctgccat

SEQ ID NO: 5358960 - DNA, 25 bp, Homo sapien
atggacctaactgggctaaatctgc

SEQ ID NO: 5358961 - DNA, 25 bp, Homo sapien
gcaaacagaactcctaacaccagca

SEQ ID NO: 5358962 - DNA, 25 bp, Homo sapien
aacagaactcctaacaccagcaaca

SEQ ID NO: 5358963 - DNA, 25 bp, Homo sapien
taacaccagcaacacttactctact

SEQ ID NO: 5358964 - DNA, 25 bp, Homo sapien
tgcatgcaaacagaactcctaacac

SEQ ID NO: 5358965 - DNA, 25 bp, Homo sapien
ccgagtgtttaaagcccagtccaga

SEQ ID NO: 5358966 - DNA, 25 bp, Homo sapien
ttaccgaagatagccacaaggacca

SEQ ID NO: 5358967 - DNA, 25 bp, Homo sapien
cagaactctgcggtacatgctatgg

SEQ ID NO: 5358968 - DNA, 25 bp, Homo sapien
tatggatggctgtaaactaggcgtg

SEQ ID NO: 5358969 - DNA, 25 bp, Homo sapien
ggtgccccaaaatccgatttctgac

SEQ ID NO: 5358970 - DNA, 25 bp, Homo sapien
ccatggtgccccaaaatccgatttc

SEQ ID NO: 5358971 - DNA, 25 bp, Homo sapien
gctgttgactggaactaactcctgt

SEQ ID NO: 5358972 - DNA, 25 bp, Homo sapien
tgctgttgactggaactaactcctg

SEQ ID NO: 5358973 - DNA, 25 bp, Homo sapien
gagtgggtgactataaccatcagca

SEQ ID NO: 5358974 - DNA, 25 bp, Homo sapien
gactataaccatcagcacagggaac

SEQ ID NO: 5358975 - DNA, 25 bp, Homo sapien
tgtcggacagagtgggtgactataa

SEQ ID NO: 5358976 - DNA, 25 bp, Homo sapien
cagagagggtgaccgtgaggcttcc

SEQ ID NO: 5358977 - DNA, 25 bp, Homo sapien
ccttcaggtcaaaccagccctcttg

SEQ ID NO: 5358978 - DNA, 25 bp, Homo sapien
aaacaggcctgtctggacggccacc

SEQ ID NO: 5358979 - DNA, 25 bp, Homo sapien
tggacattcagtagacccacacaca

SEQ ID NO: 5358980 - DNA, 25 bp, Homo sapien
taaggcacaacactaacaggaaaca

SEQ ID NO: 5358981 - DNA, 25 bp, Homo sapien
gcgagagattcttcagggcatcatc

SEQ ID NO: 5358982 - DNA, 25 bp, Homo sapien
cagacaaatattcggtccaggacaa

SEQ ID NO: 5358983 - DNA, 25 bp, Homo sapien
gttccaggcgctccatgtagaccag

SEQ ID NO: 5358984 - DNA, 25 bp, Homo sapien
gggcatcatccctgcagacgtttct

SEQ ID NO: 5358985 - DNA, 25 bp, Homo sapien
tcggtgagttaaagtccccttgctg

SEQ ID NO: 5358986 - DNA, 25 bp, Homo sapien
tacacacagaagttgctcagaggcc

SEQ ID NO: 5358987 - DNA, 25 bp, Homo sapien
ctgtaatgtgagaggccttgtgtgt

SEQ ID NO: 5358988 - DNA, 25 bp, Homo sapien
acagggagatgtgccagtacacaca

SEQ ID NO: 5358989 - DNA, 25 bp, Homo sapien
ccggccatatctatctcttaaagct

SEQ ID NO: 5358990 - DNA, 25 bp, Homo sapien
tgccaggaaatccatttatagggta

SEQ ID NO: 5358991 - DNA, 25 bp, Homo sapien
caggaaatccatttatagggtagtt

SEQ ID NO: 5358992 - DNA, 25 bp, Homo sapien
tatctatctcttaaagctacacaga

SEQ ID NO: 5358993 - DNA, 25 bp, Homo sapien
tggcactcaagaacagcgcatcagg

SEQ ID NO: 5358994 - DNA, 25 bp, Homo sapien
taaccctgatcatggatggcactca

SEQ ID NO: 5358995 - DNA, 25 bp, Homo sapien
cgagaggcccctttgcagagtggcc

SEQ ID NO: 5358996 - DNA, 25 bp, Homo sapien
tgctcttacaagaacgggtctcgtt

SEQ ID NO: 5358997 - DNA, 25 bp, Homo sapien
ttgttgcgacactttgccaaaggct

SEQ ID NO: 5358998 - DNA, 25 bp, Homo sapien
tccatcaatgtcctacgagaagtaa

SEQ ID NO: 5358999 - DNA, 25 bp, Homo sapien
catccttgagggaaccttgttgcga

SEQ ID NO: 5359000 - DNA, 25 bp, Homo sapien
tgggatgcctcaacctaaaagcaac

SEQ ID NO: 5359001 - DNA, 25 bp, Homo sapien
tctacggcttgattctgggctaaaa

SEQ ID NO: 5359002 - DNA, 25 bp, Homo sapien
cactgtgacccatggataggagctg

SEQ ID NO: 5359003 - DNA, 25 bp, Homo sapien
ggagctgtcccaacctctacggctt

SEQ ID NO: 5359004 - DNA, 25 bp, Homo sapien
atatttttagggctcgctgtaccca

SEQ ID NO: 5359005 - DNA, 25 bp, Homo sapien
gcagacgtgatgacaagcggaacca

SEQ ID NO: 5359006 - DNA, 25 bp, Homo sapien
ggaaaaggctctaacgcagacgtga

SEQ ID NO: 5359007 - DNA, 25 bp, Homo sapien
caagggtgccgtgttcaagaggaca

SEQ ID NO: 5359008 - DNA, 25 bp, Homo sapien
gaatttaggtgcacaagaagcctgc

SEQ ID NO: 5359009 - DNA, 25 bp, Homo sapien
tcagttcctcaggaatgtgcttctc

SEQ ID NO: 5359010 - DNA, 25 bp, Homo sapien
gttcctcaggaatgtgcttctcttc

SEQ ID NO: 5359011 - DNA, 25 bp, Homo sapien
cttccggcatggttgtcaggaacag

SEQ ID NO: 5359012 - DNA, 25 bp, Homo sapien
cctcacttccggcatggttgtcagg

SEQ ID NO: 5359013 - DNA, 25 bp, Homo sapien
taatcaaaaacaccgtgaacgtgtg

SEQ ID NO: 5359014 - DNA, 25 bp, Homo sapien
gaacgtgtgtgaaataaactccaac

SEQ ID NO: 5359015 - DNA, 25 bp, Homo sapien
aacatgtgagaagccctttatggcc

SEQ ID NO: 5359016 - DNA, 25 bp, Homo sapien
tggtcttgacacttcacaatgggct

SEQ ID NO: 5359017 - DNA, 25 bp, Homo sapien
gtgccagctcgcatcctgcatccag

SEQ ID NO: 5359018 - DNA, 25 bp, Homo sapien
cagcgtccttgtgcactggcaagat

SEQ ID NO: 5359019 - DNA, 25 bp, Homo sapien
gcatccagaactcagctggcggata

SEQ ID NO: 5359020 - DNA, 25 bp, Homo sapien
tggcggatatccaccttcaggatcc

SEQ ID NO: 5359021 - DNA, 25 bp, Homo sapien
caggaggtgtaggacatcgggcagt

SEQ ID NO: 5359022 - DNA, 25 bp, Homo sapien
ggacatcgggcagtccttgacacag

SEQ ID NO: 5359023 - DNA, 25 bp, Homo sapien
cagtccttgacacagccagggacat

SEQ ID NO: 5359024 - DNA, 25 bp, Homo sapien
atcgggcagtccttgacacagccag

SEQ ID NO: 5359025 - DNA, 25 bp, Homo sapien
tttggacatatccagcactccacag

SEQ ID NO: 5359026 - DNA, 25 bp, Homo sapien
ctctttggacatatccagcactcca

SEQ ID NO: 5359027 - DNA, 25 bp, Homo sapien
tctttggacatatccagcactccac

SEQ ID NO: 5359028 - DNA, 25 bp, Homo sapien
tggacatatccagcactccacagac

SEQ ID NO: 5359029 - DNA, 25 bp, Homo sapien
tagataagcaaatgacaagagcacg

SEQ ID NO: 5359030 - DNA, 25 bp, Homo sapien
aagagcacgaagtagaatcagcatt

SEQ ID NO: 5359031 - DNA, 25 bp, Homo sapien
ccaatttggcgctctttatccgtcc

SEQ ID NO: 5359032 - DNA, 25 bp, Homo sapien
gaatgcctacgttcagtaaaggaga

SEQ ID NO: 5359033 - DNA, 25 bp, Homo sapien
aagagaattcccaactgcgagcctg

SEQ ID NO: 5359034 - DNA, 25 bp, Homo sapien
tgaccttcaaacatgtggccaccac

SEQ ID NO: 5359035 - DNA, 25 bp, Homo sapien
gcagttgaggctgcacctctcatga

SEQ ID NO: 5359036 - DNA, 25 bp, Homo sapien
ccacacgggcatgccaagcagttga

SEQ ID NO: 5359037 - DNA, 25 bp, Homo sapien
acccaaaagcatgcggccagcagaa

SEQ ID NO: 5359038 - DNA, 25 bp, Homo sapien
atcacccaaaagcatgcggccagca

SEQ ID NO: 5359039 - DNA, 25 bp, Homo sapien
atgaacttgctagccaccatgaaca

SEQ ID NO: 5359040 - DNA, 25 bp, Homo sapien
tctgggtctttaaaggtcaacgtga

SEQ ID NO: 5359041 - DNA, 25 bp, Homo sapien
gttgtcacaccgcagccattcactg

SEQ ID NO: 5359042 - DNA, 25 bp, Homo sapien
ttcttgtacactcggggtaagcagg

SEQ ID NO: 5359043 - DNA, 25 bp, Homo sapien
tatctggctgtagagccccttgcag

SEQ ID NO: 5359044 - DNA, 25 bp, Homo sapien
cactgggcttcttgtacactcgggg

SEQ ID NO: 5359045 - DNA, 25 bp, Homo sapien
tgccagcatgcccatatctggctgt

SEQ ID NO: 5359046 - DNA, 25 bp, Homo sapien
ctctgttgtcatccttacaatttac

SEQ ID NO: 5359047 - DNA, 25 bp, Homo sapien
tctcaatctgcgtacagaaatttcc

SEQ ID NO: 5359048 - DNA, 25 bp, Homo sapien
ggtttctctcaatctgcgtacagaa

SEQ ID NO: 5359049 - DNA, 25 bp, Homo sapien
gtaaaggtttctctcaatctgcgta

SEQ ID NO: 5359050 - DNA, 25 bp, Homo sapien
ctgatgagctcacattctccttcac

SEQ ID NO: 5359051 - DNA, 25 bp, Homo sapien
tgagctcacattctccttcacgtac

SEQ ID NO: 5359052 - DNA, 25 bp, Homo sapien
tgatgagctcacattctccttcacg

SEQ ID NO: 5359053 - DNA, 25 bp, Homo sapien
gatgagctcacattctccttcacgt

SEQ ID NO: 5359054 - DNA, 25 bp, Homo sapien
tccttgctgtgtttcccctgaactg

SEQ ID NO: 5359055 - DNA, 25 bp, Homo sapien
ctgaggttcttggttcctcttgtca

SEQ ID NO: 5359056 - DNA, 25 bp, Homo sapien
cagcctggggctcacatttccttgc

SEQ ID NO: 5359057 - DNA, 25 bp, Homo sapien
tcccctgaactgaggttcttggttc

SEQ ID NO: 5359058 - DNA, 25 bp, Homo sapien
tatgacagtcctgccgctgagctaa

SEQ ID NO: 5359059 - DNA, 25 bp, Homo sapien
cctgccttgcagacttggaaagcaa

SEQ ID NO: 5359060 - DNA, 25 bp, Homo sapien
caacttcggacaggcctcctgacag

SEQ ID NO: 5359061 - DNA, 25 bp, Homo sapien
cagaacctggctgcactactttcca

SEQ ID NO: 5359062 - DNA, 25 bp, Homo sapien
tggctcgccaggacaaaacccgcgg

SEQ ID NO: 5359063 - DNA, 25 bp, Homo sapien
agaggggcccaggcgctgaaaccca

SEQ ID NO: 5359064 - DNA, 25 bp, Homo sapien
gagaggggcccaggcgctgaaaccc

SEQ ID NO: 5359065 - DNA, 25 bp, Homo sapien
gctcgtccgggtccttaggctcctc

SEQ ID NO: 5359066 - DNA, 25 bp, Homo sapien
cgctcgtccgggtccttaggctcct

SEQ ID NO: 5359067 - DNA, 25 bp, Homo sapien
tgggagctcgggaggcccgccccac

SEQ ID NO: 5359068 - DNA, 25 bp, Homo sapien
aagtaaggaagacgcccggcgcgct

SEQ ID NO: 5359069 - DNA, 25 bp, Homo sapien
cggcagcggaagtaaggaagacgcc

SEQ ID NO: 5359070 - DNA, 25 bp, Homo sapien
cggcggcagcggaagtaaggaagac

SEQ ID NO: 5359071 - DNA, 25 bp, Homo sapien
cagcggaagtaaggaagacgcccgg

SEQ ID NO: 5359072 - DNA, 25 bp, Homo sapien
agaacgccggcaccgcctcacgcgg

SEQ ID NO: 5359073 - DNA, 25 bp, Homo sapien
ttgggggccagaacgccggcaccgc

SEQ ID NO: 5359074 - DNA, 25 bp, Homo sapien
acgcggccccctcgcgcctatccgg

SEQ ID NO: 5359075 - DNA, 25 bp, Homo sapien
cctcgcgcctatccggccgtgcgcg

SEQ ID NO: 5359076 - DNA, 25 bp, Homo sapien
agacctgcggccggaacaagtcccg

SEQ ID NO: 5359077 - DNA, 25 bp, Homo sapien
ggaacaagtcccgctgggcctccat

SEQ ID NO: 5359078 - DNA, 25 bp, Homo sapien
ctgcggccggaacaagtcccgctgg

SEQ ID NO: 5359079 - DNA, 25 bp, Homo sapien
cgagacctgcggccggaacaagtcc

SEQ ID NO: 5359080 - DNA, 25 bp, Homo sapien
tgtagaactgtagggaccgcagcca

SEQ ID NO: 5359081 - DNA, 25 bp, Homo sapien
aagttgtagaactgtagggaccgca

SEQ ID NO: 5359082 - DNA, 25 bp, Homo sapien
ccagggtaaagttgtagaactgtag

SEQ ID NO: 5359083 - DNA, 25 bp, Homo sapien
gaactgtagggaccgcagccaggca

SEQ ID NO: 5359084 - DNA, 25 bp, Homo sapien
aattctggtcataaaaggctccttg

SEQ ID NO: 5359085 - DNA, 25 bp, Homo sapien
tgcatactgcctctctaaacgacga

SEQ ID NO: 5359086 - DNA, 25 bp, Homo sapien
tctaaacgacgaattctggtcataa

SEQ ID NO: 5359087 - DNA, 25 bp, Homo sapien
gaggagccagcaaagcttggtttgc

SEQ ID NO: 5359088 - DNA, 25 bp, Homo sapien
gagaatggctgagtctctgtgactt

SEQ ID NO: 5359089 - DNA, 25 bp, Homo sapien
aaggttttggtcatagagaatggct

SEQ ID NO: 5359090 - DNA, 25 bp, Homo sapien
gaaggttttggtcatagagaatggc

SEQ ID NO: 5359091 - DNA, 25 bp, Homo sapien
aggttttggtcatagagaatggctg

SEQ ID NO: 5359092 - DNA, 25 bp, Homo sapien
gctgaggtggataagcagcttgtct

SEQ ID NO: 5359093 - DNA, 25 bp, Homo sapien
gaaaaagtgattcaaaggggacatc

SEQ ID NO: 5359094 - DNA, 25 bp, Homo sapien
tcctgctgaggtggataagcagctt

SEQ ID NO: 5359095 - DNA, 25 bp, Homo sapien
ttgaaaaagtgattcaaaggggaca

SEQ ID NO: 5359096 - DNA, 25 bp, Homo sapien
gctctgtctacccacatgctcaagt

SEQ ID NO: 5359097 - DNA, 25 bp, Homo sapien
tgctcaagtctaccccacccttaag

SEQ ID NO: 5359098 - DNA, 25 bp, Homo sapien
gcctttttcttgtgccagggccttc

SEQ ID NO: 5359099 - DNA, 25 bp, Homo sapien
cttaagccgataccagcctttttct

SEQ ID NO: 5359100 - DNA, 25 bp, Homo sapien
atcctgaatgccaaacccaaagcct

SEQ ID NO: 5359101 - DNA, 25 bp, Homo sapien
gacatcctgaatgccaaacccaaag

SEQ ID NO: 5359102 - DNA, 25 bp, Homo sapien
tctgtttctaccctgtcgttgagcc

SEQ ID NO: 5359103 - DNA, 25 bp, Homo sapien
tcgttgagccctgatattttcctgg

SEQ ID NO: 5359104 - DNA, 25 bp, Homo sapien
cagcttcgatgcttctgagcccgct

SEQ ID NO: 5359105 - DNA, 25 bp, Homo sapien
tctccaacaccttattgacttctgt

SEQ ID NO: 5359106 - DNA, 25 bp, Homo sapien
cattttttcggtgcatgcatgcaga

SEQ ID NO: 5359107 - DNA, 25 bp, Homo sapien
catgtttgtattggtctgcttgggc

SEQ ID NO: 5359108 - DNA, 25 bp, Homo sapien
cagagctctggaggatgcaagtcca

SEQ ID NO: 5359109 - DNA, 25 bp, Homo sapien
tgttgaatagtaacagcacggactt

SEQ ID NO: 5359110 - DNA, 25 bp, Homo sapien
ctgaacatgtgtcgctaaaactgaa

SEQ ID NO: 5359111 - DNA, 25 bp, Homo sapien
tgccctagggatgtcctgaacatgt

SEQ ID NO: 5359112 - DNA, 25 bp, Homo sapien
agatcccacttgtagccatttctgc

SEQ ID NO: 5359113 - DNA, 25 bp, Homo sapien
gggaagatcccacttgtagccattt

SEQ ID NO: 5359114 - DNA, 25 bp, Homo sapien
agcagcagggctttggactttgtag

SEQ ID NO: 5359115 - DNA, 25 bp, Homo sapien
tgcaaagctagttctagtctgctgt

SEQ ID NO: 5359116 - DNA, 25 bp, Homo sapien
aggtctcctgcaaagctagttctag

SEQ ID NO: 5359117 - DNA, 25 bp, Homo sapien
ttggactttgtagaagctaggtctc

SEQ ID NO: 5359118 - DNA, 25 bp, Homo sapien
tcatgccaaatcctgtacgtgacag

SEQ ID NO: 5359119 - DNA, 25 bp, Homo sapien
ggaacaacacaaaagtcatgccaaa

SEQ ID NO: 5359120 - DNA, 25 bp, Homo sapien
cagggtcccgggatcttggtcttca

SEQ ID NO: 5359121 - DNA, 25 bp, Homo sapien
tcacatggacgatgccagggtcccg

SEQ ID NO: 5359122 - DNA, 25 bp, Homo sapien
ctccatgtcactgggtgttccaatg

SEQ ID NO: 5359123 - DNA, 25 bp, Homo sapien
cctgctccatgtcactgggtgttcc

SEQ ID NO: 5359124 - DNA, 25 bp, Homo sapien
tgttccaatgtcattggccagggac

SEQ ID NO: 5359125 - DNA, 25 bp, Homo sapien
tccaatgtcattggccagggacacc

SEQ ID NO: 5359126 - DNA, 25 bp, Homo sapien
ttcaaacctgaagattatctctctc

SEQ ID NO: 5359127 - DNA, 25 bp, Homo sapien
gaagacttcaaacctgaagattatc

SEQ ID NO: 5359128 - DNA, 25 bp, Homo sapien
gacttcaaacctgaagattatctct

SEQ ID NO: 5359129 - DNA, 25 bp, Homo sapien
cttcaaacctgaagattatctctct

SEQ ID NO: 5359130 - DNA, 25 bp, Homo sapien
ttctatgtccaagatcccataaggg

SEQ ID NO: 5359131 - DNA, 25 bp, Homo sapien
tcagctgaatctttacatacaggcc

SEQ ID NO: 5359132 - DNA, 25 bp, Homo sapien
gcagtagccatggaatcccacattt

SEQ ID NO: 5359133 - DNA, 25 bp, Homo sapien
gatgagagacaattcgacaaaagga

SEQ ID NO: 5359134 - DNA, 25 bp, Homo sapien
cacagcagtgaccagtgggggacac

SEQ ID NO: 5359135 - DNA, 25 bp, Homo sapien
aaggacacctggaagctgtcttctg

SEQ ID NO: 5359136 - DNA, 25 bp, Homo sapien
ggacacctggaagctgtcttctgtg

SEQ ID NO: 5359137 - DNA, 25 bp, Homo sapien
aggacacctggaagctgtcttctgt

SEQ ID NO: 5359138 - DNA, 25 bp, Homo sapien
cccaagccaaactgtatgcagcttt

SEQ ID NO: 5359139 - DNA, 25 bp, Homo sapien
ttttcccaagccaaactgtatgcag

SEQ ID NO: 5359140 - DNA, 25 bp, Homo sapien
ttcccaagccaaactgtatgcagct

SEQ ID NO: 5359141 - DNA, 25 bp, Homo sapien
ttttttcccaagccaaactgtatgc

SEQ ID NO: 5359142 - DNA, 25 bp, Homo sapien
ctgaatagggaaagtttggagtgag

SEQ ID NO: 5359143 - DNA, 25 bp, Homo sapien
acaagccgaccctgactttcagaaa

SEQ ID NO: 5359144 - DNA, 25 bp, Homo sapien
ggtagaatttatctgaagatccaca

SEQ ID NO: 5359145 - DNA, 25 bp, Homo sapien
gccgaccctgactttcagaaagtga

SEQ ID NO: 5359146 - DNA, 25 bp, Homo sapien
ctgctctgtcttggcatctccactt

SEQ ID NO: 5359147 - DNA, 25 bp, Homo sapien
ctctgtcttggcatctccactttct

SEQ ID NO: 5359148 - DNA, 25 bp, Homo sapien
gctctgtcttggcatctccactttc

SEQ ID NO: 5359149 - DNA, 25 bp, Homo sapien
gcctgctctgtcttggcatctccac

SEQ ID NO: 5359150 - DNA, 25 bp, Homo sapien
ctctttcttctttgcagaggccttt

SEQ ID NO: 5359151 - DNA, 25 bp, Homo sapien
cttgggtttgtctcctttagcatcc

SEQ ID NO: 5359152 - DNA, 25 bp, Homo sapien
ttctctttcttctttgcagaggcct

SEQ ID NO: 5359153 - DNA, 25 bp, Homo sapien
tcgtccttcaccttgggtttgtctc

SEQ ID NO: 5359154 - DNA, 25 bp, Homo sapien
ggatgcagcggcccgtgggcttggt

SEQ ID NO: 5359155 - DNA, 25 bp, Homo sapien
cgacggtggcaggacgtaggcgctg

SEQ ID NO: 5359156 - DNA, 25 bp, Homo sapien
gatgcagcggcccgtgggcttggtc

SEQ ID NO: 5359157 - DNA, 25 bp, Homo sapien
gacggtggcaggacgtaggcgctgg

SEQ ID NO: 5359158 - DNA, 25 bp, Homo sapien
ggtccctgcacatggcacatagttg

SEQ ID NO: 5359159 - DNA, 25 bp, Homo sapien
catggcacatagttggtgctcagaa

SEQ ID NO: 5359160 - DNA, 25 bp, Homo sapien
tctgcatgcacatggtccctgcaca

SEQ ID NO: 5359161 - DNA, 25 bp, Homo sapien
catagttggtgctcagaaggccttt

SEQ ID NO: 5359162 - DNA, 25 bp, Homo sapien
aatccacaatgagtactgagacgac

SEQ ID NO: 5359163 - DNA, 25 bp, Homo sapien
tgaaggcacctaggagtagggcctg

SEQ ID NO: 5359164 - DNA, 25 bp, Homo sapien
agtactgagacgaccggcaaaagcc

SEQ ID NO: 5359165 - DNA, 25 bp, Homo sapien
gagacgaccggcaaaagcccggtga

SEQ ID NO: 5359166 - DNA, 25 bp, Homo sapien
ctaagagcaggtttgaggcagggat

SEQ ID NO: 5359167 - DNA, 25 bp, Homo sapien
tgcagttggcccgttcaggtagaga

SEQ ID NO: 5359168 - DNA, 25 bp, Homo sapien
cttgtttgtcctggccaccgttagg

SEQ ID NO: 5359169 - DNA, 25 bp, Homo sapien
ccaccgttaggaaacagcggaggtg

SEQ ID NO: 5359170 - DNA, 25 bp, Homo sapien
cctgaacaggcggcttttgctctcc

SEQ ID NO: 5359171 - DNA, 25 bp, Homo sapien
cccaacctgaacaggcggcttttgc

SEQ ID NO: 5359172 - DNA, 25 bp, Homo sapien
tctgatgcccaacagacctgaagtt

SEQ ID NO: 5359173 - DNA, 25 bp, Homo sapien
aacctgaacaggcggcttttgctct

SEQ ID NO: 5359174 - DNA, 25 bp, Homo sapien
gatcagcgctttcatcagaataggg

SEQ ID NO: 5359175 - DNA, 25 bp, Homo sapien
tcatcagaatagggccctactgtgt

SEQ ID NO: 5359176 - DNA, 25 bp, Homo sapien
atctttgcacgtttgatctttgtgt

SEQ ID NO: 5359177 - DNA, 25 bp, Homo sapien
tatctcagcatcagatcagcgcttt

SEQ ID NO: 5359178 - DNA, 25 bp, Homo sapien
tcccagggaacagtgctctcctgac

SEQ ID NO: 5359179 - DNA, 25 bp, Homo sapien
ctcccagggaacagtgctctcctga

SEQ ID NO: 5359180 - DNA, 25 bp, Homo sapien
gctctcctgaccttgagctcctcct

SEQ ID NO: 5359181 - DNA, 25 bp, Homo sapien
aacagtgctctcctgaccttgagct

SEQ ID NO: 5359182 - DNA, 25 bp, Homo sapien
cagagaccagcggtttacgacagag

SEQ ID NO: 5359183 - DNA, 25 bp, Homo sapien
tcagcggaagcttctaatgaggaaa

SEQ ID NO: 5359184 - DNA, 25 bp, Homo sapien
gctcagcagggcaagctacaagtta

SEQ ID NO: 5359185 - DNA, 25 bp, Homo sapien
gagcccttggcagaattgttatcct

SEQ ID NO: 5359186 - DNA, 25 bp, Homo sapien
tagtggcccaggagtcatttgcaaa

SEQ ID NO: 5359187 - DNA, 25 bp, Homo sapien
gcaaaaactctaggtggacacatcc

SEQ ID NO: 5359188 - DNA, 25 bp, Homo sapien
tcttgcccaggcatcaggatggtac

SEQ ID NO: 5359189 - DNA, 25 bp, Homo sapien
gatggtactaaaactgcctgccagg

SEQ ID NO: 5359190 - DNA, 25 bp, Homo sapien
tttggtcgtgattcttgaccaggcc

SEQ ID NO: 5359191 - DNA, 25 bp, Homo sapien
gagcctctcctgtcaacaggagcta

SEQ ID NO: 5359192 - DNA, 25 bp, Homo sapien
ggcgttgatgaagaggagcctctcc

SEQ ID NO: 5359193 - DNA, 25 bp, Homo sapien
tgctattgccaatactccaggcctc

SEQ ID NO: 5359194 - DNA, 25 bp, Homo sapien
agatgcaaaacatgcaaagggtctc

SEQ ID NO: 5359195 - DNA, 25 bp, Homo sapien
ctaagagatgcaaaacatgcaaagg

SEQ ID NO: 5359196 - DNA, 25 bp, Homo sapien
tgcaaaacatgcaaagggtctcatt

SEQ ID NO: 5359197 - DNA, 25 bp, Homo sapien
aaaacatgcaaagggtctcatttgc

SEQ ID NO: 5359198 - DNA, 25 bp, Homo sapien
aaaggcgctgcacagagagccgcat

SEQ ID NO: 5359199 - DNA, 25 bp, Homo sapien
aatcttcagaaaggcgctgcacaga

SEQ ID NO: 5359200 - DNA, 25 bp, Homo sapien
catgggaacagtctgaatcttcaga

SEQ ID NO: 5359201 - DNA, 25 bp, Homo sapien
ttcagaaaggcgctgcacagagagc

SEQ ID NO: 5359202 - DNA, 25 bp, Homo sapien
tgagtcaggtaggagagttaagtct

SEQ ID NO: 5359203 - DNA, 25 bp, Homo sapien
tctgggcttagagctagttacaggc

SEQ ID NO: 5359204 - DNA, 25 bp, Homo sapien
aaatgtcttagcttctgttctgggc

SEQ ID NO: 5359205 - DNA, 25 bp, Homo sapien
aaggcgcttgctcttgtggctcccg

SEQ ID NO: 5359206 - DNA, 25 bp, Homo sapien
ggccttgagagccgcttcacagaac

SEQ ID NO: 5359207 - DNA, 25 bp, Homo sapien
ccttgagagccgcttcacagaacct

SEQ ID NO: 5359208 - DNA, 25 bp, Homo sapien
gagagaagaagggaccctctgatgc

SEQ ID NO: 5359209 - DNA, 25 bp, Homo sapien
caaaaggcatcagtgtgggagagaa

SEQ ID NO: 5359210 - DNA, 25 bp, Homo sapien
cagagtgtggggatattagggtagg

SEQ ID NO: 5359211 - DNA, 25 bp, Homo sapien
cctggagcaagacaagctgggtgac

SEQ ID NO: 5359212 - DNA, 25 bp, Homo sapien
agccctgcctggagcaagacaagct

SEQ ID NO: 5359213 - DNA, 25 bp, Homo sapien
gatattagggtagggcagccctgcc

SEQ ID NO: 5359214 - DNA, 25 bp, Homo sapien
ttcccaagtgtcctcgtggtctgaa

SEQ ID NO: 5359215 - DNA, 25 bp, Homo sapien
tcgtggtctgaaaacagagcagagg

SEQ ID NO: 5359216 - DNA, 25 bp, Homo sapien
tgcttccacagctgatgaaatttct

SEQ ID NO: 5359217 - DNA, 25 bp, Homo sapien
tctgagtagggcaagcgaagagaac

SEQ ID NO: 5359218 - DNA, 25 bp, Homo sapien
tctgccagtaatgctcagaggactg

SEQ ID NO: 5359219 - DNA, 25 bp, Homo sapien
tgtgcccatttcagggaggtctgcc

SEQ ID NO: 5359220 - DNA, 25 bp, Homo sapien
ccccttgggagtggtgttagtgcat

SEQ ID NO: 5359221 - DNA, 25 bp, Homo sapien
tgcccaagccactccaatagctggt

SEQ ID NO: 5359222 - DNA, 25 bp, Homo sapien
aatctggcccctcttaatagtaaca

SEQ ID NO: 5359223 - DNA, 25 bp, Homo sapien
tagtaacagggctttccagtttata

SEQ ID NO: 5359224 - DNA, 25 bp, Homo sapien
aagtaccatggcatttattttggca

SEQ ID NO: 5359225 - DNA, 25 bp, Homo sapien
aaagtaccatggcatttattttggc

SEQ ID NO: 5359226 - DNA, 25 bp, Homo sapien
taaatgctcgatcacaaaaatcaca

SEQ ID NO: 5359227 - DNA, 25 bp, Homo sapien
ttccataagcgtcaagattgtcagt

SEQ ID NO: 5359228 - DNA, 25 bp, Homo sapien
tgtcccagcacctgaccatttaact

SEQ ID NO: 5359229 - DNA, 25 bp, Homo sapien
agttctcttacgaagtgtcccagca

SEQ ID NO: 5359230 - DNA, 25 bp, Homo sapien
tctttcaggcgagattggcaattcc

SEQ ID NO: 5359231 - DNA, 25 bp, Homo sapien
tcagatgattgtgttgttgaccttc

SEQ ID NO: 5359232 - DNA, 25 bp, Homo sapien
cctctagcctaacatcagatgattg

SEQ ID NO: 5359233 - DNA, 25 bp, Homo sapien
cagagccggctgttcttacctctag

SEQ ID NO: 5359234 - DNA, 25 bp, Homo sapien
gagagtcaaaatcgccttttaacga

SEQ ID NO: 5359235 - DNA, 25 bp, Homo sapien
ggagactatggggactggggcactg

SEQ ID NO: 5359236 - DNA, 25 bp, Homo sapien
ctgatctcccctccagattcttccc

SEQ ID NO: 5359237 - DNA, 25 bp, Homo sapien
attcttcccttgtggctactctccc

SEQ ID NO: 5359238 - DNA, 25 bp, Homo sapien
tttcaggcccagagcctgccagttc

SEQ ID NO: 5359239 - DNA, 25 bp, Homo sapien
catttcaggcccagagcctgccagt

SEQ ID NO: 5359240 - DNA, 25 bp, Homo sapien
ccccacatttcaggcccagagcctg

SEQ ID NO: 5359241 - DNA, 25 bp, Homo sapien
tcaggcccagagcctgccagttcat

SEQ ID NO: 5359242 - DNA, 25 bp, Homo sapien
tagagactttgactaacaccggaaa

SEQ ID NO: 5359243 - DNA, 25 bp, Homo sapien
tgactaacaccggaaaactaatctc

SEQ ID NO: 5359244 - DNA, 25 bp, Homo sapien
tgagtagagactttgactaacaccg

SEQ ID NO: 5359245 - DNA, 25 bp, Homo sapien
ggaaaactaatctctgcagccttaa

SEQ ID NO: 5359246 - DNA, 25 bp, Homo sapien
agtgagcaacaccaaggtgggtccc

SEQ ID NO: 5359247 - DNA, 25 bp, Homo sapien
tctggccaaccagccttaaggtgcc

SEQ ID NO: 5359248 - DNA, 25 bp, Homo sapien
aggtgccccgatccagtgagcaaca

SEQ ID NO: 5359249 - DNA, 25 bp, Homo sapien
gaacatcgccactgccgcaacaggg

SEQ ID NO: 5359250 - DNA, 25 bp, Homo sapien
gaggaaatgagtttcaaggtttgaa

SEQ ID NO: 5359251 - DNA, 25 bp, Homo sapien
gagtttcaaggtttgaaaggccaca

SEQ ID NO: 5359252 - DNA, 25 bp, Homo sapien
gaagtaagcaagaatcactcccctg

SEQ ID NO: 5359253 - DNA, 25 bp, Homo sapien
cactcccctgtgttatccggttgca

SEQ ID NO: 5359254 - DNA, 25 bp, Homo sapien
cccagcaaagcatatcttgggagct

SEQ ID NO: 5359255 - DNA, 25 bp, Homo sapien
tccccagcaaagcatatcttgggag

SEQ ID NO: 5359256 - DNA, 25 bp, Homo sapien
ccccagcaaagcatatcttgggagc

SEQ ID NO: 5359257 - DNA, 25 bp, Homo sapien
gatggccaccctgttctatggccga

SEQ ID NO: 5359258 - DNA, 25 bp, Homo sapien
tgctgcaatggcctgtgcgccatta

SEQ ID NO: 5359259 - DNA, 25 bp, Homo sapien
tctatggccgatactgctgcaatgg

SEQ ID NO: 5359260 - DNA, 25 bp, Homo sapien
tgcgccattagtcacacactcagag

SEQ ID NO: 5359261 - DNA, 25 bp, Homo sapien
taaattgcatgccagcgacatctcc

SEQ ID NO: 5359262 - DNA, 25 bp, Homo sapien
tgtttcggcagtcatgcctgctgct

SEQ ID NO: 5359263 - DNA, 25 bp, Homo sapien
ggcagagcccagtcttgtttcggca

SEQ ID NO: 5359264 - DNA, 25 bp, Homo sapien
tattttgcttggcaggcgctgagcc

SEQ ID NO: 5359265 - DNA, 25 bp, Homo sapien
gcagaggataggcacatttggtggc

SEQ ID NO: 5359266 - DNA, 25 bp, Homo sapien
gaggataggcacatttggtggcctc

SEQ ID NO: 5359267 - DNA, 25 bp, Homo sapien
cagaggataggcacatttggtggcc

SEQ ID NO: 5359268 - DNA, 25 bp, Homo sapien
agaggataggcacatttggtggcct

SEQ ID NO: 5359269 - DNA, 25 bp, Homo sapien
gcacaaggtcccccggctctggctc

SEQ ID NO: 5359270 - DNA, 25 bp, Homo sapien
tccgcacaaggtcccccggctctgg

SEQ ID NO: 5359271 - DNA, 25 bp, Homo sapien
acaaggtcccccggctctggctccg

SEQ ID NO: 5359272 - DNA, 25 bp, Homo sapien
ctccgcacaaggtcccccggctctg

SEQ ID NO: 5359273 - DNA, 25 bp, Homo sapien
agtgcagagtgctccggctctcaca

SEQ ID NO: 5359274 - DNA, 25 bp, Homo sapien
tggcaagccccagacagtgcagagt

SEQ ID NO: 5359275 - DNA, 25 bp, Homo sapien
gtgctccggctctcacaggttctgt

SEQ ID NO: 5359276 - DNA, 25 bp, Homo sapien
ctggcaagccccagacagtgcagag

SEQ ID NO: 5359277 - DNA, 25 bp, Homo sapien
tgttgaactaataattgaaggaccc

SEQ ID NO: 5359278 - DNA, 25 bp, Homo sapien
gactgcggcaggtttctgtccactg

SEQ ID NO: 5359279 - DNA, 25 bp, Homo sapien
aattgaaggacccactatccccgtg

SEQ ID NO: 5359280 - DNA, 25 bp, Homo sapien
tgtaaatacagtctccactggaagt

SEQ ID NO: 5359281 - DNA, 25 bp, Homo sapien
caaatagtccccgtcagtagaagtc

SEQ ID NO: 5359282 - DNA, 25 bp, Homo sapien
cagcatcatacgtccacataggtca

SEQ ID NO: 5359283 - DNA, 25 bp, Homo sapien
tgaagaccttttagaagcagacagc

SEQ ID NO: 5359284 - DNA, 25 bp, Homo sapien
cataggtcacgggacaaacagtgct

SEQ ID NO: 5359285 - DNA, 25 bp, Homo sapien
tgaatcccctgcacctcatgtaggg

SEQ ID NO: 5359286 - DNA, 25 bp, Homo sapien
agcatgctgattctcagctgccagg

SEQ ID NO: 5359287 - DNA, 25 bp, Homo sapien
tgtgattctcatgaccaagctgggc

SEQ ID NO: 5359288 - DNA, 25 bp, Homo sapien
tcatgtagggtaggcacatcggcat

SEQ ID NO: 5359289 - DNA, 25 bp, Homo sapien
gctgctattgctgtaccagttcagg

SEQ ID NO: 5359290 - DNA, 25 bp, Homo sapien
tggtgcgctccagtgtgcgccacat

SEQ ID NO: 5359291 - DNA, 25 bp, Homo sapien
gggagtcatgttcccggtgctctgt

SEQ ID NO: 5359292 - DNA, 25 bp, Homo sapien
tgacggttgccatgttgtacctgcc

SEQ ID NO: 5359293 - DNA, 25 bp, Homo sapien
tggtatatacacagtccctcggtgg

SEQ ID NO: 5359294 - DNA, 25 bp, Homo sapien
gttggttagccttccaactgtgcag

SEQ ID NO: 5359295 - DNA, 25 bp, Homo sapien
tctcgccatgcctggtctagtagca

SEQ ID NO: 5359296 - DNA, 25 bp, Homo sapien
gagttgttggttagccttccaactg

SEQ ID NO: 5359297 - DNA, 25 bp, Homo sapien
ctccccagaagaacgttgctgctgg

SEQ ID NO: 5359298 - DNA, 25 bp, Homo sapien
tctccccagaagaacgttgctgctg

SEQ ID NO: 5359299 - DNA, 25 bp, Homo sapien
tccccagaagaacgttgctgctggt

SEQ ID NO: 5359300 - DNA, 25 bp, Homo sapien
ggggtgctagtgcaggagacaccat

SEQ ID NO: 5359301 - DNA, 25 bp, Homo sapien
tggatgggcccctgcctggcaatga

SEQ ID NO: 5359302 - DNA, 25 bp, Homo sapien
tgcttaagagacctggatgggcccc

SEQ ID NO: 5359303 - DNA, 25 bp, Homo sapien
cccaggaaacaatgggggtgctagt

SEQ ID NO: 5359304 - DNA, 25 bp, Homo sapien
tctctttctctgatgagtcctgaag

SEQ ID NO: 5359305 - DNA, 25 bp, Homo sapien
gcttctctttctctgatgagtcctg

SEQ ID NO: 5359306 - DNA, 25 bp, Homo sapien
tctttctctgatgagtcctgaagag

SEQ ID NO: 5359307 - DNA, 25 bp, Homo sapien
cttctctttctctgatgagtcctga

SEQ ID NO: 5359308 - DNA, 25 bp, Homo sapien
gctctctgccgtgagtagcataaga

SEQ ID NO: 5359309 - DNA, 25 bp, Homo sapien
tagcataagataaggaaggctgggt

SEQ ID NO: 5359310 - DNA, 25 bp, Homo sapien
gcctgaatcgccttatctctctgtg

SEQ ID NO: 5359311 - DNA, 25 bp, Homo sapien
tccagagaatccataagaatgaggc

SEQ ID NO: 5359312 - DNA, 25 bp, Homo sapien
atagaacagctcgtttttatttact

SEQ ID NO: 5359313 - DNA, 25 bp, Homo sapien
ccagaaatagaacagctcgttttta

SEQ ID NO: 5359314 - DNA, 25 bp, Homo sapien
gaaccagaaatagaacagctcgttt

SEQ ID NO: 5359315 - DNA, 25 bp, Homo sapien
gaagaaccagaaatagaacagctcg

SEQ ID NO: 5359316 - DNA, 25 bp, Homo sapien
ttgagcaggaggtcactgtgcggcg

SEQ ID NO: 5359317 - DNA, 25 bp, Homo sapien
tgccttctttagcttcagcaggttt

SEQ ID NO: 5359318 - DNA, 25 bp, Homo sapien
agtttggtgtccgtgctcgactcca

SEQ ID NO: 5359319 - DNA, 25 bp, Homo sapien
tgcatgccggagtaggaaaccactc

SEQ ID NO: 5359320 - DNA, 25 bp, Homo sapien
aaccctctaatgcaaccttctggta

SEQ ID NO: 5359321 - DNA, 25 bp, Homo sapien
gcaaccttctggtagccgctttata

SEQ ID NO: 5359322 - DNA, 25 bp, Homo sapien
gtagccgctttataccctggacaat

SEQ ID NO: 5359323 - DNA, 25 bp, Homo sapien
cctggacaatcttctctccacagcc

SEQ ID NO: 5359324 - DNA, 25 bp, Homo sapien
ttgaggaactggacgacaggtcagc

SEQ ID NO: 5359325 - DNA, 25 bp, Homo sapien
ggaactggacgacaggtcagcacag

SEQ ID NO: 5359326 - DNA, 25 bp, Homo sapien
gaggaactggacgacaggtcagcac

SEQ ID NO: 5359327 - DNA, 25 bp, Homo sapien
aactggacgacaggtcagcacagcc

SEQ ID NO: 5359328 - DNA, 25 bp, Homo sapien
gaagtgattctgtcctaagctgttc

SEQ ID NO: 5359329 - DNA, 25 bp, Homo sapien
tctgtcctaagctgttcctgagagg

SEQ ID NO: 5359330 - DNA, 25 bp, Homo sapien
ttcctgagaggagtaggaaatgctg

SEQ ID NO: 5359331 - DNA, 25 bp, Homo sapien
aggaaatgctgggatcggccaggtg

SEQ ID NO: 5359332 - DNA, 25 bp, Homo sapien
cagctctgcaggtataaaaggtgta

SEQ ID NO: 5359333 - DNA, 25 bp, Homo sapien
tagcctccagtggtaccgaggagga

SEQ ID NO: 5359334 - DNA, 25 bp, Homo sapien
tttctttgctcagttagcctccagt

SEQ ID NO: 5359335 - DNA, 25 bp, Homo sapien
gggcccgtgattctgaacagttttc

SEQ ID NO: 5359336 - DNA, 25 bp, Homo sapien
cctgggtgcggtgtcaggcccaagg

SEQ ID NO: 5359337 - DNA, 25 bp, Homo sapien
ggcccaaggtgaatggagacagtgc

SEQ ID NO: 5359338 - DNA, 25 bp, Homo sapien
ggtgcccacgatttcagcacctgca

SEQ ID NO: 5359339 - DNA, 25 bp, Homo sapien
acctgcaggcccacatgtggttttc

SEQ ID NO: 5359340 - DNA, 25 bp, Homo sapien
tggagtttgatctcagctgttggtg

SEQ ID NO: 5359341 - DNA, 25 bp, Homo sapien
tgcttttagctcagaacgcttcaag

SEQ ID NO: 5359342 - DNA, 25 bp, Homo sapien
cagaacgcttcaagcttttggagta

SEQ ID NO: 5359343 - DNA, 25 bp, Homo sapien
tctatagatgcttttagctcagaac

SEQ ID NO: 5359344 - DNA, 25 bp, Homo sapien
tggaaagttcttatagacacaaatc

SEQ ID NO: 5359345 - DNA, 25 bp, Homo sapien
gagattcctgtatcatacttgggag

SEQ ID NO: 5359346 - DNA, 25 bp, Homo sapien
tagggtgtgatcttccaggatcata

SEQ ID NO: 5359347 - DNA, 25 bp, Homo sapien
tctggatgaagccttgagtgtttgc

SEQ ID NO: 5359348 - DNA, 25 bp, Homo sapien
gggtttccctgcacacttaaatcta

SEQ ID NO: 5359349 - DNA, 25 bp, Homo sapien
tcatctagaccattccgctggaagc

SEQ ID NO: 5359350 - DNA, 25 bp, Homo sapien
atctacgtgtaacccaagtttatag

SEQ ID NO: 5359351 - DNA, 25 bp, Homo sapien
gctgctccatgagcaagatgccttt

SEQ ID NO: 5359352 - DNA, 25 bp, Homo sapien
ctttgctctaaagcaaggttgtgga

SEQ ID NO: 5359353 - DNA, 25 bp, Homo sapien
taggaagacatttgaattgttacat

SEQ ID NO: 5359354 - DNA, 25 bp, Homo sapien
ttactttgctctaaagcaaggttgt

SEQ ID NO: 5359355 - DNA, 25 bp, Homo sapien
tgtaggaagacatttgaattgttac

SEQ ID NO: 5359356 - DNA, 25 bp, Homo sapien
agccttctggcacacatctgttggc

SEQ ID NO: 5359357 - DNA, 25 bp, Homo sapien
gtggaggtatgagggcgcagatctg

SEQ ID NO: 5359358 - DNA, 25 bp, Homo sapien
gtatgagggcgcagatctgaaaacc

SEQ ID NO: 5359359 - DNA, 25 bp, Homo sapien
ccaggtggagccgttcagccttctg

SEQ ID NO: 5359360 - DNA, 25 bp, Homo sapien
cactaaagtttttgctgtgagggtc

SEQ ID NO: 5359361 - DNA, 25 bp, Homo sapien
tctgtgttccctttcgttatgggga

SEQ ID NO: 5359362 - DNA, 25 bp, Homo sapien
cacactaaagtttttgctgtgaggg

SEQ ID NO: 5359363 - DNA, 25 bp, Homo sapien
ctaaagtttttgctgtgagggtctc

SEQ ID NO: 5359364 - DNA, 25 bp, Homo sapien
ttccagctggcttctgacgtgtccg

SEQ ID NO: 5359365 - DNA, 25 bp, Homo sapien
tctcacctcagattccctacaggta

SEQ ID NO: 5359366 - DNA, 25 bp, Homo sapien
gctggcttctgacgtgtccgcatca

SEQ ID NO: 5359367 - DNA, 25 bp, Homo sapien
ctgacgtgtccgcatcattctttga

SEQ ID NO: 5359368 - DNA, 25 bp, Homo sapien
caggtattgaatcaggctgtcctgg

SEQ ID NO: 5359369 - DNA, 25 bp, Homo sapien
cacaacagatatgaaagcctttggg

SEQ ID NO: 5359370 - DNA, 25 bp, Homo sapien
agcctttgggcatgttttctgggtc

SEQ ID NO: 5359371 - DNA, 25 bp, Homo sapien
tccctttgcaatgcttggcagatgc

SEQ ID NO: 5359372 - DNA, 25 bp, Homo sapien
ctgaaacacgcattgggcctggctt

SEQ ID NO: 5359373 - DNA, 25 bp, Homo sapien
aaacacgcattgggcctggcttttg

SEQ ID NO: 5359374 - DNA, 25 bp, Homo sapien
tgaaacacgcattgggcctggcttt

SEQ ID NO: 5359375 - DNA, 25 bp, Homo sapien
gaaacacgcattgggcctggctttt

SEQ ID NO: 5359376 - DNA, 25 bp, Homo sapien
gctcttccttttacgggagttgctc

SEQ ID NO: 5359377 - DNA, 25 bp, Homo sapien
ttgtacgcctcccattttgtgtcct

SEQ ID NO: 5359378 - DNA, 25 bp, Homo sapien
ccacttcctgttgatgagctcttcc

SEQ ID NO: 5359379 - DNA, 25 bp, Homo sapien
gggacgtatgtgagtgaccctcttc

SEQ ID NO: 5359380 - DNA, 25 bp, Homo sapien
tgaggcaccaaggaacatggcattg

SEQ ID NO: 5359381 - DNA, 25 bp, Homo sapien
caccaaggaacatggcattgaaaaa

SEQ ID NO: 5359382 - DNA, 25 bp, Homo sapien
cttgggacacgtgggaagtgtcttc

SEQ ID NO: 5359383 - DNA, 25 bp, Homo sapien
tgggacacgtgggaagtgtcttcct

SEQ ID NO: 5359384 - DNA, 25 bp, Homo sapien
tgctgacatagtctactttgtagga

SEQ ID NO: 5359385 - DNA, 25 bp, Homo sapien
tctactttgtaggacacctttgctc

SEQ ID NO: 5359386 - DNA, 25 bp, Homo sapien
agtcgggtaacctggccacaccaat

SEQ ID NO: 5359387 - DNA, 25 bp, Homo sapien
ggacacctttgctcaagtcgggtaa

SEQ ID NO: 5359388 - DNA, 25 bp, Homo sapien
ctagagcatcctgtatccaggcctt

SEQ ID NO: 5359389 - DNA, 25 bp, Homo sapien
cttccctagagcatcctgtatccag

SEQ ID NO: 5359390 - DNA, 25 bp, Homo sapien
gagcatcctgtatccaggccttcac

SEQ ID NO: 5359391 - DNA, 25 bp, Homo sapien
ttccctagagcatcctgtatccagg

SEQ ID NO: 5359392 - DNA, 25 bp, Homo sapien
ctcctcattaaccacacttgtcacc

SEQ ID NO: 5359393 - DNA, 25 bp, Homo sapien
tcctcattaaccacacttgtcacct

SEQ ID NO: 5359394 - DNA, 25 bp, Homo sapien
ctccagcgttgctccactgaacttt

SEQ ID NO: 5359395 - DNA, 25 bp, Homo sapien
cagctccagcgttgctccactgaac

SEQ ID NO: 5359396 - DNA, 25 bp, Homo sapien
tttagttagacgcttaaagtctctc

SEQ ID NO: 5359397 - DNA, 25 bp, Homo sapien
acatcagggacctcattccactctt

SEQ ID NO: 5359398 - DNA, 25 bp, Homo sapien
atcagggacctcattccactcttca

SEQ ID NO: 5359399 - DNA, 25 bp, Homo sapien
ttagacgcttaaagtctctccactc

SEQ ID NO: 5359400 - DNA, 25 bp, Homo sapien
gatatcttgactccatccatttaca

SEQ ID NO: 5359401 - DNA, 25 bp, Homo sapien
gaaggcagatatcttgactccatcc

SEQ ID NO: 5359402 - DNA, 25 bp, Homo sapien
tccatttacacattcagtccaaata

SEQ ID NO: 5359403 - DNA, 25 bp, Homo sapien
tttacacattcagtccaaatacaca

SEQ ID NO: 5359404 - DNA, 25 bp, Homo sapien
taagctccaaaatcccaaccgctat

SEQ ID NO: 5359405 - DNA, 25 bp, Homo sapien
cacaggtgtaatggatgcacaagta

SEQ ID NO: 5359406 - DNA, 25 bp, Homo sapien
catttgtgagtggattaggattgca

SEQ ID NO: 5359407 - DNA, 25 bp, Homo sapien
ttcatagcaatggagcggggattca

SEQ ID NO: 5359408 - DNA, 25 bp, Homo sapien
gctaataccagagtgctgttctttg

SEQ ID NO: 5359409 - DNA, 25 bp, Homo sapien
tggtatagctaataccagagtgctg

SEQ ID NO: 5359410 - DNA, 25 bp, Homo sapien
gctgttctttgtaggccccgtggac

SEQ ID NO: 5359411 - DNA, 25 bp, Homo sapien
gagtgctgttctttgtaggccccgt

SEQ ID NO: 5359412 - DNA, 25 bp, Homo sapien
tatgtccacggaaggttgtttggca

SEQ ID NO: 5359413 - DNA, 25 bp, Homo sapien
ggtgacgagtcagcattcccctatg

SEQ ID NO: 5359414 - DNA, 25 bp, Homo sapien
agcagctgagacaagcagcctgtga

SEQ ID NO: 5359415 - DNA, 25 bp, Homo sapien
gcctccagggaccaggtcagtgcgt

SEQ ID NO: 5359416 - DNA, 25 bp, Homo sapien
tatagaggactgtccgaggagctcg

SEQ ID NO: 5359417 - DNA, 25 bp, Homo sapien
ctgggcagaaggcaaaaaaatatag

SEQ ID NO: 5359418 - DNA, 25 bp, Homo sapien
tgtccgaggagctcgggagggagcc

SEQ ID NO: 5359419 - DNA, 25 bp, Homo sapien
gcaaaaaaatatagaggactgtccg

SEQ ID NO: 5359420 - DNA, 25 bp, Homo sapien
tatcttctgaacaatcgctggtttg

SEQ ID NO: 5359421 - DNA, 25 bp, Homo sapien
gaacaatcgctggtttgttcagctg

SEQ ID NO: 5359422 - DNA, 25 bp, Homo sapien
tgttcagctgtttgacaggggagga

SEQ ID NO: 5359423 - DNA, 25 bp, Homo sapien
attttatcttctgaacaatcgctgg

SEQ ID NO: 5359424 - DNA, 25 bp, Homo sapien
cagtgctggtctcccacgtgcccca

SEQ ID NO: 5359425 - DNA, 25 bp, Homo sapien
acctccctcatgtgctcgcagtgcc

SEQ ID NO: 5359426 - DNA, 25 bp, Homo sapien
ccacctccctcatgtgctcgcagtg

SEQ ID NO: 5359427 - DNA, 25 bp, Homo sapien
accacctccctcatgtgctcgcagt

SEQ ID NO: 5359428 - DNA, 25 bp, Homo sapien
cactgaaccactgactcaagtccgt

SEQ ID NO: 5359429 - DNA, 25 bp, Homo sapien
ggaattccctcaaagcgttccagct

SEQ ID NO: 5359430 - DNA, 25 bp, Homo sapien
tggaagcctttctgtcggacagcta

SEQ ID NO: 5359431 - DNA, 25 bp, Homo sapien
cggacagctacagcccagactggat

SEQ ID NO: 5359432 - DNA, 25 bp, Homo sapien
cgtgacctgcggctctgaaggtccc

SEQ ID NO: 5359433 - DNA, 25 bp, Homo sapien
cagctctgatggtgcaacatgaggg

SEQ ID NO: 5359434 - DNA, 25 bp, Homo sapien
gagggtatgtcctaccaacaaggtg

SEQ ID NO: 5359435 - DNA, 25 bp, Homo sapien
cagcattggacatacttgaccacgt

SEQ ID NO: 5359436 - DNA, 25 bp, Homo sapien
tctccttgcaaacttgagcacagtg

SEQ ID NO: 5359437 - DNA, 25 bp, Homo sapien
gcatttctggacctgaaggagcatt

SEQ ID NO: 5359438 - DNA, 25 bp, Homo sapien
cttgcaaacttgagcacagtgaaga

SEQ ID NO: 5359439 - DNA, 25 bp, Homo sapien
tttttctctccttgcaaacttgagc

SEQ ID NO: 5359440 - DNA, 25 bp, Homo sapien
ggagatgcttgctggagcagtattt

SEQ ID NO: 5359441 - DNA, 25 bp, Homo sapien
gatgcttgctggagcagtattttgt

SEQ ID NO: 5359442 - DNA, 25 bp, Homo sapien
tattttgtggattcatttcggcttg

SEQ ID NO: 5359443 - DNA, 25 bp, Homo sapien
agtattttgtggattcatttcggct

SEQ ID NO: 5359444 - DNA, 25 bp, Homo sapien
gccgtgacaaaataatcctgctgcc

SEQ ID NO: 5359445 - DNA, 25 bp, Homo sapien
gcggatatgccgtgacaaaataatc

SEQ ID NO: 5359446 - DNA, 25 bp, Homo sapien
ccagggcggatatgccgtgacaaaa

SEQ ID NO: 5359447 - DNA, 25 bp, Homo sapien
gacccagggcggatatgccgtgaca

SEQ ID NO: 5359448 - DNA, 25 bp, Homo sapien
gctccggtgttgaggaagaacattc

SEQ ID NO: 5359449 - DNA, 25 bp, Homo sapien
gcctgcgtgtggtaggagaggaagc

SEQ ID NO: 5359450 - DNA, 25 bp, Homo sapien
tttcacatctgtgcaccttcgctgt

SEQ ID NO: 5359451 - DNA, 25 bp, Homo sapien
ggattgttacgtaatctttcacatc

SEQ ID NO: 5359452 - DNA, 25 bp, Homo sapien
tgcagggcagctgtcgttccatgtc

SEQ ID NO: 5359453 - DNA, 25 bp, Homo sapien
ctgtaaatggtagtgccctcaggta

SEQ ID NO: 5359454 - DNA, 25 bp, Homo sapien
ggcagctgtcgttccatgtcacctg

SEQ ID NO: 5359455 - DNA, 25 bp, Homo sapien
gtaaatggtagtgccctcaggtacc

SEQ ID NO: 5359456 - DNA, 25 bp, Homo sapien
taggcaaggctttcgatgctttagg

SEQ ID NO: 5359457 - DNA, 25 bp, Homo sapien
ctttgtgttaggcaaggctttcgat

SEQ ID NO: 5359458 - DNA, 25 bp, Homo sapien
ggctttcgatgctttagggaattca

SEQ ID NO: 5359459 - DNA, 25 bp, Homo sapien
cttgagatcaaaactctcattgcct

SEQ ID NO: 5359460 - DNA, 25 bp, Homo sapien
accggttcacgttaccatgtttctg

SEQ ID NO: 5359461 - DNA, 25 bp, Homo sapien
ccatgtttctgttgagaatcattag

SEQ ID NO: 5359462 - DNA, 25 bp, Homo sapien
ggttcacgttaccatgtttctgttg

SEQ ID NO: 5359463 - DNA, 25 bp, Homo sapien
catgtttctgttgagaatcattaga

SEQ ID NO: 5359464 - DNA, 25 bp, Homo sapien
tcagatggaaggtggtgcaggtgtc

SEQ ID NO: 5359465 - DNA, 25 bp, Homo sapien
ggaaggtggtgcaggtgtcaggggg

SEQ ID NO: 5359466 - DNA, 25 bp, Homo sapien
gatggaaggtggtgcaggtgtcagg

SEQ ID NO: 5359467 - DNA, 25 bp, Homo sapien
cagatggaaggtggtgcaggtgtca

SEQ ID NO: 5359468 - DNA, 25 bp, Homo sapien
tgagagagtcacagcactgttagtg

SEQ ID NO: 5359469 - DNA, 25 bp, Homo sapien
tggaggctgacagacatccagggtc

SEQ ID NO: 5359470 - DNA, 25 bp, Homo sapien
tgggagctgtggctacagattcttt

SEQ ID NO: 5359471 - DNA, 25 bp, Homo sapien
gacaacagatggcttgggttgaaac

SEQ ID NO: 5359472 - DNA, 25 bp, Homo sapien
tgaggttgcaagtgggtagcaacac

SEQ ID NO: 5359473 - DNA, 25 bp, Homo sapien
gtttggcagcagggccggttcctgg

SEQ ID NO: 5359474 - DNA, 25 bp, Homo sapien
aactgctctgggaagactgatgtct

SEQ ID NO: 5359475 - DNA, 25 bp, Homo sapien
cggttcctgggggttgaactgctct

SEQ ID NO: 5359476 - DNA, 25 bp, Homo sapien
cgatggaagctccaaggtggcagaa

SEQ ID NO: 5359477 - DNA, 25 bp, Homo sapien
ggctttgcattccagaagtgcacga

SEQ ID NO: 5359478 - DNA, 25 bp, Homo sapien
ccaggagagggtcggctttgcattc

SEQ ID NO: 5359479 - DNA, 25 bp, Homo sapien
cagaagtgcacgatggaagctccaa

SEQ ID NO: 5359480 - DNA, 25 bp, Homo sapien
cgttgaggctccctcatgggcatct

SEQ ID NO: 5359481 - DNA, 25 bp, Homo sapien
ttgaggctccctcatgggcatctgg

SEQ ID NO: 5359482 - DNA, 25 bp, Homo sapien
tgaggctccctcatgggcatctggc

SEQ ID NO: 5359483 - DNA, 25 bp, Homo sapien
gaggctccctcatgggcatctggcc

SEQ ID NO: 5359484 - DNA, 25 bp, Homo sapien
acacataggaaagcttgggccagga

SEQ ID NO: 5359485 - DNA, 25 bp, Homo sapien
gcccagggaacagcgtggccttgtt

SEQ ID NO: 5359486 - DNA, 25 bp, Homo sapien
taggcggcagcttcgatctgcacac

SEQ ID NO: 5359487 - DNA, 25 bp, Homo sapien
catccatggataggtggccagttta

SEQ ID NO: 5359488 - DNA, 25 bp, Homo sapien
atggaaacttccctggtgcaatcag

SEQ ID NO: 5359489 - DNA, 25 bp, Homo sapien
gaaacttccctggtgcaatcagcat

SEQ ID NO: 5359490 - DNA, 25 bp, Homo sapien
ggaaacttccctggtgcaatcagca

SEQ ID NO: 5359491 - DNA, 25 bp, Homo sapien
ggatggaaacttccctggtgcaatc

SEQ ID NO: 5359492 - DNA, 25 bp, Homo sapien
tctgtcatggcttctcgccctccct

SEQ ID NO: 5359493 - DNA, 25 bp, Homo sapien
tggcttctcgccctccctgttgttc

SEQ ID NO: 5359494 - DNA, 25 bp, Homo sapien
ttaaaatgcacgagcagttctgcca

SEQ ID NO: 5359495 - DNA, 25 bp, Homo sapien
aaatgcacgagcagttctgccaccc

SEQ ID NO: 5359496 - DNA, 25 bp, Homo sapien
aataatctgtcctgtcgtacatctg

SEQ ID NO: 5359497 - DNA, 25 bp, Homo sapien
gaaccacgggtcacttaatgaagca

SEQ ID NO: 5359498 - DNA, 25 bp, Homo sapien
cagtgcaagcctgtgtccattttcc

SEQ ID NO: 5359499 - DNA, 25 bp, Homo sapien
tgcatgaggtagcaaagctgcttgc

SEQ ID NO: 5359500 - DNA, 25 bp, Homo sapien
aatcataggatgctgctccctcttg

SEQ ID NO: 5359501 - DNA, 25 bp, Homo sapien
gtgggaatcataggatgctgctccc

SEQ ID NO: 5359502 - DNA, 25 bp, Homo sapien
gaatcataggatgctgctccctctt

SEQ ID NO: 5359503 - DNA, 25 bp, Homo sapien
tcataggatgctgctccctcttgcc

SEQ ID NO: 5359504 - DNA, 25 bp, Homo sapien
gctcatcaaatgcaggctacaaaca

SEQ ID NO: 5359505 - DNA, 25 bp, Homo sapien
catattgaagagagaagttgccccg

SEQ ID NO: 5359506 - DNA, 25 bp, Homo sapien
cacctgtgttgcctctagaatatgc

SEQ ID NO: 5359507 - DNA, 25 bp, Homo sapien
tgccccgttctggacatctgtaaaa

SEQ ID NO: 5359508 - DNA, 25 bp, Homo sapien
caaattcatttgcaatagcctaagc

SEQ ID NO: 5359509 - DNA, 25 bp, Homo sapien
gatgctcgatatgttcctcattaac

SEQ ID NO: 5359510 - DNA, 25 bp, Homo sapien
gccaacttgtgacagatgtaagctc

SEQ ID NO: 5359511 - DNA, 25 bp, Homo sapien
tcatgttagtggagagaagaccaca

SEQ ID NO: 5359512 - DNA, 25 bp, Homo sapien
tatcattgaggtttctgatccttgg

SEQ ID NO: 5359513 - DNA, 25 bp, Homo sapien
caggtgtagtgtgtatcatccagtc

SEQ ID NO: 5359514 - DNA, 25 bp, Homo sapien
gacacaccatacatcatcgctgaag

SEQ ID NO: 5359515 - DNA, 25 bp, Homo sapien
catccagtcggaaatttatcattga

SEQ ID NO: 5359516 - DNA, 25 bp, Homo sapien
tactgtgcacaccacggtcatgggt

SEQ ID NO: 5359517 - DNA, 25 bp, Homo sapien
cagagatcccaagcgagctcttgta

SEQ ID NO: 5359518 - DNA, 25 bp, Homo sapien
tggttcagctcaaccctgcatggtg

SEQ ID NO: 5359519 - DNA, 25 bp, Homo sapien
catgggtcccctcttcggatgagta

SEQ ID NO: 5359520 - DNA, 25 bp, Homo sapien
catgccggtaagtgtgtgaccccaa

SEQ ID NO: 5359521 - DNA, 25 bp, Homo sapien
tccacgggtgtacgctacaatgtgg

SEQ ID NO: 5359522 - DNA, 25 bp, Homo sapien
gcgtctccccagagaatccgtttta

SEQ ID NO: 5359523 - DNA, 25 bp, Homo sapien
cagagccaggcgatgtgctgcgtct

SEQ ID NO: 5359524 - DNA, 25 bp, Homo sapien
agacctctgtgacctagccacggaa

SEQ ID NO: 5359525 - DNA, 25 bp, Homo sapien
aaggctgtgcacaccctgcttgaga

SEQ ID NO: 5359526 - DNA, 25 bp, Homo sapien
tatagacctccacttctagacggga

SEQ ID NO: 5359527 - DNA, 25 bp, Homo sapien
agatggagtgaacgtgccaccttcc

SEQ ID NO: 5359528 - DNA, 25 bp, Homo sapien
tcagggagcgcagatgtgactcagc

SEQ ID NO: 5359529 - DNA, 25 bp, Homo sapien
cagcagctcatggtagcagtccacg

SEQ ID NO: 5359530 - DNA, 25 bp, Homo sapien
gctgagcagaaaagatacggacgca

SEQ ID NO: 5359531 - DNA, 25 bp, Homo sapien
taatccatttgggaggagagcaacc

SEQ ID NO: 5359532 - DNA, 25 bp, Homo sapien
tgtgtcctaccagaaaaacgcatgg

SEQ ID NO: 5359533 - DNA, 25 bp, Homo sapien
cagggcagggtttctactgtcagag

SEQ ID NO: 5359534 - DNA, 25 bp, Homo sapien
taaaattgccgaaggccatactgct

SEQ ID NO: 5359535 - DNA, 25 bp, Homo sapien
cagtttttatatgcccaaagaggcg

SEQ ID NO: 5359536 - DNA, 25 bp, Homo sapien
catgtggtcactacttcgaaggcaa

SEQ ID NO: 5359537 - DNA, 25 bp, Homo sapien
caatcaagatgctcctagtaggtgc

SEQ ID NO: 5359538 - DNA, 25 bp, Homo sapien
cacagaatgcagtcaggctcggatt

SEQ ID NO: 5359539 - DNA, 25 bp, Homo sapien
gatcttgtcagttctcgagacccag

SEQ ID NO: 5359540 - DNA, 25 bp, Homo sapien
tatagccatactggacaggaaccag

SEQ ID NO: 5359541 - DNA, 25 bp, Homo sapien
cggtttgccgtcagagatggcgcat

SEQ ID NO: 5359542 - DNA, 25 bp, Homo sapien
ggatggtaaccatctctggagtgca

SEQ ID NO: 5359543 - DNA, 25 bp, Homo sapien
tcagcagtctgtctgagtcgtcagg

SEQ ID NO: 5359544 - DNA, 25 bp, Homo sapien
ctagctggccttcacgctcttgatc

SEQ ID NO: 5359545 - DNA, 25 bp, Homo sapien
tggccttcacgctcttgatcgtctt

SEQ ID NO: 5359546 - DNA, 25 bp, Homo sapien
cgctcttgatcgtctttcctttgta

SEQ ID NO: 5359547 - DNA, 25 bp, Homo sapien
cgtctttcctttgtattggagaagg

SEQ ID NO: 5359548 - DNA, 25 bp, Homo sapien
tacaaaggtggactcaaagcaaagc

SEQ ID NO: 5359549 - DNA, 25 bp, Homo sapien
ggagaggttttacaagccagacagg

SEQ ID NO: 5359550 - DNA, 25 bp, Homo sapien
cactttctggcctaaaccctaatgg

SEQ ID NO: 5359551 - DNA, 25 bp, Homo sapien
tgctggccctttgagtgagaatgct

SEQ ID NO: 5359552 - DNA, 25 bp, Homo sapien
cgcaagttccttcgcggagccagaa

SEQ ID NO: 5359553 - DNA, 25 bp, Homo sapien
aatccgtcgagaagcgggacctcaa

SEQ ID NO: 5359554 - DNA, 25 bp, Homo sapien
aaagtgccaggcattaagtgggccc

SEQ ID NO: 5359555 - DNA, 25 bp, Homo sapien
tccgaagacttagagaagggacgca

SEQ ID NO: 5359556 - DNA, 25 bp, Homo sapien
caacattcacaagcgcatccatgga

SEQ ID NO: 5359557 - DNA, 25 bp, Homo sapien
cgttctgccatcaacgaagtggtaa

SEQ ID NO: 5359558 - DNA, 25 bp, Homo sapien
tacaccatcaacattcacaagcgca

SEQ ID NO: 5359559 - DNA, 25 bp, Homo sapien
agtggtaacccgagaatacaccatc

SEQ ID NO: 5359560 - DNA, 25 bp, Homo sapien
gggcttcaagaagcgtgcacctcgg

SEQ ID NO: 5359561 - DNA, 25 bp, Homo sapien
acctcgggcactcaaagagattcgg

SEQ ID NO: 5359562 - DNA, 25 bp, Homo sapien
agatgtgcgcattgacaccaggctc

SEQ ID NO: 5359563 - DNA, 25 bp, Homo sapien
gatgtgcgcattgacaccaggctca

SEQ ID NO: 5359564 - DNA, 25 bp, Homo sapien
gaggtctctgaagccgtagggcaca

SEQ ID NO: 5359565 - DNA, 25 bp, Homo sapien
gaaccactgttctgggtagttggga

SEQ ID NO: 5359566 - DNA, 25 bp, Homo sapien
tagttcagtcctaaagcagtgttgc

SEQ ID NO: 5359567 - DNA, 25 bp, Homo sapien
gaatgtgccataccgaatccgtgtg

SEQ ID NO: 5359568 - DNA, 25 bp, Homo sapien
gaagtgcccatttcagcaaatccgg

SEQ ID NO: 5359569 - DNA, 25 bp, Homo sapien
tggactccagtgtgcatagcagctg

SEQ ID NO: 5359570 - DNA, 25 bp, Homo sapien
tgaaatctcggtttagggctgaccc

SEQ ID NO: 5359571 - DNA, 25 bp, Homo sapien
caatggataccttagggcactgaca

SEQ ID NO: 5359572 - DNA, 25 bp, Homo sapien
tgattggtggctcatttcaaaagtt

SEQ ID NO: 5359573 - DNA, 25 bp, Homo sapien
gttgactaatgactgttcagtcaga

SEQ ID NO: 5359574 - DNA, 25 bp, Homo sapien
gtttggatttcatgtccagtggctt

SEQ ID NO: 5359575 - DNA, 25 bp, Homo sapien
ttggatttcatgtccagtggctttt

SEQ ID NO: 5359576 - DNA, 25 bp, Homo sapien
tgactaatgactgttcagtcagaag

SEQ ID NO: 5359577 - DNA, 25 bp, Homo sapien
gactgtggcgatggcttgatacaaa

SEQ ID NO: 5359578 - DNA, 25 bp, Homo sapien
gtgtctgcaaaaaccgagtcctcag

SEQ ID NO: 5359579 - DNA, 25 bp, Homo sapien
tggatcttcatggaacatactgtac

SEQ ID NO: 5359580 - DNA, 25 bp, Homo sapien
gcaaaaaccgagtcctcaggagaag

SEQ ID NO: 5359581 - DNA, 25 bp, Homo sapien
ggctaaatccttaatcatctgcttc

SEQ ID NO: 5359582 - DNA, 25 bp, Homo sapien
gctgtttctgataatcaactgcatc

SEQ ID NO: 5359583 - DNA, 25 bp, Homo sapien
ttttctttggctaaatccttaatca

SEQ ID NO: 5359584 - DNA, 25 bp, Homo sapien
ctggctcattttgggcaattctttc

SEQ ID NO: 5359585 - DNA, 25 bp, Homo sapien
ggatgagggcaaccccggtgcctcc

SEQ ID NO: 5359586 - DNA, 25 bp, Homo sapien
tcattggacgaagggaaaagacaag

SEQ ID NO: 5359587 - DNA, 25 bp, Homo sapien
tgctctaagaggacccgtgaaacag

SEQ ID NO: 5359588 - DNA, 25 bp, Homo sapien
gcaaattccatacaaaactggaaag

SEQ ID NO: 5359589 - DNA, 25 bp, Homo sapien
aacggcgactggctgtctcggtcat

SEQ ID NO: 5359590 - DNA, 25 bp, Homo sapien
acaacagaggattcctcaacggcga

SEQ ID NO: 5359591 - DNA, 25 bp, Homo sapien
ggctgtctcggtcattttcagtgag

SEQ ID NO: 5359592 - DNA, 25 bp, Homo sapien
tctcgatgttgacaacagaggattc

SEQ ID NO: 5359593 - DNA, 25 bp, Homo sapien
gtccacgaacccaaatgcacaccaa

SEQ ID NO: 5359594 - DNA, 25 bp, Homo sapien
gtaatgtagctttctaggcaactaa

SEQ ID NO: 5359595 - DNA, 25 bp, Homo sapien
tctaggcaactaaaggctaagccag

SEQ ID NO: 5359596 - DNA, 25 bp, Homo sapien
tgtagtttttgcagggtccacgaac

SEQ ID NO: 5359597 - DNA, 25 bp, Homo sapien
tcccagaggtatgtggagactgttg

SEQ ID NO: 5359598 - DNA, 25 bp, Homo sapien
atgtcccccacaccaagtgtgcctt

SEQ ID NO: 5359599 - DNA, 25 bp, Homo sapien
tgtcccccacaccaagtgtgccttt

SEQ ID NO: 5359600 - DNA, 25 bp, Homo sapien
gcagtgtaagcatccctcagtttct

SEQ ID NO: 5359601 - DNA, 25 bp, Homo sapien
cttgggttccagcagatatcttgac

SEQ ID NO: 5359602 - DNA, 25 bp, Homo sapien
tgagccttcttcccctatgccgttt

SEQ ID NO: 5359603 - DNA, 25 bp, Homo sapien
tcccattattagtttggtccttaga

SEQ ID NO: 5359604 - DNA, 25 bp, Homo sapien
ttagcatagccgtaagaaaagcctg

SEQ ID NO: 5359605 - DNA, 25 bp, Homo sapien
gggtataacttgagtgccaaacttc

SEQ ID NO: 5359606 - DNA, 25 bp, Homo sapien
cttaaaagcaagagcgtacagagtt

SEQ ID NO: 5359607 - DNA, 25 bp, Homo sapien
catacagtggacttacacgaaccta

SEQ ID NO: 5359608 - DNA, 25 bp, Homo sapien
tatccgtaggtttatcaatctgcag

SEQ ID NO: 5359609 - DNA, 25 bp, Homo sapien
caagctcaccgaggacgtctgtctc

SEQ ID NO: 5359610 - DNA, 25 bp, Homo sapien
tgcagcagatgcctttacaaccaag

SEQ ID NO: 5359611 - DNA, 25 bp, Homo sapien
aacagtgttacagtcgccaagagcc

SEQ ID NO: 5359612 - DNA, 25 bp, Homo sapien
aaaccatgaaggactacaaatgctt

SEQ ID NO: 5359613 - DNA, 25 bp, Homo sapien
tacaaatgcttctaataaatcaatg

SEQ ID NO: 5359614 - DNA, 25 bp, Homo sapien
cattagaaagttagatgaagaggct

SEQ ID NO: 5359615 - DNA, 25 bp, Homo sapien
attagaaagttagatgaagaggctg

SEQ ID NO: 5359616 - DNA, 25 bp, Homo sapien
caatggctgcatctgggaggtagac

SEQ ID NO: 5359617 - DNA, 25 bp, Homo sapien
tataagatgccagttcagcaatggc

SEQ ID NO: 5359618 - DNA, 25 bp, Homo sapien
tagtccctcattagccatcttggtg

SEQ ID NO: 5359619 - DNA, 25 bp, Homo sapien
gaaagcccacaagtaatgtccaggt

SEQ ID NO: 5359620 - DNA, 25 bp, Homo sapien
gatatgaagcctgtataatagttta

SEQ ID NO: 5359621 - DNA, 25 bp, Homo sapien
gggatatgaagcctgtataatagtt

SEQ ID NO: 5359622 - DNA, 25 bp, Homo sapien
tgaagcctgtataatagtttaatct

SEQ ID NO: 5359623 - DNA, 25 bp, Homo sapien
gcctgtataatagtttaatcttctc

SEQ ID NO: 5359624 - DNA, 25 bp, Homo sapien
ggcatctatgcggtactgctcagca

SEQ ID NO: 5359625 - DNA, 25 bp, Homo sapien
cgaggcagctcacaaacgctttgaa

SEQ ID NO: 5359626 - DNA, 25 bp, Homo sapien
tgtcatccaagagcctgaacgtcct

SEQ ID NO: 5359627 - DNA, 25 bp, Homo sapien
tccagggcgagactagctgaaacag

SEQ ID NO: 5359628 - DNA, 25 bp, Homo sapien
gggcctgggctgctcccagtaacag

SEQ ID NO: 5359629 - DNA, 25 bp, Homo sapien
gcctgggctgctcccagtaacagct

SEQ ID NO: 5359630 - DNA, 25 bp, Homo sapien
ctgggctgctcccagtaacagctca

SEQ ID NO: 5359631 - DNA, 25 bp, Homo sapien
tgggctgctcccagtaacagctcat

SEQ ID NO: 5359632 - DNA, 25 bp, Homo sapien
gactagccagatctgtaggatacag

SEQ ID NO: 5359633 - DNA, 25 bp, Homo sapien
caaaagtctgaagtagttcccagta

SEQ ID NO: 5359634 - DNA, 25 bp, Homo sapien
aggaccaggtgagcctcttcagaat

SEQ ID NO: 5359635 - DNA, 25 bp, Homo sapien
gcgactggcccaaaatcatattatt

SEQ ID NO: 5359636 - DNA, 25 bp, Homo sapien
taggaacgcgtttgtggaatacaca

SEQ ID NO: 5359637 - DNA, 25 bp, Homo sapien
gagtagcttacgcaccaagtctgta

SEQ ID NO: 5359638 - DNA, 25 bp, Homo sapien
caacactgttggtccttcataggaa

SEQ ID NO: 5359639 - DNA, 25 bp, Homo sapien
taagtcttacgcagaacatgaaagg

SEQ ID NO: 5359640 - DNA, 25 bp, Homo sapien
gaatgaggagtgaggaacctactaa

SEQ ID NO: 5359641 - DNA, 25 bp, Homo sapien
ctatcacttcaatcgtgctgggaac

SEQ ID NO: 5359642 - DNA, 25 bp, Homo sapien
ctggactctgctgactatcacttca

SEQ ID NO: 5359643 - DNA, 25 bp, Homo sapien
tctgctgactatcacttcaatcgtg

SEQ ID NO: 5359644 - DNA, 25 bp, Homo sapien
cagtcactgactgcggggaaaggcc

SEQ ID NO: 5359645 - DNA, 25 bp, Homo sapien
gagcccccaccaagacgagctgggg

SEQ ID NO: 5359646 - DNA, 25 bp, Homo sapien
ccaccaagacgagctggggcagcca

SEQ ID NO: 5359647 - DNA, 25 bp, Homo sapien
tgcaactgcgcttcctccccgtctc

SEQ ID NO: 5359648 - DNA, 25 bp, Homo sapien
cccccaccaagacgagctggggcag

SEQ ID NO: 5359649 - DNA, 25 bp, Homo sapien
gaaaactctagtaatgtgcctgaag

SEQ ID NO: 5359650 - DNA, 25 bp, Homo sapien
tgagcagagtagatcacagcaccga

SEQ ID NO: 5359651 - DNA, 25 bp, Homo sapien
tgatttcaaaaagggtcaccgcagg

SEQ ID NO: 5359652 - DNA, 25 bp, Homo sapien
catgcatgtactgtggtgtgggatc

SEQ ID NO: 5359653 - DNA, 25 bp, Homo sapien
ccctcatcttcccagagctgcgtac

SEQ ID NO: 5359654 - DNA, 25 bp, Homo sapien
cccctcatcttcccagagctgcgta

SEQ ID NO: 5359655 - DNA, 25 bp, Homo sapien
tcagggcctggaacccctcatcttc

SEQ ID NO: 5359656 - DNA, 25 bp, Homo sapien
ggcctggaacccctcatcttcccag

SEQ ID NO: 5359657 - DNA, 25 bp, Homo sapien
gagacttccgggataacgactcgaa

SEQ ID NO: 5359658 - DNA, 25 bp, Homo sapien
gaattgagacttccgggataacgac

SEQ ID NO: 5359659 - DNA, 25 bp, Homo sapien
ggtcttcaggaagaattgagacttc

SEQ ID NO: 5359660 - DNA, 25 bp, Homo sapien
cttgaataagtcgtagagctcctct

SEQ ID NO: 5359661 - DNA, 25 bp, Homo sapien
gaaagaataaacagcaatggcgtga

SEQ ID NO: 5359662 - DNA, 25 bp, Homo sapien
gaataaacagcaatggcgtgaaatc

SEQ ID NO: 5359663 - DNA, 25 bp, Homo sapien
gcaatggcgtgaaatctaggcctgc

SEQ ID NO: 5359664 - DNA, 25 bp, Homo sapien
aacagcaatggcgtgaaatctaggc

SEQ ID NO: 5359665 - DNA, 25 bp, Homo sapien
gatcaccggggtgaggcgtctgcta

SEQ ID NO: 5359666 - DNA, 25 bp, Homo sapien
gtgatcaccggggtgaggcgtctgc

SEQ ID NO: 5359667 - DNA, 25 bp, Homo sapien
tcaccggggtgaggcgtctgctacc

SEQ ID NO: 5359668 - DNA, 25 bp, Homo sapien
ccggggtgaggcgtctgctacccac

SEQ ID NO: 5359669 - DNA, 25 bp, Homo sapien
ccctgatcctgtgcttgtaacgtag

SEQ ID NO: 5359670 - DNA, 25 bp, Homo sapien
tgtcctcgtggccttggaggaccct

SEQ ID NO: 5359671 - DNA, 25 bp, Homo sapien
cgtggccttggaggaccctgatcct

SEQ ID NO: 5359672 - DNA, 25 bp, Homo sapien
taacgtaggtgctcgatctgctcca

SEQ ID NO: 5359673 - DNA, 25 bp, Homo sapien
aatatcagtcacagggtagggctcc

SEQ ID NO: 5359674 - DNA, 25 bp, Homo sapien
tagggctcctggtcgtcggagaaaa

SEQ ID NO: 5359675 - DNA, 25 bp, Homo sapien
cctggtcgtcggagaaaaaggcatg

SEQ ID NO: 5359676 - DNA, 25 bp, Homo sapien
taggaatcccggatcaggtccgaaa

SEQ ID NO: 5359677 - DNA, 25 bp, Homo sapien
tgtctgcaacctctagctggctgcc

SEQ ID NO: 5359678 - DNA, 25 bp, Homo sapien
aaaagcatctatggccctgctcttc

SEQ ID NO: 5359679 - DNA, 25 bp, Homo sapien
tatgcagaaaatgtctgcaacctct

SEQ ID NO: 5359680 - DNA, 25 bp, Homo sapien
gaaaatgtctgcaacctctagctgg

SEQ ID NO: 5359681 - DNA, 25 bp, Homo sapien
tccatctctggttggccacagaggt

SEQ ID NO: 5359682 - DNA, 25 bp, Homo sapien
ctccatctctggttggccacagagg

SEQ ID NO: 5359683 - DNA, 25 bp, Homo sapien
ccatctctggttggccacagaggtg

SEQ ID NO: 5359684 - DNA, 25 bp, Homo sapien
tgagctcctcgaagacagactggtc

SEQ ID NO: 5359685 - DNA, 25 bp, Homo sapien
gcactctctagaggcatgatgctga

SEQ ID NO: 5359686 - DNA, 25 bp, Homo sapien
gagaggtcgttcatgtgctctgcca

SEQ ID NO: 5359687 - DNA, 25 bp, Homo sapien
tgccagctctgggagatgacccttg

SEQ ID NO: 5359688 - DNA, 25 bp, Homo sapien
gggtaggactcactctctaaggtca

SEQ ID NO: 5359689 - DNA, 25 bp, Homo sapien
gtccagaaaagcgtccatgcttagt

SEQ ID NO: 5359690 - DNA, 25 bp, Homo sapien
gattctgacttttagaccaaggtaa

SEQ ID NO: 5359691 - DNA, 25 bp, Homo sapien
aaaatcactctgaggtaaccagaac

SEQ ID NO: 5359692 - DNA, 25 bp, Homo sapien
tcggtggttgaagtaatcgggcagc

SEQ ID NO: 5359693 - DNA, 25 bp, Homo sapien
gcagcacggaggtcaggatgttcat

SEQ ID NO: 5359694 - DNA, 25 bp, Homo sapien
cagcaaccaacagccagaaggcttc

SEQ ID NO: 5359695 - DNA, 25 bp, Homo sapien
tggttgaagtaatcgggcagcatcc

SEQ ID NO: 5359696 - DNA, 25 bp, Homo sapien
gggggtcaaggagggcagttactga

SEQ ID NO: 5359697 - DNA, 25 bp, Homo sapien
cgggggtcaaggagggcagttactg

SEQ ID NO: 5359698 - DNA, 25 bp, Homo sapien
ggggtcaaggagggcagttactgac

SEQ ID NO: 5359699 - DNA, 25 bp, Homo sapien
gaatgaccgtgacagcaacacagtc

SEQ ID NO: 5359700 - DNA, 25 bp, Homo sapien
gagatgttacaagcatccaagccca

SEQ ID NO: 5359701 - DNA, 25 bp, Homo sapien
tgagagatccagcatacaccaacca

SEQ ID NO: 5359702 - DNA, 25 bp, Homo sapien
taaagatttcataggtgagagatcc

SEQ ID NO: 5359703 - DNA, 25 bp, Homo sapien
agacatctcacctccactcatgtgt

SEQ ID NO: 5359704 - DNA, 25 bp, Homo sapien
gacatctcacctccactcatgtgtc

SEQ ID NO: 5359705 - DNA, 25 bp, Homo sapien
acctcatgatccgttgattataaga

SEQ ID NO: 5359706 - DNA, 25 bp, Homo sapien
ataagatgagtagtccctttggccc

SEQ ID NO: 5359707 - DNA, 25 bp, Homo sapien
cgttgattataagatgagtagtccc

SEQ ID NO: 5359708 - DNA, 25 bp, Homo sapien
catgatccgttgattataagatgag

SEQ ID NO: 5359709 - DNA, 25 bp, Homo sapien
gaatgcaaatgaaaccctgggaagg

SEQ ID NO: 5359710 - DNA, 25 bp, Homo sapien
aaagggaccgagtacagcgccttca

SEQ ID NO: 5359711 - DNA, 25 bp, Homo sapien
ggacaacatgagacaccaactaaag

SEQ ID NO: 5359712 - DNA, 25 bp, Homo sapien
acacgacaacactcaggaccagatg

SEQ ID NO: 5359713 - DNA, 25 bp, Homo sapien
cccgtagtaaccagggtgtgaggca

SEQ ID NO: 5359714 - DNA, 25 bp, Homo sapien
tgtgaggcaagatccgtcaccgcat

SEQ ID NO: 5359715 - DNA, 25 bp, Homo sapien
gttctatctcctcggttaccaggca

SEQ ID NO: 5359716 - DNA, 25 bp, Homo sapien
tgggcataggccgtcaagactctcc

SEQ ID NO: 5359717 - DNA, 25 bp, Homo sapien
gcatatgcgttagagagacctagag

SEQ ID NO: 5359718 - DNA, 25 bp, Homo sapien
caggtctgagatgcacaaactgcag

SEQ ID NO: 5359719 - DNA, 25 bp, Homo sapien
tattccctagtagcagcagtgtgca

SEQ ID NO: 5359720 - DNA, 25 bp, Homo sapien
caccaagcactgatgcgtgaggcac

SEQ ID NO: 5359721 - DNA, 25 bp, Homo sapien
aaggaggtgtttcaacactgcgcct

SEQ ID NO: 5359722 - DNA, 25 bp, Homo sapien
caacactgcgcctctggaagttagc

SEQ ID NO: 5359723 - DNA, 25 bp, Homo sapien
tgtttcaacactgcgcctctggaag

SEQ ID NO: 5359724 - DNA, 25 bp, Homo sapien
gggcgcagtggtgcaggcagcatca

SEQ ID NO: 5359725 - DNA, 25 bp, Homo sapien
cacagtgagtgtgccaggaagcatg

SEQ ID NO: 5359726 - DNA, 25 bp, Homo sapien
acacccaacacagtgagtgtgccag

SEQ ID NO: 5359727 - DNA, 25 bp, Homo sapien
ggcatctcgggcaggaggttggggg

SEQ ID NO: 5359728 - DNA, 25 bp, Homo sapien
ccaggaagcatgaaggctgtgtctg

SEQ ID NO: 5359729 - DNA, 25 bp, Homo sapien
catggctacgagcttccgaatcttc

SEQ ID NO: 5359730 - DNA, 25 bp, Homo sapien
gagtctccctcgcaaagattcaggg

SEQ ID NO: 5359731 - DNA, 25 bp, Homo sapien
gaaacatacacacggttctgccgta

SEQ ID NO: 5359732 - DNA, 25 bp, Homo sapien
gaatcttctctgtgcgaaacataca

SEQ ID NO: 5359733 - DNA, 25 bp, Homo sapien
ttaatgtacaaagaagtctgtcctc

SEQ ID NO: 5359734 - DNA, 25 bp, Homo sapien
tgggaatattcttaatgtacaaaga

SEQ ID NO: 5359735 - DNA, 25 bp, Homo sapien
tacaaagaagtctgtcctcaccacc

SEQ ID NO: 5359736 - DNA, 25 bp, Homo sapien
ctggaaatgggaatattcttaatgt

SEQ ID NO: 5359737 - DNA, 25 bp, Homo sapien
atggaggaagtactgcccctgctct

SEQ ID NO: 5359738 - DNA, 25 bp, Homo sapien
tggcaatggaggaagtactgcccct

SEQ ID NO: 5359739 - DNA, 25 bp, Homo sapien
cgatgcaccgctggcaatggaggaa

SEQ ID NO: 5359740 - DNA, 25 bp, Homo sapien
caccgctggcaatggaggaagtact

SEQ ID NO: 5359741 - DNA, 25 bp, Homo sapien
gagcccagtgggagcatttatacaa

SEQ ID NO: 5359742 - DNA, 25 bp, Homo sapien
taaaactagaagactggtgacctct

SEQ ID NO: 5359743 - DNA, 25 bp, Homo sapien
tgagcttcctgacagccagagggaa

SEQ ID NO: 5359744 - DNA, 25 bp, Homo sapien
gacactggtcagctcagagggcaaa

SEQ ID NO: 5359745 - DNA, 25 bp, Homo sapien
ttgttgaatgaaacacgagtgaagc

SEQ ID NO: 5359746 - DNA, 25 bp, Homo sapien
ctctcctcgctattttgagaagaca

SEQ ID NO: 5359747 - DNA, 25 bp, Homo sapien
tcatttcaagatccccaaatctgtg

SEQ ID NO: 5359748 - DNA, 25 bp, Homo sapien
atcggggtgcatcagcgggctcttc

SEQ ID NO: 5359749 - DNA, 25 bp, Homo sapien
aggccccgcattcttctcatcccca

SEQ ID NO: 5359750 - DNA, 25 bp, Homo sapien
ccctttggagaccacggcctgagac

SEQ ID NO: 5359751 - DNA, 25 bp, Homo sapien
tccccatgtgtactcccctttggag

SEQ ID NO: 5359752 - DNA, 25 bp, Homo sapien
agaccacggcctgagacatgaagaa

SEQ ID NO: 5359753 - DNA, 25 bp, Homo sapien
catccgcagaggtgtcgtagtgcac

SEQ ID NO: 5359754 - DNA, 25 bp, Homo sapien
tcggtcccggagctcaatgaactgg

SEQ ID NO: 5359755 - DNA, 25 bp, Homo sapien
tggacctgcttcaacctcgcaagca

SEQ ID NO: 5359756 - DNA, 25 bp, Homo sapien
gccaccttgcttctgatactgacaa

SEQ ID NO: 5359757 - DNA, 25 bp, Homo sapien
cgagaggcaacatgcagggacagaa

SEQ ID NO: 5359758 - DNA, 25 bp, Homo sapien
ctgcgcgagaggcaacatgcaggga

SEQ ID NO: 5359759 - DNA, 25 bp, Homo sapien
cgcgagaggcaacatgcagggacag

SEQ ID NO: 5359760 - DNA, 25 bp, Homo sapien
tgcgcgagaggcaacatgcagggac

SEQ ID NO: 5359761 - DNA, 25 bp, Homo sapien
cagtcacttgttggcaaatttcagg

SEQ ID NO: 5359762 - DNA, 25 bp, Homo sapien
ggttagagtcccctgttttcagcag

SEQ ID NO: 5359763 - DNA, 25 bp, Homo sapien
caaaactgtgccgtctgaacttccc

SEQ ID NO: 5359764 - DNA, 25 bp, Homo sapien
caatggccgaatgggtaatggtcca

SEQ ID NO: 5359765 - DNA, 25 bp, Homo sapien
tgctggcaaagcagatgtagctgtc

SEQ ID NO: 5359766 - DNA, 25 bp, Homo sapien
ggcaggatgatcttacagcagccat

SEQ ID NO: 5359767 - DNA, 25 bp, Homo sapien
tgtagctgtcagaggcgaacatccg

SEQ ID NO: 5359768 - DNA, 25 bp, Homo sapien
cccgtggtgtgacagcgactgaacg

SEQ ID NO: 5359769 - DNA, 25 bp, Homo sapien
gacacaaaaagacgacatactgcct

SEQ ID NO: 5359770 - DNA, 25 bp, Homo sapien
gaatggtacacttttaaaggatgga

SEQ ID NO: 5359771 - DNA, 25 bp, Homo sapien
tgatgagtgccacaacagagatgaa

SEQ ID NO: 5359772 - DNA, 25 bp, Homo sapien
gattactgattgctcagggcttggg

SEQ ID NO: 5359773 - DNA, 25 bp, Homo sapien
ctgtctatacccacaggcccacgtc

SEQ ID NO: 5359774 - DNA, 25 bp, Homo sapien
tacccacaggcccacgtctccatga

SEQ ID NO: 5359775 - DNA, 25 bp, Homo sapien
tgtctatacccacaggcccacgtct

SEQ ID NO: 5359776 - DNA, 25 bp, Homo sapien
caggcccacgtctccatgacaaatg

SEQ ID NO: 5359777 - DNA, 25 bp, Homo sapien
agggggaatgtcttgtagaatctcc

SEQ ID NO: 5359778 - DNA, 25 bp, Homo sapien
ggggaatgtcttgtagaatctcctt

SEQ ID NO: 5359779 - DNA, 25 bp, Homo sapien
gggggaatgtcttgtagaatctcct

SEQ ID NO: 5359780 - DNA, 25 bp, Homo sapien
aaaacactatattattactgaacac

SEQ ID NO: 5359781 - DNA, 25 bp, Homo sapien
tgtcatccagcccaagtatggcaga

SEQ ID NO: 5359782 - DNA, 25 bp, Homo sapien
tattactgaacactaactttagagc

SEQ ID NO: 5359783 - DNA, 25 bp, Homo sapien
tttgaaggaacttggcatgtcatcc

SEQ ID NO: 5359784 - DNA, 25 bp, Homo sapien
caaggctaacaaaagcacttgtaca

SEQ ID NO: 5359785 - DNA, 25 bp, Homo sapien
cacttgtacataagggatgggcaca

SEQ ID NO: 5359786 - DNA, 25 bp, Homo sapien
taaatctaacataaccaaggctaac

SEQ ID NO: 5359787 - DNA, 25 bp, Homo sapien
tgcgggtgggagacactctagaaca

SEQ ID NO: 5359788 - DNA, 25 bp, Homo sapien
ctcggctcctgcagatcggggtcga

SEQ ID NO: 5359789 - DNA, 25 bp, Homo sapien
gggtcgaggtcaaagacctcattat

SEQ ID NO: 5359790 - DNA, 25 bp, Homo sapien
ttcgcagcgtcacgtcggccagctg

SEQ ID NO: 5359791 - DNA, 25 bp, Homo sapien
agacctcattatccagcagccttcg

SEQ ID NO: 5359792 - DNA, 25 bp, Homo sapien
taaacacctcatccaggttcaggaa

SEQ ID NO: 5359793 - DNA, 25 bp, Homo sapien
gatggtatccgtcagaaagacattg

SEQ ID NO: 5359794 - DNA, 25 bp, Homo sapien
gatatcaacccacggaaccacaagt

SEQ ID NO: 5359795 - DNA, 25 bp, Homo sapien
gagaagtcacgctccttattctgcg

SEQ ID NO: 5359796 - DNA, 25 bp, Homo sapien
gaacagaaagtctaaacatctggcg

SEQ ID NO: 5359797 - DNA, 25 bp, Homo sapien
gtctaaacatctggcggcttgctgt

SEQ ID NO: 5359798 - DNA, 25 bp, Homo sapien
ctggtctagtctcagaaaggtttct

SEQ ID NO: 5359799 - DNA, 25 bp, Homo sapien
tggtctagtctcagaaaggtttcta

SEQ ID NO: 5359800 - DNA, 25 bp, Homo sapien
tccatttatcttgcaataccacttt

SEQ ID NO: 5359801 - DNA, 25 bp, Homo sapien
cctcctaacacaataaggtttagtg

SEQ ID NO: 5359802 - DNA, 25 bp, Homo sapien
agtgacaatcactaataagtgtaag

SEQ ID NO: 5359803 - DNA, 25 bp, Homo sapien
ttaaaggccaaatttctgcatcagg

SEQ ID NO: 5359804 - DNA, 25 bp, Homo sapien
tggcctcgaacttcaccagggcttc

SEQ ID NO: 5359805 - DNA, 25 bp, Homo sapien
tcgaacttcaccagggcttctcgga

SEQ ID NO: 5359806 - DNA, 25 bp, Homo sapien
cctcctgctcggcgagcctgctgct

SEQ ID NO: 5359807 - DNA, 25 bp, Homo sapien
gggcaccctgcccttccaacagcag

SEQ ID NO: 5359808 - DNA, 25 bp, Homo sapien
tgtgcgctgcttcaacgacagacac

SEQ ID NO: 5359809 - DNA, 25 bp, Homo sapien
gacacacctgacgaggagaatggct

SEQ ID NO: 5359810 - DNA, 25 bp, Homo sapien
atggctcagccgtgtcatccgtcag

SEQ ID NO: 5359811 - DNA, 25 bp, Homo sapien
ggcccccgagaagtgtgcgctgctt

SEQ ID NO: 5359812 - DNA, 25 bp, Homo sapien
aggtgtggaggagattttgttccag

SEQ ID NO: 5359813 - DNA, 25 bp, Homo sapien
caaggtgtggaggagattttgttcc

SEQ ID NO: 5359814 - DNA, 25 bp, Homo sapien
aaggtgtggaggagattttgttcca

SEQ ID NO: 5359815 - DNA, 25 bp, Homo sapien
acagaagtccaagcagcagcccact

SEQ ID NO: 5359816 - DNA, 25 bp, Homo sapien
tcccgtgtcatgctctccatggatc

SEQ ID NO: 5359817 - DNA, 25 bp, Homo sapien
cactcaggtgtagcagaagcttcct

SEQ ID NO: 5359818 - DNA, 25 bp, Homo sapien
aagcttcctctgaggtgaggggtcc

SEQ ID NO: 5359819 - DNA, 25 bp, Homo sapien
caaagcccctggcccttcaggctcc

SEQ ID NO: 5359820 - DNA, 25 bp, Homo sapien
ctgcggtgtcacaaagcccctggcc

SEQ ID NO: 5359821 - DNA, 25 bp, Homo sapien
gcggtgtcacaaagcccctggccct

SEQ ID NO: 5359822 - DNA, 25 bp, Homo sapien
gcccctggcccttcaggctccccat

SEQ ID NO: 5359823 - DNA, 25 bp, Homo sapien
gttaacatcacttttgatatcagca

SEQ ID NO: 5359824 - DNA, 25 bp, Homo sapien
tccagtcttaggaatagttgttaac

SEQ ID NO: 5359825 - DNA, 25 bp, Homo sapien
gactcagtatgtccctgcttttcaa

SEQ ID NO: 5359826 - DNA, 25 bp, Homo sapien
tttactagatctacaagttagactc

SEQ ID NO: 5359827 - DNA, 25 bp, Homo sapien
catgactaagaccatcagatacgta

SEQ ID NO: 5359828 - DNA, 25 bp, Homo sapien
cagatacgtagaaatggcaatgaag

SEQ ID NO: 5359829 - DNA, 25 bp, Homo sapien
ggcaatgaagtctccttgttcatcc

SEQ ID NO: 5359830 - DNA, 25 bp, Homo sapien
tcagcctacaacagcctggactttc

SEQ ID NO: 5359831 - DNA, 25 bp, Homo sapien
acccagccaaagtgtcactcaagtc

SEQ ID NO: 5359832 - DNA, 25 bp, Homo sapien
aataggacactgacattatggaggg

SEQ ID NO: 5359833 - DNA, 25 bp, Homo sapien
tagagcatagcctcaaactatcacc

SEQ ID NO: 5359834 - DNA, 25 bp, Homo sapien
ctcaagtccagaaacaagggcaaac

SEQ ID NO: 5359835 - DNA, 25 bp, Homo sapien
agcctgatttctttctaccgagcat

SEQ ID NO: 5359836 - DNA, 25 bp, Homo sapien
tctttctaccgagcatgcatcatct

SEQ ID NO: 5359837 - DNA, 25 bp, Homo sapien
tgatttctttctaccgagcatgcat

SEQ ID NO: 5359838 - DNA, 25 bp, Homo sapien
ctaccgagcatgcatcatctttgtc

SEQ ID NO: 5359839 - DNA, 25 bp, Homo sapien
gtggctatggcccagtaaacgtctg

SEQ ID NO: 5359840 - DNA, 25 bp, Homo sapien
aacgtctgatccattcagtaactca

SEQ ID NO: 5359841 - DNA, 25 bp, Homo sapien
tatggcccagtaaacgtctgatcca

SEQ ID NO: 5359842 - DNA, 25 bp, Homo sapien
cagtaaacgtctgatccattcagta

SEQ ID NO: 5359843 - DNA, 25 bp, Homo sapien
gagccgggaacttgaagcagaattc

SEQ ID NO: 5359844 - DNA, 25 bp, Homo sapien
cacatgctatgggagaataaacctg

SEQ ID NO: 5359845 - DNA, 25 bp, Homo sapien
gaattcgaaatggagcgacccgtgc

SEQ ID NO: 5359846 - DNA, 25 bp, Homo sapien
gcgacccgtgcattggaatccaaca

SEQ ID NO: 5359847 - DNA, 25 bp, Homo sapien
tgcatccagagcgccgaccaggcga

SEQ ID NO: 5359848 - DNA, 25 bp, Homo sapien
gcatccagagcgccgaccaggcgac

SEQ ID NO: 5359849 - DNA, 25 bp, Homo sapien
ctgcatccagagcgccgaccaggcg

SEQ ID NO: 5359850 - DNA, 25 bp, Homo sapien
agctcctcatgcgtgtgaggcatgt

SEQ ID NO: 5359851 - DNA, 25 bp, Homo sapien
catgtggtcgctgtctggactccat

SEQ ID NO: 5359852 - DNA, 25 bp, Homo sapien
ggcatgtggtcgctgtctggactcc

SEQ ID NO: 5359853 - DNA, 25 bp, Homo sapien
cctcatgcgtgtgaggcatgtggtc

SEQ ID NO: 5359854 - DNA, 25 bp, Homo sapien
tcagtatggcctcatgtttttctcc

SEQ ID NO: 5359855 - DNA, 25 bp, Homo sapien
tgtactttcactactctggccctgg

SEQ ID NO: 5359856 - DNA, 25 bp, Homo sapien
ggatgtgtcctcatcgttcttcata

SEQ ID NO: 5359857 - DNA, 25 bp, Homo sapien
gcttttgtgtccttcggatgtgtcc

SEQ ID NO: 5359858 - DNA, 25 bp, Homo sapien
ccaaaccggcaaactctttgctgca

SEQ ID NO: 5359859 - DNA, 25 bp, Homo sapien
cgccacctcgtgcatcctgctttcc

SEQ ID NO: 5359860 - DNA, 25 bp, Homo sapien
ggaatgaggccccactcaagggctg

SEQ ID NO: 5359861 - DNA, 25 bp, Homo sapien
tacagttccatctacattcagactg

SEQ ID NO: 5359862 - DNA, 25 bp, Homo sapien
ggatgctggccctcgttctcaagaa

SEQ ID NO: 5359863 - DNA, 25 bp, Homo sapien
cacatggtgccccagatacatggga

SEQ ID NO: 5359864 - DNA, 25 bp, Homo sapien
taagcagacaacatgcgcggtcctg

SEQ ID NO: 5359865 - DNA, 25 bp, Homo sapien
gaatccacaacacgaatgcctgagt

SEQ ID NO: 5359866 - DNA, 25 bp, Homo sapien
ctttcttttgggctctttccagaca

SEQ ID NO: 5359867 - DNA, 25 bp, Homo sapien
tttcttttgggctctttccagacat

SEQ ID NO: 5359868 - DNA, 25 bp, Homo sapien
gcaaaccacactcttgtttaatggc

SEQ ID NO: 5359869 - DNA, 25 bp, Homo sapien
caaaccacactcttgtttaatggcc

SEQ ID NO: 5359870 - DNA, 25 bp, Homo sapien
cagtggtagtgatggaaccggacca

SEQ ID NO: 5359871 - DNA, 25 bp, Homo sapien
gattctggatccttgagacaaacca

SEQ ID NO: 5359872 - DNA, 25 bp, Homo sapien
atctgttacgcacacgccagcaagg

SEQ ID NO: 5359873 - DNA, 25 bp, Homo sapien
catggacgtctctttattagcagga

SEQ ID NO: 5359874 - DNA, 25 bp, Homo sapien
tcagcctccccaggggctgagatta

SEQ ID NO: 5359875 - DNA, 25 bp, Homo sapien
ttgccatgttggctaggctggtctc

SEQ ID NO: 5359876 - DNA, 25 bp, Homo sapien
atttttagtagagatggagttttgc

SEQ ID NO: 5359877 - DNA, 25 bp, Homo sapien
caggcgcacaccaccatgcccaact

SEQ ID NO: 5359878 - DNA, 25 bp, Homo sapien
caatcaaaggcgaaaggcacagcac

SEQ ID NO: 5359879 - DNA, 25 bp, Homo sapien
gagaaaaacatcaggccccgcatgt

SEQ ID NO: 5359880 - DNA, 25 bp, Homo sapien
tgccacagccgggaatatagacttg

SEQ ID NO: 5359881 - DNA, 25 bp, Homo sapien
ggcacagcacagtgtcaagccagca

SEQ ID NO: 5359882 - DNA, 25 bp, Homo sapien
ccaacttgcttagggacatggtccc

SEQ ID NO: 5359883 - DNA, 25 bp, Homo sapien
ggtccctgggttggtacacagccca

SEQ ID NO: 5359884 - DNA, 25 bp, Homo sapien
cataagccaaccctgaactcaggga

SEQ ID NO: 5359885 - DNA, 25 bp, Homo sapien
ccaggtctatcagctgccagaagta

SEQ ID NO: 5359886 - DNA, 25 bp, Homo sapien
tcccatatggccctaaagatcttag

SEQ ID NO: 5359887 - DNA, 25 bp, Homo sapien
gaacagacgtcagtatggagaaaag

SEQ ID NO: 5359888 - DNA, 25 bp, Homo sapien
tgcaatcaaaagaaggctacccaca

SEQ ID NO: 5359889 - DNA, 25 bp, Homo sapien
tcatacaccactgaggagatgggtc

SEQ ID NO: 5359890 - DNA, 25 bp, Homo sapien
aaattcagtacaatgctagctgggc

SEQ ID NO: 5359891 - DNA, 25 bp, Homo sapien
tgaattctttaaatgtggcatatac

SEQ ID NO: 5359892 - DNA, 25 bp, Homo sapien
tatttgtacacctgttttcacggca

SEQ ID NO: 5359893 - DNA, 25 bp, Homo sapien
tcaggtgcaaaagtctaggattgtc

SEQ ID NO: 5359894 - DNA, 25 bp, Homo sapien
tttagtgtaggcattagctgtcaac

SEQ ID NO: 5359895 - DNA, 25 bp, Homo sapien
gcctacttcttggatatttagtgta

SEQ ID NO: 5359896 - DNA, 25 bp, Homo sapien
ggatatttagtgtaggcattagctg

SEQ ID NO: 5359897 - DNA, 25 bp, Homo sapien
ttagctgtcaactttcagaagtgga

SEQ ID NO: 5359898 - DNA, 25 bp, Homo sapien
tgaattctttacaagctaccagcct

SEQ ID NO: 5359899 - DNA, 25 bp, Homo sapien
caataattgtcagctcttcctaagg

SEQ ID NO: 5359900 - DNA, 25 bp, Homo sapien
tctgccttcacttctagtaaatgaa

SEQ ID NO: 5359901 - DNA, 25 bp, Homo sapien
tgtggagtcaagatcataaaatcct

SEQ ID NO: 5359902 - DNA, 25 bp, Homo sapien
cagtaggtgattcactggaggcaca

SEQ ID NO: 5359903 - DNA, 25 bp, Homo sapien
caggctgccctgttaagtcaaagac

SEQ ID NO: 5359904 - DNA, 25 bp, Homo sapien
tcagacagactagccaagaaatgca

SEQ ID NO: 5359905 - DNA, 25 bp, Homo sapien
ccaaagcatgtaagactctggagcc

SEQ ID NO: 5359906 - DNA, 25 bp, Homo sapien
tgtaatacacggtaccaccacagtc

SEQ ID NO: 5359907 - DNA, 25 bp, Homo sapien
gagttcaagaccatgttgtcgcaaa

SEQ ID NO: 5359908 - DNA, 25 bp, Homo sapien
gatgcaataaatacaggaacgcagg

SEQ ID NO: 5359909 - DNA, 25 bp, Homo sapien
tgttgttgcaaatgcgccaggcacg

SEQ ID NO: 5359910 - DNA, 25 bp, Homo sapien
tccaagagctgcgccccgcgcgcat

SEQ ID NO: 5359911 - DNA, 25 bp, Homo sapien
cggcctccaagagctgcgccccgcg

SEQ ID NO: 5359912 - DNA, 25 bp, Homo sapien
gcctccaagagctgcgccccgcgcg

SEQ ID NO: 5359913 - DNA, 25 bp, Homo sapien
cgcggcctccaagagctgcgccccg

SEQ ID NO: 5359914 - DNA, 25 bp, Homo sapien
agcttcagcgcgttcttcagcagca

SEQ ID NO: 5359915 - DNA, 25 bp, Homo sapien
tgaggcggccgcccccctcgccgtg

SEQ ID NO: 5359916 - DNA, 25 bp, Homo sapien
gagcttcagcgcgttcttcagcagc

SEQ ID NO: 5359917 - DNA, 25 bp, Homo sapien
cagagcttcagcgcgttcttcagca

SEQ ID NO: 5359918 - DNA, 25 bp, Homo sapien
tcaggtctggacgtccctcaagtgg

SEQ ID NO: 5359919 - DNA, 25 bp, Homo sapien
cgatattagtgtcaccgccgtcagt

SEQ ID NO: 5359920 - DNA, 25 bp, Homo sapien
taggcgatgtgaagagaaactacag

SEQ ID NO: 5359921 - DNA, 25 bp, Homo sapien
tcaagtggcccggaggtaccgatat

SEQ ID NO: 5359922 - DNA, 25 bp, Homo sapien
cagatgctcggacttgcaactggtg

SEQ ID NO: 5359923 - DNA, 25 bp, Homo sapien
agttgaacacatgaaggttcctgga

SEQ ID NO: 5359924 - DNA, 25 bp, Homo sapien
gagccaatatgaatgaccgcagcct

SEQ ID NO: 5359925 - DNA, 25 bp, Homo sapien
ggatctgatactatctcccatgtta

SEQ ID NO: 5359926 - DNA, 25 bp, Homo sapien
cttacatgtatgttttgggtggtca

SEQ ID NO: 5359927 - DNA, 25 bp, Homo sapien
gttttcccaaatgaatcaacttaca

SEQ ID NO: 5359928 - DNA, 25 bp, Homo sapien
gaatcaacttacatgtatgttttgg

SEQ ID NO: 5359929 - DNA, 25 bp, Homo sapien
ccaaatgaatcaacttacatgtatg

SEQ ID NO: 5359930 - DNA, 25 bp, Homo sapien
aggcccttcggtgcgggaagcaatc

SEQ ID NO: 5359931 - DNA, 25 bp, Homo sapien
ctacgtggcccctttatcaaatctg

SEQ ID NO: 5359932 - DNA, 25 bp, Homo sapien
ttcggtgcgggaagcaatcagaatg

SEQ ID NO: 5359933 - DNA, 25 bp, Homo sapien
catcagagaccatggtgagatggat

SEQ ID NO: 5359934 - DNA, 25 bp, Homo sapien
cactcataggtgagacattgggcaa

SEQ ID NO: 5359935 - DNA, 25 bp, Homo sapien
gaaacttcagaccataggactgtgg

SEQ ID NO: 5359936 - DNA, 25 bp, Homo sapien
gatgctaagggagttggctctcctg

SEQ ID NO: 5359937 - DNA, 25 bp, Homo sapien
tccacggtaaacacaaagtgactgg

SEQ ID NO: 5359938 - DNA, 25 bp, Homo sapien
acccctcccagggttatagccagtg

SEQ ID NO: 5359939 - DNA, 25 bp, Homo sapien
tgctttgggacttggaacaagtcac

SEQ ID NO: 5359940 - DNA, 25 bp, Homo sapien
attggagcagaaacttgctctgctg

SEQ ID NO: 5359941 - DNA, 25 bp, Homo sapien
cagggttatagccagtgctgggcat

SEQ ID NO: 5359942 - DNA, 25 bp, Homo sapien
tgggatgatggagacacctctaagc

SEQ ID NO: 5359943 - DNA, 25 bp, Homo sapien
cgtattcctccgagctgtgggatga

SEQ ID NO: 5359944 - DNA, 25 bp, Homo sapien
gtgggtttcagctcgtattcctccg

SEQ ID NO: 5359945 - DNA, 25 bp, Homo sapien
tttgcaaaaaaggcagtgggtttca

SEQ ID NO: 5359946 - DNA, 25 bp, Homo sapien
tacagcgtacactgctctggtgacg

SEQ ID NO: 5359947 - DNA, 25 bp, Homo sapien
gacaggtacagcgtacactgctctg

SEQ ID NO: 5359948 - DNA, 25 bp, Homo sapien
agcgtacactgctctggtgacgggt

SEQ ID NO: 5359949 - DNA, 25 bp, Homo sapien
agaggcctgacaggtacagcgtaca

SEQ ID NO: 5359950 - DNA, 25 bp, Homo sapien
cgaaatacgcgtacgtttctgtagg

SEQ ID NO: 5359951 - DNA, 25 bp, Homo sapien
taatcactggcgaaatacgcgtacg

SEQ ID NO: 5359952 - DNA, 25 bp, Homo sapien
ggtggtaatcactggcgaaatacgc

SEQ ID NO: 5359953 - DNA, 25 bp, Homo sapien
cactggcgaaatacgcgtacgtttc

SEQ ID NO: 5359954 - DNA, 25 bp, Homo sapien
taacatctgaggtgcattcttccaa

SEQ ID NO: 5359955 - DNA, 25 bp, Homo sapien
taagtgcccaggataagtgccctag

SEQ ID NO: 5359956 - DNA, 25 bp, Homo sapien
gtttctgagacagagcgcccgggct

SEQ ID NO: 5359957 - DNA, 25 bp, Homo sapien
caatctaagtaaaacgtggcacagc

SEQ ID NO: 5359958 - DNA, 25 bp, Homo sapien
gcttaacctcgcagctgcgcagacg

SEQ ID NO: 5359959 - DNA, 25 bp, Homo sapien
aaagggcggcttaacctcgcagctg

SEQ ID NO: 5359960 - DNA, 25 bp, Homo sapien
gccaaagggcggcttaacctcgcag

SEQ ID NO: 5359961 - DNA, 25 bp, Homo sapien
tggcaccaggaaccgtcctggggac

SEQ ID NO: 5359962 - DNA, 25 bp, Homo sapien
acctgctctgggagatgtaccgcac

SEQ ID NO: 5359963 - DNA, 25 bp, Homo sapien
tgctgagcatcatatcggaggaggc

SEQ ID NO: 5359964 - DNA, 25 bp, Homo sapien
actacttcagcaaggccgaccactt

SEQ ID NO: 5359965 - DNA, 25 bp, Homo sapien
aaggagctctcgagcctgctgagca

SEQ ID NO: 5359966 - DNA, 25 bp, Homo sapien
ttgccataggtgggatggcagtcac

SEQ ID NO: 5359967 - DNA, 25 bp, Homo sapien
tttgccataggtgggatggcagtca

SEQ ID NO: 5359968 - DNA, 25 bp, Homo sapien
agaaacaccaggcggggcacggtga

SEQ ID NO: 5359969 - DNA, 25 bp, Homo sapien
acaccaggcggggcacggtgactca

SEQ ID NO: 5359970 - DNA, 25 bp, Homo sapien
aaacaccaggcggggcacggtgact

SEQ ID NO: 5359971 - DNA, 25 bp, Homo sapien
aacaccaggcggggcacggtgactc

SEQ ID NO: 5359972 - DNA, 25 bp, Homo sapien
ttaacttgggatgccttgagtagcc

SEQ ID NO: 5359973 - DNA, 25 bp, Homo sapien
aaaagcaagcatgcctccactctgg

SEQ ID NO: 5359974 - DNA, 25 bp, Homo sapien
gatcacatgtctagagtaagggctg

SEQ ID NO: 5359975 - DNA, 25 bp, Homo sapien
cagtggcatccgtggaccaaaggtg

SEQ ID NO: 5359976 - DNA, 25 bp, Homo sapien
ctgatggcgtgtaactgcagtggct

SEQ ID NO: 5359977 - DNA, 25 bp, Homo sapien
tgatggacataatactgctgtgaac

SEQ ID NO: 5359978 - DNA, 25 bp, Homo sapien
taccttcacactgtggagtaccaag

SEQ ID NO: 5359979 - DNA, 25 bp, Homo sapien
tgtgcctgcctatagtttcactttg

SEQ ID NO: 5359980 - DNA, 25 bp, Homo sapien
tctcctcaggaaaggcaaggccact

SEQ ID NO: 5359981 - DNA, 25 bp, Homo sapien
gagatgacctctcctatcacgtttg

SEQ ID NO: 5359982 - DNA, 25 bp, Homo sapien
gctttgctcgcaagaccatcctgaa

SEQ ID NO: 5359983 - DNA, 25 bp, Homo sapien
cgagtgtgagactggatgactctcc

SEQ ID NO: 5359984 - DNA, 25 bp, Homo sapien
gtggaaaaatatggaccttaagagc

SEQ ID NO: 5359985 - DNA, 25 bp, Homo sapien
tcttagtgactaacagctgtaagtg

SEQ ID NO: 5359986 - DNA, 25 bp, Homo sapien
tgagaatcctaggaatgctgtccta

SEQ ID NO: 5359987 - DNA, 25 bp, Homo sapien
tgaccctgccatccttgactgtcag

SEQ ID NO: 5359988 - DNA, 25 bp, Homo sapien
gaaaattccaccagatgaccaaagc

SEQ ID NO: 5359989 - DNA, 25 bp, Homo sapien
tacagctgttgatctacctcctgaa

SEQ ID NO: 5359990 - DNA, 25 bp, Homo sapien
ttacgaaacagactaactacagctg

SEQ ID NO: 5359991 - DNA, 25 bp, Homo sapien
taaaactagggaattggatatgtca

SEQ ID NO: 5359992 - DNA, 25 bp, Homo sapien
ccgttaaaaccctgagtggattgct

SEQ ID NO: 5359993 - DNA, 25 bp, Homo sapien
tatccataggaggaatggctatccc

SEQ ID NO: 5359994 - DNA, 25 bp, Homo sapien
gctcttaactcctgatgaaccaagg

SEQ ID NO: 5359995 - DNA, 25 bp, Homo sapien
tcttgggcctcttataaacttggga

SEQ ID NO: 5359996 - DNA, 25 bp, Homo sapien
gagcatccccgttttgcacgttagc

SEQ ID NO: 5359997 - DNA, 25 bp, Homo sapien
ccagctttaggttctaggacctaca

SEQ ID NO: 5359998 - DNA, 25 bp, Homo sapien
ttttacacctaaaagcgagcatccc

SEQ ID NO: 5359999 - DNA, 25 bp, Homo sapien
tgaactaagcccatctatcagagga

SEQ ID NO: 5360000 - DNA, 25 bp, Homo sapien
atagcaagacctcgtttatattggg

SEQ ID NO: 5360001 - DNA, 25 bp, Homo sapien
gagtcaataactgcaataaactttt

SEQ ID NO: 5360002 - DNA, 25 bp, Homo sapien
acttgcaacaccaacaaaagcttga

SEQ ID NO: 5360003 - DNA, 25 bp, Homo sapien
ttaaatagcttacaaggaatagtgg

SEQ ID NO: 5360004 - DNA, 25 bp, Homo sapien
ttgattttctagttccaatttctag

SEQ ID NO: 5360005 - DNA, 25 bp, Homo sapien
ccaatttctagctttaatatcttca

SEQ ID NO: 5360006 - DNA, 25 bp, Homo sapien
tttctagttccaatttctagcttta

SEQ ID NO: 5360007 - DNA, 25 bp, Homo sapien
ctagttccaatttctagctttaata

SEQ ID NO: 5360008 - DNA, 25 bp, Homo sapien
acatcttagggtagaaagcagttat

SEQ ID NO: 5360009 - DNA, 25 bp, Homo sapien
taacatcttagggtagaaagcagtt

SEQ ID NO: 5360010 - DNA, 25 bp, Homo sapien
aacatcttagggtagaaagcagtta

SEQ ID NO: 5360011 - DNA, 25 bp, Homo sapien
agtaacatcttagggtagaaagcag

SEQ ID NO: 5360012 - DNA, 25 bp, Homo sapien
gaagcttccaatcctgctactgagg

SEQ ID NO: 5360013 - DNA, 25 bp, Homo sapien
cagactagtggttcgcttcaggata

SEQ ID NO: 5360014 - DNA, 25 bp, Homo sapien
tggagacactgcaattcggcctttt

SEQ ID NO: 5360015 - DNA, 25 bp, Homo sapien
tataatcccggatctgatacctgca

SEQ ID NO: 5360016 - DNA, 25 bp, Homo sapien
tgtgtgtttttacacctctctggcc

SEQ ID NO: 5360017 - DNA, 25 bp, Homo sapien
gtgtgtttttacacctctctggccc

SEQ ID NO: 5360018 - DNA, 25 bp, Homo sapien
tggtgtgtgtttttacacctctctg

SEQ ID NO: 5360019 - DNA, 25 bp, Homo sapien
gtgtgtgtttttacacctctctggc

SEQ ID NO: 5360020 - DNA, 25 bp, Homo sapien
tgctgggaaacccagaacgccagtc

SEQ ID NO: 5360021 - DNA, 25 bp, Homo sapien
ctgcggagagcagcacagtcacgga

SEQ ID NO: 5360022 - DNA, 25 bp, Homo sapien
tgccacccgcggtttccacagttaa

SEQ ID NO: 5360023 - DNA, 25 bp, Homo sapien
taaatactggtccacatgacatgtg

SEQ ID NO: 5360024 - DNA, 25 bp, Homo sapien
tgattcatgtggtaaataatataac

SEQ ID NO: 5360025 - DNA, 25 bp, Homo sapien
gaacactatgtttgacagctgctga

SEQ ID NO: 5360026 - DNA, 25 bp, Homo sapien
tgttggtgttaaaagcgtcaaccac

SEQ ID NO: 5360027 - DNA, 25 bp, Homo sapien
gatatgaccgtaattattccaacct

SEQ ID NO: 5360028 - DNA, 25 bp, Homo sapien
cttggtctgtcacagtatttttttt

SEQ ID NO: 5360029 - DNA, 25 bp, Homo sapien
agagaaacacccgtcaaatttattg

SEQ ID NO: 5360030 - DNA, 25 bp, Homo sapien
gagaaacacccgtcaaatttattgc

SEQ ID NO: 5360031 - DNA, 25 bp, Homo sapien
aaacacccgtcaaatttattgcagt

SEQ ID NO: 5360032 - DNA, 25 bp, Homo sapien
gaaacacccgtcaaatttattgcag

SEQ ID NO: 5360033 - DNA, 25 bp, Homo sapien
ctgtcttggcatcttggcagggcag

SEQ ID NO: 5360034 - DNA, 25 bp, Homo sapien
gctgattgctgatcttgccattctt

SEQ ID NO: 5360035 - DNA, 25 bp, Homo sapien
tcttcttgctgattgctgatcttgc

SEQ ID NO: 5360036 - DNA, 25 bp, Homo sapien
ttggaccccaagtgctccatgacct

SEQ ID NO: 5360037 - DNA, 25 bp, Homo sapien
gccatggacaagatgccaggacccg

SEQ ID NO: 5360038 - DNA, 25 bp, Homo sapien
tggacaagatgccaggacccgtatg

SEQ ID NO: 5360039 - DNA, 25 bp, Homo sapien
ctgggtccagcatttgccatggaca

SEQ ID NO: 5360040 - DNA, 25 bp, Homo sapien
catggacaagatgccaggacccgta

SEQ ID NO: 5360041 - DNA, 25 bp, Homo sapien
ttgccaccaatgctgtatggcgtgt

SEQ ID NO: 5360042 - DNA, 25 bp, Homo sapien
caccaatgctgtatggcgtgtgaag

SEQ ID NO: 5360043 - DNA, 25 bp, Homo sapien
gccaccaatgctgtatggcgtgtga

SEQ ID NO: 5360044 - DNA, 25 bp, Homo sapien
accaatgctgtatggcgtgtgaagt

SEQ ID NO: 5360045 - DNA, 25 bp, Homo sapien
gtgctcagagcatggaaattttctg

SEQ ID NO: 5360046 - DNA, 25 bp, Homo sapien
ctcagagcatggaaattttctgctg

SEQ ID NO: 5360047 - DNA, 25 bp, Homo sapien
cactctgacacgtaaaccctggaat

SEQ ID NO: 5360048 - DNA, 25 bp, Homo sapien
ccagtgctcagagcatggaaatttt

SEQ ID NO: 5360049 - DNA, 25 bp, Homo sapien
tatggattagatgagcagtcacttc

SEQ ID NO: 5360050 - DNA, 25 bp, Homo sapien
tttatggattagatgagcagtcact

SEQ ID NO: 5360051 - DNA, 25 bp, Homo sapien
ttatggattagatgagcagtcactt

SEQ ID NO: 5360052 - DNA, 25 bp, Homo sapien
tcgccatcgacagcaatgtggaaaa

SEQ ID NO: 5360053 - DNA, 25 bp, Homo sapien
ctcgccatcgacagcaatgtggaaa

SEQ ID NO: 5360054 - DNA, 25 bp, Homo sapien
cgccatcgacagcaatgtggaaaaa

SEQ ID NO: 5360055 - DNA, 25 bp, Homo sapien
gccatcgacagcaatgtggaaaaac

SEQ ID NO: 5360056 - DNA, 25 bp, Homo sapien
agcatctgcaaagctcacagccttc

SEQ ID NO: 5360057 - DNA, 25 bp, Homo sapien
gcaaagctcacagccttctttttaa

SEQ ID NO: 5360058 - DNA, 25 bp, Homo sapien
tctgcaaagctcacagccttctttt

SEQ ID NO: 5360059 - DNA, 25 bp, Homo sapien
catctgcaaagctcacagccttctt

SEQ ID NO: 5360060 - DNA, 25 bp, Homo sapien
cattttcccctagcatttctttctt

SEQ ID NO: 5360061 - DNA, 25 bp, Homo sapien
acattttcccctagcatttctttct

SEQ ID NO: 5360062 - DNA, 25 bp, Homo sapien
ctactgggaagaatgactagttaaa

SEQ ID NO: 5360063 - DNA, 25 bp, Homo sapien
tgggaagaatgactagttaaaacat

SEQ ID NO: 5360064 - DNA, 25 bp, Homo sapien
cctggcccttccctagtatttctgt

SEQ ID NO: 5360065 - DNA, 25 bp, Homo sapien
gaaacggttaagcaaggtcatggta

SEQ ID NO: 5360066 - DNA, 25 bp, Homo sapien
caaaagctttgcattagcctgctcc

SEQ ID NO: 5360067 - DNA, 25 bp, Homo sapien
aaccaactcagtgtgcaaagcgaaa

SEQ ID NO: 5360068 - DNA, 25 bp, Homo sapien
tatacagaataactaggagcaagga

SEQ ID NO: 5360069 - DNA, 25 bp, Homo sapien
tgtaatagtctgaagcaacacactg

SEQ ID NO: 5360070 - DNA, 25 bp, Homo sapien
tatattagagtacctgccccagttg

SEQ ID NO: 5360071 - DNA, 25 bp, Homo sapien
ggaaagcccatgagatcaattatcg

SEQ ID NO: 5360072 - DNA, 25 bp, Homo sapien
caaggcgtcacaagaaatgaggcaa

SEQ ID NO: 5360073 - DNA, 25 bp, Homo sapien
tgggtcctccatgccgagagtcact

SEQ ID NO: 5360074 - DNA, 25 bp, Homo sapien
ctaggagatgggtcctccatgccga

SEQ ID NO: 5360075 - DNA, 25 bp, Homo sapien
gagatgggtcctccatgccgagagt

SEQ ID NO: 5360076 - DNA, 25 bp, Homo sapien
tgccgagagtcactcctgccggctt

SEQ ID NO: 5360077 - DNA, 25 bp, Homo sapien
gactggcctcatgcgatgcaatctg

SEQ ID NO: 5360078 - DNA, 25 bp, Homo sapien
caccagccccggtttatagatggca

SEQ ID NO: 5360079 - DNA, 25 bp, Homo sapien
gacatgatcatggtcacggctcgct

SEQ ID NO: 5360080 - DNA, 25 bp, Homo sapien
taaagacagtcagagatggcggtac

SEQ ID NO: 5360081 - DNA, 25 bp, Homo sapien
tatgtcgttaccgttataaggctga

SEQ ID NO: 5360082 - DNA, 25 bp, Homo sapien
catttcctagttgctcctgagagtc

SEQ ID NO: 5360083 - DNA, 25 bp, Homo sapien
aaatattttgcactccccttcaagg

SEQ ID NO: 5360084 - DNA, 25 bp, Homo sapien
ccttctccagggtctaccatgagta

SEQ ID NO: 5360085 - DNA, 25 bp, Homo sapien
gatttctacccatgatttcaaattg

SEQ ID NO: 5360086 - DNA, 25 bp, Homo sapien
gacagccaatggtaaactgtaaggc

SEQ ID NO: 5360087 - DNA, 25 bp, Homo sapien
gttctaagagggtatttcaggacag

SEQ ID NO: 5360088 - DNA, 25 bp, Homo sapien
gtattatcttagttctaagagggta

SEQ ID NO: 5360089 - DNA, 25 bp, Homo sapien
ccagggtgctcatgtactagagaag

SEQ ID NO: 5360090 - DNA, 25 bp, Homo sapien
gaatgcctacacagatcaatcgcta

SEQ ID NO: 5360091 - DNA, 25 bp, Homo sapien
cactggtatgcactctggctctata

SEQ ID NO: 5360092 - DNA, 25 bp, Homo sapien
taagagccatttaccaagggaacat

SEQ ID NO: 5360093 - DNA, 25 bp, Homo sapien
gataatgtagaatagtccagaaatt

SEQ ID NO: 5360094 - DNA, 25 bp, Homo sapien
tgatgataatgtagaatagtccaga

SEQ ID NO: 5360095 - DNA, 25 bp, Homo sapien
tgtagaatagtccagaaatttttta

SEQ ID NO: 5360096 - DNA, 25 bp, Homo sapien
tgatgatgataatgtagaatagtcc

SEQ ID NO: 5360097 - DNA, 25 bp, Homo sapien
tcctaagtcagcatgcaatcaaagg

SEQ ID NO: 5360098 - DNA, 25 bp, Homo sapien
tacattttacctatcagagtgacag

SEQ ID NO: 5360099 - DNA, 25 bp, Homo sapien
taggttacctaacagcccataagtg

SEQ ID NO: 5360100 - DNA, 25 bp, Homo sapien
gaatcatgagagaacgggaaactaa

SEQ ID NO: 5360101 - DNA, 25 bp, Homo sapien
cacctttcgatttccagaaaaacat

SEQ ID NO: 5360102 - DNA, 25 bp, Homo sapien
tctacgtgggggacgactattttca

SEQ ID NO: 5360103 - DNA, 25 bp, Homo sapien
gacatctctacgtgggggacgacta

SEQ ID NO: 5360104 - DNA, 25 bp, Homo sapien
ttaagatgacatctctacgtggggg

SEQ ID NO: 5360105 - DNA, 25 bp, Homo sapien
gatgacatctctacgtgggggacga

SEQ ID NO: 5360106 - DNA, 25 bp, Homo sapien
ttactcttcgatagctcaaactcga

SEQ ID NO: 5360107 - DNA, 25 bp, Homo sapien
ggttacttactcttcgatagctcaa

SEQ ID NO: 5360108 - DNA, 25 bp, Homo sapien
tttctggttacttactcttcgatag

SEQ ID NO: 5360109 - DNA, 25 bp, Homo sapien
tctcaaatttctggttacttactct

SEQ ID NO: 5360110 - DNA, 25 bp, Homo sapien
tctcctttaaagctgggatcacact

SEQ ID NO: 5360111 - DNA, 25 bp, Homo sapien
acactgtggctcagattcagcaggg

SEQ ID NO: 5360112 - DNA, 25 bp, Homo sapien
actgctgtcatcacttccgtcatca

SEQ ID NO: 5360113 - DNA, 25 bp, Homo sapien
ggtggactgctgtcatcacttccgt

SEQ ID NO: 5360114 - DNA, 25 bp, Homo sapien
gcatctcctgtacatccccaggctc

SEQ ID NO: 5360115 - DNA, 25 bp, Homo sapien
aggcatctcctgtacatccccaggc

SEQ ID NO: 5360116 - DNA, 25 bp, Homo sapien
ctggtaaagctagactcaaatttgc

SEQ ID NO: 5360117 - DNA, 25 bp, Homo sapien
aaatgaattccttctcgacaaccaa

SEQ ID NO: 5360118 - DNA, 25 bp, Homo sapien
tgtacaatgaatctggcaaaaagca

SEQ ID NO: 5360119 - DNA, 25 bp, Homo sapien
tatcatctggctcgtaattcacaca

SEQ ID NO: 5360120 - DNA, 25 bp, Homo sapien
gacaaccaatctcctaaggccaaca

SEQ ID NO: 5360121 - DNA, 25 bp, Homo sapien
taaagtccctctgctatggtcagtg

SEQ ID NO: 5360122 - DNA, 25 bp, Homo sapien
tcatgtctgtatgcgtgccctgacc

SEQ ID NO: 5360123 - DNA, 25 bp, Homo sapien
caacaaatcctgtggctgtgacatc

SEQ ID NO: 5360124 - DNA, 25 bp, Homo sapien
tagttactataagagggcacagcat

SEQ ID NO: 5360125 - DNA, 25 bp, Homo sapien
tgtttctagtcaataatgaaactga

SEQ ID NO: 5360126 - DNA, 25 bp, Homo sapien
gttcctcttgtttctagtcaataat

SEQ ID NO: 5360127 - DNA, 25 bp, Homo sapien
gaactggggcagagattgaatataa

SEQ ID NO: 5360128 - DNA, 25 bp, Homo sapien
ctggggcagagattgaatataaaca

SEQ ID NO: 5360129 - DNA, 25 bp, Homo sapien
gacatgttcggtgatccaaaagcca

SEQ ID NO: 5360130 - DNA, 25 bp, Homo sapien
tgatgacatcaagtttacacattgg

SEQ ID NO: 5360131 - DNA, 25 bp, Homo sapien
tgatccaaaagccatgggtcaatgc

SEQ ID NO: 5360132 - DNA, 25 bp, Homo sapien
cacattggacatgttcggtgatcca

SEQ ID NO: 5360133 - DNA, 25 bp, Homo sapien
caatgtgcatacaactgtgccaggc

SEQ ID NO: 5360134 - DNA, 25 bp, Homo sapien
tatagtatgggtttcagagccagac

SEQ ID NO: 5360135 - DNA, 25 bp, Homo sapien
aacagatcatcttgcggtggtaggc

SEQ ID NO: 5360136 - DNA, 25 bp, Homo sapien
tctgcgactcaatggctgggactct

SEQ ID NO: 5360137 - DNA, 25 bp, Homo sapien
tctcctaggcaaagcaatcttaaag

SEQ ID NO: 5360138 - DNA, 25 bp, Homo sapien
acaacctcagaaggaacgcaagccc

SEQ ID NO: 5360139 - DNA, 25 bp, Homo sapien
tagtgtcacctaagaatctcctagg

SEQ ID NO: 5360140 - DNA, 25 bp, Homo sapien
caagcccagggtgcaaataacagca

SEQ ID NO: 5360141 - DNA, 25 bp, Homo sapien
ggcagaattctaataatatccttta

SEQ ID NO: 5360142 - DNA, 25 bp, Homo sapien
gcagaattctaataatatcctttac

SEQ ID NO: 5360143 - DNA, 25 bp, Homo sapien
catggcagaattctaataatatcct

SEQ ID NO: 5360144 - DNA, 25 bp, Homo sapien
ttgcatggcagaattctaataatat

SEQ ID NO: 5360145 - DNA, 25 bp, Homo sapien
caattttcagcatcaacatcaattc

SEQ ID NO: 5360146 - DNA, 25 bp, Homo sapien
aattttcaatacacactgcacaatt

SEQ ID NO: 5360147 - DNA, 25 bp, Homo sapien
aatacacactgcacaattttcagca

SEQ ID NO: 5360148 - DNA, 25 bp, Homo sapien
ttgaaattttcaatacacactgcac

SEQ ID NO: 5360149 - DNA, 25 bp, Homo sapien
atttcagagcgcaccagaagaacta

SEQ ID NO: 5360150 - DNA, 25 bp, Homo sapien
ggtagccaccaatacaattctcaaa

SEQ ID NO: 5360151 - DNA, 25 bp, Homo sapien
gtcatagctgcaagtcaacataatt

SEQ ID NO: 5360152 - DNA, 25 bp, Homo sapien
gtagtacgaaaacaatcagcaaagg

SEQ ID NO: 5360153 - DNA, 25 bp, Homo sapien
gaagctggccaataactttcttagt

SEQ ID NO: 5360154 - DNA, 25 bp, Homo sapien
tagaagctggccaataactttctta

SEQ ID NO: 5360155 - DNA, 25 bp, Homo sapien
agaagctggccaataactttcttag

SEQ ID NO: 5360156 - DNA, 25 bp, Homo sapien
gctttactacggctccatgatggag

SEQ ID NO: 5360157 - DNA, 25 bp, Homo sapien
cactcctttgggtctggcaagggac

SEQ ID NO: 5360158 - DNA, 25 bp, Homo sapien
taaaggcctcttcctagtcctcaag

SEQ ID NO: 5360159 - DNA, 25 bp, Homo sapien
gaaataagtggacgctcaaaaggcc

SEQ ID NO: 5360160 - DNA, 25 bp, Homo sapien
gggtgccaacccctatggtcatcgt

SEQ ID NO: 5360161 - DNA, 25 bp, Homo sapien
tagccaggctaacgagataatcatc

SEQ ID NO: 5360162 - DNA, 25 bp, Homo sapien
gactgaccgctgatgaactcctgta

SEQ ID NO: 5360163 - DNA, 25 bp, Homo sapien
tctgagagccagtatataggaaacg

SEQ ID NO: 5360164 - DNA, 25 bp, Homo sapien
tctcaacatgtgaactctctagagg

SEQ ID NO: 5360165 - DNA, 25 bp, Homo sapien
tacagagcatcaagaatttattatc

SEQ ID NO: 5360166 - DNA, 25 bp, Homo sapien
taacctgctctgcaaatacaaactg

SEQ ID NO: 5360167 - DNA, 25 bp, Homo sapien
tgtgagagtgtagcattacagagca

SEQ ID NO: 5360168 - DNA, 25 bp, Homo sapien
tattcaattttacaggcaggccacc

SEQ ID NO: 5360169 - DNA, 25 bp, Homo sapien
gcactcggcctagtattcaatttta

SEQ ID NO: 5360170 - DNA, 25 bp, Homo sapien
tgagccaacgcactcggcctagtat

SEQ ID NO: 5360171 - DNA, 25 bp, Homo sapien
cctagtattcaattttacaggcagg

SEQ ID NO: 5360172 - DNA, 25 bp, Homo sapien
tctgctgcgactgaggaactgtcct

SEQ ID NO: 5360173 - DNA, 25 bp, Homo sapien
tactgcctgaagatacaacctgctg

SEQ ID NO: 5360174 - DNA, 25 bp, Homo sapien
gacttaaactatgactactgcctga

SEQ ID NO: 5360175 - DNA, 25 bp, Homo sapien
cattcttgtgcaaacgcagcctggg

SEQ ID NO: 5360176 - DNA, 25 bp, Homo sapien
tcccaacagcgatcggggagccgca

SEQ ID NO: 5360177 - DNA, 25 bp, Homo sapien
agccgcaccgagcaaacgagggctt

SEQ ID NO: 5360178 - DNA, 25 bp, Homo sapien
tcgcggcctgcggttcagggccaac

SEQ ID NO: 5360179 - DNA, 25 bp, Homo sapien
gtgccaggcccgcttcgcggcctgc

SEQ ID NO: 5360180 - DNA, 25 bp, Homo sapien
acggccgaggcgttcctccgcgccg

SEQ ID NO: 5360181 - DNA, 25 bp, Homo sapien
tccttgaaggtgcagcccccacgag

SEQ ID NO: 5360182 - DNA, 25 bp, Homo sapien
ggctcgggcacgaagaagcgcgtgt

SEQ ID NO: 5360183 - DNA, 25 bp, Homo sapien
ctcattgtagaggacgacggccgag

SEQ ID NO: 5360184 - DNA, 25 bp, Homo sapien
cgaggtctccgccgggcgcccacgg

SEQ ID NO: 5360185 - DNA, 25 bp, Homo sapien
ctcgaggtctccgccgggcgcccac

SEQ ID NO: 5360186 - DNA, 25 bp, Homo sapien
tcgaggtctccgccgggcgcccacg

SEQ ID NO: 5360187 - DNA, 25 bp, Homo sapien
tctccgccgggcgcccacgggacgc

SEQ ID NO: 5360188 - DNA, 25 bp, Homo sapien
agacgctccacaccgtcaggttggt

SEQ ID NO: 5360189 - DNA, 25 bp, Homo sapien
aagcggccactctccgagacgctcc

SEQ ID NO: 5360190 - DNA, 25 bp, Homo sapien
cctccttgggcgagctgtcgccgaa

SEQ ID NO: 5360191 - DNA, 25 bp, Homo sapien
tccttgggcgagctgtcgccgaagc

SEQ ID NO: 5360192 - DNA, 25 bp, Homo sapien
gggtccacgtactcgatgtttacca

SEQ ID NO: 5360193 - DNA, 25 bp, Homo sapien
tgcgggtccacgtactcgatgttta

SEQ ID NO: 5360194 - DNA, 25 bp, Homo sapien
gcgggtccacgtactcgatgtttac

SEQ ID NO: 5360195 - DNA, 25 bp, Homo sapien
ctgcgggtccacgtactcgatgttt

SEQ ID NO: 5360196 - DNA, 25 bp, Homo sapien
cgacgctggcttcgcgccgccgcca

SEQ ID NO: 5360197 - DNA, 25 bp, Homo sapien
gccgcgagccccgacgctggcttcg

SEQ ID NO: 5360198 - DNA, 25 bp, Homo sapien
gccagggcgagcaacgccagagcca

SEQ ID NO: 5360199 - DNA, 25 bp, Homo sapien
ggcgagcaacgccagagccaacacg

SEQ ID NO: 5360200 - DNA, 25 bp, Homo sapien
ggcagcaccgctgagctgactaggg

SEQ ID NO: 5360201 - DNA, 25 bp, Homo sapien
gggagtcagggtcacgcgcgagtgc

SEQ ID NO: 5360202 - DNA, 25 bp, Homo sapien
gcggtgcagtcgaagagcagagaga

SEQ ID NO: 5360203 - DNA, 25 bp, Homo sapien
agagagaagcggacacccaccgccg

SEQ ID NO: 5360204 - DNA, 25 bp, Homo sapien
ttagaaccgcttttgctgtccactc

SEQ ID NO: 5360205 - DNA, 25 bp, Homo sapien
cagaggaacatcaaacctggcacct

SEQ ID NO: 5360206 - DNA, 25 bp, Homo sapien
gaaccgcttttgctgtccactctgc

SEQ ID NO: 5360207 - DNA, 25 bp, Homo sapien
gggtcagaggaacatcaaacctggc

SEQ ID NO: 5360208 - DNA, 25 bp, Homo sapien
ctgtataggcttatgcatttggaaa

SEQ ID NO: 5360209 - DNA, 25 bp, Homo sapien
tcattagcaaacaagcaaatacgtc

SEQ ID NO: 5360210 - DNA, 25 bp, Homo sapien
ctgatggcaggtgagagtttccgta

SEQ ID NO: 5360211 - DNA, 25 bp, Homo sapien
cattgctgtagccactgtataggct

SEQ ID NO: 5360212 - DNA, 25 bp, Homo sapien
gggccattgccagggacagccactg

SEQ ID NO: 5360213 - DNA, 25 bp, Homo sapien
agcctggtctcggtccgctggagct

SEQ ID NO: 5360214 - DNA, 25 bp, Homo sapien
accagggaagacacggcttgtgaag

SEQ ID NO: 5360215 - DNA, 25 bp, Homo sapien
cagccactgtcgagagcagggagag

SEQ ID NO: 5360216 - DNA, 25 bp, Homo sapien
accatgttcccggtcacctccaccg

SEQ ID NO: 5360217 - DNA, 25 bp, Homo sapien
agccaccatgttcccggtcacctcc

SEQ ID NO: 5360218 - DNA, 25 bp, Homo sapien
tgtgactgcggcatctggctcaccc

SEQ ID NO: 5360219 - DNA, 25 bp, Homo sapien
tgttcccggtcacctccaccgtcca

SEQ ID NO: 5360220 - DNA, 25 bp, Homo sapien
gctaccttgctcagcctagaaatac

SEQ ID NO: 5360221 - DNA, 25 bp, Homo sapien
taaaaacatggtggtctggatagac

SEQ ID NO: 5360222 - DNA, 25 bp, Homo sapien
tcagaaattcgaagatgtcctctcc

SEQ ID NO: 5360223 - DNA, 25 bp, Homo sapien
cacacttggatacttatatacacct

SEQ ID NO: 5360224 - DNA, 25 bp, Homo sapien
agtggttgcccatgtcagtaattag

SEQ ID NO: 5360225 - DNA, 25 bp, Homo sapien
tctggaattcatcccagtggttgcc

SEQ ID NO: 5360226 - DNA, 25 bp, Homo sapien
tagtattccgggcatagaggcacca

SEQ ID NO: 5360227 - DNA, 25 bp, Homo sapien
tatgattggctttgctcactcagca

SEQ ID NO: 5360228 - DNA, 25 bp, Homo sapien
caccactagtgtatgactgacccgg

SEQ ID NO: 5360229 - DNA, 25 bp, Homo sapien
aatggttttgcggagtggctgttcc

SEQ ID NO: 5360230 - DNA, 25 bp, Homo sapien
gcatccttgtcagcgtttggtgtta

SEQ ID NO: 5360231 - DNA, 25 bp, Homo sapien
aatgcccaggagcaattgagggtca

SEQ ID NO: 5360232 - DNA, 25 bp, Homo sapien
gaatttctatgtaggcaatcctctc

SEQ ID NO: 5360233 - DNA, 25 bp, Homo sapien
ttggaatttctatgtaggcaatcct

SEQ ID NO: 5360234 - DNA, 25 bp, Homo sapien
aatttctatgtaggcaatcctctca

SEQ ID NO: 5360235 - DNA, 25 bp, Homo sapien
ttctatgtaggcaatcctctcatct

SEQ ID NO: 5360236 - DNA, 25 bp, Homo sapien
taaaactggatgtcttgtaggaacc

SEQ ID NO: 5360237 - DNA, 25 bp, Homo sapien
catctcattggttgcagggcttaaa

SEQ ID NO: 5360238 - DNA, 25 bp, Homo sapien
gagaagctcccagtattaaggtgtg

SEQ ID NO: 5360239 - DNA, 25 bp, Homo sapien
gactataaacgcaaacctagccagg

SEQ ID NO: 5360240 - DNA, 25 bp, Homo sapien
caccagcaggaggagtaatccacgg

SEQ ID NO: 5360241 - DNA, 25 bp, Homo sapien
ctagccagtatgacctaataatgca

SEQ ID NO: 5360242 - DNA, 25 bp, Homo sapien
gagtaatccacggacacacagtcct

SEQ ID NO: 5360243 - DNA, 25 bp, Homo sapien
ctaataatgcatctgcaatccacca

SEQ ID NO: 5360244 - DNA, 25 bp, Homo sapien
ccttcaacaaagagacagtggtcaa

SEQ ID NO: 5360245 - DNA, 25 bp, Homo sapien
cagtggtcaatagctgtctggctgc

SEQ ID NO: 5360246 - DNA, 25 bp, Homo sapien
cagctgcttcgtggtcacagtgaac

SEQ ID NO: 5360247 - DNA, 25 bp, Homo sapien
aacaatattgtgactgcgtgatgca

SEQ ID NO: 5360248 - DNA, 25 bp, Homo sapien
tcctcccttgaaatactggatgcgc

SEQ ID NO: 5360249 - DNA, 25 bp, Homo sapien
gaagccagatatgttctatcctcat

SEQ ID NO: 5360250 - DNA, 25 bp, Homo sapien
gatgcgcctccataccatttctgaa

SEQ ID NO: 5360251 - DNA, 25 bp, Homo sapien
cattcatattgacgaggccacttcc

SEQ ID NO: 5360252 - DNA, 25 bp, Homo sapien
tctggccagtgagcgttaactggac

SEQ ID NO: 5360253 - DNA, 25 bp, Homo sapien
ttcttctggagacactgcgatcatc

SEQ ID NO: 5360254 - DNA, 25 bp, Homo sapien
gggatcttccggatcaacgatgttt

SEQ ID NO: 5360255 - DNA, 25 bp, Homo sapien
catggcttgcttggcaaattctact

SEQ ID NO: 5360256 - DNA, 25 bp, Homo sapien
ctgccaagagccactggtcatggtg

SEQ ID NO: 5360257 - DNA, 25 bp, Homo sapien
tctgccaagagccactggtcatggt

SEQ ID NO: 5360258 - DNA, 25 bp, Homo sapien
gccaagagccactggtcatggtggg

SEQ ID NO: 5360259 - DNA, 25 bp, Homo sapien
tgccaagagccactggtcatggtgg

SEQ ID NO: 5360260 - DNA, 25 bp, Homo sapien
tatggtccagtaaagcccagttctg

SEQ ID NO: 5360261 - DNA, 25 bp, Homo sapien
ttatggtccagtaaagcccagttct

SEQ ID NO: 5360262 - DNA, 25 bp, Homo sapien
tcgttatcatcgtaagacatgggcg

SEQ ID NO: 5360263 - DNA, 25 bp, Homo sapien
tgctggagacctcttcaggcccggc

SEQ ID NO: 5360264 - DNA, 25 bp, Homo sapien
gacatgggcgctttcttgaatctcc

SEQ ID NO: 5360265 - DNA, 25 bp, Homo sapien
tgaagctctgaagcacgtgacgacg

SEQ ID NO: 5360266 - DNA, 25 bp, Homo sapien
gatacctcgctatattccagtggcc

SEQ ID NO: 5360267 - DNA, 25 bp, Homo sapien
tggaatgcgaacctcacacaggtga

SEQ ID NO: 5360268 - DNA, 25 bp, Homo sapien
tgtttgggtagctgcggacacttct

SEQ ID NO: 5360269 - DNA, 25 bp, Homo sapien
tgtccttcgaagctctacccaggtg

SEQ ID NO: 5360270 - DNA, 25 bp, Homo sapien
tcccaggccagagtaacaggtatgc

SEQ ID NO: 5360271 - DNA, 25 bp, Homo sapien
tacgtggctctaggctgtgcaggca

SEQ ID NO: 5360272 - DNA, 25 bp, Homo sapien
catgaagaaggtccgcatacgtggc

SEQ ID NO: 5360273 - DNA, 25 bp, Homo sapien
tgcacaggtgtttgcgtgtcctaca

SEQ ID NO: 5360274 - DNA, 25 bp, Homo sapien
ggttgccagttgacaaatcctcccc

SEQ ID NO: 5360275 - DNA, 25 bp, Homo sapien
gccgcagctttgtcccaagtatata

SEQ ID NO: 5360276 - DNA, 25 bp, Homo sapien
ccagctggagtgctgccgcagcttt

SEQ ID NO: 5360277 - DNA, 25 bp, Homo sapien
tgggttctgggagccacatgctcca

SEQ ID NO: 5360278 - DNA, 25 bp, Homo sapien
taacagtaagcttgactgaccaaga

SEQ ID NO: 5360279 - DNA, 25 bp, Homo sapien
agttgctttgattagcctctgtaag

SEQ ID NO: 5360280 - DNA, 25 bp, Homo sapien
gcctgggaagcttagaaaggtatcc

SEQ ID NO: 5360281 - DNA, 25 bp, Homo sapien
gaaacaatggcttatccaggatgca

SEQ ID NO: 5360282 - DNA, 25 bp, Homo sapien
ccgtgctgtgcataaagaataatag

SEQ ID NO: 5360283 - DNA, 25 bp, Homo sapien
ggcctgcatcaatgttctgttagtg

SEQ ID NO: 5360284 - DNA, 25 bp, Homo sapien
ctggaggttaaagggctcaccccag

SEQ ID NO: 5360285 - DNA, 25 bp, Homo sapien
catttaggtggagtgactaaggtcc

SEQ ID NO: 5360286 - DNA, 25 bp, Homo sapien
acccgtgtgagtgagggcaaaccgt

SEQ ID NO: 5360287 - DNA, 25 bp, Homo sapien
atcaatgtgcatctcagagttctgt

SEQ ID NO: 5360288 - DNA, 25 bp, Homo sapien
tgagtgagggcaaaccgtcgtctac

SEQ ID NO: 5360289 - DNA, 25 bp, Homo sapien
gatttcaagggtgaacatcaatgtg

SEQ ID NO: 5360290 - DNA, 25 bp, Homo sapien
tctggcagcatcagcgaggccatgg

SEQ ID NO: 5360291 - DNA, 25 bp, Homo sapien
agaaaggaatcccagtgctattgtt

SEQ ID NO: 5360292 - DNA, 25 bp, Homo sapien
gaatcccagtgctattgttgaaggg

SEQ ID NO: 5360293 - DNA, 25 bp, Homo sapien
ggccatcactgacgggcaggcagtt

SEQ ID NO: 5360294 - DNA, 25 bp, Homo sapien
cggtaggagaacatcccgggtggcg

SEQ ID NO: 5360295 - DNA, 25 bp, Homo sapien
agccccagacgctggcatgggccag

SEQ ID NO: 5360296 - DNA, 25 bp, Homo sapien
tgcccgaatcctctagcagcgcggg

SEQ ID NO: 5360297 - DNA, 25 bp, Homo sapien
cgcgggcatagcctcctcagtggag

SEQ ID NO: 5360298 - DNA, 25 bp, Homo sapien
gcccaagacacggagctcacgatca

SEQ ID NO: 5360299 - DNA, 25 bp, Homo sapien
ttggtgacggcccaagacacggagc

SEQ ID NO: 5360300 - DNA, 25 bp, Homo sapien
gagctcacgatcacgtagcccgcgg

SEQ ID NO: 5360301 - DNA, 25 bp, Homo sapien
ctcgttggtgacggcccaagacacg

SEQ ID NO: 5360302 - DNA, 25 bp, Homo sapien
ccggccgccggccgcggcgcacgga

SEQ ID NO: 5360303 - DNA, 25 bp, Homo sapien
caggagaggcgggtccccggccgcg

SEQ ID NO: 5360304 - DNA, 25 bp, Homo sapien
gcagccaggagaggcgggtccccgg

SEQ ID NO: 5360305 - DNA, 25 bp, Homo sapien
gccgccggccgcggcgcacggacat

SEQ ID NO: 5360306 - DNA, 25 bp, Homo sapien
gccggggccgccagcagcgctagtg

SEQ ID NO: 5360307 - DNA, 25 bp, Homo sapien
ccggggccgccagcagcgctagtgc

SEQ ID NO: 5360308 - DNA, 25 bp, Homo sapien
cgagtcccggcgaatccctgcagcc

SEQ ID NO: 5360309 - DNA, 25 bp, Homo sapien
ccactgcggcggaagcaaggagccc

SEQ ID NO: 5360310 - DNA, 25 bp, Homo sapien
gaccaggttccacgcacacgccgcg

SEQ ID NO: 5360311 - DNA, 25 bp, Homo sapien
ctcagaagtccaggctcgcagaaga

SEQ ID NO: 5360312 - DNA, 25 bp, Homo sapien
catctttcgtcaatagaaaaacttt

SEQ ID NO: 5360313 - DNA, 25 bp, Homo sapien
atattttatcgaaaccacctccttg

SEQ ID NO: 5360314 - DNA, 25 bp, Homo sapien
tgcaagtctatcagttttcttattc

SEQ ID NO: 5360315 - DNA, 25 bp, Homo sapien
acatcatctttcgtcaatagaaaaa

SEQ ID NO: 5360316 - DNA, 25 bp, Homo sapien
ggggtacatctgatatctgaatcac

SEQ ID NO: 5360317 - DNA, 25 bp, Homo sapien
cagagctttggggtacatctgatat

SEQ ID NO: 5360318 - DNA, 25 bp, Homo sapien
cacacattagcattgttttctctga

SEQ ID NO: 5360319 - DNA, 25 bp, Homo sapien
tatcttcagagctttggggtacatc

SEQ ID NO: 5360320 - DNA, 25 bp, Homo sapien
catcttttagggttatgagggcttc

SEQ ID NO: 5360321 - DNA, 25 bp, Homo sapien
tgtccatcttttagggttatgaggg

SEQ ID NO: 5360322 - DNA, 25 bp, Homo sapien
ctgagtttaactgcgctttcagtgg

SEQ ID NO: 5360323 - DNA, 25 bp, Homo sapien
gagggcttcttgtcccataggaagg

SEQ ID NO: 5360324 - DNA, 25 bp, Homo sapien
ccatgttgctcacacccacgggata

SEQ ID NO: 5360325 - DNA, 25 bp, Homo sapien
ggatcctgaggaccatgttgctcac

SEQ ID NO: 5360326 - DNA, 25 bp, Homo sapien
ttgctcacacccacgggatatcggc

SEQ ID NO: 5360327 - DNA, 25 bp, Homo sapien
gatcctgaggaccatgttgctcaca

SEQ ID NO: 5360328 - DNA, 25 bp, Homo sapien
ctgcgacagtgaggaattcagagaa

SEQ ID NO: 5360329 - DNA, 25 bp, Homo sapien
cagagaatggaaaagtgcctggtct

SEQ ID NO: 5360330 - DNA, 25 bp, Homo sapien
tctggctggccgagagtcgggtcat

SEQ ID NO: 5360331 - DNA, 25 bp, Homo sapien
gaattcagagaatggaaaagtgcct

SEQ ID NO: 5360332 - DNA, 25 bp, Homo sapien
tcctctaggcatgactgaagtatat

SEQ ID NO: 5360333 - DNA, 25 bp, Homo sapien
gcatgactgaagtatatgaatcata

SEQ ID NO: 5360334 - DNA, 25 bp, Homo sapien
cctcctctaggcatgactgaagtat

SEQ ID NO: 5360335 - DNA, 25 bp, Homo sapien
taggcatgactgaagtatatgaatc

SEQ ID NO: 5360336 - DNA, 25 bp, Homo sapien
aaaactatctctgtggcagagggtc

SEQ ID NO: 5360337 - DNA, 25 bp, Homo sapien
caaaactatctctgtggcagagggt

SEQ ID NO: 5360338 - DNA, 25 bp, Homo sapien
gaagctggcggccaatttggtaaac

SEQ ID NO: 5360339 - DNA, 25 bp, Homo sapien
tggcggccaatttggtaaactcttc

SEQ ID NO: 5360340 - DNA, 25 bp, Homo sapien
tcagctggaagctggcggccaattt

SEQ ID NO: 5360341 - DNA, 25 bp, Homo sapien
ctcagctggaagctggcggccaatt

SEQ ID NO: 5360342 - DNA, 25 bp, Homo sapien
catctctgacaagcccaaaggtgtg

SEQ ID NO: 5360343 - DNA, 25 bp, Homo sapien
gccagatgctaactgaagccatggg

SEQ ID NO: 5360344 - DNA, 25 bp, Homo sapien
caaaggtgtgcatcttaatagtctg

SEQ ID NO: 5360345 - DNA, 25 bp, Homo sapien
ttgagctttcttcccgtcacgtcca

SEQ ID NO: 5360346 - DNA, 25 bp, Homo sapien
tatcgacaacgaaaccatctttggg

SEQ ID NO: 5360347 - DNA, 25 bp, Homo sapien
tcccaagagccacattggtcgaaag

SEQ ID NO: 5360348 - DNA, 25 bp, Homo sapien
caaacctgcccatatcgacaacgaa

SEQ ID NO: 5360349 - DNA, 25 bp, Homo sapien
cattggtcgaaaggatcaaacctgc

SEQ ID NO: 5360350 - DNA, 25 bp, Homo sapien
aatgcttggagatgtgaagacagac

SEQ ID NO: 5360351 - DNA, 25 bp, Homo sapien
tgttgatgttcccagcaaagaaatt

SEQ ID NO: 5360352 - DNA, 25 bp, Homo sapien
cagacagctgaggaataccctgaga

SEQ ID NO: 5360353 - DNA, 25 bp, Homo sapien
taccctgagatctgttgatgttccc

SEQ ID NO: 5360354 - DNA, 25 bp, Homo sapien
gcttggacttggaactggaatcatt

SEQ ID NO: 5360355 - DNA, 25 bp, Homo sapien
tgcagtggcccctctgaggcttggt

SEQ ID NO: 5360356 - DNA, 25 bp, Homo sapien
gcttggtggaggtgcgcttggactt

SEQ ID NO: 5360357 - DNA, 25 bp, Homo sapien
ttggaaaactgagtcggttgcagtg

SEQ ID NO: 5360358 - DNA, 25 bp, Homo sapien
tggccagaccagtgggcagtctgga

SEQ ID NO: 5360359 - DNA, 25 bp, Homo sapien
ggccagaccagtgggcagtctggaa

SEQ ID NO: 5360360 - DNA, 25 bp, Homo sapien
gccagaccagtgggcagtctggaag

SEQ ID NO: 5360361 - DNA, 25 bp, Homo sapien
catcttggcagcgagtgtttggaaa

SEQ ID NO: 5360362 - DNA, 25 bp, Homo sapien
atcttggcagcgagtgtttggaaag

SEQ ID NO: 5360363 - DNA, 25 bp, Homo sapien
ggggcatcttggcagcgagtgtttg

SEQ ID NO: 5360364 - DNA, 25 bp, Homo sapien
ggcatcttggcagcgagtgtttgga

SEQ ID NO: 5360365 - DNA, 25 bp, Homo sapien
atgctagccccaaatctatgcccaa

SEQ ID NO: 5360366 - DNA, 25 bp, Homo sapien
caacacgccaataaagcaagctgca

SEQ ID NO: 5360367 - DNA, 25 bp, Homo sapien
ttaacgatggccatgctagccccaa

SEQ ID NO: 5360368 - DNA, 25 bp, Homo sapien
aattcatgagttaacgatggccatg

SEQ ID NO: 5360369 - DNA, 25 bp, Homo sapien
agttcatctgcgccactccggtcac

SEQ ID NO: 5360370 - DNA, 25 bp, Homo sapien
tccagttcatctgcgccactccggt

SEQ ID NO: 5360371 - DNA, 25 bp, Homo sapien
ctccagttcatctgcgccactccgg

SEQ ID NO: 5360372 - DNA, 25 bp, Homo sapien
cagttcatctgcgccactccggtca

SEQ ID NO: 5360373 - DNA, 25 bp, Homo sapien
tagccaaagtgccttgattgatgat

SEQ ID NO: 5360374 - DNA, 25 bp, Homo sapien
gacacgcctcttacttttcaatacc

SEQ ID NO: 5360375 - DNA, 25 bp, Homo sapien
agggctttcttagaagtagccaaag

SEQ ID NO: 5360376 - DNA, 25 bp, Homo sapien
ttcaaaacgctgacacgcctcttac

SEQ ID NO: 5360377 - DNA, 25 bp, Homo sapien
ttctctgcaccacaatcgccccacg

SEQ ID NO: 5360378 - DNA, 25 bp, Homo sapien
ccaaatgactctagcgagggatccc

SEQ ID NO: 5360379 - DNA, 25 bp, Homo sapien
ccacgcccaaatgactctagcgagg

SEQ ID NO: 5360380 - DNA, 25 bp, Homo sapien
aatgactctagcgagggatcccggg

SEQ ID NO: 5360381 - DNA, 25 bp, Homo sapien
ctggactcctctgccaatggccagg

SEQ ID NO: 5360382 - DNA, 25 bp, Homo sapien
catcttttaagtgttgacctgcctt

SEQ ID NO: 5360383 - DNA, 25 bp, Homo sapien
gccatcgggcatcttttaagtgttg

SEQ ID NO: 5360384 - DNA, 25 bp, Homo sapien
tctagctttgagtcacgggggccca

SEQ ID NO: 5360385 - DNA, 25 bp, Homo sapien
ttaacagggacttagagctttcacc

SEQ ID NO: 5360386 - DNA, 25 bp, Homo sapien
cttagagctttcacctcttttcagg

SEQ ID NO: 5360387 - DNA, 25 bp, Homo sapien
tcttaacagggacttagagctttca

SEQ ID NO: 5360388 - DNA, 25 bp, Homo sapien
cagggacttagagctttcacctctt

SEQ ID NO: 5360389 - DNA, 25 bp, Homo sapien
tcttagtcttttgacaaatagagta

SEQ ID NO: 5360390 - DNA, 25 bp, Homo sapien
ttagtcttttgacaaatagagtaac

SEQ ID NO: 5360391 - DNA, 25 bp, Homo sapien
agtcttttgacaaatagagtaactt

SEQ ID NO: 5360392 - DNA, 25 bp, Homo sapien
ctttcttcttagtcttttgacaaat

SEQ ID NO: 5360393 - DNA, 25 bp, Homo sapien
aacacacgtggccattaatacaata

SEQ ID NO: 5360394 - DNA, 25 bp, Homo sapien
gggacgcttggctgaaatgtcctca

SEQ ID NO: 5360395 - DNA, 25 bp, Homo sapien
cagctggctaaactgcaacttcccc

SEQ ID NO: 5360396 - DNA, 25 bp, Homo sapien
cctctctgagtggctagaagatcct

SEQ ID NO: 5360397 - DNA, 25 bp, Homo sapien
cagaggcttgaattcgggcagatgt

SEQ ID NO: 5360398 - DNA, 25 bp, Homo sapien
ccccgtagggagttcgagagctgca

SEQ ID NO: 5360399 - DNA, 25 bp, Homo sapien
ggaaaccgctgaagtagcctacaga

SEQ ID NO: 5360400 - DNA, 25 bp, Homo sapien
gtgacaaaatgaccctgacctggca

SEQ ID NO: 5360401 - DNA, 25 bp, Homo sapien
gatgatccgacagggcatggcaggt

SEQ ID NO: 5360402 - DNA, 25 bp, Homo sapien
caggatgatccgacagggcatggca

SEQ ID NO: 5360403 - DNA, 25 bp, Homo sapien
ttccaggatgatccgacagggcatg

SEQ ID NO: 5360404 - DNA, 25 bp, Homo sapien
tttccaggatgatccgacagggcat

SEQ ID NO: 5360405 - DNA, 25 bp, Homo sapien
tgggccttccggactgtagctgagt

SEQ ID NO: 5360406 - DNA, 25 bp, Homo sapien
gataaatagcctggtggaagcagca

SEQ ID NO: 5360407 - DNA, 25 bp, Homo sapien
tgacagagcagttcaggctcgcgct

SEQ ID NO: 5360408 - DNA, 25 bp, Homo sapien
gctgaaagctaccacccagggtgaa

SEQ ID NO: 5360409 - DNA, 25 bp, Homo sapien
tttgagtttggagatctgcaagagg

SEQ ID NO: 5360410 - DNA, 25 bp, Homo sapien
gccacagcttaaatttcttactaaa

SEQ ID NO: 5360411 - DNA, 25 bp, Homo sapien
caggtactgaatagaaacatcttcc

SEQ ID NO: 5360412 - DNA, 25 bp, Homo sapien
ccaagaagtcatgaaggagaacatc

SEQ ID NO: 5360413 - DNA, 25 bp, Homo sapien
cttgtacagctggacgtcgtagcat

SEQ ID NO: 5360414 - DNA, 25 bp, Homo sapien
tgtacagctggacgtcgtagcattt

SEQ ID NO: 5360415 - DNA, 25 bp, Homo sapien
ctggacgtcgtagcatttaaagagc

SEQ ID NO: 5360416 - DNA, 25 bp, Homo sapien
cagctggacgtcgtagcatttaaag

SEQ ID NO: 5360417 - DNA, 25 bp, Homo sapien
tctgagagcacctgccagttggatg

SEQ ID NO: 5360418 - DNA, 25 bp, Homo sapien
tccttagccccagatgacaatggga

SEQ ID NO: 5360419 - DNA, 25 bp, Homo sapien
tccagtgcgtgtaaagctttgcctc

SEQ ID NO: 5360420 - DNA, 25 bp, Homo sapien
gattatactaggatgaggactgggc

SEQ ID NO: 5360421 - DNA, 25 bp, Homo sapien
ttcggcaccattgaaaattccaggg

SEQ ID NO: 5360422 - DNA, 25 bp, Homo sapien
tatcaatcaaatggctcttcggcac

SEQ ID NO: 5360423 - DNA, 25 bp, Homo sapien
gatcactcagctgcgaagtcctgct

SEQ ID NO: 5360424 - DNA, 25 bp, Homo sapien
ttaccattggacatctgttgacggg

SEQ ID NO: 5360425 - DNA, 25 bp, Homo sapien
caatagttgcagtattcgtcagcaa

SEQ ID NO: 5360426 - DNA, 25 bp, Homo sapien
tctcgacaatagttgcagtattcgt

SEQ ID NO: 5360427 - DNA, 25 bp, Homo sapien
aatgtctcgacaatagttgcagtat

SEQ ID NO: 5360428 - DNA, 25 bp, Homo sapien
gttgcagtattcgtcagcaaggaag

SEQ ID NO: 5360429 - DNA, 25 bp, Homo sapien
ccagaaatggacatctcctgaattc

SEQ ID NO: 5360430 - DNA, 25 bp, Homo sapien
tcttcatcggtgaatgatcttcaca

SEQ ID NO: 5360431 - DNA, 25 bp, Homo sapien
tgaattcagacaaaggggatccaac

SEQ ID NO: 5360432 - DNA, 25 bp, Homo sapien
actgggtctgtcttcatcggtgaat

SEQ ID NO: 5360433 - DNA, 25 bp, Homo sapien
ttcgctacagcagaaggcattcagg

SEQ ID NO: 5360434 - DNA, 25 bp, Homo sapien
gtagcgtacagagccactaacgtgt

SEQ ID NO: 5360435 - DNA, 25 bp, Homo sapien
actaacgtgtggaccctgcaggaga

SEQ ID NO: 5360436 - DNA, 25 bp, Homo sapien
tcctgaagtcaatccctgaggtctc

SEQ ID NO: 5360437 - DNA, 25 bp, Homo sapien
tgctgttataattagtagatttttc

SEQ ID NO: 5360438 - DNA, 25 bp, Homo sapien
tataattagtagatttttcaaaggc

SEQ ID NO: 5360439 - DNA, 25 bp, Homo sapien
tgttgcttcttgttggataatgctg

SEQ ID NO: 5360440 - DNA, 25 bp, Homo sapien
tgcttcttgttggataatgctgtta

SEQ ID NO: 5360441 - DNA, 25 bp, Homo sapien
gaagccgggcaattgtcatccaggt

SEQ ID NO: 5360442 - DNA, 25 bp, Homo sapien
ttctggaagccgggcaattgtcatc

SEQ ID NO: 5360443 - DNA, 25 bp, Homo sapien
cgggcaattgtcatccaggtaagga

SEQ ID NO: 5360444 - DNA, 25 bp, Homo sapien
gccgggcaattgtcatccaggtaag

SEQ ID NO: 5360445 - DNA, 25 bp, Homo sapien
aaggcaggtgagcagagttgctgga

SEQ ID NO: 5360446 - DNA, 25 bp, Homo sapien
caccctgagtgtctggcagattcag

SEQ ID NO: 5360447 - DNA, 25 bp, Homo sapien
cagaggagtgaacaccgcaggcatt

SEQ ID NO: 5360448 - DNA, 25 bp, Homo sapien
caccagggtgcagttcccaatatgg

SEQ ID NO: 5360449 - DNA, 25 bp, Homo sapien
tcatgagggtccacgttcaggtcac

SEQ ID NO: 5360450 - DNA, 25 bp, Homo sapien
tagcaatgcaacagacgttgcattg

SEQ ID NO: 5360451 - DNA, 25 bp, Homo sapien
caacagacgttgcattgcacgggcg

SEQ ID NO: 5360452 - DNA, 25 bp, Homo sapien
gacgttgcattgcacgggcgtctgt

SEQ ID NO: 5360453 - DNA, 25 bp, Homo sapien
aatgcaacagacgttgcattgcacg

SEQ ID NO: 5360454 - DNA, 25 bp, Homo sapien
gacccctctgaaagaaccactggtg

SEQ ID NO: 5360455 - DNA, 25 bp, Homo sapien
gagagacccctctgaaagaaccact

SEQ ID NO: 5360456 - DNA, 25 bp, Homo sapien
gaagactcagccccgactctcagcc

SEQ ID NO: 5360457 - DNA, 25 bp, Homo sapien
tcatcggaggccttgttggggggcc

SEQ ID NO: 5360458 - DNA, 25 bp, Homo sapien
aggctgtggtaccaccgccgccggc

SEQ ID NO: 5360459 - DNA, 25 bp, Homo sapien
cgccagcgcggtgcagcctggaaga

SEQ ID NO: 5360460 - DNA, 25 bp, Homo sapien
cctgtgaacccgctcgccgccagcg

SEQ ID NO: 5360461 - DNA, 25 bp, Homo sapien
cgccggctccctgtgaacccgctcg

SEQ ID NO: 5360462 - DNA, 25 bp, Homo sapien
ctcttctgctccgccgtctgcacag

SEQ ID NO: 5360463 - DNA, 25 bp, Homo sapien
acagccgctgtggacccgaggccct

SEQ ID NO: 5360464 - DNA, 25 bp, Homo sapien
gcacagccgctgtggacccgaggcc

SEQ ID NO: 5360465 - DNA, 25 bp, Homo sapien
gctccgccgtctgcacagccgctgt

SEQ ID NO: 5360466 - DNA, 25 bp, Homo sapien
tggcaaaagaacaaaggcgtggaag

SEQ ID NO: 5360467 - DNA, 25 bp, Homo sapien
caaaggcacggcgtgttgaaggcac

SEQ ID NO: 5360468 - DNA, 25 bp, Homo sapien
caaaggcgtggaagaacaaaggcac

SEQ ID NO: 5360469 - DNA, 25 bp, Homo sapien
gtgttgaaggcacagttttagaggc

SEQ ID NO: 5360470 - DNA, 25 bp, Homo sapien
atggccaaatctctctacgacaatg

SEQ ID NO: 5360471 - DNA, 25 bp, Homo sapien
ctctacgacaatgctcttattggtg

SEQ ID NO: 5360472 - DNA, 25 bp, Homo sapien
caatcctggttcatggccaaatctc

SEQ ID NO: 5360473 - DNA, 25 bp, Homo sapien
gacaatgctcttattggtgtttcca

SEQ ID NO: 5360474 - DNA, 25 bp, Homo sapien
gctaaggagccctgctctggttctg

SEQ ID NO: 5360475 - DNA, 25 bp, Homo sapien
gcctgtgcgtccagaggaaaagcaa

SEQ ID NO: 5360476 - DNA, 25 bp, Homo sapien
tggtcctctgttggccgctgacctc

SEQ ID NO: 5360477 - DNA, 25 bp, Homo sapien
tctggttctgttaaaggcaacgatg

SEQ ID NO: 5360478 - DNA, 25 bp, Homo sapien
gcacagatgaaaatgccaggagagt

SEQ ID NO: 5360479 - DNA, 25 bp, Homo sapien
ctgtgtgcacagatgaaaatgccag

SEQ ID NO: 5360480 - DNA, 25 bp, Homo sapien
tgtgcacagatgaaaatgccaggag

SEQ ID NO: 5360481 - DNA, 25 bp, Homo sapien
tgtgtgcacagatgaaaatgccagg

SEQ ID NO: 5360482 - DNA, 25 bp, Homo sapien
cttattcattatgtatgttgttgca

SEQ ID NO: 5360483 - DNA, 25 bp, Homo sapien
cagctgttgtgctagtgaatattag

SEQ ID NO: 5360484 - DNA, 25 bp, Homo sapien
attattgactatcatcagctgttgt

SEQ ID NO: 5360485 - DNA, 25 bp, Homo sapien
taaatggggtatcgaccacttcaag

SEQ ID NO: 5360486 - DNA, 25 bp, Homo sapien
aattcactgaagtacggctccagcg

SEQ ID NO: 5360487 - DNA, 25 bp, Homo sapien
tctactggatctctgcaagtggagg

SEQ ID NO: 5360488 - DNA, 25 bp, Homo sapien
tcttggagatccctagcgcagtggt

SEQ ID NO: 5360489 - DNA, 25 bp, Homo sapien
tcacaagggttccaccagactctgc

SEQ ID NO: 5360490 - DNA, 25 bp, Homo sapien
ctttccacaaccagggcatgcactg

SEQ ID NO: 5360491 - DNA, 25 bp, Homo sapien
cctctttccacaaccagggcatgca

SEQ ID NO: 5360492 - DNA, 25 bp, Homo sapien
tctttccacaaccagggcatgcact

SEQ ID NO: 5360493 - DNA, 25 bp, Homo sapien
tttccacaaccagggcatgcactgg

SEQ ID NO: 5360494 - DNA, 25 bp, Homo sapien
gagcactggcagtccggatcaggat

SEQ ID NO: 5360495 - DNA, 25 bp, Homo sapien
tgtatgtagcgtcactactctccac

SEQ ID NO: 5360496 - DNA, 25 bp, Homo sapien
gcagtccggatcaggatcagcctgc

SEQ ID NO: 5360497 - DNA, 25 bp, Homo sapien
ccagtgctctgggtatgtgtatgta

SEQ ID NO: 5360498 - DNA, 25 bp, Homo sapien
tgcctcctgtctgattccagtgcaa

SEQ ID NO: 5360499 - DNA, 25 bp, Homo sapien
aaatctgaacaacggcagcagccct

SEQ ID NO: 5360500 - DNA, 25 bp, Homo sapien
taaaccgcaaggctgaattttcagt

SEQ ID NO: 5360501 - DNA, 25 bp, Homo sapien
ccaactattcttaaaccgcaaggct

SEQ ID NO: 5360502 - DNA, 25 bp, Homo sapien
gcaatactgggcatagaagaaagag

SEQ ID NO: 5360503 - DNA, 25 bp, Homo sapien
ttttcttgatacagattccatcata

SEQ ID NO: 5360504 - DNA, 25 bp, Homo sapien
ttttcacctatcaggtagcaatact

SEQ ID NO: 5360505 - DNA, 25 bp, Homo sapien
gatacagattccatcataatgatac

SEQ ID NO: 5360506 - DNA, 25 bp, Homo sapien
taaatttatgtctaactactgacat

SEQ ID NO: 5360507 - DNA, 25 bp, Homo sapien
tttaaatttatgtctaactactgac

SEQ ID NO: 5360508 - DNA, 25 bp, Homo sapien
ttaaatttatgtctaactactgaca

SEQ ID NO: 5360509 - DNA, 25 bp, Homo sapien
ctggcacttcctctagtgcccagcc

SEQ ID NO: 5360510 - DNA, 25 bp, Homo sapien
agtgcccagcctccgggtgccaagg

SEQ ID NO: 5360511 - DNA, 25 bp, Homo sapien
ctagtgcccagcctccgggtgccaa

SEQ ID NO: 5360512 - DNA, 25 bp, Homo sapien
cagcctccgggtgccaaggtccgga

SEQ ID NO: 5360513 - DNA, 25 bp, Homo sapien
ggctgagaatggctgcgacctctcc

SEQ ID NO: 5360514 - DNA, 25 bp, Homo sapien
gcatgtgggagagcccagactctgc

SEQ ID NO: 5360515 - DNA, 25 bp, Homo sapien
ctgcgacctctccatgaaagagctg

SEQ ID NO: 5360516 - DNA, 25 bp, Homo sapien
gagagtggaagagatgggtgcagct

SEQ ID NO: 5360517 - DNA, 25 bp, Homo sapien
tggggatgcacactgggacagtccc

SEQ ID NO: 5360518 - DNA, 25 bp, Homo sapien
agggtgtttcaccaagcctggggat

SEQ ID NO: 5360519 - DNA, 25 bp, Homo sapien
gtgtttcaccaagcctggggatgca

SEQ ID NO: 5360520 - DNA, 25 bp, Homo sapien
accaagcctggggatgcacactggg

SEQ ID NO: 5360521 - DNA, 25 bp, Homo sapien
ctcccagaggggtcaggccacacct

SEQ ID NO: 5360522 - DNA, 25 bp, Homo sapien
tctctccctcccagaggggtcaggc

SEQ ID NO: 5360523 - DNA, 25 bp, Homo sapien
ccagaggggtcaggccacacctggt

SEQ ID NO: 5360524 - DNA, 25 bp, Homo sapien
tctccctcccagaggggtcaggcca

SEQ ID NO: 5360525 - DNA, 25 bp, Homo sapien
gcaaatgcagaagttgtcgaccaac

SEQ ID NO: 5360526 - DNA, 25 bp, Homo sapien
tcatacatgagacagcgagggacgc

SEQ ID NO: 5360527 - DNA, 25 bp, Homo sapien
gagggacgctgcactcttcgcaaat

SEQ ID NO: 5360528 - DNA, 25 bp, Homo sapien
ggttctcagtgttttgcccacaggt

SEQ ID NO: 5360529 - DNA, 25 bp, Homo sapien
tgttggcagagtggctacacagagc

SEQ ID NO: 5360530 - DNA, 25 bp, Homo sapien
tgtaggtgagcctgacttccaacca

SEQ ID NO: 5360531 - DNA, 25 bp, Homo sapien
ctgccggcaggtgacattggttaag

SEQ ID NO: 5360532 - DNA, 25 bp, Homo sapien
tatcatttttatgtctaccatcaaa

SEQ ID NO: 5360533 - DNA, 25 bp, Homo sapien
acagatgggaagcccggccccatcg

SEQ ID NO: 5360534 - DNA, 25 bp, Homo sapien
cccggggcttttacgcgtgtgcgtg

SEQ ID NO: 5360535 - DNA, 25 bp, Homo sapien
catcgccgattcgggcccggggctt

SEQ ID NO: 5360536 - DNA, 25 bp, Homo sapien
cagaccggatggctttccgcgggaa

SEQ ID NO: 5360537 - DNA, 25 bp, Homo sapien
ccggcaccccctcggccatggctcg

SEQ ID NO: 5360538 - DNA, 25 bp, Homo sapien
ccctcgccgctcgacggcgaggccg

SEQ ID NO: 5360539 - DNA, 25 bp, Homo sapien
ggccggcaccccctcggccatggct

SEQ ID NO: 5360540 - DNA, 25 bp, Homo sapien
gctaccctcgccgctcgacggcgag

SEQ ID NO: 5360541 - DNA, 25 bp, Homo sapien
aggcagcgagcggcggccgtgggcg

SEQ ID NO: 5360542 - DNA, 25 bp, Homo sapien
tgctaccgccgctcctcggtgttta

SEQ ID NO: 5360543 - DNA, 25 bp, Homo sapien
ctgctaccgccgctcctcggtgttt

SEQ ID NO: 5360544 - DNA, 25 bp, Homo sapien
tagcaaccagtcaaacagggacgcg

SEQ ID NO: 5360545 - DNA, 25 bp, Homo sapien
ggacgcgaacaacaagcaccaactt

SEQ ID NO: 5360546 - DNA, 25 bp, Homo sapien
aaaaatattgataccccggctgccg

SEQ ID NO: 5360547 - DNA, 25 bp, Homo sapien
tgggtgtccttgacttgcttgagcg

SEQ ID NO: 5360548 - DNA, 25 bp, Homo sapien
tctgtgtggaggtgaactgagaggc

SEQ ID NO: 5360549 - DNA, 25 bp, Homo sapien
tgcctctcagcgcatctgtgtggag

SEQ ID NO: 5360550 - DNA, 25 bp, Homo sapien
cctctcagcgcatctgtgtggaggt

SEQ ID NO: 5360551 - DNA, 25 bp, Homo sapien
agtgcctctcagcgcatctgtgtgg

SEQ ID NO: 5360552 - DNA, 25 bp, Homo sapien
tcagtgtgactagcacccagaggac

SEQ ID NO: 5360553 - DNA, 25 bp, Homo sapien
gccgtggctgccgtcagtgtgacta

SEQ ID NO: 5360554 - DNA, 25 bp, Homo sapien
gggcactgccttagagtccatggtc

SEQ ID NO: 5360555 - DNA, 25 bp, Homo sapien
gtgcagccacacattggccgtggct

SEQ ID NO: 5360556 - DNA, 25 bp, Homo sapien
caggtgagccacccctcttccccat

SEQ ID NO: 5360557 - DNA, 25 bp, Homo sapien
cacccctcttccccatagaccctgg

SEQ ID NO: 5360558 - DNA, 25 bp, Homo sapien
tgagccacccctcttccccatagac

SEQ ID NO: 5360559 - DNA, 25 bp, Homo sapien
ctcttccccatagaccctggggcca

SEQ ID NO: 5360560 - DNA, 25 bp, Homo sapien
tgtttttgtttggaccatcctagga

SEQ ID NO: 5360561 - DNA, 25 bp, Homo sapien
gtgtttctcaaaggtagtttcttgc

SEQ ID NO: 5360562 - DNA, 25 bp, Homo sapien
gaccatcctaggagccatcacttga

SEQ ID NO: 5360563 - DNA, 25 bp, Homo sapien
aagaggctggctgcatttgatttcc

SEQ ID NO: 5360564 - DNA, 25 bp, Homo sapien
aaagttcagcgtattttgcagcctc

SEQ ID NO: 5360565 - DNA, 25 bp, Homo sapien
cagagcaatacgccagcatttgtgt

SEQ ID NO: 5360566 - DNA, 25 bp, Homo sapien
ggccaaaagttcagcgtattttgca

SEQ ID NO: 5360567 - DNA, 25 bp, Homo sapien
taacaacagattggtggacactatc

SEQ ID NO: 5360568 - DNA, 25 bp, Homo sapien
ttgtttgtcgttcctgtcgctgatt

SEQ ID NO: 5360569 - DNA, 25 bp, Homo sapien
tttgtcgttcctgtcgctgattccc

SEQ ID NO: 5360570 - DNA, 25 bp, Homo sapien
tgtttgtcgttcctgtcgctgattc

SEQ ID NO: 5360571 - DNA, 25 bp, Homo sapien
tgtcgttcctgtcgctgattcccat

SEQ ID NO: 5360572 - DNA, 25 bp, Homo sapien
ttctgtggctgtatacttctcataa

SEQ ID NO: 5360573 - DNA, 25 bp, Homo sapien
ctctgacactctggagcttgctcca

SEQ ID NO: 5360574 - DNA, 25 bp, Homo sapien
aatacaaatgtgctgtggccctgtg

SEQ ID NO: 5360575 - DNA, 25 bp, Homo sapien
ctctgccttgaagctgaattgtgac

SEQ ID NO: 5360576 - DNA, 25 bp, Homo sapien
tgccttgaagctgaattgtgacaga

SEQ ID NO: 5360577 - DNA, 25 bp, Homo sapien
tggaatgatagtacacgggagctgc

SEQ ID NO: 5360578 - DNA, 25 bp, Homo sapien
aacgtggaatgatagtacacgggag

SEQ ID NO: 5360579 - DNA, 25 bp, Homo sapien
cgtggaatgatagtacacgggagct

SEQ ID NO: 5360580 - DNA, 25 bp, Homo sapien
aatgatagtacacgggagctgctgg

SEQ ID NO: 5360581 - DNA, 25 bp, Homo sapien
ggtgattttcagctcctaggactgt

SEQ ID NO: 5360582 - DNA, 25 bp, Homo sapien
gactgttcttttcaagtgtttgatt

SEQ ID NO: 5360583 - DNA, 25 bp, Homo sapien
tcaagtgtttgattagctctgcaaa

SEQ ID NO: 5360584 - DNA, 25 bp, Homo sapien
tagagggccgtgacagggtgatttt

SEQ ID NO: 5360585 - DNA, 25 bp, Homo sapien
gactctccgcagtatcgctgttccg

SEQ ID NO: 5360586 - DNA, 25 bp, Homo sapien
gatgtcaggagatccaagtgtccag

SEQ ID NO: 5360587 - DNA, 25 bp, Homo sapien
cttgaatgggtcatcacagggcagg

SEQ ID NO: 5360588 - DNA, 25 bp, Homo sapien
cgctgttccgcatacaccaacatag

SEQ ID NO: 5360589 - DNA, 25 bp, Homo sapien
cgagttgttcttggcaacagccggg

SEQ ID NO: 5360590 - DNA, 25 bp, Homo sapien
agttgttcttggcaacagccgggtg

SEQ ID NO: 5360591 - DNA, 25 bp, Homo sapien
gagaaccgagttgttcttggcaaca

SEQ ID NO: 5360592 - DNA, 25 bp, Homo sapien
gaaccgagttgttcttggcaacagc

SEQ ID NO: 5360593 - DNA, 25 bp, Homo sapien
ctgccgagagcccttaaggctggct

SEQ ID NO: 5360594 - DNA, 25 bp, Homo sapien
tggagttggctggcgagtgcaggct

SEQ ID NO: 5360595 - DNA, 25 bp, Homo sapien
gtggagttggctggcgagtgcaggc

SEQ ID NO: 5360596 - DNA, 25 bp, Homo sapien
caatgagcacacatagatggcaaac

SEQ ID NO: 5360597 - DNA, 25 bp, Homo sapien
catagatggcaaattgccgaggctc

SEQ ID NO: 5360598 - DNA, 25 bp, Homo sapien
tatatggacccaaagccttcaaccc

SEQ ID NO: 5360599 - DNA, 25 bp, Homo sapien
tacatcggccaccaaagacaaaatg

SEQ ID NO: 5360600 - DNA, 25 bp, Homo sapien
ctactccagatcctttgcattttta

SEQ ID NO: 5360601 - DNA, 25 bp, Homo sapien
ttttaaattaggttatcaattctca

SEQ ID NO: 5360602 - DNA, 25 bp, Homo sapien
gcttcctgggtgtttgatagggatt

SEQ ID NO: 5360603 - DNA, 25 bp, Homo sapien
attaggttatcaattctcacaaaaa

SEQ ID NO: 5360604 - DNA, 25 bp, Homo sapien
taagccctgaagtatcaacctctct

SEQ ID NO: 5360605 - DNA, 25 bp, Homo sapien
caggccagtgtgaagtacgatcttg

SEQ ID NO: 5360606 - DNA, 25 bp, Homo sapien
cttccgcaggctacatgattcatga

SEQ ID NO: 5360607 - DNA, 25 bp, Homo sapien
ttagagggtatgcttgcaaacgcat

SEQ ID NO: 5360608 - DNA, 25 bp, Homo sapien
ttctcctaagtggactttccactgg

SEQ ID NO: 5360609 - DNA, 25 bp, Homo sapien
gcttctcctaagtggactttccact

SEQ ID NO: 5360610 - DNA, 25 bp, Homo sapien
tctcctaagtggactttccactgga

SEQ ID NO: 5360611 - DNA, 25 bp, Homo sapien
ctcctaagtggactttccactggat

SEQ ID NO: 5360612 - DNA, 25 bp, Homo sapien
gatcgcttacacaggtgacaaccac

SEQ ID NO: 5360613 - DNA, 25 bp, Homo sapien
ctaggacacatggtctgcatgaatg

SEQ ID NO: 5360614 - DNA, 25 bp, Homo sapien
cagtaactggacagggaaagatcgc

SEQ ID NO: 5360615 - DNA, 25 bp, Homo sapien
gaatgaggggagtcaacaaaatcca

SEQ ID NO: 5360616 - DNA, 25 bp, Homo sapien
tgaacactgagaagactattgaagg

SEQ ID NO: 5360617 - DNA, 25 bp, Homo sapien
ttctctgagcaaaacatcacccttg

SEQ ID NO: 5360618 - DNA, 25 bp, Homo sapien
ctattgaaggtatggtgttttgtgg

SEQ ID NO: 5360619 - DNA, 25 bp, Homo sapien
acaggatgtgatgcaggactggaac

SEQ ID NO: 5360620 - DNA, 25 bp, Homo sapien
ttccaggtcgcaaggtcatttcaga

SEQ ID NO: 5360621 - DNA, 25 bp, Homo sapien
tcaaggaggtcatgttccaacagaa

SEQ ID NO: 5360622 - DNA, 25 bp, Homo sapien
cgggatcactcatgatctgtggtca

SEQ ID NO: 5360623 - DNA, 25 bp, Homo sapien
atcccggtggctcggctctgctctg

SEQ ID NO: 5360624 - DNA, 25 bp, Homo sapien
ttcaggggtccctggctcgtctgtg

SEQ ID NO: 5360625 - DNA, 25 bp, Homo sapien
ctctgcctcgtcttcatcccccttt

SEQ ID NO: 5360626 - DNA, 25 bp, Homo sapien
ggctcgtctgtgtccttgcctgcct

SEQ ID NO: 5360627 - DNA, 25 bp, Homo sapien
tcatccccctttcctgttgactgtt

SEQ ID NO: 5360628 - DNA, 25 bp, Homo sapien
atgtgtattgtagttcatggccatc

SEQ ID NO: 5360629 - DNA, 25 bp, Homo sapien
ctgaagaggacaggaatgtatgtgt

SEQ ID NO: 5360630 - DNA, 25 bp, Homo sapien
caggaatgtatgtgtattgtagttc

SEQ ID NO: 5360631 - DNA, 25 bp, Homo sapien
gaggacaggaatgtatgtgtattgt

SEQ ID NO: 5360632 - DNA, 25 bp, Homo sapien
cttcctcataagagagcccttttcc

SEQ ID NO: 5360633 - DNA, 25 bp, Homo sapien
gcatcatttcgtgctccctgttgcc

SEQ ID NO: 5360634 - DNA, 25 bp, Homo sapien
tgcctagaagcctctatcttacact

SEQ ID NO: 5360635 - DNA, 25 bp, Homo sapien
tcttacacttggaggcatcatttcg

SEQ ID NO: 5360636 - DNA, 25 bp, Homo sapien
aaataaatggatctctttagttata

SEQ ID NO: 5360637 - DNA, 25 bp, Homo sapien
gaaacagctcttctcaaagatcaaa

SEQ ID NO: 5360638 - DNA, 25 bp, Homo sapien
ggcaaatatcacacaatgcctccat

SEQ ID NO: 5360639 - DNA, 25 bp, Homo sapien
aatggatctctttagttatatttag

SEQ ID NO: 5360640 - DNA, 25 bp, Homo sapien
ggttcttgacatcactccgggcttt

SEQ ID NO: 5360641 - DNA, 25 bp, Homo sapien
ggtgaggcccctgcttagttttatc

SEQ ID NO: 5360642 - DNA, 25 bp, Homo sapien
cttccaagcactgaaaaacaacttc

SEQ ID NO: 5360643 - DNA, 25 bp, Homo sapien
taaacaagtggtaattccacttcca

SEQ ID NO: 5360644 - DNA, 25 bp, Homo sapien
gatctctgacttgcggtttaatagg

SEQ ID NO: 5360645 - DNA, 25 bp, Homo sapien
gattcaagtacatggtttgatctct

SEQ ID NO: 5360646 - DNA, 25 bp, Homo sapien
gtttaataggttggcatgcttccac

SEQ ID NO: 5360647 - DNA, 25 bp, Homo sapien
caagtacatggtttgatctctgact

SEQ ID NO: 5360648 - DNA, 25 bp, Homo sapien
tcctcctcttttcttactatgtcca

SEQ ID NO: 5360649 - DNA, 25 bp, Homo sapien
cactcctcctcttttcttactatgt

SEQ ID NO: 5360650 - DNA, 25 bp, Homo sapien
ctgaaagaacccacactcctcctct

SEQ ID NO: 5360651 - DNA, 25 bp, Homo sapien
cctcctcttttcttactatgtccat

SEQ ID NO: 5360652 - DNA, 25 bp, Homo sapien
tgttggtgccgtctccccgtgggtc

SEQ ID NO: 5360653 - DNA, 25 bp, Homo sapien
gaaactccactccagtttggcctct

SEQ ID NO: 5360654 - DNA, 25 bp, Homo sapien
tcccctaatatagaaactccactcc

SEQ ID NO: 5360655 - DNA, 25 bp, Homo sapien
cagtttggcctcttgttggtgccgt

SEQ ID NO: 5360656 - DNA, 25 bp, Homo sapien
tctaagtagggtgtccaagtcctgg

SEQ ID NO: 5360657 - DNA, 25 bp, Homo sapien
gacacagcaccggatatccataaga

SEQ ID NO: 5360658 - DNA, 25 bp, Homo sapien
gaattccttcggttgcaagtgacag

SEQ ID NO: 5360659 - DNA, 25 bp, Homo sapien
ccctgatatgttggtaaagatggcc

SEQ ID NO: 5360660 - DNA, 25 bp, Homo sapien
cctgagaaagtgagttcgcatctca

SEQ ID NO: 5360661 - DNA, 25 bp, Homo sapien
agtgagttcgcatctcagcccaggg

SEQ ID NO: 5360662 - DNA, 25 bp, Homo sapien
ggatgttgcccaagctctctgtggt

SEQ ID NO: 5360663 - DNA, 25 bp, Homo sapien
agttctgcttcttgtccgtaaaaag

SEQ ID NO: 5360664 - DNA, 25 bp, Homo sapien
gatgtgatttgagggtgtgaccaac

SEQ ID NO: 5360665 - DNA, 25 bp, Homo sapien
gggatgtgatttgagggtgtgacca

SEQ ID NO: 5360666 - DNA, 25 bp, Homo sapien
tcaggagtgtaccacttcccctttg

SEQ ID NO: 5360667 - DNA, 25 bp, Homo sapien
tgcaggcatgtgagcgcctttgcca

SEQ ID NO: 5360668 - DNA, 25 bp, Homo sapien
ccgtcttgtgtttgcgccacactgc

SEQ ID NO: 5360669 - DNA, 25 bp, Homo sapien
cgttatcctgactcaccgtcttgtg

SEQ ID NO: 5360670 - DNA, 25 bp, Homo sapien
acagggagttgggccgcgttatcct

SEQ ID NO: 5360671 - DNA, 25 bp, Homo sapien
ttgggccgcgttatcctgactcacc

SEQ ID NO: 5360672 - DNA, 25 bp, Homo sapien
tgctctgcctacttcactctgactc

SEQ ID NO: 5360673 - DNA, 25 bp, Homo sapien
acctcttcttggtccacccgggctg

SEQ ID NO: 5360674 - DNA, 25 bp, Homo sapien
ctgctcgagggaccgggcctccatg

SEQ ID NO: 5360675 - DNA, 25 bp, Homo sapien
gcattctagaaatgctgctcgaggg

SEQ ID NO: 5360676 - DNA, 25 bp, Homo sapien
taaggaacgcttgtgtgaaggtcac

SEQ ID NO: 5360677 - DNA, 25 bp, Homo sapien
tcatgacagtttaaggaacgcttgt

SEQ ID NO: 5360678 - DNA, 25 bp, Homo sapien
gaaggtcaccgcttcctcttgtagt

SEQ ID NO: 5360679 - DNA, 25 bp, Homo sapien
gcttcctcttgtagtcgtgctgcat

SEQ ID NO: 5360680 - DNA, 25 bp, Homo sapien
acagcagggctttgcttccagagca

SEQ ID NO: 5360681 - DNA, 25 bp, Homo sapien
tccgacttcttttgtccagcctggc

SEQ ID NO: 5360682 - DNA, 25 bp, Homo sapien
tggcttcccccggtagccagtggca

SEQ ID NO: 5360683 - DNA, 25 bp, Homo sapien
gatggcctgagctccgacttctttt

SEQ ID NO: 5360684 - DNA, 25 bp, Homo sapien
aattgtgccaaggtagaagcagtcc

SEQ ID NO: 5360685 - DNA, 25 bp, Homo sapien
gaagcagtcccattaatgtaggatc

SEQ ID NO: 5360686 - DNA, 25 bp, Homo sapien
aacccatgttcgtggagcatagagc

SEQ ID NO: 5360687 - DNA, 25 bp, Homo sapien
tggtatagagagcaattgtgccaag

SEQ ID NO: 5360688 - DNA, 25 bp, Homo sapien
ttggggacacacactgctgtcacca

SEQ ID NO: 5360689 - DNA, 25 bp, Homo sapien
tttaacttggggacacacactgctg

SEQ ID NO: 5360690 - DNA, 25 bp, Homo sapien
cactgctgtcaccactggatatgca

SEQ ID NO: 5360691 - DNA, 25 bp, Homo sapien
tctcttttgaaagcagcttaaaggg

SEQ ID NO: 5360692 - DNA, 25 bp, Homo sapien
gaaatggcacaaagataccagtttc

SEQ ID NO: 5360693 - DNA, 25 bp, Homo sapien
agaaatggcacaaagataccagttt

SEQ ID NO: 5360694 - DNA, 25 bp, Homo sapien
ctctccctcctttgtgatctgccat

SEQ ID NO: 5360695 - DNA, 25 bp, Homo sapien
cccatgaggtatgtcttgagaagtg

SEQ ID NO: 5360696 - DNA, 25 bp, Homo sapien
ttctctgacagacctagggtctttc

SEQ ID NO: 5360697 - DNA, 25 bp, Homo sapien
tgcagagccctgatgttacatcctc

SEQ ID NO: 5360698 - DNA, 25 bp, Homo sapien
gccttgagtgggcaggcagtgcaga

SEQ ID NO: 5360699 - DNA, 25 bp, Homo sapien
tctgaactgagtccgctgcccagtg

SEQ ID NO: 5360700 - DNA, 25 bp, Homo sapien
tgaactgagtccgctgcccagtggg

SEQ ID NO: 5360701 - DNA, 25 bp, Homo sapien
tctctgaactgagtccgctgcccag

SEQ ID NO: 5360702 - DNA, 25 bp, Homo sapien
gaactgagtccgctgcccagtgggg

SEQ ID NO: 5360703 - DNA, 25 bp, Homo sapien
tctgacaacagtggtaaatggtctg

SEQ ID NO: 5360704 - DNA, 25 bp, Homo sapien
tttggacttgaggagagacatcttc

SEQ ID NO: 5360705 - DNA, 25 bp, Homo sapien
tctttaagcattgaggagccactga

SEQ ID NO: 5360706 - DNA, 25 bp, Homo sapien
tatagttgaacagtatgtaacttca

SEQ ID NO: 5360707 - DNA, 25 bp, Homo sapien
ttacaagtgcgtgccatcacgtcca

SEQ ID NO: 5360708 - DNA, 25 bp, Homo sapien
acaagtgcgtgccatcacgtccagc

SEQ ID NO: 5360709 - DNA, 25 bp, Homo sapien
gattacaagtgcgtgccatcacgtc

SEQ ID NO: 5360710 - DNA, 25 bp, Homo sapien
caaaatgctgggattgtatacaggc

SEQ ID NO: 5360711 - DNA, 25 bp, Homo sapien
gatgcccatttgacactgtgctcat

SEQ ID NO: 5360712 - DNA, 25 bp, Homo sapien
gctaagagtttgctcattcgatgcc

SEQ ID NO: 5360713 - DNA, 25 bp, Homo sapien
gggagctaacgctaagagtttgctc

SEQ ID NO: 5360714 - DNA, 25 bp, Homo sapien
caaagaccttgatggtaaggggagc

SEQ ID NO: 5360715 - DNA, 25 bp, Homo sapien
gaaaggcagtcagcttatgcccttg

SEQ ID NO: 5360716 - DNA, 25 bp, Homo sapien
catgcgaggcttgctcactggtgac

SEQ ID NO: 5360717 - DNA, 25 bp, Homo sapien
tatgcccttgtgtagcgtatagcct

SEQ ID NO: 5360718 - DNA, 25 bp, Homo sapien
tctagggccattccagtttgaactt

SEQ ID NO: 5360719 - DNA, 25 bp, Homo sapien
caatagctagaccatgtagccttgg

SEQ ID NO: 5360720 - DNA, 25 bp, Homo sapien
ggatgacattgcctttcacagaacg

SEQ ID NO: 5360721 - DNA, 25 bp, Homo sapien
tagtcaagctatagcgataggtgca

SEQ ID NO: 5360722 - DNA, 25 bp, Homo sapien
tgtagagtaggccataccattgagg

SEQ ID NO: 5360723 - DNA, 25 bp, Homo sapien
tccagcatgagacggaacatcttcc

SEQ ID NO: 5360724 - DNA, 25 bp, Homo sapien
tcttccgtggcagctagagttagtc

SEQ ID NO: 5360725 - DNA, 25 bp, Homo sapien
ctctccttaagatgcgtcagtggac

SEQ ID NO: 5360726 - DNA, 25 bp, Homo sapien
ggccttcatgagtgctccagcatga

SEQ ID NO: 5360727 - DNA, 25 bp, Homo sapien
tgtgcaggtagcctcgtgtagtgcc

SEQ ID NO: 5360728 - DNA, 25 bp, Homo sapien
aggtagcctcgtgtagtgccagcca

SEQ ID NO: 5360729 - DNA, 25 bp, Homo sapien
tcgtgtagtgccagccagtggttcc

SEQ ID NO: 5360730 - DNA, 25 bp, Homo sapien
gcctcgtgtagtgccagccagtggt

SEQ ID NO: 5360731 - DNA, 25 bp, Homo sapien
gtttgtcaaaagctagtgcttggtc

SEQ ID NO: 5360732 - DNA, 25 bp, Homo sapien
tgtcaaaagctagtgcttggtcgtt

SEQ ID NO: 5360733 - DNA, 25 bp, Homo sapien
aagctagtgcttggtcgttacccat

SEQ ID NO: 5360734 - DNA, 25 bp, Homo sapien
caaaagctagtgcttggtcgttacc

SEQ ID NO: 5360735 - DNA, 25 bp, Homo sapien
tggcctgtcctctccacactctagc

SEQ ID NO: 5360736 - DNA, 25 bp, Homo sapien
gctttgtctctgtgagccaatcctt

SEQ ID NO: 5360737 - DNA, 25 bp, Homo sapien
actctagcctgtgcaccgcttggtg

SEQ ID NO: 5360738 - DNA, 25 bp, Homo sapien
cctgtgcaccgcttggtggccagtg

SEQ ID NO: 5360739 - DNA, 25 bp, Homo sapien
ggtccctgggctctagtgggtcatc

SEQ ID NO: 5360740 - DNA, 25 bp, Homo sapien
tgtatctctttggttgtgaagaagc

SEQ ID NO: 5360741 - DNA, 25 bp, Homo sapien
aagctgttgtcaagagcacaggagg

SEQ ID NO: 5360742 - DNA, 25 bp, Homo sapien
ccctgggctctagtgggtcatctgg

SEQ ID NO: 5360743 - DNA, 25 bp, Homo sapien
gggtgcagaaggcattttctggcca

SEQ ID NO: 5360744 - DNA, 25 bp, Homo sapien
tcttccctcgcttgaagacaccagg

SEQ ID NO: 5360745 - DNA, 25 bp, Homo sapien
tgccagcctcttccctcgcttgaag

SEQ ID NO: 5360746 - DNA, 25 bp, Homo sapien
aactgttctttgctgatctgttcat

SEQ ID NO: 5360747 - DNA, 25 bp, Homo sapien
gcatagaatgtatgcaaacagccat

SEQ ID NO: 5360748 - DNA, 25 bp, Homo sapien
ctgcacacttttgggggcccattta

SEQ ID NO: 5360749 - DNA, 25 bp, Homo sapien
cattgagtctgaagcgccttctatt

SEQ ID NO: 5360750 - DNA, 25 bp, Homo sapien
ctgaagcgccttctatttattagca

SEQ ID NO: 5360751 - DNA, 25 bp, Homo sapien
aactggtgtcgtgatgaatgtcacc

SEQ ID NO: 5360752 - DNA, 25 bp, Homo sapien
tgaagaaatgctctgtaggtgcttg

SEQ ID NO: 5360753 - DNA, 25 bp, Homo sapien
catcaaaagtgaagggtcgagctct

SEQ ID NO: 5360754 - DNA, 25 bp, Homo sapien
cacattgatgtgctatatcagttgt

SEQ ID NO: 5360755 - DNA, 25 bp, Homo sapien
acaacactgatacctgccactggga

SEQ ID NO: 5360756 - DNA, 25 bp, Homo sapien
ggcacaacactgatacctgccactg

SEQ ID NO: 5360757 - DNA, 25 bp, Homo sapien
gcacaacactgatacctgccactgg

SEQ ID NO: 5360758 - DNA, 25 bp, Homo sapien
ctgggcacaacactgatacctgcca

SEQ ID NO: 5360759 - DNA, 25 bp, Homo sapien
gctactggccactgtccacgtctgt

SEQ ID NO: 5360760 - DNA, 25 bp, Homo sapien
accgtgtcaggctcaggagacctgt

SEQ ID NO: 5360761 - DNA, 25 bp, Homo sapien
ttattgctactggccactgtccacg

SEQ ID NO: 5360762 - DNA, 25 bp, Homo sapien
atgaaaccgtgtcaggctcaggaga

SEQ ID NO: 5360763 - DNA, 25 bp, Homo sapien
taatcgacccttaatcttcgctgtg

SEQ ID NO: 5360764 - DNA, 25 bp, Homo sapien
cagttggtcttgtcccctgcatcct

SEQ ID NO: 5360765 - DNA, 25 bp, Homo sapien
tgtggtgacaaatccatgcctggca

SEQ ID NO: 5360766 - DNA, 25 bp, Homo sapien
cctggcataggtagcccagttggtc

SEQ ID NO: 5360767 - DNA, 25 bp, Homo sapien
tcctagcccctgctgtgacctcggg

SEQ ID NO: 5360768 - DNA, 25 bp, Homo sapien
tggggtaggatgtgtaagtccactc

SEQ ID NO: 5360769 - DNA, 25 bp, Homo sapien
gtgacctcgggcaatgcacctgggt

SEQ ID NO: 5360770 - DNA, 25 bp, Homo sapien
tagcacagtcttccaggaaagaatc

SEQ ID NO: 5360771 - DNA, 25 bp, Homo sapien
actgcttctgagaaaactttatccc

SEQ ID NO: 5360772 - DNA, 25 bp, Homo sapien
tatcccttgcctgatgaattgaact

SEQ ID NO: 5360773 - DNA, 25 bp, Homo sapien
tgaattgaactaatgtgggtaccca

SEQ ID NO: 5360774 - DNA, 25 bp, Homo sapien
tgcacgcacatataagaatttgtag

SEQ ID NO: 5360775 - DNA, 25 bp, Homo sapien
cttggaattgctgttggctgtcttg

SEQ ID NO: 5360776 - DNA, 25 bp, Homo sapien
ttggaattgctgttggctgtcttgt

SEQ ID NO: 5360777 - DNA, 25 bp, Homo sapien
ttggctgtcttgtgtggcagccagc

SEQ ID NO: 5360778 - DNA, 25 bp, Homo sapien
cacaaatagccccacagttacatgc

SEQ ID NO: 5360779 - DNA, 25 bp, Homo sapien
gcttctcgagtgtcctgtctaccag

SEQ ID NO: 5360780 - DNA, 25 bp, Homo sapien
ggcgctaaattgtgaccagaatcta

SEQ ID NO: 5360781 - DNA, 25 bp, Homo sapien
gacaactgtcaccagatggcgctaa

SEQ ID NO: 5360782 - DNA, 25 bp, Homo sapien
tcctgcatgttgttgctgagtggct

SEQ ID NO: 5360783 - DNA, 25 bp, Homo sapien
ccggatcaatcttaaccttcacgct

SEQ ID NO: 5360784 - DNA, 25 bp, Homo sapien
ttgtagcagtatttcaggacaaccc

SEQ ID NO: 5360785 - DNA, 25 bp, Homo sapien
gattttgtagcagtatttcaggaca

SEQ ID NO: 5360786 - DNA, 25 bp, Homo sapien
tattggtacagtttaggaggatgag

SEQ ID NO: 5360787 - DNA, 25 bp, Homo sapien
ggacagctggcctatatccacaaag

SEQ ID NO: 5360788 - DNA, 25 bp, Homo sapien
gagtcagctcttaggtcatatttag

SEQ ID NO: 5360789 - DNA, 25 bp, Homo sapien
gagagaagccttatccatcacagag

SEQ ID NO: 5360790 - DNA, 25 bp, Homo sapien
ctatttgagattgtttgtaaaggtc

SEQ ID NO: 5360791 - DNA, 25 bp, Homo sapien
gaatatgtttgtcatataacacctg

SEQ ID NO: 5360792 - DNA, 25 bp, Homo sapien
tgtgaaaaatttgtatcttaccaag

SEQ ID NO: 5360793 - DNA, 25 bp, Homo sapien
tgagaggtttgaaggttgtacctcc

SEQ ID NO: 5360794 - DNA, 25 bp, Homo sapien
ctcatcaaaggttgatgaaggggac

SEQ ID NO: 5360795 - DNA, 25 bp, Homo sapien
catcaaaggttgatgaaggggacct

SEQ ID NO: 5360796 - DNA, 25 bp, Homo sapien
ctctcatcaaaggttgatgaagggg

SEQ ID NO: 5360797 - DNA, 25 bp, Homo sapien
tcatcaaaggttgatgaaggggacc

SEQ ID NO: 5360798 - DNA, 25 bp, Homo sapien
taagaggagtcggagaggatcttca

SEQ ID NO: 5360799 - DNA, 25 bp, Homo sapien
caggcttctcaaggtgccttgattg

SEQ ID NO: 5360800 - DNA, 25 bp, Homo sapien
ccttgattggtcgaggctgtggacc

SEQ ID NO: 5360801 - DNA, 25 bp, Homo sapien
agaaaacagccaccgaagattctgg

SEQ ID NO: 5360802 - DNA, 25 bp, Homo sapien
aggctgctgttggtgccttagtggg

SEQ ID NO: 5360803 - DNA, 25 bp, Homo sapien
gtggaagcaggttctggaacacaga

SEQ ID NO: 5360804 - DNA, 25 bp, Homo sapien
ttcacctacaggctgctgttggtgc

SEQ ID NO: 5360805 - DNA, 25 bp, Homo sapien
tacaggctgctgttggtgccttagt

SEQ ID NO: 5360806 - DNA, 25 bp, Homo sapien
tgcagtgcccaaccagtcaagctgg

SEQ ID NO: 5360807 - DNA, 25 bp, Homo sapien
caaccaggagatgtttagaagaccg

SEQ ID NO: 5360808 - DNA, 25 bp, Homo sapien
gggatgatctagtaccaaccaggag

SEQ ID NO: 5360809 - DNA, 25 bp, Homo sapien
taaaagaacacctatgagtgaggcc

SEQ ID NO: 5360810 - DNA, 25 bp, Homo sapien
caccatggtgggtccacctcactag

SEQ ID NO: 5360811 - DNA, 25 bp, Homo sapien
ttcagtgccatccaggcatccttga

SEQ ID NO: 5360812 - DNA, 25 bp, Homo sapien
atccttgaaggctcagccgcagcca

SEQ ID NO: 5360813 - DNA, 25 bp, Homo sapien
tagtgatgtgtccttcctgaacagc

SEQ ID NO: 5360814 - DNA, 25 bp, Homo sapien
tgccaagagcccactgggtgtcagg

SEQ ID NO: 5360815 - DNA, 25 bp, Homo sapien
gtcggaaactcctagaacttaagca

SEQ ID NO: 5360816 - DNA, 25 bp, Homo sapien
accacctgccggactctagaacggg

SEQ ID NO: 5360817 - DNA, 25 bp, Homo sapien
cagggctagggccttatagactctc

SEQ ID NO: 5360818 - DNA, 25 bp, Homo sapien
gatagagccttccataagtatttga

SEQ ID NO: 5360819 - DNA, 25 bp, Homo sapien
acattttatgaggtgaccactctct

SEQ ID NO: 5360820 - DNA, 25 bp, Homo sapien
gaccacaggacaactgatagagcct

SEQ ID NO: 5360821 - DNA, 25 bp, Homo sapien
gcatgggtatttgtcagtaagaatt

SEQ ID NO: 5360822 - DNA, 25 bp, Homo sapien
cctcttagctcctcttgtgcagttg

SEQ ID NO: 5360823 - DNA, 25 bp, Homo sapien
gcttatggatagagggccatgcaca

SEQ ID NO: 5360824 - DNA, 25 bp, Homo sapien
caagcctgcatgtcaaagctcctct

SEQ ID NO: 5360825 - DNA, 25 bp, Homo sapien
ggcacagtcattgcccatagtaagt

SEQ ID NO: 5360826 - DNA, 25 bp, Homo sapien
aaagtgagaggcagttaccaggtca

SEQ ID NO: 5360827 - DNA, 25 bp, Homo sapien
caatgcaaagatgtgggcccacttc

SEQ ID NO: 5360828 - DNA, 25 bp, Homo sapien
ggtcactagttattcctcaggccca

SEQ ID NO: 5360829 - DNA, 25 bp, Homo sapien
cagatttcatcctcgggtgaggtga

SEQ ID NO: 5360830 - DNA, 25 bp, Homo sapien
tcccattattagtgaagccaagttg

SEQ ID NO: 5360831 - DNA, 25 bp, Homo sapien
catattgcctcacgtcagggagtac

SEQ ID NO: 5360832 - DNA, 25 bp, Homo sapien
tcttggaggtgactgccagcgttct

SEQ ID NO: 5360833 - DNA, 25 bp, Homo sapien
cacctcagtggtggtattgggtact

SEQ ID NO: 5360834 - DNA, 25 bp, Homo sapien
tcttaggttaatgcacagagaacag

SEQ ID NO: 5360835 - DNA, 25 bp, Homo sapien
aatgtagctattggaccagcagctg

SEQ ID NO: 5360836 - DNA, 25 bp, Homo sapien
gccactcgggcataggatgctgtta

SEQ ID NO: 5360837 - DNA, 25 bp, Homo sapien
tagcagagctgtatccaatctagtc

SEQ ID NO: 5360838 - DNA, 25 bp, Homo sapien
tcaaatgatccactctccacctgcc

SEQ ID NO: 5360839 - DNA, 25 bp, Homo sapien
gatccactctccacctgcctccctc

SEQ ID NO: 5360840 - DNA, 25 bp, Homo sapien
caaatgatccactctccacctgcct

SEQ ID NO: 5360841 - DNA, 25 bp, Homo sapien
ccactctccacctgcctccctccac

SEQ ID NO: 5360842 - DNA, 25 bp, Homo sapien
gtggcaatccttttctccttgtctt

SEQ ID NO: 5360843 - DNA, 25 bp, Homo sapien
tcagcccctctgtggttacagccat

SEQ ID NO: 5360844 - DNA, 25 bp, Homo sapien
tcttcagcccctctgtggttacagc

SEQ ID NO: 5360845 - DNA, 25 bp, Homo sapien
ttgtctttcttccttgcaggctcct

SEQ ID NO: 5360846 - DNA, 25 bp, Homo sapien
tgtttgactcttcgcagacggagga

SEQ ID NO: 5360847 - DNA, 25 bp, Homo sapien
ggtacctaccacttgagagactttg

SEQ ID NO: 5360848 - DNA, 25 bp, Homo sapien
tgatgatcacaagacagggaggact

SEQ ID NO: 5360849 - DNA, 25 bp, Homo sapien
tcatagccattcagagtacagggag

SEQ ID NO: 5360850 - DNA, 25 bp, Homo sapien
cagagttaagcttccattctgagtt

SEQ ID NO: 5360851 - DNA, 25 bp, Homo sapien
ccttctgaaatatgcaggacatctc

SEQ ID NO: 5360852 - DNA, 25 bp, Homo sapien
tagttttccaattgatgctgcctcc

SEQ ID NO: 5360853 - DNA, 25 bp, Homo sapien
tgctgcctcctcttaggttcttgac

SEQ ID NO: 5360854 - DNA, 25 bp, Homo sapien
tggtgaatttgctagtgccctcggg

SEQ ID NO: 5360855 - DNA, 25 bp, Homo sapien
caaggttggctcgaatgccgtggaa

SEQ ID NO: 5360856 - DNA, 25 bp, Homo sapien
tatgagaatgtggtgtcttgcccct

SEQ ID NO: 5360857 - DNA, 25 bp, Homo sapien
cagtacatccccatacaaggttggc

SEQ ID NO: 5360858 - DNA, 25 bp, Homo sapien
ggaagtccttgcaactcttttggag

SEQ ID NO: 5360859 - DNA, 25 bp, Homo sapien
tcccttggtgctctctgataactgc

SEQ ID NO: 5360860 - DNA, 25 bp, Homo sapien
taagaaatatgtacactcccaccct

SEQ ID NO: 5360861 - DNA, 25 bp, Homo sapien
tgcagccgagttcgtactgagagtc

SEQ ID NO: 5360862 - DNA, 25 bp, Homo sapien
tggttcctgctttcaagacgtttgg

SEQ ID NO: 5360863 - DNA, 25 bp, Homo sapien
cgtaggacctagagacctaaatgga

SEQ ID NO: 5360864 - DNA, 25 bp, Homo sapien
catcactctaaatgctaagcgttgg

SEQ ID NO: 5360865 - DNA, 25 bp, Homo sapien
taagcgttgggtaaattcacagcag

SEQ ID NO: 5360866 - DNA, 25 bp, Homo sapien
gaaaagacaagttggtggataatag

SEQ ID NO: 5360867 - DNA, 25 bp, Homo sapien
gattgaaagcctcgctgaataccca

SEQ ID NO: 5360868 - DNA, 25 bp, Homo sapien
tacgagtttctggattgaaagcctc

SEQ ID NO: 5360869 - DNA, 25 bp, Homo sapien
aatttctggaactaagaagtacgag

SEQ ID NO: 5360870 - DNA, 25 bp, Homo sapien
tgattttgagaaggcgaaaagccta

SEQ ID NO: 5360871 - DNA, 25 bp, Homo sapien
tgatgatgtagaaagtgagccggcc

SEQ ID NO: 5360872 - DNA, 25 bp, Homo sapien
gcaatggtgaaacggaatctgtgaa

SEQ ID NO: 5360873 - DNA, 25 bp, Homo sapien
gagattaaggcctttcacgtctgga

SEQ ID NO: 5360874 - DNA, 25 bp, Homo sapien
atgtctgagcgggagagaagccaca

SEQ ID NO: 5360875 - DNA, 25 bp, Homo sapien
gccacccagatatgctcagtttgga

SEQ ID NO: 5360876 - DNA, 25 bp, Homo sapien
cagaaggtagcgagtagtctccacc

SEQ ID NO: 5360877 - DNA, 25 bp, Homo sapien
catgttaacaagtcccagagggtca

SEQ ID NO: 5360878 - DNA, 25 bp, Homo sapien
gatgagggggtttatgtaaacacat

SEQ ID NO: 5360879 - DNA, 25 bp, Homo sapien
gtggggagagatgcctacatcagta

SEQ ID NO: 5360880 - DNA, 25 bp, Homo sapien
gagcttctggtgtgctatgaagatg

SEQ ID NO: 5360881 - DNA, 25 bp, Homo sapien
ccccaatacagatggaatggagctt

SEQ ID NO: 5360882 - DNA, 25 bp, Homo sapien
tgacagtggcgacgatgaacatgcc

SEQ ID NO: 5360883 - DNA, 25 bp, Homo sapien
gcatcatactggaaagcaaacacct

SEQ ID NO: 5360884 - DNA, 25 bp, Homo sapien
catcaggtgctataagtgtttggga

SEQ ID NO: 5360885 - DNA, 25 bp, Homo sapien
gactctgtcttgtgggtgtctgaca

SEQ ID NO: 5360886 - DNA, 25 bp, Homo sapien
ccaggttgcctaaatcatgtgcaga

SEQ ID NO: 5360887 - DNA, 25 bp, Homo sapien
caaatcagcaggcacaagaactgtc

SEQ ID NO: 5360888 - DNA, 25 bp, Homo sapien
tgtgacagtattagcactgcctcag

SEQ ID NO: 5360889 - DNA, 25 bp, Homo sapien
aatggccagaactttgtcgtgtgac

SEQ ID NO: 5360890 - DNA, 25 bp, Homo sapien
catgcacatgttacgttggagaaaa

SEQ ID NO: 5360891 - DNA, 25 bp, Homo sapien
ggttttgttacactaatgcgcacca

SEQ ID NO: 5360892 - DNA, 25 bp, Homo sapien
cagactggtggcaagtacacagccc

SEQ ID NO: 5360893 - DNA, 25 bp, Homo sapien
ggttttcgtcttagttgtagcacac

SEQ ID NO: 5360894 - DNA, 25 bp, Homo sapien
aaattcttcctgaaacagtctcatc

SEQ ID NO: 5360895 - DNA, 25 bp, Homo sapien
ttcctgaaacagtctcatctttgcc

SEQ ID NO: 5360896 - DNA, 25 bp, Homo sapien
gcccagcttctttgctgttatcttg

SEQ ID NO: 5360897 - DNA, 25 bp, Homo sapien
tctttgctgttatcttgttcactat

SEQ ID NO: 5360898 - DNA, 25 bp, Homo sapien
tggagggatgcggacagagctgacc

SEQ ID NO: 5360899 - DNA, 25 bp, Homo sapien
tctgtggagggatgcggacagagct

SEQ ID NO: 5360900 - DNA, 25 bp, Homo sapien
gagggatgcggacagagctgaccaa

SEQ ID NO: 5360901 - DNA, 25 bp, Homo sapien
gggatgcggacagagctgaccaagg

SEQ ID NO: 5360902 - DNA, 25 bp, Homo sapien
cttgatgctgtgaggaagaggggta

SEQ ID NO: 5360903 - DNA, 25 bp, Homo sapien
ccttgatgctgtgaggaagaggggt

SEQ ID NO: 5360904 - DNA, 25 bp, Homo sapien
tcatttccttgatgctgtgaggaag

SEQ ID NO: 5360905 - DNA, 25 bp, Homo sapien
tttccttgatgctgtgaggaagagg

SEQ ID NO: 5360906 - DNA, 25 bp, Homo sapien
tcagccgaggtgtttcatgtcccca

SEQ ID NO: 5360907 - DNA, 25 bp, Homo sapien
gattggctgcacttcccgtggcagg

SEQ ID NO: 5360908 - DNA, 25 bp, Homo sapien
taggatccgtgcagccgattggctg

SEQ ID NO: 5360909 - DNA, 25 bp, Homo sapien
gaagtcgcatgccacatactgtagg

SEQ ID NO: 5360910 - DNA, 25 bp, Homo sapien
tctgagtcacatgataggagcgagg

SEQ ID NO: 5360911 - DNA, 25 bp, Homo sapien
aaggaggtggtagcaacctctgagt

SEQ ID NO: 5360912 - DNA, 25 bp, Homo sapien
ataggagcgaggtggagcccatcct

SEQ ID NO: 5360913 - DNA, 25 bp, Homo sapien
ggtagcaacctctgagtcacatgat

SEQ ID NO: 5360914 - DNA, 25 bp, Homo sapien
cgcctctgggtcggagctcctgagt

SEQ ID NO: 5360915 - DNA, 25 bp, Homo sapien
cctctgggtcggagctcctgagttt

SEQ ID NO: 5360916 - DNA, 25 bp, Homo sapien
gcctctgggtcggagctcctgagtt

SEQ ID NO: 5360917 - DNA, 25 bp, Homo sapien
ccctggccacttggctttgggtcca

SEQ ID NO: 5360918 - DNA, 25 bp, Homo sapien
tcccctggccacttggctttgggtc

SEQ ID NO: 5360919 - DNA, 25 bp, Homo sapien
ccatcccctggccacttggctttgg

SEQ ID NO: 5360920 - DNA, 25 bp, Homo sapien
tggccacttggctttgggtccagga

SEQ ID NO: 5360921 - DNA, 25 bp, Homo sapien
gagccaagcagcaatagcaggcttg

SEQ ID NO: 5360922 - DNA, 25 bp, Homo sapien
ggatgaaagtctggggagtagagcc

SEQ ID NO: 5360923 - DNA, 25 bp, Homo sapien
ttgagccaagcagcaatagcaggct

SEQ ID NO: 5360924 - DNA, 25 bp, Homo sapien
caagcagcaatagcaggcttggctg

SEQ ID NO: 5360925 - DNA, 25 bp, Homo sapien
aataagtgacttacagcgcagctcc

SEQ ID NO: 5360926 - DNA, 25 bp, Homo sapien
agttccatgtgtatccgatgcctca

SEQ ID NO: 5360927 - DNA, 25 bp, Homo sapien
tctcagtgcccctatattgacccaa

SEQ ID NO: 5360928 - DNA, 25 bp, Homo sapien
tattgacccaattgtccaatgcctt

SEQ ID NO: 5360929 - DNA, 25 bp, Homo sapien
gaattatacgcctctatttttgtgg

SEQ ID NO: 5360930 - DNA, 25 bp, Homo sapien
ctgaattatacgcctctatttttgt

SEQ ID NO: 5360931 - DNA, 25 bp, Homo sapien
aattatacgcctctatttttgtggc

SEQ ID NO: 5360932 - DNA, 25 bp, Homo sapien
attatacgcctctatttttgtggcc

SEQ ID NO: 5360933 - DNA, 25 bp, Homo sapien
cagacaacccctgctttccatttta

SEQ ID NO: 5360934 - DNA, 25 bp, Homo sapien
tcagacaacccctgctttccatttt

SEQ ID NO: 5360935 - DNA, 25 bp, Homo sapien
gaagttccacttaggcgctcggtga

SEQ ID NO: 5360936 - DNA, 25 bp, Homo sapien
tgccgcttattgaaaccatcagcag

SEQ ID NO: 5360937 - DNA, 25 bp, Homo sapien
agtcatgccgcttattgaaaccatc

SEQ ID NO: 5360938 - DNA, 25 bp, Homo sapien
tttggataaagctgaagttccactt

SEQ ID NO: 5360939 - DNA, 25 bp, Homo sapien
gaccttgtggccgtgcatccactag

SEQ ID NO: 5360940 - DNA, 25 bp, Homo sapien
gccgtgcatccactagaggtgccat

SEQ ID NO: 5360941 - DNA, 25 bp, Homo sapien
tgtggccgtgcatccactagaggtg

SEQ ID NO: 5360942 - DNA, 25 bp, Homo sapien
ccttgtggccgtgcatccactagag

SEQ ID NO: 5360943 - DNA, 25 bp, Homo sapien
aaaagcatagaagcggacaccagag

SEQ ID NO: 5360944 - DNA, 25 bp, Homo sapien
tcacaagggattctacttgacaggc

SEQ ID NO: 5360945 - DNA, 25 bp, Homo sapien
tggcaaactaaaagcatagaagcgg

SEQ ID NO: 5360946 - DNA, 25 bp, Homo sapien
ggcaattggaccacccaaatggcaa

SEQ ID NO: 5360947 - DNA, 25 bp, Homo sapien
ctccattatgatctggggaccaagg

SEQ ID NO: 5360948 - DNA, 25 bp, Homo sapien
gtgtccctccattatgatctgggga

SEQ ID NO: 5360949 - DNA, 25 bp, Homo sapien
cctagggcggttggcaaatgcaatt

SEQ ID NO: 5360950 - DNA, 25 bp, Homo sapien
ccatggcctagggcggttggcaaat

SEQ ID NO: 5360951 - DNA, 25 bp, Homo sapien
tggataaagtgggatgatgcagtga

SEQ ID NO: 5360952 - DNA, 25 bp, Homo sapien
ggataaagtgggatgatgcagtgac

SEQ ID NO: 5360953 - DNA, 25 bp, Homo sapien
ctggataaagtgggatgatgcagtg

SEQ ID NO: 5360954 - DNA, 25 bp, Homo sapien
tctgatgaaagctggcatgccagcc

SEQ ID NO: 5360955 - DNA, 25 bp, Homo sapien
tcatggttgacttcagccaaggcca

SEQ ID NO: 5360956 - DNA, 25 bp, Homo sapien
atgccagcccgtgacaggacacaga

SEQ ID NO: 5360957 - DNA, 25 bp, Homo sapien
aggacacagaggagcgtggattccc

SEQ ID NO: 5360958 - DNA, 25 bp, Homo sapien
aaacagtttccataagaatccatcc

SEQ ID NO: 5360959 - DNA, 25 bp, Homo sapien
ccattttggggcattcacagtttcc

SEQ ID NO: 5360960 - DNA, 25 bp, Homo sapien
acagtttccataagaatccatccat

SEQ ID NO: 5360961 - DNA, 25 bp, Homo sapien
aactccattttggggcattcacagt

SEQ ID NO: 5360962 - DNA, 25 bp, Homo sapien
tatactcagacccagtatatacaca

SEQ ID NO: 5360963 - DNA, 25 bp, Homo sapien
aagaaaatcccatctgttttgacat

SEQ ID NO: 5360964 - DNA, 25 bp, Homo sapien
tatgtattatatactcagacccagt

SEQ ID NO: 5360965 - DNA, 25 bp, Homo sapien
agaaaatcccatctgttttgacatc

SEQ ID NO: 5360966 - DNA, 25 bp, Homo sapien
tcggctcaaatctacctctcttgct

SEQ ID NO: 5360967 - DNA, 25 bp, Homo sapien
gggaattaagcctgctgctacatgt

SEQ ID NO: 5360968 - DNA, 25 bp, Homo sapien
tcccactagggcaggggaattaagc

SEQ ID NO: 5360969 - DNA, 25 bp, Homo sapien
tacatgtattgctgtctgagtcggc

SEQ ID NO: 5360970 - DNA, 25 bp, Homo sapien
tcaccagcaccttcttctagccagg

SEQ ID NO: 5360971 - DNA, 25 bp, Homo sapien
caccagcaccttcttctagccagga

SEQ ID NO: 5360972 - DNA, 25 bp, Homo sapien
ttctcaccagcaccttcttctagcc

SEQ ID NO: 5360973 - DNA, 25 bp, Homo sapien
tctcaccagcaccttcttctagcca

SEQ ID NO: 5360974 - DNA, 25 bp, Homo sapien
gggcagctgatccacacgtgctgac

SEQ ID NO: 5360975 - DNA, 25 bp, Homo sapien
ggggacattgtgtccccagggagtg

SEQ ID NO: 5360976 - DNA, 25 bp, Homo sapien
tgggcagctgatccacacgtgctga

SEQ ID NO: 5360977 - DNA, 25 bp, Homo sapien
tggtgggcagctgatccacacgtgc

SEQ ID NO: 5360978 - DNA, 25 bp, Homo sapien
ggtgcctcagttgtcagagccagtg

SEQ ID NO: 5360979 - DNA, 25 bp, Homo sapien
cactggcttctgtggagatgtccct

SEQ ID NO: 5360980 - DNA, 25 bp, Homo sapien
gaaaacccgaggtctggtgcctcag

SEQ ID NO: 5360981 - DNA, 25 bp, Homo sapien
tactgctggcgtctgtgactgggaa

SEQ ID NO: 5360982 - DNA, 25 bp, Homo sapien
tggtgtctgcgcttaaaatcccgaa

SEQ ID NO: 5360983 - DNA, 25 bp, Homo sapien
caaaatgtttagcaaccagcagggc

SEQ ID NO: 5360984 - DNA, 25 bp, Homo sapien
gagcatagctaggattgtcaaccaa

SEQ ID NO: 5360985 - DNA, 25 bp, Homo sapien
caaggtgggattcctccagagatgc

SEQ ID NO: 5360986 - DNA, 25 bp, Homo sapien
gagacctcagaagtcccgagttgtg

SEQ ID NO: 5360987 - DNA, 25 bp, Homo sapien
attaactttatccagcaggtagccc

SEQ ID NO: 5360988 - DNA, 25 bp, Homo sapien
agctgtatctaggactgaggaggcc

SEQ ID NO: 5360989 - DNA, 25 bp, Homo sapien
tccagattgacttagagttccaggg

SEQ ID NO: 5360990 - DNA, 25 bp, Homo sapien
tttcccacggactgaggtgtcctga

SEQ ID NO: 5360991 - DNA, 25 bp, Homo sapien
gagcttcagagacacgctaagttta

SEQ ID NO: 5360992 - DNA, 25 bp, Homo sapien
agagattcagttgcaccgcattttc

SEQ ID NO: 5360993 - DNA, 25 bp, Homo sapien
gagacacgctaagtttaaataattg

SEQ ID NO: 5360994 - DNA, 25 bp, Homo sapien
cacagggtggcccagtatcctcgtt

SEQ ID NO: 5360995 - DNA, 25 bp, Homo sapien
ctgtcagtgggagcacctcgatttc

SEQ ID NO: 5360996 - DNA, 25 bp, Homo sapien
cagcatccctctgctgattagagcc

SEQ ID NO: 5360997 - DNA, 25 bp, Homo sapien
ttctatggttaggtctagaacccat

SEQ ID NO: 5360998 - DNA, 25 bp, Homo sapien
ctcagaggtggcacaaaccaaagag

SEQ ID NO: 5360999 - DNA, 25 bp, Homo sapien
gctgtcctcagaggtggcacaaacc

SEQ ID NO: 5361000 - DNA, 25 bp, Homo sapien
ttgccagagatctaggcgaagtcag

SEQ ID NO: 5361001 - DNA, 25 bp, Homo sapien
gagatctaggcgaagtcagagagaa

SEQ ID NO: 5361002 - DNA, 25 bp, Homo sapien
tcagaagtccctgggaacgtcctga

SEQ ID NO: 5361003 - DNA, 25 bp, Homo sapien
cagaagtccctgggaacgtcctgaa

SEQ ID NO: 5361004 - DNA, 25 bp, Homo sapien
ctgggaacgtcctgaaccttccgag

SEQ ID NO: 5361005 - DNA, 25 bp, Homo sapien
cactgaagtcaaaacagggatccga

SEQ ID NO: 5361006 - DNA, 25 bp, Homo sapien
agggatccgaagcttgctcccggcc

SEQ ID NO: 5361007 - DNA, 25 bp, Homo sapien
tcaccttgtcgttgagcatcctctt

SEQ ID NO: 5361008 - DNA, 25 bp, Homo sapien
cactgagtgactcacagcctcttct

SEQ ID NO: 5361009 - DNA, 25 bp, Homo sapien
tgccagctggaacccttgttctgca

SEQ ID NO: 5361010 - DNA, 25 bp, Homo sapien
catgactgtggaacatgtccagcac

SEQ ID NO: 5361011 - DNA, 25 bp, Homo sapien
agccatgactgtggaacatgtccag

SEQ ID NO: 5361012 - DNA, 25 bp, Homo sapien
ccatgactgtggaacatgtccagca

SEQ ID NO: 5361013 - DNA, 25 bp, Homo sapien
gatgaataaatgtgcagaatgggtg

SEQ ID NO: 5361014 - DNA, 25 bp, Homo sapien
cagcagtgtctgaccaatacaaaca

SEQ ID NO: 5361015 - DNA, 25 bp, Homo sapien
gaaccacaatgatcacatgtactgg

SEQ ID NO: 5361016 - DNA, 25 bp, Homo sapien
catgtactgggtgatttgtggaaga

SEQ ID NO: 5361017 - DNA, 25 bp, Homo sapien
gacctgtgttctgggaccgcttgat

SEQ ID NO: 5361018 - DNA, 25 bp, Homo sapien
cctgtgttctgggaccgcttgattt

SEQ ID NO: 5361019 - DNA, 25 bp, Homo sapien
gtgacctgtgttctgggaccgcttg

SEQ ID NO: 5361020 - DNA, 25 bp, Homo sapien
ctgtgttctgggaccgcttgatttc

SEQ ID NO: 5361021 - DNA, 25 bp, Homo sapien
tagtggactgaggatgcatgagaat

SEQ ID NO: 5361022 - DNA, 25 bp, Homo sapien
gtagtggactgaggatgcatgagaa

SEQ ID NO: 5361023 - DNA, 25 bp, Homo sapien
cgtagtggactgaggatgcatgaga

SEQ ID NO: 5361024 - DNA, 25 bp, Homo sapien
gaagtttgctttgttgccttccctc

SEQ ID NO: 5361025 - DNA, 25 bp, Homo sapien
ctcttttcaaatgcgtgtggtcagt

SEQ ID NO: 5361026 - DNA, 25 bp, Homo sapien
caaatgcgtgtggtcagtgttattt

SEQ ID NO: 5361027 - DNA, 25 bp, Homo sapien
tttcaaatgcgtgtggtcagtgtta

SEQ ID NO: 5361028 - DNA, 25 bp, Homo sapien
taaatactggctggatgtcaggctg

SEQ ID NO: 5361029 - DNA, 25 bp, Homo sapien
ttctacaacaggtcccgtgtcttct

SEQ ID NO: 5361030 - DNA, 25 bp, Homo sapien
tccctctccttggagttaaatactg

SEQ ID NO: 5361031 - DNA, 25 bp, Homo sapien
aacaggtcccgtgtcttctttcttg

SEQ ID NO: 5361032 - DNA, 25 bp, Homo sapien
tctgctgttgcaatgcggggcgcca

SEQ ID NO: 5361033 - DNA, 25 bp, Homo sapien
ggcgccaggctgcagaatctaagtc

SEQ ID NO: 5361034 - DNA, 25 bp, Homo sapien
tctgggaattggtgacgtgttagct

SEQ ID NO: 5361035 - DNA, 25 bp, Homo sapien
atgctggtcactcctacagcatggg

SEQ ID NO: 5361036 - DNA, 25 bp, Homo sapien
ccttaaagagtgctttgttcccact

SEQ ID NO: 5361037 - DNA, 25 bp, Homo sapien
aaagagtgctttgttcccacttgga

SEQ ID NO: 5361038 - DNA, 25 bp, Homo sapien
tgctccttaaagagtgctttgttcc

SEQ ID NO: 5361039 - DNA, 25 bp, Homo sapien
tgggggcaccgctgtgttgtagaca

SEQ ID NO: 5361040 - DNA, 25 bp, Homo sapien
ctgccagccaggaagggcctgaagt

SEQ ID NO: 5361041 - DNA, 25 bp, Homo sapien
ccaacgtgctttgcaggacttagag

SEQ ID NO: 5361042 - DNA, 25 bp, Homo sapien
tgtggttgagcaatgcgagcccaga

SEQ ID NO: 5361043 - DNA, 25 bp, Homo sapien
tgctctcggtgagtcagcacactgt

SEQ ID NO: 5361044 - DNA, 25 bp, Homo sapien
gctgctctcggtgagtcagcacact

SEQ ID NO: 5361045 - DNA, 25 bp, Homo sapien
gagtgggcttcaatccaaggtttac

SEQ ID NO: 5361046 - DNA, 25 bp, Homo sapien
tcattgctgcccacaattggagctg

SEQ ID NO: 5361047 - DNA, 25 bp, Homo sapien
tgatttgaaccttgagacttccctc

SEQ ID NO: 5361048 - DNA, 25 bp, Homo sapien
gctgcttagtgatatggacctggtc

SEQ ID NO: 5361049 - DNA, 25 bp, Homo sapien
gagtcaaatgtaaacagctcctggg

SEQ ID NO: 5361050 - DNA, 25 bp, Homo sapien
cggccagttctgagcttgagctgag

SEQ ID NO: 5361051 - DNA, 25 bp, Homo sapien
tcttgggaagatgtgttcacagccc

SEQ ID NO: 5361052 - DNA, 25 bp, Homo sapien
ttaatgtcatgctaagtccttcctg

SEQ ID NO: 5361053 - DNA, 25 bp, Homo sapien
cttgattacgttggtggctgtgaga

SEQ ID NO: 5361054 - DNA, 25 bp, Homo sapien
ttatcaatggcccatttgcctggga

SEQ ID NO: 5361055 - DNA, 25 bp, Homo sapien
tacactggaagtcctaatggcttca

SEQ ID NO: 5361056 - DNA, 25 bp, Homo sapien
tttgatagtggatttgggcttaatg

SEQ ID NO: 5361057 - DNA, 25 bp, Homo sapien
cactccaatgggatggtaagcttct

SEQ ID NO: 5361058 - DNA, 25 bp, Homo sapien
caagtgctgactgatttcctgagga

SEQ ID NO: 5361059 - DNA, 25 bp, Homo sapien
tgtcaaaaacatcaggattcctggt

SEQ ID NO: 5361060 - DNA, 25 bp, Homo sapien
tttgcacccctgatgctccgcatga

SEQ ID NO: 5361061 - DNA, 25 bp, Homo sapien
tgcagtgggacctccgcgtgaccct

SEQ ID NO: 5361062 - DNA, 25 bp, Homo sapien
tctgagtgtccgaggagacacgcgc

SEQ ID NO: 5361063 - DNA, 25 bp, Homo sapien
cagaacctgcctccgtcctgagctt

SEQ ID NO: 5361064 - DNA, 25 bp, Homo sapien
agccacgcccggttccagaacctgc

SEQ ID NO: 5361065 - DNA, 25 bp, Homo sapien
ctgtctctgcattgctgagtgctta

SEQ ID NO: 5361066 - DNA, 25 bp, Homo sapien
catccagtggcctttgtttgagttc

SEQ ID NO: 5361067 - DNA, 25 bp, Homo sapien
ttcacattggcctcctggacgtcta

SEQ ID NO: 5361068 - DNA, 25 bp, Homo sapien
ggacgtctatcccatggccttcgtt

SEQ ID NO: 5361069 - DNA, 25 bp, Homo sapien
ggcttaaaaccatttgcgatcacaa

SEQ ID NO: 5361070 - DNA, 25 bp, Homo sapien
tgtgtgtccagtcatgggatggcac

SEQ ID NO: 5361071 - DNA, 25 bp, Homo sapien
gccacggtccgtgttagcctggtga

SEQ ID NO: 5361072 - DNA, 25 bp, Homo sapien
tgcatgaaacagctaggcagccgcg

SEQ ID NO: 5361073 - DNA, 25 bp, Homo sapien
tgcgagatagaatcaaatgtcaaca

SEQ ID NO: 5361074 - DNA, 25 bp, Homo sapien
agtccatctgcgagatagaatcaaa

SEQ ID NO: 5361075 - DNA, 25 bp, Homo sapien
ggacagtgaagaggacccggccacc

SEQ ID NO: 5361076 - DNA, 25 bp, Homo sapien
aggacccggccacctctaggttctg

SEQ ID NO: 5361077 - DNA, 25 bp, Homo sapien
cttaacaaggtaagggctgaggcct

SEQ ID NO: 5361078 - DNA, 25 bp, Homo sapien
cgttctacaggttcaggagcgtccc

SEQ ID NO: 5361079 - DNA, 25 bp, Homo sapien
ttgttgcccctccagataaaggatg

SEQ ID NO: 5361080 - DNA, 25 bp, Homo sapien
tcttagaggttaggctcaggaccgt

SEQ ID NO: 5361081 - DNA, 25 bp, Homo sapien
tggccccgagttatctcaccaggta

SEQ ID NO: 5361082 - DNA, 25 bp, Homo sapien
taaggtcccagtcgcctgcatgttg

SEQ ID NO: 5361083 - DNA, 25 bp, Homo sapien
cggccatgcctagtgcagggagcat

SEQ ID NO: 5361084 - DNA, 25 bp, Homo sapien
tgctgtgggtccaggaaatgctgct

SEQ ID NO: 5361085 - DNA, 25 bp, Homo sapien
aggagctcacacatggcggcacgat

SEQ ID NO: 5361086 - DNA, 25 bp, Homo sapien
atcacttcccaagaggactcatgcc

SEQ ID NO: 5361087 - DNA, 25 bp, Homo sapien
gactcatgcccacgagcggacaggg

SEQ ID NO: 5361088 - DNA, 25 bp, Homo sapien
ggcacgatggagacacctatcactt

SEQ ID NO: 5361089 - DNA, 25 bp, Homo sapien
gagattaatgtagctagacacagca

SEQ ID NO: 5361090 - DNA, 25 bp, Homo sapien
gctagagacagaggaatggagatta

SEQ ID NO: 5361091 - DNA, 25 bp, Homo sapien
agcaggagccatgcggtgggactgc

SEQ ID NO: 5361092 - DNA, 25 bp, Homo sapien
ccatgcggtgggactgctccgtgca

SEQ ID NO: 5361093 - DNA, 25 bp, Homo sapien
gagctcaagaatcaggcaatccact

SEQ ID NO: 5361094 - DNA, 25 bp, Homo sapien
tcatctatgggacaaggatctcctg

SEQ ID NO: 5361095 - DNA, 25 bp, Homo sapien
ctctctctctcgaatagtgtggaaa

SEQ ID NO: 5361096 - DNA, 25 bp, Homo sapien
aaagcctctactggtttcctactgc

SEQ ID NO: 5361097 - DNA, 25 bp, Homo sapien
ccatttacctgttttgccaagaata

SEQ ID NO: 5361098 - DNA, 25 bp, Homo sapien
cagtgcttaatatatcggaaattga

SEQ ID NO: 5361099 - DNA, 25 bp, Homo sapien
ggagtaccctcatcacagtgcttaa

SEQ ID NO: 5361100 - DNA, 25 bp, Homo sapien
taaacatccatttacctgttttgcc

SEQ ID NO: 5361101 - DNA, 25 bp, Homo sapien
atgacgtcaatagcagcccagggca

SEQ ID NO: 5361102 - DNA, 25 bp, Homo sapien
ccagggcacttcagagtagagggct

SEQ ID NO: 5361103 - DNA, 25 bp, Homo sapien
gcctcatgctgacttgcagagttca

SEQ ID NO: 5361104 - DNA, 25 bp, Homo sapien
cctgaggtcacctggaatcagatta

SEQ ID NO: 5361105 - DNA, 25 bp, Homo sapien
acagcgaactagaagaaagggcaag

SEQ ID NO: 5361106 - DNA, 25 bp, Homo sapien
caagaaggaaatagccaccgtctac

SEQ ID NO: 5361107 - DNA, 25 bp, Homo sapien
caccgtctacagatggcttagttaa

SEQ ID NO: 5361108 - DNA, 25 bp, Homo sapien
agttaagtcatccacagcccaaggg

SEQ ID NO: 5361109 - DNA, 25 bp, Homo sapien
tatgccaccgattgcaggacacaag

SEQ ID NO: 5361110 - DNA, 25 bp, Homo sapien
tattgaacctaggacttgagcctcc

SEQ ID NO: 5361111 - DNA, 25 bp, Homo sapien
tgttccaacagacagggcctagctt

SEQ ID NO: 5361112 - DNA, 25 bp, Homo sapien
tgatttcaggtcaataacggtcccc

SEQ ID NO: 5361113 - DNA, 25 bp, Homo sapien
cccgtgaacttcctttgacttattg

SEQ ID NO: 5361114 - DNA, 25 bp, Homo sapien
gaaaagtgcaaagttattccccatc

SEQ ID NO: 5361115 - DNA, 25 bp, Homo sapien
tcttccaagggttgaattctggagg

SEQ ID NO: 5361116 - DNA, 25 bp, Homo sapien
gaagaagacacattcctagttcccc

SEQ ID NO: 5361117 - DNA, 25 bp, Homo sapien
taaagatgccctaagtgttgaagaa

SEQ ID NO: 5361118 - DNA, 25 bp, Homo sapien
catgtacagcatgcatcacggatca

SEQ ID NO: 5361119 - DNA, 25 bp, Homo sapien
tcacggatcaatagactgtacttat

SEQ ID NO: 5361120 - DNA, 25 bp, Homo sapien
tgtttgtactagttgatgaaggagt

SEQ ID NO: 5361121 - DNA, 25 bp, Homo sapien
aggcctcaacaaggtgaggagacct

SEQ ID NO: 5361122 - DNA, 25 bp, Homo sapien
ggcctcaacaaggtgaggagacctt

SEQ ID NO: 5361123 - DNA, 25 bp, Homo sapien
tacctataccttaaatctgagcccc

SEQ ID NO: 5361124 - DNA, 25 bp, Homo sapien
cacctgactctagactcataggagg

SEQ ID NO: 5361125 - DNA, 25 bp, Homo sapien
tcaaaatttgcagctgttagaccag

SEQ ID NO: 5361126 - DNA, 25 bp, Homo sapien
gaccagttgagcctgtaccacctga

SEQ ID NO: 5361127 - DNA, 25 bp, Homo sapien
cacacttaaggcatgaaatccggcg

SEQ ID NO: 5361128 - DNA, 25 bp, Homo sapien
agattccgaaacctggcgtctccag

SEQ ID NO: 5361129 - DNA, 25 bp, Homo sapien
gagccttgtacagagcgatgtcatt

SEQ ID NO: 5361130 - DNA, 25 bp, Homo sapien
cactgagtcccatgcactttcctgg

SEQ ID NO: 5361131 - DNA, 25 bp, Homo sapien
ctgtggacctcgtggaggggttcac

SEQ ID NO: 5361132 - DNA, 25 bp, Homo sapien
gtgataccgcgcatagacgttctgg

SEQ ID NO: 5361133 - DNA, 25 bp, Homo sapien
gataccgcgcatagacgttctgggc

SEQ ID NO: 5361134 - DNA, 25 bp, Homo sapien
ttctgggctggtagccctttgaggt

SEQ ID NO: 5361135 - DNA, 25 bp, Homo sapien
gctggtagccctttgaggtacagct

SEQ ID NO: 5361136 - DNA, 25 bp, Homo sapien
gggttcgatgcgctctctgctccct

SEQ ID NO: 5361137 - DNA, 25 bp, Homo sapien
tcgatgcgctctctgctcccttgtg

SEQ ID NO: 5361138 - DNA, 25 bp, Homo sapien
gcattgctccatcgggttcgatgcg

SEQ ID NO: 5361139 - DNA, 25 bp, Homo sapien
gttcgatgcgctctctgctcccttg

SEQ ID NO: 5361140 - DNA, 25 bp, Homo sapien
caaccgcccgtggacacctccagga

SEQ ID NO: 5361141 - DNA, 25 bp, Homo sapien
ccaaccgcccgtggacacctccagg

SEQ ID NO: 5361142 - DNA, 25 bp, Homo sapien
cccaaccgcccgtggacacctccag

SEQ ID NO: 5361143 - DNA, 25 bp, Homo sapien
ccctccgtggggtcgtggatcgtca

SEQ ID NO: 5361144 - DNA, 25 bp, Homo sapien
ttcgctgcccgagcacggtgcctgc

SEQ ID NO: 5361145 - DNA, 25 bp, Homo sapien
cgtggatcgtcagggccgcgtgggt

SEQ ID NO: 5361146 - DNA, 25 bp, Homo sapien
aaggcccacggggaagccattgcca

SEQ ID NO: 5361147 - DNA, 25 bp, Homo sapien
cagatcttatgaagattcaggcagg

SEQ ID NO: 5361148 - DNA, 25 bp, Homo sapien
aagaagagccgactgccagggagct

SEQ ID NO: 5361149 - DNA, 25 bp, Homo sapien
aagagctcggcagggcgatgcccaa

SEQ ID NO: 5361150 - DNA, 25 bp, Homo sapien
aacaggagcgtagtctgcgggtcca

SEQ ID NO: 5361151 - DNA, 25 bp, Homo sapien
tgcttaatcatgcaggcagtaaatc

SEQ ID NO: 5361152 - DNA, 25 bp, Homo sapien
cagtaaatccaagaacatgctggaa

SEQ ID NO: 5361153 - DNA, 25 bp, Homo sapien
aaaagagtatgttgcttaatcatgc

SEQ ID NO: 5361154 - DNA, 25 bp, Homo sapien
tcagcactctcaaaagagtatgttg

SEQ ID NO: 5361155 - DNA, 25 bp, Homo sapien
gtaagtgaagaacttggcctcctgc

SEQ ID NO: 5361156 - DNA, 25 bp, Homo sapien
agtaagtgaagaacttggcctcctg

SEQ ID NO: 5361157 - DNA, 25 bp, Homo sapien
cagtaagtgaagaacttggcctcct

SEQ ID NO: 5361158 - DNA, 25 bp, Homo sapien
gcaaatgttcttgataagaatgcaa

SEQ ID NO: 5361159 - DNA, 25 bp, Homo sapien
tgcaaatgttcttgataagaatgca

SEQ ID NO: 5361160 - DNA, 25 bp, Homo sapien
atgcaaatgttcttgataagaatgc

SEQ ID NO: 5361161 - DNA, 25 bp, Homo sapien
ttattgggatattaagaaatgcaaa

SEQ ID NO: 5361162 - DNA, 25 bp, Homo sapien
tcccatatgaggttaggtcctgata

SEQ ID NO: 5361163 - DNA, 25 bp, Homo sapien
gagcagaattaagcatctttgggtc

SEQ ID NO: 5361164 - DNA, 25 bp, Homo sapien
ggctttcaaacactggtgcagagca

SEQ ID NO: 5361165 - DNA, 25 bp, Homo sapien
tgatactagaggagtggctttcaaa

SEQ ID NO: 5361166 - DNA, 25 bp, Homo sapien
gagagaacactcttgacttcgctga

SEQ ID NO: 5361167 - DNA, 25 bp, Homo sapien
tccattgttaatgggcttccttcac

SEQ ID NO: 5361168 - DNA, 25 bp, Homo sapien
ggattgctacttctgccccttttta

SEQ ID NO: 5361169 - DNA, 25 bp, Homo sapien
tcacccctacattcttcagagagaa

SEQ ID NO: 5361170 - DNA, 25 bp, Homo sapien
ctcttgttgaatgcaagggtttcct

SEQ ID NO: 5361171 - DNA, 25 bp, Homo sapien
tcttgttgcctgtttgctaggagct

SEQ ID NO: 5361172 - DNA, 25 bp, Homo sapien
ctgtttgctaggagctgtccactca

SEQ ID NO: 5361173 - DNA, 25 bp, Homo sapien
aagggtttcctctcatgtcaaaaca

SEQ ID NO: 5361174 - DNA, 25 bp, Homo sapien
cccagtgttttcagctggataggtc

SEQ ID NO: 5361175 - DNA, 25 bp, Homo sapien
agtgttttcagctggataggtctct

SEQ ID NO: 5361176 - DNA, 25 bp, Homo sapien
tttcccagtgttttcagctggatag

SEQ ID NO: 5361177 - DNA, 25 bp, Homo sapien
cagtgttttcagctggataggtctc

SEQ ID NO: 5361178 - DNA, 25 bp, Homo sapien
gctgaagttgaatgctggtctgcac

SEQ ID NO: 5361179 - DNA, 25 bp, Homo sapien
tggctgaagttgaatgctggtctgc

SEQ ID NO: 5361180 - DNA, 25 bp, Homo sapien
gaagttgaatgctggtctgcacatg

SEQ ID NO: 5361181 - DNA, 25 bp, Homo sapien
ctgaagttgaatgctggtctgcaca

SEQ ID NO: 5361182 - DNA, 25 bp, Homo sapien
gctcaggagtgttgccactgctctt

SEQ ID NO: 5361183 - DNA, 25 bp, Homo sapien
ccaccacatgggtcgtaatgggaaa

SEQ ID NO: 5361184 - DNA, 25 bp, Homo sapien
ttcatcaacccagggagctcaggag

SEQ ID NO: 5361185 - DNA, 25 bp, Homo sapien
cattgctgccacgaggcactcatag

SEQ ID NO: 5361186 - DNA, 25 bp, Homo sapien
ggcagatagtgtgaggcgcatctca

SEQ ID NO: 5361187 - DNA, 25 bp, Homo sapien
gagaaataggacctgatgctggaga

SEQ ID NO: 5361188 - DNA, 25 bp, Homo sapien
tgaggcgcatctcagactcggtggc

SEQ ID NO: 5361189 - DNA, 25 bp, Homo sapien
tcagtgagttgagaatgaggcttca

SEQ ID NO: 5361190 - DNA, 25 bp, Homo sapien
aaggagttgcttccaaccagctcat

SEQ ID NO: 5361191 - DNA, 25 bp, Homo sapien
caaccagctcattgtgcgtgagagc

SEQ ID NO: 5361192 - DNA, 25 bp, Homo sapien
tggtcacatgcacacccaaggagtt

SEQ ID NO: 5361193 - DNA, 25 bp, Homo sapien
tgtgcgtgagagcagaggtaatttc

SEQ ID NO: 5361194 - DNA, 25 bp, Homo sapien
cctcttcacagccaagggtctcacc

SEQ ID NO: 5361195 - DNA, 25 bp, Homo sapien
ggcctcttcacagccaagggtctca

SEQ ID NO: 5361196 - DNA, 25 bp, Homo sapien
ctgttagggaagaggggcctcttca

SEQ ID NO: 5361197 - DNA, 25 bp, Homo sapien
tcttcacagccaagggtctcaccat

SEQ ID NO: 5361198 - DNA, 25 bp, Homo sapien
taggaaagtagcctcctttgcagag

SEQ ID NO: 5361199 - DNA, 25 bp, Homo sapien
tcaagatgcttgtactcagacaaac

SEQ ID NO: 5361200 - DNA, 25 bp, Homo sapien
tgagttagagaagccccaattgcca

SEQ ID NO: 5361201 - DNA, 25 bp, Homo sapien
tactggattctacctggatcttagg

SEQ ID NO: 5361202 - DNA, 25 bp, Homo sapien
ttatgagggtactgaacattgtatt

SEQ ID NO: 5361203 - DNA, 25 bp, Homo sapien
tatgagggtactgaacattgtattt

SEQ ID NO: 5361204 - DNA, 25 bp, Homo sapien
tattatgagggtactgaacattgta

SEQ ID NO: 5361205 - DNA, 25 bp, Homo sapien
ttattatgagggtactgaacattgt

SEQ ID NO: 5361206 - DNA, 25 bp, Homo sapien
ttaattgtctgaattaggctagatg

SEQ ID NO: 5361207 - DNA, 25 bp, Homo sapien
ttgtctgaattaggctagatgtcat

SEQ ID NO: 5361208 - DNA, 25 bp, Homo sapien
ttactgaggcatacattgtgtcata

SEQ ID NO: 5361209 - DNA, 25 bp, Homo sapien
tactgaggcatacattgtgtcataa

SEQ ID NO: 5361210 - DNA, 25 bp, Homo sapien
ttgaattatcttcgtgttacaggtg

SEQ ID NO: 5361211 - DNA, 25 bp, Homo sapien
catggttacactctgtttcagcaac

SEQ ID NO: 5361212 - DNA, 25 bp, Homo sapien
caacatggttacactctgtttcagc

SEQ ID NO: 5361213 - DNA, 25 bp, Homo sapien
tgaattatcttcgtgttacaggtgt

SEQ ID NO: 5361214 - DNA, 25 bp, Homo sapien
actccgtctctgtccggacaatcct

SEQ ID NO: 5361215 - DNA, 25 bp, Homo sapien
gattctgtaatatatagagtctaaa

SEQ ID NO: 5361216 - DNA, 25 bp, Homo sapien
cctgggatttggattgaattgtatt

SEQ ID NO: 5361217 - DNA, 25 bp, Homo sapien
tctgtccggacaatcctagattatt

SEQ ID NO: 5361218 - DNA, 25 bp, Homo sapien
tacatgcccccagtcaaatgaaatc

SEQ ID NO: 5361219 - DNA, 25 bp, Homo sapien
gataatattaatgtgttgcgaatgg

SEQ ID NO: 5361220 - DNA, 25 bp, Homo sapien
gaaatcagcagctcggacttcacga

SEQ ID NO: 5361221 - DNA, 25 bp, Homo sapien
tgttgtctacatgcccccagtcaaa

SEQ ID NO: 5361222 - DNA, 25 bp, Homo sapien
aaatgtttgccaggttgtattagcc

SEQ ID NO: 5361223 - DNA, 25 bp, Homo sapien
ttcttgaaagctcggtaaggccctg

SEQ ID NO: 5361224 - DNA, 25 bp, Homo sapien
tgcatttaatgtatcctggccacag

SEQ ID NO: 5361225 - DNA, 25 bp, Homo sapien
caagtgtgaagctggacgtgatgca

SEQ ID NO: 5361226 - DNA, 25 bp, Homo sapien
tatctcatcaaggaggttggtcaga

SEQ ID NO: 5361227 - DNA, 25 bp, Homo sapien
cggaggatgttatctagacttcacc

SEQ ID NO: 5361228 - DNA, 25 bp, Homo sapien
cagagcacttcctactgaaagaggt

SEQ ID NO: 5361229 - DNA, 25 bp, Homo sapien
gacttcaccaagatggtttctagac

SEQ ID NO: 5361230 - DNA, 25 bp, Homo sapien
ccatgactgctttaggatgcaggcg

SEQ ID NO: 5361231 - DNA, 25 bp, Homo sapien
gatatgcgggtacacagggcattca

SEQ ID NO: 5361232 - DNA, 25 bp, Homo sapien
tgctttaggatgcaggcgagctgta

SEQ ID NO: 5361233 - DNA, 25 bp, Homo sapien
cgagctgtagttgatatgcgggtac

SEQ ID NO: 5361234 - DNA, 25 bp, Homo sapien
ctgatgaaggtgataccttctctgt

SEQ ID NO: 5361235 - DNA, 25 bp, Homo sapien
aagcccctaatggtccattcttcca

SEQ ID NO: 5361236 - DNA, 25 bp, Homo sapien
atgcagtaaagcccctaatggtcca

SEQ ID NO: 5361237 - DNA, 25 bp, Homo sapien
gatgaaggtgataccttctctgtct

SEQ ID NO: 5361238 - DNA, 25 bp, Homo sapien
ttattctgcacagcattcacctggt

SEQ ID NO: 5361239 - DNA, 25 bp, Homo sapien
ttctgcacagcattcacctggttca

SEQ ID NO: 5361240 - DNA, 25 bp, Homo sapien
catggggaattggatgcccactttc

SEQ ID NO: 5361241 - DNA, 25 bp, Homo sapien
ctgcacagcattcacctggttcatg

SEQ ID NO: 5361242 - DNA, 25 bp, Homo sapien
tcctcgaaatccagtgtcatggtcc

SEQ ID NO: 5361243 - DNA, 25 bp, Homo sapien
tgttcctcgaaatccagtgtcatgg

SEQ ID NO: 5361244 - DNA, 25 bp, Homo sapien
ctcgaaatccagtgtcatggtcccc

SEQ ID NO: 5361245 - DNA, 25 bp, Homo sapien
agtgttcctcgaaatccagtgtcat

SEQ ID NO: 5361246 - DNA, 25 bp, Homo sapien
gatttcacatggagagccaactctg

SEQ ID NO: 5361247 - DNA, 25 bp, Homo sapien
tacaaaagttcttgccaaggcagag

SEQ ID NO: 5361248 - DNA, 25 bp, Homo sapien
gaaagcatttgactccttcctcgag

SEQ ID NO: 5361249 - DNA, 25 bp, Homo sapien
caagctaccggagtatctgctgagg

SEQ ID NO: 5361250 - DNA, 25 bp, Homo sapien
tgggtccctaagtgaaaccagagaa

SEQ ID NO: 5361251 - DNA, 25 bp, Homo sapien
agtgagtattaagtgtgcactggca

SEQ ID NO: 5361252 - DNA, 25 bp, Homo sapien
agtattaagtgtgcactggcactgc

SEQ ID NO: 5361253 - DNA, 25 bp, Homo sapien
tgagtattaagtgtgcactggcact

SEQ ID NO: 5361254 - DNA, 25 bp, Homo sapien
tgggttacatgcgacaatgctgcag

SEQ ID NO: 5361255 - DNA, 25 bp, Homo sapien
ttgggggcagcagtcacaagcatgc

SEQ ID NO: 5361256 - DNA, 25 bp, Homo sapien
aggctgagtcatccagaaggtggcc

SEQ ID NO: 5361257 - DNA, 25 bp, Homo sapien
ccttttcggcaaggaggctgagtca

SEQ ID NO: 5361258 - DNA, 25 bp, Homo sapien
gctgatggatcacttaaaggctgga

SEQ ID NO: 5361259 - DNA, 25 bp, Homo sapien
tcagagttcgcgtttctccagcaat

SEQ ID NO: 5361260 - DNA, 25 bp, Homo sapien
gatagaaagtcagataggctccaga

SEQ ID NO: 5361261 - DNA, 25 bp, Homo sapien
caagtgagagacaagtaaggaggct

SEQ ID NO: 5361262 - DNA, 25 bp, Homo sapien
aaggacagtgcactttggagattgg

SEQ ID NO: 5361263 - DNA, 25 bp, Homo sapien
ttggttgagtgtacagcagctagcc

SEQ ID NO: 5361264 - DNA, 25 bp, Homo sapien
tctcttgagtgtcaaggacacctgg

SEQ ID NO: 5361265 - DNA, 25 bp, Homo sapien
ccaggaggcatccagtagtgcagca

SEQ ID NO: 5361266 - DNA, 25 bp, Homo sapien
tgaaatgacggtcaaccgcagatgc

SEQ ID NO: 5361267 - DNA, 25 bp, Homo sapien
ccgcagatgcagacctccattcatg

SEQ ID NO: 5361268 - DNA, 25 bp, Homo sapien
catcgtttgtctgcaagatgaacca

SEQ ID NO: 5361269 - DNA, 25 bp, Homo sapien
catgctaggtatcaagcaattcagt

SEQ ID NO: 5361270 - DNA, 25 bp, Homo sapien
gtctgccgcttgtgttattaacttc

SEQ ID NO: 5361271 - DNA, 25 bp, Homo sapien
cggagtctgccgcttgtgttattaa

SEQ ID NO: 5361272 - DNA, 25 bp, Homo sapien
gtgttattaacttctagggccagtc

SEQ ID NO: 5361273 - DNA, 25 bp, Homo sapien
tgttattaacttctagggccagtct

SEQ ID NO: 5361274 - DNA, 25 bp, Homo sapien
tcttaagccggtctgaaaagcgcaa

SEQ ID NO: 5361275 - DNA, 25 bp, Homo sapien
acacacactggcctgcgcccactgt

SEQ ID NO: 5361276 - DNA, 25 bp, Homo sapien
cttcccaggtgaggcaatgctcgcc

SEQ ID NO: 5361277 - DNA, 25 bp, Homo sapien
cgcgcacggtgcgcacacacactgg

SEQ ID NO: 5361278 - DNA, 25 bp, Homo sapien
tcaaacctcctcgaagatgccttca

SEQ ID NO: 5361279 - DNA, 25 bp, Homo sapien
gcttatcaaaatatgttcgtaggaa

SEQ ID NO: 5361280 - DNA, 25 bp, Homo sapien
aatatgttcgtaggaaaattcagaa

SEQ ID NO: 5361281 - DNA, 25 bp, Homo sapien
ctccgcttatcaaaatatgttcgta

SEQ ID NO: 5361282 - DNA, 25 bp, Homo sapien
aaaattcagaacaagcacgttccat

SEQ ID NO: 5361283 - DNA, 25 bp, Homo sapien
tgagatcgcaaccagtgaaggaggc

SEQ ID NO: 5361284 - DNA, 25 bp, Homo sapien
tgtacacctctaagcctaaaagcgg

SEQ ID NO: 5361285 - DNA, 25 bp, Homo sapien
tcaatctgagcgaggcaaatcactg

SEQ ID NO: 5361286 - DNA, 25 bp, Homo sapien
gagaaagcccttttagatccagaag

SEQ ID NO: 5361287 - DNA, 25 bp, Homo sapien
gggtcgcgctggttccttcactgga

SEQ ID NO: 5361288 - DNA, 25 bp, Homo sapien
cagagaatcccatgccttgtcttgg

SEQ ID NO: 5361289 - DNA, 25 bp, Homo sapien
tcctaaactttctgtacgtccagag

SEQ ID NO: 5361290 - DNA, 25 bp, Homo sapien
ttcactggatggacgtccgacgctg

SEQ ID NO: 5361291 - DNA, 25 bp, Homo sapien
gagccaagcgctttacattcattgt

SEQ ID NO: 5361292 - DNA, 25 bp, Homo sapien
gagacttggtaattcctctatcaca

SEQ ID NO: 5361293 - DNA, 25 bp, Homo sapien
gctaacaaggacagaacattattct

SEQ ID NO: 5361294 - DNA, 25 bp, Homo sapien
tcttgtagcacagaaaggtggagat

SEQ ID NO: 5361295 - DNA, 25 bp, Homo sapien
gcagtgattattcataggcgtgatc

SEQ ID NO: 5361296 - DNA, 25 bp, Homo sapien
ttgccatatatcagcacgtctgtat

SEQ ID NO: 5361297 - DNA, 25 bp, Homo sapien
gattgggggctagtttgacttttgc

SEQ ID NO: 5361298 - DNA, 25 bp, Homo sapien
tttctcttccgatctgattaagatg

SEQ ID NO: 5361299 - DNA, 25 bp, Homo sapien
cagcacgtctgtatcagaagcagat

SEQ ID NO: 5361300 - DNA, 25 bp, Homo sapien
tgatttgtaacccagttgtgaaact

SEQ ID NO: 5361301 - DNA, 25 bp, Homo sapien
tctgtaatgatttgtaacccagttg

SEQ ID NO: 5361302 - DNA, 25 bp, Homo sapien
taatgatttgtaacccagttgtgaa

SEQ ID NO: 5361303 - DNA, 25 bp, Homo sapien
tgtaacccagttgtgaaacttggct

SEQ ID NO: 5361304 - DNA, 25 bp, Homo sapien
caaccaaagttccaatgtgactgtg

SEQ ID NO: 5361305 - DNA, 25 bp, Homo sapien
gtcacaatctaaatttctgtagtag

SEQ ID NO: 5361306 - DNA, 25 bp, Homo sapien
tttcgttcgtccaaacaacacttga

SEQ ID NO: 5361307 - DNA, 25 bp, Homo sapien
agagccgtagccctttgtaaaggct

SEQ ID NO: 5361308 - DNA, 25 bp, Homo sapien
tcttcaaaggtaagagcttcagagt

SEQ ID NO: 5361309 - DNA, 25 bp, Homo sapien
tggcagtaacagttcatcatgcttt

SEQ ID NO: 5361310 - DNA, 25 bp, Homo sapien
taagtcctgacctttagctagaaag

SEQ ID NO: 5361311 - DNA, 25 bp, Homo sapien
aaatattaaatacggccttcccatg

SEQ ID NO: 5361312 - DNA, 25 bp, Homo sapien
caatacaagctgtgttaagtcactt

SEQ ID NO: 5361313 - DNA, 25 bp, Homo sapien
aagatgtagtataaagactgatcaa

SEQ ID NO: 5361314 - DNA, 25 bp, Homo sapien
tcttacgctgtgtaagttatcagca

SEQ ID NO: 5361315 - DNA, 25 bp, Homo sapien
gatccttacagttcattcttacgct

SEQ ID NO: 5361316 - DNA, 25 bp, Homo sapien
gaaaagctgctacacatcatcctgg

SEQ ID NO: 5361317 - DNA, 25 bp, Homo sapien
taatcctccttgctgcggctagaga

SEQ ID NO: 5361318 - DNA, 25 bp, Homo sapien
tgtcttcacagcactttaccgcagg

SEQ ID NO: 5361319 - DNA, 25 bp, Homo sapien
tggctcaacctgacacactggaaag

SEQ ID NO: 5361320 - DNA, 25 bp, Homo sapien
caaaaaatcagctaggtatcttatt

SEQ ID NO: 5361321 - DNA, 25 bp, Homo sapien
ccctgagattatattccataagtga

SEQ ID NO: 5361322 - DNA, 25 bp, Homo sapien
gtgatacaaatactaccccttagac

SEQ ID NO: 5361323 - DNA, 25 bp, Homo sapien
atacaaatactaccccttagaccag

SEQ ID NO: 5361324 - DNA, 25 bp, Homo sapien
ccctcggtgctgtatatgaaacttg

SEQ ID NO: 5361325 - DNA, 25 bp, Homo sapien
tcaagttctggtctggcatgactcc

SEQ ID NO: 5361326 - DNA, 25 bp, Homo sapien
taagttgaaaacaggcataccatcc

SEQ ID NO: 5361327 - DNA, 25 bp, Homo sapien
tggcatatgtctccctgcaaggcta

SEQ ID NO: 5361328 - DNA, 25 bp, Homo sapien
gatgcaacctgactggaatgcaggc

SEQ ID NO: 5361329 - DNA, 25 bp, Homo sapien
tgtcagcaccagaaggatgcaacct

SEQ ID NO: 5361330 - DNA, 25 bp, Homo sapien
gctccatcatgcagtacaactgctg

SEQ ID NO: 5361331 - DNA, 25 bp, Homo sapien
cccagcatctaagtggtttagtcca

SEQ ID NO: 5361332 - DNA, 25 bp, Homo sapien
tgtgtaaaaacagccaagcctatgt

SEQ ID NO: 5361333 - DNA, 25 bp, Homo sapien
gaagagacttccaggtaaacgctga

SEQ ID NO: 5361334 - DNA, 25 bp, Homo sapien
gaaaattgtaacctgattagcccag

SEQ ID NO: 5361335 - DNA, 25 bp, Homo sapien
tagaaaactccctcctagtgtatgg

SEQ ID NO: 5361336 - DNA, 25 bp, Homo sapien
ttcccatgaggtgccgtgacttctg

SEQ ID NO: 5361337 - DNA, 25 bp, Homo sapien
tggaaaagctttgctccagtcttaa

SEQ ID NO: 5361338 - DNA, 25 bp, Homo sapien
gaggtgccgtgacttctgatcatcc

SEQ ID NO: 5361339 - DNA, 25 bp, Homo sapien
tctgatcatcctgcaggcatggctg

SEQ ID NO: 5361340 - DNA, 25 bp, Homo sapien
agctcacacccacccggaaatattt

SEQ ID NO: 5361341 - DNA, 25 bp, Homo sapien
ggccctcattcaaccatctcaaatt

SEQ ID NO: 5361342 - DNA, 25 bp, Homo sapien
caacagctcacacccacccggaaat

SEQ ID NO: 5361343 - DNA, 25 bp, Homo sapien
tggcctccggccctcattcaaccat

SEQ ID NO: 5361344 - DNA, 25 bp, Homo sapien
tcagcaagcgcaccagaaatatgtc

SEQ ID NO: 5361345 - DNA, 25 bp, Homo sapien
tgtacagccgtaggattggccccag

SEQ ID NO: 5361346 - DNA, 25 bp, Homo sapien
cagtgcctgcgagttgtgcttgtac

SEQ ID NO: 5361347 - DNA, 25 bp, Homo sapien
cccacagtcagctggaggtccgtga

SEQ ID NO: 5361348 - DNA, 25 bp, Homo sapien
ccagggctgggcagtcttcttgctg

SEQ ID NO: 5361349 - DNA, 25 bp, Homo sapien
actgtgtcatggctccttcccaaca

SEQ ID NO: 5361350 - DNA, 25 bp, Homo sapien
tgtactgcccggttttgcttccctc

SEQ ID NO: 5361351 - DNA, 25 bp, Homo sapien
aacagcacatgggtctttcgcaatg

SEQ ID NO: 5361352 - DNA, 25 bp, Homo sapien
gaggctgtgttgaagtgtccgatta

SEQ ID NO: 5361353 - DNA, 25 bp, Homo sapien
taattcagtgagatagccaccgacc

SEQ ID NO: 5361354 - DNA, 25 bp, Homo sapien
agatgaagcccacaccggaggctgt

SEQ ID NO: 5361355 - DNA, 25 bp, Homo sapien
tgtccgattacaagcggccgttcct

SEQ ID NO: 5361356 - DNA, 25 bp, Homo sapien
tggaaccacatcagaaagtagagcc

SEQ ID NO: 5361357 - DNA, 25 bp, Homo sapien
ctggaaccacatcagaaagtagagc

SEQ ID NO: 5361358 - DNA, 25 bp, Homo sapien
gagatggagagagtgtgtttaaaaa

SEQ ID NO: 5361359 - DNA, 25 bp, Homo sapien
cttgagatggagagagtgtgtttaa

SEQ ID NO: 5361360 - DNA, 25 bp, Homo sapien
tgagatggagagagtgtgtttaaaa

SEQ ID NO: 5361361 - DNA, 25 bp, Homo sapien
atggagagagtgtgtttaaaaatac

SEQ ID NO: 5361362 - DNA, 25 bp, Homo sapien
ggaagaccgtcttcccactacatcg

SEQ ID NO: 5361363 - DNA, 25 bp, Homo sapien
tccgagaaggagatagcccagagca

SEQ ID NO: 5361364 - DNA, 25 bp, Homo sapien
actgagtagaatgcatgccagcaag

SEQ ID NO: 5361365 - DNA, 25 bp, Homo sapien
ctgccgggactctagccaggacaaa

SEQ ID NO: 5361366 - DNA, 25 bp, Homo sapien
aggtgttctcatcccaaatctatca

SEQ ID NO: 5361367 - DNA, 25 bp, Homo sapien
aaagcagggaattgtaggaagaaca

SEQ ID NO: 5361368 - DNA, 25 bp, Homo sapien
caagtccccaattttactacatctg

SEQ ID NO: 5361369 - DNA, 25 bp, Homo sapien
catattacaatttaaaggtgttctc

SEQ ID NO: 5361370 - DNA, 25 bp, Homo sapien
gctagaaaagagttgcaaaatgcca

SEQ ID NO: 5361371 - DNA, 25 bp, Homo sapien
gaaaagagttgcaaaatgccatagg

SEQ ID NO: 5361372 - DNA, 25 bp, Homo sapien
tagaaaagagttgcaaaatgccata

SEQ ID NO: 5361373 - DNA, 25 bp, Homo sapien
caccaatgtgctagaaaagagttgc

SEQ ID NO: 5361374 - DNA, 25 bp, Homo sapien
aaacaaatcaataacaataaaatca

SEQ ID NO: 5361375 - DNA, 25 bp, Homo sapien
tgtaaaaaacaaatcaataacaata

SEQ ID NO: 5361376 - DNA, 25 bp, Homo sapien
ctgtaaaaaacaaatcaataacaat

SEQ ID NO: 5361377 - DNA, 25 bp, Homo sapien
cataagtacctgttgccactagtgg

SEQ ID NO: 5361378 - DNA, 25 bp, Homo sapien
ggttatagtgctcaaatctcaaaat

SEQ ID NO: 5361379 - DNA, 25 bp, Homo sapien
ccactagtggcatgggacttggtta

SEQ ID NO: 5361380 - DNA, 25 bp, Homo sapien
caaaatctctttgaacatacgtcgt

SEQ ID NO: 5361381 - DNA, 25 bp, Homo sapien
tattccagcaactgttggacttgct

SEQ ID NO: 5361382 - DNA, 25 bp, Homo sapien
ctactattccagcaactgttggact

SEQ ID NO: 5361383 - DNA, 25 bp, Homo sapien
gaaggctcaataaaggcacaaccat

SEQ ID NO: 5361384 - DNA, 25 bp, Homo sapien
gacttgctccaagggacttgacatg

SEQ ID NO: 5361385 - DNA, 25 bp, Homo sapien
tctagggttcttgcagataatggcc

SEQ ID NO: 5361386 - DNA, 25 bp, Homo sapien
taccaacatcagcttacttgtaaga

SEQ ID NO: 5361387 - DNA, 25 bp, Homo sapien
gattacaatagtgaagctccgcagc

SEQ ID NO: 5361388 - DNA, 25 bp, Homo sapien
gataatggcccagaaactaccaaca

SEQ ID NO: 5361389 - DNA, 25 bp, Homo sapien
gtccccaggcccgaacacagtcagc

SEQ ID NO: 5361390 - DNA, 25 bp, Homo sapien
aggcccgaacacagtcagcacttgc

SEQ ID NO: 5361391 - DNA, 25 bp, Homo sapien
gaagctccaagaaccgcctgggtcc

SEQ ID NO: 5361392 - DNA, 25 bp, Homo sapien
actgcgggttcccactccctgggag

SEQ ID NO: 5361393 - DNA, 25 bp, Homo sapien
tgcggtctccgagaccagcctcggg

SEQ ID NO: 5361394 - DNA, 25 bp, Homo sapien
gctccgacggcaccggagtcggcag

SEQ ID NO: 5361395 - DNA, 25 bp, Homo sapien
gcccaccaagtagagacagagcagg

SEQ ID NO: 5361396 - DNA, 25 bp, Homo sapien
ttctgctcctgtttccgctctgcgg

SEQ ID NO: 5361397 - DNA, 25 bp, Homo sapien
cgcgccggccgggggtcggacgcag

SEQ ID NO: 5361398 - DNA, 25 bp, Homo sapien
cggccgggggtcggacgcagcagca

SEQ ID NO: 5361399 - DNA, 25 bp, Homo sapien
gccgggggtcggacgcagcagcagc

SEQ ID NO: 5361400 - DNA, 25 bp, Homo sapien
gccggccgggggtcggacgcagcag

SEQ ID NO: 5361401 - DNA, 25 bp, Homo sapien
cacagtagttagtcaggtaggtata

SEQ ID NO: 5361402 - DNA, 25 bp, Homo sapien
tatagtaggtagaaaagtggtcttc

SEQ ID NO: 5361403 - DNA, 25 bp, Homo sapien
cttcccatgtttagttgagatgcca

SEQ ID NO: 5361404 - DNA, 25 bp, Homo sapien
gatgccatgtaaccatgaaatgtag

SEQ ID NO: 5361405 - DNA, 25 bp, Homo sapien
gttttttgccgatgttgcttctgtc

SEQ ID NO: 5361406 - DNA, 25 bp, Homo sapien
aacgtacaccttcccagaatcatct

SEQ ID NO: 5361407 - DNA, 25 bp, Homo sapien
taaagcaaacgtacaccttcccaga

SEQ ID NO: 5361408 - DNA, 25 bp, Homo sapien
ctgttttttgccgatgttgcttctg

SEQ ID NO: 5361409 - DNA, 25 bp, Homo sapien
ttgctgggtcattagagcctcttac

SEQ ID NO: 5361410 - DNA, 25 bp, Homo sapien
ttagagcctcttacaagcacctcgt

SEQ ID NO: 5361411 - DNA, 25 bp, Homo sapien
tctctttctcactgattaggttgtc

SEQ ID NO: 5361412 - DNA, 25 bp, Homo sapien
catatgacctgaacttgctgggtca

SEQ ID NO: 5361413 - DNA, 25 bp, Homo sapien
tctgtccttcgtgtcacagagaaga

SEQ ID NO: 5361414 - DNA, 25 bp, Homo sapien
ctctgtccttcgtgtcacagagaag

SEQ ID NO: 5361415 - DNA, 25 bp, Homo sapien
ctgtccttcgtgtcacagagaagat

SEQ ID NO: 5361416 - DNA, 25 bp, Homo sapien
gctttttgatcatctgtgcagcccc

SEQ ID NO: 5361417 - DNA, 25 bp, Homo sapien
tcatcgcaagctttttgatcatctg

SEQ ID NO: 5361418 - DNA, 25 bp, Homo sapien
tgctgtagtcatcgcaagctttttg

SEQ ID NO: 5361419 - DNA, 25 bp, Homo sapien
ggtagttgctgtagtcatcgcaagc

SEQ ID NO: 5361420 - DNA, 25 bp, Homo sapien
tgagaccaaactgtacatactatgc

SEQ ID NO: 5361421 - DNA, 25 bp, Homo sapien
gacagagtgctcctaggtgacactg

SEQ ID NO: 5361422 - DNA, 25 bp, Homo sapien
tattgtaacatcaaaccagagtgac

SEQ ID NO: 5361423 - DNA, 25 bp, Homo sapien
taattaggcagtgaaagccagacta

SEQ ID NO: 5361424 - DNA, 25 bp, Homo sapien
ctatgattcacctttgtggagaggg

SEQ ID NO: 5361425 - DNA, 25 bp, Homo sapien
ggtttctaaggccagcctcgggaga

SEQ ID NO: 5361426 - DNA, 25 bp, Homo sapien
aatatgttcaggtttcgtggctggc

SEQ ID NO: 5361427 - DNA, 25 bp, Homo sapien
gccagcctcgggagagaacaggact

SEQ ID NO: 5361428 - DNA, 25 bp, Homo sapien
taatagcttaataccatgacatggg

SEQ ID NO: 5361429 - DNA, 25 bp, Homo sapien
taagaaggtcctagaatctctccag

SEQ ID NO: 5361430 - DNA, 25 bp, Homo sapien
tagagttcatgcaggtcgcaaaggc

SEQ ID NO: 5361431 - DNA, 25 bp, Homo sapien
tactatttctggttgttggatggca

SEQ ID NO: 5361432 - DNA, 25 bp, Homo sapien
taaatttcagatggttatcctcact

SEQ ID NO: 5361433 - DNA, 25 bp, Homo sapien
tatatgacaattggctgaatagctg

SEQ ID NO: 5361434 - DNA, 25 bp, Homo sapien
cacagatttgcactttggaactatt

SEQ ID NO: 5361435 - DNA, 25 bp, Homo sapien
agtttcacatacaagctgctttcgg

SEQ ID NO: 5361436 - DNA, 25 bp, Homo sapien
aggcgtatcataatattgcactaga

SEQ ID NO: 5361437 - DNA, 25 bp, Homo sapien
ccacatcattgaagttatccatttt

SEQ ID NO: 5361438 - DNA, 25 bp, Homo sapien
tggacttgttaatagattccacatc

SEQ ID NO: 5361439 - DNA, 25 bp, Homo sapien
caatcaaaaggcgtatcataatatt

SEQ ID NO: 5361440 - DNA, 25 bp, Homo sapien
ttccctttgaaacgggtcgctctca

SEQ ID NO: 5361441 - DNA, 25 bp, Homo sapien
tttgaaacgggtcgctctcatcaca

SEQ ID NO: 5361442 - DNA, 25 bp, Homo sapien
ttgcccttgtcttatgtggcttccc

SEQ ID NO: 5361443 - DNA, 25 bp, Homo sapien
tcgctctcatcacagcacgtagcat

SEQ ID NO: 5361444 - DNA, 25 bp, Homo sapien
gctgcatatctttgcgatttcccac

SEQ ID NO: 5361445 - DNA, 25 bp, Homo sapien
gacttaacttcggaatgagatgatg

SEQ ID NO: 5361446 - DNA, 25 bp, Homo sapien
ctggaggatggacttaacttcggaa

SEQ ID NO: 5361447 - DNA, 25 bp, Homo sapien
cttccttgctgcatatctttgcgat

SEQ ID NO: 5361448 - DNA, 25 bp, Homo sapien
ccctttgggtggttgcctggatcac

SEQ ID NO: 5361449 - DNA, 25 bp, Homo sapien
agggatgctgatgacatacatggag

SEQ ID NO: 5361450 - DNA, 25 bp, Homo sapien
tcactccattctcggtgccatgaag

SEQ ID NO: 5361451 - DNA, 25 bp, Homo sapien
gcctggcccattgtagacccaacaa

SEQ ID NO: 5361452 - DNA, 25 bp, Homo sapien
gatcagatgtcatggacaggtagtc

SEQ ID NO: 5361453 - DNA, 25 bp, Homo sapien
gcaggccgtgctaaggtctcctgtt

SEQ ID NO: 5361454 - DNA, 25 bp, Homo sapien
gttgccatggctccccgatgtgtgc

SEQ ID NO: 5361455 - DNA, 25 bp, Homo sapien
tgaacatgaacagcaggccgtgcta

SEQ ID NO: 5361456 - DNA, 25 bp, Homo sapien
caccgaggagctgcatggactctga

SEQ ID NO: 5361457 - DNA, 25 bp, Homo sapien
tgagagctcaccttctgtgacaatg

SEQ ID NO: 5361458 - DNA, 25 bp, Homo sapien
tctgtgacaatgtgcacacctttcc

SEQ ID NO: 5361459 - DNA, 25 bp, Homo sapien
ctggccccgagactgcaccgaggag

SEQ ID NO: 5361460 - DNA, 25 bp, Homo sapien
catccgtagcccacagatttcttct

SEQ ID NO: 5361461 - DNA, 25 bp, Homo sapien
ttcttcttctcagttgttagtacct

SEQ ID NO: 5361462 - DNA, 25 bp, Homo sapien
agatttcttccatccgtagcccaca

SEQ ID NO: 5361463 - DNA, 25 bp, Homo sapien
cagttgttagtaccttgtgtacctc

SEQ ID NO: 5361464 - DNA, 25 bp, Homo sapien
ccatgagctttgatcccttctttag

SEQ ID NO: 5361465 - DNA, 25 bp, Homo sapien
gagctttgatcccttctttagcaaa

SEQ ID NO: 5361466 - DNA, 25 bp, Homo sapien
gctttgatcccttctttagcaaaaa

SEQ ID NO: 5361467 - DNA, 25 bp, Homo sapien
tgatcccttctttagcaaaaaacat

SEQ ID NO: 5361468 - DNA, 25 bp, Homo sapien
aggcagattggagaactgtcaagac

SEQ ID NO: 5361469 - DNA, 25 bp, Homo sapien
aaggcagattggagaactgtcaaga

SEQ ID NO: 5361470 - DNA, 25 bp, Homo sapien
ttggagaactgtcaagacatggcca

SEQ ID NO: 5361471 - DNA, 25 bp, Homo sapien
gagaactgtcaagacatggccaggc

SEQ ID NO: 5361472 - DNA, 25 bp, Homo sapien
catattgttaactgagttagaaact

SEQ ID NO: 5361473 - DNA, 25 bp, Homo sapien
ttatcatattgttaactgagttaga

SEQ ID NO: 5361474 - DNA, 25 bp, Homo sapien
ttgcatgtgcatatatttggtttta

SEQ ID NO: 5361475 - DNA, 25 bp, Homo sapien
ttttgcatgtgcatatatttggttt

SEQ ID NO: 5361476 - DNA, 25 bp, Homo sapien
gttggtaagatatgtttcctggaaa

SEQ ID NO: 5361477 - DNA, 25 bp, Homo sapien
catcaagcggatttcatttctagct

SEQ ID NO: 5361478 - DNA, 25 bp, Homo sapien
agttggtaagatatgtttcctggaa

SEQ ID NO: 5361479 - DNA, 25 bp, Homo sapien
ctgtgccatcaagcggatttcattt

SEQ ID NO: 5361480 - DNA, 25 bp, Homo sapien
tggtgaaggccgactgtccatttct

SEQ ID NO: 5361481 - DNA, 25 bp, Homo sapien
gtcactggagagtacacaaacctct

SEQ ID NO: 5361482 - DNA, 25 bp, Homo sapien
taggcagcttcctgctaagagtcac

SEQ ID NO: 5361483 - DNA, 25 bp, Homo sapien
cccattttgtacttgcataggcagc

SEQ ID NO: 5361484 - DNA, 25 bp, Homo sapien
ataacaactttgcaggtttcaacag

SEQ ID NO: 5361485 - DNA, 25 bp, Homo sapien
tgcatttagcaagtcgtccaacagc

SEQ ID NO: 5361486 - DNA, 25 bp, Homo sapien
gatttgctgcatttagcaagtcgtc

SEQ ID NO: 5361487 - DNA, 25 bp, Homo sapien
ctttgcaggtttcaacaggatttgc

SEQ ID NO: 5361488 - DNA, 25 bp, Homo sapien
atcatgtgtaaggccgaagtcagcc

SEQ ID NO: 5361489 - DNA, 25 bp, Homo sapien
gatcatgtgtaaggccgaagtcagc

SEQ ID NO: 5361490 - DNA, 25 bp, Homo sapien
aagaatgtgagtggctgggctcctc

SEQ ID NO: 5361491 - DNA, 25 bp, Homo sapien
gggagccagaaagaatgtgagtggc

SEQ ID NO: 5361492 - DNA, 25 bp, Homo sapien
ctgggtgattgctgggagccagaaa

SEQ ID NO: 5361493 - DNA, 25 bp, Homo sapien
ctgttctgccgggtccttttgtcct

SEQ ID NO: 5361494 - DNA, 25 bp, Homo sapien
ctttcaggatgactagtgaaccacc

SEQ ID NO: 5361495 - DNA, 25 bp, Homo sapien
tcaggctgagaaataagtagatcag

SEQ ID NO: 5361496 - DNA, 25 bp, Homo sapien
cagcaggtcctgaaccgtcagcaga

SEQ ID NO: 5361497 - DNA, 25 bp, Homo sapien
cataatttggaagtaactggttcta

SEQ ID NO: 5361498 - DNA, 25 bp, Homo sapien
cctgcaccttgcttggatattctct

SEQ ID NO: 5361499 - DNA, 25 bp, Homo sapien
catcctgcaccttgcttggatattc

SEQ ID NO: 5361500 - DNA, 25 bp, Homo sapien
gcaccttgcttggatattctctggg

SEQ ID NO: 5361501 - DNA, 25 bp, Homo sapien
ttgcttggatattctctgggtctgt

SEQ ID NO: 5361502 - DNA, 25 bp, Homo sapien
gatggttcctgatagctgaggctca

SEQ ID NO: 5361503 - DNA, 25 bp, Homo sapien
cactggttcaacgatggttcctgat

SEQ ID NO: 5361504 - DNA, 25 bp, Homo sapien
agtccacactggttcaacgatggtt

SEQ ID NO: 5361505 - DNA, 25 bp, Homo sapien
caacgatggttcctgatagctgagg

SEQ ID NO: 5361506 - DNA, 25 bp, Homo sapien
agttacaattccaggaacaggaaga

SEQ ID NO: 5361507 - DNA, 25 bp, Homo sapien
acaattccaggaacaggaagaaagg

SEQ ID NO: 5361508 - DNA, 25 bp, Homo sapien
caattccaggaacaggaagaaaggg

SEQ ID NO: 5361509 - DNA, 25 bp, Homo sapien
agaagttacaattccaggaacagga

SEQ ID NO: 5361510 - DNA, 25 bp, Homo sapien
tggctgcctctagtcctcagtgcct

SEQ ID NO: 5361511 - DNA, 25 bp, Homo sapien
ccctggctgcctctagtcctcagtg

SEQ ID NO: 5361512 - DNA, 25 bp, Homo sapien
gcctctagtcctcagtgcctcttct

SEQ ID NO: 5361513 - DNA, 25 bp, Homo sapien
ttgagttgcaatcccctggctgcct

SEQ ID NO: 5361514 - DNA, 25 bp, Homo sapien
cacggcaggcaatcggagacacttt

SEQ ID NO: 5361515 - DNA, 25 bp, Homo sapien
catctggaatgtacacggcaggcaa

SEQ ID NO: 5361516 - DNA, 25 bp, Homo sapien
gaaattgacaaataaccaggagaac

SEQ ID NO: 5361517 - DNA, 25 bp, Homo sapien
caatcggagacacttttgctgttgc

SEQ ID NO: 5361518 - DNA, 25 bp, Homo sapien
gctcaccatggccattgcaagtgca

SEQ ID NO: 5361519 - DNA, 25 bp, Homo sapien
atggccattgcaagtgcagtagaga

SEQ ID NO: 5361520 - DNA, 25 bp, Homo sapien
aggctcaccatggccattgcaagtg

SEQ ID NO: 5361521 - DNA, 25 bp, Homo sapien
caccatggccattgcaagtgcagta

SEQ ID NO: 5361522 - DNA, 25 bp, Homo sapien
tctgttccttactccaggcagagac

SEQ ID NO: 5361523 - DNA, 25 bp, Homo sapien
tcttaccaagtaacacaattaatga

SEQ ID NO: 5361524 - DNA, 25 bp, Homo sapien
aattaatgaattaggttcacctcaa

SEQ ID NO: 5361525 - DNA, 25 bp, Homo sapien
cctcaaaacactaaataatatatct

SEQ ID NO: 5361526 - DNA, 25 bp, Homo sapien
gcatttggaagtctgaacactcaat

SEQ ID NO: 5361527 - DNA, 25 bp, Homo sapien
tctttgaagcatttggaagtctgaa

SEQ ID NO: 5361528 - DNA, 25 bp, Homo sapien
agtctgaacactcaatttcttgcca

SEQ ID NO: 5361529 - DNA, 25 bp, Homo sapien
ttcttgccactgccagcttttgaaa

SEQ ID NO: 5361530 - DNA, 25 bp, Homo sapien
gggtgctcgatgtacattcagagcc

SEQ ID NO: 5361531 - DNA, 25 bp, Homo sapien
agtgcgaagaagtcgactaccacag

SEQ ID NO: 5361532 - DNA, 25 bp, Homo sapien
ttcctgtaaaggttggggtgctcga

SEQ ID NO: 5361533 - DNA, 25 bp, Homo sapien
ttcagagccacgcacgcgagtgcga

SEQ ID NO: 5361534 - DNA, 25 bp, Homo sapien
caacatctgccgatggcaaaatata

SEQ ID NO: 5361535 - DNA, 25 bp, Homo sapien
agccaatgcgtttgcatgtgtgatt

SEQ ID NO: 5361536 - DNA, 25 bp, Homo sapien
tatagtcaactttcagggccaagtt

SEQ ID NO: 5361537 - DNA, 25 bp, Homo sapien
aacaacaacaacatctgccgatggc

SEQ ID NO: 5361538 - DNA, 25 bp, Homo sapien
cccctctctacgtatgcattctgtg

SEQ ID NO: 5361539 - DNA, 25 bp, Homo sapien
gtgtctctaatttgttagccttaag

SEQ ID NO: 5361540 - DNA, 25 bp, Homo sapien
ttccttcacctgtaataatccatta

SEQ ID NO: 5361541 - DNA, 25 bp, Homo sapien
cctctctacgtatgcattctgtgtc

SEQ ID NO: 5361542 - DNA, 25 bp, Homo sapien
ccattatctgcaagttaaatataac

SEQ ID NO: 5361543 - DNA, 25 bp, Homo sapien
cattatctgcaagttaaatataacc

SEQ ID NO: 5361544 - DNA, 25 bp, Homo sapien
tcccattatctgcaagttaaatata

SEQ ID NO: 5361545 - DNA, 25 bp, Homo sapien
cccattatctgcaagttaaatataa

SEQ ID NO: 5361546 - DNA, 25 bp, Homo sapien
gatggccctgtttactgaaacttca

SEQ ID NO: 5361547 - DNA, 25 bp, Homo sapien
tggctgggattaccaagtgttctgg

SEQ ID NO: 5361548 - DNA, 25 bp, Homo sapien
ctgggctctcttcagatcacttttc

SEQ ID NO: 5361549 - DNA, 25 bp, Homo sapien
tcaaaaactttgggttccacactgc

SEQ ID NO: 5361550 - DNA, 25 bp, Homo sapien
cactggttcagggtgtttacatcag

SEQ ID NO: 5361551 - DNA, 25 bp, Homo sapien
taagccactggttcagggtgtttac

SEQ ID NO: 5361552 - DNA, 25 bp, Homo sapien
gccactggttcagggtgtttacatc

SEQ ID NO: 5361553 - DNA, 25 bp, Homo sapien
ctggttcagggtgtttacatcagaa

SEQ ID NO: 5361554 - DNA, 25 bp, Homo sapien
tagtccttaagtcccctttgacatc

SEQ ID NO: 5361555 - DNA, 25 bp, Homo sapien
agtcccctttgacatctccagtttg

SEQ ID NO: 5361556 - DNA, 25 bp, Homo sapien
cactctggtagtccttaagtcccct

SEQ ID NO: 5361557 - DNA, 25 bp, Homo sapien
tgctttcctatcactctggtagtcc

SEQ ID NO: 5361558 - DNA, 25 bp, Homo sapien
gagtgggtagaaatgtgtgaggagc

SEQ ID NO: 5361559 - DNA, 25 bp, Homo sapien
tgctggtggtagcatttggaggata

SEQ ID NO: 5361560 - DNA, 25 bp, Homo sapien
ctaagaccatgggatctgatcctgt

SEQ ID NO: 5361561 - DNA, 25 bp, Homo sapien
tagcatttggaggataacgtgagtg

SEQ ID NO: 5361562 - DNA, 25 bp, Homo sapien
cgcaagactggaagttttatcagac

SEQ ID NO: 5361563 - DNA, 25 bp, Homo sapien
tctggcaccaacataaactcttggc

SEQ ID NO: 5361564 - DNA, 25 bp, Homo sapien
tggaaccaacaagccacgcaagact

SEQ ID NO: 5361565 - DNA, 25 bp, Homo sapien
tgaatccccagcactgtaaggagag

SEQ ID NO: 5361566 - DNA, 25 bp, Homo sapien
gaatactgggctttatgtcagtctt

SEQ ID NO: 5361567 - DNA, 25 bp, Homo sapien
aatttgccacatgccatcctgctga

SEQ ID NO: 5361568 - DNA, 25 bp, Homo sapien
tgaatttgccacatgccatcctgct

SEQ ID NO: 5361569 - DNA, 25 bp, Homo sapien
gtcagtcttaacttcattcattact

SEQ ID NO: 5361570 - DNA, 25 bp, Homo sapien
cctataaaacgattggcaagggaga

SEQ ID NO: 5361571 - DNA, 25 bp, Homo sapien
ctgctgggggtcagtcctataaaac

SEQ ID NO: 5361572 - DNA, 25 bp, Homo sapien
ccaggacccggcagcgtaggatgct

SEQ ID NO: 5361573 - DNA, 25 bp, Homo sapien
gggtcagtcctataaaacgattggc

SEQ ID NO: 5361574 - DNA, 25 bp, Homo sapien
cagggcatagttcataaatacaatg

SEQ ID NO: 5361575 - DNA, 25 bp, Homo sapien
atagttcataaatacaatggtggcc

SEQ ID NO: 5361576 - DNA, 25 bp, Homo sapien
tgtgattaaattgtacaaagtctta

SEQ ID NO: 5361577 - DNA, 25 bp, Homo sapien
aatgttacaatgagtgttcaccagc

SEQ ID NO: 5361578 - DNA, 25 bp, Homo sapien
gacttgacttgttagcacgggacgt

SEQ ID NO: 5361579 - DNA, 25 bp, Homo sapien
cttgacttgttagcacgggacgtta

SEQ ID NO: 5361580 - DNA, 25 bp, Homo sapien
tgacttgttagcacgggacgttaaa

SEQ ID NO: 5361581 - DNA, 25 bp, Homo sapien
ttgacttgacttgttagcacgggac

SEQ ID NO: 5361582 - DNA, 25 bp, Homo sapien
gatcgggaggtattttcacaaatgc

SEQ ID NO: 5361583 - DNA, 25 bp, Homo sapien
gaaattcatacttagcattttcttc

SEQ ID NO: 5361584 - DNA, 25 bp, Homo sapien
aaactggaaattcatacttagcatt

SEQ ID NO: 5361585 - DNA, 25 bp, Homo sapien
aaagatgatcgggaggtattttcac

SEQ ID NO: 5361586 - DNA, 25 bp, Homo sapien
caggcaaatcgtcaggaattgtgtc

SEQ ID NO: 5361587 - DNA, 25 bp, Homo sapien
tcataaagggctgaagaactgagct

SEQ ID NO: 5361588 - DNA, 25 bp, Homo sapien
cttcagtgtacaagaaagttcctca

SEQ ID NO: 5361589 - DNA, 25 bp, Homo sapien
tggccagtaaagaatagcatagcct

SEQ ID NO: 5361590 - DNA, 25 bp, Homo sapien
gggcaagccttgatgaaaagctgct

SEQ ID NO: 5361591 - DNA, 25 bp, Homo sapien
ctgtgttgagtctcatacgtccacg

SEQ ID NO: 5361592 - DNA, 25 bp, Homo sapien
caagccttgatgaaaagctgctgtg

SEQ ID NO: 5361593 - DNA, 25 bp, Homo sapien
gttgagtctcatacgtccacgtcca

SEQ ID NO: 5361594 - DNA, 25 bp, Homo sapien
gaaagccttgcaaatggtatacaat

SEQ ID NO: 5361595 - DNA, 25 bp, Homo sapien
aactgtgtctaaaactgaatgataa

SEQ ID NO: 5361596 - DNA, 25 bp, Homo sapien
caagccttaggcaaaagcctttcaa

SEQ ID NO: 5361597 - DNA, 25 bp, Homo sapien
attttcaaagtgttccaagccttag

SEQ ID NO: 5361598 - DNA, 25 bp, Homo sapien
tgtgtgtcttgcactcttcaagaca

SEQ ID NO: 5361599 - DNA, 25 bp, Homo sapien
tcaagacacagttatcacattttgg

SEQ ID NO: 5361600 - DNA, 25 bp, Homo sapien
cttgcagtattgctttggaatgcca

SEQ ID NO: 5361601 - DNA, 25 bp, Homo sapien
tttcagcacgttgctcagagggcat

SEQ ID NO: 5361602 - DNA, 25 bp, Homo sapien
catctccatgcttattcccagcaga

SEQ ID NO: 5361603 - DNA, 25 bp, Homo sapien
tctccatgcttattcccagcagatt

SEQ ID NO: 5361604 - DNA, 25 bp, Homo sapien
tccatgcttattcccagcagattct

SEQ ID NO: 5361605 - DNA, 25 bp, Homo sapien
atctccatgcttattcccagcagat

SEQ ID NO: 5361606 - DNA, 25 bp, Homo sapien
gaatcatattctgcagcacgcacct

SEQ ID NO: 5361607 - DNA, 25 bp, Homo sapien
gaggttctcacagtatgcttcaggc

SEQ ID NO: 5361608 - DNA, 25 bp, Homo sapien
ttagaggtgcatgcctaacactccc

SEQ ID NO: 5361609 - DNA, 25 bp, Homo sapien
ggaacatgcccaagtattgcctgaa

SEQ ID NO: 5361610 - DNA, 25 bp, Homo sapien
gaaagtaggacaatatcctctgtct

SEQ ID NO: 5361611 - DNA, 25 bp, Homo sapien
tgaggtggaaagtaggacaatatcc

SEQ ID NO: 5361612 - DNA, 25 bp, Homo sapien
ttcttgaatgaggtggaaagtagga

SEQ ID NO: 5361613 - DNA, 25 bp, Homo sapien
cttgaatgaggtggaaagtaggaca

SEQ ID NO: 5361614 - DNA, 25 bp, Homo sapien
cagaataaatccagatggtgttctc

SEQ ID NO: 5361615 - DNA, 25 bp, Homo sapien
ctactgcttttctctataaccctgg

SEQ ID NO: 5361616 - DNA, 25 bp, Homo sapien
tataaccctggcaatagcacagaat

SEQ ID NO: 5361617 - DNA, 25 bp, Homo sapien
ctgtggcatcccgttagtgaggttc

SEQ ID NO: 5361618 - DNA, 25 bp, Homo sapien
ttggatatttttctcctggctgtag

SEQ ID NO: 5361619 - DNA, 25 bp, Homo sapien
caaaccagatgtcattgagacaggg

SEQ ID NO: 5361620 - DNA, 25 bp, Homo sapien
gctgtagtagcatagccagagggct

SEQ ID NO: 5361621 - DNA, 25 bp, Homo sapien
ctggccaagctcatgattaaaccgg

SEQ ID NO: 5361622 - DNA, 25 bp, Homo sapien
agcaactgacctcttgtggcctgca

SEQ ID NO: 5361623 - DNA, 25 bp, Homo sapien
ctgacctcttgtggcctgcagtctc

SEQ ID NO: 5361624 - DNA, 25 bp, Homo sapien
cagcaagaagtcttctgaacactga

SEQ ID NO: 5361625 - DNA, 25 bp, Homo sapien
attcagcaactgacctcttgtggcc

SEQ ID NO: 5361626 - DNA, 25 bp, Homo sapien
tgctctgaagatacggcctcagggt

SEQ ID NO: 5361627 - DNA, 25 bp, Homo sapien
cattctgtagcttggagcggaggtc

SEQ ID NO: 5361628 - DNA, 25 bp, Homo sapien
tctacacacagtggatttggctgtc

SEQ ID NO: 5361629 - DNA, 25 bp, Homo sapien
gatttggctgtctcactgtagcacc

SEQ ID NO: 5361630 - DNA, 25 bp, Homo sapien
gacgcttgaatttgcctcctgttgt

SEQ ID NO: 5361631 - DNA, 25 bp, Homo sapien
gatctcttaggtcatggtcacacac

SEQ ID NO: 5361632 - DNA, 25 bp, Homo sapien
aataaggtggtggtagctagatctc

SEQ ID NO: 5361633 - DNA, 25 bp, Homo sapien
aagtttgggccccagacgcttgaat

SEQ ID NO: 5361634 - DNA, 25 bp, Homo sapien
tagtttcctgcgagtggcttctagg

SEQ ID NO: 5361635 - DNA, 25 bp, Homo sapien
gttgtagaaatgcttgccagagggc

SEQ ID NO: 5361636 - DNA, 25 bp, Homo sapien
ggctggacctgtacccccaaggaga

SEQ ID NO: 5361637 - DNA, 25 bp, Homo sapien
gaggctacagagggaaaggttgtag

SEQ ID NO: 5361638 - DNA, 25 bp, Homo sapien
ggacagtgcggatgatttgaactca

SEQ ID NO: 5361639 - DNA, 25 bp, Homo sapien
ggtaacaagtgagcatgggacagtg

SEQ ID NO: 5361640 - DNA, 25 bp, Homo sapien
tttccttccccgtggccagtgactg

SEQ ID NO: 5361641 - DNA, 25 bp, Homo sapien
tctgggaggattcctgatgatatca

SEQ ID NO: 5361642 - DNA, 25 bp, Homo sapien
tggaaactatagtaacataactctc

SEQ ID NO: 5361643 - DNA, 25 bp, Homo sapien
aactatagtaacataactctctgct

SEQ ID NO: 5361644 - DNA, 25 bp, Homo sapien
cctgttaacctctgcatgtacccgt

SEQ ID NO: 5361645 - DNA, 25 bp, Homo sapien
gcatgtacccgtataattttggaaa

SEQ ID NO: 5361646 - DNA, 25 bp, Homo sapien
tatgttgttatcatggaacacttat

SEQ ID NO: 5361647 - DNA, 25 bp, Homo sapien
tatatttagaactactcctctcccc

SEQ ID NO: 5361648 - DNA, 25 bp, Homo sapien
cttatatttagaactactcctctcc

SEQ ID NO: 5361649 - DNA, 25 bp, Homo sapien
ggaccatgcatcttatatgttgtta

SEQ ID NO: 5361650 - DNA, 25 bp, Homo sapien
tgtaggtagtgccttctttcactgg

SEQ ID NO: 5361651 - DNA, 25 bp, Homo sapien
ggtagtgccttctttcactgggcct

SEQ ID NO: 5361652 - DNA, 25 bp, Homo sapien
aatgtaggtagtgccttctttcact

SEQ ID NO: 5361653 - DNA, 25 bp, Homo sapien
taggtagtgccttctttcactgggc

SEQ ID NO: 5361654 - DNA, 25 bp, Homo sapien
tccagcaacttttctaggtttagta

SEQ ID NO: 5361655 - DNA, 25 bp, Homo sapien
cagcaacttttctaggtttagtata

SEQ ID NO: 5361656 - DNA, 25 bp, Homo sapien
agtccagcaacttttctaggtttag

SEQ ID NO: 5361657 - DNA, 25 bp, Homo sapien
ccagcaacttttctaggtttagtat

SEQ ID NO: 5361658 - DNA, 25 bp, Homo sapien
gagctgtctgaggaccttggaatat

SEQ ID NO: 5361659 - DNA, 25 bp, Homo sapien
ctggtgcagagaaacgagccttcgg

SEQ ID NO: 5361660 - DNA, 25 bp, Homo sapien
cttggaatataacacgcttctggtg

SEQ ID NO: 5361661 - DNA, 25 bp, Homo sapien
tataacacgcttctggtgcagagaa

SEQ ID NO: 5361662 - DNA, 25 bp, Homo sapien
ctgattacaattcgcgaccgccatg

SEQ ID NO: 5361663 - DNA, 25 bp, Homo sapien
tgcagctacgatagccaggcttata

SEQ ID NO: 5361664 - DNA, 25 bp, Homo sapien
caggcttatatttaataccgcagaa

SEQ ID NO: 5361665 - DNA, 25 bp, Homo sapien
cttctcttatccctaagttattggg

SEQ ID NO: 5361666 - DNA, 25 bp, Homo sapien
aagagctgctttacaactgaaatac

SEQ ID NO: 5361667 - DNA, 25 bp, Homo sapien
tgataagagctgctttacaactgaa

SEQ ID NO: 5361668 - DNA, 25 bp, Homo sapien
ttacaccaaaccagatttgataaga

SEQ ID NO: 5361669 - DNA, 25 bp, Homo sapien
tacaccaaaccagatttgataagag

SEQ ID NO: 5361670 - DNA, 25 bp, Homo sapien
ctcctgaacagctgtagacagagga

SEQ ID NO: 5361671 - DNA, 25 bp, Homo sapien
taagaagaatattgaggtctgcgac

SEQ ID NO: 5361672 - DNA, 25 bp, Homo sapien
tgaggtctgcgacttgataaagcag

SEQ ID NO: 5361673 - DNA, 25 bp, Homo sapien
caggacagaagctgccctgttggag

SEQ ID NO: 5361674 - DNA, 25 bp, Homo sapien
gagggagtggaaagatgccatttcc

SEQ ID NO: 5361675 - DNA, 25 bp, Homo sapien
gcacccacagattcctctaatttca

SEQ ID NO: 5361676 - DNA, 25 bp, Homo sapien
cacccacagattcctctaatttcat

SEQ ID NO: 5361677 - DNA, 25 bp, Homo sapien
acccacagattcctctaatttcatg

SEQ ID NO: 5361678 - DNA, 25 bp, Homo sapien
cagggcaggtccaaggtagaactgt

SEQ ID NO: 5361679 - DNA, 25 bp, Homo sapien
tcagacgaccaccagtgagatgcag

SEQ ID NO: 5361680 - DNA, 25 bp, Homo sapien
ggagcacgtgtctgctttcaaaact

SEQ ID NO: 5361681 - DNA, 25 bp, Homo sapien
gaactgtgggcacaagtcagcagca

SEQ ID NO: 5361682 - DNA, 25 bp, Homo sapien
ggcgggtcctctagtgcatttccaa

SEQ ID NO: 5361683 - DNA, 25 bp, Homo sapien
tcctaggttgacaggatcatctctg

SEQ ID NO: 5361684 - DNA, 25 bp, Homo sapien
tgagggctttggtgtctggtctttc

SEQ ID NO: 5361685 - DNA, 25 bp, Homo sapien
tttccttatctcctaggttgacagg

SEQ ID NO: 5361686 - DNA, 25 bp, Homo sapien
taagccattgccacagaaccggcgg

SEQ ID NO: 5361687 - DNA, 25 bp, Homo sapien
cctgagcttggaagcccttttgctc

SEQ ID NO: 5361688 - DNA, 25 bp, Homo sapien
caacagaattctgcccttggatccc

SEQ ID NO: 5361689 - DNA, 25 bp, Homo sapien
tttgctcttgactcatgatagcctt

SEQ ID NO: 5361690 - DNA, 25 bp, Homo sapien
cattcgtctttcgtggctttttgtc

SEQ ID NO: 5361691 - DNA, 25 bp, Homo sapien
ggaaggataagtgaactccatgaaa

SEQ ID NO: 5361692 - DNA, 25 bp, Homo sapien
tgtcgatcatgtttgctggaaggat

SEQ ID NO: 5361693 - DNA, 25 bp, Homo sapien
aattatcctgataaagtgccatcac

SEQ ID NO: 5361694 - DNA, 25 bp, Homo sapien
tgcgaacgcatcttgaacaacttga

SEQ ID NO: 5361695 - DNA, 25 bp, Homo sapien
acaacttgaagcacggagatggggc

SEQ ID NO: 5361696 - DNA, 25 bp, Homo sapien
gaacgcatcttgaacaacttgaagc

SEQ ID NO: 5361697 - DNA, 25 bp, Homo sapien
ccacacatgcgaacgcatcttgaac

SEQ ID NO: 5361698 - DNA, 25 bp, Homo sapien
gtaggactgcgcatctgcattcccg

SEQ ID NO: 5361699 - DNA, 25 bp, Homo sapien
tcttcctagccttggcttgtagcag

SEQ ID NO: 5361700 - DNA, 25 bp, Homo sapien
gcattcccgacccttgtcttcctag

SEQ ID NO: 5361701 - DNA, 25 bp, Homo sapien
gggctgaagtacgattgacaatgct

SEQ ID NO: 5361702 - DNA, 25 bp, Homo sapien
agagactgaggacaacgtgggtcca

SEQ ID NO: 5361703 - DNA, 25 bp, Homo sapien
ccaggccaggccatgcaggaaacag

SEQ ID NO: 5361704 - DNA, 25 bp, Homo sapien
cagcaagccctcatgttgaacagaa

SEQ ID NO: 5361705 - DNA, 25 bp, Homo sapien
taccaggagtttaggtttcagtatg

SEQ ID NO: 5361706 - DNA, 25 bp, Homo sapien
ccaatgcctttgtacatttccctgt

SEQ ID NO: 5361707 - DNA, 25 bp, Homo sapien
tgaaatccttctgggtaccattgag

SEQ ID NO: 5361708 - DNA, 25 bp, Homo sapien
ttttttgcctaaatattccaatgcc

SEQ ID NO: 5361709 - DNA, 25 bp, Homo sapien
tcacatgggaagaccattctttttt

SEQ ID NO: 5361710 - DNA, 25 bp, Homo sapien
taccacagatttacaaactcatcca

SEQ ID NO: 5361711 - DNA, 25 bp, Homo sapien
taattccaggatgggcacccttaca

SEQ ID NO: 5361712 - DNA, 25 bp, Homo sapien
tgccatagcctgtgtcacataatct

SEQ ID NO: 5361713 - DNA, 25 bp, Homo sapien
ctgaagcacaggtaacgataccaca

SEQ ID NO: 5361714 - DNA, 25 bp, Homo sapien
taaccattctttcctatgacatgtc

SEQ ID NO: 5361715 - DNA, 25 bp, Homo sapien
tcagtggacttcagtccaaacataa

SEQ ID NO: 5361716 - DNA, 25 bp, Homo sapien
tccagtgttcagctaagagtgtggt

SEQ ID NO: 5361717 - DNA, 25 bp, Homo sapien
tctgttgctgagttgatactgctgc

SEQ ID NO: 5361718 - DNA, 25 bp, Homo sapien
agtccaaacataaccgcaatttccg

SEQ ID NO: 5361719 - DNA, 25 bp, Homo sapien
ccactgatggtctgaaaagactgct

SEQ ID NO: 5361720 - DNA, 25 bp, Homo sapien
tcctgacactaatgggacaattctc

SEQ ID NO: 5361721 - DNA, 25 bp, Homo sapien
ggacagactcttgctaccagcccat

SEQ ID NO: 5361722 - DNA, 25 bp, Homo sapien
ggttggagtcaatgggtcctgacac

SEQ ID NO: 5361723 - DNA, 25 bp, Homo sapien
gcaaaatgtaccgaagccaagagca

SEQ ID NO: 5361724 - DNA, 25 bp, Homo sapien
gggatcgcttccatcagtgttgtaa

SEQ ID NO: 5361725 - DNA, 25 bp, Homo sapien
tgttgtaacgagctcttctatgcag

SEQ ID NO: 5361726 - DNA, 25 bp, Homo sapien
tgggcacccacagttgtgatgaggc

SEQ ID NO: 5361727 - DNA, 25 bp, Homo sapien
gagcggagctcgcactggaagagat

SEQ ID NO: 5361728 - DNA, 25 bp, Homo sapien
catattgtcactgttgaactggcag

SEQ ID NO: 5361729 - DNA, 25 bp, Homo sapien
tgcaacacctctcgccctttgttca

SEQ ID NO: 5361730 - DNA, 25 bp, Homo sapien
tggaagagatgcacccgagggagtt

SEQ ID NO: 5361731 - DNA, 25 bp, Homo sapien
tcttctggcactgagctctggtttg

SEQ ID NO: 5361732 - DNA, 25 bp, Homo sapien
cttcatcttctggcactgagctctg

SEQ ID NO: 5361733 - DNA, 25 bp, Homo sapien
tttgttttctcaggcgcagttgatg

SEQ ID NO: 5361734 - DNA, 25 bp, Homo sapien
ttctcaggcgcagttgatggttcat

SEQ ID NO: 5361735 - DNA, 25 bp, Homo sapien
agccctctttgcaggatagtcaagg

SEQ ID NO: 5361736 - DNA, 25 bp, Homo sapien
caggatagtcaagggcaaggttaaa

SEQ ID NO: 5361737 - DNA, 25 bp, Homo sapien
ggtggtggtgaaaagccagccctct

SEQ ID NO: 5361738 - DNA, 25 bp, Homo sapien
tggtgaaaagccagccctctttgca

SEQ ID NO: 5361739 - DNA, 25 bp, Homo sapien
tgtctgcagcgcaaataaacaaaca

SEQ ID NO: 5361740 - DNA, 25 bp, Homo sapien
gtgcatgtctgcagcgcaaataaac

SEQ ID NO: 5361741 - DNA, 25 bp, Homo sapien
cagtgcatgtctgcagcgcaaataa

SEQ ID NO: 5361742 - DNA, 25 bp, Homo sapien
tgcatgtctgcagcgcaaataaaca

SEQ ID NO: 5361743 - DNA, 25 bp, Homo sapien
agatttatgcttcacagggccatct

SEQ ID NO: 5361744 - DNA, 25 bp, Homo sapien
gatttatgcttcacagggccatctc

SEQ ID NO: 5361745 - DNA, 25 bp, Homo sapien
tatatacattagcaaatttcctggg

SEQ ID NO: 5361746 - DNA, 25 bp, Homo sapien
caaacaaaactgtatgctcgctgta

SEQ ID NO: 5361747 - DNA, 25 bp, Homo sapien
ggtaaaatacctaaagcctcgctga

SEQ ID NO: 5361748 - DNA, 25 bp, Homo sapien
gaaattggcccttattgtctctgga

SEQ ID NO: 5361749 - DNA, 25 bp, Homo sapien
ggagtcctcattgcctgcagtgtct

SEQ ID NO: 5361750 - DNA, 25 bp, Homo sapien
cctctgaccacacacgcagctgggt

SEQ ID NO: 5361751 - DNA, 25 bp, Homo sapien
gcaagactgaatttgctatcctctg

SEQ ID NO: 5361752 - DNA, 25 bp, Homo sapien
tcagcaagactgaatttgctatcct

SEQ ID NO: 5361753 - DNA, 25 bp, Homo sapien
caagactgaatttgctatcctctga

SEQ ID NO: 5361754 - DNA, 25 bp, Homo sapien
aagtctgtagcatgtcgacaaaaat

SEQ ID NO: 5361755 - DNA, 25 bp, Homo sapien
agtaatggttagcggagaccctcca

SEQ ID NO: 5361756 - DNA, 25 bp, Homo sapien
gcacgttcaatggtgcagacctgtg

SEQ ID NO: 5361757 - DNA, 25 bp, Homo sapien
tattttcaagctagcagtactgtgg

SEQ ID NO: 5361758 - DNA, 25 bp, Homo sapien
tactgtgggcacgttcaatggtgca

SEQ ID NO: 5361759 - DNA, 25 bp, Homo sapien
tgtcatcgaggaggcccttatgcac

SEQ ID NO: 5361760 - DNA, 25 bp, Homo sapien
ttctgtcatcgaggaggcccttatg

SEQ ID NO: 5361761 - DNA, 25 bp, Homo sapien
ccttttctgtcatcgaggaggccct

SEQ ID NO: 5361762 - DNA, 25 bp, Homo sapien
ttttctgtcatcgaggaggccctta

SEQ ID NO: 5361763 - DNA, 25 bp, Homo sapien
gtgagtctctgtaaccagttcaggg

SEQ ID NO: 5361764 - DNA, 25 bp, Homo sapien
cagggggtccacaaggtgctaccat

SEQ ID NO: 5361765 - DNA, 25 bp, Homo sapien
ctttgtgagtctctgtaaccagttc

SEQ ID NO: 5361766 - DNA, 25 bp, Homo sapien
tctgtaaccagttcagggggtccac

SEQ ID NO: 5361767 - DNA, 25 bp, Homo sapien
taatttgtgtttggatgtgaggatc

SEQ ID NO: 5361768 - DNA, 25 bp, Homo sapien
gaaagccaagatatccgatttcaca

SEQ ID NO: 5361769 - DNA, 25 bp, Homo sapien
tctgagaacctgaaatgataacaaa

SEQ ID NO: 5361770 - DNA, 25 bp, Homo sapien
tgatagtccacagtatgttctgaga

SEQ ID NO: 5361771 - DNA, 25 bp, Homo sapien
gaaagacgctcagagctgtacacag

SEQ ID NO: 5361772 - DNA, 25 bp, Homo sapien
catgaaagacgctcagagctgtaca

SEQ ID NO: 5361773 - DNA, 25 bp, Homo sapien
gacgctcagagctgtacacaggaca

SEQ ID NO: 5361774 - DNA, 25 bp, Homo sapien
cagagctgtacacaggacacagaaa

SEQ ID NO: 5361775 - DNA, 25 bp, Homo sapien
gtttatactggtacttcactttctc

SEQ ID NO: 5361776 - DNA, 25 bp, Homo sapien
tcgtttatactggtacttcactttc

SEQ ID NO: 5361777 - DNA, 25 bp, Homo sapien
tcttcgtttatactggtacttcact

SEQ ID NO: 5361778 - DNA, 25 bp, Homo sapien
ctctctcttcgtttatactggtact

SEQ ID NO: 5361779 - DNA, 25 bp, Homo sapien
aattgattggaactaactgaagctg

SEQ ID NO: 5361780 - DNA, 25 bp, Homo sapien
aggattcttaattgcatgtaacaga

SEQ ID NO: 5361781 - DNA, 25 bp, Homo sapien
caattgcaggacatttaggattctt

SEQ ID NO: 5361782 - DNA, 25 bp, Homo sapien
cctttttagcaattgcaggacattt

SEQ ID NO: 5361783 - DNA, 25 bp, Homo sapien
tgtctcgggcctgctgccattggta

SEQ ID NO: 5361784 - DNA, 25 bp, Homo sapien
catgtggcgggcattttggtttgtc

SEQ ID NO: 5361785 - DNA, 25 bp, Homo sapien
gctgatgtgactggacgaaaggctt

SEQ ID NO: 5361786 - DNA, 25 bp, Homo sapien
cttctggccttcatgtggcgggcat

SEQ ID NO: 5361787 - DNA, 25 bp, Homo sapien
tggttcagtggaaaccttcaccagc

SEQ ID NO: 5361788 - DNA, 25 bp, Homo sapien
ctggatgggggctccagaagcttct

SEQ ID NO: 5361789 - DNA, 25 bp, Homo sapien
gaaaccttcaccagctccagaaaca

SEQ ID NO: 5361790 - DNA, 25 bp, Homo sapien
cagaagcttctggttcagtggaaac

SEQ ID NO: 5361791 - DNA, 25 bp, Homo sapien
gcttgtaacaagctgcagatttcat

SEQ ID NO: 5361792 - DNA, 25 bp, Homo sapien
ggtccttgcttgtaacaagctgcag

SEQ ID NO: 5361793 - DNA, 25 bp, Homo sapien
attaaaataggcatctccgggtcct

SEQ ID NO: 5361794 - DNA, 25 bp, Homo sapien
ggcatctccgggtccttgcttgtaa

SEQ ID NO: 5361795 - DNA, 25 bp, Homo sapien
gcctcgaaagcctttagataaataa

SEQ ID NO: 5361796 - DNA, 25 bp, Homo sapien
ttggcctcgaaagcctttagataaa

SEQ ID NO: 5361797 - DNA, 25 bp, Homo sapien
cttctctttggcctcgaaagccttt

SEQ ID NO: 5361798 - DNA, 25 bp, Homo sapien
tctttggcctcgaaagcctttagat

SEQ ID NO: 5361799 - DNA, 25 bp, Homo sapien
ggctcaaggagagaggagcttaatt

SEQ ID NO: 5361800 - DNA, 25 bp, Homo sapien
tcctgaagttgagcccaccagattg

SEQ ID NO: 5361801 - DNA, 25 bp, Homo sapien
tatgggggcttaaagtaaagatggc

SEQ ID NO: 5361802 - DNA, 25 bp, Homo sapien
tctggaacaccagttcaaacactgg

SEQ ID NO: 5361803 - DNA, 25 bp, Homo sapien
caaacacacttaagcccacattagc

SEQ ID NO: 5361804 - DNA, 25 bp, Homo sapien
aatacctgcgggattgtgctgaata

SEQ ID NO: 5361805 - DNA, 25 bp, Homo sapien
ccacattagcatacccttgccagaa

SEQ ID NO: 5361806 - DNA, 25 bp, Homo sapien
cttgccagaatacctgcgggattgt

SEQ ID NO: 5361807 - DNA, 25 bp, Homo sapien
ctttggtgaacagttgcttcatccc

SEQ ID NO: 5361808 - DNA, 25 bp, Homo sapien
gattgagagcaatcttggcacaaga

SEQ ID NO: 5361809 - DNA, 25 bp, Homo sapien
ccttctgaattaggccttcctggag

SEQ ID NO: 5361810 - DNA, 25 bp, Homo sapien
aaaactctatcggtggccttctgaa

SEQ ID NO: 5361811 - DNA, 25 bp, Homo sapien
tcttaggacaaccaggtgtatgcat

SEQ ID NO: 5361812 - DNA, 25 bp, Homo sapien
tttttcaatggaggaagtctggtta

SEQ ID NO: 5361813 - DNA, 25 bp, Homo sapien
gaaactgcctcagacaatcactgct

SEQ ID NO: 5361814 - DNA, 25 bp, Homo sapien
aaactgcctcagacaatcactgctc

SEQ ID NO: 5361815 - DNA, 25 bp, Homo sapien
catttttcaatggaggaagtctggt

SEQ ID NO: 5361816 - DNA, 25 bp, Homo sapien
ttcgcatttgagatgggccttccta

SEQ ID NO: 5361817 - DNA, 25 bp, Homo sapien
cataacagataacaggtaggttgag

SEQ ID NO: 5361818 - DNA, 25 bp, Homo sapien
tgttgggtaattggagagttcatcg

SEQ ID NO: 5361819 - DNA, 25 bp, Homo sapien
gggcatcctgatattttcgcatttg

SEQ ID NO: 5361820 - DNA, 25 bp, Homo sapien
tttcttggcaactctaactgaagac

SEQ ID NO: 5361821 - DNA, 25 bp, Homo sapien
tgcggttttcatcccctaagtgtct

SEQ ID NO: 5361822 - DNA, 25 bp, Homo sapien
gaagacttacactccagctagtttc

SEQ ID NO: 5361823 - DNA, 25 bp, Homo sapien
tctaactgaagacttacactccagc

SEQ ID NO: 5361824 - DNA, 25 bp, Homo sapien
ctctcctatccagtacctgctgctc

SEQ ID NO: 5361825 - DNA, 25 bp, Homo sapien
cctctcctatccagtacctgctgct

SEQ ID NO: 5361826 - DNA, 25 bp, Homo sapien
tagacctccagtcttgagtgtttgc

SEQ ID NO: 5361827 - DNA, 25 bp, Homo sapien
tctccagactttctcctcatacttg

SEQ ID NO: 5361828 - DNA, 25 bp, Homo sapien
cctcatacttgatttcttgcttctc

SEQ ID NO: 5361829 - DNA, 25 bp, Homo sapien
gactttctcctcatacttgatttct

SEQ ID NO: 5361830 - DNA, 25 bp, Homo sapien
ggctccacagtctgtctccagactt

SEQ ID NO: 5361831 - DNA, 25 bp, Homo sapien
ctttgcttacggcttgcttttcttg

SEQ ID NO: 5361832 - DNA, 25 bp, Homo sapien
tcagcaaaatgcactttgcttacgg

SEQ ID NO: 5361833 - DNA, 25 bp, Homo sapien
tagcctgaagcttcgggaaccattc

SEQ ID NO: 5361834 - DNA, 25 bp, Homo sapien
tgtggccagacagacgctatttccc

SEQ ID NO: 5361835 - DNA, 25 bp, Homo sapien
tcacctcactaacgacttaattggc

SEQ ID NO: 5361836 - DNA, 25 bp, Homo sapien
aacgacttaattggcatcacccctg

SEQ ID NO: 5361837 - DNA, 25 bp, Homo sapien
tgtaacaccctacaaccctttatga

SEQ ID NO: 5361838 - DNA, 25 bp, Homo sapien
caccctacaaccctttatgacagga

SEQ ID NO: 5361839 - DNA, 25 bp, Homo sapien
tttgggcattcattccaaagttcca

SEQ ID NO: 5361840 - DNA, 25 bp, Homo sapien
aagttccagccaaaggaaatatgaa

SEQ ID NO: 5361841 - DNA, 25 bp, Homo sapien
tcattccaaagttccagccaaagga

SEQ ID NO: 5361842 - DNA, 25 bp, Homo sapien
gggcattcattccaaagttccagcc

SEQ ID NO: 5361843 - DNA, 25 bp, Homo sapien
gctggaagtggcttcattcgattgt

SEQ ID NO: 5361844 - DNA, 25 bp, Homo sapien
tgtttgtggcagattcgctggaagt

SEQ ID NO: 5361845 - DNA, 25 bp, Homo sapien
cattcgattgtaaactaagctatgt

SEQ ID NO: 5361846 - DNA, 25 bp, Homo sapien
tagccccccttgatcctcttgttgg

SEQ ID NO: 5361847 - DNA, 25 bp, Homo sapien
tccaggccagcacggtagcccttcc

SEQ ID NO: 5361848 - DNA, 25 bp, Homo sapien
ggttccaggccagcacggtagccct

SEQ ID NO: 5361849 - DNA, 25 bp, Homo sapien
gttccaggccagcacggtagccctt

SEQ ID NO: 5361850 - DNA, 25 bp, Homo sapien
caggccagcacggtagcccttcctc

SEQ ID NO: 5361851 - DNA, 25 bp, Homo sapien
atttatgacctttctgtcggctgct

SEQ ID NO: 5361852 - DNA, 25 bp, Homo sapien
gcacagcttatatcactctccaggc

SEQ ID NO: 5361853 - DNA, 25 bp, Homo sapien
tttgtgctccgcacagcttatatca

SEQ ID NO: 5361854 - DNA, 25 bp, Homo sapien
cactctccaggctgaatttatgacc

SEQ ID NO: 5361855 - DNA, 25 bp, Homo sapien
gcaagagccctgttggttcctgtct

SEQ ID NO: 5361856 - DNA, 25 bp, Homo sapien
tgtctgagcagcaaggaaagagcat

SEQ ID NO: 5361857 - DNA, 25 bp, Homo sapien
gtctgagcagcaaggaaagagcatc

SEQ ID NO: 5361858 - DNA, 25 bp, Homo sapien
aagagccctgttggttcctgtctcc

SEQ ID NO: 5361859 - DNA, 25 bp, Homo sapien
tggtccatacggggccatctttgac

SEQ ID NO: 5361860 - DNA, 25 bp, Homo sapien
tctcagtggtccatacggggccatc

SEQ ID NO: 5361861 - DNA, 25 bp, Homo sapien
ctctcagtggtccatacggggccat

SEQ ID NO: 5361862 - DNA, 25 bp, Homo sapien
cagtggtccatacggggccatcttt

SEQ ID NO: 5361863 - DNA, 25 bp, Homo sapien
tctaaaagcatctctgtgattggtg

SEQ ID NO: 5361864 - DNA, 25 bp, Homo sapien
caaaactcgtttagatctaaaagca

SEQ ID NO: 5361865 - DNA, 25 bp, Homo sapien
tgtgattggtgaggctttgccaacc

SEQ ID NO: 5361866 - DNA, 25 bp, Homo sapien
gaattggctgcatgtgtttttcatg

SEQ ID NO: 5361867 - DNA, 25 bp, Homo sapien
tgatggcagaaaatgctctttcgtg

SEQ ID NO: 5361868 - DNA, 25 bp, Homo sapien
cagaaaacaagaattgatggcagaa

SEQ ID NO: 5361869 - DNA, 25 bp, Homo sapien
gaattccaaaaagataccaactagc

SEQ ID NO: 5361870 - DNA, 25 bp, Homo sapien
tcgtggccagcagctatgaattcca

SEQ ID NO: 5361871 - DNA, 25 bp, Homo sapien
gaatccttttttgtcagcgttaatg

SEQ ID NO: 5361872 - DNA, 25 bp, Homo sapien
attttgttgctgtcctctttctgca

SEQ ID NO: 5361873 - DNA, 25 bp, Homo sapien
ctgatgtgtactcattttgttgctg

SEQ ID NO: 5361874 - DNA, 25 bp, Homo sapien
aatgtctgacttctgatgtgtactc

SEQ ID NO: 5361875 - DNA, 25 bp, Homo sapien
taggcacaatctcggtaggaactgg

SEQ ID NO: 5361876 - DNA, 25 bp, Homo sapien
tcctagacgggtactgtcagcttgc

SEQ ID NO: 5361877 - DNA, 25 bp, Homo sapien
gcagagtctctaacccataattgga

SEQ ID NO: 5361878 - DNA, 25 bp, Homo sapien
aaacaagtcttaggttctggccagg

SEQ ID NO: 5361879 - DNA, 25 bp, Homo sapien
cagaagccctaattgtggccatgtg

SEQ ID NO: 5361880 - DNA, 25 bp, Homo sapien
actaaatcagagctttgacaagggc

SEQ ID NO: 5361881 - DNA, 25 bp, Homo sapien
tgtaatgacccttggacaaaaccga

SEQ ID NO: 5361882 - DNA, 25 bp, Homo sapien
gaagtgcactttcccgttttgtagc

SEQ ID NO: 5361883 - DNA, 25 bp, Homo sapien
gagtttattgtaattgcctgagcaa

SEQ ID NO: 5361884 - DNA, 25 bp, Homo sapien
gaagcaatttccagttacaatgtgc

SEQ ID NO: 5361885 - DNA, 25 bp, Homo sapien
tgtttgataatatggttcgctgctg

SEQ ID NO: 5361886 - DNA, 25 bp, Homo sapien
tacaatgtgctatgacaagtaatga

SEQ ID NO: 5361887 - DNA, 25 bp, Homo sapien
caaggagcttggctgactctggtcc

SEQ ID NO: 5361888 - DNA, 25 bp, Homo sapien
ggtccatacgaggtaccatcaggaa

SEQ ID NO: 5361889 - DNA, 25 bp, Homo sapien
tggctgactctggtccatacgaggt

SEQ ID NO: 5361890 - DNA, 25 bp, Homo sapien
gactctggtccatacgaggtaccat

SEQ ID NO: 5361891 - DNA, 25 bp, Homo sapien
cactactgaggatgttaattcttca

SEQ ID NO: 5361892 - DNA, 25 bp, Homo sapien
tccactactgaggatgttaattctt

SEQ ID NO: 5361893 - DNA, 25 bp, Homo sapien
tatatccactactgaggatgttaat

SEQ ID NO: 5361894 - DNA, 25 bp, Homo sapien
tatccactactgaggatgttaattc

SEQ ID NO: 5361895 - DNA, 25 bp, Homo sapien
agggcttcacaactaggtttatttg

SEQ ID NO: 5361896 - DNA, 25 bp, Homo sapien
caaagggcttcacaactaggtttat

SEQ ID NO: 5361897 - DNA, 25 bp, Homo sapien
cttcacaactaggtttatttgtgac

SEQ ID NO: 5361898 - DNA, 25 bp, Homo sapien
gcaaagggcttcacaactaggttta

SEQ ID NO: 5361899 - DNA, 25 bp, Homo sapien
cactgtgctgaccatgcactgagtc

SEQ ID NO: 5361900 - DNA, 25 bp, Homo sapien
gagacgtcattagtgttgtcggcgc

SEQ ID NO: 5361901 - DNA, 25 bp, Homo sapien
tctgacatctgggtgagacgtcatt

SEQ ID NO: 5361902 - DNA, 25 bp, Homo sapien
tattcctatagacgggccactgtgc

SEQ ID NO: 5361903 - DNA, 25 bp, Homo sapien
taattattaatatcaggagcaggaa

SEQ ID NO: 5361904 - DNA, 25 bp, Homo sapien
caagcacaccaaatagtcgtgaatg

SEQ ID NO: 5361905 - DNA, 25 bp, Homo sapien
tatcccgttgcataattattaatat

SEQ ID NO: 5361906 - DNA, 25 bp, Homo sapien
atagtcgtgaatgctggtgttctgg

SEQ ID NO: 5361907 - DNA, 25 bp, Homo sapien
cacatgagtttctgaggggtccctc

SEQ ID NO: 5361908 - DNA, 25 bp, Homo sapien
tcctccgctaatccttccacaatgg

SEQ ID NO: 5361909 - DNA, 25 bp, Homo sapien
gcctcctgaagtgtgttctcctccg

SEQ ID NO: 5361910 - DNA, 25 bp, Homo sapien
caggcctcctgaagtgtgttctcct

SEQ ID NO: 5361911 - DNA, 25 bp, Homo sapien
ctgttgacttacagcaaaacagcag

SEQ ID NO: 5361912 - DNA, 25 bp, Homo sapien
cagttgctgttgacttacagcaaaa

SEQ ID NO: 5361913 - DNA, 25 bp, Homo sapien
gatgctactaccatttgtagacttg

SEQ ID NO: 5361914 - DNA, 25 bp, Homo sapien
tgtagacttgtaatatctttctaat

SEQ ID NO: 5361915 - DNA, 25 bp, Homo sapien
tgttgaggtttcagtcagattggaa

SEQ ID NO: 5361916 - DNA, 25 bp, Homo sapien
gaggcttacagtatggagcgcagaa

SEQ ID NO: 5361917 - DNA, 25 bp, Homo sapien
gcggcatgcactcatggacacattt

SEQ ID NO: 5361918 - DNA, 25 bp, Homo sapien
tgggaacataagcagcggcatgcac

SEQ ID NO: 5361919 - DNA, 25 bp, Homo sapien
caaatattagtaaatcgtcaaagac

SEQ ID NO: 5361920 - DNA, 25 bp, Homo sapien
ttagtaaatcgtcaaagacagtcat

SEQ ID NO: 5361921 - DNA, 25 bp, Homo sapien
ttttcaaatattagtaaatcgtcaa

SEQ ID NO: 5361922 - DNA, 25 bp, Homo sapien
tattagtaaatcgtcaaagacagtc

SEQ ID NO: 5361923 - DNA, 25 bp, Homo sapien
ttgtgctgatgatttatcataggtt

SEQ ID NO: 5361924 - DNA, 25 bp, Homo sapien
tcataggtttgtatgccgtgttggt

SEQ ID NO: 5361925 - DNA, 25 bp, Homo sapien
gctgatgatttatcataggtttgta

SEQ ID NO: 5361926 - DNA, 25 bp, Homo sapien
ataggtttgtatgccgtgttggtct

SEQ ID NO: 5361927 - DNA, 25 bp, Homo sapien
tacacagactgatgaggatatgcct

SEQ ID NO: 5361928 - DNA, 25 bp, Homo sapien
tcagcttcgggtgtctccatgagaa

SEQ ID NO: 5361929 - DNA, 25 bp, Homo sapien
tcagcgctgatacgaattggcccca

SEQ ID NO: 5361930 - DNA, 25 bp, Homo sapien
gagtcgcatttagatagctgggcca

SEQ ID NO: 5361931 - DNA, 25 bp, Homo sapien
aatactccttcactagttgctgctg

SEQ ID NO: 5361932 - DNA, 25 bp, Homo sapien
cacgctaaaattcccaatactcctt

SEQ ID NO: 5361933 - DNA, 25 bp, Homo sapien
ccttcactagttgctgctgcaaaga

SEQ ID NO: 5361934 - DNA, 25 bp, Homo sapien
taacacgctaaaattcccaatactc

SEQ ID NO: 5361935 - DNA, 25 bp, Homo sapien
agttcacgctcacattctcgacaga

SEQ ID NO: 5361936 - DNA, 25 bp, Homo sapien
cgctcacattctcgacagaagttat

SEQ ID NO: 5361937 - DNA, 25 bp, Homo sapien
ctgcagttcacgctcacattctcga

SEQ ID NO: 5361938 - DNA, 25 bp, Homo sapien
cattctcgacagaagttatttctca

SEQ ID NO: 5361939 - DNA, 25 bp, Homo sapien
gaaaacgtaatattgctcatcctct

SEQ ID NO: 5361940 - DNA, 25 bp, Homo sapien
tatcaaattgacctagtaacaccca

SEQ ID NO: 5361941 - DNA, 25 bp, Homo sapien
taatggatgatgtaattctgctacc

SEQ ID NO: 5361942 - DNA, 25 bp, Homo sapien
tctgggatcaagtccaaatgaagta

SEQ ID NO: 5361943 - DNA, 25 bp, Homo sapien
gatatcttatcactgttttggccct

SEQ ID NO: 5361944 - DNA, 25 bp, Homo sapien
taaaagcgctgtccactggcttaca

SEQ ID NO: 5361945 - DNA, 25 bp, Homo sapien
cagccaggaagcagttaaaagcgct

SEQ ID NO: 5361946 - DNA, 25 bp, Homo sapien
tatttcacgcatgttaggcagccag

SEQ ID NO: 5361947 - DNA, 25 bp, Homo sapien
ttgcacatgtgccagagcgctgact

SEQ ID NO: 5361948 - DNA, 25 bp, Homo sapien
gagcgctgactgacaccacattttg

SEQ ID NO: 5361949 - DNA, 25 bp, Homo sapien
gaccacagcccagtcgcgacttctt

SEQ ID NO: 5361950 - DNA, 25 bp, Homo sapien
cacattttgaaaccgattgtacaac

SEQ ID NO: 5361951 - DNA, 25 bp, Homo sapien
cctccggccagtgtttgaggagtta

SEQ ID NO: 5361952 - DNA, 25 bp, Homo sapien
tctgtagtcatctctggtcttgctt

SEQ ID NO: 5361953 - DNA, 25 bp, Homo sapien
cagttcatactggagcctccggcca

SEQ ID NO: 5361954 - DNA, 25 bp, Homo sapien
ctctcgagtgtgcacggcagctgca

SEQ ID NO: 5361955 - DNA, 25 bp, Homo sapien
caatgagtatcatattttatttctg

SEQ ID NO: 5361956 - DNA, 25 bp, Homo sapien
tcaatgagtatcatattttatttct

SEQ ID NO: 5361957 - DNA, 25 bp, Homo sapien
agtatcatattttatttctgtagac

SEQ ID NO: 5361958 - DNA, 25 bp, Homo sapien
atcatattttatttctgtagaccat

SEQ ID NO: 5361959 - DNA, 25 bp, Homo sapien
tcttcaaacattgacgaagagcttc

SEQ ID NO: 5361960 - DNA, 25 bp, Homo sapien
ttgacgaagagcttctttcagtggt

SEQ ID NO: 5361961 - DNA, 25 bp, Homo sapien
gttatttggtactgcttcttcaaac

SEQ ID NO: 5361962 - DNA, 25 bp, Homo sapien
tgctggtagtactgatggctgttat

SEQ ID NO: 5361963 - DNA, 25 bp, Homo sapien
cataagggccctcttcttctctgta

SEQ ID NO: 5361964 - DNA, 25 bp, Homo sapien
cctcttcttctctgtatttggacat

SEQ ID NO: 5361965 - DNA, 25 bp, Homo sapien
ctgagaggcataagggccctcttct

SEQ ID NO: 5361966 - DNA, 25 bp, Homo sapien
ccctcttcttctctgtatttggaca

SEQ ID NO: 5361967 - DNA, 25 bp, Homo sapien
tgtgggatctatttcggtgttctct

SEQ ID NO: 5361968 - DNA, 25 bp, Homo sapien
gatctatttcggtgttctcttttct

SEQ ID NO: 5361969 - DNA, 25 bp, Homo sapien
tttaactctatacctttgagttgaa

SEQ ID NO: 5361970 - DNA, 25 bp, Homo sapien
taactctatacctttgagttgaaag

SEQ ID NO: 5361971 - DNA, 25 bp, Homo sapien
ggagaatggtctgctccatatccat

SEQ ID NO: 5361972 - DNA, 25 bp, Homo sapien
tgatagggtggtttcacctgggtaa

SEQ ID NO: 5361973 - DNA, 25 bp, Homo sapien
ccttggtcatagacggatctggaga

SEQ ID NO: 5361974 - DNA, 25 bp, Homo sapien
gatttggtcggtcatgtgatgttga

SEQ ID NO: 5361975 - DNA, 25 bp, Homo sapien
gcctagagagctgaggatgatttca

SEQ ID NO: 5361976 - DNA, 25 bp, Homo sapien
cccattgtgattgacaagcctgaca

SEQ ID NO: 5361977 - DNA, 25 bp, Homo sapien
tatgcagtaggcagatagttcccac

SEQ ID NO: 5361978 - DNA, 25 bp, Homo sapien
tgatcaaaaggattccagatctcac

SEQ ID NO: 5361979 - DNA, 25 bp, Homo sapien
attacaatgagtcacagaaaggcta

SEQ ID NO: 5361980 - DNA, 25 bp, Homo sapien
ttacaatgagtcacagaaaggctac

SEQ ID NO: 5361981 - DNA, 25 bp, Homo sapien
cattacaatgagtcacagaaaggct

SEQ ID NO: 5361982 - DNA, 25 bp, Homo sapien
tacaatgagtcacagaaaggctaca

SEQ ID NO: 5361983 - DNA, 25 bp, Homo sapien
ttgggatatggaaaatgtcaatttt

SEQ ID NO: 5361984 - DNA, 25 bp, Homo sapien
ggaaaatgtcaattttcattggcca

SEQ ID NO: 5361985 - DNA, 25 bp, Homo sapien
aaatgtcaattttcattggccacat

SEQ ID NO: 5361986 - DNA, 25 bp, Homo sapien
cttgggatatggaaaatgtcaattt

SEQ ID NO: 5361987 - DNA, 25 bp, Homo sapien
gttctcttgccaagagagaccactc

SEQ ID NO: 5361988 - DNA, 25 bp, Homo sapien
caacttgcagcgatggtacctttcc

SEQ ID NO: 5361989 - DNA, 25 bp, Homo sapien
gattcgtattttgtcgtttgaggtc

SEQ ID NO: 5361990 - DNA, 25 bp, Homo sapien
ggtcatcgctaaaacagtatcaggc

SEQ ID NO: 5361991 - DNA, 25 bp, Homo sapien
tccctgtctctggactttaattcac

SEQ ID NO: 5361992 - DNA, 25 bp, Homo sapien
ttccctgtctctggactttaattca

SEQ ID NO: 5361993 - DNA, 25 bp, Homo sapien
cctgtagcacctggcgtctccagag

SEQ ID NO: 5361994 - DNA, 25 bp, Homo sapien
cagagcaccaatcacaataatgacc

SEQ ID NO: 5361995 - DNA, 25 bp, Homo sapien
gtctccagagcaccaatcacaataa

SEQ ID NO: 5361996 - DNA, 25 bp, Homo sapien
tggcgtctccagagcaccaatcaca

SEQ ID NO: 5361997 - DNA, 25 bp, Homo sapien
tagcattctcatttaggctgtgaac

SEQ ID NO: 5361998 - DNA, 25 bp, Homo sapien
aatacagcttgctgtagcattctca

SEQ ID NO: 5361999 - DNA, 25 bp, Homo sapien
catcaaaggaaattgatgtcaggtg

SEQ ID NO: 5362000 - DNA, 25 bp, Homo sapien
tgatgtcaggtgtgaacagaagctg

SEQ ID NO: 5362001 - DNA, 25 bp, Homo sapien
tatttcactatccttttgtggaata

SEQ ID NO: 5362002 - DNA, 25 bp, Homo sapien
cactatccttttgtggaataatatt

SEQ ID NO: 5362003 - DNA, 25 bp, Homo sapien
ttcactatccttttgtggaataata

SEQ ID NO: 5362004 - DNA, 25 bp, Homo sapien
atttcactatccttttgtggaataa

SEQ ID NO: 5362005 - DNA, 25 bp, Homo sapien
catgtaatgtcaatagccatcacag

SEQ ID NO: 5362006 - DNA, 25 bp, Homo sapien
gccatcacagctgcgataagattaa

SEQ ID NO: 5362007 - DNA, 25 bp, Homo sapien
taagagtgcctctgtgattggtaac

SEQ ID NO: 5362008 - DNA, 25 bp, Homo sapien
gccctgaaatcacttcttgacgaag

SEQ ID NO: 5362009 - DNA, 25 bp, Homo sapien
taagcaatgataatcaggaaaacct

SEQ ID NO: 5362010 - DNA, 25 bp, Homo sapien
ctctgctacatgtgttgggtgataa

SEQ ID NO: 5362011 - DNA, 25 bp, Homo sapien
tatcctttagaataggacataagca

SEQ ID NO: 5362012 - DNA, 25 bp, Homo sapien
cctgaaccatagttcaagttgaaaa

SEQ ID NO: 5362013 - DNA, 25 bp, Homo sapien
gtcgcctctgaatttccttcacctt

SEQ ID NO: 5362014 - DNA, 25 bp, Homo sapien
cgtcgcctctgaatttccttcacct

SEQ ID NO: 5362015 - DNA, 25 bp, Homo sapien
cttccttcctgtactggtaactcct

SEQ ID NO: 5362016 - DNA, 25 bp, Homo sapien
accgtcgcctctgaatttccttcac

SEQ ID NO: 5362017 - DNA, 25 bp, Homo sapien
tgaagtctgcctgattgatattcca

SEQ ID NO: 5362018 - DNA, 25 bp, Homo sapien
ctgaagtctgcctgattgatattcc

SEQ ID NO: 5362019 - DNA, 25 bp, Homo sapien
gaagtctgcctgattgatattccat

SEQ ID NO: 5362020 - DNA, 25 bp, Homo sapien
tccatgggccatcatttgctgacac

SEQ ID NO: 5362021 - DNA, 25 bp, Homo sapien
gctgagtaagttaagtgaatcaccc

SEQ ID NO: 5362022 - DNA, 25 bp, Homo sapien
tgcccataggcatctggtctggtaa

SEQ ID NO: 5362023 - DNA, 25 bp, Homo sapien
gctgaacgctttctagccactcttg

SEQ ID NO: 5362024 - DNA, 25 bp, Homo sapien
ctgtgtatctgtcatggagcactta

SEQ ID NO: 5362025 - DNA, 25 bp, Homo sapien
tgtatctgtcatggagcacttagct

SEQ ID NO: 5362026 - DNA, 25 bp, Homo sapien
gtgtatctgtcatggagcacttagc

SEQ ID NO: 5362027 - DNA, 25 bp, Homo sapien
tgtgtatctgtcatggagcacttag

SEQ ID NO: 5362028 - DNA, 25 bp, Homo sapien
tttcagaaagtcaaccacagagtct

SEQ ID NO: 5362029 - DNA, 25 bp, Homo sapien
tcagaaagtcaaccacagagtcttc

SEQ ID NO: 5362030 - DNA, 25 bp, Homo sapien
caaccacagagtcttctacgcgtgt

SEQ ID NO: 5362031 - DNA, 25 bp, Homo sapien
cttttcagaaagtcaaccacagagt

SEQ ID NO: 5362032 - DNA, 25 bp, Homo sapien
tgataaccaatttcgtcacatgcat

SEQ ID NO: 5362033 - DNA, 25 bp, Homo sapien
cttagtgataaccaatttcgtcaca

SEQ ID NO: 5362034 - DNA, 25 bp, Homo sapien
tagtgataaccaatttcgtcacatg

SEQ ID NO: 5362035 - DNA, 25 bp, Homo sapien
gtgataaccaatttcgtcacatgca

SEQ ID NO: 5362036 - DNA, 25 bp, Homo sapien
ttccatcgcaagacaaatcttgcct

SEQ ID NO: 5362037 - DNA, 25 bp, Homo sapien
tgtgctctaaattccatcgcaagac

SEQ ID NO: 5362038 - DNA, 25 bp, Homo sapien
ccttgaaaactgagtgacagtttgc

SEQ ID NO: 5362039 - DNA, 25 bp, Homo sapien
gcccagggaactattgtgctctaaa

SEQ ID NO: 5362040 - DNA, 25 bp, Homo sapien
attcaggacaaatgtgctgtcctcc

SEQ ID NO: 5362041 - DNA, 25 bp, Homo sapien
agtgtgaagccccaggtttctagca

SEQ ID NO: 5362042 - DNA, 25 bp, Homo sapien
tttccaacagtgtgaagccccaggt

SEQ ID NO: 5362043 - DNA, 25 bp, Homo sapien
caacagtgtgaagccccaggtttct

SEQ ID NO: 5362044 - DNA, 25 bp, Homo sapien
ctttggatcttataagcagtccact

SEQ ID NO: 5362045 - DNA, 25 bp, Homo sapien
tgcaaatccgaagaatacaaatgac

SEQ ID NO: 5362046 - DNA, 25 bp, Homo sapien
gaaagtaaactgtacttgcagttgt

SEQ ID NO: 5362047 - DNA, 25 bp, Homo sapien
ccaagtgaagtcctggtggcagttg

SEQ ID NO: 5362048 - DNA, 25 bp, Homo sapien
ggcagttgctttgcaaatccgaaga

SEQ ID NO: 5362049 - DNA, 25 bp, Homo sapien
aacgatattggaaaaccctcgacat

SEQ ID NO: 5362050 - DNA, 25 bp, Homo sapien
tattggaaaaccctcgacattctct

SEQ ID NO: 5362051 - DNA, 25 bp, Homo sapien
tggaaaaccctcgacattctctcat

SEQ ID NO: 5362052 - DNA, 25 bp, Homo sapien
gatattggaaaaccctcgacattct

SEQ ID NO: 5362053 - DNA, 25 bp, Homo sapien
ccatttcaatgaagttttatcctta

SEQ ID NO: 5362054 - DNA, 25 bp, Homo sapien
tttatccttatgtaaagctttctga

SEQ ID NO: 5362055 - DNA, 25 bp, Homo sapien
ctgaaatattgtatgaagagtaatc

SEQ ID NO: 5362056 - DNA, 25 bp, Homo sapien
catgtgttcaggaaatgaatccatt

SEQ ID NO: 5362057 - DNA, 25 bp, Homo sapien
gcattgcttaatgtgctaactgatc

SEQ ID NO: 5362058 - DNA, 25 bp, Homo sapien
gatcttattttcgtgtggagctcac

SEQ ID NO: 5362059 - DNA, 25 bp, Homo sapien
ctcactgtcagggataccaaaagca

SEQ ID NO: 5362060 - DNA, 25 bp, Homo sapien
cattgggaaactacctaatatttcg

SEQ ID NO: 5362061 - DNA, 25 bp, Homo sapien
tcttcagcctcgctgatttgagggt

SEQ ID NO: 5362062 - DNA, 25 bp, Homo sapien
gaccataagctgatttgctgcaagc

SEQ ID NO: 5362063 - DNA, 25 bp, Homo sapien
ggagagaggcttcaaattgcctttc

SEQ ID NO: 5362064 - DNA, 25 bp, Homo sapien
tctcttattggtgtgcactttgacc

SEQ ID NO: 5362065 - DNA, 25 bp, Homo sapien
catttttatcatacaatgcacagct

SEQ ID NO: 5362066 - DNA, 25 bp, Homo sapien
tttttatcatacaatgcacagcttt

SEQ ID NO: 5362067 - DNA, 25 bp, Homo sapien
tatcatacaatgcacagctttcagg

SEQ ID NO: 5362068 - DNA, 25 bp, Homo sapien
tttatcatacaatgcacagctttca

SEQ ID NO: 5362069 - DNA, 25 bp, Homo sapien
ggcgatacaattggccacatatgcc

SEQ ID NO: 5362070 - DNA, 25 bp, Homo sapien
tggcgatacaattggccacatatgc

SEQ ID NO: 5362071 - DNA, 25 bp, Homo sapien
ctggcgatacaattggccacatatg

SEQ ID NO: 5362072 - DNA, 25 bp, Homo sapien
actggcgatacaattggccacatat

SEQ ID NO: 5362073 - DNA, 25 bp, Homo sapien
ggtccttgactcatggtcttcctct

SEQ ID NO: 5362074 - DNA, 25 bp, Homo sapien
caccaatctccaagccaggatcagg

SEQ ID NO: 5362075 - DNA, 25 bp, Homo sapien
gtccttctggacaatacgttcaaca

SEQ ID NO: 5362076 - DNA, 25 bp, Homo sapien
caggatcaggcaacccatgtgcttt

SEQ ID NO: 5362077 - DNA, 25 bp, Homo sapien
ctagatccacacaccaacgggcaca

SEQ ID NO: 5362078 - DNA, 25 bp, Homo sapien
tagatccacacaccaacgggcacat

SEQ ID NO: 5362079 - DNA, 25 bp, Homo sapien
agacctggagcccagcagatccctg

SEQ ID NO: 5362080 - DNA, 25 bp, Homo sapien
agcccagcagatccctggtagccta

SEQ ID NO: 5362081 - DNA, 25 bp, Homo sapien
ctggagcccagcagatccctggtag

SEQ ID NO: 5362082 - DNA, 25 bp, Homo sapien
aagcagccagacctggagcccagca

SEQ ID NO: 5362083 - DNA, 25 bp, Homo sapien
ttagcctctcacatagagaagatct

SEQ ID NO: 5362084 - DNA, 25 bp, Homo sapien
tctgagaaggatgctaggcacagtc

SEQ ID NO: 5362085 - DNA, 25 bp, Homo sapien
ccgccgtgtgactttgactccattg

SEQ ID NO: 5362086 - DNA, 25 bp, Homo sapien
tgctaggcacagtctgggtacctct

SEQ ID NO: 5362087 - DNA, 25 bp, Homo sapien
ggttccctgtggctgtctcccttgt

SEQ ID NO: 5362088 - DNA, 25 bp, Homo sapien
gttccctgtggctgtctcccttgta

SEQ ID NO: 5362089 - DNA, 25 bp, Homo sapien
ttccctgtggctgtctcccttgtac

SEQ ID NO: 5362090 - DNA, 25 bp, Homo sapien
ggagtctatggcagacactgacaaa

SEQ ID NO: 5362091 - DNA, 25 bp, Homo sapien
ggcctttcgattcccccttgccaca

SEQ ID NO: 5362092 - DNA, 25 bp, Homo sapien
ccagggagtctatggcagacactga

SEQ ID NO: 5362093 - DNA, 25 bp, Homo sapien
gcttgaggaagggcctttcgattcc

SEQ ID NO: 5362094 - DNA, 25 bp, Homo sapien
tggaacagcccaggattaccagcag

SEQ ID NO: 5362095 - DNA, 25 bp, Homo sapien
aatcccaccagggtacttgtctggg

SEQ ID NO: 5362096 - DNA, 25 bp, Homo sapien
gcaccgtcgcctggttggtaaagga

SEQ ID NO: 5362097 - DNA, 25 bp, Homo sapien
atcacaaagccgaggtggcccatgg

SEQ ID NO: 5362098 - DNA, 25 bp, Homo sapien
tgttcgcgttgagccacttggcatt

SEQ ID NO: 5362099 - DNA, 25 bp, Homo sapien
ttcgcgttgagccacttggcattga

SEQ ID NO: 5362100 - DNA, 25 bp, Homo sapien
agtgttcgcgttgagccacttggca

SEQ ID NO: 5362101 - DNA, 25 bp, Homo sapien
gcgttgagccacttggcattgatct

SEQ ID NO: 5362102 - DNA, 25 bp, Homo sapien
tctgtagcaggttgatggggccgat

SEQ ID NO: 5362103 - DNA, 25 bp, Homo sapien
ctcatagccccccatggcagtctgt

SEQ ID NO: 5362104 - DNA, 25 bp, Homo sapien
atagccccccatggcagtctgtagc

SEQ ID NO: 5362105 - DNA, 25 bp, Homo sapien
gtctgtagcaggttgatggggccga

SEQ ID NO: 5362106 - DNA, 25 bp, Homo sapien
tgatgacgaaggggtccccaaaatc

SEQ ID NO: 5362107 - DNA, 25 bp, Homo sapien
cttggtgatgacgaaggggtcccca

SEQ ID NO: 5362108 - DNA, 25 bp, Homo sapien
cccaaaatcccacagggcctgggca

SEQ ID NO: 5362109 - DNA, 25 bp, Homo sapien
ccaaaatcccacagggcctgggcac

SEQ ID NO: 5362110 - DNA, 25 bp, Homo sapien
cacatccgtatccctcttgatgcca

SEQ ID NO: 5362111 - DNA, 25 bp, Homo sapien
gtgatggagttgttgacggcaggta

SEQ ID NO: 5362112 - DNA, 25 bp, Homo sapien
ggtgatggagttgttgacggcaggt

SEQ ID NO: 5362113 - DNA, 25 bp, Homo sapien
ttggtgatggagttgttgacggcag

SEQ ID NO: 5362114 - DNA, 25 bp, Homo sapien
tgatggagttgttgacggcaggtac

SEQ ID NO: 5362115 - DNA, 25 bp, Homo sapien
cctcagagatgccttggatgcccag

SEQ ID NO: 5362116 - DNA, 25 bp, Homo sapien
ttggatgcccagtaagagctgtggg

SEQ ID NO: 5362117 - DNA, 25 bp, Homo sapien
taggttgtggaccctagtggtggtc

SEQ ID NO: 5362118 - DNA, 25 bp, Homo sapien
gatgcccagtaagagctgtgggtac

SEQ ID NO: 5362119 - DNA, 25 bp, Homo sapien
gcatgacagttaccccttgcttgtt

SEQ ID NO: 5362120 - DNA, 25 bp, Homo sapien
gggcacgtctttgaagtagtgaatg

SEQ ID NO: 5362121 - DNA, 25 bp, Homo sapien
tggatgcatgacagttaccccttgc

SEQ ID NO: 5362122 - DNA, 25 bp, Homo sapien
tgaatgttggatgcatgacagttac

SEQ ID NO: 5362123 - DNA, 25 bp, Homo sapien
gatgtctctctccacggtcacatac

SEQ ID NO: 5362124 - DNA, 25 bp, Homo sapien
gggtctcagtgaggatgtctctctc

SEQ ID NO: 5362125 - DNA, 25 bp, Homo sapien
ggtctcagtgaggatgtctctctcc

SEQ ID NO: 5362126 - DNA, 25 bp, Homo sapien
ggatgtctctctccacggtcacata

SEQ ID NO: 5362127 - DNA, 25 bp, Homo sapien
attctccgcaatatccaggcccttg

SEQ ID NO: 5362128 - DNA, 25 bp, Homo sapien
caaagtgtgatggacacggagaaag

SEQ ID NO: 5362129 - DNA, 25 bp, Homo sapien
cagccagagatatgggtgcccttca

SEQ ID NO: 5362130 - DNA, 25 bp, Homo sapien
gctggcaacgcttccacaaagtgtg

SEQ ID NO: 5362131 - DNA, 25 bp, Homo sapien
gagttgacagtcagattctgtggta

SEQ ID NO: 5362132 - DNA, 25 bp, Homo sapien
tggtaaatgattccagagtcgctgg

SEQ ID NO: 5362133 - DNA, 25 bp, Homo sapien
ctacatgacaaagagttgacagtca

SEQ ID NO: 5362134 - DNA, 25 bp, Homo sapien
cccagcagacctgattaattccagt

SEQ ID NO: 5362135 - DNA, 25 bp, Homo sapien
gatcactgagcagcacggtgctaaa

SEQ ID NO: 5362136 - DNA, 25 bp, Homo sapien
tttgatgcttgcattgatgaaggcc

SEQ ID NO: 5362137 - DNA, 25 bp, Homo sapien
gatgaaggccatgatcactgagcag

SEQ ID NO: 5362138 - DNA, 25 bp, Homo sapien
attgatgaaggccatgatcactgag

SEQ ID NO: 5362139 - DNA, 25 bp, Homo sapien
tcttgcatacgcaaaggtcaggcac

SEQ ID NO: 5362140 - DNA, 25 bp, Homo sapien
gccaatcaaagggttcgtttctgcc

SEQ ID NO: 5362141 - DNA, 25 bp, Homo sapien
ggagaggcatttccacacgcccatt

SEQ ID NO: 5362142 - DNA, 25 bp, Homo sapien
gaagaccaccatatgtaagacccag

SEQ ID NO: 5362143 - DNA, 25 bp, Homo sapien
gagttccgtatgcttgccttccaca

SEQ ID NO: 5362144 - DNA, 25 bp, Homo sapien
aaataccagacggagttccgtatgc

SEQ ID NO: 5362145 - DNA, 25 bp, Homo sapien
ttccaggaagaaataccagacggag

SEQ ID NO: 5362146 - DNA, 25 bp, Homo sapien
gacggagttccgtatgcttgccttc

SEQ ID NO: 5362147 - DNA, 25 bp, Homo sapien
tactttctgatgattagcagagtgt

SEQ ID NO: 5362148 - DNA, 25 bp, Homo sapien
gatgattagcagagtgttgagtgta

SEQ ID NO: 5362149 - DNA, 25 bp, Homo sapien
ctttctgatgattagcagagtgttg

SEQ ID NO: 5362150 - DNA, 25 bp, Homo sapien
tcatgggtagtagctgagaaacagg

SEQ ID NO: 5362151 - DNA, 25 bp, Homo sapien
tttaatgcaaaccaagtgttgatga

SEQ ID NO: 5362152 - DNA, 25 bp, Homo sapien
ttttaatgcaaaccaagtgttgatg

SEQ ID NO: 5362153 - DNA, 25 bp, Homo sapien
attttaatgcaaaccaagtgttgat

SEQ ID NO: 5362154 - DNA, 25 bp, Homo sapien
cctgtttacgggtcgctgatggaac

SEQ ID NO: 5362155 - DNA, 25 bp, Homo sapien
ggagacggtgcattttgtaagcgcc

SEQ ID NO: 5362156 - DNA, 25 bp, Homo sapien
taagcgccgggtagataatcatggt

SEQ ID NO: 5362157 - DNA, 25 bp, Homo sapien
cataaatttgcctatgcaatgcctg

SEQ ID NO: 5362158 - DNA, 25 bp, Homo sapien
cctttcgctcgaggtgcccatttct

SEQ ID NO: 5362159 - DNA, 25 bp, Homo sapien
catgatcgcaaatttggccaaaaga

SEQ ID NO: 5362160 - DNA, 25 bp, Homo sapien
agattttttcattaccctccaacat

SEQ ID NO: 5362161 - DNA, 25 bp, Homo sapien
tctgtgaccacttgcactggctttg

SEQ ID NO: 5362162 - DNA, 25 bp, Homo sapien
ccccagacaatagcggcctgaaagc

SEQ ID NO: 5362163 - DNA, 25 bp, Homo sapien
gcctgaaagcctggtctagacactc

SEQ ID NO: 5362164 - DNA, 25 bp, Homo sapien
tcttggcagctgttgaagcataaat

SEQ ID NO: 5362165 - DNA, 25 bp, Homo sapien
ggacccatcgctgtcaaccaggtaa

SEQ ID NO: 5362166 - DNA, 25 bp, Homo sapien
ccatgctaagctggtctttctttga

SEQ ID NO: 5362167 - DNA, 25 bp, Homo sapien
tcctgagcactgagcggggtttttt

SEQ ID NO: 5362168 - DNA, 25 bp, Homo sapien
gctccaaggcgcaccagaattatat

SEQ ID NO: 5362169 - DNA, 25 bp, Homo sapien
gatttacagaagacaattggatcag

SEQ ID NO: 5362170 - DNA, 25 bp, Homo sapien
tccatgctatctcctaaagcagtca

SEQ ID NO: 5362171 - DNA, 25 bp, Homo sapien
tatgcaaagcatgcatcagccacat

SEQ ID NO: 5362172 - DNA, 25 bp, Homo sapien
tgaaacccaatctggggacagtgca

SEQ ID NO: 5362173 - DNA, 25 bp, Homo sapien
tcctaaagcagtcattctgaaaccc

SEQ ID NO: 5362174 - DNA, 25 bp, Homo sapien
agagcactatcaagaacaccctgtg

SEQ ID NO: 5362175 - DNA, 25 bp, Homo sapien
tccaccccgttgtgtggaatgagtg

SEQ ID NO: 5362176 - DNA, 25 bp, Homo sapien
ttggttgcctttacaggctcaagct

SEQ ID NO: 5362177 - DNA, 25 bp, Homo sapien
gaacaccctgtggtgaaagatccac

SEQ ID NO: 5362178 - DNA, 25 bp, Homo sapien
ccacatcataagccaaagagagacc

SEQ ID NO: 5362179 - DNA, 25 bp, Homo sapien
agaaagcggcgctgtgactgcacta

SEQ ID NO: 5362180 - DNA, 25 bp, Homo sapien
tgccaaggctcgcagcagtttccac

SEQ ID NO: 5362181 - DNA, 25 bp, Homo sapien
aaggctgcggccaacctccagaaag

SEQ ID NO: 5362182 - DNA, 25 bp, Homo sapien
ctattggatccttttaccaacatct

SEQ ID NO: 5362183 - DNA, 25 bp, Homo sapien
ctgttaaagctttaaaggactcact

SEQ ID NO: 5362184 - DNA, 25 bp, Homo sapien
atccttttaccaacatctgttaaag

SEQ ID NO: 5362185 - DNA, 25 bp, Homo sapien
ttaaagctttaaaggactcactcac

SEQ ID NO: 5362186 - DNA, 25 bp, Homo sapien
tgggtcttagtatccacaaaggttc

SEQ ID NO: 5362187 - DNA, 25 bp, Homo sapien
gtaatatgcagtatctgaatagcag

SEQ ID NO: 5362188 - DNA, 25 bp, Homo sapien
ggcttccatttgcttgcgtggtaat

SEQ ID NO: 5362189 - DNA, 25 bp, Homo sapien
acaaaggttctagtagctttgctcc

SEQ ID NO: 5362190 - DNA, 25 bp, Homo sapien
tctcagtgccggaaagtcttgtcat

SEQ ID NO: 5362191 - DNA, 25 bp, Homo sapien
cataacatctcagtgccggaaagtc

SEQ ID NO: 5362192 - DNA, 25 bp, Homo sapien
cagatttcccgataccttaaagagg

SEQ ID NO: 5362193 - DNA, 25 bp, Homo sapien
gaggtaccataacatctcagtgccg

SEQ ID NO: 5362194 - DNA, 25 bp, Homo sapien
tttgatagagtaaacgtgtctgtac

SEQ ID NO: 5362195 - DNA, 25 bp, Homo sapien
gcacagtttgaaaggtgcttgataa

SEQ ID NO: 5362196 - DNA, 25 bp, Homo sapien
tagagtaaacgtgtctgtacacacc

SEQ ID NO: 5362197 - DNA, 25 bp, Homo sapien
gcattgacagtatctgcacagtttg

SEQ ID NO: 5362198 - DNA, 25 bp, Homo sapien
gatgctgacaggacaggggcacaca

SEQ ID NO: 5362199 - DNA, 25 bp, Homo sapien
acaggagatatgtgacctcacaggc

SEQ ID NO: 5362200 - DNA, 25 bp, Homo sapien
gggcacacaggagatatgtgacctc

SEQ ID NO: 5362201 - DNA, 25 bp, Homo sapien
cacacaggagatatgtgacctcaca

SEQ ID NO: 5362202 - DNA, 25 bp, Homo sapien
aagagttgcgtgagcctgaccacat

SEQ ID NO: 5362203 - DNA, 25 bp, Homo sapien
ctgtcccacgggctgccaagagttg

SEQ ID NO: 5362204 - DNA, 25 bp, Homo sapien
tgtgccactagctttgtctcctaca

SEQ ID NO: 5362205 - DNA, 25 bp, Homo sapien
ccctggcttgatgaatgataccctt

SEQ ID NO: 5362206 - DNA, 25 bp, Homo sapien
tgtagataaccaggcaaatcatgct

SEQ ID NO: 5362207 - DNA, 25 bp, Homo sapien
tgggctgtctcacctaatgtaattc

SEQ ID NO: 5362208 - DNA, 25 bp, Homo sapien
catgcaatgggatattgggctgtct

SEQ ID NO: 5362209 - DNA, 25 bp, Homo sapien
gatttcaacgaagaccaacagcagt

SEQ ID NO: 5362210 - DNA, 25 bp, Homo sapien
catcaacaacggctgtggttcttct

SEQ ID NO: 5362211 - DNA, 25 bp, Homo sapien
tagtgatggtgtctgcgtcacctcc

SEQ ID NO: 5362212 - DNA, 25 bp, Homo sapien
tggtctggccagtggccccggtggt

SEQ ID NO: 5362213 - DNA, 25 bp, Homo sapien
agttgcatgaatggtgtttacactg

SEQ ID NO: 5362214 - DNA, 25 bp, Homo sapien
gagtaatcacaaaagacccttctgg

SEQ ID NO: 5362215 - DNA, 25 bp, Homo sapien
tatggtccgcgcttttgtacacaga

SEQ ID NO: 5362216 - DNA, 25 bp, Homo sapien
ggaaatgcctgattgcgatcccagt

SEQ ID NO: 5362217 - DNA, 25 bp, Homo sapien
cgatcccagtttgttccgaccatca

SEQ ID NO: 5362218 - DNA, 25 bp, Homo sapien
acccaaaatgtgttttgatgtatta

SEQ ID NO: 5362219 - DNA, 25 bp, Homo sapien
aaaatgtgttttgatgtattaccat

SEQ ID NO: 5362220 - DNA, 25 bp, Homo sapien
ctttttcctaagcacccaaaatgtg

SEQ ID NO: 5362221 - DNA, 25 bp, Homo sapien
ccaaaatgtgttttgatgtattacc

SEQ ID NO: 5362222 - DNA, 25 bp, Homo sapien
aaattgggatcgtttctcttccaca

SEQ ID NO: 5362223 - DNA, 25 bp, Homo sapien
gtcagttgatccaatggatatactt

SEQ ID NO: 5362224 - DNA, 25 bp, Homo sapien
aaaggctaattcactggtgatgagc

SEQ ID NO: 5362225 - DNA, 25 bp, Homo sapien
gatctatgtatccttgcaggttgca

SEQ ID NO: 5362226 - DNA, 25 bp, Homo sapien
atctatgtatccttgcaggttgcaa

SEQ ID NO: 5362227 - DNA, 25 bp, Homo sapien
ttcatgtctctttcggactttaaaa

SEQ ID NO: 5362228 - DNA, 25 bp, Homo sapien
tagtcctggggagatttcactgagg

SEQ ID NO: 5362229 - DNA, 25 bp, Homo sapien
ctttaaaatgttgttgaagagtggc

SEQ ID NO: 5362230 - DNA, 25 bp, Homo sapien
gagttgttgatttcatgtctctttc

SEQ ID NO: 5362231 - DNA, 25 bp, Homo sapien
tagagttggctatcatccttcctgg

SEQ ID NO: 5362232 - DNA, 25 bp, Homo sapien
caagaagagtattggcgagtcagcg

SEQ ID NO: 5362233 - DNA, 25 bp, Homo sapien
ggctccgtgccctaaatgctggctg

SEQ ID NO: 5362234 - DNA, 25 bp, Homo sapien
tcattgggcagtctgggctccgtgc

SEQ ID NO: 5362235 - DNA, 25 bp, Homo sapien
taagcactgtacaaacaaaaggtgc

SEQ ID NO: 5362236 - DNA, 25 bp, Homo sapien
ctggctgattggagaggaatgacat

SEQ ID NO: 5362237 - DNA, 25 bp, Homo sapien
tgtaaatgatggctgagtaacacag

SEQ ID NO: 5362238 - DNA, 25 bp, Homo sapien
cattttgacaatttactgtagcagt

SEQ ID NO: 5362239 - DNA, 25 bp, Homo sapien
tttctaatgactccggtggctcccg

SEQ ID NO: 5362240 - DNA, 25 bp, Homo sapien
gcagttccagagtacagccttccag

SEQ ID NO: 5362241 - DNA, 25 bp, Homo sapien
caaaatccagcgaggtggactcaaa

SEQ ID NO: 5362242 - DNA, 25 bp, Homo sapien
gcctgcagctgcgtggtcattgata

SEQ ID NO: 5362243 - DNA, 25 bp, Homo sapien
ggcactgccaaatttgacacctcct

SEQ ID NO: 5362244 - DNA, 25 bp, Homo sapien
tattagatgccaccaagtagctgca

SEQ ID NO: 5362245 - DNA, 25 bp, Homo sapien
tccttcctgttcacggcagtccttt

SEQ ID NO: 5362246 - DNA, 25 bp, Homo sapien
cacggcagtcctttgcgatagggta

SEQ ID NO: 5362247 - DNA, 25 bp, Homo sapien
tggcacaatgcttggttctcagata

SEQ ID NO: 5362248 - DNA, 25 bp, Homo sapien
cttggcacaatgcttggttctcaga

SEQ ID NO: 5362249 - DNA, 25 bp, Homo sapien
acaatgcttggttctcagatatcat

SEQ ID NO: 5362250 - DNA, 25 bp, Homo sapien
gcacaatgcttggttctcagatatc

SEQ ID NO: 5362251 - DNA, 25 bp, Homo sapien
tgggtcttgctatctcacgggtggc

SEQ ID NO: 5362252 - DNA, 25 bp, Homo sapien
gtgggtcttgctatctcacgggtgg

SEQ ID NO: 5362253 - DNA, 25 bp, Homo sapien
atctataagtggacccataaacttc

SEQ ID NO: 5362254 - DNA, 25 bp, Homo sapien
catctataagtggacccataaactt

SEQ ID NO: 5362255 - DNA, 25 bp, Homo sapien
tgcttccctccgtgtgccacgcaac

SEQ ID NO: 5362256 - DNA, 25 bp, Homo sapien
cagaacccggatgctggcgaagcag

SEQ ID NO: 5362257 - DNA, 25 bp, Homo sapien
tttcagatgacctgaccagtcctcc

SEQ ID NO: 5362258 - DNA, 25 bp, Homo sapien
tttgtgaggagcctgcgttctttgg

SEQ ID NO: 5362259 - DNA, 25 bp, Homo sapien
ctgcttgttcgatccctcatttcca

SEQ ID NO: 5362260 - DNA, 25 bp, Homo sapien
accccctctatcctttgcctattgt

SEQ ID NO: 5362261 - DNA, 25 bp, Homo sapien
ccaccccctctatcctttgcctatt

SEQ ID NO: 5362262 - DNA, 25 bp, Homo sapien
tgcttgttcgatccctcatttccac

SEQ ID NO: 5362263 - DNA, 25 bp, Homo sapien
gaaaaggtaagtctctttcactgcc

SEQ ID NO: 5362264 - DNA, 25 bp, Homo sapien
agtggaccacaagccgagagctgta

SEQ ID NO: 5362265 - DNA, 25 bp, Homo sapien
tcagttgaagctcggaaggactctt

SEQ ID NO: 5362266 - DNA, 25 bp, Homo sapien
ctctgaaaggatcatagctacgcct

SEQ ID NO: 5362267 - DNA, 25 bp, Homo sapien
tataaaaggatgcacccagtgcaga

SEQ ID NO: 5362268 - DNA, 25 bp, Homo sapien
tttagtataaaaggatgcacccagt

SEQ ID NO: 5362269 - DNA, 25 bp, Homo sapien
tacggatgtccctcgcacgggacct

SEQ ID NO: 5362270 - DNA, 25 bp, Homo sapien
ttacggatgtccctcgcacgggacc

SEQ ID NO: 5362271 - DNA, 25 bp, Homo sapien
acaggttttagcctcttgatattca

SEQ ID NO: 5362272 - DNA, 25 bp, Homo sapien
tgacaggttttagcctcttgatatt

SEQ ID NO: 5362273 - DNA, 25 bp, Homo sapien
tgtgacaggttttagcctcttgata

SEQ ID NO: 5362274 - DNA, 25 bp, Homo sapien
ccttgtgacaggttttagcctcttg

SEQ ID NO: 5362275 - DNA, 25 bp, Homo sapien
taagttctaaattgcatcagacgcc

SEQ ID NO: 5362276 - DNA, 25 bp, Homo sapien
taaacaattcaggtcaggcatcaga

SEQ ID NO: 5362277 - DNA, 25 bp, Homo sapien
caaaatgcctcctaagattctggtg

SEQ ID NO: 5362278 - DNA, 25 bp, Homo sapien
tgcagagggtaagatccaaagctga

SEQ ID NO: 5362279 - DNA, 25 bp, Homo sapien
gactttagtccattgattctcaaac

SEQ ID NO: 5362280 - DNA, 25 bp, Homo sapien
tttagtccattgattctcaaacttg

SEQ ID NO: 5362281 - DNA, 25 bp, Homo sapien
agactttagtccattgattctcaaa

SEQ ID NO: 5362282 - DNA, 25 bp, Homo sapien
agtccattgattctcaaacttgaac

SEQ ID NO: 5362283 - DNA, 25 bp, Homo sapien
cagcttctatgttgaaccggccacg

SEQ ID NO: 5362284 - DNA, 25 bp, Homo sapien
catgatgtctctagtagtccagccc

SEQ ID NO: 5362285 - DNA, 25 bp, Homo sapien
gagtgtttggtcaccttccatgatg

SEQ ID NO: 5362286 - DNA, 25 bp, Homo sapien
agcccttgctgttgatggcccctgg

SEQ ID NO: 5362287 - DNA, 25 bp, Homo sapien
gagactatcttccatcacagccaga

SEQ ID NO: 5362288 - DNA, 25 bp, Homo sapien
tggctacgcaaagctcaataggctg

SEQ ID NO: 5362289 - DNA, 25 bp, Homo sapien
aataggctgccttgaattatcagtc

SEQ ID NO: 5362290 - DNA, 25 bp, Homo sapien
tcatatcagcgtatatctcagtggc

SEQ ID NO: 5362291 - DNA, 25 bp, Homo sapien
caggctgtatcttacagctggtggc

SEQ ID NO: 5362292 - DNA, 25 bp, Homo sapien
gctgtatcttacagctggtggctca

SEQ ID NO: 5362293 - DNA, 25 bp, Homo sapien
aggctgtatcttacagctggtggct

SEQ ID NO: 5362294 - DNA, 25 bp, Homo sapien
ggctgtatcttacagctggtggctc

SEQ ID NO: 5362295 - DNA, 25 bp, Homo sapien
catcattttcagctgctagaaaaat

SEQ ID NO: 5362296 - DNA, 25 bp, Homo sapien
ttcagctgctagaaaaatgggctgc

SEQ ID NO: 5362297 - DNA, 25 bp, Homo sapien
cattttcagctgctagaaaaatggg

SEQ ID NO: 5362298 - DNA, 25 bp, Homo sapien
ttttcagctgctagaaaaatgggct

SEQ ID NO: 5362299 - DNA, 25 bp, Homo sapien
aattgattccagtagtttgtaagcc

SEQ ID NO: 5362300 - DNA, 25 bp, Homo sapien
gtatgcatgcttggcgaggcagcca

SEQ ID NO: 5362301 - DNA, 25 bp, Homo sapien
ccttccatttagtgaattccgactt

SEQ ID NO: 5362302 - DNA, 25 bp, Homo sapien
gtaagcctgagcaaggccacataag

SEQ ID NO: 5362303 - DNA, 25 bp, Homo sapien
gacactcggaaaagtcaagtctcct

SEQ ID NO: 5362304 - DNA, 25 bp, Homo sapien
gatgcttcacctttgatcttgcaag

SEQ ID NO: 5362305 - DNA, 25 bp, Homo sapien
tgcgacttagtcacaaaaggccctt

SEQ ID NO: 5362306 - DNA, 25 bp, Homo sapien
catttggctaacgaactctgatgct

SEQ ID NO: 5362307 - DNA, 25 bp, Homo sapien
caaatgggcttagatgatgctgacc

SEQ ID NO: 5362308 - DNA, 25 bp, Homo sapien
aactggcttttgcagcacaacaaat

SEQ ID NO: 5362309 - DNA, 25 bp, Homo sapien
ggagctttgaccagttcagccagga

SEQ ID NO: 5362310 - DNA, 25 bp, Homo sapien
tccatggagctttgaccagttcagc

SEQ ID NO: 5362311 - DNA, 25 bp, Homo sapien
ggcagcaaaaaaacgtagcgaagca

SEQ ID NO: 5362312 - DNA, 25 bp, Homo sapien
ctggcagcaaaaaaacgtagcgaag

SEQ ID NO: 5362313 - DNA, 25 bp, Homo sapien
gcagcaaaaaaacgtagcgaagcat

SEQ ID NO: 5362314 - DNA, 25 bp, Homo sapien
tggcagcaaaaaaacgtagcgaagc

SEQ ID NO: 5362315 - DNA, 25 bp, Homo sapien
gctttacccattcgaaaaatagcat

SEQ ID NO: 5362316 - DNA, 25 bp, Homo sapien
tagctttacccattcgaaaaatagc

SEQ ID NO: 5362317 - DNA, 25 bp, Homo sapien
tttacccattcgaaaaatagcattc

SEQ ID NO: 5362318 - DNA, 25 bp, Homo sapien
tacccattcgaaaaatagcattctg

SEQ ID NO: 5362319 - DNA, 25 bp, Homo sapien
tgtccttgttcggaatgtagctttt

SEQ ID NO: 5362320 - DNA, 25 bp, Homo sapien
ccatttgtccttgttcggaatgtag

SEQ ID NO: 5362321 - DNA, 25 bp, Homo sapien
tccccatttgtccttgttcggaatg

SEQ ID NO: 5362322 - DNA, 25 bp, Homo sapien
gtccttgttcggaatgtagcttttc

SEQ ID NO: 5362323 - DNA, 25 bp, Homo sapien
tccaaaatcaaacacccgcatagtg

SEQ ID NO: 5362324 - DNA, 25 bp, Homo sapien
gcatagtgcagccattgaaaacagc

SEQ ID NO: 5362325 - DNA, 25 bp, Homo sapien
ggcatgacccataccctgcatgtga

SEQ ID NO: 5362326 - DNA, 25 bp, Homo sapien
gtgattgtcaaccacagatataaga

SEQ ID NO: 5362327 - DNA, 25 bp, Homo sapien
tccccttgggaattcgacctgagcc

SEQ ID NO: 5362328 - DNA, 25 bp, Homo sapien
tgggaattcgacctgagcccaccaa

SEQ ID NO: 5362329 - DNA, 25 bp, Homo sapien
ccttgggaattcgacctgagcccac

SEQ ID NO: 5362330 - DNA, 25 bp, Homo sapien
gtccccttgggaattcgacctgagc

SEQ ID NO: 5362331 - DNA, 25 bp, Homo sapien
agtgtctcttgggggctttgcaggt

SEQ ID NO: 5362332 - DNA, 25 bp, Homo sapien
gtgtctcttgggggctttgcaggtt

SEQ ID NO: 5362333 - DNA, 25 bp, Homo sapien
ccatgcaagggtgaaaagtgtctct

SEQ ID NO: 5362334 - DNA, 25 bp, Homo sapien
tgcaagggtgaaaagtgtctcttgg

SEQ ID NO: 5362335 - DNA, 25 bp, Homo sapien
agtcattcagagtaaaagttgtcca

SEQ ID NO: 5362336 - DNA, 25 bp, Homo sapien
ctggttggatgtcagccagtcattc

SEQ ID NO: 5362337 - DNA, 25 bp, Homo sapien
ccagtcattcagagtaaaagttgtc

SEQ ID NO: 5362338 - DNA, 25 bp, Homo sapien
cagtcattcagagtaaaagttgtcc

SEQ ID NO: 5362339 - DNA, 25 bp, Homo sapien
aactccctgcaaggtaaatggcttg

SEQ ID NO: 5362340 - DNA, 25 bp, Homo sapien
agccatccaactccctgcaaggtaa

SEQ ID NO: 5362341 - DNA, 25 bp, Homo sapien
ttgcctgtgcttgccccgttccttt

SEQ ID NO: 5362342 - DNA, 25 bp, Homo sapien
caaggtaaatggcttgcctgtgctt

SEQ ID NO: 5362343 - DNA, 25 bp, Homo sapien
ctgctattggccctagaacattgaa

SEQ ID NO: 5362344 - DNA, 25 bp, Homo sapien
tttatccaccaaataatatctcaga

SEQ ID NO: 5362345 - DNA, 25 bp, Homo sapien
ggccctagaacattgaatttatcca

SEQ ID NO: 5362346 - DNA, 25 bp, Homo sapien
ccacttcagaagaaatcagctctaa

SEQ ID NO: 5362347 - DNA, 25 bp, Homo sapien
ggtgttcagaaagcacgggattcat

SEQ ID NO: 5362348 - DNA, 25 bp, Homo sapien
taaaatggtaggctgctccaacaca

SEQ ID NO: 5362349 - DNA, 25 bp, Homo sapien
ctctgaatttggaggtatttgagga

SEQ ID NO: 5362350 - DNA, 25 bp, Homo sapien
ttgaggaagtcgataggttttgcag

SEQ ID NO: 5362351 - DNA, 25 bp, Homo sapien
aaaactcagaccatagtatccatag

SEQ ID NO: 5362352 - DNA, 25 bp, Homo sapien
aagggatggaaagatccatcacctt

SEQ ID NO: 5362353 - DNA, 25 bp, Homo sapien
aagaggatgggattgagagcctagc

SEQ ID NO: 5362354 - DNA, 25 bp, Homo sapien
tctccgataaaggaatagtgatggc

SEQ ID NO: 5362355 - DNA, 25 bp, Homo sapien
cctagctgaaggtatctctccgata

SEQ ID NO: 5362356 - DNA, 25 bp, Homo sapien
cagagacgattatcccaagcagcca

SEQ ID NO: 5362357 - DNA, 25 bp, Homo sapien
tgtctggcaaagcatcacaacttcc

SEQ ID NO: 5362358 - DNA, 25 bp, Homo sapien
cacaccgggctctcatctgagtcag

SEQ ID NO: 5362359 - DNA, 25 bp, Homo sapien
tagatgattgtagtgacagagccat

SEQ ID NO: 5362360 - DNA, 25 bp, Homo sapien
cagaggagcagcgcccatccaggaa

SEQ ID NO: 5362361 - DNA, 25 bp, Homo sapien
gcagcagcgtggttttggccatgaa

SEQ ID NO: 5362362 - DNA, 25 bp, Homo sapien
caaaggcctccaaaggcagatggag

SEQ ID NO: 5362363 - DNA, 25 bp, Homo sapien
caggaagggcccgtgccaaaggcct

SEQ ID NO: 5362364 - DNA, 25 bp, Homo sapien
aaggagcgcccataggtggatctga

SEQ ID NO: 5362365 - DNA, 25 bp, Homo sapien
cagacacagttagatctgttaagtc

SEQ ID NO: 5362366 - DNA, 25 bp, Homo sapien
cagaagtgaaaggagacatctagga

SEQ ID NO: 5362367 - DNA, 25 bp, Homo sapien
cgactggcagtgtagcagaagtgaa

SEQ ID NO: 5362368 - DNA, 25 bp, Homo sapien
gtccaagagggatcgggggccctgc

SEQ ID NO: 5362369 - DNA, 25 bp, Homo sapien
tgctgccatgagttttcatcagatg

SEQ ID NO: 5362370 - DNA, 25 bp, Homo sapien
gctgccatgagttttcatcagatgg

SEQ ID NO: 5362371 - DNA, 25 bp, Homo sapien
ccaagagggatcgggggccctgctg

SEQ ID NO: 5362372 - DNA, 25 bp, Homo sapien
ctgcggacagcagggcttaagagac

SEQ ID NO: 5362373 - DNA, 25 bp, Homo sapien
taagagacgtgcatttaacaaagtg

SEQ ID NO: 5362374 - DNA, 25 bp, Homo sapien
tcctcccctcgagatgaagccaaag

SEQ ID NO: 5362375 - DNA, 25 bp, Homo sapien
catttaacaaagtggtgctgaaggc

SEQ ID NO: 5362376 - DNA, 25 bp, Homo sapien
tccagcagcccaagataccaaaact

SEQ ID NO: 5362377 - DNA, 25 bp, Homo sapien
ccagcagcccaagataccaaaactc

SEQ ID NO: 5362378 - DNA, 25 bp, Homo sapien
gataccaaaactccgaaggcagccc

SEQ ID NO: 5362379 - DNA, 25 bp, Homo sapien
taccaaaactccgaaggcagcccca

SEQ ID NO: 5362380 - DNA, 25 bp, Homo sapien
aagttcccccagccactgagtctgc

SEQ ID NO: 5362381 - DNA, 25 bp, Homo sapien
caagttcccccagccactgagtctg

SEQ ID NO: 5362382 - DNA, 25 bp, Homo sapien
aaagaaaacacttgtgctcattggg

SEQ ID NO: 5362383 - DNA, 25 bp, Homo sapien
attgatgtggccaagtccacatcct

SEQ ID NO: 5362384 - DNA, 25 bp, Homo sapien
tgaaagaaaacacttgtgctcattg

SEQ ID NO: 5362385 - DNA, 25 bp, Homo sapien
gaaaacacttgtgctcattggggat

SEQ ID NO: 5362386 - DNA, 25 bp, Homo sapien
ccagttctacaggtttcttatcacc

SEQ ID NO: 5362387 - DNA, 25 bp, Homo sapien
gttctacaggtttcttatcaccttc

SEQ ID NO: 5362388 - DNA, 25 bp, Homo sapien
acaggtttcttatcaccttccccat

SEQ ID NO: 5362389 - DNA, 25 bp, Homo sapien
tctacaggtttcttatcaccttccc

SEQ ID NO: 5362390 - DNA, 25 bp, Homo sapien
tgggaatatgggtagtatccccttg

SEQ ID NO: 5362391 - DNA, 25 bp, Homo sapien
ggcctgttaccccttcggtgtgcag

SEQ ID NO: 5362392 - DNA, 25 bp, Homo sapien
tatgggtagtatccccttggcctgt

SEQ ID NO: 5362393 - DNA, 25 bp, Homo sapien
ttaccccttcggtgtgcagtgctga

SEQ ID NO: 5362394 - DNA, 25 bp, Homo sapien
tcttctcctggggtagctgagccct

SEQ ID NO: 5362395 - DNA, 25 bp, Homo sapien
ctcctggggtagctgagccctcaca

SEQ ID NO: 5362396 - DNA, 25 bp, Homo sapien
agccattcgtcttctcctggggtag

SEQ ID NO: 5362397 - DNA, 25 bp, Homo sapien
cattcgtcttctcctggggtagctg

SEQ ID NO: 5362398 - DNA, 25 bp, Homo sapien
tattctgcagcacgtcaaaggctgg

SEQ ID NO: 5362399 - DNA, 25 bp, Homo sapien
tctgcagcacgtcaaaggctggccc

SEQ ID NO: 5362400 - DNA, 25 bp, Homo sapien
ctgggttattctgcagcacgtcaaa

SEQ ID NO: 5362401 - DNA, 25 bp, Homo sapien
gagaacgtaattactgtgactaagt

SEQ ID NO: 5362402 - DNA, 25 bp, Homo sapien
gagcaaggtaggaacctaatctggg

SEQ ID NO: 5362403 - DNA, 25 bp, Homo sapien
ttcatcaacagtcactaatgtggga

SEQ ID NO: 5362404 - DNA, 25 bp, Homo sapien
cagtcactaatgtgggaagagcaag

SEQ ID NO: 5362405 - DNA, 25 bp, Homo sapien
gaagagcaaggtaggaacctaatct

SEQ ID NO: 5362406 - DNA, 25 bp, Homo sapien
tcttcaggaaatgcacaggagcctc

SEQ ID NO: 5362407 - DNA, 25 bp, Homo sapien
tgtatcgtgactaagggagaggctt

SEQ ID NO: 5362408 - DNA, 25 bp, Homo sapien
gccttgtaatacacagtctgtctca

SEQ ID NO: 5362409 - DNA, 25 bp, Homo sapien
tggcctttgaatcggtcatctcctg

SEQ ID NO: 5362410 - DNA, 25 bp, Homo sapien
tataggcacactattgtgccatcaa

SEQ ID NO: 5362411 - DNA, 25 bp, Homo sapien
catcaaatactaggccctatttagt

SEQ ID NO: 5362412 - DNA, 25 bp, Homo sapien
cattatgtaaagtggggtatccatc

SEQ ID NO: 5362413 - DNA, 25 bp, Homo sapien
aataatcacattatgtaaagtgggg

SEQ ID NO: 5362414 - DNA, 25 bp, Homo sapien
ggacagctctcgctattttgtgtct

SEQ ID NO: 5362415 - DNA, 25 bp, Homo sapien
ttgcttaggacagctctcgctattt

SEQ ID NO: 5362416 - DNA, 25 bp, Homo sapien
taggacagctctcgctattttgtgt

SEQ ID NO: 5362417 - DNA, 25 bp, Homo sapien
gcttaggacagctctcgctattttg

SEQ ID NO: 5362418 - DNA, 25 bp, Homo sapien
gcaggtgatgtcagatgtggtcaca

SEQ ID NO: 5362419 - DNA, 25 bp, Homo sapien
gttcacctgtagcacatgacaaatg

SEQ ID NO: 5362420 - DNA, 25 bp, Homo sapien
tattcacatgttcatagccccagac

SEQ ID NO: 5362421 - DNA, 25 bp, Homo sapien
agttggtcctaaatacactggtgct

SEQ ID NO: 5362422 - DNA, 25 bp, Homo sapien
ggtccaagcaagttagtttcagctg

SEQ ID NO: 5362423 - DNA, 25 bp, Homo sapien
gctgcttgaagcctccaatgctgta

SEQ ID NO: 5362424 - DNA, 25 bp, Homo sapien
tgctagtgcaatttgggccatgtcc

SEQ ID NO: 5362425 - DNA, 25 bp, Homo sapien
cagttgtgagcccttggtccaagca

SEQ ID NO: 5362426 - DNA, 25 bp, Homo sapien
cagtgcagggatgacctctcacata

SEQ ID NO: 5362427 - DNA, 25 bp, Homo sapien
tggagtccagcacgaatgtcgccct

SEQ ID NO: 5362428 - DNA, 25 bp, Homo sapien
ggatgacctctcacataggtaaccc

SEQ ID NO: 5362429 - DNA, 25 bp, Homo sapien
cagcacgaatgtcgccctctagagc

SEQ ID NO: 5362430 - DNA, 25 bp, Homo sapien
ttaacagagcggagtgacctgcgac

SEQ ID NO: 5362431 - DNA, 25 bp, Homo sapien
taagtcaacatgtgcgttctccggc

SEQ ID NO: 5362432 - DNA, 25 bp, Homo sapien
gatttcgctgccgaagagccgagga

SEQ ID NO: 5362433 - DNA, 25 bp, Homo sapien
ggcagttcttttcacgttggcgcaa

SEQ ID NO: 5362434 - DNA, 25 bp, Homo sapien
agttcttcctgcaagtggttctgtg

SEQ ID NO: 5362435 - DNA, 25 bp, Homo sapien
acacacttgagaacaccttcaattt

SEQ ID NO: 5362436 - DNA, 25 bp, Homo sapien
ttcttcctgcaagtggttctgtgtg

SEQ ID NO: 5362437 - DNA, 25 bp, Homo sapien
cacacttgagaacaccttcaatttt

SEQ ID NO: 5362438 - DNA, 25 bp, Homo sapien
aagagcccgtgaactcagccctggc

SEQ ID NO: 5362439 - DNA, 25 bp, Homo sapien
tagaaagagcccgtgaactcagccc

SEQ ID NO: 5362440 - DNA, 25 bp, Homo sapien
ccatttagaaagagcccgtgaactc

SEQ ID NO: 5362441 - DNA, 25 bp, Homo sapien
ctctctctacctggtacctcttcct

SEQ ID NO: 5362442 - DNA, 25 bp, Homo sapien
gggcatgggccacaatataacatgt

SEQ ID NO: 5362443 - DNA, 25 bp, Homo sapien
aaactgaagaactcaggaggagggc

SEQ ID NO: 5362444 - DNA, 25 bp, Homo sapien
caggaaccagcctttttacctgagt

SEQ ID NO: 5362445 - DNA, 25 bp, Homo sapien
ttccatgcttatagcacagaggttc

SEQ ID NO: 5362446 - DNA, 25 bp, Homo sapien
taaagcacttgacagtccccagacc

SEQ ID NO: 5362447 - DNA, 25 bp, Homo sapien
ttaacgctgctaaaaagtctgcacc

SEQ ID NO: 5362448 - DNA, 25 bp, Homo sapien
tactgagggagcatctggtaaaatc

SEQ ID NO: 5362449 - DNA, 25 bp, Homo sapien
ggtaaaatcacaccactgatgacag

SEQ ID NO: 5362450 - DNA, 25 bp, Homo sapien
gagaggcactaccagaataccagat

SEQ ID NO: 5362451 - DNA, 25 bp, Homo sapien
tggcacaggaaaaagcgccgctgag

SEQ ID NO: 5362452 - DNA, 25 bp, Homo sapien
gaggaggtgtcgcatatgccagccc

SEQ ID NO: 5362453 - DNA, 25 bp, Homo sapien
caacacatggataggagtgctctcc

SEQ ID NO: 5362454 - DNA, 25 bp, Homo sapien
tgctcccagggccacttagaagttt

SEQ ID NO: 5362455 - DNA, 25 bp, Homo sapien
gaagaccatttgtgactctccacgg

SEQ ID NO: 5362456 - DNA, 25 bp, Homo sapien
cacagagctgtactcaggagggtta

SEQ ID NO: 5362457 - DNA, 25 bp, Homo sapien
taaatctaacagtgccttccgacgg

SEQ ID NO: 5362458 - DNA, 25 bp, Homo sapien
attcctcaagtagcccgcaatgcca

SEQ ID NO: 5362459 - DNA, 25 bp, Homo sapien
cagtaactggaacaccagaggattc

SEQ ID NO: 5362460 - DNA, 25 bp, Homo sapien
acatcatggaagaggcggcatctca

SEQ ID NO: 5362461 - DNA, 25 bp, Homo sapien
tcacacattgcaagaacacagagcg

SEQ ID NO: 5362462 - DNA, 25 bp, Homo sapien
tgagtctgcagtggacatccattta

SEQ ID NO: 5362463 - DNA, 25 bp, Homo sapien
ttgagtctgcagtggacatccattt

SEQ ID NO: 5362464 - DNA, 25 bp, Homo sapien
tgacttgcattcactcccttagtta

SEQ ID NO: 5362465 - DNA, 25 bp, Homo sapien
cctccacaaaactgtgatgtttcaa

SEQ ID NO: 5362466 - DNA, 25 bp, Homo sapien
cccttagttagtgggccagccagaa

SEQ ID NO: 5362467 - DNA, 25 bp, Homo sapien
tgcagagctcagagcgtgtaattga

SEQ ID NO: 5362468 - DNA, 25 bp, Homo sapien
caagctttggctcggagccagtaca

SEQ ID NO: 5362469 - DNA, 25 bp, Homo sapien
tgagaacgtagagttcctggccgga

SEQ ID NO: 5362470 - DNA, 25 bp, Homo sapien
ttgccataggaaacccagccatgtg

SEQ ID NO: 5362471 - DNA, 25 bp, Homo sapien
gaaagcacaaacaagggaaccttgc

SEQ ID NO: 5362472 - DNA, 25 bp, Homo sapien
gcttaaaactcttccaccagggagc

SEQ ID NO: 5362473 - DNA, 25 bp, Homo sapien
acctccattgctggcttaaaactct

SEQ ID NO: 5362474 - DNA, 25 bp, Homo sapien
gaagcccctgctagggtagagcaag

SEQ ID NO: 5362475 - DNA, 25 bp, Homo sapien
caactttacgcaatgccctaatggg

SEQ ID NO: 5362476 - DNA, 25 bp, Homo sapien
gacgcaactcgccaacttttggaag

SEQ ID NO: 5362477 - DNA, 25 bp, Homo sapien
gggaatttagcgttgcgacgcaact

SEQ ID NO: 5362478 - DNA, 25 bp, Homo sapien
ccctggtgtctggagatcaaggaca

SEQ ID NO: 5362479 - DNA, 25 bp, Homo sapien
gacacatgcctcatagattgctgag

SEQ ID NO: 5362480 - DNA, 25 bp, Homo sapien
gcaacatttccatgggtgccaccga

SEQ ID NO: 5362481 - DNA, 25 bp, Homo sapien
tcttgagaccccactatcatgacca

SEQ ID NO: 5362482 - DNA, 25 bp, Homo sapien
ggcttgcctatggatgactatagca

SEQ ID NO: 5362483 - DNA, 25 bp, Homo sapien
tcaactgtgccctgaccgttgcctg

SEQ ID NO: 5362484 - DNA, 25 bp, Homo sapien
aaacaatgtcttgggtaaggcttgc

SEQ ID NO: 5362485 - DNA, 25 bp, Homo sapien
catctttcaatcaggtcaactgtgc

SEQ ID NO: 5362486 - DNA, 25 bp, Homo sapien
catttcctcgcatgccaaataggga

SEQ ID NO: 5362487 - DNA, 25 bp, Homo sapien
cacgtttcataggagggacacatgg

SEQ ID NO: 5362488 - DNA, 25 bp, Homo sapien
gatttaccccgagacaatggcagaa

SEQ ID NO: 5362489 - DNA, 25 bp, Homo sapien
tggaggattccagccacaggagtct

SEQ ID NO: 5362490 - DNA, 25 bp, Homo sapien
tttacaaaagcaggcgacaagtcag

SEQ ID NO: 5362491 - DNA, 25 bp, Homo sapien
ggcagggtcctgacaactcttgatt

SEQ ID NO: 5362492 - DNA, 25 bp, Homo sapien
gttttccaacccttagactgcatcc

SEQ ID NO: 5362493 - DNA, 25 bp, Homo sapien
aagtcagacctagcctgattgggcc

SEQ ID NO: 5362494 - DNA, 25 bp, Homo sapien
gtcctttgataaacaccaactggca

SEQ ID NO: 5362495 - DNA, 25 bp, Homo sapien
tccgttgtcctttgataaacaccaa

SEQ ID NO: 5362496 - DNA, 25 bp, Homo sapien
catggagcatttttccttcaattgc

SEQ ID NO: 5362497 - DNA, 25 bp, Homo sapien
ctctcttcctccgttgtcctttgat

SEQ ID NO: 5362498 - DNA, 25 bp, Homo sapien
gagctagcggtataccttaataaag

SEQ ID NO: 5362499 - DNA, 25 bp, Homo sapien
gacccgaggtctttgtgccatgctc

SEQ ID NO: 5362500 - DNA, 25 bp, Homo sapien
tgccatgctcggcatatcaagtgcc

SEQ ID NO: 5362501 - DNA, 25 bp, Homo sapien
tcttcaaattgtactgagctagcgg

SEQ ID NO: 5362502 - DNA, 25 bp, Homo sapien
gtgtcagaagtcaggccagtggtta

SEQ ID NO: 5362503 - DNA, 25 bp, Homo sapien
aatgtatggtgtcagaagtcaggcc

SEQ ID NO: 5362504 - DNA, 25 bp, Homo sapien
agcaaaacaaatgtatggtgtcaga

SEQ ID NO: 5362505 - DNA, 25 bp, Homo sapien
tgtcagaagtcaggccagtggttac

SEQ ID NO: 5362506 - DNA, 25 bp, Homo sapien
ttcacattctccgtcttgtcctggg

SEQ ID NO: 5362507 - DNA, 25 bp, Homo sapien
gcagttagaggatgtggtcactcca

SEQ ID NO: 5362508 - DNA, 25 bp, Homo sapien
tatgtggaaccccaataaagcttcc

SEQ ID NO: 5362509 - DNA, 25 bp, Homo sapien
ccttcaggagcattgttcacattct

SEQ ID NO: 5362510 - DNA, 25 bp, Homo sapien
gttcacgttgctcccctgatgtcag

SEQ ID NO: 5362511 - DNA, 25 bp, Homo sapien
tgtgttcacgttgctcccctgatgt

SEQ ID NO: 5362512 - DNA, 25 bp, Homo sapien
tgttcacgttgctcccctgatgtca

SEQ ID NO: 5362513 - DNA, 25 bp, Homo sapien
ctgtgttcacgttgctcccctgatg

SEQ ID NO: 5362514 - DNA, 25 bp, Homo sapien
acaggaaaaaccacgcatatgattt

SEQ ID NO: 5362515 - DNA, 25 bp, Homo sapien
ggaaaaaccacgcatatgattttca

SEQ ID NO: 5362516 - DNA, 25 bp, Homo sapien
aaaccacgcatatgattttcaggca

SEQ ID NO: 5362517 - DNA, 25 bp, Homo sapien
aaaaaccacgcatatgattttcagg

SEQ ID NO: 5362518 - DNA, 25 bp, Homo sapien
gaggaagaggaagagaatgccttcc

SEQ ID NO: 5362519 - DNA, 25 bp, Homo sapien
ggaggaagaggaagagaatgccttc

SEQ ID NO: 5362520 - DNA, 25 bp, Homo sapien
tggaggaagaggaagagaatgcctt

SEQ ID NO: 5362521 - DNA, 25 bp, Homo sapien
ctggaggaagaggaagagaatgcct

SEQ ID NO: 5362522 - DNA, 25 bp, Homo sapien
tctatcttgtagttacgggctcaat

SEQ ID NO: 5362523 - DNA, 25 bp, Homo sapien
tagttatctatcttgtagttacggg

SEQ ID NO: 5362524 - DNA, 25 bp, Homo sapien
tctgaatagttatctatcttgtagt

SEQ ID NO: 5362525 - DNA, 25 bp, Homo sapien
tagttacgggctcaattacttcaat

SEQ ID NO: 5362526 - DNA, 25 bp, Homo sapien
ctgctggacagaggctttaggagcc

SEQ ID NO: 5362527 - DNA, 25 bp, Homo sapien
tgctttgcattaggcttggtcaagt

SEQ ID NO: 5362528 - DNA, 25 bp, Homo sapien
ggcttggtcaagtgactttctttgg

SEQ ID NO: 5362529 - DNA, 25 bp, Homo sapien
cactgctggacagaggctttaggag

SEQ ID NO: 5362530 - DNA, 25 bp, Homo sapien
tacactgcataatggaatgccctgt

SEQ ID NO: 5362531 - DNA, 25 bp, Homo sapien
ctggttgtggcagaggacacatgaa

SEQ ID NO: 5362532 - DNA, 25 bp, Homo sapien
gacacatgaatttttatacccctaa

SEQ ID NO: 5362533 - DNA, 25 bp, Homo sapien
ggccaccaagtcactaggctggttg

SEQ ID NO: 5362534 - DNA, 25 bp, Homo sapien
caattgctagcattaaaggttgtca

SEQ ID NO: 5362535 - DNA, 25 bp, Homo sapien
gatgtagcaaattcccctatgaaca

SEQ ID NO: 5362536 - DNA, 25 bp, Homo sapien
gatagcccaccttgaaaacagtgtc

SEQ ID NO: 5362537 - DNA, 25 bp, Homo sapien
cacttaggcccttacagacatacag

SEQ ID NO: 5362538 - DNA, 25 bp, Homo sapien
gagtacccgtgtctcagagttccct

SEQ ID NO: 5362539 - DNA, 25 bp, Homo sapien
tagctgattatatgtcctcctggac

SEQ ID NO: 5362540 - DNA, 25 bp, Homo sapien
cactgttgccatgagttgagtaccc

SEQ ID NO: 5362541 - DNA, 25 bp, Homo sapien
tccggtggcagcaacgaatatttca

SEQ ID NO: 5362542 - DNA, 25 bp, Homo sapien
ttaacaccggtagaatgaaaagtca

SEQ ID NO: 5362543 - DNA, 25 bp, Homo sapien
gcgcatccatctttgttaacaccgg

SEQ ID NO: 5362544 - DNA, 25 bp, Homo sapien
ggcccattcaggtgtgcgcatccat

SEQ ID NO: 5362545 - DNA, 25 bp, Homo sapien
taatcacagatagatagccagtcca

SEQ ID NO: 5362546 - DNA, 25 bp, Homo sapien
ccggagattcgggagaagtcgcttc

SEQ ID NO: 5362547 - DNA, 25 bp, Homo sapien
gctaattcgacttctgaaggccgct

SEQ ID NO: 5362548 - DNA, 25 bp, Homo sapien
gaatgcgatctaaggaagccgagct

SEQ ID NO: 5362549 - DNA, 25 bp, Homo sapien
gaaggccgctctagatgttcaaata

SEQ ID NO: 5362550 - DNA, 25 bp, Homo sapien
gaggcgctatcacgtttcatcaggc

SEQ ID NO: 5362551 - DNA, 25 bp, Homo sapien
tgtatattaatgaaaggcggcccca

SEQ ID NO: 5362552 - DNA, 25 bp, Homo sapien
ttgagccggatccaagcaaaatcgg

SEQ ID NO: 5362553 - DNA, 25 bp, Homo sapien
ttatcgaggagcacaacgttttggg

SEQ ID NO: 5362554 - DNA, 25 bp, Homo sapien
gagttcacttaactgcgctcggcag

SEQ ID NO: 5362555 - DNA, 25 bp, Homo sapien
attttaatcggagcgcaccggcggc

SEQ ID NO: 5362556 - DNA, 25 bp, Homo sapien
acgatggtatctcacccggcaagca

SEQ ID NO: 5362557 - DNA, 25 bp, Homo sapien
ggcaggcccgttcacattttaatcg

SEQ ID NO: 5362558 - DNA, 25 bp, Homo sapien
gctgagaaagcatttgtcgccgcca

SEQ ID NO: 5362559 - DNA, 25 bp, Homo sapien
aggttcctctgtgcagcgtttccgc

SEQ ID NO: 5362560 - DNA, 25 bp, Homo sapien
ttcattggaaatccccgaggagggc

SEQ ID NO: 5362561 - DNA, 25 bp, Homo sapien
gcacacgcacgctcattaagagcca

SEQ ID NO: 5362562 - DNA, 25 bp, Homo sapien
gggaaggtcggactgattgcttttc

SEQ ID NO: 5362563 - DNA, 25 bp, Homo sapien
aaatacatcgcacggctccgctgac

SEQ ID NO: 5362564 - DNA, 25 bp, Homo sapien
tttcaaatacatcgcacggctccgc

SEQ ID NO: 5362565 - DNA, 25 bp, Homo sapien
tgcttttcaaatacatcgcacggct

SEQ ID NO: 5362566 - DNA, 25 bp, Homo sapien
tgagccagtcattccgagcctgcca

SEQ ID NO: 5362567 - DNA, 25 bp, Homo sapien
ggccctggtgctcgacttccttgta

SEQ ID NO: 5362568 - DNA, 25 bp, Homo sapien
agcaaccaatcggaacggccggaag

SEQ ID NO: 5362569 - DNA, 25 bp, Homo sapien
cgctcgcggcggagggtaaacattc

SEQ ID NO: 5362570 - DNA, 25 bp, Homo sapien
cggaggaggaggcggcgaaggcggc

SEQ ID NO: 5362571 - DNA, 25 bp, Homo sapien
gaggaggcggcgaaggcggcggggc

SEQ ID NO: 5362572 - DNA, 25 bp, Homo sapien
gcggaggaggaggcggcgaaggcgg

SEQ ID NO: 5362573 - DNA, 25 bp, Homo sapien
aggaggaggcggcgaaggcggcggg

SEQ ID NO: 5362574 - DNA, 25 bp, Homo sapien
ctctattgtgcactcggacgcggca

SEQ ID NO: 5362575 - DNA, 25 bp, Homo sapien
tggtccagagcgacttcatgcaggg

SEQ ID NO: 5362576 - DNA, 25 bp, Homo sapien
agcaacggcggccatatgctgagcc

SEQ ID NO: 5362577 - DNA, 25 bp, Homo sapien
tatgctgagccacgcgcaccagtgg

SEQ ID NO: 5362578 - DNA, 25 bp, Homo sapien
cgccgcgcacctcccgtccatggcc

SEQ ID NO: 5362579 - DNA, 25 bp, Homo sapien
cgcgcacctcccgtccatggccggg

SEQ ID NO: 5362580 - DNA, 25 bp, Homo sapien
gccgcgcacctcccgtccatggccg

SEQ ID NO: 5362581 - DNA, 25 bp, Homo sapien
ccgcgcacctcccgtccatggccgg

SEQ ID NO: 5362582 - DNA, 25 bp, Homo sapien
ctgccgccgccgcgccgaccctgca

SEQ ID NO: 5362583 - DNA, 25 bp, Homo sapien
tgccgccgccgcgccgaccctgcac

SEQ ID NO: 5362584 - DNA, 25 bp, Homo sapien
gctgccgccgccgcgccgaccctgc

SEQ ID NO: 5362585 - DNA, 25 bp, Homo sapien
tgagatgacctacacggcagcggtg

SEQ ID NO: 5362586 - DNA, 25 bp, Homo sapien
gcacgaaaactgcactcgtgaggtt

SEQ ID NO: 5362587 - DNA, 25 bp, Homo sapien
taaagaagggtgaagatgcctgacg

SEQ ID NO: 5362588 - DNA, 25 bp, Homo sapien
aaaagcataataaacacccagactg

SEQ ID NO: 5362589 - DNA, 25 bp, Homo sapien
taagggtatcttttgatgtgatcat

SEQ ID NO: 5362590 - DNA, 25 bp, Homo sapien
aatagtctgtgtctgatgcgtaaac

SEQ ID NO: 5362591 - DNA, 25 bp, Homo sapien
cagttgttaggtaataagggtatct

SEQ ID NO: 5362592 - DNA, 25 bp, Homo sapien
gattccgtaagagctgatcgagaaa

SEQ ID NO: 5362593 - DNA, 25 bp, Homo sapien
gaactgttcgttattgatcttagcg

SEQ ID NO: 5362594 - DNA, 25 bp, Homo sapien
agcgattccctttgctgccctgtag

SEQ ID NO: 5362595 - DNA, 25 bp, Homo sapien
tctttgttccgaagagaactgttcg

SEQ ID NO: 5362596 - DNA, 25 bp, Homo sapien
gctcatgaccatgctcataatctgt

SEQ ID NO: 5362597 - DNA, 25 bp, Homo sapien
ctgaagttcacccatgtgacctcct

SEQ ID NO: 5362598 - DNA, 25 bp, Homo sapien
gagggcctgaagttcacccatgtga

SEQ ID NO: 5362599 - DNA, 25 bp, Homo sapien
aagttcacccatgtgacctcctggg

SEQ ID NO: 5362600 - DNA, 25 bp, Homo sapien
agctcctcagggctgctggtctgag

SEQ ID NO: 5362601 - DNA, 25 bp, Homo sapien
ggtaggcttgacgttgatttcaata

SEQ ID NO: 5362602 - DNA, 25 bp, Homo sapien
gcgtttgcatcctgaactttgcagc

SEQ ID NO: 5362603 - DNA, 25 bp, Homo sapien
aaagcagaagcctctgcgtttgcat

SEQ ID NO: 5362604 - DNA, 25 bp, Homo sapien
tgacgttgatttcaataaggaaagc

SEQ ID NO: 5362605 - DNA, 25 bp, Homo sapien
cagtcagcagagtaatgagcaaacc

SEQ ID NO: 5362606 - DNA, 25 bp, Homo sapien
tcccaggagaattgagttgccgccc

SEQ ID NO: 5362607 - DNA, 25 bp, Homo sapien
gcctgtgggtctctgcgcgacgttt

SEQ ID NO: 5362608 - DNA, 25 bp, Homo sapien
gaggttctggcgataactttctgca

SEQ ID NO: 5362609 - DNA, 25 bp, Homo sapien
agaagaagtcagagcggaacagcct

SEQ ID NO: 5362610 - DNA, 25 bp, Homo sapien
gagatgcgctgacttgttccaaccc

SEQ ID NO: 5362611 - DNA, 25 bp, Homo sapien
gaacagcctagtgcactggcagggc

SEQ ID NO: 5362612 - DNA, 25 bp, Homo sapien
tgtcttcccgaaggatgcggcgcgt

SEQ ID NO: 5362613 - DNA, 25 bp, Homo sapien
gggaagacaccgaggtctaggcagc

SEQ ID NO: 5362614 - DNA, 25 bp, Homo sapien
tgggaagacaccgaggtctaggcag

SEQ ID NO: 5362615 - DNA, 25 bp, Homo sapien
ctgggaagacaccgaggtctaggca

SEQ ID NO: 5362616 - DNA, 25 bp, Homo sapien
cggctttgtggaagtttcgcgccgc

SEQ ID NO: 5362617 - DNA, 25 bp, Homo sapien
ctgcggagtggaggcaaggccggag

SEQ ID NO: 5362618 - DNA, 25 bp, Homo sapien
ttgtggaagtttcgcgccgccaggc

SEQ ID NO: 5362619 - DNA, 25 bp, Homo sapien
gccggcggctttgtggaagtttcgc

SEQ ID NO: 5362620 - DNA, 25 bp, Homo sapien
cattaagtcggctggaacattgcac

SEQ ID NO: 5362621 - DNA, 25 bp, Homo sapien
caggactgcctctccgcataaggca

SEQ ID NO: 5362622 - DNA, 25 bp, Homo sapien
gaccacacattagctctgtcctgca

SEQ ID NO: 5362623 - DNA, 25 bp, Homo sapien
gacattgagatggaagcaaaaactt

SEQ ID NO: 5362624 - DNA, 25 bp, Homo sapien
tatcaaggtctcagaaggagggtga

SEQ ID NO: 5362625 - DNA, 25 bp, Homo sapien
ggtgacaaaacccaccacgctcatt

SEQ ID NO: 5362626 - DNA, 25 bp, Homo sapien
cattgtacccaggtttagacaggga

SEQ ID NO: 5362627 - DNA, 25 bp, Homo sapien
aggggggctagccagatttgttcct

SEQ ID NO: 5362628 - DNA, 25 bp, Homo sapien
tcagaaagcacagtatcacccagaa

SEQ ID NO: 5362629 - DNA, 25 bp, Homo sapien
gtacgccttaaagacttatgccaag

SEQ ID NO: 5362630 - DNA, 25 bp, Homo sapien
caaatttcaaaatcgctcaggcaag

SEQ ID NO: 5362631 - DNA, 25 bp, Homo sapien
gaagtggtggacactcaaaggcacg

SEQ ID NO: 5362632 - DNA, 25 bp, Homo sapien
gaggtcagcagtatttacatatgta

SEQ ID NO: 5362633 - DNA, 25 bp, Homo sapien
ctgaaacgggctttctgcttttcgg

SEQ ID NO: 5362634 - DNA, 25 bp, Homo sapien
aggtcagcagtatttacatatgtac

SEQ ID NO: 5362635 - DNA, 25 bp, Homo sapien
ccacgggctttcctctatttatcaa

SEQ ID NO: 5362636 - DNA, 25 bp, Homo sapien
tgatcccacgggctttcctctattt

SEQ ID NO: 5362637 - DNA, 25 bp, Homo sapien
gatcccacgggctttcctctattta

SEQ ID NO: 5362638 - DNA, 25 bp, Homo sapien
tcccacgggctttcctctatttatc

SEQ ID NO: 5362639 - DNA, 25 bp, Homo sapien
cccagggaatgaagcttccacctcc

SEQ ID NO: 5362640 - DNA, 25 bp, Homo sapien
cataacatacagaatcctctgtggg

SEQ ID NO: 5362641 - DNA, 25 bp, Homo sapien
aacttgaggaatcccagtgtgagtg

SEQ ID NO: 5362642 - DNA, 25 bp, Homo sapien
aatggtaacttgaggaatcccagtg

SEQ ID NO: 5362643 - DNA, 25 bp, Homo sapien
tttctccaaatgactgtgtgcaggc

SEQ ID NO: 5362644 - DNA, 25 bp, Homo sapien
gattttctccaaatgactgtgtgca

SEQ ID NO: 5362645 - DNA, 25 bp, Homo sapien
aaatgactgtgtgcaggcggaaagc

SEQ ID NO: 5362646 - DNA, 25 bp, Homo sapien
ccaaatgactgtgtgcaggcggaaa

SEQ ID NO: 5362647 - DNA, 25 bp, Homo sapien
taggagccaggttagttcacaactg

SEQ ID NO: 5362648 - DNA, 25 bp, Homo sapien
cgtgtagccatatatgacagggcac

SEQ ID NO: 5362649 - DNA, 25 bp, Homo sapien
gcagcatcccgaggtcacattcaga

SEQ ID NO: 5362650 - DNA, 25 bp, Homo sapien
cacgttggctaagcaggagtccata

SEQ ID NO: 5362651 - DNA, 25 bp, Homo sapien
agagcccgctgactgttcccccggg

SEQ ID NO: 5362652 - DNA, 25 bp, Homo sapien
cgtgcccgggttgtcagaggtgtgg

SEQ ID NO: 5362653 - DNA, 25 bp, Homo sapien
cgcagacgtgcccgggttgtcagag

SEQ ID NO: 5362654 - DNA, 25 bp, Homo sapien
ggctggaagtccagcgtctcggcct

SEQ ID NO: 5362655 - DNA, 25 bp, Homo sapien
ctcctccgccgacaaagtgggtggt

SEQ ID NO: 5362656 - DNA, 25 bp, Homo sapien
gatcagaagagcgttcgagaagccg

SEQ ID NO: 5362657 - DNA, 25 bp, Homo sapien
ttccccgggaggctcagttaggcag

SEQ ID NO: 5362658 - DNA, 25 bp, Homo sapien
tcacagcggctagttgggcatttcc

SEQ ID NO: 5362659 - DNA, 25 bp, Homo sapien
ggctagggcttccacttcccaaatg

SEQ ID NO: 5362660 - DNA, 25 bp, Homo sapien
tgctctgaaattccagctggcgggt

SEQ ID NO: 5362661 - DNA, 25 bp, Homo sapien
tggggcctgctctgaaattccagct

SEQ ID NO: 5362662 - DNA, 25 bp, Homo sapien
ctatccaccccgcacccctgctgga

SEQ ID NO: 5362663 - DNA, 25 bp, Homo sapien
ggtgccaggttctaggagacaaata

SEQ ID NO: 5362664 - DNA, 25 bp, Homo sapien
cagagtcaataaacccagagccagc

SEQ ID NO: 5362665 - DNA, 25 bp, Homo sapien
tctgaacaatgtgtaggcccaccta

SEQ ID NO: 5362666 - DNA, 25 bp, Homo sapien
aaatagcttctggtattgtgcccca

SEQ ID NO: 5362667 - DNA, 25 bp, Homo sapien
ccttgctgggagttataagatgagc

SEQ ID NO: 5362668 - DNA, 25 bp, Homo sapien
gggcagatcccaagctgaacttgtt

SEQ ID NO: 5362669 - DNA, 25 bp, Homo sapien
taagatgagccttgtggcagcctct

SEQ ID NO: 5362670 - DNA, 25 bp, Homo sapien
agttctcagggtgcctcttggtgcc

SEQ ID NO: 5362671 - DNA, 25 bp, Homo sapien
cccggtaaacacatcagaaccagat

SEQ ID NO: 5362672 - DNA, 25 bp, Homo sapien
agcccggtaaacacatcagaaccag

SEQ ID NO: 5362673 - DNA, 25 bp, Homo sapien
gcccggtaaacacatcagaaccaga

SEQ ID NO: 5362674 - DNA, 25 bp, Homo sapien
ggcacggtccttccattccacatac

SEQ ID NO: 5362675 - DNA, 25 bp, Homo sapien
atcaaagaccagagcacacacttcg

SEQ ID NO: 5362676 - DNA, 25 bp, Homo sapien
catacagacaggaaaccggcctctt

SEQ ID NO: 5362677 - DNA, 25 bp, Homo sapien
cggcctcttcgggacaacatttgaa

SEQ ID NO: 5362678 - DNA, 25 bp, Homo sapien
caggggcgagaaatcctgcttccaa

SEQ ID NO: 5362679 - DNA, 25 bp, Homo sapien
tgcaggggcgagaaatcctgcttcc

SEQ ID NO: 5362680 - DNA, 25 bp, Homo sapien
ctgcaggggcgagaaatcctgcttc

SEQ ID NO: 5362681 - DNA, 25 bp, Homo sapien
gcaggggcgagaaatcctgcttcca

SEQ ID NO: 5362682 - DNA, 25 bp, Homo sapien
aggtctccgcgctggttctcaaggg

SEQ ID NO: 5362683 - DNA, 25 bp, Homo sapien
cttgacagtgcgcctccagactggc

SEQ ID NO: 5362684 - DNA, 25 bp, Homo sapien
ttctcaagggcgaggagacgcatcc

SEQ ID NO: 5362685 - DNA, 25 bp, Homo sapien
cgggaaagttcacagccaaggagag

SEQ ID NO: 5362686 - DNA, 25 bp, Homo sapien
ggttagaaagtcttgggcgccatct

SEQ ID NO: 5362687 - DNA, 25 bp, Homo sapien
taacgggagcagcaaaaagttgacg

SEQ ID NO: 5362688 - DNA, 25 bp, Homo sapien
tctttttgttccgggccaggagcac

SEQ ID NO: 5362689 - DNA, 25 bp, Homo sapien
gccaggagcactttcacaagtggtt

SEQ ID NO: 5362690 - DNA, 25 bp, Homo sapien
gaaaggaacagccacgcaattaagg

SEQ ID NO: 5362691 - DNA, 25 bp, Homo sapien
agggagttcaaagaggataatggca

SEQ ID NO: 5362692 - DNA, 25 bp, Homo sapien
gataatggcaaggaagcaattgagg

SEQ ID NO: 5362693 - DNA, 25 bp, Homo sapien
ccacgcaattaaggagtctgcagcc

SEQ ID NO: 5362694 - DNA, 25 bp, Homo sapien
tgggaggaaggggtagtgtcctgaa

SEQ ID NO: 5362695 - DNA, 25 bp, Homo sapien
ctgggaggaaggggtagtgtcctga

SEQ ID NO: 5362696 - DNA, 25 bp, Homo sapien
tcccagccaccgtgagagccagtgg

SEQ ID NO: 5362697 - DNA, 25 bp, Homo sapien
gttcccagccaccgtgagagccagt

SEQ ID NO: 5362698 - DNA, 25 bp, Homo sapien
agggttcccagccaccgtgagagcc

SEQ ID NO: 5362699 - DNA, 25 bp, Homo sapien
ctgaaccgctagagctctgtgctgc

SEQ ID NO: 5362700 - DNA, 25 bp, Homo sapien
attgggaacacccagcacctcagtc

SEQ ID NO: 5362701 - DNA, 25 bp, Homo sapien
gggattgggaacacccagcacctca

SEQ ID NO: 5362702 - DNA, 25 bp, Homo sapien
ctttgccacttgctgaaccgctaga

SEQ ID NO: 5362703 - DNA, 25 bp, Homo sapien
tgtctcagctaggttaagagaaacc

SEQ ID NO: 5362704 - DNA, 25 bp, Homo sapien
aagttgcatccacatttgggctggg

SEQ ID NO: 5362705 - DNA, 25 bp, Homo sapien
gtgtgtaaaggtggctggtgattga

SEQ ID NO: 5362706 - DNA, 25 bp, Homo sapien
ctcagctaggttaagagaaaccacc

SEQ ID NO: 5362707 - DNA, 25 bp, Homo sapien
ccttgtggaaaactactctttgctg

SEQ ID NO: 5362708 - DNA, 25 bp, Homo sapien
ttccttgtggaaaactactctttgc

SEQ ID NO: 5362709 - DNA, 25 bp, Homo sapien
gtggaaaactactctttgctgtgga

SEQ ID NO: 5362710 - DNA, 25 bp, Homo sapien
ttgtggaaaactactctttgctgtg

SEQ ID NO: 5362711 - DNA, 25 bp, Homo sapien
caattcccgactcccagtacagagg

SEQ ID NO: 5362712 - DNA, 25 bp, Homo sapien
taacaagtgcaattcccgactccca

SEQ ID NO: 5362713 - DNA, 25 bp, Homo sapien
gcacctgggagactctaacaagtgc

SEQ ID NO: 5362714 - DNA, 25 bp, Homo sapien
gagactctaacaagtgcaattcccg

SEQ ID NO: 5362715 - DNA, 25 bp, Homo sapien
tttaaaggcgcagtctccccgacat

SEQ ID NO: 5362716 - DNA, 25 bp, Homo sapien
tttcctcagaggattttaaaggcgc

SEQ ID NO: 5362717 - DNA, 25 bp, Homo sapien
gaggattttaaaggcgcagtctccc

SEQ ID NO: 5362718 - DNA, 25 bp, Homo sapien
ctcagaggattttaaaggcgcagtc

SEQ ID NO: 5362719 - DNA, 25 bp, Homo sapien
ctgggctccgatcaaaccccctgat

SEQ ID NO: 5362720 - DNA, 25 bp, Homo sapien
ggctccgatcaaaccccctgatgat

SEQ ID NO: 5362721 - DNA, 25 bp, Homo sapien
tgggctccgatcaaaccccctgatg

SEQ ID NO: 5362722 - DNA, 25 bp, Homo sapien
gggctccgatcaaaccccctgatga

SEQ ID NO: 5362723 - DNA, 25 bp, Homo sapien
gaggcatactttctaactccatgat

SEQ ID NO: 5362724 - DNA, 25 bp, Homo sapien
agagtgaggcatactttctaactcc

SEQ ID NO: 5362725 - DNA, 25 bp, Homo sapien
gtgaggcatactttctaactccatg

SEQ ID NO: 5362726 - DNA, 25 bp, Homo sapien
ggcatactttctaactccatgattt

SEQ ID NO: 5362727 - DNA, 25 bp, Homo sapien
tcaggggttggctaagggcattcat

SEQ ID NO: 5362728 - DNA, 25 bp, Homo sapien
ctgtaccaaggcctgtacaattcga

SEQ ID NO: 5362729 - DNA, 25 bp, Homo sapien
aaggcctgtacaattcgactcaggg

SEQ ID NO: 5362730 - DNA, 25 bp, Homo sapien
taccaaggcctgtacaattcgactc

SEQ ID NO: 5362731 - DNA, 25 bp, Homo sapien
gagctggcttgcagccagaccatcc

SEQ ID NO: 5362732 - DNA, 25 bp, Homo sapien
ctctcgtcgaaccttggtgaagcct

SEQ ID NO: 5362733 - DNA, 25 bp, Homo sapien
tcctcattctctcgtcgaaccttgg

SEQ ID NO: 5362734 - DNA, 25 bp, Homo sapien
tcctcatgacactccacgtcctggt

SEQ ID NO: 5362735 - DNA, 25 bp, Homo sapien
cagcacataagcgacggatcggcag

SEQ ID NO: 5362736 - DNA, 25 bp, Homo sapien
gggttgtgtgtttccacacccacag

SEQ ID NO: 5362737 - DNA, 25 bp, Homo sapien
cataagcgacggatcggcagtatgg

SEQ ID NO: 5362738 - DNA, 25 bp, Homo sapien
ggcagtatgggttgtgtgtgcctgc

SEQ ID NO: 5362739 - DNA, 25 bp, Homo sapien
gcaatattgcaaggctgcccgtggc

SEQ ID NO: 5362740 - DNA, 25 bp, Homo sapien
tggccaggaaggtaaatgctaactt

SEQ ID NO: 5362741 - DNA, 25 bp, Homo sapien
taacttttcagcctgcgccaagtgg

SEQ ID NO: 5362742 - DNA, 25 bp, Homo sapien
tgcccgtggccaggaaggtaaatgc

SEQ ID NO: 5362743 - DNA, 25 bp, Homo sapien
cacggaaaataacaggcggccggag

SEQ ID NO: 5362744 - DNA, 25 bp, Homo sapien
taaggtggaaaccaatgcatcactg

SEQ ID NO: 5362745 - DNA, 25 bp, Homo sapien
tgcatcactgcccttgatggatttg

SEQ ID NO: 5362746 - DNA, 25 bp, Homo sapien
gaactgctcacataacactcgcagg

SEQ ID NO: 5362747 - DNA, 25 bp, Homo sapien
gtcctcactcatcaaggagtctgct

SEQ ID NO: 5362748 - DNA, 25 bp, Homo sapien
caagagcacgtgaccaccttgtcca

SEQ ID NO: 5362749 - DNA, 25 bp, Homo sapien
gaattgtagaagaaagacgagtgaa

SEQ ID NO: 5362750 - DNA, 25 bp, Homo sapien
aaggagcaactgaggaatctcccac

SEQ ID NO: 5362751 - DNA, 25 bp, Homo sapien
tctggaggatcccaagaatctggat

SEQ ID NO: 5362752 - DNA, 25 bp, Homo sapien
agaatttccaaactgcctgatgagg

SEQ ID NO: 5362753 - DNA, 25 bp, Homo sapien
agatatgccagaaaagacccacaaa

SEQ ID NO: 5362754 - DNA, 25 bp, Homo sapien
ggatgggaagccagaagatatgcca

SEQ ID NO: 5362755 - DNA, 25 bp, Homo sapien
cagtgtcatgagctgaagctctaac

SEQ ID NO: 5362756 - DNA, 25 bp, Homo sapien
aggaagactcctttaacgccagcca

SEQ ID NO: 5362757 - DNA, 25 bp, Homo sapien
agccagtgtcatgagctgaagctct

SEQ ID NO: 5362758 - DNA, 25 bp, Homo sapien
tcctttaacgccagccaagagatgt

SEQ ID NO: 5362759 - DNA, 25 bp, Homo sapien
ttttacaaagcgcaagtgactggta

SEQ ID NO: 5362760 - DNA, 25 bp, Homo sapien
gccacagtcaactcccattttgaca

SEQ ID NO: 5362761 - DNA, 25 bp, Homo sapien
gactggtaatgaagacgtgactgat

SEQ ID NO: 5362762 - DNA, 25 bp, Homo sapien
gttccggccggacatggccctctgt

SEQ ID NO: 5362763 - DNA, 25 bp, Homo sapien
tggtccttgcattcccacgccaaag

SEQ ID NO: 5362764 - DNA, 25 bp, Homo sapien
ttctgcttctactcttgactggtcc

SEQ ID NO: 5362765 - DNA, 25 bp, Homo sapien
tccgccctcacgaaagccagttctg

SEQ ID NO: 5362766 - DNA, 25 bp, Homo sapien
ggcatcattggccactccgccctca

SEQ ID NO: 5362767 - DNA, 25 bp, Homo sapien
tctggaccccgttgggaccatggac

SEQ ID NO: 5362768 - DNA, 25 bp, Homo sapien
tgaaacgcagctttgttgggccttg

SEQ ID NO: 5362769 - DNA, 25 bp, Homo sapien
ttaaagaatagattccctggctggc

SEQ ID NO: 5362770 - DNA, 25 bp, Homo sapien
caatgcttgtgaccgtgacaggcca

SEQ ID NO: 5362771 - DNA, 25 bp, Homo sapien
caggacctatattcataggcagcag

SEQ ID NO: 5362772 - DNA, 25 bp, Homo sapien
ggtcactcggaaggtcacacttgtg

SEQ ID NO: 5362773 - DNA, 25 bp, Homo sapien
gtgcctgcaggacctatattcatag

SEQ ID NO: 5362774 - DNA, 25 bp, Homo sapien
gatctgaggtagcgcagggtcactc

SEQ ID NO: 5362775 - DNA, 25 bp, Homo sapien
caatttaggttctatcatgaagccc

SEQ ID NO: 5362776 - DNA, 25 bp, Homo sapien
aagtagggagcattatagacatggc

SEQ ID NO: 5362777 - DNA, 25 bp, Homo sapien
tgtaactgatgaaatgcaacctctg

SEQ ID NO: 5362778 - DNA, 25 bp, Homo sapien
aatctagggtattatgaaaatggcc

SEQ ID NO: 5362779 - DNA, 25 bp, Homo sapien
cttggagcaatctagggttttcttc

SEQ ID NO: 5362780 - DNA, 25 bp, Homo sapien
tttcttctctgggttttgtactcat

SEQ ID NO: 5362781 - DNA, 25 bp, Homo sapien
ttttcttctctgggttttgtactca

SEQ ID NO: 5362782 - DNA, 25 bp, Homo sapien
gagcaatctagggttttcttctctg

SEQ ID NO: 5362783 - DNA, 25 bp, Homo sapien
aggaactgggaaatcaacttctcca

SEQ ID NO: 5362784 - DNA, 25 bp, Homo sapien
ctttggtgggcattgttggctatca

SEQ ID NO: 5362785 - DNA, 25 bp, Homo sapien
caccagcaatcctgtcttcactttg

SEQ ID NO: 5362786 - DNA, 25 bp, Homo sapien
cttcactttggtgggcattgttggc

SEQ ID NO: 5362787 - DNA, 25 bp, Homo sapien
tgcacggaatgactttacaccaaag

SEQ ID NO: 5362788 - DNA, 25 bp, Homo sapien
gaatgtttacaggtcctgcacggaa

SEQ ID NO: 5362789 - DNA, 25 bp, Homo sapien
tcggcatctcgttagctctgagaag

SEQ ID NO: 5362790 - DNA, 25 bp, Homo sapien
tataaaaatgacagcccctaatgga

SEQ ID NO: 5362791 - DNA, 25 bp, Homo sapien
ggttattagataagcctcaggagga

SEQ ID NO: 5362792 - DNA, 25 bp, Homo sapien
taaactatgagcagctgtagcacat

SEQ ID NO: 5362793 - DNA, 25 bp, Homo sapien
cgtgttccaggtttgagatcccatg

SEQ ID NO: 5362794 - DNA, 25 bp, Homo sapien
gcacacattgagacgattagagatc

SEQ ID NO: 5362795 - DNA, 25 bp, Homo sapien
cagcactgaatgtaggcctcaaatt

SEQ ID NO: 5362796 - DNA, 25 bp, Homo sapien
aagaaactcaatacagctccagcac

SEQ ID NO: 5362797 - DNA, 25 bp, Homo sapien
cctcaaattggaaccatctgggccg

SEQ ID NO: 5362798 - DNA, 25 bp, Homo sapien
gaaactcaatacagctccagcactg

SEQ ID NO: 5362799 - DNA, 25 bp, Homo sapien
ttggcgcctgctgaaagtactgctc

SEQ ID NO: 5362800 - DNA, 25 bp, Homo sapien
taaggcagccagtcttttcagcaac

SEQ ID NO: 5362801 - DNA, 25 bp, Homo sapien
catcaggcgttgctccgcgatcata

SEQ ID NO: 5362802 - DNA, 25 bp, Homo sapien
tcagtgaacgtggatggagcaatta

SEQ ID NO: 5362803 - DNA, 25 bp, Homo sapien
aaggacagatattttccggacacaa

SEQ ID NO: 5362804 - DNA, 25 bp, Homo sapien
gttccatgtgccttggctcaacttc

SEQ ID NO: 5362805 - DNA, 25 bp, Homo sapien
ttctggtcctcgcaggagacagcct

SEQ ID NO: 5362806 - DNA, 25 bp, Homo sapien
atgtgccttggctcaacttctggtc

SEQ ID NO: 5362807 - DNA, 25 bp, Homo sapien
ctcaacttctggtcctcgcaggaga

SEQ ID NO: 5362808 - DNA, 25 bp, Homo sapien
tttctgctgaagctcggcacaccct

SEQ ID NO: 5362809 - DNA, 25 bp, Homo sapien
ttctgctgaagctcggcacaccctg

SEQ ID NO: 5362810 - DNA, 25 bp, Homo sapien
tgctgaagctcggcacaccctgact

SEQ ID NO: 5362811 - DNA, 25 bp, Homo sapien
tctgctgaagctcggcacaccctga

SEQ ID NO: 5362812 - DNA, 25 bp, Homo sapien
ccagcaatctatcccgggtcatgcg

SEQ ID NO: 5362813 - DNA, 25 bp, Homo sapien
gccacagtcactgcgtctgcattct

SEQ ID NO: 5362814 - DNA, 25 bp, Homo sapien
tcactgcgtctgcattctccgatct

SEQ ID NO: 5362815 - DNA, 25 bp, Homo sapien
tggccaagtttgaggcaggtccttg

SEQ ID NO: 5362816 - DNA, 25 bp, Homo sapien
tcaggattaagcctaggagagggct

SEQ ID NO: 5362817 - DNA, 25 bp, Homo sapien
ggcttttcaggattaagcctaggag

SEQ ID NO: 5362818 - DNA, 25 bp, Homo sapien
gattaagcctaggagagggctccat

SEQ ID NO: 5362819 - DNA, 25 bp, Homo sapien
ttttcaggattaagcctaggagagg

SEQ ID NO: 5362820 - DNA, 25 bp, Homo sapien
gagagctttccaggacattttttat

SEQ ID NO: 5362821 - DNA, 25 bp, Homo sapien
tatgccaatcttatcatgaaaggag

SEQ ID NO: 5362822 - DNA, 25 bp, Homo sapien
gggtcatatgactctggaaaactgt

SEQ ID NO: 5362823 - DNA, 25 bp, Homo sapien
tagaaaagggtcatatgactctgga

SEQ ID NO: 5362824 - DNA, 25 bp, Homo sapien
gaggctgacagcatccgaggaagtg

SEQ ID NO: 5362825 - DNA, 25 bp, Homo sapien
aggctgacagcatccgaggaagtgc

SEQ ID NO: 5362826 - DNA, 25 bp, Homo sapien
aaactgtacaaatttggagatggat

SEQ ID NO: 5362827 - DNA, 25 bp, Homo sapien
aatttggagatggattcaggcctcc

SEQ ID NO: 5362828 - DNA, 25 bp, Homo sapien
caaatttggagatggattcaggcct

SEQ ID NO: 5362829 - DNA, 25 bp, Homo sapien
tgtacaaatttggagatggattcag

SEQ ID NO: 5362830 - DNA, 25 bp, Homo sapien
ctgacgttagtttataaaacatgac

SEQ ID NO: 5362831 - DNA, 25 bp, Homo sapien
actgacgttagtttataaaacatga

SEQ ID NO: 5362832 - DNA, 25 bp, Homo sapien
aactgacgttagtttataaaacatg

SEQ ID NO: 5362833 - DNA, 25 bp, Homo sapien
ctgagggctggttgatggaatttcc

SEQ ID NO: 5362834 - DNA, 25 bp, Homo sapien
tggattgatgggaagtttctagaag

SEQ ID NO: 5362835 - DNA, 25 bp, Homo sapien
tggaatttccctggacttggattga

SEQ ID NO: 5362836 - DNA, 25 bp, Homo sapien
caaaattaatagtgcctgagggctg

SEQ ID NO: 5362837 - DNA, 25 bp, Homo sapien
aacagattcatcagttgccatgcaa

SEQ ID NO: 5362838 - DNA, 25 bp, Homo sapien
aggagaagagagcctgctaacttct

SEQ ID NO: 5362839 - DNA, 25 bp, Homo sapien
gaggagaagagagcctgctaacttc

SEQ ID NO: 5362840 - DNA, 25 bp, Homo sapien
agaggagaagagagcctgctaactt

SEQ ID NO: 5362841 - DNA, 25 bp, Homo sapien
gataggcactgtagaaagcaaggct

SEQ ID NO: 5362842 - DNA, 25 bp, Homo sapien
gtcaagtgtgcatgtgttgaactca

SEQ ID NO: 5362843 - DNA, 25 bp, Homo sapien
tcattgagtaggcaaagcctcaaca

SEQ ID NO: 5362844 - DNA, 25 bp, Homo sapien
tgtgaacgtgggaacacaccacggg

SEQ ID NO: 5362845 - DNA, 25 bp, Homo sapien
aagagatgtccataacaccatagaa

SEQ ID NO: 5362846 - DNA, 25 bp, Homo sapien
gatgtccataacaccatagaaattg

SEQ ID NO: 5362847 - DNA, 25 bp, Homo sapien
cactgactccaaatccatgaatgaa

SEQ ID NO: 5362848 - DNA, 25 bp, Homo sapien
tctgttcatcacaggggagtcccgc

SEQ ID NO: 5362849 - DNA, 25 bp, Homo sapien
cagcgatccttcttgaggtcgacac

SEQ ID NO: 5362850 - DNA, 25 bp, Homo sapien
caccatgcacccaatcagcgacgag

SEQ ID NO: 5362851 - DNA, 25 bp, Homo sapien
ttcttgaggtcgacaccgagcaggg

SEQ ID NO: 5362852 - DNA, 25 bp, Homo sapien
tggagtcggatacgccccgcggaca

SEQ ID NO: 5362853 - DNA, 25 bp, Homo sapien
aaaggcccgagaagctcttgcacag

SEQ ID NO: 5362854 - DNA, 25 bp, Homo sapien
gacagcctctggaaccccgcgccat

SEQ ID NO: 5362855 - DNA, 25 bp, Homo sapien
gagaagctcttgcacaggacagcct

SEQ ID NO: 5362856 - DNA, 25 bp, Homo sapien
ccctgatccaaaggcccgagaagct

SEQ ID NO: 5362857 - DNA, 25 bp, Homo sapien
gagcagtttcgtaccggcttcttct

SEQ ID NO: 5362858 - DNA, 25 bp, Homo sapien
cctgtgtgtcctacggcggagcagt

SEQ ID NO: 5362859 - DNA, 25 bp, Homo sapien
gtagcctcgcccggaagcaaggcct

SEQ ID NO: 5362860 - DNA, 25 bp, Homo sapien
gagctcccacagctaacatggcggc

SEQ ID NO: 5362861 - DNA, 25 bp, Homo sapien
gaagtggagcgacctcctccttcat

SEQ ID NO: 5362862 - DNA, 25 bp, Homo sapien
ctgagctaagtaagggtcggtgcct

SEQ ID NO: 5362863 - DNA, 25 bp, Homo sapien
ggtgcctaggtctgtgttgggtcca

SEQ ID NO: 5362864 - DNA, 25 bp, Homo sapien
aaggtagaagtggagcgacctcctc

SEQ ID NO: 5362865 - DNA, 25 bp, Homo sapien
tgacataattctgctgtgctagact

SEQ ID NO: 5362866 - DNA, 25 bp, Homo sapien
ctttgctgcaagtgattgatcggct

SEQ ID NO: 5362867 - DNA, 25 bp, Homo sapien
tcggcttcgctgactcttgtggcat

SEQ ID NO: 5362868 - DNA, 25 bp, Homo sapien
tttccttgacaccagtgacataatt

SEQ ID NO: 5362869 - DNA, 25 bp, Homo sapien
tatagcgggccccttttggtattgc

SEQ ID NO: 5362870 - DNA, 25 bp, Homo sapien
tatagcggaccccttttggtattgc

SEQ ID NO: 5362871 - DNA, 25 bp, Homo sapien
tagcggaccccttttggtattgcat

SEQ ID NO: 5362872 - DNA, 25 bp, Homo sapien
agcgggccccttttggtattgcatt

SEQ ID NO: 5362873 - DNA, 25 bp, Homo sapien
tattaaatatagcggaccccctcca

SEQ ID NO: 5362874 - DNA, 25 bp, Homo sapien
atatagcggaccccctccacctttg

SEQ ID NO: 5362875 - DNA, 25 bp, Homo sapien
atagcggaccccctccacctttgtg

SEQ ID NO: 5362876 - DNA, 25 bp, Homo sapien
gcggaccccctccacctttgtggca

SEQ ID NO: 5362877 - DNA, 25 bp, Homo sapien
tatgtctacgtgtctgcctctagcc

SEQ ID NO: 5362878 - DNA, 25 bp, Homo sapien
tcttggagccggatgtacattgcca

SEQ ID NO: 5362879 - DNA, 25 bp, Homo sapien
tgtagagcacaactgtccctgtggt

SEQ ID NO: 5362880 - DNA, 25 bp, Homo sapien
tagtatgtttgttagcccctgactg

SEQ ID NO: 5362881 - DNA, 25 bp, Homo sapien
gtgagcttcctcatacctgcggcag

SEQ ID NO: 5362882 - DNA, 25 bp, Homo sapien
tatgcctggcgctgaaatgcagact

SEQ ID NO: 5362883 - DNA, 25 bp, Homo sapien
tacccgcagcaggtttagagagaaa

SEQ ID NO: 5362884 - DNA, 25 bp, Homo sapien
gaaaggtgatagtgccccattcctc

SEQ ID NO: 5362885 - DNA, 25 bp, Homo sapien
ctaggtgtagactgcgggaagtgga

SEQ ID NO: 5362886 - DNA, 25 bp, Homo sapien
ggcctgtccaggatgaccaagctgg

SEQ ID NO: 5362887 - DNA, 25 bp, Homo sapien
gtccaggatgaccaagctggtggca

SEQ ID NO: 5362888 - DNA, 25 bp, Homo sapien
ctgtccaggatgaccaagctggtgg

SEQ ID NO: 5362889 - DNA, 25 bp, Homo sapien
gtggcaaagggaacggtgggccgca

SEQ ID NO: 5362890 - DNA, 25 bp, Homo sapien
gagcaccccaatggagccacagtct

SEQ ID NO: 5362891 - DNA, 25 bp, Homo sapien
ggctgtgctgggtgcgcagtggcat

SEQ ID NO: 5362892 - DNA, 25 bp, Homo sapien
gcaccccaatggagccacagtctgc

SEQ ID NO: 5362893 - DNA, 25 bp, Homo sapien
cagagcaccccaatggagccacagt

SEQ ID NO: 5362894 - DNA, 25 bp, Homo sapien
tcagggaggtgacttgtcgagtctc

SEQ ID NO: 5362895 - DNA, 25 bp, Homo sapien
gcaggtgttcctacgatgacttttc

SEQ ID NO: 5362896 - DNA, 25 bp, Homo sapien
tgccttgggaggaccttatttgtgg

SEQ ID NO: 5362897 - DNA, 25 bp, Homo sapien
ctaatagtaatgttcctcagaggca

SEQ ID NO: 5362898 - DNA, 25 bp, Homo sapien
gctttgtcaccgaggacgaggtcga

SEQ ID NO: 5362899 - DNA, 25 bp, Homo sapien
ggagcaatacgactggcaatggcaa

SEQ ID NO: 5362900 - DNA, 25 bp, Homo sapien
taagagtgtgttgctatacccaagc

SEQ ID NO: 5362901 - DNA, 25 bp, Homo sapien
tttgttgaccggctgggaaagcacg

SEQ ID NO: 5362902 - DNA, 25 bp, Homo sapien
gtttgagctgaagaccatcttcgca

SEQ ID NO: 5362903 - DNA, 25 bp, Homo sapien
aagtttgagctgaagaccatcttcg

SEQ ID NO: 5362904 - DNA, 25 bp, Homo sapien
gggaagtttgagctgaagaccatct

SEQ ID NO: 5362905 - DNA, 25 bp, Homo sapien
ttggggaagtttgagctgaagacca

SEQ ID NO: 5362906 - DNA, 25 bp, Homo sapien
tttacagtaagtttttcttctctgc

SEQ ID NO: 5362907 - DNA, 25 bp, Homo sapien
ttctctgcctcttgtctccattaaa

SEQ ID NO: 5362908 - DNA, 25 bp, Homo sapien
cttgtctccattaaaactctgtcct

SEQ ID NO: 5362909 - DNA, 25 bp, Homo sapien
ttacagtaagtttttcttctctgcc

SEQ ID NO: 5362910 - DNA, 25 bp, Homo sapien
tactgatccacgtgtgagggaacgg

SEQ ID NO: 5362911 - DNA, 25 bp, Homo sapien
ggagcccgcagaaagtttacgtgga

SEQ ID NO: 5362912 - DNA, 25 bp, Homo sapien
ccagcatgagggcagtactgtcaga

SEQ ID NO: 5362913 - DNA, 25 bp, Homo sapien
cacagtaaataatggctgaccagca

SEQ ID NO: 5362914 - DNA, 25 bp, Homo sapien
gggaaaagtcttgaggatctcccca

SEQ ID NO: 5362915 - DNA, 25 bp, Homo sapien
ttctgggcctcaggaaccccgagct

SEQ ID NO: 5362916 - DNA, 25 bp, Homo sapien
aggaaggtcacggagggactgcagg

SEQ ID NO: 5362917 - DNA, 25 bp, Homo sapien
ccccgagctcatgggaaaagtcttg

SEQ ID NO: 5362918 - DNA, 25 bp, Homo sapien
gatgcttgaaataattggactgtga

SEQ ID NO: 5362919 - DNA, 25 bp, Homo sapien
ggtattcggtatgagatccacaggc

SEQ ID NO: 5362920 - DNA, 25 bp, Homo sapien
tgactcaggcgacgggtcagcctgc

SEQ ID NO: 5362921 - DNA, 25 bp, Homo sapien
gggccacctcatatgagatgcttga

SEQ ID NO: 5362922 - DNA, 25 bp, Homo sapien
ccactggcttatcttgagctggctc

SEQ ID NO: 5362923 - DNA, 25 bp, Homo sapien
aaatcacccactggcttatcttgag

SEQ ID NO: 5362924 - DNA, 25 bp, Homo sapien
cacccactggcttatcttgagctgg

SEQ ID NO: 5362925 - DNA, 25 bp, Homo sapien
atcacccactggcttatcttgagct

SEQ ID NO: 5362926 - DNA, 25 bp, Homo sapien
gccagtcgtgcgtgtgttctcctcc

SEQ ID NO: 5362927 - DNA, 25 bp, Homo sapien
ggtgcttatgggggccagtcgtgcg

SEQ ID NO: 5362928 - DNA, 25 bp, Homo sapien
tatgggggccagtcgtgcgtgtgtt

SEQ ID NO: 5362929 - DNA, 25 bp, Homo sapien
gggccagtcgtgcgtgtgttctcct

SEQ ID NO: 5362930 - DNA, 25 bp, Homo sapien
ctgctattgtactggatctgggagt

SEQ ID NO: 5362931 - DNA, 25 bp, Homo sapien
tgcattggctggtttggagttcatg

SEQ ID NO: 5362932 - DNA, 25 bp, Homo sapien
gctattgtactggatctgggagtcc

SEQ ID NO: 5362933 - DNA, 25 bp, Homo sapien
tttggcttgcattggctggtttgga

SEQ ID NO: 5362934 - DNA, 25 bp, Homo sapien
ctgttgtccagggagtgtgcctcga

SEQ ID NO: 5362935 - DNA, 25 bp, Homo sapien
tcctgggtcacttaggagagccaca

SEQ ID NO: 5362936 - DNA, 25 bp, Homo sapien
cagctcccctgacagaatggaacca

SEQ ID NO: 5362937 - DNA, 25 bp, Homo sapien
cctgacagaatggaaccactcctgg

SEQ ID NO: 5362938 - DNA, 25 bp, Homo sapien
tgccattcgcaacccatcccggcat

SEQ ID NO: 5362939 - DNA, 25 bp, Homo sapien
tgttgttgaaggtttagcgagcatc

SEQ ID NO: 5362940 - DNA, 25 bp, Homo sapien
aacccatcccggcatggctcctggg

SEQ ID NO: 5362941 - DNA, 25 bp, Homo sapien
gactggcaaggacggctgtctctgc

SEQ ID NO: 5362942 - DNA, 25 bp, Homo sapien
gacacaacgctattgtggtctctgg

SEQ ID NO: 5362943 - DNA, 25 bp, Homo sapien
tcttcctggctgcagcgacacaacg

SEQ ID NO: 5362944 - DNA, 25 bp, Homo sapien
tttcaggccttgtcgcctgctcttc

SEQ ID NO: 5362945 - DNA, 25 bp, Homo sapien
ctccgcgtccgtgggactggatcca

SEQ ID NO: 5362946 - DNA, 25 bp, Homo sapien
tgcgcgtctcccttacgtgactcag

SEQ ID NO: 5362947 - DNA, 25 bp, Homo sapien
gactcagttgtcgtctctgcctcag

SEQ ID NO: 5362948 - DNA, 25 bp, Homo sapien
ccaatgcgtgggcatccactgcgcg

SEQ ID NO: 5362949 - DNA, 25 bp, Homo sapien
tgcgtgggcatccactgcgcgtctc

SEQ ID NO: 5362950 - DNA, 25 bp, Homo sapien
ttgacgagagtgtgcttgcaggacc

SEQ ID NO: 5362951 - DNA, 25 bp, Homo sapien
aaatgtttttgacgagagtgtgctt

SEQ ID NO: 5362952 - DNA, 25 bp, Homo sapien
tggaaatgtttttgacgagagtgtg

SEQ ID NO: 5362953 - DNA, 25 bp, Homo sapien
tgtttttgacgagagtgtgcttgca

SEQ ID NO: 5362954 - DNA, 25 bp, Homo sapien
catcccctaggtctggctttctggg

SEQ ID NO: 5362955 - DNA, 25 bp, Homo sapien
ggctttctgggatcgagaagtagat

SEQ ID NO: 5362956 - DNA, 25 bp, Homo sapien
cagtcagcagggattagtggaagac

SEQ ID NO: 5362957 - DNA, 25 bp, Homo sapien
tcgagaagtagatgacagtcagcag

SEQ ID NO: 5362958 - DNA, 25 bp, Homo sapien
tgttttcttcatggggcgaaacata

SEQ ID NO: 5362959 - DNA, 25 bp, Homo sapien
tcttcatggggcgaaacatatttta

SEQ ID NO: 5362960 - DNA, 25 bp, Homo sapien
ttcatggggcgaaacatattttatc

SEQ ID NO: 5362961 - DNA, 25 bp, Homo sapien
catggggcgaaacatattttatctg

SEQ ID NO: 5362962 - DNA, 25 bp, Homo sapien
cagggtaaccttggtctaattgtgg

SEQ ID NO: 5362963 - DNA, 25 bp, Homo sapien
tggtctgaccgtgtggtagccttga

SEQ ID NO: 5362964 - DNA, 25 bp, Homo sapien
gagagcgaggttgagtatatgttcc

SEQ ID NO: 5362965 - DNA, 25 bp, Homo sapien
gcctttagctgcctgtaggacagcc

SEQ ID NO: 5362966 - DNA, 25 bp, Homo sapien
gatttaagcagtaggagtacagggt

SEQ ID NO: 5362967 - DNA, 25 bp, Homo sapien
tttaagcagtaggagtacagggtgt

SEQ ID NO: 5362968 - DNA, 25 bp, Homo sapien
agcagtaggagtacagggtgttatt

SEQ ID NO: 5362969 - DNA, 25 bp, Homo sapien
ttctgatttaagcagtaggagtaca

SEQ ID NO: 5362970 - DNA, 25 bp, Homo sapien
atcattcagctgattgatggaaaag

SEQ ID NO: 5362971 - DNA, 25 bp, Homo sapien
tcagctgattgatggaaaagcccat

SEQ ID NO: 5362972 - DNA, 25 bp, Homo sapien
tctccatcattcagctgattgatgg

SEQ ID NO: 5362973 - DNA, 25 bp, Homo sapien
tccctctccatcattcagctgattg

SEQ ID NO: 5362974 - DNA, 25 bp, Homo sapien
ggctttcctcgaggtctgctggtca

SEQ ID NO: 5362975 - DNA, 25 bp, Homo sapien
tggctttcctcgaggtctgctggtc

SEQ ID NO: 5362976 - DNA, 25 bp, Homo sapien
gctttcctcgaggtctgctggtcat

SEQ ID NO: 5362977 - DNA, 25 bp, Homo sapien
gtggctttcctcgaggtctgctggt

SEQ ID NO: 5362978 - DNA, 25 bp, Homo sapien
tcgcacacgtataaatgggtcaagc

SEQ ID NO: 5362979 - DNA, 25 bp, Homo sapien
caagctctacaagctcttcttgaac

SEQ ID NO: 5362980 - DNA, 25 bp, Homo sapien
cttgtttttaacactcgcacacgta

SEQ ID NO: 5362981 - DNA, 25 bp, Homo sapien
tataaatgggtcaagctctacaagc

SEQ ID NO: 5362982 - DNA, 25 bp, Homo sapien
catagtgtgctaagtttgccgaccg

SEQ ID NO: 5362983 - DNA, 25 bp, Homo sapien
taacccaggtgacaagcttcagcct

SEQ ID NO: 5362984 - DNA, 25 bp, Homo sapien
tgacctcatgggagtaaaacagctc

SEQ ID NO: 5362985 - DNA, 25 bp, Homo sapien
taacctgctgttagggaagaatggc

SEQ ID NO: 5362986 - DNA, 25 bp, Homo sapien
taaagcagccctgtgaaatctgatg

SEQ ID NO: 5362987 - DNA, 25 bp, Homo sapien
ttttctcctgtgtaagccgcacctg

SEQ ID NO: 5362988 - DNA, 25 bp, Homo sapien
caggtgaaaatgtagtagagggccc

SEQ ID NO: 5362989 - DNA, 25 bp, Homo sapien
gagcccctgggtataggctacttga

SEQ ID NO: 5362990 - DNA, 25 bp, Homo sapien
gatctcatccacatttgcttgagaa

SEQ ID NO: 5362991 - DNA, 25 bp, Homo sapien
tctgcaaaagctcccgcatcagatg

SEQ ID NO: 5362992 - DNA, 25 bp, Homo sapien
ttgaggagacaaatagatctcatcc

SEQ ID NO: 5362993 - DNA, 25 bp, Homo sapien
catcagatgcacacacggtcctaca

SEQ ID NO: 5362994 - DNA, 25 bp, Homo sapien
gcaacacctttcgacgcagagctgg

SEQ ID NO: 5362995 - DNA, 25 bp, Homo sapien
aagccacgtgggaacaaggacgagc

SEQ ID NO: 5362996 - DNA, 25 bp, Homo sapien
atgctccgacagacgaagccacgtg

SEQ ID NO: 5362997 - DNA, 25 bp, Homo sapien
ggccaataggaatggatgctccgac

SEQ ID NO: 5362998 - DNA, 25 bp, Homo sapien
gtgtcacagggggcaagtggagttg

SEQ ID NO: 5362999 - DNA, 25 bp, Homo sapien
ctggaggtacaggggcagtgtcaca

SEQ ID NO: 5363000 - DNA, 25 bp, Homo sapien
tggaggtacaggggcagtgtcacag

SEQ ID NO: 5363001 - DNA, 25 bp, Homo sapien
gaggtacaggggcagtgtcacaggg

SEQ ID NO: 5363002 - DNA, 25 bp, Homo sapien
tgccccgactgtgcctccgcaggtc

SEQ ID NO: 5363003 - DNA, 25 bp, Homo sapien
ccacgtggcaatcgccgctgctgct

SEQ ID NO: 5363004 - DNA, 25 bp, Homo sapien
cctcgcaaggcattatccctccccg

SEQ ID NO: 5363005 - DNA, 25 bp, Homo sapien
aggaagtctacctcctccacgtggc

SEQ ID NO: 5363006 - DNA, 25 bp, Homo sapien
tttgcgagcagaaggccactcgaat

SEQ ID NO: 5363007 - DNA, 25 bp, Homo sapien
ctgaaacgccaagtttgcgagcaga

SEQ ID NO: 5363008 - DNA, 25 bp, Homo sapien
agaaggccactcgaatccccgcttg

SEQ ID NO: 5363009 - DNA, 25 bp, Homo sapien
atccccgcttgaccaggccttagga

SEQ ID NO: 5363010 - DNA, 25 bp, Homo sapien
tcaacaaggacacttactgcatgcc

SEQ ID NO: 5363011 - DNA, 25 bp, Homo sapien
tagaccaaggcttcattccgacagg

SEQ ID NO: 5363012 - DNA, 25 bp, Homo sapien
tctaacgttagttggctagaccaag

SEQ ID NO: 5363013 - DNA, 25 bp, Homo sapien
tccgacaggttgctgaaaactcaag

SEQ ID NO: 5363014 - DNA, 25 bp, Homo sapien
aagaccattccagtgccccagaggt

SEQ ID NO: 5363015 - DNA, 25 bp, Homo sapien
gcaacagcacgtcccttgaggctta

SEQ ID NO: 5363016 - DNA, 25 bp, Homo sapien
gagggtccaagcacgaagctgtgca

SEQ ID NO: 5363017 - DNA, 25 bp, Homo sapien
catgaatcgcaaatcccagctagtg

SEQ ID NO: 5363018 - DNA, 25 bp, Homo sapien
cagtctacgtgtgcaatgaaaacca

SEQ ID NO: 5363019 - DNA, 25 bp, Homo sapien
catcgtctactgctggagaatcaaa

SEQ ID NO: 5363020 - DNA, 25 bp, Homo sapien
aaaattccgcgaggcctgcatagag

SEQ ID NO: 5363021 - DNA, 25 bp, Homo sapien
caaggtgatcatcgcggtctcctgg

SEQ ID NO: 5363022 - DNA, 25 bp, Homo sapien
cacagagttctacgtccaaatacag

SEQ ID NO: 5363023 - DNA, 25 bp, Homo sapien
tgattacgatcaactctgcccaaga

SEQ ID NO: 5363024 - DNA, 25 bp, Homo sapien
gaaggtagtttcaatgctctggctg

SEQ ID NO: 5363025 - DNA, 25 bp, Homo sapien
taagcatatctctaacacatcagcc

SEQ ID NO: 5363026 - DNA, 25 bp, Homo sapien
tggctgtgggcaccatgcggtttcc

SEQ ID NO: 5363027 - DNA, 25 bp, Homo sapien
tgtgggcaccatgcggtttccctcc

SEQ ID NO: 5363028 - DNA, 25 bp, Homo sapien
tctaggccactagaaagtcctttcc

SEQ ID NO: 5363029 - DNA, 25 bp, Homo sapien
ggaatgcattcccttcagacccaca

SEQ ID NO: 5363030 - DNA, 25 bp, Homo sapien
gaccttccctgtcggttgctgctta

SEQ ID NO: 5363031 - DNA, 25 bp, Homo sapien
tgggatttagaccatcagctccctg

SEQ ID NO: 5363032 - DNA, 25 bp, Homo sapien
taggcgcaaatcgagcacagatggg

SEQ ID NO: 5363033 - DNA, 25 bp, Homo sapien
gaatggcctgaaccaattcctcaca

SEQ ID NO: 5363034 - DNA, 25 bp, Homo sapien
actaggtatggtgcgagtgaaaacc

SEQ ID NO: 5363035 - DNA, 25 bp, Homo sapien
ggtgcgagtgaaaaccatcactcca

SEQ ID NO: 5363036 - DNA, 25 bp, Homo sapien
ttagactaggtatggtgcgagtgaa

SEQ ID NO: 5363037 - DNA, 25 bp, Homo sapien
ggtatggtgcgagtgaaaaccatca

SEQ ID NO: 5363038 - DNA, 25 bp, Homo sapien
ttttgtgtatctgggacccaatcgg

SEQ ID NO: 5363039 - DNA, 25 bp, Homo sapien
tatctgggacccaatcgggacaaag

SEQ ID NO: 5363040 - DNA, 25 bp, Homo sapien
gtgtatctgggacccaatcgggaca

SEQ ID NO: 5363041 - DNA, 25 bp, Homo sapien
ctgggacccaatcgggacaaaggat

SEQ ID NO: 5363042 - DNA, 25 bp, Homo sapien
gaagcacatgtaagcacgcgtcagt

SEQ ID NO: 5363043 - DNA, 25 bp, Homo sapien
gcacagttacaaatcagcaggcctg

SEQ ID NO: 5363044 - DNA, 25 bp, Homo sapien
taaaaatgactagtgttggctgggc

SEQ ID NO: 5363045 - DNA, 25 bp, Homo sapien
aagggctgccccagttgcatcatgg

SEQ ID NO: 5363046 - DNA, 25 bp, Homo sapien
gatcttcacttgctaggcagccaga

SEQ ID NO: 5363047 - DNA, 25 bp, Homo sapien
cagaaaagaacgctcagtgtgtgct

SEQ ID NO: 5363048 - DNA, 25 bp, Homo sapien
gaatttcccgagtattcaacaggag

SEQ ID NO: 5363049 - DNA, 25 bp, Homo sapien
caagagaggactttgtcgccagcca

SEQ ID NO: 5363050 - DNA, 25 bp, Homo sapien
ctgcatgaggaagactccctttttt

SEQ ID NO: 5363051 - DNA, 25 bp, Homo sapien
tttcaaagtagacctctgtcttgga

SEQ ID NO: 5363052 - DNA, 25 bp, Homo sapien
gactgcatgaggaagactccctttt

SEQ ID NO: 5363053 - DNA, 25 bp, Homo sapien
tcttggattactatgtacctggaca

SEQ ID NO: 5363054 - DNA, 25 bp, Homo sapien
gcagcgaggagtccttgttgcgtat

SEQ ID NO: 5363055 - DNA, 25 bp, Homo sapien
agatgtctcccttcgtcctggctga

SEQ ID NO: 5363056 - DNA, 25 bp, Homo sapien
gttgcgtatggacggaaggctccct

SEQ ID NO: 5363057 - DNA, 25 bp, Homo sapien
gaaagaactcggagttcccctcgca

SEQ ID NO: 5363058 - DNA, 25 bp, Homo sapien
gagttggattgagcttcctttcaac

SEQ ID NO: 5363059 - DNA, 25 bp, Homo sapien
aagtccgagtgccaggactggatga

SEQ ID NO: 5363060 - DNA, 25 bp, Homo sapien
caagaccaccatttgggtatctaac

SEQ ID NO: 5363061 - DNA, 25 bp, Homo sapien
cacagtgggtgtgcacaagaccacc

SEQ ID NO: 5363062 - DNA, 25 bp, Homo sapien
ccatgggttattattatgatgagga

SEQ ID NO: 5363063 - DNA, 25 bp, Homo sapien
gagttgacatgcattactccatggg

SEQ ID NO: 5363064 - DNA, 25 bp, Homo sapien
tggctacgttctagttttgcagagt

SEQ ID NO: 5363065 - DNA, 25 bp, Homo sapien
gaaaccaagactgagaatgctgtca

SEQ ID NO: 5363066 - DNA, 25 bp, Homo sapien
cacaaaagtaattgttgcttgtctg

SEQ ID NO: 5363067 - DNA, 25 bp, Homo sapien
cattctctggctctgatcatttcaa

SEQ ID NO: 5363068 - DNA, 25 bp, Homo sapien
ggcctgttagaaagtcatgaatgtt

SEQ ID NO: 5363069 - DNA, 25 bp, Homo sapien
tataatagtgtaactccagggttct

SEQ ID NO: 5363070 - DNA, 25 bp, Homo sapien
cacaattcactcgtgtcaaccgagg

SEQ ID NO: 5363071 - DNA, 25 bp, Homo sapien
aaactgagtcttaatgccatcggtc

SEQ ID NO: 5363072 - DNA, 25 bp, Homo sapien
tccttagaggtaactggtgaaactg

SEQ ID NO: 5363073 - DNA, 25 bp, Homo sapien
gatcaacaggacttgagttctgaaa

SEQ ID NO: 5363074 - DNA, 25 bp, Homo sapien
tagattaagttttcggacctggcca

SEQ ID NO: 5363075 - DNA, 25 bp, Homo sapien
catcaaattcggtggcgtggcggtt

SEQ ID NO: 5363076 - DNA, 25 bp, Homo sapien
agcttcccgtgcaggatggcgctct

SEQ ID NO: 5363077 - DNA, 25 bp, Homo sapien
gatatgcagcgccttctcatgctcg

SEQ ID NO: 5363078 - DNA, 25 bp, Homo sapien
accctgtgcaatcaaccagcagctg

SEQ ID NO: 5363079 - DNA, 25 bp, Homo sapien
aagcgacaccctgtcttcatttaaa

SEQ ID NO: 5363080 - DNA, 25 bp, Homo sapien
caaagcgacaccctgtcttcattta

SEQ ID NO: 5363081 - DNA, 25 bp, Homo sapien
aagaggctcaaagaatcaccctgtg

SEQ ID NO: 5363082 - DNA, 25 bp, Homo sapien
ctaagtgggtgtgatactcttcttt

SEQ ID NO: 5363083 - DNA, 25 bp, Homo sapien
ttggcctgcgtctcggtggcctctg

SEQ ID NO: 5363084 - DNA, 25 bp, Homo sapien
ggactcggtataaatcagatttctg

SEQ ID NO: 5363085 - DNA, 25 bp, Homo sapien
aggtacagcacagctaagtgggtgt

SEQ ID NO: 5363086 - DNA, 25 bp, Homo sapien
ccaaaggtctcttggtgaaaacctg

SEQ ID NO: 5363087 - DNA, 25 bp, Homo sapien
taaaactgttcttctgctgttcatc

SEQ ID NO: 5363088 - DNA, 25 bp, Homo sapien
taaggcaattgataatgtcgtctgg

SEQ ID NO: 5363089 - DNA, 25 bp, Homo sapien
tgcagtctcttgtctatcacaagat

SEQ ID NO: 5363090 - DNA, 25 bp, Homo sapien
cactagttcctcgtctaagcagtag

SEQ ID NO: 5363091 - DNA, 25 bp, Homo sapien
gatgtattcatacaggtctgagcgt

SEQ ID NO: 5363092 - DNA, 25 bp, Homo sapien
ggagtcctggacatcgccattcaca

SEQ ID NO: 5363093 - DNA, 25 bp, Homo sapien
tcacttttctgcaggacccaatcag

SEQ ID NO: 5363094 - DNA, 25 bp, Homo sapien
cccctttggactgtgataggcagat

SEQ ID NO: 5363095 - DNA, 25 bp, Homo sapien
tgacggttgcgtgggttccttctgc

SEQ ID NO: 5363096 - DNA, 25 bp, Homo sapien
tcactgataacatctcgacacagag

SEQ ID NO: 5363097 - DNA, 25 bp, Homo sapien
gactccagtgataaaagccttttgc

SEQ ID NO: 5363098 - DNA, 25 bp, Homo sapien
aacaggggtggcatatgaattctgg

SEQ ID NO: 5363099 - DNA, 25 bp, Homo sapien
atacacagcaccacccctccaagcc

SEQ ID NO: 5363100 - DNA, 25 bp, Homo sapien
ggaattctgatgtcagcatacgaac

SEQ ID NO: 5363101 - DNA, 25 bp, Homo sapien
gatgtcagcatacgaacatttttta

SEQ ID NO: 5363102 - DNA, 25 bp, Homo sapien
cttggttattataatgatagagcag

SEQ ID NO: 5363103 - DNA, 25 bp, Homo sapien
attataatgatagagcagtccaagt

SEQ ID NO: 5363104 - DNA, 25 bp, Homo sapien
gttattataatgatagagcagtcca

SEQ ID NO: 5363105 - DNA, 25 bp, Homo sapien
tggttattataatgatagagcagtc

SEQ ID NO: 5363106 - DNA, 25 bp, Homo sapien
caggcagcactgtccgtcagaagac

SEQ ID NO: 5363107 - DNA, 25 bp, Homo sapien
tcaggtctgcgtactcatgaagagg

SEQ ID NO: 5363108 - DNA, 25 bp, Homo sapien
tgagcaaggctgtgtcgatgtcctc

SEQ ID NO: 5363109 - DNA, 25 bp, Homo sapien
catgaggaagcgtttgcacttggcc

SEQ ID NO: 5363110 - DNA, 25 bp, Homo sapien
gagctgtggatctcaaacctggccc

SEQ ID NO: 5363111 - DNA, 25 bp, Homo sapien
gactctcgtagaatttcagagccta

SEQ ID NO: 5363112 - DNA, 25 bp, Homo sapien
cggaacctccttgtcctggctacaa

SEQ ID NO: 5363113 - DNA, 25 bp, Homo sapien
ctggcccagtgtcagacccagctgt

SEQ ID NO: 5363114 - DNA, 25 bp, Homo sapien
ctgaagttgtgcaaactgtataaat

SEQ ID NO: 5363115 - DNA, 25 bp, Homo sapien
gtgcaaactgtataaatcccgcctg

SEQ ID NO: 5363116 - DNA, 25 bp, Homo sapien
ctgaagagctctttagcttccagga

SEQ ID NO: 5363117 - DNA, 25 bp, Homo sapien
taaatcccgcctgctgcagaatcct

SEQ ID NO: 5363118 - DNA, 25 bp, Homo sapien
tccgtcaccgtccagcatggctggt

SEQ ID NO: 5363119 - DNA, 25 bp, Homo sapien
tgtgtggtgtctctgatcccacgcc

SEQ ID NO: 5363120 - DNA, 25 bp, Homo sapien
caaaatgcacattaggaacctgctg

SEQ ID NO: 5363121 - DNA, 25 bp, Homo sapien
gttcttgttacatccagcaatagca

SEQ ID NO: 5363122 - DNA, 25 bp, Homo sapien
tcctgagctataaaacctggagcca

SEQ ID NO: 5363123 - DNA, 25 bp, Homo sapien
tgtctactacgatcaatgcctcctc

SEQ ID NO: 5363124 - DNA, 25 bp, Homo sapien
tcagatgatcctgagctataaaacc

SEQ ID NO: 5363125 - DNA, 25 bp, Homo sapien
aaggtgacggtctcatttccaaact

SEQ ID NO: 5363126 - DNA, 25 bp, Homo sapien
acacggggacgacacagacccctga

SEQ ID NO: 5363127 - DNA, 25 bp, Homo sapien
ctctccagggctctcggctatggct

SEQ ID NO: 5363128 - DNA, 25 bp, Homo sapien
ggggacgacacagacccctgagcca

SEQ ID NO: 5363129 - DNA, 25 bp, Homo sapien
cagggctctcggctatggctaattc

SEQ ID NO: 5363130 - DNA, 25 bp, Homo sapien
tgacatgataaatggtatgggccac

SEQ ID NO: 5363131 - DNA, 25 bp, Homo sapien
aatggtatgggccacaaatcgcagg

SEQ ID NO: 5363132 - DNA, 25 bp, Homo sapien
ccacaaatcgcaggtgcatgaggta

SEQ ID NO: 5363133 - DNA, 25 bp, Homo sapien
ggagggagaagtatggcgctgaggg

SEQ ID NO: 5363134 - DNA, 25 bp, Homo sapien
ccttttctgcataaagcacctgagg

SEQ ID NO: 5363135 - DNA, 25 bp, Homo sapien
cctcaaatatggaataacctgtaca

SEQ ID NO: 5363136 - DNA, 25 bp, Homo sapien
gcacctgaggccaaagaacatatca

SEQ ID NO: 5363137 - DNA, 25 bp, Homo sapien
taggagacccgatttatatcaattg

SEQ ID NO: 5363138 - DNA, 25 bp, Homo sapien
ttacttgtggcaacgatcactcttc

SEQ ID NO: 5363139 - DNA, 25 bp, Homo sapien
tgttcctccgggctccttttgctaa

SEQ ID NO: 5363140 - DNA, 25 bp, Homo sapien
ctactctgcggcttgctagaagatc

SEQ ID NO: 5363141 - DNA, 25 bp, Homo sapien
caaagcctcttctactctgcggctt

SEQ ID NO: 5363142 - DNA, 25 bp, Homo sapien
attttgaagcatgagataatatttc

SEQ ID NO: 5363143 - DNA, 25 bp, Homo sapien
tcctgcaagttaacctggcccatgg

SEQ ID NO: 5363144 - DNA, 25 bp, Homo sapien
tggcccatggtcaacactgccatcc

SEQ ID NO: 5363145 - DNA, 25 bp, Homo sapien
agtaaacgcataatacatagtccag

SEQ ID NO: 5363146 - DNA, 25 bp, Homo sapien
tgaattcgtcatcgagcgctatgac

SEQ ID NO: 5363147 - DNA, 25 bp, Homo sapien
tgggatatccctgcgactgtggcaa

SEQ ID NO: 5363148 - DNA, 25 bp, Homo sapien
tgttgctgatccaacatgctgtgga

SEQ ID NO: 5363149 - DNA, 25 bp, Homo sapien
cgctatgacgtatggaaaggacaca

SEQ ID NO: 5363150 - DNA, 25 bp, Homo sapien
ctgaggattctgctgaatttctgct

SEQ ID NO: 5363151 - DNA, 25 bp, Homo sapien
caaatagggcgtaatcctgaggatt

SEQ ID NO: 5363152 - DNA, 25 bp, Homo sapien
actttcaaatagggcgtaatcctga

SEQ ID NO: 5363153 - DNA, 25 bp, Homo sapien
tgctgaatttctgctcaagtaacat

SEQ ID NO: 5363154 - DNA, 25 bp, Homo sapien
tggaggtcaaagagggtcactgcat

SEQ ID NO: 5363155 - DNA, 25 bp, Homo sapien
ctggatttcatcaagcactggtcaa

SEQ ID NO: 5363156 - DNA, 25 bp, Homo sapien
cagaacaatcgaactggatttcatc

SEQ ID NO: 5363157 - DNA, 25 bp, Homo sapien
tcacagaacaatcgaactggatttc

SEQ ID NO: 5363158 - DNA, 25 bp, Homo sapien
tcaagcactggtcaagcactgctac

SEQ ID NO: 5363159 - DNA, 25 bp, Homo sapien
gaggatttattctgcacagcgccaa

SEQ ID NO: 5363160 - DNA, 25 bp, Homo sapien
gtcttgccacacacgcccaatgtca

SEQ ID NO: 5363161 - DNA, 25 bp, Homo sapien
ttattctgcacagcgccaatctcac

SEQ ID NO: 5363162 - DNA, 25 bp, Homo sapien
caatgtcactgaggatttattctgc

SEQ ID NO: 5363163 - DNA, 25 bp, Homo sapien
ccaaaaagatcaggcgcacaaatgc

SEQ ID NO: 5363164 - DNA, 25 bp, Homo sapien
tccagtttcaacacgcagtcaccga

SEQ ID NO: 5363165 - DNA, 25 bp, Homo sapien
accgaggccacccaaaaagatcagg

SEQ ID NO: 5363166 - DNA, 25 bp, Homo sapien
tttcaacacgcagtcaccgaggcca

SEQ ID NO: 5363167 - DNA, 25 bp, Homo sapien
cacagggttctcgttcagtgcaaac

SEQ ID NO: 5363168 - DNA, 25 bp, Homo sapien
catctggatggttctgcgtttgaca

SEQ ID NO: 5363169 - DNA, 25 bp, Homo sapien
gaccaggctgatggagttgtcacac

SEQ ID NO: 5363170 - DNA, 25 bp, Homo sapien
ctatcctcttgacgatcggcggcct

SEQ ID NO: 5363171 - DNA, 25 bp, Homo sapien
cctgggagacacgcttgaaggcaga

SEQ ID NO: 5363172 - DNA, 25 bp, Homo sapien
tcctgggagacacgcttgaaggcag

SEQ ID NO: 5363173 - DNA, 25 bp, Homo sapien
ctcctgggagacacgcttgaaggca

SEQ ID NO: 5363174 - DNA, 25 bp, Homo sapien
ctgggagacacgcttgaaggcagaa

SEQ ID NO: 5363175 - DNA, 25 bp, Homo sapien
tcagaagcatgcattggaggccagt

SEQ ID NO: 5363176 - DNA, 25 bp, Homo sapien
gaaaagtcaggtggtgacttcagta

SEQ ID NO: 5363177 - DNA, 25 bp, Homo sapien
acgcctggatgaggagggagagcct

SEQ ID NO: 5363178 - DNA, 25 bp, Homo sapien
atggtggctcttgtgacgcctggat

SEQ ID NO: 5363179 - DNA, 25 bp, Homo sapien
ttttcagagctgagggagacctggc

SEQ ID NO: 5363180 - DNA, 25 bp, Homo sapien
tccaatgctatgacaagaggactgc

SEQ ID NO: 5363181 - DNA, 25 bp, Homo sapien
tgcagtggtgaaaacgctctgcctc

SEQ ID NO: 5363182 - DNA, 25 bp, Homo sapien
tcaactggagctgcctaaatgaaga

SEQ ID NO: 5363183 - DNA, 25 bp, Homo sapien
ccatttttagcagccaggtaggagg

SEQ ID NO: 5363184 - DNA, 25 bp, Homo sapien
gatagacaaggtgcttgcccatgag

SEQ ID NO: 5363185 - DNA, 25 bp, Homo sapien
gtgcagtccacgtgcagtaaggcct

SEQ ID NO: 5363186 - DNA, 25 bp, Homo sapien
tcagtgattaaactctgctcagaca

SEQ ID NO: 5363187 - DNA, 25 bp, Homo sapien
tgcagacaaccggacagcttccgtg

SEQ ID NO: 5363188 - DNA, 25 bp, Homo sapien
cggacagcttccgtgtttaaggata

SEQ ID NO: 5363189 - DNA, 25 bp, Homo sapien
gcttccgtgtttaaggatatcaaca

SEQ ID NO: 5363190 - DNA, 25 bp, Homo sapien
cacggcaggtgcagacaaccggaca

SEQ ID NO: 5363191 - DNA, 25 bp, Homo sapien
ccgggcgagagcgtggtccgcgcca

SEQ ID NO: 5363192 - DNA, 25 bp, Homo sapien
agcacaggccgagacgggccctgct

SEQ ID NO: 5363193 - DNA, 25 bp, Homo sapien
gtggtccgcgccagctgtgcgagcc

SEQ ID NO: 5363194 - DNA, 25 bp, Homo sapien
ccagcgggcggaaggtgttcattcg

SEQ ID NO: 5363195 - DNA, 25 bp, Homo sapien
ggccgcctgaccacgcgggctggag

SEQ ID NO: 5363196 - DNA, 25 bp, Homo sapien
cgcgggctggaggatcggacgtacc

SEQ ID NO: 5363197 - DNA, 25 bp, Homo sapien
gaggatcggacgtaccgccggtgcc

SEQ ID NO: 5363198 - DNA, 25 bp, Homo sapien
gctggaggatcggacgtaccgccgg

SEQ ID NO: 5363199 - DNA, 25 bp, Homo sapien
caaagtccactttcatgacggaaga

SEQ ID NO: 5363200 - DNA, 25 bp, Homo sapien
gaggcctgggactatcttactcctt

SEQ ID NO: 5363201 - DNA, 25 bp, Homo sapien
cgcaaggaagaattgtaggttacca

SEQ ID NO: 5363202 - DNA, 25 bp, Homo sapien
tcctttggttcaggccgcaaggaag

SEQ ID NO: 5363203 - DNA, 25 bp, Homo sapien
taatcttatcaacaggaggccctcc

SEQ ID NO: 5363204 - DNA, 25 bp, Homo sapien
gatattcttatcaacgggaggcccg

SEQ ID NO: 5363205 - DNA, 25 bp, Homo sapien
tgtagcgggagtaaccttaggcctg

SEQ ID NO: 5363206 - DNA, 25 bp, Homo sapien
tggtccccacacaagttcagagatg

SEQ ID NO: 5363207 - DNA, 25 bp, Homo sapien
gacaatcaataggatacaagaactc

SEQ ID NO: 5363208 - DNA, 25 bp, Homo sapien
taggcgatgggttcagaaaaccaca

SEQ ID NO: 5363209 - DNA, 25 bp, Homo sapien
gtatgtcctaggtgagtaaagaagc

SEQ ID NO: 5363210 - DNA, 25 bp, Homo sapien
tttaaggcttcaggttaggcgatgg

SEQ ID NO: 5363211 - DNA, 25 bp, Homo sapien
tgagcctcccaaaacgccgtgatta

SEQ ID NO: 5363212 - DNA, 25 bp, Homo sapien
tatttaaagcactgtacaccggccc

SEQ ID NO: 5363213 - DNA, 25 bp, Homo sapien
aatacacgtaaaatgcagtccctgg

SEQ ID NO: 5363214 - DNA, 25 bp, Homo sapien
tgtggtaatcctaactgcaggctgg

SEQ ID NO: 5363215 - DNA, 25 bp, Homo sapien
aagatggactcctagcttacatgag

SEQ ID NO: 5363216 - DNA, 25 bp, Homo sapien
cactgcagagtgcaacataggaaga

SEQ ID NO: 5363217 - DNA, 25 bp, Homo sapien
caatagaggagctactggagtcaga

SEQ ID NO: 5363218 - DNA, 25 bp, Homo sapien
catgagattccctgcagctgtaata

SEQ ID NO: 5363219 - DNA, 25 bp, Homo sapien
aagtcatattgcttggccctccaca

SEQ ID NO: 5363220 - DNA, 25 bp, Homo sapien
cagggcactgaatggcttctcaatg

SEQ ID NO: 5363221 - DNA, 25 bp, Homo sapien
tctcaatggctgtagagacagtaca

SEQ ID NO: 5363222 - DNA, 25 bp, Homo sapien
cactgagaggtgaagataggctgac

SEQ ID NO: 5363223 - DNA, 25 bp, Homo sapien
gactgtcactacatgttgagggatg

SEQ ID NO: 5363224 - DNA, 25 bp, Homo sapien
cagatgtgattcgagtagtccagcc

SEQ ID NO: 5363225 - DNA, 25 bp, Homo sapien
tgctgggatatcacggtgctacaga

SEQ ID NO: 5363226 - DNA, 25 bp, Homo sapien
gctacagagcctgacatgttgactg

SEQ ID NO: 5363227 - DNA, 25 bp, Homo sapien
aaagtcgcagtattctgtgcactag

SEQ ID NO: 5363228 - DNA, 25 bp, Homo sapien
tccttgaagcctagagaaacccatc

SEQ ID NO: 5363229 - DNA, 25 bp, Homo sapien
catttaacaattaaagtcgcagtat

SEQ ID NO: 5363230 - DNA, 25 bp, Homo sapien
tgtgcactaggtagtttactagtta

SEQ ID NO: 5363231 - DNA, 25 bp, Homo sapien
cagggcacattgcaccacagcagat

SEQ ID NO: 5363232 - DNA, 25 bp, Homo sapien
tagtaaccattgtagttccagggca

SEQ ID NO: 5363233 - DNA, 25 bp, Homo sapien
gacttaaagacttgagggcagccct

SEQ ID NO: 5363234 - DNA, 25 bp, Homo sapien
gagaggtaccctcaagtctgaatgg

SEQ ID NO: 5363235 - DNA, 25 bp, Homo sapien
ttgatgctctgttgaaactcagctg

SEQ ID NO: 5363236 - DNA, 25 bp, Homo sapien
cagaagagctgacaggctaagagac

SEQ ID NO: 5363237 - DNA, 25 bp, Homo sapien
aactcagctgtagtttaggtgactg

SEQ ID NO: 5363238 - DNA, 25 bp, Homo sapien
aaatggaaggagcaattctgctggg

SEQ ID NO: 5363239 - DNA, 25 bp, Homo sapien
cacatctgattgctcctgagtggat

SEQ ID NO: 5363240 - DNA, 25 bp, Homo sapien
tcagccagtgtttggtcagaggttc

SEQ ID NO: 5363241 - DNA, 25 bp, Homo sapien
gctgggttaccagtctcagagcctg

SEQ ID NO: 5363242 - DNA, 25 bp, Homo sapien
tactaatagcatggagttaccagcc

SEQ ID NO: 5363243 - DNA, 25 bp, Homo sapien
ccttcagtaggaagagggtcggtca

SEQ ID NO: 5363244 - DNA, 25 bp, Homo sapien
agtctggcctaagtatacacggttc

SEQ ID NO: 5363245 - DNA, 25 bp, Homo sapien
tacacggttcagttgtcagccagaa

SEQ ID NO: 5363246 - DNA, 25 bp, Homo sapien
gggtcggtcagctaagccctgcaaa

SEQ ID NO: 5363247 - DNA, 25 bp, Homo sapien
tatgctcagcatatatcagacttga

SEQ ID NO: 5363248 - DNA, 25 bp, Homo sapien
caaacattctaacagtgactaacac

SEQ ID NO: 5363249 - DNA, 25 bp, Homo sapien
tgttgctcagcctatcattttatta

SEQ ID NO: 5363250 - DNA, 25 bp, Homo sapien
taaaaccaaaagactcattccagac

SEQ ID NO: 5363251 - DNA, 25 bp, Homo sapien
cattggaacattggaactgcacttc

SEQ ID NO: 5363252 - DNA, 25 bp, Homo sapien
acttcatacagtgaccatgggacca

SEQ ID NO: 5363253 - DNA, 25 bp, Homo sapien
catgggaccatgcaataaagtgtta

SEQ ID NO: 5363254 - DNA, 25 bp, Homo sapien
tacttagactcagtgcctcgacctg

SEQ ID NO: 5363255 - DNA, 25 bp, Homo sapien
tagacttgacgcaacgggaggttac

SEQ ID NO: 5363256 - DNA, 25 bp, Homo sapien
ctttccctgggactgaactatcaca

SEQ ID NO: 5363257 - DNA, 25 bp, Homo sapien
tacatttgggtgtgccttactcgat

SEQ ID NO: 5363258 - DNA, 25 bp, Homo sapien
aagaaagtctcaatgtggctggaag

SEQ ID NO: 5363259 - DNA, 25 bp, Homo sapien
atgccactgccgttcctcaaaggag

SEQ ID NO: 5363260 - DNA, 25 bp, Homo sapien
tacagttaaagcagtcgttatgcca

SEQ ID NO: 5363261 - DNA, 25 bp, Homo sapien
gagagggagcacttcttacagttaa

SEQ ID NO: 5363262 - DNA, 25 bp, Homo sapien
aaggagatgtattttgtgccaccaa

SEQ ID NO: 5363263 - DNA, 25 bp, Homo sapien
agtgcaccaaggagaggaaagcaga

SEQ ID NO: 5363264 - DNA, 25 bp, Homo sapien
ccagtgcaccaaggagaggaaagca

SEQ ID NO: 5363265 - DNA, 25 bp, Homo sapien
agcagataggcagaaaagtctgctg

SEQ ID NO: 5363266 - DNA, 25 bp, Homo sapien
ctgaagcatagccagtgcaccaagg

SEQ ID NO: 5363267 - DNA, 25 bp, Homo sapien
gttggtgcacccagcacacttcttg

SEQ ID NO: 5363268 - DNA, 25 bp, Homo sapien
cttggcatacaagtcacagaagcag

SEQ ID NO: 5363269 - DNA, 25 bp, Homo sapien
gctgatggggttggtgcacccagca

SEQ ID NO: 5363270 - DNA, 25 bp, Homo sapien
agcacacttcttggcatacaagtca

SEQ ID NO: 5363271 - DNA, 25 bp, Homo sapien
cagggctgctcccggtaagtgaccc

SEQ ID NO: 5363272 - DNA, 25 bp, Homo sapien
caggcggtgcacacgaagcactcct

SEQ ID NO: 5363273 - DNA, 25 bp, Homo sapien
acacgaagcactccttgtgccaggg

SEQ ID NO: 5363274 - DNA, 25 bp, Homo sapien
cggtgcacacgaagcactccttgtg

SEQ ID NO: 5363275 - DNA, 25 bp, Homo sapien
gcttaaaggacagccgggactagca

SEQ ID NO: 5363276 - DNA, 25 bp, Homo sapien
cctgtcttgtggtcttagaacatct

SEQ ID NO: 5363277 - DNA, 25 bp, Homo sapien
tccagccacttacggtgaaagaagg

SEQ ID NO: 5363278 - DNA, 25 bp, Homo sapien
tgaagctgcaaagccacatgaggtg

SEQ ID NO: 5363279 - DNA, 25 bp, Homo sapien
gggcacacagaaattctgattgtct

SEQ ID NO: 5363280 - DNA, 25 bp, Homo sapien
gcagatgaagcaggtctcatgccag

SEQ ID NO: 5363281 - DNA, 25 bp, Homo sapien
ttgcactgaacgcactgcatggcat

SEQ ID NO: 5363282 - DNA, 25 bp, Homo sapien
gcactgcatggcatgttgtttctca

SEQ ID NO: 5363283 - DNA, 25 bp, Homo sapien
gaaatggctagagtgtgaatgaacc

SEQ ID NO: 5363284 - DNA, 25 bp, Homo sapien
gagcagcctctacaacactcacttt

SEQ ID NO: 5363285 - DNA, 25 bp, Homo sapien
tgcacacctgataatgaacaccccg

SEQ ID NO: 5363286 - DNA, 25 bp, Homo sapien
tgaatgaacctggaacctcgaacct

SEQ ID NO: 5363287 - DNA, 25 bp, Homo sapien
attaatgtcgtggttcttattgtta

SEQ ID NO: 5363288 - DNA, 25 bp, Homo sapien
aatgtcgtggttcttattgttactg

SEQ ID NO: 5363289 - DNA, 25 bp, Homo sapien
taatgtcgtggttcttattgttact

SEQ ID NO: 5363290 - DNA, 25 bp, Homo sapien
tcaattaatgtcgtggttcttattg

SEQ ID NO: 5363291 - DNA, 25 bp, Homo sapien
ggtcctccttggcagcaaagggctt

SEQ ID NO: 5363292 - DNA, 25 bp, Homo sapien
ttggaatagcagtctgtacagagca

SEQ ID NO: 5363293 - DNA, 25 bp, Homo sapien
tcctggcacttggatgagtactcgt

SEQ ID NO: 5363294 - DNA, 25 bp, Homo sapien
cagtgccggtccttgtaagacaagt

SEQ ID NO: 5363295 - DNA, 25 bp, Homo sapien
cagaccacacaagacagtcagaggc

SEQ ID NO: 5363296 - DNA, 25 bp, Homo sapien
agaccacacaagacagtcagaggca

SEQ ID NO: 5363297 - DNA, 25 bp, Homo sapien
ctgcagggcaaacaaggaaagaagt

SEQ ID NO: 5363298 - DNA, 25 bp, Homo sapien
tgcagggcaaacaaggaaagaagtt

SEQ ID NO: 5363299 - DNA, 25 bp, Homo sapien
gcagggcaaacaaggaaagaagttg

SEQ ID NO: 5363300 - DNA, 25 bp, Homo sapien
gaagtcgaagctggagttatgctga

SEQ ID NO: 5363301 - DNA, 25 bp, Homo sapien
ctgaagaagagcctgcccacgatgt

SEQ ID NO: 5363302 - DNA, 25 bp, Homo sapien
gctgaatgtaggatgtgaagacatg

SEQ ID NO: 5363303 - DNA, 25 bp, Homo sapien
gatgtctctgttactgaaaccgaag

SEQ ID NO: 5363304 - DNA, 25 bp, Homo sapien
gacctcttgtgctatccctgttgga

SEQ ID NO: 5363305 - DNA, 25 bp, Homo sapien
tcatccttgagaacccaaactgggt

SEQ ID NO: 5363306 - DNA, 25 bp, Homo sapien
tgaacgctgagacactttgaagaca

SEQ ID NO: 5363307 - DNA, 25 bp, Homo sapien
gactaaatgcccttgtttctgcgga

SEQ ID NO: 5363308 - DNA, 25 bp, Homo sapien
cctgtgcaggcgagccacctcatag

SEQ ID NO: 5363309 - DNA, 25 bp, Homo sapien
cacctcatagaggactgctcgtttg

SEQ ID NO: 5363310 - DNA, 25 bp, Homo sapien
ttttccatgacccaagagtcactgt

SEQ ID NO: 5363311 - DNA, 25 bp, Homo sapien
atgttttccatgacccaagagtcac

SEQ ID NO: 5363312 - DNA, 25 bp, Homo sapien
cacagccagtgctccggtcattaag

SEQ ID NO: 5363313 - DNA, 25 bp, Homo sapien
tcattaagtccccagatggaggaaa

SEQ ID NO: 5363314 - DNA, 25 bp, Homo sapien
ttaagtccccagatggaggaaagag

SEQ ID NO: 5363315 - DNA, 25 bp, Homo sapien
gccagtgctccggtcattaagtccc

SEQ ID NO: 5363316 - DNA, 25 bp, Homo sapien
ggtgaaggccgcattctctcaggac

SEQ ID NO: 5363317 - DNA, 25 bp, Homo sapien
aaagtgctccccatcccattcgggt

SEQ ID NO: 5363318 - DNA, 25 bp, Homo sapien
ctggtctgctatatcccctgggaac

SEQ ID NO: 5363319 - DNA, 25 bp, Homo sapien
tgggaaccatttcgccttggctcct

SEQ ID NO: 5363320 - DNA, 25 bp, Homo sapien
tgggagagcatgaggtcccacagtc

SEQ ID NO: 5363321 - DNA, 25 bp, Homo sapien
gggagagcatgaggtcccacagtcc

SEQ ID NO: 5363322 - DNA, 25 bp, Homo sapien
cagatccatacgatttcacttcaga

SEQ ID NO: 5363323 - DNA, 25 bp, Homo sapien
cattcttcagatccatacgatttca

SEQ ID NO: 5363324 - DNA, 25 bp, Homo sapien
accattcttcagatccatacgattt

SEQ ID NO: 5363325 - DNA, 25 bp, Homo sapien
tcttcagatccatacgatttcactt

SEQ ID NO: 5363326 - DNA, 25 bp, Homo sapien
aataaatacgcgttttcagtgctcg

SEQ ID NO: 5363327 - DNA, 25 bp, Homo sapien
tgacaggcccttctcatgaaatcca

SEQ ID NO: 5363328 - DNA, 25 bp, Homo sapien
cactgacaggccaagttcgtgcact

SEQ ID NO: 5363329 - DNA, 25 bp, Homo sapien
ctgctgctatgtcttgtggctgaac

SEQ ID NO: 5363330 - DNA, 25 bp, Homo sapien
tgtgttacaccgaggacagaagggt

SEQ ID NO: 5363331 - DNA, 25 bp, Homo sapien
tcataaggactgaccacatctggcc

SEQ ID NO: 5363332 - DNA, 25 bp, Homo sapien
tctggcccgagagtcacatagacag

SEQ ID NO: 5363333 - DNA, 25 bp, Homo sapien
taacctgtatgtgtgaaaaccttcg

SEQ ID NO: 5363334 - DNA, 25 bp, Homo sapien
tggtggctgagctctcatgcttgtc

SEQ ID NO: 5363335 - DNA, 25 bp, Homo sapien
cacacagcaagtgagacacagagcc

SEQ ID NO: 5363336 - DNA, 25 bp, Homo sapien
tgggcagtctggtggctgagctctc

SEQ ID NO: 5363337 - DNA, 25 bp, Homo sapien
cctgggctggaactgggcagtctgg

SEQ ID NO: 5363338 - DNA, 25 bp, Homo sapien
cagttgggaattcctttagagatgc

SEQ ID NO: 5363339 - DNA, 25 bp, Homo sapien
agttcagagctatggatgggtcccc

SEQ ID NO: 5363340 - DNA, 25 bp, Homo sapien
cagtttcacggcactcaggatgaca

SEQ ID NO: 5363341 - DNA, 25 bp, Homo sapien
ggtgtccttcagcaatccaggttgg

SEQ ID NO: 5363342 - DNA, 25 bp, Homo sapien
ggcagagatcacattcgctagaggg

SEQ ID NO: 5363343 - DNA, 25 bp, Homo sapien
gaagcttccgaaaggctacacgcag

SEQ ID NO: 5363344 - DNA, 25 bp, Homo sapien
cagctgggtagttagataagggcac

SEQ ID NO: 5363345 - DNA, 25 bp, Homo sapien
gaaagttccagtattggtaggcagc

SEQ ID NO: 5363346 - DNA, 25 bp, Homo sapien
caatggtggcagtcaaagcgctcag

SEQ ID NO: 5363347 - DNA, 25 bp, Homo sapien
ggtctcaaagcacaccacgcagtag

SEQ ID NO: 5363348 - DNA, 25 bp, Homo sapien
tcttgccaaagagagattcgttgca

SEQ ID NO: 5363349 - DNA, 25 bp, Homo sapien
cacactcctcgcaggtgttggcgaa

SEQ ID NO: 5363350 - DNA, 25 bp, Homo sapien
tgtaccgcagccatctcgagttgga

SEQ ID NO: 5363351 - DNA, 25 bp, Homo sapien
taaatatcctttgtaccgcagccat

SEQ ID NO: 5363352 - DNA, 25 bp, Homo sapien
cgtataaatatcctttgtaccgcag

SEQ ID NO: 5363353 - DNA, 25 bp, Homo sapien
tattctgaagcccaacgtataaata

SEQ ID NO: 5363354 - DNA, 25 bp, Homo sapien
gtaataatcgtgatcacggtgctca

SEQ ID NO: 5363355 - DNA, 25 bp, Homo sapien
cacggtgctcatatacctgatatgt

SEQ ID NO: 5363356 - DNA, 25 bp, Homo sapien
tacctgatatgtgttttccacttcc

SEQ ID NO: 5363357 - DNA, 25 bp, Homo sapien
ttttcctctgaggtaataatcgtga

SEQ ID NO: 5363358 - DNA, 25 bp, Homo sapien
aatggcgtgaaccaagaggtagagc

SEQ ID NO: 5363359 - DNA, 25 bp, Homo sapien
tggcgtgaaccaagaggtagagctt

SEQ ID NO: 5363360 - DNA, 25 bp, Homo sapien
cgtgaaccaagaggtagagcttgca

SEQ ID NO: 5363361 - DNA, 25 bp, Homo sapien
gaatggcgtgaaccaagaggtagag

SEQ ID NO: 5363362 - DNA, 25 bp, Homo sapien
ggcagatccctacaggtaaagcctg

SEQ ID NO: 5363363 - DNA, 25 bp, Homo sapien
gagaaatctgtgaacgtccccaagc

SEQ ID NO: 5363364 - DNA, 25 bp, Homo sapien
tactttgatctgaccccaatgggcc

SEQ ID NO: 5363365 - DNA, 25 bp, Homo sapien
gacagacagcctcccttggcttgct

SEQ ID NO: 5363366 - DNA, 25 bp, Homo sapien
cctacggatgggagtatctacacac

SEQ ID NO: 5363367 - DNA, 25 bp, Homo sapien
gcccactttgggaagaacgcacaga

SEQ ID NO: 5363368 - DNA, 25 bp, Homo sapien
tccattcaaaggcacgggactctca

SEQ ID NO: 5363369 - DNA, 25 bp, Homo sapien
tctgataaaacggagagggccatca

SEQ ID NO: 5363370 - DNA, 25 bp, Homo sapien
acacttgttttgatgtcgttcagcc

SEQ ID NO: 5363371 - DNA, 25 bp, Homo sapien
ttgaacccagccgacaagaatgtgt

SEQ ID NO: 5363372 - DNA, 25 bp, Homo sapien
tccatgactacaagaggagttacac

SEQ ID NO: 5363373 - DNA, 25 bp, Homo sapien
ctgttttccatgtgctacgtgaggc

SEQ ID NO: 5363374 - DNA, 25 bp, Homo sapien
tccaggaagacacagttctcagcca

SEQ ID NO: 5363375 - DNA, 25 bp, Homo sapien
cccaaagtcaaaatgccagcctagt

SEQ ID NO: 5363376 - DNA, 25 bp, Homo sapien
gtcaaaatgccagcctagtctccag

SEQ ID NO: 5363377 - DNA, 25 bp, Homo sapien
aatgccagcctagtctccaggaaga

SEQ ID NO: 5363378 - DNA, 25 bp, Homo sapien
aaggaactttgtacctcagggcatc

SEQ ID NO: 5363379 - DNA, 25 bp, Homo sapien
tctgagtcagagagccgcttagcga

SEQ ID NO: 5363380 - DNA, 25 bp, Homo sapien
gatggtcatcttgaggaagcgaact

SEQ ID NO: 5363381 - DNA, 25 bp, Homo sapien
taaaaccgcacagaagaacccaatg

SEQ ID NO: 5363382 - DNA, 25 bp, Homo sapien
aatgttcctcccgtggtgcgtttag

SEQ ID NO: 5363383 - DNA, 25 bp, Homo sapien
cagatctcagggctaccatttacag

SEQ ID NO: 5363384 - DNA, 25 bp, Homo sapien
caatcttgggtcaaagtatgcatca

SEQ ID NO: 5363385 - DNA, 25 bp, Homo sapien
tatacactgtctatgatgtccaggc

SEQ ID NO: 5363386 - DNA, 25 bp, Homo sapien
ttccgagccctggtggctaagcccc

SEQ ID NO: 5363387 - DNA, 25 bp, Homo sapien
tccttgggtctcgcaccggattcgg

SEQ ID NO: 5363388 - DNA, 25 bp, Homo sapien
ggcgcagggggttggaggtactcac

SEQ ID NO: 5363389 - DNA, 25 bp, Homo sapien
ttgggtctcgcaccggattcggccc

SEQ ID NO: 5363390 - DNA, 25 bp, Homo sapien
gccctcgagaaaccccgccgtgtca

SEQ ID NO: 5363391 - DNA, 25 bp, Homo sapien
cagctcccgccctcgagaaaccccg

SEQ ID NO: 5363392 - DNA, 25 bp, Homo sapien
ccgctgccggccgagtggagcgctg

SEQ ID NO: 5363393 - DNA, 25 bp, Homo sapien
gagtggagcgctgcgcagctcccgc

SEQ ID NO: 5363394 - DNA, 25 bp, Homo sapien
tataaggagatgcacgcctcggctc

SEQ ID NO: 5363395 - DNA, 25 bp, Homo sapien
agatgcacgcctcggctcgctggca

SEQ ID NO: 5363396 - DNA, 25 bp, Homo sapien
tcggctcgctggcaccgggcgtggg

SEQ ID NO: 5363397 - DNA, 25 bp, Homo sapien
gaccatataaggagatgcacgcctc

SEQ ID NO: 5363398 - DNA, 25 bp, Homo sapien
tccgggtcttgggagcacagtagtt

SEQ ID NO: 5363399 - DNA, 25 bp, Homo sapien
cacagtagttatcgggagcgtcgcc

SEQ ID NO: 5363400 - DNA, 25 bp, Homo sapien
aagaatccttcgttccactacggag

SEQ ID NO: 5363401 - DNA, 25 bp, Homo sapien
cgggatctctgcctggtcccaggag

SEQ ID NO: 5363402 - DNA, 25 bp, Homo sapien
ctgaaatgggagattcttccaggca

SEQ ID NO: 5363403 - DNA, 25 bp, Homo sapien
tgagtgaacggtttgcttccctaaa

SEQ ID NO: 5363404 - DNA, 25 bp, Homo sapien
atgtctaaagtctgtgcaaacctgg

SEQ ID NO: 5363405 - DNA, 25 bp, Homo sapien
caccatggctggcaagagtgtttat

SEQ ID NO: 5363406 - DNA, 25 bp, Homo sapien
gacgtctgaatgtgatcagtggcat

SEQ ID NO: 5363407 - DNA, 25 bp, Homo sapien
acagtggctgttggtgacgtctgaa

SEQ ID NO: 5363408 - DNA, 25 bp, Homo sapien
tgagaaggcagcgtcaaggaaggat

SEQ ID NO: 5363409 - DNA, 25 bp, Homo sapien
actgacacagccgaggagcagtggc

SEQ ID NO: 5363410 - DNA, 25 bp, Homo sapien
gcaaggcagcgatcagtttctgagc

SEQ ID NO: 5363411 - DNA, 25 bp, Homo sapien
tgaagcaaggcagcgatcagtttct

SEQ ID NO: 5363412 - DNA, 25 bp, Homo sapien
cctgaagcaaggcagcgatcagttt

SEQ ID NO: 5363413 - DNA, 25 bp, Homo sapien
aaggcagcgatcagtttctgagctc

SEQ ID NO: 5363414 - DNA, 25 bp, Homo sapien
atctacctggagttagatcccacag

SEQ ID NO: 5363415 - DNA, 25 bp, Homo sapien
gattctctagaagacaccagctggg

SEQ ID NO: 5363416 - DNA, 25 bp, Homo sapien
tcagatgccgcttgcaaatagtagg

SEQ ID NO: 5363417 - DNA, 25 bp, Homo sapien
tactggatgctcacaatgcagaaca

SEQ ID NO: 5363418 - DNA, 25 bp, Homo sapien
ccaaagtctattgcatcatttgtat

SEQ ID NO: 5363419 - DNA, 25 bp, Homo sapien
tgttttgaggtgaaggcaattaaga

SEQ ID NO: 5363420 - DNA, 25 bp, Homo sapien
cataggtttttcggaactggtggtg

SEQ ID NO: 5363421 - DNA, 25 bp, Homo sapien
gattgttttgaggtgaaggcaatta

SEQ ID NO: 5363422 - DNA, 25 bp, Homo sapien
tgcattggcagcgtagctcagagga

SEQ ID NO: 5363423 - DNA, 25 bp, Homo sapien
cattggcagcgtagctcagaggagt

SEQ ID NO: 5363424 - DNA, 25 bp, Homo sapien
ctgttgcgtgcattggcagcgtagc

SEQ ID NO: 5363425 - DNA, 25 bp, Homo sapien
tgcgtgcattggcagcgtagctcag

SEQ ID NO: 5363426 - DNA, 25 bp, Homo sapien
ctctgatgtttgcccccagaggaat

SEQ ID NO: 5363427 - DNA, 25 bp, Homo sapien
gtcgctctcttctgctctgcaccag

SEQ ID NO: 5363428 - DNA, 25 bp, Homo sapien
atcctgcctagggtcgctctcttct

SEQ ID NO: 5363429 - DNA, 25 bp, Homo sapien
cagacatcctgcctagggtcgctct

SEQ ID NO: 5363430 - DNA, 25 bp, Homo sapien
gacatcctgcctagggtcgctctct

SEQ ID NO: 5363431 - DNA, 25 bp, Homo sapien
tgaaacacttctgtttcagtgaagt

SEQ ID NO: 5363432 - DNA, 25 bp, Homo sapien
ggcggctgctctgtactctgtacag

SEQ ID NO: 5363433 - DNA, 25 bp, Homo sapien
gcttccaggtctgcccttggcggct

SEQ ID NO: 5363434 - DNA, 25 bp, Homo sapien
tgctcctcttactgtggggatcctg

SEQ ID NO: 5363435 - DNA, 25 bp, Homo sapien
ggctgctctgtactctgtacagaca

SEQ ID NO: 5363436 - DNA, 25 bp, Homo sapien
gatgggaggcatgtcatggcctgtc

SEQ ID NO: 5363437 - DNA, 25 bp, Homo sapien
ttggatgggaggcatgtcatggcct

SEQ ID NO: 5363438 - DNA, 25 bp, Homo sapien
tggatgggaggcatgtcatggcctg

SEQ ID NO: 5363439 - DNA, 25 bp, Homo sapien
gttggatgggaggcatgtcatggcc

SEQ ID NO: 5363440 - DNA, 25 bp, Homo sapien
tggaagccctgaatagaacaatgaa

SEQ ID NO: 5363441 - DNA, 25 bp, Homo sapien
caggtccctgtgctttaggtcatgg

SEQ ID NO: 5363442 - DNA, 25 bp, Homo sapien
ttcagagatcggtagaaagagtgca

SEQ ID NO: 5363443 - DNA, 25 bp, Homo sapien
aaagtacgaaacctgctgaaaggca

SEQ ID NO: 5363444 - DNA, 25 bp, Homo sapien
tcttttcatcccaggctttccggaa

SEQ ID NO: 5363445 - DNA, 25 bp, Homo sapien
aacagattcccactgaaagggggca

SEQ ID NO: 5363446 - DNA, 25 bp, Homo sapien
actgaaagggggcagaggttcaatt

SEQ ID NO: 5363447 - DNA, 25 bp, Homo sapien
tcatcccaggctttccggaaattct

SEQ ID NO: 5363448 - DNA, 25 bp, Homo sapien
atctctcctcattcccaatgagcag

SEQ ID NO: 5363449 - DNA, 25 bp, Homo sapien
gcttctgttcttgggctctgccgtt

SEQ ID NO: 5363450 - DNA, 25 bp, Homo sapien
ggacactccctctgcatgcaacaag

SEQ ID NO: 5363451 - DNA, 25 bp, Homo sapien
agctgacaccccctgtagctctggg

SEQ ID NO: 5363452 - DNA, 25 bp, Homo sapien
tggcaagggtgagagaagggcacag

SEQ ID NO: 5363453 - DNA, 25 bp, Homo sapien
ggaaggatggcaagggtgagagaag

SEQ ID NO: 5363454 - DNA, 25 bp, Homo sapien
agagaagggcacaggggaaccagtg

SEQ ID NO: 5363455 - DNA, 25 bp, Homo sapien
ggcacaggggaaccagtggccctta

SEQ ID NO: 5363456 - DNA, 25 bp, Homo sapien
tgcaggcggactgcctggttggatg

SEQ ID NO: 5363457 - DNA, 25 bp, Homo sapien
tctgtcctccagcccgatgagcagg

SEQ ID NO: 5363458 - DNA, 25 bp, Homo sapien
tgtcctccagcccgatgagcaggga

SEQ ID NO: 5363459 - DNA, 25 bp, Homo sapien
gctgtgcaggcggactgcctggttg

SEQ ID NO: 5363460 - DNA, 25 bp, Homo sapien
aaggcacgtctggacattggccagg

SEQ ID NO: 5363461 - DNA, 25 bp, Homo sapien
taaggcacgtctggacattggccag

SEQ ID NO: 5363462 - DNA, 25 bp, Homo sapien
taaataaggcacgtctggacattgg

SEQ ID NO: 5363463 - DNA, 25 bp, Homo sapien
aataaggcacgtctggacattggcc

SEQ ID NO: 5363464 - DNA, 25 bp, Homo sapien
tcctgaaaggatgtgccacaaatgt

SEQ ID NO: 5363465 - DNA, 25 bp, Homo sapien
taataaaaagcaggtcatggcccac

SEQ ID NO: 5363466 - DNA, 25 bp, Homo sapien
caacaacagtggtcacccttgaggg

SEQ ID NO: 5363467 - DNA, 25 bp, Homo sapien
taaaatcttagtttccgagactcag

SEQ ID NO: 5363468 - DNA, 25 bp, Homo sapien
tcatctttgagggagtcgctgtcac

SEQ ID NO: 5363469 - DNA, 25 bp, Homo sapien
gcacctttcccttatagtcactgta

SEQ ID NO: 5363470 - DNA, 25 bp, Homo sapien
tgtcactacagcttcttgctcaggg

SEQ ID NO: 5363471 - DNA, 25 bp, Homo sapien
tgtaggtgccatttaccactgttgc

SEQ ID NO: 5363472 - DNA, 25 bp, Homo sapien
gtaggatggtacaaagctcagccac

SEQ ID NO: 5363473 - DNA, 25 bp, Homo sapien
tgtacgtaggatggtacaaagctca

SEQ ID NO: 5363474 - DNA, 25 bp, Homo sapien
ctttgtacgtaggatggtacaaagc

SEQ ID NO: 5363475 - DNA, 25 bp, Homo sapien
tacgtaggatggtacaaagctcagc

SEQ ID NO: 5363476 - DNA, 25 bp, Homo sapien
cagcaatcccaaaccgtaaattctc

SEQ ID NO: 5363477 - DNA, 25 bp, Homo sapien
ctctccatgggtagcagtatggtgg

SEQ ID NO: 5363478 - DNA, 25 bp, Homo sapien
gttgtgcagccgctgtacgttgcac

SEQ ID NO: 5363479 - DNA, 25 bp, Homo sapien
gccgctgtacgttgcaccagcaatc

SEQ ID NO: 5363480 - DNA, 25 bp, Homo sapien
aggttcctcccccatccatttgtga

SEQ ID NO: 5363481 - DNA, 25 bp, Homo sapien
tggcaagaaataggaaggttctcag

SEQ ID NO: 5363482 - DNA, 25 bp, Homo sapien
caagaaataggaaggttctcaggtt

SEQ ID NO: 5363483 - DNA, 25 bp, Homo sapien
ggttcctcccccatccatttgtgaa

SEQ ID NO: 5363484 - DNA, 25 bp, Homo sapien
atgcacatcaagagagcctcagact

SEQ ID NO: 5363485 - DNA, 25 bp, Homo sapien
gagcctcagactcaacagaatcctt

SEQ ID NO: 5363486 - DNA, 25 bp, Homo sapien
caaggtcttcgtctgtgataataca

SEQ ID NO: 5363487 - DNA, 25 bp, Homo sapien
tttctcaaggtcttcgtctgtgata

SEQ ID NO: 5363488 - DNA, 25 bp, Homo sapien
aaacagagcttggagctcaactaga

SEQ ID NO: 5363489 - DNA, 25 bp, Homo sapien
cagggtagtctggatactcagggta

SEQ ID NO: 5363490 - DNA, 25 bp, Homo sapien
tttcttgagtgccagggtagtctgg

SEQ ID NO: 5363491 - DNA, 25 bp, Homo sapien
gctcaactagagagaccaaaagtct

SEQ ID NO: 5363492 - DNA, 25 bp, Homo sapien
ttcagagagcttaggcaacaaggac

SEQ ID NO: 5363493 - DNA, 25 bp, Homo sapien
catcagatacacctttttccaaaag

SEQ ID NO: 5363494 - DNA, 25 bp, Homo sapien
gacatcagatacacctttttccaaa

SEQ ID NO: 5363495 - DNA, 25 bp, Homo sapien
caagacatcagatacacctttttcc

SEQ ID NO: 5363496 - DNA, 25 bp, Homo sapien
ggttaaagagataatcagggattcc

SEQ ID NO: 5363497 - DNA, 25 bp, Homo sapien
tgtaacaggcaagactaagaaacca

SEQ ID NO: 5363498 - DNA, 25 bp, Homo sapien
atttgccagctcttaaggtgtaaca

SEQ ID NO: 5363499 - DNA, 25 bp, Homo sapien
cagaaatttgcaacttggaggttaa

SEQ ID NO: 5363500 - DNA, 25 bp, Homo sapien
cagaccccctgtgattttcaatatg

SEQ ID NO: 5363501 - DNA, 25 bp, Homo sapien
ataaaattaactgtgacagggtcat

SEQ ID NO: 5363502 - DNA, 25 bp, Homo sapien
gaccccctgtgattttcaatatgca

SEQ ID NO: 5363503 - DNA, 25 bp, Homo sapien
cccctgtgattttcaatatgcaata

SEQ ID NO: 5363504 - DNA, 25 bp, Homo sapien
cctgccgattctcttttgtaatgaa

SEQ ID NO: 5363505 - DNA, 25 bp, Homo sapien
gccaccattcatgttctctcatcag

SEQ ID NO: 5363506 - DNA, 25 bp, Homo sapien
tcagccagtgaaaacctgccgattc

SEQ ID NO: 5363507 - DNA, 25 bp, Homo sapien
agccaccattcatgttctctcatca

SEQ ID NO: 5363508 - DNA, 25 bp, Homo sapien
gaaaacgatggacttagtctccagt

SEQ ID NO: 5363509 - DNA, 25 bp, Homo sapien
ctgtaaaggtatgaacgagaaaacg

SEQ ID NO: 5363510 - DNA, 25 bp, Homo sapien
tggacttagtctccagttgattttg

SEQ ID NO: 5363511 - DNA, 25 bp, Homo sapien
ggtatgaacgagaaaacgatggact

SEQ ID NO: 5363512 - DNA, 25 bp, Homo sapien
ctagcggtgcattcaagttccttca

SEQ ID NO: 5363513 - DNA, 25 bp, Homo sapien
ggatttcttgaggactccttcaact

SEQ ID NO: 5363514 - DNA, 25 bp, Homo sapien
tgaggactccttcaactgaatattc

SEQ ID NO: 5363515 - DNA, 25 bp, Homo sapien
agtcatatccctagcggtgcattca

SEQ ID NO: 5363516 - DNA, 25 bp, Homo sapien
aggccacctccaaaccacccagtct

SEQ ID NO: 5363517 - DNA, 25 bp, Homo sapien
caggccacctccaaaccacccagtc

SEQ ID NO: 5363518 - DNA, 25 bp, Homo sapien
ctccaaaccacccagtctccactct

SEQ ID NO: 5363519 - DNA, 25 bp, Homo sapien
caaaccacccagtctccactctcac

SEQ ID NO: 5363520 - DNA, 25 bp, Homo sapien
tgcccctaaaggaggccacttgtaa

SEQ ID NO: 5363521 - DNA, 25 bp, Homo sapien
ttgcccctaaaggaggccacttgta

SEQ ID NO: 5363522 - DNA, 25 bp, Homo sapien
ctttgcccctaaaggaggccacttg

SEQ ID NO: 5363523 - DNA, 25 bp, Homo sapien
cccctatctgtgaagtcatttggca

SEQ ID NO: 5363524 - DNA, 25 bp, Homo sapien
ctttttcgatgatgaaagctgctgc

SEQ ID NO: 5363525 - DNA, 25 bp, Homo sapien
cagaatctgcgtgttgttgatatca

SEQ ID NO: 5363526 - DNA, 25 bp, Homo sapien
cctcttgaagtctatgcacttggag

SEQ ID NO: 5363527 - DNA, 25 bp, Homo sapien
tctatagtggtggcttgagaaagaa

SEQ ID NO: 5363528 - DNA, 25 bp, Homo sapien
agaaaatggacttctatagtggtgg

SEQ ID NO: 5363529 - DNA, 25 bp, Homo sapien
ctatagtggtggcttgagaaagaag

SEQ ID NO: 5363530 - DNA, 25 bp, Homo sapien
aggatgtgggactttccatggcctt

SEQ ID NO: 5363531 - DNA, 25 bp, Homo sapien
ttctcagatgtgacattccctgcac

SEQ ID NO: 5363532 - DNA, 25 bp, Homo sapien
caaccgtctaactttgagccaggtg

SEQ ID NO: 5363533 - DNA, 25 bp, Homo sapien
caactggcagttgggatcaatgtct

SEQ ID NO: 5363534 - DNA, 25 bp, Homo sapien
taatagtataagacatcctgcgatg

SEQ ID NO: 5363535 - DNA, 25 bp, Homo sapien
tttaattggcctacatcacatctgg

SEQ ID NO: 5363536 - DNA, 25 bp, Homo sapien
tgtccccactccttgaaacagttga

SEQ ID NO: 5363537 - DNA, 25 bp, Homo sapien
gagtggaaactacccatgagaaagc

SEQ ID NO: 5363538 - DNA, 25 bp, Homo sapien
agtaggaatggtgtggagtgtgacc

SEQ ID NO: 5363539 - DNA, 25 bp, Homo sapien
ctagtaggaatggtgtggagtgtga

SEQ ID NO: 5363540 - DNA, 25 bp, Homo sapien
tagtaggaatggtgtggagtgtgac

SEQ ID NO: 5363541 - DNA, 25 bp, Homo sapien
cctccccatgggatcaggctaaggg

SEQ ID NO: 5363542 - DNA, 25 bp, Homo sapien
gctaagggtagatgtcagccaaacc

SEQ ID NO: 5363543 - DNA, 25 bp, Homo sapien
tattggagagcttagcatccccagc

SEQ ID NO: 5363544 - DNA, 25 bp, Homo sapien
gaagtctgggctcctcgacagaagg

SEQ ID NO: 5363545 - DNA, 25 bp, Homo sapien
aatcaaactgtttcctatccgcgtt

SEQ ID NO: 5363546 - DNA, 25 bp, Homo sapien
aatgaagctgctttgggacccctcc

SEQ ID NO: 5363547 - DNA, 25 bp, Homo sapien
ctcccactagtagattcagaatcaa

SEQ ID NO: 5363548 - DNA, 25 bp, Homo sapien
ttcctatccgcgttcattgcacctg

SEQ ID NO: 5363549 - DNA, 25 bp, Homo sapien
tatagtgcttggttcattggatgga

SEQ ID NO: 5363550 - DNA, 25 bp, Homo sapien
tccagagtccactgaagatatagtg

SEQ ID NO: 5363551 - DNA, 25 bp, Homo sapien
tccactgaagatatagtgcttggtt

SEQ ID NO: 5363552 - DNA, 25 bp, Homo sapien
cattggatggatagctattcccttc

SEQ ID NO: 5363553 - DNA, 25 bp, Homo sapien
ggcagccggcgtcagtttccattca

SEQ ID NO: 5363554 - DNA, 25 bp, Homo sapien
gagctgcaggccgagcgagtcctta

SEQ ID NO: 5363555 - DNA, 25 bp, Homo sapien
gtccttatcctgaatgtcattccac

SEQ ID NO: 5363556 - DNA, 25 bp, Homo sapien
cttctccgtccctggcagccggcgt

SEQ ID NO: 5363557 - DNA, 25 bp, Homo sapien
gggacttgctgttagccgcttccag

SEQ ID NO: 5363558 - DNA, 25 bp, Homo sapien
aatgcctgtgggtttgagaacgtcc

SEQ ID NO: 5363559 - DNA, 25 bp, Homo sapien
ccagctggtgacatctaaaggcttg

SEQ ID NO: 5363560 - DNA, 25 bp, Homo sapien
ggtgacatctaaaggcttggaggcc

SEQ ID NO: 5363561 - DNA, 25 bp, Homo sapien
ccctctctgtctccgaggcccactc

SEQ ID NO: 5363562 - DNA, 25 bp, Homo sapien
caaatagcaggtgccttcccccatg

SEQ ID NO: 5363563 - DNA, 25 bp, Homo sapien
ccagggcaaatagcaggtgccttcc

SEQ ID NO: 5363564 - DNA, 25 bp, Homo sapien
agggcaaatagcaggtgccttcccc

SEQ ID NO: 5363565 - DNA, 25 bp, Homo sapien
aaaattccgtcctgctcttcaaaca

SEQ ID NO: 5363566 - DNA, 25 bp, Homo sapien
attccgtcctgctcttcaaacacag

SEQ ID NO: 5363567 - DNA, 25 bp, Homo sapien
aggaaaaattccgtcctgctcttca

SEQ ID NO: 5363568 - DNA, 25 bp, Homo sapien
ctggatgctggggaaccactggtga

SEQ ID NO: 5363569 - DNA, 25 bp, Homo sapien
tgtgcattaggaggtttgcgccctc

SEQ ID NO: 5363570 - DNA, 25 bp, Homo sapien
ctccatggcagacccgtgtgtgtcg

SEQ ID NO: 5363571 - DNA, 25 bp, Homo sapien
ctctaccagacgaggagagctggag

SEQ ID NO: 5363572 - DNA, 25 bp, Homo sapien
agtccctaagcggtatgtttgtgca

SEQ ID NO: 5363573 - DNA, 25 bp, Homo sapien
tacagcgatggactctgagcctggt

SEQ ID NO: 5363574 - DNA, 25 bp, Homo sapien
gggtttgcttcctgctacagcgatg

SEQ ID NO: 5363575 - DNA, 25 bp, Homo sapien
tctggtctccgttgaagccttgcaa

SEQ ID NO: 5363576 - DNA, 25 bp, Homo sapien
cactcatctgcgtgttcctgagcca

SEQ ID NO: 5363577 - DNA, 25 bp, Homo sapien
cccagtttagcaagggtggggccat

SEQ ID NO: 5363578 - DNA, 25 bp, Homo sapien
tcccagtttagcaagggtggggcca

SEQ ID NO: 5363579 - DNA, 25 bp, Homo sapien
gctcccagtttagcaagggtggggc

SEQ ID NO: 5363580 - DNA, 25 bp, Homo sapien
tcacacagctggccttataggccat

SEQ ID NO: 5363581 - DNA, 25 bp, Homo sapien
gcatcacacagctggccttataggc

SEQ ID NO: 5363582 - DNA, 25 bp, Homo sapien
ctggtgtgaacctgttctcctgctg

SEQ ID NO: 5363583 - DNA, 25 bp, Homo sapien
gcccatgtctttcctggtgtgaacc

SEQ ID NO: 5363584 - DNA, 25 bp, Homo sapien
catgctgaggttgacccactggcac

SEQ ID NO: 5363585 - DNA, 25 bp, Homo sapien
tgttgaatctgttgagcctctccca

SEQ ID NO: 5363586 - DNA, 25 bp, Homo sapien
tgcaaagatgcggaggagcctgtct

SEQ ID NO: 5363587 - DNA, 25 bp, Homo sapien
ggcactcgtaagaccagcatgctga

SEQ ID NO: 5363588 - DNA, 25 bp, Homo sapien
aactccaggagaaaccatggtgatg

SEQ ID NO: 5363589 - DNA, 25 bp, Homo sapien
actccaggagaaaccatggtgatgt

SEQ ID NO: 5363590 - DNA, 25 bp, Homo sapien
aaacttaacgtgcattcttcatgtg

SEQ ID NO: 5363591 - DNA, 25 bp, Homo sapien
tttagctaaacttaacgtgcattct

SEQ ID NO: 5363592 - DNA, 25 bp, Homo sapien
cactattagtcatgcatgccgggaa

SEQ ID NO: 5363593 - DNA, 25 bp, Homo sapien
cagctgcatttgttccaggtggtca

SEQ ID NO: 5363594 - DNA, 25 bp, Homo sapien
tgggttccacagacacaagcattcc

SEQ ID NO: 5363595 - DNA, 25 bp, Homo sapien
ccctatgttggtggagatgcgtcaa

SEQ ID NO: 5363596 - DNA, 25 bp, Homo sapien
ggccctatctggtgtctttgcaaga

SEQ ID NO: 5363597 - DNA, 25 bp, Homo sapien
cccaacaggtggcttgagcgtacca

SEQ ID NO: 5363598 - DNA, 25 bp, Homo sapien
gcctcagtggcagatacagtcacat

SEQ ID NO: 5363599 - DNA, 25 bp, Homo sapien
gcagggcagtcaccgtatctacttg

SEQ ID NO: 5363600 - DNA, 25 bp, Homo sapien
tgtgggcaggggtgagtcaccctgc

SEQ ID NO: 5363601 - DNA, 25 bp, Homo sapien
ggtgagtcaccctgcccagtcatct

SEQ ID NO: 5363602 - DNA, 25 bp, Homo sapien
caggggtgagtcaccctgcccagtc

SEQ ID NO: 5363603 - DNA, 25 bp, Homo sapien
gggtgagtcaccctgcccagtcatc

SEQ ID NO: 5363604 - DNA, 25 bp, Homo sapien
tggtcaagaggcctgagagctcttc

SEQ ID NO: 5363605 - DNA, 25 bp, Homo sapien
gcttccttagcctgcatctccataa

SEQ ID NO: 5363606 - DNA, 25 bp, Homo sapien
tcaagaggcctgagagctcttcctt

SEQ ID NO: 5363607 - DNA, 25 bp, Homo sapien
tcaccaccaacagtagcatcctgta

SEQ ID NO: 5363608 - DNA, 25 bp, Homo sapien
tagagcttggatgatggtacagtgt

SEQ ID NO: 5363609 - DNA, 25 bp, Homo sapien
gaatttgaatttggccttgaaggaa

SEQ ID NO: 5363610 - DNA, 25 bp, Homo sapien
aaaccattgcatgcttgcaggacat

SEQ ID NO: 5363611 - DNA, 25 bp, Homo sapien
tacctctggcaataaagattccata

SEQ ID NO: 5363612 - DNA, 25 bp, Homo sapien
taacctctcgttgagctctgatctg

SEQ ID NO: 5363613 - DNA, 25 bp, Homo sapien
tgatctgagtatgcctaaggctcct

SEQ ID NO: 5363614 - DNA, 25 bp, Homo sapien
tcaggtaggcggcaacatcctggaa

SEQ ID NO: 5363615 - DNA, 25 bp, Homo sapien
tcagaaaggaggctgaaatccagca

SEQ ID NO: 5363616 - DNA, 25 bp, Homo sapien
cctgcacagggcccggtctttaggg

SEQ ID NO: 5363617 - DNA, 25 bp, Homo sapien
ctgcacagggcccggtctttagggt

SEQ ID NO: 5363618 - DNA, 25 bp, Homo sapien
tgcacagggcccggtctttagggtg

SEQ ID NO: 5363619 - DNA, 25 bp, Homo sapien
cagggcccggtctttagggtgtcat

SEQ ID NO: 5363620 - DNA, 25 bp, Homo sapien
agatggccttgtccggaattgctcg

SEQ ID NO: 5363621 - DNA, 25 bp, Homo sapien
ctgagctgtgcaagttgcagatggc

SEQ ID NO: 5363622 - DNA, 25 bp, Homo sapien
agctgtgcaagttgcagatggcctt

SEQ ID NO: 5363623 - DNA, 25 bp, Homo sapien
tccggaattgctcggggaacacacg

SEQ ID NO: 5363624 - DNA, 25 bp, Homo sapien
caaatggactcagcctctttaggcc

SEQ ID NO: 5363625 - DNA, 25 bp, Homo sapien
tagctgcccatagttgaagctggcc

SEQ ID NO: 5363626 - DNA, 25 bp, Homo sapien
caggatccaaatggactcagcctct

SEQ ID NO: 5363627 - DNA, 25 bp, Homo sapien
ttaggccacctctccctgatagctg

SEQ ID NO: 5363628 - DNA, 25 bp, Homo sapien
cattgccaaagtgaaagcatattgc

SEQ ID NO: 5363629 - DNA, 25 bp, Homo sapien
cctctgaataatccgattaacttgt

SEQ ID NO: 5363630 - DNA, 25 bp, Homo sapien
atccgattaacttgtatccagccag

SEQ ID NO: 5363631 - DNA, 25 bp, Homo sapien
agccattgccaaagtgaaagcatat

SEQ ID NO: 5363632 - DNA, 25 bp, Homo sapien
gaatccattggaagccaccaatgcg

SEQ ID NO: 5363633 - DNA, 25 bp, Homo sapien
gaatggggagtatagggctgccctg

SEQ ID NO: 5363634 - DNA, 25 bp, Homo sapien
gccaccaatgcgcaggcacaagtca

SEQ ID NO: 5363635 - DNA, 25 bp, Homo sapien
caccaatgcgcaggcacaagtcagt

SEQ ID NO: 5363636 - DNA, 25 bp, Homo sapien
gaagtgaacctgtcagcaaaccagg

SEQ ID NO: 5363637 - DNA, 25 bp, Homo sapien
gcccaggtggctgcggctagagctt

SEQ ID NO: 5363638 - DNA, 25 bp, Homo sapien
gaccctcaattggagcagccgagag

SEQ ID NO: 5363639 - DNA, 25 bp, Homo sapien
tgcggctagagcttttgctctgcac

SEQ ID NO: 5363640 - DNA, 25 bp, Homo sapien
ttgggtgggaccctcaattggagca

SEQ ID NO: 5363641 - DNA, 25 bp, Homo sapien
aacagtttttgttgaggcgactgca

SEQ ID NO: 5363642 - DNA, 25 bp, Homo sapien
agtttttgttgaggcgactgcaaac

SEQ ID NO: 5363643 - DNA, 25 bp, Homo sapien
cggaacagtttttgttgaggcgact

SEQ ID NO: 5363644 - DNA, 25 bp, Homo sapien
cagtttttgttgaggcgactgcaaa

SEQ ID NO: 5363645 - DNA, 25 bp, Homo sapien
gctgggacagaagcttcatgctgga

SEQ ID NO: 5363646 - DNA, 25 bp, Homo sapien
acagggtggccaaacatacgtattc

SEQ ID NO: 5363647 - DNA, 25 bp, Homo sapien
ggctcagaagtgtgcctctggccaa

SEQ ID NO: 5363648 - DNA, 25 bp, Homo sapien
gaagaactacgaatattcatgaagg

SEQ ID NO: 5363649 - DNA, 25 bp, Homo sapien
tcaggacatgaaggcggatgaatgt

SEQ ID NO: 5363650 - DNA, 25 bp, Homo sapien
cagtctcccatccaatcaaagctgt

SEQ ID NO: 5363651 - DNA, 25 bp, Homo sapien
gaaagttactggagtcagtctccca

SEQ ID NO: 5363652 - DNA, 25 bp, Homo sapien
gcaacaggggtcagttactcagcgt

SEQ ID NO: 5363653 - DNA, 25 bp, Homo sapien
ccctcgtgtctagatttctgaagga

SEQ ID NO: 5363654 - DNA, 25 bp, Homo sapien
gcagaacaaatcctaaggccaggtt

SEQ ID NO: 5363655 - DNA, 25 bp, Homo sapien
gccaggttagactagctttgcactg

SEQ ID NO: 5363656 - DNA, 25 bp, Homo sapien
catgtgatggatatttctccgtttt

SEQ ID NO: 5363657 - DNA, 25 bp, Homo sapien
accatgtttataggtgctgaggacc

SEQ ID NO: 5363658 - DNA, 25 bp, Homo sapien
ggctgtcttagagcaggcacgcaag

SEQ ID NO: 5363659 - DNA, 25 bp, Homo sapien
gattggacataacatggaaccttag

SEQ ID NO: 5363660 - DNA, 25 bp, Homo sapien
tagaagcagatctcaagcactcacg

SEQ ID NO: 5363661 - DNA, 25 bp, Homo sapien
gcctgctagactattaagctgatga

SEQ ID NO: 5363662 - DNA, 25 bp, Homo sapien
ccacaaaatgctccttcaccacatg

SEQ ID NO: 5363663 - DNA, 25 bp, Homo sapien
cagtgcctgctagactattaagctg

SEQ ID NO: 5363664 - DNA, 25 bp, Homo sapien
tagcacccaagaaagcagtgcctgc

SEQ ID NO: 5363665 - DNA, 25 bp, Homo sapien
gtgcagggggcactcatgaggtgag

SEQ ID NO: 5363666 - DNA, 25 bp, Homo sapien
gggcagcgggaaccatttcacccaa

SEQ ID NO: 5363667 - DNA, 25 bp, Homo sapien
gtcgacccagattcctgtctcagtt

SEQ ID NO: 5363668 - DNA, 25 bp, Homo sapien
tcgacggctcctctcacccacaggt

SEQ ID NO: 5363669 - DNA, 25 bp, Homo sapien
tcacatgaggctgataactttaggg

SEQ ID NO: 5363670 - DNA, 25 bp, Homo sapien
cattgagatctcatttcgattgttt

SEQ ID NO: 5363671 - DNA, 25 bp, Homo sapien
caggaagagcagctacaactcgagc

SEQ ID NO: 5363672 - DNA, 25 bp, Homo sapien
ctttgcagctttagtgtcacatgag

SEQ ID NO: 5363673 - DNA, 25 bp, Homo sapien
gggagctctcagcagacgtgcttct

SEQ ID NO: 5363674 - DNA, 25 bp, Homo sapien
ttaaattgcaagcttccgggagctc

SEQ ID NO: 5363675 - DNA, 25 bp, Homo sapien
cttgggcccttgatcagtgtgtatt

SEQ ID NO: 5363676 - DNA, 25 bp, Homo sapien
gacgtgcttctaggtccgactctaa

SEQ ID NO: 5363677 - DNA, 25 bp, Homo sapien
cttgcaggatagctcctgcccaggc

SEQ ID NO: 5363678 - DNA, 25 bp, Homo sapien
tccatttggaccctggcttggcgag

SEQ ID NO: 5363679 - DNA, 25 bp, Homo sapien
cagcagggaacaccacctgctcatt

SEQ ID NO: 5363680 - DNA, 25 bp, Homo sapien
tcagggatggcgaggagaggagtag

SEQ ID NO: 5363681 - DNA, 25 bp, Homo sapien
agagaggagatctgatttgtgtgct

SEQ ID NO: 5363682 - DNA, 25 bp, Homo sapien
agatctgatttgtgtgctgccactg

SEQ ID NO: 5363683 - DNA, 25 bp, Homo sapien
gcgagtagagccaaatgacagtgtg

SEQ ID NO: 5363684 - DNA, 25 bp, Homo sapien
tgggcgagtagagccaaatgacagt

SEQ ID NO: 5363685 - DNA, 25 bp, Homo sapien
gagtagagccaaatgacagtgtggc

SEQ ID NO: 5363686 - DNA, 25 bp, Homo sapien
ctgggcgagtagagccaaatgacag

SEQ ID NO: 5363687 - DNA, 25 bp, Homo sapien
gatctacgagtcctctgccttatcc

SEQ ID NO: 5363688 - DNA, 25 bp, Homo sapien
gcccacaaagactctccatagcccc

SEQ ID NO: 5363689 - DNA, 25 bp, Homo sapien
ctgtaacagatctacgagtcctctg

SEQ ID NO: 5363690 - DNA, 25 bp, Homo sapien
ctctcggtcccaggcccacaaagac

SEQ ID NO: 5363691 - DNA, 25 bp, Homo sapien
agcaaattggaatacaaagaccttg

SEQ ID NO: 5363692 - DNA, 25 bp, Homo sapien
tatggtcccgatgacttgaactagc

SEQ ID NO: 5363693 - DNA, 25 bp, Homo sapien
gtgactgtctatggtcccgatgact

SEQ ID NO: 5363694 - DNA, 25 bp, Homo sapien
caaagaccttggtctgcatctcaaa

SEQ ID NO: 5363695 - DNA, 25 bp, Homo sapien
aattcactagacttggcgtcagaaa

SEQ ID NO: 5363696 - DNA, 25 bp, Homo sapien
taaaaattcactagacttggcgtca

SEQ ID NO: 5363697 - DNA, 25 bp, Homo sapien
ttcactagacttggcgtcagaaaac

SEQ ID NO: 5363698 - DNA, 25 bp, Homo sapien
aaaattcactagacttggcgtcaga

SEQ ID NO: 5363699 - DNA, 25 bp, Homo sapien
ttacattctatcttggaagcagaaa

SEQ ID NO: 5363700 - DNA, 25 bp, Homo sapien
cattctatcttggaagcagaaagcc

SEQ ID NO: 5363701 - DNA, 25 bp, Homo sapien
ttctatcttggaagcagaaagccca

SEQ ID NO: 5363702 - DNA, 25 bp, Homo sapien
tctatcttggaagcagaaagcccac

SEQ ID NO: 5363703 - DNA, 25 bp, Homo sapien
aaagcttctgggaaaatcgtcttcg

SEQ ID NO: 5363704 - DNA, 25 bp, Homo sapien
cccaggcggtaagcatgctcagtcg

SEQ ID NO: 5363705 - DNA, 25 bp, Homo sapien
agtgtctccgggacccactccttag

SEQ ID NO: 5363706 - DNA, 25 bp, Homo sapien
tctggggacccagagaatttgctca

SEQ ID NO: 5363707 - DNA, 25 bp, Homo sapien
gaaaccaactggaagacctctgaaa

SEQ ID NO: 5363708 - DNA, 25 bp, Homo sapien
ccaaaagggaaccagaggatgctac

SEQ ID NO: 5363709 - DNA, 25 bp, Homo sapien
tgctctaggactgatgtaacatggg

SEQ ID NO: 5363710 - DNA, 25 bp, Homo sapien
cagcaaagcttgtcttggtagctca

SEQ ID NO: 5363711 - DNA, 25 bp, Homo sapien
ggtactggagtgaaaaccaggcaac

SEQ ID NO: 5363712 - DNA, 25 bp, Homo sapien
tattctctagatgctgtttccagga

SEQ ID NO: 5363713 - DNA, 25 bp, Homo sapien
gagattttcaagacagttgctgcct

SEQ ID NO: 5363714 - DNA, 25 bp, Homo sapien
tttggtcactagatcaggagaggtc

SEQ ID NO: 5363715 - DNA, 25 bp, Homo sapien
tctgcttgggcggaacatccctgat

SEQ ID NO: 5363716 - DNA, 25 bp, Homo sapien
tggcacctccccttgtgcgacgtgg

SEQ ID NO: 5363717 - DNA, 25 bp, Homo sapien
accccatagcatactgcccgtggag

SEQ ID NO: 5363718 - DNA, 25 bp, Homo sapien
gcactgcgggaagtctgggtccctt

SEQ ID NO: 5363719 - DNA, 25 bp, Homo sapien
taacatgattcattccagggaggaa

SEQ ID NO: 5363720 - DNA, 25 bp, Homo sapien
ccagtgtccacagtttagcaggcat

SEQ ID NO: 5363721 - DNA, 25 bp, Homo sapien
gaaatccaggctacgaaagcttcct

SEQ ID NO: 5363722 - DNA, 25 bp, Homo sapien
gatgagtgactccttccggagcaca

SEQ ID NO: 5363723 - DNA, 25 bp, Homo sapien
ctgaggaccattggcctggctgctc

SEQ ID NO: 5363724 - DNA, 25 bp, Homo sapien
ggtggtcctccacctgcccaagtct

SEQ ID NO: 5363725 - DNA, 25 bp, Homo sapien
tcatcactgaggaccattggcctgg

SEQ ID NO: 5363726 - DNA, 25 bp, Homo sapien
ggaagccttggatggtcatcactga

SEQ ID NO: 5363727 - DNA, 25 bp, Homo sapien
tgtaaatgcctgtgtgatgtgcctc

SEQ ID NO: 5363728 - DNA, 25 bp, Homo sapien
gtaaatgcctgtgtgatgtgcctct

SEQ ID NO: 5363729 - DNA, 25 bp, Homo sapien
tgcaggtgccattgtaaatgcctgt

SEQ ID NO: 5363730 - DNA, 25 bp, Homo sapien
ctgttggaatagcttgcacaaggcc

SEQ ID NO: 5363731 - DNA, 25 bp, Homo sapien
gggagactgctgctacaggtcctga

SEQ ID NO: 5363732 - DNA, 25 bp, Homo sapien
gaggccaggtcaagtccaaatgtag

SEQ ID NO: 5363733 - DNA, 25 bp, Homo sapien
tcctgatgggaactctgacactggc

SEQ ID NO: 5363734 - DNA, 25 bp, Homo sapien
tcatgtggccacttctacacgtagc

SEQ ID NO: 5363735 - DNA, 25 bp, Homo sapien
tacacgtagcaggttccaggatatg

SEQ ID NO: 5363736 - DNA, 25 bp, Homo sapien
ggagatgcctagaaagacgcccatg

SEQ ID NO: 5363737 - DNA, 25 bp, Homo sapien
tagatttgcagtcacactacctctc

SEQ ID NO: 5363738 - DNA, 25 bp, Homo sapien
ttccctgctggtggcacctagctct

SEQ ID NO: 5363739 - DNA, 25 bp, Homo sapien
tgaggctccctttgtatcaaccaag

SEQ ID NO: 5363740 - DNA, 25 bp, Homo sapien
tagctctaaggctccccgtgtaacc

SEQ ID NO: 5363741 - DNA, 25 bp, Homo sapien
tgtatcaaccaagggtctttgcttt

SEQ ID NO: 5363742 - DNA, 25 bp, Homo sapien
aagggagaaaccagttacagctgag

SEQ ID NO: 5363743 - DNA, 25 bp, Homo sapien
gaagtggtcccgacccagtgtctga

SEQ ID NO: 5363744 - DNA, 25 bp, Homo sapien
catgtgtcatgccttgcgctttggg

SEQ ID NO: 5363745 - DNA, 25 bp, Homo sapien
tttgggacacccctagctcttgggc

SEQ ID NO: 5363746 - DNA, 25 bp, Homo sapien
cttccgcctgaggaagccctggtct

SEQ ID NO: 5363747 - DNA, 25 bp, Homo sapien
aaagtcagaattaaggccattagcc

SEQ ID NO: 5363748 - DNA, 25 bp, Homo sapien
ctcttgggtacagaaaaagtcagaa

SEQ ID NO: 5363749 - DNA, 25 bp, Homo sapien
ggccattagcctgtttctctttctg

SEQ ID NO: 5363750 - DNA, 25 bp, Homo sapien
tttctcttgggtacagaaaaagtca

SEQ ID NO: 5363751 - DNA, 25 bp, Homo sapien
catccgcaccctgcaggttaaggag

SEQ ID NO: 5363752 - DNA, 25 bp, Homo sapien
agccttgacccttcagcacctttgc

SEQ ID NO: 5363753 - DNA, 25 bp, Homo sapien
ccgcaccctgcaggttaaggagagc

SEQ ID NO: 5363754 - DNA, 25 bp, Homo sapien
ctttgcatccgcaccctgcaggtta

SEQ ID NO: 5363755 - DNA, 25 bp, Homo sapien
tcccagacacccttcaaaattggat

SEQ ID NO: 5363756 - DNA, 25 bp, Homo sapien
tcttcagctctgagtctttgagaac

SEQ ID NO: 5363757 - DNA, 25 bp, Homo sapien
cagcttgtaagctgcgtcctgcctg

SEQ ID NO: 5363758 - DNA, 25 bp, Homo sapien
tgtcgtcaaagtgtccaggaactct

SEQ ID NO: 5363759 - DNA, 25 bp, Homo sapien
ttccaccggtgtcttcccaacagcc

SEQ ID NO: 5363760 - DNA, 25 bp, Homo sapien
ctcctgggaactcttgatctctttg

SEQ ID NO: 5363761 - DNA, 25 bp, Homo sapien
ctgggaactcttgatctctttggcc

SEQ ID NO: 5363762 - DNA, 25 bp, Homo sapien
ttcccaacagcctctcggagcctcc

SEQ ID NO: 5363763 - DNA, 25 bp, Homo sapien
tgccttttagatagctgatctagcc

SEQ ID NO: 5363764 - DNA, 25 bp, Homo sapien
gatagctgatctagcctcacagatg

SEQ ID NO: 5363765 - DNA, 25 bp, Homo sapien
gatgtgcttctccagaagtggccgg

SEQ ID NO: 5363766 - DNA, 25 bp, Homo sapien
agaagtggccggatctctggtcctc

SEQ ID NO: 5363767 - DNA, 25 bp, Homo sapien
gatgatggtctgactggtctgacag

SEQ ID NO: 5363768 - DNA, 25 bp, Homo sapien
tgagcccctggaacaatgtatttgg

SEQ ID NO: 5363769 - DNA, 25 bp, Homo sapien
tctggtggccctccctgtgaatgga

SEQ ID NO: 5363770 - DNA, 25 bp, Homo sapien
atcgtctcaatttgggcaggtgtcc

SEQ ID NO: 5363771 - DNA, 25 bp, Homo sapien
taacagtctgtggacaccaatgcgc

SEQ ID NO: 5363772 - DNA, 25 bp, Homo sapien
tgaaaatgccgagctccctttgcag

SEQ ID NO: 5363773 - DNA, 25 bp, Homo sapien
tatcaaggtcctgtgtgtagagcca

SEQ ID NO: 5363774 - DNA, 25 bp, Homo sapien
cagcaccttggtttcgcctagccgt

SEQ ID NO: 5363775 - DNA, 25 bp, Homo sapien
ttagctctcctcatgcaacgtcaaa

SEQ ID NO: 5363776 - DNA, 25 bp, Homo sapien
gatagaacctgatcgtttctgagag

SEQ ID NO: 5363777 - DNA, 25 bp, Homo sapien
ggatccggcccgttgaaatcatttg

SEQ ID NO: 5363778 - DNA, 25 bp, Homo sapien
catgcaacgtcaaatgatagaacct

SEQ ID NO: 5363779 - DNA, 25 bp, Homo sapien
ttggcgaagagggtggcagcctcac

SEQ ID NO: 5363780 - DNA, 25 bp, Homo sapien
tcacctttatttccggtgtcataac

SEQ ID NO: 5363781 - DNA, 25 bp, Homo sapien
ggcagttactccagacacttgtgct

SEQ ID NO: 5363782 - DNA, 25 bp, Homo sapien
acacttgtgctcaccggcttggcga

SEQ ID NO: 5363783 - DNA, 25 bp, Homo sapien
ggcctcaacaccatgcgtggcattg

SEQ ID NO: 5363784 - DNA, 25 bp, Homo sapien
aacaccatgcgtggcattggcagtg

SEQ ID NO: 5363785 - DNA, 25 bp, Homo sapien
cagctggacggcaggtcccttctgt

SEQ ID NO: 5363786 - DNA, 25 bp, Homo sapien
cctggttggcctcaacaccatgcgt

SEQ ID NO: 5363787 - DNA, 25 bp, Homo sapien
gaagcttgggagaacctgatcacac

SEQ ID NO: 5363788 - DNA, 25 bp, Homo sapien
tcaggtgtttgcaggtatgcccagc

SEQ ID NO: 5363789 - DNA, 25 bp, Homo sapien
ccaaagtgacacgaccaaaagaccg

SEQ ID NO: 5363790 - DNA, 25 bp, Homo sapien
taacttgggcgactggttccctgga

SEQ ID NO: 5363791 - DNA, 25 bp, Homo sapien
gtgagctaaaaatacgggcagccgt

SEQ ID NO: 5363792 - DNA, 25 bp, Homo sapien
tgagctaaaaatacgggcagccgtt

SEQ ID NO: 5363793 - DNA, 25 bp, Homo sapien
tccaggtgggtctctcgctgccagc

SEQ ID NO: 5363794 - DNA, 25 bp, Homo sapien
tcgctgccagctgatgcacataggc

SEQ ID NO: 5363795 - DNA, 25 bp, Homo sapien
tgcacataggcaagacttgggtgga

SEQ ID NO: 5363796 - DNA, 25 bp, Homo sapien
gctgatgcacataggcaagacttgg

SEQ ID NO: 5363797 - DNA, 25 bp, Homo sapien
gagtgctcctcgtgttagaacctgc

SEQ ID NO: 5363798 - DNA, 25 bp, Homo sapien
tgcttagaggttgtccgctcccact

SEQ ID NO: 5363799 - DNA, 25 bp, Homo sapien
agttggaaggcactgcttagaggtt

SEQ ID NO: 5363800 - DNA, 25 bp, Homo sapien
gtgtggcaggtcagcccgaggcaag

SEQ ID NO: 5363801 - DNA, 25 bp, Homo sapien
tctcccacgtaacctctgtgccttc

SEQ ID NO: 5363802 - DNA, 25 bp, Homo sapien
cactccagaagaagagtgaccaggt

SEQ ID NO: 5363803 - DNA, 25 bp, Homo sapien
tccagaagaagagtgaccaggtgtg

SEQ ID NO: 5363804 - DNA, 25 bp, Homo sapien
ctgtgccttcacgtttttctcttca

SEQ ID NO: 5363805 - DNA, 25 bp, Homo sapien
catgcggttccatattgtgcaatgc

SEQ ID NO: 5363806 - DNA, 25 bp, Homo sapien
gttctaggaccggaagagactgcca

SEQ ID NO: 5363807 - DNA, 25 bp, Homo sapien
ttctaggaccggaagagactgccag

SEQ ID NO: 5363808 - DNA, 25 bp, Homo sapien
gactgccagccatgcggttccatat

SEQ ID NO: 5363809 - DNA, 25 bp, Homo sapien
ggtcagtgcagccatgtagcctggc

SEQ ID NO: 5363810 - DNA, 25 bp, Homo sapien
tgaacaccaaggaagggatcctgag

SEQ ID NO: 5363811 - DNA, 25 bp, Homo sapien
agtccccaggctccggttccaactg

SEQ ID NO: 5363812 - DNA, 25 bp, Homo sapien
cctggctgcaccgtatagtctggct

SEQ ID NO: 5363813 - DNA, 25 bp, Homo sapien
cctgccgggctgtcatctccttggg

SEQ ID NO: 5363814 - DNA, 25 bp, Homo sapien
catttgcccccttgttggacgtcat

SEQ ID NO: 5363815 - DNA, 25 bp, Homo sapien
ggggacaggactgtgatcatttgcc

SEQ ID NO: 5363816 - DNA, 25 bp, Homo sapien
ggacaggactgtgatcatttgcccc

SEQ ID NO: 5363817 - DNA, 25 bp, Homo sapien
tacgtctgttgaccagctcactcgg

SEQ ID NO: 5363818 - DNA, 25 bp, Homo sapien
cagccccagcccttacgtctgttga

SEQ ID NO: 5363819 - DNA, 25 bp, Homo sapien
cagcccttacgtctgttgaccagct

SEQ ID NO: 5363820 - DNA, 25 bp, Homo sapien
gttgaccagctcactcggcttgcct

SEQ ID NO: 5363821 - DNA, 25 bp, Homo sapien
tacaatgtgatgcaggagcttggcc

SEQ ID NO: 5363822 - DNA, 25 bp, Homo sapien
ctttctggtgtgcaagaggagatac

SEQ ID NO: 5363823 - DNA, 25 bp, Homo sapien
tacttggtaggcaaagtgtgggtca

SEQ ID NO: 5363824 - DNA, 25 bp, Homo sapien
gtcacctggtggttttgacctcgag

SEQ ID NO: 5363825 - DNA, 25 bp, Homo sapien
cccactgagcactgctagaagaaga

SEQ ID NO: 5363826 - DNA, 25 bp, Homo sapien
acccactgagcactgctagaagaag

SEQ ID NO: 5363827 - DNA, 25 bp, Homo sapien
ttagttcaagtcctgctccgttctg

SEQ ID NO: 5363828 - DNA, 25 bp, Homo sapien
gtgcttggagaggccgtgttctgac

SEQ ID NO: 5363829 - DNA, 25 bp, Homo sapien
tttcctttactgattgtgcttggag

SEQ ID NO: 5363830 - DNA, 25 bp, Homo sapien
tcaagtcctgctccgttctgtctgg

SEQ ID NO: 5363831 - DNA, 25 bp, Homo sapien
tcactctccagtcggttgggaaaaa

SEQ ID NO: 5363832 - DNA, 25 bp, Homo sapien
ttgctgttggcataaggagtctctc

SEQ ID NO: 5363833 - DNA, 25 bp, Homo sapien
gattagagatgtgcaaagcccactc

SEQ ID NO: 5363834 - DNA, 25 bp, Homo sapien
tcatccggagtccaaggcctaagtg

SEQ ID NO: 5363835 - DNA, 25 bp, Homo sapien
caatccacttgtcagatttcaaggg

SEQ ID NO: 5363836 - DNA, 25 bp, Homo sapien
gacattagcagacctgaagctgttg

SEQ ID NO: 5363837 - DNA, 25 bp, Homo sapien
taatttattagcatcagagtctgtc

SEQ ID NO: 5363838 - DNA, 25 bp, Homo sapien
agaaaggtcttgatcgtcagtgaca

SEQ ID NO: 5363839 - DNA, 25 bp, Homo sapien
caacacacgggtgccacgtagacaa

SEQ ID NO: 5363840 - DNA, 25 bp, Homo sapien
gacaagacggtacatggagaccatg

SEQ ID NO: 5363841 - DNA, 25 bp, Homo sapien
aggagctcccaacacacgggtgcca

SEQ ID NO: 5363842 - DNA, 25 bp, Homo sapien
ggtgccacgtagacaagacggtaca

SEQ ID NO: 5363843 - DNA, 25 bp, Homo sapien
gaaagcaacagctcggtcagccata

SEQ ID NO: 5363844 - DNA, 25 bp, Homo sapien
tgcaggtcattcagacaatactggc

SEQ ID NO: 5363845 - DNA, 25 bp, Homo sapien
aatgtgtttccttggaacagggcag

SEQ ID NO: 5363846 - DNA, 25 bp, Homo sapien
ggtccttgaagtgccaacagggaaa

SEQ ID NO: 5363847 - DNA, 25 bp, Homo sapien
cagaaagaagtgaaataaatgctgg

SEQ ID NO: 5363848 - DNA, 25 bp, Homo sapien
agaaagaagtgaaataaatgctggc

SEQ ID NO: 5363849 - DNA, 25 bp, Homo sapien
tcagaaagaagtgaaataaatgctg

SEQ ID NO: 5363850 - DNA, 25 bp, Homo sapien
gtcagaaagaagtgaaataaatgct

SEQ ID NO: 5363851 - DNA, 25 bp, Homo sapien
gggctgctgtctctgacacatgatg

SEQ ID NO: 5363852 - DNA, 25 bp, Homo sapien
acgttccttctgcttcccgggctgc

SEQ ID NO: 5363853 - DNA, 25 bp, Homo sapien
ttctgcttcccgggctgctgtctct

SEQ ID NO: 5363854 - DNA, 25 bp, Homo sapien
gctgtctctgacacatgatggtggt

SEQ ID NO: 5363855 - DNA, 25 bp, Homo sapien
gatggtgctcagagtcgccttgtgt

SEQ ID NO: 5363856 - DNA, 25 bp, Homo sapien
tggggatccccagcttaacatcaga

SEQ ID NO: 5363857 - DNA, 25 bp, Homo sapien
agctgggaacctgaatcccccgagg

SEQ ID NO: 5363858 - DNA, 25 bp, Homo sapien
ggtgtgtgaaggaagactttgggag

SEQ ID NO: 5363859 - DNA, 25 bp, Homo sapien
tctcggcggcgtgtgcttagaacag

SEQ ID NO: 5363860 - DNA, 25 bp, Homo sapien
tcatggctgggttttaacttccggc

SEQ ID NO: 5363861 - DNA, 25 bp, Homo sapien
tcgttaagtaccacgtctcggcggc

SEQ ID NO: 5363862 - DNA, 25 bp, Homo sapien
tgaacttggaattctaaggacagtc

SEQ ID NO: 5363863 - DNA, 25 bp, Homo sapien
cttctgtaatatttggttcaccttg

SEQ ID NO: 5363864 - DNA, 25 bp, Homo sapien
taatatttggttcaccttgatcccc

SEQ ID NO: 5363865 - DNA, 25 bp, Homo sapien
cctctttggaaatctctatgaccat

SEQ ID NO: 5363866 - DNA, 25 bp, Homo sapien
acctctttggaaatctctatgacca

SEQ ID NO: 5363867 - DNA, 25 bp, Homo sapien
tgctaaaaagataggagccaaagtg

SEQ ID NO: 5363868 - DNA, 25 bp, Homo sapien
tgcagcctgcagaaattatccctgc

SEQ ID NO: 5363869 - DNA, 25 bp, Homo sapien
gttcatggcttcctattactgttgg

SEQ ID NO: 5363870 - DNA, 25 bp, Homo sapien
gaatgacagtatgactttaggccaa

SEQ ID NO: 5363871 - DNA, 25 bp, Homo sapien
cattgctggagtgaagttcacagcg

SEQ ID NO: 5363872 - DNA, 25 bp, Homo sapien
ggatgagcgagcatgtagtcagaac

SEQ ID NO: 5363873 - DNA, 25 bp, Homo sapien
ggcatggaggatgagcgagcatgta

SEQ ID NO: 5363874 - DNA, 25 bp, Homo sapien
tagtcagaaccgcatggggaggcct

SEQ ID NO: 5363875 - DNA, 25 bp, Homo sapien
gagaggagaacacactggtccatag

SEQ ID NO: 5363876 - DNA, 25 bp, Homo sapien
ggactcaagcatctccactgggtga

SEQ ID NO: 5363877 - DNA, 25 bp, Homo sapien
gggatgaagaaacgtggaaagctca

SEQ ID NO: 5363878 - DNA, 25 bp, Homo sapien
atagagagccgtggatgccggcggc

SEQ ID NO: 5363879 - DNA, 25 bp, Homo sapien
tctctatcccttggaaatcccgtct

SEQ ID NO: 5363880 - DNA, 25 bp, Homo sapien
tcccttggaaatcccgtctgagcca

SEQ ID NO: 5363881 - DNA, 25 bp, Homo sapien
gagccactgcattctctgctgtgag

SEQ ID NO: 5363882 - DNA, 25 bp, Homo sapien
tcagttgtccctttctctatccctt

SEQ ID NO: 5363883 - DNA, 25 bp, Homo sapien
cagggatgcagacacgatgcagcaa

SEQ ID NO: 5363884 - DNA, 25 bp, Homo sapien
taatagggtgtgttccgatcagaag

SEQ ID NO: 5363885 - DNA, 25 bp, Homo sapien
ccaaaggctttgaaacagggatgca

SEQ ID NO: 5363886 - DNA, 25 bp, Homo sapien
cagcaaccccaacagtgtaataggg

SEQ ID NO: 5363887 - DNA, 25 bp, Homo sapien
aggccatcggcgagccagccggact

SEQ ID NO: 5363888 - DNA, 25 bp, Homo sapien
gatgtgaagacggaaacccataggt

SEQ ID NO: 5363889 - DNA, 25 bp, Homo sapien
ttgagggatgcagagtgcaagtgag

SEQ ID NO: 5363890 - DNA, 25 bp, Homo sapien
tggggcatgccacaccgtaaaggcc

SEQ ID NO: 5363891 - DNA, 25 bp, Homo sapien
tctgaggcagctgattaggtacctc

SEQ ID NO: 5363892 - DNA, 25 bp, Homo sapien
cagctgattaggtacctcagccagg

SEQ ID NO: 5363893 - DNA, 25 bp, Homo sapien
tcggagagctggcacttctgaggca

SEQ ID NO: 5363894 - DNA, 25 bp, Homo sapien
ttaggtacctcagccaggcattcaa

SEQ ID NO: 5363895 - DNA, 25 bp, Homo sapien
gcgagtgaggtttattaattgcaga

SEQ ID NO: 5363896 - DNA, 25 bp, Homo sapien
agacacaggcctggagggtcgatga

SEQ ID NO: 5363897 - DNA, 25 bp, Homo sapien
agatgtgtattgaatgcctgctcca

SEQ ID NO: 5363898 - DNA, 25 bp, Homo sapien
cagatctgaggccacgatggtgact

SEQ ID NO: 5363899 - DNA, 25 bp, Homo sapien
tgttcacagtgtggccctaacacct

SEQ ID NO: 5363900 - DNA, 25 bp, Homo sapien
tgtcctcacctgagcgcctccgtgt

SEQ ID NO: 5363901 - DNA, 25 bp, Homo sapien
gtgtagcctgtcttccttgccacgg

SEQ ID NO: 5363902 - DNA, 25 bp, Homo sapien
ttgccacgggtacttcctgtcctca

SEQ ID NO: 5363903 - DNA, 25 bp, Homo sapien
ctgcgggaccgaaagagacatgctc

SEQ ID NO: 5363904 - DNA, 25 bp, Homo sapien
tgcgggaccgaaagagacatgctca

SEQ ID NO: 5363905 - DNA, 25 bp, Homo sapien
tattgcgattgtcaccgttggtcat

SEQ ID NO: 5363906 - DNA, 25 bp, Homo sapien
ctctttattgcgattgtcaccgttg

SEQ ID NO: 5363907 - DNA, 25 bp, Homo sapien
ttgggtttgtgtaagtgattctcta

SEQ ID NO: 5363908 - DNA, 25 bp, Homo sapien
ctgcaacttgggtttgtgtaagtga

SEQ ID NO: 5363909 - DNA, 25 bp, Homo sapien
tgggtttgtgtaagtgattctctat

SEQ ID NO: 5363910 - DNA, 25 bp, Homo sapien
atgatctttggccagcagtcagtgt

SEQ ID NO: 5363911 - DNA, 25 bp, Homo sapien
ggctgccaggaaaggtcactgtcct

SEQ ID NO: 5363912 - DNA, 25 bp, Homo sapien
cggctgccaggaaaggtcactgtcc

SEQ ID NO: 5363913 - DNA, 25 bp, Homo sapien
acacccccagttccatgatctttgg

SEQ ID NO: 5363914 - DNA, 25 bp, Homo sapien
catgtcctcctagggacggtatttc

SEQ ID NO: 5363915 - DNA, 25 bp, Homo sapien
tgaacctctgcagcgtgggcagatg

SEQ ID NO: 5363916 - DNA, 25 bp, Homo sapien
tggccatgtcctcctagggacggta

SEQ ID NO: 5363917 - DNA, 25 bp, Homo sapien
acctctgcagcgtgggcagatgctg

SEQ ID NO: 5363918 - DNA, 25 bp, Homo sapien
tgacgagagctctgtgcaccacttc

SEQ ID NO: 5363919 - DNA, 25 bp, Homo sapien
gagccttacatgtgcttggacggga

SEQ ID NO: 5363920 - DNA, 25 bp, Homo sapien
cagcagcgcttttaactcaatcgag

SEQ ID NO: 5363921 - DNA, 25 bp, Homo sapien
tctctttgaggacggagcatcgtgg

SEQ ID NO: 5363922 - DNA, 25 bp, Homo sapien
ggtcatatgtaacggtgtatgttag

SEQ ID NO: 5363923 - DNA, 25 bp, Homo sapien
tggagaacatcttaactagttcatc

SEQ ID NO: 5363924 - DNA, 25 bp, Homo sapien
cacttagaggtgttcagtggtcata

SEQ ID NO: 5363925 - DNA, 25 bp, Homo sapien
ccatggctggcccttgagaatatgc

SEQ ID NO: 5363926 - DNA, 25 bp, Homo sapien
acatttatcgttcagtatcttcttt

SEQ ID NO: 5363927 - DNA, 25 bp, Homo sapien
caaagaacatttatcgttcagtatc

SEQ ID NO: 5363928 - DNA, 25 bp, Homo sapien
gaacatttatcgttcagtatcttct

SEQ ID NO: 5363929 - DNA, 25 bp, Homo sapien
gtacaaagaacatttatcgttcagt

SEQ ID NO: 5363930 - DNA, 25 bp, Homo sapien
caaaagagggaaccggtgactcaga

SEQ ID NO: 5363931 - DNA, 25 bp, Homo sapien
cagggagccgatacgtttgctgata

SEQ ID NO: 5363932 - DNA, 25 bp, Homo sapien
tctttaaaaagacgcagggcacctg

SEQ ID NO: 5363933 - DNA, 25 bp, Homo sapien
aagtggcgctcgtgcattcaactcg

SEQ ID NO: 5363934 - DNA, 25 bp, Homo sapien
attcatttccacaagtgccagggag

SEQ ID NO: 5363935 - DNA, 25 bp, Homo sapien
cagtcccacagggaatgggatgtca

SEQ ID NO: 5363936 - DNA, 25 bp, Homo sapien
atgggatgtcagtaatattcatttc

SEQ ID NO: 5363937 - DNA, 25 bp, Homo sapien
cacagggaatgggatgtcagtaata

SEQ ID NO: 5363938 - DNA, 25 bp, Homo sapien
ttggagaggacagaccactgggcct

SEQ ID NO: 5363939 - DNA, 25 bp, Homo sapien
ttgagtttgcacatgcgagccttgg

SEQ ID NO: 5363940 - DNA, 25 bp, Homo sapien
cacatgcgagccttggagaggacag

SEQ ID NO: 5363941 - DNA, 25 bp, Homo sapien
ttgcacatgcgagccttggagagga

SEQ ID NO: 5363942 - DNA, 25 bp, Homo sapien
catgtccgaaggtctctgagatggt

SEQ ID NO: 5363943 - DNA, 25 bp, Homo sapien
tcagtggtcctcgtgcatgtccgaa

SEQ ID NO: 5363944 - DNA, 25 bp, Homo sapien
tggaactctgctggccgccaagctt

SEQ ID NO: 5363945 - DNA, 25 bp, Homo sapien
ggttgcttcattaccatgacagcag

SEQ ID NO: 5363946 - DNA, 25 bp, Homo sapien
gctgccaatcgtgagaacagcagga

SEQ ID NO: 5363947 - DNA, 25 bp, Homo sapien
gaagagctggtccatcagtttgtgt

SEQ ID NO: 5363948 - DNA, 25 bp, Homo sapien
ttgtttctgtggacagcgcagtgct

SEQ ID NO: 5363949 - DNA, 25 bp, Homo sapien
tggacagcgcagtgctggagtcact

SEQ ID NO: 5363950 - DNA, 25 bp, Homo sapien
gccagctctccacagtagagtctgg

SEQ ID NO: 5363951 - DNA, 25 bp, Homo sapien
cagctctccacagtagagtctggcc

SEQ ID NO: 5363952 - DNA, 25 bp, Homo sapien
ggagggagcacatgaaagcgacttt

SEQ ID NO: 5363953 - DNA, 25 bp, Homo sapien
gactttcggatccaaggccagccag

SEQ ID NO: 5363954 - DNA, 25 bp, Homo sapien
acagcacccatcgttctgccttgag

SEQ ID NO: 5363955 - DNA, 25 bp, Homo sapien
gcacccatcgttctgccttgagaga

SEQ ID NO: 5363956 - DNA, 25 bp, Homo sapien
gcaggactggctccatagtctccat

SEQ ID NO: 5363957 - DNA, 25 bp, Homo sapien
ggctccatagtctccatgcactctg

SEQ ID NO: 5363958 - DNA, 25 bp, Homo sapien
tttcctttagaatacaagatgctaa

SEQ ID NO: 5363959 - DNA, 25 bp, Homo sapien
ctttagaatacaagatgctaagacc

SEQ ID NO: 5363960 - DNA, 25 bp, Homo sapien
tggaaagcaccccttgcaacatcca

SEQ ID NO: 5363961 - DNA, 25 bp, Homo sapien
ggaaagcaccccttgcaacatccat

SEQ ID NO: 5363962 - DNA, 25 bp, Homo sapien
gctgtgcaattcttaggaccctcat

SEQ ID NO: 5363963 - DNA, 25 bp, Homo sapien
gggttggctgtgcaattcttaggac

SEQ ID NO: 5363964 - DNA, 25 bp, Homo sapien
ctttggacaaaagggttggctgtgc

SEQ ID NO: 5363965 - DNA, 25 bp, Homo sapien
actttggacaaaagggttggctgtg

SEQ ID NO: 5363966 - DNA, 25 bp, Homo sapien
gaatcttacaaaagggttgtggcca

SEQ ID NO: 5363967 - DNA, 25 bp, Homo sapien
tgaacatgaggattacagcgaggca

SEQ ID NO: 5363968 - DNA, 25 bp, Homo sapien
caagcacatatccattgagccatca

SEQ ID NO: 5363969 - DNA, 25 bp, Homo sapien
catttatcactgatcgatggagtgc

SEQ ID NO: 5363970 - DNA, 25 bp, Homo sapien
tcaggcaggcagacgtgaagtcctg

SEQ ID NO: 5363971 - DNA, 25 bp, Homo sapien
gggactggacgccaagaagttccac

SEQ ID NO: 5363972 - DNA, 25 bp, Homo sapien
agacgtgaagtcctgcggtggctgt

SEQ ID NO: 5363973 - DNA, 25 bp, Homo sapien
gaagttccacagtgtccaatggaga

SEQ ID NO: 5363974 - DNA, 25 bp, Homo sapien
ctggttgagtatcagcaaattcctc

SEQ ID NO: 5363975 - DNA, 25 bp, Homo sapien
ggttgagtatcagcaaattcctctt

SEQ ID NO: 5363976 - DNA, 25 bp, Homo sapien
tggttgagtatcagcaaattcctct

SEQ ID NO: 5363977 - DNA, 25 bp, Homo sapien
tcaggatacaatagctggagcaccc

SEQ ID NO: 5363978 - DNA, 25 bp, Homo sapien
gactgcactaattgaaagaccgcct

SEQ ID NO: 5363979 - DNA, 25 bp, Homo sapien
taaagcttactctctgcaatggagg

SEQ ID NO: 5363980 - DNA, 25 bp, Homo sapien
ttattccaacaggtcaaagaggcag

SEQ ID NO: 5363981 - DNA, 25 bp, Homo sapien
caaatttcaagtaggtcaggcagct

SEQ ID NO: 5363982 - DNA, 25 bp, Homo sapien
tagggaccctacagattcagaggca

SEQ ID NO: 5363983 - DNA, 25 bp, Homo sapien
gaattctaatcttggtggcgcttga

SEQ ID NO: 5363984 - DNA, 25 bp, Homo sapien
tcttgtaacttcagaggcgacatct

SEQ ID NO: 5363985 - DNA, 25 bp, Homo sapien
tcttgagcctaagatgggtccctcc

SEQ ID NO: 5363986 - DNA, 25 bp, Homo sapien
tgcacaagcgcaagatgaacatcac

SEQ ID NO: 5363987 - DNA, 25 bp, Homo sapien
cattttccgatgacaacgaggagca

SEQ ID NO: 5363988 - DNA, 25 bp, Homo sapien
cactctgctgggataagcaccggga

SEQ ID NO: 5363989 - DNA, 25 bp, Homo sapien
aggaatgaataagcacttgtccttt

SEQ ID NO: 5363990 - DNA, 25 bp, Homo sapien
gtgagagttgggagacaccacccca

SEQ ID NO: 5363991 - DNA, 25 bp, Homo sapien
cagagttcatttacttcgctttcca

SEQ ID NO: 5363992 - DNA, 25 bp, Homo sapien
cactgtacatggaacatcctcaata

SEQ ID NO: 5363993 - DNA, 25 bp, Homo sapien
cctctagggtccagggtatgtcccg

SEQ ID NO: 5363994 - DNA, 25 bp, Homo sapien
tccagggtatgtcccgtgcccttga

SEQ ID NO: 5363995 - DNA, 25 bp, Homo sapien
catgttcagaatgtgaatggtggct

SEQ ID NO: 5363996 - DNA, 25 bp, Homo sapien
ggtatgtcccgtgcccttgagctgc

SEQ ID NO: 5363997 - DNA, 25 bp, Homo sapien
tacctcagaaccactctccagtctg

SEQ ID NO: 5363998 - DNA, 25 bp, Homo sapien
cagaaccactctccagtctgtccat

SEQ ID NO: 5363999 - DNA, 25 bp, Homo sapien
ctgtctctcctacctcagaaccact

SEQ ID NO: 5364000 - DNA, 25 bp, Homo sapien
tcctacctcagaaccactctccagt

SEQ ID NO: 5364001 - DNA, 25 bp, Homo sapien
ctggaaagactcttcaatgacctct

SEQ ID NO: 5364002 - DNA, 25 bp, Homo sapien
agagctgctttcaggtggttgcaac

SEQ ID NO: 5364003 - DNA, 25 bp, Homo sapien
caagtctttttcttagcggtgtgtt

SEQ ID NO: 5364004 - DNA, 25 bp, Homo sapien
gttatccctctccaacgagcaaaag

SEQ ID NO: 5364005 - DNA, 25 bp, Homo sapien
ctgggtcagttgcatttggaggaga

SEQ ID NO: 5364006 - DNA, 25 bp, Homo sapien
cctgggtcagttgcatttggaggag

SEQ ID NO: 5364007 - DNA, 25 bp, Homo sapien
ttaacaaggaggcggttgttgaaca

SEQ ID NO: 5364008 - DNA, 25 bp, Homo sapien
cggttgttgaacatgaggattggtt

SEQ ID NO: 5364009 - DNA, 25 bp, Homo sapien
ttcttaacaaggaggcggttgttga

SEQ ID NO: 5364010 - DNA, 25 bp, Homo sapien
gttgttgaacatgaggattggttac

SEQ ID NO: 5364011 - DNA, 25 bp, Homo sapien
gctgtgctttttcatcctctaggtg

SEQ ID NO: 5364012 - DNA, 25 bp, Homo sapien
ctttttcatcctctaggtggttctt

SEQ ID NO: 5364013 - DNA, 25 bp, Homo sapien
ctgtgctttttcatcctctaggtgg

SEQ ID NO: 5364014 - DNA, 25 bp, Homo sapien
tttttcatcctctaggtggttctta

SEQ ID NO: 5364015 - DNA, 25 bp, Homo sapien
tctccaggtccgatgccattgcctt

SEQ ID NO: 5364016 - DNA, 25 bp, Homo sapien
cattgccttttctatgccagaggga

SEQ ID NO: 5364017 - DNA, 25 bp, Homo sapien
tcattccgaggacaggtgctttctt

SEQ ID NO: 5364018 - DNA, 25 bp, Homo sapien
aacattcgcattcttgcgcagggca

SEQ ID NO: 5364019 - DNA, 25 bp, Homo sapien
caaaacaccacactcacaccataca

SEQ ID NO: 5364020 - DNA, 25 bp, Homo sapien
catagtaacaccgtaatctccctta

SEQ ID NO: 5364021 - DNA, 25 bp, Homo sapien
aaaacaccacactcacaccatacac

SEQ ID NO: 5364022 - DNA, 25 bp, Homo sapien
gtgtcatagtaacaccgtaatctcc

SEQ ID NO: 5364023 - DNA, 25 bp, Homo sapien
taagaaattatcctgttggctcttc

SEQ ID NO: 5364024 - DNA, 25 bp, Homo sapien
aagacttagggagtgagaaaccctg

SEQ ID NO: 5364025 - DNA, 25 bp, Homo sapien
ccacaggactatgagacacagaagg

SEQ ID NO: 5364026 - DNA, 25 bp, Homo sapien
gccagtcataggacattacagtgaa

SEQ ID NO: 5364027 - DNA, 25 bp, Homo sapien
gtaccaaccacaggactatgagaca

SEQ ID NO: 5364028 - DNA, 25 bp, Homo sapien
gcagattctataacttgagggtcac

SEQ ID NO: 5364029 - DNA, 25 bp, Homo sapien
gggcagattctataacttgagggtc

SEQ ID NO: 5364030 - DNA, 25 bp, Homo sapien
ttgggcagattctataacttgaggg

SEQ ID NO: 5364031 - DNA, 25 bp, Homo sapien
ggcagattctataacttgagggtca

SEQ ID NO: 5364032 - DNA, 25 bp, Homo sapien
gtggaagcagccatgaggtcgctct

SEQ ID NO: 5364033 - DNA, 25 bp, Homo sapien
tgtctctgctccctatgagtgagtg

SEQ ID NO: 5364034 - DNA, 25 bp, Homo sapien
catgaggtcgctctggtgtaacctg

SEQ ID NO: 5364035 - DNA, 25 bp, Homo sapien
tctccagaactcagggcaaggagtg

SEQ ID NO: 5364036 - DNA, 25 bp, Homo sapien
gctgcaagcatccttgttgcactct

SEQ ID NO: 5364037 - DNA, 25 bp, Homo sapien
tgtcaggaaggtttttgctcactct

SEQ ID NO: 5364038 - DNA, 25 bp, Homo sapien
cactcttaatatctctgatgaagcc

SEQ ID NO: 5364039 - DNA, 25 bp, Homo sapien
tgcaggacttagcaattggtcttgg

SEQ ID NO: 5364040 - DNA, 25 bp, Homo sapien
ctcgaattatgactatcagcaactg

SEQ ID NO: 5364041 - DNA, 25 bp, Homo sapien
ctgggtgtggaaaggtcctcagcat

SEQ ID NO: 5364042 - DNA, 25 bp, Homo sapien
ccatgggagaggtcaccctgggtgt

SEQ ID NO: 5364043 - DNA, 25 bp, Homo sapien
cattgcaagatgacctgacttggcc

SEQ ID NO: 5364044 - DNA, 25 bp, Homo sapien
tgaaacccataatccccaaggcaag

SEQ ID NO: 5364045 - DNA, 25 bp, Homo sapien
ggcagaaaagatgttgtattcctca

SEQ ID NO: 5364046 - DNA, 25 bp, Homo sapien
aagatgttgtattcctcaaaggacc

SEQ ID NO: 5364047 - DNA, 25 bp, Homo sapien
cataatccccaaggcaagtacttta

SEQ ID NO: 5364048 - DNA, 25 bp, Homo sapien
ttacactaagttggaggtgactgac

SEQ ID NO: 5364049 - DNA, 25 bp, Homo sapien
aatctgatctcccatgccaccagga

SEQ ID NO: 5364050 - DNA, 25 bp, Homo sapien
gatacttctcgtacctggtcatggg

SEQ ID NO: 5364051 - DNA, 25 bp, Homo sapien
aagagcagaggccatgggaaatgga

SEQ ID NO: 5364052 - DNA, 25 bp, Homo sapien
ggccccgaaggagcatccttcagag

SEQ ID NO: 5364053 - DNA, 25 bp, Homo sapien
accaactctcctggttaactgctaa

SEQ ID NO: 5364054 - DNA, 25 bp, Homo sapien
ctctgaaacctgtgtgtagctgcca

SEQ ID NO: 5364055 - DNA, 25 bp, Homo sapien
tatggcaggatataggccaccttgc

SEQ ID NO: 5364056 - DNA, 25 bp, Homo sapien
taaccagccgagttacttctccaag

SEQ ID NO: 5364057 - DNA, 25 bp, Homo sapien
ccagtgtcactacccctgattcagg

SEQ ID NO: 5364058 - DNA, 25 bp, Homo sapien
tctccacaatcctgttaaataagcg

SEQ ID NO: 5364059 - DNA, 25 bp, Homo sapien
ttaaataagcgaggaagtagtagta

SEQ ID NO: 5364060 - DNA, 25 bp, Homo sapien
gtagcaatagtgtacccattttaca

SEQ ID NO: 5364061 - DNA, 25 bp, Homo sapien
gtagtagtagcaatagtgtacccat

SEQ ID NO: 5364062 - DNA, 25 bp, Homo sapien
cagcttgtcgttggtcagacgtggt

SEQ ID NO: 5364063 - DNA, 25 bp, Homo sapien
ctggatagagagcagcttgtcgttg

SEQ ID NO: 5364064 - DNA, 25 bp, Homo sapien
aggagctggatagagagcagcttgt

SEQ ID NO: 5364065 - DNA, 25 bp, Homo sapien
tgtcgttggtcagacgtggtctttt

SEQ ID NO: 5364066 - DNA, 25 bp, Homo sapien
tgcaatgatacacttgtgacctcct

SEQ ID NO: 5364067 - DNA, 25 bp, Homo sapien
gcccctgcagtaatgttatgcatag

SEQ ID NO: 5364068 - DNA, 25 bp, Homo sapien
tagcagattcagctatgcagttctg

SEQ ID NO: 5364069 - DNA, 25 bp, Homo sapien
tgcatttgtgagcaccctctccgtt

SEQ ID NO: 5364070 - DNA, 25 bp, Homo sapien
tggaagtccctgctaggttggtcac

SEQ ID NO: 5364071 - DNA, 25 bp, Homo sapien
gctaggttggtcaccccctctgtgc

SEQ ID NO: 5364072 - DNA, 25 bp, Homo sapien
gaatctgctggggtttatggcacac

SEQ ID NO: 5364073 - DNA, 25 bp, Homo sapien
gctggggtttatggcacacgctgtc

SEQ ID NO: 5364074 - DNA, 25 bp, Homo sapien
agttctggctgtggaaccccagaga

SEQ ID NO: 5364075 - DNA, 25 bp, Homo sapien
gctgtggaaccccagagactttccc

SEQ ID NO: 5364076 - DNA, 25 bp, Homo sapien
tgtggaaccccagagactttcccag

SEQ ID NO: 5364077 - DNA, 25 bp, Homo sapien
ctggctgtggaaccccagagacttt

SEQ ID NO: 5364078 - DNA, 25 bp, Homo sapien
cgctgggacccgtgcccatggaggg

SEQ ID NO: 5364079 - DNA, 25 bp, Homo sapien
cacgctgggacccgtgcccatggag

SEQ ID NO: 5364080 - DNA, 25 bp, Homo sapien
acgctgggacccgtgcccatggagg

SEQ ID NO: 5364081 - DNA, 25 bp, Homo sapien
gctgggacccgtgcccatggagggg

SEQ ID NO: 5364082 - DNA, 25 bp, Homo sapien
tttcccttcctgcagactgcgttct

SEQ ID NO: 5364083 - DNA, 25 bp, Homo sapien
gtctgagtgtctccgggaagggact

SEQ ID NO: 5364084 - DNA, 25 bp, Homo sapien
gacttggatcagctgtgcattcctg

SEQ ID NO: 5364085 - DNA, 25 bp, Homo sapien
gcattcctgggtggctccacggagg

SEQ ID NO: 5364086 - DNA, 25 bp, Homo sapien
ctgaagagaaggtcacccaggaggg

SEQ ID NO: 5364087 - DNA, 25 bp, Homo sapien
atcgtggttggccacaggatttcta

SEQ ID NO: 5364088 - DNA, 25 bp, Homo sapien
taatccaatcgtggttggccacagg

SEQ ID NO: 5364089 - DNA, 25 bp, Homo sapien
tctgggccattaatccaatcgtggt

SEQ ID NO: 5364090 - DNA, 25 bp, Homo sapien
cacaggatttctatggtcttttaac

SEQ ID NO: 5364091 - DNA, 25 bp, Homo sapien
tcaagcttgagaaagttgggaaaag

SEQ ID NO: 5364092 - DNA, 25 bp, Homo sapien
gcttgagaaagttgggaaaagtcat

SEQ ID NO: 5364093 - DNA, 25 bp, Homo sapien
caagcttgagaaagttgggaaaagt

SEQ ID NO: 5364094 - DNA, 25 bp, Homo sapien
ttgagaaagttgggaaaagtcatac

SEQ ID NO: 5364095 - DNA, 25 bp, Homo sapien
cagatgggactgcataatgggaagt

SEQ ID NO: 5364096 - DNA, 25 bp, Homo sapien
agtggggccccgatcaattctttct

SEQ ID NO: 5364097 - DNA, 25 bp, Homo sapien
gactgtgtttctggcgactggtgcc

SEQ ID NO: 5364098 - DNA, 25 bp, Homo sapien
gtgccttggcacctgtcattcctgc

SEQ ID NO: 5364099 - DNA, 25 bp, Homo sapien
aagctcctgctgtgaacctatatga

SEQ ID NO: 5364100 - DNA, 25 bp, Homo sapien
tcaccatccatggagctacaagctc

SEQ ID NO: 5364101 - DNA, 25 bp, Homo sapien
tggctattggccttgggtgcccgaa

SEQ ID NO: 5364102 - DNA, 25 bp, Homo sapien
tgagttttagacgaaggagtccacc

SEQ ID NO: 5364103 - DNA, 25 bp, Homo sapien
ctgtggttgccggcccgttgtttag

SEQ ID NO: 5364104 - DNA, 25 bp, Homo sapien
tgtttaggcagttttcgggctggcc

SEQ ID NO: 5364105 - DNA, 25 bp, Homo sapien
ggttctccctctgtagtgggccttc

SEQ ID NO: 5364106 - DNA, 25 bp, Homo sapien
actgagcatgaatgttaaccctgtg

SEQ ID NO: 5364107 - DNA, 25 bp, Homo sapien
gcaggacacaatcagggctttttaa

SEQ ID NO: 5364108 - DNA, 25 bp, Homo sapien
tgtctctgaagctcagtgcgtcaca

SEQ ID NO: 5364109 - DNA, 25 bp, Homo sapien
tccaaagtggccaaggtacaagcag

SEQ ID NO: 5364110 - DNA, 25 bp, Homo sapien
tgcgtcacaccccagatactatggt

SEQ ID NO: 5364111 - DNA, 25 bp, Homo sapien
tgcatacactcagcccaagtagcat

SEQ ID NO: 5364112 - DNA, 25 bp, Homo sapien
tttccttagcactccaacaagtgcc

SEQ ID NO: 5364113 - DNA, 25 bp, Homo sapien
aagtgccatgccgaagcagaaagac

SEQ ID NO: 5364114 - DNA, 25 bp, Homo sapien
agcagaaagacaacctttaaaactg

SEQ ID NO: 5364115 - DNA, 25 bp, Homo sapien
tctgccctaaaatcaatgccggcgc

SEQ ID NO: 5364116 - DNA, 25 bp, Homo sapien
cccagatacgcagcaaaacacagta

SEQ ID NO: 5364117 - DNA, 25 bp, Homo sapien
aatatccttgatcatgaccaacagg

SEQ ID NO: 5364118 - DNA, 25 bp, Homo sapien
tttgcaactcaaaagtagaccttgg

SEQ ID NO: 5364119 - DNA, 25 bp, Homo sapien
ggagcttttaggcacatccatttca

SEQ ID NO: 5364120 - DNA, 25 bp, Homo sapien
aaacttgaaaatacgcagagatgca

SEQ ID NO: 5364121 - DNA, 25 bp, Homo sapien
gagattcaaaaagtgcaaggcaaaa

SEQ ID NO: 5364122 - DNA, 25 bp, Homo sapien
cagtcacaacatatgctctcacagc

SEQ ID NO: 5364123 - DNA, 25 bp, Homo sapien
gctgtggcgagtccgtcctttcttt

SEQ ID NO: 5364124 - DNA, 25 bp, Homo sapien
gcgagtccgtcctttctttattctg

SEQ ID NO: 5364125 - DNA, 25 bp, Homo sapien
tcagctgtggcgagtccgtcctttc

SEQ ID NO: 5364126 - DNA, 25 bp, Homo sapien
tgtggcgagtccgtcctttctttat

SEQ ID NO: 5364127 - DNA, 25 bp, Homo sapien
tgattatttgcctggtactcgagtt

SEQ ID NO: 5364128 - DNA, 25 bp, Homo sapien
gcctggtactcgagttctttacgga

SEQ ID NO: 5364129 - DNA, 25 bp, Homo sapien
tcgagttctttacggaagtagtgaa

SEQ ID NO: 5364130 - DNA, 25 bp, Homo sapien
ttgcctggtactcgagttctttacg

SEQ ID NO: 5364131 - DNA, 25 bp, Homo sapien
gaaggtctgtcagcttgactgcagc

SEQ ID NO: 5364132 - DNA, 25 bp, Homo sapien
tcttctaaatatgggcagtgtgcag

SEQ ID NO: 5364133 - DNA, 25 bp, Homo sapien
gaaaccagtggtagatggctcacat

SEQ ID NO: 5364134 - DNA, 25 bp, Homo sapien
tgcctagcggatcatggcccacttg

SEQ ID NO: 5364135 - DNA, 25 bp, Homo sapien
tctgagactcctgatacaggagagg

SEQ ID NO: 5364136 - DNA, 25 bp, Homo sapien
aaccctctatctgcctggatgccga

SEQ ID NO: 5364137 - DNA, 25 bp, Homo sapien
caggagaggctgtttaccacttgga

SEQ ID NO: 5364138 - DNA, 25 bp, Homo sapien
cttccagccgcttcccaggtaacat

SEQ ID NO: 5364139 - DNA, 25 bp, Homo sapien
gggcttcggagagaaactgaatttc

SEQ ID NO: 5364140 - DNA, 25 bp, Homo sapien
ttcggagagaaactgaatttcactt

SEQ ID NO: 5364141 - DNA, 25 bp, Homo sapien
ctgggcttcggagagaaactgaatt

SEQ ID NO: 5364142 - DNA, 25 bp, Homo sapien
gcttcggagagaaactgaatttcac

SEQ ID NO: 5364143 - DNA, 25 bp, Homo sapien
gaatcacaaagcatgggtaagcaca

SEQ ID NO: 5364144 - DNA, 25 bp, Homo sapien
cacaaagcatgggtaagcacagcct

SEQ ID NO: 5364145 - DNA, 25 bp, Homo sapien
gtaggagagaatcacaaagcatggg

SEQ ID NO: 5364146 - DNA, 25 bp, Homo sapien
ggagagaatcacaaagcatgggtaa

SEQ ID NO: 5364147 - DNA, 25 bp, Homo sapien
catcaaaggcaaaccccatatgtgg

SEQ ID NO: 5364148 - DNA, 25 bp, Homo sapien
aagccccggagctcccgagggactg

SEQ ID NO: 5364149 - DNA, 25 bp, Homo sapien
tcccgagggactgttctgcgtggaa

SEQ ID NO: 5364150 - DNA, 25 bp, Homo sapien
tgtgaatagggtgcaggcggtggaa

SEQ ID NO: 5364151 - DNA, 25 bp, Homo sapien
ccaccgagcatgaccccggtgtgag

SEQ ID NO: 5364152 - DNA, 25 bp, Homo sapien
tacaagagggttgctccaaggcaga

SEQ ID NO: 5364153 - DNA, 25 bp, Homo sapien
tgtgagaccacaaacgtggtgtggg

SEQ ID NO: 5364154 - DNA, 25 bp, Homo sapien
tgagttaccgcccactacaagaggg

SEQ ID NO: 5364155 - DNA, 25 bp, Homo sapien
agggacctctcggaggacggcaaag

SEQ ID NO: 5364156 - DNA, 25 bp, Homo sapien
tgggtgctcggagcctagacagccc

SEQ ID NO: 5364157 - DNA, 25 bp, Homo sapien
ctgggtgctcggagcctagacagcc

SEQ ID NO: 5364158 - DNA, 25 bp, Homo sapien
agctggagggacctctcggaggacg

SEQ ID NO: 5364159 - DNA, 25 bp, Homo sapien
tgtcatggaggccacattgcagact

SEQ ID NO: 5364160 - DNA, 25 bp, Homo sapien
ctgcagaagaaagcctgtggaggct

SEQ ID NO: 5364161 - DNA, 25 bp, Homo sapien
aaagcctgtggaggctttccctgcc

SEQ ID NO: 5364162 - DNA, 25 bp, Homo sapien
ctccgtgtcatggaggccacattgc

SEQ ID NO: 5364163 - DNA, 25 bp, Homo sapien
agctatatacagaagcacagcaggg

SEQ ID NO: 5364164 - DNA, 25 bp, Homo sapien
tagtgtttctcaagcgtcagcacgc

SEQ ID NO: 5364165 - DNA, 25 bp, Homo sapien
tcagcacgcacggatcacctgaaga

SEQ ID NO: 5364166 - DNA, 25 bp, Homo sapien
ggttcaggatggtctgtcacaaagc

SEQ ID NO: 5364167 - DNA, 25 bp, Homo sapien
taattaactgagcaaattctaggat

SEQ ID NO: 5364168 - DNA, 25 bp, Homo sapien
aactgagcaaattctaggattgtgt

SEQ ID NO: 5364169 - DNA, 25 bp, Homo sapien
ttttaattaactgagcaaattctag

SEQ ID NO: 5364170 - DNA, 25 bp, Homo sapien
caaattctaggattgtgtgttcttc

SEQ ID NO: 5364171 - DNA, 25 bp, Homo sapien
tagacccaggcccttcagaaggtgg

SEQ ID NO: 5364172 - DNA, 25 bp, Homo sapien
aatgtcctaagtgtgccgatggcaa

SEQ ID NO: 5364173 - DNA, 25 bp, Homo sapien
ggcttcacacaatcttagacccagg

SEQ ID NO: 5364174 - DNA, 25 bp, Homo sapien
gattacatcactcacccgtgccttg

SEQ ID NO: 5364175 - DNA, 25 bp, Homo sapien
cacaaatgaacgaaagtctgagctg

SEQ ID NO: 5364176 - DNA, 25 bp, Homo sapien
tcatggtttcacaaatgaacgaaag

SEQ ID NO: 5364177 - DNA, 25 bp, Homo sapien
tttcacaaatgaacgaaagtctgag

SEQ ID NO: 5364178 - DNA, 25 bp, Homo sapien
ggtttcacaaatgaacgaaagtctg

SEQ ID NO: 5364179 - DNA, 25 bp, Homo sapien
ttgaccgggctgctgacgttgctgt

SEQ ID NO: 5364180 - DNA, 25 bp, Homo sapien
ctgttcatgagagccacgaggccat

SEQ ID NO: 5364181 - DNA, 25 bp, Homo sapien
tcatgagagccacgaggccattcac

SEQ ID NO: 5364182 - DNA, 25 bp, Homo sapien
tgctgacgttgctgttcatgagagc

SEQ ID NO: 5364183 - DNA, 25 bp, Homo sapien
gagtcatgccaaaatgccgatgcgg

SEQ ID NO: 5364184 - DNA, 25 bp, Homo sapien
tagttgacctgtacgaaagcacatg

SEQ ID NO: 5364185 - DNA, 25 bp, Homo sapien
tgtaaatgaggacaaaaccggccat

SEQ ID NO: 5364186 - DNA, 25 bp, Homo sapien
caagtatggcaaagtccctgaagcc

SEQ ID NO: 5364187 - DNA, 25 bp, Homo sapien
tactggaacgcccttgtctgagacc

SEQ ID NO: 5364188 - DNA, 25 bp, Homo sapien
gaacgcccttgtctgagacccggat

SEQ ID NO: 5364189 - DNA, 25 bp, Homo sapien
ctgacgtactggaacgcccttgtct

SEQ ID NO: 5364190 - DNA, 25 bp, Homo sapien
ccttgtctgagacccggatccgtat

SEQ ID NO: 5364191 - DNA, 25 bp, Homo sapien
gaatgacctgcggagcgccacggat

SEQ ID NO: 5364192 - DNA, 25 bp, Homo sapien
atgacctgcggagcgccacggatca

SEQ ID NO: 5364193 - DNA, 25 bp, Homo sapien
tctgctgaatgacctgcggagcgcc

SEQ ID NO: 5364194 - DNA, 25 bp, Homo sapien
gctgaatgacctgcggagcgccacg

SEQ ID NO: 5364195 - DNA, 25 bp, Homo sapien
ggcggagacggcaacagaggtgctt

SEQ ID NO: 5364196 - DNA, 25 bp, Homo sapien
tgcttggggagatctcctaagcgcg

SEQ ID NO: 5364197 - DNA, 25 bp, Homo sapien
tcctaagcgcggcatcacaggaaca

SEQ ID NO: 5364198 - DNA, 25 bp, Homo sapien
tcacaggaacaagagtgccctcggg

SEQ ID NO: 5364199 - DNA, 25 bp, Homo sapien
gggactgcctttgggaacaagcttg

SEQ ID NO: 5364200 - DNA, 25 bp, Homo sapien
agccccctcagcaccagacactcag

SEQ ID NO: 5364201 - DNA, 25 bp, Homo sapien
tgacagcaaaaaagagcccctgcca

SEQ ID NO: 5364202 - DNA, 25 bp, Homo sapien
ccctcagcaccagacactcagcctg

SEQ ID NO: 5364203 - DNA, 25 bp, Homo sapien
ggaatggggattcctgtcaacacag

SEQ ID NO: 5364204 - DNA, 25 bp, Homo sapien
tgtcaacacagaaactacagctgca

SEQ ID NO: 5364205 - DNA, 25 bp, Homo sapien
tgcaacaaatctcagtaaaggaaca

SEQ ID NO: 5364206 - DNA, 25 bp, Homo sapien
gaaactacagctgcaacaaatctca

SEQ ID NO: 5364207 - DNA, 25 bp, Homo sapien
gcccattgcctctgtctgcatccgg

SEQ ID NO: 5364208 - DNA, 25 bp, Homo sapien
gctctcaaagctgagcgcacagatg

SEQ ID NO: 5364209 - DNA, 25 bp, Homo sapien
ggatttaggcaactcccgcgtcaca

SEQ ID NO: 5364210 - DNA, 25 bp, Homo sapien
gcttgttttgcaccttcccaccaca

SEQ ID NO: 5364211 - DNA, 25 bp, Homo sapien
cagccagcaccgacacaaggttcat

SEQ ID NO: 5364212 - DNA, 25 bp, Homo sapien
aaggttcatctgcaggcaccacggt

SEQ ID NO: 5364213 - DNA, 25 bp, Homo sapien
gcaggcaccacggtcaccgggtaag

SEQ ID NO: 5364214 - DNA, 25 bp, Homo sapien
acggtcaccgggtaagctatgctgc

SEQ ID NO: 5364215 - DNA, 25 bp, Homo sapien
acaggtgtggaatcagcaaacccac

SEQ ID NO: 5364216 - DNA, 25 bp, Homo sapien
caggcctggggtgctcctcccaagg

SEQ ID NO: 5364217 - DNA, 25 bp, Homo sapien
gaacaggtgtggaatcagcaaaccc

SEQ ID NO: 5364218 - DNA, 25 bp, Homo sapien
tgggaacaggtgtggaatcagcaaa

SEQ ID NO: 5364219 - DNA, 25 bp, Homo sapien
ggtatctgagggtaccaagcagtca

SEQ ID NO: 5364220 - DNA, 25 bp, Homo sapien
cccagatggtatctgagggtaccaa

SEQ ID NO: 5364221 - DNA, 25 bp, Homo sapien
caagcagtcagtgtcggcacagaca

SEQ ID NO: 5364222 - DNA, 25 bp, Homo sapien
cttggaccaccgaccacagatcact

SEQ ID NO: 5364223 - DNA, 25 bp, Homo sapien
gggtggccagtggaggatggtaccg

SEQ ID NO: 5364224 - DNA, 25 bp, Homo sapien
gccagtggaggatggtaccgagggc

SEQ ID NO: 5364225 - DNA, 25 bp, Homo sapien
ggtggccagtggaggatggtaccga

SEQ ID NO: 5364226 - DNA, 25 bp, Homo sapien
tggccagtggaggatggtaccgagg

SEQ ID NO: 5364227 - DNA, 25 bp, Homo sapien
tccgaggacacccagtacaggcaca

SEQ ID NO: 5364228 - DNA, 25 bp, Homo sapien
agcaggccaaaagtatgtcggagaa

SEQ ID NO: 5364229 - DNA, 25 bp, Homo sapien
aagtatgtcggagaaggtcttcaca

SEQ ID NO: 5364230 - DNA, 25 bp, Homo sapien
aggcttctcagccatccgaggacac

SEQ ID NO: 5364231 - DNA, 25 bp, Homo sapien
tggagggcaaggtgactctagtttc

SEQ ID NO: 5364232 - DNA, 25 bp, Homo sapien
ggtagcgggtatacatggcagcttc

SEQ ID NO: 5364233 - DNA, 25 bp, Homo sapien
ctctagtttcgtggagcagccatgc

SEQ ID NO: 5364234 - DNA, 25 bp, Homo sapien
catctgggttatgtccccgtgcctg

SEQ ID NO: 5364235 - DNA, 25 bp, Homo sapien
gttcatgtgcatgcgtggcccaaag

SEQ ID NO: 5364236 - DNA, 25 bp, Homo sapien
tactcgcccatcgttcatgtgcatg

SEQ ID NO: 5364237 - DNA, 25 bp, Homo sapien
tgcgtggcccaaaggtgttgaagat

SEQ ID NO: 5364238 - DNA, 25 bp, Homo sapien
agttgctgactactcgcccatcgtt

SEQ ID NO: 5364239 - DNA, 25 bp, Homo sapien
ggagcctggggcgtgaggacctggg

SEQ ID NO: 5364240 - DNA, 25 bp, Homo sapien
cctggggcgtgaggacctgggctct

SEQ ID NO: 5364241 - DNA, 25 bp, Homo sapien
gggcgtgaggacctgggctctgctt

SEQ ID NO: 5364242 - DNA, 25 bp, Homo sapien
ggcgtgaggacctgggctctgcttc

SEQ ID NO: 5364243 - DNA, 25 bp, Homo sapien
cagggggacagtcgatggatgctga

SEQ ID NO: 5364244 - DNA, 25 bp, Homo sapien
actgttgatggtggcagttcagttg

SEQ ID NO: 5364245 - DNA, 25 bp, Homo sapien
ggcaggcagggggacagtcgatgga

SEQ ID NO: 5364246 - DNA, 25 bp, Homo sapien
ttgatggtggcagttcagttgccac

SEQ ID NO: 5364247 - DNA, 25 bp, Homo sapien
gggcacggtcctccctgacataatg

SEQ ID NO: 5364248 - DNA, 25 bp, Homo sapien
taagtagagtgtgagccccaatgaa

SEQ ID NO: 5364249 - DNA, 25 bp, Homo sapien
tcgcagccaccagaattggacaggg

SEQ ID NO: 5364250 - DNA, 25 bp, Homo sapien
ttactgacctgttggccaagagccc

SEQ ID NO: 5364251 - DNA, 25 bp, Homo sapien
agggcaacgctgcccacgccattaa

SEQ ID NO: 5364252 - DNA, 25 bp, Homo sapien
cacggggggcttctaacaggtatat

SEQ ID NO: 5364253 - DNA, 25 bp, Homo sapien
gatgctaccttgagcaggaggaacc

SEQ ID NO: 5364254 - DNA, 25 bp, Homo sapien
tcccgacagggttcacgtcagggat

SEQ ID NO: 5364255 - DNA, 25 bp, Homo sapien
atgaggatgtgaaaattcagaccca

SEQ ID NO: 5364256 - DNA, 25 bp, Homo sapien
gcatgtcccactataccagagggca

SEQ ID NO: 5364257 - DNA, 25 bp, Homo sapien
tcccactataccagagggcattttc

SEQ ID NO: 5364258 - DNA, 25 bp, Homo sapien
ctgcatgtcccactataccagaggg

SEQ ID NO: 5364259 - DNA, 25 bp, Homo sapien
aacacgtttgccttcatcgtagcag

SEQ ID NO: 5364260 - DNA, 25 bp, Homo sapien
attggattcacgtggccccagtaat

SEQ ID NO: 5364261 - DNA, 25 bp, Homo sapien
tagcaggcccgaggtcctattggat

SEQ ID NO: 5364262 - DNA, 25 bp, Homo sapien
ctgcttcatgtaggcatagcacatg

SEQ ID NO: 5364263 - DNA, 25 bp, Homo sapien
acctccgatgtggaggccaggagca

SEQ ID NO: 5364264 - DNA, 25 bp, Homo sapien
ggagcagacgggcaccgactcgttt

SEQ ID NO: 5364265 - DNA, 25 bp, Homo sapien
ccatacacctccgatgtggaggcca

SEQ ID NO: 5364266 - DNA, 25 bp, Homo sapien
gacgggcaccgactcgttttgccag

SEQ ID NO: 5364267 - DNA, 25 bp, Homo sapien
cgtattggtctttaatgtcttgata

SEQ ID NO: 5364268 - DNA, 25 bp, Homo sapien
gtcccaatcgtattggtctttaatg

SEQ ID NO: 5364269 - DNA, 25 bp, Homo sapien
aacatgtttaatgtcccaatcgtat

SEQ ID NO: 5364270 - DNA, 25 bp, Homo sapien
tgtttaatgtcccaatcgtattggt

SEQ ID NO: 5364271 - DNA, 25 bp, Homo sapien
gatgccagatggtatatctggtcaa

SEQ ID NO: 5364272 - DNA, 25 bp, Homo sapien
agatgccagatggtatatctggtca

SEQ ID NO: 5364273 - DNA, 25 bp, Homo sapien
gagatgccagatggtatatctggtc

SEQ ID NO: 5364274 - DNA, 25 bp, Homo sapien
gatcagcacagaccgggtcagttcc

SEQ ID NO: 5364275 - DNA, 25 bp, Homo sapien
gcagtttccagctaggatcagcaca

SEQ ID NO: 5364276 - DNA, 25 bp, Homo sapien
agcagaccattagccccagaaacag

SEQ ID NO: 5364277 - DNA, 25 bp, Homo sapien
taaggccaagctatcttttgcagtt

SEQ ID NO: 5364278 - DNA, 25 bp, Homo sapien
gtcagtctgtatgggaaaccttctc

SEQ ID NO: 5364279 - DNA, 25 bp, Homo sapien
gccttgtccagagattcacacatgc

SEQ ID NO: 5364280 - DNA, 25 bp, Homo sapien
ttgcctgcaccactagtccacaaca

SEQ ID NO: 5364281 - DNA, 25 bp, Homo sapien
ttcaaagctcaatccagacgtcagt

SEQ ID NO: 5364282 - DNA, 25 bp, Homo sapien
ctagacgatgagctcactgagcaca

SEQ ID NO: 5364283 - DNA, 25 bp, Homo sapien
tagacgatgagctcactgagcacaa

SEQ ID NO: 5364284 - DNA, 25 bp, Homo sapien
agcacaagatgcaggcctttccctt

SEQ ID NO: 5364285 - DNA, 25 bp, Homo sapien
ctgagagaagagatgagcgtaaact

SEQ ID NO: 5364286 - DNA, 25 bp, Homo sapien
tcgagacgttcagttaagtagcggc

SEQ ID NO: 5364287 - DNA, 25 bp, Homo sapien
ggtctcacccttcaggatttccagg

SEQ ID NO: 5364288 - DNA, 25 bp, Homo sapien
cccaggccagtttgggaacagggct

SEQ ID NO: 5364289 - DNA, 25 bp, Homo sapien
ggtgctaggtaaacagtaagtaaca

SEQ ID NO: 5364290 - DNA, 25 bp, Homo sapien
accagcaatgagaggtgctaggtaa

SEQ ID NO: 5364291 - DNA, 25 bp, Homo sapien
cattaataacaaccggcttcggaat

SEQ ID NO: 5364292 - DNA, 25 bp, Homo sapien
caatgagaggtgctaggtaaacagt

SEQ ID NO: 5364293 - DNA, 25 bp, Homo sapien
ccaagcatgagcctgacgttccaaa

SEQ ID NO: 5364294 - DNA, 25 bp, Homo sapien
tgagcctgacgttccaaaatccaag

SEQ ID NO: 5364295 - DNA, 25 bp, Homo sapien
ggccctgggaacatgtcaactgcac

SEQ ID NO: 5364296 - DNA, 25 bp, Homo sapien
ggaacatgtcaactgcacagttcag

SEQ ID NO: 5364297 - DNA, 25 bp, Homo sapien
ccacgtcgtggttaatcaactcgaa

SEQ ID NO: 5364298 - DNA, 25 bp, Homo sapien
tttgtcagttagatgggagcccacg

SEQ ID NO: 5364299 - DNA, 25 bp, Homo sapien
ttcctgcccgtgaagaaattgtcca

SEQ ID NO: 5364300 - DNA, 25 bp, Homo sapien
gaagttctcatgtccgatccagtgc

SEQ ID NO: 5364301 - DNA, 25 bp, Homo sapien
ctgcatccggacagcgtgtgcagag

SEQ ID NO: 5364302 - DNA, 25 bp, Homo sapien
tgcatccggacagcgtgtgcagagc

SEQ ID NO: 5364303 - DNA, 25 bp, Homo sapien
cacaactgaccaacgttaatattaa

SEQ ID NO: 5364304 - DNA, 25 bp, Homo sapien
aaacaggacctagggtcgtgccaga

SEQ ID NO: 5364305 - DNA, 25 bp, Homo sapien
tcttggccaaacggaaccccagaga

SEQ ID NO: 5364306 - DNA, 25 bp, Homo sapien
tgtgaaaggagattggacatgcctc

SEQ ID NO: 5364307 - DNA, 25 bp, Homo sapien
tcttttccgatccttttctgataaa

SEQ ID NO: 5364308 - DNA, 25 bp, Homo sapien
ttcttttccgatccttttctgataa

SEQ ID NO: 5364309 - DNA, 25 bp, Homo sapien
aattcttttccgatccttttctgat

SEQ ID NO: 5364310 - DNA, 25 bp, Homo sapien
attcttttccgatccttttctgata

SEQ ID NO: 5364311 - DNA, 25 bp, Homo sapien
ttgccgcccataggaagtgcctcag

SEQ ID NO: 5364312 - DNA, 25 bp, Homo sapien
tgccttcagtcaggagcgatgctgt

SEQ ID NO: 5364313 - DNA, 25 bp, Homo sapien
gaccgtctttagtacttgccgccca

SEQ ID NO: 5364314 - DNA, 25 bp, Homo sapien
tctctgagctcacgatatccatgtc

SEQ ID NO: 5364315 - DNA, 25 bp, Homo sapien
tatagctacatatgggaaaacgcgg

SEQ ID NO: 5364316 - DNA, 25 bp, Homo sapien
aaccaattcagtgaggagcggaggc

SEQ ID NO: 5364317 - DNA, 25 bp, Homo sapien
ttttagagtcaagaccgctcgggaa

SEQ ID NO: 5364318 - DNA, 25 bp, Homo sapien
ttcagggctccttctctaccgtgta

SEQ ID NO: 5364319 - DNA, 25 bp, Homo sapien
tcttcgagaagccacacatacaaag

SEQ ID NO: 5364320 - DNA, 25 bp, Homo sapien
tcacttcttcgagaagccacacata

SEQ ID NO: 5364321 - DNA, 25 bp, Homo sapien
tatactcctcacttcttcgagaagc

SEQ ID NO: 5364322 - DNA, 25 bp, Homo sapien
taaaaaactatcttatactcctcac

SEQ ID NO: 5364323 - DNA, 25 bp, Homo sapien
caaggcttcttaaagacctgtagca

SEQ ID NO: 5364324 - DNA, 25 bp, Homo sapien
gacctgtagcaggtgaaaatcctac

SEQ ID NO: 5364325 - DNA, 25 bp, Homo sapien
caagccatcagcctgccgaggcttc

SEQ ID NO: 5364326 - DNA, 25 bp, Homo sapien
tacccagtgtactggctcatccact

SEQ ID NO: 5364327 - DNA, 25 bp, Homo sapien
tcacgcttttttagccaggcctacg

SEQ ID NO: 5364328 - DNA, 25 bp, Homo sapien
cacagtaatgcaggcacgcggatca

SEQ ID NO: 5364329 - DNA, 25 bp, Homo sapien
aaagtaagctagacggagttccatc

SEQ ID NO: 5364330 - DNA, 25 bp, Homo sapien
ggcctacgcttgaccttctgacaca

SEQ ID NO: 5364331 - DNA, 25 bp, Homo sapien
catacagtacgtgcaagaggaaagt

SEQ ID NO: 5364332 - DNA, 25 bp, Homo sapien
gggttctctccgaaatctgactcaa

SEQ ID NO: 5364333 - DNA, 25 bp, Homo sapien
tgactacacatgacacaccataggc

SEQ ID NO: 5364334 - DNA, 25 bp, Homo sapien
tcgtccaaactcatcccaataaggg

SEQ ID NO: 5364335 - DNA, 25 bp, Homo sapien
caaacagaattaattactcaattga

SEQ ID NO: 5364336 - DNA, 25 bp, Homo sapien
ttactcaattgagacaaacttattt

SEQ ID NO: 5364337 - DNA, 25 bp, Homo sapien
gagacaaacttattttaactattga

SEQ ID NO: 5364338 - DNA, 25 bp, Homo sapien
tattttaactattgactttaagaca

SEQ ID NO: 5364339 - DNA, 25 bp, Homo sapien
tgattttctctcttagtggttcaac

SEQ ID NO: 5364340 - DNA, 25 bp, Homo sapien
gattttctctcttagtggttcaacc

SEQ ID NO: 5364341 - DNA, 25 bp, Homo sapien
gcatcacaatgctagaattgaacag

SEQ ID NO: 5364342 - DNA, 25 bp, Homo sapien
tccagtttgaaattaagatacacca

SEQ ID NO: 5364343 - DNA, 25 bp, Homo sapien
cattctgatgtttcagataaggcaa

SEQ ID NO: 5364344 - DNA, 25 bp, Homo sapien
gaaattaagatacaccacttgcatc

SEQ ID NO: 5364345 - DNA, 25 bp, Homo sapien
gcataggtgctagccttcagctggg

SEQ ID NO: 5364346 - DNA, 25 bp, Homo sapien
tgggtgtgcaacgtctccatctgtg

SEQ ID NO: 5364347 - DNA, 25 bp, Homo sapien
gcacgtggcctagcatccgattggt

SEQ ID NO: 5364348 - DNA, 25 bp, Homo sapien
caacggtctggctgtatctacatgt

SEQ ID NO: 5364349 - DNA, 25 bp, Homo sapien
tttagttcaccattttcctggatag

SEQ ID NO: 5364350 - DNA, 25 bp, Homo sapien
tagttcaccattttcctggatagac

SEQ ID NO: 5364351 - DNA, 25 bp, Homo sapien
ttagttcaccattttcctggataga

SEQ ID NO: 5364352 - DNA, 25 bp, Homo sapien
catattaacgaagttgccccaaaca

SEQ ID NO: 5364353 - DNA, 25 bp, Homo sapien
tcatattaacgaagttgccccaaac

SEQ ID NO: 5364354 - DNA, 25 bp, Homo sapien
atattaacgaagttgccccaaacag

SEQ ID NO: 5364355 - DNA, 25 bp, Homo sapien
gagcaggattctttctacggaagcc

SEQ ID NO: 5364356 - DNA, 25 bp, Homo sapien
tgcagtgcggcttaactccaacggg

SEQ ID NO: 5364357 - DNA, 25 bp, Homo sapien
taaatgtgtataagtcagccctgaa

SEQ ID NO: 5364358 - DNA, 25 bp, Homo sapien
tcatgtggccactcagcagatactg

SEQ ID NO: 5364359 - DNA, 25 bp, Homo sapien
gaacacctgggtcagtcctcagctc

SEQ ID NO: 5364360 - DNA, 25 bp, Homo sapien
taaactctatgtccttgttgtcctg

SEQ ID NO: 5364361 - DNA, 25 bp, Homo sapien
actctatgtccttgttgtcctgttc

SEQ ID NO: 5364362 - DNA, 25 bp, Homo sapien
tcctcagctcggacaccacgcactg

SEQ ID NO: 5364363 - DNA, 25 bp, Homo sapien
gcttcgccactcagacctccagagc

SEQ ID NO: 5364364 - DNA, 25 bp, Homo sapien
tccacgcttcgccactcagacctcc

SEQ ID NO: 5364365 - DNA, 25 bp, Homo sapien
tgcaagcagccccctgcatgtgact

SEQ ID NO: 5364366 - DNA, 25 bp, Homo sapien
aagcagccccctgcatgtgactctc

SEQ ID NO: 5364367 - DNA, 25 bp, Homo sapien
caacccttcagctcgtctacaggta

SEQ ID NO: 5364368 - DNA, 25 bp, Homo sapien
cgtctacaggtagtgtcctgggcac

SEQ ID NO: 5364369 - DNA, 25 bp, Homo sapien
tcagctcgtctacaggtagtgtcct

SEQ ID NO: 5364370 - DNA, 25 bp, Homo sapien
ttccctaaaccacttgctgtcccca

SEQ ID NO: 5364371 - DNA, 25 bp, Homo sapien
cacctccaagactcatctgagcatc

SEQ ID NO: 5364372 - DNA, 25 bp, Homo sapien
ctgcacctccaagactcatctgagc

SEQ ID NO: 5364373 - DNA, 25 bp, Homo sapien
tggccctcctgtgtggccaaggtct

SEQ ID NO: 5364374 - DNA, 25 bp, Homo sapien
tgcacctccaagactcatctgagca

SEQ ID NO: 5364375 - DNA, 25 bp, Homo sapien
cgttgctgcacagattccaaaggga

SEQ ID NO: 5364376 - DNA, 25 bp, Homo sapien
tcatgtcaagtgttgtggcctcctt

SEQ ID NO: 5364377 - DNA, 25 bp, Homo sapien
gagataattcaatacccagcccaga

SEQ ID NO: 5364378 - DNA, 25 bp, Homo sapien
tacaccaggcatacatggtccaagc

SEQ ID NO: 5364379 - DNA, 25 bp, Homo sapien
cgggggcgggatggcaatgccagca

SEQ ID NO: 5364380 - DNA, 25 bp, Homo sapien
gcgggggcgggatggcaatgccagc

SEQ ID NO: 5364381 - DNA, 25 bp, Homo sapien
ggctccggacagcaggcaatgaaca

SEQ ID NO: 5364382 - DNA, 25 bp, Homo sapien
acagtgaggtgctgtagtctgagca

SEQ ID NO: 5364383 - DNA, 25 bp, Homo sapien
tggaagcagcggtgtgagagacaaa

SEQ ID NO: 5364384 - DNA, 25 bp, Homo sapien
gagtaaataatgcagagggcagagc

SEQ ID NO: 5364385 - DNA, 25 bp, Homo sapien
aatgctggactgtttgctgttcctc

SEQ ID NO: 5364386 - DNA, 25 bp, Homo sapien
tcaagcttttctgaacatgtgagct

SEQ ID NO: 5364387 - DNA, 25 bp, Homo sapien
gctgtatcgaaaagcttcatctaag

SEQ ID NO: 5364388 - DNA, 25 bp, Homo sapien
gctgctgctgcatgcattccaatgc

SEQ ID NO: 5364389 - DNA, 25 bp, Homo sapien
ctgggcagtgtagttctgagcacac

SEQ ID NO: 5364390 - DNA, 25 bp, Homo sapien
gctgggcagtgtagttctgagcaca

SEQ ID NO: 5364391 - DNA, 25 bp, Homo sapien
tcacattcgtacttcctgaccaaga

SEQ ID NO: 5364392 - DNA, 25 bp, Homo sapien
aatcagcgtctgatcattaatgggc

SEQ ID NO: 5364393 - DNA, 25 bp, Homo sapien
cggtgttgataaagcttgctcagca

SEQ ID NO: 5364394 - DNA, 25 bp, Homo sapien
ttttctctaacggacagcagggcgg

SEQ ID NO: 5364395 - DNA, 25 bp, Homo sapien
ccttcacgatgaggacaaggtccct

SEQ ID NO: 5364396 - DNA, 25 bp, Homo sapien
caccttcacgatgaggacaaggtcc

SEQ ID NO: 5364397 - DNA, 25 bp, Homo sapien
tccaccttcacgatgaggacaaggt

SEQ ID NO: 5364398 - DNA, 25 bp, Homo sapien
accttcacgatgaggacaaggtccc

SEQ ID NO: 5364399 - DNA, 25 bp, Homo sapien
gggtgggaacgcaggcaaggtgaag

SEQ ID NO: 5364400 - DNA, 25 bp, Homo sapien
tgcatttcagcatctacactggtgg

SEQ ID NO: 5364401 - DNA, 25 bp, Homo sapien
ttcagcatctacactggtgggtggg

SEQ ID NO: 5364402 - DNA, 25 bp, Homo sapien
ggtgggaacgcaggcaaggtgaagc

SEQ ID NO: 5364403 - DNA, 25 bp, Homo sapien
cctgggaatgccaccggtactaggt

SEQ ID NO: 5364404 - DNA, 25 bp, Homo sapien
acagtgatatctaacttgctgcaca

SEQ ID NO: 5364405 - DNA, 25 bp, Homo sapien
gggtcctctggcgtcacagtgatat

SEQ ID NO: 5364406 - DNA, 25 bp, Homo sapien
tggattttagctgtctgctgtcccc

SEQ ID NO: 5364407 - DNA, 25 bp, Homo sapien
ttatacttagggtcaagaactgggc

SEQ ID NO: 5364408 - DNA, 25 bp, Homo sapien
taaggaatcaatccacgtggacagg

SEQ ID NO: 5364409 - DNA, 25 bp, Homo sapien
catctaagaagcaggacaagttcca

SEQ ID NO: 5364410 - DNA, 25 bp, Homo sapien
gaacaggcaccaaaatgctactgga

SEQ ID NO: 5364411 - DNA, 25 bp, Homo sapien
ccactcttaaacatgggcaggccat

SEQ ID NO: 5364412 - DNA, 25 bp, Homo sapien
aggagagcctcacacagaaacggga

SEQ ID NO: 5364413 - DNA, 25 bp, Homo sapien
tcttgtgacaatagcccgggaggac

SEQ ID NO: 5364414 - DNA, 25 bp, Homo sapien
caaggaaaggttcagctcacagaag

SEQ ID NO: 5364415 - DNA, 25 bp, Homo sapien
taaacgctgagtaattttcctgagg

SEQ ID NO: 5364416 - DNA, 25 bp, Homo sapien
ctgaggagcaaacagtcggagcggg

SEQ ID NO: 5364417 - DNA, 25 bp, Homo sapien
gggctctgccaatggccacagtatt

SEQ ID NO: 5364418 - DNA, 25 bp, Homo sapien
ggctcccagcgcgacatggacgaca

SEQ ID NO: 5364419 - DNA, 25 bp, Homo sapien
cgacgtaggccagcaaggcgatgcc

SEQ ID NO: 5364420 - DNA, 25 bp, Homo sapien
acgtaggccagcaaggcgatgccca

SEQ ID NO: 5364421 - DNA, 25 bp, Homo sapien
gacacgaggcgcagcagcgccttgc

SEQ ID NO: 5364422 - DNA, 25 bp, Homo sapien
cttcatcctcctgcggttgacggca

SEQ ID NO: 5364423 - DNA, 25 bp, Homo sapien
ccgcctgctgcacaatgcgcggcgg

SEQ ID NO: 5364424 - DNA, 25 bp, Homo sapien
cccgcctgctgcacaatgcgcggcg

SEQ ID NO: 5364425 - DNA, 25 bp, Homo sapien
gcccgcctgctgcacaatgcgcggc

SEQ ID NO: 5364426 - DNA, 25 bp, Homo sapien
ctaagcgacggtgccctgaggagtc

SEQ ID NO: 5364427 - DNA, 25 bp, Homo sapien
gacaataccagtaaagacacagtga

SEQ ID NO: 5364428 - DNA, 25 bp, Homo sapien
aaacggtcctgcaaggtcagccaga

SEQ ID NO: 5364429 - DNA, 25 bp, Homo sapien
ttcagggagacagcgagttcagcgc

SEQ ID NO: 5364430 - DNA, 25 bp, Homo sapien
acacgggaagtgactggcccatgta

SEQ ID NO: 5364431 - DNA, 25 bp, Homo sapien
gccaacaggaacacgggaagtgact

SEQ ID NO: 5364432 - DNA, 25 bp, Homo sapien
cccacagccaacaggaacacgggaa

SEQ ID NO: 5364433 - DNA, 25 bp, Homo sapien
acaggaacacgggaagtgactggcc

SEQ ID NO: 5364434 - DNA, 25 bp, Homo sapien
cgtgggtccgcgtctgcaggttcct

SEQ ID NO: 5364435 - DNA, 25 bp, Homo sapien
agagcagcatcataaagtacatagg

SEQ ID NO: 5364436 - DNA, 25 bp, Homo sapien
tgcaggttcctatcgctccccgttt

SEQ ID NO: 5364437 - DNA, 25 bp, Homo sapien
taggtctgcccacgtcgggacgcgt

SEQ ID NO: 5364438 - DNA, 25 bp, Homo sapien
cactgcgttgtagtgaccatggttt

SEQ ID NO: 5364439 - DNA, 25 bp, Homo sapien
agctgttggtgaaaacttccctggc

SEQ ID NO: 5364440 - DNA, 25 bp, Homo sapien
actgccacagctatgctctcagctg

SEQ ID NO: 5364441 - DNA, 25 bp, Homo sapien
cctgtgcctgtggttcctgtgtgtg

SEQ ID NO: 5364442 - DNA, 25 bp, Homo sapien
aatcaaagtgcaacgcttctacctc

SEQ ID NO: 5364443 - DNA, 25 bp, Homo sapien
tctatccattccaaatcaaagtgca

SEQ ID NO: 5364444 - DNA, 25 bp, Homo sapien
tcttgttgacgaggaagtgagacca

SEQ ID NO: 5364445 - DNA, 25 bp, Homo sapien
cagctcctcttgttgacgaggaagt

SEQ ID NO: 5364446 - DNA, 25 bp, Homo sapien
cttttgtatgaggaaatgtggtcat

SEQ ID NO: 5364447 - DNA, 25 bp, Homo sapien
tgtgttccctcacatatcccgatgt

SEQ ID NO: 5364448 - DNA, 25 bp, Homo sapien
tcccgatgttacagcagaggctctc

SEQ ID NO: 5364449 - DNA, 25 bp, Homo sapien
ggcagcgtctgtgttccctcacata

SEQ ID NO: 5364450 - DNA, 25 bp, Homo sapien
ggctctgaggcagcgtctgtgttcc

SEQ ID NO: 5364451 - DNA, 25 bp, Homo sapien
agctttaaaaatccccaatgcattt

SEQ ID NO: 5364452 - DNA, 25 bp, Homo sapien
cagctttaaaaatccccaatgcatt

SEQ ID NO: 5364453 - DNA, 25 bp, Homo sapien
gccagctttaaaaatccccaatgca

SEQ ID NO: 5364454 - DNA, 25 bp, Homo sapien
ccagctttaaaaatccccaatgcat

SEQ ID NO: 5364455 - DNA, 25 bp, Homo sapien
ccaaggtggagtaggcgggtctagc

SEQ ID NO: 5364456 - DNA, 25 bp, Homo sapien
tctagcggcccttgctggagtgcgc

SEQ ID NO: 5364457 - DNA, 25 bp, Homo sapien
agctcccggccggattcagaagatc

SEQ ID NO: 5364458 - DNA, 25 bp, Homo sapien
aggagcccgcctgagttgcatcttc

SEQ ID NO: 5364459 - DNA, 25 bp, Homo sapien
tcagggtgtaggcagcgcctccttc

SEQ ID NO: 5364460 - DNA, 25 bp, Homo sapien
gagcaccgctctcagcaggctgagc

SEQ ID NO: 5364461 - DNA, 25 bp, Homo sapien
tggaacctggtgagcaccgctctca

SEQ ID NO: 5364462 - DNA, 25 bp, Homo sapien
tcctgcattcctagctccagtgctg

SEQ ID NO: 5364463 - DNA, 25 bp, Homo sapien
tcttcagccactcgtgcagcctgga

SEQ ID NO: 5364464 - DNA, 25 bp, Homo sapien
ctcttcttcagccactcgtgcagcc

SEQ ID NO: 5364465 - DNA, 25 bp, Homo sapien
ttcttcagccactcgtgcagcctgg

SEQ ID NO: 5364466 - DNA, 25 bp, Homo sapien
ttcagccactcgtgcagcctggaca

SEQ ID NO: 5364467 - DNA, 25 bp, Homo sapien
caagagtgatatggatttttaagtg

SEQ ID NO: 5364468 - DNA, 25 bp, Homo sapien
tcaagagtgatatggatttttaagt

SEQ ID NO: 5364469 - DNA, 25 bp, Homo sapien
aagagtgatatggatttttaagtgc

SEQ ID NO: 5364470 - DNA, 25 bp, Homo sapien
agagtgatatggatttttaagtgct

SEQ ID NO: 5364471 - DNA, 25 bp, Homo sapien
tccggtgacccataaatcttcagta

SEQ ID NO: 5364472 - DNA, 25 bp, Homo sapien
ctccggtgacccataaatcttcagt

SEQ ID NO: 5364473 - DNA, 25 bp, Homo sapien
caaaggcgaccttgagaacaaaagc

SEQ ID NO: 5364474 - DNA, 25 bp, Homo sapien
tcaaggaaaagccacggatagggac

SEQ ID NO: 5364475 - DNA, 25 bp, Homo sapien
gcttgacaaaggctgaaagttgaca

SEQ ID NO: 5364476 - DNA, 25 bp, Homo sapien
aaacgttgggcaggacactgactcc

SEQ ID NO: 5364477 - DNA, 25 bp, Homo sapien
tacaatccgtcggtcttggccaatt

SEQ ID NO: 5364478 - DNA, 25 bp, Homo sapien
tccgtcggtcttggccaattggaga

SEQ ID NO: 5364479 - DNA, 25 bp, Homo sapien
aatccgtcggtcttggccaattgga

SEQ ID NO: 5364480 - DNA, 25 bp, Homo sapien
ttaatacaatccgtcggtcttggcc

SEQ ID NO: 5364481 - DNA, 25 bp, Homo sapien
catttccatggcatgtacaggccta

SEQ ID NO: 5364482 - DNA, 25 bp, Homo sapien
tgtacaggcctatgaactcaccagt

SEQ ID NO: 5364483 - DNA, 25 bp, Homo sapien
catggcatgtacaggcctatgaact

SEQ ID NO: 5364484 - DNA, 25 bp, Homo sapien
ggcctatgaactcaccagtgtcatt

SEQ ID NO: 5364485 - DNA, 25 bp, Homo sapien
ctcaaagccgcacctgctgccgcca

SEQ ID NO: 5364486 - DNA, 25 bp, Homo sapien
tcaaagccgcacctgctgccgccac

SEQ ID NO: 5364487 - DNA, 25 bp, Homo sapien
caaagccgcacctgctgccgccaca

SEQ ID NO: 5364488 - DNA, 25 bp, Homo sapien
ccctttctgggtacacttgcttgat

SEQ ID NO: 5364489 - DNA, 25 bp, Homo sapien
agggaatctgtccagcttgggcctt

SEQ ID NO: 5364490 - DNA, 25 bp, Homo sapien
cacctgctgccgctggacttgtaga

SEQ ID NO: 5364491 - DNA, 25 bp, Homo sapien
gaactaacactagagacagcccttt

SEQ ID NO: 5364492 - DNA, 25 bp, Homo sapien
ctcatgacaatactctgggaaacct

SEQ ID NO: 5364493 - DNA, 25 bp, Homo sapien
cctctctgttggattgaatggtatt

SEQ ID NO: 5364494 - DNA, 25 bp, Homo sapien
ttctctttgctcatgacaatactct

SEQ ID NO: 5364495 - DNA, 25 bp, Homo sapien
ttgaatggtattccttgtggccttc

SEQ ID NO: 5364496 - DNA, 25 bp, Homo sapien
gagcatcatgctgggtcctgctgtt

SEQ ID NO: 5364497 - DNA, 25 bp, Homo sapien
tttgagcatcatgctgggtcctgct

SEQ ID NO: 5364498 - DNA, 25 bp, Homo sapien
tgagcatcatgctgggtcctgctgt

SEQ ID NO: 5364499 - DNA, 25 bp, Homo sapien
ttgagcatcatgctgggtcctgctg

SEQ ID NO: 5364500 - DNA, 25 bp, Homo sapien
cttacgttcgaagtgagattgaagt

SEQ ID NO: 5364501 - DNA, 25 bp, Homo sapien
ttacgttcgaagtgagattgaagtt

SEQ ID NO: 5364502 - DNA, 25 bp, Homo sapien
aaagacagtgctcaaatgctactgt

SEQ ID NO: 5364503 - DNA, 25 bp, Homo sapien
aagacagtgctcaaatgctactgtg

SEQ ID NO: 5364504 - DNA, 25 bp, Homo sapien
gcaaagcgcaggacactctctgtcc

SEQ ID NO: 5364505 - DNA, 25 bp, Homo sapien
aaagcgcaggacactctctgtcctc

SEQ ID NO: 5364506 - DNA, 25 bp, Homo sapien
agcgcaggacactctctgtcctctt

SEQ ID NO: 5364507 - DNA, 25 bp, Homo sapien
cgcaggacactctctgtcctcttca

SEQ ID NO: 5364508 - DNA, 25 bp, Homo sapien
ccgggccttgggaaggcatcgccat

SEQ ID NO: 5364509 - DNA, 25 bp, Homo sapien
atctcctgcagggcgtccgggcctt

SEQ ID NO: 5364510 - DNA, 25 bp, Homo sapien
cgtccgggccttgggaaggcatcgc

SEQ ID NO: 5364511 - DNA, 25 bp, Homo sapien
ggcgtccgggccttgggaaggcatc

SEQ ID NO: 5364512 - DNA, 25 bp, Homo sapien
agcactcctcgaaggtctaaatcgg

SEQ ID NO: 5364513 - DNA, 25 bp, Homo sapien
gcactcctcgaaggtctaaatcggg

SEQ ID NO: 5364514 - DNA, 25 bp, Homo sapien
gtccttgggccctaacgtctggatg

SEQ ID NO: 5364515 - DNA, 25 bp, Homo sapien
atggtccttgggccctaacgtctgg

SEQ ID NO: 5364516 - DNA, 25 bp, Homo sapien
ccttgggccctaacgtctggatgaa

SEQ ID NO: 5364517 - DNA, 25 bp, Homo sapien
ttgggccctaacgtctggatgaagc

SEQ ID NO: 5364518 - DNA, 25 bp, Homo sapien
tagctgtacacctgatctcgaagaa

SEQ ID NO: 5364519 - DNA, 25 bp, Homo sapien
gctgtacacctgatctcgaagaaat

SEQ ID NO: 5364520 - DNA, 25 bp, Homo sapien
cacactgccttcaccgagtccaaga

SEQ ID NO: 5364521 - DNA, 25 bp, Homo sapien
tgtagctgtacacctgatctcgaag

SEQ ID NO: 5364522 - DNA, 25 bp, Homo sapien
tcacgtggtgtcttgtgaaagactt

SEQ ID NO: 5364523 - DNA, 25 bp, Homo sapien
ttgggtatggaggtttcttgaagac

SEQ ID NO: 5364524 - DNA, 25 bp, Homo sapien
tcttgggtatggaggtttcttgaag

SEQ ID NO: 5364525 - DNA, 25 bp, Homo sapien
cttgggtatggaggtttcttgaaga

SEQ ID NO: 5364526 - DNA, 25 bp, Homo sapien
cagcaactcatctctagaactgaaa

SEQ ID NO: 5364527 - DNA, 25 bp, Homo sapien
ggtagtctaggctcatcttcatgag

SEQ ID NO: 5364528 - DNA, 25 bp, Homo sapien
catctaaatggttgtctctatacag

SEQ ID NO: 5364529 - DNA, 25 bp, Homo sapien
tcttcatgagggaactgaggtcttg

SEQ ID NO: 5364530 - DNA, 25 bp, Homo sapien
gtctcaagtcaaagagaaagtgaaa

SEQ ID NO: 5364531 - DNA, 25 bp, Homo sapien
tcatggcttgcatgcagtgacaccc

SEQ ID NO: 5364532 - DNA, 25 bp, Homo sapien
gaagatgtagcacggacctctaagg

SEQ ID NO: 5364533 - DNA, 25 bp, Homo sapien
agtgacaccctatcaagagcctgga

SEQ ID NO: 5364534 - DNA, 25 bp, Homo sapien
tcaactcaagtggtgggcccaccta

SEQ ID NO: 5364535 - DNA, 25 bp, Homo sapien
tcgaagtccaaaccaactacgaaga

SEQ ID NO: 5364536 - DNA, 25 bp, Homo sapien
agtccaaaccaactacgaagatagg

SEQ ID NO: 5364537 - DNA, 25 bp, Homo sapien
cctatcgaagtccaaaccaactacg

SEQ ID NO: 5364538 - DNA, 25 bp, Homo sapien
caaaccaactacgaagataggatgc

SEQ ID NO: 5364539 - DNA, 25 bp, Homo sapien
gagtctgacctctgtcaactggcat

SEQ ID NO: 5364540 - DNA, 25 bp, Homo sapien
cacaaggtttgtgcataggtttttg

SEQ ID NO: 5364541 - DNA, 25 bp, Homo sapien
tgaaggataactgagatcttcctcg

SEQ ID NO: 5364542 - DNA, 25 bp, Homo sapien
tattcatttgccagttgaaggataa

SEQ ID NO: 5364543 - DNA, 25 bp, Homo sapien
ataactcattaggttagcctactgg

SEQ ID NO: 5364544 - DNA, 25 bp, Homo sapien
cattaggttagcctactggctctca

SEQ ID NO: 5364545 - DNA, 25 bp, Homo sapien
aagccacaatctcttgtaatctatc

SEQ ID NO: 5364546 - DNA, 25 bp, Homo sapien
atattgcttagggatggacaacttg

SEQ ID NO: 5364547 - DNA, 25 bp, Homo sapien
tgagcaaccgcagcaagttttccct

SEQ ID NO: 5364548 - DNA, 25 bp, Homo sapien
gcaacatcgtatttataacaggaag

SEQ ID NO: 5364549 - DNA, 25 bp, Homo sapien
gaactgcagcaagacgttcttcaag

SEQ ID NO: 5364550 - DNA, 25 bp, Homo sapien
ggctgagctgcaacatcgtatttat

SEQ ID NO: 5364551 - DNA, 25 bp, Homo sapien
tgatctgcactttttgtggtggaac

SEQ ID NO: 5364552 - DNA, 25 bp, Homo sapien
gctgctctaaagactgtgtgtatgt

SEQ ID NO: 5364553 - DNA, 25 bp, Homo sapien
gcagctgctctaaagactgtgtgta

SEQ ID NO: 5364554 - DNA, 25 bp, Homo sapien
tgtgtatgtgctggcggaagacaca

SEQ ID NO: 5364555 - DNA, 25 bp, Homo sapien
ctgtgtgtatgtgctggcggaagac

SEQ ID NO: 5364556 - DNA, 25 bp, Homo sapien
tagaagcgggaggtctgtgtttctc

SEQ ID NO: 5364557 - DNA, 25 bp, Homo sapien
tctagaagcgggaggtctgtgtttc

SEQ ID NO: 5364558 - DNA, 25 bp, Homo sapien
agcgggaggtctgtgtttctccttt

SEQ ID NO: 5364559 - DNA, 25 bp, Homo sapien
gaagcgggaggtctgtgtttctcct

SEQ ID NO: 5364560 - DNA, 25 bp, Homo sapien
taagtgaccgatagctgctaatgct

SEQ ID NO: 5364561 - DNA, 25 bp, Homo sapien
tgctaatgctccagtgacaatattt

SEQ ID NO: 5364562 - DNA, 25 bp, Homo sapien
cctaataagtgaccgatagctgcta

SEQ ID NO: 5364563 - DNA, 25 bp, Homo sapien
agctgctaatgctccagtgacaata

SEQ ID NO: 5364564 - DNA, 25 bp, Homo sapien
tgaggaaggggtgctagtccaaaag

SEQ ID NO: 5364565 - DNA, 25 bp, Homo sapien
tccactctgggctactgaactagtt

SEQ ID NO: 5364566 - DNA, 25 bp, Homo sapien
gattcaacttggcaggagacttaga

SEQ ID NO: 5364567 - DNA, 25 bp, Homo sapien
tgggagtgcttgaccgagaaacatg

SEQ ID NO: 5364568 - DNA, 25 bp, Homo sapien
cacatggtgactctctgggagtgct

SEQ ID NO: 5364569 - DNA, 25 bp, Homo sapien
gaagatactgggaattatatgctgg

SEQ ID NO: 5364570 - DNA, 25 bp, Homo sapien
agtaacattagctgctggtctgaga

SEQ ID NO: 5364571 - DNA, 25 bp, Homo sapien
ggaattatatgctggtgactgacta

SEQ ID NO: 5364572 - DNA, 25 bp, Homo sapien
ctttgtgggagtaacattagctgct

SEQ ID NO: 5364573 - DNA, 25 bp, Homo sapien
ggtccataattctctgtgggccaac

SEQ ID NO: 5364574 - DNA, 25 bp, Homo sapien
ctgttagtggagccccatgaaatgt

SEQ ID NO: 5364575 - DNA, 25 bp, Homo sapien
cataattctctgtgggccaacgatg

SEQ ID NO: 5364576 - DNA, 25 bp, Homo sapien
gtctgtgacccctgatatccatcag

SEQ ID NO: 5364577 - DNA, 25 bp, Homo sapien
ggcctttacttcttggcgaatcatt

SEQ ID NO: 5364578 - DNA, 25 bp, Homo sapien
ttacttcttggcgaatcattttcag

SEQ ID NO: 5364579 - DNA, 25 bp, Homo sapien
taatggcctttacttcttggcgaat

SEQ ID NO: 5364580 - DNA, 25 bp, Homo sapien
aatggcctttacttcttggcgaatc

SEQ ID NO: 5364581 - DNA, 25 bp, Homo sapien
ataacaaaagagcatttaaaacact

SEQ ID NO: 5364582 - DNA, 25 bp, Homo sapien
gagcatttaaaacacttagaaacaa

SEQ ID NO: 5364583 - DNA, 25 bp, Homo sapien
tttcacaatgaaatgattccattct

SEQ ID NO: 5364584 - DNA, 25 bp, Homo sapien
cacaatgaaatgattccattctttc

SEQ ID NO: 5364585 - DNA, 25 bp, Homo sapien
cgcatttcgcaaagaaccattttta

SEQ ID NO: 5364586 - DNA, 25 bp, Homo sapien
gttcctgcatgactgacttaagcat

SEQ ID NO: 5364587 - DNA, 25 bp, Homo sapien
agagaggacctccttcactatagtt

SEQ ID NO: 5364588 - DNA, 25 bp, Homo sapien
tctgaatccgcatttcgcaaagaac

SEQ ID NO: 5364589 - DNA, 25 bp, Homo sapien
ctcttttacagactccaggggcaca

SEQ ID NO: 5364590 - DNA, 25 bp, Homo sapien
ttttacagactccaggggcacaggc

SEQ ID NO: 5364591 - DNA, 25 bp, Homo sapien
tcttttacagactccaggggcacag

SEQ ID NO: 5364592 - DNA, 25 bp, Homo sapien
ttacagactccaggggcacaggcaa

SEQ ID NO: 5364593 - DNA, 25 bp, Homo sapien
ttcttgaccactgaaagatttgaat

SEQ ID NO: 5364594 - DNA, 25 bp, Homo sapien
tttcttgaccactgaaagatttgaa

SEQ ID NO: 5364595 - DNA, 25 bp, Homo sapien
tcttgaccactgaaagatttgaatc

SEQ ID NO: 5364596 - DNA, 25 bp, Homo sapien
agaaacaacactttttatagattca

SEQ ID NO: 5364597 - DNA, 25 bp, Homo sapien
aatgaacacttctccctatgtattc

SEQ ID NO: 5364598 - DNA, 25 bp, Homo sapien
gtttaaacagaggatcaataggttc

SEQ ID NO: 5364599 - DNA, 25 bp, Homo sapien
ataatgaacacttctccctatgtat

SEQ ID NO: 5364600 - DNA, 25 bp, Homo sapien
gaggatcaataggttcaggaatact

SEQ ID NO: 5364601 - DNA, 25 bp, Homo sapien
catttttagatagctgaaacctgcc

SEQ ID NO: 5364602 - DNA, 25 bp, Homo sapien
gaaacctgcctcttctgtagtgtca

SEQ ID NO: 5364603 - DNA, 25 bp, Homo sapien
cagtttgttcaaaaggctgaccatc

SEQ ID NO: 5364604 - DNA, 25 bp, Homo sapien
cacaactttaaggaacacgcatgat

SEQ ID NO: 5364605 - DNA, 25 bp, Homo sapien
agagtgtttatttcatgctgaacta

SEQ ID NO: 5364606 - DNA, 25 bp, Homo sapien
tgcccaatgtacaagcagagcaggt

SEQ ID NO: 5364607 - DNA, 25 bp, Homo sapien
ctcttagagtgtttatttcatgctg

SEQ ID NO: 5364608 - DNA, 25 bp, Homo sapien
catgtttttcctgggctcttagagt

SEQ ID NO: 5364609 - DNA, 25 bp, Homo sapien
aaaacctacgcactaagtgaaagca

SEQ ID NO: 5364610 - DNA, 25 bp, Homo sapien
taaaacctacgcactaagtgaaagc

SEQ ID NO: 5364611 - DNA, 25 bp, Homo sapien
aaacctacgcactaagtgaaagcaa

SEQ ID NO: 5364612 - DNA, 25 bp, Homo sapien
gcaggcataacggctgataggagct

SEQ ID NO: 5364613 - DNA, 25 bp, Homo sapien
aaccgcatcccaccaagatttttgt

SEQ ID NO: 5364614 - DNA, 25 bp, Homo sapien
ctcctttaattgtaagtggctggta

SEQ ID NO: 5364615 - DNA, 25 bp, Homo sapien
actgcttttctgtgaatcagagtac

SEQ ID NO: 5364616 - DNA, 25 bp, Homo sapien
tccactgtaagccaagccaagtaag

SEQ ID NO: 5364617 - DNA, 25 bp, Homo sapien
tttcggattccaggtaaagcaggca

SEQ ID NO: 5364618 - DNA, 25 bp, Homo sapien
atgaattccactgtaagccaagcca

SEQ ID NO: 5364619 - DNA, 25 bp, Homo sapien
tttagccattttcggattccaggta

SEQ ID NO: 5364620 - DNA, 25 bp, Homo sapien
tcatataatgcagactgcccgcttt

SEQ ID NO: 5364621 - DNA, 25 bp, Homo sapien
atcatataatgcagactgcccgctt

SEQ ID NO: 5364622 - DNA, 25 bp, Homo sapien
gattttgtccagcttcaccttttat

SEQ ID NO: 5364623 - DNA, 25 bp, Homo sapien
tttgtccagcttcaccttttattaa

SEQ ID NO: 5364624 - DNA, 25 bp, Homo sapien
tgtccagcttcaccttttattaatt

SEQ ID NO: 5364625 - DNA, 25 bp, Homo sapien
ttttgtccagcttcaccttttatta

SEQ ID NO: 5364626 - DNA, 25 bp, Homo sapien
tgtataacctatgaaagataggcca

SEQ ID NO: 5364627 - DNA, 25 bp, Homo sapien
gataggccaggtacaggcgtggtgg

SEQ ID NO: 5364628 - DNA, 25 bp, Homo sapien
agactgcaaaaactgggaaccaagg

SEQ ID NO: 5364629 - DNA, 25 bp, Homo sapien
caaggaatttgtataacctatgaaa

SEQ ID NO: 5364630 - DNA, 25 bp, Homo sapien
taaaaataagaactattggcagggc

SEQ ID NO: 5364631 - DNA, 25 bp, Homo sapien
tctaatagacacacagacagataaa

SEQ ID NO: 5364632 - DNA, 25 bp, Homo sapien
gcaagactctaatagacacacagac

SEQ ID NO: 5364633 - DNA, 25 bp, Homo sapien
aataagaactattggcagggcgcgg

SEQ ID NO: 5364634 - DNA, 25 bp, Homo sapien
gaatcaagtttacccatcatacgag

SEQ ID NO: 5364635 - DNA, 25 bp, Homo sapien
gacaagagtgcactcaacatccctg

SEQ ID NO: 5364636 - DNA, 25 bp, Homo sapien
gcaatgcaggctttcgacaagagtg

SEQ ID NO: 5364637 - DNA, 25 bp, Homo sapien
tatcatgttcccaaaaatggcagag

SEQ ID NO: 5364638 - DNA, 25 bp, Homo sapien
gaaatgctatgagatagcacaatgc

SEQ ID NO: 5364639 - DNA, 25 bp, Homo sapien
agagctcgccattgaacattattac

SEQ ID NO: 5364640 - DNA, 25 bp, Homo sapien
tatgagatagcacaatgcagccagc

SEQ ID NO: 5364641 - DNA, 25 bp, Homo sapien
gctcagaaagagctcgccattgaac

SEQ ID NO: 5364642 - DNA, 25 bp, Homo sapien
taagaaagtagctgacagttcatca

SEQ ID NO: 5364643 - DNA, 25 bp, Homo sapien
atttctaagaaagtagctgacagtt

SEQ ID NO: 5364644 - DNA, 25 bp, Homo sapien
gacagttcatcatttccacccaaag

SEQ ID NO: 5364645 - DNA, 25 bp, Homo sapien
tgacagttcatcatttccacccaaa

SEQ ID NO: 5364646 - DNA, 25 bp, Homo sapien
tccaaacactgtaaagactccagat

SEQ ID NO: 5364647 - DNA, 25 bp, Homo sapien
tcctgcacatctctagtggaaagcg

SEQ ID NO: 5364648 - DNA, 25 bp, Homo sapien
ccagcagtaagtctgtattggttgc

SEQ ID NO: 5364649 - DNA, 25 bp, Homo sapien
gaagcataagattagcataggccag

SEQ ID NO: 5364650 - DNA, 25 bp, Homo sapien
tctaaacttgaacgcaaagctatgt

SEQ ID NO: 5364651 - DNA, 25 bp, Homo sapien
aaacttgaacgcaaagctatgttcc

SEQ ID NO: 5364652 - DNA, 25 bp, Homo sapien
gggtctgtacaacacacgaattcca

SEQ ID NO: 5364653 - DNA, 25 bp, Homo sapien
gtcttacataaagttctgactgaat

SEQ ID NO: 5364654 - DNA, 25 bp, Homo sapien
agtttataaattgcaggacttcctg

SEQ ID NO: 5364655 - DNA, 25 bp, Homo sapien
tagtttataaattgcaggacttcct

SEQ ID NO: 5364656 - DNA, 25 bp, Homo sapien
ttccaattcataaagaagacccaga

SEQ ID NO: 5364657 - DNA, 25 bp, Homo sapien
cctgtaacattcaacggctttctct

SEQ ID NO: 5364658 - DNA, 25 bp, Homo sapien
tgtaacattcaacggctttctctgt

SEQ ID NO: 5364659 - DNA, 25 bp, Homo sapien
agaaatctgtgagctctgggatcca

SEQ ID NO: 5364660 - DNA, 25 bp, Homo sapien
ctctcgcacattaatgtaagtacat

SEQ ID NO: 5364661 - DNA, 25 bp, Homo sapien
cgcacattaatgtaagtacatatgt

SEQ ID NO: 5364662 - DNA, 25 bp, Homo sapien
ctcgcacattaatgtaagtacatat

SEQ ID NO: 5364663 - DNA, 25 bp, Homo sapien
cacattaatgtaagtacatatgtat

SEQ ID NO: 5364664 - DNA, 25 bp, Homo sapien
ttccatcttcctttggatgccttta

SEQ ID NO: 5364665 - DNA, 25 bp, Homo sapien
agctttgcaaaatagaatcctctcg

SEQ ID NO: 5364666 - DNA, 25 bp, Homo sapien
ctttgcaaaatagaatcctctcgtt

SEQ ID NO: 5364667 - DNA, 25 bp, Homo sapien
caaaatagaatcctctcgttgactt

SEQ ID NO: 5364668 - DNA, 25 bp, Homo sapien
tgcaaaatagaatcctctcgttgac

SEQ ID NO: 5364669 - DNA, 25 bp, Homo sapien
cctcaatagtacatgtactgttctc

SEQ ID NO: 5364670 - DNA, 25 bp, Homo sapien
ctgtgcctcaatagtacatgtactg

SEQ ID NO: 5364671 - DNA, 25 bp, Homo sapien
gattccctgtgcctcaatagtacat

SEQ ID NO: 5364672 - DNA, 25 bp, Homo sapien
aggattccctgtgcctcaatagtac

SEQ ID NO: 5364673 - DNA, 25 bp, Homo sapien
agcagcgcccgtcgggagccatgac

SEQ ID NO: 5364674 - DNA, 25 bp, Homo sapien
gagcagcgcccgtcgggagccatga

SEQ ID NO: 5364675 - DNA, 25 bp, Homo sapien
agcagcgcccgtcgggagccatgac

SEQ ID NO: 5364676 - DNA, 25 bp, Homo sapien
gagcagcgcccgtcgggagccatga

SEQ ID NO: 5364677 - DNA, 25 bp, Homo sapien
ccccgtaggccttgctgcaactcat

SEQ ID NO: 5364678 - DNA, 25 bp, Homo sapien
ccgctccccgtaggccttgctgcaa

SEQ ID NO: 5364679 - DNA, 25 bp, Homo sapien
gcggagccctgcaccgaggcgacgt

SEQ ID NO: 5364680 - DNA, 25 bp, Homo sapien
gtaccgctccccgtaggccttgctg

SEQ ID NO: 5364681 - DNA, 25 bp, Homo sapien
ggaggaccactgtgacgaacttgtg

SEQ ID NO: 5364682 - DNA, 25 bp, Homo sapien
ccaattccaagaggaaagcgcctga

SEQ ID NO: 5364683 - DNA, 25 bp, Homo sapien
aggaccactgtgacgaacttgtgtc

SEQ ID NO: 5364684 - DNA, 25 bp, Homo sapien
gcggaggaccactgtgacgaacttg

SEQ ID NO: 5364685 - DNA, 25 bp, Homo sapien
caaaacactctgacgcttctccaat

SEQ ID NO: 5364686 - DNA, 25 bp, Homo sapien
cacacaaaacactctgacgcttctc

SEQ ID NO: 5364687 - DNA, 25 bp, Homo sapien
cccctttcaatgttccgcaaatgtg

SEQ ID NO: 5364688 - DNA, 25 bp, Homo sapien
caattccccctttcaatgttccgca

SEQ ID NO: 5364689 - DNA, 25 bp, Homo sapien
gaggcattgtgttggacatcgtcag

SEQ ID NO: 5364690 - DNA, 25 bp, Homo sapien
ccaaggagtttactaagaggctttg

SEQ ID NO: 5364691 - DNA, 25 bp, Homo sapien
cattgtgttggacatcgtcagagag

SEQ ID NO: 5364692 - DNA, 25 bp, Homo sapien
ctcgtccaatgatccaaggagttta

SEQ ID NO: 5364693 - DNA, 25 bp, Homo sapien
tttacttcctttgctccatatcacc

SEQ ID NO: 5364694 - DNA, 25 bp, Homo sapien
taaatgctttataaactgccaatgc

SEQ ID NO: 5364695 - DNA, 25 bp, Homo sapien
caggactgtcaactgtaaatgcttt

SEQ ID NO: 5364696 - DNA, 25 bp, Homo sapien
ttataaactgccaatgcctggcttt

SEQ ID NO: 5364697 - DNA, 25 bp, Homo sapien
aacacaatgggaaactcaatggaac

SEQ ID NO: 5364698 - DNA, 25 bp, Homo sapien
caaaaacacaatgggaaactcaatg

SEQ ID NO: 5364699 - DNA, 25 bp, Homo sapien
tcaaaaacacaatgggaaactcaat

SEQ ID NO: 5364700 - DNA, 25 bp, Homo sapien
aaaacacaatgggaaactcaatgga

SEQ ID NO: 5364701 - DNA, 25 bp, Homo sapien
tgtttctcgtggattgtaacctcct

SEQ ID NO: 5364702 - DNA, 25 bp, Homo sapien
tttctcgtggattgtaacctcctga

SEQ ID NO: 5364703 - DNA, 25 bp, Homo sapien
tctgtttctcgtggattgtaacctc

SEQ ID NO: 5364704 - DNA, 25 bp, Homo sapien
cttctgtttctcgtggattgtaacc

SEQ ID NO: 5364705 - DNA, 25 bp, Homo sapien
aaggttcaaagcattagggtggtgc

SEQ ID NO: 5364706 - DNA, 25 bp, Homo sapien
cagctggcgaagttgaaggttcaaa

SEQ ID NO: 5364707 - DNA, 25 bp, Homo sapien
tgaaggttcaaagcattagggtggt

SEQ ID NO: 5364708 - DNA, 25 bp, Homo sapien
ttcaaagcattagggtggtgcttgc

SEQ ID NO: 5364709 - DNA, 25 bp, Homo sapien
gttgtcctttcttcatagaagttcg

SEQ ID NO: 5364710 - DNA, 25 bp, Homo sapien
cgttgtcctttcttcatagaagttc

SEQ ID NO: 5364711 - DNA, 25 bp, Homo sapien
tgtcctttcttcatagaagttcgtc

SEQ ID NO: 5364712 - DNA, 25 bp, Homo sapien
tcctttcttcatagaagttcgtcat

SEQ ID NO: 5364713 - DNA, 25 bp, Homo sapien
cacagcggaagtaagaacaggccac

SEQ ID NO: 5364714 - DNA, 25 bp, Homo sapien
tgtcccactgcaggctttgaaattt

SEQ ID NO: 5364715 - DNA, 25 bp, Homo sapien
tgcagtgcacgtggtctgccctcct

SEQ ID NO: 5364716 - DNA, 25 bp, Homo sapien
ttgaaggctcacacccagtgcacag

SEQ ID NO: 5364717 - DNA, 25 bp, Homo sapien
ctaccttcggatcacgaaggctcta

SEQ ID NO: 5364718 - DNA, 25 bp, Homo sapien
taccttcggatcacgaaggctctag

SEQ ID NO: 5364719 - DNA, 25 bp, Homo sapien
tgacccgataccttctttcccgatg

SEQ ID NO: 5364720 - DNA, 25 bp, Homo sapien
gagtaggaaggctcacgtggcctct

SEQ ID NO: 5364721 - DNA, 25 bp, Homo sapien
ggcctctgggtttccgaggacatga

SEQ ID NO: 5364722 - DNA, 25 bp, Homo sapien
ggacatgacatacccaggcctaagc

SEQ ID NO: 5364723 - DNA, 25 bp, Homo sapien
tctgtagtatttatccctcaagcac

SEQ ID NO: 5364724 - DNA, 25 bp, Homo sapien
cctggtcagggttctttctgtagta

SEQ ID NO: 5364725 - DNA, 25 bp, Homo sapien
ccaatggccggttttatagcagtat

SEQ ID NO: 5364726 - DNA, 25 bp, Homo sapien
tattgagtcccaatttgataacacc

SEQ ID NO: 5364727 - DNA, 25 bp, Homo sapien
catttctgaatagcctccagcatgg

SEQ ID NO: 5364728 - DNA, 25 bp, Homo sapien
actcctcctcaaaggttatcccagg

SEQ ID NO: 5364729 - DNA, 25 bp, Homo sapien
gattactaaggctttagtccttgtg

SEQ ID NO: 5364730 - DNA, 25 bp, Homo sapien
tagtccttgtgacctgattgctgga

SEQ ID NO: 5364731 - DNA, 25 bp, Homo sapien
gggcctttccagaatcattgaggct

SEQ ID NO: 5364732 - DNA, 25 bp, Homo sapien
ctttccagaatcattgaggctcggg

SEQ ID NO: 5364733 - DNA, 25 bp, Homo sapien
ttgaggctcggggaccagagacact

SEQ ID NO: 5364734 - DNA, 25 bp, Homo sapien
aggccaagggggattaggttgcaca

SEQ ID NO: 5364735 - DNA, 25 bp, Homo sapien
tggtctcaagagcacttcatcatcc

SEQ ID NO: 5364736 - DNA, 25 bp, Homo sapien
tttgccagtgcaaactgtacctctg

SEQ ID NO: 5364737 - DNA, 25 bp, Homo sapien
tctgagtggaatttccggctgctgc

SEQ ID NO: 5364738 - DNA, 25 bp, Homo sapien
tgtacctctggtgtgcagttcccca

SEQ ID NO: 5364739 - DNA, 25 bp, Homo sapien
ggactcagagcacccactccagtat

SEQ ID NO: 5364740 - DNA, 25 bp, Homo sapien
accccaggcagaggtcccatcatgt

SEQ ID NO: 5364741 - DNA, 25 bp, Homo sapien
gtcccatcatgtctgaggcccacgt

SEQ ID NO: 5364742 - DNA, 25 bp, Homo sapien
aggcccacgtccctcccatacgcag

SEQ ID NO: 5364743 - DNA, 25 bp, Homo sapien
cagattccacacaggtcttgggcat

SEQ ID NO: 5364744 - DNA, 25 bp, Homo sapien
tggttcggaaatggaccaaatggga

SEQ ID NO: 5364745 - DNA, 25 bp, Homo sapien
cctgcagctgtaggtgtaatttccc

SEQ ID NO: 5364746 - DNA, 25 bp, Homo sapien
tcgacgagtttcctgatatagcgcc

SEQ ID NO: 5364747 - DNA, 25 bp, Homo sapien
gacagtacgatcctgaaacctgcag

SEQ ID NO: 5364748 - DNA, 25 bp, Homo sapien
ttttcctcaaggtctacatgaaggg

SEQ ID NO: 5364749 - DNA, 25 bp, Homo sapien
tcagtgcgatcctgaagcctctccc

SEQ ID NO: 5364750 - DNA, 25 bp, Homo sapien
tctttaaagtgtcctgcactttctt

SEQ ID NO: 5364751 - DNA, 25 bp, Homo sapien
caaggtctacatgaagggaacctct

SEQ ID NO: 5364752 - DNA, 25 bp, Homo sapien
aggcttctcagggaagcagcactgg

SEQ ID NO: 5364753 - DNA, 25 bp, Homo sapien
ctgaccctgatatggccaattccca

SEQ ID NO: 5364754 - DNA, 25 bp, Homo sapien
aaggcttctcagggaagcagcactg

SEQ ID NO: 5364755 - DNA, 25 bp, Homo sapien
acctgaccctgatatggccaattcc

SEQ ID NO: 5364756 - DNA, 25 bp, Homo sapien
cgttagctaggatgaccagactcat

SEQ ID NO: 5364757 - DNA, 25 bp, Homo sapien
gctacgttagctaggatgaccagac

SEQ ID NO: 5364758 - DNA, 25 bp, Homo sapien
tacgttagctaggatgaccagactc

SEQ ID NO: 5364759 - DNA, 25 bp, Homo sapien
aagagctacgttagctaggatgacc

SEQ ID NO: 5364760 - DNA, 25 bp, Homo sapien
gctagcttcaggcacctcgctttgg

SEQ ID NO: 5364761 - DNA, 25 bp, Homo sapien
ctcgctttggaaattagcagggtaa

SEQ ID NO: 5364762 - DNA, 25 bp, Homo sapien
ggacagccgtcacgcctgcttgttg

SEQ ID NO: 5364763 - DNA, 25 bp, Homo sapien
cctgcgctgagagctggtggatgca

SEQ ID NO: 5364764 - DNA, 25 bp, Homo sapien
ttcactctgcatggctggtgtcgcc

SEQ ID NO: 5364765 - DNA, 25 bp, Homo sapien
gtgcaatcttcactctgcatggctg

SEQ ID NO: 5364766 - DNA, 25 bp, Homo sapien
ctggtgcaatcttcactctgcatgg

SEQ ID NO: 5364767 - DNA, 25 bp, Homo sapien
cttcactctgcatggctggtgtcgc

SEQ ID NO: 5364768 - DNA, 25 bp, Homo sapien
gttgatgacggccttctaactccag

SEQ ID NO: 5364769 - DNA, 25 bp, Homo sapien
cagctgggtagatgcagttgatgac

SEQ ID NO: 5364770 - DNA, 25 bp, Homo sapien
tccagacccacagtactgcgaggag

SEQ ID NO: 5364771 - DNA, 25 bp, Homo sapien
catgagtgatgaaggcgtgcagcac

SEQ ID NO: 5364772 - DNA, 25 bp, Homo sapien
ttcctgtaggaccatgccctggagc

SEQ ID NO: 5364773 - DNA, 25 bp, Homo sapien
caagaaggcgtctttttgaaatact

SEQ ID NO: 5364774 - DNA, 25 bp, Homo sapien
tactcagcattcctgtaggaccatg

SEQ ID NO: 5364775 - DNA, 25 bp, Homo sapien
ggcgtctttttgaaatactcagcat

SEQ ID NO: 5364776 - DNA, 25 bp, Homo sapien
cctttctgagcactcaccccgtcat

SEQ ID NO: 5364777 - DNA, 25 bp, Homo sapien
cactcaccccgtcattcttgatggg

SEQ ID NO: 5364778 - DNA, 25 bp, Homo sapien
tgagcactcaccccgtcattcttga

SEQ ID NO: 5364779 - DNA, 25 bp, Homo sapien
cttcatcctttatctgcgtgtctgt

SEQ ID NO: 5364780 - DNA, 25 bp, Homo sapien
ttatgctgatggttgtccccacccg

SEQ ID NO: 5364781 - DNA, 25 bp, Homo sapien
tatgcaagcattcgggatgggctgc

SEQ ID NO: 5364782 - DNA, 25 bp, Homo sapien
caatgatgaaggtaacgagagagca

SEQ ID NO: 5364783 - DNA, 25 bp, Homo sapien
ccatggctggtcaattgggagcaga

SEQ ID NO: 5364784 - DNA, 25 bp, Homo sapien
catatgtggtgtgtgcgttctggca

SEQ ID NO: 5364785 - DNA, 25 bp, Homo sapien
aacgatgacacaggtccctcccatt

SEQ ID NO: 5364786 - DNA, 25 bp, Homo sapien
ctgttggcacactctggcagcccgt

SEQ ID NO: 5364787 - DNA, 25 bp, Homo sapien
cttgtgtgcacgatgtgagcatatg

SEQ ID NO: 5364788 - DNA, 25 bp, Homo sapien
gcagcctcggaaacttgatccctcg

SEQ ID NO: 5364789 - DNA, 25 bp, Homo sapien
catattggatttacactggtccttg

SEQ ID NO: 5364790 - DNA, 25 bp, Homo sapien
cctcggctcccggagttgaccagtc

SEQ ID NO: 5364791 - DNA, 25 bp, Homo sapien
tgcagcctcggaaacttgatccctc

SEQ ID NO: 5364792 - DNA, 25 bp, Homo sapien
gaagagggtacagacagccccgaag

SEQ ID NO: 5364793 - DNA, 25 bp, Homo sapien
aggaagagggtacagacagccccga

SEQ ID NO: 5364794 - DNA, 25 bp, Homo sapien
agcatactgacaacaggagggcaag

SEQ ID NO: 5364795 - DNA, 25 bp, Homo sapien
ggaagagggtacagacagccccgaa

SEQ ID NO: 5364796 - DNA, 25 bp, Homo sapien
catcccacattttccctttcttaag

SEQ ID NO: 5364797 - DNA, 25 bp, Homo sapien
ctgggaacatcccacattttccctt

SEQ ID NO: 5364798 - DNA, 25 bp, Homo sapien
tccctttcttaagaataacaaatga

SEQ ID NO: 5364799 - DNA, 25 bp, Homo sapien
gacactcaagccagtaagctgcgct

SEQ ID NO: 5364800 - DNA, 25 bp, Homo sapien
ccctgacactcaagccagtaagctg

SEQ ID NO: 5364801 - DNA, 25 bp, Homo sapien
gagctccctgacactcaagccagta

SEQ ID NO: 5364802 - DNA, 25 bp, Homo sapien
gctccctgacactcaagccagtaag

SEQ ID NO: 5364803 - DNA, 25 bp, Homo sapien
tttcctaaatgccaacgcttcttgg

SEQ ID NO: 5364804 - DNA, 25 bp, Homo sapien
tgcttgactgtaccacctccgtcaa

SEQ ID NO: 5364805 - DNA, 25 bp, Homo sapien
gtcaacgctggcttttgcatcattt

SEQ ID NO: 5364806 - DNA, 25 bp, Homo sapien
cctccgtcaacgctggcttttgcat

SEQ ID NO: 5364807 - DNA, 25 bp, Homo sapien
gccatgagccatcaggagacttaga

SEQ ID NO: 5364808 - DNA, 25 bp, Homo sapien
catcaggagacttagaaccatctga

SEQ ID NO: 5364809 - DNA, 25 bp, Homo sapien
gagccatcaggagacttagaaccat

SEQ ID NO: 5364810 - DNA, 25 bp, Homo sapien
catgagccatcaggagacttagaac

SEQ ID NO: 5364811 - DNA, 25 bp, Homo sapien
agaattcagacatttcaactctgga

SEQ ID NO: 5364812 - DNA, 25 bp, Homo sapien
ttcagacatttcaactctggaactg

SEQ ID NO: 5364813 - DNA, 25 bp, Homo sapien
ttcagaattcagacatttcaactct

SEQ ID NO: 5364814 - DNA, 25 bp, Homo sapien
atttcaactctggaactgttattat

SEQ ID NO: 5364815 - DNA, 25 bp, Homo sapien
tcatcttggtgagtggtctggcgac

SEQ ID NO: 5364816 - DNA, 25 bp, Homo sapien
tgaaggtctatactccaggcatctg

SEQ ID NO: 5364817 - DNA, 25 bp, Homo sapien
tgtacaacggtgaaccagccagtcc

SEQ ID NO: 5364818 - DNA, 25 bp, Homo sapien
taaagagatctgctgacaaaaaggc

SEQ ID NO: 5364819 - DNA, 25 bp, Homo sapien
tcacttgggtttcttcattcctagt

SEQ ID NO: 5364820 - DNA, 25 bp, Homo sapien
cttgggtttcttcattcctagtagg

SEQ ID NO: 5364821 - DNA, 25 bp, Homo sapien
cttcattcctagtagggtttcttca

SEQ ID NO: 5364822 - DNA, 25 bp, Homo sapien
tcttcattcctagtagggtttcttc

SEQ ID NO: 5364823 - DNA, 25 bp, Homo sapien
cagaatagcactaggtccagtcccc

SEQ ID NO: 5364824 - DNA, 25 bp, Homo sapien
tcggcaacgtataagcccacagcca

SEQ ID NO: 5364825 - DNA, 25 bp, Homo sapien
cagcaccgcagtggagccttctgtt

SEQ ID NO: 5364826 - DNA, 25 bp, Homo sapien
ggtccagtccccagggatcggcaac

SEQ ID NO: 5364827 - DNA, 25 bp, Homo sapien
gagatgagaaacttgagtggcagat

SEQ ID NO: 5364828 - DNA, 25 bp, Homo sapien
gatgagatgagaaacttgagtggca

SEQ ID NO: 5364829 - DNA, 25 bp, Homo sapien
ctgatgagatgagaaacttgagtgg

SEQ ID NO: 5364830 - DNA, 25 bp, Homo sapien
atgagaaacttgagtggcagatttg

SEQ ID NO: 5364831 - DNA, 25 bp, Homo sapien
gaagtcacgactttccaagattata

SEQ ID NO: 5364832 - DNA, 25 bp, Homo sapien
tgcctttggcatcctgtgaggtcaa

SEQ ID NO: 5364833 - DNA, 25 bp, Homo sapien
tgaggtcaaccatgaagtcacgact

SEQ ID NO: 5364834 - DNA, 25 bp, Homo sapien
gattataatggagcaattgctcatt

SEQ ID NO: 5364835 - DNA, 25 bp, Homo sapien
ccttgtgagagtaacatgagtcatc

SEQ ID NO: 5364836 - DNA, 25 bp, Homo sapien
tggagaccccatacatttgactgat

SEQ ID NO: 5364837 - DNA, 25 bp, Homo sapien
tatgtgtgttggagcaccttccctg

SEQ ID NO: 5364838 - DNA, 25 bp, Homo sapien
gaagggtcctgctaaatttcaccag

SEQ ID NO: 5364839 - DNA, 25 bp, Homo sapien
ccattgccaaggttccatgttggtt

SEQ ID NO: 5364840 - DNA, 25 bp, Homo sapien
tctccattgccaaggttccatgttg

SEQ ID NO: 5364841 - DNA, 25 bp, Homo sapien
tccaggctgtgtagcatctataggc

SEQ ID NO: 5364842 - DNA, 25 bp, Homo sapien
ggcatggccaggcattcaccttgcc

SEQ ID NO: 5364843 - DNA, 25 bp, Homo sapien
caattgaaacagagttctgagactg

SEQ ID NO: 5364844 - DNA, 25 bp, Homo sapien
acagagttctgagactgttcttcca

SEQ ID NO: 5364845 - DNA, 25 bp, Homo sapien
tgaaacagagttctgagactgttct

SEQ ID NO: 5364846 - DNA, 25 bp, Homo sapien
gctgattttaaaagctagtaactta

SEQ ID NO: 5364847 - DNA, 25 bp, Homo sapien
aacccaaagatggatagtccgagaa

SEQ ID NO: 5364848 - DNA, 25 bp, Homo sapien
ttgatgacacccactgtaactatct

SEQ ID NO: 5364849 - DNA, 25 bp, Homo sapien
gcaacccaaagatggatagtccgag

SEQ ID NO: 5364850 - DNA, 25 bp, Homo sapien
tttgatgacacccactgtaactatc

SEQ ID NO: 5364851 - DNA, 25 bp, Homo sapien
gaatttagggccatcttccagcttt

SEQ ID NO: 5364852 - DNA, 25 bp, Homo sapien
aatttagggccatcttccagctttt

SEQ ID NO: 5364853 - DNA, 25 bp, Homo sapien
ttagggccatcttccagctttttac

SEQ ID NO: 5364854 - DNA, 25 bp, Homo sapien
cttcaagaatttagggccatcttcc

SEQ ID NO: 5364855 - DNA, 25 bp, Homo sapien
caatatgagccgtgtggcaatccaa

SEQ ID NO: 5364856 - DNA, 25 bp, Homo sapien
tagccagtgcttatttggcctggat

SEQ ID NO: 5364857 - DNA, 25 bp, Homo sapien
tatgagccgtgtggcaatccaatac

SEQ ID NO: 5364858 - DNA, 25 bp, Homo sapien
catagccagtgcttatttggcctgg

SEQ ID NO: 5364859 - DNA, 25 bp, Homo sapien
agcaacgttgccatgacgaacatcc

SEQ ID NO: 5364860 - DNA, 25 bp, Homo sapien
cgttgccatgacgaacatccttgac

SEQ ID NO: 5364861 - DNA, 25 bp, Homo sapien
gcaacgttgccatgacgaacatcct

SEQ ID NO: 5364862 - DNA, 25 bp, Homo sapien
aacgttgccatgacgaacatccttg

SEQ ID NO: 5364863 - DNA, 25 bp, Homo sapien
cagattttacttctgttgtaacgtt

SEQ ID NO: 5364864 - DNA, 25 bp, Homo sapien
gtgcatttcgacagattttacttct

SEQ ID NO: 5364865 - DNA, 25 bp, Homo sapien
cgacagattttacttctgttgtaac

SEQ ID NO: 5364866 - DNA, 25 bp, Homo sapien
gattttacttctgttgtaacgttga

SEQ ID NO: 5364867 - DNA, 25 bp, Homo sapien
ctccactcggccaacaggaacacta

SEQ ID NO: 5364868 - DNA, 25 bp, Homo sapien
cactcggccaacaggaacactacca

SEQ ID NO: 5364869 - DNA, 25 bp, Homo sapien
tccactcggccaacaggaacactac

SEQ ID NO: 5364870 - DNA, 25 bp, Homo sapien
ctcggccaacaggaacactaccaat

SEQ ID NO: 5364871 - DNA, 25 bp, Homo sapien
caagcagcatggttccaaggcatgt

SEQ ID NO: 5364872 - DNA, 25 bp, Homo sapien
tcaagcagcatggttccaaggcatg

SEQ ID NO: 5364873 - DNA, 25 bp, Homo sapien
agcagcatggttccaaggcatgtta

SEQ ID NO: 5364874 - DNA, 25 bp, Homo sapien
cagcatggttccaaggcatgttagc

SEQ ID NO: 5364875 - DNA, 25 bp, Homo sapien
caattttcttaatgtaagtgctgac

SEQ ID NO: 5364876 - DNA, 25 bp, Homo sapien
agccaattttcttaatgtaagtgct

SEQ ID NO: 5364877 - DNA, 25 bp, Homo sapien
tactgtgtcagggttgtagccaatt

SEQ ID NO: 5364878 - DNA, 25 bp, Homo sapien
ctactgtgtcagggttgtagccaat

SEQ ID NO: 5364879 - DNA, 25 bp, Homo sapien
ccttaacaattttcctcatatctct

SEQ ID NO: 5364880 - DNA, 25 bp, Homo sapien
taacaattttcctcatatctcttct

SEQ ID NO: 5364881 - DNA, 25 bp, Homo sapien
acaattttcctcatatctcttctgg

SEQ ID NO: 5364882 - DNA, 25 bp, Homo sapien
ttccttaacaattttcctcatatct

SEQ ID NO: 5364883 - DNA, 25 bp, Homo sapien
gctcagtagaatccattttgttaac

SEQ ID NO: 5364884 - DNA, 25 bp, Homo sapien
ctgtagggtggctcagtagaatcca

SEQ ID NO: 5364885 - DNA, 25 bp, Homo sapien
tcagtagaatccattttgttaacac

SEQ ID NO: 5364886 - DNA, 25 bp, Homo sapien
tggctcagtagaatccattttgtta

SEQ ID NO: 5364887 - DNA, 25 bp, Homo sapien
gggcatcaacgatagtcacatagta

SEQ ID NO: 5364888 - DNA, 25 bp, Homo sapien
atgctcttgggtttgcccattcttg

SEQ ID NO: 5364889 - DNA, 25 bp, Homo sapien
caatggtgataccatgttcacactc

SEQ ID NO: 5364890 - DNA, 25 bp, Homo sapien
gctcttgggtttgcccattcttgga

SEQ ID NO: 5364891 - DNA, 25 bp, Homo sapien
tgccaccgcctttgtagatcagatg

SEQ ID NO: 5364892 - DNA, 25 bp, Homo sapien
ttgtcgatgccaccgcctttgtaga

SEQ ID NO: 5364893 - DNA, 25 bp, Homo sapien
ttttgtcgatgccaccgcctttgta

SEQ ID NO: 5364894 - DNA, 25 bp, Homo sapien
tcgatgccaccgcctttgtagatca

SEQ ID NO: 5364895 - DNA, 25 bp, Homo sapien
cacgaggtctctcaaggtgatccac

SEQ ID NO: 5364896 - DNA, 25 bp, Homo sapien
tagacaccttcgagggtgacccagc

SEQ ID NO: 5364897 - DNA, 25 bp, Homo sapien
ctaaagggtcgaggaacctcagtct

SEQ ID NO: 5364898 - DNA, 25 bp, Homo sapien
gagttgttgggttctccttctctga

SEQ ID NO: 5364899 - DNA, 25 bp, Homo sapien
acatccactctttctatttggaagc

SEQ ID NO: 5364900 - DNA, 25 bp, Homo sapien
catccactctttctatttggaagcc

SEQ ID NO: 5364901 - DNA, 25 bp, Homo sapien
tccactctttctatttggaagccct

SEQ ID NO: 5364902 - DNA, 25 bp, Homo sapien
atccactctttctatttggaagccc

SEQ ID NO: 5364903 - DNA, 25 bp, Homo sapien
cttcatgcccttttgctatcgtttg

SEQ ID NO: 5364904 - DNA, 25 bp, Homo sapien
gctttggtgtgcctcataatcttgt

SEQ ID NO: 5364905 - DNA, 25 bp, Homo sapien
ttcatgcccttttgctatcgtttgt

SEQ ID NO: 5364906 - DNA, 25 bp, Homo sapien
ttcagaggcaatacagggctggagt

SEQ ID NO: 5364907 - DNA, 25 bp, Homo sapien
cttttttcagaggcaatacagggct

SEQ ID NO: 5364908 - DNA, 25 bp, Homo sapien
cagaggcaatacagggctggagtcc

SEQ ID NO: 5364909 - DNA, 25 bp, Homo sapien
gaggcaatacagggctggagtccta

SEQ ID NO: 5364910 - DNA, 25 bp, Homo sapien
cctgctctgatccttaagagactca

SEQ ID NO: 5364911 - DNA, 25 bp, Homo sapien
tgcaggtgagttttcatcacatgtt

SEQ ID NO: 5364912 - DNA, 25 bp, Homo sapien
gaggctggagagctacttgagtctc

SEQ ID NO: 5364913 - DNA, 25 bp, Homo sapien
cactgtgtccagtagggtctgcagg

SEQ ID NO: 5364914 - DNA, 25 bp, Homo sapien
ttaaatttacataagcccagaagca

SEQ ID NO: 5364915 - DNA, 25 bp, Homo sapien
tttaaatttacataagcccagaagc

SEQ ID NO: 5364916 - DNA, 25 bp, Homo sapien
taaatttacataagcccagaagcat

SEQ ID NO: 5364917 - DNA, 25 bp, Homo sapien
tatatgcagtcacttcggaatgtcc

SEQ ID NO: 5364918 - DNA, 25 bp, Homo sapien
tttgataacactggaaattaggttc

SEQ ID NO: 5364919 - DNA, 25 bp, Homo sapien
tcagtgctgagggttagcctgagct

SEQ ID NO: 5364920 - DNA, 25 bp, Homo sapien
gcctgagcttaaggttaggctaacc

SEQ ID NO: 5364921 - DNA, 25 bp, Homo sapien
ccactatgctgagtagaacttcaag

SEQ ID NO: 5364922 - DNA, 25 bp, Homo sapien
tcagcctgggagtacacactgcggt

SEQ ID NO: 5364923 - DNA, 25 bp, Homo sapien
ggtcacaaccatccatatggcagga

SEQ ID NO: 5364924 - DNA, 25 bp, Homo sapien
tagtctactgagtttttggcggcca

SEQ ID NO: 5364925 - DNA, 25 bp, Homo sapien
gaatgatggcttagaccagtggtga

SEQ ID NO: 5364926 - DNA, 25 bp, Homo sapien
ggtagaagactagcaacatttgtga

SEQ ID NO: 5364927 - DNA, 25 bp, Homo sapien
gcatgaaggccaattagaaggatca

SEQ ID NO: 5364928 - DNA, 25 bp, Homo sapien
tgcttaactgtgataggtttggaac

SEQ ID NO: 5364929 - DNA, 25 bp, Homo sapien
gcatagaataccaatgagctgaggc

SEQ ID NO: 5364930 - DNA, 25 bp, Homo sapien
tagggtttactacagtcacattctt

SEQ ID NO: 5364931 - DNA, 25 bp, Homo sapien
tactaatttgccagatcgacatagc

SEQ ID NO: 5364932 - DNA, 25 bp, Homo sapien
ttatcttgcagcacaagttcttggc

SEQ ID NO: 5364933 - DNA, 25 bp, Homo sapien
tgctctgaggccatttgaaccactg

SEQ ID NO: 5364934 - DNA, 25 bp, Homo sapien
taagactcaaaccatcacaggcgtt

SEQ ID NO: 5364935 - DNA, 25 bp, Homo sapien
gagaaaaagctccacccttgatctg

SEQ ID NO: 5364936 - DNA, 25 bp, Homo sapien
gaggatatcctcttagggaccatga

SEQ ID NO: 5364937 - DNA, 25 bp, Homo sapien
gttattaagtcaacatcaagatttg

SEQ ID NO: 5364938 - DNA, 25 bp, Homo sapien
ttcatcaaaatcttgggttattaag

SEQ ID NO: 5364939 - DNA, 25 bp, Homo sapien
gagtctcccaaagccatgcattcat

SEQ ID NO: 5364940 - DNA, 25 bp, Homo sapien
ttccacttgatttcgccactttcat

SEQ ID NO: 5364941 - DNA, 25 bp, Homo sapien
catacacatgtaagagagtgaccca

SEQ ID NO: 5364942 - DNA, 25 bp, Homo sapien
gaacatacttggaagctacctggcc

SEQ ID NO: 5364943 - DNA, 25 bp, Homo sapien
gctacaatgactgaggactactgga

SEQ ID NO: 5364944 - DNA, 25 bp, Homo sapien
tcaaagatgtataaaagccctccct

SEQ ID NO: 5364945 - DNA, 25 bp, Homo sapien
gaaaggtcagctccctgggacgagc

SEQ ID NO: 5364946 - DNA, 25 bp, Homo sapien
ccttggtcctgagcacaaagttctc

SEQ ID NO: 5364947 - DNA, 25 bp, Homo sapien
gacgagcatcggtattccatgagaa

SEQ ID NO: 5364948 - DNA, 25 bp, Homo sapien
aaaggttacccgtctgcctggtgtg

SEQ ID NO: 5364949 - DNA, 25 bp, Homo sapien
ttttatagaagaacgcccagtcagt

SEQ ID NO: 5364950 - DNA, 25 bp, Homo sapien
aattagaaaggaatgaccgggcgcg

SEQ ID NO: 5364951 - DNA, 25 bp, Homo sapien
tgtataactgacacactcgatgctg

SEQ ID NO: 5364952 - DNA, 25 bp, Homo sapien
cctagaagcacagggtgatggctcc

SEQ ID NO: 5364953 - DNA, 25 bp, Homo sapien
gtgcagggcagtgcaccgcctggaa

SEQ ID NO: 5364954 - DNA, 25 bp, Homo sapien
gcaccgcctggaagccgggaagaac

SEQ ID NO: 5364955 - DNA, 25 bp, Homo sapien
tgcagggcagtgcaccgcctggaag

SEQ ID NO: 5364956 - DNA, 25 bp, Homo sapien
tgccgcacggatgggatatattcat

SEQ ID NO: 5364957 - DNA, 25 bp, Homo sapien
tcgtggtagtggcacagctccgtct

SEQ ID NO: 5364958 - DNA, 25 bp, Homo sapien
tcatagagtagtgggtggtacgccc

SEQ ID NO: 5364959 - DNA, 25 bp, Homo sapien
tgcgtcgtagtacagctcgtggtag

SEQ ID NO: 5364960 - DNA, 25 bp, Homo sapien
actgcaagctctgatatggccaatt

SEQ ID NO: 5364961 - DNA, 25 bp, Homo sapien
cactgcaagctctgatatggccaat

SEQ ID NO: 5364962 - DNA, 25 bp, Homo sapien
aagctctgatatggccaatttttac

SEQ ID NO: 5364963 - DNA, 25 bp, Homo sapien
tgcaagctctgatatggccaatttt

SEQ ID NO: 5364964 - DNA, 25 bp, Homo sapien
tctatgtacgtaaattgcaaacttc

SEQ ID NO: 5364965 - DNA, 25 bp, Homo sapien
tctttgataaactttctatgtacgt

SEQ ID NO: 5364966 - DNA, 25 bp, Homo sapien
ttctttctcttgaagtggaaaagga

SEQ ID NO: 5364967 - DNA, 25 bp, Homo sapien
gaagaggttcttagagtttgctttc

SEQ ID NO: 5364968 - DNA, 25 bp, Homo sapien
cccaggaccaacagtgtcagtatca

SEQ ID NO: 5364969 - DNA, 25 bp, Homo sapien
cctgtggactagacttctaaagttc

SEQ ID NO: 5364970 - DNA, 25 bp, Homo sapien
tcagtatcacttgagaacttgttcc

SEQ ID NO: 5364971 - DNA, 25 bp, Homo sapien
ttgctggtacctccatcagtacgga

SEQ ID NO: 5364972 - DNA, 25 bp, Homo sapien
tgaccgtcctgctgaccggtgtacc

SEQ ID NO: 5364973 - DNA, 25 bp, Homo sapien
gatcttttgcgatggtgaccgtcct

SEQ ID NO: 5364974 - DNA, 25 bp, Homo sapien
tgccagggtgatcttttgcgatggt

SEQ ID NO: 5364975 - DNA, 25 bp, Homo sapien
tcagaacaatcggaggccagggaca

SEQ ID NO: 5364976 - DNA, 25 bp, Homo sapien
tccactgcccatccttggtgagggt

SEQ ID NO: 5364977 - DNA, 25 bp, Homo sapien
catcaggagcacacggtgactcaga

SEQ ID NO: 5364978 - DNA, 25 bp, Homo sapien
ttcaccatgacaaggcacaagggcc

SEQ ID NO: 5364979 - DNA, 25 bp, Homo sapien
tctacataacgttctgggacaatgg

SEQ ID NO: 5364980 - DNA, 25 bp, Homo sapien
tattagatatcatcctgtctgcccc

SEQ ID NO: 5364981 - DNA, 25 bp, Homo sapien
taaatattagatatcatcctgtctg

SEQ ID NO: 5364982 - DNA, 25 bp, Homo sapien
ttgttaaatattagatatcatcctg

SEQ ID NO: 5364983 - DNA, 25 bp, Homo sapien
tgtctgccccccaatcattccaatt

SEQ ID NO: 5364984 - DNA, 25 bp, Homo sapien
tggtgggtttggttgaatcttctct

SEQ ID NO: 5364985 - DNA, 25 bp, Homo sapien
tgaaaccagaagatggtgggtttgg

SEQ ID NO: 5364986 - DNA, 25 bp, Homo sapien
tctctgacgatgctgaatatatgga

SEQ ID NO: 5364987 - DNA, 25 bp, Homo sapien
tggagtgaacaggttgtaatccggt

SEQ ID NO: 5364988 - DNA, 25 bp, Homo sapien
ggtcccaggccaccaaaatgacgtc

SEQ ID NO: 5364989 - DNA, 25 bp, Homo sapien
aaaatgacgtctttatacagtgaac

SEQ ID NO: 5364990 - DNA, 25 bp, Homo sapien
caggccaccaaaatgacgtctttat

SEQ ID NO: 5364991 - DNA, 25 bp, Homo sapien
caggttaagatttgcggaatatggg

SEQ ID NO: 5364992 - DNA, 25 bp, Homo sapien
ctgcgaattaatgatgcgtatggtg

SEQ ID NO: 5364993 - DNA, 25 bp, Homo sapien
agttaaatctcaaaaccgcatcatg

SEQ ID NO: 5364994 - DNA, 25 bp, Homo sapien
catctttctcataaccacgtgtagg

SEQ ID NO: 5364995 - DNA, 25 bp, Homo sapien
tgcgtatggtggttttattcccaac

SEQ ID NO: 5364996 - DNA, 25 bp, Homo sapien
gcacataagtgacaagcttactttt

SEQ ID NO: 5364997 - DNA, 25 bp, Homo sapien
cacataagtgacaagcttacttttg

SEQ ID NO: 5364998 - DNA, 25 bp, Homo sapien
acataagtgacaagcttacttttgt

SEQ ID NO: 5364999 - DNA, 25 bp, Homo sapien
cataagtgacaagcttacttttgtt

SEQ ID NO: 5365000 - DNA, 25 bp, Homo sapien
cctgtgtgagagcaaccttaagagc

SEQ ID NO: 5365001 - DNA, 25 bp, Homo sapien
tactgctgccgatggcaagaagacc

SEQ ID NO: 5365002 - DNA, 25 bp, Homo sapien
atggcaagaagacctgtgtgagagc

SEQ ID NO: 5365003 - DNA, 25 bp, Homo sapien
gagagcaaccttaagagcattctgc

SEQ ID NO: 5365004 - DNA, 25 bp, Homo sapien
tgtaaacgtacacctggctgtgcat

SEQ ID NO: 5365005 - DNA, 25 bp, Homo sapien
taggcttgtggctaggcccagtgca

SEQ ID NO: 5365006 - DNA, 25 bp, Homo sapien
tgcgctgagactgtctctcacacag

SEQ ID NO: 5365007 - DNA, 25 bp, Homo sapien
aggcagggtcatgtaggcttgtggc

SEQ ID NO: 5365008 - DNA, 25 bp, Homo sapien
tgacgccctgattgggcagcttctg

SEQ ID NO: 5365009 - DNA, 25 bp, Homo sapien
gcaggatgggttcaccgggctttca

SEQ ID NO: 5365010 - DNA, 25 bp, Homo sapien
ctgggggcatatccatgcagactgc

SEQ ID NO: 5365011 - DNA, 25 bp, Homo sapien
gctctttggagctgacgccctgatt

SEQ ID NO: 5365012 - DNA, 25 bp, Homo sapien
cagctaatattaggaacacctggtg

SEQ ID NO: 5365013 - DNA, 25 bp, Homo sapien
agcttgccccgtcagagatccagag

SEQ ID NO: 5365014 - DNA, 25 bp, Homo sapien
agaggcgcgctcagaaagaaccggc

SEQ ID NO: 5365015 - DNA, 25 bp, Homo sapien
acacctggtgcggagaccccagctt

SEQ ID NO: 5365016 - DNA, 25 bp, Homo sapien
atcctccgggtagaaagcactttga

SEQ ID NO: 5365017 - DNA, 25 bp, Homo sapien
gattgcgcctgcagacatgacgaca

SEQ ID NO: 5365018 - DNA, 25 bp, Homo sapien
ggaatcccaatgtcccctgagtgtg

SEQ ID NO: 5365019 - DNA, 25 bp, Homo sapien
caggcgcgggttcagcattttggaa

SEQ ID NO: 5365020 - DNA, 25 bp, Homo sapien
gggagctgggtacaggctcagcggg

SEQ ID NO: 5365021 - DNA, 25 bp, Homo sapien
cccaagcgaatattccgaaaagcat

SEQ ID NO: 5365022 - DNA, 25 bp, Homo sapien
gaggagcccccaagcgaatattccg

SEQ ID NO: 5365023 - DNA, 25 bp, Homo sapien
agcaaaaagaggagcccccaagcga

SEQ ID NO: 5365024 - DNA, 25 bp, Homo sapien
tcgttgtctccattgcttcaagtgt

SEQ ID NO: 5365025 - DNA, 25 bp, Homo sapien
gtctccattgcttcaagtgtggttt

SEQ ID NO: 5365026 - DNA, 25 bp, Homo sapien
ttgtctccattgcttcaagtgtggt

SEQ ID NO: 5365027 - DNA, 25 bp, Homo sapien
cgttgtctccattgcttcaagtgtg

SEQ ID NO: 5365028 - DNA, 25 bp, Homo sapien
aatgcagatgggtggcagaatgaac

SEQ ID NO: 5365029 - DNA, 25 bp, Homo sapien
caggtctctgcggtcagcaccttgt

SEQ ID NO: 5365030 - DNA, 25 bp, Homo sapien
agcaccttgtgtcttaatgcagatg

SEQ ID NO: 5365031 - DNA, 25 bp, Homo sapien
gtctctgcggtcagcaccttgtgtc

SEQ ID NO: 5365032 - DNA, 25 bp, Homo sapien
gaccctgtggcagagtttgctctct

SEQ ID NO: 5365033 - DNA, 25 bp, Homo sapien
cctaagaccataagcctgggccatg

SEQ ID NO: 5365034 - DNA, 25 bp, Homo sapien
taaagagaagaagcacctggcagga

SEQ ID NO: 5365035 - DNA, 25 bp, Homo sapien
ctcgggcacacgttctcaggacttc

SEQ ID NO: 5365036 - DNA, 25 bp, Homo sapien
aaagtctccagactgctaaaggcag

SEQ ID NO: 5365037 - DNA, 25 bp, Homo sapien
aaacatccagtctgcagcaaagagg

SEQ ID NO: 5365038 - DNA, 25 bp, Homo sapien
aattagctcccgtcacatatccaag

SEQ ID NO: 5365039 - DNA, 25 bp, Homo sapien
gaggaagatacctccctcagctgga

SEQ ID NO: 5365040 - DNA, 25 bp, Homo sapien
tgccccgccttcgtcagagatagct

SEQ ID NO: 5365041 - DNA, 25 bp, Homo sapien
cagagctggacgtcgaaggatgcac

SEQ ID NO: 5365042 - DNA, 25 bp, Homo sapien
ttttgcctaggcagaatgggctacc

SEQ ID NO: 5365043 - DNA, 25 bp, Homo sapien
ctacaggtgttaggcccatggttgc

SEQ ID NO: 5365044 - DNA, 25 bp, Homo sapien
taggaagcccgcaatttggaaatgg

SEQ ID NO: 5365045 - DNA, 25 bp, Homo sapien
ttctgcagcaaactgtaacacatct

SEQ ID NO: 5365046 - DNA, 25 bp, Homo sapien
catcttctcccgcaggaacttcaaa

SEQ ID NO: 5365047 - DNA, 25 bp, Homo sapien
atatcgaccgccctttaaactcagg

SEQ ID NO: 5365048 - DNA, 25 bp, Homo sapien
cccttcctgacaccaagcaggactg

SEQ ID NO: 5365049 - DNA, 25 bp, Homo sapien
ttcctgacaccaagcaggactgaac

SEQ ID NO: 5365050 - DNA, 25 bp, Homo sapien
caagcaggactgaacagagggccct

SEQ ID NO: 5365051 - DNA, 25 bp, Homo sapien
ccaagcaggactgaacagagggccc

SEQ ID NO: 5365052 - DNA, 25 bp, Homo sapien
tgacggaccaacacaactaatgaag

SEQ ID NO: 5365053 - DNA, 25 bp, Homo sapien
gatgaggctagccactgcgctgtgc

SEQ ID NO: 5365054 - DNA, 25 bp, Homo sapien
cctaaattgtggagactgcgatgag

SEQ ID NO: 5365055 - DNA, 25 bp, Homo sapien
tccacttcagtggtgtgacggacca

SEQ ID NO: 5365056 - DNA, 25 bp, Homo sapien
tctctccgtagatgtccccagccct

SEQ ID NO: 5365057 - DNA, 25 bp, Homo sapien
tcatctctctccgtagatgtcccca

SEQ ID NO: 5365058 - DNA, 25 bp, Homo sapien
ccttcatctctctccgtagatgtcc

SEQ ID NO: 5365059 - DNA, 25 bp, Homo sapien
tctctctccgtagatgtccccagcc

SEQ ID NO: 5365060 - DNA, 25 bp, Homo sapien
ctcctgcagggagcgatggcagaat

SEQ ID NO: 5365061 - DNA, 25 bp, Homo sapien
agcgatggcagaatgaggttgtggc

SEQ ID NO: 5365062 - DNA, 25 bp, Homo sapien
cgatggcagaatgaggttgtggcca

SEQ ID NO: 5365063 - DNA, 25 bp, Homo sapien
tgcagggagcgatggcagaatgagg

SEQ ID NO: 5365064 - DNA, 25 bp, Homo sapien
gatgtcatttccatacacagaacaa

SEQ ID NO: 5365065 - DNA, 25 bp, Homo sapien
agatagaagtcctccgcagtgggca

SEQ ID NO: 5365066 - DNA, 25 bp, Homo sapien
agaacagttccgtccagatagaagt

SEQ ID NO: 5365067 - DNA, 25 bp, Homo sapien
aagtcctccgcagtgggcagcatgc

SEQ ID NO: 5365068 - DNA, 25 bp, Homo sapien
gtggtgctcggtgctccccctggca

SEQ ID NO: 5365069 - DNA, 25 bp, Homo sapien
gccttcttcccacgccgcgcctcga

SEQ ID NO: 5365070 - DNA, 25 bp, Homo sapien
gcctcgaagcgcacgacaccgtggt

SEQ ID NO: 5365071 - DNA, 25 bp, Homo sapien
aagcgcacgacaccgtggtgctcgg

SEQ ID NO: 5365072 - DNA, 25 bp, Homo sapien
gctgcagaaggcgagtgcgcggcgg

SEQ ID NO: 5365073 - DNA, 25 bp, Homo sapien
gccgcaggctcgagtcctcctcctg

SEQ ID NO: 5365074 - DNA, 25 bp, Homo sapien
tcctgccaccgtggggtctcggagc

SEQ ID NO: 5365075 - DNA, 25 bp, Homo sapien
tgcgcggcgggagtcgtcctgccgc

SEQ ID NO: 5365076 - DNA, 25 bp, Homo sapien
ggcagcacggctgcctaaaaaggcg

SEQ ID NO: 5365077 - DNA, 25 bp, Homo sapien
gctgcctaaaaaggcgtgtttctcc

SEQ ID NO: 5365078 - DNA, 25 bp, Homo sapien
tgcgcgcggatttctgcttgtcgcg

SEQ ID NO: 5365079 - DNA, 25 bp, Homo sapien
gatttctgcttgtcgcggagagtga

SEQ ID NO: 5365080 - DNA, 25 bp, Homo sapien
ctgcacagtacccgcctggcaccgc

SEQ ID NO: 5365081 - DNA, 25 bp, Homo sapien
tgcacagtacccgcctggcaccgcg

SEQ ID NO: 5365082 - DNA, 25 bp, Homo sapien
gcctggcaccgcgcctggacacctc

SEQ ID NO: 5365083 - DNA, 25 bp, Homo sapien
ggcaccgcgcctggacacctccggg

SEQ ID NO: 5365084 - DNA, 25 bp, Homo sapien
ccggcggaagtgagtctttgtgtac

SEQ ID NO: 5365085 - DNA, 25 bp, Homo sapien
gaagtgagtctttgtgtaccctgtc

SEQ ID NO: 5365086 - DNA, 25 bp, Homo sapien
gagtctttgtgtaccctgtccaaca

SEQ ID NO: 5365087 - DNA, 25 bp, Homo sapien
ccccggcggaagtgagtctttgtgt

SEQ ID NO: 5365088 - DNA, 25 bp, Homo sapien
ctgcgcgcctggcagcgcctggcag

SEQ ID NO: 5365089 - DNA, 25 bp, Homo sapien
gcgcgcctggcagcgcctggcagcc

SEQ ID NO: 5365090 - DNA, 25 bp, Homo sapien
tgcgcgcctggcagcgcctggcagc

SEQ ID NO: 5365091 - DNA, 25 bp, Homo sapien
catttgggaagggtagctcgccaag

SEQ ID NO: 5365092 - DNA, 25 bp, Homo sapien
caagtccggtgacggtgctccctgg

SEQ ID NO: 5365093 - DNA, 25 bp, Homo sapien
tcgccaagtccggtgacggtgctcc

SEQ ID NO: 5365094 - DNA, 25 bp, Homo sapien
agggtagctcgccaagtccggtgac

SEQ ID NO: 5365095 - DNA, 25 bp, Homo sapien
agaagccggcgggacaagtggttga

SEQ ID NO: 5365096 - DNA, 25 bp, Homo sapien
cgggacaagtggttgaagcagcctc

SEQ ID NO: 5365097 - DNA, 25 bp, Homo sapien
tcttggggtagaagccggcgggaca

SEQ ID NO: 5365098 - DNA, 25 bp, Homo sapien
agtggttgaagcagcctccggagcc

SEQ ID NO: 5365099 - DNA, 25 bp, Homo sapien
gtcgcgtgcggaatgtccacttgtc

SEQ ID NO: 5365100 - DNA, 25 bp, Homo sapien
cccttgcgttttctcgagacggcgg

SEQ ID NO: 5365101 - DNA, 25 bp, Homo sapien
accgcggcccttgcgttttctcgag

SEQ ID NO: 5365102 - DNA, 25 bp, Homo sapien
gtgcccatcgagtgtcggtctggtc

SEQ ID NO: 5365103 - DNA, 25 bp, Homo sapien
cctgtttcaggaacttgaagcacat

SEQ ID NO: 5365104 - DNA, 25 bp, Homo sapien
gggacaattccttcctgtttcagga

SEQ ID NO: 5365105 - DNA, 25 bp, Homo sapien
agctgagctttcacagggacaattc

SEQ ID NO: 5365106 - DNA, 25 bp, Homo sapien
gctttcacagggacaattccttcct

SEQ ID NO: 5365107 - DNA, 25 bp, Homo sapien
tatctgcagtaggaacaataaaacc

SEQ ID NO: 5365108 - DNA, 25 bp, Homo sapien
tgacacccgcgctagtctgtgggct

SEQ ID NO: 5365109 - DNA, 25 bp, Homo sapien
ttacccttaggcttgctgacacccg

SEQ ID NO: 5365110 - DNA, 25 bp, Homo sapien
tttttagcatcagatataggaatga

SEQ ID NO: 5365111 - DNA, 25 bp, Homo sapien
aggatctcatttgtgttcgaaaagc

SEQ ID NO: 5365112 - DNA, 25 bp, Homo sapien
ttgtgttcgaaaagctttcatgtgc

SEQ ID NO: 5365113 - DNA, 25 bp, Homo sapien
tcaagccgtcggtgtctcctttgcg

SEQ ID NO: 5365114 - DNA, 25 bp, Homo sapien
catgtgcttcagtccttgctgagca

SEQ ID NO: 5365115 - DNA, 25 bp, Homo sapien
ttggtagtcagcataaaatacctgg

SEQ ID NO: 5365116 - DNA, 25 bp, Homo sapien
cattgtttaggaggaatgcttcagc

SEQ ID NO: 5365117 - DNA, 25 bp, Homo sapien
ttttgtttctctgtatgatgggagc

SEQ ID NO: 5365118 - DNA, 25 bp, Homo sapien
tctgtatgatgggagcattgtttag

SEQ ID NO: 5365119 - DNA, 25 bp, Homo sapien
gaaccccacgcttaatctctttata

SEQ ID NO: 5365120 - DNA, 25 bp, Homo sapien
tgagtgtgttatcactgcaggctga

SEQ ID NO: 5365121 - DNA, 25 bp, Homo sapien
tagcaattgagtgtgttatcactgc

SEQ ID NO: 5365122 - DNA, 25 bp, Homo sapien
cattggacaaatccatgctgaaatg

SEQ ID NO: 5365123 - DNA, 25 bp, Homo sapien
ggccaacacctggtgaactttcagg

SEQ ID NO: 5365124 - DNA, 25 bp, Homo sapien
agggccaacacctggtgaactttca

SEQ ID NO: 5365125 - DNA, 25 bp, Homo sapien
tccaagggagggccaacacctggtg

SEQ ID NO: 5365126 - DNA, 25 bp, Homo sapien
ccaagggagggccaacacctggtga

SEQ ID NO: 5365127 - DNA, 25 bp, Homo sapien
ttctgcagggctgttccgacaacgc

SEQ ID NO: 5365128 - DNA, 25 bp, Homo sapien
catcacccgttataccatggtaagg

SEQ ID NO: 5365129 - DNA, 25 bp, Homo sapien
tcagctcctcgtggacagttctgca

SEQ ID NO: 5365130 - DNA, 25 bp, Homo sapien
cacttgggctgtgggctcaaggtcc

SEQ ID NO: 5365131 - DNA, 25 bp, Homo sapien
ttagccgctggcacttgacccttag

SEQ ID NO: 5365132 - DNA, 25 bp, Homo sapien
accagagaggttgtcgggacacaac

SEQ ID NO: 5365133 - DNA, 25 bp, Homo sapien
cagagccaacgctgaactggtagca

SEQ ID NO: 5365134 - DNA, 25 bp, Homo sapien
gcagctccttatgtgcccttagccg

SEQ ID NO: 5365135 - DNA, 25 bp, Homo sapien
tgtgccttagcaagtcatatatcaa

SEQ ID NO: 5365136 - DNA, 25 bp, Homo sapien
gatattgtgaccaaatctttcagac

SEQ ID NO: 5365137 - DNA, 25 bp, Homo sapien
tggttggttgattggaaggctctgt

SEQ ID NO: 5365138 - DNA, 25 bp, Homo sapien
cagttaatagctgccgcttctcttg

SEQ ID NO: 5365139 - DNA, 25 bp, Homo sapien
gtttggacacttgttcctggctcgt

SEQ ID NO: 5365140 - DNA, 25 bp, Homo sapien
ttgttcctggctcgtccactactga

SEQ ID NO: 5365141 - DNA, 25 bp, Homo sapien
gacacttgttcctggctcgtccact

SEQ ID NO: 5365142 - DNA, 25 bp, Homo sapien
ctggctcgtccactactgattcttc

SEQ ID NO: 5365143 - DNA, 25 bp, Homo sapien
ccattgtccagccataagctgccat

SEQ ID NO: 5365144 - DNA, 25 bp, Homo sapien
ccagccataagcttgcttttaccca

SEQ ID NO: 5365145 - DNA, 25 bp, Homo sapien
aagcttgcttttacccattgtccag

SEQ ID NO: 5365146 - DNA, 25 bp, Homo sapien
ccattgtccagccataagcttgctt

SEQ ID NO: 5365147 - DNA, 25 bp, Homo sapien
ttcggcagcgtgggatgggggcaca

SEQ ID NO: 5365148 - DNA, 25 bp, Homo sapien
ggcagcgtgggatgggggcacacaa

SEQ ID NO: 5365149 - DNA, 25 bp, Homo sapien
gcagcgtgggatgggggcacacaat

SEQ ID NO: 5365150 - DNA, 25 bp, Homo sapien
gcgtgggatgggggcacacaatatc

SEQ ID NO: 5365151 - DNA, 25 bp, Homo sapien
ctctgagtggttcggaagaggccct

SEQ ID NO: 5365152 - DNA, 25 bp, Homo sapien
gcattcctgattctggcctgattcc

SEQ ID NO: 5365153 - DNA, 25 bp, Homo sapien
taattctatgactcagagcaccaga

SEQ ID NO: 5365154 - DNA, 25 bp, Homo sapien
ccagaagtatggctgtctagcatcc

SEQ ID NO: 5365155 - DNA, 25 bp, Homo sapien
cagtggcatcttttctgaatggaga

SEQ ID NO: 5365156 - DNA, 25 bp, Homo sapien
ctcctgcagtggcatcttttctgaa

SEQ ID NO: 5365157 - DNA, 25 bp, Homo sapien
gcatcttttctgaatggagattctg

SEQ ID NO: 5365158 - DNA, 25 bp, Homo sapien
tgcagtggcatcttttctgaatgga

SEQ ID NO: 5365159 - DNA, 25 bp, Homo sapien
tgaagagattcattaaagtgtcact

SEQ ID NO: 5365160 - DNA, 25 bp, Homo sapien
tgcagcgtctctagttgatcaggga

SEQ ID NO: 5365161 - DNA, 25 bp, Homo sapien
caagttgttatccttgctctgagca

SEQ ID NO: 5365162 - DNA, 25 bp, Homo sapien
gcagctcacgctctaaatgttacat

SEQ ID NO: 5365163 - DNA, 25 bp, Homo sapien
acttccactgggaccatcccatgtg

SEQ ID NO: 5365164 - DNA, 25 bp, Homo sapien
tccactgggaccatcccatgtgtgc

SEQ ID NO: 5365165 - DNA, 25 bp, Homo sapien
ctgggaccatcccatgtgtgctttg

SEQ ID NO: 5365166 - DNA, 25 bp, Homo sapien
cactgggaccatcccatgtgtgctt

SEQ ID NO: 5365167 - DNA, 25 bp, Homo sapien
caagatgttgggtacttcaaaatcc

SEQ ID NO: 5365168 - DNA, 25 bp, Homo sapien
acaccctgctgggaacatcaggcag

SEQ ID NO: 5365169 - DNA, 25 bp, Homo sapien
gatattgttatcctctcacagaggg

SEQ ID NO: 5365170 - DNA, 25 bp, Homo sapien
tcacggcaaaataactgagcccaag

SEQ ID NO: 5365171 - DNA, 25 bp, Homo sapien
taggtgaccaaccataatctagatg

SEQ ID NO: 5365172 - DNA, 25 bp, Homo sapien
gttggtccacaaatctttggagatc

SEQ ID NO: 5365173 - DNA, 25 bp, Homo sapien
aatgtggtcatttaggtagcacggc

SEQ ID NO: 5365174 - DNA, 25 bp, Homo sapien
gagatcctgggttgtggtatacgta

SEQ ID NO: 5365175 - DNA, 25 bp, Homo sapien
tctgagctaattctctgtgactgtt

SEQ ID NO: 5365176 - DNA, 25 bp, Homo sapien
ctgggctttgccacttctagatcta

SEQ ID NO: 5365177 - DNA, 25 bp, Homo sapien
tgtgactgttaagaatttggtgagc

SEQ ID NO: 5365178 - DNA, 25 bp, Homo sapien
tctgtgtagatgcagcctgggcttt

SEQ ID NO: 5365179 - DNA, 25 bp, Homo sapien
caaacactcgagaagaagctgggtg

SEQ ID NO: 5365180 - DNA, 25 bp, Homo sapien
acacaaggcagatctacaccggcat

SEQ ID NO: 5365181 - DNA, 25 bp, Homo sapien
ttacaacaaacactcgagaagaagc

SEQ ID NO: 5365182 - DNA, 25 bp, Homo sapien
gatctacaccggcatctcctggttc

SEQ ID NO: 5365183 - DNA, 25 bp, Homo sapien
ctattgccagtgttgctcctggaga

SEQ ID NO: 5365184 - DNA, 25 bp, Homo sapien
cagagctagagaatggcaggaccag

SEQ ID NO: 5365185 - DNA, 25 bp, Homo sapien
ggagattttgctgcagagctagaga

SEQ ID NO: 5365186 - DNA, 25 bp, Homo sapien
gaatggcaggaccagaacagattgt

SEQ ID NO: 5365187 - DNA, 25 bp, Homo sapien
aatattaagatgtctgaaagtacag

SEQ ID NO: 5365188 - DNA, 25 bp, Homo sapien
caatgtaggtggctggtgataatca

SEQ ID NO: 5365189 - DNA, 25 bp, Homo sapien
acagctcctaagaatcagtgtggtc

SEQ ID NO: 5365190 - DNA, 25 bp, Homo sapien
taaattctcgtactgccaaatgaaa

SEQ ID NO: 5365191 - DNA, 25 bp, Homo sapien
tcacagtccagtttagagctctatt

SEQ ID NO: 5365192 - DNA, 25 bp, Homo sapien
gctctattggcagttgtcccttcag

SEQ ID NO: 5365193 - DNA, 25 bp, Homo sapien
gatgctgaagaaggcattgaaattc

SEQ ID NO: 5365194 - DNA, 25 bp, Homo sapien
cagggtttttaggaccaaggatgct

SEQ ID NO: 5365195 - DNA, 25 bp, Homo sapien
tgaagagatggtgcaccgcaggagg

SEQ ID NO: 5365196 - DNA, 25 bp, Homo sapien
gaaacgctccacgtgaggagtggca

SEQ ID NO: 5365197 - DNA, 25 bp, Homo sapien
ccacgtgaggagtggcatccacgag

SEQ ID NO: 5365198 - DNA, 25 bp, Homo sapien
tcagacagaggaaacgctccacgtg

SEQ ID NO: 5365199 - DNA, 25 bp, Homo sapien
gctggtgctatcaatctctccattt

SEQ ID NO: 5365200 - DNA, 25 bp, Homo sapien
ctcaaagaaatagctggtgctatca

SEQ ID NO: 5365201 - DNA, 25 bp, Homo sapien
aactgccagcgaatactaatggctg

SEQ ID NO: 5365202 - DNA, 25 bp, Homo sapien
agatgaactgccagcgaatactaat

SEQ ID NO: 5365203 - DNA, 25 bp, Homo sapien
aaggggatcttgcattgtttatctc

SEQ ID NO: 5365204 - DNA, 25 bp, Homo sapien
ctgattttgtctccagccgctgacc

SEQ ID NO: 5365205 - DNA, 25 bp, Homo sapien
ctccagccgctgacctttcctttct

SEQ ID NO: 5365206 - DNA, 25 bp, Homo sapien
caaggggatcttgcattgtttatct

SEQ ID NO: 5365207 - DNA, 25 bp, Homo sapien
ttctgggttcaagcatgagcggagt

SEQ ID NO: 5365208 - DNA, 25 bp, Homo sapien
ctgtgttctccaaccccatgaggca

SEQ ID NO: 5365209 - DNA, 25 bp, Homo sapien
cacatataccttcttttgtctggtc

SEQ ID NO: 5365210 - DNA, 25 bp, Homo sapien
tgagccctggtagtcttgcatgcaa

SEQ ID NO: 5365211 - DNA, 25 bp, Homo sapien
cagtagatgacaccagtgttccgca

SEQ ID NO: 5365212 - DNA, 25 bp, Homo sapien
ggaaggttgtgctcagacccaaagt

SEQ ID NO: 5365213 - DNA, 25 bp, Homo sapien
gacaggacctcagctgcttcgggaa

SEQ ID NO: 5365214 - DNA, 25 bp, Homo sapien
tgcgccataatagtacaaggattcc

SEQ ID NO: 5365215 - DNA, 25 bp, Homo sapien
ccaccacctttcattgcatacttag

SEQ ID NO: 5365216 - DNA, 25 bp, Homo sapien
accacctttcattgcatacttagat

SEQ ID NO: 5365217 - DNA, 25 bp, Homo sapien
caccacctttcattgcatacttaga

SEQ ID NO: 5365218 - DNA, 25 bp, Homo sapien
gccaccacctttcattgcatactta

SEQ ID NO: 5365219 - DNA, 25 bp, Homo sapien
gtcattagaacaggtgtggtcaccc

SEQ ID NO: 5365220 - DNA, 25 bp, Homo sapien
attagaacaggtgtggtcacccacg

SEQ ID NO: 5365221 - DNA, 25 bp, Homo sapien
catggtcattagaacaggtgtggtc

SEQ ID NO: 5365222 - DNA, 25 bp, Homo sapien
tcctcatggtcattagaacaggtgt

SEQ ID NO: 5365223 - DNA, 25 bp, Homo sapien
tagacaccgcttcccatgccttgtt

SEQ ID NO: 5365224 - DNA, 25 bp, Homo sapien
tgacgtggccaatgtcaagtccact

SEQ ID NO: 5365225 - DNA, 25 bp, Homo sapien
gtctttccagcaccatgagattgca

SEQ ID NO: 5365226 - DNA, 25 bp, Homo sapien
tggcagtggccttgtaaccaagccc

SEQ ID NO: 5365227 - DNA, 25 bp, Homo sapien
cacatgtagggagggtagagtttta

SEQ ID NO: 5365228 - DNA, 25 bp, Homo sapien
gcctgggagctcagagtttccagga

SEQ ID NO: 5365229 - DNA, 25 bp, Homo sapien
ttcacacaagcaaggctcacatcct

SEQ ID NO: 5365230 - DNA, 25 bp, Homo sapien
tagattggagtcatttggtcccttc

SEQ ID NO: 5365231 - DNA, 25 bp, Homo sapien
ggtttctgtaatgccttctgctcac

SEQ ID NO: 5365232 - DNA, 25 bp, Homo sapien
tcacgtctgtgtggtccttttgcct

SEQ ID NO: 5365233 - DNA, 25 bp, Homo sapien
tctgtgtggtccttttgcctggttt

SEQ ID NO: 5365234 - DNA, 25 bp, Homo sapien
gcctggtttctgtaatgccttctgc

SEQ ID NO: 5365235 - DNA, 25 bp, Homo sapien
tccaaggtgagcaagtgtcctcagc

SEQ ID NO: 5365236 - DNA, 25 bp, Homo sapien
ccagcgcagagccaatgatctccaa

SEQ ID NO: 5365237 - DNA, 25 bp, Homo sapien
actcagactgtagggcactcgggag

SEQ ID NO: 5365238 - DNA, 25 bp, Homo sapien
aggtgttattctgtggccggaccca

SEQ ID NO: 5365239 - DNA, 25 bp, Homo sapien
ggatgcagagggcactccgggcact

SEQ ID NO: 5365240 - DNA, 25 bp, Homo sapien
ctttcaccggattccttcccattgc

SEQ ID NO: 5365241 - DNA, 25 bp, Homo sapien
gggatgtatttgaaatagcacccat

SEQ ID NO: 5365242 - DNA, 25 bp, Homo sapien
ccgggcactcacaagggatgtattt

SEQ ID NO: 5365243 - DNA, 25 bp, Homo sapien
agtctgttggtacagtttatctggg

SEQ ID NO: 5365244 - DNA, 25 bp, Homo sapien
tctgtatccacaggacattgggaag

SEQ ID NO: 5365245 - DNA, 25 bp, Homo sapien
ttgggaagctagtgaaagtccgagt

SEQ ID NO: 5365246 - DNA, 25 bp, Homo sapien
gtcttcttggtcaattcctatgtcc

SEQ ID NO: 5365247 - DNA, 25 bp, Homo sapien
ccagttggacctccccacatggttg

SEQ ID NO: 5365248 - DNA, 25 bp, Homo sapien
gcaaaccctttgcactactcctgtg

SEQ ID NO: 5365249 - DNA, 25 bp, Homo sapien
gtaggtactcaatacctggctcctg

SEQ ID NO: 5365250 - DNA, 25 bp, Homo sapien
tgggttccatactgactctcactgt

SEQ ID NO: 5365251 - DNA, 25 bp, Homo sapien
tgtagtagccaagaggagctagcag

SEQ ID NO: 5365252 - DNA, 25 bp, Homo sapien
aacatttggtttgtgtagtagccaa

SEQ ID NO: 5365253 - DNA, 25 bp, Homo sapien
cttgaacagagatgcactttaggat

SEQ ID NO: 5365254 - DNA, 25 bp, Homo sapien
tcacttgaacagagatgcactttag

SEQ ID NO: 5365255 - DNA, 25 bp, Homo sapien
tttctttctgcagctactccaagac

SEQ ID NO: 5365256 - DNA, 25 bp, Homo sapien
agtccaggcagtccttttctttaag

SEQ ID NO: 5365257 - DNA, 25 bp, Homo sapien
tctttaagccagtcttttctttctg

SEQ ID NO: 5365258 - DNA, 25 bp, Homo sapien
ccagtccaggcagtccttttcttta

SEQ ID NO: 5365259 - DNA, 25 bp, Homo sapien
tttgctcctctccactaaggtgcat

SEQ ID NO: 5365260 - DNA, 25 bp, Homo sapien
gtttgctcctctccactaaggtgca

SEQ ID NO: 5365261 - DNA, 25 bp, Homo sapien
cctaccacagtgttgctgggtttgc

SEQ ID NO: 5365262 - DNA, 25 bp, Homo sapien
gaccatacccagtggtctgtgggtt

SEQ ID NO: 5365263 - DNA, 25 bp, Homo sapien
gcaggagaatctggaccatacccag

SEQ ID NO: 5365264 - DNA, 25 bp, Homo sapien
attggctatatgcacatagtgggct

SEQ ID NO: 5365265 - DNA, 25 bp, Homo sapien
agcatgatgttgaacccattggcta

SEQ ID NO: 5365266 - DNA, 25 bp, Homo sapien
gccttgattgcaccatactctccag

SEQ ID NO: 5365267 - DNA, 25 bp, Homo sapien
tacttattgaagtaacccagagcca

SEQ ID NO: 5365268 - DNA, 25 bp, Homo sapien
cgtggtgatgtgtgtctctagtccc

SEQ ID NO: 5365269 - DNA, 25 bp, Homo sapien
agtaacccagagccatgcgtggtga

SEQ ID NO: 5365270 - DNA, 25 bp, Homo sapien
tgccctggccgtgttgacagacttg

SEQ ID NO: 5365271 - DNA, 25 bp, Homo sapien
caggtgaaaacgtcagatgctggct

SEQ ID NO: 5365272 - DNA, 25 bp, Homo sapien
tattgctccagcagtggtgctcaga

SEQ ID NO: 5365273 - DNA, 25 bp, Homo sapien
tctaatcggccggagtttctgcgct

SEQ ID NO: 5365274 - DNA, 25 bp, Homo sapien
tagcgtcaaggcactttgaaaaaac

SEQ ID NO: 5365275 - DNA, 25 bp, Homo sapien
aactggaccagtgcattttgtacac

SEQ ID NO: 5365276 - DNA, 25 bp, Homo sapien
gaattcattttaccccttgtcagca

SEQ ID NO: 5365277 - DNA, 25 bp, Homo sapien
tgacatcaaagaggcacacttaccc

SEQ ID NO: 5365278 - DNA, 25 bp, Homo sapien
acatgcatgcacaggcaaatgttct

SEQ ID NO: 5365279 - DNA, 25 bp, Homo sapien
catgcatgcacaggcaaatgttctt

SEQ ID NO: 5365280 - DNA, 25 bp, Homo sapien
taaatgaggcttgttgaaatggaaa

SEQ ID NO: 5365281 - DNA, 25 bp, Homo sapien
gtttagagaaattgccagttgcata

SEQ ID NO: 5365282 - DNA, 25 bp, Homo sapien
aaatattcactgtatgtattttgga

SEQ ID NO: 5365283 - DNA, 25 bp, Homo sapien
aatattcactgtatgtattttggag

SEQ ID NO: 5365284 - DNA, 25 bp, Homo sapien
ttgaaaatattcactgtatgtattt

SEQ ID NO: 5365285 - DNA, 25 bp, Homo sapien
gaaaatattcactgtatgtattttg

SEQ ID NO: 5365286 - DNA, 25 bp, Homo sapien
acctctcataggctgagcattgttg

SEQ ID NO: 5365287 - DNA, 25 bp, Homo sapien
gacacctctcataggctgagcattg

SEQ ID NO: 5365288 - DNA, 25 bp, Homo sapien
aggagacacctctcataggctgagc

SEQ ID NO: 5365289 - DNA, 25 bp, Homo sapien
tctcataggctgagcattgttgtag

SEQ ID NO: 5365290 - DNA, 25 bp, Homo sapien
caacaacaggagagctcatggatct

SEQ ID NO: 5365291 - DNA, 25 bp, Homo sapien
gagaatactgagctagaaagaccat

SEQ ID NO: 5365292 - DNA, 25 bp, Homo sapien
taaatgccgtaaaggtggccagctg

SEQ ID NO: 5365293 - DNA, 25 bp, Homo sapien
taaactactgcaggtaatggccaca

SEQ ID NO: 5365294 - DNA, 25 bp, Homo sapien
gacccacaggacttgtctgggccac

SEQ ID NO: 5365295 - DNA, 25 bp, Homo sapien
ccatagaagtgacccacaggacttg

SEQ ID NO: 5365296 - DNA, 25 bp, Homo sapien
acctcttgccccgataggcttattc

SEQ ID NO: 5365297 - DNA, 25 bp, Homo sapien
caggagctcgtccatagaagtgacc

SEQ ID NO: 5365298 - DNA, 25 bp, Homo sapien
tcgacattttcagtaccatcagtag

SEQ ID NO: 5365299 - DNA, 25 bp, Homo sapien
ctgtcgacattttcagtaccatcag

SEQ ID NO: 5365300 - DNA, 25 bp, Homo sapien
gacattttcagtaccatcagtaggg

SEQ ID NO: 5365301 - DNA, 25 bp, Homo sapien
cattttcagtaccatcagtagggaa

SEQ ID NO: 5365302 - DNA, 25 bp, Homo sapien
catcagcagcaagcaatttgccttt

SEQ ID NO: 5365303 - DNA, 25 bp, Homo sapien
agcaatttgcctttgatatctctgt

SEQ ID NO: 5365304 - DNA, 25 bp, Homo sapien
atgaacttccacataatcttaggtc

SEQ ID NO: 5365305 - DNA, 25 bp, Homo sapien
atcttaggtcaacatttgtgatttc

SEQ ID NO: 5365306 - DNA, 25 bp, Homo sapien
agtgggcccaattgacaattgtcag

SEQ ID NO: 5365307 - DNA, 25 bp, Homo sapien
caattgtcaggagtaaggctgcagg

SEQ ID NO: 5365308 - DNA, 25 bp, Homo sapien
gagctagtataagaggtggtgagga

SEQ ID NO: 5365309 - DNA, 25 bp, Homo sapien
aattgacaattgtcaggagtaaggc

SEQ ID NO: 5365310 - DNA, 25 bp, Homo sapien
aatttcatttcgctcaagcagttct

SEQ ID NO: 5365311 - DNA, 25 bp, Homo sapien
tctcctaatcttgtcctcaattcaa

SEQ ID NO: 5365312 - DNA, 25 bp, Homo sapien
ctagaatttcatttcgctcaagcag

SEQ ID NO: 5365313 - DNA, 25 bp, Homo sapien
agaacactgataaagaagatgatgc

SEQ ID NO: 5365314 - DNA, 25 bp, Homo sapien
cataaaatgcttgtcccaactccat

SEQ ID NO: 5365315 - DNA, 25 bp, Homo sapien
gacataaaatgcttgtcccaactcc

SEQ ID NO: 5365316 - DNA, 25 bp, Homo sapien
tgacataaaatgcttgtcccaactc

SEQ ID NO: 5365317 - DNA, 25 bp, Homo sapien
acataaaatgcttgtcccaactcca

SEQ ID NO: 5365318 - DNA, 25 bp, Homo sapien
gtcaccgtgcttgccgatcgactca

SEQ ID NO: 5365319 - DNA, 25 bp, Homo sapien
gaaggtggaggtcaccgtgcttgcc

SEQ ID NO: 5365320 - DNA, 25 bp, Homo sapien
tcccgtacacccactgggctgtgca

SEQ ID NO: 5365321 - DNA, 25 bp, Homo sapien
tccagtgctcccgtacacccactgg

SEQ ID NO: 5365322 - DNA, 25 bp, Homo sapien
cagtgtgtaagcattcaggtttttc

SEQ ID NO: 5365323 - DNA, 25 bp, Homo sapien
tgtaggttgtacctccactctgttg

SEQ ID NO: 5365324 - DNA, 25 bp, Homo sapien
caatactagcccgtctaactggagt

SEQ ID NO: 5365325 - DNA, 25 bp, Homo sapien
tatttttgcatacacctattggcca

SEQ ID NO: 5365326 - DNA, 25 bp, Homo sapien
tctaacattcctgagggtatggtcc

SEQ ID NO: 5365327 - DNA, 25 bp, Homo sapien
catgtagctacaacagatcccagag

SEQ ID NO: 5365328 - DNA, 25 bp, Homo sapien
gctggtccactatgccaatctgtga

SEQ ID NO: 5365329 - DNA, 25 bp, Homo sapien
tataattctgaaatggcacacgtgc

SEQ ID NO: 5365330 - DNA, 25 bp, Homo sapien
taggtgctgcacgaataccaatgaa

SEQ ID NO: 5365331 - DNA, 25 bp, Homo sapien
gctgcaacaactttggctcagttta

SEQ ID NO: 5365332 - DNA, 25 bp, Homo sapien
tgtttttgtgagttacccatggtca

SEQ ID NO: 5365333 - DNA, 25 bp, Homo sapien
catggtcatgttgctaaaccgtggc

SEQ ID NO: 5365334 - DNA, 25 bp, Homo sapien
cccacgctgcccagatggcaaaatg

SEQ ID NO: 5365335 - DNA, 25 bp, Homo sapien
tggcaaaatgcttcagccttcactg

SEQ ID NO: 5365336 - DNA, 25 bp, Homo sapien
tgtgcacagcagctcaaaaaccatg

SEQ ID NO: 5365337 - DNA, 25 bp, Homo sapien
ctgggcctggcaaatgatgtgccgt

SEQ ID NO: 5365338 - DNA, 25 bp, Homo sapien
tgatttgtgcccgtgaaggtcctgg

SEQ ID NO: 5365339 - DNA, 25 bp, Homo sapien
tggttgggcctgacaagtagtgctc

SEQ ID NO: 5365340 - DNA, 25 bp, Homo sapien
ctgcaaatgttcatgtggttgggcc

SEQ ID NO: 5365341 - DNA, 25 bp, Homo sapien
gttaacccatttatgacccactgct

SEQ ID NO: 5365342 - DNA, 25 bp, Homo sapien
ttcatgataggactttgcctctgct

SEQ ID NO: 5365343 - DNA, 25 bp, Homo sapien
gctgtgaacagttaggcctcagctc

SEQ ID NO: 5365344 - DNA, 25 bp, Homo sapien
tttttgttcatgataggactttgcc

SEQ ID NO: 5365345 - DNA, 25 bp, Homo sapien
ctctgctgtgaacagttaggcctca

SEQ ID NO: 5365346 - DNA, 25 bp, Homo sapien
ttctcacagtccgatacatccatgc

SEQ ID NO: 5365347 - DNA, 25 bp, Homo sapien
tcacagtccgatacatccatgcatg

SEQ ID NO: 5365348 - DNA, 25 bp, Homo sapien
agtccgatacatccatgcatgtgca

SEQ ID NO: 5365349 - DNA, 25 bp, Homo sapien
gatacatccatgcatgtgcacccac

SEQ ID NO: 5365350 - DNA, 25 bp, Homo sapien
tttgtcagatgagcgaagaaaggtg

SEQ ID NO: 5365351 - DNA, 25 bp, Homo sapien
aggtggttgatttgctttctctgag

SEQ ID NO: 5365352 - DNA, 25 bp, Homo sapien
agagagagacacctttggacacgtg

SEQ ID NO: 5365353 - DNA, 25 bp, Homo sapien
acctttggacacgtgaatgacattg

SEQ ID NO: 5365354 - DNA, 25 bp, Homo sapien
ggttgtcctccttatttgcttgctg

SEQ ID NO: 5365355 - DNA, 25 bp, Homo sapien
gttgtcctccttatttgcttgctgc

SEQ ID NO: 5365356 - DNA, 25 bp, Homo sapien
gtggttgtcctccttatttgcttgc

SEQ ID NO: 5365357 - DNA, 25 bp, Homo sapien
tgtggttgtcctccttatttgcttg

SEQ ID NO: 5365358 - DNA, 25 bp, Homo sapien
tgccacaaggagtggctgactccag

SEQ ID NO: 5365359 - DNA, 25 bp, Homo sapien
cagtaacctcaagggtagcaccttc

SEQ ID NO: 5365360 - DNA, 25 bp, Homo sapien
atgaggttggacttagctgctggtt

SEQ ID NO: 5365361 - DNA, 25 bp, Homo sapien
aaagggaagaaaggtgcgtatctgt

SEQ ID NO: 5365362 - DNA, 25 bp, Homo sapien
ggcaccatggggcattttcggggta

SEQ ID NO: 5365363 - DNA, 25 bp, Homo sapien
gcaccatggggcattttcggggtag

SEQ ID NO: 5365364 - DNA, 25 bp, Homo sapien
cctgctggaatgatgagcctctgtg

SEQ ID NO: 5365365 - DNA, 25 bp, Homo sapien
tgggcttttacaaaagggcaccatg

SEQ ID NO: 5365366 - DNA, 25 bp, Homo sapien
gtcttttgatgaccttcctttggat

SEQ ID NO: 5365367 - DNA, 25 bp, Homo sapien
gtgagtccctacatccttccacagg

SEQ ID NO: 5365368 - DNA, 25 bp, Homo sapien
tgtcctctttaattgaacctctgcc

SEQ ID NO: 5365369 - DNA, 25 bp, Homo sapien
ttcctcttgtgttctatagcccttg

SEQ ID NO: 5365370 - DNA, 25 bp, Homo sapien
aatgttacaatgattaatgatgtct

SEQ ID NO: 5365371 - DNA, 25 bp, Homo sapien
atgttacaatgattaatgatgtctt

SEQ ID NO: 5365372 - DNA, 25 bp, Homo sapien
cagaggtgaatcagtaggtctccct

SEQ ID NO: 5365373 - DNA, 25 bp, Homo sapien
aatgagctcacagaggtgaatcagt

SEQ ID NO: 5365374 - DNA, 25 bp, Homo sapien
gatgtggctaacgacaatgagctca

SEQ ID NO: 5365375 - DNA, 25 bp, Homo sapien
caggatgtggctaacgacaatgagc

SEQ ID NO: 5365376 - DNA, 25 bp, Homo sapien
caggagagccctgtctctcaaccgg

SEQ ID NO: 5365377 - DNA, 25 bp, Homo sapien
aaagtccacctaaccttcacaggag

SEQ ID NO: 5365378 - DNA, 25 bp, Homo sapien
tctcctggaccaaaagtccacctaa

SEQ ID NO: 5365379 - DNA, 25 bp, Homo sapien
ggggactcctacatcaatcatcaca

SEQ ID NO: 5365380 - DNA, 25 bp, Homo sapien
caatccattgtgcatttctgtacag

SEQ ID NO: 5365381 - DNA, 25 bp, Homo sapien
gataggagtctcgaattcctccctt

SEQ ID NO: 5365382 - DNA, 25 bp, Homo sapien
ttaggcctaagtatggcatctcgtt

SEQ ID NO: 5365383 - DNA, 25 bp, Homo sapien
ggcatctcgtttggacgtgcacagc

SEQ ID NO: 5365384 - DNA, 25 bp, Homo sapien
gggggctcttttatagtactgcaag

SEQ ID NO: 5365385 - DNA, 25 bp, Homo sapien
ggctcttttatagtactgcaagtaa

SEQ ID NO: 5365386 - DNA, 25 bp, Homo sapien
cacagggggctcttttatagtactg

SEQ ID NO: 5365387 - DNA, 25 bp, Homo sapien
cagggggctcttttatagtactgca

SEQ ID NO: 5365388 - DNA, 25 bp, Homo sapien
ttaatcttgatctggaatacagagt

SEQ ID NO: 5365389 - DNA, 25 bp, Homo sapien
tcttgatctggaatacagagttcat

SEQ ID NO: 5365390 - DNA, 25 bp, Homo sapien
catttgataagattgcaacgcaaag

SEQ ID NO: 5365391 - DNA, 25 bp, Homo sapien
acagagttcatttgataagattgca

SEQ ID NO: 5365392 - DNA, 25 bp, Homo sapien
gactggactatacccatgttcgtta

SEQ ID NO: 5365393 - DNA, 25 bp, Homo sapien
tagaacaaagactggactataccca

SEQ ID NO: 5365394 - DNA, 25 bp, Homo sapien
gaacaaagactggactatacccatg

SEQ ID NO: 5365395 - DNA, 25 bp, Homo sapien
caaagactggactatacccatgttc

SEQ ID NO: 5365396 - DNA, 25 bp, Homo sapien
cgtaggccagggttgcatggtaact

SEQ ID NO: 5365397 - DNA, 25 bp, Homo sapien
gtaactgagagacaccatgctctgg

SEQ ID NO: 5365398 - DNA, 25 bp, Homo sapien
ggatgtgcccatacacactcagtta

SEQ ID NO: 5365399 - DNA, 25 bp, Homo sapien
tgatcgatcaccagacgtaggccag

SEQ ID NO: 5365400 - DNA, 25 bp, Homo sapien
catgtgtgacacattaagtgtcatc

SEQ ID NO: 5365401 - DNA, 25 bp, Homo sapien
cgggctacgatttcaacacggcggc

SEQ ID NO: 5365402 - DNA, 25 bp, Homo sapien
cttaaactgataaatccgggctacg

SEQ ID NO: 5365403 - DNA, 25 bp, Homo sapien
acacggcggccccttgtgcatttct

SEQ ID NO: 5365404 - DNA, 25 bp, Homo sapien
gatggaacataactctaatggcaag

SEQ ID NO: 5365405 - DNA, 25 bp, Homo sapien
agatggaacataactctaatggcaa

SEQ ID NO: 5365406 - DNA, 25 bp, Homo sapien
tgaacagctcccaatactcttgatg

SEQ ID NO: 5365407 - DNA, 25 bp, Homo sapien
acagctcccaatactcttgatggta

SEQ ID NO: 5365408 - DNA, 25 bp, Homo sapien
ttgaacagctcccaatactcttgat

SEQ ID NO: 5365409 - DNA, 25 bp, Homo sapien
gaacagctcccaatactcttgatgg

SEQ ID NO: 5365410 - DNA, 25 bp, Homo sapien
tgctgaataccaatagacactgctt

SEQ ID NO: 5365411 - DNA, 25 bp, Homo sapien
tagactgaaaaccaggacacaactg

SEQ ID NO: 5365412 - DNA, 25 bp, Homo sapien
caagaggctgcttgccacgggcaat

SEQ ID NO: 5365413 - DNA, 25 bp, Homo sapien
ggaagtctcctccaaactagactga

SEQ ID NO: 5365414 - DNA, 25 bp, Homo sapien
agctcattggaagagttcgtggcca

SEQ ID NO: 5365415 - DNA, 25 bp, Homo sapien
ccttggctcacattgaatagttgaa

SEQ ID NO: 5365416 - DNA, 25 bp, Homo sapien
taaaaaggtagcttggcatgattct

SEQ ID NO: 5365417 - DNA, 25 bp, Homo sapien
ttacagtgagccatcgggtccggaa

SEQ ID NO: 5365418 - DNA, 25 bp, Homo sapien
catatgctgtatacaagagatacac

SEQ ID NO: 5365419 - DNA, 25 bp, Homo sapien
tgaagacataaatcctactttatct

SEQ ID NO: 5365420 - DNA, 25 bp, Homo sapien
agtaaaagtgatactaataccagac

SEQ ID NO: 5365421 - DNA, 25 bp, Homo sapien
gaggctgacagaacggattaggaaa

SEQ ID NO: 5365422 - DNA, 25 bp, Homo sapien
tcttgatggattctcacaatgagga

SEQ ID NO: 5365423 - DNA, 25 bp, Homo sapien
caaagcctaggatgtcagcatcttg

SEQ ID NO: 5365424 - DNA, 25 bp, Homo sapien
tgggcaaagcctaggatgtcagcat

SEQ ID NO: 5365425 - DNA, 25 bp, Homo sapien
ccaggtagtgcctcttttcctgggc

SEQ ID NO: 5365426 - DNA, 25 bp, Homo sapien
gataatgtctttcgcattgtaggca

SEQ ID NO: 5365427 - DNA, 25 bp, Homo sapien
tatgagccagcacaaaaacatgtgg

SEQ ID NO: 5365428 - DNA, 25 bp, Homo sapien
tatagttaaatgcttctgtgcagaa

SEQ ID NO: 5365429 - DNA, 25 bp, Homo sapien
tagaagtcaacgattaaggtcagat

SEQ ID NO: 5365430 - DNA, 25 bp, Homo sapien
tctgtgcaacttcattttgcatgta

SEQ ID NO: 5365431 - DNA, 25 bp, Homo sapien
ttgtctgcaagggaatgtacatatt

SEQ ID NO: 5365432 - DNA, 25 bp, Homo sapien
cctctgtgcaacttcattttgcatg

SEQ ID NO: 5365433 - DNA, 25 bp, Homo sapien
tctgcaagggaatgtacatatttta

SEQ ID NO: 5365434 - DNA, 25 bp, Homo sapien
tggctcataacgaatgcttctggag

SEQ ID NO: 5365435 - DNA, 25 bp, Homo sapien
tccccagaccatgagtctccagtgt

SEQ ID NO: 5365436 - DNA, 25 bp, Homo sapien
gttggagtgcccacttcagaagtct

SEQ ID NO: 5365437 - DNA, 25 bp, Homo sapien
ctggtattgtttccccagaccatga

SEQ ID NO: 5365438 - DNA, 25 bp, Homo sapien
ggagtgcccacttcagaagtctgtg

SEQ ID NO: 5365439 - DNA, 25 bp, Homo sapien
acactgcttagtatgtgcatcctgg

SEQ ID NO: 5365440 - DNA, 25 bp, Homo sapien
tgatggtggggactagctcagccat

SEQ ID NO: 5365441 - DNA, 25 bp, Homo sapien
tagtatgtgcatcctggtggtggtt

SEQ ID NO: 5365442 - DNA, 25 bp, Homo sapien
tgcttagtatgtgcatcctggtggt

SEQ ID NO: 5365443 - DNA, 25 bp, Homo sapien
gaaaaccttaatggatgagtacaca

SEQ ID NO: 5365444 - DNA, 25 bp, Homo sapien
gaagatggaaagagactggcgcact

SEQ ID NO: 5365445 - DNA, 25 bp, Homo sapien
cactgagcggtggacgtgaacctga

SEQ ID NO: 5365446 - DNA, 25 bp, Homo sapien
tggatgtgaaactcaggacagatgg

SEQ ID NO: 5365447 - DNA, 25 bp, Homo sapien
cactgagagccggatgtgaaactca

SEQ ID NO: 5365448 - DNA, 25 bp, Homo sapien
gaaactcaggggagatggaaggaga

SEQ ID NO: 5365449 - DNA, 25 bp, Homo sapien
gatggaaggagacgcggcgcactga

SEQ ID NO: 5365450 - DNA, 25 bp, Homo sapien
ctgagagccggatgtgaaactcagg

SEQ ID NO: 5365451 - DNA, 25 bp, Homo sapien
gggatatgttggctgactttcacta

SEQ ID NO: 5365452 - DNA, 25 bp, Homo sapien
atttcccattggcaacaactggata

SEQ ID NO: 5365453 - DNA, 25 bp, Homo sapien
ccttggctagagcactccggagtga

SEQ ID NO: 5365454 - DNA, 25 bp, Homo sapien
gataaaatgcccttggctagagcac

SEQ ID NO: 5365455 - DNA, 25 bp, Homo sapien
gtggatatccaaactcgtctggcat

SEQ ID NO: 5365456 - DNA, 25 bp, Homo sapien
ctcctctgatatcccttggagaaag

SEQ ID NO: 5365457 - DNA, 25 bp, Homo sapien
aaggtggatatccaaactcgtctgg

SEQ ID NO: 5365458 - DNA, 25 bp, Homo sapien
tcatcctcctctgatatcccttgga

SEQ ID NO: 5365459 - DNA, 25 bp, Homo sapien
aaaagacctgagacagtcctgtagg

SEQ ID NO: 5365460 - DNA, 25 bp, Homo sapien
gcagctttggctgtcctccgataca

SEQ ID NO: 5365461 - DNA, 25 bp, Homo sapien
aaagcaactgcagcaaaaaccttgc

SEQ ID NO: 5365462 - DNA, 25 bp, Homo sapien
taggcgctcctcatgcaggcagctt

SEQ ID NO: 5365463 - DNA, 25 bp, Homo sapien
gctgggtactgagaagacccgttaa

SEQ ID NO: 5365464 - DNA, 25 bp, Homo sapien
ccggcctgctgggtactgagaagac

SEQ ID NO: 5365465 - DNA, 25 bp, Homo sapien
taagtagggtcccacagtaggattc

SEQ ID NO: 5365466 - DNA, 25 bp, Homo sapien
cagtgagcttctacatgcccacaaa

SEQ ID NO: 5365467 - DNA, 25 bp, Homo sapien
gagagaggtctggatgggtatttga

SEQ ID NO: 5365468 - DNA, 25 bp, Homo sapien
tgaaaatcccgttggttgagaatag

SEQ ID NO: 5365469 - DNA, 25 bp, Homo sapien
tagagagaggtctggatgggtattt

SEQ ID NO: 5365470 - DNA, 25 bp, Homo sapien
tatttgaaaatcccgttggttgaga

SEQ ID NO: 5365471 - DNA, 25 bp, Homo sapien
aattactatagctttgcaatatctt

SEQ ID NO: 5365472 - DNA, 25 bp, Homo sapien
cacccagccatactgttttaattac

SEQ ID NO: 5365473 - DNA, 25 bp, Homo sapien
ctttgaaaacaataactatgatgtc

SEQ ID NO: 5365474 - DNA, 25 bp, Homo sapien
atagctttgcaatatctttgaaaac

SEQ ID NO: 5365475 - DNA, 25 bp, Homo sapien
cccacaattcttgaatgtcctggtt

SEQ ID NO: 5365476 - DNA, 25 bp, Homo sapien
catcaagctcactgattattgcctt

SEQ ID NO: 5365477 - DNA, 25 bp, Homo sapien
ccacaattcttgaatgtcctggttt

SEQ ID NO: 5365478 - DNA, 25 bp, Homo sapien
atcatcaagctcactgattattgcc

SEQ ID NO: 5365479 - DNA, 25 bp, Homo sapien
tgaataaggaaacatatcgactgcc

SEQ ID NO: 5365480 - DNA, 25 bp, Homo sapien
tcaatgccacatgtgatgaataagg

SEQ ID NO: 5365481 - DNA, 25 bp, Homo sapien
tgtctggagtagcagacccaggagc

SEQ ID NO: 5365482 - DNA, 25 bp, Homo sapien
tcagattcagcgtgcatgtgagccg

SEQ ID NO: 5365483 - DNA, 25 bp, Homo sapien
cttggtacaccataggaggagaaac

SEQ ID NO: 5365484 - DNA, 25 bp, Homo sapien
gagaaacaatgcactggtgtgcagc

SEQ ID NO: 5365485 - DNA, 25 bp, Homo sapien
tgtgcagccgagcaaggaatgatac

SEQ ID NO: 5365486 - DNA, 25 bp, Homo sapien
ctgaagaggcgacagctcctgggtc

SEQ ID NO: 5365487 - DNA, 25 bp, Homo sapien
gatatgacaggggtgtctgctgctt

SEQ ID NO: 5365488 - DNA, 25 bp, Homo sapien
cgcatgatatgacaggggtgtctgc

SEQ ID NO: 5365489 - DNA, 25 bp, Homo sapien
ctcctccacgcatgatatgacaggg

SEQ ID NO: 5365490 - DNA, 25 bp, Homo sapien
ccacgcatgatatgacaggggtgtc

SEQ ID NO: 5365491 - DNA, 25 bp, Homo sapien
ccagataaatctggggttagctcag

SEQ ID NO: 5365492 - DNA, 25 bp, Homo sapien
aacatctcattttggtaagatcttc

SEQ ID NO: 5365493 - DNA, 25 bp, Homo sapien
catctcattttggtaagatcttcca

SEQ ID NO: 5365494 - DNA, 25 bp, Homo sapien
ccagtccagataaatctggggttag

SEQ ID NO: 5365495 - DNA, 25 bp, Homo sapien
cctactgtccctaaaagctggctgt

SEQ ID NO: 5365496 - DNA, 25 bp, Homo sapien
gctttccatgcgctgcagagtggac

SEQ ID NO: 5365497 - DNA, 25 bp, Homo sapien
caaatttggtgtccataccatcagg

SEQ ID NO: 5365498 - DNA, 25 bp, Homo sapien
gggaataagtccctgctctaggatg

SEQ ID NO: 5365499 - DNA, 25 bp, Homo sapien
tgaacaaaacccacactctcgaatg

SEQ ID NO: 5365500 - DNA, 25 bp, Homo sapien
tcatccagcgtccaatctcaaaata

SEQ ID NO: 5365501 - DNA, 25 bp, Homo sapien
tatggaatcatccagcgtccaatct

SEQ ID NO: 5365502 - DNA, 25 bp, Homo sapien
tccttccttccaatgcgtcctcttt

SEQ ID NO: 5365503 - DNA, 25 bp, Homo sapien
tgaagtggcatccattggatcattc

SEQ ID NO: 5365504 - DNA, 25 bp, Homo sapien
gaagccattgggttgcttctttagt

SEQ ID NO: 5365505 - DNA, 25 bp, Homo sapien
ttatcttcctggttattgatactcg

SEQ ID NO: 5365506 - DNA, 25 bp, Homo sapien
gatactcgttttgccctgaagtggc

SEQ ID NO: 5365507 - DNA, 25 bp, Homo sapien
tggtctatccctcatgactgtcggg

SEQ ID NO: 5365508 - DNA, 25 bp, Homo sapien
tattttcaggtgacccagagaaggg

SEQ ID NO: 5365509 - DNA, 25 bp, Homo sapien
gaagtcaggaaggtgctagccacta

SEQ ID NO: 5365510 - DNA, 25 bp, Homo sapien
caaactgttgttcaatatcggcacc

SEQ ID NO: 5365511 - DNA, 25 bp, Homo sapien
tggaccataagcaactggaaagctg

SEQ ID NO: 5365512 - DNA, 25 bp, Homo sapien
gaaagctggaatgacgtctgtagta

SEQ ID NO: 5365513 - DNA, 25 bp, Homo sapien
cctggagtgaattacattcccttgc

SEQ ID NO: 5365514 - DNA, 25 bp, Homo sapien
ttccactttataggcagtgcctcag

SEQ ID NO: 5365515 - DNA, 25 bp, Homo sapien
tcatgacattcaggacgcaaagcgg

SEQ ID NO: 5365516 - DNA, 25 bp, Homo sapien
ggatgactccagtataaataaaagg

SEQ ID NO: 5365517 - DNA, 25 bp, Homo sapien
tacatacaaaatggtctgactgagg

SEQ ID NO: 5365518 - DNA, 25 bp, Homo sapien
taaatgtgagacttcatcattgctg

SEQ ID NO: 5365519 - DNA, 25 bp, Homo sapien
aatgatagtctaacacattggctga

SEQ ID NO: 5365520 - DNA, 25 bp, Homo sapien
gattttgctagtagacttagagcca

SEQ ID NO: 5365521 - DNA, 25 bp, Homo sapien
ttagagccaggaccagtggagctga

SEQ ID NO: 5365522 - DNA, 25 bp, Homo sapien
ctataagcctggtaatagtgccttt

SEQ ID NO: 5365523 - DNA, 25 bp, Homo sapien
gccacggcgcccggcgggcaagaca

SEQ ID NO: 5365524 - DNA, 25 bp, Homo sapien
ccacggcgcccggcgggcaagacac

SEQ ID NO: 5365525 - DNA, 25 bp, Homo sapien
tcgagcgccgaggtcgccaacgttc

SEQ ID NO: 5365526 - DNA, 25 bp, Homo sapien
agagcacagggtgctgccaagagcc

SEQ ID NO: 5365527 - DNA, 25 bp, Homo sapien
aagagcccagcggagtgcagctcga

SEQ ID NO: 5365528 - DNA, 25 bp, Homo sapien
gagcgccgaggtcgccaacgttcca

SEQ ID NO: 5365529 - DNA, 25 bp, Homo sapien
tcgaagagaccgacggcctcgacct

SEQ ID NO: 5365530 - DNA, 25 bp, Homo sapien
tctcgaagagaccgacggcctcgac

SEQ ID NO: 5365531 - DNA, 25 bp, Homo sapien
cgaagagaccgacggcctcgacctg

SEQ ID NO: 5365532 - DNA, 25 bp, Homo sapien
ctcgaagagaccgacggcctcgacc

SEQ ID NO: 5365533 - DNA, 25 bp, Homo sapien
cggcggcctcgatggctcaggcgtc

SEQ ID NO: 5365534 - DNA, 25 bp, Homo sapien
tctggtatgtaatgacaatatgtga

SEQ ID NO: 5365535 - DNA, 25 bp, Homo sapien
gctctggtatgtaatgacaatatgt

SEQ ID NO: 5365536 - DNA, 25 bp, Homo sapien
ggtatgtaatgacaatatgtgaaca

SEQ ID NO: 5365537 - DNA, 25 bp, Homo sapien
atgtaatgacaatatgtgaacaaac

SEQ ID NO: 5365538 - DNA, 25 bp, Homo sapien
tgaaatgtggagataatacttgcct

SEQ ID NO: 5365539 - DNA, 25 bp, Homo sapien
agaaaaggagtttggacctgaatca

SEQ ID NO: 5365540 - DNA, 25 bp, Homo sapien
ttactgtgggttggctatgtgcaaa

SEQ ID NO: 5365541 - DNA, 25 bp, Homo sapien
tacagtaacttagaatggccggtac

SEQ ID NO: 5365542 - DNA, 25 bp, Homo sapien
gccagttgacagaggtcagactcaa

SEQ ID NO: 5365543 - DNA, 25 bp, Homo sapien
tgccagttgacagaggtcagactca

SEQ ID NO: 5365544 - DNA, 25 bp, Homo sapien
tgcttcccgttcttctggatgggca

SEQ ID NO: 5365545 - DNA, 25 bp, Homo sapien
gggcatcctatcttcgtagttggtt

SEQ ID NO: 5365546 - DNA, 25 bp, Homo sapien
ccaaaggtgaggaataaaatgcttc

SEQ ID NO: 5365547 - DNA, 25 bp, Homo sapien
caaaggtgaggaataaaatgcttcc

SEQ ID NO: 5365548 - DNA, 25 bp, Homo sapien
tctcggcagtactgtgaattttgaa

SEQ ID NO: 5365549 - DNA, 25 bp, Homo sapien
aggacccgcccatttctcggcagta

SEQ ID NO: 5365550 - DNA, 25 bp, Homo sapien
gcatgctgccagaataaaaccacca

SEQ ID NO: 5365551 - DNA, 25 bp, Homo sapien
aaaccaccaggaatgaattcactcc

SEQ ID NO: 5365552 - DNA, 25 bp, Homo sapien
tacagattgttataaattgttgaga

SEQ ID NO: 5365553 - DNA, 25 bp, Homo sapien
taaaagtgacatgttaaggggctat

SEQ ID NO: 5365554 - DNA, 25 bp, Homo sapien
ttacagattgttataaattgttgag

SEQ ID NO: 5365555 - DNA, 25 bp, Homo sapien
ttaaggggctatgaagtaaatatgc

SEQ ID NO: 5365556 - DNA, 25 bp, Homo sapien
agctcttttatgttacacactgtct

SEQ ID NO: 5365557 - DNA, 25 bp, Homo sapien
tactggccttccatggttggtccct

SEQ ID NO: 5365558 - DNA, 25 bp, Homo sapien
tttactactggccttccatggttgg

SEQ ID NO: 5365559 - DNA, 25 bp, Homo sapien
tatggcagctcttttatgttacaca

SEQ ID NO: 5365560 - DNA, 25 bp, Homo sapien
gaccgtagtacctgccatgtctgac

SEQ ID NO: 5365561 - DNA, 25 bp, Homo sapien
tagtacctgccatgtctgacaccct

SEQ ID NO: 5365562 - DNA, 25 bp, Homo sapien
gtagaccgtagtacctgccatgtct

SEQ ID NO: 5365563 - DNA, 25 bp, Homo sapien
cgtagtacctgccatgtctgacacc

SEQ ID NO: 5365564 - DNA, 25 bp, Homo sapien
gaagcagctcttcagccctgggcct

SEQ ID NO: 5365565 - DNA, 25 bp, Homo sapien
cctggataggactggacacagcagc

SEQ ID NO: 5365566 - DNA, 25 bp, Homo sapien
ccagaccaagagaggcatctagtga

SEQ ID NO: 5365567 - DNA, 25 bp, Homo sapien
caagagaggcatctagtgagaagca

SEQ ID NO: 5365568 - DNA, 25 bp, Homo sapien
ggacaccacaatttccgcctcactg

SEQ ID NO: 5365569 - DNA, 25 bp, Homo sapien
acaccacaatttccgcctcactgac

SEQ ID NO: 5365570 - DNA, 25 bp, Homo sapien
acaaggacaccacaatttccgcctc

SEQ ID NO: 5365571 - DNA, 25 bp, Homo sapien
aaggacaccacaatttccgcctcac

SEQ ID NO: 5365572 - DNA, 25 bp, Homo sapien
ttcttctgttccttgttctgacctc

SEQ ID NO: 5365573 - DNA, 25 bp, Homo sapien
gttctgacctcagtgcatgacccat

SEQ ID NO: 5365574 - DNA, 25 bp, Homo sapien
cttgttctgacctcagtgcatgacc

SEQ ID NO: 5365575 - DNA, 25 bp, Homo sapien
tctgttccttgttctgacctcagtg

SEQ ID NO: 5365576 - DNA, 25 bp, Homo sapien
gaacttgtctttagtttcatcaact

SEQ ID NO: 5365577 - DNA, 25 bp, Homo sapien
caacttttctaaggaaattgatctg

SEQ ID NO: 5365578 - DNA, 25 bp, Homo sapien
gctttgtttgagcatagtgtaaata

SEQ ID NO: 5365579 - DNA, 25 bp, Homo sapien
gatctgttaatgaaagttggcttgc

SEQ ID NO: 5365580 - DNA, 25 bp, Homo sapien
cattgacctttgaggtgcactatta

SEQ ID NO: 5365581 - DNA, 25 bp, Homo sapien
gtttttagcattgacctttgaggtg

SEQ ID NO: 5365582 - DNA, 25 bp, Homo sapien
ttttgcactaacgtagccagaaatg

SEQ ID NO: 5365583 - DNA, 25 bp, Homo sapien
gccagaaatgtgaaacgatgacagt

SEQ ID NO: 5365584 - DNA, 25 bp, Homo sapien
taggcctgtgcactatttcagacac

SEQ ID NO: 5365585 - DNA, 25 bp, Homo sapien
tgcctgccctgctacagcaataagc

SEQ ID NO: 5365586 - DNA, 25 bp, Homo sapien
gccctgctacagcaataagctgtgt

SEQ ID NO: 5365587 - DNA, 25 bp, Homo sapien
ctgagtcaagctccctgaccttagg

SEQ ID NO: 5365588 - DNA, 25 bp, Homo sapien
ggctggcagcgcggaccagagccca

SEQ ID NO: 5365589 - DNA, 25 bp, Homo sapien
tagcattacctcaacactcaaagtg

SEQ ID NO: 5365590 - DNA, 25 bp, Homo sapien
gactttgtgatcgtggcacatggct

SEQ ID NO: 5365591 - DNA, 25 bp, Homo sapien
ttccagtagtggactggagggcttc

SEQ ID NO: 5365592 - DNA, 25 bp, Homo sapien
ggagggcttctttgcctaaggattg

SEQ ID NO: 5365593 - DNA, 25 bp, Homo sapien
aatgaacgccacatgttctggtttc

SEQ ID NO: 5365594 - DNA, 25 bp, Homo sapien
tttctgttcatcaacattaagtcca

SEQ ID NO: 5365595 - DNA, 25 bp, Homo sapien
ggtttctgttcatcaacattaagtc

SEQ ID NO: 5365596 - DNA, 25 bp, Homo sapien
ttacacaatgaacgccacatgttct

SEQ ID NO: 5365597 - DNA, 25 bp, Homo sapien
ttgtggtattaacaacatacgatcg

SEQ ID NO: 5365598 - DNA, 25 bp, Homo sapien
gtgaattcagcccatcttgtggtat

SEQ ID NO: 5365599 - DNA, 25 bp, Homo sapien
taacaacatacgatcgagtctcact

SEQ ID NO: 5365600 - DNA, 25 bp, Homo sapien
gatcgagtctcactataaatatacc

SEQ ID NO: 5365601 - DNA, 25 bp, Homo sapien
gatggtacaggaaacgtccctatac

SEQ ID NO: 5365602 - DNA, 25 bp, Homo sapien
tctgctgaaagatcggagaactttg

SEQ ID NO: 5365603 - DNA, 25 bp, Homo sapien
ggatccactcttggctcagaggcag

SEQ ID NO: 5365604 - DNA, 25 bp, Homo sapien
ctataggtgaagtttcgtaggttct

SEQ ID NO: 5365605 - DNA, 25 bp, Homo sapien
agttctatcatccaactgcccattc

SEQ ID NO: 5365606 - DNA, 25 bp, Homo sapien
tgttggggacagttctatcatccaa

SEQ ID NO: 5365607 - DNA, 25 bp, Homo sapien
ctgagtgatagaagaggtgagctca

SEQ ID NO: 5365608 - DNA, 25 bp, Homo sapien
gaagtgtaccacttccactggtaca

SEQ ID NO: 5365609 - DNA, 25 bp, Homo sapien
ctgagtcaaaatctcaccatcctga

SEQ ID NO: 5365610 - DNA, 25 bp, Homo sapien
aatctcaccatcctgatacgttcca

SEQ ID NO: 5365611 - DNA, 25 bp, Homo sapien
ccatcctgatacgttccaacttggc

SEQ ID NO: 5365612 - DNA, 25 bp, Homo sapien
tcaaaatctcaccatcctgatacgt

SEQ ID NO: 5365613 - DNA, 25 bp, Homo sapien
caagaaaagcaatcaatgtaactca

SEQ ID NO: 5365614 - DNA, 25 bp, Homo sapien
catcatgaattctggccaatacaac

SEQ ID NO: 5365615 - DNA, 25 bp, Homo sapien
tcccttaagttgaggagcaagcaag

SEQ ID NO: 5365616 - DNA, 25 bp, Homo sapien
gaaaattgccttaatctgataaaag

SEQ ID NO: 5365617 - DNA, 25 bp, Homo sapien
ggactgcttgccctacatataatgg

SEQ ID NO: 5365618 - DNA, 25 bp, Homo sapien
taatgtctacctcctttgactcagt

SEQ ID NO: 5365619 - DNA, 25 bp, Homo sapien
aaattgcccataagtaagtttgaca

SEQ ID NO: 5365620 - DNA, 25 bp, Homo sapien
aatggatccattatagatgaatatc

SEQ ID NO: 5365621 - DNA, 25 bp, Homo sapien
taatgtggcactctatagacatgag

SEQ ID NO: 5365622 - DNA, 25 bp, Homo sapien
gcttaaaaccagtgcatgaagtacg

SEQ ID NO: 5365623 - DNA, 25 bp, Homo sapien
atggttatccctgttgccacacgag

SEQ ID NO: 5365624 - DNA, 25 bp, Homo sapien
atcacctttcattccgtgccttctt

SEQ ID NO: 5365625 - DNA, 25 bp, Homo sapien
ctctaggtatgagaccgcgcaggca

SEQ ID NO: 5365626 - DNA, 25 bp, Homo sapien
gacgatagagacattggagatttct

SEQ ID NO: 5365627 - DNA, 25 bp, Homo sapien
tagagattagtcagtccaggcactg

SEQ ID NO: 5365628 - DNA, 25 bp, Homo sapien
gcactggagaggcatgatgcaccaa

SEQ ID NO: 5365629 - DNA, 25 bp, Homo sapien
ttgactcttctaatcaatgaacaca

SEQ ID NO: 5365630 - DNA, 25 bp, Homo sapien
atattgactcttctaatcaatgaac

SEQ ID NO: 5365631 - DNA, 25 bp, Homo sapien
caatattgactcttctaatcaatga

SEQ ID NO: 5365632 - DNA, 25 bp, Homo sapien
tattgactcttctaatcaatgaaca

SEQ ID NO: 5365633 - DNA, 25 bp, Homo sapien
aactgactctatggaattcagagga

SEQ ID NO: 5365634 - DNA, 25 bp, Homo sapien
gggtaaagagtgtctgaacctacac

SEQ ID NO: 5365635 - DNA, 25 bp, Homo sapien
gctgacaaaggtctttcatagtcag

SEQ ID NO: 5365636 - DNA, 25 bp, Homo sapien
tctgaacctacacagagtagggcct

SEQ ID NO: 5365637 - DNA, 25 bp, Homo sapien
tgtggaattacaaaatgctacccaa

SEQ ID NO: 5365638 - DNA, 25 bp, Homo sapien
gtggaattacaaaatgctacccaac

SEQ ID NO: 5365639 - DNA, 25 bp, Homo sapien
ctgtggaattacaaaatgctaccca

SEQ ID NO: 5365640 - DNA, 25 bp, Homo sapien
atcaggttcagctacagtagttttc

SEQ ID NO: 5365641 - DNA, 25 bp, Homo sapien
aatcaggttcagctacagtagtttt

SEQ ID NO: 5365642 - DNA, 25 bp, Homo sapien
gactgatgttcatggaagttatgga

SEQ ID NO: 5365643 - DNA, 25 bp, Homo sapien
aaggaacagccacataagacccact

SEQ ID NO: 5365644 - DNA, 25 bp, Homo sapien
ttatattgagtcaggtcctcagtca

SEQ ID NO: 5365645 - DNA, 25 bp, Homo sapien
caatcagataatgtcacaaggaaca

SEQ ID NO: 5365646 - DNA, 25 bp, Homo sapien
tagtgaaaacgtaggccagaaatgt

SEQ ID NO: 5365647 - DNA, 25 bp, Homo sapien
tctgcctatgggtcgatgggtccag

SEQ ID NO: 5365648 - DNA, 25 bp, Homo sapien
aaggaacttactaagaaatcactgc

SEQ ID NO: 5365649 - DNA, 25 bp, Homo sapien
ggtttcaggtttctagccattagga

SEQ ID NO: 5365650 - DNA, 25 bp, Homo sapien
tggaaaaagtcaggagcacaattgt

SEQ ID NO: 5365651 - DNA, 25 bp, Homo sapien
ggaacagtgactggaacctcctctg

SEQ ID NO: 5365652 - DNA, 25 bp, Homo sapien
gcaggtagcattattagccagtaga

SEQ ID NO: 5365653 - DNA, 25 bp, Homo sapien
gccagtagaatcttttgctgtagga

SEQ ID NO: 5365654 - DNA, 25 bp, Homo sapien
agacagcagggatatgtctatcttc

SEQ ID NO: 5365655 - DNA, 25 bp, Homo sapien
gacagcagggatatgtctatcttca

SEQ ID NO: 5365656 - DNA, 25 bp, Homo sapien
tgtatcgacatgcagcacagctggg

SEQ ID NO: 5365657 - DNA, 25 bp, Homo sapien
gaatatctgtacacgagttttgtat

SEQ ID NO: 5365658 - DNA, 25 bp, Homo sapien
gcaagcgggttagagacacagtgaa

SEQ ID NO: 5365659 - DNA, 25 bp, Homo sapien
cagagagcaagcgggttagagacac

SEQ ID NO: 5365660 - DNA, 25 bp, Homo sapien
gatccaagggatgaaagtaaaagcc

SEQ ID NO: 5365661 - DNA, 25 bp, Homo sapien
caaatttgaatgacactggatgaaa

SEQ ID NO: 5365662 - DNA, 25 bp, Homo sapien
tttgcagacgccgaagatccaaggg

SEQ ID NO: 5365663 - DNA, 25 bp, Homo sapien
cagaaatcatatccagctggttctc

SEQ ID NO: 5365664 - DNA, 25 bp, Homo sapien
tgtgtgtctgtgatgagaaagtatc

SEQ ID NO: 5365665 - DNA, 25 bp, Homo sapien
gtgtgtctgtgatgagaaagtatct

SEQ ID NO: 5365666 - DNA, 25 bp, Homo sapien
aattaacagggagctaggatagtgc

SEQ ID NO: 5365667 - DNA, 25 bp, Homo sapien
caggagtgtgtaaatggcacccacc

SEQ ID NO: 5365668 - DNA, 25 bp, Homo sapien
tctgttgtgaatggcagcaaacctg

SEQ ID NO: 5365669 - DNA, 25 bp, Homo sapien
taatgaagagctggtatcagtcact

SEQ ID NO: 5365670 - DNA, 25 bp, Homo sapien
gaacattctagtagttatcccagat

SEQ ID NO: 5365671 - DNA, 25 bp, Homo sapien
acagtgtctggagggattcaatgct

SEQ ID NO: 5365672 - DNA, 25 bp, Homo sapien
cttagtggatggcagagaacattct

SEQ ID NO: 5365673 - DNA, 25 bp, Homo sapien
gctggcattgtagtcttctatagga

SEQ ID NO: 5365674 - DNA, 25 bp, Homo sapien
agtgacagtctctccaaacccagga

SEQ ID NO: 5365675 - DNA, 25 bp, Homo sapien
gacagtctctccaaacccaggatca

SEQ ID NO: 5365676 - DNA, 25 bp, Homo sapien
cagtctctccaaacccaggatcaga

SEQ ID NO: 5365677 - DNA, 25 bp, Homo sapien
caaatttacatcccaaggaatggcc

SEQ ID NO: 5365678 - DNA, 25 bp, Homo sapien
tctgaaaggcaccagactgattcag

SEQ ID NO: 5365679 - DNA, 25 bp, Homo sapien
accagactgattcaggtgctgctcc

SEQ ID NO: 5365680 - DNA, 25 bp, Homo sapien
gaaaggcaccagactgattcaggtg

SEQ ID NO: 5365681 - DNA, 25 bp, Homo sapien
ggcaccagactgattcaggtgctgc

SEQ ID NO: 5365682 - DNA, 25 bp, Homo sapien
gattcagcgctcttttgcaaaggcc

SEQ ID NO: 5365683 - DNA, 25 bp, Homo sapien
catcctcaaagctccgaacaagtta

SEQ ID NO: 5365684 - DNA, 25 bp, Homo sapien
ccttttcggcaatagtggctcctga

SEQ ID NO: 5365685 - DNA, 25 bp, Homo sapien
aacaagttaccagccagattcagcg

SEQ ID NO: 5365686 - DNA, 25 bp, Homo sapien
tataaggctggcagacacatcaatg

SEQ ID NO: 5365687 - DNA, 25 bp, Homo sapien
agacatataaggctggcagacacat

SEQ ID NO: 5365688 - DNA, 25 bp, Homo sapien
cttccccaggggctcgcagacatat

SEQ ID NO: 5365689 - DNA, 25 bp, Homo sapien
ccaggggctcgcagacatataaggc

SEQ ID NO: 5365690 - DNA, 25 bp, Homo sapien
taacatctatgtccggtatttcggc

SEQ ID NO: 5365691 - DNA, 25 bp, Homo sapien
gagaactgcctagaaaagctccaca

SEQ ID NO: 5365692 - DNA, 25 bp, Homo sapien
cccagaagtcatcccttgaaggaga

SEQ ID NO: 5365693 - DNA, 25 bp, Homo sapien
tatgtgccgtagcaactgctatagg

SEQ ID NO: 5365694 - DNA, 25 bp, Homo sapien
ggaaagacggctgagtgtgtgttgt

SEQ ID NO: 5365695 - DNA, 25 bp, Homo sapien
atttctgggaaagacggctgagtgt

SEQ ID NO: 5365696 - DNA, 25 bp, Homo sapien
tctgggaaagacggctgagtgtgtg

SEQ ID NO: 5365697 - DNA, 25 bp, Homo sapien
tgggaaagacggctgagtgtgtgtt

SEQ ID NO: 5365698 - DNA, 25 bp, Homo sapien
gctcctgctctaatacttctttctg

SEQ ID NO: 5365699 - DNA, 25 bp, Homo sapien
taggcaccctaatggttgctgcaag

SEQ ID NO: 5365700 - DNA, 25 bp, Homo sapien
ttctgggcctctaggcaccctaatg

SEQ ID NO: 5365701 - DNA, 25 bp, Homo sapien
gcagccagccggaaaggctccaggc

SEQ ID NO: 5365702 - DNA, 25 bp, Homo sapien
gatgcctcagccatgacgaatttct

SEQ ID NO: 5365703 - DNA, 25 bp, Homo sapien
gaggtctcagcgttctcaggaacag

SEQ ID NO: 5365704 - DNA, 25 bp, Homo sapien
taaatgcagaccactgaacactgtg

SEQ ID NO: 5365705 - DNA, 25 bp, Homo sapien
gaacagagaatctgcagatgcctca

SEQ ID NO: 5365706 - DNA, 25 bp, Homo sapien
gtcacccaagtaaatgtctctaagt

SEQ ID NO: 5365707 - DNA, 25 bp, Homo sapien
tccctttaatgtcaagtcacccaag

SEQ ID NO: 5365708 - DNA, 25 bp, Homo sapien
caaggtcctttctcctagcaacaga

SEQ ID NO: 5365709 - DNA, 25 bp, Homo sapien
cacaggataccacagaatacttcaa

SEQ ID NO: 5365710 - DNA, 25 bp, Homo sapien
agcaacatctgttatatgcataaaa

SEQ ID NO: 5365711 - DNA, 25 bp, Homo sapien
aaagaaataatcctatcacatactt

SEQ ID NO: 5365712 - DNA, 25 bp, Homo sapien
agaagcaacatctgttatatgcata

SEQ ID NO: 5365713 - DNA, 25 bp, Homo sapien
agaaataatcctatcacatacttac

SEQ ID NO: 5365714 - DNA, 25 bp, Homo sapien
gtggatgagccacgaggatgttact

SEQ ID NO: 5365715 - DNA, 25 bp, Homo sapien
gagccacgaggatgttactctaaga

SEQ ID NO: 5365716 - DNA, 25 bp, Homo sapien
gatgagccacgaggatgttactcta

SEQ ID NO: 5365717 - DNA, 25 bp, Homo sapien
tggatgagccacgaggatgttactc

SEQ ID NO: 5365718 - DNA, 25 bp, Homo sapien
cttaaagtgccataacacaaaaggt

SEQ ID NO: 5365719 - DNA, 25 bp, Homo sapien
caatgaccaccagctgtaaacagcc

SEQ ID NO: 5365720 - DNA, 25 bp, Homo sapien
aatagttctcaaatacttaagcaca

SEQ ID NO: 5365721 - DNA, 25 bp, Homo sapien
gacaaatacggtatcattctatttc

SEQ ID NO: 5365722 - DNA, 25 bp, Homo sapien
gggacggataatgttgacagacaac

SEQ ID NO: 5365723 - DNA, 25 bp, Homo sapien
tctgtgtgctgttctgtttccggaa

SEQ ID NO: 5365724 - DNA, 25 bp, Homo sapien
ctaccctcaaaagggacggataatg

SEQ ID NO: 5365725 - DNA, 25 bp, Homo sapien
ggaaatttcccatgactcaaaaatg

SEQ ID NO: 5365726 - DNA, 25 bp, Homo sapien
gatgcaagtagaccaggttctctgc

SEQ ID NO: 5365727 - DNA, 25 bp, Homo sapien
agtgggccctaaactagaaattctg

SEQ ID NO: 5365728 - DNA, 25 bp, Homo sapien
gcccttggatcttaacacatgcagt

SEQ ID NO: 5365729 - DNA, 25 bp, Homo sapien
tgaccaaatgatccaattggacggg

SEQ ID NO: 5365730 - DNA, 25 bp, Homo sapien
cccagcagcactctttgtttcaggg

SEQ ID NO: 5365731 - DNA, 25 bp, Homo sapien
gagccttcagtgcaagtccatgaca

SEQ ID NO: 5365732 - DNA, 25 bp, Homo sapien
gggaggtctatttgttcccagcagc

SEQ ID NO: 5365733 - DNA, 25 bp, Homo sapien
ggaggcctgcattaatgcaacctgc

SEQ ID NO: 5365734 - DNA, 25 bp, Homo sapien
tatagtatttatgcagagttccggc

SEQ ID NO: 5365735 - DNA, 25 bp, Homo sapien
tttccctctctagggtaagcatgca

SEQ ID NO: 5365736 - DNA, 25 bp, Homo sapien
tatacaagctatacaacgatccatg

SEQ ID NO: 5365737 - DNA, 25 bp, Homo sapien
gagttccggcctgcactgaggaaag

SEQ ID NO: 5365738 - DNA, 25 bp, Homo sapien
agctggccctgacccatgatcagtc

SEQ ID NO: 5365739 - DNA, 25 bp, Homo sapien
gaatgctgcgtctttgttggcaatg

SEQ ID NO: 5365740 - DNA, 25 bp, Homo sapien
ggcaatgtggactgtttccagcaga

SEQ ID NO: 5365741 - DNA, 25 bp, Homo sapien
gtgactcccaagcacactgtggctt

SEQ ID NO: 5365742 - DNA, 25 bp, Homo sapien
atctggtcctagagccaaccttcca

SEQ ID NO: 5365743 - DNA, 25 bp, Homo sapien
tgatgcatctggtcctagagccaac

SEQ ID NO: 5365744 - DNA, 25 bp, Homo sapien
gatgcatctggtcctagagccaacc

SEQ ID NO: 5365745 - DNA, 25 bp, Homo sapien
tgcatctggtcctagagccaacctt

SEQ ID NO: 5365746 - DNA, 25 bp, Homo sapien
ctgaggtcactaggggtttagttct

SEQ ID NO: 5365747 - DNA, 25 bp, Homo sapien
ccaataactgaggtcactaggggtt

SEQ ID NO: 5365748 - DNA, 25 bp, Homo sapien
ataactgaggtcactaggggtttag

SEQ ID NO: 5365749 - DNA, 25 bp, Homo sapien
caataactgaggtcactaggggttt

SEQ ID NO: 5365750 - DNA, 25 bp, Homo sapien
aaaagcattcagaatagacttcccg

SEQ ID NO: 5365751 - DNA, 25 bp, Homo sapien
gaccgttggagagtggaaggattac

SEQ ID NO: 5365752 - DNA, 25 bp, Homo sapien
aatctctcaagcacgattgcattgc

SEQ ID NO: 5365753 - DNA, 25 bp, Homo sapien
ttttcagggaccgttggagagtgga

SEQ ID NO: 5365754 - DNA, 25 bp, Homo sapien
tcaggagcagcggtagtgactgcag

SEQ ID NO: 5365755 - DNA, 25 bp, Homo sapien
gctctcaggagcagcggtagtgact

SEQ ID NO: 5365756 - DNA, 25 bp, Homo sapien
tctcaggagcagcggtagtgactgc

SEQ ID NO: 5365757 - DNA, 25 bp, Homo sapien
ctctcaggagcagcggtagtgactg

SEQ ID NO: 5365758 - DNA, 25 bp, Homo sapien
gccatggctttctgagttgccattc

SEQ ID NO: 5365759 - DNA, 25 bp, Homo sapien
agcccttgccacagcttgcctgagc

SEQ ID NO: 5365760 - DNA, 25 bp, Homo sapien
accttgttggtggagtccatggaaa

SEQ ID NO: 5365761 - DNA, 25 bp, Homo sapien
gaatagctgtagagcacagcccttg

SEQ ID NO: 5365762 - DNA, 25 bp, Homo sapien
cttgcacagtgtgggccaaacagga

SEQ ID NO: 5365763 - DNA, 25 bp, Homo sapien
aggctgagttgggagcaaatctgga

SEQ ID NO: 5365764 - DNA, 25 bp, Homo sapien
caaacaggaatagggtcaggggcca

SEQ ID NO: 5365765 - DNA, 25 bp, Homo sapien
tgagttgggagcaaatctggaatgt

SEQ ID NO: 5365766 - DNA, 25 bp, Homo sapien
cacaagggcatagtctagaggcgga

SEQ ID NO: 5365767 - DNA, 25 bp, Homo sapien
gcagctggcacaagggcatagtcta

SEQ ID NO: 5365768 - DNA, 25 bp, Homo sapien
atagtctagaggcggagccagagcc

SEQ ID NO: 5365769 - DNA, 25 bp, Homo sapien
tggcacaagggcatagtctagaggc

SEQ ID NO: 5365770 - DNA, 25 bp, Homo sapien
tcttttcccttcatttgaccatggc

SEQ ID NO: 5365771 - DNA, 25 bp, Homo sapien
atatgcaatttttctaacatgaatc

SEQ ID NO: 5365772 - DNA, 25 bp, Homo sapien
cccttcatttgaccatggcagtaat

SEQ ID NO: 5365773 - DNA, 25 bp, Homo sapien
ctaacatgaatcacttcttttccct

SEQ ID NO: 5365774 - DNA, 25 bp, Homo sapien
gtgaatgatggaaaggtgagtctgc

SEQ ID NO: 5365775 - DNA, 25 bp, Homo sapien
gatgagtgaatgatggaaaggtgag

SEQ ID NO: 5365776 - DNA, 25 bp, Homo sapien
gagtgaatgatggaaaggtgagtct

SEQ ID NO: 5365777 - DNA, 25 bp, Homo sapien
tgagtgaatgatggaaaggtgagtc

SEQ ID NO: 5365778 - DNA, 25 bp, Homo sapien
aactgccagtggacaaattcataaa

SEQ ID NO: 5365779 - DNA, 25 bp, Homo sapien
ctcaggaaactgccagtggacaaat

SEQ ID NO: 5365780 - DNA, 25 bp, Homo sapien
caggaaactgccagtggacaaattc

SEQ ID NO: 5365781 - DNA, 25 bp, Homo sapien
ggaaactgccagtggacaaattcat

SEQ ID NO: 5365782 - DNA, 25 bp, Homo sapien
ttccctggaacctgagtcgggaggc

SEQ ID NO: 5365783 - DNA, 25 bp, Homo sapien
caaagtcataaacaagagttccagt

SEQ ID NO: 5365784 - DNA, 25 bp, Homo sapien
ttctccctgtttgctggcccagaca

SEQ ID NO: 5365785 - DNA, 25 bp, Homo sapien
gagtcgggaggcctgcaactcactt

SEQ ID NO: 5365786 - DNA, 25 bp, Homo sapien
ctagcaacatttgaatctgccctca

SEQ ID NO: 5365787 - DNA, 25 bp, Homo sapien
cccggagcctctagcaacatttgaa

SEQ ID NO: 5365788 - DNA, 25 bp, Homo sapien
gagcctctagcaacatttgaatctg

SEQ ID NO: 5365789 - DNA, 25 bp, Homo sapien
gcctctagcaacatttgaatctgcc

SEQ ID NO: 5365790 - DNA, 25 bp, Homo sapien
gttacttagctccagccccaactag

SEQ ID NO: 5365791 - DNA, 25 bp, Homo sapien
gccccaactagaccaactcagtttg

SEQ ID NO: 5365792 - DNA, 25 bp, Homo sapien
tatacccccagcaagcaaaaccaat

SEQ ID NO: 5365793 - DNA, 25 bp, Homo sapien
caaaaccaatctctgtggtttagtt

SEQ ID NO: 5365794 - DNA, 25 bp, Homo sapien
cagcagtagggaccagatgcattaa

SEQ ID NO: 5365795 - DNA, 25 bp, Homo sapien
gagaaaacttttgcctgagtgctat

SEQ ID NO: 5365796 - DNA, 25 bp, Homo sapien
ggtggcaccgagcatttacttctaa

SEQ ID NO: 5365797 - DNA, 25 bp, Homo sapien
tagacatgccttgcaccgtaatgga

SEQ ID NO: 5365798 - DNA, 25 bp, Homo sapien
gaggattgatactgcccaaaccatg

SEQ ID NO: 5365799 - DNA, 25 bp, Homo sapien
cctcaaagctttgtgttccgtctgc

SEQ ID NO: 5365800 - DNA, 25 bp, Homo sapien
tctgcttttgagttatctgggccct

SEQ ID NO: 5365801 - DNA, 25 bp, Homo sapien
tgggagtagaaactttgctctcagc

SEQ ID NO: 5365802 - DNA, 25 bp, Homo sapien
ttcatggcaggtacaatgccgacac

SEQ ID NO: 5365803 - DNA, 25 bp, Homo sapien
catggcaggtacaatgccgacacat

SEQ ID NO: 5365804 - DNA, 25 bp, Homo sapien
tcatggcaggtacaatgccgacaca

SEQ ID NO: 5365805 - DNA, 25 bp, Homo sapien
cttcatggcaggtacaatgccgaca

SEQ ID NO: 5365806 - DNA, 25 bp, Homo sapien
cagccacttttctatgcaccacaaa

SEQ ID NO: 5365807 - DNA, 25 bp, Homo sapien
aatcaaggacctcagaagagaatct

SEQ ID NO: 5365808 - DNA, 25 bp, Homo sapien
gaaccctgtgattataccaggccca

SEQ ID NO: 5365809 - DNA, 25 bp, Homo sapien
taaaccagggtaattatctcaggac

SEQ ID NO: 5365810 - DNA, 25 bp, Homo sapien
cagttaattagtagcctgccaaaca

SEQ ID NO: 5365811 - DNA, 25 bp, Homo sapien
cgaaatagaatgctagccagactaa

SEQ ID NO: 5365812 - DNA, 25 bp, Homo sapien
cagcagaattctacctgaggtaaaa

SEQ ID NO: 5365813 - DNA, 25 bp, Homo sapien
ctaaatgcatcaataacaagttctt

SEQ ID NO: 5365814 - DNA, 25 bp, Homo sapien
gggagatcctgctatttttcgaaca

SEQ ID NO: 5365815 - DNA, 25 bp, Homo sapien
caattttagtgtgcgcaatcgccca

SEQ ID NO: 5365816 - DNA, 25 bp, Homo sapien
caagggattctgatctgtgggctcc

SEQ ID NO: 5365817 - DNA, 25 bp, Homo sapien
cgcccaccccgatatagaaagactt

SEQ ID NO: 5365818 - DNA, 25 bp, Homo sapien
cactgtcaaaactactcctaaagac

SEQ ID NO: 5365819 - DNA, 25 bp, Homo sapien
tcaaaactactcctaaagacaagat

SEQ ID NO: 5365820 - DNA, 25 bp, Homo sapien
tagcccaagctacttggtagctgag

SEQ ID NO: 5365821 - DNA, 25 bp, Homo sapien
cattatatttatacgtattcatggg

SEQ ID NO: 5365822 - DNA, 25 bp, Homo sapien
catccccgacttacatagatatgct

SEQ ID NO: 5365823 - DNA, 25 bp, Homo sapien
gccaccatccccgacttacatagat

SEQ ID NO: 5365824 - DNA, 25 bp, Homo sapien
caccatccccgacttacatagatat

SEQ ID NO: 5365825 - DNA, 25 bp, Homo sapien
aaaggtgtctattttgatagctgtg

SEQ ID NO: 5365826 - DNA, 25 bp, Homo sapien
tcttgcctattaggtctgggctaat

SEQ ID NO: 5365827 - DNA, 25 bp, Homo sapien
gttctacggtattcagaggcatttc

SEQ ID NO: 5365828 - DNA, 25 bp, Homo sapien
tgtcatactttagataggcagcacc

SEQ ID NO: 5365829 - DNA, 25 bp, Homo sapien
cagcacctaaggagagttattggaa

SEQ ID NO: 5365830 - DNA, 25 bp, Homo sapien
caggcagtcggtgaatccttggcaa

SEQ ID NO: 5365831 - DNA, 25 bp, Homo sapien
gaaagatgttgttaatgtcctacag

SEQ ID NO: 5365832 - DNA, 25 bp, Homo sapien
gaagagaaagatgttgttaatgtcc

SEQ ID NO: 5365833 - DNA, 25 bp, Homo sapien
ggcttttcagcgtgatgaaaaagta

SEQ ID NO: 5365834 - DNA, 25 bp, Homo sapien
aatgcccaactattctagaccctgg

SEQ ID NO: 5365835 - DNA, 25 bp, Homo sapien
tatgcttaacatgatggccagttca

SEQ ID NO: 5365836 - DNA, 25 bp, Homo sapien
tctggtctaacaagggaaaatctgt

SEQ ID NO: 5365837 - DNA, 25 bp, Homo sapien
gaatagggttttcagccaagtcttg

SEQ ID NO: 5365838 - DNA, 25 bp, Homo sapien
tgaaagctaaggcaagtgacatgga

SEQ ID NO: 5365839 - DNA, 25 bp, Homo sapien
tgagtactgagacctgaccactgcg

SEQ ID NO: 5365840 - DNA, 25 bp, Homo sapien
taccaagggagtatagccaaaagat

SEQ ID NO: 5365841 - DNA, 25 bp, Homo sapien
gcgttaagcaacatagaggtcagtg

SEQ ID NO: 5365842 - DNA, 25 bp, Homo sapien
actacaggaagagtgccgtgctgcc

SEQ ID NO: 5365843 - DNA, 25 bp, Homo sapien
tcattggtttactccagggctgtgc

SEQ ID NO: 5365844 - DNA, 25 bp, Homo sapien
gccaaggtgcgttcttcagggcagc

SEQ ID NO: 5365845 - DNA, 25 bp, Homo sapien
gaagcacaaaatccacgagcacctg

SEQ ID NO: 5365846 - DNA, 25 bp, Homo sapien
tagaaggaccctgttacagtagaaa

SEQ ID NO: 5365847 - DNA, 25 bp, Homo sapien
tctgaattcgagagctacaaagtcc

SEQ ID NO: 5365848 - DNA, 25 bp, Homo sapien
ggcagaacaagctactgtaacctct

SEQ ID NO: 5365849 - DNA, 25 bp, Homo sapien
taagtgtaaagccaacagaagtatg

SEQ ID NO: 5365850 - DNA, 25 bp, Homo sapien
tggttcccaaattgtaggcccactg

SEQ ID NO: 5365851 - DNA, 25 bp, Homo sapien
gattatttgaactagatgacagcca

SEQ ID NO: 5365852 - DNA, 25 bp, Homo sapien
tgaaagaagttcctagtctggacaa

SEQ ID NO: 5365853 - DNA, 25 bp, Homo sapien
ggcccactggttagtttcaggctga

SEQ ID NO: 5365854 - DNA, 25 bp, Homo sapien
tcacgcttccaagaaactgacagtt

SEQ ID NO: 5365855 - DNA, 25 bp, Homo sapien
gatggtacctaccagataaagggtg

SEQ ID NO: 5365856 - DNA, 25 bp, Homo sapien
gccctaggcttgaaccataaataag

SEQ ID NO: 5365857 - DNA, 25 bp, Homo sapien
taatccaatcagcttgacacctagt

SEQ ID NO: 5365858 - DNA, 25 bp, Homo sapien
aaattacctgtcaactgtgagcctg

SEQ ID NO: 5365859 - DNA, 25 bp, Homo sapien
tgagggaacatgatacgtgaccagt

SEQ ID NO: 5365860 - DNA, 25 bp, Homo sapien
gcagcagactccagaagccaatttg

SEQ ID NO: 5365861 - DNA, 25 bp, Homo sapien
taatgatacctaccccgcctgatag

SEQ ID NO: 5365862 - DNA, 25 bp, Homo sapien
tcataaatttatactctcttcatga

SEQ ID NO: 5365863 - DNA, 25 bp, Homo sapien
ataaatttatactctcttcatgatt

SEQ ID NO: 5365864 - DNA, 25 bp, Homo sapien
tttcataaatttatactctcttcat

SEQ ID NO: 5365865 - DNA, 25 bp, Homo sapien
cataaatttatactctcttcatgat

SEQ ID NO: 5365866 - DNA, 25 bp, Homo sapien
tataatctctcttgcgttgtcaccc

SEQ ID NO: 5365867 - DNA, 25 bp, Homo sapien
tcaactcatggacaatcttttggcg

SEQ ID NO: 5365868 - DNA, 25 bp, Homo sapien
gagagttagagacttaaatcccaca

SEQ ID NO: 5365869 - DNA, 25 bp, Homo sapien
tgacatttacaagcatacaaggaag

SEQ ID NO: 5365870 - DNA, 25 bp, Homo sapien
ggcagagaatgcatactcacactgt

SEQ ID NO: 5365871 - DNA, 25 bp, Homo sapien
gcaaatgcatcctatcttagcacag

SEQ ID NO: 5365872 - DNA, 25 bp, Homo sapien
aaggagatgaatagctgccaggaac

SEQ ID NO: 5365873 - DNA, 25 bp, Homo sapien
ccaggaacattgtttgcacaagggc

SEQ ID NO: 5365874 - DNA, 25 bp, Homo sapien
tttgcttatattgtagagtgattct

SEQ ID NO: 5365875 - DNA, 25 bp, Homo sapien
gaaagacaaataatgttcgagaaca

SEQ ID NO: 5365876 - DNA, 25 bp, Homo sapien
gacaaataatgttcgagaacagaca

SEQ ID NO: 5365877 - DNA, 25 bp, Homo sapien
tgtagagtgattctaaaatatagat

SEQ ID NO: 5365878 - DNA, 25 bp, Homo sapien
aaaatggttcacgtatattaccaca

SEQ ID NO: 5365879 - DNA, 25 bp, Homo sapien
tggttcacgtatattaccacaattc

SEQ ID NO: 5365880 - DNA, 25 bp, Homo sapien
ggttcacgtatattaccacaattct

SEQ ID NO: 5365881 - DNA, 25 bp, Homo sapien
aatggttcacgtatattaccacaat

SEQ ID NO: 5365882 - DNA, 25 bp, Homo sapien
gcaagccatgaatctgttttgagaa

SEQ ID NO: 5365883 - DNA, 25 bp, Homo sapien
caacagtgactatatcactcagcat

SEQ ID NO: 5365884 - DNA, 25 bp, Homo sapien
aggctcttgatagggtgtcactgca

SEQ ID NO: 5365885 - DNA, 25 bp, Homo sapien
catcagaagggattttagacacctt

SEQ ID NO: 5365886 - DNA, 25 bp, Homo sapien
gtagtgttacttgcctttgacacct

SEQ ID NO: 5365887 - DNA, 25 bp, Homo sapien
cttaggtggtagtgttacttgcctt

SEQ ID NO: 5365888 - DNA, 25 bp, Homo sapien
ggtggtagtgttacttgcctttgac

SEQ ID NO: 5365889 - DNA, 25 bp, Homo sapien
ggtagtgttacttgcctttgacacc

SEQ ID NO: 5365890 - DNA, 25 bp, Homo sapien
atgactagatccaaactgtgttgtt

SEQ ID NO: 5365891 - DNA, 25 bp, Homo sapien
ctctgaagttctcttaagccttcag

SEQ ID NO: 5365892 - DNA, 25 bp, Homo sapien
gaagttctcttaagccttcagttta

SEQ ID NO: 5365893 - DNA, 25 bp, Homo sapien
gatccaaactgtgttgttcttaaat

SEQ ID NO: 5365894 - DNA, 25 bp, Homo sapien
gccagctgcatacgatgtaactaat

SEQ ID NO: 5365895 - DNA, 25 bp, Homo sapien
ctgcaatgagaggaagtgtaatgat

SEQ ID NO: 5365896 - DNA, 25 bp, Homo sapien
tgtgaatatgagtatgccagctgca

SEQ ID NO: 5365897 - DNA, 25 bp, Homo sapien
gaaatatagtctctgcttacgaatg

SEQ ID NO: 5365898 - DNA, 25 bp, Homo sapien
ttatggctgctcttttatgttacac

SEQ ID NO: 5365899 - DNA, 25 bp, Homo sapien
atggctgctcttttatgttacacac

SEQ ID NO: 5365900 - DNA, 25 bp, Homo sapien
tatggctgctcttttatgttacaca

SEQ ID NO: 5365901 - DNA, 25 bp, Homo sapien
tttactactggccttacacgattgg

SEQ ID NO: 5365902 - DNA, 25 bp, Homo sapien
tactggccttacacgattggtccct

SEQ ID NO: 5365903 - DNA, 25 bp, Homo sapien
ggccttacacgattggtccctatta

SEQ ID NO: 5365904 - DNA, 25 bp, Homo sapien
ccttacacgattggtccctattagg

SEQ ID NO: 5365905 - DNA, 25 bp, Homo sapien
ccagctaaaactagaaacagcactg

SEQ ID NO: 5365906 - DNA, 25 bp, Homo sapien
aaactagaaacagcactgggcctcc

SEQ ID NO: 5365907 - DNA, 25 bp, Homo sapien
gctaaaactagaaacagcactgggc

SEQ ID NO: 5365908 - DNA, 25 bp, Homo sapien
taaaactagaaacagcactgggcct

SEQ ID NO: 5365909 - DNA, 25 bp, Homo sapien
atttctttggatgtttggactagga

SEQ ID NO: 5365910 - DNA, 25 bp, Homo sapien
tctcgatctcctggaggtaattaat

SEQ ID NO: 5365911 - DNA, 25 bp, Homo sapien
tttggatgtttggactaggatatgg

SEQ ID NO: 5365912 - DNA, 25 bp, Homo sapien
ctcctggaggtaattaatttctttg

SEQ ID NO: 5365913 - DNA, 25 bp, Homo sapien
ccagaccaagagaggcatctagtga

SEQ ID NO: 5365914 - DNA, 25 bp, Homo sapien
cctgcataggactggacacagcagc

SEQ ID NO: 5365915 - DNA, 25 bp, Homo sapien
gaagcagctcttcagccctgggcct

SEQ ID NO: 5365916 - DNA, 25 bp, Homo sapien
caagagaggcatctagtgagaagca

SEQ ID NO: 5365917 - DNA, 25 bp, Homo sapien
taagtacagaagctttggagtgccc

SEQ ID NO: 5365918 - DNA, 25 bp, Homo sapien
cagagttatgacctgagcctaggca

SEQ ID NO: 5365919 - DNA, 25 bp, Homo sapien
cacgaaaaggcatctagttgggacc

SEQ ID NO: 5365920 - DNA, 25 bp, Homo sapien
aattcatacagtccctgaggagtgg

SEQ ID NO: 5365921 - DNA, 25 bp, Homo sapien
cactgacgaataacttggggcatgt

SEQ ID NO: 5365922 - DNA, 25 bp, Homo sapien
tgacgaataacttggggcatgttct

SEQ ID NO: 5365923 - DNA, 25 bp, Homo sapien
gcctcactgacgaataacttggggc

SEQ ID NO: 5365924 - DNA, 25 bp, Homo sapien
cctcactgacgaataacttggggca

SEQ ID NO: 5365925 - DNA, 25 bp, Homo sapien
tctgttccttgttctgacctcagtg

SEQ ID NO: 5365926 - DNA, 25 bp, Homo sapien
ttcttctgttccttgttctgacctc

SEQ ID NO: 5365927 - DNA, 25 bp, Homo sapien
cttgttctgacctcagtgcatgacc

SEQ ID NO: 5365928 - DNA, 25 bp, Homo sapien
gttctgacctcagtgcatgacccat

SEQ ID NO: 5365929 - DNA, 25 bp, Homo sapien
ttcatgtgaggacatcaaatagatc

SEQ ID NO: 5365930 - DNA, 25 bp, Homo sapien
ctcgactggcaggagaccaaagttt

SEQ ID NO: 5365931 - DNA, 25 bp, Homo sapien
gatccagtgttttcctccgacatgc

SEQ ID NO: 5365932 - DNA, 25 bp, Homo sapien
caaagttttcattctattactagag

SEQ ID NO: 5365933 - DNA, 25 bp, Homo sapien
gggacggagcctgttacctaggctg

SEQ ID NO: 5365934 - DNA, 25 bp, Homo sapien
tgcccgacagagccttaccacagag

SEQ ID NO: 5365935 - DNA, 25 bp, Homo sapien
aggcacccagcggtgaccgatccag

SEQ ID NO: 5365936 - DNA, 25 bp, Homo sapien
cggaagcccggcctgcccgacagag

SEQ ID NO: 5365937 - DNA, 25 bp, Homo sapien
aggctccatgcggagctcaggcacc

SEQ ID NO: 5365938 - DNA, 25 bp, Homo sapien
gccgcgcagccacgcgagtggaatc

SEQ ID NO: 5365939 - DNA, 25 bp, Homo sapien
tggaatcagaggagcctcgaggcaa

SEQ ID NO: 5365940 - DNA, 25 bp, Homo sapien
ggacgaaggccgctgccagggccgc

SEQ ID NO: 5365941 - DNA, 25 bp, Homo sapien
gggcggaaccctgtgtagctcccac

SEQ ID NO: 5365942 - DNA, 25 bp, Homo sapien
gctccgtgggctcccaatgagcccc

SEQ ID NO: 5365943 - DNA, 25 bp, Homo sapien
gggctcccaatgagcccctacccca

SEQ ID NO: 5365944 - DNA, 25 bp, Homo sapien
cccagccacccgctgcgtttgcgcc

SEQ ID NO: 5365945 - DNA, 25 bp, Homo sapien
acccgctgcgtttgcgccagcctcc

SEQ ID NO: 5365946 - DNA, 25 bp, Homo sapien
gcatcttttttcacgttggagcacg

SEQ ID NO: 5365947 - DNA, 25 bp, Homo sapien
tggagcacgttttggagcttgatga

SEQ ID NO: 5365948 - DNA, 25 bp, Homo sapien
gagtcttcagtgacatttaacagtg

SEQ ID NO: 5365949 - DNA, 25 bp, Homo sapien
gtcttcagtgacatttaacagtggg

SEQ ID NO: 5365950 - DNA, 25 bp, Homo sapien
tttcaaatgaacataagatgatagt

SEQ ID NO: 5365951 - DNA, 25 bp, Homo sapien
tgaacataagatgatagtattaaga

SEQ ID NO: 5365952 - DNA, 25 bp, Homo sapien
aatctttcaaatgaacataagatga

SEQ ID NO: 5365953 - DNA, 25 bp, Homo sapien
atgaacataagatgatagtattaag

SEQ ID NO: 5365954 - DNA, 25 bp, Homo sapien
tgtatactgtgatggcctgattcac

SEQ ID NO: 5365955 - DNA, 25 bp, Homo sapien
acagagggagtggccgcatctcaga

SEQ ID NO: 5365956 - DNA, 25 bp, Homo sapien
gggaacgtggccatcctgggaggcg

SEQ ID NO: 5365957 - DNA, 25 bp, Homo sapien
tgggaggcggtggagaagagcggga

SEQ ID NO: 5365958 - DNA, 25 bp, Homo sapien
ttgtgagcagcgaccttgaggaaga

SEQ ID NO: 5365959 - DNA, 25 bp, Homo sapien
gagtggttgtgagcagcgaccttga

SEQ ID NO: 5365960 - DNA, 25 bp, Homo sapien
gaggtccgcagtgctgagagtggtt

SEQ ID NO: 5365961 - DNA, 25 bp, Homo sapien
cctggaggtccgcagtgctgagagt

SEQ ID NO: 5365962 - DNA, 25 bp, Homo sapien
tagccagttattttggcgtaagaaa

SEQ ID NO: 5365963 - DNA, 25 bp, Homo sapien
tgatcttttggccatgcttttagag

SEQ ID NO: 5365964 - DNA, 25 bp, Homo sapien
tttttctactgggtacagtgatctt

SEQ ID NO: 5365965 - DNA, 25 bp, Homo sapien
tgcttttagagtttcccacttggaa

SEQ ID NO: 5365966 - DNA, 25 bp, Homo sapien
ttctgcaaactccgagagctctgac

SEQ ID NO: 5365967 - DNA, 25 bp, Homo sapien
cttctgcaaactccgagagctctga

SEQ ID NO: 5365968 - DNA, 25 bp, Homo sapien
caccagccttcaattgggttagaga

SEQ ID NO: 5365969 - DNA, 25 bp, Homo sapien
gtctcatttgagcttgtgcactaca

SEQ ID NO: 5365970 - DNA, 25 bp, Homo sapien
ttgtccaaggtcatcattcccggta

SEQ ID NO: 5365971 - DNA, 25 bp, Homo sapien
aattggtaggcaggtattactatac

SEQ ID NO: 5365972 - DNA, 25 bp, Homo sapien
cagctaatacagactcacttccgtg

SEQ ID NO: 5365973 - DNA, 25 bp, Homo sapien
tgatgaacccggtaaggcctaggcc

SEQ ID NO: 5365974 - DNA, 25 bp, Homo sapien
taaggcctaggcctttcttgctgct

SEQ ID NO: 5365975 - DNA, 25 bp, Homo sapien
catttcgcagcgctttgcagatgct

SEQ ID NO: 5365976 - DNA, 25 bp, Homo sapien
taaccccaagatgactaaaccagct

SEQ ID NO: 5365977 - DNA, 25 bp, Homo sapien
aatgaagaaagttggctggccgaca

SEQ ID NO: 5365978 - DNA, 25 bp, Homo sapien
gctactgaatgcacccacagaaagg

SEQ ID NO: 5365979 - DNA, 25 bp, Homo sapien
gacccctgccctctaagttatggtg

SEQ ID NO: 5365980 - DNA, 25 bp, Homo sapien
aaaaaatcgaatgtagaggccctgc

SEQ ID NO: 5365981 - DNA, 25 bp, Homo sapien
tacatgtgactactggctaccaaag

SEQ ID NO: 5365982 - DNA, 25 bp, Homo sapien
gcaaggacattactgactgaagggc

SEQ ID NO: 5365983 - DNA, 25 bp, Homo sapien
ggagagcagtaaggtcataccgacc

SEQ ID NO: 5365984 - DNA, 25 bp, Homo sapien
tcaactgtgggactttcattctgtt

SEQ ID NO: 5365985 - DNA, 25 bp, Homo sapien
ggctctcaactgtgggactttcatt

SEQ ID NO: 5365986 - DNA, 25 bp, Homo sapien
tctcaactgtgggactttcattctg

SEQ ID NO: 5365987 - DNA, 25 bp, Homo sapien
gctctcaactgtgggactttcattc

SEQ ID NO: 5365988 - DNA, 25 bp, Homo sapien
tgctgtacagaagctgtatttgttg

SEQ ID NO: 5365989 - DNA, 25 bp, Homo sapien
ctgtacagaagctgtatttgttgtt

SEQ ID NO: 5365990 - DNA, 25 bp, Homo sapien
gctgtacagaagctgtatttgttgt

SEQ ID NO: 5365991 - DNA, 25 bp, Homo sapien
gattacatttgacagagttttagct

SEQ ID NO: 5365992 - DNA, 25 bp, Homo sapien
ggattacatttgacagagttttagc

SEQ ID NO: 5365993 - DNA, 25 bp, Homo sapien
agtactgctttccctatatctcata

SEQ ID NO: 5365994 - DNA, 25 bp, Homo sapien
gtactgctttccctatatctcatag

SEQ ID NO: 5365995 - DNA, 25 bp, Homo sapien
tgtcctggaagagcactagagagtt

SEQ ID NO: 5365996 - DNA, 25 bp, Homo sapien
ctagagagttgtctaagaccacccc

SEQ ID NO: 5365997 - DNA, 25 bp, Homo sapien
cattagttagcttccgttctttctg

SEQ ID NO: 5365998 - DNA, 25 bp, Homo sapien
tcaagatgggtttcttgtaactagc

SEQ ID NO: 5365999 - DNA, 25 bp, Homo sapien
gtgactggtttgatttgtgttttag

SEQ ID NO: 5366000 - DNA, 25 bp, Homo sapien
gagtgactggtttgatttgtgtttt

SEQ ID NO: 5366001 - DNA, 25 bp, Homo sapien
ttattagtctcacagagtgactggt

SEQ ID NO: 5366002 - DNA, 25 bp, Homo sapien
ttcttttattagtctcacagagtga

SEQ ID NO: 5366003 - DNA, 25 bp, Homo sapien
tgttctcagaggaaccgaaatcggt

SEQ ID NO: 5366004 - DNA, 25 bp, Homo sapien
catgaagcagtaggagcaagtggct

SEQ ID NO: 5366005 - DNA, 25 bp, Homo sapien
aacagtacccttggtttcagcgtag

SEQ ID NO: 5366006 - DNA, 25 bp, Homo sapien
tgaagaaaacctgttagaatctgcc

SEQ ID NO: 5366007 - DNA, 25 bp, Homo sapien
tgttcccggtttggaaggcccatgc

SEQ ID NO: 5366008 - DNA, 25 bp, Homo sapien
ttggctgatgacagactctccgcat

SEQ ID NO: 5366009 - DNA, 25 bp, Homo sapien
catccgctttaaacctgtgttcccg

SEQ ID NO: 5366010 - DNA, 25 bp, Homo sapien
gtctcatccccttgacaggtcctca

SEQ ID NO: 5366011 - DNA, 25 bp, Homo sapien
gggagagaggaaggttgagcacagg

SEQ ID NO: 5366012 - DNA, 25 bp, Homo sapien
agagaggaaggttgagcacaggagc

SEQ ID NO: 5366013 - DNA, 25 bp, Homo sapien
tccgtgacagagaatggagagctct

SEQ ID NO: 5366014 - DNA, 25 bp, Homo sapien
tcattccgtgacagagaatggagag

SEQ ID NO: 5366015 - DNA, 25 bp, Homo sapien
tgtctgggtagggacgcagctcacc

SEQ ID NO: 5366016 - DNA, 25 bp, Homo sapien
tataaagattcaacagaggctgggc

SEQ ID NO: 5366017 - DNA, 25 bp, Homo sapien
tacgccaaaggcaacgagctagact

SEQ ID NO: 5366018 - DNA, 25 bp, Homo sapien
tctttcttgaggaaagttacgccaa

SEQ ID NO: 5366019 - DNA, 25 bp, Homo sapien
cagtctcgtgtctttccatgatggg

SEQ ID NO: 5366020 - DNA, 25 bp, Homo sapien
ttcctgtgtgatgggagtgtctcca

SEQ ID NO: 5366021 - DNA, 25 bp, Homo sapien
cttgttgcagggagtaagagcgtca

SEQ ID NO: 5366022 - DNA, 25 bp, Homo sapien
cattatcatagggacaggatggctt

SEQ ID NO: 5366023 - DNA, 25 bp, Homo sapien
ggtggtgagccatgactcaattcag

SEQ ID NO: 5366024 - DNA, 25 bp, Homo sapien
tctacctcggcaccatggaggcctg

SEQ ID NO: 5366025 - DNA, 25 bp, Homo sapien
taggaaatccctaggtgctgcggca

SEQ ID NO: 5366026 - DNA, 25 bp, Homo sapien
caggagaggccaatgtaccacagca

SEQ ID NO: 5366027 - DNA, 25 bp, Homo sapien
cctcctgtatacttttcattatctc

SEQ ID NO: 5366028 - DNA, 25 bp, Homo sapien
tctagattacttaaacaatagctaa

SEQ ID NO: 5366029 - DNA, 25 bp, Homo sapien
ataaaatggtatacttacttgcata

SEQ ID NO: 5366030 - DNA, 25 bp, Homo sapien
ggtatacttacttgcatataaccta

SEQ ID NO: 5366031 - DNA, 25 bp, Homo sapien
atccttggttgatcgaatccaagga

SEQ ID NO: 5366032 - DNA, 25 bp, Homo sapien
ataataattacacacatggggcaca

SEQ ID NO: 5366033 - DNA, 25 bp, Homo sapien
tttttatccttggttgatcgaatcc

SEQ ID NO: 5366034 - DNA, 25 bp, Homo sapien
cataataattacacacatggggcac

SEQ ID NO: 5366035 - DNA, 25 bp, Homo sapien
tgctttatcatttcccaagctcagt

SEQ ID NO: 5366036 - DNA, 25 bp, Homo sapien
acaaagaatacctgtatgtctttca

SEQ ID NO: 5366037 - DNA, 25 bp, Homo sapien
ttcagactcagaagctaactataaa

SEQ ID NO: 5366038 - DNA, 25 bp, Homo sapien
atcttctcagaaccttgcccctgga

SEQ ID NO: 5366039 - DNA, 25 bp, Homo sapien
tctgtgcttagatgaggttatacac

SEQ ID NO: 5366040 - DNA, 25 bp, Homo sapien
gccctggtgatctcccaggcatggt

SEQ ID NO: 5366041 - DNA, 25 bp, Homo sapien
tgtggcctcatacagtggcagggca

SEQ ID NO: 5366042 - DNA, 25 bp, Homo sapien
tgtactgtggtaattaggctgggct

SEQ ID NO: 5366043 - DNA, 25 bp, Homo sapien
cgctaacacacttctgccagagact

SEQ ID NO: 5366044 - DNA, 25 bp, Homo sapien
agcagctgtgtttgctaagactcgc

SEQ ID NO: 5366045 - DNA, 25 bp, Homo sapien
taggctgggctgattgattggaaca

SEQ ID NO: 5366046 - DNA, 25 bp, Homo sapien
acatatcaggcatacccaggcatct

SEQ ID NO: 5366047 - DNA, 25 bp, Homo sapien
gaccagcaatgacaaccttgggagt

SEQ ID NO: 5366048 - DNA, 25 bp, Homo sapien
catggcctgaactcgactgcttgtg

SEQ ID NO: 5366049 - DNA, 25 bp, Homo sapien
tatgaattagtggacaggcacggtg

SEQ ID NO: 5366050 - DNA, 25 bp, Homo sapien
ctagaaattcaacttgctaagcctg

SEQ ID NO: 5366051 - DNA, 25 bp, Homo sapien
ctgataagtagtatcattggagccc

SEQ ID NO: 5366052 - DNA, 25 bp, Homo sapien
cattggagcccttaggtataggaga

SEQ ID NO: 5366053 - DNA, 25 bp, Homo sapien
gctaagcctgtaatacttaagggta

SEQ ID NO: 5366054 - DNA, 25 bp, Homo sapien
tttggggtgactctgccaccagggc

SEQ ID NO: 5366055 - DNA, 25 bp, Homo sapien
tggggtgactctgccaccagggcac

SEQ ID NO: 5366056 - DNA, 25 bp, Homo sapien
cattatcgtattgtcatgaaaatca

SEQ ID NO: 5366057 - DNA, 25 bp, Homo sapien
gctaatacagcattatcgtattgtc

SEQ ID NO: 5366058 - DNA, 25 bp, Homo sapien
cacttgcccagaggaccacgactag

SEQ ID NO: 5366059 - DNA, 25 bp, Homo sapien
tgcccagaggaccacgactagggat

SEQ ID NO: 5366060 - DNA, 25 bp, Homo sapien
cccagaggaccacgactagggatgt

SEQ ID NO: 5366061 - DNA, 25 bp, Homo sapien
ttgcccagaggaccacgactaggga

SEQ ID NO: 5366062 - DNA, 25 bp, Homo sapien
tccaaaggcacttcgcatacgcgga

SEQ ID NO: 5366063 - DNA, 25 bp, Homo sapien
tcttctgtccgccagggaactggaa

SEQ ID NO: 5366064 - DNA, 25 bp, Homo sapien
ggcacttcgcatacgcggagcctgt

SEQ ID NO: 5366065 - DNA, 25 bp, Homo sapien
ccctatgcagggcttcaatcgcctg

SEQ ID NO: 5366066 - DNA, 25 bp, Homo sapien
gagaatgatggtatcagggacacct

SEQ ID NO: 5366067 - DNA, 25 bp, Homo sapien
gacacctcggcagaactgaggcttt

SEQ ID NO: 5366068 - DNA, 25 bp, Homo sapien
agaatgatggtatcagggacacctc

SEQ ID NO: 5366069 - DNA, 25 bp, Homo sapien
gaatgatggtatcagggacacctcg

SEQ ID NO: 5366070 - DNA, 25 bp, Homo sapien
ggcgataccaggatcttcagcggcg

SEQ ID NO: 5366071 - DNA, 25 bp, Homo sapien
cgataccaggatcttcagcggcgcg

SEQ ID NO: 5366072 - DNA, 25 bp, Homo sapien
gcgataccaggatcttcagcggcgc

SEQ ID NO: 5366073 - DNA, 25 bp, Homo sapien
ttgtggtttcacctatcacctgaga

SEQ ID NO: 5366074 - DNA, 25 bp, Homo sapien
tagctatggctattgttatcaacac

SEQ ID NO: 5366075 - DNA, 25 bp, Homo sapien
caacacacttttcaaggcaaacttg

SEQ ID NO: 5366076 - DNA, 25 bp, Homo sapien
cacagcaagtacttgttagctatgg

SEQ ID NO: 5366077 - DNA, 25 bp, Homo sapien
gctgtggacactggcggccgaaatc

SEQ ID NO: 5366078 - DNA, 25 bp, Homo sapien
gcttaagagcccatcacgcaaattg

SEQ ID NO: 5366079 - DNA, 25 bp, Homo sapien
tgttatctgctggaaatctacgccc

SEQ ID NO: 5366080 - DNA, 25 bp, Homo sapien
ccgaaatctgatcccggcttgccaa

SEQ ID NO: 5366081 - DNA, 25 bp, Homo sapien
ttggcggcgcgatgaggcgcagcaa

SEQ ID NO: 5366082 - DNA, 25 bp, Homo sapien
tcgggagccaggttggcggcgcgat

SEQ ID NO: 5366083 - DNA, 25 bp, Homo sapien
tacatcgcctcggtgcagggctcca

SEQ ID NO: 5366084 - DNA, 25 bp, Homo sapien
caaggctgacgtggagcggtacatc

SEQ ID NO: 5366085 - DNA, 25 bp, Homo sapien
tcgagtgacaaggtaggcatctcag

SEQ ID NO: 5366086 - DNA, 25 bp, Homo sapien
tctcagcgcggacatttgcaatggc

SEQ ID NO: 5366087 - DNA, 25 bp, Homo sapien
ttgcaatggcccgacggcgcaaatg

SEQ ID NO: 5366088 - DNA, 25 bp, Homo sapien
ggtaggcatctcagcgcggacattt

SEQ ID NO: 5366089 - DNA, 25 bp, Homo sapien
gaaatccatgagatttataactgtc

SEQ ID NO: 5366090 - DNA, 25 bp, Homo sapien
atttaaggcttgctaaggtaaacag

SEQ ID NO: 5366091 - DNA, 25 bp, Homo sapien
tgagagtattactgttgagaaggct

SEQ ID NO: 5366092 - DNA, 25 bp, Homo sapien
tataactgtcatgcaaagtaattcc

SEQ ID NO: 5366093 - DNA, 25 bp, Homo sapien
caagctctgtttccagggttcacgc

SEQ ID NO: 5366094 - DNA, 25 bp, Homo sapien
acaggtgcccgccaccacacccagc

SEQ ID NO: 5366095 - DNA, 25 bp, Homo sapien
aagctctgtttccagggttcacgcc

SEQ ID NO: 5366096 - DNA, 25 bp, Homo sapien
ccgcgcccagcccacacctggctaa

SEQ ID NO: 5366097 - DNA, 25 bp, Homo sapien
ccttccatgtagctggaattaatag

SEQ ID NO: 5366098 - DNA, 25 bp, Homo sapien
caggttcaaactatccttgtgcctc

SEQ ID NO: 5366099 - DNA, 25 bp, Homo sapien
ccaggttcaaactatccttgtgcct

SEQ ID NO: 5366100 - DNA, 25 bp, Homo sapien
tccatgtagctggaattaataggtg

SEQ ID NO: 5366101 - DNA, 25 bp, Homo sapien
gtttgtccctgttctcctatggcca

SEQ ID NO: 5366102 - DNA, 25 bp, Homo sapien
gatcagagaataagagtttgtccct

SEQ ID NO: 5366103 - DNA, 25 bp, Homo sapien
gtgtatcagatcagagaataagagt

SEQ ID NO: 5366104 - DNA, 25 bp, Homo sapien
ccagaccttttcatctgaaatgcaa

SEQ ID NO: 5366105 - DNA, 25 bp, Homo sapien
tcatttgccccatgaaacctcaagg

SEQ ID NO: 5366106 - DNA, 25 bp, Homo sapien
cttacttggcttggcttacagtgga

SEQ ID NO: 5366107 - DNA, 25 bp, Homo sapien
tacctggaatccgaaaatggctaaa

SEQ ID NO: 5366108 - DNA, 25 bp, Homo sapien
ggagtagtatataccagccacttac

SEQ ID NO: 5366109 - DNA, 25 bp, Homo sapien
tcaaaaacgaggtcaatggcaaact

SEQ ID NO: 5366110 - DNA, 25 bp, Homo sapien
gctgatgcgaagagaacaagtacta

SEQ ID NO: 5366111 - DNA, 25 bp, Homo sapien
tgctgaggtaagtcagtggaaagaa

SEQ ID NO: 5366112 - DNA, 25 bp, Homo sapien
caagtactaaaagtgtgtgctaatc

SEQ ID NO: 5366113 - DNA, 25 bp, Homo sapien
cttctgttagacataccacttcaaa

SEQ ID NO: 5366114 - DNA, 25 bp, Homo sapien
cttcaaactccccataaacttgtag

SEQ ID NO: 5366115 - DNA, 25 bp, Homo sapien
caaactccccataaacttgtagata

SEQ ID NO: 5366116 - DNA, 25 bp, Homo sapien
tgttagacataccacttcaaactcc

SEQ ID NO: 5366117 - DNA, 25 bp, Homo sapien
gcagcagcttatagagaatttcatc

SEQ ID NO: 5366118 - DNA, 25 bp, Homo sapien
tatagatgggatcgggatgtcagtc

SEQ ID NO: 5366119 - DNA, 25 bp, Homo sapien
gaaacctctctgtcctataaagaaa

SEQ ID NO: 5366120 - DNA, 25 bp, Homo sapien
tcctagccctaagatatataaccag

SEQ ID NO: 5366121 - DNA, 25 bp, Homo sapien
tcaaactatactcaggaaagctggg

SEQ ID NO: 5366122 - DNA, 25 bp, Homo sapien
ggtttactatccatggccaatcaag

SEQ ID NO: 5366123 - DNA, 25 bp, Homo sapien
tcaccaaacatgatggaacaggcgg

SEQ ID NO: 5366124 - DNA, 25 bp, Homo sapien
tgatgtgaaacatactggtcctggt

SEQ ID NO: 5366125 - DNA, 25 bp, Homo sapien
gggtctgtttgtcgaagaataacta

SEQ ID NO: 5366126 - DNA, 25 bp, Homo sapien
tgaatcatttggttctcccaaaggg

SEQ ID NO: 5366127 - DNA, 25 bp, Homo sapien
tataattgaccttgcatggtgtgaa

SEQ ID NO: 5366128 - DNA, 25 bp, Homo sapien
taaggatggcatggatactgtgaaa

SEQ ID NO: 5366129 - DNA, 25 bp, Homo sapien
tcatgtttaagaaaactttgccaaa

SEQ ID NO: 5366130 - DNA, 25 bp, Homo sapien
tttctccattcagtagttgtctgtt

SEQ ID NO: 5366131 - DNA, 25 bp, Homo sapien
tcaagatggatgtaccttatccaat

SEQ ID NO: 5366132 - DNA, 25 bp, Homo sapien
ttctggatagtatcctttgaagcat

SEQ ID NO: 5366133 - DNA, 25 bp, Homo sapien
tcccaagtgatgctctttctgtagt

SEQ ID NO: 5366134 - DNA, 25 bp, Homo sapien
gacagacacctagtagttgaaggag

SEQ ID NO: 5366135 - DNA, 25 bp, Homo sapien
ttgaaggaggagacacgagctgcct

SEQ ID NO: 5366136 - DNA, 25 bp, Homo sapien
ccactggtataggtaaattatatcc

SEQ ID NO: 5366137 - DNA, 25 bp, Homo sapien
ggttagatactagtgcatatacagt

SEQ ID NO: 5366138 - DNA, 25 bp, Homo sapien
gacatacttgagttgttctgtttaa

SEQ ID NO: 5366139 - DNA, 25 bp, Homo sapien
aaaactttggactatactccaggca

SEQ ID NO: 5366140 - DNA, 25 bp, Homo sapien
aatcctaggaaatattacaaggaca

SEQ ID NO: 5366141 - DNA, 25 bp, Homo sapien
aaaaataatcgtcctgttaccagag

SEQ ID NO: 5366142 - DNA, 25 bp, Homo sapien
cttgggacttaggacaggatactga

SEQ ID NO: 5366143 - DNA, 25 bp, Homo sapien
ccaaagatgagtaaagtggccacag

SEQ ID NO: 5366144 - DNA, 25 bp, Homo sapien
ccacaggtctgggtgaagtaaaggt

SEQ ID NO: 5366145 - DNA, 25 bp, Homo sapien
gggtcaagtgatttcaggccaagaa

SEQ ID NO: 5366146 - DNA, 25 bp, Homo sapien
aaaattgtctcattccccagtgcat

SEQ ID NO: 5366147 - DNA, 25 bp, Homo sapien
tgtctcattccccagtgcattcaga

SEQ ID NO: 5366148 - DNA, 25 bp, Homo sapien
agaggaaccacgctgggtctgtaag

SEQ ID NO: 5366149 - DNA, 25 bp, Homo sapien
ttttctctttcgaaagccgggcagc

SEQ ID NO: 5366150 - DNA, 25 bp, Homo sapien
caccctcgttgaaacacctctgctc

SEQ ID NO: 5366151 - DNA, 25 bp, Homo sapien
aagccacacaccctcgttgaaacac

SEQ ID NO: 5366152 - DNA, 25 bp, Homo sapien
tcaggaattgaaggcgggtctgcca

SEQ ID NO: 5366153 - DNA, 25 bp, Homo sapien
caagctgttatcctggaatggcaca

SEQ ID NO: 5366154 - DNA, 25 bp, Homo sapien
gcagtgaactctaacccctggtgtg

SEQ ID NO: 5366155 - DNA, 25 bp, Homo sapien
tatgcgtggctgaactcttaggaag

SEQ ID NO: 5366156 - DNA, 25 bp, Homo sapien
ttcccaggccaaagagtaatgcagt

SEQ ID NO: 5366157 - DNA, 25 bp, Homo sapien
aaagccttgattcttggcagtcttt

SEQ ID NO: 5366158 - DNA, 25 bp, Homo sapien
tgattcttggcagtcttttggcacc

SEQ ID NO: 5366159 - DNA, 25 bp, Homo sapien
tccagagccctcgttggctccttgg

SEQ ID NO: 5366160 - DNA, 25 bp, Homo sapien
catatcacaaaagccttgattcttg

SEQ ID NO: 5366161 - DNA, 25 bp, Homo sapien
tgggaggacagcccacaggcatgct

SEQ ID NO: 5366162 - DNA, 25 bp, Homo sapien
ctgggaggacagcccacaggcatgc

SEQ ID NO: 5366163 - DNA, 25 bp, Homo sapien
ggaggacagcccacaggcatgcttt

SEQ ID NO: 5366164 - DNA, 25 bp, Homo sapien
gggaggacagcccacaggcatgctt

SEQ ID NO: 5366165 - DNA, 25 bp, Homo sapien
tcaggatgcagcatgtggctgggag

SEQ ID NO: 5366166 - DNA, 25 bp, Homo sapien
aggcaggtggcacaacccccgccca

SEQ ID NO: 5366167 - DNA, 25 bp, Homo sapien
ggaggcaggtggcacaacccccgcc

SEQ ID NO: 5366168 - DNA, 25 bp, Homo sapien
gctgggaggcaggtggcacaacccc

SEQ ID NO: 5366169 - DNA, 25 bp, Homo sapien
cctgccgtgctgatgcggtcaaaga

SEQ ID NO: 5366170 - DNA, 25 bp, Homo sapien
cagagttgtacgtggagctgagcat

SEQ ID NO: 5366171 - DNA, 25 bp, Homo sapien
gaggtggcgccacgttttcacaaca

SEQ ID NO: 5366172 - DNA, 25 bp, Homo sapien
tcaaagagttgcatgccgtctgtca

SEQ ID NO: 5366173 - DNA, 25 bp, Homo sapien
tagtcttctcgaggcaatcaaatgg

SEQ ID NO: 5366174 - DNA, 25 bp, Homo sapien
aggcaatcaaatggcagctccgtgg

SEQ ID NO: 5366175 - DNA, 25 bp, Homo sapien
ttctcgaggcaatcaaatggcagct

SEQ ID NO: 5366176 - DNA, 25 bp, Homo sapien
tcggctagtcttctcgaggcaatca

SEQ ID NO: 5366177 - DNA, 25 bp, Homo sapien
gaggtctgaggctccgtggctgctg

SEQ ID NO: 5366178 - DNA, 25 bp, Homo sapien
ctaagtctaggataaatgactgatc

SEQ ID NO: 5366179 - DNA, 25 bp, Homo sapien
ggataaatgactgatcacgtttccc

SEQ ID NO: 5366180 - DNA, 25 bp, Homo sapien
gagagggcagctaagtctaggataa

SEQ ID NO: 5366181 - DNA, 25 bp, Homo sapien
acacctgaaatagtttccagcggcc

SEQ ID NO: 5366182 - DNA, 25 bp, Homo sapien
cggccattctgaccaaagtgcggca

SEQ ID NO: 5366183 - DNA, 25 bp, Homo sapien
tgcgtttccctacagtgggtgcctg

SEQ ID NO: 5366184 - DNA, 25 bp, Homo sapien
tgggagatgccttccgatatctggg

SEQ ID NO: 5366185 - DNA, 25 bp, Homo sapien
cgttggcatacacatcgaggatctt

SEQ ID NO: 5366186 - DNA, 25 bp, Homo sapien
tccacacacgttggcatacacatcg

SEQ ID NO: 5366187 - DNA, 25 bp, Homo sapien
cacatcgaggatctttttcctccgg

SEQ ID NO: 5366188 - DNA, 25 bp, Homo sapien
cacacgttggcatacacatcgagga

SEQ ID NO: 5366189 - DNA, 25 bp, Homo sapien
ctgtgaaaaagagtcgagaattttc

SEQ ID NO: 5366190 - DNA, 25 bp, Homo sapien
aaaagagtcgagaattttcatctcc

SEQ ID NO: 5366191 - DNA, 25 bp, Homo sapien
tccagaaaggggcaacagtagaaag

SEQ ID NO: 5366192 - DNA, 25 bp, Homo sapien
caacagtagaaaggaggcaaatcct

SEQ ID NO: 5366193 - DNA, 25 bp, Homo sapien
tggcatcctatcaggaccaggctgg

SEQ ID NO: 5366194 - DNA, 25 bp, Homo sapien
tagcaacacagctgtcctgcggctg

SEQ ID NO: 5366195 - DNA, 25 bp, Homo sapien
caactgggcatttttgccatcagtg

SEQ ID NO: 5366196 - DNA, 25 bp, Homo sapien
aagtggcagccccattacagaggtc

SEQ ID NO: 5366197 - DNA, 25 bp, Homo sapien
cccggctgacttgttgctggtggca

SEQ ID NO: 5366198 - DNA, 25 bp, Homo sapien
cctggccaggtgaaccagcgacagc

SEQ ID NO: 5366199 - DNA, 25 bp, Homo sapien
tgtcgacgctccggctcagcagctg

SEQ ID NO: 5366200 - DNA, 25 bp, Homo sapien
cattctcggatgaggcatcgttctc

SEQ ID NO: 5366201 - DNA, 25 bp, Homo sapien
gacatgagacgagacatacaccggt

SEQ ID NO: 5366202 - DNA, 25 bp, Homo sapien
caagagcgatggtcattagcagtgc

SEQ ID NO: 5366203 - DNA, 25 bp, Homo sapien
tgccactgcgtgtgggaggcatcca

SEQ ID NO: 5366204 - DNA, 25 bp, Homo sapien
caaacaagtccgtggtgggtgacct

SEQ ID NO: 5366205 - DNA, 25 bp, Homo sapien
ggtgagctgggtgggcggtcggacc

SEQ ID NO: 5366206 - DNA, 25 bp, Homo sapien
tgggcggtcggacccaccaagccca

SEQ ID NO: 5366207 - DNA, 25 bp, Homo sapien
ggtggcacagcaagccccagcgggt

SEQ ID NO: 5366208 - DNA, 25 bp, Homo sapien
acagcaagccccagcgggtgagctg

SEQ ID NO: 5366209 - DNA, 25 bp, Homo sapien
gtggagcaggtgaggtggcacccca

SEQ ID NO: 5366210 - DNA, 25 bp, Homo sapien
atccctgtccccactcgagagaagg

SEQ ID NO: 5366211 - DNA, 25 bp, Homo sapien
cctgtccccactcgagagaaggtga

SEQ ID NO: 5366212 - DNA, 25 bp, Homo sapien
gtccccactcgagagaaggtgaggt

SEQ ID NO: 5366213 - DNA, 25 bp, Homo sapien
cacaggaccccagcttcagcttggt

SEQ ID NO: 5366214 - DNA, 25 bp, Homo sapien
caggaccccagcttcagcttggtgc

SEQ ID NO: 5366215 - DNA, 25 bp, Homo sapien
gaccccagcttcagcttggtgctgg

SEQ ID NO: 5366216 - DNA, 25 bp, Homo sapien
ggaccccagcttcagcttggtgctg

SEQ ID NO: 5366217 - DNA, 25 bp, Homo sapien
tcatccttctcggagaacatcacca

SEQ ID NO: 5366218 - DNA, 25 bp, Homo sapien
ttctcggagaacatcaccacgttgt

SEQ ID NO: 5366219 - DNA, 25 bp, Homo sapien
tctcaaattcatccttctcggagaa

SEQ ID NO: 5366220 - DNA, 25 bp, Homo sapien
tcaaattcatccttctcggagaaca

SEQ ID NO: 5366221 - DNA, 25 bp, Homo sapien
tctcctcgtccttgctcacttgggc

SEQ ID NO: 5366222 - DNA, 25 bp, Homo sapien
ctcacttgggcctccacgctcttcc

SEQ ID NO: 5366223 - DNA, 25 bp, Homo sapien
gctcacttgggcctccacgctcttc

SEQ ID NO: 5366224 - DNA, 25 bp, Homo sapien
ttctcctcgtccttgctcacttggg

SEQ ID NO: 5366225 - DNA, 25 bp, Homo sapien
cttcaggatgtagaacatgatgatg

SEQ ID NO: 5366226 - DNA, 25 bp, Homo sapien
ttcaggatgtagaacatgatgatga

SEQ ID NO: 5366227 - DNA, 25 bp, Homo sapien
atggtggacattgcaatgatcaggg

SEQ ID NO: 5366228 - DNA, 25 bp, Homo sapien
agatggtggacattgcaatgatcag

SEQ ID NO: 5366229 - DNA, 25 bp, Homo sapien
gggtcacctgattgttcctagggag

SEQ ID NO: 5366230 - DNA, 25 bp, Homo sapien
gagaaccaaatcctccgcgctggtt

SEQ ID NO: 5366231 - DNA, 25 bp, Homo sapien
cgctggttttggctgccagaccagg

SEQ ID NO: 5366232 - DNA, 25 bp, Homo sapien
tgctcttgcttctactgctttggca

SEQ ID NO: 5366233 - DNA, 25 bp, Homo sapien
agcggtcccaggacacccatagagg

SEQ ID NO: 5366234 - DNA, 25 bp, Homo sapien
cagcggtcccaggacacccatagag

SEQ ID NO: 5366235 - DNA, 25 bp, Homo sapien
ctctgattgcagatataatgacttc

SEQ ID NO: 5366236 - DNA, 25 bp, Homo sapien
tagagggatcaactctgattgcaga

SEQ ID NO: 5366237 - DNA, 25 bp, Homo sapien
ccagggaagttggcagaagctcctg

SEQ ID NO: 5366238 - DNA, 25 bp, Homo sapien
gccagggaagttggcagaagctcct

SEQ ID NO: 5366239 - DNA, 25 bp, Homo sapien
tccagtgtgataaggaggcttcaga

SEQ ID NO: 5366240 - DNA, 25 bp, Homo sapien
gagattgaaaagaagctgatctatc

SEQ ID NO: 5366241 - DNA, 25 bp, Homo sapien
tgatctatctgttcagtaaggcgct

SEQ ID NO: 5366242 - DNA, 25 bp, Homo sapien
cttcatcaggtgagtgagcataggg

SEQ ID NO: 5366243 - DNA, 25 bp, Homo sapien
cagcctctcgtgtcaggactgaagc

SEQ ID NO: 5366244 - DNA, 25 bp, Homo sapien
ctgaaagccagcacccaatcagcca

SEQ ID NO: 5366245 - DNA, 25 bp, Homo sapien
agagctcagcctctcgtgtcaggac

SEQ ID NO: 5366246 - DNA, 25 bp, Homo sapien
cctctcgtgtcaggactgaagctga

SEQ ID NO: 5366247 - DNA, 25 bp, Homo sapien
catataacccacaagaacaggtgag

SEQ ID NO: 5366248 - DNA, 25 bp, Homo sapien
agcagatccggtcccaaagtgccaa

SEQ ID NO: 5366249 - DNA, 25 bp, Homo sapien
agtgccaaccttgggcagcaatggg

SEQ ID NO: 5366250 - DNA, 25 bp, Homo sapien
tgccactgtcactacacatataacc

SEQ ID NO: 5366251 - DNA, 25 bp, Homo sapien
aaatatacagtgtctggaggtttca

SEQ ID NO: 5366252 - DNA, 25 bp, Homo sapien
caaatatacagtgtctggaggtttc

SEQ ID NO: 5366253 - DNA, 25 bp, Homo sapien
aatatacagtgtctggaggtttcac

SEQ ID NO: 5366254 - DNA, 25 bp, Homo sapien
tgctgtgtgtttcggttcatctgcc

SEQ ID NO: 5366255 - DNA, 25 bp, Homo sapien
gcttgttaagtgcaaggtgctccag

SEQ ID NO: 5366256 - DNA, 25 bp, Homo sapien
tgggtggccaactgcgggtccatct

SEQ ID NO: 5366257 - DNA, 25 bp, Homo sapien
tgagtttcgaataagcaaggctggg

SEQ ID NO: 5366258 - DNA, 25 bp, Homo sapien
ggaaaccacgggagtacgcagagta

SEQ ID NO: 5366259 - DNA, 25 bp, Homo sapien
cagtgcttgctgtttagtgtcacgg

SEQ ID NO: 5366260 - DNA, 25 bp, Homo sapien
tcacggaagagcatccgggcacaag

SEQ ID NO: 5366261 - DNA, 25 bp, Homo sapien
tccgggcacaagagacggaaaccac

SEQ ID NO: 5366262 - DNA, 25 bp, Homo sapien
ctgagcaagtggcaccatgtccaca

SEQ ID NO: 5366263 - DNA, 25 bp, Homo sapien
tctgccttctgcagctgagcaagtg

SEQ ID NO: 5366264 - DNA, 25 bp, Homo sapien
cagtcacagagacacctgagtcctc

SEQ ID NO: 5366265 - DNA, 25 bp, Homo sapien
gagacacctgagtcctcatctgaat

SEQ ID NO: 5366266 - DNA, 25 bp, Homo sapien
tgaaatgtttgctgcccagagtggg

SEQ ID NO: 5366267 - DNA, 25 bp, Homo sapien
tgggtttgacaaagacagggcctgc

SEQ ID NO: 5366268 - DNA, 25 bp, Homo sapien
ggcgagggcccaggtaaatcaagaa

SEQ ID NO: 5366269 - DNA, 25 bp, Homo sapien
ggcaacttcgggctcctgatgaaat

SEQ ID NO: 5366270 - DNA, 25 bp, Homo sapien
ctccttcagggccggattctaaggc

SEQ ID NO: 5366271 - DNA, 25 bp, Homo sapien
gagccggctttcagtaaagcaggca

SEQ ID NO: 5366272 - DNA, 25 bp, Homo sapien
gccggctttcagtaaagcaggcaag

SEQ ID NO: 5366273 - DNA, 25 bp, Homo sapien
tcagggccggattctaaggccctac

SEQ ID NO: 5366274 - DNA, 25 bp, Homo sapien
tcctacaccctctgtagtgaaaggg

SEQ ID NO: 5366275 - DNA, 25 bp, Homo sapien
aacaaataccgtgctggtggaagga

SEQ ID NO: 5366276 - DNA, 25 bp, Homo sapien
caggtgccaggaccggctctttcct

SEQ ID NO: 5366277 - DNA, 25 bp, Homo sapien
tccgtgctgaacaaataccgtgctg

SEQ ID NO: 5366278 - DNA, 25 bp, Homo sapien
cggtctgttctccagcatgtagtag

SEQ ID NO: 5366279 - DNA, 25 bp, Homo sapien
gaccatgccatagatgttcctcggt

SEQ ID NO: 5366280 - DNA, 25 bp, Homo sapien
ctcggtctgttctccagcatgtagt

SEQ ID NO: 5366281 - DNA, 25 bp, Homo sapien
ccatagatgttcctcggtctgttct

SEQ ID NO: 5366282 - DNA, 25 bp, Homo sapien
cgtggccttgtgagttcacgggcat

SEQ ID NO: 5366283 - DNA, 25 bp, Homo sapien
actctacctccacgcattctctctc

SEQ ID NO: 5366284 - DNA, 25 bp, Homo sapien
cacttcctcgcccttgcctcctcca

SEQ ID NO: 5366285 - DNA, 25 bp, Homo sapien
cactctacctccacgcattctctct

SEQ ID NO: 5366286 - DNA, 25 bp, Homo sapien
tctcactctacctccacgcattctc

SEQ ID NO: 5366287 - DNA, 25 bp, Homo sapien
acacagcgtgacagcctcgtaagag

SEQ ID NO: 5366288 - DNA, 25 bp, Homo sapien
cgtgacagcctcgtaagaggaagtg

SEQ ID NO: 5366289 - DNA, 25 bp, Homo sapien
cctctgtgacacagcgtgacagcct

SEQ ID NO: 5366290 - DNA, 25 bp, Homo sapien
tgtgatcctcctctgtgacacagcg

SEQ ID NO: 5366291 - DNA, 25 bp, Homo sapien
ggtgtctctgcacagggtcccttgc

SEQ ID NO: 5366292 - DNA, 25 bp, Homo sapien
tgtgctgggccttgctatgtcctgg

SEQ ID NO: 5366293 - DNA, 25 bp, Homo sapien
tgcgaaggcactctgaggcacgtgc

SEQ ID NO: 5366294 - DNA, 25 bp, Homo sapien
tcgtctgcacccctgcggagcagtg

SEQ ID NO: 5366295 - DNA, 25 bp, Homo sapien
aaggccaggtgtgcggctgcaccga

SEQ ID NO: 5366296 - DNA, 25 bp, Homo sapien
ggactctccgtcctggatgctgctc

SEQ ID NO: 5366297 - DNA, 25 bp, Homo sapien
tccttgtgggatgggaccaaggcca

SEQ ID NO: 5366298 - DNA, 25 bp, Homo sapien
gcagtatccatgacccctgttccca

SEQ ID NO: 5366299 - DNA, 25 bp, Homo sapien
tgtgacgcctgcatatctggtagcc

SEQ ID NO: 5366300 - DNA, 25 bp, Homo sapien
ctggtgtcagcacggtggcccggaa

SEQ ID NO: 5366301 - DNA, 25 bp, Homo sapien
gggacgcagccgtagtcctcgtctt

SEQ ID NO: 5366302 - DNA, 25 bp, Homo sapien
ctcgtctttggtgccgtagccacag

SEQ ID NO: 5366303 - DNA, 25 bp, Homo sapien
gttgtagtactcgttctcaccgcag

SEQ ID NO: 5366304 - DNA, 25 bp, Homo sapien
tggcacagccccgtagtctggttgt

SEQ ID NO: 5366305 - DNA, 25 bp, Homo sapien
attccgctcgggctgagcacatcag

SEQ ID NO: 5366306 - DNA, 25 bp, Homo sapien
tctcaccgcagtttgagtattccgc

SEQ ID NO: 5366307 - DNA, 25 bp, Homo sapien
ggggagccagggcgtctgcgtgcag

SEQ ID NO: 5366308 - DNA, 25 bp, Homo sapien
gagccagggcgtctgcgtgcagtcc

SEQ ID NO: 5366309 - DNA, 25 bp, Homo sapien
gacggggagccagggcgtctgcgtg

SEQ ID NO: 5366310 - DNA, 25 bp, Homo sapien
tctgcgtgcagtcccccacatgggc

SEQ ID NO: 5366311 - DNA, 25 bp, Homo sapien
tactatgtggcaatcttataggccc

SEQ ID NO: 5366312 - DNA, 25 bp, Homo sapien
gccctaaggacggtgccagacagat

SEQ ID NO: 5366313 - DNA, 25 bp, Homo sapien
gatagggtccctgctctattgggcc

SEQ ID NO: 5366314 - DNA, 25 bp, Homo sapien
gctctattgggcctttatctgtcca

SEQ ID NO: 5366315 - DNA, 25 bp, Homo sapien
gacggtgctacctcttccaaaagct

SEQ ID NO: 5366316 - DNA, 25 bp, Homo sapien
tggtcaccacctttaggagaagcag

SEQ ID NO: 5366317 - DNA, 25 bp, Homo sapien
tgagctgctcgcctcttggaatggc

SEQ ID NO: 5366318 - DNA, 25 bp, Homo sapien
tctatacttgtcatcacggctgcct

SEQ ID NO: 5366319 - DNA, 25 bp, Homo sapien
cttttgtctgtggcccctccagcgt

SEQ ID NO: 5366320 - DNA, 25 bp, Homo sapien
tctgtaggacggatgtcccttttgt

SEQ ID NO: 5366321 - DNA, 25 bp, Homo sapien
gcaggcctgatggttcggagttacc

SEQ ID NO: 5366322 - DNA, 25 bp, Homo sapien
ccttttaaagtctgtaggacggatg

SEQ ID NO: 5366323 - DNA, 25 bp, Homo sapien
cgcctgggttgaccgcatcacggac

SEQ ID NO: 5366324 - DNA, 25 bp, Homo sapien
cacgcctgggttgaccgcatcacgg

SEQ ID NO: 5366325 - DNA, 25 bp, Homo sapien
ttgccacgcctgggttgaccgcatc

SEQ ID NO: 5366326 - DNA, 25 bp, Homo sapien
ctgggttgaccgcatcacggacagg

SEQ ID NO: 5366327 - DNA, 25 bp, Homo sapien
caggctggctattgtaggtaatgca

SEQ ID NO: 5366328 - DNA, 25 bp, Homo sapien
ctctcaggctggctattgtaggtaa

SEQ ID NO: 5366329 - DNA, 25 bp, Homo sapien
tcaggctggctattgtaggtaatgc

SEQ ID NO: 5366330 - DNA, 25 bp, Homo sapien
ttacgtgtcccgagggcctgcagag

SEQ ID NO: 5366331 - DNA, 25 bp, Homo sapien
cctgcggttccagcgcgttcctgtt

SEQ ID NO: 5366332 - DNA, 25 bp, Homo sapien
ccagaggcctttcaagacggcggga

SEQ ID NO: 5366333 - DNA, 25 bp, Homo sapien
catctggactctcacgaaggttcgt

SEQ ID NO: 5366334 - DNA, 25 bp, Homo sapien
tccttttaccacgaagccagcttcg

SEQ ID NO: 5366335 - DNA, 25 bp, Homo sapien
agagcgaagactccgcgtattttcc

SEQ ID NO: 5366336 - DNA, 25 bp, Homo sapien
gtgttgctccgcagcacacctcagg

SEQ ID NO: 5366337 - DNA, 25 bp, Homo sapien
agatgaatccatggggctgagcacc

SEQ ID NO: 5366338 - DNA, 25 bp, Homo sapien
ccgtggcctggtgtgttgagtaaca

SEQ ID NO: 5366339 - DNA, 25 bp, Homo sapien
ctggcagtcgtccacaccctgtgag

SEQ ID NO: 5366340 - DNA, 25 bp, Homo sapien
cagtcgtccacaccctgtgagatgt

SEQ ID NO: 5366341 - DNA, 25 bp, Homo sapien
gatgtgctcggagtgtgtcccagca

SEQ ID NO: 5366342 - DNA, 25 bp, Homo sapien
tgtgagatgtgctcggagtgtgtcc

SEQ ID NO: 5366343 - DNA, 25 bp, Homo sapien
gggtgacagtgacgggagtagcacc

SEQ ID NO: 5366344 - DNA, 25 bp, Homo sapien
gggagtagcacctgggacaacacat

SEQ ID NO: 5366345 - DNA, 25 bp, Homo sapien
tgacgggagtagcacctgggacaac

SEQ ID NO: 5366346 - DNA, 25 bp, Homo sapien
tagcacctgggacaacacatatctg

SEQ ID NO: 5366347 - DNA, 25 bp, Homo sapien
caggcgggtctcagtcaagcatagc

SEQ ID NO: 5366348 - DNA, 25 bp, Homo sapien
taagggccgatggtgtttaacagca

SEQ ID NO: 5366349 - DNA, 25 bp, Homo sapien
tgcattctggacgtgacacacagcc

SEQ ID NO: 5366350 - DNA, 25 bp, Homo sapien
aaggccagatcaaccagggaagcac

SEQ ID NO: 5366351 - DNA, 25 bp, Homo sapien
tgaggcatgcctctcataatccagt

SEQ ID NO: 5366352 - DNA, 25 bp, Homo sapien
tatttcttgcacttgctcaccaggc

SEQ ID NO: 5366353 - DNA, 25 bp, Homo sapien
ggttatatgagctcagtttccccta

SEQ ID NO: 5366354 - DNA, 25 bp, Homo sapien
agggtctcaatatcggtcttctgca

SEQ ID NO: 5366355 - DNA, 25 bp, Homo sapien
ctggacccaggacgcacagtagaga

SEQ ID NO: 5366356 - DNA, 25 bp, Homo sapien
tgcgtttgttcaggcagggggcaga

SEQ ID NO: 5366357 - DNA, 25 bp, Homo sapien
cccaggacgcacagtagagagggca

SEQ ID NO: 5366358 - DNA, 25 bp, Homo sapien
ccctggacccaggacgcacagtaga

SEQ ID NO: 5366359 - DNA, 25 bp, Homo sapien
ggctgcctccggaagaacagaagga

SEQ ID NO: 5366360 - DNA, 25 bp, Homo sapien
atgcactttccaggggtcgtgtgtc

SEQ ID NO: 5366361 - DNA, 25 bp, Homo sapien
ggtgctggctgcctccggaagaaca

SEQ ID NO: 5366362 - DNA, 25 bp, Homo sapien
cagcctgtgagtgtggctcctggaa

SEQ ID NO: 5366363 - DNA, 25 bp, Homo sapien
gcagcagtagccaacagaggaggag

SEQ ID NO: 5366364 - DNA, 25 bp, Homo sapien
cagcagtagccaacagaggaggagc

SEQ ID NO: 5366365 - DNA, 25 bp, Homo sapien
gcagtagccaacagaggaggagcca

SEQ ID NO: 5366366 - DNA, 25 bp, Homo sapien
gtcagattaatcatgaaggatgcag

SEQ ID NO: 5366367 - DNA, 25 bp, Homo sapien
taagaactagggacattggcgtttg

SEQ ID NO: 5366368 - DNA, 25 bp, Homo sapien
actagggacattggcgtttgccagt

SEQ ID NO: 5366369 - DNA, 25 bp, Homo sapien
agaactagggacattggcgtttgcc

SEQ ID NO: 5366370 - DNA, 25 bp, Homo sapien
gaactagggacattggcgtttgcca

SEQ ID NO: 5366371 - DNA, 25 bp, Homo sapien
ggaggagctcaacattctgttgtac

SEQ ID NO: 5366372 - DNA, 25 bp, Homo sapien
aaacataaggaggagctcaacattc

SEQ ID NO: 5366373 - DNA, 25 bp, Homo sapien
aagcaacaactgtgataatcatcag

SEQ ID NO: 5366374 - DNA, 25 bp, Homo sapien
caactgtgataatcatcaggataat

SEQ ID NO: 5366375 - DNA, 25 bp, Homo sapien
gagcagtaggtctgattgaccgtga

SEQ ID NO: 5366376 - DNA, 25 bp, Homo sapien
gcatcttcctctgtagggctcctta

SEQ ID NO: 5366377 - DNA, 25 bp, Homo sapien
gcatgagctcgcagggtggtgcagg

SEQ ID NO: 5366378 - DNA, 25 bp, Homo sapien
gaccgtgaagtgagttaagctggca

SEQ ID NO: 5366379 - DNA, 25 bp, Homo sapien
cagaagatgggtctatgaagaaagt

SEQ ID NO: 5366380 - DNA, 25 bp, Homo sapien
ggcttcacaggtggccaccgtggca

SEQ ID NO: 5366381 - DNA, 25 bp, Homo sapien
tgaagaaagtcaggtaccatccagt

SEQ ID NO: 5366382 - DNA, 25 bp, Homo sapien
gtggcagccctctcagaagcaggta

SEQ ID NO: 5366383 - DNA, 25 bp, Homo sapien
gtggctcgtataagaaaatcctaaa

SEQ ID NO: 5366384 - DNA, 25 bp, Homo sapien
ttcattgctacatgagtggctcgta

SEQ ID NO: 5366385 - DNA, 25 bp, Homo sapien
tgctacatgagtggctcgtataaga

SEQ ID NO: 5366386 - DNA, 25 bp, Homo sapien
catgagtggctcgtataagaaaatc

SEQ ID NO: 5366387 - DNA, 25 bp, Homo sapien
ggcagtcgcagtgtgcaacactctc

SEQ ID NO: 5366388 - DNA, 25 bp, Homo sapien
cttccccctcgtctggcacgtagta

SEQ ID NO: 5366389 - DNA, 25 bp, Homo sapien
tgggcagtcgcagtgtgcaacactc

SEQ ID NO: 5366390 - DNA, 25 bp, Homo sapien
tccccctcgtctggcacgtagtaca

SEQ ID NO: 5366391 - DNA, 25 bp, Homo sapien
gcttcggagtcgtggagctgcccat

SEQ ID NO: 5366392 - DNA, 25 bp, Homo sapien
ggcttcggagtcgtggagctgccca

SEQ ID NO: 5366393 - DNA, 25 bp, Homo sapien
agggcttcggagtcgtggagctgcc

SEQ ID NO: 5366394 - DNA, 25 bp, Homo sapien
gggcttcggagtcgtggagctgccc

SEQ ID NO: 5366395 - DNA, 25 bp, Homo sapien
cgtaattgtggcagtcgctggcaga

SEQ ID NO: 5366396 - DNA, 25 bp, Homo sapien
ttatttggcgtaattgtggcagtcg

SEQ ID NO: 5366397 - DNA, 25 bp, Homo sapien
taatggggtggaagttcatgaactg

SEQ ID NO: 5366398 - DNA, 25 bp, Homo sapien
tgtggcagtcgctggcagatacaac

SEQ ID NO: 5366399 - DNA, 25 bp, Homo sapien
agcagacaaatagcggttaagaaat

SEQ ID NO: 5366400 - DNA, 25 bp, Homo sapien
gacaaatagcggttaagaaatccga

SEQ ID NO: 5366401 - DNA, 25 bp, Homo sapien
aacaaaatcgctttcaggattgtct

SEQ ID NO: 5366402 - DNA, 25 bp, Homo sapien
agaagcagacaaatagcggttaaga

SEQ ID NO: 5366403 - DNA, 25 bp, Homo sapien
cttccaccagggattgagaagtgcc

SEQ ID NO: 5366404 - DNA, 25 bp, Homo sapien
gaatctgtgaggcacgatttttcac

SEQ ID NO: 5366405 - DNA, 25 bp, Homo sapien
accttccaccagggattgagaagtg

SEQ ID NO: 5366406 - DNA, 25 bp, Homo sapien
atctgtgaggcacgatttttcacct

SEQ ID NO: 5366407 - DNA, 25 bp, Homo sapien
tcatgtgccgctgccacagcactcc

SEQ ID NO: 5366408 - DNA, 25 bp, Homo sapien
gccgctgccacagcactccatctac

SEQ ID NO: 5366409 - DNA, 25 bp, Homo sapien
gtgccgctgccacagcactccatct

SEQ ID NO: 5366410 - DNA, 25 bp, Homo sapien
atgtgccgctgccacagcactccat

SEQ ID NO: 5366411 - DNA, 25 bp, Homo sapien
gggagcagtgttactgtcctcaggc

SEQ ID NO: 5366412 - DNA, 25 bp, Homo sapien
cttccccagggggagcagtgttact

SEQ ID NO: 5366413 - DNA, 25 bp, Homo sapien
gagcagtgttactgtcctcaggcat

SEQ ID NO: 5366414 - DNA, 25 bp, Homo sapien
cagggggagcagtgttactgtcctc

SEQ ID NO: 5366415 - DNA, 25 bp, Homo sapien
gcaattatgtggacagcgtcgctca

SEQ ID NO: 5366416 - DNA, 25 bp, Homo sapien
caattatgtggacagcgtcgctcat

SEQ ID NO: 5366417 - DNA, 25 bp, Homo sapien
tggcaattatgtggacagcgtcgct

SEQ ID NO: 5366418 - DNA, 25 bp, Homo sapien
cgtggcaattatgtggacagcgtcg

SEQ ID NO: 5366419 - DNA, 25 bp, Homo sapien
gaaatcttttgcatgaacctctgat

SEQ ID NO: 5366420 - DNA, 25 bp, Homo sapien
tggagaaatcttttgcatgaacctc

SEQ ID NO: 5366421 - DNA, 25 bp, Homo sapien
gagttggagaaatcttttgcatgaa

SEQ ID NO: 5366422 - DNA, 25 bp, Homo sapien
tttatagtcttgttctaagtgcagg

SEQ ID NO: 5366423 - DNA, 25 bp, Homo sapien
ctggaaagagtcgaaggtgttgaag

SEQ ID NO: 5366424 - DNA, 25 bp, Homo sapien
tggaaagagtcgaaggtgttgaaga

SEQ ID NO: 5366425 - DNA, 25 bp, Homo sapien
gttctgagttgctgtgtcacaagaa

SEQ ID NO: 5366426 - DNA, 25 bp, Homo sapien
gtgtcacaagaagtctcacagctca

SEQ ID NO: 5366427 - DNA, 25 bp, Homo sapien
gagttgctgtgtcacaagaagtctc

SEQ ID NO: 5366428 - DNA, 25 bp, Homo sapien
ttcttgtctgttctgagttgctgtg

SEQ ID NO: 5366429 - DNA, 25 bp, Homo sapien
tcgtccgcaatgtgcagaagcatgc

SEQ ID NO: 5366430 - DNA, 25 bp, Homo sapien
aaaccaatagttggcataagtgagc

SEQ ID NO: 5366431 - DNA, 25 bp, Homo sapien
gtcaaaccaatagttggcataagtg

SEQ ID NO: 5366432 - DNA, 25 bp, Homo sapien
tgcaagcggtatagagtcgtccgca

SEQ ID NO: 5366433 - DNA, 25 bp, Homo sapien
gcaacatctgcacttccaaggtttg

SEQ ID NO: 5366434 - DNA, 25 bp, Homo sapien
gagtggaccccagtatcctccaggt

SEQ ID NO: 5366435 - DNA, 25 bp, Homo sapien
caaggtttgttgtgttcagactccc

SEQ ID NO: 5366436 - DNA, 25 bp, Homo sapien
tggtacacctcatctgtctgcacaa

SEQ ID NO: 5366437 - DNA, 25 bp, Homo sapien
gacggatgacagctctgtccttgac

SEQ ID NO: 5366438 - DNA, 25 bp, Homo sapien
ccttgactctgacatttacggcagg

SEQ ID NO: 5366439 - DNA, 25 bp, Homo sapien
catatttccagtgatgtaaatgaca

SEQ ID NO: 5366440 - DNA, 25 bp, Homo sapien
ccaatgggtcttagtgacggatgac

SEQ ID NO: 5366441 - DNA, 25 bp, Homo sapien
gagcagcgagcagattgcggagtcg

SEQ ID NO: 5366442 - DNA, 25 bp, Homo sapien
ttcagatttctatagtgtctctctg

SEQ ID NO: 5366443 - DNA, 25 bp, Homo sapien
tcttcagatttctatagtgtctctc

SEQ ID NO: 5366444 - DNA, 25 bp, Homo sapien
tgcggagtcgaagggcaaagccatc

SEQ ID NO: 5366445 - DNA, 25 bp, Homo sapien
ggggcttgggccatttgtggccagt

SEQ ID NO: 5366446 - DNA, 25 bp, Homo sapien
gggcttgggccatttgtggccagta

SEQ ID NO: 5366447 - DNA, 25 bp, Homo sapien
gtggaagccacgaggtccatcctgc

SEQ ID NO: 5366448 - DNA, 25 bp, Homo sapien
ggcagtggaagccacgaggtccatc

SEQ ID NO: 5366449 - DNA, 25 bp, Homo sapien
catcctgccagtgatgcccgtgggc

SEQ ID NO: 5366450 - DNA, 25 bp, Homo sapien
cacgaggtccatcctgccagtgatg

SEQ ID NO: 5366451 - DNA, 25 bp, Homo sapien
gcaggtggggacggtcacagaaaac

SEQ ID NO: 5366452 - DNA, 25 bp, Homo sapien
ggcaggtggggacggtcacagaaaa

SEQ ID NO: 5366453 - DNA, 25 bp, Homo sapien
tggcaggtggggacggtcacagaaa

SEQ ID NO: 5366454 - DNA, 25 bp, Homo sapien
ctggcaggtggggacggtcacagaa

SEQ ID NO: 5366455 - DNA, 25 bp, Homo sapien
caaatgaccccaattatcctcaggt

SEQ ID NO: 5366456 - DNA, 25 bp, Homo sapien
tcagtgtgacaaatgaccccaatta

SEQ ID NO: 5366457 - DNA, 25 bp, Homo sapien
tgtgacaaatgaccccaattatcct

SEQ ID NO: 5366458 - DNA, 25 bp, Homo sapien
ccccaattatcctcaggtcagtcat

SEQ ID NO: 5366459 - DNA, 25 bp, Homo sapien
acttagagcactaaacacagcagat

SEQ ID NO: 5366460 - DNA, 25 bp, Homo sapien
cacttagagcactaaacacagcaga

SEQ ID NO: 5366461 - DNA, 25 bp, Homo sapien
gcacttagagcactaaacacagcag

SEQ ID NO: 5366462 - DNA, 25 bp, Homo sapien
ctgcacttagagcactaaacacagc

SEQ ID NO: 5366463 - DNA, 25 bp, Homo sapien
ggggggatgtggcagacaagagcca

SEQ ID NO: 5366464 - DNA, 25 bp, Homo sapien
gggggggatgtggcagacaagagcc

SEQ ID NO: 5366465 - DNA, 25 bp, Homo sapien
catgcagcttcagaaacgagcgcat

SEQ ID NO: 5366466 - DNA, 25 bp, Homo sapien
aaacgagcgcatggaggatgaatgc

SEQ ID NO: 5366467 - DNA, 25 bp, Homo sapien
cgtggctgcaagtcggccagaaaca

SEQ ID NO: 5366468 - DNA, 25 bp, Homo sapien
cccgcgtggctgcaagtcggccaga

SEQ ID NO: 5366469 - DNA, 25 bp, Homo sapien
aacagctcgaacttccctgcaggca

SEQ ID NO: 5366470 - DNA, 25 bp, Homo sapien
gtagaactggcattggaacaaacag

SEQ ID NO: 5366471 - DNA, 25 bp, Homo sapien
ctgtagaactggcattggaacaaac

SEQ ID NO: 5366472 - DNA, 25 bp, Homo sapien
gaacaaacagctcgaacttccctgc

SEQ ID NO: 5366473 - DNA, 25 bp, Homo sapien
tccaacaaagccaacattaggaggc

SEQ ID NO: 5366474 - DNA, 25 bp, Homo sapien
gctagaggtttgactgagatttcca

SEQ ID NO: 5366475 - DNA, 25 bp, Homo sapien
gaagtccctggtcctgtagctcatg

SEQ ID NO: 5366476 - DNA, 25 bp, Homo sapien
taggaggcactctagttgaagacta

SEQ ID NO: 5366477 - DNA, 25 bp, Homo sapien
taaactcaagtaggagtgaggctcc

SEQ ID NO: 5366478 - DNA, 25 bp, Homo sapien
gtgaggctccctcctactgaaagaa

SEQ ID NO: 5366479 - DNA, 25 bp, Homo sapien
gaaagaaacgcagttggtgtccgct

SEQ ID NO: 5366480 - DNA, 25 bp, Homo sapien
tgcccacaggtcaattccgattcca

SEQ ID NO: 5366481 - DNA, 25 bp, Homo sapien
ggaaggtcacacaggtctagatcta

SEQ ID NO: 5366482 - DNA, 25 bp, Homo sapien
cagtgacgcctccaaagatagctac

SEQ ID NO: 5366483 - DNA, 25 bp, Homo sapien
tattcatcctaaaaacaccgtgggc

SEQ ID NO: 5366484 - DNA, 25 bp, Homo sapien
gatagctactgcataatctctccgc

SEQ ID NO: 5366485 - DNA, 25 bp, Homo sapien
cgttgagttggaataccatttgttt

SEQ ID NO: 5366486 - DNA, 25 bp, Homo sapien
tttgtttcctcattcgttgagttgg

SEQ ID NO: 5366487 - DNA, 25 bp, Homo sapien
cattcgttgagttggaataccattt

SEQ ID NO: 5366488 - DNA, 25 bp, Homo sapien
tcctcattcgttgagttggaatacc

SEQ ID NO: 5366489 - DNA, 25 bp, Homo sapien
gcagtgttctatgtcccaggaattt

SEQ ID NO: 5366490 - DNA, 25 bp, Homo sapien
ggagtcattactctttcccttgagt

SEQ ID NO: 5366491 - DNA, 25 bp, Homo sapien
tttggctctttcatggagtcattac

SEQ ID NO: 5366492 - DNA, 25 bp, Homo sapien
ccaggaattttgtactgtaaaccag

SEQ ID NO: 5366493 - DNA, 25 bp, Homo sapien
agctcttcacaaggggcgatactaa

SEQ ID NO: 5366494 - DNA, 25 bp, Homo sapien
ttcacaaggggcgatactaagctcc

SEQ ID NO: 5366495 - DNA, 25 bp, Homo sapien
gggcgatactaagctcccgggccca

SEQ ID NO: 5366496 - DNA, 25 bp, Homo sapien
aatgagctcttcacaaggggcgata

SEQ ID NO: 5366497 - DNA, 25 bp, Homo sapien
atgtgcttggttgaagggttgttaa

SEQ ID NO: 5366498 - DNA, 25 bp, Homo sapien
gatttttaggtagcaagttgggaca

SEQ ID NO: 5366499 - DNA, 25 bp, Homo sapien
tgcttggttgaagggttgttaagaa

SEQ ID NO: 5366500 - DNA, 25 bp, Homo sapien
atttttaggtagcaagttgggacag

SEQ ID NO: 5366501 - DNA, 25 bp, Homo sapien
ggccatgggagctggacgtggccat

SEQ ID NO: 5366502 - DNA, 25 bp, Homo sapien
aaaccgcaaattgtccctgggccag

SEQ ID NO: 5366503 - DNA, 25 bp, Homo sapien
tccttggagatgctcggaaggctct

SEQ ID NO: 5366504 - DNA, 25 bp, Homo sapien
tgaagacaaggcgaatgaactgaaa

SEQ ID NO: 5366505 - DNA, 25 bp, Homo sapien
gcagtagggcttcaccagtaccata

SEQ ID NO: 5366506 - DNA, 25 bp, Homo sapien
cacggatggaggactttttccattc

SEQ ID NO: 5366507 - DNA, 25 bp, Homo sapien
cagtaccataaaggccacggactgt

SEQ ID NO: 5366508 - DNA, 25 bp, Homo sapien
caggctgcagtagggcttcaccagt

SEQ ID NO: 5366509 - DNA, 25 bp, Homo sapien
gggaccaggagcagtacccagtctc

SEQ ID NO: 5366510 - DNA, 25 bp, Homo sapien
ggaccaggagcagtacccagtctct

SEQ ID NO: 5366511 - DNA, 25 bp, Homo sapien
gaccaggagcagtacccagtctctg

SEQ ID NO: 5366512 - DNA, 25 bp, Homo sapien
acgggaccaggagcagtacccagtc

SEQ ID NO: 5366513 - DNA, 25 bp, Homo sapien
ttattctactttagctctatatctt

SEQ ID NO: 5366514 - DNA, 25 bp, Homo sapien
tattctactttagctctatatcttt

SEQ ID NO: 5366515 - DNA, 25 bp, Homo sapien
gttgactttccccaggcagcggata

SEQ ID NO: 5366516 - DNA, 25 bp, Homo sapien
caccgctcagctttgtataccaaga

SEQ ID NO: 5366517 - DNA, 25 bp, Homo sapien
gcggatacctacttccctcacatgt

SEQ ID NO: 5366518 - DNA, 25 bp, Homo sapien
cctcacatgtccaaagccaagggaa

SEQ ID NO: 5366519 - DNA, 25 bp, Homo sapien
tcacacagctgggagatcatggaag

SEQ ID NO: 5366520 - DNA, 25 bp, Homo sapien
catgcctggtggacgatgtagccca

SEQ ID NO: 5366521 - DNA, 25 bp, Homo sapien
tgcacagtgacggtgaactagtaac

SEQ ID NO: 5366522 - DNA, 25 bp, Homo sapien
tcttaggcagcctcggtaacttgca

SEQ ID NO: 5366523 - DNA, 25 bp, Homo sapien
gaaaggtgggcttaagtggctctct

SEQ ID NO: 5366524 - DNA, 25 bp, Homo sapien
gaaggtctagcaacatttggtcgtc

SEQ ID NO: 5366525 - DNA, 25 bp, Homo sapien
tcctctgaagggtgcagacaaagct

SEQ ID NO: 5366526 - DNA, 25 bp, Homo sapien
tgagaactaaatcggttgccaactg

SEQ ID NO: 5366527 - DNA, 25 bp, Homo sapien
gctgatgttgttggaagaaaggctc

SEQ ID NO: 5366528 - DNA, 25 bp, Homo sapien
cacgggtccaaagagtgaccactgg

SEQ ID NO: 5366529 - DNA, 25 bp, Homo sapien
gaaaggctcatgaagatttgaccgc

SEQ ID NO: 5366530 - DNA, 25 bp, Homo sapien
tgtgactacagagagtgctgccagg

SEQ ID NO: 5366531 - DNA, 25 bp, Homo sapien
ctgttgttggcgctgatgtaaatca

SEQ ID NO: 5366532 - DNA, 25 bp, Homo sapien
tgtaaatcatacagatggaaatcca

SEQ ID NO: 5366533 - DNA, 25 bp, Homo sapien
cgctgatgtaaatcatacagatgga

SEQ ID NO: 5366534 - DNA, 25 bp, Homo sapien
atcatacagatggaaatccacattg

SEQ ID NO: 5366535 - DNA, 25 bp, Homo sapien
tagtcactgccctaggcactaagga

SEQ ID NO: 5366536 - DNA, 25 bp, Homo sapien
tgtgcagcgtccaaccaatcctggt

SEQ ID NO: 5366537 - DNA, 25 bp, Homo sapien
tgttagccctgactgaactcgctgt

SEQ ID NO: 5366538 - DNA, 25 bp, Homo sapien
aataatatatagcacgctcttggcc

SEQ ID NO: 5366539 - DNA, 25 bp, Homo sapien
tctcggtcctcctgtacgtacttcc

SEQ ID NO: 5366540 - DNA, 25 bp, Homo sapien
aaggagagcgcgaattcaccctcct

SEQ ID NO: 5366541 - DNA, 25 bp, Homo sapien
tacgtacttccgttgctctgacgct

SEQ ID NO: 5366542 - DNA, 25 bp, Homo sapien
gtcctcctgtacgtacttccgttgc

SEQ ID NO: 5366543 - DNA, 25 bp, Homo sapien
ctcgcacagcgtcgccaagggtgcg

SEQ ID NO: 5366544 - DNA, 25 bp, Homo sapien
gttcacgagactgcgccgcggcggg

SEQ ID NO: 5366545 - DNA, 25 bp, Homo sapien
gcgactccggcgagccaaggctgcg

SEQ ID NO: 5366546 - DNA, 25 bp, Homo sapien
cctggcgccagggtgctggtcggcg

SEQ ID NO: 5366547 - DNA, 25 bp, Homo sapien
ggagtctgaactgggagcgctccgg

SEQ ID NO: 5366548 - DNA, 25 bp, Homo sapien
ttctgcgcgcttctcggaaaggagt

SEQ ID NO: 5366549 - DNA, 25 bp, Homo sapien
ggctgtgtccccaagctgctcgccg

SEQ ID NO: 5366550 - DNA, 25 bp, Homo sapien
gaaggcagtcgggataacgccgccc

SEQ ID NO: 5366551 - DNA, 25 bp, Homo sapien
cagcgttggcaggaaacgtccctct

SEQ ID NO: 5366552 - DNA, 25 bp, Homo sapien
gaggctcacgaaaagccgaaaaaga

SEQ ID NO: 5366553 - DNA, 25 bp, Homo sapien
gctcacgaaaagccgaaaaagactc

SEQ ID NO: 5366554 - DNA, 25 bp, Homo sapien
ctcacgaaaagccgaaaaagactcg

SEQ ID NO: 5366555 - DNA, 25 bp, Homo sapien
ctgaggctcacgaaaagccgaaaaa

SEQ ID NO: 5366556 - DNA, 25 bp, Homo sapien
gggaccaggctaatcgccggcttgc

SEQ ID NO: 5366557 - DNA, 25 bp, Homo sapien
ccaagcgaagggaagtcctgcaggc

SEQ ID NO: 5366558 - DNA, 25 bp, Homo sapien
ccaagcctgcgcaggagaggttccc

SEQ ID NO: 5366559 - DNA, 25 bp, Homo sapien
ccggcttgcgcccaagcgaagggaa

SEQ ID NO: 5366560 - DNA, 25 bp, Homo sapien
agaacccgttgagcttcgtgcccgg

SEQ ID NO: 5366561 - DNA, 25 bp, Homo sapien
aagaggaacggtcctgctgaatcct

SEQ ID NO: 5366562 - DNA, 25 bp, Homo sapien
gctgaatcctctggaggacagcgac

SEQ ID NO: 5366563 - DNA, 25 bp, Homo sapien
gcgagccgccgcttgcagcacagaa

SEQ ID NO: 5366564 - DNA, 25 bp, Homo sapien
cggtccccgccacgcaggccggtcg

SEQ ID NO: 5366565 - DNA, 25 bp, Homo sapien
ccgccacgcaggccggtcggtgagc

SEQ ID NO: 5366566 - DNA, 25 bp, Homo sapien
gccacgcaggccggtcggtgagcca

SEQ ID NO: 5366567 - DNA, 25 bp, Homo sapien
tccccgccacgcaggccggtcggtg

SEQ ID NO: 5366568 - DNA, 25 bp, Homo sapien
aagaaagtcacggcggagcccggct

SEQ ID NO: 5366569 - DNA, 25 bp, Homo sapien
ccaccagccggggtgaagaaagtca

SEQ ID NO: 5366570 - DNA, 25 bp, Homo sapien
aggcagccgcgcgagaccgctgcgg

SEQ ID NO: 5366571 - DNA, 25 bp, Homo sapien
acagccctagcatcgggccaccagc

SEQ ID NO: 5366572 - DNA, 25 bp, Homo sapien
tggacgagtcgtcgctgctggacct

SEQ ID NO: 5366573 - DNA, 25 bp, Homo sapien
ccgctgctgcgcagagcgagggcga

SEQ ID NO: 5366574 - DNA, 25 bp, Homo sapien
gggcgggcgaggacatggacgagtc

SEQ ID NO: 5366575 - DNA, 25 bp, Homo sapien
tcggagcgtcctggctgtgcgcatc

SEQ ID NO: 5366576 - DNA, 25 bp, Homo sapien
agcagcttggtgttgcgggcagcac

SEQ ID NO: 5366577 - DNA, 25 bp, Homo sapien
tgtctgctgtttgctagttctggag

SEQ ID NO: 5366578 - DNA, 25 bp, Homo sapien
gtttgctagttctggagcagatgct

SEQ ID NO: 5366579 - DNA, 25 bp, Homo sapien
gtgttgcgggcagcacctttcagag

SEQ ID NO: 5366580 - DNA, 25 bp, Homo sapien
gtgccacatgctcaggagataagag

SEQ ID NO: 5366581 - DNA, 25 bp, Homo sapien
agtgccacatgctcaggagataaga

SEQ ID NO: 5366582 - DNA, 25 bp, Homo sapien
gatggaggtcaggagtgtccagcac

SEQ ID NO: 5366583 - DNA, 25 bp, Homo sapien
tgctgtggctaggacgatggaggtc

SEQ ID NO: 5366584 - DNA, 25 bp, Homo sapien
ttctgaaggctgcattgatgcacat

SEQ ID NO: 5366585 - DNA, 25 bp, Homo sapien
ttcttttctgaaggctgcattgatg

SEQ ID NO: 5366586 - DNA, 25 bp, Homo sapien
cttttctgaaggctgcattgatgca

SEQ ID NO: 5366587 - DNA, 25 bp, Homo sapien
ttttctgaaggctgcattgatgcac

SEQ ID NO: 5366588 - DNA, 25 bp, Homo sapien
tacatcagttgtattgaagggatca

SEQ ID NO: 5366589 - DNA, 25 bp, Homo sapien
gaagggatcaatgctatgctgggac

SEQ ID NO: 5366590 - DNA, 25 bp, Homo sapien
gcatcctgacaaccagactcctgtt

SEQ ID NO: 5366591 - DNA, 25 bp, Homo sapien
tcctgttgggcaggcggtatctggc

SEQ ID NO: 5366592 - DNA, 25 bp, Homo sapien
tgacagatacagcacatgggtggta

SEQ ID NO: 5366593 - DNA, 25 bp, Homo sapien
tcggctttcaaggtgacaattgtcg

SEQ ID NO: 5366594 - DNA, 25 bp, Homo sapien
caattgtcgtgctgacagatacagc

SEQ ID NO: 5366595 - DNA, 25 bp, Homo sapien
attgtcaaggatgtcggctttcaag

SEQ ID NO: 5366596 - DNA, 25 bp, Homo sapien
aagggaaagtgccactgggatgctg

SEQ ID NO: 5366597 - DNA, 25 bp, Homo sapien
ggaaagggaaagtgccactgggatg

SEQ ID NO: 5366598 - DNA, 25 bp, Homo sapien
gaaagggaaagtgccactgggatgc

SEQ ID NO: 5366599 - DNA, 25 bp, Homo sapien
aaagggaaagtgccactgggatgct

SEQ ID NO: 5366600 - DNA, 25 bp, Homo sapien
ctgagcccgggaacccagtgtgggg

SEQ ID NO: 5366601 - DNA, 25 bp, Homo sapien
ctctgaatgcacgctctccccagca

SEQ ID NO: 5366602 - DNA, 25 bp, Homo sapien
cccagcaccaccttcaggcccagcc

SEQ ID NO: 5366603 - DNA, 25 bp, Homo sapien
agcaccaccttcaggcccagccctt

SEQ ID NO: 5366604 - DNA, 25 bp, Homo sapien
ctccccagcaccaccttcaggccca

SEQ ID NO: 5366605 - DNA, 25 bp, Homo sapien
aagcccactgaaggtcacagtgccc

SEQ ID NO: 5366606 - DNA, 25 bp, Homo sapien
aatgaatacttttggccttgctgta

SEQ ID NO: 5366607 - DNA, 25 bp, Homo sapien
ggccagaagcccactgaaggtcaca

SEQ ID NO: 5366608 - DNA, 25 bp, Homo sapien
ggcttctggcctccaaatgaatact

SEQ ID NO: 5366609 - DNA, 25 bp, Homo sapien
gctgtaccgcggtttcctcgtcctg

SEQ ID NO: 5366610 - DNA, 25 bp, Homo sapien
ctgccgagagggtgctgcctgccct

SEQ ID NO: 5366611 - DNA, 25 bp, Homo sapien
catgggctctatcccggcgcagctg

SEQ ID NO: 5366612 - DNA, 25 bp, Homo sapien
tgtatgcgtgcagaagggacttggg

SEQ ID NO: 5366613 - DNA, 25 bp, Homo sapien
gtgatgatgtggctgatgatgctgt

SEQ ID NO: 5366614 - DNA, 25 bp, Homo sapien
cccttgctccatactatgatggtga

SEQ ID NO: 5366615 - DNA, 25 bp, Homo sapien
tgctccatactatgatggtgatgat

SEQ ID NO: 5366616 - DNA, 25 bp, Homo sapien
agggtcccttgctccatactatgat

SEQ ID NO: 5366617 - DNA, 25 bp, Homo sapien
ttcaccatgcacggagctcagccgt

SEQ ID NO: 5366618 - DNA, 25 bp, Homo sapien
aaacagcgtggaaatgcgcgagcca

SEQ ID NO: 5366619 - DNA, 25 bp, Homo sapien
tctgagcacagcgtctgaagtatca

SEQ ID NO: 5366620 - DNA, 25 bp, Homo sapien
gtctgaagtatcagccgccacaggg

SEQ ID NO: 5366621 - DNA, 25 bp, Homo sapien
gctggtgttttgaatcagcagcatc

SEQ ID NO: 5366622 - DNA, 25 bp, Homo sapien
acccaggctggtgttttgaatcagc

SEQ ID NO: 5366623 - DNA, 25 bp, Homo sapien
ggtgttttgaatcagcagcatcacc

SEQ ID NO: 5366624 - DNA, 25 bp, Homo sapien
caggctggtgttttgaatcagcagc

SEQ ID NO: 5366625 - DNA, 25 bp, Homo sapien
gcctgtggtctttctacaacaaccc

SEQ ID NO: 5366626 - DNA, 25 bp, Homo sapien
ccagccagggcaacgggcagtcctg

SEQ ID NO: 5366627 - DNA, 25 bp, Homo sapien
agtcctggaatcaaagcctgtggtc

SEQ ID NO: 5366628 - DNA, 25 bp, Homo sapien
ctacaacaacccatggtgtctggaa

SEQ ID NO: 5366629 - DNA, 25 bp, Homo sapien
gagtggtcccgaactgcagatgtgt

SEQ ID NO: 5366630 - DNA, 25 bp, Homo sapien
ccccgtgagcgtagtgagtggtccc

SEQ ID NO: 5366631 - DNA, 25 bp, Homo sapien
tgctctgtgcggtgctctcggacat

SEQ ID NO: 5366632 - DNA, 25 bp, Homo sapien
tgcttgggtggagtctgcaccggct

SEQ ID NO: 5366633 - DNA, 25 bp, Homo sapien
cagtgtattgacttcccaagaacca

SEQ ID NO: 5366634 - DNA, 25 bp, Homo sapien
agtgtattgacttcccaagaaccag

SEQ ID NO: 5366635 - DNA, 25 bp, Homo sapien
agcagtgtattgacttcccaagaac

SEQ ID NO: 5366636 - DNA, 25 bp, Homo sapien
gtgtattgacttcccaagaaccaga

SEQ ID NO: 5366637 - DNA, 25 bp, Homo sapien
tgctccctgggcccgaagggctttc

SEQ ID NO: 5366638 - DNA, 25 bp, Homo sapien
cttgctccctgggcccgaagggctt

SEQ ID NO: 5366639 - DNA, 25 bp, Homo sapien
tgctcagcggggtctgggaccccat

SEQ ID NO: 5366640 - DNA, 25 bp, Homo sapien
ggctgctgctcagcggggtctggga

SEQ ID NO: 5366641 - DNA, 25 bp, Homo sapien
ctccagggttgcatgggaggctgct

SEQ ID NO: 5366642 - DNA, 25 bp, Homo sapien
accacctccagggttgcatgggagg

SEQ ID NO: 5366643 - DNA, 25 bp, Homo sapien
gaggaccagtgcgtttctccttgag

SEQ ID NO: 5366644 - DNA, 25 bp, Homo sapien
agtggaattgcagcaagagcagtcc

SEQ ID NO: 5366645 - DNA, 25 bp, Homo sapien
ttgcccatggcagtatagctgggtg

SEQ ID NO: 5366646 - DNA, 25 bp, Homo sapien
aataattggagccacttgcccatgg

SEQ ID NO: 5366647 - DNA, 25 bp, Homo sapien
gaatggagaagtcctctgacaggtg

SEQ ID NO: 5366648 - DNA, 25 bp, Homo sapien
gcagctgtgttgaggctctgtagaa

SEQ ID NO: 5366649 - DNA, 25 bp, Homo sapien
ctgcgctctcggctggctgatggca

SEQ ID NO: 5366650 - DNA, 25 bp, Homo sapien
acagtcttcagctgcgctctcggct

SEQ ID NO: 5366651 - DNA, 25 bp, Homo sapien
cgccctgcagcgagaagggccaggt

SEQ ID NO: 5366652 - DNA, 25 bp, Homo sapien
ctcgccctgcagcgagaagggccag

SEQ ID NO: 5366653 - DNA, 25 bp, Homo sapien
ccctgcagcgagaagggccaggtac

SEQ ID NO: 5366654 - DNA, 25 bp, Homo sapien
gccctgcagcgagaagggccaggta

SEQ ID NO: 5366655 - DNA, 25 bp, Homo sapien
aaatctgtacgcacacctgtttttc

SEQ ID NO: 5366656 - DNA, 25 bp, Homo sapien
ccaccagaaactcccatttgcagta

SEQ ID NO: 5366657 - DNA, 25 bp, Homo sapien
ttgcagtagcaaatctgtacgcaca

SEQ ID NO: 5366658 - DNA, 25 bp, Homo sapien
agggaacgcagaccacctggctcta

SEQ ID NO: 5366659 - DNA, 25 bp, Homo sapien
acccctcatgcccactccatgacca

SEQ ID NO: 5366660 - DNA, 25 bp, Homo sapien
ctcatgcccactccatgaccaggtc

SEQ ID NO: 5366661 - DNA, 25 bp, Homo sapien
tgctccatgtggttcgtccagctct

SEQ ID NO: 5366662 - DNA, 25 bp, Homo sapien
gatcccagggcatgcatttggagcc

SEQ ID NO: 5366663 - DNA, 25 bp, Homo sapien
cctgaatgcagttgctctgatccca

SEQ ID NO: 5366664 - DNA, 25 bp, Homo sapien
cactttccctttgcacgacaagcat

SEQ ID NO: 5366665 - DNA, 25 bp, Homo sapien
cttgccgggcaatggtccgaatcga

SEQ ID NO: 5366666 - DNA, 25 bp, Homo sapien
ggatgacttgtcagggtaccagcca

SEQ ID NO: 5366667 - DNA, 25 bp, Homo sapien
cattggtgtaactggtgggctttgc

SEQ ID NO: 5366668 - DNA, 25 bp, Homo sapien
tccgaatcgagcctctgggtggctg

SEQ ID NO: 5366669 - DNA, 25 bp, Homo sapien
ccatgactgcacccattcatggggg

SEQ ID NO: 5366670 - DNA, 25 bp, Homo sapien
cccatggcttgttaacttccaagtc

SEQ ID NO: 5366671 - DNA, 25 bp, Homo sapien
catggcttgttaacttccaagtcta

SEQ ID NO: 5366672 - DNA, 25 bp, Homo sapien
ggcttgttaacttccaagtctagaa

SEQ ID NO: 5366673 - DNA, 25 bp, Homo sapien
aggctggcaccacgccctgatgctt

SEQ ID NO: 5366674 - DNA, 25 bp, Homo sapien
ttctcctgaaaccagcatgggtgct

SEQ ID NO: 5366675 - DNA, 25 bp, Homo sapien
gataaccaggagttggctgttacca

SEQ ID NO: 5366676 - DNA, 25 bp, Homo sapien
catgcagtcaagtgccctgataacc

SEQ ID NO: 5366677 - DNA, 25 bp, Homo sapien
tcccagagccgacagagccaagagg

SEQ ID NO: 5366678 - DNA, 25 bp, Homo sapien
ggagctgccgtgtgctcgctgtgat

SEQ ID NO: 5366679 - DNA, 25 bp, Homo sapien
tgctcgctgtgatggagttgccgaa

SEQ ID NO: 5366680 - DNA, 25 bp, Homo sapien
tttgattcctcggttatttcaggca

SEQ ID NO: 5366681 - DNA, 25 bp, Homo sapien
cagtcctttcgggtccaacgcaagt

SEQ ID NO: 5366682 - DNA, 25 bp, Homo sapien
tcatggggtacacggcagctcccct

SEQ ID NO: 5366683 - DNA, 25 bp, Homo sapien
caagtgccagaatcttgtgcagtcc

SEQ ID NO: 5366684 - DNA, 25 bp, Homo sapien
cagccaactggagtcaacacttcct

SEQ ID NO: 5366685 - DNA, 25 bp, Homo sapien
ccctgtaggcttcatgatggtgacc

SEQ ID NO: 5366686 - DNA, 25 bp, Homo sapien
tggcaatctcccttggcccttcggt

SEQ ID NO: 5366687 - DNA, 25 bp, Homo sapien
ggtcgctccgcctttcatcggtttg

SEQ ID NO: 5366688 - DNA, 25 bp, Homo sapien
tgtttcccaaacaaacgtgcattgg

SEQ ID NO: 5366689 - DNA, 25 bp, Homo sapien
tgtacttgcaacgtttggcaaacat

SEQ ID NO: 5366690 - DNA, 25 bp, Homo sapien
aatgatgtacttgcaacgtttggca

SEQ ID NO: 5366691 - DNA, 25 bp, Homo sapien
tgctgcaaatgatgtacttgcaacg

SEQ ID NO: 5366692 - DNA, 25 bp, Homo sapien
gcaaatgatgtacttgcaacgtttg

SEQ ID NO: 5366693 - DNA, 25 bp, Homo sapien
cccctgatgaaacccggcgaggtgt

SEQ ID NO: 5366694 - DNA, 25 bp, Homo sapien
actccacagaggaccggatgccctt

SEQ ID NO: 5366695 - DNA, 25 bp, Homo sapien
tgtggctcttgcaatacagaggcaa

SEQ ID NO: 5366696 - DNA, 25 bp, Homo sapien
tgcccttgttgctcaagacttcctt

SEQ ID NO: 5366697 - DNA, 25 bp, Homo sapien
tgtcccaagggaggatacagctcca

SEQ ID NO: 5366698 - DNA, 25 bp, Homo sapien
tcccaagggaggatacagctccact

SEQ ID NO: 5366699 - DNA, 25 bp, Homo sapien
gagacaacagatgagagggcccttc

SEQ ID NO: 5366700 - DNA, 25 bp, Homo sapien
gcatcagagacaacagatgagaggg

SEQ ID NO: 5366701 - DNA, 25 bp, Homo sapien
ccagtgctgtttaggtagaacaaaa

SEQ ID NO: 5366702 - DNA, 25 bp, Homo sapien
tgagtatgaggcaaatatggaaaac

SEQ ID NO: 5366703 - DNA, 25 bp, Homo sapien
taatagtggtatgtttcctgggcta

SEQ ID NO: 5366704 - DNA, 25 bp, Homo sapien
cctagaagcaaactaccataacttg

SEQ ID NO: 5366705 - DNA, 25 bp, Homo sapien
caacattgtagatgctgattaaaac

SEQ ID NO: 5366706 - DNA, 25 bp, Homo sapien
ggcacatgtgaagaaaccatgacta

SEQ ID NO: 5366707 - DNA, 25 bp, Homo sapien
tgggtctggcaatacaacattgtag

SEQ ID NO: 5366708 - DNA, 25 bp, Homo sapien
gatgctgattaaaacttgaggcaca

SEQ ID NO: 5366709 - DNA, 25 bp, Homo sapien
caccaccagggaatgtctgggttgt

SEQ ID NO: 5366710 - DNA, 25 bp, Homo sapien
cacattcagggttggactggggttc

SEQ ID NO: 5366711 - DNA, 25 bp, Homo sapien
accaccaccagggaatgtctgggtt

SEQ ID NO: 5366712 - DNA, 25 bp, Homo sapien
tcgtattagtcagccgactgggtat

SEQ ID NO: 5366713 - DNA, 25 bp, Homo sapien
gaggccaggcccgtgcttctggccg

SEQ ID NO: 5366714 - DNA, 25 bp, Homo sapien
cattcccatgagcctgcaaagtctg

SEQ ID NO: 5366715 - DNA, 25 bp, Homo sapien
attcccatgagcctgcaaagtctgg

SEQ ID NO: 5366716 - DNA, 25 bp, Homo sapien
tgtgacccagcacctggcggaggcc

SEQ ID NO: 5366717 - DNA, 25 bp, Homo sapien
ctgagtggaggtgaaaggtagacaa

SEQ ID NO: 5366718 - DNA, 25 bp, Homo sapien
ccatggacaggtcgcgcattgtttc

SEQ ID NO: 5366719 - DNA, 25 bp, Homo sapien
tgccatggacaggtcgcgcattgtt

SEQ ID NO: 5366720 - DNA, 25 bp, Homo sapien
gagcctgccatggacaggtcgcgca

SEQ ID NO: 5366721 - DNA, 25 bp, Homo sapien
ctctgggcttgtcagttgacagtgt

SEQ ID NO: 5366722 - DNA, 25 bp, Homo sapien
gaagttgacgctgtgacgtagtcct

SEQ ID NO: 5366723 - DNA, 25 bp, Homo sapien
tatgagcggcaatgcgatgtcctcc

SEQ ID NO: 5366724 - DNA, 25 bp, Homo sapien
cctggttgagcgtattactgggagt

SEQ ID NO: 5366725 - DNA, 25 bp, Homo sapien
tgtatgggtggtgccaccaatcctt

SEQ ID NO: 5366726 - DNA, 25 bp, Homo sapien
aatccaatcatgtaggctggccagg

SEQ ID NO: 5366727 - DNA, 25 bp, Homo sapien
tgtcctcactaggaatccagtcagt

SEQ ID NO: 5366728 - DNA, 25 bp, Homo sapien
gggcggtgagcctccgaacaatgta

SEQ ID NO: 5366729 - DNA, 25 bp, Homo sapien
agcctgactgtgtggcagccgtgtc

SEQ ID NO: 5366730 - DNA, 25 bp, Homo sapien
tataatacgtgctgctttgaagaca

SEQ ID NO: 5366731 - DNA, 25 bp, Homo sapien
tgagtgatgactgccagaaagttct

SEQ ID NO: 5366732 - DNA, 25 bp, Homo sapien
tattcagacatataatacgtgctgc

SEQ ID NO: 5366733 - DNA, 25 bp, Homo sapien
ccagatcacatgtaatagctgcaac

SEQ ID NO: 5366734 - DNA, 25 bp, Homo sapien
ccagggccctagtttccatttggct

SEQ ID NO: 5366735 - DNA, 25 bp, Homo sapien
tctctagctgggtgaactatgtggg

SEQ ID NO: 5366736 - DNA, 25 bp, Homo sapien
cacgcggcttgtggctgaagttact

SEQ ID NO: 5366737 - DNA, 25 bp, Homo sapien
tctggccttcatgggtcggattaaa

SEQ ID NO: 5366738 - DNA, 25 bp, Homo sapien
catgggtcggattaaagggtgtcct

SEQ ID NO: 5366739 - DNA, 25 bp, Homo sapien
cttctctggccttcatgggtcggat

SEQ ID NO: 5366740 - DNA, 25 bp, Homo sapien
ccgggttgaggaatccataaagtgt

SEQ ID NO: 5366741 - DNA, 25 bp, Homo sapien
ctgaacaactggctctgagtgtgca

SEQ ID NO: 5366742 - DNA, 25 bp, Homo sapien
ctgaggagcacccagacctgcagct

SEQ ID NO: 5366743 - DNA, 25 bp, Homo sapien
actggctctgagtgtgcagaggcct

SEQ ID NO: 5366744 - DNA, 25 bp, Homo sapien
ctgctggctcctgaacaactggctc

SEQ ID NO: 5366745 - DNA, 25 bp, Homo sapien
tatgtggagtgcctgatgcaggatc

SEQ ID NO: 5366746 - DNA, 25 bp, Homo sapien
aagagggctcccgatcttgtatgtg

SEQ ID NO: 5366747 - DNA, 25 bp, Homo sapien
gctgtccagggccaatggaggccca

SEQ ID NO: 5366748 - DNA, 25 bp, Homo sapien
cacttgtagcgtgggcacagggaca

SEQ ID NO: 5366749 - DNA, 25 bp, Homo sapien
caggcccgtgagctagccttctgtt

SEQ ID NO: 5366750 - DNA, 25 bp, Homo sapien
gtcagggccctttgtagttgcatag

SEQ ID NO: 5366751 - DNA, 25 bp, Homo sapien
ttgcataggtgtaaagcgagggccc

SEQ ID NO: 5366752 - DNA, 25 bp, Homo sapien
tgtcacacaggtatggtcagggccc

SEQ ID NO: 5366753 - DNA, 25 bp, Homo sapien
attcttgattgacagccttcaatca

SEQ ID NO: 5366754 - DNA, 25 bp, Homo sapien
taagtaatgaaatagtagctagaat

SEQ ID NO: 5366755 - DNA, 25 bp, Homo sapien
aaatgtcctctgtggattagggggc

SEQ ID NO: 5366756 - DNA, 25 bp, Homo sapien
ggctgatgcatacatagaaagattg

SEQ ID NO: 5366757 - DNA, 25 bp, Homo sapien
tgtccatggagccacgaggcacaag

SEQ ID NO: 5366758 - DNA, 25 bp, Homo sapien
cattggaagcgtgggcatcataggc

SEQ ID NO: 5366759 - DNA, 25 bp, Homo sapien
gcacaagggccgcacgtggattttg

SEQ ID NO: 5366760 - DNA, 25 bp, Homo sapien
ggtgatgaggcttgaggacagctcc

SEQ ID NO: 5366761 - DNA, 25 bp, Homo sapien
acacctgaagcgtaaccttaaggcg

SEQ ID NO: 5366762 - DNA, 25 bp, Homo sapien
ttggattgatgatcagcaaattggg

SEQ ID NO: 5366763 - DNA, 25 bp, Homo sapien
taggctggaacacctgaagcgtaac

SEQ ID NO: 5366764 - DNA, 25 bp, Homo sapien
aggatgctggttaggctggaacacc

SEQ ID NO: 5366765 - DNA, 25 bp, Homo sapien
cttgtttggtgtgaaatctgtaaac

SEQ ID NO: 5366766 - DNA, 25 bp, Homo sapien
tggtgtgaaatctgtaaacatctcc

SEQ ID NO: 5366767 - DNA, 25 bp, Homo sapien
tgaaatctgtaaacatctccttcct

SEQ ID NO: 5366768 - DNA, 25 bp, Homo sapien
tttggtgtgaaatctgtaaacatct

SEQ ID NO: 5366769 - DNA, 25 bp, Homo sapien
ccatgagggcaagcacgaagccagc

SEQ ID NO: 5366770 - DNA, 25 bp, Homo sapien
accatgagggcaagcacgaagccag

SEQ ID NO: 5366771 - DNA, 25 bp, Homo sapien
catgagggcaagcacgaagccagct

SEQ ID NO: 5366772 - DNA, 25 bp, Homo sapien
atgagggcaagcacgaagccagctg

SEQ ID NO: 5366773 - DNA, 25 bp, Homo sapien
ggctcagagcgctcgttcctttgga

SEQ ID NO: 5366774 - DNA, 25 bp, Homo sapien
gtgagcacatgcttccgcacagaca

SEQ ID NO: 5366775 - DNA, 25 bp, Homo sapien
tgatgtctacttgggctgaaggctc

SEQ ID NO: 5366776 - DNA, 25 bp, Homo sapien
tcgttcctttggagaccctgctgca

SEQ ID NO: 5366777 - DNA, 25 bp, Homo sapien
gaagagatactggttcttgatgacc

SEQ ID NO: 5366778 - DNA, 25 bp, Homo sapien
tagaagttgtttactgagtatttcg

SEQ ID NO: 5366779 - DNA, 25 bp, Homo sapien
cagtgggagaaagaccagtagtcaa

SEQ ID NO: 5366780 - DNA, 25 bp, Homo sapien
tgagtatttcgggttgaagagatac

SEQ ID NO: 5366781 - DNA, 25 bp, Homo sapien
tacttctgctaggacattgggcagc

SEQ ID NO: 5366782 - DNA, 25 bp, Homo sapien
gcgctggtccgttgaaagtgcctcc

SEQ ID NO: 5366783 - DNA, 25 bp, Homo sapien
tctccgagcagtccgtggaatacca

SEQ ID NO: 5366784 - DNA, 25 bp, Homo sapien
tggaataccaagtgacaggcgctgg

SEQ ID NO: 5366785 - DNA, 25 bp, Homo sapien
cttctttggaccagcagcttccaga

SEQ ID NO: 5366786 - DNA, 25 bp, Homo sapien
ttggaccagcagcttccagagccat

SEQ ID NO: 5366787 - DNA, 25 bp, Homo sapien
tctttggaccagcagcttccagagc

SEQ ID NO: 5366788 - DNA, 25 bp, Homo sapien
tttggaccagcagcttccagagcca

SEQ ID NO: 5366789 - DNA, 25 bp, Homo sapien
gaattctgtcattggaatttcctgc

SEQ ID NO: 5366790 - DNA, 25 bp, Homo sapien
gcgaaacttcgcagacgctgacctc

SEQ ID NO: 5366791 - DNA, 25 bp, Homo sapien
aaattcagtacgcttgggagcagtg

SEQ ID NO: 5366792 - DNA, 25 bp, Homo sapien
cttttgcagctcttgccagcttgcg

SEQ ID NO: 5366793 - DNA, 25 bp, Homo sapien
agccaggccgggcaagaagaggtcc

SEQ ID NO: 5366794 - DNA, 25 bp, Homo sapien
caggccgggcaagaagaggtccggg

SEQ ID NO: 5366795 - DNA, 25 bp, Homo sapien
gagccaggccgggcaagaagaggtc

SEQ ID NO: 5366796 - DNA, 25 bp, Homo sapien
cgggcaagaagaggtccgggaggat

SEQ ID NO: 5366797 - DNA, 25 bp, Homo sapien
ctggggccatggtccaataccagtc

SEQ ID NO: 5366798 - DNA, 25 bp, Homo sapien
aatcccttctcgttcccgggtgctg

SEQ ID NO: 5366799 - DNA, 25 bp, Homo sapien
tgagtgcgctcttggctaggcaggg

SEQ ID NO: 5366800 - DNA, 25 bp, Homo sapien
tggtggacgctcagcaataggaagg

SEQ ID NO: 5366801 - DNA, 25 bp, Homo sapien
caaaacatgggtgtgaagtaactgg

SEQ ID NO: 5366802 - DNA, 25 bp, Homo sapien
gctctaggaatcttctggtcctgct

SEQ ID NO: 5366803 - DNA, 25 bp, Homo sapien
tgggagaagctctaggaatcttctg

SEQ ID NO: 5366804 - DNA, 25 bp, Homo sapien
gaaggcccgagggtcaccaagacgc

SEQ ID NO: 5366805 - DNA, 25 bp, Homo sapien
tctgtgtcctccagggctggcaggc

SEQ ID NO: 5366806 - DNA, 25 bp, Homo sapien
caggaggaggtggaggggtaatggt

SEQ ID NO: 5366807 - DNA, 25 bp, Homo sapien
caggaggtagaccatgtctgtgtcc

SEQ ID NO: 5366808 - DNA, 25 bp, Homo sapien
ggcaggaggaggtggaggggtaatg

SEQ ID NO: 5366809 - DNA, 25 bp, Homo sapien
gggctggcttgttactctccctggg

SEQ ID NO: 5366810 - DNA, 25 bp, Homo sapien
cattggggctggcttgttactctcc

SEQ ID NO: 5366811 - DNA, 25 bp, Homo sapien
ggcattggggctggcttgttactct

SEQ ID NO: 5366812 - DNA, 25 bp, Homo sapien
ctggcttgttactctccctgggtcc

SEQ ID NO: 5366813 - DNA, 25 bp, Homo sapien
gaaggtaagtccaggcttggccagg

SEQ ID NO: 5366814 - DNA, 25 bp, Homo sapien
catgggttggcaaggactgtgtgaa

SEQ ID NO: 5366815 - DNA, 25 bp, Homo sapien
gtgaactgtgtatgcagacagaagg

SEQ ID NO: 5366816 - DNA, 25 bp, Homo sapien
tgggcagcagcggtgatgatggcag

SEQ ID NO: 5366817 - DNA, 25 bp, Homo sapien
ctcactgcgttgaaattgagtgttt

SEQ ID NO: 5366818 - DNA, 25 bp, Homo sapien
actgcgttgaaattgagtgttttgg

SEQ ID NO: 5366819 - DNA, 25 bp, Homo sapien
tgagtgttttggtggccagtattga

SEQ ID NO: 5366820 - DNA, 25 bp, Homo sapien
ttttggtggccagtattgagctcac

SEQ ID NO: 5366821 - DNA, 25 bp, Homo sapien
tgtggaggagcactcagaaatgctg

SEQ ID NO: 5366822 - DNA, 25 bp, Homo sapien
ctgtggaggagcactcagaaatgct

SEQ ID NO: 5366823 - DNA, 25 bp, Homo sapien
gcactcagaaatgctggtgaccaca

SEQ ID NO: 5366824 - DNA, 25 bp, Homo sapien
agaaatgctggtgaccacagagacc

SEQ ID NO: 5366825 - DNA, 25 bp, Homo sapien
tctcctctcgtccagccttggaagc

SEQ ID NO: 5366826 - DNA, 25 bp, Homo sapien
ggaaaccctgtgtttgaattatgtg

SEQ ID NO: 5366827 - DNA, 25 bp, Homo sapien
atcactctcctctcgtccagccttg

SEQ ID NO: 5366828 - DNA, 25 bp, Homo sapien
actctcctctcgtccagccttggaa

SEQ ID NO: 5366829 - DNA, 25 bp, Homo sapien
tgtcatctgtgtcagtcctctctga

SEQ ID NO: 5366830 - DNA, 25 bp, Homo sapien
gccctgggttctgagggtccatggc

SEQ ID NO: 5366831 - DNA, 25 bp, Homo sapien
ctcttttctgccctgggttctgagg

SEQ ID NO: 5366832 - DNA, 25 bp, Homo sapien
cctgggttctgagggtccatggcct

SEQ ID NO: 5366833 - DNA, 25 bp, Homo sapien
ttctgccctgggttctgagggtcca

SEQ ID NO: 5366834 - DNA, 25 bp, Homo sapien
ttctccaactctaaattcgttgacc

SEQ ID NO: 5366835 - DNA, 25 bp, Homo sapien
tctccaactctaaattcgttgaccg

SEQ ID NO: 5366836 - DNA, 25 bp, Homo sapien
acttctccaactctaaattcgttga

SEQ ID NO: 5366837 - DNA, 25 bp, Homo sapien
ctccaactctaaattcgttgaccgg

SEQ ID NO: 5366838 - DNA, 25 bp, Homo sapien
gaaagcagtcaatgctgtgagtctg

SEQ ID NO: 5366839 - DNA, 25 bp, Homo sapien
tgtccccagagaaagcagtcaatgc

SEQ ID NO: 5366840 - DNA, 25 bp, Homo sapien
agcagtcaatgctgtgagtctgcat

SEQ ID NO: 5366841 - DNA, 25 bp, Homo sapien
ctgtccccagagaaagcagtcaatg

SEQ ID NO: 5366842 - DNA, 25 bp, Homo sapien
ggaggccggcatttggggacatgaa

SEQ ID NO: 5366843 - DNA, 25 bp, Homo sapien
aggaggccggcatttggggacatga

SEQ ID NO: 5366844 - DNA, 25 bp, Homo sapien
gaggccggcatttggggacatgaag

SEQ ID NO: 5366845 - DNA, 25 bp, Homo sapien
caggaggccggcatttggggacatg

SEQ ID NO: 5366846 - DNA, 25 bp, Homo sapien
gaggttcacctgaatctcccatggt

SEQ ID NO: 5366847 - DNA, 25 bp, Homo sapien
gactctggccggctttacggatggc

SEQ ID NO: 5366848 - DNA, 25 bp, Homo sapien
tgtgagatcttgtgggcacgtctgt

SEQ ID NO: 5366849 - DNA, 25 bp, Homo sapien
gatggctgcaattggcactccctgc

SEQ ID NO: 5366850 - DNA, 25 bp, Homo sapien
aggtgaatagggcattgtggcagta

SEQ ID NO: 5366851 - DNA, 25 bp, Homo sapien
tggcagtagccaagggcgggtggat

SEQ ID NO: 5366852 - DNA, 25 bp, Homo sapien
aatagggcattgtggcagtagccaa

SEQ ID NO: 5366853 - DNA, 25 bp, Homo sapien
tgcagaggtgaatagggcattgtgg

SEQ ID NO: 5366854 - DNA, 25 bp, Homo sapien
tttggccaactgttgtctgccagcc

SEQ ID NO: 5366855 - DNA, 25 bp, Homo sapien
tgactttggccaactgttgtctgcc

SEQ ID NO: 5366856 - DNA, 25 bp, Homo sapien
cttgactttggccaactgttgtctg

SEQ ID NO: 5366857 - DNA, 25 bp, Homo sapien
actttggccaactgttgtctgccag

SEQ ID NO: 5366858 - DNA, 25 bp, Homo sapien
gatttcagcatcttcgttgtgtgac

SEQ ID NO: 5366859 - DNA, 25 bp, Homo sapien
tgcgggaccggggtccattttctgc

SEQ ID NO: 5366860 - DNA, 25 bp, Homo sapien
cagcatcttcgttgtgtgactcagt

SEQ ID NO: 5366861 - DNA, 25 bp, Homo sapien
tttgagcatttgaagaattctgccc

SEQ ID NO: 5366862 - DNA, 25 bp, Homo sapien
gtgtttgcattccaccctgcgatgt

SEQ ID NO: 5366863 - DNA, 25 bp, Homo sapien
tgcgatgttgttctgacccctgtgt

SEQ ID NO: 5366864 - DNA, 25 bp, Homo sapien
tctgccagatgcagaccccaggaag

SEQ ID NO: 5366865 - DNA, 25 bp, Homo sapien
tttcagaagagatgcagtctgccag

SEQ ID NO: 5366866 - DNA, 25 bp, Homo sapien
cataccgcagaaggtatgggagcag

SEQ ID NO: 5366867 - DNA, 25 bp, Homo sapien
ttctctgaccgtacagtggctggtg

SEQ ID NO: 5366868 - DNA, 25 bp, Homo sapien
acatctccgacctgcccttgtggat

SEQ ID NO: 5366869 - DNA, 25 bp, Homo sapien
cggggcttccgattccatcctgctg

SEQ ID NO: 5366870 - DNA, 25 bp, Homo sapien
ggactcgcacaactctgccgcttgt

SEQ ID NO: 5366871 - DNA, 25 bp, Homo sapien
gatggattctgtggcaaaggccaag

SEQ ID NO: 5366872 - DNA, 25 bp, Homo sapien
caactctgccgcttgtcctgatgga

SEQ ID NO: 5366873 - DNA, 25 bp, Homo sapien
aaggcacataactggagtcccagcc

SEQ ID NO: 5366874 - DNA, 25 bp, Homo sapien
tacaacgtttgatctcaccacagtg

SEQ ID NO: 5366875 - DNA, 25 bp, Homo sapien
tgagcagcaggtacaacgtttgatc

SEQ ID NO: 5366876 - DNA, 25 bp, Homo sapien
tcctgctggaaccaccgcaggcgcc

SEQ ID NO: 5366877 - DNA, 25 bp, Homo sapien
agtgagtgcaaaaccatccttcctg

SEQ ID NO: 5366878 - DNA, 25 bp, Homo sapien
ctaaatctctccatctgagaaacat

SEQ ID NO: 5366879 - DNA, 25 bp, Homo sapien
taaatctctccatctgagaaacatc

SEQ ID NO: 5366880 - DNA, 25 bp, Homo sapien
gcttcagccagttttgtaaggtttg

SEQ ID NO: 5366881 - DNA, 25 bp, Homo sapien
cttcagccagttttgtaaggtttgg

SEQ ID NO: 5366882 - DNA, 25 bp, Homo sapien
ttcagccagttttgtaaggtttgga

SEQ ID NO: 5366883 - DNA, 25 bp, Homo sapien
tcagccagttttgtaaggtttggaa

SEQ ID NO: 5366884 - DNA, 25 bp, Homo sapien
acctggccgatcctccgatgggtct

SEQ ID NO: 5366885 - DNA, 25 bp, Homo sapien
gatgggtcttcctggtgctgtgact

SEQ ID NO: 5366886 - DNA, 25 bp, Homo sapien
tgtgactgtctgtgactagtcgtgg

SEQ ID NO: 5366887 - DNA, 25 bp, Homo sapien
ctgtgactagtcgtggatgccggct

SEQ ID NO: 5366888 - DNA, 25 bp, Homo sapien
ctgggagcagcggttaccggaaatc

SEQ ID NO: 5366889 - DNA, 25 bp, Homo sapien
cagcggttaccggaaatctgtggct

SEQ ID NO: 5366890 - DNA, 25 bp, Homo sapien
ttaccggaaatctgtggctttctgc

SEQ ID NO: 5366891 - DNA, 25 bp, Homo sapien
gagcagcggttaccggaaatctgtg

SEQ ID NO: 5366892 - DNA, 25 bp, Homo sapien
ctgtatctatcaggttcaggcattc

SEQ ID NO: 5366893 - DNA, 25 bp, Homo sapien
gtatctatcaggttcaggcattctc

SEQ ID NO: 5366894 - DNA, 25 bp, Homo sapien
ctatcaggttcaggcattctcctgc

SEQ ID NO: 5366895 - DNA, 25 bp, Homo sapien
tatctatcaggttcaggcattctcc

SEQ ID NO: 5366896 - DNA, 25 bp, Homo sapien
tcagggtgattagtttcgcctttta

SEQ ID NO: 5366897 - DNA, 25 bp, Homo sapien
caagttcagggtgattagtttcgcc

SEQ ID NO: 5366898 - DNA, 25 bp, Homo sapien
tcaagttcagggtgattagtttcgc

SEQ ID NO: 5366899 - DNA, 25 bp, Homo sapien
agttcagggtgattagtttcgcctt

SEQ ID NO: 5366900 - DNA, 25 bp, Homo sapien
cctgcggactttcctcgcaataagg

SEQ ID NO: 5366901 - DNA, 25 bp, Homo sapien
cctgttggtccagaaccctgcggac

SEQ ID NO: 5366902 - DNA, 25 bp, Homo sapien
tgttggtccagaaccctgcggactt

SEQ ID NO: 5366903 - DNA, 25 bp, Homo sapien
ttcctcgcaataagggcacagactg

SEQ ID NO: 5366904 - DNA, 25 bp, Homo sapien
aggctctgagaacgcgatttatgtc

SEQ ID NO: 5366905 - DNA, 25 bp, Homo sapien
ttatgtcaccgcgttggcgacttac

SEQ ID NO: 5366906 - DNA, 25 bp, Homo sapien
ttttaactctttgcgtgccttccca

SEQ ID NO: 5366907 - DNA, 25 bp, Homo sapien
cccaggccatgcgtcctggtgcgag

SEQ ID NO: 5366908 - DNA, 25 bp, Homo sapien
gaacatttcgtgttttcggagcaga

SEQ ID NO: 5366909 - DNA, 25 bp, Homo sapien
gacacggttttgtctctgcctggga

SEQ ID NO: 5366910 - DNA, 25 bp, Homo sapien
gattcgtcaggacgttttgcagcat

SEQ ID NO: 5366911 - DNA, 25 bp, Homo sapien
cctgcttcaaaaccgaacatttcgt

SEQ ID NO: 5366912 - DNA, 25 bp, Homo sapien
actgcaacatccaattttgtggaga

SEQ ID NO: 5366913 - DNA, 25 bp, Homo sapien
tggcaaagcgttttgtaactaaata

SEQ ID NO: 5366914 - DNA, 25 bp, Homo sapien
cttaagtctgtaaaagcaactgcaa

SEQ ID NO: 5366915 - DNA, 25 bp, Homo sapien
ttccattacaaagttggcaaagcgt

SEQ ID NO: 5366916 - DNA, 25 bp, Homo sapien
tgagaggtaagagcttgggctccct

SEQ ID NO: 5366917 - DNA, 25 bp, Homo sapien
ttgagaggtaagagcttgggctccc

SEQ ID NO: 5366918 - DNA, 25 bp, Homo sapien
tgggtgcagggtgcatcgggctgct

SEQ ID NO: 5366919 - DNA, 25 bp, Homo sapien
tgcagggtgcatcgggctgctggcc

SEQ ID NO: 5366920 - DNA, 25 bp, Homo sapien
gatctcagttgaaatttggaatatt

SEQ ID NO: 5366921 - DNA, 25 bp, Homo sapien
gctggaagcttgatctcagttgaaa

SEQ ID NO: 5366922 - DNA, 25 bp, Homo sapien
gcttctgctggaagcttgatctcag

SEQ ID NO: 5366923 - DNA, 25 bp, Homo sapien
aaaatgaaggcttctgctggaagct

SEQ ID NO: 5366924 - DNA, 25 bp, Homo sapien
ggtacggcttgcctgagagtcccaa

SEQ ID NO: 5366925 - DNA, 25 bp, Homo sapien
gctgccacatgcctgattccagtag

SEQ ID NO: 5366926 - DNA, 25 bp, Homo sapien
gagcacattcattagagcctgctgc

SEQ ID NO: 5366927 - DNA, 25 bp, Homo sapien
attccagtagaagccggagatggcg

SEQ ID NO: 5366928 - DNA, 25 bp, Homo sapien
ctttgaattaacagcatatagaggg

SEQ ID NO: 5366929 - DNA, 25 bp, Homo sapien
catcagagtgaacagcatagtctct

SEQ ID NO: 5366930 - DNA, 25 bp, Homo sapien
gcctgactcaggactaacctgagtg

SEQ ID NO: 5366931 - DNA, 25 bp, Homo sapien
cagggagaacactcctgggtcctgg

SEQ ID NO: 5366932 - DNA, 25 bp, Homo sapien
caagcaggcatctgggttcacatca

SEQ ID NO: 5366933 - DNA, 25 bp, Homo sapien
cacagggatgactgaaggtccttgc

SEQ ID NO: 5366934 - DNA, 25 bp, Homo sapien
cacatcaagtcccatgatcagaggg

SEQ ID NO: 5366935 - DNA, 25 bp, Homo sapien
gcacagccctctgggtgaaagctca

SEQ ID NO: 5366936 - DNA, 25 bp, Homo sapien
gaggcaggtttagctggggtctgca

SEQ ID NO: 5366937 - DNA, 25 bp, Homo sapien
gcaggtttagctggggtctgcatca

SEQ ID NO: 5366938 - DNA, 25 bp, Homo sapien
gcacaggttgatttgagagccactg

SEQ ID NO: 5366939 - DNA, 25 bp, Homo sapien
cacaggcacaggttgatttgagagc

SEQ ID NO: 5366940 - DNA, 25 bp, Homo sapien
tgggccatccacgtccacctgccct

SEQ ID NO: 5366941 - DNA, 25 bp, Homo sapien
tcttgggccatccacgtccacctgc

SEQ ID NO: 5366942 - DNA, 25 bp, Homo sapien
acctgccctcccttcagcgtggcca

SEQ ID NO: 5366943 - DNA, 25 bp, Homo sapien
gggccatccacgtccacctgccctc

SEQ ID NO: 5366944 - DNA, 25 bp, Homo sapien
ttagaatcggggaaccgcggccaca

SEQ ID NO: 5366945 - DNA, 25 bp, Homo sapien
tgacagcccaatctttactgactag

SEQ ID NO: 5366946 - DNA, 25 bp, Homo sapien
ttgatgaaacacatcgccgtcacag

SEQ ID NO: 5366947 - DNA, 25 bp, Homo sapien
gctgacaccaggcttccaaccaggg

SEQ ID NO: 5366948 - DNA, 25 bp, Homo sapien
ttggccaccagcaaattgctgctcg

SEQ ID NO: 5366949 - DNA, 25 bp, Homo sapien
accagcaaattgctgctcgtttgca

SEQ ID NO: 5366950 - DNA, 25 bp, Homo sapien
aattgctgctcgtttgcatccgtag

SEQ ID NO: 5366951 - DNA, 25 bp, Homo sapien
gcaaattgctgctcgtttgcatccg

SEQ ID NO: 5366952 - DNA, 25 bp, Homo sapien
ccatgctaggaaggccggccacacg

SEQ ID NO: 5366953 - DNA, 25 bp, Homo sapien
aggccggccacacgggagccacgct

SEQ ID NO: 5366954 - DNA, 25 bp, Homo sapien
gccggccacacgggagccacgctca

SEQ ID NO: 5366955 - DNA, 25 bp, Homo sapien
ggccggccacacgggagccacgctc

SEQ ID NO: 5366956 - DNA, 25 bp, Homo sapien
ggaacaaagagtctcacatggcagg

SEQ ID NO: 5366957 - DNA, 25 bp, Homo sapien
caaggagacggtgttaaaccattcg

SEQ ID NO: 5366958 - DNA, 25 bp, Homo sapien
gcttccacgaccattcaccaaggat

SEQ ID NO: 5366959 - DNA, 25 bp, Homo sapien
agaaatctgcttccacgaccattca

SEQ ID NO: 5366960 - DNA, 25 bp, Homo sapien
ccatatctatttgaggatgagcgtt

SEQ ID NO: 5366961 - DNA, 25 bp, Homo sapien
atctgaccgttctgcagtcccctgg

SEQ ID NO: 5366962 - DNA, 25 bp, Homo sapien
gatgagcgtttgaagcagctcctct

SEQ ID NO: 5366963 - DNA, 25 bp, Homo sapien
gccagaagagaggacgagcatgatt

SEQ ID NO: 5366964 - DNA, 25 bp, Homo sapien
cattgtgcgctatcccagaatattc

SEQ ID NO: 5366965 - DNA, 25 bp, Homo sapien
tgcattgtgcgctatcccagaatat

SEQ ID NO: 5366966 - DNA, 25 bp, Homo sapien
gcattgtgcgctatcccagaatatt

SEQ ID NO: 5366967 - DNA, 25 bp, Homo sapien
gtgcagatgtgcaggaagtagaggc

SEQ ID NO: 5366968 - DNA, 25 bp, Homo sapien
tggctctgacagtgccacgcatggg

SEQ ID NO: 5366969 - DNA, 25 bp, Homo sapien
catggggtgcctagaaactgctgtg

SEQ ID NO: 5366970 - DNA, 25 bp, Homo sapien
ccagaggtgcagatgtgcaggaagt

SEQ ID NO: 5366971 - DNA, 25 bp, Homo sapien
ggtctcgggccggtgtgcatgcagg

SEQ ID NO: 5366972 - DNA, 25 bp, Homo sapien
cactctcggtggtctcgggccggtg

SEQ ID NO: 5366973 - DNA, 25 bp, Homo sapien
tctcggtggtctcgggccggtgtgc

SEQ ID NO: 5366974 - DNA, 25 bp, Homo sapien
ctgcactctcggtggtctcgggccg

SEQ ID NO: 5366975 - DNA, 25 bp, Homo sapien
agagctttgatttacggttgctgcc

SEQ ID NO: 5366976 - DNA, 25 bp, Homo sapien
ccaattgatgaaccgacctgcggct

SEQ ID NO: 5366977 - DNA, 25 bp, Homo sapien
ggcttcccgtcagggcttggcaagc

SEQ ID NO: 5366978 - DNA, 25 bp, Homo sapien
ggttgctgcctcagaaaccccgatc

SEQ ID NO: 5366979 - DNA, 25 bp, Homo sapien
tttgatgcacagtctgggccgggct

SEQ ID NO: 5366980 - DNA, 25 bp, Homo sapien
cttccatttgatgcacagtctgggc

SEQ ID NO: 5366981 - DNA, 25 bp, Homo sapien
catttgatgcacagtctgggccggg

SEQ ID NO: 5366982 - DNA, 25 bp, Homo sapien
ggtggccagggaagcttggccgcac

SEQ ID NO: 5366983 - DNA, 25 bp, Homo sapien
aagcttcccgctggtctgccctgga

SEQ ID NO: 5366984 - DNA, 25 bp, Homo sapien
cagggggggagaacgcaggtgaaat

SEQ ID NO: 5366985 - DNA, 25 bp, Homo sapien
tgaaattccagaagcttcccgctgg

SEQ ID NO: 5366986 - DNA, 25 bp, Homo sapien
ggagaacgcaggtgaaattccagaa

SEQ ID NO: 5366987 - DNA, 25 bp, Homo sapien
caccagcacatgagtcaaggagctc

SEQ ID NO: 5366988 - DNA, 25 bp, Homo sapien
ctgaggagcaaaggcgctacaagcc

SEQ ID NO: 5366989 - DNA, 25 bp, Homo sapien
gatgcagtccactccatgatgggtc

SEQ ID NO: 5366990 - DNA, 25 bp, Homo sapien
caagccgtgtgggtagtcatggact

SEQ ID NO: 5366991 - DNA, 25 bp, Homo sapien
cctccagctaaagccagggtgagca

SEQ ID NO: 5366992 - DNA, 25 bp, Homo sapien
ctggcctcctccagctaaagccagg

SEQ ID NO: 5366993 - DNA, 25 bp, Homo sapien
ggcctcctccagctaaagccagggt

SEQ ID NO: 5366994 - DNA, 25 bp, Homo sapien
ctcctccagctaaagccagggtgag

SEQ ID NO: 5366995 - DNA, 25 bp, Homo sapien
tcggtgttaattgaagctgagtctt

SEQ ID NO: 5366996 - DNA, 25 bp, Homo sapien
tatagtcggtgttaattgaagctga

SEQ ID NO: 5366997 - DNA, 25 bp, Homo sapien
gacctgttatagtcggtgttaattg

SEQ ID NO: 5366998 - DNA, 25 bp, Homo sapien
ttaggacctgttatagtcggtgtta

SEQ ID NO: 5366999 - DNA, 25 bp, Homo sapien
ctgatcagggccacgtgagcaggct

SEQ ID NO: 5367000 - DNA, 25 bp, Homo sapien
tgtggcgcctccactctacggagtc

SEQ ID NO: 5367001 - DNA, 25 bp, Homo sapien
gccagagatcacctgtgcacaaagg

SEQ ID NO: 5367002 - DNA, 25 bp, Homo sapien
tggtcaggcagtcacggcgacgttt

SEQ ID NO: 5367003 - DNA, 25 bp, Homo sapien
ctttcatactctggataaactgctc

SEQ ID NO: 5367004 - DNA, 25 bp, Homo sapien
tgtgccttgtactaggaatgcctcc

SEQ ID NO: 5367005 - DNA, 25 bp, Homo sapien
tccttcaggaccagtcacttctttg

SEQ ID NO: 5367006 - DNA, 25 bp, Homo sapien
cacttctttggacggctccttgtga

SEQ ID NO: 5367007 - DNA, 25 bp, Homo sapien
gagacatctgtgaatttcaaatgca

SEQ ID NO: 5367008 - DNA, 25 bp, Homo sapien
gactgagagacatctgtgaatttca

SEQ ID NO: 5367009 - DNA, 25 bp, Homo sapien
tgaagttttaaaagactgagagaca

SEQ ID NO: 5367010 - DNA, 25 bp, Homo sapien
ttaaaagactgagagacatctgtga

SEQ ID NO: 5367011 - DNA, 25 bp, Homo sapien
agaatctgacacagactaataagtt

SEQ ID NO: 5367012 - DNA, 25 bp, Homo sapien
caacttagatgactctatgattgct

SEQ ID NO: 5367013 - DNA, 25 bp, Homo sapien
tgacacagactaataagtttcattg

SEQ ID NO: 5367014 - DNA, 25 bp, Homo sapien
tagatgactctatgattgctcagaa

SEQ ID NO: 5367015 - DNA, 25 bp, Homo sapien
gcaaataccacctgaaatatgaatt

SEQ ID NO: 5367016 - DNA, 25 bp, Homo sapien
tatctatgactgttaagaaatgtta

SEQ ID NO: 5367017 - DNA, 25 bp, Homo sapien
tatatatctatgactgttaagaaat

SEQ ID NO: 5367018 - DNA, 25 bp, Homo sapien
gaatgcaaataccacctgaaatatg

SEQ ID NO: 5367019 - DNA, 25 bp, Homo sapien
tatctgcatatacacaacgggaccc

SEQ ID NO: 5367020 - DNA, 25 bp, Homo sapien
tatataggtacaagctgagtatccc

SEQ ID NO: 5367021 - DNA, 25 bp, Homo sapien
cgctctttggtataatgcactgcag

SEQ ID NO: 5367022 - DNA, 25 bp, Homo sapien
actgcagtgacaatagcttggtagc

SEQ ID NO: 5367023 - DNA, 25 bp, Homo sapien
cagtaactgtggctgttcaccaaat

SEQ ID NO: 5367024 - DNA, 25 bp, Homo sapien
cattcactctggcttatgtattgac

SEQ ID NO: 5367025 - DNA, 25 bp, Homo sapien
cttgtacttgaaagtacttttccat

SEQ ID NO: 5367026 - DNA, 25 bp, Homo sapien
caccaaatatagaagtgataaaaca

SEQ ID NO: 5367027 - DNA, 25 bp, Homo sapien
taaagtttgcttgtgatgatgacct

SEQ ID NO: 5367028 - DNA, 25 bp, Homo sapien
ataaagtttgcttgtgatgatgacc

SEQ ID NO: 5367029 - DNA, 25 bp, Homo sapien
aaaaaatatgggcttggtcctgatt

SEQ ID NO: 5367030 - DNA, 25 bp, Homo sapien
gataaattcttctagagagctctca

SEQ ID NO: 5367031 - DNA, 25 bp, Homo sapien
tctggccatgggactttgaaaaaga

SEQ ID NO: 5367032 - DNA, 25 bp, Homo sapien
caacagcagggttctcaagtggagc

SEQ ID NO: 5367033 - DNA, 25 bp, Homo sapien
tatgtaccagacaactgctctaggc

SEQ ID NO: 5367034 - DNA, 25 bp, Homo sapien
aaataattgcatgcctactatgtac

SEQ ID NO: 5367035 - DNA, 25 bp, Homo sapien
gataaagatccatgcccttggagag

SEQ ID NO: 5367036 - DNA, 25 bp, Homo sapien
tctggggatggctatatcaatgaac

SEQ ID NO: 5367037 - DNA, 25 bp, Homo sapien
gccttgcgattatcatccacatgct

SEQ ID NO: 5367038 - DNA, 25 bp, Homo sapien
gattatcatccacatgctactcatg

SEQ ID NO: 5367039 - DNA, 25 bp, Homo sapien
tcatccacatgctactcatggctgc

SEQ ID NO: 5367040 - DNA, 25 bp, Homo sapien
aaacctacacgccttgcgattatca

SEQ ID NO: 5367041 - DNA, 25 bp, Homo sapien
tttctctgcgtctttacgtccacca

SEQ ID NO: 5367042 - DNA, 25 bp, Homo sapien
caagctctgacatcaatgcacagga

SEQ ID NO: 5367043 - DNA, 25 bp, Homo sapien
gagttcgaatcgacagcctggttcc

SEQ ID NO: 5367044 - DNA, 25 bp, Homo sapien
caccattggtttcacaagctctgac

SEQ ID NO: 5367045 - DNA, 25 bp, Homo sapien
ttccccaacaaagggcacagcttta

SEQ ID NO: 5367046 - DNA, 25 bp, Homo sapien
tagctgtgtactagggccacggctg

SEQ ID NO: 5367047 - DNA, 25 bp, Homo sapien
tattcaataagagcagccattttcc

SEQ ID NO: 5367048 - DNA, 25 bp, Homo sapien
aataactcatggtaggtcagcagcc

SEQ ID NO: 5367049 - DNA, 25 bp, Homo sapien
gcagaagtaagaagcgctaggaaga

SEQ ID NO: 5367050 - DNA, 25 bp, Homo sapien
ggcaaatactgaacacataacatgt

SEQ ID NO: 5367051 - DNA, 25 bp, Homo sapien
gagctgacatttagttggagaagga

SEQ ID NO: 5367052 - DNA, 25 bp, Homo sapien
agacaaagcataaggaagcagaagt

SEQ ID NO: 5367053 - DNA, 25 bp, Homo sapien
aggactggctgtgaaatatctcgga

SEQ ID NO: 5367054 - DNA, 25 bp, Homo sapien
gaaaggactggctgtgaaatatctc

SEQ ID NO: 5367055 - DNA, 25 bp, Homo sapien
ggctgtgaaatatctcggaggtagc

SEQ ID NO: 5367056 - DNA, 25 bp, Homo sapien
gaaatatctcggaggtagctttctt

SEQ ID NO: 5367057 - DNA, 25 bp, Homo sapien
ttcttggtgaagtctcttaaggtgc

SEQ ID NO: 5367058 - DNA, 25 bp, Homo sapien
taggaaaaacattgcctacatagcc

SEQ ID NO: 5367059 - DNA, 25 bp, Homo sapien
caagtgtcaattgtcaactatgtca

SEQ ID NO: 5367060 - DNA, 25 bp, Homo sapien
aagctctctgacctccctttaggcg

SEQ ID NO: 5367061 - DNA, 25 bp, Homo sapien
taggcgcctaaaggcaggatacaga

SEQ ID NO: 5367062 - DNA, 25 bp, Homo sapien
tatgaagggcataaaactctggaaa

SEQ ID NO: 5367063 - DNA, 25 bp, Homo sapien
gatggctggcactgagtaagcactc

SEQ ID NO: 5367064 - DNA, 25 bp, Homo sapien
catatttctcaaagctatgaagggc

SEQ ID NO: 5367065 - DNA, 25 bp, Homo sapien
ccatataaagggagcaatgtcacct

SEQ ID NO: 5367066 - DNA, 25 bp, Homo sapien
tctggttactcaaatggaggttgca

SEQ ID NO: 5367067 - DNA, 25 bp, Homo sapien
ggttccattattcactacgacaggc

SEQ ID NO: 5367068 - DNA, 25 bp, Homo sapien
aaaatatcttgaaaggtcacacagc

SEQ ID NO: 5367069 - DNA, 25 bp, Homo sapien
tcatcagtatggtacgatagtcccc

SEQ ID NO: 5367070 - DNA, 25 bp, Homo sapien
ccaaggttgcggtaagctgagattg

SEQ ID NO: 5367071 - DNA, 25 bp, Homo sapien
gccaaggttgcggtaagctgagatt

SEQ ID NO: 5367072 - DNA, 25 bp, Homo sapien
cgacacattctcgtactcaaagatc

SEQ ID NO: 5367073 - DNA, 25 bp, Homo sapien
cacattctcgtactcaaagatcctt

SEQ ID NO: 5367074 - DNA, 25 bp, Homo sapien
acatccagtcgtgtttcttctttta

SEQ ID NO: 5367075 - DNA, 25 bp, Homo sapien
agaaaacatccagtcgtgtttcttc

SEQ ID NO: 5367076 - DNA, 25 bp, Homo sapien
cctgctaggcataagaaaacatcca

SEQ ID NO: 5367077 - DNA, 25 bp, Homo sapien
ggcataagaaaacatccagtcgtgt

SEQ ID NO: 5367078 - DNA, 25 bp, Homo sapien
tctctctcagcttctttcaatatgg

SEQ ID NO: 5367079 - DNA, 25 bp, Homo sapien
tctctcagcttctttcaatatggct

SEQ ID NO: 5367080 - DNA, 25 bp, Homo sapien
tctcagcttctttcaatatggcttc

SEQ ID NO: 5367081 - DNA, 25 bp, Homo sapien
ctctctctcagcttctttcaatatg

SEQ ID NO: 5367082 - DNA, 25 bp, Homo sapien
tctgacgttcaccatggaactcatg

SEQ ID NO: 5367083 - DNA, 25 bp, Homo sapien
ctctgacgttcaccatggaactcat

SEQ ID NO: 5367084 - DNA, 25 bp, Homo sapien
ctgacgttcaccatggaactcatgt

SEQ ID NO: 5367085 - DNA, 25 bp, Homo sapien
tctactatagactacctgaagaact

SEQ ID NO: 5367086 - DNA, 25 bp, Homo sapien
tcaagtacagttccgataagcctag

SEQ ID NO: 5367087 - DNA, 25 bp, Homo sapien
ccttcaattgggacatgtttgtgtt

SEQ ID NO: 5367088 - DNA, 25 bp, Homo sapien
actgttgttgcaaatctcactgatt

SEQ ID NO: 5367089 - DNA, 25 bp, Homo sapien
ccatgggatacagtcttgtgggaca

SEQ ID NO: 5367090 - DNA, 25 bp, Homo sapien
tatgtagcctccaaccaatgccttt

SEQ ID NO: 5367091 - DNA, 25 bp, Homo sapien
tgggaacatgacctacatcaggcct

SEQ ID NO: 5367092 - DNA, 25 bp, Homo sapien
cgtagcctgacctaagctgaagaat

SEQ ID NO: 5367093 - DNA, 25 bp, Homo sapien
gcaacagcggcactaatttgatgca

SEQ ID NO: 5367094 - DNA, 25 bp, Homo sapien
aaggatctcacgctttcctgcatgc

SEQ ID NO: 5367095 - DNA, 25 bp, Homo sapien
cactgttctggaatgctacatcaaa

SEQ ID NO: 5367096 - DNA, 25 bp, Homo sapien
taaaatagcacttgtcccaaggatc

SEQ ID NO: 5367097 - DNA, 25 bp, Homo sapien
gattctatatcatggttttgggaga

SEQ ID NO: 5367098 - DNA, 25 bp, Homo sapien
gccccatcatcctggatatataaaa

SEQ ID NO: 5367099 - DNA, 25 bp, Homo sapien
ggagattctaaagaacacatgcccc

SEQ ID NO: 5367100 - DNA, 25 bp, Homo sapien
taattagtcattaccaaatgattct

SEQ ID NO: 5367101 - DNA, 25 bp, Homo sapien
gcgcctgtaaagctcatagtgcctg

SEQ ID NO: 5367102 - DNA, 25 bp, Homo sapien
agcgcctgtaaagctcatagtgcct

SEQ ID NO: 5367103 - DNA, 25 bp, Homo sapien
cgcctgtaaagctcatagtgcctgg

SEQ ID NO: 5367104 - DNA, 25 bp, Homo sapien
catcttgtttccgacttttacctca

SEQ ID NO: 5367105 - DNA, 25 bp, Homo sapien
tcccacaacagcaaacggcaactgt

SEQ ID NO: 5367106 - DNA, 25 bp, Homo sapien
tactggcgagctttgaccatcttgt

SEQ ID NO: 5367107 - DNA, 25 bp, Homo sapien
accccaagggtactggcgagctttg

SEQ ID NO: 5367108 - DNA, 25 bp, Homo sapien
tagaaaccgtatctgctttggcaat

SEQ ID NO: 5367109 - DNA, 25 bp, Homo sapien
ttcattgcagcgttgaccttagcaa

SEQ ID NO: 5367110 - DNA, 25 bp, Homo sapien
tgaccttagcaatagtgtcatcatc

SEQ ID NO: 5367111 - DNA, 25 bp, Homo sapien
tggcaatcactggtataatgtttac

SEQ ID NO: 5367112 - DNA, 25 bp, Homo sapien
cacacccggcctgtattaggtatta

SEQ ID NO: 5367113 - DNA, 25 bp, Homo sapien
ccttctcaggtcatataagacatgc

SEQ ID NO: 5367114 - DNA, 25 bp, Homo sapien
tagactataagcctgtacagcatgt

SEQ ID NO: 5367115 - DNA, 25 bp, Homo sapien
catgtgtggcttaaccatggcgaca

SEQ ID NO: 5367116 - DNA, 25 bp, Homo sapien
gttcttcatggttaagagatcaagt

SEQ ID NO: 5367117 - DNA, 25 bp, Homo sapien
agatcaagtgtcttcagagagtggc

SEQ ID NO: 5367118 - DNA, 25 bp, Homo sapien
taagagatcaagtgtcttcagagag

SEQ ID NO: 5367119 - DNA, 25 bp, Homo sapien
catggttaagagatcaagtgtcttc

SEQ ID NO: 5367120 - DNA, 25 bp, Homo sapien
cctgaaataggtcagtaagaggacc

SEQ ID NO: 5367121 - DNA, 25 bp, Homo sapien
taaaaacccaggtacagcatagcaa

SEQ ID NO: 5367122 - DNA, 25 bp, Homo sapien
ttaatagcaaagatagaagccagga

SEQ ID NO: 5367123 - DNA, 25 bp, Homo sapien
gacggacacactattcagagtcaag

SEQ ID NO: 5367124 - DNA, 25 bp, Homo sapien
caattgaacattactttcctggagt

SEQ ID NO: 5367125 - DNA, 25 bp, Homo sapien
aaatcccactgtattcacaatggtc

SEQ ID NO: 5367126 - DNA, 25 bp, Homo sapien
caatcagtgttgattttccaattcc

SEQ ID NO: 5367127 - DNA, 25 bp, Homo sapien
aaaatgtgaggattcatagtcttca

SEQ ID NO: 5367128 - DNA, 25 bp, Homo sapien
aagcagaaaccttgctgaatggatc

SEQ ID NO: 5367129 - DNA, 25 bp, Homo sapien
aaagcagaaaccttgctgaatggat

SEQ ID NO: 5367130 - DNA, 25 bp, Homo sapien
taaagcagaaaccttgctgaatgga

SEQ ID NO: 5367131 - DNA, 25 bp, Homo sapien
agtcaacgaacgaatgttttctctt

SEQ ID NO: 5367132 - DNA, 25 bp, Homo sapien
gatccttgtgaagacatacaagttg

SEQ ID NO: 5367133 - DNA, 25 bp, Homo sapien
tgtgaagacatacaagttgttttcg

SEQ ID NO: 5367134 - DNA, 25 bp, Homo sapien
gttgttttcgttgccatgtgagact

SEQ ID NO: 5367135 - DNA, 25 bp, Homo sapien
gacatacaagttgttttcgttgcca

SEQ ID NO: 5367136 - DNA, 25 bp, Homo sapien
tcctctgtatactacagtgtggtgt

SEQ ID NO: 5367137 - DNA, 25 bp, Homo sapien
cggcattgcaatgaaagagagaacc

SEQ ID NO: 5367138 - DNA, 25 bp, Homo sapien
gcaattacaatgaaccatgctgcaa

SEQ ID NO: 5367139 - DNA, 25 bp, Homo sapien
acatatcgacgctcttcattgagac

SEQ ID NO: 5367140 - DNA, 25 bp, Homo sapien
gagacaaaatagtgtacatcgtgac

SEQ ID NO: 5367141 - DNA, 25 bp, Homo sapien
ctgaccttgtgactgaacactccga

SEQ ID NO: 5367142 - DNA, 25 bp, Homo sapien
cacagtgaataaatcttacagagac

SEQ ID NO: 5367143 - DNA, 25 bp, Homo sapien
catcgtgactaaatttcatatatgc

SEQ ID NO: 5367144 - DNA, 25 bp, Homo sapien
taggtaaatgggaaagtgtagctaa

SEQ ID NO: 5367145 - DNA, 25 bp, Homo sapien
tgcactctactctgagcgacaagag

SEQ ID NO: 5367146 - DNA, 25 bp, Homo sapien
gaatacctgaggataagctaaataa

SEQ ID NO: 5367147 - DNA, 25 bp, Homo sapien
gctaaaaaagctaatcagaatacct

SEQ ID NO: 5367148 - DNA, 25 bp, Homo sapien
tgggatacagttttctcatggacac

SEQ ID NO: 5367149 - DNA, 25 bp, Homo sapien
tggtcatatgatcttaggctgaaac

SEQ ID NO: 5367150 - DNA, 25 bp, Homo sapien
tgtaacacgcactctaagacaatag

SEQ ID NO: 5367151 - DNA, 25 bp, Homo sapien
cagggagcctgaccaggtagcctat

SEQ ID NO: 5367152 - DNA, 25 bp, Homo sapien
cacacttggaaaaccgctggcttac

SEQ ID NO: 5367153 - DNA, 25 bp, Homo sapien
caccatcggataaaacgggagagct

SEQ ID NO: 5367154 - DNA, 25 bp, Homo sapien
gaaaactcgatgtacacgaccttgg

SEQ ID NO: 5367155 - DNA, 25 bp, Homo sapien
gaggaaaacttggacgaccacacca

SEQ ID NO: 5367156 - DNA, 25 bp, Homo sapien
ccgttatagccgtaagagacccaca

SEQ ID NO: 5367157 - DNA, 25 bp, Homo sapien
gcactgcgccttcaactccgttata

SEQ ID NO: 5367158 - DNA, 25 bp, Homo sapien
gatgaccgctattcaatcagtccgc

SEQ ID NO: 5367159 - DNA, 25 bp, Homo sapien
aagtcgttcaagaactctcccaccg

SEQ ID NO: 5367160 - DNA, 25 bp, Homo sapien
tgccgcgccacctcggaggaggcca

SEQ ID NO: 5367161 - DNA, 25 bp, Homo sapien
gccgcgccacctcggaggaggccat

SEQ ID NO: 5367162 - DNA, 25 bp, Homo sapien
ggtgccgcgccacctcggaggaggc

SEQ ID NO: 5367163 - DNA, 25 bp, Homo sapien
caggtgccgcgccacctcggaggag

SEQ ID NO: 5367164 - DNA, 25 bp, Homo sapien
cgcgaggaatgcaggcgggaactgc

SEQ ID NO: 5367165 - DNA, 25 bp, Homo sapien
actccaggaagacggcgcgaggaat

SEQ ID NO: 5367166 - DNA, 25 bp, Homo sapien
agcgttttgcctgcgccaagcgagc

SEQ ID NO: 5367167 - DNA, 25 bp, Homo sapien
taccctcgacgcctgaggactgagc

SEQ ID NO: 5367168 - DNA, 25 bp, Homo sapien
gctcctggaaggtgaaaagtagtca

SEQ ID NO: 5367169 - DNA, 25 bp, Homo sapien
gatgcttcagaaccatcagaaggtt

SEQ ID NO: 5367170 - DNA, 25 bp, Homo sapien
gcacttatgcatacatgtgggtgaa

SEQ ID NO: 5367171 - DNA, 25 bp, Homo sapien
tatgaacggtgtaaatttgagaagc

SEQ ID NO: 5367172 - DNA, 25 bp, Homo sapien
gcatttctgtaaacatgtctcgcct

SEQ ID NO: 5367173 - DNA, 25 bp, Homo sapien
ataataaggaggtcagcaacaaaca

SEQ ID NO: 5367174 - DNA, 25 bp, Homo sapien
taaggaggtcagcaacaaacatgtg

SEQ ID NO: 5367175 - DNA, 25 bp, Homo sapien
aataaggaggtcagcaacaaacatg

SEQ ID NO: 5367176 - DNA, 25 bp, Homo sapien
tgctctgagtacagtgtgcagtcag

SEQ ID NO: 5367177 - DNA, 25 bp, Homo sapien
gttttgtccctgtcagatccttgca

SEQ ID NO: 5367178 - DNA, 25 bp, Homo sapien
tctgtgagagtattctgatgctcgc

SEQ ID NO: 5367179 - DNA, 25 bp, Homo sapien
ggatcctggattgcctctatcttgg

SEQ ID NO: 5367180 - DNA, 25 bp, Homo sapien
tcaatgcacaggagttcgaatcgac

SEQ ID NO: 5367181 - DNA, 25 bp, Homo sapien
aataactcatggtaggtcagcagcc

SEQ ID NO: 5367182 - DNA, 25 bp, Homo sapien
gaacatgggagcatgcaacgctgct

SEQ ID NO: 5367183 - DNA, 25 bp, Homo sapien
cattagctgtgtactagggccacgg

SEQ ID NO: 5367184 - DNA, 25 bp, Homo sapien
gagctgacatttagttggagaagga

SEQ ID NO: 5367185 - DNA, 25 bp, Homo sapien
agacaaagcataaggaagcagaagt

SEQ ID NO: 5367186 - DNA, 25 bp, Homo sapien
ggcaaatactgaacacataacatgt

SEQ ID NO: 5367187 - DNA, 25 bp, Homo sapien
gcagaagtaagaagcgctaggaaga

SEQ ID NO: 5367188 - DNA, 25 bp, Homo sapien
gaaatatctcggaggtagctttctt

SEQ ID NO: 5367189 - DNA, 25 bp, Homo sapien
ttcttggtgaagtctcttaaggtgc

SEQ ID NO: 5367190 - DNA, 25 bp, Homo sapien
gaaaggactggctgtgaaatatctc

SEQ ID NO: 5367191 - DNA, 25 bp, Homo sapien
gctgtgaaatatctcggaggtagct

SEQ ID NO: 5367192 - DNA, 25 bp, Homo sapien
taggaaaaacattgcctacatagcc

SEQ ID NO: 5367193 - DNA, 25 bp, Homo sapien
caagtgtcaattgtcaactatgtca

SEQ ID NO: 5367194 - DNA, 25 bp, Homo sapien
taggcgcctaaaggcaggatacaga

SEQ ID NO: 5367195 - DNA, 25 bp, Homo sapien
aagctctctgacctccctttaggcg

SEQ ID NO: 5367196 - DNA, 25 bp, Homo sapien
catatttctcaaagctatgaagggc

SEQ ID NO: 5367197 - DNA, 25 bp, Homo sapien
ccatataaagggagcaatgtcacct

SEQ ID NO: 5367198 - DNA, 25 bp, Homo sapien
gatggctggcactgagtaagcactc

SEQ ID NO: 5367199 - DNA, 25 bp, Homo sapien
tatgaagggcataaaactctggaaa

SEQ ID NO: 5367200 - DNA, 25 bp, Homo sapien
ggttccattattcactacgacaggc

SEQ ID NO: 5367201 - DNA, 25 bp, Homo sapien
aaaatatcttgaaaggtcacacagc

SEQ ID NO: 5367202 - DNA, 25 bp, Homo sapien
tcatcagtatggtacgatagtcccc

SEQ ID NO: 5367203 - DNA, 25 bp, Homo sapien
tctggttactcaaatggaggttgca

SEQ ID NO: 5367204 - DNA, 25 bp, Homo sapien
cgacacattctcgtactcaaagatc

SEQ ID NO: 5367205 - DNA, 25 bp, Homo sapien
ccaaggttgcggtaagctgagattg

SEQ ID NO: 5367206 - DNA, 25 bp, Homo sapien
cacattctcgtactcaaagatcctt

SEQ ID NO: 5367207 - DNA, 25 bp, Homo sapien
gccaaggttgcggtaagctgagatt

SEQ ID NO: 5367208 - DNA, 25 bp, Homo sapien
acatccagtcgtgtttcttctttta

SEQ ID NO: 5367209 - DNA, 25 bp, Homo sapien
agaaaacatccagtcgtgtttcttc

SEQ ID NO: 5367210 - DNA, 25 bp, Homo sapien
ggcataagaaaacatccagtcgtgt

SEQ ID NO: 5367211 - DNA, 25 bp, Homo sapien
cctgctaggcataagaaaacatcca

SEQ ID NO: 5367212 - DNA, 25 bp, Homo sapien
ctctctctcagcttctttcaatatg

SEQ ID NO: 5367213 - DNA, 25 bp, Homo sapien
tctcagcttctttcaatatggcttc

SEQ ID NO: 5367214 - DNA, 25 bp, Homo sapien
tctctcagcttctttcaatatggct

SEQ ID NO: 5367215 - DNA, 25 bp, Homo sapien
tctctctcagcttctttcaatatgg

SEQ ID NO: 5367216 - DNA, 25 bp, Homo sapien
tctgacgttcaccatggaactcatg

SEQ ID NO: 5367217 - DNA, 25 bp, Homo sapien
ctctgacgttcaccatggaactcat

SEQ ID NO: 5367218 - DNA, 25 bp, Homo sapien
ctgacgttcaccatggaactcatgt

SEQ ID NO: 5367219 - DNA, 25 bp, Homo sapien
tctactatagactacctgaagaact

SEQ ID NO: 5367220 - DNA, 25 bp, Homo sapien
actgttgttgcaaatctcactgatt

SEQ ID NO: 5367221 - DNA, 25 bp, Homo sapien
tcaagtacagttccgataagcctag

SEQ ID NO: 5367222 - DNA, 25 bp, Homo sapien
ccttcaattgggacatgtttgtgtt

SEQ ID NO: 5367223 - DNA, 25 bp, Homo sapien
ccatgggatacagtcttgtgggaca

SEQ ID NO: 5367224 - DNA, 25 bp, Homo sapien
tgggaacatgacctacatcaggcct

SEQ ID NO: 5367225 - DNA, 25 bp, Homo sapien
cgtagcctgacctaagctgaagaat

SEQ ID NO: 5367226 - DNA, 25 bp, Homo sapien
tatgtagcctccaaccaatgccttt

SEQ ID NO: 5367227 - DNA, 25 bp, Homo sapien
cactgttctggaatgctacatcaaa

SEQ ID NO: 5367228 - DNA, 25 bp, Homo sapien
aaggatctcacgctttcctgcatgc

SEQ ID NO: 5367229 - DNA, 25 bp, Homo sapien
taaaatagcacttgtcccaaggatc

SEQ ID NO: 5367230 - DNA, 25 bp, Homo sapien
gcaacagcggcactaatttgatgca

SEQ ID NO: 5367231 - DNA, 25 bp, Homo sapien
gattctatatcatggttttgggaga

SEQ ID NO: 5367232 - DNA, 25 bp, Homo sapien
gccccatcatcctggatatataaaa

SEQ ID NO: 5367233 - DNA, 25 bp, Homo sapien
ggagattctaaagaacacatgcccc

SEQ ID NO: 5367234 - DNA, 25 bp, Homo sapien
taattagtcattaccaaatgattct

SEQ ID NO: 5367235 - DNA, 25 bp, Homo sapien
gcgcctgtaaagctcatagtgcctg

SEQ ID NO: 5367236 - DNA, 25 bp, Homo sapien
agcgcctgtaaagctcatagtgcct

SEQ ID NO: 5367237 - DNA, 25 bp, Homo sapien
cgcctgtaaagctcatagtgcctgg

SEQ ID NO: 5367238 - DNA, 25 bp, Homo sapien
catcttgtttccgacttttacctca

SEQ ID NO: 5367239 - DNA, 25 bp, Homo sapien
accccaagggtactggcgagctttg

SEQ ID NO: 5367240 - DNA, 25 bp, Homo sapien
tcccacaacagcaaacggcaactgt

SEQ ID NO: 5367241 - DNA, 25 bp, Homo sapien
tactggcgagctttgaccatcttgt

SEQ ID NO: 5367242 - DNA, 25 bp, Homo sapien
ttcattgcagcgttgaccttagcaa

SEQ ID NO: 5367243 - DNA, 25 bp, Homo sapien
tagaaaccgtatctgctttggcaat

SEQ ID NO: 5367244 - DNA, 25 bp, Homo sapien
tgaccttagcaatagtgtcatcatc

SEQ ID NO: 5367245 - DNA, 25 bp, Homo sapien
tggcaatcactggtataatgtttac

SEQ ID NO: 5367246 - DNA, 25 bp, Homo sapien
cacacccggcctgtattaggtatta

SEQ ID NO: 5367247 - DNA, 25 bp, Homo sapien
ccttctcaggtcatataagacatgc

SEQ ID NO: 5367248 - DNA, 25 bp, Homo sapien
tagactataagcctgtacagcatgt

SEQ ID NO: 5367249 - DNA, 25 bp, Homo sapien
catgtgtggcttaaccatggcgaca

SEQ ID NO: 5367250 - DNA, 25 bp, Homo sapien
gttcttcatggttaagagatcaagt

SEQ ID NO: 5367251 - DNA, 25 bp, Homo sapien
taagagatcaagtgtcttcagagag

SEQ ID NO: 5367252 - DNA, 25 bp, Homo sapien
catggttaagagatcaagtgtcttc

SEQ ID NO: 5367253 - DNA, 25 bp, Homo sapien
agatcaagtgtcttcagagagtggc

SEQ ID NO: 5367254 - DNA, 25 bp, Homo sapien
cctgaaataggtcagtaagaggacc

SEQ ID NO: 5367255 - DNA, 25 bp, Homo sapien
gacggacacactattcagagtcaag

SEQ ID NO: 5367256 - DNA, 25 bp, Homo sapien
ttaatagcaaagatagaagccagga

SEQ ID NO: 5367257 - DNA, 25 bp, Homo sapien
taaaaacccaggtacagcatagcaa

SEQ ID NO: 5367258 - DNA, 25 bp, Homo sapien
caattgaacattactttcctggagt

SEQ ID NO: 5367259 - DNA, 25 bp, Homo sapien
aaaatgtgaggattcatagtcttca

SEQ ID NO: 5367260 - DNA, 25 bp, Homo sapien
aaatcccactgtattcacaatggtc

SEQ ID NO: 5367261 - DNA, 25 bp, Homo sapien
caatcagtgttgattttccaattcc

SEQ ID NO: 5367262 - DNA, 25 bp, Homo sapien
aagcagaaaccttgctgaatggatc

SEQ ID NO: 5367263 - DNA, 25 bp, Homo sapien
taaagcagaaaccttgctgaatgga

SEQ ID NO: 5367264 - DNA, 25 bp, Homo sapien
aaagcagaaaccttgctgaatggat

SEQ ID NO: 5367265 - DNA, 25 bp, Homo sapien
agtcaacgaacgaatgttttctctt

SEQ ID NO: 5367266 - DNA, 25 bp, Homo sapien
gatccttgtgaagacatacaagttg

SEQ ID NO: 5367267 - DNA, 25 bp, Homo sapien
tgtgaagacatacaagttgttttcg

SEQ ID NO: 5367268 - DNA, 25 bp, Homo sapien
gttgttttcgttgccatgtgagact

SEQ ID NO: 5367269 - DNA, 25 bp, Homo sapien
gacatacaagttgttttcgttgcca

SEQ ID NO: 5367270 - DNA, 25 bp, Homo sapien
acatatcgacgctcttcattgagac

SEQ ID NO: 5367271 - DNA, 25 bp, Homo sapien
gcaattacaatgaaccatgctgcaa

SEQ ID NO: 5367272 - DNA, 25 bp, Homo sapien
cggcattgcaatgaaagagagaacc

SEQ ID NO: 5367273 - DNA, 25 bp, Homo sapien
tcctctgtatactacagtgtggtgt

SEQ ID NO: 5367274 - DNA, 25 bp, Homo sapien
cacagtgaataaatcttacagagac

SEQ ID NO: 5367275 - DNA, 25 bp, Homo sapien
gagacaaaatagtgtacatcgtgac

SEQ ID NO: 5367276 - DNA, 25 bp, Homo sapien
ctgaccttgtgactgaacactccga

SEQ ID NO: 5367277 - DNA, 25 bp, Homo sapien
catcgtgactaaatttcatatatgc

SEQ ID NO: 5367278 - DNA, 25 bp, Homo sapien
gctaaaaaagctaatcagaatacct

SEQ ID NO: 5367279 - DNA, 25 bp, Homo sapien
tgcactctactctgagcgacaagag

SEQ ID NO: 5367280 - DNA, 25 bp, Homo sapien
taggtaaatgggaaagtgtagctaa

SEQ ID NO: 5367281 - DNA, 25 bp, Homo sapien
gaatacctgaggataagctaaataa

SEQ ID NO: 5367282 - DNA, 25 bp, Homo sapien
tggtcatatgatcttaggctgaaac

SEQ ID NO: 5367283 - DNA, 25 bp, Homo sapien
tgggatacagttttctcatggacac

SEQ ID NO: 5367284 - DNA, 25 bp, Homo sapien
tgtaacacgcactctaagacaatag

SEQ ID NO: 5367285 - DNA, 25 bp, Homo sapien
cagggagcctgaccaggtagcctat

SEQ ID NO: 5367286 - DNA, 25 bp, Homo sapien
cacacttggaaaaccgctggcttac

SEQ ID NO: 5367287 - DNA, 25 bp, Homo sapien
caccatcggataaaacgggagagct

SEQ ID NO: 5367288 - DNA, 25 bp, Homo sapien
gaaaactcgatgtacacgaccttgg

SEQ ID NO: 5367289 - DNA, 25 bp, Homo sapien
gaggaaaacttggacgaccacacca

SEQ ID NO: 5367290 - DNA, 25 bp, Homo sapien
ccgttatagccgtaagagacccaca

SEQ ID NO: 5367291 - DNA, 25 bp, Homo sapien
gcactgcgccttcaactccgttata

SEQ ID NO: 5367292 - DNA, 25 bp, Homo sapien
gatgaccgctattcaatcagtccgc

SEQ ID NO: 5367293 - DNA, 25 bp, Homo sapien
aagtcgttcaagaactctcccaccg

SEQ ID NO: 5367294 - DNA, 25 bp, Homo sapien
cgcgaggaatgcaggcgggaactgc

SEQ ID NO: 5367295 - DNA, 25 bp, Homo sapien
taccctcgacgcctgaggactgagc

SEQ ID NO: 5367296 - DNA, 25 bp, Homo sapien
agcgttttgcctgcgccaagcgagc

SEQ ID NO: 5367297 - DNA, 25 bp, Homo sapien
actccaggaagacggcgcgaggaat

SEQ ID NO: 5367298 - DNA, 25 bp, Homo sapien
gatgcttcagaaccatcagaaggtt

SEQ ID NO: 5367299 - DNA, 25 bp, Homo sapien
tatgaacggtgtaaatttgagaagc

SEQ ID NO: 5367300 - DNA, 25 bp, Homo sapien
gctcctggaaggtgaaaagtagtca

SEQ ID NO: 5367301 - DNA, 25 bp, Homo sapien
gcacttatgcatacatgtgggtgaa

SEQ ID NO: 5367302 - DNA, 25 bp, Homo sapien
aataaggaggtcagcaacaaacatg

SEQ ID NO: 5367303 - DNA, 25 bp, Homo sapien
ataataaggaggtcagcaacaaaca

SEQ ID NO: 5367304 - DNA, 25 bp, Homo sapien
taaggaggtcagcaacaaacatgtg

SEQ ID NO: 5367305 - DNA, 25 bp, Homo sapien
gcatttctgtaaacatgtctcgcct

SEQ ID NO: 5367306 - DNA, 25 bp, Homo sapien
ggatcctggattgcctctatcttgg

SEQ ID NO: 5367307 - DNA, 25 bp, Homo sapien
tgctctgagtacagtgtgcagtcag

SEQ ID NO: 5367308 - DNA, 25 bp, Homo sapien
gttttgtccctgtcagatccttgca

SEQ ID NO: 5367309 - DNA, 25 bp, Homo sapien
tctgtgagagtattctgatgctcgc

SEQ ID NO: 5367310 - DNA, 25 bp, Homo sapien
cattggtatcttggggagcactggc

SEQ ID NO: 5367311 - DNA, 25 bp, Homo sapien
tcaatcacattggtatcttggggag

SEQ ID NO: 5367312 - DNA, 25 bp, Homo sapien
atcacattggtatcttggggagcac

SEQ ID NO: 5367313 - DNA, 25 bp, Homo sapien
gtttcgccattttgctcaatcacat

SEQ ID NO: 5367314 - DNA, 25 bp, Homo sapien
tgaggccaatctcgcaccacaagtt

SEQ ID NO: 5367315 - DNA, 25 bp, Homo sapien
ttttggctccataagatgttcaggc

SEQ ID NO: 5367316 - DNA, 25 bp, Homo sapien
tgaattcatatccacacctgtgagg

SEQ ID NO: 5367317 - DNA, 25 bp, Homo sapien
tataattaacaacgtcatgagctcc

SEQ ID NO: 5367318 - DNA, 25 bp, Homo sapien
tctggtaggcagttaggaacagccc

SEQ ID NO: 5367319 - DNA, 25 bp, Homo sapien
tgcctgaaaatctggtaggcagtta

SEQ ID NO: 5367320 - DNA, 25 bp, Homo sapien
aggcttttggaaagacccacaacag

SEQ ID NO: 5367321 - DNA, 25 bp, Homo sapien
cttttggaaagacccacaacagcat

SEQ ID NO: 5367322 - DNA, 25 bp, Homo sapien
gctcacagtacaactgccaggagag

SEQ ID NO: 5367323 - DNA, 25 bp, Homo sapien
gctgctcacagtacaactgccagga

SEQ ID NO: 5367324 - DNA, 25 bp, Homo sapien
cacagtacaactgccaggagagaga

SEQ ID NO: 5367325 - DNA, 25 bp, Homo sapien
cagctgctcacagtacaactgccag

SEQ ID NO: 5367326 - DNA, 25 bp, Homo sapien
tccaggtaggctgttaaaacaggcc

SEQ ID NO: 5367327 - DNA, 25 bp, Homo sapien
ggctgttaaaacaggcctcctataa

SEQ ID NO: 5367328 - DNA, 25 bp, Homo sapien
gtaggctgttaaaacaggcctccta

SEQ ID NO: 5367329 - DNA, 25 bp, Homo sapien
caggtaggctgttaaaacaggcctc

SEQ ID NO: 5367330 - DNA, 25 bp, Homo sapien
gagcatagcccagagaacttgttga

SEQ ID NO: 5367331 - DNA, 25 bp, Homo sapien
gaaggttgcaaccatcctgtcagca

SEQ ID NO: 5367332 - DNA, 25 bp, Homo sapien
gaggccatccaggttaaaatcgatt

SEQ ID NO: 5367333 - DNA, 25 bp, Homo sapien
aaatcgattttagagttggctgagc

SEQ ID NO: 5367334 - DNA, 25 bp, Homo sapien
tgagcccagatacctcttggggccc

SEQ ID NO: 5367335 - DNA, 25 bp, Homo sapien
gtgtactcctggatgcctgagagct

SEQ ID NO: 5367336 - DNA, 25 bp, Homo sapien
ccagatacctcttggggcccaagtg

SEQ ID NO: 5367337 - DNA, 25 bp, Homo sapien
gaaggagctagtgcctggtcacgat

SEQ ID NO: 5367338 - DNA, 25 bp, Homo sapien
gactgaatgagaactggctagatgg

SEQ ID NO: 5367339 - DNA, 25 bp, Homo sapien
caggagatcccagtggacagaggca

SEQ ID NO: 5367340 - DNA, 25 bp, Homo sapien
gccctggtgcttcctaaaccacaag

SEQ ID NO: 5367341 - DNA, 25 bp, Homo sapien
ggctagatggaagccctaacttcag

SEQ ID NO: 5367342 - DNA, 25 bp, Homo sapien
ggtgagatgactgatttgccctctc

SEQ ID NO: 5367343 - DNA, 25 bp, Homo sapien
tcaggtccagcgagtcagtgatggc

SEQ ID NO: 5367344 - DNA, 25 bp, Homo sapien
tgatggccacccctctacagagagc

SEQ ID NO: 5367345 - DNA, 25 bp, Homo sapien
caaactcccaacacaaccggaggct

SEQ ID NO: 5367346 - DNA, 25 bp, Homo sapien
ttgaatttgaagatccccgagatgc

SEQ ID NO: 5367347 - DNA, 25 bp, Homo sapien
ttgttgaatttgaagatccccgaga

SEQ ID NO: 5367348 - DNA, 25 bp, Homo sapien
tgttgaatttgaagatccccgagat

SEQ ID NO: 5367349 - DNA, 25 bp, Homo sapien
gttgaatttgaagatccccgagatg

SEQ ID NO: 5367350 - DNA, 25 bp, Homo sapien
tgtaggaggggtcttccacctcgtc

SEQ ID NO: 5367351 - DNA, 25 bp, Homo sapien
gacctccaagaaggagaaacttgtc

SEQ ID NO: 5367352 - DNA, 25 bp, Homo sapien
ccttgagatgattattgtaggaggg

SEQ ID NO: 5367353 - DNA, 25 bp, Homo sapien
acttgtcttgtagccggagcaggtc

SEQ ID NO: 5367354 - DNA, 25 bp, Homo sapien
gcaactagcagagcacaatttcacg

SEQ ID NO: 5367355 - DNA, 25 bp, Homo sapien
tcttggccattatgcatagtgtggc

SEQ ID NO: 5367356 - DNA, 25 bp, Homo sapien
cacagtaagagacattgccaaagag

SEQ ID NO: 5367357 - DNA, 25 bp, Homo sapien
gagccaaggtaggattaaacattga

SEQ ID NO: 5367358 - DNA, 25 bp, Homo sapien
gctgtcagttccgtcaagtcacctt

SEQ ID NO: 5367359 - DNA, 25 bp, Homo sapien
gtcagttccgtcaagtcaccttctc

SEQ ID NO: 5367360 - DNA, 25 bp, Homo sapien
ctgtcagttccgtcaagtcaccttc

SEQ ID NO: 5367361 - DNA, 25 bp, Homo sapien
tgtcagttccgtcaagtcaccttct

SEQ ID NO: 5367362 - DNA, 25 bp, Homo sapien
aactatgcacaaccaatcacgaaga

SEQ ID NO: 5367363 - DNA, 25 bp, Homo sapien
caattttctcttcaatcaatactgc

SEQ ID NO: 5367364 - DNA, 25 bp, Homo sapien
tggaggcccaaaggaagccctttga

SEQ ID NO: 5367365 - DNA, 25 bp, Homo sapien
tactgcagagatacaaggataaacc

SEQ ID NO: 5367366 - DNA, 25 bp, Homo sapien
tgacggtcaccaccccttcgccaag

SEQ ID NO: 5367367 - DNA, 25 bp, Homo sapien
ttgacggtcaccaccccttcgccaa

SEQ ID NO: 5367368 - DNA, 25 bp, Homo sapien
tttgacggtcaccaccccttcgcca

SEQ ID NO: 5367369 - DNA, 25 bp, Homo sapien
tgggtgcaaccaagagtgaacttca

SEQ ID NO: 5367370 - DNA, 25 bp, Homo sapien
ctatggggtgggtgcaaccaagagt

SEQ ID NO: 5367371 - DNA, 25 bp, Homo sapien
ggtgcaaccaagagtgaacttcaga

SEQ ID NO: 5367372 - DNA, 25 bp, Homo sapien
tgcaaccaagagtgaacttcagaac

SEQ ID NO: 5367373 - DNA, 25 bp, Homo sapien
ttttgcccgccttctccacaagctt

SEQ ID NO: 5367374 - DNA, 25 bp, Homo sapien
ttttttgcccgccttctccacaagc

SEQ ID NO: 5367375 - DNA, 25 bp, Homo sapien
tttgcccgccttctccacaagcttt

SEQ ID NO: 5367376 - DNA, 25 bp, Homo sapien
tttttgcccgccttctccacaagct

SEQ ID NO: 5367377 - DNA, 25 bp, Homo sapien
acaccaaggacattgagggcccttc

SEQ ID NO: 5367378 - DNA, 25 bp, Homo sapien
gaacaccaaggacattgagggccct

SEQ ID NO: 5367379 - DNA, 25 bp, Homo sapien
ttgaacaccaaggacattgagggcc

SEQ ID NO: 5367380 - DNA, 25 bp, Homo sapien
caccaaggacattgagggcccttcc

SEQ ID NO: 5367381 - DNA, 25 bp, Homo sapien
taggcagcaaggcaagtgctttcat

SEQ ID NO: 5367382 - DNA, 25 bp, Homo sapien
tatgtaccaaagaccaacagttctc

SEQ ID NO: 5367383 - DNA, 25 bp, Homo sapien
cagcatttgggttggaactaaagca

SEQ ID NO: 5367384 - DNA, 25 bp, Homo sapien
gactgactacaatcaccaaggatct

SEQ ID NO: 5367385 - DNA, 25 bp, Homo sapien
agctcgcagcccggggggcactcca

SEQ ID NO: 5367386 - DNA, 25 bp, Homo sapien
gcagcccggggggcactccaggttc

SEQ ID NO: 5367387 - DNA, 25 bp, Homo sapien
ctcgcagcccggggggcactccagg

SEQ ID NO: 5367388 - DNA, 25 bp, Homo sapien
tcgcagcccggggggcactccaggt

SEQ ID NO: 5367389 - DNA, 25 bp, Homo sapien
tgactttactgaggtcataaaacag

SEQ ID NO: 5367390 - DNA, 25 bp, Homo sapien
tgggaagatagggtaacctgcccag

SEQ ID NO: 5367391 - DNA, 25 bp, Homo sapien
gaacacgtattatttatcagacact

SEQ ID NO: 5367392 - DNA, 25 bp, Homo sapien
aaactaacatttgctgaacacgtat

SEQ ID NO: 5367393 - DNA, 25 bp, Homo sapien
ttcttgcagtcacagagagtgtcct

SEQ ID NO: 5367394 - DNA, 25 bp, Homo sapien
ggtgactgtggctttgaatctgagc

SEQ ID NO: 5367395 - DNA, 25 bp, Homo sapien
cagtcacagagagtgtcctcaaatg

SEQ ID NO: 5367396 - DNA, 25 bp, Homo sapien
gaatctgagctagtttattcttgca

SEQ ID NO: 5367397 - DNA, 25 bp, Homo sapien
taatttccacctctaattccacttc

SEQ ID NO: 5367398 - DNA, 25 bp, Homo sapien
ggatggccctaatttccacctctaa

SEQ ID NO: 5367399 - DNA, 25 bp, Homo sapien
tggccctaatttccacctctaattc

SEQ ID NO: 5367400 - DNA, 25 bp, Homo sapien
aaggatggccctaatttccacctct

SEQ ID NO: 5367401 - DNA, 25 bp, Homo sapien
gtcctggagctgattggtagacagc

SEQ ID NO: 5367402 - DNA, 25 bp, Homo sapien
gctgattggtagacagcagctctgc

SEQ ID NO: 5367403 - DNA, 25 bp, Homo sapien
gctctgcagagctgcgtgtactcac

SEQ ID NO: 5367404 - DNA, 25 bp, Homo sapien
ggagctgattggtagacagcagctc

SEQ ID NO: 5367405 - DNA, 25 bp, Homo sapien
gcaggtacgaggaggcaaagccttc

SEQ ID NO: 5367406 - DNA, 25 bp, Homo sapien
gtacgaggaggcaaagccttctcag

SEQ ID NO: 5367407 - DNA, 25 bp, Homo sapien
tgactgcgtggctctcattggccct

SEQ ID NO: 5367408 - DNA, 25 bp, Homo sapien
actggccgaaggtcaccgtgtagtt

SEQ ID NO: 5367409 - DNA, 25 bp, Homo sapien
tgcaactttcctagtgtcctacgag

SEQ ID NO: 5367410 - DNA, 25 bp, Homo sapien
gaacccatagtaggtttcagatact

SEQ ID NO: 5367411 - DNA, 25 bp, Homo sapien
ccgtggccatagctgcaaattgcaa

SEQ ID NO: 5367412 - DNA, 25 bp, Homo sapien
tgaagactctacgtggaacccatag

SEQ ID NO: 5367413 - DNA, 25 bp, Homo sapien
aaaggaggatacagctctagcaacc

SEQ ID NO: 5367414 - DNA, 25 bp, Homo sapien
agcaaaatatatgagctgtctgtca

SEQ ID NO: 5367415 - DNA, 25 bp, Homo sapien
gaggatacagctctagcaacccttt

SEQ ID NO: 5367416 - DNA, 25 bp, Homo sapien
gagcaaaatatatgagctgtctgtc

SEQ ID NO: 5367417 - DNA, 25 bp, Homo sapien
cacgaagagggtagcttggcaaagc

SEQ ID NO: 5367418 - DNA, 25 bp, Homo sapien
tgtgccaagcagaagtgcggtgatt

SEQ ID NO: 5367419 - DNA, 25 bp, Homo sapien
cagaggaaacggtgggcacgaagag

SEQ ID NO: 5367420 - DNA, 25 bp, Homo sapien
gacactgtggagtcccttcttgact

SEQ ID NO: 5367421 - DNA, 25 bp, Homo sapien
tggagtcaggtagcttagatttgcc

SEQ ID NO: 5367422 - DNA, 25 bp, Homo sapien
cctgaactgcaaaccggctgattga

SEQ ID NO: 5367423 - DNA, 25 bp, Homo sapien
tagcaaggcacaactgctaaatgaa

SEQ ID NO: 5367424 - DNA, 25 bp, Homo sapien
gacatagactttctcgtagcaaggc

SEQ ID NO: 5367425 - DNA, 25 bp, Homo sapien
atggtggcgattttctcgcttgccc

SEQ ID NO: 5367426 - DNA, 25 bp, Homo sapien
ggtggcgattttctcgcttgcccag

SEQ ID NO: 5367427 - DNA, 25 bp, Homo sapien
gattttctcgcttgcccagctctgc

SEQ ID NO: 5367428 - DNA, 25 bp, Homo sapien
tggcgattttctcgcttgcccagct

SEQ ID NO: 5367429 - DNA, 25 bp, Homo sapien
gatcccatcgcaagtggatctcttt

SEQ ID NO: 5367430 - DNA, 25 bp, Homo sapien
cattctggggaggatattttaccca

SEQ ID NO: 5367431 - DNA, 25 bp, Homo sapien
gaggatattttacccacactttgtg

SEQ ID NO: 5367432 - DNA, 25 bp, Homo sapien
gtgagcgcggctacttttccctagg

SEQ ID NO: 5367433 - DNA, 25 bp, Homo sapien
gctgcctcgctaggcttcaggacct

SEQ ID NO: 5367434 - DNA, 25 bp, Homo sapien
tgacggtgccatttgtgggattcct

SEQ ID NO: 5367435 - DNA, 25 bp, Homo sapien
tttgacggtgccatttgtgggattc

SEQ ID NO: 5367436 - DNA, 25 bp, Homo sapien
ttgacggtgccatttgtgggattcc

SEQ ID NO: 5367437 - DNA, 25 bp, Homo sapien
tcctttcgtgccgaggaggcaagtg

SEQ ID NO: 5367438 - DNA, 25 bp, Homo sapien
cttcctttcgtgccgaggaggcaag

SEQ ID NO: 5367439 - DNA, 25 bp, Homo sapien
tttcgtgccgaggaggcaagtgcat

SEQ ID NO: 5367440 - DNA, 25 bp, Homo sapien
ctttcgtgccgaggaggcaagtgca

SEQ ID NO: 5367441 - DNA, 25 bp, Homo sapien
tcctcttggaagtggcgactgctgc

SEQ ID NO: 5367442 - DNA, 25 bp, Homo sapien
tacacagtgctgaggcagaacgcag

SEQ ID NO: 5367443 - DNA, 25 bp, Homo sapien
tacgccgctgcttcagtggcttgca

SEQ ID NO: 5367444 - DNA, 25 bp, Homo sapien
gaacgcaggttcgtcacagtgggcc

SEQ ID NO: 5367445 - DNA, 25 bp, Homo sapien
ttgttcccgacggtgctcgctcctg

SEQ ID NO: 5367446 - DNA, 25 bp, Homo sapien
catttactttatatgctgcggcgga

SEQ ID NO: 5367447 - DNA, 25 bp, Homo sapien
gcttgttcccgacgcttgttcccga

SEQ ID NO: 5367448 - DNA, 25 bp, Homo sapien
ggcgcttcctcttaatcccggcttg

SEQ ID NO: 5367449 - DNA, 25 bp, Homo sapien
tgccctttacatctatacttcatac

SEQ ID NO: 5367450 - DNA, 25 bp, Homo sapien
atacttcatacttctgagtaacaca

SEQ ID NO: 5367451 - DNA, 25 bp, Homo sapien
tacttcatacttctgagtaacacac

SEQ ID NO: 5367452 - DNA, 25 bp, Homo sapien
ttctgccctttacatctatacttca

SEQ ID NO: 5367453 - DNA, 25 bp, Homo sapien
tactggctattatgctcctccaaaa

SEQ ID NO: 5367454 - DNA, 25 bp, Homo sapien
tctttcagtactgttactgcagttt

SEQ ID NO: 5367455 - DNA, 25 bp, Homo sapien
tcagacactttggtttgcccctcat

SEQ ID NO: 5367456 - DNA, 25 bp, Homo sapien
ccggccccattttagacattctgta

SEQ ID NO: 5367457 - DNA, 25 bp, Homo sapien
tggaaatgatgaactgtcagctact

SEQ ID NO: 5367458 - DNA, 25 bp, Homo sapien
tgatagtgctcttcagtctgcgaaa

SEQ ID NO: 5367459 - DNA, 25 bp, Homo sapien
tctgcgaaatcttctttgggtggaa

SEQ ID NO: 5367460 - DNA, 25 bp, Homo sapien
tgttcaatggcgagctctttctgag

SEQ ID NO: 5367461 - DNA, 25 bp, Homo sapien
gatcagagaataagagcttgtccct

SEQ ID NO: 5367462 - DNA, 25 bp, Homo sapien
gttcagaaatcagtgtatcagatca

SEQ ID NO: 5367463 - DNA, 25 bp, Homo sapien
ccagaccttttcatctaaagtgcaa

SEQ ID NO: 5367464 - DNA, 25 bp, Homo sapien
gcttgtccctgttctcctatggcca

SEQ ID NO: 5367465 - DNA, 25 bp, Homo sapien
ttggctcagcctgccacgaagccag

SEQ ID NO: 5367466 - DNA, 25 bp, Homo sapien
agccaggactacagacagtcacatg

SEQ ID NO: 5367467 - DNA, 25 bp, Homo sapien
ttactgcggcttcaacctcctagct

SEQ ID NO: 5367468 - DNA, 25 bp, Homo sapien
tacatacctcggtcttgacccttta

SEQ ID NO: 5367469 - DNA, 25 bp, Homo sapien
gagatcctgtgcgtgaatttgtcag

SEQ ID NO: 5367470 - DNA, 25 bp, Homo sapien
tattagagccgcacagtttagagtc

SEQ ID NO: 5367471 - DNA, 25 bp, Homo sapien
gagtcagtagtcaattaaagtccct

SEQ ID NO: 5367472 - DNA, 25 bp, Homo sapien
caaaaacatgttccttgaggcctat

SEQ ID NO: 5367473 - DNA, 25 bp, Homo sapien
aggccctgggctttacatacgttat

SEQ ID NO: 5367474 - DNA, 25 bp, Homo sapien
tgttgaggagttcttatgacccagg

SEQ ID NO: 5367475 - DNA, 25 bp, Homo sapien
tcatagctgtctgaaaagtacatgc

SEQ ID NO: 5367476 - DNA, 25 bp, Homo sapien
ggccactagctatccttgtcagatt

SEQ ID NO: 5367477 - DNA, 25 bp, Homo sapien
ggagttccggttttcatgtcaaatg

SEQ ID NO: 5367478 - DNA, 25 bp, Homo sapien
gagagaagtctgcagctaacctgga

SEQ ID NO: 5367479 - DNA, 25 bp, Homo sapien
caaatagcttaggacaatggagtcc

SEQ ID NO: 5367480 - DNA, 25 bp, Homo sapien
aatccactttctaggcaaatgcagc

SEQ ID NO: 5367481 - DNA, 25 bp, Homo sapien
gcccatcagagcaaacaagtacctt

SEQ ID NO: 5367482 - DNA, 25 bp, Homo sapien
gcattttgttaccaaggccttgaaa

SEQ ID NO: 5367483 - DNA, 25 bp, Homo sapien
tcaaaagaatacaagctgggctcaa

SEQ ID NO: 5367484 - DNA, 25 bp, Homo sapien
ggtcgaaatcctggtcacgccactg

SEQ ID NO: 5367485 - DNA, 25 bp, Homo sapien
acaccttgtggtcccagttgcttgg

SEQ ID NO: 5367486 - DNA, 25 bp, Homo sapien
tgtgctggtaagattgtagataatc

SEQ ID NO: 5367487 - DNA, 25 bp, Homo sapien
tacagtggctcgtgactgcaatccc

SEQ ID NO: 5367488 - DNA, 25 bp, Homo sapien
tgcattgaagtctcatcacgccact

SEQ ID NO: 5367489 - DNA, 25 bp, Homo sapien
gcttcccgttcttctggatgagcat

SEQ ID NO: 5367490 - DNA, 25 bp, Homo sapien
aagaaaatgcttcccgttcttctgg

SEQ ID NO: 5367491 - DNA, 25 bp, Homo sapien
gagcatcctatcttcgtagttggtt

SEQ ID NO: 5367492 - DNA, 25 bp, Homo sapien
tggatgagcatcctatcttcgtagt

SEQ ID NO: 5367493 - DNA, 25 bp, Homo sapien
tagagctggctagtgtaacactgac

SEQ ID NO: 5367494 - DNA, 25 bp, Homo sapien
gactagatccaaactgtgttgttct

SEQ ID NO: 5367495 - DNA, 25 bp, Homo sapien
actgactatgagtaggtgggcccac

SEQ ID NO: 5367496 - DNA, 25 bp, Homo sapien
cattatgttgtcagagccctagagc

SEQ ID NO: 5367497 - DNA, 25 bp, Homo sapien
cctcactgacgaataacttggggca

SEQ ID NO: 5367498 - DNA, 25 bp, Homo sapien
gcctcactgacgaataacttggggc

SEQ ID NO: 5367499 - DNA, 25 bp, Homo sapien
tgacgaataacttggggcatgttct

SEQ ID NO: 5367500 - DNA, 25 bp, Homo sapien
cactgacgaataacttggggcatgt

SEQ ID NO: 5367501 - DNA, 25 bp, Homo sapien
tgtcaaacttgcgatgacctggctc

SEQ ID NO: 5367502 - DNA, 25 bp, Homo sapien
tcaaacttgcgatgacctggctcaa

SEQ ID NO: 5367503 - DNA, 25 bp, Homo sapien
ttgcgatgacctggctcaagcagca

SEQ ID NO: 5367504 - DNA, 25 bp, Homo sapien
aacttgcgatgacctggctcaagca

SEQ ID NO: 5367505 - DNA, 25 bp, Homo sapien
cctcttccaaatccgtcatttacca

SEQ ID NO: 5367506 - DNA, 25 bp, Homo sapien
tcctcttccaaatccgtcatttacc

SEQ ID NO: 5367507 - DNA, 25 bp, Homo sapien
ctcttccaaatccgtcatttaccat

SEQ ID NO: 5367508 - DNA, 25 bp, Homo sapien
gctgtggagagagaatagcttgtca

SEQ ID NO: 5367509 - DNA, 25 bp, Homo sapien
gcaacaccatcaatttagtgcaatc

SEQ ID NO: 5367510 - DNA, 25 bp, Homo sapien
gaacaactagaagaaccctggaata

SEQ ID NO: 5367511 - DNA, 25 bp, Homo sapien
acttcatgtaggtgttggagcaaac

SEQ ID NO: 5367512 - DNA, 25 bp, Homo sapien
catggagaagtagctgacctaagca

SEQ ID NO: 5367513 - DNA, 25 bp, Homo sapien
taggtagtaaatttgtttctcagta

SEQ ID NO: 5367514 - DNA, 25 bp, Homo sapien
cagccttttgactggatactgtaaa

SEQ ID NO: 5367515 - DNA, 25 bp, Homo sapien
aaacgcatgatacagcctcactgaa

SEQ ID NO: 5367516 - DNA, 25 bp, Homo sapien
cagttcaggcaacacggaagctgtg

SEQ ID NO: 5367517 - DNA, 25 bp, Homo sapien
gcagccggatggttagctttgcaga

SEQ ID NO: 5367518 - DNA, 25 bp, Homo sapien
gctttgcagataccaggccagtgag

SEQ ID NO: 5367519 - DNA, 25 bp, Homo sapien
tgagccctgatggttggatactagc

SEQ ID NO: 5367520 - DNA, 25 bp, Homo sapien
ctgtacagaagctgtatttgttgtt

SEQ ID NO: 5367521 - DNA, 25 bp, Homo sapien
tgctgtacagaagctgtatttgttg

SEQ ID NO: 5367522 - DNA, 25 bp, Homo sapien
gctgtacagaagctgtatttgttgt

SEQ ID NO: 5367523 - DNA, 25 bp, Homo sapien
ccatgctgttctgtgcgggagatgc

SEQ ID NO: 5367524 - DNA, 25 bp, Homo sapien
tatagctctccagtataattggaaa

SEQ ID NO: 5367525 - DNA, 25 bp, Homo sapien
ggctattcgggtgttttgtgactcc

SEQ ID NO: 5367526 - DNA, 25 bp, Homo sapien
ttggaaatccggtaatgtgattccc

SEQ ID NO: 5367527 - DNA, 25 bp, Homo sapien
tgtgctccagagtcagccactggtc

SEQ ID NO: 5367528 - DNA, 25 bp, Homo sapien
gcctgtgctccagagtcagccactg

SEQ ID NO: 5367529 - DNA, 25 bp, Homo sapien
gctccagagtcagccactggtccat

SEQ ID NO: 5367530 - DNA, 25 bp, Homo sapien
tgctccagagtcagccactggtcca

SEQ ID NO: 5367531 - DNA, 25 bp, Homo sapien
aatgagactttcagctggtttcccg

SEQ ID NO: 5367532 - DNA, 25 bp, Homo sapien
cacttcaaggcagtttatgacaaac

SEQ ID NO: 5367533 - DNA, 25 bp, Homo sapien
aaaacagttagagccattcttggag

SEQ ID NO: 5367534 - DNA, 25 bp, Homo sapien
ggtttcccgttctgagcttacttga

SEQ ID NO: 5367535 - DNA, 25 bp, Homo sapien
tccctcagccaggtggtggttcctt

SEQ ID NO: 5367536 - DNA, 25 bp, Homo sapien
aggtggtcgtcccacctctgagaga

SEQ ID NO: 5367537 - DNA, 25 bp, Homo sapien
ggtcgtcccacctctgagagatcct

SEQ ID NO: 5367538 - DNA, 25 bp, Homo sapien
aggtggtcgtcccacctctgagaca

SEQ ID NO: 5367539 - DNA, 25 bp, Homo sapien
gaaggcatccttctattctactgat

SEQ ID NO: 5367540 - DNA, 25 bp, Homo sapien
ttggtgccatttgcggaggtgacct

SEQ ID NO: 5367541 - DNA, 25 bp, Homo sapien
ggcagccgtggctcctacattagct

SEQ ID NO: 5367542 - DNA, 25 bp, Homo sapien
ctaataattactgggccctccccag

SEQ ID NO: 5367543 - DNA, 25 bp, Homo sapien
tggcttaggcttttcccagtgggtg

SEQ ID NO: 5367544 - DNA, 25 bp, Homo sapien
tggaagctcttagatctctggaggc

SEQ ID NO: 5367545 - DNA, 25 bp, Homo sapien
aggtagctctctcacgtggctggca

SEQ ID NO: 5367546 - DNA, 25 bp, Homo sapien
tgtcaatcacatgccaaaacctgag

SEQ ID NO: 5367547 - DNA, 25 bp, Homo sapien
gcagtagagttcttaagcccttgca

SEQ ID NO: 5367548 - DNA, 25 bp, Homo sapien
gattgatcagtgtctccccagagtc

SEQ ID NO: 5367549 - DNA, 25 bp, Homo sapien
gagtctccgagaggctcagtcttgc

SEQ ID NO: 5367550 - DNA, 25 bp, Homo sapien
agcatgtgactggtctgtgtcccca

SEQ ID NO: 5367551 - DNA, 25 bp, Homo sapien
ctgcccttgctgactacttttctgg

SEQ ID NO: 5367552 - DNA, 25 bp, Homo sapien
gcccttgctgactacttttctggaa

SEQ ID NO: 5367553 - DNA, 25 bp, Homo sapien
tgcccttgctgactacttttctgga

SEQ ID NO: 5367554 - DNA, 25 bp, Homo sapien
acagtggccgcacgcataggcaagt

SEQ ID NO: 5367555 - DNA, 25 bp, Homo sapien
ggcaccaggagtgcgagcagtggtg

SEQ ID NO: 5367556 - DNA, 25 bp, Homo sapien
ataggcaagtggctcggcaccagga

SEQ ID NO: 5367557 - DNA, 25 bp, Homo sapien
aacgtcttgcaacagtggccgcacg

SEQ ID NO: 5367558 - DNA, 25 bp, Homo sapien
ccgcagctgagtgccgggggctgcc

SEQ ID NO: 5367559 - DNA, 25 bp, Homo sapien
tcccgcagctgagtgccgggggctg

SEQ ID NO: 5367560 - DNA, 25 bp, Homo sapien
cccgcagctgagtgccgggggctgc

SEQ ID NO: 5367561 - DNA, 25 bp, Homo sapien
cgggtggttcgggagcacccaagtg

SEQ ID NO: 5367562 - DNA, 25 bp, Homo sapien
ttgtcgtgccaagcggttacatagc

SEQ ID NO: 5367563 - DNA, 25 bp, Homo sapien
tggtgcgggtggttcgggagcaccc

SEQ ID NO: 5367564 - DNA, 25 bp, Homo sapien
cgccatccttgtcgtgccaagcggt

SEQ ID NO: 5367565 - DNA, 25 bp, Homo sapien
gccagtgggtgcatggaactcctcg

SEQ ID NO: 5367566 - DNA, 25 bp, Homo sapien
gtgggtgcatggaactcctcgcacg

SEQ ID NO: 5367567 - DNA, 25 bp, Homo sapien
agtttcctcgtcatcgttgtcacct

SEQ ID NO: 5367568 - DNA, 25 bp, Homo sapien
gtgcatggaactcctcgcacgcgct

SEQ ID NO: 5367569 - DNA, 25 bp, Homo sapien
ggtgctcgcgggtgcagaggagcgc

SEQ ID NO: 5367570 - DNA, 25 bp, Homo sapien
cagaggagcgcgtgcgataatctgc

SEQ ID NO: 5367571 - DNA, 25 bp, Homo sapien
ccgggggtgcgcagccagcaggtgg

SEQ ID NO: 5367572 - DNA, 25 bp, Homo sapien
cgggtgcagaggagcgcgtgcgata

SEQ ID NO: 5367573 - DNA, 25 bp, Homo sapien
aaccgctgtacaggagctcgactag

SEQ ID NO: 5367574 - DNA, 25 bp, Homo sapien
agggcgagccgattgccagcccgca

SEQ ID NO: 5367575 - DNA, 25 bp, Homo sapien
tcatgaatgcacacagtcacgtcgc

SEQ ID NO: 5367576 - DNA, 25 bp, Homo sapien
ctagctgtcgcaccgtctgcacagg

SEQ ID NO: 5367577 - DNA, 25 bp, Homo sapien
tgcagatgtatgtggcgcacagcct

SEQ ID NO: 5367578 - DNA, 25 bp, Homo sapien
ctgcagatgtatgtggcgcacagcc

SEQ ID NO: 5367579 - DNA, 25 bp, Homo sapien
tccaaggcagcacttccgggcgctt

SEQ ID NO: 5367580 - DNA, 25 bp, Homo sapien
cttctcaccgactccaaggcagcac

SEQ ID NO: 5367581 - DNA, 25 bp, Homo sapien
caaggcagcacttccgggcgcttct

SEQ ID NO: 5367582 - DNA, 25 bp, Homo sapien
gccgccttctcaccgactccaaggc

SEQ ID NO: 5367583 - DNA, 25 bp, Homo sapien
taggtgaaaccagtcctagtggctc

SEQ ID NO: 5367584 - DNA, 25 bp, Homo sapien
ctagtggctcataactgggttttcc

SEQ ID NO: 5367585 - DNA, 25 bp, Homo sapien
taagtcacagtcatcctggtagaag

SEQ ID NO: 5367586 - DNA, 25 bp, Homo sapien
tacttgtcctcagtccgtaggtgaa

SEQ ID NO: 5367587 - DNA, 25 bp, Homo sapien
cccacattggacaccgctgcatcca

SEQ ID NO: 5367588 - DNA, 25 bp, Homo sapien
cattggacaccgctgcatccatgtc

SEQ ID NO: 5367589 - DNA, 25 bp, Homo sapien
cacattggacaccgctgcatccatg

SEQ ID NO: 5367590 - DNA, 25 bp, Homo sapien
attggacaccgctgcatccatgtcc

SEQ ID NO: 5367591 - DNA, 25 bp, Homo sapien
tgcagttcatcgagtcttcagggac

SEQ ID NO: 5367592 - DNA, 25 bp, Homo sapien
gaatggatttatagagaacatcatc

SEQ ID NO: 5367593 - DNA, 25 bp, Homo sapien
acatcatctaaatccaacttgacca

SEQ ID NO: 5367594 - DNA, 25 bp, Homo sapien
catcatctaaatccaacttgaccat

SEQ ID NO: 5367595 - DNA, 25 bp, Homo sapien
cagtctggataaaaaaattggctta

SEQ ID NO: 5367596 - DNA, 25 bp, Homo sapien
cccagtctggataaaaaaattggct

SEQ ID NO: 5367597 - DNA, 25 bp, Homo sapien
ccagtctggataaaaaaattggctt

SEQ ID NO: 5367598 - DNA, 25 bp, Homo sapien
tcgagggaatcctcctcgttatcaa

SEQ ID NO: 5367599 - DNA, 25 bp, Homo sapien
actgccatcgcagctctcagcacta

SEQ ID NO: 5367600 - DNA, 25 bp, Homo sapien
cactaaaaaggtggcatcagactcc

SEQ ID NO: 5367601 - DNA, 25 bp, Homo sapien
gaatcctcctcgttatcaaaagaag

SEQ ID NO: 5367602 - DNA, 25 bp, Homo sapien
caattccattttgaggaatggggaa

SEQ ID NO: 5367603 - DNA, 25 bp, Homo sapien
ataaggaatgctgatttcctcaatt

SEQ ID NO: 5367604 - DNA, 25 bp, Homo sapien
cctcaattccattttgaggaatggg

SEQ ID NO: 5367605 - DNA, 25 bp, Homo sapien
taataaggaatgctgatttcctcaa

SEQ ID NO: 5367606 - DNA, 25 bp, Homo sapien
ctctgagagagttatattttttggt

SEQ ID NO: 5367607 - DNA, 25 bp, Homo sapien
tacaaagaatctgccaaataagtct

SEQ ID NO: 5367608 - DNA, 25 bp, Homo sapien
ataaaaccataggtcactggaaaat

SEQ ID NO: 5367609 - DNA, 25 bp, Homo sapien
taaaagttattcacacaagtagagt

SEQ ID NO: 5367610 - DNA, 25 bp, Homo sapien
taatgtacccataattgtaacagaa

SEQ ID NO: 5367611 - DNA, 25 bp, Homo sapien
cagtgaaataaaagaggatacaaag

SEQ ID NO: 5367612 - DNA, 25 bp, Homo sapien
atgggtaggaagaaccaatattgtg

SEQ ID NO: 5367613 - DNA, 25 bp, Homo sapien
ttccatgttcatgggtaggaagaac

SEQ ID NO: 5367614 - DNA, 25 bp, Homo sapien
ttcatgggtaggaagaaccaatatt

SEQ ID NO: 5367615 - DNA, 25 bp, Homo sapien
tcacctcagaggcagaatacctcag

SEQ ID NO: 5367616 - DNA, 25 bp, Homo sapien
ggtcacctcagaggcagaatacctc

SEQ ID NO: 5367617 - DNA, 25 bp, Homo sapien
tcaggggttggtcacctcagaggca

SEQ ID NO: 5367618 - DNA, 25 bp, Homo sapien
ttggtcacctcagaggcagaatacc

SEQ ID NO: 5367619 - DNA, 25 bp, Homo sapien
gtggctgtttcctgaaaccttacat

SEQ ID NO: 5367620 - DNA, 25 bp, Homo sapien
tcctgaaaccttacatcttgggccc

SEQ ID NO: 5367621 - DNA, 25 bp, Homo sapien
catcttgggccctcaaagctgcagg

SEQ ID NO: 5367622 - DNA, 25 bp, Homo sapien
aaccttacatcttgggccctcaaag

SEQ ID NO: 5367623 - DNA, 25 bp, Homo sapien
ggtggagagaaagcggcgctctggc

SEQ ID NO: 5367624 - DNA, 25 bp, Homo sapien
ctggtggagagaaagcggcgctctg

SEQ ID NO: 5367625 - DNA, 25 bp, Homo sapien
gcggcgctctggcaggtgaggcagc

SEQ ID NO: 5367626 - DNA, 25 bp, Homo sapien
gagaaagcggcgctctggcaggtga

SEQ ID NO: 5367627 - DNA, 25 bp, Homo sapien
gcagagccggcagtcttcagctgcc

SEQ ID NO: 5367628 - DNA, 25 bp, Homo sapien
gggcagagccggcagtcttcagctg

SEQ ID NO: 5367629 - DNA, 25 bp, Homo sapien
gagccggcagtcttcagctgccctg

SEQ ID NO: 5367630 - DNA, 25 bp, Homo sapien
agagccggcagtcttcagctgccct

SEQ ID NO: 5367631 - DNA, 25 bp, Homo sapien
gcagggcagtagtggcccaccgggc

SEQ ID NO: 5367632 - DNA, 25 bp, Homo sapien
cagggcagtagtggcccaccgggca

SEQ ID NO: 5367633 - DNA, 25 bp, Homo sapien
agggctgtaagggtagagcatccag

SEQ ID NO: 5367634 - DNA, 25 bp, Homo sapien
ctgggggcagctgaatccaggcggg

SEQ ID NO: 5367635 - DNA, 25 bp, Homo sapien
gggggcagctgaatccaggcgggca

SEQ ID NO: 5367636 - DNA, 25 bp, Homo sapien
gggctgtaagggtagagcatccagg

SEQ ID NO: 5367637 - DNA, 25 bp, Homo sapien
ggcctacaagggacctcagccacag

SEQ ID NO: 5367638 - DNA, 25 bp, Homo sapien
cccacagtaggagccgggcctacaa

SEQ ID NO: 5367639 - DNA, 25 bp, Homo sapien
ggagccgggcctacaagggacctca

SEQ ID NO: 5367640 - DNA, 25 bp, Homo sapien
ggcccacagtaggagccgggcctac

SEQ ID NO: 5367641 - DNA, 25 bp, Homo sapien
caaacacatttgcatgaccctgaag

SEQ ID NO: 5367642 - DNA, 25 bp, Homo sapien
ggcaaacacatttgcatgaccctga

SEQ ID NO: 5367643 - DNA, 25 bp, Homo sapien
acacatttgcatgaccctgaagctc

SEQ ID NO: 5367644 - DNA, 25 bp, Homo sapien
aaacacatttgcatgaccctgaagc

SEQ ID NO: 5367645 - DNA, 25 bp, Homo sapien
gcaccctggtcacctagacaccagt

SEQ ID NO: 5367646 - DNA, 25 bp, Homo sapien
accctggtcacctagacaccagtgg

SEQ ID NO: 5367647 - DNA, 25 bp, Homo sapien
cagtggcccggaggacatgggtggt

SEQ ID NO: 5367648 - DNA, 25 bp, Homo sapien
agacaccagtggcccggaggacatg

SEQ ID NO: 5367649 - DNA, 25 bp, Homo sapien
tgccaggtaggtatgctcagggcag

SEQ ID NO: 5367650 - DNA, 25 bp, Homo sapien
catctgttgccaggtaggtatgctc

SEQ ID NO: 5367651 - DNA, 25 bp, Homo sapien
ccgcctgactatggcctccatctgt

SEQ ID NO: 5367652 - DNA, 25 bp, Homo sapien
gcaggggaggcactccgcctgacta

SEQ ID NO: 5367653 - DNA, 25 bp, Homo sapien
ctccagggcagtagtggccagaggg

SEQ ID NO: 5367654 - DNA, 25 bp, Homo sapien
gggagctcccgagtgggtctcactt

SEQ ID NO: 5367655 - DNA, 25 bp, Homo sapien
cttcctccagggcagtagtggccag

SEQ ID NO: 5367656 - DNA, 25 bp, Homo sapien
gagctcccgagtgggtctcacttcc

SEQ ID NO: 5367657 - DNA, 25 bp, Homo sapien
gggcacaggtgcaagccggaggaat

SEQ ID NO: 5367658 - DNA, 25 bp, Homo sapien
gcacaggtgcaagccggaggaatca

SEQ ID NO: 5367659 - DNA, 25 bp, Homo sapien
aggtgcaagccggaggaatcagatc

SEQ ID NO: 5367660 - DNA, 25 bp, Homo sapien
caagccggaggaatcagatctgtct

SEQ ID NO: 5367661 - DNA, 25 bp, Homo sapien
ttggtgctggtgtagttgtccaggt

SEQ ID NO: 5367662 - DNA, 25 bp, Homo sapien
tgggcacaggcaattggtgctggtg

SEQ ID NO: 5367663 - DNA, 25 bp, Homo sapien
ggctgggcacaggcaattggtgctg

SEQ ID NO: 5367664 - DNA, 25 bp, Homo sapien
attggtgctggtgtagttgtccagg

SEQ ID NO: 5367665 - DNA, 25 bp, Homo sapien
cagaaatgggaagtgcagagatgga

SEQ ID NO: 5367666 - DNA, 25 bp, Homo sapien
gctgctccaggagatagtctggatg

SEQ ID NO: 5367667 - DNA, 25 bp, Homo sapien
gagatagtctggatgaccccaggtc

SEQ ID NO: 5367668 - DNA, 25 bp, Homo sapien
caggagatagtctggatgaccccag

SEQ ID NO: 5367669 - DNA, 25 bp, Homo sapien
ctgccgcacaaggcccagaggcccg

SEQ ID NO: 5367670 - DNA, 25 bp, Homo sapien
caaggcccagaggcccgggtcaggt

SEQ ID NO: 5367671 - DNA, 25 bp, Homo sapien
gcacaaggcccagaggcccgggtca

SEQ ID NO: 5367672 - DNA, 25 bp, Homo sapien
tgccgcacaaggcccagaggcccgg

SEQ ID NO: 5367673 - DNA, 25 bp, Homo sapien
tctgggtcgtagtagctccgagggc

SEQ ID NO: 5367674 - DNA, 25 bp, Homo sapien
gagggcaggggaactgggtggcgta

SEQ ID NO: 5367675 - DNA, 25 bp, Homo sapien
gggtcgtagtagctccgagggcagg

SEQ ID NO: 5367676 - DNA, 25 bp, Homo sapien
cagtgggtctgggtcgtagtagctc

SEQ ID NO: 5367677 - DNA, 25 bp, Homo sapien
gcccagcttgctggttcctgaaggc

SEQ ID NO: 5367678 - DNA, 25 bp, Homo sapien
ctcggggcagtagaagccagcggga

SEQ ID NO: 5367679 - DNA, 25 bp, Homo sapien
tcggggcagtagaagccagcgggac

SEQ ID NO: 5367680 - DNA, 25 bp, Homo sapien
acgttctcggggcagtagtagccag

SEQ ID NO: 5367681 - DNA, 25 bp, Homo sapien
agttggtgacgttctcggggcagta

SEQ ID NO: 5367682 - DNA, 25 bp, Homo sapien
gcagtagtagccagtggggcaaggg

SEQ ID NO: 5367683 - DNA, 25 bp, Homo sapien
tggtgacgttctcggggcagtagta

SEQ ID NO: 5367684 - DNA, 25 bp, Homo sapien
ctgtaggagccggcagggcagggct

SEQ ID NO: 5367685 - DNA, 25 bp, Homo sapien
tgtaggagccggcagggcagggctg

SEQ ID NO: 5367686 - DNA, 25 bp, Homo sapien
cagaagtggcctcggggacaggggc

SEQ ID NO: 5367687 - DNA, 25 bp, Homo sapien
gaggctggttcccctggggcagaag

SEQ ID NO: 5367688 - DNA, 25 bp, Homo sapien
ctgagttgtactaagccaggccagc

SEQ ID NO: 5367689 - DNA, 25 bp, Homo sapien
tccatctgagagctgaactcgctcc

SEQ ID NO: 5367690 - DNA, 25 bp, Homo sapien
tcatccatgatgccccagaactcaa

SEQ ID NO: 5367691 - DNA, 25 bp, Homo sapien
gctgaactcgctcctccaatgttct

SEQ ID NO: 5367692 - DNA, 25 bp, Homo sapien
catggggcaccattcggtgtccact

SEQ ID NO: 5367693 - DNA, 25 bp, Homo sapien
cccatggggcaccattcggtgtcca

SEQ ID NO: 5367694 - DNA, 25 bp, Homo sapien
tggggcaccattcggtgtccactga

SEQ ID NO: 5367695 - DNA, 25 bp, Homo sapien
ggcccatggggcaccattcggtgtc

SEQ ID NO: 5367696 - DNA, 25 bp, Homo sapien
aggccctcagagaccatggagagaa

SEQ ID NO: 5367697 - DNA, 25 bp, Homo sapien
ggccctcagagaccatggagagaaa

SEQ ID NO: 5367698 - DNA, 25 bp, Homo sapien
cagacagaagtagccgggggagcag

SEQ ID NO: 5367699 - DNA, 25 bp, Homo sapien
cctcagagaccatggagagaaacat

SEQ ID NO: 5367700 - DNA, 25 bp, Homo sapien
gagaaggtgcccatagggcagggca

SEQ ID NO: 5367701 - DNA, 25 bp, Homo sapien
agaaggtgcccatagggcagggcag

SEQ ID NO: 5367702 - DNA, 25 bp, Homo sapien
ttctctgttatgccctccgtccctg

SEQ ID NO: 5367703 - DNA, 25 bp, Homo sapien
ctctgttatgccctccgtccctgcc

SEQ ID NO: 5367704 - DNA, 25 bp, Homo sapien
tctgttatgccctccgtccctgccg

SEQ ID NO: 5367705 - DNA, 25 bp, Homo sapien
tttctctgttatgccctccgtccct

SEQ ID NO: 5367706 - DNA, 25 bp, Homo sapien
cagctgtgggcctggcttcggtcct

SEQ ID NO: 5367707 - DNA, 25 bp, Homo sapien
ggacatggcgggcagctgtgggcct

SEQ ID NO: 5367708 - DNA, 25 bp, Homo sapien
ctggcttcggtcctcccagggactg

SEQ ID NO: 5367709 - DNA, 25 bp, Homo sapien
ctgcaggacatggcgggcagctgtg

SEQ ID NO: 5367710 - DNA, 25 bp, Homo sapien
agggagccctcgaagtgtccccaca

SEQ ID NO: 5367711 - DNA, 25 bp, Homo sapien
gctgtgctccccgtcttgccgaggt

SEQ ID NO: 5367712 - DNA, 25 bp, Homo sapien
ccgtcttgccgaggtgtggccgcca

SEQ ID NO: 5367713 - DNA, 25 bp, Homo sapien
tgtgccgtagctgtgctccccgtct

SEQ ID NO: 5367714 - DNA, 25 bp, Homo sapien
tggaggtgccccagtaagctcataa

SEQ ID NO: 5367715 - DNA, 25 bp, Homo sapien
cggctgtacccgtgactgctgtggt

SEQ ID NO: 5367716 - DNA, 25 bp, Homo sapien
ttcccatgcacgaggctccggctgt

SEQ ID NO: 5367717 - DNA, 25 bp, Homo sapien
agggaagcaccaggccggcctgctc

SEQ ID NO: 5367718 - DNA, 25 bp, Homo sapien
ctggtgcatacgggcccccaggggc

SEQ ID NO: 5367719 - DNA, 25 bp, Homo sapien
catacgggcccccaggggcagcctg

SEQ ID NO: 5367720 - DNA, 25 bp, Homo sapien
tacgggcccccaggggcagcctggc

SEQ ID NO: 5367721 - DNA, 25 bp, Homo sapien
tgcatacgggcccccaggggcagcc

SEQ ID NO: 5367722 - DNA, 25 bp, Homo sapien
tgcattccaggtgccagccgggcag

SEQ ID NO: 5367723 - DNA, 25 bp, Homo sapien
cgaggcaggcaccagcttatgtcct

SEQ ID NO: 5367724 - DNA, 25 bp, Homo sapien
gcaggcaccagcttatgtcctgtgc

SEQ ID NO: 5367725 - DNA, 25 bp, Homo sapien
cagggcagaaatgacccgggggaca

SEQ ID NO: 5367726 - DNA, 25 bp, Homo sapien
tttgccacagaatgcccccaggtgg

SEQ ID NO: 5367727 - DNA, 25 bp, Homo sapien
ggcatggctggcagtattccacacg

SEQ ID NO: 5367728 - DNA, 25 bp, Homo sapien
ggccagctttgccacagaatgcccc

SEQ ID NO: 5367729 - DNA, 25 bp, Homo sapien
atggctggcagtattccacacgggc

SEQ ID NO: 5367730 - DNA, 25 bp, Homo sapien
ctgggcagatagagggatgtcacca

SEQ ID NO: 5367731 - DNA, 25 bp, Homo sapien
cagatagagggatgtcaccagggtc

SEQ ID NO: 5367732 - DNA, 25 bp, Homo sapien
atagagggatgtcaccagggtcaag

SEQ ID NO: 5367733 - DNA, 25 bp, Homo sapien
gcagatagagggatgtcaccagggt

SEQ ID NO: 5367734 - DNA, 25 bp, Homo sapien
cctggtgcacgacaggtactgagga

SEQ ID NO: 5367735 - DNA, 25 bp, Homo sapien
gtgggcctggtgcacgacaggtact

SEQ ID NO: 5367736 - DNA, 25 bp, Homo sapien
tggtgcacgacaggtactgaggaaa

SEQ ID NO: 5367737 - DNA, 25 bp, Homo sapien
ggcctggtgcacgacaggtactgag

SEQ ID NO: 5367738 - DNA, 25 bp, Homo sapien
aggaaggcggatgccacagaaccag

SEQ ID NO: 5367739 - DNA, 25 bp, Homo sapien
tgaggaaggcggatgccacagaacc

SEQ ID NO: 5367740 - DNA, 25 bp, Homo sapien
aaggcggatgccacagaaccaggga

SEQ ID NO: 5367741 - DNA, 25 bp, Homo sapien
ctatgaggaaggcggatgccacaga

SEQ ID NO: 5367742 - DNA, 25 bp, Homo sapien
tgctgccttcatcacccatagctcc

SEQ ID NO: 5367743 - DNA, 25 bp, Homo sapien
taaaatggaagtgtgctgccttcat

SEQ ID NO: 5367744 - DNA, 25 bp, Homo sapien
ggaggtaaaatggaagtgtgctgcc

SEQ ID NO: 5367745 - DNA, 25 bp, Homo sapien
ggtaaaatggaagtgtgctgccttc

SEQ ID NO: 5367746 - DNA, 25 bp, Homo sapien
tcgtggcgtggtggtgcctctctca

SEQ ID NO: 5367747 - DNA, 25 bp, Homo sapien
ctgcatggtcgtggcgtggtggtgc

SEQ ID NO: 5367748 - DNA, 25 bp, Homo sapien
tgccagtgctgcatggtcgtggcgt

SEQ ID NO: 5367749 - DNA, 25 bp, Homo sapien
tgctggaccttggcagtacgttcct

SEQ ID NO: 5367750 - DNA, 25 bp, Homo sapien
tagggcagacagtcctcgagctggc

SEQ ID NO: 5367751 - DNA, 25 bp, Homo sapien
ggcaggggaactgtgtcctccactt

SEQ ID NO: 5367752 - DNA, 25 bp, Homo sapien
agacagtcctcgagctggccgttgc

SEQ ID NO: 5367753 - DNA, 25 bp, Homo sapien
ctcgagctggccgttgcctgcctgg

SEQ ID NO: 5367754 - DNA, 25 bp, Homo sapien
caggacaggctagtccctcggggca

SEQ ID NO: 5367755 - DNA, 25 bp, Homo sapien
gtcattgcggttgctaaaggtccca

SEQ ID NO: 5367756 - DNA, 25 bp, Homo sapien
gggcagacctcacactgcgatgggt

SEQ ID NO: 5367757 - DNA, 25 bp, Homo sapien
ttgcggttgctaaaggtcccaggag

SEQ ID NO: 5367758 - DNA, 25 bp, Homo sapien
tcagcttctgttagcgtttgataag

SEQ ID NO: 5367759 - DNA, 25 bp, Homo sapien
gtcagtcccttaacatcagcttctg

SEQ ID NO: 5367760 - DNA, 25 bp, Homo sapien
cagagtcaaggccactcttcctgtc

SEQ ID NO: 5367761 - DNA, 25 bp, Homo sapien
taagcaccaatcagcaaggtcagag

SEQ ID NO: 5367762 - DNA, 25 bp, Homo sapien
tgtccttgaagtttccggcatggcg

SEQ ID NO: 5367763 - DNA, 25 bp, Homo sapien
ctgctgagcagaagctggtgtcctg

SEQ ID NO: 5367764 - DNA, 25 bp, Homo sapien
catggcgtggcacaaaggcagcacc

SEQ ID NO: 5367765 - DNA, 25 bp, Homo sapien
ccatatgggtggaagtagcctgtga

SEQ ID NO: 5367766 - DNA, 25 bp, Homo sapien
tggaagcctggcacctggagtggct

SEQ ID NO: 5367767 - DNA, 25 bp, Homo sapien
gagctggaagcctggcacctggagt

SEQ ID NO: 5367768 - DNA, 25 bp, Homo sapien
aagcctggcacctggagtggcttct

SEQ ID NO: 5367769 - DNA, 25 bp, Homo sapien
tggagggtgagctggaagcctggca

SEQ ID NO: 5367770 - DNA, 25 bp, Homo sapien
ctgcaccatgcagggtgaggctggg

SEQ ID NO: 5367771 - DNA, 25 bp, Homo sapien
tgggtcccaccccgggcccatgtgc

SEQ ID NO: 5367772 - DNA, 25 bp, Homo sapien
cagggtgaggctgggtcccaccccg

SEQ ID NO: 5367773 - DNA, 25 bp, Homo sapien
gtcccaccccgggcccatgtgccat

SEQ ID NO: 5367774 - DNA, 25 bp, Homo sapien
ggtggggccgtggaacactcaggag

SEQ ID NO: 5367775 - DNA, 25 bp, Homo sapien
caacggtggggccgtggaacactca

SEQ ID NO: 5367776 - DNA, 25 bp, Homo sapien
tgcacccacttctaagaacacaggc

SEQ ID NO: 5367777 - DNA, 25 bp, Homo sapien
taagaacacaggcaacggtggggcc

SEQ ID NO: 5367778 - DNA, 25 bp, Homo sapien
gagaaatgacaaagctcttgtctcc

SEQ ID NO: 5367779 - DNA, 25 bp, Homo sapien
acaaagctcttgtctccgaggtgag

SEQ ID NO: 5367780 - DNA, 25 bp, Homo sapien
cttgtctccgaggtgaggtgctcca

SEQ ID NO: 5367781 - DNA, 25 bp, Homo sapien
ctccgaggtgaggtgctccatgcct

SEQ ID NO: 5367782 - DNA, 25 bp, Homo sapien
ctgaggggcagggctggcagctggg

SEQ ID NO: 5367783 - DNA, 25 bp, Homo sapien
cagggctggcagctggggcttctgc

SEQ ID NO: 5367784 - DNA, 25 bp, Homo sapien
ggcagggctggcagctggggcttct

SEQ ID NO: 5367785 - DNA, 25 bp, Homo sapien
ggggcagggctggcagctggggctt

SEQ ID NO: 5367786 - DNA, 25 bp, Homo sapien
cctggctcctgttcaggtgggcact

SEQ ID NO: 5367787 - DNA, 25 bp, Homo sapien
ctgtgaagtagtgcagagagcacaa

SEQ ID NO: 5367788 - DNA, 25 bp, Homo sapien
tgcagagagcacaaaatgcagctgg

SEQ ID NO: 5367789 - DNA, 25 bp, Homo sapien
agtagtgcagagagcacaaaatgca

SEQ ID NO: 5367790 - DNA, 25 bp, Homo sapien
tgagttctgggagccgactgcaggt

SEQ ID NO: 5367791 - DNA, 25 bp, Homo sapien
gggtcatgggcagagggatgaactc

SEQ ID NO: 5367792 - DNA, 25 bp, Homo sapien
actccttcatctggtccaagggtgg

SEQ ID NO: 5367793 - DNA, 25 bp, Homo sapien
caggtggaggggtcggagcagtggg

SEQ ID NO: 5367794 - DNA, 25 bp, Homo sapien
ggatgaactccttcatctggtccaa

SEQ ID NO: 5367795 - DNA, 25 bp, Homo sapien
gggcactgcaggttgctcccagcca

SEQ ID NO: 5367796 - DNA, 25 bp, Homo sapien
aggttgctcccagccatggagtgct

SEQ ID NO: 5367797 - DNA, 25 bp, Homo sapien
ttgctcccagccatggagtgctggc

SEQ ID NO: 5367798 - DNA, 25 bp, Homo sapien
gggggcactgcaggttgctcccagc

SEQ ID NO: 5367799 - DNA, 25 bp, Homo sapien
acaggcagtggctgtcagctccacc

SEQ ID NO: 5367800 - DNA, 25 bp, Homo sapien
ggcacaggcagtggctgtcagctcc

SEQ ID NO: 5367801 - DNA, 25 bp, Homo sapien
ctgccaggcagacaacaaggcacag

SEQ ID NO: 5367802 - DNA, 25 bp, Homo sapien
tgccaggcagacaacaaggcacagg

SEQ ID NO: 5367803 - DNA, 25 bp, Homo sapien
gtgacttcagcccaacactgcaatt

SEQ ID NO: 5367804 - DNA, 25 bp, Homo sapien
tgaagagcctgtatgagagccctgc

SEQ ID NO: 5367805 - DNA, 25 bp, Homo sapien
gcaattcgtgacagctgtaacagca

SEQ ID NO: 5367806 - DNA, 25 bp, Homo sapien
catctccattggtgtgacttcagcc

SEQ ID NO: 5367807 - DNA, 25 bp, Homo sapien
ggcggcaaccaggagagggaccagg

SEQ ID NO: 5367808 - DNA, 25 bp, Homo sapien
gcagtggcggcaaccaggagaggga

SEQ ID NO: 5367809 - DNA, 25 bp, Homo sapien
ggcaaccaggagagggaccaggccc

SEQ ID NO: 5367810 - DNA, 25 bp, Homo sapien
ctgcagtggcggcaaccaggagagg

SEQ ID NO: 5367811 - DNA, 25 bp, Homo sapien
tccaccagggtgatcgtagaccaga

SEQ ID NO: 5367812 - DNA, 25 bp, Homo sapien
tgatcgtagaccagaagggtccagg

SEQ ID NO: 5367813 - DNA, 25 bp, Homo sapien
ttggcccagactctcgccagtcacc

SEQ ID NO: 5367814 - DNA, 25 bp, Homo sapien
tcatgctgttcccagcggactctcc

SEQ ID NO: 5367815 - DNA, 25 bp, Homo sapien
gatgtaggttctgcagtatccagtg

SEQ ID NO: 5367816 - DNA, 25 bp, Homo sapien
gctgagagactggcccaagtctttg

SEQ ID NO: 5367817 - DNA, 25 bp, Homo sapien
gactggcccaagtctttggagatgc

SEQ ID NO: 5367818 - DNA, 25 bp, Homo sapien
tctgggatgtaggttctgcagtatc

SEQ ID NO: 5367819 - DNA, 25 bp, Homo sapien
gcatgtggctacttagtaaatagta

SEQ ID NO: 5367820 - DNA, 25 bp, Homo sapien
tagatacaaaactgtaaggcctcaa

SEQ ID NO: 5367821 - DNA, 25 bp, Homo sapien
aaatgtagatacaaaactgtaaggc

SEQ ID NO: 5367822 - DNA, 25 bp, Homo sapien
tgtagatacaaaactgtaaggcctc

SEQ ID NO: 5367823 - DNA, 25 bp, Homo sapien
cagaaggcacgtgcagttacagggc

SEQ ID NO: 5367824 - DNA, 25 bp, Homo sapien
gggtccttcactcctcgctgagatg

SEQ ID NO: 5367825 - DNA, 25 bp, Homo sapien
caaagtgtggtgtcatcgctcagtc

SEQ ID NO: 5367826 - DNA, 25 bp, Homo sapien
aactttgcccgttgaggtcctggtg

SEQ ID NO: 5367827 - DNA, 25 bp, Homo sapien
agcagcgtggcgatgaaggcgaaga

SEQ ID NO: 5367828 - DNA, 25 bp, Homo sapien
gcagcgtggcgatgaaggcgaagaa

SEQ ID NO: 5367829 - DNA, 25 bp, Homo sapien
gagcagcgtggcgatgaaggcgaag

SEQ ID NO: 5367830 - DNA, 25 bp, Homo sapien
gtagtaaattcttgggtccagcagt

SEQ ID NO: 5367831 - DNA, 25 bp, Homo sapien
tttctcagaaacaatcgtggcatgt

SEQ ID NO: 5367832 - DNA, 25 bp, Homo sapien
aggacggcagcgctcatgtacagga

SEQ ID NO: 5367833 - DNA, 25 bp, Homo sapien
cgaggctgccgaattaatgtagtaa

SEQ ID NO: 5367834 - DNA, 25 bp, Homo sapien
ggaaatgcagagcagagccacgcat

SEQ ID NO: 5367835 - DNA, 25 bp, Homo sapien
ctggaaatgcagagcagagccacgc

SEQ ID NO: 5367836 - DNA, 25 bp, Homo sapien
tggaaatgcagagcagagccacgca

SEQ ID NO: 5367837 - DNA, 25 bp, Homo sapien
ccacatcaatcaggtgaacattttc

SEQ ID NO: 5367838 - DNA, 25 bp, Homo sapien
ggccacatcaatcaggtgaacattt

SEQ ID NO: 5367839 - DNA, 25 bp, Homo sapien
gccacatcaatcaggtgaacatttt

SEQ ID NO: 5367840 - DNA, 25 bp, Homo sapien
gggtatactatgtgggtggcggcta

SEQ ID NO: 5367841 - DNA, 25 bp, Homo sapien
gtatactatgtgggtggcggctacc

SEQ ID NO: 5367842 - DNA, 25 bp, Homo sapien
ttgcagcaaggggtatactatgtgg

SEQ ID NO: 5367843 - DNA, 25 bp, Homo sapien
atactatgtgggtggcggctaccat

SEQ ID NO: 5367844 - DNA, 25 bp, Homo sapien
gcacagagcagctggaagcccctca

SEQ ID NO: 5367845 - DNA, 25 bp, Homo sapien
tgcacagagcagctggaagcccctc

SEQ ID NO: 5367846 - DNA, 25 bp, Homo sapien
ctgcacagagcagctggaagcccct

SEQ ID NO: 5367847 - DNA, 25 bp, Homo sapien
cacagagcagctggaagcccctcat

SEQ ID NO: 5367848 - DNA, 25 bp, Homo sapien
ctagggatacatacttgacttagtc

SEQ ID NO: 5367849 - DNA, 25 bp, Homo sapien
gatgtcactgcccatgccattaggc

SEQ ID NO: 5367850 - DNA, 25 bp, Homo sapien
ggctcatcacgttccctactaggga

SEQ ID NO: 5367851 - DNA, 25 bp, Homo sapien
tgccattaggctcatcacgttccct

SEQ ID NO: 5367852 - DNA, 25 bp, Homo sapien
gcagaggggcatcctcagttaccca

SEQ ID NO: 5367853 - DNA, 25 bp, Homo sapien
cctttgtgcttcgaatacaggagga

SEQ ID NO: 5367854 - DNA, 25 bp, Homo sapien
tgtgcttcgaatacaggaggatgct

SEQ ID NO: 5367855 - DNA, 25 bp, Homo sapien
tctcctttgtgcttcgaatacagga

SEQ ID NO: 5367856 - DNA, 25 bp, Homo sapien
ccattattccaacgggaccccatgg

SEQ ID NO: 5367857 - DNA, 25 bp, Homo sapien
atgttctcccgtccttgttttccag

SEQ ID NO: 5367858 - DNA, 25 bp, Homo sapien
tgttttccaggggacatccttggcc

SEQ ID NO: 5367859 - DNA, 25 bp, Homo sapien
tcatgttctcccgtccttgttttcc

SEQ ID NO: 5367860 - DNA, 25 bp, Homo sapien
ggcacagaggttggtggctcccatg

SEQ ID NO: 5367861 - DNA, 25 bp, Homo sapien
gcacagaggttggtggctcccatgt

SEQ ID NO: 5367862 - DNA, 25 bp, Homo sapien
agggatggtgaggaacagcgcgacc

SEQ ID NO: 5367863 - DNA, 25 bp, Homo sapien
aggaacagcgcgacccccgagggca

SEQ ID NO: 5367864 - DNA, 25 bp, Homo sapien
agggcacgtcggacggggcgtagct

SEQ ID NO: 5367865 - DNA, 25 bp, Homo sapien
tcggacggggcgtagctggtggcgg

SEQ ID NO: 5367866 - DNA, 25 bp, Homo sapien
gagtgtaggcccaagctgcttggct

SEQ ID NO: 5367867 - DNA, 25 bp, Homo sapien
gcgcgcagcctgtcaaatatcacct

SEQ ID NO: 5367868 - DNA, 25 bp, Homo sapien
aatgagccaagctatctgcagacag

SEQ ID NO: 5367869 - DNA, 25 bp, Homo sapien
tacgagggctgcgtactgaggacca

SEQ ID NO: 5367870 - DNA, 25 bp, Homo sapien
ttaactgggctaatgagaaatgctc

SEQ ID NO: 5367871 - DNA, 25 bp, Homo sapien
gaaatgctcagacacacagtaggtg

SEQ ID NO: 5367872 - DNA, 25 bp, Homo sapien
ggtgctcaattaacgcaggctgcta

SEQ ID NO: 5367873 - DNA, 25 bp, Homo sapien
caaggcctgaaagggtgagtcgact

SEQ ID NO: 5367874 - DNA, 25 bp, Homo sapien
acctttatcagttagatgatttgca

SEQ ID NO: 5367875 - DNA, 25 bp, Homo sapien
ataccattaacttaagtagctgttt

SEQ ID NO: 5367876 - DNA, 25 bp, Homo sapien
atctataccattaacttaagtagct

SEQ ID NO: 5367877 - DNA, 25 bp, Homo sapien
ctataccattaacttaagtagctgt

SEQ ID NO: 5367878 - DNA, 25 bp, Homo sapien
tttaaaaatatggtctgtagaaaga

SEQ ID NO: 5367879 - DNA, 25 bp, Homo sapien
aaacctaagttgtaaagtgacagtg

SEQ ID NO: 5367880 - DNA, 25 bp, Homo sapien
aaatatggtctgtagaaagaaaaga

SEQ ID NO: 5367881 - DNA, 25 bp, Homo sapien
aacctaagttgtaaagtgacagtga

SEQ ID NO: 5367882 - DNA, 25 bp, Homo sapien
cattttattcacgtaatcgtggagg

SEQ ID NO: 5367883 - DNA, 25 bp, Homo sapien
cgtggaggatccatctgattccgtg

SEQ ID NO: 5367884 - DNA, 25 bp, Homo sapien
cacgtaatcgtggaggatccatctg

SEQ ID NO: 5367885 - DNA, 25 bp, Homo sapien
catctgattccgtgggaagctgagg

SEQ ID NO: 5367886 - DNA, 25 bp, Homo sapien
tctgaaaggtcaaaaggttcatgaa

SEQ ID NO: 5367887 - DNA, 25 bp, Homo sapien
gtgataactttccaccgtgcagtct

SEQ ID NO: 5367888 - DNA, 25 bp, Homo sapien
catgaactccgtctggtgacagcag

SEQ ID NO: 5367889 - DNA, 25 bp, Homo sapien
tcacccaagaagtcataggtctgct

SEQ ID NO: 5367890 - DNA, 25 bp, Homo sapien
gagaagtgggagcacgcagtcatgg

SEQ ID NO: 5367891 - DNA, 25 bp, Homo sapien
ggagaaacgtggacttcaggaactc

SEQ ID NO: 5367892 - DNA, 25 bp, Homo sapien
gggtaggcgtgtggagtggagaagt

SEQ ID NO: 5367893 - DNA, 25 bp, Homo sapien
taaaccaggagaaacgtggacttca

SEQ ID NO: 5367894 - DNA, 25 bp, Homo sapien
caggcagcagagtctacacagagat

SEQ ID NO: 5367895 - DNA, 25 bp, Homo sapien
cagggtgtctcctaagctccatgga

SEQ ID NO: 5367896 - DNA, 25 bp, Homo sapien
ggcaatgtctacaggcccaaggctg

SEQ ID NO: 5367897 - DNA, 25 bp, Homo sapien
tgtactagaatagcactaagcctgg

SEQ ID NO: 5367898 - DNA, 25 bp, Homo sapien
taaagcaagttcggattggtaatta

SEQ ID NO: 5367899 - DNA, 25 bp, Homo sapien
attaaagcaagttcggattggtaat

SEQ ID NO: 5367900 - DNA, 25 bp, Homo sapien
gattaaagcaagttcggattggtaa

SEQ ID NO: 5367901 - DNA, 25 bp, Homo sapien
cgattaaagcaagttcggattggta

SEQ ID NO: 5367902 - DNA, 25 bp, Homo sapien
ttgttttcaatatatggtacagctc

SEQ ID NO: 5367903 - DNA, 25 bp, Homo sapien
gcaggagcaatgcattgttttcaat

SEQ ID NO: 5367904 - DNA, 25 bp, Homo sapien
ttttcaatatatggtacagctcagg

SEQ ID NO: 5367905 - DNA, 25 bp, Homo sapien
atgattttatagcaaggtaagcagg

SEQ ID NO: 5367906 - DNA, 25 bp, Homo sapien
cacaactgagagactttggcttaga

SEQ ID NO: 5367907 - DNA, 25 bp, Homo sapien
acgatcatgcgtaaccctcttggaa

SEQ ID NO: 5367908 - DNA, 25 bp, Homo sapien
tagaataggcaagcaaacaccaggt

SEQ ID NO: 5367909 - DNA, 25 bp, Homo sapien
taagagggattatgactatggctac

SEQ ID NO: 5367910 - DNA, 25 bp, Homo sapien
tttaatgtgctttcttttccagccc

SEQ ID NO: 5367911 - DNA, 25 bp, Homo sapien
tgtgctttcttttccagcccacgaa

SEQ ID NO: 5367912 - DNA, 25 bp, Homo sapien
tctctgatctttttaatgtgctttc

SEQ ID NO: 5367913 - DNA, 25 bp, Homo sapien
tgctttcttttccagcccacgaact

SEQ ID NO: 5367914 - DNA, 25 bp, Homo sapien
gggaaatattcctgtggccagcaca

SEQ ID NO: 5367915 - DNA, 25 bp, Homo sapien
tagtttttatcagcaggagtcaccc

SEQ ID NO: 5367916 - DNA, 25 bp, Homo sapien
gaagaggacccttacagaaccagag

SEQ ID NO: 5367917 - DNA, 25 bp, Homo sapien
tctgtgaaaaatgccgtagaagccc

SEQ ID NO: 5367918 - DNA, 25 bp, Homo sapien
atcacatcaggctgctccaagagca

SEQ ID NO: 5367919 - DNA, 25 bp, Homo sapien
gccagcatgggatggctaattaaat

SEQ ID NO: 5367920 - DNA, 25 bp, Homo sapien
atccatcacatcaggctgctccaag

SEQ ID NO: 5367921 - DNA, 25 bp, Homo sapien
catggggaaggtggccagcatggga

SEQ ID NO: 5367922 - DNA, 25 bp, Homo sapien
cagtactttgcaagctcatcctgtc

SEQ ID NO: 5367923 - DNA, 25 bp, Homo sapien
aacacatatttccaattaatgtttc

SEQ ID NO: 5367924 - DNA, 25 bp, Homo sapien
tctccaagaatttgtcgataaaata

SEQ ID NO: 5367925 - DNA, 25 bp, Homo sapien
atcaacaagtgaatagaacacatat

SEQ ID NO: 5367926 - DNA, 25 bp, Homo sapien
tagaagttgaggctgccttctcatt

SEQ ID NO: 5367927 - DNA, 25 bp, Homo sapien
actagaagttgaggctgccttctca

SEQ ID NO: 5367928 - DNA, 25 bp, Homo sapien
cactagaagttgaggctgccttctc

SEQ ID NO: 5367929 - DNA, 25 bp, Homo sapien
ctagaagttgaggctgccttctcat

SEQ ID NO: 5367930 - DNA, 25 bp, Homo sapien
gaaaggaagacaacacatgagagcc

SEQ ID NO: 5367931 - DNA, 25 bp, Homo sapien
gaaaatataccacccagtagtgctg

SEQ ID NO: 5367932 - DNA, 25 bp, Homo sapien
ggaaaacagcatgtctgactccagg

SEQ ID NO: 5367933 - DNA, 25 bp, Homo sapien
tttgacccagcaataggcagtctct

SEQ ID NO: 5367934 - DNA, 25 bp, Homo sapien
cctttttcataaggagtaccaccat

SEQ ID NO: 5367935 - DNA, 25 bp, Homo sapien
aggagtaccaccattcaagaaaagc

SEQ ID NO: 5367936 - DNA, 25 bp, Homo sapien
ggtccacttcaatacctttttcata

SEQ ID NO: 5367937 - DNA, 25 bp, Homo sapien
tattgaagggtccacttcaatacct

SEQ ID NO: 5367938 - DNA, 25 bp, Homo sapien
gctggaataggaactccactggcat

SEQ ID NO: 5367939 - DNA, 25 bp, Homo sapien
tgctggaataggaactccactggca

SEQ ID NO: 5367940 - DNA, 25 bp, Homo sapien
ctggaataggaactccactggcatc

SEQ ID NO: 5367941 - DNA, 25 bp, Homo sapien
tattccaagatctggagatgcagaa

SEQ ID NO: 5367942 - DNA, 25 bp, Homo sapien
gcaatcaccatcaagcaaacatggt

SEQ ID NO: 5367943 - DNA, 25 bp, Homo sapien
gatgcagaattagacctgataaagc

SEQ ID NO: 5367944 - DNA, 25 bp, Homo sapien
ataatattccaagatctggagatgc

SEQ ID NO: 5367945 - DNA, 25 bp, Homo sapien
catgtggctctgactgtatgaatgt

SEQ ID NO: 5367946 - DNA, 25 bp, Homo sapien
tgtaaaaagctctttgaaatgtcac

SEQ ID NO: 5367947 - DNA, 25 bp, Homo sapien
aaaagctctttgaaatgtcaccatt

SEQ ID NO: 5367948 - DNA, 25 bp, Homo sapien
taaaaagctctttgaaatgtcacca

SEQ ID NO: 5367949 - DNA, 25 bp, Homo sapien
aatcatgtaaaaagctctttgaaat

SEQ ID NO: 5367950 - DNA, 25 bp, Homo sapien
ctaagtactgtttaacctgtatctc

SEQ ID NO: 5367951 - DNA, 25 bp, Homo sapien
aaatactctcttgggaattggggag

SEQ ID NO: 5367952 - DNA, 25 bp, Homo sapien
gggaatgtttctccataatcctagt

SEQ ID NO: 5367953 - DNA, 25 bp, Homo sapien
ccatctaagtactgtttaacctgta

SEQ ID NO: 5367954 - DNA, 25 bp, Homo sapien
gtctgctgagaacctgtatgctcat

SEQ ID NO: 5367955 - DNA, 25 bp, Homo sapien
tattaccatcaaatagacagaggcg

SEQ ID NO: 5367956 - DNA, 25 bp, Homo sapien
gaaatacgacttggtctcgacctaa

SEQ ID NO: 5367957 - DNA, 25 bp, Homo sapien
gaacctgtatgctcattcctggaag

SEQ ID NO: 5367958 - DNA, 25 bp, Homo sapien
ttctaacacaaatctgtcttttgtg

SEQ ID NO: 5367959 - DNA, 25 bp, Homo sapien
ttgtgaattcggcttatgaaaatgt

SEQ ID NO: 5367960 - DNA, 25 bp, Homo sapien
gtcttttgtgaattcggcttatgaa

SEQ ID NO: 5367961 - DNA, 25 bp, Homo sapien
gaattcggcttatgaaaatgtatac

SEQ ID NO: 5367962 - DNA, 25 bp, Homo sapien
gcatcccacatcagatctctgaagg

SEQ ID NO: 5367963 - DNA, 25 bp, Homo sapien
gccagttgtgaaggcatgagctctg

SEQ ID NO: 5367964 - DNA, 25 bp, Homo sapien
aagtaatttgctcgaaattgattcc

SEQ ID NO: 5367965 - DNA, 25 bp, Homo sapien
tctgtagcatcccacatcagatctc

SEQ ID NO: 5367966 - DNA, 25 bp, Homo sapien
tactcttgccagatgctacaccagg

SEQ ID NO: 5367967 - DNA, 25 bp, Homo sapien
catagagctataaagggtgttcaca

SEQ ID NO: 5367968 - DNA, 25 bp, Homo sapien
gaatttaccgcgagacctgaaggat

SEQ ID NO: 5367969 - DNA, 25 bp, Homo sapien
caacaactcagggtatacaggacac

SEQ ID NO: 5367970 - DNA, 25 bp, Homo sapien
cctgcaggaatagctcccatcgtag

SEQ ID NO: 5367971 - DNA, 25 bp, Homo sapien
tcctccagaagctgtgagagcgtgg

SEQ ID NO: 5367972 - DNA, 25 bp, Homo sapien
tagctcccatcgtagttaacacatc

SEQ ID NO: 5367973 - DNA, 25 bp, Homo sapien
gagagcgtggaaggcctgaaccctg

SEQ ID NO: 5367974 - DNA, 25 bp, Homo sapien
ttgccctgtcactcatgctctggag

SEQ ID NO: 5367975 - DNA, 25 bp, Homo sapien
tattggcaaatcacatgcactgaag

SEQ ID NO: 5367976 - DNA, 25 bp, Homo sapien
gaagaataatacgatttggccccaa

SEQ ID NO: 5367977 - DNA, 25 bp, Homo sapien
tccactcaaatgataggaaagcagg

SEQ ID NO: 5367978 - DNA, 25 bp, Homo sapien
cagtctccatcctatttcgcatcag

SEQ ID NO: 5367979 - DNA, 25 bp, Homo sapien
gaaatatacgtcctctgctctgtac

SEQ ID NO: 5367980 - DNA, 25 bp, Homo sapien
gaactattaggtagcaaaacgagac

SEQ ID NO: 5367981 - DNA, 25 bp, Homo sapien
gaaccctgtttcagatccattggtg

SEQ ID NO: 5367982 - DNA, 25 bp, Homo sapien
tcgctttctgaacagcactccagtg

SEQ ID NO: 5367983 - DNA, 25 bp, Homo sapien
tgaaatcgctttctgaacagcactc

SEQ ID NO: 5367984 - DNA, 25 bp, Homo sapien
aatcgctttctgaacagcactccag

SEQ ID NO: 5367985 - DNA, 25 bp, Homo sapien
gaaatcgctttctgaacagcactcc

SEQ ID NO: 5367986 - DNA, 25 bp, Homo sapien
ttgatatcctttcccacttttgtac

SEQ ID NO: 5367987 - DNA, 25 bp, Homo sapien
ttctgctccatctgctgtttcatcc

SEQ ID NO: 5367988 - DNA, 25 bp, Homo sapien
tgctccatctgctgtttcatccacc

SEQ ID NO: 5367989 - DNA, 25 bp, Homo sapien
ctccatctgctgtttcatccaccgc

SEQ ID NO: 5367990 - DNA, 25 bp, Homo sapien
ctttgcttaacttctgctccatctg

SEQ ID NO: 5367991 - DNA, 25 bp, Homo sapien
ctgccctcttcacttgactcttggc

SEQ ID NO: 5367992 - DNA, 25 bp, Homo sapien
cactgccctcttcacttgactcttg

SEQ ID NO: 5367993 - DNA, 25 bp, Homo sapien
cttcacttgactcttggccttcttc

SEQ ID NO: 5367994 - DNA, 25 bp, Homo sapien
cttcactgccctcttcacttgactc

SEQ ID NO: 5367995 - DNA, 25 bp, Homo sapien
tctgggaacaagaccttcatttcct

SEQ ID NO: 5367996 - DNA, 25 bp, Homo sapien
tctaggtaggttctgggaacaagac

SEQ ID NO: 5367997 - DNA, 25 bp, Homo sapien
ttcatttcctttggcatccttagct

SEQ ID NO: 5367998 - DNA, 25 bp, Homo sapien
atccttagctatccaccaaccatca

SEQ ID NO: 5367999 - DNA, 25 bp, Homo sapien
ccggttgaccatttgtgagattcat

SEQ ID NO: 5368000 - DNA, 25 bp, Homo sapien
tcctcttcttcagtaggtgccccaa

SEQ ID NO: 5368001 - DNA, 25 bp, Homo sapien
aaaatctccaacagcgatgtattct

SEQ ID NO: 5368002 - DNA, 25 bp, Homo sapien
cgatgtattcttcaccggttgacca

SEQ ID NO: 5368003 - DNA, 25 bp, Homo sapien
atgcaagtagacattccaaatcatt

SEQ ID NO: 5368004 - DNA, 25 bp, Homo sapien
ggagaacaatgcaagtagacattcc

SEQ ID NO: 5368005 - DNA, 25 bp, Homo sapien
taaagaatgtttatgaaagggagaa

SEQ ID NO: 5368006 - DNA, 25 bp, Homo sapien
aatcatttcccttttacacatcaac

SEQ ID NO: 5368007 - DNA, 25 bp, Homo sapien
gtttatatctatactgctatatgtc

SEQ ID NO: 5368008 - DNA, 25 bp, Homo sapien
catctctcatgggatctaacacctt

SEQ ID NO: 5368009 - DNA, 25 bp, Homo sapien
gattctattgttagtgtcatttgtt

SEQ ID NO: 5368010 - DNA, 25 bp, Homo sapien
aaatgttgactgattctattgttag

SEQ ID NO: 5368011 - DNA, 25 bp, Homo sapien
gttatattttctctgcttattgtca

SEQ ID NO: 5368012 - DNA, 25 bp, Homo sapien
ttatattttctctgcttattgtcac

SEQ ID NO: 5368013 - DNA, 25 bp, Homo sapien
tcagttatattttctctgcttattg

SEQ ID NO: 5368014 - DNA, 25 bp, Homo sapien
agttatattttctctgcttattgtc

SEQ ID NO: 5368015 - DNA, 25 bp, Homo sapien
ggtaagcttgtccaaaagagtatgc

SEQ ID NO: 5368016 - DNA, 25 bp, Homo sapien
tgcagttgttgggtaagcttgtcca

SEQ ID NO: 5368017 - DNA, 25 bp, Homo sapien
gcttgtccaaaagagtatgctcctc

SEQ ID NO: 5368018 - DNA, 25 bp, Homo sapien
tgttgggtaagcttgtccaaaagag

SEQ ID NO: 5368019 - DNA, 25 bp, Homo sapien
cggctttaaagtcaatgagacaggc

SEQ ID NO: 5368020 - DNA, 25 bp, Homo sapien
cacttattgacagaagaggcatgga

SEQ ID NO: 5368021 - DNA, 25 bp, Homo sapien
tgagacaggcaccaatcccaagttc

SEQ ID NO: 5368022 - DNA, 25 bp, Homo sapien
tgttctgacagaagatcggctttaa

SEQ ID NO: 5368023 - DNA, 25 bp, Homo sapien
tattgcctgctttaactggatacat

SEQ ID NO: 5368024 - DNA, 25 bp, Homo sapien
tcatctattgcctgctttaactgga

SEQ ID NO: 5368025 - DNA, 25 bp, Homo sapien
tctattgcctgctttaactggatac

SEQ ID NO: 5368026 - DNA, 25 bp, Homo sapien
catctattgcctgctttaactggat

SEQ ID NO: 5368027 - DNA, 25 bp, Homo sapien
aaaactgaggcaattagggtctggg

SEQ ID NO: 5368028 - DNA, 25 bp, Homo sapien
cgtttgggctggcaacaaatcagta

SEQ ID NO: 5368029 - DNA, 25 bp, Homo sapien
cacctcctacaaagtgcgtttgggc

SEQ ID NO: 5368030 - DNA, 25 bp, Homo sapien
caaatcagtactctcctgggacaga

SEQ ID NO: 5368031 - DNA, 25 bp, Homo sapien
ttgtcttttattgggttctagagct

SEQ ID NO: 5368032 - DNA, 25 bp, Homo sapien
gttgtcttttattgggttctagagc

SEQ ID NO: 5368033 - DNA, 25 bp, Homo sapien
ttctttcagttggctctcagaaagc

SEQ ID NO: 5368034 - DNA, 25 bp, Homo sapien
tgtcttttattgggttctagagctt

SEQ ID NO: 5368035 - DNA, 25 bp, Homo sapien
tacttgtcctacagacaccgaatag

SEQ ID NO: 5368036 - DNA, 25 bp, Homo sapien
tacagacaccgaatagaaaatctgt

SEQ ID NO: 5368037 - DNA, 25 bp, Homo sapien
ctagtgatagagccagtcatcacag

SEQ ID NO: 5368038 - DNA, 25 bp, Homo sapien
tgttgattacttgtcctacagacac

SEQ ID NO: 5368039 - DNA, 25 bp, Homo sapien
gaagttcagcataagtcaatgcccc

SEQ ID NO: 5368040 - DNA, 25 bp, Homo sapien
agtgaatctcttaccggcctcagat

SEQ ID NO: 5368041 - DNA, 25 bp, Homo sapien
gaagactgaaagactgcctattggg

SEQ ID NO: 5368042 - DNA, 25 bp, Homo sapien
cacagaaccatattaagatccaccg

SEQ ID NO: 5368043 - DNA, 25 bp, Homo sapien
gggttgggtgctggaatgttatggg

SEQ ID NO: 5368044 - DNA, 25 bp, Homo sapien
ttagttgatggtcacgaattttggg

SEQ ID NO: 5368045 - DNA, 25 bp, Homo sapien
tgatggtcacgaattttgggaggtt

SEQ ID NO: 5368046 - DNA, 25 bp, Homo sapien
agttgatggtcacgaattttgggag

SEQ ID NO: 5368047 - DNA, 25 bp, Homo sapien
ttgcggcgccgcagggcctggagag

SEQ ID NO: 5368048 - DNA, 25 bp, Homo sapien
gatctcgctgtcgtctcgccagcat

SEQ ID NO: 5368049 - DNA, 25 bp, Homo sapien
ttcagctcctgattgcggcgccgca

SEQ ID NO: 5368050 - DNA, 25 bp, Homo sapien
gcctggagaggatctcgctgtcgtc

SEQ ID NO: 5368051 - DNA, 25 bp, Homo sapien
ctggctgcggtgctctgattgctcc

SEQ ID NO: 5368052 - DNA, 25 bp, Homo sapien
gatttatcactaagctctgttcagg

SEQ ID NO: 5368053 - DNA, 25 bp, Homo sapien
gacacgtaaaagagatttttgccaa

SEQ ID NO: 5368054 - DNA, 25 bp, Homo sapien
ttcatgtgtattccataatgacacg

SEQ ID NO: 5368055 - DNA, 25 bp, Homo sapien
tgttcaggagggtttctccttcatg

SEQ ID NO: 5368056 - DNA, 25 bp, Homo sapien
gctttgtgcctgtaccaaagaaggg

SEQ ID NO: 5368057 - DNA, 25 bp, Homo sapien
ctcttggaagttcaaaggtcttaca

SEQ ID NO: 5368058 - DNA, 25 bp, Homo sapien
cataatggtcccacggccaagtctg

SEQ ID NO: 5368059 - DNA, 25 bp, Homo sapien
tatagcacccttacctcagttatgt

SEQ ID NO: 5368060 - DNA, 25 bp, Homo sapien
ttccggtagtctatatgcatcttca

SEQ ID NO: 5368061 - DNA, 25 bp, Homo sapien
agaagtcatttctttccggtagtct

SEQ ID NO: 5368062 - DNA, 25 bp, Homo sapien
catttctttccggtagtctatatgc

SEQ ID NO: 5368063 - DNA, 25 bp, Homo sapien
ttctttccggtagtctatatgcatc

SEQ ID NO: 5368064 - DNA, 25 bp, Homo sapien
gacctagccagagttgatcctaaga

SEQ ID NO: 5368065 - DNA, 25 bp, Homo sapien
ttgatcctaagatatccgcccgacc

SEQ ID NO: 5368066 - DNA, 25 bp, Homo sapien
aagtcctgtcttctgcgacctagcc

SEQ ID NO: 5368067 - DNA, 25 bp, Homo sapien
ttatcagggaagacaaaacttccac

SEQ ID NO: 5368068 - DNA, 25 bp, Homo sapien
cggcgcggacatggcaaggtggcca

SEQ ID NO: 5368069 - DNA, 25 bp, Homo sapien
gcaggcggggactgtgtggcaagcc

SEQ ID NO: 5368070 - DNA, 25 bp, Homo sapien
ggctccggcgcggacatggcaaggt

SEQ ID NO: 5368071 - DNA, 25 bp, Homo sapien
tggcaagcctggttctgggcgccgg

SEQ ID NO: 5368072 - DNA, 25 bp, Homo sapien
cggttcgcctgccagcccaggagta

SEQ ID NO: 5368073 - DNA, 25 bp, Homo sapien
ttcttctgcgtcgccgccagcttgt

SEQ ID NO: 5368074 - DNA, 25 bp, Homo sapien
caggagtactccagaagcgaaggct

SEQ ID NO: 5368075 - DNA, 25 bp, Homo sapien
caagtagcgcctccgcagtcggttc

SEQ ID NO: 5368076 - DNA, 25 bp, Homo sapien
ggctgccgccggcgtgcagcgcggt

SEQ ID NO: 5368077 - DNA, 25 bp, Homo sapien
caaaaggcgccgcgcgttcaagggt

SEQ ID NO: 5368078 - DNA, 25 bp, Homo sapien
gaggcgttggatctctcgaaactca

SEQ ID NO: 5368079 - DNA, 25 bp, Homo sapien
catctgtctcgccttcaactgaaga

SEQ ID NO: 5368080 - DNA, 25 bp, Homo sapien
aaaaatgaagcgaaggcggcgaggc

SEQ ID NO: 5368081 - DNA, 25 bp, Homo sapien
tcttgttgatgccttacatcattag

SEQ ID NO: 5368082 - DNA, 25 bp, Homo sapien
tgttgatgccttacatcattagcta

SEQ ID NO: 5368083 - DNA, 25 bp, Homo sapien
cttgttgatgccttacatcattagc

SEQ ID NO: 5368084 - DNA, 25 bp, Homo sapien
ttgatgccttacatcattagctaac

SEQ ID NO: 5368085 - DNA, 25 bp, Homo sapien
gctcttcaccgctctgtattttctc

SEQ ID NO: 5368086 - DNA, 25 bp, Homo sapien
atgggagtgactggcgtaactttaa

SEQ ID NO: 5368087 - DNA, 25 bp, Homo sapien
tgtaagctcttcaccgctctgtatt

SEQ ID NO: 5368088 - DNA, 25 bp, Homo sapien
agaatgggagtgactggcgtaactt

SEQ ID NO: 5368089 - DNA, 25 bp, Homo sapien
tagtgtaaggcatataggaaagggc

SEQ ID NO: 5368090 - DNA, 25 bp, Homo sapien
tgtaaggcatataggaaagggcatg

SEQ ID NO: 5368091 - DNA, 25 bp, Homo sapien
agtgtaaggcatataggaaagggca

SEQ ID NO: 5368092 - DNA, 25 bp, Homo sapien
gatagtgtaaggcatataggaaagg

SEQ ID NO: 5368093 - DNA, 25 bp, Homo sapien
ctgtttaggaccaccatcctccagg

SEQ ID NO: 5368094 - DNA, 25 bp, Homo sapien
cctgtttaggaccaccatcctccag

SEQ ID NO: 5368095 - DNA, 25 bp, Homo sapien
tgcaatagccctatcaggtttccat

SEQ ID NO: 5368096 - DNA, 25 bp, Homo sapien
catgcttctatatctgtccaccaca

SEQ ID NO: 5368097 - DNA, 25 bp, Homo sapien
gctgccatcgcctcttttctgagtg

SEQ ID NO: 5368098 - DNA, 25 bp, Homo sapien
tactgcttccaacaggtccaagctg

SEQ ID NO: 5368099 - DNA, 25 bp, Homo sapien
tccattgtatactggtgaatcccaa

SEQ ID NO: 5368100 - DNA, 25 bp, Homo sapien
cattgtatactggtgaatcccaagt

SEQ ID NO: 5368101 - DNA, 25 bp, Homo sapien
ttgtatactggtgaatcccaagtgc

SEQ ID NO: 5368102 - DNA, 25 bp, Homo sapien
ccattgtatactggtgaatcccaag

SEQ ID NO: 5368103 - DNA, 25 bp, Homo sapien
gccctaaagactctcgctgggcctg

SEQ ID NO: 5368104 - DNA, 25 bp, Homo sapien
tgttccacccgagacacaagcagac

SEQ ID NO: 5368105 - DNA, 25 bp, Homo sapien
cctgttccacccgagacacaagcag

SEQ ID NO: 5368106 - DNA, 25 bp, Homo sapien
tggccctaaagactctcgctgggcc

SEQ ID NO: 5368107 - DNA, 25 bp, Homo sapien
catctatgattcactgattattcca

SEQ ID NO: 5368108 - DNA, 25 bp, Homo sapien
tgctgagccagtatcaaggatctta

SEQ ID NO: 5368109 - DNA, 25 bp, Homo sapien
attccaacaagtatttcctcagtgc

SEQ ID NO: 5368110 - DNA, 25 bp, Homo sapien
gtatttcctcagtgcatactgtgtg

SEQ ID NO: 5368111 - DNA, 25 bp, Homo sapien
accaccagaccaggaagtaacagcc

SEQ ID NO: 5368112 - DNA, 25 bp, Homo sapien
gattcaccaccagaccaggaagtaa

SEQ ID NO: 5368113 - DNA, 25 bp, Homo sapien
gaccaggaagtaacagcctgggctc

SEQ ID NO: 5368114 - DNA, 25 bp, Homo sapien
agaccaggaagtaacagcctgggct

SEQ ID NO: 5368115 - DNA, 25 bp, Homo sapien
gcagaattggtcttgtaatacagac

SEQ ID NO: 5368116 - DNA, 25 bp, Homo sapien
taaagcacagtctctctcagcaatg

SEQ ID NO: 5368117 - DNA, 25 bp, Homo sapien
aaaaacaggaatgttggctgagtgc

SEQ ID NO: 5368118 - DNA, 25 bp, Homo sapien
gtaatacagacttcagggattggag

SEQ ID NO: 5368119 - DNA, 25 bp, Homo sapien
ctgtcgatctggcagggtgttcgct

SEQ ID NO: 5368120 - DNA, 25 bp, Homo sapien
cactgcggatcgtccccattgcaga

SEQ ID NO: 5368121 - DNA, 25 bp, Homo sapien
tcgccattgcagacccactgttgac

SEQ ID NO: 5368122 - DNA, 25 bp, Homo sapien
gctcccgatgctgatcgtcgccatt

SEQ ID NO: 5368123 - DNA, 25 bp, Homo sapien
ggaccacaggttacactgcagtgac

SEQ ID NO: 5368124 - DNA, 25 bp, Homo sapien
cagctaagtgtctggtggtcttgca

SEQ ID NO: 5368125 - DNA, 25 bp, Homo sapien
gctacagagctgctccatgggaaag

SEQ ID NO: 5368126 - DNA, 25 bp, Homo sapien
ggcatgggctacagagctgctccat

SEQ ID NO: 5368127 - DNA, 25 bp, Homo sapien
taaaggcatccatgtgactgcggga

SEQ ID NO: 5368128 - DNA, 25 bp, Homo sapien
gcgagctctgctcccttattctggg

SEQ ID NO: 5368129 - DNA, 25 bp, Homo sapien
tgaggtcactcatcccaataaaggc

SEQ ID NO: 5368130 - DNA, 25 bp, Homo sapien
cacctttccacaggatgggcaagtc

SEQ ID NO: 5368131 - DNA, 25 bp, Homo sapien
tctgggtcctcaggaacatgtgaag

SEQ ID NO: 5368132 - DNA, 25 bp, Homo sapien
acatgtgaaggcagatagggcagct

SEQ ID NO: 5368133 - DNA, 25 bp, Homo sapien
ccttggccaggatccttgaatccct

SEQ ID NO: 5368134 - DNA, 25 bp, Homo sapien
tattcagagaacattggaggagcga

SEQ ID NO: 5368135 - DNA, 25 bp, Homo sapien
tgtcccacgtttatttacatatgaa

SEQ ID NO: 5368136 - DNA, 25 bp, Homo sapien
aatgtcccacgtttatttacatatg

SEQ ID NO: 5368137 - DNA, 25 bp, Homo sapien
caaatgtcccacgtttatttacata

SEQ ID NO: 5368138 - DNA, 25 bp, Homo sapien
gtcccacgtttatttacatatgaaa

SEQ ID NO: 5368139 - DNA, 25 bp, Homo sapien
ccagacttgcagatctacccagaaa

SEQ ID NO: 5368140 - DNA, 25 bp, Homo sapien
gccagacttgcagatctacccagaa

SEQ ID NO: 5368141 - DNA, 25 bp, Homo sapien
gatctacccagaaaacctgtcccat

SEQ ID NO: 5368142 - DNA, 25 bp, Homo sapien
gaactgcccctgttactaagaactc

SEQ ID NO: 5368143 - DNA, 25 bp, Homo sapien
tagcctgtaattagttaacccattc

SEQ ID NO: 5368144 - DNA, 25 bp, Homo sapien
ctaaaaaaggcattattttagcctg

SEQ ID NO: 5368145 - DNA, 25 bp, Homo sapien
atttgaattcaggaactgcccctgt

SEQ ID NO: 5368146 - DNA, 25 bp, Homo sapien
aaagtgtcttatgccaatgtggaca

SEQ ID NO: 5368147 - DNA, 25 bp, Homo sapien
caaaagtgtcttatgccaatgtgga

SEQ ID NO: 5368148 - DNA, 25 bp, Homo sapien
tgtaacaaaagtgtcttatgccaat

SEQ ID NO: 5368149 - DNA, 25 bp, Homo sapien
aacaaaagtgtcttatgccaatgtg

SEQ ID NO: 5368150 - DNA, 25 bp, Homo sapien
tctgtctgacatggcgccattggga

SEQ ID NO: 5368151 - DNA, 25 bp, Homo sapien
gggagattcatcctcgtgactgggt

SEQ ID NO: 5368152 - DNA, 25 bp, Homo sapien
gatgaaggccataccatgtgtctgc

SEQ ID NO: 5368153 - DNA, 25 bp, Homo sapien
tgtctgcatgtgagtttttaaggca

SEQ ID NO: 5368154 - DNA, 25 bp, Homo sapien
cagccccgttttgcttggacactgg

SEQ ID NO: 5368155 - DNA, 25 bp, Homo sapien
cgttttgcttggacactggctgagg

SEQ ID NO: 5368156 - DNA, 25 bp, Homo sapien
ctttaacttgtgtacaacaaagagg

SEQ ID NO: 5368157 - DNA, 25 bp, Homo sapien
tccccagccccgttttgcttggaca

SEQ ID NO: 5368158 - DNA, 25 bp, Homo sapien
ggcactggtagaaagaaccatccga

SEQ ID NO: 5368159 - DNA, 25 bp, Homo sapien
tcccggcactggtagaaagaaccat

SEQ ID NO: 5368160 - DNA, 25 bp, Homo sapien
ccggcactggtagaaagaaccatcc

SEQ ID NO: 5368161 - DNA, 25 bp, Homo sapien
gcactggtagaaagaaccatccgat

SEQ ID NO: 5368162 - DNA, 25 bp, Homo sapien
aaaaacattgatttccagctttggt

SEQ ID NO: 5368163 - DNA, 25 bp, Homo sapien
tgatttccagctttggttgagtgat

SEQ ID NO: 5368164 - DNA, 25 bp, Homo sapien
tttccagctttggttgagtgattgc

SEQ ID NO: 5368165 - DNA, 25 bp, Homo sapien
taaaaacattgatttccagctttgg

SEQ ID NO: 5368166 - DNA, 25 bp, Homo sapien
ggtaaaggtacctctagagtctgag

SEQ ID NO: 5368167 - DNA, 25 bp, Homo sapien
gtctgagcagtgtgaacaggtgtac

SEQ ID NO: 5368168 - DNA, 25 bp, Homo sapien
ctgagcagtgtgaacaggtgtacac

SEQ ID NO: 5368169 - DNA, 25 bp, Homo sapien
cttctccaacatcaactgtttggta

SEQ ID NO: 5368170 - DNA, 25 bp, Homo sapien
cttgatccggttgtgccagcacagg

SEQ ID NO: 5368171 - DNA, 25 bp, Homo sapien
actttgtgcttgatccggttgtgcc

SEQ ID NO: 5368172 - DNA, 25 bp, Homo sapien
tgcttgatccggttgtgccagcaca

SEQ ID NO: 5368173 - DNA, 25 bp, Homo sapien
tgactttgtgcttgatccggttgtg

SEQ ID NO: 5368174 - DNA, 25 bp, Homo sapien
cacgctggcagcagggttgtttctt

SEQ ID NO: 5368175 - DNA, 25 bp, Homo sapien
acgctggcagcagggttgtttcttc

SEQ ID NO: 5368176 - DNA, 25 bp, Homo sapien
tcacgctggcagcagggttgtttct

SEQ ID NO: 5368177 - DNA, 25 bp, Homo sapien
tttcccatgctccttcctgacgtgg

SEQ ID NO: 5368178 - DNA, 25 bp, Homo sapien
tccttcctgacgtgggatatgtaca

SEQ ID NO: 5368179 - DNA, 25 bp, Homo sapien
tgctccttcctgacgtgggatatgt

SEQ ID NO: 5368180 - DNA, 25 bp, Homo sapien
ccttcctgacgtgggatatgtacac

SEQ ID NO: 5368181 - DNA, 25 bp, Homo sapien
catgaacaggcggtcacactcccaa

SEQ ID NO: 5368182 - DNA, 25 bp, Homo sapien
tcccaacatgtccacccaggactgg

SEQ ID NO: 5368183 - DNA, 25 bp, Homo sapien
ggcggtcacactcccaacatgtcca

SEQ ID NO: 5368184 - DNA, 25 bp, Homo sapien
atgtccacccaggactggccacttt

SEQ ID NO: 5368185 - DNA, 25 bp, Homo sapien
taagttgcttctgtgcatataaaag

SEQ ID NO: 5368186 - DNA, 25 bp, Homo sapien
cataagttgcttctgtgcatataaa

SEQ ID NO: 5368187 - DNA, 25 bp, Homo sapien
gttgcttctgtgcatataaaagaga

SEQ ID NO: 5368188 - DNA, 25 bp, Homo sapien
atataaaagagaacagtctggacac

SEQ ID NO: 5368189 - DNA, 25 bp, Homo sapien
ttgtagaagacttcacagtgagaac

SEQ ID NO: 5368190 - DNA, 25 bp, Homo sapien
cattggacaaataggacacttgtag

SEQ ID NO: 5368191 - DNA, 25 bp, Homo sapien
cagcaaggtttgcagggtgaacaca

SEQ ID NO: 5368192 - DNA, 25 bp, Homo sapien
ggtcaaagtggcgatacagcaaggt

SEQ ID NO: 5368193 - DNA, 25 bp, Homo sapien
gcaacgtacacatcaaaaaccaact

SEQ ID NO: 5368194 - DNA, 25 bp, Homo sapien
acacaacattgcaacgtacacatca

SEQ ID NO: 5368195 - DNA, 25 bp, Homo sapien
caacattgcaacgtacacatcaaaa

SEQ ID NO: 5368196 - DNA, 25 bp, Homo sapien
cattgcaacgtacacatcaaaaacc

SEQ ID NO: 5368197 - DNA, 25 bp, Homo sapien
cctgcactcagggcaggtttaagga

SEQ ID NO: 5368198 - DNA, 25 bp, Homo sapien
gcactcagggcaggtttaaggagat

SEQ ID NO: 5368199 - DNA, 25 bp, Homo sapien
caggtttaaggagatttgtgctgat

SEQ ID NO: 5368200 - DNA, 25 bp, Homo sapien
ggccctgcactcagggcaggtttaa

SEQ ID NO: 5368201 - DNA, 25 bp, Homo sapien
cagcatctggcagatagtacaagtc

SEQ ID NO: 5368202 - DNA, 25 bp, Homo sapien
gaagcagcatctggcagatagtaca

SEQ ID NO: 5368203 - DNA, 25 bp, Homo sapien
gcatctggcagatagtacaagtctt

SEQ ID NO: 5368204 - DNA, 25 bp, Homo sapien
agcagcatctggcagatagtacaag

SEQ ID NO: 5368205 - DNA, 25 bp, Homo sapien
agaagaagtattggttgatggagaa

SEQ ID NO: 5368206 - DNA, 25 bp, Homo sapien
tgaagaagaagtattggttgatgga

SEQ ID NO: 5368207 - DNA, 25 bp, Homo sapien
ctgatgaagaagaagtattggttga

SEQ ID NO: 5368208 - DNA, 25 bp, Homo sapien
gatgaagaagaagtattggttgatg

SEQ ID NO: 5368209 - DNA, 25 bp, Homo sapien
catcagtaatgtgatccctgcattg

SEQ ID NO: 5368210 - DNA, 25 bp, Homo sapien
tgcattaattattgccttctttatc

SEQ ID NO: 5368211 - DNA, 25 bp, Homo sapien
tttgattgacacttggcagagttca

SEQ ID NO: 5368212 - DNA, 25 bp, Homo sapien
tgattgacacttggcagagttcaga

SEQ ID NO: 5368213 - DNA, 25 bp, Homo sapien
attgacacttggcagagttcagagg

SEQ ID NO: 5368214 - DNA, 25 bp, Homo sapien
aaggttaaggttggcaagatgcagt

SEQ ID NO: 5368215 - DNA, 25 bp, Homo sapien
gttaaggttggcaagatgcagtctt

SEQ ID NO: 5368216 - DNA, 25 bp, Homo sapien
aggttggcaagatgcagtctttggc

SEQ ID NO: 5368217 - DNA, 25 bp, Homo sapien
aggcagaaggttaaggttggcaaga

SEQ ID NO: 5368218 - DNA, 25 bp, Homo sapien
aagggtggcagctgatgcgggagac

SEQ ID NO: 5368219 - DNA, 25 bp, Homo sapien
gagaagccggggttcctttgatgct

SEQ ID NO: 5368220 - DNA, 25 bp, Homo sapien
gtggcagctgatgcgggagacgaca

SEQ ID NO: 5368221 - DNA, 25 bp, Homo sapien
gaagccggggttcctttgatgctgt

SEQ ID NO: 5368222 - DNA, 25 bp, Homo sapien
gatgccacctttttagtgctgagag

SEQ ID NO: 5368223 - DNA, 25 bp, Homo sapien
ctgatgccacctttttagtgctgag

SEQ ID NO: 5368224 - DNA, 25 bp, Homo sapien
tgatgccacctttttagtgctgaga

SEQ ID NO: 5368225 - DNA, 25 bp, Homo sapien
tctggcaagctgaatgggatccacc

SEQ ID NO: 5368226 - DNA, 25 bp, Homo sapien
tgaatgggatccacctcccaagacc

SEQ ID NO: 5368227 - DNA, 25 bp, Homo sapien
tacattcctcttaggccagactctg

SEQ ID NO: 5368228 - DNA, 25 bp, Homo sapien
tgaggttgtacattcctcttaggcc

SEQ ID NO: 5368229 - DNA, 25 bp, Homo sapien
ctttggcctggactgtttccccact

SEQ ID NO: 5368230 - DNA, 25 bp, Homo sapien
ccactaagggaagccctcaaaggca

SEQ ID NO: 5368231 - DNA, 25 bp, Homo sapien
gggtcatccctttggcctggactgt

SEQ ID NO: 5368232 - DNA, 25 bp, Homo sapien
tggcctggactgtttccccactaag

SEQ ID NO: 5368233 - DNA, 25 bp, Homo sapien
gaagccattggcttaaatcagcaaa

SEQ ID NO: 5368234 - DNA, 25 bp, Homo sapien
ttatgataaagaagccattggctta

SEQ ID NO: 5368235 - DNA, 25 bp, Homo sapien
gcaaagcaagccgtcccttggttta

SEQ ID NO: 5368236 - DNA, 25 bp, Homo sapien
gactaaattactgggaagtcttatg

SEQ ID NO: 5368237 - DNA, 25 bp, Homo sapien
cgagctgcttcatcgtcccaaacca

SEQ ID NO: 5368238 - DNA, 25 bp, Homo sapien
ccaaagtgctgcttgggctcaaggt

SEQ ID NO: 5368239 - DNA, 25 bp, Homo sapien
ctcaaggttgtaattatttgcagcc

SEQ ID NO: 5368240 - DNA, 25 bp, Homo sapien
gagctgcttcatcgtcccaaaccag

SEQ ID NO: 5368241 - DNA, 25 bp, Homo sapien
gcagcggacctccttgcttactttg

SEQ ID NO: 5368242 - DNA, 25 bp, Homo sapien
gagcagcggacctccttgcttactt

SEQ ID NO: 5368243 - DNA, 25 bp, Homo sapien
gcggacctccttgcttactttgaat

SEQ ID NO: 5368244 - DNA, 25 bp, Homo sapien
ctggagcagcggacctccttgctta

SEQ ID NO: 5368245 - DNA, 25 bp, Homo sapien
agtgggtggtgacagggactggaca

SEQ ID NO: 5368246 - DNA, 25 bp, Homo sapien
tccagagggaaaaagtgggtggtga

SEQ ID NO: 5368247 - DNA, 25 bp, Homo sapien
cagagggaaaaagtgggtggtgaca

SEQ ID NO: 5368248 - DNA, 25 bp, Homo sapien
aaaaagtgggtggtgacagggactg

SEQ ID NO: 5368249 - DNA, 25 bp, Homo sapien
tcctctttctctctgtatccccata

SEQ ID NO: 5368250 - DNA, 25 bp, Homo sapien
tctttctctctgtatccccataaat

SEQ ID NO: 5368251 - DNA, 25 bp, Homo sapien
ctgcacgtcttcctggagtgtctcc

SEQ ID NO: 5368252 - DNA, 25 bp, Homo sapien
gtgtctcctctttctctctgtatcc

SEQ ID NO: 5368253 - DNA, 25 bp, Homo sapien
atcagtctcccctggaaggccaaca

SEQ ID NO: 5368254 - DNA, 25 bp, Homo sapien
gtgaggttgatcagtctcccctgga

SEQ ID NO: 5368255 - DNA, 25 bp, Homo sapien
agtctcccctggaaggccaacagct

SEQ ID NO: 5368256 - DNA, 25 bp, Homo sapien
gttgatcagtctcccctggaaggcc

SEQ ID NO: 5368257 - DNA, 25 bp, Homo sapien
tgattgccaaaagtcctaagaggat

SEQ ID NO: 5368258 - DNA, 25 bp, Homo sapien
taagaggatctcaccaggctaaagt

SEQ ID NO: 5368259 - DNA, 25 bp, Homo sapien
ccagcttctaggtttgtggcctcct

SEQ ID NO: 5368260 - DNA, 25 bp, Homo sapien
tcaaggaaagaatcgggtccctgcc

SEQ ID NO: 5368261 - DNA, 25 bp, Homo sapien
ggtaaggagccagttccagacctgg

SEQ ID NO: 5368262 - DNA, 25 bp, Homo sapien
tgcaggttgaccagaactcaccgac

SEQ ID NO: 5368263 - DNA, 25 bp, Homo sapien
tggccacacaatggtcaagttggat

SEQ ID NO: 5368264 - DNA, 25 bp, Homo sapien
tcctctcccgtgtaagcaaggcaaa

SEQ ID NO: 5368265 - DNA, 25 bp, Homo sapien
cagacagtgagagagtcctggccct

SEQ ID NO: 5368266 - DNA, 25 bp, Homo sapien
agacagtgagagagtcctggccctt

SEQ ID NO: 5368267 - DNA, 25 bp, Homo sapien
tatcatcagctattcaataaaacac

SEQ ID NO: 5368268 - DNA, 25 bp, Homo sapien
cactaatctaggtgtcaccgtgaaa

SEQ ID NO: 5368269 - DNA, 25 bp, Homo sapien
tcaccgtgaaagtattttgtgacat

SEQ ID NO: 5368270 - DNA, 25 bp, Homo sapien
tgttgttacaaatgtgcatgatgca

SEQ ID NO: 5368271 - DNA, 25 bp, Homo sapien
taagtgtgtggcaccatggtggaag

SEQ ID NO: 5368272 - DNA, 25 bp, Homo sapien
tgtggcaccatggtggaagtaacac

SEQ ID NO: 5368273 - DNA, 25 bp, Homo sapien
tgtgtggcaccatggtggaagtaac

SEQ ID NO: 5368274 - DNA, 25 bp, Homo sapien
ggaatggatattaagtgtgtggcac

SEQ ID NO: 5368275 - DNA, 25 bp, Homo sapien
tggcccactaaacagagattctgga

SEQ ID NO: 5368276 - DNA, 25 bp, Homo sapien
tttattaatgttggcccactaaaca

SEQ ID NO: 5368277 - DNA, 25 bp, Homo sapien
gactggatttattatgtcagacctg

SEQ ID NO: 5368278 - DNA, 25 bp, Homo sapien
tggatttattatgtcagacctgctc

SEQ ID NO: 5368279 - DNA, 25 bp, Homo sapien
gatttattatgtcagacctgctcac

SEQ ID NO: 5368280 - DNA, 25 bp, Homo sapien
ttattatgtcagacctgctcactca

SEQ ID NO: 5368281 - DNA, 25 bp, Homo sapien
tactgtctggacttacagagtgcct

SEQ ID NO: 5368282 - DNA, 25 bp, Homo sapien
catggacttccactcccaaggtaac

SEQ ID NO: 5368283 - DNA, 25 bp, Homo sapien
gacactatgtatgagaatttcccct

SEQ ID NO: 5368284 - DNA, 25 bp, Homo sapien
tggctgtgactctgaaccacctcca

SEQ ID NO: 5368285 - DNA, 25 bp, Homo sapien
tgtataagaatatgtttgggccggg

SEQ ID NO: 5368286 - DNA, 25 bp, Homo sapien
ttgcaaaccctatatctaagaagag

SEQ ID NO: 5368287 - DNA, 25 bp, Homo sapien
ggagaacaacgtgggtggattacga

SEQ ID NO: 5368288 - DNA, 25 bp, Homo sapien
taagctgtactttataaaattcaca

SEQ ID NO: 5368289 - DNA, 25 bp, Homo sapien
gtctggcactttgtcaaaaagtgaa

SEQ ID NO: 5368290 - DNA, 25 bp, Homo sapien
gtcctttgaaaagcagtctggcact

SEQ ID NO: 5368291 - DNA, 25 bp, Homo sapien
gaaaacatgctcaatcttataactc

SEQ ID NO: 5368292 - DNA, 25 bp, Homo sapien
gtggaaactggacccctcgacattg

SEQ ID NO: 5368293 - DNA, 25 bp, Homo sapien
agccagtcacataagacccagtgtt

SEQ ID NO: 5368294 - DNA, 25 bp, Homo sapien
cataaatgaaccttgcaaactttga

SEQ ID NO: 5368295 - DNA, 25 bp, Homo sapien
aagccagtcacataagacccagtgt

SEQ ID NO: 5368296 - DNA, 25 bp, Homo sapien
aaccttgcaaactttgatagaagcc

SEQ ID NO: 5368297 - DNA, 25 bp, Homo sapien
cccttgcatggtacacttgaaatag

SEQ ID NO: 5368298 - DNA, 25 bp, Homo sapien
cacttctgcgacgtgactgtgtgca

SEQ ID NO: 5368299 - DNA, 25 bp, Homo sapien
gctgtgcgccacatacatctgcaga

SEQ ID NO: 5368300 - DNA, 25 bp, Homo sapien
cttgagaccctcaatgggcagaagc

SEQ ID NO: 5368301 - DNA, 25 bp, Homo sapien
ttgtggcacagagtgaagccccgca

SEQ ID NO: 5368302 - DNA, 25 bp, Homo sapien
tgccttcggtggtgcctgtgcagac

SEQ ID NO: 5368303 - DNA, 25 bp, Homo sapien
tagtcgagctcctgtacagcggttc

SEQ ID NO: 5368304 - DNA, 25 bp, Homo sapien
gaatgcacgcagattatcgcacgcg

SEQ ID NO: 5368305 - DNA, 25 bp, Homo sapien
ctgacagcgcgtgcgaggagttcca

SEQ ID NO: 5368306 - DNA, 25 bp, Homo sapien
aggagttccatgcacccactggcct

SEQ ID NO: 5368307 - DNA, 25 bp, Homo sapien
gagagattttcttccgggatctggg

SEQ ID NO: 5368308 - DNA, 25 bp, Homo sapien
aaactgacgatgagaccgatggcga

SEQ ID NO: 5368309 - DNA, 25 bp, Homo sapien
gctatgtaaccgcttggcacgacaa

SEQ ID NO: 5368310 - DNA, 25 bp, Homo sapien
gacagctatgtaaccgcttggcacg

SEQ ID NO: 5368311 - DNA, 25 bp, Homo sapien
aggacgtatttccagacagctatgt

SEQ ID NO: 5368312 - DNA, 25 bp, Homo sapien
tatttccagacagctatgtaaccgc

SEQ ID NO: 5368313 - DNA, 25 bp, Homo sapien
tgtgatggcgatccttctcgctgcg

SEQ ID NO: 5368314 - DNA, 25 bp, Homo sapien
tctcgctgcgctactgccgtttcaa

SEQ ID NO: 5368315 - DNA, 25 bp, Homo sapien
tatgcgtgcggccactgttgcaaga

SEQ ID NO: 5368316 - DNA, 25 bp, Homo sapien
ctcaaggaaaaacgacaccaagcac

SEQ ID NO: 5368317 - DNA, 25 bp, Homo sapien
ccctttctccatacgcccaagtccg

SEQ ID NO: 5368318 - DNA, 25 bp, Homo sapien
atacgcccaagtccgccttactcct

SEQ ID NO: 5368319 - DNA, 25 bp, Homo sapien
tccatacgcccaagtccgccttact

SEQ ID NO: 5368320 - DNA, 25 bp, Homo sapien
tctccatacgcccaagtccgcctta

SEQ ID NO: 5368321 - DNA, 25 bp, Homo sapien
tgctaacacagtattttccagggca

SEQ ID NO: 5368322 - DNA, 25 bp, Homo sapien
tggtgccccggacaggcagatctca

SEQ ID NO: 5368323 - DNA, 25 bp, Homo sapien
agtagtcagcaagggcagaggccca

SEQ ID NO: 5368324 - DNA, 25 bp, Homo sapien
cagggcgccttaggtgtggtgctcc

SEQ ID NO: 5368325 - DNA, 25 bp, Homo sapien
aagcagctgaaacaggcacttgttt

SEQ ID NO: 5368326 - DNA, 25 bp, Homo sapien
cagctcccgccacaggaatgggctg

SEQ ID NO: 5368327 - DNA, 25 bp, Homo sapien
ttggccagtgacagtggtgcctcct

SEQ ID NO: 5368328 - DNA, 25 bp, Homo sapien
agctgccagcccttggccagtgaca

SEQ ID NO: 5368329 - DNA, 25 bp, Homo sapien
aatgggctgccaaggagcgtggctg

SEQ ID NO: 5368330 - DNA, 25 bp, Homo sapien
ggcccaaaggctcggcgagcacagc

SEQ ID NO: 5368331 - DNA, 25 bp, Homo sapien
ggcagcaccatagtggcggccagca

SEQ ID NO: 5368332 - DNA, 25 bp, Homo sapien
ggacctgtgtgcttaccatcctgtg

SEQ ID NO: 5368333 - DNA, 25 bp, Homo sapien
ctgtgtgcttaccatcctgtgctgg

SEQ ID NO: 5368334 - DNA, 25 bp, Homo sapien
aagaacagctggtgcgggtgttcca

SEQ ID NO: 5368335 - DNA, 25 bp, Homo sapien
gaagctggtggcgggcatgtagagg

SEQ ID NO: 5368336 - DNA, 25 bp, Homo sapien
gagacgaagcgggacagagtgggga

SEQ ID NO: 5368337 - DNA, 25 bp, Homo sapien
gaagaacagctggtgcgggtgttcc

SEQ ID NO: 5368338 - DNA, 25 bp, Homo sapien
cctccaaagccttgcccgctgccac

SEQ ID NO: 5368339 - DNA, 25 bp, Homo sapien
ccaaagccttgcccgctgccaccag

SEQ ID NO: 5368340 - DNA, 25 bp, Homo sapien
cttgcccgctgccaccaggtcatac

SEQ ID NO: 5368341 - DNA, 25 bp, Homo sapien
gccctccaaagccttgcccgctgcc

SEQ ID NO: 5368342 - DNA, 25 bp, Homo sapien
ggaagcctgccacaaaatcatgagc

SEQ ID NO: 5368343 - DNA, 25 bp, Homo sapien
ttcgtccaacaatgtccagtcctgg

SEQ ID NO: 5368344 - DNA, 25 bp, Homo sapien
aggccacgggaagcctgccacaaaa

SEQ ID NO: 5368345 - DNA, 25 bp, Homo sapien
aggccctgcagcagttcgtccaaca

SEQ ID NO: 5368346 - DNA, 25 bp, Homo sapien
ctgcagcttaccctgaagcgtgcac

SEQ ID NO: 5368347 - DNA, 25 bp, Homo sapien
gcttaccctgaagcgtgcacagcag

SEQ ID NO: 5368348 - DNA, 25 bp, Homo sapien
ttaccctgaagcgtgcacagcaggc

SEQ ID NO: 5368349 - DNA, 25 bp, Homo sapien
gcagcttaccctgaagcgtgcacag

SEQ ID NO: 5368350 - DNA, 25 bp, Homo sapien
tggaagagattgagcaggtcaaggt

SEQ ID NO: 5368351 - DNA, 25 bp, Homo sapien
ggaagagattgagcaggtcaaggtt

SEQ ID NO: 5368352 - DNA, 25 bp, Homo sapien
ctggaagagattgagcaggtcaagg

SEQ ID NO: 5368353 - DNA, 25 bp, Homo sapien
gcctctagctcatcgactcttattt

SEQ ID NO: 5368354 - DNA, 25 bp, Homo sapien
ctgctatcgtaagttttctttaggg

SEQ ID NO: 5368355 - DNA, 25 bp, Homo sapien
taaatgactctgttttgggccacat

SEQ ID NO: 5368356 - DNA, 25 bp, Homo sapien
caaaattaactgactacagattctg

SEQ ID NO: 5368357 - DNA, 25 bp, Homo sapien
accagtcctgcccttccctgggaca

SEQ ID NO: 5368358 - DNA, 25 bp, Homo sapien
tctctgtgagctgggaccagtcctg

SEQ ID NO: 5368359 - DNA, 25 bp, Homo sapien
aggcaggggtgtaggtgaccggcat

SEQ ID NO: 5368360 - DNA, 25 bp, Homo sapien
gacacacgctcctgcaagaggcagg

SEQ ID NO: 5368361 - DNA, 25 bp, Homo sapien
cttctttggatgcagtgcaagctct

SEQ ID NO: 5368362 - DNA, 25 bp, Homo sapien
ttgccttgcaagttctgtgttgtgg

SEQ ID NO: 5368363 - DNA, 25 bp, Homo sapien
ctgggatgtgggagcgtggatttgc

SEQ ID NO: 5368364 - DNA, 25 bp, Homo sapien
tgtgggagcgtggatttgccttgca

SEQ ID NO: 5368365 - DNA, 25 bp, Homo sapien
ggctaaaaccctacacactatgctt

SEQ ID NO: 5368366 - DNA, 25 bp, Homo sapien
gaggagaacatcagtctagaggaac

SEQ ID NO: 5368367 - DNA, 25 bp, Homo sapien
agagtatcccgcagcccctgttcat

SEQ ID NO: 5368368 - DNA, 25 bp, Homo sapien
cccctagggtagaaagtcataggag

SEQ ID NO: 5368369 - DNA, 25 bp, Homo sapien
aatcccaggatggacgcacactcag

SEQ ID NO: 5368370 - DNA, 25 bp, Homo sapien
ttgcatatgacctgaacatatcctc

SEQ ID NO: 5368371 - DNA, 25 bp, Homo sapien
ataacacctaatatagtgtcaatgc

SEQ ID NO: 5368372 - DNA, 25 bp, Homo sapien
ttataacacctaatatagtgtcaat

SEQ ID NO: 5368373 - DNA, 25 bp, Homo sapien
cttccataaactggcttgggttggt

SEQ ID NO: 5368374 - DNA, 25 bp, Homo sapien
cataaactggcttgggttggttatt

SEQ ID NO: 5368375 - DNA, 25 bp, Homo sapien
aactggcttgggttggttattactg

SEQ ID NO: 5368376 - DNA, 25 bp, Homo sapien
actggcttgggttggttattactgg

SEQ ID NO: 5368377 - DNA, 25 bp, Homo sapien
taattgctgtacaccatggccagaa

SEQ ID NO: 5368378 - DNA, 25 bp, Homo sapien
cacagtccatgtgcacgaggcacca

SEQ ID NO: 5368379 - DNA, 25 bp, Homo sapien
tccacaatgcatataaggctgacct

SEQ ID NO: 5368380 - DNA, 25 bp, Homo sapien
gaaagcctcctgtaacattcgctct

SEQ ID NO: 5368381 - DNA, 25 bp, Homo sapien
cactattggagcagatgtggactga

SEQ ID NO: 5368382 - DNA, 25 bp, Homo sapien
gcatgaaaggtacccggtgataact

SEQ ID NO: 5368383 - DNA, 25 bp, Homo sapien
cccaagagtgagcaacaaccaagaa

SEQ ID NO: 5368384 - DNA, 25 bp, Homo sapien
tctgaggaaagacccaagagaacat

SEQ ID NO: 5368385 - DNA, 25 bp, Homo sapien
tctgatgctgtggatgttaatagct

SEQ ID NO: 5368386 - DNA, 25 bp, Homo sapien
cagataatcagatcgatcaaggtca

SEQ ID NO: 5368387 - DNA, 25 bp, Homo sapien
taaggcccttgaccatctgatgctg

SEQ ID NO: 5368388 - DNA, 25 bp, Homo sapien
tgacgactttcagggaagttaatta

SEQ ID NO: 5368389 - DNA, 25 bp, Homo sapien
caatggtgggttaggcaaagaaaat

SEQ ID NO: 5368390 - DNA, 25 bp, Homo sapien
catggaagcaacttaggtgctcatc

SEQ ID NO: 5368391 - DNA, 25 bp, Homo sapien
gtgctcatcaatggtgggttaggca

SEQ ID NO: 5368392 - DNA, 25 bp, Homo sapien
ggaagcaacttaggtgctcatcaat

SEQ ID NO: 5368393 - DNA, 25 bp, Homo sapien
tgcttatggcgttcactgtatggaa

SEQ ID NO: 5368394 - DNA, 25 bp, Homo sapien
catctttcctatcggccattttaca

SEQ ID NO: 5368395 - DNA, 25 bp, Homo sapien
gaagtgctcttgatatgctgaaatg

SEQ ID NO: 5368396 - DNA, 25 bp, Homo sapien
gttcttcagtttgcggtttgcttgc

SEQ ID NO: 5368397 - DNA, 25 bp, Homo sapien
ttgtatccttccagaaaaccatttg

SEQ ID NO: 5368398 - DNA, 25 bp, Homo sapien
ccttccagaaaaccatttgaggagt

SEQ ID NO: 5368399 - DNA, 25 bp, Homo sapien
tgcagatgtcttttgtatccttcca

SEQ ID NO: 5368400 - DNA, 25 bp, Homo sapien
cagaaaaccatttgaggagtgactt

SEQ ID NO: 5368401 - DNA, 25 bp, Homo sapien
tatgcagtcaggcagagtacttctg

SEQ ID NO: 5368402 - DNA, 25 bp, Homo sapien
agtctgccaaagtatgcagtcaggc

SEQ ID NO: 5368403 - DNA, 25 bp, Homo sapien
agagtacttctgctattgaggtggc

SEQ ID NO: 5368404 - DNA, 25 bp, Homo sapien
caaagtatgcagtcaggcagagtac

SEQ ID NO: 5368405 - DNA, 25 bp, Homo sapien
tgccagccacgtgagagagctacct

SEQ ID NO: 5368406 - DNA, 25 bp, Homo sapien
tgggattcctaccttggccagagtg

SEQ ID NO: 5368407 - DNA, 25 bp, Homo sapien
cagaggtttgatggtgcagcacact

SEQ ID NO: 5368408 - DNA, 25 bp, Homo sapien
tgttgatgtagctccaaagcagcca

SEQ ID NO: 5368409 - DNA, 25 bp, Homo sapien
tgatcacctccaaatacctccacac

SEQ ID NO: 5368410 - DNA, 25 bp, Homo sapien
tgtggcgttctcacttgacagaagg

SEQ ID NO: 5368411 - DNA, 25 bp, Homo sapien
cactgggactaggttttgaaatacg

SEQ ID NO: 5368412 - DNA, 25 bp, Homo sapien
acattccatttgtagcaccattctt

SEQ ID NO: 5368413 - DNA, 25 bp, Homo sapien
gaagaggcacaaggcccaatcatct

SEQ ID NO: 5368414 - DNA, 25 bp, Homo sapien
cttggcagtaagtaaattggctttg

SEQ ID NO: 5368415 - DNA, 25 bp, Homo sapien
cttaaaatgcgttatgaaggaagca

SEQ ID NO: 5368416 - DNA, 25 bp, Homo sapien
tagccatctgctatggcttgcttac

SEQ ID NO: 5368417 - DNA, 25 bp, Homo sapien
caggggaagcaactcaggctcttca

SEQ ID NO: 5368418 - DNA, 25 bp, Homo sapien
aggggaagcaactcaggctcttcaa

SEQ ID NO: 5368419 - DNA, 25 bp, Homo sapien
ggggaagcaactcaggctcttcaaa

SEQ ID NO: 5368420 - DNA, 25 bp, Homo sapien
gcaggggaagcaactcaggctcttc

SEQ ID NO: 5368421 - DNA, 25 bp, Homo sapien
agaagtatgcggcaacctgcgttgt

SEQ ID NO: 5368422 - DNA, 25 bp, Homo sapien
tacacaaataaagaagtatgcggca

SEQ ID NO: 5368423 - DNA, 25 bp, Homo sapien
ataaagaagtatgcggcaacctgcg

SEQ ID NO: 5368424 - DNA, 25 bp, Homo sapien
caaataaagaagtatgcggcaacct

SEQ ID NO: 5368425 - DNA, 25 bp, Homo sapien
atccaaaacataggcagctgccagg

SEQ ID NO: 5368426 - DNA, 25 bp, Homo sapien
tgggcatccaaaacataggcagctg

SEQ ID NO: 5368427 - DNA, 25 bp, Homo sapien
atttctgttgtactgggcatccaaa

SEQ ID NO: 5368428 - DNA, 25 bp, Homo sapien
gttgtactgggcatccaaaacatag

SEQ ID NO: 5368429 - DNA, 25 bp, Homo sapien
tgagacagagtaagggagaccaagt

SEQ ID NO: 5368430 - DNA, 25 bp, Homo sapien
cagaggtagccaacatctaaacagt

SEQ ID NO: 5368431 - DNA, 25 bp, Homo sapien
cactgagtataaaaggaagctcccc

SEQ ID NO: 5368432 - DNA, 25 bp, Homo sapien
ccaatgtctctttgagcaccgagaa

SEQ ID NO: 5368433 - DNA, 25 bp, Homo sapien
cacctagtgaggtcatagcacaaca

SEQ ID NO: 5368434 - DNA, 25 bp, Homo sapien
aatatatatacggtcatgtgcccca

SEQ ID NO: 5368435 - DNA, 25 bp, Homo sapien
tgctggtgtcaacaaacctccacgg

SEQ ID NO: 5368436 - DNA, 25 bp, Homo sapien
tccacggccagtcgtataaaattct

SEQ ID NO: 5368437 - DNA, 25 bp, Homo sapien
gcttaaatgtggctgcaaacctcaa

SEQ ID NO: 5368438 - DNA, 25 bp, Homo sapien
tcaagtttacatgcgaaccactgtc

SEQ ID NO: 5368439 - DNA, 25 bp, Homo sapien
gaatgtggattatgttagacacccc

SEQ ID NO: 5368440 - DNA, 25 bp, Homo sapien
caaatagcagatgtttccccagatg

SEQ ID NO: 5368441 - DNA, 25 bp, Homo sapien
ccttttcactctgatggcattttct

SEQ ID NO: 5368442 - DNA, 25 bp, Homo sapien
ttttcactctgatggcattttcttt

SEQ ID NO: 5368443 - DNA, 25 bp, Homo sapien
agatcccatttgtctctttcggctt

SEQ ID NO: 5368444 - DNA, 25 bp, Homo sapien
cccatttgtctctttcggcttttgt

SEQ ID NO: 5368445 - DNA, 25 bp, Homo sapien
tgtgtagaagtattgatagcattct

SEQ ID NO: 5368446 - DNA, 25 bp, Homo sapien
ttgtgtagaagtattgatagcattc

SEQ ID NO: 5368447 - DNA, 25 bp, Homo sapien
cagtttcttcctagcatcgacggtc

SEQ ID NO: 5368448 - DNA, 25 bp, Homo sapien
gtttcttcctagcatcgacggtctt

SEQ ID NO: 5368449 - DNA, 25 bp, Homo sapien
ttcctagcatcgacggtctttacaa

SEQ ID NO: 5368450 - DNA, 25 bp, Homo sapien
tcttcctagcatcgacggtctttac

SEQ ID NO: 5368451 - DNA, 25 bp, Homo sapien
ttttaattgcaccatgacaataatt

SEQ ID NO: 5368452 - DNA, 25 bp, Homo sapien
taattgcaccatgacaataattgcc

SEQ ID NO: 5368453 - DNA, 25 bp, Homo sapien
gatcacaggtaacaaccactgcacc

SEQ ID NO: 5368454 - DNA, 25 bp, Homo sapien
ggatcacaggtaacaaccactgcac

SEQ ID NO: 5368455 - DNA, 25 bp, Homo sapien
catatggtagaatgcatctgttgga

SEQ ID NO: 5368456 - DNA, 25 bp, Homo sapien
tgttggatgtggtcaagcccctttg

SEQ ID NO: 5368457 - DNA, 25 bp, Homo sapien
gctctctcgagggataggacatatg

SEQ ID NO: 5368458 - DNA, 25 bp, Homo sapien
gataggacatatggtagaatgcatc

SEQ ID NO: 5368459 - DNA, 25 bp, Homo sapien
tgcagccttctttccgggcgttttc

SEQ ID NO: 5368460 - DNA, 25 bp, Homo sapien
gtgtcccgcaggcatcggaagaccc

SEQ ID NO: 5368461 - DNA, 25 bp, Homo sapien
ggctgcgcagcccttctgctgtgtc

SEQ ID NO: 5368462 - DNA, 25 bp, Homo sapien
ggctgcatcagcactcccggggccc

SEQ ID NO: 5368463 - DNA, 25 bp, Homo sapien
caggcagctcaccaccgcggctagg

SEQ ID NO: 5368464 - DNA, 25 bp, Homo sapien
tcaccaccgcggctaggccggcccc

SEQ ID NO: 5368465 - DNA, 25 bp, Homo sapien
ggcagctcaccaccgcggctaggcc

SEQ ID NO: 5368466 - DNA, 25 bp, Homo sapien
agctcaccaccgcggctaggccggc

SEQ ID NO: 5368467 - DNA, 25 bp, Homo sapien
gcgcggcgctcggtccttcacgtga

SEQ ID NO: 5368468 - DNA, 25 bp, Homo sapien
tgccctcctcgtgcaggccggaggc

SEQ ID NO: 5368469 - DNA, 25 bp, Homo sapien
gggcggcagccgcaacggactctgc

SEQ ID NO: 5368470 - DNA, 25 bp, Homo sapien
tccttcacgtgaccgctgcgggtgg

SEQ ID NO: 5368471 - DNA, 25 bp, Homo sapien
cttccctggcggcgcgctgggccca

SEQ ID NO: 5368472 - DNA, 25 bp, Homo sapien
gcagggacggggagtgggacgcgcg

SEQ ID NO: 5368473 - DNA, 25 bp, Homo sapien
agggaagcggatccggcagggacgg

SEQ ID NO: 5368474 - DNA, 25 bp, Homo sapien
gcaggggtaagagctcgggcgggtg

SEQ ID NO: 5368475 - DNA, 25 bp, Homo sapien
tagaatagaaggatgccttcctcca

SEQ ID NO: 5368476 - DNA, 25 bp, Homo sapien
ctgatcagtagaatagaaggatgcc

SEQ ID NO: 5368477 - DNA, 25 bp, Homo sapien
tccgcaaatggcaccaactgtgtag

SEQ ID NO: 5368478 - DNA, 25 bp, Homo sapien
ttgtccagctttctgatcagtagaa

SEQ ID NO: 5368479 - DNA, 25 bp, Homo sapien
aatcagcggtattctaaaagtagcc

SEQ ID NO: 5368480 - DNA, 25 bp, Homo sapien
taggcaacatatccagaccagatct

SEQ ID NO: 5368481 - DNA, 25 bp, Homo sapien
tggtggcaaacctatagtgggctag

SEQ ID NO: 5368482 - DNA, 25 bp, Homo sapien
cagcgacaactgcttgggtcccggt

SEQ ID NO: 5368483 - DNA, 25 bp, Homo sapien
tattcccaccttgtgagacaccgag

SEQ ID NO: 5368484 - DNA, 25 bp, Homo sapien
tgagacaccgagcagagaatccatg

SEQ ID NO: 5368485 - DNA, 25 bp, Homo sapien
accgagcagagaatccatgtggcaa

SEQ ID NO: 5368486 - DNA, 25 bp, Homo sapien
caccttgtgagacaccgagcagaga

SEQ ID NO: 5368487 - DNA, 25 bp, Homo sapien
ccagaattgtgtcctagctggaggc

SEQ ID NO: 5368488 - DNA, 25 bp, Homo sapien
caccagaattgtgtcctagctggag

SEQ ID NO: 5368489 - DNA, 25 bp, Homo sapien
aacaccagaattgtgtcctagctgg

SEQ ID NO: 5368490 - DNA, 25 bp, Homo sapien
tgcaacaccagaattgtgtcctagc

SEQ ID NO: 5368491 - DNA, 25 bp, Homo sapien
tccgagcagtgtacgttgtgcccaa

SEQ ID NO: 5368492 - DNA, 25 bp, Homo sapien
tctaccagtgtgtaatcaaaggtcc

SEQ ID NO: 5368493 - DNA, 25 bp, Homo sapien
caaaggtccttgtctacaaggtatc

SEQ ID NO: 5368494 - DNA, 25 bp, Homo sapien
gcatatggtggctgaaatggtaaag

SEQ ID NO: 5368495 - DNA, 25 bp, Homo sapien
agagatgaggattcagttttaccct

SEQ ID NO: 5368496 - DNA, 25 bp, Homo sapien
aactcccaactctcaggttctcatg

SEQ ID NO: 5368497 - DNA, 25 bp, Homo sapien
tacagttgtgatcccccatgctcgg

SEQ ID NO: 5368498 - DNA, 25 bp, Homo sapien
ccatgctcggcctagatttaagtct

SEQ ID NO: 5368499 - DNA, 25 bp, Homo sapien
tatcatcggtgaacagcaacagttt

SEQ ID NO: 5368500 - DNA, 25 bp, Homo sapien
ctccttggttcagtatattccaaag

SEQ ID NO: 5368501 - DNA, 25 bp, Homo sapien
tatttcgcctccttggttcagtata

SEQ ID NO: 5368502 - DNA, 25 bp, Homo sapien
ttaggcttttctaggcatacaatta

SEQ ID NO: 5368503 - DNA, 25 bp, Homo sapien
gtctaatagaattcacctgtcagtc

SEQ ID NO: 5368504 - DNA, 25 bp, Homo sapien
aatagaattcacctgtcagtccatc

SEQ ID NO: 5368505 - DNA, 25 bp, Homo sapien
attttttcgtgatttaatatgggag

SEQ ID NO: 5368506 - DNA, 25 bp, Homo sapien
taatagaattcacctgtcagtccat

SEQ ID NO: 5368507 - DNA, 25 bp, Homo sapien
catttaagtgagtctctcaaagaca

SEQ ID NO: 5368508 - DNA, 25 bp, Homo sapien
tcaaggtcttgtttcaaggtttgga

SEQ ID NO: 5368509 - DNA, 25 bp, Homo sapien
catcgtgttatataggccctgtgag

SEQ ID NO: 5368510 - DNA, 25 bp, Homo sapien
atgtgagtccttatacatttaagtg

SEQ ID NO: 5368511 - DNA, 25 bp, Homo sapien
catgactttagttggctcagcctga

SEQ ID NO: 5368512 - DNA, 25 bp, Homo sapien
tcttggagcacaacagggtcacagt

SEQ ID NO: 5368513 - DNA, 25 bp, Homo sapien
gctatattgtatgacccaggagaca

SEQ ID NO: 5368514 - DNA, 25 bp, Homo sapien
gaagatagtaccctgcagagtttga

SEQ ID NO: 5368515 - DNA, 25 bp, Homo sapien
tcctggttgcatatctgccagtggg

SEQ ID NO: 5368516 - DNA, 25 bp, Homo sapien
ttacagtaagggctctctgcttggc

SEQ ID NO: 5368517 - DNA, 25 bp, Homo sapien
taaagcgtgttaatgcctgttcctg

SEQ ID NO: 5368518 - DNA, 25 bp, Homo sapien
ataaccaagtactcccagccaagtg

SEQ ID NO: 5368519 - DNA, 25 bp, Homo sapien
aagaagaagcagagatccttggaga

SEQ ID NO: 5368520 - DNA, 25 bp, Homo sapien
cagattgtagtccttaaatagccta

SEQ ID NO: 5368521 - DNA, 25 bp, Homo sapien
tagcctattttacaagaagaagcag

SEQ ID NO: 5368522 - DNA, 25 bp, Homo sapien
cttaatgctcagattgtagtcctta

SEQ ID NO: 5368523 - DNA, 25 bp, Homo sapien
aattatgtgacagagaaaattgaac

SEQ ID NO: 5368524 - DNA, 25 bp, Homo sapien
cttaaaagacatattggccaattgg

SEQ ID NO: 5368525 - DNA, 25 bp, Homo sapien
gaaaattgaactaactggatatttg

SEQ ID NO: 5368526 - DNA, 25 bp, Homo sapien
tggccaatttcaatttggatcctag

SEQ ID NO: 5368527 - DNA, 25 bp, Homo sapien
gtagtgatctcctcggttcactctg

SEQ ID NO: 5368528 - DNA, 25 bp, Homo sapien
ctgtttggaggcatcacccagttgt

SEQ ID NO: 5368529 - DNA, 25 bp, Homo sapien
cagttgtttggaggcaaacttgtgc

SEQ ID NO: 5368530 - DNA, 25 bp, Homo sapien
cctcggttcactctgagtcatcaat

SEQ ID NO: 5368531 - DNA, 25 bp, Homo sapien
ggatctctcagaggtgggacgacca

SEQ ID NO: 5368532 - DNA, 25 bp, Homo sapien
tgggacgaccacctgactgtgctgg

SEQ ID NO: 5368533 - DNA, 25 bp, Homo sapien
tctcagaggtgggacgaccacctga

SEQ ID NO: 5368534 - DNA, 25 bp, Homo sapien
ggagtggtggaggatctctcagagg

SEQ ID NO: 5368535 - DNA, 25 bp, Homo sapien
caaatacacgcccaaaagttgcagg

SEQ ID NO: 5368536 - DNA, 25 bp, Homo sapien
ggcccaaatttctgatgactacaaa

SEQ ID NO: 5368537 - DNA, 25 bp, Homo sapien
ctactttggcaaatgagtgaggcaa

SEQ ID NO: 5368538 - DNA, 25 bp, Homo sapien
tggcctaagttttccagcagccagg

SEQ ID NO: 5368539 - DNA, 25 bp, Homo sapien
tctcccgtttggcaagtcgcctctt

SEQ ID NO: 5368540 - DNA, 25 bp, Homo sapien
actggctttaggtcaatttcaacaa

SEQ ID NO: 5368541 - DNA, 25 bp, Homo sapien
tggctttaggtcaatttcaacaaac

SEQ ID NO: 5368542 - DNA, 25 bp, Homo sapien
aagtcgcctcttaaattcttctggc

SEQ ID NO: 5368543 - DNA, 25 bp, Homo sapien
gaatagaagaaagaacagggaacag

SEQ ID NO: 5368544 - DNA, 25 bp, Homo sapien
tgagtaggacaaagaaggaatagaa

SEQ ID NO: 5368545 - DNA, 25 bp, Homo sapien
tagaagaaagaacagggaacagtta

SEQ ID NO: 5368546 - DNA, 25 bp, Homo sapien
ctttgagtaggacaaagaaggaata

SEQ ID NO: 5368547 - DNA, 25 bp, Homo sapien
cacactggacaaaaccgtacactta

SEQ ID NO: 5368548 - DNA, 25 bp, Homo sapien
cagtcttaggattcacactggacaa

SEQ ID NO: 5368549 - DNA, 25 bp, Homo sapien
tcacactggacaaaaccgtacactt

SEQ ID NO: 5368550 - DNA, 25 bp, Homo sapien
aaagttttcagtcttaggattcaca

SEQ ID NO: 5368551 - DNA, 25 bp, Homo sapien
tgttgcaggtagaacaggcaaagca

SEQ ID NO: 5368552 - DNA, 25 bp, Homo sapien
caccaggccttattaagagcagaga

SEQ ID NO: 5368553 - DNA, 25 bp, Homo sapien
gagtgttaatttagtgttgcaggta

SEQ ID NO: 5368554 - DNA, 25 bp, Homo sapien
aggcaaagcagttcacgcaccaggc

SEQ ID NO: 5368555 - DNA, 25 bp, Homo sapien
gatcatctctaggttaattataatg

SEQ ID NO: 5368556 - DNA, 25 bp, Homo sapien
tctctaggttaattataatgcctag

SEQ ID NO: 5368557 - DNA, 25 bp, Homo sapien
actgcgcctggtcccgtctcgtata

SEQ ID NO: 5368558 - DNA, 25 bp, Homo sapien
ggtcccgtctcgtatactttagatc

SEQ ID NO: 5368559 - DNA, 25 bp, Homo sapien
tataacacgattgcagtggaagcaa

SEQ ID NO: 5368560 - DNA, 25 bp, Homo sapien
ccttctataacacgattgcagtgga

SEQ ID NO: 5368561 - DNA, 25 bp, Homo sapien
tctataacacgattgcagtggaagc

SEQ ID NO: 5368562 - DNA, 25 bp, Homo sapien
ttctataacacgattgcagtggaag

SEQ ID NO: 5368563 - DNA, 25 bp, Homo sapien
aatgtacatcttccaagagatttcc

SEQ ID NO: 5368564 - DNA, 25 bp, Homo sapien
ccttgtagctaaactactgataagc

SEQ ID NO: 5368565 - DNA, 25 bp, Homo sapien
gataagcttaggttcataaaagtct

SEQ ID NO: 5368566 - DNA, 25 bp, Homo sapien
taaaagtctatctagcatccagtga

SEQ ID NO: 5368567 - DNA, 25 bp, Homo sapien
tctcataatggcgatgtccaagaaa

SEQ ID NO: 5368568 - DNA, 25 bp, Homo sapien
cctttcctctcataatggcgatgtc

SEQ ID NO: 5368569 - DNA, 25 bp, Homo sapien
tttcctctcataatggcgatgtcca

SEQ ID NO: 5368570 - DNA, 25 bp, Homo sapien
tcctctcataatggcgatgtccaag

SEQ ID NO: 5368571 - DNA, 25 bp, Homo sapien
caccagagttaacctattttcagag

SEQ ID NO: 5368572 - DNA, 25 bp, Homo sapien
ggtggccccataacataatacttct

SEQ ID NO: 5368573 - DNA, 25 bp, Homo sapien
tagcacctataaaggaggagctgct

SEQ ID NO: 5368574 - DNA, 25 bp, Homo sapien
tgctataggtcatttttgaattgcc

SEQ ID NO: 5368575 - DNA, 25 bp, Homo sapien
cgcccttcgatgggccgtcggcaag

SEQ ID NO: 5368576 - DNA, 25 bp, Homo sapien
gcccttcgatgggccgtcggcaagc

SEQ ID NO: 5368577 - DNA, 25 bp, Homo sapien
ggacccccattttatcatggcatgg

SEQ ID NO: 5368578 - DNA, 25 bp, Homo sapien
ctgtgagaaagacacccagcttaat

SEQ ID NO: 5368579 - DNA, 25 bp, Homo sapien
tgtgagaaagacacccagcttaata

SEQ ID NO: 5368580 - DNA, 25 bp, Homo sapien
tagactaacacacgacctttccaag

SEQ ID NO: 5368581 - DNA, 25 bp, Homo sapien
caggcaagaaaacgagataaggcac

SEQ ID NO: 5368582 - DNA, 25 bp, Homo sapien
gagatggtcccaattagtcaaatgg

SEQ ID NO: 5368583 - DNA, 25 bp, Homo sapien
tggacagaggtgaatccccaagagg

SEQ ID NO: 5368584 - DNA, 25 bp, Homo sapien
cagttggcgcagttgaaatggtctg

SEQ ID NO: 5368585 - DNA, 25 bp, Homo sapien
ttggcgcagttgaaatggtctggat

SEQ ID NO: 5368586 - DNA, 25 bp, Homo sapien
cgcagttgaaatggtctggatggta

SEQ ID NO: 5368587 - DNA, 25 bp, Homo sapien
ggcgcagttgaaatggtctggatgg

SEQ ID NO: 5368588 - DNA, 25 bp, Homo sapien
gggtcgttcttgaatatcagaggct

SEQ ID NO: 5368589 - DNA, 25 bp, Homo sapien
tggctttctcacgattatgacaggg

SEQ ID NO: 5368590 - DNA, 25 bp, Homo sapien
catcgatgatagcatggcatttctg

SEQ ID NO: 5368591 - DNA, 25 bp, Homo sapien
tcagaggctgctcatcgatgatagc

SEQ ID NO: 5368592 - DNA, 25 bp, Homo sapien
aggtcacagcggaagcactccggat

SEQ ID NO: 5368593 - DNA, 25 bp, Homo sapien
ttgacaaacccgatatctgccagaa

SEQ ID NO: 5368594 - DNA, 25 bp, Homo sapien
gataactcggccaatgatgaattca

SEQ ID NO: 5368595 - DNA, 25 bp, Homo sapien
cactccggatgccagctgttattca

SEQ ID NO: 5368596 - DNA, 25 bp, Homo sapien
acttgacatttagcagtaaaactta

SEQ ID NO: 5368597 - DNA, 25 bp, Homo sapien
tttacttgacatttagcagtaaaac

SEQ ID NO: 5368598 - DNA, 25 bp, Homo sapien
ttacttgacatttagcagtaaaact

SEQ ID NO: 5368599 - DNA, 25 bp, Homo sapien
tacttgacatttagcagtaaaactt

SEQ ID NO: 5368600 - DNA, 25 bp, Homo sapien
tgacagcaaggggcaaagagcatct

SEQ ID NO: 5368601 - DNA, 25 bp, Homo sapien
cactgatgacagcaaggggcaaaga

SEQ ID NO: 5368602 - DNA, 25 bp, Homo sapien
cacactgatgacagcaaggggcaaa

SEQ ID NO: 5368603 - DNA, 25 bp, Homo sapien
ggggcaaagagcatctgaaagtcat

SEQ ID NO: 5368604 - DNA, 25 bp, Homo sapien
gttcacagtactttcttccttcaaa

SEQ ID NO: 5368605 - DNA, 25 bp, Homo sapien
cctgagtccacgagatggagactgc

SEQ ID NO: 5368606 - DNA, 25 bp, Homo sapien
tgtttagaataaactggtagagcca

SEQ ID NO: 5368607 - DNA, 25 bp, Homo sapien
ccgtgcctggctggtaatattgttt

SEQ ID NO: 5368608 - DNA, 25 bp, Homo sapien
ggaagactgcctgagtccacgagat

SEQ ID NO: 5368609 - DNA, 25 bp, Homo sapien
gggcaacagcccatgaatagcctag

SEQ ID NO: 5368610 - DNA, 25 bp, Homo sapien
gctcaggaagcggtcatgctgctta

SEQ ID NO: 5368611 - DNA, 25 bp, Homo sapien
gatgcaggtttacacatccctgggc

SEQ ID NO: 5368612 - DNA, 25 bp, Homo sapien
tgacagggcctaaatgcggcagcag

SEQ ID NO: 5368613 - DNA, 25 bp, Homo sapien
tcaatgtgccttgggagtctcacct

SEQ ID NO: 5368614 - DNA, 25 bp, Homo sapien
ttctctattgctcccctggaccgag

SEQ ID NO: 5368615 - DNA, 25 bp, Homo sapien
ttcatatagtgagaagaccatgctc

SEQ ID NO: 5368616 - DNA, 25 bp, Homo sapien
catctctttcatgtcgcaaacctgc

SEQ ID NO: 5368617 - DNA, 25 bp, Homo sapien
ctgtggtacattggcctctcctgct

SEQ ID NO: 5368618 - DNA, 25 bp, Homo sapien
atttgcccatccctaaatccatcat

SEQ ID NO: 5368619 - DNA, 25 bp, Homo sapien
tcttctgctgtggtacattggcctc

SEQ ID NO: 5368620 - DNA, 25 bp, Homo sapien
tcctgccctcttctgctgtggtaca

SEQ ID NO: 5368621 - DNA, 25 bp, Homo sapien
gctctcctttagagcaggtccagtg

SEQ ID NO: 5368622 - DNA, 25 bp, Homo sapien
gctggaagcactgagcgcacacgaa

SEQ ID NO: 5368623 - DNA, 25 bp, Homo sapien
cagcgctcgcaagtggcgctggcca

SEQ ID NO: 5368624 - DNA, 25 bp, Homo sapien
cagctccccattactgttcacgatc

SEQ ID NO: 5368625 - DNA, 25 bp, Homo sapien
ctcatagaagagtccttctgggaac

SEQ ID NO: 5368626 - DNA, 25 bp, Homo sapien
tgcagtttggaaacagccctctcgt

SEQ ID NO: 5368627 - DNA, 25 bp, Homo sapien
taaaagtcacagaactccttgtaga

SEQ ID NO: 5368628 - DNA, 25 bp, Homo sapien
tcctcggtcccattggcctcgtgga

SEQ ID NO: 5368629 - DNA, 25 bp, Homo sapien
ctttcacgtcactgtgcctgcgctg

SEQ ID NO: 5368630 - DNA, 25 bp, Homo sapien
tagtgacacagtctttgtcagagcg

SEQ ID NO: 5368631 - DNA, 25 bp, Homo sapien
gacacagtctttgtcagagcggcag

SEQ ID NO: 5368632 - DNA, 25 bp, Homo sapien
aaagtagtgacacagtctttgtcag

SEQ ID NO: 5368633 - DNA, 25 bp, Homo sapien
acagtctttgtcagagcggcagtcc

SEQ ID NO: 5368634 - DNA, 25 bp, Homo sapien
aagaccagggctgcatttacaatga

SEQ ID NO: 5368635 - DNA, 25 bp, Homo sapien
ttgaaagaccagggctgcatttaca

SEQ ID NO: 5368636 - DNA, 25 bp, Homo sapien
accagggctgcatttacaatgacag

SEQ ID NO: 5368637 - DNA, 25 bp, Homo sapien
gaaagaccagggctgcatttacaat

SEQ ID NO: 5368638 - DNA, 25 bp, Homo sapien
aggtctttctatgtctgcggcagaa

SEQ ID NO: 5368639 - DNA, 25 bp, Homo sapien
caggaagtcaaaacagtatcaggtc

SEQ ID NO: 5368640 - DNA, 25 bp, Homo sapien
gctgaatgcctacagggacacagga

SEQ ID NO: 5368641 - DNA, 25 bp, Homo sapien
tatacaaatgttggccgctgaatgc

SEQ ID NO: 5368642 - DNA, 25 bp, Homo sapien
ttcacaagctttcgccaattcctca

SEQ ID NO: 5368643 - DNA, 25 bp, Homo sapien
gatggcaaagctgaacgatcattgg

SEQ ID NO: 5368644 - DNA, 25 bp, Homo sapien
tgcacgaagtcttcacaagctttcg

SEQ ID NO: 5368645 - DNA, 25 bp, Homo sapien
tctccaacgaggcaaatacttcatt

SEQ ID NO: 5368646 - DNA, 25 bp, Homo sapien
acagagctgatgtcatccaagagga

SEQ ID NO: 5368647 - DNA, 25 bp, Homo sapien
tgtcatccaagaggaaagactccat

SEQ ID NO: 5368648 - DNA, 25 bp, Homo sapien
agctgatgtcatccaagaggaaaga

SEQ ID NO: 5368649 - DNA, 25 bp, Homo sapien
tgatgtcatccaagaggaaagactc

SEQ ID NO: 5368650 - DNA, 25 bp, Homo sapien
gacttgatgttcatctaattttact

SEQ ID NO: 5368651 - DNA, 25 bp, Homo sapien
ttgacttgatgttcatctaatttta

SEQ ID NO: 5368652 - DNA, 25 bp, Homo sapien
ctttgacttgatgttcatctaattt

SEQ ID NO: 5368653 - DNA, 25 bp, Homo sapien
tgacttgatgttcatctaattttac

SEQ ID NO: 5368654 - DNA, 25 bp, Homo sapien
gattgataagccactagctagacta

SEQ ID NO: 5368655 - DNA, 25 bp, Homo sapien
agagaaaaggtcatacacttttggt

SEQ ID NO: 5368656 - DNA, 25 bp, Homo sapien
ctcggagaactgaaaatagaactac

SEQ ID NO: 5368657 - DNA, 25 bp, Homo sapien
ttggcaagagtacagagaaaaggtc

SEQ ID NO: 5368658 - DNA, 25 bp, Homo sapien
caatctagcaataccacaactgggc

SEQ ID NO: 5368659 - DNA, 25 bp, Homo sapien
gccatgagacaggaaggcctcaact

SEQ ID NO: 5368660 - DNA, 25 bp, Homo sapien
tttccaccagccatgagacaggaag

SEQ ID NO: 5368661 - DNA, 25 bp, Homo sapien
gacaggaaggcctcaactggtatcc

SEQ ID NO: 5368662 - DNA, 25 bp, Homo sapien
accagccatgagacaggaaggcctc

SEQ ID NO: 5368663 - DNA, 25 bp, Homo sapien
tttcatggttgtagccagccaagat

SEQ ID NO: 5368664 - DNA, 25 bp, Homo sapien
gttgtagccagccaagatagcgttg

SEQ ID NO: 5368665 - DNA, 25 bp, Homo sapien
tagccagccaagatagcgttgacac

SEQ ID NO: 5368666 - DNA, 25 bp, Homo sapien
ttcatggttgtagccagccaagata

SEQ ID NO: 5368667 - DNA, 25 bp, Homo sapien
agaaatatcttgagcaccctctgct

SEQ ID NO: 5368668 - DNA, 25 bp, Homo sapien
tgctgcttgagccaggtcatcgcaa

SEQ ID NO: 5368669 - DNA, 25 bp, Homo sapien
gcccagtgcacgtgatccagaaata

SEQ ID NO: 5368670 - DNA, 25 bp, Homo sapien
cgcaagtttgacattcggtaatgca

SEQ ID NO: 5368671 - DNA, 25 bp, Homo sapien
agtctgaaagaatgatctcagtcag

SEQ ID NO: 5368672 - DNA, 25 bp, Homo sapien
gaatcatatgaattaaacattggac

SEQ ID NO: 5368673 - DNA, 25 bp, Homo sapien
tgaagtcatcgtctataaggcaata

SEQ ID NO: 5368674 - DNA, 25 bp, Homo sapien
tcagaaactcagaatgaatcatatg

SEQ ID NO: 5368675 - DNA, 25 bp, Homo sapien
taggctcaggtcataactctgtgtc

SEQ ID NO: 5368676 - DNA, 25 bp, Homo sapien
gactgttgtctcaaatgctaggcag

SEQ ID NO: 5368677 - DNA, 25 bp, Homo sapien
gcagacatctggagtggtaaccact

SEQ ID NO: 5368678 - DNA, 25 bp, Homo sapien
tgagcacatccttgcagggaaactg

SEQ ID NO: 5368679 - DNA, 25 bp, Homo sapien
tacggtatgccttctcagtgccttg

SEQ ID NO: 5368680 - DNA, 25 bp, Homo sapien
tacactgttcagagcacaagcatag

SEQ ID NO: 5368681 - DNA, 25 bp, Homo sapien
gcaagagatgtgcatcagttcccac

SEQ ID NO: 5368682 - DNA, 25 bp, Homo sapien
gaagcagaagtcttccaccaagttg

SEQ ID NO: 5368683 - DNA, 25 bp, Homo sapien
gagttggtcgacgttctcacaacaa

SEQ ID NO: 5368684 - DNA, 25 bp, Homo sapien
cgggtatcaaagagttggtcgacgt

SEQ ID NO: 5368685 - DNA, 25 bp, Homo sapien
tcagacatggcaggtactacggtct

SEQ ID NO: 5368686 - DNA, 25 bp, Homo sapien
gacatggcaggtactacggtctacc

SEQ ID NO: 5368687 - DNA, 25 bp, Homo sapien
agtgacaccctatcaagagcctgga

SEQ ID NO: 5368688 - DNA, 25 bp, Homo sapien
gaagatgtagcacggacctctaagg

SEQ ID NO: 5368689 - DNA, 25 bp, Homo sapien
tcatgtcggctctgaaatagatgca

SEQ ID NO: 5368690 - DNA, 25 bp, Homo sapien
tcatggcttgcatgcagtgacaccc

SEQ ID NO: 5368691 - DNA, 25 bp, Homo sapien
gctgtggcctggtatcaacacttca

SEQ ID NO: 5368692 - DNA, 25 bp, Homo sapien
aattcacagtactgccgagaaatgg

SEQ ID NO: 5368693 - DNA, 25 bp, Homo sapien
caaaagaataatggtaacacacacg

SEQ ID NO: 5368694 - DNA, 25 bp, Homo sapien
taatagaagtattccttccatcaac

SEQ ID NO: 5368695 - DNA, 25 bp, Homo sapien
catccagaagaacgggaagcatttt

SEQ ID NO: 5368696 - DNA, 25 bp, Homo sapien
tcatccagaagaacgggaagcattt

SEQ ID NO: 5368697 - DNA, 25 bp, Homo sapien
ccagaagaacgggaagcattttctt

SEQ ID NO: 5368698 - DNA, 25 bp, Homo sapien
gaacgggaagcattttcttcctcat

SEQ ID NO: 5368699 - DNA, 25 bp, Homo sapien
gaagagcaatctatacttaccactg

SEQ ID NO: 5368700 - DNA, 25 bp, Homo sapien
aaaagctgtgcttagatagggtgca

SEQ ID NO: 5368701 - DNA, 25 bp, Homo sapien
tagcatcttagaccttttacctagg

SEQ ID NO: 5368702 - DNA, 25 bp, Homo sapien
taccctcctaagctaatgtttccca

SEQ ID NO: 5368703 - DNA, 25 bp, Homo sapien
cacattgataagagacaagtaggaa

SEQ ID NO: 5368704 - DNA, 25 bp, Homo sapien
caggccttacattctctctcttaaa

SEQ ID NO: 5368705 - DNA, 25 bp, Homo sapien
gagagaatgtaaggtatctaaatct

SEQ ID NO: 5368706 - DNA, 25 bp, Homo sapien
taaatctgctgctaaaccatcattg

SEQ ID NO: 5368707 - DNA, 25 bp, Homo sapien
gggaccagcaattggaattttagta

SEQ ID NO: 5368708 - DNA, 25 bp, Homo sapien
tagataaggtcaatcagtcaaaagt

SEQ ID NO: 5368709 - DNA, 25 bp, Homo sapien
tgttaaagaacaccaactagataag

SEQ ID NO: 5368710 - DNA, 25 bp, Homo sapien
tgcctgctcaattttgaggatgact

SEQ ID NO: 5368711 - DNA, 25 bp, Homo sapien
caaccaaatgcaatatatgagccct

SEQ ID NO: 5368712 - DNA, 25 bp, Homo sapien
tagttacgccaaaagattgtccatg

SEQ ID NO: 5368713 - DNA, 25 bp, Homo sapien
aaattagctggcgtgcgtctgtagt

SEQ ID NO: 5368714 - DNA, 25 bp, Homo sapien
caactcaagagagattatagcgtct

SEQ ID NO: 5368715 - DNA, 25 bp, Homo sapien
gtcacggcctactcatatgacagac

SEQ ID NO: 5368716 - DNA, 25 bp, Homo sapien
tttcaaatctagtcacggcctactc

SEQ ID NO: 5368717 - DNA, 25 bp, Homo sapien
gacccaattcaaatgagcaaaattg

SEQ ID NO: 5368718 - DNA, 25 bp, Homo sapien
tatgacagacccaattcaaatgagc

SEQ ID NO: 5368719 - DNA, 25 bp, Homo sapien
agtattccaggttagctgcagactt

SEQ ID NO: 5368720 - DNA, 25 bp, Homo sapien
ccaggttagctgcagacttctctcg

SEQ ID NO: 5368721 - DNA, 25 bp, Homo sapien
gctgcagacttctctcgctcttgat

SEQ ID NO: 5368722 - DNA, 25 bp, Homo sapien
gcagacttctctcgctcttgattcc

SEQ ID NO: 5368723 - DNA, 25 bp, Homo sapien
catttgacatgaaaaccggaactcc

SEQ ID NO: 5368724 - DNA, 25 bp, Homo sapien
aaaaatgggctttaggagcttctga

SEQ ID NO: 5368725 - DNA, 25 bp, Homo sapien
tctgattaaatatggcagactgaac

SEQ ID NO: 5368726 - DNA, 25 bp, Homo sapien
tcaaaggagtttatgacatcaccgt

SEQ ID NO: 5368727 - DNA, 25 bp, Homo sapien
tgatctgcactttttgtggtggaac

SEQ ID NO: 5368728 - DNA, 25 bp, Homo sapien
tcttcccatctattaatattccaag

SEQ ID NO: 5368729 - DNA, 25 bp, Homo sapien
tgtcatttcacgtataaggaaagca

SEQ ID NO: 5368730 - DNA, 25 bp, Homo sapien
aagcattaacatttactggtcacgt

SEQ ID NO: 5368731 - DNA, 25 bp, Homo sapien
gaataaagccctatgaatcccagtt

SEQ ID NO: 5368732 - DNA, 25 bp, Homo sapien
ggaaccatgacttgcagtttctacc

SEQ ID NO: 5368733 - DNA, 25 bp, Homo sapien
caaatgacccttactccaggtgatt

SEQ ID NO: 5368734 - DNA, 25 bp, Homo sapien
ttatttatggttcaagcctagggca

SEQ ID NO: 5368735 - DNA, 25 bp, Homo sapien
agtttctaccccacgtggtcagtga

SEQ ID NO: 5368736 - DNA, 25 bp, Homo sapien
gttacagtgtgcatgtctagaagcg

SEQ ID NO: 5368737 - DNA, 25 bp, Homo sapien
gcagctgctctaaagactgtgtgta

SEQ ID NO: 5368738 - DNA, 25 bp, Homo sapien
tgtgtatgtgctggcggaagacaca

SEQ ID NO: 5368739 - DNA, 25 bp, Homo sapien
gaagcgggaggtctgtgtttctcct

SEQ ID NO: 5368740 - DNA, 25 bp, Homo sapien
agctgctaatgctccagtgacaata

SEQ ID NO: 5368741 - DNA, 25 bp, Homo sapien
cctaataagtgaccgatagctgcta

SEQ ID NO: 5368742 - DNA, 25 bp, Homo sapien
taagtgaccgatagctgctaatgct

SEQ ID NO: 5368743 - DNA, 25 bp, Homo sapien
tgctaatgctccagtgacaatattt

SEQ ID NO: 5368744 - DNA, 25 bp, Homo sapien
taccaaaatatccacgcatttgcag

SEQ ID NO: 5368745 - DNA, 25 bp, Homo sapien
aaactgtgactctatgggtagctaa

SEQ ID NO: 5368746 - DNA, 25 bp, Homo sapien
tatactttgatgcagagatgtacga

SEQ ID NO: 5368747 - DNA, 25 bp, Homo sapien
taaaatctaagaccattcatatggc

SEQ ID NO: 5368748 - DNA, 25 bp, Homo sapien
tgaggaaggggtgctagtccaaaag

SEQ ID NO: 5368749 - DNA, 25 bp, Homo sapien
tgagtccgtacactgtaccaagttc

SEQ ID NO: 5368750 - DNA, 25 bp, Homo sapien
acactgtaccaagttcttttgctct

SEQ ID NO: 5368751 - DNA, 25 bp, Homo sapien
ccgtacactgtaccaagttcttttg

SEQ ID NO: 5368752 - DNA, 25 bp, Homo sapien
aagcatgagtccgtacactgtacca

SEQ ID NO: 5368753 - DNA, 25 bp, Homo sapien
cacatggtgactctctgggagtgct

SEQ ID NO: 5368754 - DNA, 25 bp, Homo sapien
gattcaacttggcaggagacttaga

SEQ ID NO: 5368755 - DNA, 25 bp, Homo sapien
tgggagtgcttgaccgagaaacatg

SEQ ID NO: 5368756 - DNA, 25 bp, Homo sapien
tccactctgggctactgaactagtt

SEQ ID NO: 5368757 - DNA, 25 bp, Homo sapien
tcagcaagggcattacagttctatt

SEQ ID NO: 5368758 - DNA, 25 bp, Homo sapien
tgggtcagcaagggcattacagttc

SEQ ID NO: 5368759 - DNA, 25 bp, Homo sapien
gtgggtcagcaagggcattacagtt

SEQ ID NO: 5368760 - DNA, 25 bp, Homo sapien
ggtcagcaagggcattacagttcta

SEQ ID NO: 5368761 - DNA, 25 bp, Homo sapien
ctttgtgggagtaacattagctgct

SEQ ID NO: 5368762 - DNA, 25 bp, Homo sapien
agtaacattagctgctggtctgaga

SEQ ID NO: 5368763 - DNA, 25 bp, Homo sapien
ggaattatatgctggtgactgacta

SEQ ID NO: 5368764 - DNA, 25 bp, Homo sapien
gaagatactgggaattatatgctgg

SEQ ID NO: 5368765 - DNA, 25 bp, Homo sapien
ttggctctcgccctttcagtgccac

SEQ ID NO: 5368766 - DNA, 25 bp, Homo sapien
ggctctcgccctttcagtgccacaa

SEQ ID NO: 5368767 - DNA, 25 bp, Homo sapien
tctcgccctttcagtgccacaaagc

SEQ ID NO: 5368768 - DNA, 25 bp, Homo sapien
atcttggctctcgccctttcagtgc

SEQ ID NO: 5368769 - DNA, 25 bp, Homo sapien
cataattctctgtgggccaacgatg

SEQ ID NO: 5368770 - DNA, 25 bp, Homo sapien
gtctgtgacccctgatatccatcag

SEQ ID NO: 5368771 - DNA, 25 bp, Homo sapien
ctgttagtggagccccatgaaatgt

SEQ ID NO: 5368772 - DNA, 25 bp, Homo sapien
ggtccataattctctgtgggccaac

SEQ ID NO: 5368773 - DNA, 25 bp, Homo sapien
catgtaatccacagctaatctggga

SEQ ID NO: 5368774 - DNA, 25 bp, Homo sapien
tgtagcacttcaatcactcgggaac

SEQ ID NO: 5368775 - DNA, 25 bp, Homo sapien
ttttgaagctcagaccacttttcga

SEQ ID NO: 5368776 - DNA, 25 bp, Homo sapien
taatctgggaatgaactcatagacc

SEQ ID NO: 5368777 - DNA, 25 bp, Homo sapien
ttaatggcctctacttgttggcaaa

SEQ ID NO: 5368778 - DNA, 25 bp, Homo sapien
cttaatggcctctacttgttggcaa

SEQ ID NO: 5368779 - DNA, 25 bp, Homo sapien
agcatctgttttacagactccaggg

SEQ ID NO: 5368780 - DNA, 25 bp, Homo sapien
gaatctgcatttcgcaaagaaccat

SEQ ID NO: 5368781 - DNA, 25 bp, Homo sapien
tatagtcttcgagttcctgcatgac

SEQ ID NO: 5368782 - DNA, 25 bp, Homo sapien
gagaggacctccttcactatagtct

SEQ ID NO: 5368783 - DNA, 25 bp, Homo sapien
aagagcatatacctagattcccaag

SEQ ID NO: 5368784 - DNA, 25 bp, Homo sapien
ctgttaaccatgataattgtagagg

SEQ ID NO: 5368785 - DNA, 25 bp, Homo sapien
gaaatacagatgctacaatacacca

SEQ ID NO: 5368786 - DNA, 25 bp, Homo sapien
cagaaaagtgttgtacagtctaaca

SEQ ID NO: 5368787 - DNA, 25 bp, Homo sapien
ttcttgaccactgaaagatttgaat

SEQ ID NO: 5368788 - DNA, 25 bp, Homo sapien
tcttgaccactgaaagatttgaatc

SEQ ID NO: 5368789 - DNA, 25 bp, Homo sapien
tttcttgaccactgaaagatttgaa

SEQ ID NO: 5368790 - DNA, 25 bp, Homo sapien
agaaacaacactttttatagattca

SEQ ID NO: 5368791 - DNA, 25 bp, Homo sapien
gtttaaacagaggatcaataggttc

SEQ ID NO: 5368792 - DNA, 25 bp, Homo sapien
taaacagaggatcaataggttcagg

SEQ ID NO: 5368793 - DNA, 25 bp, Homo sapien
taatgaacacttctccctatgtatt

SEQ ID NO: 5368794 - DNA, 25 bp, Homo sapien
gaggatcaataggttcaggaatact

SEQ ID NO: 5368795 - DNA, 25 bp, Homo sapien
tagttgaccataaaaagaattaaga

SEQ ID NO: 5368796 - DNA, 25 bp, Homo sapien
ctagttgaccataaaaagaattaag

SEQ ID NO: 5368797 - DNA, 25 bp, Homo sapien
cataaaaagaattaagaccgctgcc

SEQ ID NO: 5368798 - DNA, 25 bp, Homo sapien
tgaccataaaaagaattaagaccgc

SEQ ID NO: 5368799 - DNA, 25 bp, Homo sapien
attattaaggaataacagtaacagc

SEQ ID NO: 5368800 - DNA, 25 bp, Homo sapien
cagtaacagctcagctaatatgtaa

SEQ ID NO: 5368801 - DNA, 25 bp, Homo sapien
acagctcagctaatatgtaacattc

SEQ ID NO: 5368802 - DNA, 25 bp, Homo sapien
ttaaggaataacagtaacagctcag

SEQ ID NO: 5368803 - DNA, 25 bp, Homo sapien
tgcccaatgtacaagcagagcaggt

SEQ ID NO: 5368804 - DNA, 25 bp, Homo sapien
ctcttagagtgtttatttcatgctg

SEQ ID NO: 5368805 - DNA, 25 bp, Homo sapien
catgtttttcctgggctcttagagt

SEQ ID NO: 5368806 - DNA, 25 bp, Homo sapien
agagtgtttatttcatgctgaacta

SEQ ID NO: 5368807 - DNA, 25 bp, Homo sapien
tctgtgaatcagagtacaaaccgca

SEQ ID NO: 5368808 - DNA, 25 bp, Homo sapien
gaatcagagtacaaaccgcatccca

SEQ ID NO: 5368809 - DNA, 25 bp, Homo sapien
actgcttttctgtgaatcagagtac

SEQ ID NO: 5368810 - DNA, 25 bp, Homo sapien
aaccgcatcccaccaagatttttgt

SEQ ID NO: 5368811 - DNA, 25 bp, Homo sapien
gggcaggcataacggctgataggag

SEQ ID NO: 5368812 - DNA, 25 bp, Homo sapien
cctttaattgtaagtggctggtata

SEQ ID NO: 5368813 - DNA, 25 bp, Homo sapien
ctcctttaattgtaagtggctggta

SEQ ID NO: 5368814 - DNA, 25 bp, Homo sapien
gcaggcataacggctgataggagct

SEQ ID NO: 5368815 - DNA, 25 bp, Homo sapien
tccactgtaagccaagccaagtaag

SEQ ID NO: 5368816 - DNA, 25 bp, Homo sapien
atgaattccactgtaagccaagcca

SEQ ID NO: 5368817 - DNA, 25 bp, Homo sapien
tttcggattccaggtaaagcaggca

SEQ ID NO: 5368818 - DNA, 25 bp, Homo sapien
tttagccattttcggattccaggta

SEQ ID NO: 5368819 - DNA, 25 bp, Homo sapien
gctctggttcttgtacatcaatttt

SEQ ID NO: 5368820 - DNA, 25 bp, Homo sapien
tcaagctctggttcttgtacatcaa

SEQ ID NO: 5368821 - DNA, 25 bp, Homo sapien
caacatcgtatctagccaaatcttc

SEQ ID NO: 5368822 - DNA, 25 bp, Homo sapien
aacatcgtatctagccaaatcttca

SEQ ID NO: 5368823 - DNA, 25 bp, Homo sapien
aaaagatgtatccttaggtgactga

SEQ ID NO: 5368824 - DNA, 25 bp, Homo sapien
taccaagaaaagatgtatccttagg

SEQ ID NO: 5368825 - DNA, 25 bp, Homo sapien
aagaaaagatgtatccttaggtgac

SEQ ID NO: 5368826 - DNA, 25 bp, Homo sapien
ctaccaagaaaagatgtatccttag

SEQ ID NO: 5368827 - DNA, 25 bp, Homo sapien
gcatcatataacgcagactgcccaa

SEQ ID NO: 5368828 - DNA, 25 bp, Homo sapien
catataacgcagactgcccaatttt

SEQ ID NO: 5368829 - DNA, 25 bp, Homo sapien
catcatataacgcagactgcccaat

SEQ ID NO: 5368830 - DNA, 25 bp, Homo sapien
tcatataacgcagactgcccaattt

SEQ ID NO: 5368831 - DNA, 25 bp, Homo sapien
ttatgccataggtttacagtaagca

SEQ ID NO: 5368832 - DNA, 25 bp, Homo sapien
caggccttgttcccagagattttta

SEQ ID NO: 5368833 - DNA, 25 bp, Homo sapien
cagtaagcaatcaaaaaatcatagt

SEQ ID NO: 5368834 - DNA, 25 bp, Homo sapien
tagtcctcggataaagtactgatac

SEQ ID NO: 5368835 - DNA, 25 bp, Homo sapien
gcagattttgtccagctttaccttc

SEQ ID NO: 5368836 - DNA, 25 bp, Homo sapien
ccagcagattttgtccagctttacc

SEQ ID NO: 5368837 - DNA, 25 bp, Homo sapien
ttgtccagctttaccttctcttaat

SEQ ID NO: 5368838 - DNA, 25 bp, Homo sapien
gattttgtccagctttaccttctct

SEQ ID NO: 5368839 - DNA, 25 bp, Homo sapien
tatataacctatgaaagataggcca

SEQ ID NO: 5368840 - DNA, 25 bp, Homo sapien
cacctattaattccagctacacggg

SEQ ID NO: 5368841 - DNA, 25 bp, Homo sapien
gataggccaggtacaggcgtggtgg

SEQ ID NO: 5368842 - DNA, 25 bp, Homo sapien
agactgcaaaaactgggaaccaagg

SEQ ID NO: 5368843 - DNA, 25 bp, Homo sapien
agggaagacgtgacagctgccttca

SEQ ID NO: 5368844 - DNA, 25 bp, Homo sapien
tggcgaagggaagacgtgacagctg

SEQ ID NO: 5368845 - DNA, 25 bp, Homo sapien
gcgaagggaagacgtgacagctgcc

SEQ ID NO: 5368846 - DNA, 25 bp, Homo sapien
gaagggaagacgtgacagctgcctt

SEQ ID NO: 5368847 - DNA, 25 bp, Homo sapien
taaggaagtaccaagagccaaacca

SEQ ID NO: 5368848 - DNA, 25 bp, Homo sapien
gaaaacgtccagtcataggcaatgc

SEQ ID NO: 5368849 - DNA, 25 bp, Homo sapien
ggcaatgcccgcttactagaaacat

SEQ ID NO: 5368850 - DNA, 25 bp, Homo sapien
tatatgggtgactagagcatcggct

SEQ ID NO: 5368851 - DNA, 25 bp, Homo sapien
taagaaagtagctgacagttcatca

SEQ ID NO: 5368852 - DNA, 25 bp, Homo sapien
atttctaagaaagtagctgacagtt

SEQ ID NO: 5368853 - DNA, 25 bp, Homo sapien
gacagttcatcatttccacccaaag

SEQ ID NO: 5368854 - DNA, 25 bp, Homo sapien
tgacagttcatcatttccacccaaa

SEQ ID NO: 5368855 - DNA, 25 bp, Homo sapien
tccaaacactgtaaagactccagat

SEQ ID NO: 5368856 - DNA, 25 bp, Homo sapien
ccagcagtaagtctgtattggttgc

SEQ ID NO: 5368857 - DNA, 25 bp, Homo sapien
gaagcataagattagcataggccag

SEQ ID NO: 5368858 - DNA, 25 bp, Homo sapien
tcctgcacatctctagtggaaagcg

SEQ ID NO: 5368859 - DNA, 25 bp, Homo sapien
agggtctgtacaacacacgaattcc

SEQ ID NO: 5368860 - DNA, 25 bp, Homo sapien
tctaaacttgaacgcaaagctatgt

SEQ ID NO: 5368861 - DNA, 25 bp, Homo sapien
aaacttgaacgcaaagctatgttcc

SEQ ID NO: 5368862 - DNA, 25 bp, Homo sapien
gggtctgtacaacacacgaattcca

SEQ ID NO: 5368863 - DNA, 25 bp, Homo sapien
tcaagtcaaaaagtttattccatcc

SEQ ID NO: 5368864 - DNA, 25 bp, Homo sapien
tcttcaccttcacaatctagaagct

SEQ ID NO: 5368865 - DNA, 25 bp, Homo sapien
tccatcttcaccttcacaatctaga

SEQ ID NO: 5368866 - DNA, 25 bp, Homo sapien
tcaccttcacaatctagaagctgtt

SEQ ID NO: 5368867 - DNA, 25 bp, Homo sapien
tcagacaatagttatcagaaaactc

SEQ ID NO: 5368868 - DNA, 25 bp, Homo sapien
gcaaaaattgtatatcagacagaac

SEQ ID NO: 5368869 - DNA, 25 bp, Homo sapien
aaaatatccctaaattgtcatcctg

SEQ ID NO: 5368870 - DNA, 25 bp, Homo sapien
tccagaagggtaaatgagatgtcac

SEQ ID NO: 5368871 - DNA, 25 bp, Homo sapien
tagtttataaattgcaggacttcct

SEQ ID NO: 5368872 - DNA, 25 bp, Homo sapien
agtttataaattgcaggacttcctg

SEQ ID NO: 5368873 - DNA, 25 bp, Homo sapien
cttgcacattaatgtaagtacatat

SEQ ID NO: 5368874 - DNA, 25 bp, Homo sapien
tgagctttgggatccctctcttgca

SEQ ID NO: 5368875 - DNA, 25 bp, Homo sapien
ctgtgagctttgggatccctctctt

SEQ ID NO: 5368876 - DNA, 25 bp, Homo sapien
gagctttgggatccctctcttgcac

SEQ ID NO: 5368877 - DNA, 25 bp, Homo sapien
tacagctttgcaaaatagaatcctt

SEQ ID NO: 5368878 - DNA, 25 bp, Homo sapien
tagcaagatcatattctttagcttc

SEQ ID NO: 5368879 - DNA, 25 bp, Homo sapien
gctttgcaaaatagaatcctttcat

SEQ ID NO: 5368880 - DNA, 25 bp, Homo sapien
caaaatagaatcctttcattgactt

SEQ ID NO: 5368881 - DNA, 25 bp, Homo sapien
gattcccgggtccatgtactgttct

SEQ ID NO: 5368882 - DNA, 25 bp, Homo sapien
attcccgggtccatgtactgttctc

SEQ ID NO: 5368883 - DNA, 25 bp, Homo sapien
ggattcccgggtccatgtactgttc

SEQ ID NO: 5368884 - DNA, 25 bp, Homo sapien
ttcccgggtccatgtactgttctct

SEQ ID NO: 5368885 - DNA, 25 bp, Homo sapien
atttttggaccacgggtgacgcagg

SEQ ID NO: 5368886 - DNA, 25 bp, Homo sapien
gcaggaggccgtgagatttttatca

SEQ ID NO: 5368887 - DNA, 25 bp, Homo sapien
taaaaccacgtaaggcaatactgtg

SEQ ID NO: 5368888 - DNA, 25 bp, Homo sapien
gaagggactactgtaccagcaacga

SEQ ID NO: 5368889 - DNA, 25 bp, Homo sapien
agatgcctaccttgtcactcgacgc

SEQ ID NO: 5368890 - DNA, 25 bp, Homo sapien
gggacagcgacaaacacctcatact

SEQ ID NO: 5368891 - DNA, 25 bp, Homo sapien
gagtggagctggacccttacaaagg

SEQ ID NO: 5368892 - DNA, 25 bp, Homo sapien
gggccattgcaaatgtccgcgctga

SEQ ID NO: 5368893 - DNA, 25 bp, Homo sapien
cgacgtaccgctccacatcggcctt

SEQ ID NO: 5368894 - DNA, 25 bp, Homo sapien
gacgtaccgctccacatcggccttg

SEQ ID NO: 5368895 - DNA, 25 bp, Homo sapien
gcgacgtaccgctccacatcggcct

SEQ ID NO: 5368896 - DNA, 25 bp, Homo sapien
gagacgcgtgcgagcaccgctcagc

SEQ ID NO: 5368897 - DNA, 25 bp, Homo sapien
ctcccgagacgcgtgcgagcaccgc

SEQ ID NO: 5368898 - DNA, 25 bp, Homo sapien
cccgagacgcgtgcgagcaccgctc

SEQ ID NO: 5368899 - DNA, 25 bp, Homo sapien
cgagacgcgtgcgagcaccgctcag

SEQ ID NO: 5368900 - DNA, 25 bp, Homo sapien
aaacttgtatacaggccaggcatag

SEQ ID NO: 5368901 - DNA, 25 bp, Homo sapien
taaaatgtggtattattgggcacag

SEQ ID NO: 5368902 - DNA, 25 bp, Homo sapien
ttgcagctgcagtgatgctccttga

SEQ ID NO: 5368903 - DNA, 25 bp, Homo sapien
acagacacacgtgcctgtaggccca

SEQ ID NO: 5368904 - DNA, 25 bp, Homo sapien
ccacgatggccagctaatatttctg

SEQ ID NO: 5368905 - DNA, 25 bp, Homo sapien
caggtgtgatcagcctgtaccacca

SEQ ID NO: 5368906 - DNA, 25 bp, Homo sapien
gtaccaccatgccttgtctaaaata

SEQ ID NO: 5368907 - DNA, 25 bp, Homo sapien
cctgctgaggaataaaagtaaggaa

SEQ ID NO: 5368908 - DNA, 25 bp, Homo sapien
tatttccagtatcaagttaagcaca

SEQ ID NO: 5368909 - DNA, 25 bp, Homo sapien
tggtgatccactacagtaaagcctc

SEQ ID NO: 5368910 - DNA, 25 bp, Homo sapien
cgctaacaatgagcctcctgggaag

SEQ ID NO: 5368911 - DNA, 25 bp, Homo sapien
tcataacgcaggtaaacagtacaga

SEQ ID NO: 5368912 - DNA, 25 bp, Homo sapien
gctgtgagcgtggcacaaagggata

SEQ ID NO: 5368913 - DNA, 25 bp, Homo sapien
tgtgagcgtggcacaaagggatacc

SEQ ID NO: 5368914 - DNA, 25 bp, Homo sapien
ctgtgagcgtggcacaaagggatac

SEQ ID NO: 5368915 - DNA, 25 bp, Homo sapien
gcagggctaagtcgaagctgtccat

SEQ ID NO: 5368916 - DNA, 25 bp, Homo sapien
gtgactcgaggtcccattcctggag

SEQ ID NO: 5368917 - DNA, 25 bp, Homo sapien
tggagcagggctaagtcgaagctgt

SEQ ID NO: 5368918 - DNA, 25 bp, Homo sapien
cacagtgactcgaggtcccattcct

SEQ ID NO: 5368919 - DNA, 25 bp, Homo sapien
ggccattcatgcaagtttcaaggac

SEQ ID NO: 5368920 - DNA, 25 bp, Homo sapien
tatccccacaggttctttgtcatgc

SEQ ID NO: 5368921 - DNA, 25 bp, Homo sapien
ttgatgctggtaacaagaaccaatc

SEQ ID NO: 5368922 - DNA, 25 bp, Homo sapien
ttgtcatgcgtcttcaagatgtgcc

SEQ ID NO: 5368923 - DNA, 25 bp, Homo sapien
tacgcactcatgtgcatttttggtg

SEQ ID NO: 5368924 - DNA, 25 bp, Homo sapien
tatagttcacatccttttattgctg

SEQ ID NO: 5368925 - DNA, 25 bp, Homo sapien
gcttccagtttgagacaattgtgaa

SEQ ID NO: 5368926 - DNA, 25 bp, Homo sapien
tacaacttctttggataaatatcaa

SEQ ID NO: 5368927 - DNA, 25 bp, Homo sapien
acaggcacccgacatcatgccagac

SEQ ID NO: 5368928 - DNA, 25 bp, Homo sapien
gtagccaaaagtctgttccaattca

SEQ ID NO: 5368929 - DNA, 25 bp, Homo sapien
caaaagtctgttccaattcagtctt

SEQ ID NO: 5368930 - DNA, 25 bp, Homo sapien
gccaaaagtctgttccaattcagtc

SEQ ID NO: 5368931 - DNA, 25 bp, Homo sapien
tagccaaaagtctgttccaattcag

SEQ ID NO: 5368932 - DNA, 25 bp, Homo sapien
cagccggccagggcagccctgagct

SEQ ID NO: 5368933 - DNA, 25 bp, Homo sapien
gccggccagggcagccctgagctca

SEQ ID NO: 5368934 - DNA, 25 bp, Homo sapien
tcacttgacacagccggccagggca

SEQ ID NO: 5368935 - DNA, 25 bp, Homo sapien
cacagccggccagggcagccctgag

SEQ ID NO: 5368936 - DNA, 25 bp, Homo sapien
aaaatggagcgtggtgttgcaaaac

SEQ ID NO: 5368937 - DNA, 25 bp, Homo sapien
gttgcaaaacatcctcttcccgagc

SEQ ID NO: 5368938 - DNA, 25 bp, Homo sapien
cctcttcccgagctctggaccagct

SEQ ID NO: 5368939 - DNA, 25 bp, Homo sapien
gcgtggtgttgcaaaacatcctctt

SEQ ID NO: 5368940 - DNA, 25 bp, Homo sapien
ttctgctgatggtagttgaaggtag

SEQ ID NO: 5368941 - DNA, 25 bp, Homo sapien
gatggtagttgaaggtagaactcac

SEQ ID NO: 5368942 - DNA, 25 bp, Homo sapien
ctgatggtagttgaaggtagaactc

SEQ ID NO: 5368943 - DNA, 25 bp, Homo sapien
tgctgatggtagttgaaggtagaac

SEQ ID NO: 5368944 - DNA, 25 bp, Homo sapien
gatgcacctggaaggctctccaaag

SEQ ID NO: 5368945 - DNA, 25 bp, Homo sapien
gcacctggaaggctctccaaagcca

SEQ ID NO: 5368946 - DNA, 25 bp, Homo sapien
cacctggaaggctctccaaagccat

SEQ ID NO: 5368947 - DNA, 25 bp, Homo sapien
cagatgcacctggaaggctctccaa

SEQ ID NO: 5368948 - DNA, 25 bp, Homo sapien
ctgccccctaggaccttgtgggcca

SEQ ID NO: 5368949 - DNA, 25 bp, Homo sapien
gctgccccctaggaccttgtgggcc

SEQ ID NO: 5368950 - DNA, 25 bp, Homo sapien
tgccccctaggaccttgtgggccag

SEQ ID NO: 5368951 - DNA, 25 bp, Homo sapien
ggctgccccctaggaccttgtgggc

SEQ ID NO: 5368952 - DNA, 25 bp, Homo sapien
tgaggctttggcacctcgcagaggt

SEQ ID NO: 5368953 - DNA, 25 bp, Homo sapien
tcgcagaggtgagccttcagcccca

SEQ ID NO: 5368954 - DNA, 25 bp, Homo sapien
cacctcgcagaggtgagccttcagc

SEQ ID NO: 5368955 - DNA, 25 bp, Homo sapien
tccttgaggctttggcacctcgcag

SEQ ID NO: 5368956 - DNA, 25 bp, Homo sapien
ctagtttggcatcaccgtcagagaa

SEQ ID NO: 5368957 - DNA, 25 bp, Homo sapien
agagaaatcactggctgaccacatc

SEQ ID NO: 5368958 - DNA, 25 bp, Homo sapien
actggctgaccacatccatgctcta

SEQ ID NO: 5368959 - DNA, 25 bp, Homo sapien
tttggcatcaccgtcagagaaatca

SEQ ID NO: 5368960 - DNA, 25 bp, Homo sapien
gttctcttcgcatcagcattcttag

SEQ ID NO: 5368961 - DNA, 25 bp, Homo sapien
gcatcagcattcttagtttgccatt

SEQ ID NO: 5368962 - DNA, 25 bp, Homo sapien
ttttagtacttgttctcttcgcatc

SEQ ID NO: 5368963 - DNA, 25 bp, Homo sapien
gtttgccattgacctcgtttttgag

SEQ ID NO: 5368964 - DNA, 25 bp, Homo sapien
ctcagcatcaaatctaaatagtttt

SEQ ID NO: 5368965 - DNA, 25 bp, Homo sapien
cagcatcaaatctaaatagttttac

SEQ ID NO: 5368966 - DNA, 25 bp, Homo sapien
tcagcatcaaatctaaatagtttta

SEQ ID NO: 5368967 - DNA, 25 bp, Homo sapien
ccctgtgaatacagaactttttcac

SEQ ID NO: 5368968 - DNA, 25 bp, Homo sapien
cccctgtgaatacagaactttttca

SEQ ID NO: 5368969 - DNA, 25 bp, Homo sapien
tactggttcaaaatggatgtcatcg

SEQ ID NO: 5368970 - DNA, 25 bp, Homo sapien
gatttcctggttccgaaatgccaaa

SEQ ID NO: 5368971 - DNA, 25 bp, Homo sapien
gatgtcatcgctgtcctcagtctta

SEQ ID NO: 5368972 - DNA, 25 bp, Homo sapien
aagtgctacttgtttggccaaaaat

SEQ ID NO: 5368973 - DNA, 25 bp, Homo sapien
tgggtcagcaagggcattacagttc

SEQ ID NO: 5368974 - DNA, 25 bp, Homo sapien
tcagcaagggcattacagttctatt

SEQ ID NO: 5368975 - DNA, 25 bp, Homo sapien
ggtcagcaagggcattacagttcta

SEQ ID NO: 5368976 - DNA, 25 bp, Homo sapien
gtgggtcagcaagggcattacagtt

SEQ ID NO: 5368977 - DNA, 25 bp, Homo sapien
gaagatactgggaattatatgctgg

SEQ ID NO: 5368978 - DNA, 25 bp, Homo sapien
ctttgtgggagtaacattagctgct

SEQ ID NO: 5368979 - DNA, 25 bp, Homo sapien
agtaacattagctgctggtctgaga

SEQ ID NO: 5368980 - DNA, 25 bp, Homo sapien
ggaattatatgctggtgactgacta

SEQ ID NO: 5368981 - DNA, 25 bp, Homo sapien
aaggaaaaagaatctatgaacacag

SEQ ID NO: 5368982 - DNA, 25 bp, Homo sapien
taaggaaaaagaatctatgaacaca

SEQ ID NO: 5368983 - DNA, 25 bp, Homo sapien
ttggctctcgccctttcagtgccac

SEQ ID NO: 5368984 - DNA, 25 bp, Homo sapien
atcttggctctcgccctttcagtgc

SEQ ID NO: 5368985 - DNA, 25 bp, Homo sapien
ggctctcgccctttcagtgccacaa

SEQ ID NO: 5368986 - DNA, 25 bp, Homo sapien
tctcgccctttcagtgccacaaagc

SEQ ID NO: 5368987 - DNA, 25 bp, Homo sapien
ggtccataattctctgtgggccaac

SEQ ID NO: 5368988 - DNA, 25 bp, Homo sapien
cataattctctgtgggccaacgatg

SEQ ID NO: 5368989 - DNA, 25 bp, Homo sapien
ctgttagtggagccccatgaaatgt

SEQ ID NO: 5368990 - DNA, 25 bp, Homo sapien
gtctgtgacccctgatatccatcag

SEQ ID NO: 5368991 - DNA, 25 bp, Homo sapien
ttttgaagctcagaccacttttcga

SEQ ID NO: 5368992 - DNA, 25 bp, Homo sapien
catgtaatccacagctaatctggga

SEQ ID NO: 5368993 - DNA, 25 bp, Homo sapien
tgtagcacttcaatcactcgggaac

SEQ ID NO: 5368994 - DNA, 25 bp, Homo sapien
taatctgggaatgaactcatagacc

SEQ ID NO: 5368995 - DNA, 25 bp, Homo sapien
ttaatggcctctacttgttggcaaa

SEQ ID NO: 5368996 - DNA, 25 bp, Homo sapien
cttaatggcctctacttgttggcaa

SEQ ID NO: 5368997 - DNA, 25 bp, Homo sapien
gagaggacctccttcactatagtct

SEQ ID NO: 5368998 - DNA, 25 bp, Homo sapien
tatagtcttcgagttcctgcatgac

SEQ ID NO: 5368999 - DNA, 25 bp, Homo sapien
agcatctgttttacagactccaggg

SEQ ID NO: 5369000 - DNA, 25 bp, Homo sapien
gaatctgcatttcgcaaagaaccat

SEQ ID NO: 5369001 - DNA, 25 bp, Homo sapien
gaaatacagatgctacaatacacca

SEQ ID NO: 5369002 - DNA, 25 bp, Homo sapien
cagaaaagtgttgtacagtctaaca

SEQ ID NO: 5369003 - DNA, 25 bp, Homo sapien
ctgttaaccatgataattgtagagg

SEQ ID NO: 5369004 - DNA, 25 bp, Homo sapien
aagagcatatacctagattcccaag

SEQ ID NO: 5369005 - DNA, 25 bp, Homo sapien
tttcttgaccactgaaagatttgaa

SEQ ID NO: 5369006 - DNA, 25 bp, Homo sapien
ttcttgaccactgaaagatttgaat

SEQ ID NO: 5369007 - DNA, 25 bp, Homo sapien
tcttgaccactgaaagatttgaatc

SEQ ID NO: 5369008 - DNA, 25 bp, Homo sapien
agaaacaacactttttatagattca

SEQ ID NO: 5369009 - DNA, 25 bp, Homo sapien
gaggatcaataggttcaggaatact

SEQ ID NO: 5369010 - DNA, 25 bp, Homo sapien
gtttaaacagaggatcaataggttc

SEQ ID NO: 5369011 - DNA, 25 bp, Homo sapien
taatgaacacttctccctatgtatt

SEQ ID NO: 5369012 - DNA, 25 bp, Homo sapien
taaacagaggatcaataggttcagg

SEQ ID NO: 5369013 - DNA, 25 bp, Homo sapien
tgaccataaaaagaattaagaccgc

SEQ ID NO: 5369014 - DNA, 25 bp, Homo sapien
cataaaaagaattaagaccgctgcc

SEQ ID NO: 5369015 - DNA, 25 bp, Homo sapien
ctagttgaccataaaaagaattaag

SEQ ID NO: 5369016 - DNA, 25 bp, Homo sapien
tagttgaccataaaaagaattaaga

SEQ ID NO: 5369017 - DNA, 25 bp, Homo sapien
ttaaggaataacagtaacagctcag

SEQ ID NO: 5369018 - DNA, 25 bp, Homo sapien
attattaaggaataacagtaacagc

SEQ ID NO: 5369019 - DNA, 25 bp, Homo sapien
cagtaacagctcagctaatatgtaa

SEQ ID NO: 5369020 - DNA, 25 bp, Homo sapien
acagctcagctaatatgtaacattc

SEQ ID NO: 5369021 - DNA, 25 bp, Homo sapien
catgtttttcctgggctcttagagt

SEQ ID NO: 5369022 - DNA, 25 bp, Homo sapien
tgcccaatgtacaagcagagcaggt

SEQ ID NO: 5369023 - DNA, 25 bp, Homo sapien
ctcttagagtgtttatttcatgctg

SEQ ID NO: 5369024 - DNA, 25 bp, Homo sapien
agagtgtttatttcatgctgaacta

SEQ ID NO: 5369025 - DNA, 25 bp, Homo sapien
aatagttcaatttactaaaattgct

SEQ ID NO: 5369026 - DNA, 25 bp, Homo sapien
ttcaatttactaaaattgctttcta

SEQ ID NO: 5369027 - DNA, 25 bp, Homo sapien
actgcttttctgtgaatcagagtac

SEQ ID NO: 5369028 - DNA, 25 bp, Homo sapien
tctgtgaatcagagtacaaaccgca

SEQ ID NO: 5369029 - DNA, 25 bp, Homo sapien
aaccgcatcccaccaagatttttgt

SEQ ID NO: 5369030 - DNA, 25 bp, Homo sapien
gaatcagagtacaaaccgcatccca

SEQ ID NO: 5369031 - DNA, 25 bp, Homo sapien
gggcaggcataacggctgataggag

SEQ ID NO: 5369032 - DNA, 25 bp, Homo sapien
cctttaattgtaagtggctggtata

SEQ ID NO: 5369033 - DNA, 25 bp, Homo sapien
ctcctttaattgtaagtggctggta

SEQ ID NO: 5369034 - DNA, 25 bp, Homo sapien
gcaggcataacggctgataggagct

SEQ ID NO: 5369035 - DNA, 25 bp, Homo sapien
atgaattccactgtaagccaagcca

SEQ ID NO: 5369036 - DNA, 25 bp, Homo sapien
tttagccattttcggattccaggta

SEQ ID NO: 5369037 - DNA, 25 bp, Homo sapien
tttcggattccaggtaaagcaggca

SEQ ID NO: 5369038 - DNA, 25 bp, Homo sapien
tccactgtaagccaagccaagtaag

SEQ ID NO: 5369039 - DNA, 25 bp, Homo sapien
tcaagctctggttcttgtacatcaa

SEQ ID NO: 5369040 - DNA, 25 bp, Homo sapien
gctctggttcttgtacatcaatttt

SEQ ID NO: 5369041 - DNA, 25 bp, Homo sapien
caacatcgtatctagccaaatcttc

SEQ ID NO: 5369042 - DNA, 25 bp, Homo sapien
aacatcgtatctagccaaatcttca

SEQ ID NO: 5369043 - DNA, 25 bp, Homo sapien
aagaaaagatgtatccttaggtgac

SEQ ID NO: 5369044 - DNA, 25 bp, Homo sapien
taccaagaaaagatgtatccttagg

SEQ ID NO: 5369045 - DNA, 25 bp, Homo sapien
cgctaccaagaaaagatgtatcctt

SEQ ID NO: 5369046 - DNA, 25 bp, Homo sapien
aaaagatgtatccttaggtgactga

SEQ ID NO: 5369047 - DNA, 25 bp, Homo sapien
catataacgcagactgcccaatttt

SEQ ID NO: 5369048 - DNA, 25 bp, Homo sapien
catcatataacgcagactgcccaat

SEQ ID NO: 5369049 - DNA, 25 bp, Homo sapien
gcatcatataacgcagactgcccaa

SEQ ID NO: 5369050 - DNA, 25 bp, Homo sapien
tcatataacgcagactgcccaattt

SEQ ID NO: 5369051 - DNA, 25 bp, Homo sapien
gcagattttgtccagctttaccttc

SEQ ID NO: 5369052 - DNA, 25 bp, Homo sapien
gattttgtccagctttaccttctct

SEQ ID NO: 5369053 - DNA, 25 bp, Homo sapien
ttgtccagctttaccttctcttaat

SEQ ID NO: 5369054 - DNA, 25 bp, Homo sapien
ccagcagattttgtccagctttacc

SEQ ID NO: 5369055 - DNA, 25 bp, Homo sapien
catacttctaatagtaacatggtct

SEQ ID NO: 5369056 - DNA, 25 bp, Homo sapien
cttctaatagtaacatggtcttatc

SEQ ID NO: 5369057 - DNA, 25 bp, Homo sapien
catggtcttatctattacactgtac

SEQ ID NO: 5369058 - DNA, 25 bp, Homo sapien
ttgatgatacccatacttctaatag

SEQ ID NO: 5369059 - DNA, 25 bp, Homo sapien
agggaagacgtgacagctgccttca

SEQ ID NO: 5369060 - DNA, 25 bp, Homo sapien
gcgaagggaagacgtgacagctgcc

SEQ ID NO: 5369061 - DNA, 25 bp, Homo sapien
tggcgaagggaagacgtgacagctg

SEQ ID NO: 5369062 - DNA, 25 bp, Homo sapien
gaagggaagacgtgacagctgcctt

SEQ ID NO: 5369063 - DNA, 25 bp, Homo sapien
aactgacctcaattcataaacccgg

SEQ ID NO: 5369064 - DNA, 25 bp, Homo sapien
ttagaaatattcgtatcgcctatcc

SEQ ID NO: 5369065 - DNA, 25 bp, Homo sapien
gaccagttaattagttgtgaatcca

SEQ ID NO: 5369066 - DNA, 25 bp, Homo sapien
tagcatattcttaagagccgccaga

SEQ ID NO: 5369067 - DNA, 25 bp, Homo sapien
aaaaattgtaggctgtgcgcagtag

SEQ ID NO: 5369068 - DNA, 25 bp, Homo sapien
ccagttcaatgttacggtgagctac

SEQ ID NO: 5369069 - DNA, 25 bp, Homo sapien
cactctgggaagctcgagcccagtt

SEQ ID NO: 5369070 - DNA, 25 bp, Homo sapien
tctgcctcccaaaactacatatcaa

SEQ ID NO: 5369071 - DNA, 25 bp, Homo sapien
ttcacatattgtcattacataccag

SEQ ID NO: 5369072 - DNA, 25 bp, Homo sapien
cacatattgtcattacataccagag

SEQ ID NO: 5369073 - DNA, 25 bp, Homo sapien
acatattgtcattacataccagagc

SEQ ID NO: 5369074 - DNA, 25 bp, Homo sapien
gacagttcatcatttccacccaaag

SEQ ID NO: 5369075 - DNA, 25 bp, Homo sapien
taagaaagtagctgacagttcatca

SEQ ID NO: 5369076 - DNA, 25 bp, Homo sapien
atttctaagaaagtagctgacagtt

SEQ ID NO: 5369077 - DNA, 25 bp, Homo sapien
tgacagttcatcatttccacccaaa

SEQ ID NO: 5369078 - DNA, 25 bp, Homo sapien
tccaaacactgtaaagactccagat

SEQ ID NO: 5369079 - DNA, 25 bp, Homo sapien
tcctgcacatctctagtggaaagcg

SEQ ID NO: 5369080 - DNA, 25 bp, Homo sapien
ccagcagtaagtctgtattggttgc

SEQ ID NO: 5369081 - DNA, 25 bp, Homo sapien
gaagcataagattagcataggccag

SEQ ID NO: 5369082 - DNA, 25 bp, Homo sapien
agggtctgtacaacacacgaattcc

SEQ ID NO: 5369083 - DNA, 25 bp, Homo sapien
aaacttgaacgcaaagctatgttcc

SEQ ID NO: 5369084 - DNA, 25 bp, Homo sapien
tctaaacttgaacgcaaagctatgt

SEQ ID NO: 5369085 - DNA, 25 bp, Homo sapien
gggtctgtacaacacacgaattcca

SEQ ID NO: 5369086 - DNA, 25 bp, Homo sapien
tcaagtcaaaaagtttattccatcc

SEQ ID NO: 5369087 - DNA, 25 bp, Homo sapien
tcaccttcacaatctagaagctgtt

SEQ ID NO: 5369088 - DNA, 25 bp, Homo sapien
tcttcaccttcacaatctagaagct

SEQ ID NO: 5369089 - DNA, 25 bp, Homo sapien
tccatcttcaccttcacaatctaga

SEQ ID NO: 5369090 - DNA, 25 bp, Homo sapien
aaaatatccctaaattgtcatcctg

SEQ ID NO: 5369091 - DNA, 25 bp, Homo sapien
tcagacaatagttatcagaaaactc

SEQ ID NO: 5369092 - DNA, 25 bp, Homo sapien
tccagaagggtaaatgagatgtcac

SEQ ID NO: 5369093 - DNA, 25 bp, Homo sapien
gcaaaaattgtatatcagacagaac

SEQ ID NO: 5369094 - DNA, 25 bp, Homo sapien
tagtttataaattgcaggacttcct

SEQ ID NO: 5369095 - DNA, 25 bp, Homo sapien
agtttataaattgcaggacttcctg

SEQ ID NO: 5369096 - DNA, 25 bp, Homo sapien
gagctttgggatccctctcttgcac

SEQ ID NO: 5369097 - DNA, 25 bp, Homo sapien
ctgtgagctttgggatccctctctt

SEQ ID NO: 5369098 - DNA, 25 bp, Homo sapien
cttgcacattaatgtaagtacatat

SEQ ID NO: 5369099 - DNA, 25 bp, Homo sapien
tgagctttgggatccctctcttgca

SEQ ID NO: 5369100 - DNA, 25 bp, Homo sapien
tagcaagatcatattctttagcttc

SEQ ID NO: 5369101 - DNA, 25 bp, Homo sapien
gctttgcaaaatagaatcctttcat

SEQ ID NO: 5369102 - DNA, 25 bp, Homo sapien
tacagctttgcaaaatagaatcctt

SEQ ID NO: 5369103 - DNA, 25 bp, Homo sapien
caaaatagaatcctttcattgactt

SEQ ID NO: 5369104 - DNA, 25 bp, Homo sapien
tggtcacacctttaattctatttaa

SEQ ID NO: 5369105 - DNA, 25 bp, Homo sapien
gcagttggtcacacctttaattcta

SEQ ID NO: 5369106 - DNA, 25 bp, Homo sapien
tgcagttggtcacacctttaattct

SEQ ID NO: 5369107 - DNA, 25 bp, Homo sapien
agttggtcacacctttaattctatt

SEQ ID NO: 5369108 - DNA, 25 bp, Homo sapien
ttcccgggtccatgtactgttctct

SEQ ID NO: 5369109 - DNA, 25 bp, Homo sapien
attcccgggtccatgtactgttctc

SEQ ID NO: 5369110 - DNA, 25 bp, Homo sapien
gattcccgggtccatgtactgttct

SEQ ID NO: 5369111 - DNA, 25 bp, Homo sapien
ggattcccgggtccatgtactgttc

SEQ ID NO: 5369112 - DNA, 25 bp, Homo sapien
ctcaatgccaggctaacacctgcaa

SEQ ID NO: 5369113 - DNA, 25 bp, Homo sapien
ggtgagagacttgtatgcttaaatt

SEQ ID NO: 5369114 - DNA, 25 bp, Homo sapien
tcctaagtcaaaaactcacctcttc

SEQ ID NO: 5369115 - DNA, 25 bp, Homo sapien
tcagcaaccccagtatatgatcttt

SEQ ID NO: 5369116 - DNA, 25 bp, Homo sapien
agatgcctaccttgtcactcgacgc

SEQ ID NO: 5369117 - DNA, 25 bp, Homo sapien
gggccattgcaaatgtccgcgctga

SEQ ID NO: 5369118 - DNA, 25 bp, Homo sapien
gggacagcgacaaacacctcatact

SEQ ID NO: 5369119 - DNA, 25 bp, Homo sapien
gagtggagctggacccttacaaagg

SEQ ID NO: 5369120 - DNA, 25 bp, Homo sapien
gacgtaccgctccacatcggccttg

SEQ ID NO: 5369121 - DNA, 25 bp, Homo sapien
gcgacgtaccgctccacatcggcct

SEQ ID NO: 5369122 - DNA, 25 bp, Homo sapien
cgacgtaccgctccacatcggcctt

SEQ ID NO: 5369123 - DNA, 25 bp, Homo sapien
gacgaacctgcgttctgcctcagca

SEQ ID NO: 5369124 - DNA, 25 bp, Homo sapien
acggaggcccactgtgacgaacctg

SEQ ID NO: 5369125 - DNA, 25 bp, Homo sapien
gagggtgtcttgacatgatcttatc

SEQ ID NO: 5369126 - DNA, 25 bp, Homo sapien
gaggcccactgtgacgagcgtgcgg

SEQ ID NO: 5369127 - DNA, 25 bp, Homo sapien
taaaatgtggtattattgggcacag

SEQ ID NO: 5369128 - DNA, 25 bp, Homo sapien
aaacttgtatacaggccaggcatag

SEQ ID NO: 5369129 - DNA, 25 bp, Homo sapien
acagacacacgtgcctgtaggccca

SEQ ID NO: 5369130 - DNA, 25 bp, Homo sapien
ttgcagctgcagtgatgctccttga

SEQ ID NO: 5369131 - DNA, 25 bp, Homo sapien
ctcagttcagctgtcaatctttggt

SEQ ID NO: 5369132 - DNA, 25 bp, Homo sapien
tgttgaacaggacgagatctatgca

SEQ ID NO: 5369133 - DNA, 25 bp, Homo sapien
gtcttcacaggactattcagttctg

SEQ ID NO: 5369134 - DNA, 25 bp, Homo sapien
taggttcaagccacaagttcccacc

SEQ ID NO: 5369135 - DNA, 25 bp, Homo sapien
ccacgatggccagctaatatttctg

SEQ ID NO: 5369136 - DNA, 25 bp, Homo sapien
gtaccaccatgccttgtctaaaata

SEQ ID NO: 5369137 - DNA, 25 bp, Homo sapien
caggtgtgatcagcctgtaccacca

SEQ ID NO: 5369138 - DNA, 25 bp, Homo sapien
cctgctgaggaataaaagtaaggaa

SEQ ID NO: 5369139 - DNA, 25 bp, Homo sapien
tatttccagtatcaagttaagcaca

SEQ ID NO: 5369140 - DNA, 25 bp, Homo sapien
tggtgatccactacagtaaagcctc

SEQ ID NO: 5369141 - DNA, 25 bp, Homo sapien
cgctaacaatgagcctcctgggaag

SEQ ID NO: 5369142 - DNA, 25 bp, Homo sapien
tcataacgcaggtaaacagtacaga

SEQ ID NO: 5369143 - DNA, 25 bp, Homo sapien
acaagttcctccaggaatatgcagg

SEQ ID NO: 5369144 - DNA, 25 bp, Homo sapien
taagcgattaccagaggcagaacag

SEQ ID NO: 5369145 - DNA, 25 bp, Homo sapien
cacctgaatagtgctggttggaaac

SEQ ID NO: 5369146 - DNA, 25 bp, Homo sapien
tgttccagcagatgttcatccccgt

SEQ ID NO: 5369147 - DNA, 25 bp, Homo sapien
gctgtgagcgtggcacaaagggata

SEQ ID NO: 5369148 - DNA, 25 bp, Homo sapien
ctgtgagcgtggcacaaagggatac

SEQ ID NO: 5369149 - DNA, 25 bp, Homo sapien
tgtgagcgtggcacaaagggatacc

SEQ ID NO: 5369150 - DNA, 25 bp, Homo sapien
gcagggctaagtcgaagctgtccat

SEQ ID NO: 5369151 - DNA, 25 bp, Homo sapien
gtgactcgaggtcccattcctggag

SEQ ID NO: 5369152 - DNA, 25 bp, Homo sapien
tggagcagggctaagtcgaagctgt

SEQ ID NO: 5369153 - DNA, 25 bp, Homo sapien
cacagtgactcgaggtcccattcct

SEQ ID NO: 5369154 - DNA, 25 bp, Homo sapien
ggccattcatgcaagtttcaaggac

SEQ ID NO: 5369155 - DNA, 25 bp, Homo sapien
ttgatgctggtaacaagaaccaatc

SEQ ID NO: 5369156 - DNA, 25 bp, Homo sapien
ttgtcatgcgtcttcaagatgtgcc

SEQ ID NO: 5369157 - DNA, 25 bp, Homo sapien
tatccccacaggttctttgtcatgc

SEQ ID NO: 5369158 - DNA, 25 bp, Homo sapien
ggtgaataagaccagggtctcatgg

SEQ ID NO: 5369159 - DNA, 25 bp, Homo sapien
tgaaggggtgaataagaccagggtc

SEQ ID NO: 5369160 - DNA, 25 bp, Homo sapien
actcactcccagatgaaggcttgga

SEQ ID NO: 5369161 - DNA, 25 bp, Homo sapien
tgaaggcttggaggtccatgaaggg

SEQ ID NO: 5369162 - DNA, 25 bp, Homo sapien
tggtgttcaaggtgctcttccccgg

SEQ ID NO: 5369163 - DNA, 25 bp, Homo sapien
ttaatttccagttccctggtgacat

SEQ ID NO: 5369164 - DNA, 25 bp, Homo sapien
tcaccagcattcgatgttatcagtg

SEQ ID NO: 5369165 - DNA, 25 bp, Homo sapien
gtcttccaaagtaatggtgctgctt

SEQ ID NO: 5369166 - DNA, 25 bp, Homo sapien
ctaatcggtgtttagtgatatgtaa

SEQ ID NO: 5369167 - DNA, 25 bp, Homo sapien
tcaagtatgatgatagctttagagt

SEQ ID NO: 5369168 - DNA, 25 bp, Homo sapien
agcgtctagtctctcatcaagtatg

SEQ ID NO: 5369169 - DNA, 25 bp, Homo sapien
gttctaatcttagggtgaaagcgtc

SEQ ID NO: 5369170 - DNA, 25 bp, Homo sapien
taacagttccagaagtacttttgtc

SEQ ID NO: 5369171 - DNA, 25 bp, Homo sapien
gggaatatttcatgtgagctggaga

SEQ ID NO: 5369172 - DNA, 25 bp, Homo sapien
gaatatgtaacctgctcttggatga

SEQ ID NO: 5369173 - DNA, 25 bp, Homo sapien
gaagtagtctctagatgtcaattag

SEQ ID NO: 5369174 - DNA, 25 bp, Homo sapien
ttttcttgattagcctgactaaagg

SEQ ID NO: 5369175 - DNA, 25 bp, Homo sapien
gacagactcacagctagtattgtac

SEQ ID NO: 5369176 - DNA, 25 bp, Homo sapien
ggaagtcttagctagagcaatcaag

SEQ ID NO: 5369177 - DNA, 25 bp, Homo sapien
tgacaaggatgcccagttttaccac

SEQ ID NO: 5369178 - DNA, 25 bp, Homo sapien
ctaatagaactgacaaacaaatcca

SEQ ID NO: 5369179 - DNA, 25 bp, Homo sapien
cttggcgaaggggtggtgaccgtca

SEQ ID NO: 5369180 - DNA, 25 bp, Homo sapien
agaagatggaatcgtggatgctgcc

SEQ ID NO: 5369181 - DNA, 25 bp, Homo sapien
tcttcatgattggtttgtgcatagt

SEQ ID NO: 5369182 - DNA, 25 bp, Homo sapien
ccatagaagatggaatcgtggatgc

SEQ ID NO: 5369183 - DNA, 25 bp, Homo sapien
tgccgggatacttccaaagccagtg

SEQ ID NO: 5369184 - DNA, 25 bp, Homo sapien
tgagaccagtacctcccaaatgtgg

SEQ ID NO: 5369185 - DNA, 25 bp, Homo sapien
tgtatggactcaaggctggaggcac

SEQ ID NO: 5369186 - DNA, 25 bp, Homo sapien
gaaggtgacttgacggaactgacag

SEQ ID NO: 5369187 - DNA, 25 bp, Homo sapien
gacacagggtgggaaataccacaca

SEQ ID NO: 5369188 - DNA, 25 bp, Homo sapien
taatgagagcgtggagaacaaagac

SEQ ID NO: 5369189 - DNA, 25 bp, Homo sapien
tcccatgggaggctatttgcagata

SEQ ID NO: 5369190 - DNA, 25 bp, Homo sapien
gagagcctgatctgtcctaatgaga

SEQ ID NO: 5369191 - DNA, 25 bp, Homo sapien
cctgaactgtgcataacctgggatt

SEQ ID NO: 5369192 - DNA, 25 bp, Homo sapien
taggaggaagcaattcactctgtcc

SEQ ID NO: 5369193 - DNA, 25 bp, Homo sapien
gaaggtcagtccaggctagaaggcc

SEQ ID NO: 5369194 - DNA, 25 bp, Homo sapien
tctggaatgggcaacacgatggctg

SEQ ID NO: 5369195 - DNA, 25 bp, Homo sapien
gcctgctatatagggaccttatggg

SEQ ID NO: 5369196 - DNA, 25 bp, Homo sapien
gaagcagcccaatcagcctgctata

SEQ ID NO: 5369197 - DNA, 25 bp, Homo sapien
ttctcacaaatgcttgcatcccaga

SEQ ID NO: 5369198 - DNA, 25 bp, Homo sapien
tctagagaatgctcatgtctgaatt

SEQ ID NO: 5369199 - DNA, 25 bp, Homo sapien
aaaaacaggtttaaagtgagcagat

SEQ ID NO: 5369200 - DNA, 25 bp, Homo sapien
tattccatgggatttatttttaaca

SEQ ID NO: 5369201 - DNA, 25 bp, Homo sapien
aacaggtttaaagtgagcagattca

SEQ ID NO: 5369202 - DNA, 25 bp, Homo sapien
gagcagattcatatttacagtgtga

SEQ ID NO: 5369203 - DNA, 25 bp, Homo sapien
ttttaaggactgtctatatccaaat

SEQ ID NO: 5369204 - DNA, 25 bp, Homo sapien
tttttaaggactgtctatatccaaa

SEQ ID NO: 5369205 - DNA, 25 bp, Homo sapien
gatgacaatctggaatattcaacat

SEQ ID NO: 5369206 - DNA, 25 bp, Homo sapien
tagggccctaatcttgttagtatag

SEQ ID NO: 5369207 - DNA, 25 bp, Homo sapien
ttttgccttaacaaatccaaagatg

SEQ ID NO: 5369208 - DNA, 25 bp, Homo sapien
ttctaagagcagtacaattagccta

SEQ ID NO: 5369209 - DNA, 25 bp, Homo sapien
tacaatgcagcaagtatggaaacac

SEQ ID NO: 5369210 - DNA, 25 bp, Homo sapien
gccttcaatatgcaggataacccca

SEQ ID NO: 5369211 - DNA, 25 bp, Homo sapien
tgcaccaggaccaagtagacaggtt

SEQ ID NO: 5369212 - DNA, 25 bp, Homo sapien
ccacaggcttggacagtttagtata

SEQ ID NO: 5369213 - DNA, 25 bp, Homo sapien
ggaagagctcttgcctaatcatgaa

SEQ ID NO: 5369214 - DNA, 25 bp, Homo sapien
taatgaatatgcaggtaccaaatac

SEQ ID NO: 5369215 - DNA, 25 bp, Homo sapien
gcatgtttttatgcctcaaaaaaga

SEQ ID NO: 5369216 - DNA, 25 bp, Homo sapien
ccatccatgttgacaggaagagctc

SEQ ID NO: 5369217 - DNA, 25 bp, Homo sapien
aagagcatgcaatatactgttgcag

SEQ ID NO: 5369218 - DNA, 25 bp, Homo sapien
catgtaagtgccaaagagcatgcaa

SEQ ID NO: 5369219 - DNA, 25 bp, Homo sapien
tctaaaaagaccttcaggcttacac

SEQ ID NO: 5369220 - DNA, 25 bp, Homo sapien
actgttgcagcaaccccaaagtaat

SEQ ID NO: 5369221 - DNA, 25 bp, Homo sapien
tatctatactctgacccaggtcaat

SEQ ID NO: 5369222 - DNA, 25 bp, Homo sapien
gtagttccatggtttgttgctgagc

SEQ ID NO: 5369223 - DNA, 25 bp, Homo sapien
agtgccaagccagcagataaatcat

SEQ ID NO: 5369224 - DNA, 25 bp, Homo sapien
cactttgctgtgaatatagttcctt

SEQ ID NO: 5369225 - DNA, 25 bp, Homo sapien
tcacagtcatgcacttgctcaatca

SEQ ID NO: 5369226 - DNA, 25 bp, Homo sapien
tgtaaagcattctcatagcaaaaga

SEQ ID NO: 5369227 - DNA, 25 bp, Homo sapien
ccaagtatgaaattgtctggtttaa

SEQ ID NO: 5369228 - DNA, 25 bp, Homo sapien
caaaagagatgacaagaccttgagg

SEQ ID NO: 5369229 - DNA, 25 bp, Homo sapien
cactccacaaaagccccaaccacaa

SEQ ID NO: 5369230 - DNA, 25 bp, Homo sapien
aagtacgtgcaaggtacaagccaaa

SEQ ID NO: 5369231 - DNA, 25 bp, Homo sapien
cacaaaagtacgtgcaaggtacaag

SEQ ID NO: 5369232 - DNA, 25 bp, Homo sapien
caaaagtacgtgcaaggtacaagcc

SEQ ID NO: 5369233 - DNA, 25 bp, Homo sapien
tagagctctcctactaatacactgc

SEQ ID NO: 5369234 - DNA, 25 bp, Homo sapien
cataaacatgtgctgcatagatggc

SEQ ID NO: 5369235 - DNA, 25 bp, Homo sapien
ggctttagtctttccatcaactggg

SEQ ID NO: 5369236 - DNA, 25 bp, Homo sapien
taataatgttccatagctgtagagc

SEQ ID NO: 5369237 - DNA, 25 bp, Homo sapien
ctgcaaatcaggtatgtgaaattca

SEQ ID NO: 5369238 - DNA, 25 bp, Homo sapien
gtgaaattcatatccaatctcgtat

SEQ ID NO: 5369239 - DNA, 25 bp, Homo sapien
tcaggtatgtgaaattcatatccaa

SEQ ID NO: 5369240 - DNA, 25 bp, Homo sapien
atgtgaaattcatatccaatctcgt

SEQ ID NO: 5369241 - DNA, 25 bp, Homo sapien
tgaaaaatgatagcaataaagcaac

SEQ ID NO: 5369242 - DNA, 25 bp, Homo sapien
ctgaaaaatgatagcaataaagcaa

SEQ ID NO: 5369243 - DNA, 25 bp, Homo sapien
aaaaatgatagcaataaagcaacct

SEQ ID NO: 5369244 - DNA, 25 bp, Homo sapien
gaaaaatgatagcaataaagcaacc

SEQ ID NO: 5369245 - DNA, 25 bp, Homo sapien
tagcttcgtacacctgggcaaaggc

SEQ ID NO: 5369246 - DNA, 25 bp, Homo sapien
ctgggtagcttcgtacacctgggca

SEQ ID NO: 5369247 - DNA, 25 bp, Homo sapien
gggtagcttcgtacacctgggcaaa

SEQ ID NO: 5369248 - DNA, 25 bp, Homo sapien
ctccctgggtagcttcgtacacctg

SEQ ID NO: 5369249 - DNA, 25 bp, Homo sapien
tagtcatcatgtccacttagccact

SEQ ID NO: 5369250 - DNA, 25 bp, Homo sapien
tccaaagagtactagtcaggtatgt

SEQ ID NO: 5369251 - DNA, 25 bp, Homo sapien
gtatacttcgcatccactgtctgca

SEQ ID NO: 5369252 - DNA, 25 bp, Homo sapien
tcaatcaaccaaagtagtatgctcc

SEQ ID NO: 5369253 - DNA, 25 bp, Homo sapien
tcatttctgacagagcagacttcag

SEQ ID NO: 5369254 - DNA, 25 bp, Homo sapien
tgctatgttccctggctaatctgaa

SEQ ID NO: 5369255 - DNA, 25 bp, Homo sapien
gacataatgtgtataagcctaacaa

SEQ ID NO: 5369256 - DNA, 25 bp, Homo sapien
caattatcagcatagaaaatggcgt

SEQ ID NO: 5369257 - DNA, 25 bp, Homo sapien
aagtatttggataggaactcactgg

SEQ ID NO: 5369258 - DNA, 25 bp, Homo sapien
aaatcagcttatcatcccatgggtt

SEQ ID NO: 5369259 - DNA, 25 bp, Homo sapien
gaactcactggtttagaaagcccag

SEQ ID NO: 5369260 - DNA, 25 bp, Homo sapien
ttcagtcttgggcttgatggctgga

SEQ ID NO: 5369261 - DNA, 25 bp, Homo sapien
cactcaactggaacggctagattct

SEQ ID NO: 5369262 - DNA, 25 bp, Homo sapien
catggttaacactcactcagcgcta

SEQ ID NO: 5369263 - DNA, 25 bp, Homo sapien
caaagggaatcaactctaggtgcat

SEQ ID NO: 5369264 - DNA, 25 bp, Homo sapien
tagggatacatgtcttaagggcaga

SEQ ID NO: 5369265 - DNA, 25 bp, Homo sapien
gattcaagggcataacaaagagtga

SEQ ID NO: 5369266 - DNA, 25 bp, Homo sapien
cataacaaagagtgagtgttcgtac

SEQ ID NO: 5369267 - DNA, 25 bp, Homo sapien
tgggtttctttcatgggacagcttt

SEQ ID NO: 5369268 - DNA, 25 bp, Homo sapien
gtgggtttctttcatgggacagctt

SEQ ID NO: 5369269 - DNA, 25 bp, Homo sapien
agtctgcaagcctcaacgcccaact

SEQ ID NO: 5369270 - DNA, 25 bp, Homo sapien
agtcccaagtgaactcatctgcatc

SEQ ID NO: 5369271 - DNA, 25 bp, Homo sapien
cttctgcaatggcagcgtcagtgtc

SEQ ID NO: 5369272 - DNA, 25 bp, Homo sapien
caggctggctcagacgaagtaagga

SEQ ID NO: 5369273 - DNA, 25 bp, Homo sapien
ctgaatacatgtgagacgacaaggc

SEQ ID NO: 5369274 - DNA, 25 bp, Homo sapien
tacatgtgagacgacaaggcctgtt

SEQ ID NO: 5369275 - DNA, 25 bp, Homo sapien
aatacatgtgagacgacaaggcctg

SEQ ID NO: 5369276 - DNA, 25 bp, Homo sapien
tgtgagacgacaaggcctgttttgg

SEQ ID NO: 5369277 - DNA, 25 bp, Homo sapien
ggatcataatggagccgaaaacctc

SEQ ID NO: 5369278 - DNA, 25 bp, Homo sapien
caatggtggccccataggatcataa

SEQ ID NO: 5369279 - DNA, 25 bp, Homo sapien
gaaaacctccagtctcctagtgatg

SEQ ID NO: 5369280 - DNA, 25 bp, Homo sapien
tgaccctgggtgtgtaggcctcagc

SEQ ID NO: 5369281 - DNA, 25 bp, Homo sapien
caagaatccaaagtcgcctgggtac

SEQ ID NO: 5369282 - DNA, 25 bp, Homo sapien
tccaaagtcgcctgggtacactgtt

SEQ ID NO: 5369283 - DNA, 25 bp, Homo sapien
tttcctcacaagaatccaaagtcgc

SEQ ID NO: 5369284 - DNA, 25 bp, Homo sapien
atcccttgaaggcaccaccatgttt

SEQ ID NO: 5369285 - DNA, 25 bp, Homo sapien
cactggaagcttgtggaatggtgta

SEQ ID NO: 5369286 - DNA, 25 bp, Homo sapien
gaatggtgtagacgcaagttgtgca

SEQ ID NO: 5369287 - DNA, 25 bp, Homo sapien
cagggttttgttgcagcgaataccc

SEQ ID NO: 5369288 - DNA, 25 bp, Homo sapien
ccccatacagttgagtcatccaaaa

SEQ ID NO: 5369289 - DNA, 25 bp, Homo sapien
tgctgacagagcgttctccaaaggt

SEQ ID NO: 5369290 - DNA, 25 bp, Homo sapien
tggttttgaaggaagtctgctgaca

SEQ ID NO: 5369291 - DNA, 25 bp, Homo sapien
gacagagcgttctccaaaggtcctg

SEQ ID NO: 5369292 - DNA, 25 bp, Homo sapien
gtctgctgacagagcgttctccaaa

SEQ ID NO: 5369293 - DNA, 25 bp, Homo sapien
ctgtgggtttatttttaggctgtgg

SEQ ID NO: 5369294 - DNA, 25 bp, Homo sapien
gaagagatgatcttattgactcccc

SEQ ID NO: 5369295 - DNA, 25 bp, Homo sapien
gatgatcttattgactccccaagcc

SEQ ID NO: 5369296 - DNA, 25 bp, Homo sapien
aagaagagatgatcttattgactcc

SEQ ID NO: 5369297 - DNA, 25 bp, Homo sapien
gagatgatcttattgactccccaag

SEQ ID NO: 5369298 - DNA, 25 bp, Homo sapien
cctgcctttatgtgacaagctaatc

SEQ ID NO: 5369299 - DNA, 25 bp, Homo sapien
cacattgagtaccttgtcaagaact

SEQ ID NO: 5369300 - DNA, 25 bp, Homo sapien
caagctaatcaagggcagggtcacc

SEQ ID NO: 5369301 - DNA, 25 bp, Homo sapien
tgtgataaccacctataatgctatg

SEQ ID NO: 5369302 - DNA, 25 bp, Homo sapien
tgtaggagcctgaaacatattcatg

SEQ ID NO: 5369303 - DNA, 25 bp, Homo sapien
caggaagtgtaggagcctgaaacat

SEQ ID NO: 5369304 - DNA, 25 bp, Homo sapien
agtgtaggagcctgaaacatattca

SEQ ID NO: 5369305 - DNA, 25 bp, Homo sapien
ggaagtgtaggagcctgaaacatat

SEQ ID NO: 5369306 - DNA, 25 bp, Homo sapien
gctacacactcagataaaatacttt

SEQ ID NO: 5369307 - DNA, 25 bp, Homo sapien
tcattaacttgtcatcaggtgctac

SEQ ID NO: 5369308 - DNA, 25 bp, Homo sapien
ggtgctacacactcagataaaatac

SEQ ID NO: 5369309 - DNA, 25 bp, Homo sapien
taacttgtcatcaggtgctacacac

SEQ ID NO: 5369310 - DNA, 25 bp, Homo sapien
gatggcgttgcctgaaccattccca

SEQ ID NO: 5369311 - DNA, 25 bp, Homo sapien
tgcactttggatggcgttgcctgaa

SEQ ID NO: 5369312 - DNA, 25 bp, Homo sapien
tgaaaagaacttgtgttggcaacct

SEQ ID NO: 5369313 - DNA, 25 bp, Homo sapien
cttcttttgtgtgcacggtgggtga

SEQ ID NO: 5369314 - DNA, 25 bp, Homo sapien
ctaatggcatggtagctccctaact

SEQ ID NO: 5369315 - DNA, 25 bp, Homo sapien
tgcagtcaggcatagaatacaaggc

SEQ ID NO: 5369316 - DNA, 25 bp, Homo sapien
gaagtgaaagcccaacctgtgcatc

SEQ ID NO: 5369317 - DNA, 25 bp, Homo sapien
cagagcaggctcagtaagtcttggt

SEQ ID NO: 5369318 - DNA, 25 bp, Homo sapien
tctgtggcttgaattcatgagtact

SEQ ID NO: 5369319 - DNA, 25 bp, Homo sapien
tggaagagaaaactcttgagacaca

SEQ ID NO: 5369320 - DNA, 25 bp, Homo sapien
ctggaagagaaaactcttgagacac

SEQ ID NO: 5369321 - DNA, 25 bp, Homo sapien
aataaaatgcttgatctaggctggg

SEQ ID NO: 5369322 - DNA, 25 bp, Homo sapien
agagaataaaatgcttgatctaggc

SEQ ID NO: 5369323 - DNA, 25 bp, Homo sapien
ctagagaataaaatgcttgatctag

SEQ ID NO: 5369324 - DNA, 25 bp, Homo sapien
agaataaaatgcttgatctaggctg

SEQ ID NO: 5369325 - DNA, 25 bp, Homo sapien
taagcctaaaggattgggagcaatg

SEQ ID NO: 5369326 - DNA, 25 bp, Homo sapien
taaagaaggtgacaggtgccactca

SEQ ID NO: 5369327 - DNA, 25 bp, Homo sapien
tgcagaggtacattttgagagacag

SEQ ID NO: 5369328 - DNA, 25 bp, Homo sapien
caaactgctctctatgggaagacag

SEQ ID NO: 5369329 - DNA, 25 bp, Homo sapien
catttgccaaaggaggaacaacagg

SEQ ID NO: 5369330 - DNA, 25 bp, Homo sapien
gaacaggaggagcaatgctctggct

SEQ ID NO: 5369331 - DNA, 25 bp, Homo sapien
ctgcagaaatagcatttgccaaagg

SEQ ID NO: 5369332 - DNA, 25 bp, Homo sapien
caggaggtgcctctcttgggttctt

SEQ ID NO: 5369333 - DNA, 25 bp, Homo sapien
ttcactggtgtctgctgataggtta

SEQ ID NO: 5369334 - DNA, 25 bp, Homo sapien
gttcactggtgtctgctgataggtt

SEQ ID NO: 5369335 - DNA, 25 bp, Homo sapien
gaagacatggcgctctcagttcctg

SEQ ID NO: 5369336 - DNA, 25 bp, Homo sapien
ggaagacatggcgctctcagttcct

SEQ ID NO: 5369337 - DNA, 25 bp, Homo sapien
aagacatggcgctctcagttcctgc

SEQ ID NO: 5369338 - DNA, 25 bp, Homo sapien
gtccagaatactactaatcaggcat

SEQ ID NO: 5369339 - DNA, 25 bp, Homo sapien
gaatactactaatcaggcattacat

SEQ ID NO: 5369340 - DNA, 25 bp, Homo sapien
ccatgaagtccagaatactactaat

SEQ ID NO: 5369341 - DNA, 25 bp, Homo sapien
tactactaatcaggcattacatctt

SEQ ID NO: 5369342 - DNA, 25 bp, Homo sapien
gaaagtgtgccttcgaaatgaggac

SEQ ID NO: 5369343 - DNA, 25 bp, Homo sapien
taaggagagataacgacatgggaac

SEQ ID NO: 5369344 - DNA, 25 bp, Homo sapien
caatttcttgcaactatccagggaa

SEQ ID NO: 5369345 - DNA, 25 bp, Homo sapien
cacagtccgaagtttatagagggca

SEQ ID NO: 5369346 - DNA, 25 bp, Homo sapien
aagcgggcagatcctcatgggatgt

SEQ ID NO: 5369347 - DNA, 25 bp, Homo sapien
tcggacctttcctgggaagcgggca

SEQ ID NO: 5369348 - DNA, 25 bp, Homo sapien
gtctccaccacctgatgcaacttct

SEQ ID NO: 5369349 - DNA, 25 bp, Homo sapien
caccacctgatgcaacttcttatga

SEQ ID NO: 5369350 - DNA, 25 bp, Homo sapien
caacctgctcaacatcaactttgga

SEQ ID NO: 5369351 - DNA, 25 bp, Homo sapien
tttggatgccaaagatgagtgcaca

SEQ ID NO: 5369352 - DNA, 25 bp, Homo sapien
cgaataagcttctccttgcaataca

SEQ ID NO: 5369353 - DNA, 25 bp, Homo sapien
tagaaatcgtgatcactcttcgttc

SEQ ID NO: 5369354 - DNA, 25 bp, Homo sapien
tatcacaagctgaagatatcactcc

SEQ ID NO: 5369355 - DNA, 25 bp, Homo sapien
caagctgaagatatcactccagaaa

SEQ ID NO: 5369356 - DNA, 25 bp, Homo sapien
ctgaagatatcactccagaaagctc

SEQ ID NO: 5369357 - DNA, 25 bp, Homo sapien
ctttatcacaagctgaagatatcac

SEQ ID NO: 5369358 - DNA, 25 bp, Homo sapien
gaatcagacactggaagcatgtccc

SEQ ID NO: 5369359 - DNA, 25 bp, Homo sapien
tagggatttccagagcctatgcaga

SEQ ID NO: 5369360 - DNA, 25 bp, Homo sapien
gaggtagcgaggtcccaagtttgaa

SEQ ID NO: 5369361 - DNA, 25 bp, Homo sapien
tacttgaggtaacaggcagcaatct

SEQ ID NO: 5369362 - DNA, 25 bp, Homo sapien
cacaagctacaaatgtcattattac

SEQ ID NO: 5369363 - DNA, 25 bp, Homo sapien
aatgagatgtcaaagtggatgtaga

SEQ ID NO: 5369364 - DNA, 25 bp, Homo sapien
tgagggcctctgggttagacaacaa

SEQ ID NO: 5369365 - DNA, 25 bp, Homo sapien
caacaaattgtatttgaggtgagct

SEQ ID NO: 5369366 - DNA, 25 bp, Homo sapien
agaaatgcaggccatgttatttcct

SEQ ID NO: 5369367 - DNA, 25 bp, Homo sapien
aacctgaacattatgcagaggttct

SEQ ID NO: 5369368 - DNA, 25 bp, Homo sapien
cctgaacattatgcagaggttctga

SEQ ID NO: 5369369 - DNA, 25 bp, Homo sapien
tgaacattatgcagaggttctgagg

SEQ ID NO: 5369370 - DNA, 25 bp, Homo sapien
gggtttcagtgaggcgtgtctgaaa

SEQ ID NO: 5369371 - DNA, 25 bp, Homo sapien
tgggtttcagtgaggcgtgtctgaa

SEQ ID NO: 5369372 - DNA, 25 bp, Homo sapien
gtttcagtgaggcgtgtctgaaata

SEQ ID NO: 5369373 - DNA, 25 bp, Homo sapien
ttcagtgaggcgtgtctgaaataac

SEQ ID NO: 5369374 - DNA, 25 bp, Homo sapien
aactcaaaaaattgatggaggtcac

SEQ ID NO: 5369375 - DNA, 25 bp, Homo sapien
tacagaggggatgacagggttccaa

SEQ ID NO: 5369376 - DNA, 25 bp, Homo sapien
atcccatggttgtacagaaactcaa

SEQ ID NO: 5369377 - DNA, 25 bp, Homo sapien
ttgcaggaactctctgggttcagcc

SEQ ID NO: 5369378 - DNA, 25 bp, Homo sapien
tctagtaaagttatcaagtattctt

SEQ ID NO: 5369379 - DNA, 25 bp, Homo sapien
agtaaagttatcaagtattctttat

SEQ ID NO: 5369380 - DNA, 25 bp, Homo sapien
ctagtaaagttatcaagtattcttt

SEQ ID NO: 5369381 - DNA, 25 bp, Homo sapien
aatcttgggtcattgtggtatttct

SEQ ID NO: 5369382 - DNA, 25 bp, Homo sapien
caccaagagggtcattgcccttgta

SEQ ID NO: 5369383 - DNA, 25 bp, Homo sapien
ttcaccaagagggtcattgcccttg

SEQ ID NO: 5369384 - DNA, 25 bp, Homo sapien
ccaagagggtcattgcccttgtagc

SEQ ID NO: 5369385 - DNA, 25 bp, Homo sapien
aagagggtcattgcccttgtagctc

SEQ ID NO: 5369386 - DNA, 25 bp, Homo sapien
tgaaggacattttccggggtgtcca

SEQ ID NO: 5369387 - DNA, 25 bp, Homo sapien
gcgcagccgcagtcggctcgccgaa

SEQ ID NO: 5369388 - DNA, 25 bp, Homo sapien
tcggctcgccgaacgtttcagggcg

SEQ ID NO: 5369389 - DNA, 25 bp, Homo sapien
gccgcagtcggctcgccgaacgttt

SEQ ID NO: 5369390 - DNA, 25 bp, Homo sapien
ccgccgattcgaataccccgcgcag

SEQ ID NO: 5369391 - DNA, 25 bp, Homo sapien
cttgagctcgctaggttttatttct

SEQ ID NO: 5369392 - DNA, 25 bp, Homo sapien
cctccttgagctcgctaggttttat

SEQ ID NO: 5369393 - DNA, 25 bp, Homo sapien
cttcagggtttgtgtctattgcttt

SEQ ID NO: 5369394 - DNA, 25 bp, Homo sapien
tgctttttgcgcaggtgccgggaga

SEQ ID NO: 5369395 - DNA, 25 bp, Homo sapien
gagcgtctccggcacttgcagagtc

SEQ ID NO: 5369396 - DNA, 25 bp, Homo sapien
aagctggagcgtctccggcacttgc

SEQ ID NO: 5369397 - DNA, 25 bp, Homo sapien
tggccttcgaatgctggggagcatc

SEQ ID NO: 5369398 - DNA, 25 bp, Homo sapien
ccttcgaatgctggggagcatcctc

SEQ ID NO: 5369399 - DNA, 25 bp, Homo sapien
tcagtgtccacttggactttgcaac

SEQ ID NO: 5369400 - DNA, 25 bp, Homo sapien
gagacaaggctggaatgactaccag

SEQ ID NO: 5369401 - DNA, 25 bp, Homo sapien
tggaatgactaccagatgcaccagt

SEQ ID NO: 5369402 - DNA, 25 bp, Homo sapien
ctgtaagcccaacagagacaaggct

SEQ ID NO: 5369403 - DNA, 25 bp, Homo sapien
ccagatgcaccagtcatgggtgcca

SEQ ID NO: 5369404 - DNA, 25 bp, Homo sapien
tggaagcagagcttgtggctgccat

SEQ ID NO: 5369405 - DNA, 25 bp, Homo sapien
cctggaagcagagcttgtggctgcc

SEQ ID NO: 5369406 - DNA, 25 bp, Homo sapien
ctggaagcagagcttgtggctgcca

SEQ ID NO: 5369407 - DNA, 25 bp, Homo sapien
aactggcttgggttggttattactg

SEQ ID NO: 5369408 - DNA, 25 bp, Homo sapien
cttccataaactggcttgggttggt

SEQ ID NO: 5369409 - DNA, 25 bp, Homo sapien
actggcttgggttggttattactgg

SEQ ID NO: 5369410 - DNA, 25 bp, Homo sapien
cataaactggcttgggttggttatt

SEQ ID NO: 5369411 - DNA, 25 bp, Homo sapien
ccctggtgccaacactgcacgtgga

SEQ ID NO: 5369412 - DNA, 25 bp, Homo sapien
ctaacatgggcactcttttcccctg

SEQ ID NO: 5369413 - DNA, 25 bp, Homo sapien
ggaacagaagatccctaggacccat

SEQ ID NO: 5369414 - DNA, 25 bp, Homo sapien
tctccatcgggtggaaggcacctag

SEQ ID NO: 5369415 - DNA, 25 bp, Homo sapien
tagtatgtcctaccccaatgtgctg

SEQ ID NO: 5369416 - DNA, 25 bp, Homo sapien
caagcactcgtgttgtgagcctcaa

SEQ ID NO: 5369417 - DNA, 25 bp, Homo sapien
tgtccttggagacgctgcacacctt

SEQ ID NO: 5369418 - DNA, 25 bp, Homo sapien
taagtacagttcacagttgcgcagt

SEQ ID NO: 5369419 - DNA, 25 bp, Homo sapien
catccaactcttgtaaaaccttggg

SEQ ID NO: 5369420 - DNA, 25 bp, Homo sapien
actttcgctaatgatccactccctg

SEQ ID NO: 5369421 - DNA, 25 bp, Homo sapien
gggcccagtcagatgcccagtctgc

SEQ ID NO: 5369422 - DNA, 25 bp, Homo sapien
ccttgggagtccctgtacagtttct

SEQ ID NO: 5369423 - DNA, 25 bp, Homo sapien
tgactcaggtgacacagcaatacac

SEQ ID NO: 5369424 - DNA, 25 bp, Homo sapien
cagtcttaactgaaacactctgata

SEQ ID NO: 5369425 - DNA, 25 bp, Homo sapien
ccagaatctttgctatgtgttttca

SEQ ID NO: 5369426 - DNA, 25 bp, Homo sapien
tttcaaagaattgcctcattcagtc

SEQ ID NO: 5369427 - DNA, 25 bp, Homo sapien
ctctaggtggtgagagtataagcga

SEQ ID NO: 5369428 - DNA, 25 bp, Homo sapien
tgtgtccttatcctacattccttga

SEQ ID NO: 5369429 - DNA, 25 bp, Homo sapien
aaaaacttacatatccccttgccag

SEQ ID NO: 5369430 - DNA, 25 bp, Homo sapien
tctggctgacattaatggccaatat

SEQ ID NO: 5369431 - DNA, 25 bp, Homo sapien
gggcttgttagaggcaaacacatac

SEQ ID NO: 5369432 - DNA, 25 bp, Homo sapien
caaacacatactcatggttttgcat

SEQ ID NO: 5369433 - DNA, 25 bp, Homo sapien
tagagggcttgttagaggcaaacac

SEQ ID NO: 5369434 - DNA, 25 bp, Homo sapien
tgcattagagggcttgttagaggca

SEQ ID NO: 5369435 - DNA, 25 bp, Homo sapien
ctgttgttacccatgagatcatagc

SEQ ID NO: 5369436 - DNA, 25 bp, Homo sapien
tgctgttgggaggataaaaccttga

SEQ ID NO: 5369437 - DNA, 25 bp, Homo sapien
tcatagccagcgatgctgttgggag

SEQ ID NO: 5369438 - DNA, 25 bp, Homo sapien
ccatgagatcatagccagcgatgct

SEQ ID NO: 5369439 - DNA, 25 bp, Homo sapien
tatggcaaaatggacattgctggtg

SEQ ID NO: 5369440 - DNA, 25 bp, Homo sapien
gatggaacgatgaaagcagagcttg

SEQ ID NO: 5369441 - DNA, 25 bp, Homo sapien
ccatgggtcccatgtaaacaagtcc

SEQ ID NO: 5369442 - DNA, 25 bp, Homo sapien
ccctagtaccggagagtgtgtttct

SEQ ID NO: 5369443 - DNA, 25 bp, Homo sapien
ggctaacatttccttgagtatttaa

SEQ ID NO: 5369444 - DNA, 25 bp, Homo sapien
tccccagcaaagtagcctctggaag

SEQ ID NO: 5369445 - DNA, 25 bp, Homo sapien
tctggaagggaacggctaacatttc

SEQ ID NO: 5369446 - DNA, 25 bp, Homo sapien
tagcctctggaagggaacggctaac

SEQ ID NO: 5369447 - DNA, 25 bp, Homo sapien
gaagctacagtctaatgtggccagg

SEQ ID NO: 5369448 - DNA, 25 bp, Homo sapien
cagccatcatttagggacctgatag

SEQ ID NO: 5369449 - DNA, 25 bp, Homo sapien
taaggatgctccatgatacagcctg

SEQ ID NO: 5369450 - DNA, 25 bp, Homo sapien
cagttgtccttggtcctgtctaggg

SEQ ID NO: 5369451 - DNA, 25 bp, Homo sapien
gttggagccatggtaagagtcataa

SEQ ID NO: 5369452 - DNA, 25 bp, Homo sapien
caaggaaggttagttatcatcctgc

SEQ ID NO: 5369453 - DNA, 25 bp, Homo sapien
tacaagatgcattgggttggagcca

SEQ ID NO: 5369454 - DNA, 25 bp, Homo sapien
tacagatgcacacgcacatatagac

SEQ ID NO: 5369455 - DNA, 25 bp, Homo sapien
gggtgccccagcagatgacttctgt

SEQ ID NO: 5369456 - DNA, 25 bp, Homo sapien
ggtgccccagcagatgacttctgtt

SEQ ID NO: 5369457 - DNA, 25 bp, Homo sapien
aaatgatcgagggtgcttttgctcc

SEQ ID NO: 5369458 - DNA, 25 bp, Homo sapien
tgctccagtgtctttgtacggtggc

SEQ ID NO: 5369459 - DNA, 25 bp, Homo sapien
tactcttgtctagttgtgccctgcc

SEQ ID NO: 5369460 - DNA, 25 bp, Homo sapien
caccaatgtagtgccaggtagcacc

SEQ ID NO: 5369461 - DNA, 25 bp, Homo sapien
agtgggcctgaactcgtggtgatca

SEQ ID NO: 5369462 - DNA, 25 bp, Homo sapien
taaagtaagctccatagtgaacata

SEQ ID NO: 5369463 - DNA, 25 bp, Homo sapien
ggaatggtaacatcataaagtaagc

SEQ ID NO: 5369464 - DNA, 25 bp, Homo sapien
tggtgaggctccaaggcttgccctt

SEQ ID NO: 5369465 - DNA, 25 bp, Homo sapien
aaacgtaagtctctgattgctgatg

SEQ ID NO: 5369466 - DNA, 25 bp, Homo sapien
tgcaaacgtaagtctctgattgctg

SEQ ID NO: 5369467 - DNA, 25 bp, Homo sapien
tctttttgcaaacgtaagtctctga

SEQ ID NO: 5369468 - DNA, 25 bp, Homo sapien
tgaactgttctttttgcaaacgtaa

SEQ ID NO: 5369469 - DNA, 25 bp, Homo sapien
ttgcttgattggcaagagcacattg

SEQ ID NO: 5369470 - DNA, 25 bp, Homo sapien
tgtgatgtccgtgtcgcagatggaa

SEQ ID NO: 5369471 - DNA, 25 bp, Homo sapien
tccgtgtcgcagatggaattgttct

SEQ ID NO: 5369472 - DNA, 25 bp, Homo sapien
gttctagttgcttgattggcaagag

SEQ ID NO: 5369473 - DNA, 25 bp, Homo sapien
catgtgacctgctcacggactgaca

SEQ ID NO: 5369474 - DNA, 25 bp, Homo sapien
gcatgtgacctgctcacggactgac

SEQ ID NO: 5369475 - DNA, 25 bp, Homo sapien
atgtgacctgctcacggactgacat

SEQ ID NO: 5369476 - DNA, 25 bp, Homo sapien
agcatgtgacctgctcacggactga

SEQ ID NO: 5369477 - DNA, 25 bp, Homo sapien
ctttagattctaaatctaagaccag

SEQ ID NO: 5369478 - DNA, 25 bp, Homo sapien
gggcgtcaggaccaagagagatggt

SEQ ID NO: 5369479 - DNA, 25 bp, Homo sapien
gattctaaatctaagaccagatttg

SEQ ID NO: 5369480 - DNA, 25 bp, Homo sapien
ctttggcatcaagatttgagacttt

SEQ ID NO: 5369481 - DNA, 25 bp, Homo sapien
ttgatgttcattccccactgtttgg

SEQ ID NO: 5369482 - DNA, 25 bp, Homo sapien
cagataacagctctcggggccccat

SEQ ID NO: 5369483 - DNA, 25 bp, Homo sapien
gaggtttttgggtggaatccacaca

SEQ ID NO: 5369484 - DNA, 25 bp, Homo sapien
tgacagctgggtaacccccagaagt

SEQ ID NO: 5369485 - DNA, 25 bp, Homo sapien
gacaccggggagctctctggtcagg

SEQ ID NO: 5369486 - DNA, 25 bp, Homo sapien
tatttctgttgagagggacaccggg

SEQ ID NO: 5369487 - DNA, 25 bp, Homo sapien
gggctaccaaggtcttgctcgtatt

SEQ ID NO: 5369488 - DNA, 25 bp, Homo sapien
ctcgtatttctgttgagagggacac

SEQ ID NO: 5369489 - DNA, 25 bp, Homo sapien
gttcctcctccagagaacaagcttc

SEQ ID NO: 5369490 - DNA, 25 bp, Homo sapien
tcctcctccagagaacaagcttctt

SEQ ID NO: 5369491 - DNA, 25 bp, Homo sapien
tcctccagagaacaagcttctttgt

SEQ ID NO: 5369492 - DNA, 25 bp, Homo sapien
aatgttcctcctccagagaacaagc

SEQ ID NO: 5369493 - DNA, 25 bp, Homo sapien
tgggtccagagtgccgggcctcggg

SEQ ID NO: 5369494 - DNA, 25 bp, Homo sapien
gtccagagtgccgggcctcgggcgg

SEQ ID NO: 5369495 - DNA, 25 bp, Homo sapien
gggtccagagtgccgggcctcgggc

SEQ ID NO: 5369496 - DNA, 25 bp, Homo sapien
ctgggtccagagtgccgggcctcgg

SEQ ID NO: 5369497 - DNA, 25 bp, Homo sapien
tgctgttgacggcagccggctgcat

SEQ ID NO: 5369498 - DNA, 25 bp, Homo sapien
gggctttgccagtggtgaaacccga

SEQ ID NO: 5369499 - DNA, 25 bp, Homo sapien
tccaacttgtggaatcgtattttag

SEQ ID NO: 5369500 - DNA, 25 bp, Homo sapien
tggtgaaacccgattccatttccaa

SEQ ID NO: 5369501 - DNA, 25 bp, Homo sapien
gctttggagagagagactcgagttc

SEQ ID NO: 5369502 - DNA, 25 bp, Homo sapien
caagcacatgtgtagaagagcactc

SEQ ID NO: 5369503 - DNA, 25 bp, Homo sapien
ttcagtgcagagaccaggagctttg

SEQ ID NO: 5369504 - DNA, 25 bp, Homo sapien
catgtctaggtgatctgctgcaagt

SEQ ID NO: 5369505 - DNA, 25 bp, Homo sapien
tgtccatgtagtgtcgtgagactgg

SEQ ID NO: 5369506 - DNA, 25 bp, Homo sapien
cacctccacgggctttgtgaaaggg

SEQ ID NO: 5369507 - DNA, 25 bp, Homo sapien
tcaaagcctctgaacggctccgggt

SEQ ID NO: 5369508 - DNA, 25 bp, Homo sapien
cagatggcggaagcataaaaggcac

SEQ ID NO: 5369509 - DNA, 25 bp, Homo sapien
cttttagaatagtgaggccttcgaa

SEQ ID NO: 5369510 - DNA, 25 bp, Homo sapien
tcgaaccgagaaccctcacgctttg

SEQ ID NO: 5369511 - DNA, 25 bp, Homo sapien
tagtgaggccttcgaaccgagaacc

SEQ ID NO: 5369512 - DNA, 25 bp, Homo sapien
aaccgagaaccctcacgctttggca

SEQ ID NO: 5369513 - DNA, 25 bp, Homo sapien
tcttgcatggcgatagcctttccaa

SEQ ID NO: 5369514 - DNA, 25 bp, Homo sapien
tggcgatagcctttccaaggagacc

SEQ ID NO: 5369515 - DNA, 25 bp, Homo sapien
atattcttgcatggcgatagccttt

SEQ ID NO: 5369516 - DNA, 25 bp, Homo sapien
tgcatggcgatagcctttccaagga

SEQ ID NO: 5369517 - DNA, 25 bp, Homo sapien
ttttcttgcatgatgaataatcggt

SEQ ID NO: 5369518 - DNA, 25 bp, Homo sapien
caaaatcagtttcctgtctcagggt

SEQ ID NO: 5369519 - DNA, 25 bp, Homo sapien
tcaaaatcagtttcctgtctcaggg

SEQ ID NO: 5369520 - DNA, 25 bp, Homo sapien
ttctgatcaaaatcagtttcctgtc

SEQ ID NO: 5369521 - DNA, 25 bp, Homo sapien
tgatcaaaatcagtttcctgtctca

SEQ ID NO: 5369522 - DNA, 25 bp, Homo sapien
ggcccactgggatgagattggtcac

SEQ ID NO: 5369523 - DNA, 25 bp, Homo sapien
cagaaaggcccactgggatgagatt

SEQ ID NO: 5369524 - DNA, 25 bp, Homo sapien
gagaccagaaaggcccactgggatg

SEQ ID NO: 5369525 - DNA, 25 bp, Homo sapien
aaggcccactgggatgagattggtc

SEQ ID NO: 5369526 - DNA, 25 bp, Homo sapien
tgcacctgagggccatgatgcgttg

SEQ ID NO: 5369527 - DNA, 25 bp, Homo sapien
cacctgagggccatgatgcgttgca

SEQ ID NO: 5369528 - DNA, 25 bp, Homo sapien
cctgagggccatgatgcgttgcatc

SEQ ID NO: 5369529 - DNA, 25 bp, Homo sapien
tgagggccatgatgcgttgcatctg

SEQ ID NO: 5369530 - DNA, 25 bp, Homo sapien
ttctgggtagacccccactgatgta

SEQ ID NO: 5369531 - DNA, 25 bp, Homo sapien
ctgggtagacccccactgatgtaat

SEQ ID NO: 5369532 - DNA, 25 bp, Homo sapien
ttccacaacaactttgtgccagttt

SEQ ID NO: 5369533 - DNA, 25 bp, Homo sapien
cacaacaactttgtgccagtttcca

SEQ ID NO: 5369534 - DNA, 25 bp, Homo sapien
ttctgtccctttttctaggtccaga

SEQ ID NO: 5369535 - DNA, 25 bp, Homo sapien
gtccctttttctaggtccagaatca

SEQ ID NO: 5369536 - DNA, 25 bp, Homo sapien
tgtccctttttctaggtccagaatc

SEQ ID NO: 5369537 - DNA, 25 bp, Homo sapien
tctgtccctttttctaggtccagaa

SEQ ID NO: 5369538 - DNA, 25 bp, Homo sapien
agtggccacctctcacggacaggca

SEQ ID NO: 5369539 - DNA, 25 bp, Homo sapien
gtgttatccaattactagaggccat

SEQ ID NO: 5369540 - DNA, 25 bp, Homo sapien
ctagtggccacctctcacggacagg

SEQ ID NO: 5369541 - DNA, 25 bp, Homo sapien
gcacccggctgctcagtgttatcca

SEQ ID NO: 5369542 - DNA, 25 bp, Homo sapien
caggaccagacccttcttttcctat

SEQ ID NO: 5369543 - DNA, 25 bp, Homo sapien
tttcctattagtctttctgagattt

SEQ ID NO: 5369544 - DNA, 25 bp, Homo sapien
tcttttcctattagtctttctgaga

SEQ ID NO: 5369545 - DNA, 25 bp, Homo sapien
atttcctgctgtttccccctgttgt

SEQ ID NO: 5369546 - DNA, 25 bp, Homo sapien
atgcccatggccagggccggtgccc

SEQ ID NO: 5369547 - DNA, 25 bp, Homo sapien
aaggtgccactctcgtgtcaccgtg

SEQ ID NO: 5369548 - DNA, 25 bp, Homo sapien
ccacatcagtggagacccttctcat

SEQ ID NO: 5369549 - DNA, 25 bp, Homo sapien
cctttgaaaccaacactagaaggtg

SEQ ID NO: 5369550 - DNA, 25 bp, Homo sapien
ggcatggtccatactcagagggtcc

SEQ ID NO: 5369551 - DNA, 25 bp, Homo sapien
tccaaggctggatctggcaaacctc

SEQ ID NO: 5369552 - DNA, 25 bp, Homo sapien
gcttgggtcatgaatagctgagtcc

SEQ ID NO: 5369553 - DNA, 25 bp, Homo sapien
tcaagagtctcatttttcccgggca

SEQ ID NO: 5369554 - DNA, 25 bp, Homo sapien
actctgtccagcgaataagtcctga

SEQ ID NO: 5369555 - DNA, 25 bp, Homo sapien
ccagatctcagctgtcacgggacag

SEQ ID NO: 5369556 - DNA, 25 bp, Homo sapien
aagttagtgccacccgaagacacgg

SEQ ID NO: 5369557 - DNA, 25 bp, Homo sapien
tcccctcaaagcatgcggcaggatg

SEQ ID NO: 5369558 - DNA, 25 bp, Homo sapien
tcatgctgcaatcagcaccaccata

SEQ ID NO: 5369559 - DNA, 25 bp, Homo sapien
catgctgcaatcagcaccaccatag

SEQ ID NO: 5369560 - DNA, 25 bp, Homo sapien
caggcagatgagacccctcgtgcat

SEQ ID NO: 5369561 - DNA, 25 bp, Homo sapien
gcagatgagacccctcgtgcattac

SEQ ID NO: 5369562 - DNA, 25 bp, Homo sapien
agatgagacccctcgtgcattacct

SEQ ID NO: 5369563 - DNA, 25 bp, Homo sapien
tgcacggcccctccaggcagatgag

SEQ ID NO: 5369564 - DNA, 25 bp, Homo sapien
ccgttgttggcttccgagtctttca

SEQ ID NO: 5369565 - DNA, 25 bp, Homo sapien
gatcagctccgttgttggcttccga

SEQ ID NO: 5369566 - DNA, 25 bp, Homo sapien
tacccagatcagctccgttgttggc

SEQ ID NO: 5369567 - DNA, 25 bp, Homo sapien
ttggctcctttttacccagatcagc

SEQ ID NO: 5369568 - DNA, 25 bp, Homo sapien
gctgtatattggctcatgtctacct

SEQ ID NO: 5369569 - DNA, 25 bp, Homo sapien
tctacctgcattagtttggtgtatc

SEQ ID NO: 5369570 - DNA, 25 bp, Homo sapien
ctgtttagcaatttgaacatctgac

SEQ ID NO: 5369571 - DNA, 25 bp, Homo sapien
gacccaaacagagtctgggcaatag

SEQ ID NO: 5369572 - DNA, 25 bp, Homo sapien
tttacaaaccaatacagtggcccga

SEQ ID NO: 5369573 - DNA, 25 bp, Homo sapien
tagggacttttgtagttctatgagg

SEQ ID NO: 5369574 - DNA, 25 bp, Homo sapien
aaatatcaattctggtagggacttt

SEQ ID NO: 5369575 - DNA, 25 bp, Homo sapien
agtggcccgaatggcagatgtttta

SEQ ID NO: 5369576 - DNA, 25 bp, Homo sapien
agggatcttgatccaatagctttgg

SEQ ID NO: 5369577 - DNA, 25 bp, Homo sapien
tatcaagtgccttggaagatcacca

SEQ ID NO: 5369578 - DNA, 25 bp, Homo sapien
aagatcaccaataggatgtccacca

SEQ ID NO: 5369579 - DNA, 25 bp, Homo sapien
tgttggcgattgggtggcacacaca

SEQ ID NO: 5369580 - DNA, 25 bp, Homo sapien
cattgatgatggacccagacagaga

SEQ ID NO: 5369581 - DNA, 25 bp, Homo sapien
ggtcggtttgtactgctctgagaca

SEQ ID NO: 5369582 - DNA, 25 bp, Homo sapien
tgctggtcggtttgtactgctctga

SEQ ID NO: 5369583 - DNA, 25 bp, Homo sapien
gaaaatccagtgctggtcggtttgt

SEQ ID NO: 5369584 - DNA, 25 bp, Homo sapien
aaagctatgcgtgatggttcaggaa

SEQ ID NO: 5369585 - DNA, 25 bp, Homo sapien
gaaacatattcccattactcagtga

SEQ ID NO: 5369586 - DNA, 25 bp, Homo sapien
catgaaactccagagatagggaaag

SEQ ID NO: 5369587 - DNA, 25 bp, Homo sapien
ggacgatgtcgtagaaagctatgcg

SEQ ID NO: 5369588 - DNA, 25 bp, Homo sapien
ggtctgtaccagtagccagggtcac

SEQ ID NO: 5369589 - DNA, 25 bp, Homo sapien
ccccgtgctaggcactttgcagtgt

SEQ ID NO: 5369590 - DNA, 25 bp, Homo sapien
gtggtctgtaccagtagccagggtc

SEQ ID NO: 5369591 - DNA, 25 bp, Homo sapien
tacatcgaaaaatggcagtgggtgc

SEQ ID NO: 5369592 - DNA, 25 bp, Homo sapien
catttctgcgcaagctcagcagtgg

SEQ ID NO: 5369593 - DNA, 25 bp, Homo sapien
atttctgcgcaagctcagcagtggc

SEQ ID NO: 5369594 - DNA, 25 bp, Homo sapien
tttctgcgcaagctcagcagtggca

SEQ ID NO: 5369595 - DNA, 25 bp, Homo sapien
agaagagtgaggatgcagcccgagc

SEQ ID NO: 5369596 - DNA, 25 bp, Homo sapien
aagagtgaggatgcagcccgagctt

SEQ ID NO: 5369597 - DNA, 25 bp, Homo sapien
gcccgagcttgggtggtagcagaga

SEQ ID NO: 5369598 - DNA, 25 bp, Homo sapien
cgagcttgggtggtagcagagaggc

SEQ ID NO: 5369599 - DNA, 25 bp, Homo sapien
catgtcaaaagtttctgtggtggac

SEQ ID NO: 5369600 - DNA, 25 bp, Homo sapien
cccagtcagagcagcgctcgcatgg

SEQ ID NO: 5369601 - DNA, 25 bp, Homo sapien
gcttccttcatgtggtcattgcctg

SEQ ID NO: 5369602 - DNA, 25 bp, Homo sapien
tgtggtcattgcctgaccaggctcc

SEQ ID NO: 5369603 - DNA, 25 bp, Homo sapien
tgccagcaatactctcgaagttaat

SEQ ID NO: 5369604 - DNA, 25 bp, Homo sapien
taaaatcttgtgcattgcataggca

SEQ ID NO: 5369605 - DNA, 25 bp, Homo sapien
cagcagaatggtgtgtagagcctat

SEQ ID NO: 5369606 - DNA, 25 bp, Homo sapien
tggaggccgagccagaatttgacct

SEQ ID NO: 5369607 - DNA, 25 bp, Homo sapien
atctccaggccccgcagaaaccgca

SEQ ID NO: 5369608 - DNA, 25 bp, Homo sapien
tgtggatctccaggccccgcagaaa

SEQ ID NO: 5369609 - DNA, 25 bp, Homo sapien
tccaggccccgcagaaaccgcagag

SEQ ID NO: 5369610 - DNA, 25 bp, Homo sapien
ggatctccaggccccgcagaaaccg

SEQ ID NO: 5369611 - DNA, 25 bp, Homo sapien
tttgtaattgagtgactcaggggtc

SEQ ID NO: 5369612 - DNA, 25 bp, Homo sapien
gaggtcagttggctcctgttgaata

SEQ ID NO: 5369613 - DNA, 25 bp, Homo sapien
tgactcaggggtctacgggtccctg

SEQ ID NO: 5369614 - DNA, 25 bp, Homo sapien
cagttggctcctgttgaatatttgt

SEQ ID NO: 5369615 - DNA, 25 bp, Homo sapien
tcaactaaatccaagatcatgaagg

SEQ ID NO: 5369616 - DNA, 25 bp, Homo sapien
aactaaatccaagatcatgaaggac

SEQ ID NO: 5369617 - DNA, 25 bp, Homo sapien
ctaaatccaagatcatgaaggacaa

SEQ ID NO: 5369618 - DNA, 25 bp, Homo sapien
aaatccaagatcatgaaggacaaac

SEQ ID NO: 5369619 - DNA, 25 bp, Homo sapien
ttgactgttgggtttctgcagtgtt

SEQ ID NO: 5369620 - DNA, 25 bp, Homo sapien
gtagaaccagaagttgtaagacaac

SEQ ID NO: 5369621 - DNA, 25 bp, Homo sapien
cgacttggggtagaaccagaagttg

SEQ ID NO: 5369622 - DNA, 25 bp, Homo sapien
cattctttgactgttgggtttctgc

SEQ ID NO: 5369623 - DNA, 25 bp, Homo sapien
agagagcgacgaagcttgtggccaa

SEQ ID NO: 5369624 - DNA, 25 bp, Homo sapien
gagagcgacgaagcttgtggccaat

SEQ ID NO: 5369625 - DNA, 25 bp, Homo sapien
ctttgagagagagcgacgaagcttg

SEQ ID NO: 5369626 - DNA, 25 bp, Homo sapien
aaaattgctttgagagagagcgacg

SEQ ID NO: 5369627 - DNA, 25 bp, Homo sapien
gaaagctgtctttagagacttcact

SEQ ID NO: 5369628 - DNA, 25 bp, Homo sapien
tggttttttatcaccagtgacctga

SEQ ID NO: 5369629 - DNA, 25 bp, Homo sapien
agctgtctttagagacttcactgac

SEQ ID NO: 5369630 - DNA, 25 bp, Homo sapien
accagtgacctgaagactctgttgc

SEQ ID NO: 5369631 - DNA, 25 bp, Homo sapien
tcccaatttaagtgtgacactggag

SEQ ID NO: 5369632 - DNA, 25 bp, Homo sapien
ggcctccagctgagcgttagtgtca

SEQ ID NO: 5369633 - DNA, 25 bp, Homo sapien
tttgtttcccaaaattggctgactc

SEQ ID NO: 5369634 - DNA, 25 bp, Homo sapien
tcttgttccgctgatgggacagtgg

SEQ ID NO: 5369635 - DNA, 25 bp, Homo sapien
acatgcataggttcccgaaggtggg

SEQ ID NO: 5369636 - DNA, 25 bp, Homo sapien
acaggctcccacgtggtgtcacaga

SEQ ID NO: 5369637 - DNA, 25 bp, Homo sapien
agacccattggtgctgggtcttgaa

SEQ ID NO: 5369638 - DNA, 25 bp, Homo sapien
tgtcacagaagacccattggtgctg

SEQ ID NO: 5369639 - DNA, 25 bp, Homo sapien
catgcttgaggtcaaatcattggaa

SEQ ID NO: 5369640 - DNA, 25 bp, Homo sapien
atcattggaatcagactgtccctca

SEQ ID NO: 5369641 - DNA, 25 bp, Homo sapien
ccttgaggctgagtttagctctgcc

SEQ ID NO: 5369642 - DNA, 25 bp, Homo sapien
gacatgacatccaggcatgcttgag

SEQ ID NO: 5369643 - DNA, 25 bp, Homo sapien
gacggacagcatgctgtttacgtct

SEQ ID NO: 5369644 - DNA, 25 bp, Homo sapien
ggaaggacggacagcatgctgttta

SEQ ID NO: 5369645 - DNA, 25 bp, Homo sapien
gctgtttacgtctgttataaccaca

SEQ ID NO: 5369646 - DNA, 25 bp, Homo sapien
gacagcatgctgtttacgtctgtta

SEQ ID NO: 5369647 - DNA, 25 bp, Homo sapien
tatagacagactgccaagaagatgc

SEQ ID NO: 5369648 - DNA, 25 bp, Homo sapien
atgaacttggttcatcagatggctg

SEQ ID NO: 5369649 - DNA, 25 bp, Homo sapien
ctgagaagatgctctatagacagac

SEQ ID NO: 5369650 - DNA, 25 bp, Homo sapien
aagatgcaagagatgaacttggttc

SEQ ID NO: 5369651 - DNA, 25 bp, Homo sapien
aatgcacagagacgcctgggagcgt

SEQ ID NO: 5369652 - DNA, 25 bp, Homo sapien
tgtggaaggagggacgccaggcctc

SEQ ID NO: 5369653 - DNA, 25 bp, Homo sapien
caaatgcacagagacgcctgggagc

SEQ ID NO: 5369654 - DNA, 25 bp, Homo sapien
tggaaggagggacgccaggcctccc

SEQ ID NO: 5369655 - DNA, 25 bp, Homo sapien
aggtgctcgccacggcaacccaagt

SEQ ID NO: 5369656 - DNA, 25 bp, Homo sapien
cttcacgcctttggttctcgtaagg

SEQ ID NO: 5369657 - DNA, 25 bp, Homo sapien
cttggtccaaggcatagtaattgag

SEQ ID NO: 5369658 - DNA, 25 bp, Homo sapien
caggtgcctttgtctgcctttgtgc

SEQ ID NO: 5369659 - DNA, 25 bp, Homo sapien
tccatcatgcacagtgcaaaccatg

SEQ ID NO: 5369660 - DNA, 25 bp, Homo sapien
gcacagtgcaaaccatgatgtcctt

SEQ ID NO: 5369661 - DNA, 25 bp, Homo sapien
cttccatcatgcacagtgcaaacca

SEQ ID NO: 5369662 - DNA, 25 bp, Homo sapien
tcatgcacagtgcaaaccatgatgt

SEQ ID NO: 5369663 - DNA, 25 bp, Homo sapien
gcccccaaggctctgtggcctgtgg

SEQ ID NO: 5369664 - DNA, 25 bp, Homo sapien
catggcccccaaggctctgtggcct

SEQ ID NO: 5369665 - DNA, 25 bp, Homo sapien
ctgcatccacatggcccccaaggct

SEQ ID NO: 5369666 - DNA, 25 bp, Homo sapien
ccccaaggctctgtggcctgtggtc

SEQ ID NO: 5369667 - DNA, 25 bp, Homo sapien
tgtagatgggttttctgtacttttc

SEQ ID NO: 5369668 - DNA, 25 bp, Homo sapien
ccctttgtgcttgttgattttactt

SEQ ID NO: 5369669 - DNA, 25 bp, Homo sapien
ttattatgcagctcaggccatggag

SEQ ID NO: 5369670 - DNA, 25 bp, Homo sapien
gcaataatgcagatcccaagtggct

SEQ ID NO: 5369671 - DNA, 25 bp, Homo sapien
gacttgcccaccttgggagacctga

SEQ ID NO: 5369672 - DNA, 25 bp, Homo sapien
ccaagtggctaaagtctgaggcaga

SEQ ID NO: 5369673 - DNA, 25 bp, Homo sapien
cgctacctttggaggcttcagagaa

SEQ ID NO: 5369674 - DNA, 25 bp, Homo sapien
gaagtctgaaatcggtatcactgat

SEQ ID NO: 5369675 - DNA, 25 bp, Homo sapien
caactatgcctgtggatctgtctac

SEQ ID NO: 5369676 - DNA, 25 bp, Homo sapien
aatactgcaggcttatttggattag

SEQ ID NO: 5369677 - DNA, 25 bp, Homo sapien
tacttgtgaacatgtggtcagccca

SEQ ID NO: 5369678 - DNA, 25 bp, Homo sapien
cctcccagggaacgtagtgaattgc

SEQ ID NO: 5369679 - DNA, 25 bp, Homo sapien
tgtgttgagagaaccacagcccagc

SEQ ID NO: 5369680 - DNA, 25 bp, Homo sapien
gacacaggagcagttgcatcagcca

SEQ ID NO: 5369681 - DNA, 25 bp, Homo sapien
taacctagcttcacatctgtaggac

SEQ ID NO: 5369682 - DNA, 25 bp, Homo sapien
ggaccaactagaatgtgggtgtctc

SEQ ID NO: 5369683 - DNA, 25 bp, Homo sapien
tggttcaccacctcttggagacagc

SEQ ID NO: 5369684 - DNA, 25 bp, Homo sapien
ccaccttctcctcccagtgcaaaag

SEQ ID NO: 5369685 - DNA, 25 bp, Homo sapien
cattcagcgagtttggaagtctgca

SEQ ID NO: 5369686 - DNA, 25 bp, Homo sapien
caccagtcacgatttgccagtccat

SEQ ID NO: 5369687 - DNA, 25 bp, Homo sapien
taaaggtccttctaggtcatcaagc

SEQ ID NO: 5369688 - DNA, 25 bp, Homo sapien
gacttttcacatggtagctggctct

SEQ ID NO: 5369689 - DNA, 25 bp, Homo sapien
catcatagagtactcctgggcacca

SEQ ID NO: 5369690 - DNA, 25 bp, Homo sapien
tacagattctgacttaggaagaacg

SEQ ID NO: 5369691 - DNA, 25 bp, Homo sapien
ggtcctctcagagaatctgagccag

SEQ ID NO: 5369692 - DNA, 25 bp, Homo sapien
tcaagggtcacacgtctgccacagt

SEQ ID NO: 5369693 - DNA, 25 bp, Homo sapien
taagagttggctgcatagagattct

SEQ ID NO: 5369694 - DNA, 25 bp, Homo sapien
tggctcaccaatatctaacaatccc

SEQ ID NO: 5369695 - DNA, 25 bp, Homo sapien
aatgactgatacttattctgtgggc

SEQ ID NO: 5369696 - DNA, 25 bp, Homo sapien
tctatttctgtgcattaaccggtga

SEQ ID NO: 5369697 - DNA, 25 bp, Homo sapien
tcatctgagttcaacaggactagga

SEQ ID NO: 5369698 - DNA, 25 bp, Homo sapien
tctacgtggccttttgtcctccagc

SEQ ID NO: 5369699 - DNA, 25 bp, Homo sapien
tggctgttggccaaggcaccttggt

SEQ ID NO: 5369700 - DNA, 25 bp, Homo sapien
tctctcatatctggcagtgggtgct

SEQ ID NO: 5369701 - DNA, 25 bp, Homo sapien
caggaaaaccttctgcatggagtcc

SEQ ID NO: 5369702 - DNA, 25 bp, Homo sapien
tgcacagcaggtattctcacggtta

SEQ ID NO: 5369703 - DNA, 25 bp, Homo sapien
ggtgtccctccaagtgtactgggca

SEQ ID NO: 5369704 - DNA, 25 bp, Homo sapien
tctaccaaggtagccagacgaaagg

SEQ ID NO: 5369705 - DNA, 25 bp, Homo sapien
aatagtgcccatgtttaggtttgac

SEQ ID NO: 5369706 - DNA, 25 bp, Homo sapien
taagcttgaagtactttgtccagca

SEQ ID NO: 5369707 - DNA, 25 bp, Homo sapien
cagaggacccctacactatgtgcaa

SEQ ID NO: 5369708 - DNA, 25 bp, Homo sapien
gcataaatgggtcataaactggcag

SEQ ID NO: 5369709 - DNA, 25 bp, Homo sapien
tttgtgagtgaaaggatggtaatta

SEQ ID NO: 5369710 - DNA, 25 bp, Homo sapien
atttgtgagtgaaaggatggtaatt

SEQ ID NO: 5369711 - DNA, 25 bp, Homo sapien
catttgtgagtgaaaggatggtaat

SEQ ID NO: 5369712 - DNA, 25 bp, Homo sapien
gagtgaaaggatggtaattattatt

SEQ ID NO: 5369713 - DNA, 25 bp, Homo sapien
gacagattagtcagggatttttcaa

SEQ ID NO: 5369714 - DNA, 25 bp, Homo sapien
taaagacgttgagagttgacagatt

SEQ ID NO: 5369715 - DNA, 25 bp, Homo sapien
ggctgtgtacgccacctcatggttt

SEQ ID NO: 5369716 - DNA, 25 bp, Homo sapien
tttggcaccagatagataaaaccca

SEQ ID NO: 5369717 - DNA, 25 bp, Homo sapien
tggtccgccgtctcactgtactgaa

SEQ ID NO: 5369718 - DNA, 25 bp, Homo sapien
cagatggattttccgcagcggccag

SEQ ID NO: 5369719 - DNA, 25 bp, Homo sapien
gaagatgcctagcattggtccgccg

SEQ ID NO: 5369720 - DNA, 25 bp, Homo sapien
agaccttggtctcgagttcccggct

SEQ ID NO: 5369721 - DNA, 25 bp, Homo sapien
caccgacgcccagagctgtggccga

SEQ ID NO: 5369722 - DNA, 25 bp, Homo sapien
gccgaggctggcgaggtgcgcggct

SEQ ID NO: 5369723 - DNA, 25 bp, Homo sapien
tttggtggcaaagcggaggtcccgc

SEQ ID NO: 5369724 - DNA, 25 bp, Homo sapien
tgggccgccactctcggggattttg

SEQ ID NO: 5369725 - DNA, 25 bp, Homo sapien
aaagtgttcacagggtcgcgagagc

SEQ ID NO: 5369726 - DNA, 25 bp, Homo sapien
caatttcggaactaggagagaccac

SEQ ID NO: 5369727 - DNA, 25 bp, Homo sapien
agagcaaagttcgtccgcggtagga

SEQ ID NO: 5369728 - DNA, 25 bp, Homo sapien
ttttagtgccccaaatagcagcgct

SEQ ID NO: 5369729 - DNA, 25 bp, Homo sapien
ccccgctgcagttgtctagaagctg

SEQ ID NO: 5369730 - DNA, 25 bp, Homo sapien
ccgctgcagttgtctagaagctggg

SEQ ID NO: 5369731 - DNA, 25 bp, Homo sapien
acacccccgctgcagttgtctagaa

SEQ ID NO: 5369732 - DNA, 25 bp, Homo sapien
tccatttcccgatccacctcccaca

SEQ ID NO: 5369733 - DNA, 25 bp, Homo sapien
gcctggccgttttctgggcgcgtcc

SEQ ID NO: 5369734 - DNA, 25 bp, Homo sapien
ctctgtctcttagggcgactgggcg

SEQ ID NO: 5369735 - DNA, 25 bp, Homo sapien
gggaggcggcgaagacgcccactgg

SEQ ID NO: 5369736 - DNA, 25 bp, Homo sapien
aagacgcccactgggaccgcgcctg

SEQ ID NO: 5369737 - DNA, 25 bp, Homo sapien
gccccagagcggcttagaaactcag

SEQ ID NO: 5369738 - DNA, 25 bp, Homo sapien
aagatgcgcagcctgctgatccgcg

SEQ ID NO: 5369739 - DNA, 25 bp, Homo sapien
agggtgcctgagtcccgcgagaggc

SEQ ID NO: 5369740 - DNA, 25 bp, Homo sapien
aaactcagggcacagtgagagcgca

SEQ ID NO: 5369741 - DNA, 25 bp, Homo sapien
ttcgctccgcgcagccgcctggtct

SEQ ID NO: 5369742 - DNA, 25 bp, Homo sapien
ttggagctctgcgtccagcgccgct

SEQ ID NO: 5369743 - DNA, 25 bp, Homo sapien
cagccgcctggtctgcagtttgttg

SEQ ID NO: 5369744 - DNA, 25 bp, Homo sapien
gccactaccaccacttgattcttgc

SEQ ID NO: 5369745 - DNA, 25 bp, Homo sapien
cgatcgcatcatcgcggtattcggt

SEQ ID NO: 5369746 - DNA, 25 bp, Homo sapien
ctgactctgactctcggactgagaa

SEQ ID NO: 5369747 - DNA, 25 bp, Homo sapien
tattcggttcgctgcgttcccgccg

SEQ ID NO: 5369748 - DNA, 25 bp, Homo sapien
cggactgagaaacgcaaggtaaata

SEQ ID NO: 5369749 - DNA, 25 bp, Homo sapien
cacgtgcgagcggagacgcttgcat

SEQ ID NO: 5369750 - DNA, 25 bp, Homo sapien
tggcaccgaaggaagactagcgctg

SEQ ID NO: 5369751 - DNA, 25 bp, Homo sapien
gaaaagtcgttcacgcggaacctgc

SEQ ID NO: 5369752 - DNA, 25 bp, Homo sapien
gatccgtgtggatcgggttccctct

SEQ ID NO: 5369753 - DNA, 25 bp, Homo sapien
cgcccagctggaaagtctcgccgcc

SEQ ID NO: 5369754 - DNA, 25 bp, Homo sapien
agctggaaagtctcgccgccggctc

SEQ ID NO: 5369755 - DNA, 25 bp, Homo sapien
cagctggaaagtctcgccgccggct

SEQ ID NO: 5369756 - DNA, 25 bp, Homo sapien
cccagctggaaagtctcgccgccgg

SEQ ID NO: 5369757 - DNA, 25 bp, Homo sapien
ctcagagtagcggccgcgcagtgtg

SEQ ID NO: 5369758 - DNA, 25 bp, Homo sapien
ggcctgttgcggaggatttgcggaa

SEQ ID NO: 5369759 - DNA, 25 bp, Homo sapien
gggcgcgtgggcctgttgcggagga

SEQ ID NO: 5369760 - DNA, 25 bp, Homo sapien
tgtgagggtgtttcgtgtcttggtt

SEQ ID NO: 5369761 - DNA, 25 bp, Homo sapien
acggcttttccttttactcattcag

SEQ ID NO: 5369762 - DNA, 25 bp, Homo sapien
cactgctgcgttcgctttctcaagc

SEQ ID NO: 5369763 - DNA, 25 bp, Homo sapien
gtggtgatttaactgacgagacacg

SEQ ID NO: 5369764 - DNA, 25 bp, Homo sapien
tttactcattcaggccaaggtttcg

SEQ ID NO: 5369765 - DNA, 25 bp, Homo sapien
tgcggcctgtgccatccgcacgatt

SEQ ID NO: 5369766 - DNA, 25 bp, Homo sapien
ttgctctgcaggagtcctgcggcct

SEQ ID NO: 5369767 - DNA, 25 bp, Homo sapien
gcgagaaatctaggtcctcccctga

SEQ ID NO: 5369768 - DNA, 25 bp, Homo sapien
cgcacgattccctggcagcgagaaa

SEQ ID NO: 5369769 - DNA, 25 bp, Homo sapien
agtcgcggccggcagaacctgctcg

SEQ ID NO: 5369770 - DNA, 25 bp, Homo sapien
atcttagcggctcacgcatgcccga

SEQ ID NO: 5369771 - DNA, 25 bp, Homo sapien
ccctgggccgggctatcttagcggc

SEQ ID NO: 5369772 - DNA, 25 bp, Homo sapien
tcgcggccggcagaacctgctcggt

SEQ ID NO: 5369773 - DNA, 25 bp, Homo sapien
gctttgactcgtgtctgcggcgcac

SEQ ID NO: 5369774 - DNA, 25 bp, Homo sapien
tgaatttactcgatggtcgcggacg

SEQ ID NO: 5369775 - DNA, 25 bp, Homo sapien
ctcggaggcgagtttgtcaacaatc

SEQ ID NO: 5369776 - DNA, 25 bp, Homo sapien
taaggcttgtgtccggaaggagcac

SEQ ID NO: 5369777 - DNA, 25 bp, Homo sapien
gaggcggaggatgttcccggcggct

SEQ ID NO: 5369778 - DNA, 25 bp, Homo sapien
cgaccgcgcgcggaccaattgggaa

SEQ ID NO: 5369779 - DNA, 25 bp, Homo sapien
ggcgcgggctttgcgctgcgccggg

SEQ ID NO: 5369780 - DNA, 25 bp, Homo sapien
agcgcgggccagaggcgcggcgtgc

SEQ ID NO: 5369781 - DNA, 25 bp, Homo sapien
tgtctcctgcgctgctttcgtggtg

SEQ ID NO: 5369782 - DNA, 25 bp, Homo sapien
tcctgcgctgctttcgtggtgacgg

SEQ ID NO: 5369783 - DNA, 25 bp, Homo sapien
tctcctgcgctgctttcgtggtgac

SEQ ID NO: 5369784 - DNA, 25 bp, Homo sapien
tgcgctgctttcgtggtgacggtca

SEQ ID NO: 5369785 - DNA, 25 bp, Homo sapien
cgtgagtttcggtgtgattgccttc

SEQ ID NO: 5369786 - DNA, 25 bp, Homo sapien
gtagaccttgcaggcgttcgcttcg

SEQ ID NO: 5369787 - DNA, 25 bp, Homo sapien
tagcctgcggacctagttgtagacc

SEQ ID NO: 5369788 - DNA, 25 bp, Homo sapien
gtgtcgcctagcctgcggacctagt

SEQ ID NO: 5369789 - DNA, 25 bp, Homo sapien
tacgactgacggccgctgccagacc

SEQ ID NO: 5369790 - DNA, 25 bp, Homo sapien
cgactgacggccgctgccagacctt

SEQ ID NO: 5369791 - DNA, 25 bp, Homo sapien
ctgacggccgctgccagaccttccc

SEQ ID NO: 5369792 - DNA, 25 bp, Homo sapien
gactgacggccgctgccagaccttc

SEQ ID NO: 5369793 - DNA, 25 bp, Homo sapien
ttcggcaaacaatggggccggagca

SEQ ID NO: 5369794 - DNA, 25 bp, Homo sapien
tttcggcaaacaatggggccggagc

SEQ ID NO: 5369795 - DNA, 25 bp, Homo sapien
tcggcaaacaatggggccggagcag

SEQ ID NO: 5369796 - DNA, 25 bp, Homo sapien
cggcaaacaatggggccggagcagg

SEQ ID NO: 5369797 - DNA, 25 bp, Homo sapien
aatcgctgcatctgcgcccgctcct

SEQ ID NO: 5369798 - DNA, 25 bp, Homo sapien
agtcagagccgctgggagtttctga

SEQ ID NO: 5369799 - DNA, 25 bp, Homo sapien
ctaaccccgggaagtcagagccgct

SEQ ID NO: 5369800 - DNA, 25 bp, Homo sapien
ctgtgctccggcgtcctacctaacc

SEQ ID NO: 5369801 - DNA, 25 bp, Homo sapien
tgggcaaagagcacacacgaataga

SEQ ID NO: 5369802 - DNA, 25 bp, Homo sapien
tgtgtgtgcaccagttccgcaagct

SEQ ID NO: 5369803 - DNA, 25 bp, Homo sapien
tagacttcagattagctgcttctct

SEQ ID NO: 5369804 - DNA, 25 bp, Homo sapien
tgcttctctggaaacgcatgtgtgt

SEQ ID NO: 5369805 - DNA, 25 bp, Homo sapien
ttttgctaccagatccccgcttttc

SEQ ID NO: 5369806 - DNA, 25 bp, Homo sapien
cctgctgtctcgatcctccagtggg

SEQ ID NO: 5369807 - DNA, 25 bp, Homo sapien
ttatgagaagatcctccctgctgtc

SEQ ID NO: 5369808 - DNA, 25 bp, Homo sapien
gctgtctcgatcctccagtgggtat

SEQ ID NO: 5369809 - DNA, 25 bp, Homo sapien
tacattggttgctcgtggatttaac

SEQ ID NO: 5369810 - DNA, 25 bp, Homo sapien
tgctcgtggatttaacattaggagt

SEQ ID NO: 5369811 - DNA, 25 bp, Homo sapien
taagggatacattggttgctcgtgg

SEQ ID NO: 5369812 - DNA, 25 bp, Homo sapien
cccaaaataagggatacattggttg

SEQ ID NO: 5369813 - DNA, 25 bp, Homo sapien
catttaccgcaaacgctgatggcag

SEQ ID NO: 5369814 - DNA, 25 bp, Homo sapien
tcccgcaagtgccagacagaatgtg

SEQ ID NO: 5369815 - DNA, 25 bp, Homo sapien
gaatgcttgtgtgtgacatgcccct

SEQ ID NO: 5369816 - DNA, 25 bp, Homo sapien
tgaattcatgtgactgcccaggctt

SEQ ID NO: 5369817 - DNA, 25 bp, Homo sapien
tgggcccagtgggtgtcagccctgc

SEQ ID NO: 5369818 - DNA, 25 bp, Homo sapien
cgagtccttgggcccagtgggtgtc

SEQ ID NO: 5369819 - DNA, 25 bp, Homo sapien
agtccttgggcccagtgggtgtcag

SEQ ID NO: 5369820 - DNA, 25 bp, Homo sapien
tccttgggcccagtgggtgtcagcc

SEQ ID NO: 5369821 - DNA, 25 bp, Homo sapien
ggcatacacttcgagccaacagcag

SEQ ID NO: 5369822 - DNA, 25 bp, Homo sapien
tgaatgtcgtccaaaagcaattgct

SEQ ID NO: 5369823 - DNA, 25 bp, Homo sapien
tgaatccgtggtaatggcttcctct

SEQ ID NO: 5369824 - DNA, 25 bp, Homo sapien
tccagctgtcttttgcaatacgggc

SEQ ID NO: 5369825 - DNA, 25 bp, Homo sapien
ggtctgtccttcacgttgacccagc

SEQ ID NO: 5369826 - DNA, 25 bp, Homo sapien
ggggtctgtccttcacgttgaccca

SEQ ID NO: 5369827 - DNA, 25 bp, Homo sapien
tccttcacgttgacccagccccctc

SEQ ID NO: 5369828 - DNA, 25 bp, Homo sapien
tctgtccttcacgttgacccagccc

SEQ ID NO: 5369829 - DNA, 25 bp, Homo sapien
gggtctactctaaacagcattgtgt

SEQ ID NO: 5369830 - DNA, 25 bp, Homo sapien
ttttctaggacccagcgtatgtagc

SEQ ID NO: 5369831 - DNA, 25 bp, Homo sapien
tgtgtaagaagcatcctcaagctcc

SEQ ID NO: 5369832 - DNA, 25 bp, Homo sapien
tacagatgacgctaaatcagttggg

SEQ ID NO: 5369833 - DNA, 25 bp, Homo sapien
ctgccattagggcagagcagctccc

SEQ ID NO: 5369834 - DNA, 25 bp, Homo sapien
tcactctgccattagggcagagcag

SEQ ID NO: 5369835 - DNA, 25 bp, Homo sapien
tctgccattagggcagagcagctcc

SEQ ID NO: 5369836 - DNA, 25 bp, Homo sapien
actctgccattagggcagagcagct

SEQ ID NO: 5369837 - DNA, 25 bp, Homo sapien
gttgtagttgcaaaatgatcaattc

SEQ ID NO: 5369838 - DNA, 25 bp, Homo sapien
acaggcatccatgcctccagccaaa

SEQ ID NO: 5369839 - DNA, 25 bp, Homo sapien
gacagagtgtgctgtagggcccaag

SEQ ID NO: 5369840 - DNA, 25 bp, Homo sapien
tgagtggaggacagagtgtgctgta

SEQ ID NO: 5369841 - DNA, 25 bp, Homo sapien
gtccagggccatagcgctgccagga

SEQ ID NO: 5369842 - DNA, 25 bp, Homo sapien
tgtccagggccatagcgctgccagg

SEQ ID NO: 5369843 - DNA, 25 bp, Homo sapien
ccagggccatagcgctgccaggatt

SEQ ID NO: 5369844 - DNA, 25 bp, Homo sapien
tcggacaatttagttgcttctaaac

SEQ ID NO: 5369845 - DNA, 25 bp, Homo sapien
gcatttcggacaatttagttgcttc

SEQ ID NO: 5369846 - DNA, 25 bp, Homo sapien
atgtgcatttcggacaatttagttg

SEQ ID NO: 5369847 - DNA, 25 bp, Homo sapien
aatttagttgcttctaaacttggtg

SEQ ID NO: 5369848 - DNA, 25 bp, Homo sapien
gagaccacaggaggtctgaagacat

SEQ ID NO: 5369849 - DNA, 25 bp, Homo sapien
cacaagagaccacaggaggtctgaa

SEQ ID NO: 5369850 - DNA, 25 bp, Homo sapien
tggtcccacaagagaccacaggagg

SEQ ID NO: 5369851 - DNA, 25 bp, Homo sapien
caagagaccacaggaggtctgaaga

SEQ ID NO: 5369852 - DNA, 25 bp, Homo sapien
tcccagggccgtgttgatgcaaact

SEQ ID NO: 5369853 - DNA, 25 bp, Homo sapien
aggccacccgtgcagacgtgctgaa

SEQ ID NO: 5369854 - DNA, 25 bp, Homo sapien
gacgtgctgaaggaagacacttccc

SEQ ID NO: 5369855 - DNA, 25 bp, Homo sapien
cttcccagggccgtgttgatgcaaa

SEQ ID NO: 5369856 - DNA, 25 bp, Homo sapien
ctgcttgggtgggtctcagaaatct

SEQ ID NO: 5369857 - DNA, 25 bp, Homo sapien
tctttaagatacaggccccagattc

SEQ ID NO: 5369858 - DNA, 25 bp, Homo sapien
gatgctgagtatttgtgaatttatc

SEQ ID NO: 5369859 - DNA, 25 bp, Homo sapien
aatttatctcctctttaagatacag

SEQ ID NO: 5369860 - DNA, 25 bp, Homo sapien
caagagtcctgttggatctggaaaa

SEQ ID NO: 5369861 - DNA, 25 bp, Homo sapien
tgaaaatgcatcacactgcctgcgt

SEQ ID NO: 5369862 - DNA, 25 bp, Homo sapien
ttcatacacagtggatttgccatgg

SEQ ID NO: 5369863 - DNA, 25 bp, Homo sapien
gaaacaccgagtatgtgcacaagag

SEQ ID NO: 5369864 - DNA, 25 bp, Homo sapien
tttccccaaatgcaagtatagacgg

SEQ ID NO: 5369865 - DNA, 25 bp, Homo sapien
aaaatcacacatctaagttaaacac

SEQ ID NO: 5369866 - DNA, 25 bp, Homo sapien
agttaaacacactctcaatcacctc

SEQ ID NO: 5369867 - DNA, 25 bp, Homo sapien
gacggaacacgaatttggaatgaaa

SEQ ID NO: 5369868 - DNA, 25 bp, Homo sapien
cacaagttggtaaggctggacttcc

SEQ ID NO: 5369869 - DNA, 25 bp, Homo sapien
gtgtcatgcattgtccgggaaccca

SEQ ID NO: 5369870 - DNA, 25 bp, Homo sapien
ttagcgagctcgtacaacagctggg

SEQ ID NO: 5369871 - DNA, 25 bp, Homo sapien
gttctaacgggtcctcagtgagcca

SEQ ID NO: 5369872 - DNA, 25 bp, Homo sapien
gtgccgtgggacagcctagcttcaa

SEQ ID NO: 5369873 - DNA, 25 bp, Homo sapien
gccacgagcccggtgccgtgggaca

SEQ ID NO: 5369874 - DNA, 25 bp, Homo sapien
tagcttcaatccctcgagtggagga

SEQ ID NO: 5369875 - DNA, 25 bp, Homo sapien
tccctcgagtggaggaaagataacc

SEQ ID NO: 5369876 - DNA, 25 bp, Homo sapien
tggatggacactggtaacctctctg

SEQ ID NO: 5369877 - DNA, 25 bp, Homo sapien
taacctctctgcatgcgtggctttg

SEQ ID NO: 5369878 - DNA, 25 bp, Homo sapien
cttggctacctgtctgtgaagtggg

SEQ ID NO: 5369879 - DNA, 25 bp, Homo sapien
cacttagggctacaatagccgggct

SEQ ID NO: 5369880 - DNA, 25 bp, Homo sapien
tgtcccatctagtaaacccctctcc

SEQ ID NO: 5369881 - DNA, 25 bp, Homo sapien
tctcctcaggagtaaccatgactct

SEQ ID NO: 5369882 - DNA, 25 bp, Homo sapien
gagtagtttctttcatccagaatgt

SEQ ID NO: 5369883 - DNA, 25 bp, Homo sapien
gtcatcacaggttaattttacctgt

SEQ ID NO: 5369884 - DNA, 25 bp, Homo sapien
catgggaccatgattgtgcagagca

SEQ ID NO: 5369885 - DNA, 25 bp, Homo sapien
tagaattcctgggtgatctgagagg

SEQ ID NO: 5369886 - DNA, 25 bp, Homo sapien
acagtgtgcacttgggtgataggaa

SEQ ID NO: 5369887 - DNA, 25 bp, Homo sapien
acaccgctgtggactttataaacag

SEQ ID NO: 5369888 - DNA, 25 bp, Homo sapien
gatagtttaagcatgatctgaggta

SEQ ID NO: 5369889 - DNA, 25 bp, Homo sapien
ccaggcaagaatcaaaagttaatcc

SEQ ID NO: 5369890 - DNA, 25 bp, Homo sapien
aagttaatccaaacaattttcagat

SEQ ID NO: 5369891 - DNA, 25 bp, Homo sapien
ttcagatacagaataccatttgtgc

SEQ ID NO: 5369892 - DNA, 25 bp, Homo sapien
ccattatagtagttacatttccaga

SEQ ID NO: 5369893 - DNA, 25 bp, Homo sapien
ccggccccatttgtgcatttgtaag

SEQ ID NO: 5369894 - DNA, 25 bp, Homo sapien
tttgtaaggtccattatagtagtta

SEQ ID NO: 5369895 - DNA, 25 bp, Homo sapien
acccggccccatttgtgcatttgta

SEQ ID NO: 5369896 - DNA, 25 bp, Homo sapien
tatcagggtcatgaacttgtcctca

SEQ ID NO: 5369897 - DNA, 25 bp, Homo sapien
tcacgaatgcaatgagaacactcgc

SEQ ID NO: 5369898 - DNA, 25 bp, Homo sapien
ggaagttttatgataccaccaagcc

SEQ ID NO: 5369899 - DNA, 25 bp, Homo sapien
tctggagctatactacctggacaag

SEQ ID NO: 5369900 - DNA, 25 bp, Homo sapien
taaagcagtagtgacctagtcgtgg

SEQ ID NO: 5369901 - DNA, 25 bp, Homo sapien
ttcttgagggatctggtcataccac

SEQ ID NO: 5369902 - DNA, 25 bp, Homo sapien
tcagcgagtgacagaaatgcagtag

SEQ ID NO: 5369903 - DNA, 25 bp, Homo sapien
tgttgtagagcaaagtccaggcttg

SEQ ID NO: 5369904 - DNA, 25 bp, Homo sapien
tgaccaaattgaagaccatgggatt

SEQ ID NO: 5369905 - DNA, 25 bp, Homo sapien
aaaaacagtataccttgtagattat

SEQ ID NO: 5369906 - DNA, 25 bp, Homo sapien
taaatgaccaaattgaagaccatgg

SEQ ID NO: 5369907 - DNA, 25 bp, Homo sapien
tttaaatgaccaaattgaagaccat

SEQ ID NO: 5369908 - DNA, 25 bp, Homo sapien
tccaaagtggtagtttgattttaca

SEQ ID NO: 5369909 - DNA, 25 bp, Homo sapien
tacatgtagtggtatcacatggtgg

SEQ ID NO: 5369910 - DNA, 25 bp, Homo sapien
acttttgagttgtctccagtttggg

SEQ ID NO: 5369911 - DNA, 25 bp, Homo sapien
ccaatagcattgtatgagaatttca

SEQ ID NO: 5369912 - DNA, 25 bp, Homo sapien
ggttttgttcgcacttccatatgaa

SEQ ID NO: 5369913 - DNA, 25 bp, Homo sapien
gcaagagccataacgcctggccagt

SEQ ID NO: 5369914 - DNA, 25 bp, Homo sapien
ttgtgccaactatgaatctttccag

SEQ ID NO: 5369915 - DNA, 25 bp, Homo sapien
tccagcactgttaaatagagtggtg

SEQ ID NO: 5369916 - DNA, 25 bp, Homo sapien
tctgtagaatctgagtgatcccacc

SEQ ID NO: 5369917 - DNA, 25 bp, Homo sapien
ggctctggtagattgtgccttgcca

SEQ ID NO: 5369918 - DNA, 25 bp, Homo sapien
tattccgtaaatagaggattgtctg

SEQ ID NO: 5369919 - DNA, 25 bp, Homo sapien
cactagtgaagccatgtcaaccggg

SEQ ID NO: 5369920 - DNA, 25 bp, Homo sapien
tatttttatgatccaactttatctc

SEQ ID NO: 5369921 - DNA, 25 bp, Homo sapien
tccccttctgacctttatattattg

SEQ ID NO: 5369922 - DNA, 25 bp, Homo sapien
tcttaggattaacagaacacatctt

SEQ ID NO: 5369923 - DNA, 25 bp, Homo sapien
ccagttcgcgtatagcataagaaac

SEQ ID NO: 5369924 - DNA, 25 bp, Homo sapien
tgctttagtcattccttaagggcaa

SEQ ID NO: 5369925 - DNA, 25 bp, Homo sapien
agaaacccttgagcagaaacctttg

SEQ ID NO: 5369926 - DNA, 25 bp, Homo sapien
gcaatccagtacgtaaggagcttgg

SEQ ID NO: 5369927 - DNA, 25 bp, Homo sapien
tcagagaagtgaggtttactgcccc

SEQ ID NO: 5369928 - DNA, 25 bp, Homo sapien
gatcctgaagttccgtgcttgcagt

SEQ ID NO: 5369929 - DNA, 25 bp, Homo sapien
tagaatgactcagcaaagcagtggc

SEQ ID NO: 5369930 - DNA, 25 bp, Homo sapien
taaacagctgtttagacagaaaagc

SEQ ID NO: 5369931 - DNA, 25 bp, Homo sapien
aataacccgaaaagcaagatcctga

SEQ ID NO: 5369932 - DNA, 25 bp, Homo sapien
aggcaacaaagttcatgatcaaagt

SEQ ID NO: 5369933 - DNA, 25 bp, Homo sapien
ggcaacaaagttcatgatcaaagta

SEQ ID NO: 5369934 - DNA, 25 bp, Homo sapien
agttcatgatcaaagtaatgtcagc

SEQ ID NO: 5369935 - DNA, 25 bp, Homo sapien
catgatcaaagtaatgtcagctaag

SEQ ID NO: 5369936 - DNA, 25 bp, Homo sapien
catgttgggcatagatgggaagata

SEQ ID NO: 5369937 - DNA, 25 bp, Homo sapien
caggggaatggtcataccccagcga

SEQ ID NO: 5369938 - DNA, 25 bp, Homo sapien
gggcaggcatggctaactttgcatt

SEQ ID NO: 5369939 - DNA, 25 bp, Homo sapien
atttaggacagatccccttggcagc

SEQ ID NO: 5369940 - DNA, 25 bp, Homo sapien
tgatatccagtttcctggttcaagc

SEQ ID NO: 5369941 - DNA, 25 bp, Homo sapien
ttaagatgatatccagtttcctggt

SEQ ID NO: 5369942 - DNA, 25 bp, Homo sapien
taagatgatatccagtttcctggtt

SEQ ID NO: 5369943 - DNA, 25 bp, Homo sapien
gatgatatccagtttcctggttcaa

SEQ ID NO: 5369944 - DNA, 25 bp, Homo sapien
tggacatctgggagatacattcggg

SEQ ID NO: 5369945 - DNA, 25 bp, Homo sapien
acatctgggagatgatacattcggg

SEQ ID NO: 5369946 - DNA, 25 bp, Homo sapien
gacgagttcagttttgccgatggcg

SEQ ID NO: 5369947 - DNA, 25 bp, Homo sapien
cgagttcagttttgccgatggcgta

SEQ ID NO: 5369948 - DNA, 25 bp, Homo sapien
ggaaagaggacgagttcagttttgc

SEQ ID NO: 5369949 - DNA, 25 bp, Homo sapien
tttgcagatggcgtattctggacat

SEQ ID NO: 5369950 - DNA, 25 bp, Homo sapien
gaaagaggacgagttcagttttgca

SEQ ID NO: 5369951 - DNA, 25 bp, Homo sapien
agttttgcagatggcgtattctgga

SEQ ID NO: 5369952 - DNA, 25 bp, Homo sapien
ttcagtagtttccttatgatgtctc

SEQ ID NO: 5369953 - DNA, 25 bp, Homo sapien
gatgtctctaagtgagaatctcttt

SEQ ID NO: 5369954 - DNA, 25 bp, Homo sapien
gaaatgttgttcaattgcattctgg

SEQ ID NO: 5369955 - DNA, 25 bp, Homo sapien
gcccggcctggcctctatggtttct

SEQ ID NO: 5369956 - DNA, 25 bp, Homo sapien
cattaattgttgggttcccaaacat

SEQ ID NO: 5369957 - DNA, 25 bp, Homo sapien
ctgcattaattgttgggttcccaaa

SEQ ID NO: 5369958 - DNA, 25 bp, Homo sapien
tgcattaattgttgggttcccaaac

SEQ ID NO: 5369959 - DNA, 25 bp, Homo sapien
gcattaattgttgggttcccaaaca

SEQ ID NO: 5369960 - DNA, 25 bp, Homo sapien
cttgagaatcttgctccaaatttta

SEQ ID NO: 5369961 - DNA, 25 bp, Homo sapien
tcttgctccaaattttatcctcccc

SEQ ID NO: 5369962 - DNA, 25 bp, Homo sapien
tgcttccttgagaatcttgctccaa

SEQ ID NO: 5369963 - DNA, 25 bp, Homo sapien
cttaggatcttgttgcttccttgag

SEQ ID NO: 5369964 - DNA, 25 bp, Homo sapien
tccacttgtagacatcctcaggctc

SEQ ID NO: 5369965 - DNA, 25 bp, Homo sapien
tagacatcctcaggctcgtccaaga

SEQ ID NO: 5369966 - DNA, 25 bp, Homo sapien
ttcttccacttgtagacatcctcag

SEQ ID NO: 5369967 - DNA, 25 bp, Homo sapien
ttgtagacatcctcaggctcgtcca

SEQ ID NO: 5369968 - DNA, 25 bp, Homo sapien
tctttctgagccttggatcctcctc

SEQ ID NO: 5369969 - DNA, 25 bp, Homo sapien
tttctgagccttggatcctcctcca

SEQ ID NO: 5369970 - DNA, 25 bp, Homo sapien
ttctctttctgagccttggatcctc

SEQ ID NO: 5369971 - DNA, 25 bp, Homo sapien
ctccttctctttctgagccttggat

SEQ ID NO: 5369972 - DNA, 25 bp, Homo sapien
tcaaaatgatccagaacaataggca

SEQ ID NO: 5369973 - DNA, 25 bp, Homo sapien
cattgtgtgaacacgccatgatttg

SEQ ID NO: 5369974 - DNA, 25 bp, Homo sapien
caacatgatgcctagtggattcacc

SEQ ID NO: 5369975 - DNA, 25 bp, Homo sapien
gtttctgtgtgcatccgcagttcat

SEQ ID NO: 5369976 - DNA, 25 bp, Homo sapien
tactccaatgctctgcaaatggctg

SEQ ID NO: 5369977 - DNA, 25 bp, Homo sapien
aaagccagtgctttcccgagatctg

SEQ ID NO: 5369978 - DNA, 25 bp, Homo sapien
gaggcaaagaaacgtaacacccagc

SEQ ID NO: 5369979 - DNA, 25 bp, Homo sapien
tctggatctaagaggtctggcttct

SEQ ID NO: 5369980 - DNA, 25 bp, Homo sapien
gatcggcgaagtcctagtgtaacac

SEQ ID NO: 5369981 - DNA, 25 bp, Homo sapien
tccagctgggaatagtgtctacctc

SEQ ID NO: 5369982 - DNA, 25 bp, Homo sapien
tcaacattgagagtatccagctggg

SEQ ID NO: 5369983 - DNA, 25 bp, Homo sapien
gactactgcacttccccaaatgagg

SEQ ID NO: 5369984 - DNA, 25 bp, Homo sapien
gtttccactcggcagctgagatctg

SEQ ID NO: 5369985 - DNA, 25 bp, Homo sapien
aaccttgtggaccaatgttactgca

SEQ ID NO: 5369986 - DNA, 25 bp, Homo sapien
tacatgcaaactacctgtcacatcc

SEQ ID NO: 5369987 - DNA, 25 bp, Homo sapien
tcccatagctatggtgtgagaatgg

SEQ ID NO: 5369988 - DNA, 25 bp, Homo sapien
tgaggacaagccatccattatgcaa

SEQ ID NO: 5369989 - DNA, 25 bp, Homo sapien
cagtcctggtgagtgttgtggtaca

SEQ ID NO: 5369990 - DNA, 25 bp, Homo sapien
tcataggtggcactccagtcctggt

SEQ ID NO: 5369991 - DNA, 25 bp, Homo sapien
agttgtgagaagtgatcacgtgctc

SEQ ID NO: 5369992 - DNA, 25 bp, Homo sapien
gatatgatcacatgttatgggatca

SEQ ID NO: 5369993 - DNA, 25 bp, Homo sapien
tggcagtagctattggtaatgatga

SEQ ID NO: 5369994 - DNA, 25 bp, Homo sapien
tcatcattgtcatggctagtaagcc

SEQ ID NO: 5369995 - DNA, 25 bp, Homo sapien
ggctagtaagcctacagatctttaa

SEQ ID NO: 5369996 - DNA, 25 bp, Homo sapien
tctggagtgctcaaactacatgact

SEQ ID NO: 5369997 - DNA, 25 bp, Homo sapien
tacatcaattgaacaaggtcacagg

SEQ ID NO: 5369998 - DNA, 25 bp, Homo sapien
caatcccagtaataatgctagcagg

SEQ ID NO: 5369999 - DNA, 25 bp, Homo sapien
tcatgtttgcagattggaagactca

SEQ ID NO: 5370000 - DNA, 25 bp, Homo sapien
aggagaacggataagcaaactgagc

SEQ ID NO: 5370001 - DNA, 25 bp, Homo sapien
tagccattcggtatatgaagagaca

SEQ ID NO: 5370002 - DNA, 25 bp, Homo sapien
tatgtttacaagaagactcacggag

SEQ ID NO: 5370003 - DNA, 25 bp, Homo sapien
gacacttatcattactcatttggga

SEQ ID NO: 5370004 - DNA, 25 bp, Homo sapien
tgaatggactcagcctgactctggg

SEQ ID NO: 5370005 - DNA, 25 bp, Homo sapien
tatatatgttcacagggcctgcaag

SEQ ID NO: 5370006 - DNA, 25 bp, Homo sapien
gaggaatggcccctggtaaacatgt

SEQ ID NO: 5370007 - DNA, 25 bp, Homo sapien
tctggcatccaggttcaaaagcatg

SEQ ID NO: 5370008 - DNA, 25 bp, Homo sapien
gggagaccgacagccagttgtagtg

SEQ ID NO: 5370009 - DNA, 25 bp, Homo sapien
tgatgaagctcccttggccatcaca

SEQ ID NO: 5370010 - DNA, 25 bp, Homo sapien
gatgaagctcccttggccatcacat

SEQ ID NO: 5370011 - DNA, 25 bp, Homo sapien
gtttcccattgtgggaccccaggca

SEQ ID NO: 5370012 - DNA, 25 bp, Homo sapien
ggccttggctaactgcctgtgtgag

SEQ ID NO: 5370013 - DNA, 25 bp, Homo sapien
gcactttctgcatatcaggccttgg

SEQ ID NO: 5370014 - DNA, 25 bp, Homo sapien
tcaggccttggctaactgcctgtgt

SEQ ID NO: 5370015 - DNA, 25 bp, Homo sapien
actttctgcatatcaggccttggct

SEQ ID NO: 5370016 - DNA, 25 bp, Homo sapien
tagccgaagacatgtgctatcctcc

SEQ ID NO: 5370017 - DNA, 25 bp, Homo sapien
aagacatgtgctatcctccctgggt

SEQ ID NO: 5370018 - DNA, 25 bp, Homo sapien
ttcaccagtgtagccgaagacatgt

SEQ ID NO: 5370019 - DNA, 25 bp, Homo sapien
ctgtggagcaggcacgatgccttca

SEQ ID NO: 5370020 - DNA, 25 bp, Homo sapien
taataatacatcctgggtatcagct

SEQ ID NO: 5370021 - DNA, 25 bp, Homo sapien
cctcttttagattcactgtgtcaca

SEQ ID NO: 5370022 - DNA, 25 bp, Homo sapien
taatacatcctgggtatcagctgca

SEQ ID NO: 5370023 - DNA, 25 bp, Homo sapien
gtaataataatacatcctgggtatc

SEQ ID NO: 5370024 - DNA, 25 bp, Homo sapien
ggagtctcatacaatctcccttgag

SEQ ID NO: 5370025 - DNA, 25 bp, Homo sapien
taggttctaccctataggagtctca

SEQ ID NO: 5370026 - DNA, 25 bp, Homo sapien
gaagcttaggtgtctagccttggct

SEQ ID NO: 5370027 - DNA, 25 bp, Homo sapien
tccaatcaagcttaattgaggtgag

SEQ ID NO: 5370028 - DNA, 25 bp, Homo sapien
taataagttttatgtctgggcttcc

SEQ ID NO: 5370029 - DNA, 25 bp, Homo sapien
gattgctgattatatcttccacctg

SEQ ID NO: 5370030 - DNA, 25 bp, Homo sapien
tcatagagatctacaggtttctgag

SEQ ID NO: 5370031 - DNA, 25 bp, Homo sapien
tcttgtgtagccactgacgtctctg

SEQ ID NO: 5370032 - DNA, 25 bp, Homo sapien
tagggaaactggaactcgtgtacac

SEQ ID NO: 5370033 - DNA, 25 bp, Homo sapien
catatggtcaaatacaacttgctca

SEQ ID NO: 5370034 - DNA, 25 bp, Homo sapien
gaagctggtcgcaaaagatcacaca

SEQ ID NO: 5370035 - DNA, 25 bp, Homo sapien
tgctcaaaacaattagtcattaggg

SEQ ID NO: 5370036 - DNA, 25 bp, Homo sapien
cagtcaggtcactgagtttatggca

SEQ ID NO: 5370037 - DNA, 25 bp, Homo sapien
tggctgacaggtgggtcatcaaagc

SEQ ID NO: 5370038 - DNA, 25 bp, Homo sapien
tacaggatcctcagtgacggaggcc

SEQ ID NO: 5370039 - DNA, 25 bp, Homo sapien
aaagctctggcgcagacgtgactga

SEQ ID NO: 5370040 - DNA, 25 bp, Homo sapien
ggttctccaggtggtaagatgtgca

SEQ ID NO: 5370041 - DNA, 25 bp, Homo sapien
tgccaaggaagtgggcaggcctctc

SEQ ID NO: 5370042 - DNA, 25 bp, Homo sapien
aggcctctcgggcaagccttttgaa

SEQ ID NO: 5370043 - DNA, 25 bp, Homo sapien
ctcgggcaagccttttgaatgtggg

SEQ ID NO: 5370044 - DNA, 25 bp, Homo sapien
agagtgcagaggctccgagaatcca

SEQ ID NO: 5370045 - DNA, 25 bp, Homo sapien
gcggccttggcctattctgagctca

SEQ ID NO: 5370046 - DNA, 25 bp, Homo sapien
gacacagagcagacattatgaggga

SEQ ID NO: 5370047 - DNA, 25 bp, Homo sapien
gaatccactcttgcataaaacgttg

SEQ ID NO: 5370048 - DNA, 25 bp, Homo sapien
gattccttgggaaagatccaggttc

SEQ ID NO: 5370049 - DNA, 25 bp, Homo sapien
tttagcaattatacagtgggagttc

SEQ ID NO: 5370050 - DNA, 25 bp, Homo sapien
tgatatctgctatggcaacccaggg

SEQ ID NO: 5370051 - DNA, 25 bp, Homo sapien
gttcctcatgaaagacggccgtaat

SEQ ID NO: 5370052 - DNA, 25 bp, Homo sapien
ggttcagcagctgggcgaccaatat

SEQ ID NO: 5370053 - DNA, 25 bp, Homo sapien
gaccaatatcctttctaggctcctc

SEQ ID NO: 5370054 - DNA, 25 bp, Homo sapien
aagtggctaagcctccagcctgcag

SEQ ID NO: 5370055 - DNA, 25 bp, Homo sapien
caggtgcccagcataaaatagattt

SEQ ID NO: 5370056 - DNA, 25 bp, Homo sapien
ccttctcatgggctacatagtgcat

SEQ ID NO: 5370057 - DNA, 25 bp, Homo sapien
tgggcattggcgtgtagtttttaaa

SEQ ID NO: 5370058 - DNA, 25 bp, Homo sapien
agcattattgggcattggcgtgtag

SEQ ID NO: 5370059 - DNA, 25 bp, Homo sapien
taaaggaagtgtctggacaattgtg

SEQ ID NO: 5370060 - DNA, 25 bp, Homo sapien
gggtgccaggtcacagagcattttt

SEQ ID NO: 5370061 - DNA, 25 bp, Homo sapien
agagcctttaatgcactgtggttcc

SEQ ID NO: 5370062 - DNA, 25 bp, Homo sapien
tgacgaatgcactctgggagatgtg

SEQ ID NO: 5370063 - DNA, 25 bp, Homo sapien
taattgtattcccatatgtgtcccg

SEQ ID NO: 5370064 - DNA, 25 bp, Homo sapien
ctctatgaattcaggaacgaaaatc

SEQ ID NO: 5370065 - DNA, 25 bp, Homo sapien
tctatgaattcaggaacgaaaatca

SEQ ID NO: 5370066 - DNA, 25 bp, Homo sapien
atgaattcaggaacgaaaatcacaa

SEQ ID NO: 5370067 - DNA, 25 bp, Homo sapien
ctatgaattcaggaacgaaaatcac

SEQ ID NO: 5370068 - DNA, 25 bp, Homo sapien
tcttgaagcagtcagtgctcccagg

SEQ ID NO: 5370069 - DNA, 25 bp, Homo sapien
tttttgcttaacattgcagggcacc

SEQ ID NO: 5370070 - DNA, 25 bp, Homo sapien
aagagtgaggctaactcaagaccca

SEQ ID NO: 5370071 - DNA, 25 bp, Homo sapien
ccccatgaagagtggagtctgcctt

SEQ ID NO: 5370072 - DNA, 25 bp, Homo sapien
ttgagagtctcctgcaaaggtgagg

SEQ ID NO: 5370073 - DNA, 25 bp, Homo sapien
caaggtccttgagtgccaagggcaa

SEQ ID NO: 5370074 - DNA, 25 bp, Homo sapien
gggcaaatgtcccatagtaggaact

SEQ ID NO: 5370075 - DNA, 25 bp, Homo sapien
gagtcctggacttcacctgcctgat

SEQ ID NO: 5370076 - DNA, 25 bp, Homo sapien
tgcaggcccagactttaacaaaagc

SEQ ID NO: 5370077 - DNA, 25 bp, Homo sapien
tcatccacctgagtactagcctggg

SEQ ID NO: 5370078 - DNA, 25 bp, Homo sapien
gccgggcagccaggttaacttattg

SEQ ID NO: 5370079 - DNA, 25 bp, Homo sapien
catacgcgggttctgagtcatcctg

SEQ ID NO: 5370080 - DNA, 25 bp, Homo sapien
ttaatctttcttccgtaggtagcca

SEQ ID NO: 5370081 - DNA, 25 bp, Homo sapien
gtttggtaatgacacctcctcggtg

SEQ ID NO: 5370082 - DNA, 25 bp, Homo sapien
tcggtgaagcgcaaggccaccttga

SEQ ID NO: 5370083 - DNA, 25 bp, Homo sapien
taggtagccaatgtccagcacgttt

SEQ ID NO: 5370084 - DNA, 25 bp, Homo sapien
cccaggtccagggatctcagtccta

SEQ ID NO: 5370085 - DNA, 25 bp, Homo sapien
gcctggagtttgatgtaggccagtg

SEQ ID NO: 5370086 - DNA, 25 bp, Homo sapien
tttgatgtaggccagtggtgtctgg

SEQ ID NO: 5370087 - DNA, 25 bp, Homo sapien
tgtggcctggagtttgatgtaggcc

SEQ ID NO: 5370088 - DNA, 25 bp, Homo sapien
aaagatatggtagatgccaaataca

SEQ ID NO: 5370089 - DNA, 25 bp, Homo sapien
caaagatatggtagatgccaaatac

SEQ ID NO: 5370090 - DNA, 25 bp, Homo sapien
gatgcaaagatatggtagatgccaa

SEQ ID NO: 5370091 - DNA, 25 bp, Homo sapien
atgcaaagatatggtagatgccaaa

SEQ ID NO: 5370092 - DNA, 25 bp, Homo sapien
ggtggaaagctgtcaggacaggggg

SEQ ID NO: 5370093 - DNA, 25 bp, Homo sapien
aaagctgtcaggacaggggggccta

SEQ ID NO: 5370094 - DNA, 25 bp, Homo sapien
tcaggacaggggggcctagcttcat

SEQ ID NO: 5370095 - DNA, 25 bp, Homo sapien
agaagtggggaggtgcattgcccct

SEQ ID NO: 5370096 - DNA, 25 bp, Homo sapien
tagctgcctaatagggctattgtgg

SEQ ID NO: 5370097 - DNA, 25 bp, Homo sapien
aataatactagctgcctaatagggc

SEQ ID NO: 5370098 - DNA, 25 bp, Homo sapien
gctattgtggaagttaaatggagaa

SEQ ID NO: 5370099 - DNA, 25 bp, Homo sapien
actcaacaacagctagcactcaaca

SEQ ID NO: 5370100 - DNA, 25 bp, Homo sapien
gaaccctgagttgaaggaagccctg

SEQ ID NO: 5370101 - DNA, 25 bp, Homo sapien
gctcatcctgttaacatggtggtgg

SEQ ID NO: 5370102 - DNA, 25 bp, Homo sapien
cagagtagtcttggaccaggtctga

SEQ ID NO: 5370103 - DNA, 25 bp, Homo sapien
caaacagcatactgaataggctctg

SEQ ID NO: 5370104 - DNA, 25 bp, Homo sapien
cccatctgtgctccaagctcagaag

SEQ ID NO: 5370105 - DNA, 25 bp, Homo sapien
atctgtgctccaagctcagaagtct

SEQ ID NO: 5370106 - DNA, 25 bp, Homo sapien
gtccccgtgcttcctcaccagcggg

SEQ ID NO: 5370107 - DNA, 25 bp, Homo sapien
tcaccagcggggctctctccacggg

SEQ ID NO: 5370108 - DNA, 25 bp, Homo sapien
caccaaggcttttcctcggcattaa

SEQ ID NO: 5370109 - DNA, 25 bp, Homo sapien
aagttcaccaaggttacatgcaggg

SEQ ID NO: 5370110 - DNA, 25 bp, Homo sapien
gacctccatggagcggatgacctga

SEQ ID NO: 5370111 - DNA, 25 bp, Homo sapien
tgcttacaagaagactgcgcagact

SEQ ID NO: 5370112 - DNA, 25 bp, Homo sapien
tgtcctggccgctcctgtcgggaga

SEQ ID NO: 5370113 - DNA, 25 bp, Homo sapien
taaacctccggacagaagagctcca

SEQ ID NO: 5370114 - DNA, 25 bp, Homo sapien
cctggccgctcctgtcgggagagaa

SEQ ID NO: 5370115 - DNA, 25 bp, Homo sapien
actaaacctccggacagaagagctc

SEQ ID NO: 5370116 - DNA, 25 bp, Homo sapien
acagtggtcatagggaatgtcagca

SEQ ID NO: 5370117 - DNA, 25 bp, Homo sapien
ggctggaacgctctctgtacggagt

SEQ ID NO: 5370118 - DNA, 25 bp, Homo sapien
tcaaaatgagtgaggcgttaggcca

SEQ ID NO: 5370119 - DNA, 25 bp, Homo sapien
cacaggaagtaacaggagagcttga

SEQ ID NO: 5370120 - DNA, 25 bp, Homo sapien
cttctggagaggagtcatttgctaa

SEQ ID NO: 5370121 - DNA, 25 bp, Homo sapien
ccccgcctgggagacaactgattct

SEQ ID NO: 5370122 - DNA, 25 bp, Homo sapien
gattctccaaagcacactagtggcc

SEQ ID NO: 5370123 - DNA, 25 bp, Homo sapien
ccagcagctctgagtgtgccacaaa

SEQ ID NO: 5370124 - DNA, 25 bp, Homo sapien
tacttcggcccatgtgatcaccaag

SEQ ID NO: 5370125 - DNA, 25 bp, Homo sapien
tgtggtcttgatgcaccgcccttgt

SEQ ID NO: 5370126 - DNA, 25 bp, Homo sapien
tattagacaataagagctgcacacc

SEQ ID NO: 5370127 - DNA, 25 bp, Homo sapien
accttacatggtagatcaggcctga

SEQ ID NO: 5370128 - DNA, 25 bp, Homo sapien
gccttcctcagatatctgggggccg

SEQ ID NO: 5370129 - DNA, 25 bp, Homo sapien
tcagccttcctcagatatctggggg

SEQ ID NO: 5370130 - DNA, 25 bp, Homo sapien
gctcagccttcctcagatatctggg

SEQ ID NO: 5370131 - DNA, 25 bp, Homo sapien
cagccttcctcagatatctgggggc

SEQ ID NO: 5370132 - DNA, 25 bp, Homo sapien
tctgtaatgataacatgtggttcca

SEQ ID NO: 5370133 - DNA, 25 bp, Homo sapien
tagcatagagttaggtcacttttaa

SEQ ID NO: 5370134 - DNA, 25 bp, Homo sapien
gtgaatatagcccttttgcttccag

SEQ ID NO: 5370135 - DNA, 25 bp, Homo sapien
taagcatttattgtagggtcagtct

SEQ ID NO: 5370136 - DNA, 25 bp, Homo sapien
cctctagatgggcaaaaggagtctc

SEQ ID NO: 5370137 - DNA, 25 bp, Homo sapien
gaggagaataccaggctcaccagga

SEQ ID NO: 5370138 - DNA, 25 bp, Homo sapien
caggcctacggagaccaagagtgct

SEQ ID NO: 5370139 - DNA, 25 bp, Homo sapien
tgccaagttgggatcaggtaatacc

SEQ ID NO: 5370140 - DNA, 25 bp, Homo sapien
ctctcacctcactcctattttaagt

SEQ ID NO: 5370141 - DNA, 25 bp, Homo sapien
aactgtccacttgacgtccatgagc

SEQ ID NO: 5370142 - DNA, 25 bp, Homo sapien
gaaatataggaaataccagctgaga

SEQ ID NO: 5370143 - DNA, 25 bp, Homo sapien
agcaagtccacagagctttttaaca

SEQ ID NO: 5370144 - DNA, 25 bp, Homo sapien
ggtcttacccttcctatgagagagg

SEQ ID NO: 5370145 - DNA, 25 bp, Homo sapien
tgtttcccggtctacataaatgaga

SEQ ID NO: 5370146 - DNA, 25 bp, Homo sapien
tcataggatcactgaacaagggctc

SEQ ID NO: 5370147 - DNA, 25 bp, Homo sapien
tgtaggtacaaagttcccctggtgc

SEQ ID NO: 5370148 - DNA, 25 bp, Homo sapien
tagatggacagccttccatgatggg

SEQ ID NO: 5370149 - DNA, 25 bp, Homo sapien
catgtgctgtgtctaagttgtggac

SEQ ID NO: 5370150 - DNA, 25 bp, Homo sapien
gacacagggcttcacagtggctgct

SEQ ID NO: 5370151 - DNA, 25 bp, Homo sapien
atctctctgcaaggaccctgggttg

SEQ ID NO: 5370152 - DNA, 25 bp, Homo sapien
ttttctgtgcctgttggtgattcca

SEQ ID NO: 5370153 - DNA, 25 bp, Homo sapien
tgcctgttggtgattccagcacagc

SEQ ID NO: 5370154 - DNA, 25 bp, Homo sapien
cagcgtatatgggagacaaaaagaa

SEQ ID NO: 5370155 - DNA, 25 bp, Homo sapien
gcacagcccagcgtatatgggagac

SEQ ID NO: 5370156 - DNA, 25 bp, Homo sapien
tgagtttaaccatcttgttccagaa

SEQ ID NO: 5370157 - DNA, 25 bp, Homo sapien
agtcctgaggtttcttgcaagtaca

SEQ ID NO: 5370158 - DNA, 25 bp, Homo sapien
gctttcagagccctttatcattgtc

SEQ ID NO: 5370159 - DNA, 25 bp, Homo sapien
ttccagaactggaagtcggcagagc

SEQ ID NO: 5370160 - DNA, 25 bp, Homo sapien
acctacttattaagcctgacatgca

SEQ ID NO: 5370161 - DNA, 25 bp, Homo sapien
acttattaagcctgacatgcattag

SEQ ID NO: 5370162 - DNA, 25 bp, Homo sapien
tacatgtgtagtatttgtaggtttg

SEQ ID NO: 5370163 - DNA, 25 bp, Homo sapien
tggccattttggttgattctatgtc

SEQ ID NO: 5370164 - DNA, 25 bp, Homo sapien
ttcatagggccacggtaaaaccagc

SEQ ID NO: 5370165 - DNA, 25 bp, Homo sapien
tttgaggcaccagacaacgaaagcc

SEQ ID NO: 5370166 - DNA, 25 bp, Homo sapien
gggaagcaagtctcacacatccggg

SEQ ID NO: 5370167 - DNA, 25 bp, Homo sapien
tactcgatttcaggccagcaagaca

SEQ ID NO: 5370168 - DNA, 25 bp, Homo sapien
atgttttaactgtcgagttccatgc

SEQ ID NO: 5370169 - DNA, 25 bp, Homo sapien
cgagttccatgctccgcctcctcgg

SEQ ID NO: 5370170 - DNA, 25 bp, Homo sapien
tctcttaaatgttttaactgtcgag

SEQ ID NO: 5370171 - DNA, 25 bp, Homo sapien
taactgtcgagttccatgctccgcc

SEQ ID NO: 5370172 - DNA, 25 bp, Homo sapien
ttggccgccggcgaggctgggcttc

SEQ ID NO: 5370173 - DNA, 25 bp, Homo sapien
gagccccagatcctgacagagccag

SEQ ID NO: 5370174 - DNA, 25 bp, Homo sapien
ggcctcgcggtgaacttggccgccg

SEQ ID NO: 5370175 - DNA, 25 bp, Homo sapien
tgtgttgtgacagaaaaggctgcct

SEQ ID NO: 5370176 - DNA, 25 bp, Homo sapien
ttagagccaaaatcagtcaacgcgg

SEQ ID NO: 5370177 - DNA, 25 bp, Homo sapien
gctgtcagtctagaagcccctgggc

SEQ ID NO: 5370178 - DNA, 25 bp, Homo sapien
tgcagagccgggtagtttcagagtc

SEQ ID NO: 5370179 - DNA, 25 bp, Homo sapien
cccagcgtgggcttaactgatgcta

SEQ ID NO: 5370180 - DNA, 25 bp, Homo sapien
cagtctgatagtgttcttttgagga

SEQ ID NO: 5370181 - DNA, 25 bp, Homo sapien
tctgatagtgttcttttgaggatac

SEQ ID NO: 5370182 - DNA, 25 bp, Homo sapien
aaagatgctggtgactgcagccttt

SEQ ID NO: 5370183 - DNA, 25 bp, Homo sapien
tggaaaagatgctggtgactgcagc

SEQ ID NO: 5370184 - DNA, 25 bp, Homo sapien
atttgctggtgggataggaattttc

SEQ ID NO: 5370185 - DNA, 25 bp, Homo sapien
cgggctgatttgctggtgggatagg

SEQ ID NO: 5370186 - DNA, 25 bp, Homo sapien
ctgatttgctggtgggataggaatt

SEQ ID NO: 5370187 - DNA, 25 bp, Homo sapien
ggctgatttgctggtgggataggaa

SEQ ID NO: 5370188 - DNA, 25 bp, Homo sapien
ctgtcccgtgttgatctctttatct

SEQ ID NO: 5370189 - DNA, 25 bp, Homo sapien
gtcccgtgttgatctctttatctgg

SEQ ID NO: 5370190 - DNA, 25 bp, Homo sapien
cccgtgttgatctctttatctggga

SEQ ID NO: 5370191 - DNA, 25 bp, Homo sapien
ccgtgttgatctctttatctgggag

SEQ ID NO: 5370192 - DNA, 25 bp, Homo sapien
agctccaagattccgacaggaaccc

SEQ ID NO: 5370193 - DNA, 25 bp, Homo sapien
aatctcaagtttgggggatgagctc

SEQ ID NO: 5370194 - DNA, 25 bp, Homo sapien
gatgagctccaagattccgacagga

SEQ ID NO: 5370195 - DNA, 25 bp, Homo sapien
gggatgagctccaagattccgacag

SEQ ID NO: 5370196 - DNA, 25 bp, Homo sapien
cagggagctccccaacaattctcag

SEQ ID NO: 5370197 - DNA, 25 bp, Homo sapien
gccctccgtgggcagggagctcccc

SEQ ID NO: 5370198 - DNA, 25 bp, Homo sapien
cctccgtgggcagggagctccccaa

SEQ ID NO: 5370199 - DNA, 25 bp, Homo sapien
tctcagccagcaagagaagcctttg

SEQ ID NO: 5370200 - DNA, 25 bp, Homo sapien
gaatgcacagttgtcttccttaaag

SEQ ID NO: 5370201 - DNA, 25 bp, Homo sapien
tgcacagttgtcttccttaaagttt

SEQ ID NO: 5370202 - DNA, 25 bp, Homo sapien
gagaatgcacagttgtcttccttaa

SEQ ID NO: 5370203 - DNA, 25 bp, Homo sapien
acagagaatgcacagttgtcttcct

SEQ ID NO: 5370204 - DNA, 25 bp, Homo sapien
tatgttcacaagaacgtatgttcca

SEQ ID NO: 5370205 - DNA, 25 bp, Homo sapien
ggtgaccaggagttgttcacattac

SEQ ID NO: 5370206 - DNA, 25 bp, Homo sapien
tacatcgacataagaaaatgccact

SEQ ID NO: 5370207 - DNA, 25 bp, Homo sapien
aaatgccactctctatgttcacaag

SEQ ID NO: 5370208 - DNA, 25 bp, Homo sapien
gaacaagtaagctcccaagtctcag

SEQ ID NO: 5370209 - DNA, 25 bp, Homo sapien
aaagactgggtcatcgagtttggga

SEQ ID NO: 5370210 - DNA, 25 bp, Homo sapien
gtaggctggcatgtggatccacccc

SEQ ID NO: 5370211 - DNA, 25 bp, Homo sapien
cacagaccgtgctggcatgtaccaa

SEQ ID NO: 5370212 - DNA, 25 bp, Homo sapien
caggtgggtcctcgcacagtgaatc

SEQ ID NO: 5370213 - DNA, 25 bp, Homo sapien
ggtgtcaggtgggtcctcgcacagt

SEQ ID NO: 5370214 - DNA, 25 bp, Homo sapien
tgtcaggtgggtcctcgcacagtga

SEQ ID NO: 5370215 - DNA, 25 bp, Homo sapien
gtgtcaggtgggtcctcgcacagtg

SEQ ID NO: 5370216 - DNA, 25 bp, Homo sapien
cttcagccagccattggtcacctta

SEQ ID NO: 5370217 - DNA, 25 bp, Homo sapien
ttcagccagccattggtcaccttac

SEQ ID NO: 5370218 - DNA, 25 bp, Homo sapien
gacggtcctgtaagtgtaacccaca

SEQ ID NO: 5370219 - DNA, 25 bp, Homo sapien
acagactgaaaatgacccatggcaa

SEQ ID NO: 5370220 - DNA, 25 bp, Homo sapien
caagtagggcatgagtggcattcca

SEQ ID NO: 5370221 - DNA, 25 bp, Homo sapien
tgtataaaccacgtgacagctcgga

SEQ ID NO: 5370222 - DNA, 25 bp, Homo sapien
tctggattcctcccagcaaacctga

SEQ ID NO: 5370223 - DNA, 25 bp, Homo sapien
ttctggattcctcccagcaaacctg

SEQ ID NO: 5370224 - DNA, 25 bp, Homo sapien
aagcgctgacgcatatcaaaccaca

SEQ ID NO: 5370225 - DNA, 25 bp, Homo sapien
gatatgaaagtcctgcctagagtgg

SEQ ID NO: 5370226 - DNA, 25 bp, Homo sapien
catcatgtgacagttagataaagga

SEQ ID NO: 5370227 - DNA, 25 bp, Homo sapien
tatgccaaagtcataagcgctgacg

SEQ ID NO: 5370228 - DNA, 25 bp, Homo sapien
tcggctacaatgttgaggagactcc

SEQ ID NO: 5370229 - DNA, 25 bp, Homo sapien
tacagggcagacgtgaaatatgacc

SEQ ID NO: 5370230 - DNA, 25 bp, Homo sapien
tgtcaggtctgatgaaccctccagc

SEQ ID NO: 5370231 - DNA, 25 bp, Homo sapien
tatgaccttcgagggaaaagctggc

SEQ ID NO: 5370232 - DNA, 25 bp, Homo sapien
tgactctgcttctagtaaggcagcc

SEQ ID NO: 5370233 - DNA, 25 bp, Homo sapien
ttgaggagtcagtgtttgtaaagca

SEQ ID NO: 5370234 - DNA, 25 bp, Homo sapien
tccagaactgtcgaggaactgccaa

SEQ ID NO: 5370235 - DNA, 25 bp, Homo sapien
gagatgaccgtgtgttgaggagtca

SEQ ID NO: 5370236 - DNA, 25 bp, Homo sapien
aatgaaggacaagggattaagacac

SEQ ID NO: 5370237 - DNA, 25 bp, Homo sapien
caaatgggaaaccgaccagaccagc

SEQ ID NO: 5370238 - DNA, 25 bp, Homo sapien
ttaatgaaggacaagggattaagac

SEQ ID NO: 5370239 - DNA, 25 bp, Homo sapien
accagaccagcccatgaccaaaata

SEQ ID NO: 5370240 - DNA, 25 bp, Homo sapien
aaccaggccccagggaatctttcag

SEQ ID NO: 5370241 - DNA, 25 bp, Homo sapien
aggccccagggaatctttcagctgc

SEQ ID NO: 5370242 - DNA, 25 bp, Homo sapien
tttcagctgcattccggctgtgatc

SEQ ID NO: 5370243 - DNA, 25 bp, Homo sapien
gatcggcgggcaacaggtagaggtg

SEQ ID NO: 5370244 - DNA, 25 bp, Homo sapien
gagggggatgagtcgtgattttcag

SEQ ID NO: 5370245 - DNA, 25 bp, Homo sapien
gatgagtcgtgattttcagtgtctg

SEQ ID NO: 5370246 - DNA, 25 bp, Homo sapien
gggatgagtcgtgattttcagtgtc

SEQ ID NO: 5370247 - DNA, 25 bp, Homo sapien
gagtcgtgattttcagtgtctgtca

SEQ ID NO: 5370248 - DNA, 25 bp, Homo sapien
gtgtgtcatagagcttcctgtttca

SEQ ID NO: 5370249 - DNA, 25 bp, Homo sapien
attcgatcaagtgtgtcatagagct

SEQ ID NO: 5370250 - DNA, 25 bp, Homo sapien
aagtgtgtcatagagcttcctgttt

SEQ ID NO: 5370251 - DNA, 25 bp, Homo sapien
ttcgatcaagtgtgtcatagagctt

SEQ ID NO: 5370252 - DNA, 25 bp, Homo sapien
taatcacaatacacctgggcctagc

SEQ ID NO: 5370253 - DNA, 25 bp, Homo sapien
gaagagtcacacaaggacttacagg

SEQ ID NO: 5370254 - DNA, 25 bp, Homo sapien
gcccctgttgacttggatgaagagt

SEQ ID NO: 5370255 - DNA, 25 bp, Homo sapien
ttctgttaataactgctctgccgct

SEQ ID NO: 5370256 - DNA, 25 bp, Homo sapien
gcacaaagtcagacatagccgggtc

SEQ ID NO: 5370257 - DNA, 25 bp, Homo sapien
cagcacaaagtcagacatagccggg

SEQ ID NO: 5370258 - DNA, 25 bp, Homo sapien
aaagtcagacatagccgggtccacg

SEQ ID NO: 5370259 - DNA, 25 bp, Homo sapien
acaaagtcagacatagccgggtcca

SEQ ID NO: 5370260 - DNA, 25 bp, Homo sapien
cttttgttatcagcccaatcggcaa

SEQ ID NO: 5370261 - DNA, 25 bp, Homo sapien
tggtttgagcagacattttgttccc

SEQ ID NO: 5370262 - DNA, 25 bp, Homo sapien
agcccaatcggcaaattgtggccaa

SEQ ID NO: 5370263 - DNA, 25 bp, Homo sapien
ttttgtcatggtttgagcagacatt

SEQ ID NO: 5370264 - DNA, 25 bp, Homo sapien
cactgtctgagtgattagtacacac

SEQ ID NO: 5370265 - DNA, 25 bp, Homo sapien
cacactgatgtagacacgaataaaa

SEQ ID NO: 5370266 - DNA, 25 bp, Homo sapien
tgtagacacgaataaaaatcttttc

SEQ ID NO: 5370267 - DNA, 25 bp, Homo sapien
gcctttcacactgatgtagacacga

SEQ ID NO: 5370268 - DNA, 25 bp, Homo sapien
caggatgaagcctttcacactgatg

SEQ ID NO: 5370269 - DNA, 25 bp, Homo sapien
ggctaggatggggccatagtgtccc

SEQ ID NO: 5370270 - DNA, 25 bp, Homo sapien
taggatggggccatagtgtccccag

SEQ ID NO: 5370271 - DNA, 25 bp, Homo sapien
caccaggctaggatggggccatagt

SEQ ID NO: 5370272 - DNA, 25 bp, Homo sapien
ctaggatggggccatagtgtcccca

SEQ ID NO: 5370273 - DNA, 25 bp, Homo sapien
gcccaaaccggagtgcagtggagcg

SEQ ID NO: 5370274 - DNA, 25 bp, Homo sapien
atgatccgcccaccttggcctccca

SEQ ID NO: 5370275 - DNA, 25 bp, Homo sapien
cccaaaccggagtgcagtggagcga

SEQ ID NO: 5370276 - DNA, 25 bp, Homo sapien
cttgaacccctgagctcatgatccg

SEQ ID NO: 5370277 - DNA, 25 bp, Homo sapien
tacagtatgagcaaatatggagata

SEQ ID NO: 5370278 - DNA, 25 bp, Homo sapien
tggagataaaaatcgctgacccaga

SEQ ID NO: 5370279 - DNA, 25 bp, Homo sapien
taccagtttgtaagtatatcagcaa

SEQ ID NO: 5370280 - DNA, 25 bp, Homo sapien
taagttatgggcaagccaatataaa

SEQ ID NO: 5370281 - DNA, 25 bp, Homo sapien
caactttgtttaatggcctgggagc

SEQ ID NO: 5370282 - DNA, 25 bp, Homo sapien
ttgagccggtcagatccctagagca

SEQ ID NO: 5370283 - DNA, 25 bp, Homo sapien
caaagcagatagaaggacaggccta

SEQ ID NO: 5370284 - DNA, 25 bp, Homo sapien
cacaggccaggcttgactggcacag

SEQ ID NO: 5370285 - DNA, 25 bp, Homo sapien
tcaggagtatctgttcttgctccca

SEQ ID NO: 5370286 - DNA, 25 bp, Homo sapien
taatcttggagtggatcacaaaact

SEQ ID NO: 5370287 - DNA, 25 bp, Homo sapien
taacaacttgttcaaatggcaacag

SEQ ID NO: 5370288 - DNA, 25 bp, Homo sapien
gacaactgcccctcaataactagta

SEQ ID NO: 5370289 - DNA, 25 bp, Homo sapien
caactcttaattaaatcagaaatgc

SEQ ID NO: 5370290 - DNA, 25 bp, Homo sapien
aactcttaattaaatcagaaatgcc

SEQ ID NO: 5370291 - DNA, 25 bp, Homo sapien
actcttaattaaatcagaaatgcct

SEQ ID NO: 5370292 - DNA, 25 bp, Homo sapien
tcttaattaaatcagaaatgccttt

SEQ ID NO: 5370293 - DNA, 25 bp, Homo sapien
caagtgtagacgactcctccttcat

SEQ ID NO: 5370294 - DNA, 25 bp, Homo sapien
tacaagtgtagacgactcctccttc

SEQ ID NO: 5370295 - DNA, 25 bp, Homo sapien
tttttacaagtgtagacgactcctc

SEQ ID NO: 5370296 - DNA, 25 bp, Homo sapien
tttacaagtgtagacgactcctcct

SEQ ID NO: 5370297 - DNA, 25 bp, Homo sapien
tcattcagcttttttacaagacaca

SEQ ID NO: 5370298 - DNA, 25 bp, Homo sapien
gacacaaatttctttaactcaagga

SEQ ID NO: 5370299 - DNA, 25 bp, Homo sapien
taaaatcccacataccctgtggaac

SEQ ID NO: 5370300 - DNA, 25 bp, Homo sapien
catcctgggtcaatggatggattct

SEQ ID NO: 5370301 - DNA, 25 bp, Homo sapien
caaaaatatgttgagcactggatta

SEQ ID NO: 5370302 - DNA, 25 bp, Homo sapien
agttcagcctcttttcatacccctg

SEQ ID NO: 5370303 - DNA, 25 bp, Homo sapien
gaattagaggccacccatatgacct

SEQ ID NO: 5370304 - DNA, 25 bp, Homo sapien
aacaagtcccaatatgatgccaggg

SEQ ID NO: 5370305 - DNA, 25 bp, Homo sapien
gtcatattgaattagaggccaccca

SEQ ID NO: 5370306 - DNA, 25 bp, Homo sapien
caattcagcccttaacaagtcccaa

SEQ ID NO: 5370307 - DNA, 25 bp, Homo sapien
cactggaatgacatctcagaagacg

SEQ ID NO: 5370308 - DNA, 25 bp, Homo sapien
tactgtgtgggacaggaatgccatc

SEQ ID NO: 5370309 - DNA, 25 bp, Homo sapien
tcagtaagtgaaatccccaatcagc

SEQ ID NO: 5370310 - DNA, 25 bp, Homo sapien
cactttacgcccagagttatgtgtg

SEQ ID NO: 5370311 - DNA, 25 bp, Homo sapien
agaggtcaagggtttctatcagcag

SEQ ID NO: 5370312 - DNA, 25 bp, Homo sapien
tagtgaataattttgcggttgtttc

SEQ ID NO: 5370313 - DNA, 25 bp, Homo sapien
tatgagattcagataatcgtagtga

SEQ ID NO: 5370314 - DNA, 25 bp, Homo sapien
cacagaaggaaccatttttaggatg

SEQ ID NO: 5370315 - DNA, 25 bp, Homo sapien
agggtggattctgcggatgtcaagg

SEQ ID NO: 5370316 - DNA, 25 bp, Homo sapien
tggattctgcggatgtcaagggtga

SEQ ID NO: 5370317 - DNA, 25 bp, Homo sapien
gtggattctgcggatgtcaagggtg

SEQ ID NO: 5370318 - DNA, 25 bp, Homo sapien
aggagggtggattctgcggatgtca

SEQ ID NO: 5370319 - DNA, 25 bp, Homo sapien
gataattactttaggccctaatcca

SEQ ID NO: 5370320 - DNA, 25 bp, Homo sapien
aattgttatgggtggagatgtgtcc

SEQ ID NO: 5370321 - DNA, 25 bp, Homo sapien
gactggccctactaggaaatggaaa

SEQ ID NO: 5370322 - DNA, 25 bp, Homo sapien
ggacatatggcctttaaagaagtaa

SEQ ID NO: 5370323 - DNA, 25 bp, Homo sapien
caccaagtagtatttcgttatagca

SEQ ID NO: 5370324 - DNA, 25 bp, Homo sapien
tagcagtccaagcaaactaatgcac

SEQ ID NO: 5370325 - DNA, 25 bp, Homo sapien
cagtccaagcaaactaatgcacata

SEQ ID NO: 5370326 - DNA, 25 bp, Homo sapien
gcagtccaagcaaactaatgcacat

SEQ ID NO: 5370327 - DNA, 25 bp, Homo sapien
tgactatcacgtttgcccttccaag

SEQ ID NO: 5370328 - DNA, 25 bp, Homo sapien
gtgtcctcatcaattcggcgctgaa

SEQ ID NO: 5370329 - DNA, 25 bp, Homo sapien
caaaggctcttagtctcgtgcatga

SEQ ID NO: 5370330 - DNA, 25 bp, Homo sapien
aatgtctgcactagagggcacacta

SEQ ID NO: 5370331 - DNA, 25 bp, Homo sapien
cagcgatggcaagctgtccatcacg

SEQ ID NO: 5370332 - DNA, 25 bp, Homo sapien
ctggctgggccgcctgtttctccat

SEQ ID NO: 5370333 - DNA, 25 bp, Homo sapien
ggcctggctgggccgcctgtttctc

SEQ ID NO: 5370334 - DNA, 25 bp, Homo sapien
tccatcacgggcagtgaaagggcct

SEQ ID NO: 5370335 - DNA, 25 bp, Homo sapien
gggaaccaagtggaataagtgtcat

SEQ ID NO: 5370336 - DNA, 25 bp, Homo sapien
ccaagtggaataagtgtcatcagtc

SEQ ID NO: 5370337 - DNA, 25 bp, Homo sapien
ctcttagttctgggaaccaagtgga

SEQ ID NO: 5370338 - DNA, 25 bp, Homo sapien
gaataagtgtcatcagtctggtgga

SEQ ID NO: 5370339 - DNA, 25 bp, Homo sapien
cactgcgttcactgtccgctggttc

SEQ ID NO: 5370340 - DNA, 25 bp, Homo sapien
tgtttctggcccatattctctaaaa

SEQ ID NO: 5370341 - DNA, 25 bp, Homo sapien
tggttcccgttatcaggtcctgact

SEQ ID NO: 5370342 - DNA, 25 bp, Homo sapien
tctggcccatattctctaaaagctc

SEQ ID NO: 5370343 - DNA, 25 bp, Homo sapien
gttgtcccggttagagtccaaatgc

SEQ ID NO: 5370344 - DNA, 25 bp, Homo sapien
aaaagctgacactcgtagcaaacta

SEQ ID NO: 5370345 - DNA, 25 bp, Homo sapien
tgtcccggttagagtccaaatgccc

SEQ ID NO: 5370346 - DNA, 25 bp, Homo sapien
tagcaaactactgtgacctgtggtg

SEQ ID NO: 5370347 - DNA, 25 bp, Homo sapien
aagtgaaaacaaaaggagaatattg

SEQ ID NO: 5370348 - DNA, 25 bp, Homo sapien
gtgaaaacaaaaggagaatattgta

SEQ ID NO: 5370349 - DNA, 25 bp, Homo sapien
aacaaaaggagaatattgtattcac

SEQ ID NO: 5370350 - DNA, 25 bp, Homo sapien
cctcgattttcttttgaaccttgat

SEQ ID NO: 5370351 - DNA, 25 bp, Homo sapien
cacaccaagctggacctgggacttg

SEQ ID NO: 5370352 - DNA, 25 bp, Homo sapien
caggacgcacgctggattagcatct

SEQ ID NO: 5370353 - DNA, 25 bp, Homo sapien
cctgcgtccaggttgactgctcatc

SEQ ID NO: 5370354 - DNA, 25 bp, Homo sapien
ctgctcatccattagcagcagatgt

SEQ ID NO: 5370355 - DNA, 25 bp, Homo sapien
ctctctcggcttctggtggtgtagc

SEQ ID NO: 5370356 - DNA, 25 bp, Homo sapien
cggcttctggtggtgtagctgttta

SEQ ID NO: 5370357 - DNA, 25 bp, Homo sapien
tctggtggtgtagctgtttaagtcc

SEQ ID NO: 5370358 - DNA, 25 bp, Homo sapien
tagctgtttaagtccagtcttcaca

SEQ ID NO: 5370359 - DNA, 25 bp, Homo sapien
ggttggcaccacctgtcatgagcgc

SEQ ID NO: 5370360 - DNA, 25 bp, Homo sapien
tgctgaaaagcatccgtggaaggtt

SEQ ID NO: 5370361 - DNA, 25 bp, Homo sapien
cacctgtcatgagcgcctttttcca

SEQ ID NO: 5370362 - DNA, 25 bp, Homo sapien
ttccagatgagagttccccaggact

SEQ ID NO: 5370363 - DNA, 25 bp, Homo sapien
gggatgagaatcaattctttatgga

SEQ ID NO: 5370364 - DNA, 25 bp, Homo sapien
tgatgacacaagcgggatctcactt

SEQ ID NO: 5370365 - DNA, 25 bp, Homo sapien
tcaattctttatggattcccacagg

SEQ ID NO: 5370366 - DNA, 25 bp, Homo sapien
acacaagcgggatctcacttctggg

SEQ ID NO: 5370367 - DNA, 25 bp, Homo sapien
acatgaggtagaccaggtgcaccag

SEQ ID NO: 5370368 - DNA, 25 bp, Homo sapien
tggacatgaggtagaccaggtgcac

SEQ ID NO: 5370369 - DNA, 25 bp, Homo sapien
cactggacatgaggtagaccaggtg

SEQ ID NO: 5370370 - DNA, 25 bp, Homo sapien
aaacactggacatgaggtagaccag

SEQ ID NO: 5370371 - DNA, 25 bp, Homo sapien
ttgttagccttggaaacaactgctg

SEQ ID NO: 5370372 - DNA, 25 bp, Homo sapien
tgctgctcacattggaactgcagga

SEQ ID NO: 5370373 - DNA, 25 bp, Homo sapien
tctagttggcgtgaaattgttagcc

SEQ ID NO: 5370374 - DNA, 25 bp, Homo sapien
gagaaacaagcggagctgctctact

SEQ ID NO: 5370375 - DNA, 25 bp, Homo sapien
gcatcctaagtcgattttaacccga

SEQ ID NO: 5370376 - DNA, 25 bp, Homo sapien
tttaacccgagatccaccagccaag

SEQ ID NO: 5370377 - DNA, 25 bp, Homo sapien
taagtcgattttaacccgagatcca

SEQ ID NO: 5370378 - DNA, 25 bp, Homo sapien
ataaggggggcatcctaagtcgatt

SEQ ID NO: 5370379 - DNA, 25 bp, Homo sapien
gcccagactccaaggcaaactgcag

SEQ ID NO: 5370380 - DNA, 25 bp, Homo sapien
acagcccagactccaaggcaaactg

SEQ ID NO: 5370381 - DNA, 25 bp, Homo sapien
cagactccaaggcaaactgcagaag

SEQ ID NO: 5370382 - DNA, 25 bp, Homo sapien
agactccaaggcaaactgcagaagc

SEQ ID NO: 5370383 - DNA, 25 bp, Homo sapien
cacgggctcaggcaccgcttgtctg

SEQ ID NO: 5370384 - DNA, 25 bp, Homo sapien
caccgcttgtctggaatgtcaattt

SEQ ID NO: 5370385 - DNA, 25 bp, Homo sapien
caggcaccgcttgtctggaatgtca

SEQ ID NO: 5370386 - DNA, 25 bp, Homo sapien
cgggctcaggcaccgcttgtctgga

SEQ ID NO: 5370387 - DNA, 25 bp, Homo sapien
ctccattcccaatgatgtacacacg

SEQ ID NO: 5370388 - DNA, 25 bp, Homo sapien
ttaaaaagcagcgaccatccagtca

SEQ ID NO: 5370389 - DNA, 25 bp, Homo sapien
gcagcgaccatccagtcatttattt

SEQ ID NO: 5370390 - DNA, 25 bp, Homo sapien
tcccaatgatgtacacacgactaag

SEQ ID NO: 5370391 - DNA, 25 bp, Homo sapien
ctggaggacacaagactgttagagg

SEQ ID NO: 5370392 - DNA, 25 bp, Homo sapien
atagcaggtctcttcatcatcctcc

SEQ ID NO: 5370393 - DNA, 25 bp, Homo sapien
cttcatagcaggtctcttcatcatc

SEQ ID NO: 5370394 - DNA, 25 bp, Homo sapien
accttcatagcaggtctcttcatca

SEQ ID NO: 5370395 - DNA, 25 bp, Homo sapien
agcaggtctcttcatcatcctccat

SEQ ID NO: 5370396 - DNA, 25 bp, Homo sapien
gggagtcacattgatttcactcatg

SEQ ID NO: 5370397 - DNA, 25 bp, Homo sapien
aatggtgcagcatccgtgggttcaa

SEQ ID NO: 5370398 - DNA, 25 bp, Homo sapien
aatattcttgttaatgggagtcaca

SEQ ID NO: 5370399 - DNA, 25 bp, Homo sapien
acagattgcattttgggcttaattc

SEQ ID NO: 5370400 - DNA, 25 bp, Homo sapien
aactgcaacaaggaacttaacaagt

SEQ ID NO: 5370401 - DNA, 25 bp, Homo sapien
tggccactgaagtttctagacaggc

SEQ ID NO: 5370402 - DNA, 25 bp, Homo sapien
tgttggcaagacagttatccctgag

SEQ ID NO: 5370403 - DNA, 25 bp, Homo sapien
tggcaagacagttatccctgagcct

SEQ ID NO: 5370404 - DNA, 25 bp, Homo sapien
tgggaaacggccagtccccacaatc

SEQ ID NO: 5370405 - DNA, 25 bp, Homo sapien
catggaaagcccgtgtgagaaccag

SEQ ID NO: 5370406 - DNA, 25 bp, Homo sapien
gtgcctccttcaaaagacactcatc

SEQ ID NO: 5370407 - DNA, 25 bp, Homo sapien
aggtgctgtgcctgggaaacggcca

SEQ ID NO: 5370408 - DNA, 25 bp, Homo sapien
ttccctgcactcatgggaccagggc

SEQ ID NO: 5370409 - DNA, 25 bp, Homo sapien
aatgacaggccaactaccgtcactg

SEQ ID NO: 5370410 - DNA, 25 bp, Homo sapien
tgcaaatccagaaatgacaggccaa

SEQ ID NO: 5370411 - DNA, 25 bp, Homo sapien
gtcactgtccacaggtctgtgtccc

SEQ ID NO: 5370412 - DNA, 25 bp, Homo sapien
tgagtcagaaccagaacatcagaga

SEQ ID NO: 5370413 - DNA, 25 bp, Homo sapien
tcagagactgagttaagacacacgc

SEQ ID NO: 5370414 - DNA, 25 bp, Homo sapien
gacacacgcagcaaagcacaatttc

SEQ ID NO: 5370415 - DNA, 25 bp, Homo sapien
ggtgcagctgtcaccaacatcctga

SEQ ID NO: 5370416 - DNA, 25 bp, Homo sapien
gaaatcatgaagtgacatgggagcc

SEQ ID NO: 5370417 - DNA, 25 bp, Homo sapien
gaacctgagtacagtttccagctga

SEQ ID NO: 5370418 - DNA, 25 bp, Homo sapien
catgggagccttacgtcaaaagcaa

SEQ ID NO: 5370419 - DNA, 25 bp, Homo sapien
tatcatcatccgtgatcctggtgtg

SEQ ID NO: 5370420 - DNA, 25 bp, Homo sapien
ttcggcttgcaaaacgttcatgtcc

SEQ ID NO: 5370421 - DNA, 25 bp, Homo sapien
gacctcattcggcttgcaaaacgtt

SEQ ID NO: 5370422 - DNA, 25 bp, Homo sapien
gggaagacctcattcggcttgcaaa

SEQ ID NO: 5370423 - DNA, 25 bp, Homo sapien
tcattcggcttgcaaaacgttcatg

SEQ ID NO: 5370424 - DNA, 25 bp, Homo sapien
gaaagacgacatgaaagtaggtatc

SEQ ID NO: 5370425 - DNA, 25 bp, Homo sapien
gaaagtaggtatcattgagaagcag

SEQ ID NO: 5370426 - DNA, 25 bp, Homo sapien
gaagctgtggtgagcggaaagacga

SEQ ID NO: 5370427 - DNA, 25 bp, Homo sapien
tggtgagcggaaagacgacatgaaa

SEQ ID NO: 5370428 - DNA, 25 bp, Homo sapien
gacatggagactatgtgatgtagcc

SEQ ID NO: 5370429 - DNA, 25 bp, Homo sapien
taccttcccgcaagaagacatggag

SEQ ID NO: 5370430 - DNA, 25 bp, Homo sapien
ctggacaccgggactagaggaccct

SEQ ID NO: 5370431 - DNA, 25 bp, Homo sapien
ctgcgcccagtcaaagatgttctct

SEQ ID NO: 5370432 - DNA, 25 bp, Homo sapien
acaatgccacagccagcaaaggtga

SEQ ID NO: 5370433 - DNA, 25 bp, Homo sapien
tcacaatgccacagccagcaaaggt

SEQ ID NO: 5370434 - DNA, 25 bp, Homo sapien
cacaatgccacagccagcaaaggtg

SEQ ID NO: 5370435 - DNA, 25 bp, Homo sapien
ttcatgcatttgactaacaggtagt

SEQ ID NO: 5370436 - DNA, 25 bp, Homo sapien
catttgactaacaggtagtggagga

SEQ ID NO: 5370437 - DNA, 25 bp, Homo sapien
ttgccttcatccaatgtttcatgca

SEQ ID NO: 5370438 - DNA, 25 bp, Homo sapien
actaacaggtagtggaggacatcct

SEQ ID NO: 5370439 - DNA, 25 bp, Homo sapien
aaaatgcacctgggggactcggagc

SEQ ID NO: 5370440 - DNA, 25 bp, Homo sapien
aacaaggacaggaaaatgcacctgg

SEQ ID NO: 5370441 - DNA, 25 bp, Homo sapien
ggaacaaggacaggaaaatgcacct

SEQ ID NO: 5370442 - DNA, 25 bp, Homo sapien
gtgggaacaaggacaggaaaatgca

SEQ ID NO: 5370443 - DNA, 25 bp, Homo sapien
tagctggaaggtaccagctatacgt

SEQ ID NO: 5370444 - DNA, 25 bp, Homo sapien
agttcaagctatgcaggggtgttga

SEQ ID NO: 5370445 - DNA, 25 bp, Homo sapien
agggtccaaccttgaggagatggca

SEQ ID NO: 5370446 - DNA, 25 bp, Homo sapien
ccagctatacgtcagcttccaaggg

SEQ ID NO: 5370447 - DNA, 25 bp, Homo sapien
tatctcctggggtgtaacggtcacc

SEQ ID NO: 5370448 - DNA, 25 bp, Homo sapien
gtatctcctggggtgtaacggtcac

SEQ ID NO: 5370449 - DNA, 25 bp, Homo sapien
agtccgtatctcctggggtgtaacg

SEQ ID NO: 5370450 - DNA, 25 bp, Homo sapien
tcattgagtccgtatctcctggggt

SEQ ID NO: 5370451 - DNA, 25 bp, Homo sapien
ctgctgggaaagatccagaagactg

SEQ ID NO: 5370452 - DNA, 25 bp, Homo sapien
aatgccgaagacgagttccactgcc

SEQ ID NO: 5370453 - DNA, 25 bp, Homo sapien
gccatctcttactaaatgccgaaga

SEQ ID NO: 5370454 - DNA, 25 bp, Homo sapien
aagatccagaagactgcaccgtggc

SEQ ID NO: 5370455 - DNA, 25 bp, Homo sapien
aggcagagggacaaaagccgtcggc

SEQ ID NO: 5370456 - DNA, 25 bp, Homo sapien
tccacactgctgataggaacgcaag

SEQ ID NO: 5370457 - DNA, 25 bp, Homo sapien
agagggacaaaagccgtcggcatga

SEQ ID NO: 5370458 - DNA, 25 bp, Homo sapien
ggacaaaagccgtcggcatgagcat

SEQ ID NO: 5370459 - DNA, 25 bp, Homo sapien
ggcttgttgaggtccagatttagaa

SEQ ID NO: 5370460 - DNA, 25 bp, Homo sapien
gatttagaagaggtttgtaatgacc

SEQ ID NO: 5370461 - DNA, 25 bp, Homo sapien
ggccatcgcatgacccttactttgt

SEQ ID NO: 5370462 - DNA, 25 bp, Homo sapien
gaactcgaaggtcagctcagaggcc

SEQ ID NO: 5370463 - DNA, 25 bp, Homo sapien
taacacacgtctgcttaagttcagg

SEQ ID NO: 5370464 - DNA, 25 bp, Homo sapien
taagatctgtaacacacgtctgctt

SEQ ID NO: 5370465 - DNA, 25 bp, Homo sapien
agggcaactcccatcggcatcaaca

SEQ ID NO: 5370466 - DNA, 25 bp, Homo sapien
tcaacacactcattaagatctgtaa

SEQ ID NO: 5370467 - DNA, 25 bp, Homo sapien
tggagagtgcctcccctcaagactg

SEQ ID NO: 5370468 - DNA, 25 bp, Homo sapien
tattgacagaagttggaagctcctc

SEQ ID NO: 5370469 - DNA, 25 bp, Homo sapien
aattctgctcttcccaggactagga

SEQ ID NO: 5370470 - DNA, 25 bp, Homo sapien
tcagtgattcttccccattaacgag

SEQ ID NO: 5370471 - DNA, 25 bp, Homo sapien
tcatatgcatctggttgtaaagaag

SEQ ID NO: 5370472 - DNA, 25 bp, Homo sapien
gatctcatatgcatctggttgtaaa

SEQ ID NO: 5370473 - DNA, 25 bp, Homo sapien
tgctaagatctcatatgcatctggt

SEQ ID NO: 5370474 - DNA, 25 bp, Homo sapien
ttcctgctaagatctcatatgcatc

SEQ ID NO: 5370475 - DNA, 25 bp, Homo sapien
cctctgtctgaaaagactgccttgg

SEQ ID NO: 5370476 - DNA, 25 bp, Homo sapien
ctttgtcaggcaatgtggagacctc

SEQ ID NO: 5370477 - DNA, 25 bp, Homo sapien
tatgctttgaaactgccacgtcccc

SEQ ID NO: 5370478 - DNA, 25 bp, Homo sapien
catcgtccaccagggataagcaaga

SEQ ID NO: 5370479 - DNA, 25 bp, Homo sapien
gcctgtaattctcgatatgatttgg

SEQ ID NO: 5370480 - DNA, 25 bp, Homo sapien
tgagataaacccaacttaatgaaga

SEQ ID NO: 5370481 - DNA, 25 bp, Homo sapien
gctgagagtttttaccattaatgga

SEQ ID NO: 5370482 - DNA, 25 bp, Homo sapien
taatgaagatgtattaccctttctc

SEQ ID NO: 5370483 - DNA, 25 bp, Homo sapien
gaagcaaatgagactatacaggagc

SEQ ID NO: 5370484 - DNA, 25 bp, Homo sapien
tgtaatttgtggcaataagagcaca

SEQ ID NO: 5370485 - DNA, 25 bp, Homo sapien
gcaaaggttttgtataccatcgaaa

SEQ ID NO: 5370486 - DNA, 25 bp, Homo sapien
catcgaaattgagtaggtattaatc

SEQ ID NO: 5370487 - DNA, 25 bp, Homo sapien
tgggcctcaagtgggctctccactc

SEQ ID NO: 5370488 - DNA, 25 bp, Homo sapien
tgttatctgtcgaaaaggcaagatg

SEQ ID NO: 5370489 - DNA, 25 bp, Homo sapien
tcccctgctggggtcggcgtgcaaa

SEQ ID NO: 5370490 - DNA, 25 bp, Homo sapien
gcaagatgacgtctgggtgtccttg

SEQ ID NO: 5370491 - DNA, 25 bp, Homo sapien
gggtgacaaggttattcctttctgc

SEQ ID NO: 5370492 - DNA, 25 bp, Homo sapien
cgggtgacaaggttattcctttctg

SEQ ID NO: 5370493 - DNA, 25 bp, Homo sapien
gctgctcccgggtgacaaggttatt

SEQ ID NO: 5370494 - DNA, 25 bp, Homo sapien
tgctcccgggtgacaaggttattcc

SEQ ID NO: 5370495 - DNA, 25 bp, Homo sapien
caggcaggaattggcttcttacgaa

SEQ ID NO: 5370496 - DNA, 25 bp, Homo sapien
tacgaacaccaatagggttgagcat

SEQ ID NO: 5370497 - DNA, 25 bp, Homo sapien
cagtgggacaggcaggaattggctt

SEQ ID NO: 5370498 - DNA, 25 bp, Homo sapien
tggcttcttacgaacaccaataggg

SEQ ID NO: 5370499 - DNA, 25 bp, Homo sapien
aagagacttaggacgcattggaaga

SEQ ID NO: 5370500 - DNA, 25 bp, Homo sapien
acttaggacgcattggaagatctcc

SEQ ID NO: 5370501 - DNA, 25 bp, Homo sapien
ggaagagacttaggacgcattggaa

SEQ ID NO: 5370502 - DNA, 25 bp, Homo sapien
ttcttggggaagagacttaggacgc

SEQ ID NO: 5370503 - DNA, 25 bp, Homo sapien
gagggcaggcaggtcgcccctctcc

SEQ ID NO: 5370504 - DNA, 25 bp, Homo sapien
gggcaggcaggtcgcccctctcctc

SEQ ID NO: 5370505 - DNA, 25 bp, Homo sapien
gcagtggtggtactggcgatgaaga

SEQ ID NO: 5370506 - DNA, 25 bp, Homo sapien
cagcagcagcccacgacacccccag

SEQ ID NO: 5370507 - DNA, 25 bp, Homo sapien
catgcccgaggaccagaaataagtc

SEQ ID NO: 5370508 - DNA, 25 bp, Homo sapien
gtttgaggagcattggtgtcaacca

SEQ ID NO: 5370509 - DNA, 25 bp, Homo sapien
tggtgtcaaccacatgcccgaggac

SEQ ID NO: 5370510 - DNA, 25 bp, Homo sapien
ttgaggagcattggtgtcaaccaca

SEQ ID NO: 5370511 - DNA, 25 bp, Homo sapien
ctaggagggccttggttttcaactg

SEQ ID NO: 5370512 - DNA, 25 bp, Homo sapien
taggagggccttggttttcaactgc

SEQ ID NO: 5370513 - DNA, 25 bp, Homo sapien
tcatcttgagggtccctggtccaac

SEQ ID NO: 5370514 - DNA, 25 bp, Homo sapien
ctcatcttgagggtccctggtccaa

SEQ ID NO: 5370515 - DNA, 25 bp, Homo sapien
cttctattccaaataacatctcatc

SEQ ID NO: 5370516 - DNA, 25 bp, Homo sapien
ttgagccccaagtaagaaatctgac

SEQ ID NO: 5370517 - DNA, 25 bp, Homo sapien
tggccaatgagatcagtgcaactcg

SEQ ID NO: 5370518 - DNA, 25 bp, Homo sapien
gacttgcctgcaaccaaaagaatgt

SEQ ID NO: 5370519 - DNA, 25 bp, Homo sapien
gaagtgccataagtgcaagggagcc

SEQ ID NO: 5370520 - DNA, 25 bp, Homo sapien
agcagaatgcaggaacttgcagaag

SEQ ID NO: 5370521 - DNA, 25 bp, Homo sapien
cagaaggccgcaggcgattagcaga

SEQ ID NO: 5370522 - DNA, 25 bp, Homo sapien
ttaattacccaattgccccgagcag

SEQ ID NO: 5370523 - DNA, 25 bp, Homo sapien
caattgccccgagcagaatgcagga

SEQ ID NO: 5370524 - DNA, 25 bp, Homo sapien
ctcttgaacctctggttatggacaa

SEQ ID NO: 5370525 - DNA, 25 bp, Homo sapien
aacctctggttatggacaagatgga

SEQ ID NO: 5370526 - DNA, 25 bp, Homo sapien
tggcctctagacactcaaaatttaa

SEQ ID NO: 5370527 - DNA, 25 bp, Homo sapien
tttgctaacagtaatggcctctaga

SEQ ID NO: 5370528 - DNA, 25 bp, Homo sapien
ccttaactacagagacaaggcaagc

SEQ ID NO: 5370529 - DNA, 25 bp, Homo sapien
tcacaaggaagagtgcctgagtgtg

SEQ ID NO: 5370530 - DNA, 25 bp, Homo sapien
gatcccttaactacagagacaaggc

SEQ ID NO: 5370531 - DNA, 25 bp, Homo sapien
acagatcccttaactacagagacaa

SEQ ID NO: 5370532 - DNA, 25 bp, Homo sapien
tgcaggcagtactggacccggttca

SEQ ID NO: 5370533 - DNA, 25 bp, Homo sapien
ggtggttgttataatgtgaccaaga

SEQ ID NO: 5370534 - DNA, 25 bp, Homo sapien
aagagttagtatgtctgcttctcaa

SEQ ID NO: 5370535 - DNA, 25 bp, Homo sapien
ggaataaatctttttagctatgaga

SEQ ID NO: 5370536 - DNA, 25 bp, Homo sapien
tgagctgagacatgccccttaccat

SEQ ID NO: 5370537 - DNA, 25 bp, Homo sapien
ccagttacaccgtccagagtggcca

SEQ ID NO: 5370538 - DNA, 25 bp, Homo sapien
gaacctttgtacactagcgtggata

SEQ ID NO: 5370539 - DNA, 25 bp, Homo sapien
ccacatgcgggaggcaacgaagtct

SEQ ID NO: 5370540 - DNA, 25 bp, Homo sapien
gtcagcgtctactggggaaagaacc

SEQ ID NO: 5370541 - DNA, 25 bp, Homo sapien
agggaggaacgcagatgtcagcgtc

SEQ ID NO: 5370542 - DNA, 25 bp, Homo sapien
gaggaacgcagatgtcagcgtctac

SEQ ID NO: 5370543 - DNA, 25 bp, Homo sapien
aacgcagatgtcagcgtctactggg

SEQ ID NO: 5370544 - DNA, 25 bp, Homo sapien
gacggcctaaaaatgctgcttccag

SEQ ID NO: 5370545 - DNA, 25 bp, Homo sapien
tatttgatgatccagcaggcctact

SEQ ID NO: 5370546 - DNA, 25 bp, Homo sapien
gaggccccaaaaatagctgcaattg

SEQ ID NO: 5370547 - DNA, 25 bp, Homo sapien
agtgtgactacttcgggccaacagg

SEQ ID NO: 5370548 - DNA, 25 bp, Homo sapien
catttttgggcatagtcacttcacc

SEQ ID NO: 5370549 - DNA, 25 bp, Homo sapien
ttagagcaggcttcacgtattagtc

SEQ ID NO: 5370550 - DNA, 25 bp, Homo sapien
cagactgggtggtttcaacgacgga

SEQ ID NO: 5370551 - DNA, 25 bp, Homo sapien
aggtccacgatgaaggtgctagcca

SEQ ID NO: 5370552 - DNA, 25 bp, Homo sapien
gtcatataccgttaatgatgacagc

SEQ ID NO: 5370553 - DNA, 25 bp, Homo sapien
tcatttccccctagttataccataa

SEQ ID NO: 5370554 - DNA, 25 bp, Homo sapien
ggtttgtgcagctcatttcccccta

SEQ ID NO: 5370555 - DNA, 25 bp, Homo sapien
tttaaaatacattgaggtttgtgca

SEQ ID NO: 5370556 - DNA, 25 bp, Homo sapien
ttagctttgatgtttggtcacgttt

SEQ ID NO: 5370557 - DNA, 25 bp, Homo sapien
tcacgtttcagggtaggttcaccgc

SEQ ID NO: 5370558 - DNA, 25 bp, Homo sapien
cgtttcagggtaggttcaccgccag

SEQ ID NO: 5370559 - DNA, 25 bp, Homo sapien
ttcagggtaggttcaccgccagaca

SEQ ID NO: 5370560 - DNA, 25 bp, Homo sapien
agggtaggttcaccgccagacacgg

SEQ ID NO: 5370561 - DNA, 25 bp, Homo sapien
gccaatctcagcaaagctcgcactg

SEQ ID NO: 5370562 - DNA, 25 bp, Homo sapien
ggagccaatctcagcaaagctcgca

SEQ ID NO: 5370563 - DNA, 25 bp, Homo sapien
aggagccaatctcagcaaagctcgc

SEQ ID NO: 5370564 - DNA, 25 bp, Homo sapien
gagccaatctcagcaaagctcgcac

SEQ ID NO: 5370565 - DNA, 25 bp, Homo sapien
ttaaatttgaagagcagttcagcaa

SEQ ID NO: 5370566 - DNA, 25 bp, Homo sapien
agcagttcagcaaagcttgtgctcc

SEQ ID NO: 5370567 - DNA, 25 bp, Homo sapien
tttgaagagcagttcagcaaagctt

SEQ ID NO: 5370568 - DNA, 25 bp, Homo sapien
gaagagcagttcagcaaagcttgtg

SEQ ID NO: 5370569 - DNA, 25 bp, Homo sapien
cagagtggtagacgaggaagcaggc

SEQ ID NO: 5370570 - DNA, 25 bp, Homo sapien
tctagtcctataggtggcaggtgct

SEQ ID NO: 5370571 - DNA, 25 bp, Homo sapien
ccagcatgctcagctgtgattcctc

SEQ ID NO: 5370572 - DNA, 25 bp, Homo sapien
ctgcccgctgaggtaggcgtgcaca

SEQ ID NO: 5370573 - DNA, 25 bp, Homo sapien
cttattgaacgctcagcatatataa

SEQ ID NO: 5370574 - DNA, 25 bp, Homo sapien
attgaacgctcagcatatataaagc

SEQ ID NO: 5370575 - DNA, 25 bp, Homo sapien
gcaggttctatagccggtattgagg

SEQ ID NO: 5370576 - DNA, 25 bp, Homo sapien
taaagcaggttctatagccggtatt

SEQ ID NO: 5370577 - DNA, 25 bp, Homo sapien
ggcttcgggagctgaaaaactctaa

SEQ ID NO: 5370578 - DNA, 25 bp, Homo sapien
gaattccgagttcataaagagcccc

SEQ ID NO: 5370579 - DNA, 25 bp, Homo sapien
gccactggtccagggtattatcaat

SEQ ID NO: 5370580 - DNA, 25 bp, Homo sapien
cacttcacaacagggaggaattccg

SEQ ID NO: 5370581 - DNA, 25 bp, Homo sapien
ttctcttctcccaagtcttcttata

SEQ ID NO: 5370582 - DNA, 25 bp, Homo sapien
tctcttctcccaagtcttcttatag

SEQ ID NO: 5370583 - DNA, 25 bp, Homo sapien
ctcttctcccaagtcttcttatagc

SEQ ID NO: 5370584 - DNA, 25 bp, Homo sapien
cagtgccagcgtggataccatatat

SEQ ID NO: 5370585 - DNA, 25 bp, Homo sapien
gccagcaacattctcatccagcaaa

SEQ ID NO: 5370586 - DNA, 25 bp, Homo sapien
ataaagacctgccacccatgactgt

SEQ ID NO: 5370587 - DNA, 25 bp, Homo sapien
gctgctatacaaagaggcactgtga

SEQ ID NO: 5370588 - DNA, 25 bp, Homo sapien
gggaattatcctctgactaaatata

SEQ ID NO: 5370589 - DNA, 25 bp, Homo sapien
tctggtttgggggaattatcctctg

SEQ ID NO: 5370590 - DNA, 25 bp, Homo sapien
tccattcagctttttagcaaattat

SEQ ID NO: 5370591 - DNA, 25 bp, Homo sapien
gttacttaacactgtgtgttttctg

SEQ ID NO: 5370592 - DNA, 25 bp, Homo sapien
ctgggtaacacattcatagagtact

SEQ ID NO: 5370593 - DNA, 25 bp, Homo sapien
tcctgggtaacacattcatagagta

SEQ ID NO: 5370594 - DNA, 25 bp, Homo sapien
cctgggtaacacattcatagagtac

SEQ ID NO: 5370595 - DNA, 25 bp, Homo sapien
taggacatcacagagctatgccttg

SEQ ID NO: 5370596 - DNA, 25 bp, Homo sapien
cgtgccaagcaaaagtcatccaatg

SEQ ID NO: 5370597 - DNA, 25 bp, Homo sapien
gaaaaatctgctaagcacccttgga

SEQ ID NO: 5370598 - DNA, 25 bp, Homo sapien
tattagagacccgtgacctggagtg

SEQ ID NO: 5370599 - DNA, 25 bp, Homo sapien
acagttggcttgcagaaatattcag

SEQ ID NO: 5370600 - DNA, 25 bp, Homo sapien
gtgctggatcagaagtgaatgctga

SEQ ID NO: 5370601 - DNA, 25 bp, Homo sapien
gcaaatgacagaagtgctggatcag

SEQ ID NO: 5370602 - DNA, 25 bp, Homo sapien
cagttggcttgcagaaatattcagc

SEQ ID NO: 5370603 - DNA, 25 bp, Homo sapien
ttttgcacaagttaacatgagctac

SEQ ID NO: 5370604 - DNA, 25 bp, Homo sapien
aaatcccagatgatgcaaacttgcc

SEQ ID NO: 5370605 - DNA, 25 bp, Homo sapien
caacctgttctgctaagaagttaca

SEQ ID NO: 5370606 - DNA, 25 bp, Homo sapien
gagctactaatttatcaaaaggcca

SEQ ID NO: 5370607 - DNA, 25 bp, Homo sapien
aaagcccgggcttcagagttcctgt

SEQ ID NO: 5370608 - DNA, 25 bp, Homo sapien
gagttcctgttagcaacagtctgag

SEQ ID NO: 5370609 - DNA, 25 bp, Homo sapien
cagtctgagccaacaaactttgcca

SEQ ID NO: 5370610 - DNA, 25 bp, Homo sapien
tgacccgcccggagtttaacatata

SEQ ID NO: 5370611 - DNA, 25 bp, Homo sapien
cagttcccagtatcttgggcctttt

SEQ ID NO: 5370612 - DNA, 25 bp, Homo sapien
gagcagttcccagtatcttgggcct

SEQ ID NO: 5370613 - DNA, 25 bp, Homo sapien
tgagcagttcccagtatcttgggcc

SEQ ID NO: 5370614 - DNA, 25 bp, Homo sapien
cctttgcttaaatctatgagcagtt

SEQ ID NO: 5370615 - DNA, 25 bp, Homo sapien
agggtaggagccatcaattcttctt

SEQ ID NO: 5370616 - DNA, 25 bp, Homo sapien
aagggtaggagccatcaattcttct

SEQ ID NO: 5370617 - DNA, 25 bp, Homo sapien
gaagaagggtaggagccatcaattc

SEQ ID NO: 5370618 - DNA, 25 bp, Homo sapien
agaagggtaggagccatcaattctt

SEQ ID NO: 5370619 - DNA, 25 bp, Homo sapien
ggctccgcggccagcacatagaggt

SEQ ID NO: 5370620 - DNA, 25 bp, Homo sapien
agcacatagaggtgccggagagcct

SEQ ID NO: 5370621 - DNA, 25 bp, Homo sapien
cttctaagagggcatagcagggcgt

SEQ ID NO: 5370622 - DNA, 25 bp, Homo sapien
taacttctaagagggcatagcaggg

SEQ ID NO: 5370623 - DNA, 25 bp, Homo sapien
gagcggcaatggaagaatttgatgt

SEQ ID NO: 5370624 - DNA, 25 bp, Homo sapien
agagaagagcggcaatggaagaatt

SEQ ID NO: 5370625 - DNA, 25 bp, Homo sapien
ggcaatggaagaatttgatgtgctc

SEQ ID NO: 5370626 - DNA, 25 bp, Homo sapien
ggcacagagaagagcggcaatggaa

SEQ ID NO: 5370627 - DNA, 25 bp, Homo sapien
catggagaaaaatccgtgccaggta

SEQ ID NO: 5370628 - DNA, 25 bp, Homo sapien
aaccaatgtggagcagtcaacctca

SEQ ID NO: 5370629 - DNA, 25 bp, Homo sapien
gcaaacaagccctagggtggcaaag

SEQ ID NO: 5370630 - DNA, 25 bp, Homo sapien
caaagctgaccaagggcttaggaca

SEQ ID NO: 5370631 - DNA, 25 bp, Homo sapien
catgtggtgggctaagtgaaaacca

SEQ ID NO: 5370632 - DNA, 25 bp, Homo sapien
ttaggtttcctgagccagccatgac

SEQ ID NO: 5370633 - DNA, 25 bp, Homo sapien
catgtgtaagaagcgacaaagctgc

SEQ ID NO: 5370634 - DNA, 25 bp, Homo sapien
ccaaaaatagaagtccaagggccat

SEQ ID NO: 5370635 - DNA, 25 bp, Homo sapien
aagtcataaaatctttggcaaattt

SEQ ID NO: 5370636 - DNA, 25 bp, Homo sapien
aacagaagcattaggtgcggacaaa

SEQ ID NO: 5370637 - DNA, 25 bp, Homo sapien
cattaggtgcggacaaataagtcat

SEQ ID NO: 5370638 - DNA, 25 bp, Homo sapien
gaagcattaggtgcggacaaataag

SEQ ID NO: 5370639 - DNA, 25 bp, Homo sapien
ggctcctgcaattatgtagacatgt

SEQ ID NO: 5370640 - DNA, 25 bp, Homo sapien
cagcaaatcgaaaacccagagacaa

SEQ ID NO: 5370641 - DNA, 25 bp, Homo sapien
tgcaattatgtagacatgtgcttgg

SEQ ID NO: 5370642 - DNA, 25 bp, Homo sapien
tctgagccagcaaatcgaaaaccca

SEQ ID NO: 5370643 - DNA, 25 bp, Homo sapien
tgagcacggcaattcgatttcactg

SEQ ID NO: 5370644 - DNA, 25 bp, Homo sapien
aatcctctgagcacggcaattcgat

SEQ ID NO: 5370645 - DNA, 25 bp, Homo sapien
tctgagcacggcaattcgatttcac

SEQ ID NO: 5370646 - DNA, 25 bp, Homo sapien
aaattcaaatcctctgagcacggca

SEQ ID NO: 5370647 - DNA, 25 bp, Homo sapien
tagtataggtaatgaacaatttacc

SEQ ID NO: 5370648 - DNA, 25 bp, Homo sapien
gaatatctagctgtaataaccaaga

SEQ ID NO: 5370649 - DNA, 25 bp, Homo sapien
aatattggccgaacacagtggctta

SEQ ID NO: 5370650 - DNA, 25 bp, Homo sapien
acaatttaccgaaaaacatacacag

SEQ ID NO: 5370651 - DNA, 25 bp, Homo sapien
acaaaatcaggcatcgagcaagtgt

SEQ ID NO: 5370652 - DNA, 25 bp, Homo sapien
aacattgctgtcaacccacttggaa

SEQ ID NO: 5370653 - DNA, 25 bp, Homo sapien
gaacattgctgtcaacccacttgga

SEQ ID NO: 5370654 - DNA, 25 bp, Homo sapien
gaggaacattgctgtcaacccactt

SEQ ID NO: 5370655 - DNA, 25 bp, Homo sapien
aaatacatggtgtcaggggctcgga

SEQ ID NO: 5370656 - DNA, 25 bp, Homo sapien
gtcaggggctcggagccaatctgca

SEQ ID NO: 5370657 - DNA, 25 bp, Homo sapien
caggggctcggagccaatctgcaat

SEQ ID NO: 5370658 - DNA, 25 bp, Homo sapien
gtccaacaaatacatggtgtcaggg

SEQ ID NO: 5370659 - DNA, 25 bp, Homo sapien
attggtttttaagtagatcatagcc

SEQ ID NO: 5370660 - DNA, 25 bp, Homo sapien
catccacatttatggtatctccttc

SEQ ID NO: 5370661 - DNA, 25 bp, Homo sapien
gtagcacctggacaagtcacatcca

SEQ ID NO: 5370662 - DNA, 25 bp, Homo sapien
tagccaaagctagagtagcacctgg

SEQ ID NO: 5370663 - DNA, 25 bp, Homo sapien
tgtcctccaaccatgtactgataga

SEQ ID NO: 5370664 - DNA, 25 bp, Homo sapien
gtttgaaagcgcctatgtcctccaa

SEQ ID NO: 5370665 - DNA, 25 bp, Homo sapien
gctgctcaggcacattgagatcaga

SEQ ID NO: 5370666 - DNA, 25 bp, Homo sapien
tatgtttctccctatgcattcctgt

SEQ ID NO: 5370667 - DNA, 25 bp, Homo sapien
gctaaggagtatgactctctgtcag

SEQ ID NO: 5370668 - DNA, 25 bp, Homo sapien
ctctgtcagtgcagtattccatttc

SEQ ID NO: 5370669 - DNA, 25 bp, Homo sapien
agccagcagctaaggagtatgactc

SEQ ID NO: 5370670 - DNA, 25 bp, Homo sapien
tctgtcagtgcagtattccatttca

SEQ ID NO: 5370671 - DNA, 25 bp, Homo sapien
taagaagccgagtaatagacatatc

SEQ ID NO: 5370672 - DNA, 25 bp, Homo sapien
cactgcagccacttggacattgtga

SEQ ID NO: 5370673 - DNA, 25 bp, Homo sapien
tgtgagctgtcccttgatatacaag

SEQ ID NO: 5370674 - DNA, 25 bp, Homo sapien
gaaacaccaagtagcagtccaatgc

SEQ ID NO: 5370675 - DNA, 25 bp, Homo sapien
ttattagggatgaaatctctaaaga

SEQ ID NO: 5370676 - DNA, 25 bp, Homo sapien
ggattattagggatgaaatctctaa

SEQ ID NO: 5370677 - DNA, 25 bp, Homo sapien
ggactagaggattattagggatgaa

SEQ ID NO: 5370678 - DNA, 25 bp, Homo sapien
taatttagattgggagggactagag

SEQ ID NO: 5370679 - DNA, 25 bp, Homo sapien
acagtggcaggaaagaggacactca

SEQ ID NO: 5370680 - DNA, 25 bp, Homo sapien
acctgaaggatgaaaacaaattagc

SEQ ID NO: 5370681 - DNA, 25 bp, Homo sapien
gaacagtggcaggaaagaggacact

SEQ ID NO: 5370682 - DNA, 25 bp, Homo sapien
ctgaaggatgaaaacaaattagcca

SEQ ID NO: 5370683 - DNA, 25 bp, Homo sapien
cagtggtaccaactagggctggaga

SEQ ID NO: 5370684 - DNA, 25 bp, Homo sapien
gattattccatgtactatgagacaa

SEQ ID NO: 5370685 - DNA, 25 bp, Homo sapien
taaatggctttgaccagggaagtga

SEQ ID NO: 5370686 - DNA, 25 bp, Homo sapien
tgagacaaatggacttagaagtaca

SEQ ID NO: 5370687 - DNA, 25 bp, Homo sapien
gcaaatagagcaattaggagctact

SEQ ID NO: 5370688 - DNA, 25 bp, Homo sapien
gcaggagctatcttcaggccagcag

SEQ ID NO: 5370689 - DNA, 25 bp, Homo sapien
taaggtgcccattcaaacccagagc

SEQ ID NO: 5370690 - DNA, 25 bp, Homo sapien
caatccaagctgagtcgatctggga

SEQ ID NO: 5370691 - DNA, 25 bp, Homo sapien
gatattgagagtcgccagcttggta

SEQ ID NO: 5370692 - DNA, 25 bp, Homo sapien
tactgttgtgttccgaggaggggca

SEQ ID NO: 5370693 - DNA, 25 bp, Homo sapien
ggaggcacatcgatgtttccactat

SEQ ID NO: 5370694 - DNA, 25 bp, Homo sapien
cacatcgatgtttccactattaagg

SEQ ID NO: 5370695 - DNA, 25 bp, Homo sapien
gttgggaggcacatcgatgtttcca

SEQ ID NO: 5370696 - DNA, 25 bp, Homo sapien
tgtcttatttgtagcatgtacacat

SEQ ID NO: 5370697 - DNA, 25 bp, Homo sapien
gaaacattcattcatcatatgcaag

SEQ ID NO: 5370698 - DNA, 25 bp, Homo sapien
tgtacctaaaagctaactcaactgc

SEQ ID NO: 5370699 - DNA, 25 bp, Homo sapien
tatgaaaaaactgagtgacctttct

SEQ ID NO: 5370700 - DNA, 25 bp, Homo sapien
taggaataggcaatggctctgttgg

SEQ ID NO: 5370701 - DNA, 25 bp, Homo sapien
cagtcagattcaatttaggaatagg

SEQ ID NO: 5370702 - DNA, 25 bp, Homo sapien
tcctcgtcctacaggaagagccata

SEQ ID NO: 5370703 - DNA, 25 bp, Homo sapien
tagttcgctgacacaattggagcaa

SEQ ID NO: 5370704 - DNA, 25 bp, Homo sapien
tctgaagaagccttcgcacatcctg

SEQ ID NO: 5370705 - DNA, 25 bp, Homo sapien
tcgatgaactcgtggtcactgagct

SEQ ID NO: 5370706 - DNA, 25 bp, Homo sapien
ccatattaatgacatgacctcgtga

SEQ ID NO: 5370707 - DNA, 25 bp, Homo sapien
ttgacacggacaggatgcgcactct

SEQ ID NO: 5370708 - DNA, 25 bp, Homo sapien
gagtaacagactttattgtaataat

SEQ ID NO: 5370709 - DNA, 25 bp, Homo sapien
ttcaaaagcagttaacatgcacttg

SEQ ID NO: 5370710 - DNA, 25 bp, Homo sapien
ctgagtaacagactttattgtaata

SEQ ID NO: 5370711 - DNA, 25 bp, Homo sapien
tcaaaagcagttaacatgcacttgc

SEQ ID NO: 5370712 - DNA, 25 bp, Homo sapien
taaaattggaactctgaactttcta

SEQ ID NO: 5370713 - DNA, 25 bp, Homo sapien
ttggaactctgaactttctatgttg

SEQ ID NO: 5370714 - DNA, 25 bp, Homo sapien
aattggaactctgaactttctatgt

SEQ ID NO: 5370715 - DNA, 25 bp, Homo sapien
tggaactctgaactttctatgttga

SEQ ID NO: 5370716 - DNA, 25 bp, Homo sapien
tgcttggaaagatcctgacgtccaa

SEQ ID NO: 5370717 - DNA, 25 bp, Homo sapien
tcacgacagtgataaattgcatctc

SEQ ID NO: 5370718 - DNA, 25 bp, Homo sapien
tccaatcaagagacagacagcttct

SEQ ID NO: 5370719 - DNA, 25 bp, Homo sapien
ggtaagtttccttcgcaggcctgct

SEQ ID NO: 5370720 - DNA, 25 bp, Homo sapien
tccatagccaatggtagtgtaaact

SEQ ID NO: 5370721 - DNA, 25 bp, Homo sapien
gcgcctggcccaagcaacaataatg

SEQ ID NO: 5370722 - DNA, 25 bp, Homo sapien
aagcaacaataatgcttatccatag

SEQ ID NO: 5370723 - DNA, 25 bp, Homo sapien
agccaatggtagtgtaaactggtac

SEQ ID NO: 5370724 - DNA, 25 bp, Homo sapien
atctttcagctagactagaaacaga

SEQ ID NO: 5370725 - DNA, 25 bp, Homo sapien
caaccaatctttcagctagactaga

SEQ ID NO: 5370726 - DNA, 25 bp, Homo sapien
aaccaatctttcagctagactagaa

SEQ ID NO: 5370727 - DNA, 25 bp, Homo sapien
ccaatctttcagctagactagaaac

SEQ ID NO: 5370728 - DNA, 25 bp, Homo sapien
ttcctcttgttctacttgcaacttc

SEQ ID NO: 5370729 - DNA, 25 bp, Homo sapien
tcttgttctacttgcaacttctggg

SEQ ID NO: 5370730 - DNA, 25 bp, Homo sapien
ctgttttcctcttgttctacttgca

SEQ ID NO: 5370731 - DNA, 25 bp, Homo sapien
cctcttgttctacttgcaacttctg

SEQ ID NO: 5370732 - DNA, 25 bp, Homo sapien
ctctcatcaccaagtatgtacagtg

SEQ ID NO: 5370733 - DNA, 25 bp, Homo sapien
agctctcatcaccaagtatgtacag

SEQ ID NO: 5370734 - DNA, 25 bp, Homo sapien
agttattctggttaaatactgtgag

SEQ ID NO: 5370735 - DNA, 25 bp, Homo sapien
atactgtgaggattcatcagaaacc

SEQ ID NO: 5370736 - DNA, 25 bp, Homo sapien
aaagcatatggttctcctgcaagcc

SEQ ID NO: 5370737 - DNA, 25 bp, Homo sapien
tgaggaacaggtatgccaagaaact

SEQ ID NO: 5370738 - DNA, 25 bp, Homo sapien
aaatcatgagatttgcagctagagg

SEQ ID NO: 5370739 - DNA, 25 bp, Homo sapien
cttattcaccgttacagccctatgg

SEQ ID NO: 5370740 - DNA, 25 bp, Homo sapien
taaacttaactatatgacccatcaa

SEQ ID NO: 5370741 - DNA, 25 bp, Homo sapien
caataccaaacaccaacaagaatgc

SEQ ID NO: 5370742 - DNA, 25 bp, Homo sapien
cataaaacgctaagcatgaatgctg

SEQ ID NO: 5370743 - DNA, 25 bp, Homo sapien
gacgagacaagacaaggtagaaacc

SEQ ID NO: 5370744 - DNA, 25 bp, Homo sapien
cccactgataaatacttggtggctc

SEQ ID NO: 5370745 - DNA, 25 bp, Homo sapien
ggtggctcagacgtaaaaaatgatg

SEQ ID NO: 5370746 - DNA, 25 bp, Homo sapien
aagaactcacccactgataaatact

SEQ ID NO: 5370747 - DNA, 25 bp, Homo sapien
agattccagggaggtaaggataagg

SEQ ID NO: 5370748 - DNA, 25 bp, Homo sapien
agtaatgatctacataaggccccaa

SEQ ID NO: 5370749 - DNA, 25 bp, Homo sapien
cgttgggtagtctctatagtaatga

SEQ ID NO: 5370750 - DNA, 25 bp, Homo sapien
taatgatctacataaggccccaatt

SEQ ID NO: 5370751 - DNA, 25 bp, Homo sapien
ctggatcaattgtgcacacttgtcc

SEQ ID NO: 5370752 - DNA, 25 bp, Homo sapien
gaacgaaaaaaattgcaggtatgtg

SEQ ID NO: 5370753 - DNA, 25 bp, Homo sapien
tatgtgagtaaagagaagtgtagaa

SEQ ID NO: 5370754 - DNA, 25 bp, Homo sapien
ttctcccattagagtattcaactta

SEQ ID NO: 5370755 - DNA, 25 bp, Homo sapien
cttaagctcctcatacacaaggtga

SEQ ID NO: 5370756 - DNA, 25 bp, Homo sapien
tctggtggtagtctgaatttagtaa

SEQ ID NO: 5370757 - DNA, 25 bp, Homo sapien
cataaagatctgttcaaaagatgag

SEQ ID NO: 5370758 - DNA, 25 bp, Homo sapien
cttctgaaggactcagacataaaga

SEQ ID NO: 5370759 - DNA, 25 bp, Homo sapien
agacataaagatctgttcaaaagat

SEQ ID NO: 5370760 - DNA, 25 bp, Homo sapien
ttttttgggcgcaatgacaggagaa

SEQ ID NO: 5370761 - DNA, 25 bp, Homo sapien
caggagaaagtgatccttcaaagtc

SEQ ID NO: 5370762 - DNA, 25 bp, Homo sapien
aaggccttgcttttttgggcgcaat

SEQ ID NO: 5370763 - DNA, 25 bp, Homo sapien
tcatcagatccagtctcggaaggcc

SEQ ID NO: 5370764 - DNA, 25 bp, Homo sapien
ctggagcactgtggacattgtacca

SEQ ID NO: 5370765 - DNA, 25 bp, Homo sapien
ttctagtccatgctaagcggtctgt

SEQ ID NO: 5370766 - DNA, 25 bp, Homo sapien
ccactctgagtgataactgggtcct

SEQ ID NO: 5370767 - DNA, 25 bp, Homo sapien
tgtaccacttgacaagcatctgaac

SEQ ID NO: 5370768 - DNA, 25 bp, Homo sapien
taactcagaggtggcaatttcagga

SEQ ID NO: 5370769 - DNA, 25 bp, Homo sapien
ctaactcagaggtggcaatttcagg

SEQ ID NO: 5370770 - DNA, 25 bp, Homo sapien
ggacaggatctctgatagaatgaat

SEQ ID NO: 5370771 - DNA, 25 bp, Homo sapien
gggtgactctgttatggacaggatc

SEQ ID NO: 5370772 - DNA, 25 bp, Homo sapien
tgatagaatgaatgtaagttccaag

SEQ ID NO: 5370773 - DNA, 25 bp, Homo sapien
ggatctctgatagaatgaatgtaag

SEQ ID NO: 5370774 - DNA, 25 bp, Homo sapien
ttggaaagtacaatcctcattatag

SEQ ID NO: 5370775 - DNA, 25 bp, Homo sapien
ctgttggaaagtacaatcctcatta

SEQ ID NO: 5370776 - DNA, 25 bp, Homo sapien
gttggaaagtacaatcctcattata

SEQ ID NO: 5370777 - DNA, 25 bp, Homo sapien
tgttggaaagtacaatcctcattat

SEQ ID NO: 5370778 - DNA, 25 bp, Homo sapien
tgtaaaaagttgtaaatacgataca

SEQ ID NO: 5370779 - DNA, 25 bp, Homo sapien
tgtaaatacgatacaaatgaattgt

SEQ ID NO: 5370780 - DNA, 25 bp, Homo sapien
aagttgtaaatacgatacaaatgaa

SEQ ID NO: 5370781 - DNA, 25 bp, Homo sapien
taaatacgatacaaatgaattgttt

SEQ ID NO: 5370782 - DNA, 25 bp, Homo sapien
gaggcattgtgttggacatcgtcag

SEQ ID NO: 5370783 - DNA, 25 bp, Homo sapien
cattgtgttggacatcgtcagagag

SEQ ID NO: 5370784 - DNA, 25 bp, Homo sapien
ccaaggagtttactaagaggctttg

SEQ ID NO: 5370785 - DNA, 25 bp, Homo sapien
ctcgtccaatgatccaaggagttta

SEQ ID NO: 5370786 - DNA, 25 bp, Homo sapien
cacctaaataggaagcttcactgag

SEQ ID NO: 5370787 - DNA, 25 bp, Homo sapien
ccatctgtgacaggtttagagtacc

SEQ ID NO: 5370788 - DNA, 25 bp, Homo sapien
gcagcctgaagtcctactaaaggca

SEQ ID NO: 5370789 - DNA, 25 bp, Homo sapien
tagtacttaccaaaggtacccatgc

SEQ ID NO: 5370790 - DNA, 25 bp, Homo sapien
tgtgtatagcaccaggtttccactg

SEQ ID NO: 5370791 - DNA, 25 bp, Homo sapien
tatagcaccaggtttccactgcctt

SEQ ID NO: 5370792 - DNA, 25 bp, Homo sapien
cgaaccactcctgtgtatagcacca

SEQ ID NO: 5370793 - DNA, 25 bp, Homo sapien
cactcctgtgtatagcaccaggttt

SEQ ID NO: 5370794 - DNA, 25 bp, Homo sapien
caaagatgagctgggttttatcatt

SEQ ID NO: 5370795 - DNA, 25 bp, Homo sapien
tcattactctcttgaaactttacac

SEQ ID NO: 5370796 - DNA, 25 bp, Homo sapien
gctgggttttatcattactctcttg

SEQ ID NO: 5370797 - DNA, 25 bp, Homo sapien
attactctcttgaaactttacacag

SEQ ID NO: 5370798 - DNA, 25 bp, Homo sapien
caacctgtatgggtattaaaagtat

SEQ ID NO: 5370799 - DNA, 25 bp, Homo sapien
taccaggatcagtgggtaatggtgt

SEQ ID NO: 5370800 - DNA, 25 bp, Homo sapien
acatgcaacaacctgtatgggtatt

SEQ ID NO: 5370801 - DNA, 25 bp, Homo sapien
aaagtattatactgaacagaaaaag

SEQ ID NO: 5370802 - DNA, 25 bp, Homo sapien
tggagctgggactctactaaaaagc

SEQ ID NO: 5370803 - DNA, 25 bp, Homo sapien
aagcacaggaacttttgcccacata

SEQ ID NO: 5370804 - DNA, 25 bp, Homo sapien
tgcccacataggtcagatgtaataa

SEQ ID NO: 5370805 - DNA, 25 bp, Homo sapien
gtcagatgtaataaacacttttgag

SEQ ID NO: 5370806 - DNA, 25 bp, Homo sapien
cacaaatggtcaatacacagttcag

SEQ ID NO: 5370807 - DNA, 25 bp, Homo sapien
tggagactgattatggcttgaaatg

SEQ ID NO: 5370808 - DNA, 25 bp, Homo sapien
tggctccgtttctggtgcaagaaag

SEQ ID NO: 5370809 - DNA, 25 bp, Homo sapien
cacagttcaggaacaattggctccg

SEQ ID NO: 5370810 - DNA, 25 bp, Homo sapien
agaatgtagactgggtgatgaggtt

SEQ ID NO: 5370811 - DNA, 25 bp, Homo sapien
cgagaatgtagactgggtgatgagg

SEQ ID NO: 5370812 - DNA, 25 bp, Homo sapien
gaaatagaaggtgagcgagaatgta

SEQ ID NO: 5370813 - DNA, 25 bp, Homo sapien
tagaaggtgagcgagaatgtagact

SEQ ID NO: 5370814 - DNA, 25 bp, Homo sapien
tttggagaggcttctgagatgtgct

SEQ ID NO: 5370815 - DNA, 25 bp, Homo sapien
aagtcacaggggaatctcctttgga

SEQ ID NO: 5370816 - DNA, 25 bp, Homo sapien
ctgtgaatggaggagtaattctgga

SEQ ID NO: 5370817 - DNA, 25 bp, Homo sapien
tctgagatgtgctgtgagggagctg

SEQ ID NO: 5370818 - DNA, 25 bp, Homo sapien
ctagtggccacattctgtggggttc

SEQ ID NO: 5370819 - DNA, 25 bp, Homo sapien
ctgtggggttcccccctgttcagag

SEQ ID NO: 5370820 - DNA, 25 bp, Homo sapien
cacattctgtggggttcccccctgt

SEQ ID NO: 5370821 - DNA, 25 bp, Homo sapien
gtggccacattctgtggggttcccc

SEQ ID NO: 5370822 - DNA, 25 bp, Homo sapien
ttttcattgcatgatctacaacata

SEQ ID NO: 5370823 - DNA, 25 bp, Homo sapien
tagaggggtcagtattgaggaaaac

SEQ ID NO: 5370824 - DNA, 25 bp, Homo sapien
cagaatgcacattttgaacagcatc

SEQ ID NO: 5370825 - DNA, 25 bp, Homo sapien
ttgactctccggagagtccacacag

SEQ ID NO: 5370826 - DNA, 25 bp, Homo sapien
gttatttcatctagtgggtgcagca

SEQ ID NO: 5370827 - DNA, 25 bp, Homo sapien
ttatttcatctagtgggtgcagcat

SEQ ID NO: 5370828 - DNA, 25 bp, Homo sapien
gttttagtcataaattccttgccta

SEQ ID NO: 5370829 - DNA, 25 bp, Homo sapien
taataatggccattccttaaagagt

SEQ ID NO: 5370830 - DNA, 25 bp, Homo sapien
tctcccactgtgtgaactatctgtc

SEQ ID NO: 5370831 - DNA, 25 bp, Homo sapien
ctttcatccctcttgaactgacttt

SEQ ID NO: 5370832 - DNA, 25 bp, Homo sapien
caatccatatttagtgggccaaaca

SEQ ID NO: 5370833 - DNA, 25 bp, Homo sapien
ggaggtacttcatgtgaagaagcgc

SEQ ID NO: 5370834 - DNA, 25 bp, Homo sapien
tacttcatgtgaagaagcgcttcgt

SEQ ID NO: 5370835 - DNA, 25 bp, Homo sapien
tgtgaagaagcgcttcgttcaaaca

SEQ ID NO: 5370836 - DNA, 25 bp, Homo sapien
cactggccaggatcagtaacaaaat

SEQ ID NO: 5370837 - DNA, 25 bp, Homo sapien
ttttgactactacgaaacatgagac

SEQ ID NO: 5370838 - DNA, 25 bp, Homo sapien
aaaagactggtgttattcatatgcc

SEQ ID NO: 5370839 - DNA, 25 bp, Homo sapien
gacaatgtgttaacaatagccctag

SEQ ID NO: 5370840 - DNA, 25 bp, Homo sapien
gaagctatgtaatcctttccttcta

SEQ ID NO: 5370841 - DNA, 25 bp, Homo sapien
tgagctttgcaatatacatatgcat

SEQ ID NO: 5370842 - DNA, 25 bp, Homo sapien
ccttctatgctatgcatgttaatac

SEQ ID NO: 5370843 - DNA, 25 bp, Homo sapien
ctttccttctatgctatgcatgtta

SEQ ID NO: 5370844 - DNA, 25 bp, Homo sapien
ctgtgatataatgaagtcacaccac

SEQ ID NO: 5370845 - DNA, 25 bp, Homo sapien
tgtgatataatgaagtcacaccaca

SEQ ID NO: 5370846 - DNA, 25 bp, Homo sapien
tttacttcctttgctccatatcacc

SEQ ID NO: 5370847 - DNA, 25 bp, Homo sapien
caggactgtcaactgtaaatgcttt

SEQ ID NO: 5370848 - DNA, 25 bp, Homo sapien
taaatgctttataaactgccaatgc

SEQ ID NO: 5370849 - DNA, 25 bp, Homo sapien
ttataaactgccaatgcctggcttt

SEQ ID NO: 5370850 - DNA, 25 bp, Homo sapien
cttgggagactaaaaggacatatta

SEQ ID NO: 5370851 - DNA, 25 bp, Homo sapien
cataggctttccctccccgagattt

SEQ ID NO: 5370852 - DNA, 25 bp, Homo sapien
acagtgaggtgcacgtgggaatcac

SEQ ID NO: 5370853 - DNA, 25 bp, Homo sapien
gcaggagggattcattttctgacac

SEQ ID NO: 5370854 - DNA, 25 bp, Homo sapien
tctgcagcagggactacttctaatc

SEQ ID NO: 5370855 - DNA, 25 bp, Homo sapien
gataacatgaaatctggtccccaca

SEQ ID NO: 5370856 - DNA, 25 bp, Homo sapien
cagggactacttctaatctctacca

SEQ ID NO: 5370857 - DNA, 25 bp, Homo sapien
ccatttaatcattagataacatgaa

SEQ ID NO: 5370858 - DNA, 25 bp, Homo sapien
aataagtcgctatgacaatgtaata

SEQ ID NO: 5370859 - DNA, 25 bp, Homo sapien
aagtcgctatgacaatgtaataaag

SEQ ID NO: 5370860 - DNA, 25 bp, Homo sapien
ggtatctaaataagtcgctatgaca

SEQ ID NO: 5370861 - DNA, 25 bp, Homo sapien
ctaaataagtcgctatgacaatgta

SEQ ID NO: 5370862 - DNA, 25 bp, Homo sapien
tctctcagttgcatcttagtagcct

SEQ ID NO: 5370863 - DNA, 25 bp, Homo sapien
tagtagccttaaattacaagtagat

SEQ ID NO: 5370864 - DNA, 25 bp, Homo sapien
ctctactctagaagtggcatcacac

SEQ ID NO: 5370865 - DNA, 25 bp, Homo sapien
catttattgaaattaccacacctta

SEQ ID NO: 5370866 - DNA, 25 bp, Homo sapien
tgtttctcgtggattgtaacctcct

SEQ ID NO: 5370867 - DNA, 25 bp, Homo sapien
tttctcgtggattgtaacctcctga

SEQ ID NO: 5370868 - DNA, 25 bp, Homo sapien
tctgtttctcgtggattgtaacctc

SEQ ID NO: 5370869 - DNA, 25 bp, Homo sapien
cttctgtttctcgtggattgtaacc

SEQ ID NO: 5370870 - DNA, 25 bp, Homo sapien
aaggttcaaagcattagggtggtgc

SEQ ID NO: 5370871 - DNA, 25 bp, Homo sapien
tgaaggttcaaagcattagggtggt

SEQ ID NO: 5370872 - DNA, 25 bp, Homo sapien
cagctggcgaagttgaaggttcaaa

SEQ ID NO: 5370873 - DNA, 25 bp, Homo sapien
ttcaaagcattagggtggtgcttgc

SEQ ID NO: 5370874 - DNA, 25 bp, Homo sapien
tgtcctttcttcatagaagttcgac

SEQ ID NO: 5370875 - DNA, 25 bp, Homo sapien
tcctttcttcatagaagttcgacat

SEQ ID NO: 5370876 - DNA, 25 bp, Homo sapien
gttgtcctttcttcatagaagttcg

SEQ ID NO: 5370877 - DNA, 25 bp, Homo sapien
cgttgtcctttcttcatagaagttc

SEQ ID NO: 5370878 - DNA, 25 bp, Homo sapien
agcggcggggtccttcacagtgact

SEQ ID NO: 5370879 - DNA, 25 bp, Homo sapien
cagcggcggggtccttcacagtgac

SEQ ID NO: 5370880 - DNA, 25 bp, Homo sapien
gagacgttcaaatggacgcgtccat

SEQ ID NO: 5370881 - DNA, 25 bp, Homo sapien
catcttgactttcccgtcttgcctc

SEQ ID NO: 5370882 - DNA, 25 bp, Homo sapien
aggaaggcgtgcgagacgttcaaat

SEQ ID NO: 5370883 - DNA, 25 bp, Homo sapien
aacagcagcgggctcgagtgctaat

SEQ ID NO: 5370884 - DNA, 25 bp, Homo sapien
gcgattgaacccagggttcaacctc

SEQ ID NO: 5370885 - DNA, 25 bp, Homo sapien
gttcaagcgattgaacccagggttc

SEQ ID NO: 5370886 - DNA, 25 bp, Homo sapien
attgaacccagggttcaacctcctg

SEQ ID NO: 5370887 - DNA, 25 bp, Homo sapien
caagcgattgaacccagggttcaac

SEQ ID NO: 5370888 - DNA, 25 bp, Homo sapien
ctgtttgatagcaaataccttcagc

SEQ ID NO: 5370889 - DNA, 25 bp, Homo sapien
agaagggctgtagggctgtttgata

SEQ ID NO: 5370890 - DNA, 25 bp, Homo sapien
gggctgtagggctgtttgatagcaa

SEQ ID NO: 5370891 - DNA, 25 bp, Homo sapien
acagcaagactggtgaggaaacagc

SEQ ID NO: 5370892 - DNA, 25 bp, Homo sapien
taaggtgcatcctcttggccatgca

SEQ ID NO: 5370893 - DNA, 25 bp, Homo sapien
ctggaataaggtgcatcctcttggc

SEQ ID NO: 5370894 - DNA, 25 bp, Homo sapien
aataaggtgcatcctcttggccatg

SEQ ID NO: 5370895 - DNA, 25 bp, Homo sapien
ggaataaggtgcatcctcttggcca

SEQ ID NO: 5370896 - DNA, 25 bp, Homo sapien
ctagaacttactcaattttctggga

SEQ ID NO: 5370897 - DNA, 25 bp, Homo sapien
gaagtatacatggttcccaattgta

SEQ ID NO: 5370898 - DNA, 25 bp, Homo sapien
atttccaaacatgccggaagtatac

SEQ ID NO: 5370899 - DNA, 25 bp, Homo sapien
tggttcccaattgtactaaatagac

SEQ ID NO: 5370900 - DNA, 25 bp, Homo sapien
tttgagtagcttcattaagaactgc

SEQ ID NO: 5370901 - DNA, 25 bp, Homo sapien
tcacagaatttgagtagcttcatta

SEQ ID NO: 5370902 - DNA, 25 bp, Homo sapien
tcctgtgtcaaaaccaagaatatgt

SEQ ID NO: 5370903 - DNA, 25 bp, Homo sapien
taagaactgcatctcctgtgtcaaa

SEQ ID NO: 5370904 - DNA, 25 bp, Homo sapien
ggcaatcatcatgacattgaacctg

SEQ ID NO: 5370905 - DNA, 25 bp, Homo sapien
caggcaatcatcatgacattgaacc

SEQ ID NO: 5370906 - DNA, 25 bp, Homo sapien
ccaggcaatcatcatgacattgaac

SEQ ID NO: 5370907 - DNA, 25 bp, Homo sapien
aggcaatcatcatgacattgaacct

SEQ ID NO: 5370908 - DNA, 25 bp, Homo sapien
acgacagttaacatctctgagatac

SEQ ID NO: 5370909 - DNA, 25 bp, Homo sapien
aaacgacagttaacatctctgagat

SEQ ID NO: 5370910 - DNA, 25 bp, Homo sapien
ctttaaacgacagttaacatctctg

SEQ ID NO: 5370911 - DNA, 25 bp, Homo sapien
ttaaacgacagttaacatctctgag

SEQ ID NO: 5370912 - DNA, 25 bp, Homo sapien
gccagtcactgctgtggatgtttct

SEQ ID NO: 5370913 - DNA, 25 bp, Homo sapien
tttgaaagaactcgggccagtcact

SEQ ID NO: 5370914 - DNA, 25 bp, Homo sapien
ctgctgtggatgtttcttaaattac

SEQ ID NO: 5370915 - DNA, 25 bp, Homo sapien
ttttgaaagaactcgggccagtcac

SEQ ID NO: 5370916 - DNA, 25 bp, Homo sapien
gattttctggtcttcaagccaaaca

SEQ ID NO: 5370917 - DNA, 25 bp, Homo sapien
tcttcaagccaaacagtgaagtttc

SEQ ID NO: 5370918 - DNA, 25 bp, Homo sapien
tgtcttcagtcttgtagtatctgat

SEQ ID NO: 5370919 - DNA, 25 bp, Homo sapien
cagtcttgtagtatctgattttctg

SEQ ID NO: 5370920 - DNA, 25 bp, Homo sapien
tgcagttgaaaccggcggggttgtg

SEQ ID NO: 5370921 - DNA, 25 bp, Homo sapien
ggttgtggtagtcaagagccgtcag

SEQ ID NO: 5370922 - DNA, 25 bp, Homo sapien
gcggggttgtggtagtcaagagccg

SEQ ID NO: 5370923 - DNA, 25 bp, Homo sapien
ccggcggggttgtggtagtcaagag

SEQ ID NO: 5370924 - DNA, 25 bp, Homo sapien
agtctgatttctacagtccagggtg

SEQ ID NO: 5370925 - DNA, 25 bp, Homo sapien
ctgccagacggtcctttgtgcctca

SEQ ID NO: 5370926 - DNA, 25 bp, Homo sapien
agggtgagctgccagacggtccttt

SEQ ID NO: 5370927 - DNA, 25 bp, Homo sapien
gcagtctgatttctacagtccaggg

SEQ ID NO: 5370928 - DNA, 25 bp, Homo sapien
tggagatatttgtcctgtgtattct

SEQ ID NO: 5370929 - DNA, 25 bp, Homo sapien
cagccagctccttatttggagatat

SEQ ID NO: 5370930 - DNA, 25 bp, Homo sapien
gccagctccttatttggagatattt

SEQ ID NO: 5370931 - DNA, 25 bp, Homo sapien
gatatttgtcctgtgtattctcttt

SEQ ID NO: 5370932 - DNA, 25 bp, Homo sapien
agcacttgcggcagcattcaccaga

SEQ ID NO: 5370933 - DNA, 25 bp, Homo sapien
gaatatctgatttacgcctctgcct

SEQ ID NO: 5370934 - DNA, 25 bp, Homo sapien
aatgaccagtaggagagcacttgcg

SEQ ID NO: 5370935 - DNA, 25 bp, Homo sapien
tctgcctgtttccatgagaccaggg

SEQ ID NO: 5370936 - DNA, 25 bp, Homo sapien
gagtttttagagtagtgacaaatgt

SEQ ID NO: 5370937 - DNA, 25 bp, Homo sapien
gtttttagagtagtgacaaatgtgt

SEQ ID NO: 5370938 - DNA, 25 bp, Homo sapien
agagtttttagagtagtgacaaatg

SEQ ID NO: 5370939 - DNA, 25 bp, Homo sapien
agtttttagagtagtgacaaatgtg

SEQ ID NO: 5370940 - DNA, 25 bp, Homo sapien
aactgctgagtcgaaattctagttt

SEQ ID NO: 5370941 - DNA, 25 bp, Homo sapien
ttctaaatcaatacgcagtataccg

SEQ ID NO: 5370942 - DNA, 25 bp, Homo sapien
gctgagtcgaaattctagtttctaa

SEQ ID NO: 5370943 - DNA, 25 bp, Homo sapien
cagtataccgcactgctcaggcagt

SEQ ID NO: 5370944 - DNA, 25 bp, Homo sapien
ctctcgcccatccaacagtcatcac

SEQ ID NO: 5370945 - DNA, 25 bp, Homo sapien
cagattcttctctctcgcccatcca

SEQ ID NO: 5370946 - DNA, 25 bp, Homo sapien
ttctctctcgcccatccaacagtca

SEQ ID NO: 5370947 - DNA, 25 bp, Homo sapien
gcccatccaacagtcatcaccaaga

SEQ ID NO: 5370948 - DNA, 25 bp, Homo sapien
gagcgactgtgccttcttgccaagc

SEQ ID NO: 5370949 - DNA, 25 bp, Homo sapien
cacctgcttgtgagacctgatgaac

SEQ ID NO: 5370950 - DNA, 25 bp, Homo sapien
tgtgagacctgatgaacttttcgca

SEQ ID NO: 5370951 - DNA, 25 bp, Homo sapien
ttcgcaggcccatgagcgactgtgc

SEQ ID NO: 5370952 - DNA, 25 bp, Homo sapien
gaaacgcagacactggtgacaacct

SEQ ID NO: 5370953 - DNA, 25 bp, Homo sapien
ggttaccaccgaatcataggacaga

SEQ ID NO: 5370954 - DNA, 25 bp, Homo sapien
tactgtgaagtagcagtcaaatcct

SEQ ID NO: 5370955 - DNA, 25 bp, Homo sapien
ttccctgagggacccgtgtgtagtc

SEQ ID NO: 5370956 - DNA, 25 bp, Homo sapien
aatacttgtatagttgtaattctaa

SEQ ID NO: 5370957 - DNA, 25 bp, Homo sapien
catagtaaatacttgtatagttgta

SEQ ID NO: 5370958 - DNA, 25 bp, Homo sapien
gccgggattgcaccattgcctgggt

SEQ ID NO: 5370959 - DNA, 25 bp, Homo sapien
gaagtttccagattcaactacatag

SEQ ID NO: 5370960 - DNA, 25 bp, Homo sapien
tgatcattaagttggtgtctgccag

SEQ ID NO: 5370961 - DNA, 25 bp, Homo sapien
gaagcttttgccaactaactttaga

SEQ ID NO: 5370962 - DNA, 25 bp, Homo sapien
gtctgtttgtcccaatccttgtggg

SEQ ID NO: 5370963 - DNA, 25 bp, Homo sapien
tccttgtgggattaaccttgatcat

SEQ ID NO: 5370964 - DNA, 25 bp, Homo sapien
cactctggctagtggaaactcaaac

SEQ ID NO: 5370965 - DNA, 25 bp, Homo sapien
tatcagcctttgagatgtctcccag

SEQ ID NO: 5370966 - DNA, 25 bp, Homo sapien
aataatggcacatcccttctgaggc

SEQ ID NO: 5370967 - DNA, 25 bp, Homo sapien
tgtctagggcaaacttaacagtgct

SEQ ID NO: 5370968 - DNA, 25 bp, Homo sapien
ccaatcagcatgtgagggccctggg

SEQ ID NO: 5370969 - DNA, 25 bp, Homo sapien
cactgtaagttagaccctctgtgcc

SEQ ID NO: 5370970 - DNA, 25 bp, Homo sapien
gttaagctgtggttccttagtgcca

SEQ ID NO: 5370971 - DNA, 25 bp, Homo sapien
tcggtctgttgtactgcatggccct

SEQ ID NO: 5370972 - DNA, 25 bp, Homo sapien
agatttggagctagtctctagtgcc

SEQ ID NO: 5370973 - DNA, 25 bp, Homo sapien
tctatgggttctcatgttggaagaa

SEQ ID NO: 5370974 - DNA, 25 bp, Homo sapien
tagacttagaatatgaaaggtcctc

SEQ ID NO: 5370975 - DNA, 25 bp, Homo sapien
cagcctcccgagtcgagtgatgttt

SEQ ID NO: 5370976 - DNA, 25 bp, Homo sapien
cagtcgtgaccatgtggaaagtgaa

SEQ ID NO: 5370977 - DNA, 25 bp, Homo sapien
aacagtgttggcaaacattaccgag

SEQ ID NO: 5370978 - DNA, 25 bp, Homo sapien
aatcttaaccggcacaaacactcca

SEQ ID NO: 5370979 - DNA, 25 bp, Homo sapien
tctggtagtcatatcgcttgaaagg

SEQ ID NO: 5370980 - DNA, 25 bp, Homo sapien
tttaacatattggttaatatactgg

SEQ ID NO: 5370981 - DNA, 25 bp, Homo sapien
aatacaaaataccaagccttatact

SEQ ID NO: 5370982 - DNA, 25 bp, Homo sapien
gaagaagtttcgttgaatgtaggac

SEQ ID NO: 5370983 - DNA, 25 bp, Homo sapien
agtactgcatgaagagacttcatta

SEQ ID NO: 5370984 - DNA, 25 bp, Homo sapien
aaaggaagggctgttgtcataagac

SEQ ID NO: 5370985 - DNA, 25 bp, Homo sapien
tgagagggacaagatggatagtccc

SEQ ID NO: 5370986 - DNA, 25 bp, Homo sapien
ctttgacatgtgaggagtgagaggg

SEQ ID NO: 5370987 - DNA, 25 bp, Homo sapien
caagatggatagtcccagagggaaa

SEQ ID NO: 5370988 - DNA, 25 bp, Homo sapien
ccttgattactgcagatccagggca

SEQ ID NO: 5370989 - DNA, 25 bp, Homo sapien
ggttctggacttgataggctctgcc

SEQ ID NO: 5370990 - DNA, 25 bp, Homo sapien
tagacagccttggtaggttctggac

SEQ ID NO: 5370991 - DNA, 25 bp, Homo sapien
ctgtctgcttgtagacagccttggt

SEQ ID NO: 5370992 - DNA, 25 bp, Homo sapien
gtgggtctcactccttacatgctaa

SEQ ID NO: 5370993 - DNA, 25 bp, Homo sapien
cagagcagcctcagcggattcatgt

SEQ ID NO: 5370994 - DNA, 25 bp, Homo sapien
aacttcacctcggaaggcgcaggga

SEQ ID NO: 5370995 - DNA, 25 bp, Homo sapien
ttgctgagactgcttaactgtgggt

SEQ ID NO: 5370996 - DNA, 25 bp, Homo sapien
gagttcagctacatgaggaagttta

SEQ ID NO: 5370997 - DNA, 25 bp, Homo sapien
ctaactgagttcagctacatgagga

SEQ ID NO: 5370998 - DNA, 25 bp, Homo sapien
taactgagttcagctacatgaggaa

SEQ ID NO: 5370999 - DNA, 25 bp, Homo sapien
cagctacatgaggaagtttaaattg

SEQ ID NO: 5371000 - DNA, 25 bp, Homo sapien
gaggtatcgctcatctaagactggt

SEQ ID NO: 5371001 - DNA, 25 bp, Homo sapien
tttcatgcctccaagacaagttcga

SEQ ID NO: 5371002 - DNA, 25 bp, Homo sapien
taaaaattgagttctggccgggtgc

SEQ ID NO: 5371003 - DNA, 25 bp, Homo sapien
ggttaagtccatggctcagctgtta

SEQ ID NO: 5371004 - DNA, 25 bp, Homo sapien
cgaatggctcttgagacgaatggct

SEQ ID NO: 5371005 - DNA, 25 bp, Homo sapien
gatagagtactttggacgaatggct

SEQ ID NO: 5371006 - DNA, 25 bp, Homo sapien
ggctgaagcagtatactcggaaatc

SEQ ID NO: 5371007 - DNA, 25 bp, Homo sapien
tcttggttcagggaacggcacagtg

SEQ ID NO: 5371008 - DNA, 25 bp, Homo sapien
gataccatcacactcctaaagtttg

SEQ ID NO: 5371009 - DNA, 25 bp, Homo sapien
aaccaatgagaaagataaatattct

SEQ ID NO: 5371010 - DNA, 25 bp, Homo sapien
gaatcttgtgttaatgataccatca

SEQ ID NO: 5371011 - DNA, 25 bp, Homo sapien
tcacacaagtgtataatctgactac

SEQ ID NO: 5371012 - DNA, 25 bp, Homo sapien
gaacagtcttgaacacgcatgggcg

SEQ ID NO: 5371013 - DNA, 25 bp, Homo sapien
cgcatgggcgttaaagtactcttta

SEQ ID NO: 5371014 - DNA, 25 bp, Homo sapien
tccaatggctggaatgtctcaggga

SEQ ID NO: 5371015 - DNA, 25 bp, Homo sapien
tctaccaatgtcttccgagcagttc

SEQ ID NO: 5371016 - DNA, 25 bp, Homo sapien
gcttgcaactcagataacacagcac

SEQ ID NO: 5371017 - DNA, 25 bp, Homo sapien
aacacagcacatgtacttttcttag

SEQ ID NO: 5371018 - DNA, 25 bp, Homo sapien
tcagcttgcaactcagataacacag

SEQ ID NO: 5371019 - DNA, 25 bp, Homo sapien
gcaactcagataacacagcacatgt

SEQ ID NO: 5371020 - DNA, 25 bp, Homo sapien
taactggagtgtgtagcctatttac

SEQ ID NO: 5371021 - DNA, 25 bp, Homo sapien
tcaagtatagagttcaggtcccaaa

SEQ ID NO: 5371022 - DNA, 25 bp, Homo sapien
gagtggagtgtttaatgtctcccac

SEQ ID NO: 5371023 - DNA, 25 bp, Homo sapien
caacgatctaatactgtgagtggag

SEQ ID NO: 5371024 - DNA, 25 bp, Homo sapien
ggttgtatccttgctaggtcagccc

SEQ ID NO: 5371025 - DNA, 25 bp, Homo sapien
gcttagattctagcctgctcctggg

SEQ ID NO: 5371026 - DNA, 25 bp, Homo sapien
cctggcctgtctggctacaagaggt

SEQ ID NO: 5371027 - DNA, 25 bp, Homo sapien
gacaggaacctcagttgacagatag

SEQ ID NO: 5371028 - DNA, 25 bp, Homo sapien
ttatttacatgacttcttttcagta

SEQ ID NO: 5371029 - DNA, 25 bp, Homo sapien
catgacttcttttcagtatccaaaa

SEQ ID NO: 5371030 - DNA, 25 bp, Homo sapien
tttacatgacttcttttcagtatcc

SEQ ID NO: 5371031 - DNA, 25 bp, Homo sapien
tacatgacttcttttcagtatccaa

SEQ ID NO: 5371032 - DNA, 25 bp, Homo sapien
caggagtcagtggagcatgagaaaa

SEQ ID NO: 5371033 - DNA, 25 bp, Homo sapien
tgagaaaacttgcagtattctccct

SEQ ID NO: 5371034 - DNA, 25 bp, Homo sapien
caacaattcttgtgtttcaggagtc

SEQ ID NO: 5371035 - DNA, 25 bp, Homo sapien
agtattctccctgataacattttgt

SEQ ID NO: 5371036 - DNA, 25 bp, Homo sapien
tgtatggtaaaacttacaaggatat

SEQ ID NO: 5371037 - DNA, 25 bp, Homo sapien
ctgtatggtaaaacttacaaggata

SEQ ID NO: 5371038 - DNA, 25 bp, Homo sapien
tatggtaaaacttacaaggatattc

SEQ ID NO: 5371039 - DNA, 25 bp, Homo sapien
catttgcactgaagagctaaggcta

SEQ ID NO: 5371040 - DNA, 25 bp, Homo sapien
tggaccctctataccacccaggttg

SEQ ID NO: 5371041 - DNA, 25 bp, Homo sapien
agaaaacaggtactcccaaattatg

SEQ ID NO: 5371042 - DNA, 25 bp, Homo sapien
taatcactttgatactaagttgggc

SEQ ID NO: 5371043 - DNA, 25 bp, Homo sapien
tggtacaatatccttgtacataaaa

SEQ ID NO: 5371044 - DNA, 25 bp, Homo sapien
acaatatccttgtacataaaactta

SEQ ID NO: 5371045 - DNA, 25 bp, Homo sapien
caatatccttgtacataaaacttac

SEQ ID NO: 5371046 - DNA, 25 bp, Homo sapien
ctctggtacaatatccttgtacata

SEQ ID NO: 5371047 - DNA, 25 bp, Homo sapien
tttctatctctgcatcatgatcaaa

SEQ ID NO: 5371048 - DNA, 25 bp, Homo sapien
tcttttctatctctgcatcatgatc

SEQ ID NO: 5371049 - DNA, 25 bp, Homo sapien
gcatcatgatcaaatttacactggt

SEQ ID NO: 5371050 - DNA, 25 bp, Homo sapien
catgatcaaatttacactggtctcc

SEQ ID NO: 5371051 - DNA, 25 bp, Homo sapien
gatgaatgcctgactcaaatgctgc

SEQ ID NO: 5371052 - DNA, 25 bp, Homo sapien
ttggttgatgaatgcctgactcaaa

SEQ ID NO: 5371053 - DNA, 25 bp, Homo sapien
ttgttttcccttgcgttccactgta

SEQ ID NO: 5371054 - DNA, 25 bp, Homo sapien
tgcgttccactgtatgttggttgat

SEQ ID NO: 5371055 - DNA, 25 bp, Homo sapien
ggtattcctagaagcatatattcca

SEQ ID NO: 5371056 - DNA, 25 bp, Homo sapien
ttcatccgaaaaccgattctgtggg

SEQ ID NO: 5371057 - DNA, 25 bp, Homo sapien
agatcaagtccaaaagcatgcaggg

SEQ ID NO: 5371058 - DNA, 25 bp, Homo sapien
cacatagcacttcttgtcactgaag

SEQ ID NO: 5371059 - DNA, 25 bp, Homo sapien
ctcttcctgtgagccgctgttcctc

SEQ ID NO: 5371060 - DNA, 25 bp, Homo sapien
cctcagcaaagcatttgatcctttg

SEQ ID NO: 5371061 - DNA, 25 bp, Homo sapien
gccattcttgtgaccagctttaaga

SEQ ID NO: 5371062 - DNA, 25 bp, Homo sapien
cagggccaggccattttcgcttcat

SEQ ID NO: 5371063 - DNA, 25 bp, Homo sapien
ttctttgtagattcttcaggttgag

SEQ ID NO: 5371064 - DNA, 25 bp, Homo sapien
cttcaggttgagcagcatttgccat

SEQ ID NO: 5371065 - DNA, 25 bp, Homo sapien
tgtagattcttcaggttgagcagca

SEQ ID NO: 5371066 - DNA, 25 bp, Homo sapien
ctgtggggtatcttttactccttct

SEQ ID NO: 5371067 - DNA, 25 bp, Homo sapien
cagcgaactttttggtgatattgca

SEQ ID NO: 5371068 - DNA, 25 bp, Homo sapien
tacatcatagtccttacttcttgat

SEQ ID NO: 5371069 - DNA, 25 bp, Homo sapien
tcttctgattcctgactgcagatat

SEQ ID NO: 5371070 - DNA, 25 bp, Homo sapien
ttctctggcttgtatgtactgttga

SEQ ID NO: 5371071 - DNA, 25 bp, Homo sapien
tggtagcagcaatgatgacaaggaa

SEQ ID NO: 5371072 - DNA, 25 bp, Homo sapien
tgtaatggtccatatgaaaacccac

SEQ ID NO: 5371073 - DNA, 25 bp, Homo sapien
gatacatctaagctaccaaagtcta

SEQ ID NO: 5371074 - DNA, 25 bp, Homo sapien
tctcctataactcacagaagtggta

SEQ ID NO: 5371075 - DNA, 25 bp, Homo sapien
tggcatttgggagcaacccctacta

SEQ ID NO: 5371076 - DNA, 25 bp, Homo sapien
gaagttatgctctaaagggtgggct

SEQ ID NO: 5371077 - DNA, 25 bp, Homo sapien
gtactacgaccacccacatggaggt

SEQ ID NO: 5371078 - DNA, 25 bp, Homo sapien
aaagctaagatgtgggtactacgac

SEQ ID NO: 5371079 - DNA, 25 bp, Homo sapien
gttctcaccctgctgtccagagacc

SEQ ID NO: 5371080 - DNA, 25 bp, Homo sapien
gactgtcactaacacaaatcacaga

SEQ ID NO: 5371081 - DNA, 25 bp, Homo sapien
tatcagcagtgcctgtgactgtcac

SEQ ID NO: 5371082 - DNA, 25 bp, Homo sapien
cacattatagttgttgcagatctca

SEQ ID NO: 5371083 - DNA, 25 bp, Homo sapien
tagaatcagactaactgctctgcta

SEQ ID NO: 5371084 - DNA, 25 bp, Homo sapien
gtcttccaggcaatgtatatgctca

SEQ ID NO: 5371085 - DNA, 25 bp, Homo sapien
ccatttaactatgcaactgaggagc

SEQ ID NO: 5371086 - DNA, 25 bp, Homo sapien
gagcttccgcctaacctttgattgg

SEQ ID NO: 5371087 - DNA, 25 bp, Homo sapien
gacactgcttggtatcactgtgctg

SEQ ID NO: 5371088 - DNA, 25 bp, Homo sapien
tttctgtcttataagtctcagtgac

SEQ ID NO: 5371089 - DNA, 25 bp, Homo sapien
gtcttataagtctcagtgacaattt

SEQ ID NO: 5371090 - DNA, 25 bp, Homo sapien
tataagtctcagtgacaatttaacc

SEQ ID NO: 5371091 - DNA, 25 bp, Homo sapien
gtctcagtgacaatttaacccattc

SEQ ID NO: 5371092 - DNA, 25 bp, Homo sapien
aaatctgcgttttcaacttaaacag

SEQ ID NO: 5371093 - DNA, 25 bp, Homo sapien
aatctgcgttttcaacttaaacagt

SEQ ID NO: 5371094 - DNA, 25 bp, Homo sapien
atctgcgttttcaacttaaacagtg

SEQ ID NO: 5371095 - DNA, 25 bp, Homo sapien
tctgcgttttcaacttaaacagtgg

SEQ ID NO: 5371096 - DNA, 25 bp, Homo sapien
ggaatttgctcgcactccagtttaa

SEQ ID NO: 5371097 - DNA, 25 bp, Homo sapien
tttttgggaatttgctcgcactcca

SEQ ID NO: 5371098 - DNA, 25 bp, Homo sapien
tgggaatttgctcgcactccagttt

SEQ ID NO: 5371099 - DNA, 25 bp, Homo sapien
tttgggaatttgctcgcactccagt

SEQ ID NO: 5371100 - DNA, 25 bp, Homo sapien
gtgcaatctcggcaggttatttagc

SEQ ID NO: 5371101 - DNA, 25 bp, Homo sapien
tctcggcaggttatttagcctctcc

SEQ ID NO: 5371102 - DNA, 25 bp, Homo sapien
caatctcggcaggttatttagcctc

SEQ ID NO: 5371103 - DNA, 25 bp, Homo sapien
gcaggttatttagcctctccgtgcc

SEQ ID NO: 5371104 - DNA, 25 bp, Homo sapien
cagagtccgtggccgttttgccgag

SEQ ID NO: 5371105 - DNA, 25 bp, Homo sapien
tcagagtccgtggccgttttgccga

SEQ ID NO: 5371106 - DNA, 25 bp, Homo sapien
agagtccgtggccgttttgccgagg

SEQ ID NO: 5371107 - DNA, 25 bp, Homo sapien
gacaggtcctccctttcgcgagccg

SEQ ID NO: 5371108 - DNA, 25 bp, Homo sapien
caggtcctccctttcgcgagccggg

SEQ ID NO: 5371109 - DNA, 25 bp, Homo sapien
ccagacaggtcctccctttcgcgag

SEQ ID NO: 5371110 - DNA, 25 bp, Homo sapien
gacccagacaggtcctccctttcgc

SEQ ID NO: 5371111 - DNA, 25 bp, Homo sapien
tgacaacccggacgcgacgagacgg

SEQ ID NO: 5371112 - DNA, 25 bp, Homo sapien
gacgcgacgagacggacccagagcc

SEQ ID NO: 5371113 - DNA, 25 bp, Homo sapien
agagagtgacaacccggacgcgacg

SEQ ID NO: 5371114 - DNA, 25 bp, Homo sapien
gagtaacaacccgagagagtgacaa

SEQ ID NO: 5371115 - DNA, 25 bp, Homo sapien
gatctgcggtcatcctacgaacacg

SEQ ID NO: 5371116 - DNA, 25 bp, Homo sapien
ctgggagacatttaaccgagaggcc

SEQ ID NO: 5371117 - DNA, 25 bp, Homo sapien
tatgctgctacaaggctcgctatag

SEQ ID NO: 5371118 - DNA, 25 bp, Homo sapien
tcattacgtgacaagagttctgcag

SEQ ID NO: 5371119 - DNA, 25 bp, Homo sapien
ctaatatattaaataggccaaaaca

SEQ ID NO: 5371120 - DNA, 25 bp, Homo sapien
tttccttcaggactaatatattaaa

SEQ ID NO: 5371121 - DNA, 25 bp, Homo sapien
tattaaataggccaaaacactgact

SEQ ID NO: 5371122 - DNA, 25 bp, Homo sapien
aactttccttcaggactaatatatt

SEQ ID NO: 5371123 - DNA, 25 bp, Homo sapien
aaatactcgcatacattttacatgt

SEQ ID NO: 5371124 - DNA, 25 bp, Homo sapien
aaaaaggcatgcctaatagtattta

SEQ ID NO: 5371125 - DNA, 25 bp, Homo sapien
ggcatgcctaatagtatttataaaa

SEQ ID NO: 5371126 - DNA, 25 bp, Homo sapien
aaggcatgcctaatagtatttataa

SEQ ID NO: 5371127 - DNA, 25 bp, Homo sapien
caaaaacagatacttgctacaactg

SEQ ID NO: 5371128 - DNA, 25 bp, Homo sapien
ctctacagccgccttgttctttgtt

SEQ ID NO: 5371129 - DNA, 25 bp, Homo sapien
aaatttaaggactctacagccgcct

SEQ ID NO: 5371130 - DNA, 25 bp, Homo sapien
aacagatacttgctacaactgtgaa

SEQ ID NO: 5371131 - DNA, 25 bp, Homo sapien
gcgggcgtctcgcaggaaaaaccgc

SEQ ID NO: 5371132 - DNA, 25 bp, Homo sapien
ctgcccgcctcggctaacggttttg

SEQ ID NO: 5371133 - DNA, 25 bp, Homo sapien
ccgtttgcttggtgcgtctggaact

SEQ ID NO: 5371134 - DNA, 25 bp, Homo sapien
cttggtgcgtctggaactcctcggg

SEQ ID NO: 5371135 - DNA, 25 bp, Homo sapien
tcctgcagacactcgaggagccatc

SEQ ID NO: 5371136 - DNA, 25 bp, Homo sapien
cctgcaggtgattgacgggcactct

SEQ ID NO: 5371137 - DNA, 25 bp, Homo sapien
tgcggccggcgccattttctcgagc

SEQ ID NO: 5371138 - DNA, 25 bp, Homo sapien
gcggctcgcggaggaatctctcttg

SEQ ID NO: 5371139 - DNA, 25 bp, Homo sapien
ccagtgtttgcagttagagccccat

SEQ ID NO: 5371140 - DNA, 25 bp, Homo sapien
aatagagactagagcggcagcgccg

SEQ ID NO: 5371141 - DNA, 25 bp, Homo sapien
agccaccggcggcgaatagagacta

SEQ ID NO: 5371142 - DNA, 25 bp, Homo sapien
ggccgttgcccagtgtttgcagtta

SEQ ID NO: 5371143 - DNA, 25 bp, Homo sapien
ctggcgtggttgttaatagactgga

SEQ ID NO: 5371144 - DNA, 25 bp, Homo sapien
gtggttgttaatagactggaaagtc

SEQ ID NO: 5371145 - DNA, 25 bp, Homo sapien
gcgtggttgttaatagactggaaag

SEQ ID NO: 5371146 - DNA, 25 bp, Homo sapien
ggttgttaatagactggaaagtctg

SEQ ID NO: 5371147 - DNA, 25 bp, Homo sapien
tgagtttttaccacttcgtcacctg

SEQ ID NO: 5371148 - DNA, 25 bp, Homo sapien
ttaccacttcgtcacctgtcggcgg

SEQ ID NO: 5371149 - DNA, 25 bp, Homo sapien
ttttaccacttcgtcacctgtcggc

SEQ ID NO: 5371150 - DNA, 25 bp, Homo sapien
cttcgtcacctgtcggcggcggccg

SEQ ID NO: 5371151 - DNA, 25 bp, Homo sapien
gaacatgcagggcacgacaggtcgg

SEQ ID NO: 5371152 - DNA, 25 bp, Homo sapien
cgccccgttcttgaccaaacatgac

SEQ ID NO: 5371153 - DNA, 25 bp, Homo sapien
cccgccccgttcttgaccaaacatg

SEQ ID NO: 5371154 - DNA, 25 bp, Homo sapien
tgcagggcacgacaggtcgggaacc

SEQ ID NO: 5371155 - DNA, 25 bp, Homo sapien
ttagggtaagcaggtttcagccagg

SEQ ID NO: 5371156 - DNA, 25 bp, Homo sapien
cctcggcagttagggtaagcaggtt

SEQ ID NO: 5371157 - DNA, 25 bp, Homo sapien
atgagccctcggcagttagggtaag

SEQ ID NO: 5371158 - DNA, 25 bp, Homo sapien
gttagggtaagcaggtttcagccag

SEQ ID NO: 5371159 - DNA, 25 bp, Homo sapien
ctgccttggcctcccaaagtactgg

SEQ ID NO: 5371160 - DNA, 25 bp, Homo sapien
tcttatcaaaaacaaatttgttgga

SEQ ID NO: 5371161 - DNA, 25 bp, Homo sapien
tgccttggcctcccaaagtactggg

SEQ ID NO: 5371162 - DNA, 25 bp, Homo sapien
attatcagatattttcttatcaaaa

SEQ ID NO: 5371163 - DNA, 25 bp, Homo sapien
caccccgcaagcttcaataattgag

SEQ ID NO: 5371164 - DNA, 25 bp, Homo sapien
tcatgcagtccactgatagggtccc

SEQ ID NO: 5371165 - DNA, 25 bp, Homo sapien
gaatctgtggtggagatgttttccc

SEQ ID NO: 5371166 - DNA, 25 bp, Homo sapien
gccactagaagttaggaagctccta

SEQ ID NO: 5371167 - DNA, 25 bp, Homo sapien
gataccatgaacagtaattttccct

SEQ ID NO: 5371168 - DNA, 25 bp, Homo sapien
ttattgtaggcataaggaagagctg

SEQ ID NO: 5371169 - DNA, 25 bp, Homo sapien
taccctttggaatagaacaatcatg

SEQ ID NO: 5371170 - DNA, 25 bp, Homo sapien
ttagctctgcagatagtcaggcccc

SEQ ID NO: 5371171 - DNA, 25 bp, Homo sapien
caagcaatatctgtgggctgaaatc

SEQ ID NO: 5371172 - DNA, 25 bp, Homo sapien
gggcttttgtcctccacagtctagg

SEQ ID NO: 5371173 - DNA, 25 bp, Homo sapien
taaaatagaggtttgagtccacctg

SEQ ID NO: 5371174 - DNA, 25 bp, Homo sapien
ggtttggcatagatccagggctcca

SEQ ID NO: 5371175 - DNA, 25 bp, Homo sapien
ctattaaggactaacccagtacttg

SEQ ID NO: 5371176 - DNA, 25 bp, Homo sapien
tagtagattaatgacgttgttaatc

SEQ ID NO: 5371177 - DNA, 25 bp, Homo sapien
gttgttaatctgtctgctcaaaaga

SEQ ID NO: 5371178 - DNA, 25 bp, Homo sapien
cagttccccgaagttgtatctcaaa

SEQ ID NO: 5371179 - DNA, 25 bp, Homo sapien
tgaagtcatcgtctataaggcaata

SEQ ID NO: 5371180 - DNA, 25 bp, Homo sapien
agtctgaaagaatgatctcagtcag

SEQ ID NO: 5371181 - DNA, 25 bp, Homo sapien
gaatcatatgaattaaacattggac

SEQ ID NO: 5371182 - DNA, 25 bp, Homo sapien
tcagaaactcagaatgaatcatatg

SEQ ID NO: 5371183 - DNA, 25 bp, Homo sapien
tgagcacatccttgcagggaaactg

SEQ ID NO: 5371184 - DNA, 25 bp, Homo sapien
gactgttgtctcaaatgctaggcag

SEQ ID NO: 5371185 - DNA, 25 bp, Homo sapien
gcagacatctggagtggtaaccact

SEQ ID NO: 5371186 - DNA, 25 bp, Homo sapien
taggctcaggtcataactctgtgtc

SEQ ID NO: 5371187 - DNA, 25 bp, Homo sapien
tgtgtaaccgtatcttgaatggaac

SEQ ID NO: 5371188 - DNA, 25 bp, Homo sapien
taatacccacgaaaagccattagct

SEQ ID NO: 5371189 - DNA, 25 bp, Homo sapien
gccattagctcaaagacacttgcaa

SEQ ID NO: 5371190 - DNA, 25 bp, Homo sapien
aactagatgactttttgtgtaaccg

SEQ ID NO: 5371191 - DNA, 25 bp, Homo sapien
tcagacatggcaggtactacggtct

SEQ ID NO: 5371192 - DNA, 25 bp, Homo sapien
cagacatggcaggtactacggtcta

SEQ ID NO: 5371193 - DNA, 25 bp, Homo sapien
agacatggcaggtactacggtctac

SEQ ID NO: 5371194 - DNA, 25 bp, Homo sapien
tatcaaagagttggtcgacgttctc

SEQ ID NO: 5371195 - DNA, 25 bp, Homo sapien
gagttggtcgacgttctcacaacaa

SEQ ID NO: 5371196 - DNA, 25 bp, Homo sapien
caaagagttggtcgacgttctcaca

SEQ ID NO: 5371197 - DNA, 25 bp, Homo sapien
tggcgggtatcaaagagttggtcga

SEQ ID NO: 5371198 - DNA, 25 bp, Homo sapien
gaagatgtagcacggacctctaagg

SEQ ID NO: 5371199 - DNA, 25 bp, Homo sapien
agtgacaccctatcaagagcctgga

SEQ ID NO: 5371200 - DNA, 25 bp, Homo sapien
tcatgtcggctctgaaatagatgca

SEQ ID NO: 5371201 - DNA, 25 bp, Homo sapien
tcatggcttgcatgcagtgacaccc

SEQ ID NO: 5371202 - DNA, 25 bp, Homo sapien
gctgtggcctggtatcaacacttca

SEQ ID NO: 5371203 - DNA, 25 bp, Homo sapien
caaaagaataatggtaacacacacg

SEQ ID NO: 5371204 - DNA, 25 bp, Homo sapien
catccagaagaacgggaaggatttt

SEQ ID NO: 5371205 - DNA, 25 bp, Homo sapien
aaccaactacgaagataggatgctc

SEQ ID NO: 5371206 - DNA, 25 bp, Homo sapien
gatgagacttcaatgcagccttgat

SEQ ID NO: 5371207 - DNA, 25 bp, Homo sapien
catgaagcaatctagaacttaacct

SEQ ID NO: 5371208 - DNA, 25 bp, Homo sapien
gatatactgaatttccggttgagcc

SEQ ID NO: 5371209 - DNA, 25 bp, Homo sapien
cggttgagccaacttaacagctaat

SEQ ID NO: 5371210 - DNA, 25 bp, Homo sapien
agaatctacttccaaacttatgtgg

SEQ ID NO: 5371211 - DNA, 25 bp, Homo sapien
tgctgtgttctcagatctggcaggc

SEQ ID NO: 5371212 - DNA, 25 bp, Homo sapien
gaatctacttccaaacttatgtggt

SEQ ID NO: 5371213 - DNA, 25 bp, Homo sapien
cagattcaacatattctaacgtttc

SEQ ID NO: 5371214 - DNA, 25 bp, Homo sapien
agattcaacatattctaacgtttca

SEQ ID NO: 5371215 - DNA, 25 bp, Homo sapien
ccagattcaacatattctaacgttt

SEQ ID NO: 5371216 - DNA, 25 bp, Homo sapien
cgcctcgtgagttcaagcgactctg

SEQ ID NO: 5371217 - DNA, 25 bp, Homo sapien
agtacagtggcgtgacacatcactg

SEQ ID NO: 5371218 - DNA, 25 bp, Homo sapien
tggtctcggtatcttgatcttgtga

SEQ ID NO: 5371219 - DNA, 25 bp, Homo sapien
ggatggtctcggtatcttgatcttg

SEQ ID NO: 5371220 - DNA, 25 bp, Homo sapien
gctagaagatcaagctaagcactta

SEQ ID NO: 5371221 - DNA, 25 bp, Homo sapien
aaacaaaaccacgttcagctgaaca

SEQ ID NO: 5371222 - DNA, 25 bp, Homo sapien
caggataaaaatccaattttcaaag

SEQ ID NO: 5371223 - DNA, 25 bp, Homo sapien
tattttgctgaacgttaaaattata

SEQ ID NO: 5371224 - DNA, 25 bp, Homo sapien
gcagacttctctcgctcttgattcc

SEQ ID NO: 5371225 - DNA, 25 bp, Homo sapien
ccaggttagctgcagacttctctcg

SEQ ID NO: 5371226 - DNA, 25 bp, Homo sapien
agtattccaggttagctgcagactt

SEQ ID NO: 5371227 - DNA, 25 bp, Homo sapien
gctgcagacttctctcgctcttgat

SEQ ID NO: 5371228 - DNA, 25 bp, Homo sapien
catttgacatgaaaaccggaactcc

SEQ ID NO: 5371229 - DNA, 25 bp, Homo sapien
aaaaatgggctttaggagcttctga

SEQ ID NO: 5371230 - DNA, 25 bp, Homo sapien
tctgattaaatatggcagactgaac

SEQ ID NO: 5371231 - DNA, 25 bp, Homo sapien
tcaaaggagtttatgacatcaccgt

SEQ ID NO: 5371232 - DNA, 25 bp, Homo sapien
tgatctgcactttttgtggtggaac

SEQ ID NO: 5371233 - DNA, 25 bp, Homo sapien
tgttgttccaagaattaattttcaa

SEQ ID NO: 5371234 - DNA, 25 bp, Homo sapien
ggaaccatgacttgcagtttctacc

SEQ ID NO: 5371235 - DNA, 25 bp, Homo sapien
ttatttatggttcaagcctagggca

SEQ ID NO: 5371236 - DNA, 25 bp, Homo sapien
caaatgacccttactccaggtgatt

SEQ ID NO: 5371237 - DNA, 25 bp, Homo sapien
agtttctaccccacgtggtcagtga

SEQ ID NO: 5371238 - DNA, 25 bp, Homo sapien
agaaccctaatacaaacaggtagtg

SEQ ID NO: 5371239 - DNA, 25 bp, Homo sapien
caaccatccaattagttctgtccct

SEQ ID NO: 5371240 - DNA, 25 bp, Homo sapien
tgtgtatgtgctggcggaagacaca

SEQ ID NO: 5371241 - DNA, 25 bp, Homo sapien
gcagctgctctaaagactgtgtgta

SEQ ID NO: 5371242 - DNA, 25 bp, Homo sapien
gttacagtgtgcatgtctagaagcg

SEQ ID NO: 5371243 - DNA, 25 bp, Homo sapien
gaagcgggaggtctgtgtttctcct

SEQ ID NO: 5371244 - DNA, 25 bp, Homo sapien
taagtgaccgatagctgctaatgct

SEQ ID NO: 5371245 - DNA, 25 bp, Homo sapien
cctaataagtgaccgatagctgcta

SEQ ID NO: 5371246 - DNA, 25 bp, Homo sapien
tgctaatgctccagtgacaatattt

SEQ ID NO: 5371247 - DNA, 25 bp, Homo sapien
agctgctaatgctccagtgacaata

SEQ ID NO: 5371248 - DNA, 25 bp, Homo sapien
tgaggaaggggtgctagtccaaaag

SEQ ID NO: 5371249 - DNA, 25 bp, Homo sapien
tccactctgggctactgaactagtt

SEQ ID NO: 5371250 - DNA, 25 bp, Homo sapien
cacatggtgactctctgggagtgct

SEQ ID NO: 5371251 - DNA, 25 bp, Homo sapien
gattcaacttggcaggagacttaga

SEQ ID NO: 5371252 - DNA, 25 bp, Homo sapien
tgggagtgcttgaccgagaaacatg

SEQ ID NO: 5371253 - DNA, 25 bp, Homo sapien
ggtcagcaagggcattacagttcta

SEQ ID NO: 5371254 - DNA, 25 bp, Homo sapien
gtgggtcagcaagggcattacagtt

SEQ ID NO: 5371255 - DNA, 25 bp, Homo sapien
tcagcaagggcattacagttctatt

SEQ ID NO: 5371256 - DNA, 25 bp, Homo sapien
tgggtcagcaagggcattacagttc

SEQ ID NO: 5371257 - DNA, 25 bp, Homo sapien
ggaattatatgctggtgactgacta

SEQ ID NO: 5371258 - DNA, 25 bp, Homo sapien
agtaacattagctgctggtctgaga

SEQ ID NO: 5371259 - DNA, 25 bp, Homo sapien
gaagatactgggaattatatgctgg

SEQ ID NO: 5371260 - DNA, 25 bp, Homo sapien
ctttgtgggagtaacattagctgct

SEQ ID NO: 5371261 - DNA, 25 bp, Homo sapien
ggtccataattctctgtgggccaac

SEQ ID NO: 5371262 - DNA, 25 bp, Homo sapien
gtctgtgacccctgatatccatcag

SEQ ID NO: 5371263 - DNA, 25 bp, Homo sapien
ctgttagtggagccccatgaaatgt

SEQ ID NO: 5371264 - DNA, 25 bp, Homo sapien
cataattctctgtgggccaacgatg

SEQ ID NO: 5371265 - DNA, 25 bp, Homo sapien
tgtagcacttcaatcactcgggaac

SEQ ID NO: 5371266 - DNA, 25 bp, Homo sapien
ttttgaagctcagaccacttttcga

SEQ ID NO: 5371267 - DNA, 25 bp, Homo sapien
taatctgggaatgaactcatagacc

SEQ ID NO: 5371268 - DNA, 25 bp, Homo sapien
catgtaatccacagctaatctggga

SEQ ID NO: 5371269 - DNA, 25 bp, Homo sapien
ttaatggcctctacttgttggcaaa

SEQ ID NO: 5371270 - DNA, 25 bp, Homo sapien
cttaatggcctctacttgttggcaa

SEQ ID NO: 5371271 - DNA, 25 bp, Homo sapien
tatagtcttcgagttcctgcatgac

SEQ ID NO: 5371272 - DNA, 25 bp, Homo sapien
agcatctgttttacagactccaggg

SEQ ID NO: 5371273 - DNA, 25 bp, Homo sapien
gaatctgcatttcgcaaagaaccat

SEQ ID NO: 5371274 - DNA, 25 bp, Homo sapien
gagaggacctccttcactatagtct

SEQ ID NO: 5371275 - DNA, 25 bp, Homo sapien
ctgttaaccatgataattgtagagg

SEQ ID NO: 5371276 - DNA, 25 bp, Homo sapien
gaaatacagatgctacaatacacca

SEQ ID NO: 5371277 - DNA, 25 bp, Homo sapien
aagagcatatacctagattcccaag

SEQ ID NO: 5371278 - DNA, 25 bp, Homo sapien
cagaaaagtgttgtacagtctaaca

SEQ ID NO: 5371279 - DNA, 25 bp, Homo sapien
ttcttgaccactgaaagatttgaat

SEQ ID NO: 5371280 - DNA, 25 bp, Homo sapien
tcttgaccactgaaagatttgaatc

SEQ ID NO: 5371281 - DNA, 25 bp, Homo sapien
tttcttgaccactgaaagatttgaa

SEQ ID NO: 5371282 - DNA, 25 bp, Homo sapien
agaaacaacactttttatagattca

SEQ ID NO: 5371283 - DNA, 25 bp, Homo sapien
gtttaaacagaggatcaataggttc

SEQ ID NO: 5371284 - DNA, 25 bp, Homo sapien
taatgaacacttctccctatgtatt

SEQ ID NO: 5371285 - DNA, 25 bp, Homo sapien
taaacagaggatcaataggttcagg

SEQ ID NO: 5371286 - DNA, 25 bp, Homo sapien
gaggatcaataggttcaggaatact

SEQ ID NO: 5371287 - DNA, 25 bp, Homo sapien
tgaccataaaaagaattaagaccgc

SEQ ID NO: 5371288 - DNA, 25 bp, Homo sapien
cataaaaagaattaagaccgctgcc

SEQ ID NO: 5371289 - DNA, 25 bp, Homo sapien
tagttgaccataaaaagaattaaga

SEQ ID NO: 5371290 - DNA, 25 bp, Homo sapien
ctagttgaccataaaaagaattaag

SEQ ID NO: 5371291 - DNA, 25 bp, Homo sapien
ttaaggaataacagtaacagctcag

SEQ ID NO: 5371292 - DNA, 25 bp, Homo sapien
cagtaacagctcagctaatatgtaa

SEQ ID NO: 5371293 - DNA, 25 bp, Homo sapien
acagctcagctaatatgtaacattc

SEQ ID NO: 5371294 - DNA, 25 bp, Homo sapien
attattaaggaataacagtaacagc

SEQ ID NO: 5371295 - DNA, 25 bp, Homo sapien
agagtgtttatttcatgctgaacta

SEQ ID NO: 5371296 - DNA, 25 bp, Homo sapien
tgcccaatgtacaagcagagcaggt

SEQ ID NO: 5371297 - DNA, 25 bp, Homo sapien
ctcttagagtgtttatttcatgctg

SEQ ID NO: 5371298 - DNA, 25 bp, Homo sapien
catgtttttcctgggctcttagagt

SEQ ID NO: 5371299 - DNA, 25 bp, Homo sapien
aatagttcaatttactaaaattgct

SEQ ID NO: 5371300 - DNA, 25 bp, Homo sapien
ttcaatttactaaaattgctttcta

SEQ ID NO: 5371301 - DNA, 25 bp, Homo sapien
tctgtgaatcagagtacaaaccgca

SEQ ID NO: 5371302 - DNA, 25 bp, Homo sapien
actgcttttctgtgaatcagagtac

SEQ ID NO: 5371303 - DNA, 25 bp, Homo sapien
aaccgcatcccaccaagatttttgt

SEQ ID NO: 5371304 - DNA, 25 bp, Homo sapien
gaatcagagtacaaaccgcatccca

SEQ ID NO: 5371305 - DNA, 25 bp, Homo sapien
cctttaattgtaagtggctggtata

SEQ ID NO: 5371306 - DNA, 25 bp, Homo sapien
ctcctttaattgtaagtggctggta

SEQ ID NO: 5371307 - DNA, 25 bp, Homo sapien
gggcaggcataacggctgataggag

SEQ ID NO: 5371308 - DNA, 25 bp, Homo sapien
gcaggcataacggctgataggagct

SEQ ID NO: 5371309 - DNA, 25 bp, Homo sapien
tttcggattccaggtaaagcaggca

SEQ ID NO: 5371310 - DNA, 25 bp, Homo sapien
tttagccattttcggattccaggta

SEQ ID NO: 5371311 - DNA, 25 bp, Homo sapien
atgaattccactgtaagccaagcca

SEQ ID NO: 5371312 - DNA, 25 bp, Homo sapien
tccactgtaagccaagccaagtaag

SEQ ID NO: 5371313 - DNA, 25 bp, Homo sapien
caacatcgtatctagccaaatcttc

SEQ ID NO: 5371314 - DNA, 25 bp, Homo sapien
gctctggttcttgtacatcaatttt

SEQ ID NO: 5371315 - DNA, 25 bp, Homo sapien
tcaagctctggttcttgtacatcaa

SEQ ID NO: 5371316 - DNA, 25 bp, Homo sapien
aacatcgtatctagccaaatcttca

SEQ ID NO: 5371317 - DNA, 25 bp, Homo sapien
aagaaaagatgtatccttaggtgac

SEQ ID NO: 5371318 - DNA, 25 bp, Homo sapien
aaaagatgtatccttaggtgactga

SEQ ID NO: 5371319 - DNA, 25 bp, Homo sapien
cgctaccaagaaaagatgtatcctt

SEQ ID NO: 5371320 - DNA, 25 bp, Homo sapien
taccaagaaaagatgtatccttagg

SEQ ID NO: 5371321 - DNA, 25 bp, Homo sapien
tcatataacgcagactgcccaattt

SEQ ID NO: 5371322 - DNA, 25 bp, Homo sapien
catataacgcagactgcccaatttt

SEQ ID NO: 5371323 - DNA, 25 bp, Homo sapien
catcatataacgcagactgcccaat

SEQ ID NO: 5371324 - DNA, 25 bp, Homo sapien
gcatcatataacgcagactgcccaa

SEQ ID NO: 5371325 - DNA, 25 bp, Homo sapien
ccagcagattttgtccagctttacc

SEQ ID NO: 5371326 - DNA, 25 bp, Homo sapien
gcagattttgtccagctttaccttc

SEQ ID NO: 5371327 - DNA, 25 bp, Homo sapien
ttgtccagctttaccttctcttaat

SEQ ID NO: 5371328 - DNA, 25 bp, Homo sapien
gattttgtccagctttaccttctct

SEQ ID NO: 5371329 - DNA, 25 bp, Homo sapien
catacttctaatagtaacatggtct

SEQ ID NO: 5371330 - DNA, 25 bp, Homo sapien
cttctaatagtaacatggtcttatc

SEQ ID NO: 5371331 - DNA, 25 bp, Homo sapien
ttgatgatacccatacttctaatag

SEQ ID NO: 5371332 - DNA, 25 bp, Homo sapien
catggtcttatctattacactgtac

SEQ ID NO: 5371333 - DNA, 25 bp, Homo sapien
gcgaagggaagacgtgacagctgcc

SEQ ID NO: 5371334 - DNA, 25 bp, Homo sapien
tggcgaagggaagacgtgacagctg

SEQ ID NO: 5371335 - DNA, 25 bp, Homo sapien
agggaagacgtgacagctgccttca

SEQ ID NO: 5371336 - DNA, 25 bp, Homo sapien
gaagggaagacgtgacagctgcctt

SEQ ID NO: 5371337 - DNA, 25 bp, Homo sapien
ggcaatgcccgcttactagaaacat

SEQ ID NO: 5371338 - DNA, 25 bp, Homo sapien
taaggaagtaccaagagccaaacca

SEQ ID NO: 5371339 - DNA, 25 bp, Homo sapien
gaaaacgtccagtcataggcaatgc

SEQ ID NO: 5371340 - DNA, 25 bp, Homo sapien
tatatgggtgactagagcatcggct

SEQ ID NO: 5371341 - DNA, 25 bp, Homo sapien
cacatattgtcattacataccagag

SEQ ID NO: 5371342 - DNA, 25 bp, Homo sapien
acatattgtcattacataccagagc

SEQ ID NO: 5371343 - DNA, 25 bp, Homo sapien
ttcacatattgtcattacataccag

SEQ ID NO: 5371344 - DNA, 25 bp, Homo sapien
tgacagttcatcatttccacccaaa

SEQ ID NO: 5371345 - DNA, 25 bp, Homo sapien
taagaaagtagctgacagttcatca

SEQ ID NO: 5371346 - DNA, 25 bp, Homo sapien
atttctaagaaagtagctgacagtt

SEQ ID NO: 5371347 - DNA, 25 bp, Homo sapien
gacagttcatcatttccacccaaag

SEQ ID NO: 5371348 - DNA, 25 bp, Homo sapien
ccagcagtaagtctgtattggttgc

SEQ ID NO: 5371349 - DNA, 25 bp, Homo sapien
tccaaacactgtaaagactccagat

SEQ ID NO: 5371350 - DNA, 25 bp, Homo sapien
gaagcataagattagcataggccag

SEQ ID NO: 5371351 - DNA, 25 bp, Homo sapien
tcctgcacatctctagtggaaagcg

SEQ ID NO: 5371352 - DNA, 25 bp, Homo sapien
aaacttgaacgcaaagctatgttcc

SEQ ID NO: 5371353 - DNA, 25 bp, Homo sapien
gggtctgtacaacacacgaattcca

SEQ ID NO: 5371354 - DNA, 25 bp, Homo sapien
agggtctgtacaacacacgaattcc

SEQ ID NO: 5371355 - DNA, 25 bp, Homo sapien
tctaaacttgaacgcaaagctatgt

SEQ ID NO: 5371356 - DNA, 25 bp, Homo sapien
tcaagtcaaaaagtttattccatcc

SEQ ID NO: 5371357 - DNA, 25 bp, Homo sapien
tcaccttcacaatctagaagctgtt

SEQ ID NO: 5371358 - DNA, 25 bp, Homo sapien
tcttcaccttcacaatctagaagct

SEQ ID NO: 5371359 - DNA, 25 bp, Homo sapien
tccatcttcaccttcacaatctaga

SEQ ID NO: 5371360 - DNA, 25 bp, Homo sapien
gcaaaaattgtatatcagacagaac

SEQ ID NO: 5371361 - DNA, 25 bp, Homo sapien
aaaatatccctaaattgtcatcctg

SEQ ID NO: 5371362 - DNA, 25 bp, Homo sapien
tcagacaatagttatcagaaaactc

SEQ ID NO: 5371363 - DNA, 25 bp, Homo sapien
tccagaagggtaaatgagatgtcac

SEQ ID NO: 5371364 - DNA, 25 bp, Homo sapien
agtttataaattgcaggacttcctg

SEQ ID NO: 5371365 - DNA, 25 bp, Homo sapien
tagtttataaattgcaggacttcct

SEQ ID NO: 5371366 - DNA, 25 bp, Homo sapien
cttgcacattaatgtaagtacatat

SEQ ID NO: 5371367 - DNA, 25 bp, Homo sapien
gagctttgggatccctctcttgcac

SEQ ID NO: 5371368 - DNA, 25 bp, Homo sapien
ctgtgagctttgggatccctctctt

SEQ ID NO: 5371369 - DNA, 25 bp, Homo sapien
tgagctttgggatccctctcttgca

SEQ ID NO: 5371370 - DNA, 25 bp, Homo sapien
tagcaagatcatattctttagcttc

SEQ ID NO: 5371371 - DNA, 25 bp, Homo sapien
caaaatagaatcctttcattgactt

SEQ ID NO: 5371372 - DNA, 25 bp, Homo sapien
tacagctttgcaaaatagaatcctt

SEQ ID NO: 5371373 - DNA, 25 bp, Homo sapien
gctttgcaaaatagaatcctttcat

SEQ ID NO: 5371374 - DNA, 25 bp, Homo sapien
gagaaactaaatcagacccactgcc

SEQ ID NO: 5371375 - DNA, 25 bp, Homo sapien
tgctgcactacccatttgaccctga

SEQ ID NO: 5371376 - DNA, 25 bp, Homo sapien
gaacaagtatcttaaatctctacag

SEQ ID NO: 5371377 - DNA, 25 bp, Homo sapien
tacaggtctcaatatccacagggtt

SEQ ID NO: 5371378 - DNA, 25 bp, Homo sapien
tgggaagaaacccgccgatacagca

SEQ ID NO: 5371379 - DNA, 25 bp, Homo sapien
ttgtcactcgacgcagccgccaaag

SEQ ID NO: 5371380 - DNA, 25 bp, Homo sapien
aaagctcacccggagctgcgtcagt

SEQ ID NO: 5371381 - DNA, 25 bp, Homo sapien
ccaggccaaggaggtacgacctccg

SEQ ID NO: 5371382 - DNA, 25 bp, Homo sapien
agcgccctcgggagccatgacccct

SEQ ID NO: 5371383 - DNA, 25 bp, Homo sapien
gcgccctcgggagccatgacccctg

SEQ ID NO: 5371384 - DNA, 25 bp, Homo sapien
gccctcgggagccatgacccctgac

SEQ ID NO: 5371385 - DNA, 25 bp, Homo sapien
cctcgggagccatgacccctgaccc

SEQ ID NO: 5371386 - DNA, 25 bp, Homo sapien
ggccgggtcgaggccgccgcctcaa

SEQ ID NO: 5371387 - DNA, 25 bp, Homo sapien
gccgggtcgaggccgccgcctcaac

SEQ ID NO: 5371388 - DNA, 25 bp, Homo sapien
ccgggtcgaggccgccgcctcaaca

SEQ ID NO: 5371389 - DNA, 25 bp, Homo sapien
cgacgtaccgctccacatcggcctt

SEQ ID NO: 5371390 - DNA, 25 bp, Homo sapien
gacgtaccgctccacatcggccttg

SEQ ID NO: 5371391 - DNA, 25 bp, Homo sapien
gcgacgtaccgctccacatcggcct

SEQ ID NO: 5371392 - DNA, 25 bp, Homo sapien
cccgagacgcgtgcgagcaccgctc

SEQ ID NO: 5371393 - DNA, 25 bp, Homo sapien
ctcccgagacgcgtgcgagcaccgc

SEQ ID NO: 5371394 - DNA, 25 bp, Homo sapien
gagacgcgtgcgagcaccgctcagc

SEQ ID NO: 5371395 - DNA, 25 bp, Homo sapien
cgagacgcgtgcgagcaccgctcag

SEQ ID NO: 5371396 - DNA, 25 bp, Homo sapien
ctgtgacgagcgtgcggcgccgccc

SEQ ID NO: 5371397 - DNA, 25 bp, Homo sapien
tgtgacgagcgtgcggcgccgccca

SEQ ID NO: 5371398 - DNA, 25 bp, Homo sapien
tctgagggtgtcttgacatgatctt

SEQ ID NO: 5371399 - DNA, 25 bp, Homo sapien
ctgagggtgtcttgacatgatctta

SEQ ID NO: 5371400 - DNA, 25 bp, Homo sapien
gagggtgtcttgacatgatcttatc

SEQ ID NO: 5371401 - DNA, 25 bp, Homo sapien
gtctgagggtgtcttgacatgatct

SEQ ID NO: 5371402 - DNA, 25 bp, Homo sapien
gaggccccacgcatggctaggatgc

SEQ ID NO: 5371403 - DNA, 25 bp, Homo sapien
gggtctccaatcccagcagggaggc

SEQ ID NO: 5371404 - DNA, 25 bp, Homo sapien
accccagggactgcacgaagtggaa

SEQ ID NO: 5371405 - DNA, 25 bp, Homo sapien
taagggttcagacccccgcaacaca

SEQ ID NO: 5371406 - DNA, 25 bp, Homo sapien
tgacggttctcatggcctcctctgg

SEQ ID NO: 5371407 - DNA, 25 bp, Homo sapien
cttgacggttctcatggcctcctct

SEQ ID NO: 5371408 - DNA, 25 bp, Homo sapien
gcactgctgacgacgtcctcctgag

SEQ ID NO: 5371409 - DNA, 25 bp, Homo sapien
tcagcactgctgacgacgtcctcct

SEQ ID NO: 5371410 - DNA, 25 bp, Homo sapien
gatggcaaagctgaacgatcattgg

SEQ ID NO: 5371411 - DNA, 25 bp, Homo sapien
tgcacgaagtcttcacaagctttcg

SEQ ID NO: 5371412 - DNA, 25 bp, Homo sapien
tctccaacgaggcaaatacttcatt

SEQ ID NO: 5371413 - DNA, 25 bp, Homo sapien
ttcacaagctttcgccaattcctca

SEQ ID NO: 5371414 - DNA, 25 bp, Homo sapien
gtcatccaagaggaaagactccatc

SEQ ID NO: 5371415 - DNA, 25 bp, Homo sapien
tcatccaagaggaaagactccatct

SEQ ID NO: 5371416 - DNA, 25 bp, Homo sapien
ctttgacttgatgttcatctaattt

SEQ ID NO: 5371417 - DNA, 25 bp, Homo sapien
gacttgatgttcatctaattttact

SEQ ID NO: 5371418 - DNA, 25 bp, Homo sapien
ttgacttgatgttcatctaatttta

SEQ ID NO: 5371419 - DNA, 25 bp, Homo sapien
tgacttgatgttcatctaattttac

SEQ ID NO: 5371420 - DNA, 25 bp, Homo sapien
gaccttcagaagacatttgctaccg

SEQ ID NO: 5371421 - DNA, 25 bp, Homo sapien
ttgctaccgtgcctctcattgatgc

SEQ ID NO: 5371422 - DNA, 25 bp, Homo sapien
tcctcctgacatttaggagctgtca

SEQ ID NO: 5371423 - DNA, 25 bp, Homo sapien
ccttactgtgctgggatcctatgct

SEQ ID NO: 5371424 - DNA, 25 bp, Homo sapien
ttgctctgtatgatcctttccacag

SEQ ID NO: 5371425 - DNA, 25 bp, Homo sapien
tgctctgtatgatcctttccacagt

SEQ ID NO: 5371426 - DNA, 25 bp, Homo sapien
cattgctctgtatgatcctttccac

SEQ ID NO: 5371427 - DNA, 25 bp, Homo sapien
tccattgctctgtatgatcctttcc

SEQ ID NO: 5371428 - DNA, 25 bp, Homo sapien
atataccttgtatctagtgacttta

SEQ ID NO: 5371429 - DNA, 25 bp, Homo sapien
tgactttacaatgttcagttattca

SEQ ID NO: 5371430 - DNA, 25 bp, Homo sapien
ggatccactatgtatagaaccatat

SEQ ID NO: 5371431 - DNA, 25 bp, Homo sapien
gatccactatgtatagaaccatatc

SEQ ID NO: 5371432 - DNA, 25 bp, Homo sapien
tccatgaactggagaatcattgagt

SEQ ID NO: 5371433 - DNA, 25 bp, Homo sapien
ttcagaaaacctagcacaaggccgg

SEQ ID NO: 5371434 - DNA, 25 bp, Homo sapien
taacaactgtatccgtgacacttag

SEQ ID NO: 5371435 - DNA, 25 bp, Homo sapien
gcagagaacacagtatcattaaatt

SEQ ID NO: 5371436 - DNA, 25 bp, Homo sapien
ggtccagccctcttgcaagtgtggt

SEQ ID NO: 5371437 - DNA, 25 bp, Homo sapien
tcattcacagtggaggctacatcaa

SEQ ID NO: 5371438 - DNA, 25 bp, Homo sapien
tagcaaagacatgggcaccggagta

SEQ ID NO: 5371439 - DNA, 25 bp, Homo sapien
aattcagtgacgtacatggctctgg

SEQ ID NO: 5371440 - DNA, 25 bp, Homo sapien
catctatagtgaactgattttcgac

SEQ ID NO: 5371441 - DNA, 25 bp, Homo sapien
gacaagctaagctgacgctaaaatc

SEQ ID NO: 5371442 - DNA, 25 bp, Homo sapien
gacgctaaaatccatattgaaatac

SEQ ID NO: 5371443 - DNA, 25 bp, Homo sapien
caaatctgtgtagtttgtagacaga

SEQ ID NO: 5371444 - DNA, 25 bp, Homo sapien
ttgaaaaaccagcaggcattccctg

SEQ ID NO: 5371445 - DNA, 25 bp, Homo sapien
tccagtccggaagatgcgacgaggt

SEQ ID NO: 5371446 - DNA, 25 bp, Homo sapien
gaagcaacgactttggccggatgac

SEQ ID NO: 5371447 - DNA, 25 bp, Homo sapien
tgtaaatccagttggacgccccgct

SEQ ID NO: 5371448 - DNA, 25 bp, Homo sapien
tcaactgctcagatcggtcggtagc

SEQ ID NO: 5371449 - DNA, 25 bp, Homo sapien
caccgagaggttatatagtggcatc

SEQ ID NO: 5371450 - DNA, 25 bp, Homo sapien
gagaactcggccttagaatactttg

SEQ ID NO: 5371451 - DNA, 25 bp, Homo sapien
ggctacaatttctatggcaccgaga

SEQ ID NO: 5371452 - DNA, 25 bp, Homo sapien
tgtgcctggcctccggtgagtattt

SEQ ID NO: 5371453 - DNA, 25 bp, Homo sapien
tgtatggatttaccatcccctgtgt

SEQ ID NO: 5371454 - DNA, 25 bp, Homo sapien
tgaagctttatacctgttgaacaac

SEQ ID NO: 5371455 - DNA, 25 bp, Homo sapien
ttcatagcagtgtgtagagtgccac

SEQ ID NO: 5371456 - DNA, 25 bp, Homo sapien
tagtatatacactatccatatgtgc

SEQ ID NO: 5371457 - DNA, 25 bp, Homo sapien
gattatatcccaagactcccagtga

SEQ ID NO: 5371458 - DNA, 25 bp, Homo sapien
tattgctacacagtactccatagta

SEQ ID NO: 5371459 - DNA, 25 bp, Homo sapien
tgaacaatcaggtataatagtcccc

SEQ ID NO: 5371460 - DNA, 25 bp, Homo sapien
ggcattctgaccaaccagcatttgg

SEQ ID NO: 5371461 - DNA, 25 bp, Homo sapien
aagtgttcaagactgggattgctgg

SEQ ID NO: 5371462 - DNA, 25 bp, Homo sapien
caaaattgtagataaggaggactac

SEQ ID NO: 5371463 - DNA, 25 bp, Homo sapien
gaggactactatacaggttattgtg

SEQ ID NO: 5371464 - DNA, 25 bp, Homo sapien
tcaatttgttgcaacaccattgcac

SEQ ID NO: 5371465 - DNA, 25 bp, Homo sapien
catctgtgtatcttcagtgaaatgt

SEQ ID NO: 5371466 - DNA, 25 bp, Homo sapien
tgcatttctctaatggctgaaaatg

SEQ ID NO: 5371467 - DNA, 25 bp, Homo sapien
tttctctaatggctgaaaatgttga

SEQ ID NO: 5371468 - DNA, 25 bp, Homo sapien
catttctctaatggctgaaaatgtt

SEQ ID NO: 5371469 - DNA, 25 bp, Homo sapien
tcggatgtcaactgccaaccagggt

SEQ ID NO: 5371470 - DNA, 25 bp, Homo sapien
caaacgaaacggcaggactgatgct

SEQ ID NO: 5371471 - DNA, 25 bp, Homo sapien
aacaacatgttgagacgctgcagca

SEQ ID NO: 5371472 - DNA, 25 bp, Homo sapien
gattatcagcgtctgcgcaaggccg

SEQ ID NO: 5371473 - DNA, 25 bp, Homo sapien
gatctagacctagtctaggacctcg

SEQ ID NO: 5371474 - DNA, 25 bp, Homo sapien
tagtctaggacctcgggaactagga

SEQ ID NO: 5371475 - DNA, 25 bp, Homo sapien
gacctcgggaactaggaccagcctc

SEQ ID NO: 5371476 - DNA, 25 bp, Homo sapien
tcttttacccagtgatctagaccta

SEQ ID NO: 5371477 - DNA, 25 bp, Homo sapien
gatctgggcaggtaccaacagtggc

SEQ ID NO: 5371478 - DNA, 25 bp, Homo sapien
ttcatgcttctcaggaatacaggct

SEQ ID NO: 5371479 - DNA, 25 bp, Homo sapien
gctgtttgatacaggctccccagta

SEQ ID NO: 5371480 - DNA, 25 bp, Homo sapien
taaacctgcggaagagatgctgagt

SEQ ID NO: 5371481 - DNA, 25 bp, Homo sapien
tcccacccagccgtgacataatgat

SEQ ID NO: 5371482 - DNA, 25 bp, Homo sapien
cccacccagccgtgacataatgatt

SEQ ID NO: 5371483 - DNA, 25 bp, Homo sapien
cacccagccgtgacataatgatttt

SEQ ID NO: 5371484 - DNA, 25 bp, Homo sapien
ccacccagccgtgacataatgattt

SEQ ID NO: 5371485 - DNA, 25 bp, Homo sapien
taaaagcctttcatgtcggctgcat

SEQ ID NO: 5371486 - DNA, 25 bp, Homo sapien
gcagtcagtcatttagatcacatca

SEQ ID NO: 5371487 - DNA, 25 bp, Homo sapien
gggcgattcttcacccttgctgccg

SEQ ID NO: 5371488 - DNA, 25 bp, Homo sapien
caggcttctaacttcttgcaattca

SEQ ID NO: 5371489 - DNA, 25 bp, Homo sapien
agtagtttgtactgctgtaggatca

SEQ ID NO: 5371490 - DNA, 25 bp, Homo sapien
agattcgacttcttactggcttaga

SEQ ID NO: 5371491 - DNA, 25 bp, Homo sapien
tgatagtagtttgtactgctgtagg

SEQ ID NO: 5371492 - DNA, 25 bp, Homo sapien
cagagattcgacttcttactggctt

SEQ ID NO: 5371493 - DNA, 25 bp, Homo sapien
taagtctgctacaagcctgactggg

SEQ ID NO: 5371494 - DNA, 25 bp, Homo sapien
tgtccagggaggagcaatctcgcag

SEQ ID NO: 5371495 - DNA, 25 bp, Homo sapien
cactgtggtggtaaaaccgcctgct

SEQ ID NO: 5371496 - DNA, 25 bp, Homo sapien
aatctcgcagtctgaacacggcagc

SEQ ID NO: 5371497 - DNA, 25 bp, Homo sapien
taatcaatttattaaaatagttgac

SEQ ID NO: 5371498 - DNA, 25 bp, Homo sapien
ctggtaatcaatttattaaaatagt

SEQ ID NO: 5371499 - DNA, 25 bp, Homo sapien
caactggtaatcaatttattaaaat

SEQ ID NO: 5371500 - DNA, 25 bp, Homo sapien
gtaatcaatttattaaaatagttga

SEQ ID NO: 5371501 - DNA, 25 bp, Homo sapien
gcatctgcaatggtaacttccacct

SEQ ID NO: 5371502 - DNA, 25 bp, Homo sapien
tgcaagtcaatgagtcgcttgtgaa

SEQ ID NO: 5371503 - DNA, 25 bp, Homo sapien
agcatctgcaatggtaacttccacc

SEQ ID NO: 5371504 - DNA, 25 bp, Homo sapien
aattctcatctggaaatgatcccag

SEQ ID NO: 5371505 - DNA, 25 bp, Homo sapien
ctttgcgcctctgattaagtcatca

SEQ ID NO: 5371506 - DNA, 25 bp, Homo sapien
tcctttgcgcctctgattaagtcat

SEQ ID NO: 5371507 - DNA, 25 bp, Homo sapien
gcgcctctgattaagtcatcacaca

SEQ ID NO: 5371508 - DNA, 25 bp, Homo sapien
ttgcgcctctgattaagtcatcaca

SEQ ID NO: 5371509 - DNA, 25 bp, Homo sapien
tttacattgcggcttgttagggtga

SEQ ID NO: 5371510 - DNA, 25 bp, Homo sapien
ggtgattcgaatttggtgaatggcc

SEQ ID NO: 5371511 - DNA, 25 bp, Homo sapien
tagggtgattcgaatttggtgaatg

SEQ ID NO: 5371512 - DNA, 25 bp, Homo sapien
ggattttacattgcggcttgttagg

SEQ ID NO: 5371513 - DNA, 25 bp, Homo sapien
gccaaggctgctgcgcggcttcctg

SEQ ID NO: 5371514 - DNA, 25 bp, Homo sapien
taaaagccaaggctgctgcgcggct

SEQ ID NO: 5371515 - DNA, 25 bp, Homo sapien
aaagccaaggctgctgcgcggcttc

SEQ ID NO: 5371516 - DNA, 25 bp, Homo sapien
cttaaaagccaaggctgctgcgcgg

SEQ ID NO: 5371517 - DNA, 25 bp, Homo sapien
gcgtctgaacgagaaatcctcagca

SEQ ID NO: 5371518 - DNA, 25 bp, Homo sapien
gagcaggagcgtctgaacgagaaat

SEQ ID NO: 5371519 - DNA, 25 bp, Homo sapien
ggagcgtctgaacgagaaatcctca

SEQ ID NO: 5371520 - DNA, 25 bp, Homo sapien
gcaggagcgtctgaacgagaaatcc

SEQ ID NO: 5371521 - DNA, 25 bp, Homo sapien
ggcagcctgagctcaggcgccatct

SEQ ID NO: 5371522 - DNA, 25 bp, Homo sapien
gcagcctgagctcaggcgccatctt

SEQ ID NO: 5371523 - DNA, 25 bp, Homo sapien
agcctgagctcaggcgccatcttcc

SEQ ID NO: 5371524 - DNA, 25 bp, Homo sapien
agggcagcctgagctcaggcgccat

SEQ ID NO: 5371525 - DNA, 25 bp, Homo sapien
tcgtggctctgcaagcaccaagagt

SEQ ID NO: 5371526 - DNA, 25 bp, Homo sapien
ggctctgcaagcaccaagagtggtt

SEQ ID NO: 5371527 - DNA, 25 bp, Homo sapien
tctgcaagcaccaagagtggttctt

SEQ ID NO: 5371528 - DNA, 25 bp, Homo sapien
ttgtcgtggctctgcaagcaccaag

SEQ ID NO: 5371529 - DNA, 25 bp, Homo sapien
ggatgcttcactagggcaggaaacc

SEQ ID NO: 5371530 - DNA, 25 bp, Homo sapien
gggatgcttcactagggcaggaaac

SEQ ID NO: 5371531 - DNA, 25 bp, Homo sapien
gtggccccattaccaatcatagaga

SEQ ID NO: 5371532 - DNA, 25 bp, Homo sapien
ttaccaatcatagagacacctttgg

SEQ ID NO: 5371533 - DNA, 25 bp, Homo sapien
gcaccctgacgccactttgtcagtg

SEQ ID NO: 5371534 - DNA, 25 bp, Homo sapien
cagtgtggttttcacatcctgtcct

SEQ ID NO: 5371535 - DNA, 25 bp, Homo sapien
tagcggtatgtttgtcttttcgccc

SEQ ID NO: 5371536 - DNA, 25 bp, Homo sapien
catcctgtcctagcggtatgtttgt

SEQ ID NO: 5371537 - DNA, 25 bp, Homo sapien
catattgtagttgtaacccatgagc

SEQ ID NO: 5371538 - DNA, 25 bp, Homo sapien
tagttgtaacccatgagcaatagat

SEQ ID NO: 5371539 - DNA, 25 bp, Homo sapien
tacatattgtagttgtaacccatga

SEQ ID NO: 5371540 - DNA, 25 bp, Homo sapien
gttacatattgtagttgtaacccat

SEQ ID NO: 5371541 - DNA, 25 bp, Homo sapien
tagggtaactatgccattccccagg

SEQ ID NO: 5371542 - DNA, 25 bp, Homo sapien
gcctgaatgaaccaagacacccatg

SEQ ID NO: 5371543 - DNA, 25 bp, Homo sapien
ggccacctggtctatagtcctctgt

SEQ ID NO: 5371544 - DNA, 25 bp, Homo sapien
aaagggcctgcgttgagactagctc

SEQ ID NO: 5371545 - DNA, 25 bp, Homo sapien
tgaaactcacggttcagcggctgag

SEQ ID NO: 5371546 - DNA, 25 bp, Homo sapien
gccggaccgggcagaatacattctt

SEQ ID NO: 5371547 - DNA, 25 bp, Homo sapien
tatatgagtgagaaaagcgaccgct

SEQ ID NO: 5371548 - DNA, 25 bp, Homo sapien
tcaagggctgccgtgtggacttagc

SEQ ID NO: 5371549 - DNA, 25 bp, Homo sapien
gagtgagaagctgacacctctgtgc

SEQ ID NO: 5371550 - DNA, 25 bp, Homo sapien
gagccttgtggcagcacctgacttc

SEQ ID NO: 5371551 - DNA, 25 bp, Homo sapien
actccaacagtctgccggacgctgg

SEQ ID NO: 5371552 - DNA, 25 bp, Homo sapien
agggaaatcaggtcacccactccaa

SEQ ID NO: 5371553 - DNA, 25 bp, Homo sapien
gaagaaatgcaaaggcgctccagga

SEQ ID NO: 5371554 - DNA, 25 bp, Homo sapien
tgaagaaatgcaaaggcgctccagg

SEQ ID NO: 5371555 - DNA, 25 bp, Homo sapien
aaggtgagggcgagggctggtttca

SEQ ID NO: 5371556 - DNA, 25 bp, Homo sapien
agagctattaagagccagcctttgg

SEQ ID NO: 5371557 - DNA, 25 bp, Homo sapien
tttggcgagacagtaaggaactaca

SEQ ID NO: 5371558 - DNA, 25 bp, Homo sapien
ctggtttcatcatcagcgccgctgg

SEQ ID NO: 5371559 - DNA, 25 bp, Homo sapien
caatctcgaagactgatctcctaga

SEQ ID NO: 5371560 - DNA, 25 bp, Homo sapien
gaaactggggccaatctcgaagact

SEQ ID NO: 5371561 - DNA, 25 bp, Homo sapien
tctggagagaacatgtgctctggct

SEQ ID NO: 5371562 - DNA, 25 bp, Homo sapien
ttctggagagaacatgtgctctggc

SEQ ID NO: 5371563 - DNA, 25 bp, Homo sapien
tcttcgcagctttaactgccgcttc

SEQ ID NO: 5371564 - DNA, 25 bp, Homo sapien
tcttgaaatttgttaggttcttcgc

SEQ ID NO: 5371565 - DNA, 25 bp, Homo sapien
gcagctttaactgccgcttccttct

SEQ ID NO: 5371566 - DNA, 25 bp, Homo sapien
ctgggaaaaggcacttacaatcttg

SEQ ID NO: 5371567 - DNA, 25 bp, Homo sapien
gcccattcatatggcatgagccaca

SEQ ID NO: 5371568 - DNA, 25 bp, Homo sapien
gtgagcccattcatatggcatgagc

SEQ ID NO: 5371569 - DNA, 25 bp, Homo sapien
ggcagcagcccgttttgcgtgtccc

SEQ ID NO: 5371570 - DNA, 25 bp, Homo sapien
cctccggcagcagcccgttttgcgt

SEQ ID NO: 5371571 - DNA, 25 bp, Homo sapien
ttcggcagaagcatctcagtgttgg

SEQ ID NO: 5371572 - DNA, 25 bp, Homo sapien
tcagtgttggaaagataaggatttc

SEQ ID NO: 5371573 - DNA, 25 bp, Homo sapien
ctactcttcggcagaagcatctcag

SEQ ID NO: 5371574 - DNA, 25 bp, Homo sapien
ggcagaagcatctcagtgttggaaa

SEQ ID NO: 5371575 - DNA, 25 bp, Homo sapien
taaggtgccaggattacactacggg

SEQ ID NO: 5371576 - DNA, 25 bp, Homo sapien
taatattcacggtaacagcaaagcg

SEQ ID NO: 5371577 - DNA, 25 bp, Homo sapien
gacctataaaagtacgcctgtggac

SEQ ID NO: 5371578 - DNA, 25 bp, Homo sapien
ttcagaccgaccttgggacctacag

SEQ ID NO: 5371579 - DNA, 25 bp, Homo sapien
gaatttgaatccgaagcagtgtcct

SEQ ID NO: 5371580 - DNA, 25 bp, Homo sapien
tcctgcgtgcgctgaaagtgcggct

SEQ ID NO: 5371581 - DNA, 25 bp, Homo sapien
ccaagtgcatgactgcgggagcaaa

SEQ ID NO: 5371582 - DNA, 25 bp, Homo sapien
taggaatgactttggtcgcagcctc

SEQ ID NO: 5371583 - DNA, 25 bp, Homo sapien
acgcgggtcgctgcgcgggctataa

SEQ ID NO: 5371584 - DNA, 25 bp, Homo sapien
tggcgccgcctcgtaaaggctcttt

SEQ ID NO: 5371585 - DNA, 25 bp, Homo sapien
tctctgcgtggttcttcttctcggc

SEQ ID NO: 5371586 - DNA, 25 bp, Homo sapien
ttcctgggaaggtcgtgagtcccgc

SEQ ID NO: 5371587 - DNA, 25 bp, Homo sapien
ccgtgggagccaatgatgtagcaaa

SEQ ID NO: 5371588 - DNA, 25 bp, Homo sapien
tgtacaactcgactcaagggctgct

SEQ ID NO: 5371589 - DNA, 25 bp, Homo sapien
aaagtgagcgaaaccatccggaagg

SEQ ID NO: 5371590 - DNA, 25 bp, Homo sapien
tttacacatcttgaaaggcgctcag

SEQ ID NO: 5371591 - DNA, 25 bp, Homo sapien
ggcaactcgtggcttcgtttttgaa

SEQ ID NO: 5371592 - DNA, 25 bp, Homo sapien
gaacccattgtattgttggtgcaac

SEQ ID NO: 5371593 - DNA, 25 bp, Homo sapien
ttgaagctccctatttctggaaccc

SEQ ID NO: 5371594 - DNA, 25 bp, Homo sapien
aactattggtttctccctcgtggca

SEQ ID NO: 5371595 - DNA, 25 bp, Homo sapien
tgtgatcaagataacattaaacctt

SEQ ID NO: 5371596 - DNA, 25 bp, Homo sapien
aagtttttagccttcccatatatgt

SEQ ID NO: 5371597 - DNA, 25 bp, Homo sapien
ccatatatgtattcagatctttgct

SEQ ID NO: 5371598 - DNA, 25 bp, Homo sapien
tgaggtggcccagtctccactgact

SEQ ID NO: 5371599 - DNA, 25 bp, Homo sapien
cattcagcgcccaaataatcaggtg

SEQ ID NO: 5371600 - DNA, 25 bp, Homo sapien
tatctctgtctggaacattcagcgc

SEQ ID NO: 5371601 - DNA, 25 bp, Homo sapien
gtcactggccttactgttccttaaa

SEQ ID NO: 5371602 - DNA, 25 bp, Homo sapien
taatcaggtggtttgccccttctgt

SEQ ID NO: 5371603 - DNA, 25 bp, Homo sapien
cacaggatccactgataatatgatc

SEQ ID NO: 5371604 - DNA, 25 bp, Homo sapien
caaggcatggattaaattatggcgc

SEQ ID NO: 5371605 - DNA, 25 bp, Homo sapien
gactttcatgtttgggactaaggca

SEQ ID NO: 5371606 - DNA, 25 bp, Homo sapien
ggatgtttaccacctgctctaagtg

SEQ ID NO: 5371607 - DNA, 25 bp, Homo sapien
tcagggtgttctcacacttcagtct

SEQ ID NO: 5371608 - DNA, 25 bp, Homo sapien
gttagatttaaataggattgtatag

SEQ ID NO: 5371609 - DNA, 25 bp, Homo sapien
ttagatttaaataggattgtatagt

SEQ ID NO: 5371610 - DNA, 25 bp, Homo sapien
aattagctgtgtaaaatagcccggg

SEQ ID NO: 5371611 - DNA, 25 bp, Homo sapien
ggcatattcgggagcttcttagagg

SEQ ID NO: 5371612 - DNA, 25 bp, Homo sapien
tgaagagccgtttgacagagcatgc

SEQ ID NO: 5371613 - DNA, 25 bp, Homo sapien
caagttaagtgggacagccttccat

SEQ ID NO: 5371614 - DNA, 25 bp, Homo sapien
gacatatggtcagtaacccaggaac

SEQ ID NO: 5371615 - DNA, 25 bp, Homo sapien
tcaaaatcataaatagcccggtggc

SEQ ID NO: 5371616 - DNA, 25 bp, Homo sapien
tgcagcatgtgagacaaggaattaa

SEQ ID NO: 5371617 - DNA, 25 bp, Homo sapien
aatgggtactctcatgtattgctgg

SEQ ID NO: 5371618 - DNA, 25 bp, Homo sapien
tcatacacagagcttcgcatgtctc

SEQ ID NO: 5371619 - DNA, 25 bp, Homo sapien
ctcattccacaaggatcagcagctg

SEQ ID NO: 5371620 - DNA, 25 bp, Homo sapien
tatagacttgatgaaagccccagaa

SEQ ID NO: 5371621 - DNA, 25 bp, Homo sapien
cagctggaccattacctggagctat

SEQ ID NO: 5371622 - DNA, 25 bp, Homo sapien
tgggagctgcaaccagagccagcta

SEQ ID NO: 5371623 - DNA, 25 bp, Homo sapien
tgcatcccccaacccaagtacacct

SEQ ID NO: 5371624 - DNA, 25 bp, Homo sapien
ctctgcatcccccaacccaagtaca

SEQ ID NO: 5371625 - DNA, 25 bp, Homo sapien
gcaaccagagccagctaaagctctg

SEQ ID NO: 5371626 - DNA, 25 bp, Homo sapien
aggaagcgggttggcctgttggagc

SEQ ID NO: 5371627 - DNA, 25 bp, Homo sapien
tgagggagtgtggtctgtacaacca

SEQ ID NO: 5371628 - DNA, 25 bp, Homo sapien
gcctgttggagcatgagctcttttt

SEQ ID NO: 5371629 - DNA, 25 bp, Homo sapien
tcaaaggggcttatcaggccagtgg

SEQ ID NO: 5371630 - DNA, 25 bp, Homo sapien
tgcctttctgcagcacagtgcctgc

SEQ ID NO: 5371631 - DNA, 25 bp, Homo sapien
tgggtcctctcctgtctccatccta

SEQ ID NO: 5371632 - DNA, 25 bp, Homo sapien
tcctcttggtcttctctgctgggtc

SEQ ID NO: 5371633 - DNA, 25 bp, Homo sapien
cttctgcctttctgcagcacagtgc

SEQ ID NO: 5371634 - DNA, 25 bp, Homo sapien
ggtgctcgatctttagctgccatag

SEQ ID NO: 5371635 - DNA, 25 bp, Homo sapien
cggggctccgttcttgcctctcttt

SEQ ID NO: 5371636 - DNA, 25 bp, Homo sapien
ctcgatctttagctgccatagatgc

SEQ ID NO: 5371637 - DNA, 25 bp, Homo sapien
gtcctggtgctcgatctttagctgc

SEQ ID NO: 5371638 - DNA, 25 bp, Homo sapien
gtttctggccaccaacagcagctac

SEQ ID NO: 5371639 - DNA, 25 bp, Homo sapien
tggccaccaacagcagctacaacta

SEQ ID NO: 5371640 - DNA, 25 bp, Homo sapien
gctacaactacaccaatgtgagtat

SEQ ID NO: 5371641 - DNA, 25 bp, Homo sapien
tatggaggggtggaccgtcggcctc

SEQ ID NO: 5371642 - DNA, 25 bp, Homo sapien
catcttgctcctgtggccaccagtg

SEQ ID NO: 5371643 - DNA, 25 bp, Homo sapien
tcttgctcctgtggccaccagtgtg

SEQ ID NO: 5371644 - DNA, 25 bp, Homo sapien
atcttgctcctgtggccaccagtgt

SEQ ID NO: 5371645 - DNA, 25 bp, Homo sapien
cagtgggtaggagcctggtgacctc

SEQ ID NO: 5371646 - DNA, 25 bp, Homo sapien
ggtcatttctcatgagtggaagctc

SEQ ID NO: 5371647 - DNA, 25 bp, Homo sapien
tgttcagcatcagtgaggtgagtgt

SEQ ID NO: 5371648 - DNA, 25 bp, Homo sapien
tgggctgtgcaaagggccagggtgc

SEQ ID NO: 5371649 - DNA, 25 bp, Homo sapien
ccccatggttacctctgccactccc

SEQ ID NO: 5371650 - DNA, 25 bp, Homo sapien
ccatggttacctctgccactcccag

SEQ ID NO: 5371651 - DNA, 25 bp, Homo sapien
cccatggttacctctgccactccca

SEQ ID NO: 5371652 - DNA, 25 bp, Homo sapien
ctcaagtccaagaagcgtcagggct

SEQ ID NO: 5371653 - DNA, 25 bp, Homo sapien
ttcggacatggtgtgcgagctgctt

SEQ ID NO: 5371654 - DNA, 25 bp, Homo sapien
tcagggctggcggacttgcctggtg

SEQ ID NO: 5371655 - DNA, 25 bp, Homo sapien
caggaagggcaaacgagtgtctgtc

SEQ ID NO: 5371656 - DNA, 25 bp, Homo sapien
aagagactggacacgcacctggcag

SEQ ID NO: 5371657 - DNA, 25 bp, Homo sapien
agacatataccagtgagaccctggc

SEQ ID NO: 5371658 - DNA, 25 bp, Homo sapien
gacccctggtggcttttcagagcgg

SEQ ID NO: 5371659 - DNA, 25 bp, Homo sapien
ccctggtggcttttcagagcggttg

SEQ ID NO: 5371660 - DNA, 25 bp, Homo sapien
cagcggtaccctcttgaagggctga

SEQ ID NO: 5371661 - DNA, 25 bp, Homo sapien
tctgctggccgacattccaaagggc

SEQ ID NO: 5371662 - DNA, 25 bp, Homo sapien
agctgggcccttattgactgactag

SEQ ID NO: 5371663 - DNA, 25 bp, Homo sapien
aagtgcctgcgtgctagctgggccc

SEQ ID NO: 5371664 - DNA, 25 bp, Homo sapien
gccgtacccgggacggagtgcttca

SEQ ID NO: 5371665 - DNA, 25 bp, Homo sapien
ggagcctgtgcatagctgaggaatc

SEQ ID NO: 5371666 - DNA, 25 bp, Homo sapien
aacatcgttgggcaggaagttggca

SEQ ID NO: 5371667 - DNA, 25 bp, Homo sapien
ctgcagcaacatcgttgggcaggaa

SEQ ID NO: 5371668 - DNA, 25 bp, Homo sapien
acacatgtcacccagtttattatta

SEQ ID NO: 5371669 - DNA, 25 bp, Homo sapien
aaagacacatgtcacccagtttatt

SEQ ID NO: 5371670 - DNA, 25 bp, Homo sapien
cacatgtcacccagtttattattac

SEQ ID NO: 5371671 - DNA, 25 bp, Homo sapien
agacacatgtcacccagtttattat

SEQ ID NO: 5371672 - DNA, 25 bp, Homo sapien
ttagacttatttttgcaaaggccca

SEQ ID NO: 5371673 - DNA, 25 bp, Homo sapien
tctaaaaagccatccccgaacaaca

SEQ ID NO: 5371674 - DNA, 25 bp, Homo sapien
catccccgaacaacattagacttat

SEQ ID NO: 5371675 - DNA, 25 bp, Homo sapien
tagacttatttttgcaaaggcccat

SEQ ID NO: 5371676 - DNA, 25 bp, Homo sapien
gactctatagtctgacgaggctgat

SEQ ID NO: 5371677 - DNA, 25 bp, Homo sapien
gcagctgcagtaccatccacaatca

SEQ ID NO: 5371678 - DNA, 25 bp, Homo sapien
cccagggtaatactgtgagacatcc

SEQ ID NO: 5371679 - DNA, 25 bp, Homo sapien
gctgatcgaaacctccaatgtgcca

SEQ ID NO: 5371680 - DNA, 25 bp, Homo sapien
gatgcctctacgtcctatgttcaga

SEQ ID NO: 5371681 - DNA, 25 bp, Homo sapien
ggcttcacaggtaaagttaactcta

SEQ ID NO: 5371682 - DNA, 25 bp, Homo sapien
tttgtgatctctaagcagccctctg

SEQ ID NO: 5371683 - DNA, 25 bp, Homo sapien
tctgagcattacttggcttcacagg

SEQ ID NO: 5371684 - DNA, 25 bp, Homo sapien
ggtgattcacccactccaaagtgct

SEQ ID NO: 5371685 - DNA, 25 bp, Homo sapien
gatgaatactattccacggcatgca

SEQ ID NO: 5371686 - DNA, 25 bp, Homo sapien
gctattgagaataacactgccacaa

SEQ ID NO: 5371687 - DNA, 25 bp, Homo sapien
catacttactcagaagagggtcaga

SEQ ID NO: 5371688 - DNA, 25 bp, Homo sapien
cgttttccataacggctgccccagt

SEQ ID NO: 5371689 - DNA, 25 bp, Homo sapien
cctggatgaggctgatagacctttg

SEQ ID NO: 5371690 - DNA, 25 bp, Homo sapien
tcttaggacagccaactggtatatc

SEQ ID NO: 5371691 - DNA, 25 bp, Homo sapien
tctccttggtaatgaatgctccttg

SEQ ID NO: 5371692 - DNA, 25 bp, Homo sapien
tttccacaaatagttgcccaggagg

SEQ ID NO: 5371693 - DNA, 25 bp, Homo sapien
taagtcctgagcgtccataatctgc

SEQ ID NO: 5371694 - DNA, 25 bp, Homo sapien
tactgtaaaactggcaaactggtct

SEQ ID NO: 5371695 - DNA, 25 bp, Homo sapien
agaacttgccctctgctaaggtgga

SEQ ID NO: 5371696 - DNA, 25 bp, Homo sapien
tatgattcaggggtttgaaacccca

SEQ ID NO: 5371697 - DNA, 25 bp, Homo sapien
caatgttacaggcagcgcctcattt

SEQ ID NO: 5371698 - DNA, 25 bp, Homo sapien
gtttgaaaccccaatgttacaggca

SEQ ID NO: 5371699 - DNA, 25 bp, Homo sapien
gcgcctcatttctacggaatataaa

SEQ ID NO: 5371700 - DNA, 25 bp, Homo sapien
tagcgggacactgctcgctcaatcc

SEQ ID NO: 5371701 - DNA, 25 bp, Homo sapien
gagaagccactactaaatcgtgttc

SEQ ID NO: 5371702 - DNA, 25 bp, Homo sapien
tcctgcagcatttctgggtagcggg

SEQ ID NO: 5371703 - DNA, 25 bp, Homo sapien
ttctaacagttcatcaagagaagcc

SEQ ID NO: 5371704 - DNA, 25 bp, Homo sapien
tcttccactgatgttatactagttt

SEQ ID NO: 5371705 - DNA, 25 bp, Homo sapien
ggtgtcgccgtgacttgttccctct

SEQ ID NO: 5371706 - DNA, 25 bp, Homo sapien
ccaggataattatgctgttctgcct

SEQ ID NO: 5371707 - DNA, 25 bp, Homo sapien
gaaagacaagacttcacagattcca

SEQ ID NO: 5371708 - DNA, 25 bp, Homo sapien
cacatgtagtgggttacttagctac

SEQ ID NO: 5371709 - DNA, 25 bp, Homo sapien
gacttgattgttccccagttaaatc

SEQ ID NO: 5371710 - DNA, 25 bp, Homo sapien
tagctacatgacttgattgttcccc

SEQ ID NO: 5371711 - DNA, 25 bp, Homo sapien
tccttcttaccacatgtagtgggtt

SEQ ID NO: 5371712 - DNA, 25 bp, Homo sapien
taataatacaaataagtcagctgat

SEQ ID NO: 5371713 - DNA, 25 bp, Homo sapien
tactggtacagctagagaagatgaa

SEQ ID NO: 5371714 - DNA, 25 bp, Homo sapien
cctttgttcagtattgagtagtgca

SEQ ID NO: 5371715 - DNA, 25 bp, Homo sapien
gggacactccagtctaggctgtttt

SEQ ID NO: 5371716 - DNA, 25 bp, Homo sapien
agatattaagaacaactttccgcaa

SEQ ID NO: 5371717 - DNA, 25 bp, Homo sapien
gtggttctgtttgagtcttgcaaga

SEQ ID NO: 5371718 - DNA, 25 bp, Homo sapien
ggttctgtttgagtcttgcaagata

SEQ ID NO: 5371719 - DNA, 25 bp, Homo sapien
caactttccgcaactcttgtattgg

SEQ ID NO: 5371720 - DNA, 25 bp, Homo sapien
ggaatgctggacaatatgttaagta

SEQ ID NO: 5371721 - DNA, 25 bp, Homo sapien
gcagatccagaatttagcaaatttt

SEQ ID NO: 5371722 - DNA, 25 bp, Homo sapien
gcccaataacatcaaaggtgccttt

SEQ ID NO: 5371723 - DNA, 25 bp, Homo sapien
taagtatttcattagaaggtacacc

SEQ ID NO: 5371724 - DNA, 25 bp, Homo sapien
cagttcgagttgtgctttcttttct

SEQ ID NO: 5371725 - DNA, 25 bp, Homo sapien
taagttccataggaggccgtttata

SEQ ID NO: 5371726 - DNA, 25 bp, Homo sapien
gacattctgtcagagtgttgttaat

SEQ ID NO: 5371727 - DNA, 25 bp, Homo sapien
tgttaattttactggacagttcgag

SEQ ID NO: 5371728 - DNA, 25 bp, Homo sapien
gacaaaatcaggagaatggaattaa

SEQ ID NO: 5371729 - DNA, 25 bp, Homo sapien
taattaaatactttcaactacagac

SEQ ID NO: 5371730 - DNA, 25 bp, Homo sapien
tatttttaaacatagtcaagctgct

SEQ ID NO: 5371731 - DNA, 25 bp, Homo sapien
tggcagcattgggttgcgcccaccc

SEQ ID NO: 5371732 - DNA, 25 bp, Homo sapien
tgggtcccatttacggttgtgacat

SEQ ID NO: 5371733 - DNA, 25 bp, Homo sapien
tggttctggggaacagcctttttca

SEQ ID NO: 5371734 - DNA, 25 bp, Homo sapien
ttgggtcccatttacggttgtgaca

SEQ ID NO: 5371735 - DNA, 25 bp, Homo sapien
caaattaggcctctggcttatggct

SEQ ID NO: 5371736 - DNA, 25 bp, Homo sapien
tgactgaactttactaagggtccga

SEQ ID NO: 5371737 - DNA, 25 bp, Homo sapien
tatattcaccctgaagcaaactggg

SEQ ID NO: 5371738 - DNA, 25 bp, Homo sapien
tacaaacttggctggacttctgatc

SEQ ID NO: 5371739 - DNA, 25 bp, Homo sapien
taagtgaccccacaggttttcttga

SEQ ID NO: 5371740 - DNA, 25 bp, Homo sapien
tcctgttgtggacgatccagcttca

SEQ ID NO: 5371741 - DNA, 25 bp, Homo sapien
ggtggctccaacttcggcttctggg

SEQ ID NO: 5371742 - DNA, 25 bp, Homo sapien
gaaaactcttgctagaaggcttaga

SEQ ID NO: 5371743 - DNA, 25 bp, Homo sapien
gaaggtggttgattctggcaattat

SEQ ID NO: 5371744 - DNA, 25 bp, Homo sapien
aggtggttgattctggcaattattc

SEQ ID NO: 5371745 - DNA, 25 bp, Homo sapien
gtggttgattctggcaattattctt

SEQ ID NO: 5371746 - DNA, 25 bp, Homo sapien
agaaggtggttgattctggcaatta

SEQ ID NO: 5371747 - DNA, 25 bp, Homo sapien
gcaaggtactcctgaagctttctct

SEQ ID NO: 5371748 - DNA, 25 bp, Homo sapien
tggctgcaaggtactcctgaagctt

SEQ ID NO: 5371749 - DNA, 25 bp, Homo sapien
cccttggctgcaaggtactcctgaa

SEQ ID NO: 5371750 - DNA, 25 bp, Homo sapien
ttggtgttttggctcttcagttttc

SEQ ID NO: 5371751 - DNA, 25 bp, Homo sapien
ctgaaattcagagagagtaaatgtc

SEQ ID NO: 5371752 - DNA, 25 bp, Homo sapien
gtaagtcaaagcactcggcctaaat

SEQ ID NO: 5371753 - DNA, 25 bp, Homo sapien
gagtaaatgtcatgcccaaagttac

SEQ ID NO: 5371754 - DNA, 25 bp, Homo sapien
acaggcgtaagtcaaagcactcggc

SEQ ID NO: 5371755 - DNA, 25 bp, Homo sapien
ttaggcaggcgagcggacgggcacc

SEQ ID NO: 5371756 - DNA, 25 bp, Homo sapien
gtcccgtctgcgctcccgggatgga

SEQ ID NO: 5371757 - DNA, 25 bp, Homo sapien
gggaaacttaggcaggcgagcggac

SEQ ID NO: 5371758 - DNA, 25 bp, Homo sapien
cgctcccgggatggaaaacgcccag

SEQ ID NO: 5371759 - DNA, 25 bp, Homo sapien
ataacgggaacagcggtcgtactca

SEQ ID NO: 5371760 - DNA, 25 bp, Homo sapien
taacgggaacagcggtcgtactcac

SEQ ID NO: 5371761 - DNA, 25 bp, Homo sapien
gagaataacgggaacagcggtcgta

SEQ ID NO: 5371762 - DNA, 25 bp, Homo sapien
ctgagaataacgggaacagcggtcg

SEQ ID NO: 5371763 - DNA, 25 bp, Homo sapien
cagcagcggtaggcccgggccccac

SEQ ID NO: 5371764 - DNA, 25 bp, Homo sapien
gcagcagcggtaggcccgggcccca

SEQ ID NO: 5371765 - DNA, 25 bp, Homo sapien
cagtgacagtttttcttcaaacgcc

SEQ ID NO: 5371766 - DNA, 25 bp, Homo sapien
gacagtttttcttcaaacgccgcgc

SEQ ID NO: 5371767 - DNA, 25 bp, Homo sapien
gtgacagtttttcttcaaacgccgc

SEQ ID NO: 5371768 - DNA, 25 bp, Homo sapien
gactcttcagtgacagtttttcttc

SEQ ID NO: 5371769 - DNA, 25 bp, Homo sapien
gcgcgtccacgcgtcctcattggct

SEQ ID NO: 5371770 - DNA, 25 bp, Homo sapien
ggcgtgccgcgcgtccacgcgtcct

SEQ ID NO: 5371771 - DNA, 25 bp, Homo sapien
ccaggaccggcgtgccgcgcgtcca

SEQ ID NO: 5371772 - DNA, 25 bp, Homo sapien
gccgcgcgtccacgcgtcctcattg

SEQ ID NO: 5371773 - DNA, 25 bp, Homo sapien
gggccgctacctgattctgtccttt

SEQ ID NO: 5371774 - DNA, 25 bp, Homo sapien
ggagagacagggcggtcctcccagg

SEQ ID NO: 5371775 - DNA, 25 bp, Homo sapien
gtcctttcaaagtctcagactcaca

SEQ ID NO: 5371776 - DNA, 25 bp, Homo sapien
ggcggttacgctgaatccagctggg

SEQ ID NO: 5371777 - DNA, 25 bp, Homo sapien
aacctagaagaaacattgattacat

SEQ ID NO: 5371778 - DNA, 25 bp, Homo sapien
tgactgataacactctatcaatcac

SEQ ID NO: 5371779 - DNA, 25 bp, Homo sapien
tatcaatcactattgttgataataa

SEQ ID NO: 5371780 - DNA, 25 bp, Homo sapien
tgtaacattatggtctgatcacaat

SEQ ID NO: 5371781 - DNA, 25 bp, Homo sapien
actgtctgctattgtggaggatgcc

SEQ ID NO: 5371782 - DNA, 25 bp, Homo sapien
tacaaggctcagtacatgctcagca

SEQ ID NO: 5371783 - DNA, 25 bp, Homo sapien
catgaaatcctaggtctgtggcttc

SEQ ID NO: 5371784 - DNA, 25 bp, Homo sapien
taaaaaactgttgcggcaggaaggc

SEQ ID NO: 5371785 - DNA, 25 bp, Homo sapien
tccagtatctgaaagtcagtgatag

SEQ ID NO: 5371786 - DNA, 25 bp, Homo sapien
ttttccagtatctgaaagtcagtga

SEQ ID NO: 5371787 - DNA, 25 bp, Homo sapien
atctgaaagtcagtgatagagggtg

SEQ ID NO: 5371788 - DNA, 25 bp, Homo sapien
aaagtcagtgatagagggtggcccc

SEQ ID NO: 5371789 - DNA, 25 bp, Homo sapien
gtggcaataaacaagtttggatggg

SEQ ID NO: 5371790 - DNA, 25 bp, Homo sapien
aatagttcttagtgccgtgagtttc

SEQ ID NO: 5371791 - DNA, 25 bp, Homo sapien
gtgaaatagttcttagtgccgtgag

SEQ ID NO: 5371792 - DNA, 25 bp, Homo sapien
taaacaagtttggatgggcaactga

SEQ ID NO: 5371793 - DNA, 25 bp, Homo sapien
cagaagaagaggaggttggtctcac

SEQ ID NO: 5371794 - DNA, 25 bp, Homo sapien
gaagaagaggaggttggtctcacta

SEQ ID NO: 5371795 - DNA, 25 bp, Homo sapien
ccagaagaagaggaggttggtctca

SEQ ID NO: 5371796 - DNA, 25 bp, Homo sapien
aagaagaggaggttggtctcactac

SEQ ID NO: 5371797 - DNA, 25 bp, Homo sapien
tggttttgggtatctcaggcatctc

SEQ ID NO: 5371798 - DNA, 25 bp, Homo sapien
tttgagattcttagaatcacggtaa

SEQ ID NO: 5371799 - DNA, 25 bp, Homo sapien
tcttgggcagtcacatacaattgag

SEQ ID NO: 5371800 - DNA, 25 bp, Homo sapien
aatcacggtaattttagcatcatcc

SEQ ID NO: 5371801 - DNA, 25 bp, Homo sapien
tcagcagcactggttggtcttcatc

SEQ ID NO: 5371802 - DNA, 25 bp, Homo sapien
tccagattatgtaatgcagcagccg

SEQ ID NO: 5371803 - DNA, 25 bp, Homo sapien
gctaaaaggtgctgacctaggcttg

SEQ ID NO: 5371804 - DNA, 25 bp, Homo sapien
gaattatactttgattgagggcgtc

SEQ ID NO: 5371805 - DNA, 25 bp, Homo sapien
cgtgaggtactgatcattggctcga

SEQ ID NO: 5371806 - DNA, 25 bp, Homo sapien
agaggtttcagagatactcagagac

SEQ ID NO: 5371807 - DNA, 25 bp, Homo sapien
tcatcagtgatggattggcttaaac

SEQ ID NO: 5371808 - DNA, 25 bp, Homo sapien
tgggccatagcttacatgatagaag

SEQ ID NO: 5371809 - DNA, 25 bp, Homo sapien
gacacagattgatccatgcagcctt

SEQ ID NO: 5371810 - DNA, 25 bp, Homo sapien
tgatcaatggaggaactgtcttctt

SEQ ID NO: 5371811 - DNA, 25 bp, Homo sapien
atcaatggaggaactgtcttcttca

SEQ ID NO: 5371812 - DNA, 25 bp, Homo sapien
attcagagacagatgatcaatggag

SEQ ID NO: 5371813 - DNA, 25 bp, Homo sapien
ctgattcagagacagatgatcaatg

SEQ ID NO: 5371814 - DNA, 25 bp, Homo sapien
atgatgagaatgtaattgttgttat

SEQ ID NO: 5371815 - DNA, 25 bp, Homo sapien
aagatgatgagaatgtaattgttgt

SEQ ID NO: 5371816 - DNA, 25 bp, Homo sapien
agatgatgagaatgtaattgttgtt

SEQ ID NO: 5371817 - DNA, 25 bp, Homo sapien
gatgatgagaatgtaattgttgtta

SEQ ID NO: 5371818 - DNA, 25 bp, Homo sapien
ggtcttcaaacatgtctggaacttt

SEQ ID NO: 5371819 - DNA, 25 bp, Homo sapien
tcaggtcttcaaacatgtctggaac

SEQ ID NO: 5371820 - DNA, 25 bp, Homo sapien
ttcaggtcttcaaacatgtctggaa

SEQ ID NO: 5371821 - DNA, 25 bp, Homo sapien
caggtcttcaaacatgtctggaact

SEQ ID NO: 5371822 - DNA, 25 bp, Homo sapien
tctgtaggatatgcccaaggtgtgt

SEQ ID NO: 5371823 - DNA, 25 bp, Homo sapien
cgtggctacaagtgcgtcgtcaaaa

SEQ ID NO: 5371824 - DNA, 25 bp, Homo sapien
gtagaagaaggtgtgtgcaagcccc

SEQ ID NO: 5371825 - DNA, 25 bp, Homo sapien
cagctcctggcaacttttgagggaa

SEQ ID NO: 5371826 - DNA, 25 bp, Homo sapien
ggggatatgtctggcatcactcagg

SEQ ID NO: 5371827 - DNA, 25 bp, Homo sapien
aatggggatatgtctggcatcactc

SEQ ID NO: 5371828 - DNA, 25 bp, Homo sapien
taaatggggatatgtctggcatcac

SEQ ID NO: 5371829 - DNA, 25 bp, Homo sapien
ggtaaatggggatatgtctggcatc

SEQ ID NO: 5371830 - DNA, 25 bp, Homo sapien
tctcctgctgttttaggaatttccc

SEQ ID NO: 5371831 - DNA, 25 bp, Homo sapien
cacagtccatgagctcagggtcaag

SEQ ID NO: 5371832 - DNA, 25 bp, Homo sapien
tctgagggtcctaaagctgctctgc

SEQ ID NO: 5371833 - DNA, 25 bp, Homo sapien
gatgagcatctatggaatgcaggct

SEQ ID NO: 5371834 - DNA, 25 bp, Homo sapien
gatacctattgccaaactgaacttt

SEQ ID NO: 5371835 - DNA, 25 bp, Homo sapien
gagtccttcagatacctattgccaa

SEQ ID NO: 5371836 - DNA, 25 bp, Homo sapien
tggagtccttcagatacctattgcc

SEQ ID NO: 5371837 - DNA, 25 bp, Homo sapien
ccttcagatacctattgccaaactg

SEQ ID NO: 5371838 - DNA, 25 bp, Homo sapien
gtccaagtctggacaggtggagtgt

SEQ ID NO: 5371839 - DNA, 25 bp, Homo sapien
tgcttcctgtaattcccctaaatcc

SEQ ID NO: 5371840 - DNA, 25 bp, Homo sapien
gtgtggcattgcaccgtcaggtcct

SEQ ID NO: 5371841 - DNA, 25 bp, Homo sapien
gacaggtggagtgtggcattgcacc

SEQ ID NO: 5371842 - DNA, 25 bp, Homo sapien
gggctaacagtctcaagtctccaat

SEQ ID NO: 5371843 - DNA, 25 bp, Homo sapien
tcctgtgacaaaccccatcatgaag

SEQ ID NO: 5371844 - DNA, 25 bp, Homo sapien
tttattacgtacacatgattgaccg

SEQ ID NO: 5371845 - DNA, 25 bp, Homo sapien
tgattgaccgaaccattggccattg

SEQ ID NO: 5371846 - DNA, 25 bp, Homo sapien
ttttcggagccagaacgtgtgtgca

SEQ ID NO: 5371847 - DNA, 25 bp, Homo sapien
tcggagccagaacgtgtgtgcatgt

SEQ ID NO: 5371848 - DNA, 25 bp, Homo sapien
ttctttttcggagccagaacgtgtg

SEQ ID NO: 5371849 - DNA, 25 bp, Homo sapien
aagtgtgagcgtgtggtgggtgggt

SEQ ID NO: 5371850 - DNA, 25 bp, Homo sapien
ccttctgacttgaagaatggccagc

SEQ ID NO: 5371851 - DNA, 25 bp, Homo sapien
tccaacaaggatgaagtacgcaagg

SEQ ID NO: 5371852 - DNA, 25 bp, Homo sapien
catcgtcagggatacagaggatcca

SEQ ID NO: 5371853 - DNA, 25 bp, Homo sapien
tacgcaaggattgtcaacctgtggg

SEQ ID NO: 5371854 - DNA, 25 bp, Homo sapien
atgaggaaatgaaccatggaatgct

SEQ ID NO: 5371855 - DNA, 25 bp, Homo sapien
tccgattgcacccatccggttattc

SEQ ID NO: 5371856 - DNA, 25 bp, Homo sapien
ctgaaatagcacctccgattgcacc

SEQ ID NO: 5371857 - DNA, 25 bp, Homo sapien
gattgcacccatccggttattctcc

SEQ ID NO: 5371858 - DNA, 25 bp, Homo sapien
gagaggcctggctcaacaaaagggc

SEQ ID NO: 5371859 - DNA, 25 bp, Homo sapien
tggctgatggacaggagatcctctt

SEQ ID NO: 5371860 - DNA, 25 bp, Homo sapien
tctgccagccctagggattgagtcc

SEQ ID NO: 5371861 - DNA, 25 bp, Homo sapien
gaagcggttgctcatcagaatgtgg

SEQ ID NO: 5371862 - DNA, 25 bp, Homo sapien
cacaaattgcatggtgaagtcagtt

SEQ ID NO: 5371863 - DNA, 25 bp, Homo sapien
tccctcccaggaagacgggcatgtt

SEQ ID NO: 5371864 - DNA, 25 bp, Homo sapien
ggaactgggcagactcaaattccag

SEQ ID NO: 5371865 - DNA, 25 bp, Homo sapien
tcagttatatcctggccgcctttgg

SEQ ID NO: 5371866 - DNA, 25 bp, Homo sapien
gaagggcttcattccatagcattca

SEQ ID NO: 5371867 - DNA, 25 bp, Homo sapien
atttacattaatgcaaaattgtcaa

SEQ ID NO: 5371868 - DNA, 25 bp, Homo sapien
gagaagggcttcattccatagcatt

SEQ ID NO: 5371869 - DNA, 25 bp, Homo sapien
ccagcttttcctagggatgggggcg

SEQ ID NO: 5371870 - DNA, 25 bp, Homo sapien
gcttatcatctttcaacacgcagga

SEQ ID NO: 5371871 - DNA, 25 bp, Homo sapien
ttcaacacgcaggacaggtacagat

SEQ ID NO: 5371872 - DNA, 25 bp, Homo sapien
ctccagctgtagagtgggcttatca

SEQ ID NO: 5371873 - DNA, 25 bp, Homo sapien
ttgtacaaaggacatggagaacacc

SEQ ID NO: 5371874 - DNA, 25 bp, Homo sapien
tcacagcagtgtcaattggaggccc

SEQ ID NO: 5371875 - DNA, 25 bp, Homo sapien
cacagctaatgatgggttcaccgca

SEQ ID NO: 5371876 - DNA, 25 bp, Homo sapien
cacagtgaggttccttggcctaaga

SEQ ID NO: 5371877 - DNA, 25 bp, Homo sapien
cagaggctttggctactgtggcacg

SEQ ID NO: 5371878 - DNA, 25 bp, Homo sapien
aaaacatggagaattagcaagctgc

SEQ ID NO: 5371879 - DNA, 25 bp, Homo sapien
catggagaattagcaagctgccagg

SEQ ID NO: 5371880 - DNA, 25 bp, Homo sapien
gatcatttgccttaaattaactttc

SEQ ID NO: 5371881 - DNA, 25 bp, Homo sapien
gtgttgatcatttgccttaaattaa

SEQ ID NO: 5371882 - DNA, 25 bp, Homo sapien
agtcccggagcgtgcagttcagtga

SEQ ID NO: 5371883 - DNA, 25 bp, Homo sapien
tgcatcgtgcacataagcctcgtta

SEQ ID NO: 5371884 - DNA, 25 bp, Homo sapien
cagtgatcgtacaggtgcatcgtgc

SEQ ID NO: 5371885 - DNA, 25 bp, Homo sapien
gagctttcagttcatatggaccaga

SEQ ID NO: 5371886 - DNA, 25 bp, Homo sapien
gtcataacactagcccacagggagg

SEQ ID NO: 5371887 - DNA, 25 bp, Homo sapien
tgtggccgagcaacagagctactta

SEQ ID NO: 5371888 - DNA, 25 bp, Homo sapien
gacactattagacatgggttccagc

SEQ ID NO: 5371889 - DNA, 25 bp, Homo sapien
tgacaatgtaagtgaaaggcccctg

SEQ ID NO: 5371890 - DNA, 25 bp, Homo sapien
gattcgtagctggatgccgccatcc

SEQ ID NO: 5371891 - DNA, 25 bp, Homo sapien
ctgtagtggtggtcggagattcgta

SEQ ID NO: 5371892 - DNA, 25 bp, Homo sapien
tggccacaacaactgacgcggcctg

SEQ ID NO: 5371893 - DNA, 25 bp, Homo sapien
tgtccatggccacaacaactgacgc

SEQ ID NO: 5371894 - DNA, 25 bp, Homo sapien
gcttcaaagaacaagtcatcctcat

SEQ ID NO: 5371895 - DNA, 25 bp, Homo sapien
tcaaagaacaagtcatcctcattgc

SEQ ID NO: 5371896 - DNA, 25 bp, Homo sapien
atcagcttcaaagaacaagtcatcc

SEQ ID NO: 5371897 - DNA, 25 bp, Homo sapien
cagcttcaaagaacaagtcatcctc

SEQ ID NO: 5371898 - DNA, 25 bp, Homo sapien
gcaggaagcccttgcaacaacacat

SEQ ID NO: 5371899 - DNA, 25 bp, Homo sapien
taaatcagatttacttggcaccctg

SEQ ID NO: 5371900 - DNA, 25 bp, Homo sapien
tggtctccaagcacagataacactc

SEQ ID NO: 5371901 - DNA, 25 bp, Homo sapien
tactcttgaaagaggagacctgctc

SEQ ID NO: 5371902 - DNA, 25 bp, Homo sapien
taagccatcatttcactggcgagct

SEQ ID NO: 5371903 - DNA, 25 bp, Homo sapien
gtaataagccatcatttcactggcg

SEQ ID NO: 5371904 - DNA, 25 bp, Homo sapien
catcatttcactggcgagctcaggt

SEQ ID NO: 5371905 - DNA, 25 bp, Homo sapien
catttcactggcgagctcaggtact

SEQ ID NO: 5371906 - DNA, 25 bp, Homo sapien
gacggctacgttcatgtgtgatttc

SEQ ID NO: 5371907 - DNA, 25 bp, Homo sapien
gacttccccatgacggctacgttca

SEQ ID NO: 5371908 - DNA, 25 bp, Homo sapien
agaaaatgagtgacttccccatgac

SEQ ID NO: 5371909 - DNA, 25 bp, Homo sapien
aaatgagtgacttccccatgacggc

SEQ ID NO: 5371910 - DNA, 25 bp, Homo sapien
taagcagtatccattcccagaatat

SEQ ID NO: 5371911 - DNA, 25 bp, Homo sapien
gagcagaggctttgacactaacctt

SEQ ID NO: 5371912 - DNA, 25 bp, Homo sapien
gagagactcccttagcacctagttg

SEQ ID NO: 5371913 - DNA, 25 bp, Homo sapien
cccagaatatttcccgagtcataag

SEQ ID NO: 5371914 - DNA, 25 bp, Homo sapien
tgccttgtgcctcgaagaggtttgg

SEQ ID NO: 5371915 - DNA, 25 bp, Homo sapien
gttgtgccttgtgcctcgaagaggt

SEQ ID NO: 5371916 - DNA, 25 bp, Homo sapien
tgtgcctcgaagaggtttggtatct

SEQ ID NO: 5371917 - DNA, 25 bp, Homo sapien
gtttctccctcgctgtttttatggc

SEQ ID NO: 5371918 - DNA, 25 bp, Homo sapien
ttccgatccccaatgagcagaaaat

SEQ ID NO: 5371919 - DNA, 25 bp, Homo sapien
tgtcttcccaaggagaccgctcagg

SEQ ID NO: 5371920 - DNA, 25 bp, Homo sapien
cagcacttccttccgatccccaatg

SEQ ID NO: 5371921 - DNA, 25 bp, Homo sapien
acttccttccgatccccaatgagca

SEQ ID NO: 5371922 - DNA, 25 bp, Homo sapien
gaaggtgactggcattgacattgta

SEQ ID NO: 5371923 - DNA, 25 bp, Homo sapien
tgactggcattgacattgtaacgag

SEQ ID NO: 5371924 - DNA, 25 bp, Homo sapien
aatgggtggtgccacctttgctgtg

SEQ ID NO: 5371925 - DNA, 25 bp, Homo sapien
ttgtaacgaggaatgggtggtgcca

SEQ ID NO: 5371926 - DNA, 25 bp, Homo sapien
gcaggtaaatttctagagagaccct

SEQ ID NO: 5371927 - DNA, 25 bp, Homo sapien
taaatttctagagagaccctcccat

SEQ ID NO: 5371928 - DNA, 25 bp, Homo sapien
gtttcctgagggctttccaaattca

SEQ ID NO: 5371929 - DNA, 25 bp, Homo sapien
tttcctgagggctttccaaattcat

SEQ ID NO: 5371930 - DNA, 25 bp, Homo sapien
ggctagttcaggtggcaaatggttt

SEQ ID NO: 5371931 - DNA, 25 bp, Homo sapien
cctgggctagttcaggtggcaaatg

SEQ ID NO: 5371932 - DNA, 25 bp, Homo sapien
caggtggcaaatggttttcctccag

SEQ ID NO: 5371933 - DNA, 25 bp, Homo sapien
tagttcaggtggcaaatggttttcc

SEQ ID NO: 5371934 - DNA, 25 bp, Homo sapien
tttacaatgacctttcatcaagtgt

SEQ ID NO: 5371935 - DNA, 25 bp, Homo sapien
tttatgacctaatgaatcctttaag

SEQ ID NO: 5371936 - DNA, 25 bp, Homo sapien
tttttatgacctaatgaatccttta

SEQ ID NO: 5371937 - DNA, 25 bp, Homo sapien
ttacaatgacctttcatcaagtgtt

SEQ ID NO: 5371938 - DNA, 25 bp, Homo sapien
cataaagtgtagtttcagggccttt

SEQ ID NO: 5371939 - DNA, 25 bp, Homo sapien
ctcataaagtgtagtttcagggcct

SEQ ID NO: 5371940 - DNA, 25 bp, Homo sapien
ctctcataaagtgtagtttcagggc

SEQ ID NO: 5371941 - DNA, 25 bp, Homo sapien
ttctctcataaagtgtagtttcagg

SEQ ID NO: 5371942 - DNA, 25 bp, Homo sapien
ctccttctagaaggctctgaccagg

SEQ ID NO: 5371943 - DNA, 25 bp, Homo sapien
gacggttggaactgggaatgtgtgg

SEQ ID NO: 5371944 - DNA, 25 bp, Homo sapien
tgtggatgacggttggaactgggaa

SEQ ID NO: 5371945 - DNA, 25 bp, Homo sapien
tgtggtggatgtttgggtctccttc

SEQ ID NO: 5371946 - DNA, 25 bp, Homo sapien
ctccctgcttatctccactcaacat

SEQ ID NO: 5371947 - DNA, 25 bp, Homo sapien
agctggctcgggctgagactggcac

SEQ ID NO: 5371948 - DNA, 25 bp, Homo sapien
tgtgggtgtagctggctcgggctga

SEQ ID NO: 5371949 - DNA, 25 bp, Homo sapien
ggctcgggctgagactggcactgcc

SEQ ID NO: 5371950 - DNA, 25 bp, Homo sapien
taaatcttctcctacagagttggac

SEQ ID NO: 5371951 - DNA, 25 bp, Homo sapien
cacccacgatgattaaatcttctcc

SEQ ID NO: 5371952 - DNA, 25 bp, Homo sapien
tcactcttcacccacgatgattaaa

SEQ ID NO: 5371953 - DNA, 25 bp, Homo sapien
ttaaatcttctcctacagagttgga

SEQ ID NO: 5371954 - DNA, 25 bp, Homo sapien
caatgcccagggtgtcatggatctc

SEQ ID NO: 5371955 - DNA, 25 bp, Homo sapien
tcaatggtgagaacagtacaagggt

SEQ ID NO: 5371956 - DNA, 25 bp, Homo sapien
tgtcatggatctctgctgcatcggg

SEQ ID NO: 5371957 - DNA, 25 bp, Homo sapien
catcgggcaccagctgtgtcaatgg

SEQ ID NO: 5371958 - DNA, 25 bp, Homo sapien
ggtaatccttattaccatgactggc

SEQ ID NO: 5371959 - DNA, 25 bp, Homo sapien
caatatttcacggtcgacaagagga

SEQ ID NO: 5371960 - DNA, 25 bp, Homo sapien
catgactggctggacagaatactca

SEQ ID NO: 5371961 - DNA, 25 bp, Homo sapien
tcgacaagaggacatcagaactggt

SEQ ID NO: 5371962 - DNA, 25 bp, Homo sapien
caggctccacaggacccacgtcaga

SEQ ID NO: 5371963 - DNA, 25 bp, Homo sapien
cccacgtcagacacacgggtactga

SEQ ID NO: 5371964 - DNA, 25 bp, Homo sapien
cacgtcagacacacgggtactgagc

SEQ ID NO: 5371965 - DNA, 25 bp, Homo sapien
acaggacccacgtcagacacacggg

SEQ ID NO: 5371966 - DNA, 25 bp, Homo sapien
gaaaggcacaggacgagagtggtct

SEQ ID NO: 5371967 - DNA, 25 bp, Homo sapien
acgagagtggtctgggtgatgcttc

SEQ ID NO: 5371968 - DNA, 25 bp, Homo sapien
ttatacgtagaagaggtaacagtcc

SEQ ID NO: 5371969 - DNA, 25 bp, Homo sapien
gtaacagtccacaaacagaaaggca

SEQ ID NO: 5371970 - DNA, 25 bp, Homo sapien
ccagacccacagggcgataaggcac

SEQ ID NO: 5371971 - DNA, 25 bp, Homo sapien
tgtgccttttgactgtgcccagtga

SEQ ID NO: 5371972 - DNA, 25 bp, Homo sapien
ggcgataaggcacagaggtacgcat

SEQ ID NO: 5371973 - DNA, 25 bp, Homo sapien
cacagggcgataaggcacagaggta

SEQ ID NO: 5371974 - DNA, 25 bp, Homo sapien
taaacacgggctaagctggagctgc

SEQ ID NO: 5371975 - DNA, 25 bp, Homo sapien
tatttctagcaaacaatccagggag

SEQ ID NO: 5371976 - DNA, 25 bp, Homo sapien
tctaagagatatatggtcaccagcc

SEQ ID NO: 5371977 - DNA, 25 bp, Homo sapien
tgaggcaagcaaaccatcagcaggc

SEQ ID NO: 5371978 - DNA, 25 bp, Homo sapien
tagggtgcgttggagcctcactctg

SEQ ID NO: 5371979 - DNA, 25 bp, Homo sapien
tcatccttcatgcagttaatagggt

SEQ ID NO: 5371980 - DNA, 25 bp, Homo sapien
gccttcaatgcagccaacactggct

SEQ ID NO: 5371981 - DNA, 25 bp, Homo sapien
caggaatatctgccctgtttgcata

SEQ ID NO: 5371982 - DNA, 25 bp, Homo sapien
agttcacaggtggctcccaaacctg

SEQ ID NO: 5371983 - DNA, 25 bp, Homo sapien
ggtctacatccatcctttgtcagtg

SEQ ID NO: 5371984 - DNA, 25 bp, Homo sapien
cttccaatggctctgaagcaggctg

SEQ ID NO: 5371985 - DNA, 25 bp, Homo sapien
ggctcccaaacctgtggtctacatc

SEQ ID NO: 5371986 - DNA, 25 bp, Homo sapien
cattccatctacgttgggtaaaggc

SEQ ID NO: 5371987 - DNA, 25 bp, Homo sapien
tggatcagctcataggaagcaagtc

SEQ ID NO: 5371988 - DNA, 25 bp, Homo sapien
taaatagcgtgttggcctatgtgcc

SEQ ID NO: 5371989 - DNA, 25 bp, Homo sapien
ttaccacagagcctatgccaagagc

SEQ ID NO: 5371990 - DNA, 25 bp, Homo sapien
aatagtttttcaaactgtacagtca

SEQ ID NO: 5371991 - DNA, 25 bp, Homo sapien
gtttttcaaactgtacagtcaccag

SEQ ID NO: 5371992 - DNA, 25 bp, Homo sapien
tagtttttcaaactgtacagtcacc

SEQ ID NO: 5371993 - DNA, 25 bp, Homo sapien
tttttcaaactgtacagtcaccaga

SEQ ID NO: 5371994 - DNA, 25 bp, Homo sapien
ttggcatctctattttctgcagagt

SEQ ID NO: 5371995 - DNA, 25 bp, Homo sapien
tgcaggggcatttttaggcttggcc

SEQ ID NO: 5371996 - DNA, 25 bp, Homo sapien
tgtgccttccctgttttggcatctc

SEQ ID NO: 5371997 - DNA, 25 bp, Homo sapien
cagctttctgtgccttccctgtttt

SEQ ID NO: 5371998 - DNA, 25 bp, Homo sapien
actttgcgggccttctctgtggttc

SEQ ID NO: 5371999 - DNA, 25 bp, Homo sapien
aactttgcgggccttctctgtggtt

SEQ ID NO: 5372000 - DNA, 25 bp, Homo sapien
gtttttctgtatgatgataattcca

SEQ ID NO: 5372001 - DNA, 25 bp, Homo sapien
gggcaaagcttcttagcctaggagg

SEQ ID NO: 5372002 - DNA, 25 bp, Homo sapien
tactgaatattgtgaataatcatcc

SEQ ID NO: 5372003 - DNA, 25 bp, Homo sapien
aatcatcctggatgtattcctctgc

SEQ ID NO: 5372004 - DNA, 25 bp, Homo sapien
ccacccaaagcctcaacaggaagca

SEQ ID NO: 5372005 - DNA, 25 bp, Homo sapien
ttccccacccaaagcctcaacagga

SEQ ID NO: 5372006 - DNA, 25 bp, Homo sapien
ctgtgctaccattgatatttcccca

SEQ ID NO: 5372007 - DNA, 25 bp, Homo sapien
acctgtgctaccattgatatttccc

SEQ ID NO: 5372008 - DNA, 25 bp, Homo sapien
gagagagaagtcttcacatgctcct

SEQ ID NO: 5372009 - DNA, 25 bp, Homo sapien
gagagaagtcttcacatgctccttt

SEQ ID NO: 5372010 - DNA, 25 bp, Homo sapien
agagagaagtcttcacatgctcctt

SEQ ID NO: 5372011 - DNA, 25 bp, Homo sapien
gggctactagagaaactacatatcc

SEQ ID NO: 5372012 - DNA, 25 bp, Homo sapien
gaccccgatccacactggtgtctgg

SEQ ID NO: 5372013 - DNA, 25 bp, Homo sapien
taaaggagcataggggctactagag

SEQ ID NO: 5372014 - DNA, 25 bp, Homo sapien
tggtgtctggactccttggcccagc

SEQ ID NO: 5372015 - DNA, 25 bp, Homo sapien
catcgatgagggtctttgcttgtgc

SEQ ID NO: 5372016 - DNA, 25 bp, Homo sapien
tgcttgtgctggaatcaaagggaca

SEQ ID NO: 5372017 - DNA, 25 bp, Homo sapien
gttggtgggaccgtgctctgtgctc

SEQ ID NO: 5372018 - DNA, 25 bp, Homo sapien
tttggcctggcactggccatcgatg

SEQ ID NO: 5372019 - DNA, 25 bp, Homo sapien
cactctaaggactggacaaaacaca

SEQ ID NO: 5372020 - DNA, 25 bp, Homo sapien
ggacttaacccctgtacatcaggaa

SEQ ID NO: 5372021 - DNA, 25 bp, Homo sapien
tgggaattcaggagcaatgttgtct

SEQ ID NO: 5372022 - DNA, 25 bp, Homo sapien
taaacagagcgtttcactcctcatg

SEQ ID NO: 5372023 - DNA, 25 bp, Homo sapien
tatgttggtccgcatggatgagaaa

SEQ ID NO: 5372024 - DNA, 25 bp, Homo sapien
gatgttgaaaggaactcttccactt

SEQ ID NO: 5372025 - DNA, 25 bp, Homo sapien
cctggcattcctatgttggtccgca

SEQ ID NO: 5372026 - DNA, 25 bp, Homo sapien
ggtgatgttgaaaggaactcttcca

SEQ ID NO: 5372027 - DNA, 25 bp, Homo sapien
aagatgttgccttcggttgggaaga

SEQ ID NO: 5372028 - DNA, 25 bp, Homo sapien
agataagatgttgccttcggttggg

SEQ ID NO: 5372029 - DNA, 25 bp, Homo sapien
cagaagataagatgttgccttcggt

SEQ ID NO: 5372030 - DNA, 25 bp, Homo sapien
ataagatgttgccttcggttgggaa

SEQ ID NO: 5372031 - DNA, 25 bp, Homo sapien
tatgcatgtgtgaattccaactagt

SEQ ID NO: 5372032 - DNA, 25 bp, Homo sapien
caactagtttccagcaagtgtcctt

SEQ ID NO: 5372033 - DNA, 25 bp, Homo sapien
tctctcacatccaggtttatgcatg

SEQ ID NO: 5372034 - DNA, 25 bp, Homo sapien
tccccattggtcaagggttcccatg

SEQ ID NO: 5372035 - DNA, 25 bp, Homo sapien
tttacattcaccatggttagcaatt

SEQ ID NO: 5372036 - DNA, 25 bp, Homo sapien
ggtttacattcaccatggttagcaa

SEQ ID NO: 5372037 - DNA, 25 bp, Homo sapien
ttggtttacattcaccatggttagc

SEQ ID NO: 5372038 - DNA, 25 bp, Homo sapien
tggtttacattcaccatggttagca

SEQ ID NO: 5372039 - DNA, 25 bp, Homo sapien
tctacatcatgggttggcaaaagga

SEQ ID NO: 5372040 - DNA, 25 bp, Homo sapien
tagtgaactcagtcgcataatgatc

SEQ ID NO: 5372041 - DNA, 25 bp, Homo sapien
gatgggctgaactgctagtgaactc

SEQ ID NO: 5372042 - DNA, 25 bp, Homo sapien
gaatggaaggttgcatgaagcagca

SEQ ID NO: 5372043 - DNA, 25 bp, Homo sapien
gaatctaagtagaagttagtgttat

SEQ ID NO: 5372044 - DNA, 25 bp, Homo sapien
tggctatgaaccagccagggtaaga

SEQ ID NO: 5372045 - DNA, 25 bp, Homo sapien
tggtggaggtggctatgaaccagcc

SEQ ID NO: 5372046 - DNA, 25 bp, Homo sapien
ggtgagaaagatgggctgtcctgat

SEQ ID NO: 5372047 - DNA, 25 bp, Homo sapien
gaagtggagccttctttattgtgga

SEQ ID NO: 5372048 - DNA, 25 bp, Homo sapien
aaagacagaagtggagccttcttta

SEQ ID NO: 5372049 - DNA, 25 bp, Homo sapien
gacagaagtggagccttctttattg

SEQ ID NO: 5372050 - DNA, 25 bp, Homo sapien
catacaggtccatgatatttttttc

SEQ ID NO: 5372051 - DNA, 25 bp, Homo sapien
cccttgattcccaggtaaaccatat

SEQ ID NO: 5372052 - DNA, 25 bp, Homo sapien
gcaaagtaggcttgccctgaatttc

SEQ ID NO: 5372053 - DNA, 25 bp, Homo sapien
aggcttgccctgaatttctgcacag

SEQ ID NO: 5372054 - DNA, 25 bp, Homo sapien
agagacagagatcttttcccttgat

SEQ ID NO: 5372055 - DNA, 25 bp, Homo sapien
catctgtcgagaatcacgaatagca

SEQ ID NO: 5372056 - DNA, 25 bp, Homo sapien
caggcttaatgctgcggctaagagg

SEQ ID NO: 5372057 - DNA, 25 bp, Homo sapien
gcggctaagaggagctgctattaaa

SEQ ID NO: 5372058 - DNA, 25 bp, Homo sapien
tagcataggatttgggtgctgcctc

SEQ ID NO: 5372059 - DNA, 25 bp, Homo sapien
tttgtgaagagaacaagatagatca

SEQ ID NO: 5372060 - DNA, 25 bp, Homo sapien
tgaagagaacaagatagatcagatg

SEQ ID NO: 5372061 - DNA, 25 bp, Homo sapien
ttgtgaagagaacaagatagatcag

SEQ ID NO: 5372062 - DNA, 25 bp, Homo sapien
tgtgaagagaacaagatagatcaga

SEQ ID NO: 5372063 - DNA, 25 bp, Homo sapien
gagatgcttttgtccctcgtttcaa

SEQ ID NO: 5372064 - DNA, 25 bp, Homo sapien
tcaaagtcaaggctctagttgcatg

SEQ ID NO: 5372065 - DNA, 25 bp, Homo sapien
aggctctagttgcatgtaagtggtc

SEQ ID NO: 5372066 - DNA, 25 bp, Homo sapien
ttgtccctcgtttcaaagtcaaggc

SEQ ID NO: 5372067 - DNA, 25 bp, Homo sapien
ctaggaaaagtgaaggagaggtgag

SEQ ID NO: 5372068 - DNA, 25 bp, Homo sapien
gacagagtggggaggaacccgtgtc

SEQ ID NO: 5372069 - DNA, 25 bp, Homo sapien
aggagaggtgagaaagacagagtgg

SEQ ID NO: 5372070 - DNA, 25 bp, Homo sapien
aagacagagtggggaggaacccgtg

SEQ ID NO: 5372071 - DNA, 25 bp, Homo sapien
tttgtacaggtctttataatgcaca

SEQ ID NO: 5372072 - DNA, 25 bp, Homo sapien
atttgtacaggtctttataatgcac

SEQ ID NO: 5372073 - DNA, 25 bp, Homo sapien
tgtacaggtctttataatgcacaga

SEQ ID NO: 5372074 - DNA, 25 bp, Homo sapien
ttgtacaggtctttataatgcacag

SEQ ID NO: 5372075 - DNA, 25 bp, Homo sapien
gcatccatgtgacctataagcaaag

SEQ ID NO: 5372076 - DNA, 25 bp, Homo sapien
tatcaaaatgctcactcataaagtg

SEQ ID NO: 5372077 - DNA, 25 bp, Homo sapien
tcaggataggagctactgccacagg

SEQ ID NO: 5372078 - DNA, 25 bp, Homo sapien
tgccacaggtaatccaatgcctttt

SEQ ID NO: 5372079 - DNA, 25 bp, Homo sapien
actgcctttcacgtgtaataagcat

SEQ ID NO: 5372080 - DNA, 25 bp, Homo sapien
tagaggttttggagaggtcctacac

SEQ ID NO: 5372081 - DNA, 25 bp, Homo sapien
atctgtttgaccacatactgccttt

SEQ ID NO: 5372082 - DNA, 25 bp, Homo sapien
aggttttggagaggtcctacactgc

SEQ ID NO: 5372083 - DNA, 25 bp, Homo sapien
attgcctgaattccccgcccacgct

SEQ ID NO: 5372084 - DNA, 25 bp, Homo sapien
tgaattccccgcccacgctttctct

SEQ ID NO: 5372085 - DNA, 25 bp, Homo sapien
cctgaattccccgcccacgctttct

SEQ ID NO: 5372086 - DNA, 25 bp, Homo sapien
taattgcctgaattccccgcccacg

SEQ ID NO: 5372087 - DNA, 25 bp, Homo sapien
gttcctcttccgtgctcccacaaaa

SEQ ID NO: 5372088 - DNA, 25 bp, Homo sapien
tgttcctcttccgtgctcccacaaa

SEQ ID NO: 5372089 - DNA, 25 bp, Homo sapien
aatggggtgttcctcttccgtgctc

SEQ ID NO: 5372090 - DNA, 25 bp, Homo sapien
agcctgaatggggtgttcctcttcc

SEQ ID NO: 5372091 - DNA, 25 bp, Homo sapien
tacatcttggtgagccaaggcggaa

SEQ ID NO: 5372092 - DNA, 25 bp, Homo sapien
acaggaagtgaaggccccatgggaa

SEQ ID NO: 5372093 - DNA, 25 bp, Homo sapien
caaaagctgcttcgaaaatttccag

SEQ ID NO: 5372094 - DNA, 25 bp, Homo sapien
ccttggcattacatcttggtgagcc

SEQ ID NO: 5372095 - DNA, 25 bp, Homo sapien
gagaagtttatgaattatgagccct

SEQ ID NO: 5372096 - DNA, 25 bp, Homo sapien
gttgagaagtttatgaattatgagc

SEQ ID NO: 5372097 - DNA, 25 bp, Homo sapien
tatgaattatgagcccttctgcaaa

SEQ ID NO: 5372098 - DNA, 25 bp, Homo sapien
agtttatgaattatgagcccttctg

SEQ ID NO: 5372099 - DNA, 25 bp, Homo sapien
gggcctgtgtaaatgcatgtgattt

SEQ ID NO: 5372100 - DNA, 25 bp, Homo sapien
ggcctgtgtaaatgcatgtgattta

SEQ ID NO: 5372101 - DNA, 25 bp, Homo sapien
agggcctgtgtaaatgcatgtgatt

SEQ ID NO: 5372102 - DNA, 25 bp, Homo sapien
gcattttatgtactgcgtgtcattc

SEQ ID NO: 5372103 - DNA, 25 bp, Homo sapien
ccttgacattgtagagcttctggca

SEQ ID NO: 5372104 - DNA, 25 bp, Homo sapien
actcgtatatgtctcaggtccctgc

SEQ ID NO: 5372105 - DNA, 25 bp, Homo sapien
tcttggcaggtactcagcgaatgaa

SEQ ID NO: 5372106 - DNA, 25 bp, Homo sapien
tttcagtccccgtgaaggagagccc

SEQ ID NO: 5372107 - DNA, 25 bp, Homo sapien
cctcagtttccggttcaggtactgg

SEQ ID NO: 5372108 - DNA, 25 bp, Homo sapien
tcagtttccggttcaggtactggaa

SEQ ID NO: 5372109 - DNA, 25 bp, Homo sapien
ctcagtttccggttcaggtactgga

SEQ ID NO: 5372110 - DNA, 25 bp, Homo sapien
tacgagtagcacttacggacttaca

SEQ ID NO: 5372111 - DNA, 25 bp, Homo sapien
gtcaatgtggcaggttagcttccaa

SEQ ID NO: 5372112 - DNA, 25 bp, Homo sapien
caaggttgtttgacctacgagtagc

SEQ ID NO: 5372113 - DNA, 25 bp, Homo sapien
aagccatgtaggtgtctcaggcggc

SEQ ID NO: 5372114 - DNA, 25 bp, Homo sapien
gtggcctcatttcctagacttgctg

SEQ ID NO: 5372115 - DNA, 25 bp, Homo sapien
tggtcttgctctgggaattaggtga

SEQ ID NO: 5372116 - DNA, 25 bp, Homo sapien
gccccagaatccagagtggcctcat

SEQ ID NO: 5372117 - DNA, 25 bp, Homo sapien
aactcagcacttgtttgagaaccag

SEQ ID NO: 5372118 - DNA, 25 bp, Homo sapien
ccaagtgtgcaagtaggctgcccgc

SEQ ID NO: 5372119 - DNA, 25 bp, Homo sapien
aatatgggacgctttctatgtgcca

SEQ ID NO: 5372120 - DNA, 25 bp, Homo sapien
tgcatatgcaggagtcacacggtca

SEQ ID NO: 5372121 - DNA, 25 bp, Homo sapien
gggctaggccatgcacccaatgggt

SEQ ID NO: 5372122 - DNA, 25 bp, Homo sapien
cagttatgacatgtgaccacttgga

SEQ ID NO: 5372123 - DNA, 25 bp, Homo sapien
cgtggaatcttcagagccagatgat

SEQ ID NO: 5372124 - DNA, 25 bp, Homo sapien
tttgctcatgtagaaccggcacctc

SEQ ID NO: 5372125 - DNA, 25 bp, Homo sapien
tctttcacctgagcacgtggaatct

SEQ ID NO: 5372126 - DNA, 25 bp, Homo sapien
tgtgccatcaccgaaccaggacctt

SEQ ID NO: 5372127 - DNA, 25 bp, Homo sapien
tcaacttcgtaaaacccacagtggc

SEQ ID NO: 5372128 - DNA, 25 bp, Homo sapien
tctagggaagcctctcctagggaaa

SEQ ID NO: 5372129 - DNA, 25 bp, Homo sapien
gcccctgtgccatcaccgaaccagg

SEQ ID NO: 5372130 - DNA, 25 bp, Homo sapien
gtgacccaggttgttactcctgata

SEQ ID NO: 5372131 - DNA, 25 bp, Homo sapien
gctttctgctgatgatatttgtttg

SEQ ID NO: 5372132 - DNA, 25 bp, Homo sapien
tcctgatataactgcttcctgggct

SEQ ID NO: 5372133 - DNA, 25 bp, Homo sapien
cccatataggggagctcagcttcca

SEQ ID NO: 5372134 - DNA, 25 bp, Homo sapien
agacggagacatatggaatgtgtcg

SEQ ID NO: 5372135 - DNA, 25 bp, Homo sapien
gaatgtgtcggggttggaaggagca

SEQ ID NO: 5372136 - DNA, 25 bp, Homo sapien
aggagacggagacatatggaatgtg

SEQ ID NO: 5372137 - DNA, 25 bp, Homo sapien
caggactggagggtcggggtgaggg

SEQ ID NO: 5372138 - DNA, 25 bp, Homo sapien
ttgtgaaaacctggccgtagcaggt

SEQ ID NO: 5372139 - DNA, 25 bp, Homo sapien
ggtagggtcagaatatggcctgcaa

SEQ ID NO: 5372140 - DNA, 25 bp, Homo sapien
gcatgctcacagatcctcaaggttt

SEQ ID NO: 5372141 - DNA, 25 bp, Homo sapien
aaggtttcttgaatggctactgtcc

SEQ ID NO: 5372142 - DNA, 25 bp, Homo sapien
agaggtgctctccacaagcctgtga

SEQ ID NO: 5372143 - DNA, 25 bp, Homo sapien
aggaagaggtgctctccacaagcct

SEQ ID NO: 5372144 - DNA, 25 bp, Homo sapien
aagcctgtgaccaactgttcccctc

SEQ ID NO: 5372145 - DNA, 25 bp, Homo sapien
cccctcagccggcacactggctcct

SEQ ID NO: 5372146 - DNA, 25 bp, Homo sapien
tggggctctttgagcctattctcta

SEQ ID NO: 5372147 - DNA, 25 bp, Homo sapien
actggggctctttgagcctattctc

SEQ ID NO: 5372148 - DNA, 25 bp, Homo sapien
ggctctttgagcctattctctaccc

SEQ ID NO: 5372149 - DNA, 25 bp, Homo sapien
attctctacccccttcattatcatg

SEQ ID NO: 5372150 - DNA, 25 bp, Homo sapien
tggaagaagtctctaaatctaagcc

SEQ ID NO: 5372151 - DNA, 25 bp, Homo sapien
atttcagacctggaattctaactgt

SEQ ID NO: 5372152 - DNA, 25 bp, Homo sapien
caatacatggctcctcaatatatct

SEQ ID NO: 5372153 - DNA, 25 bp, Homo sapien
ctaactgtccacaatacatggctcc

SEQ ID NO: 5372154 - DNA, 25 bp, Homo sapien
tctgtgagtgattctgcgatggctt

SEQ ID NO: 5372155 - DNA, 25 bp, Homo sapien
tacatacagagatgtgacccggatg

SEQ ID NO: 5372156 - DNA, 25 bp, Homo sapien
cacactcggtgtcatctcctgcaaa

SEQ ID NO: 5372157 - DNA, 25 bp, Homo sapien
atggacctttgcctcacaatcaggg

SEQ ID NO: 5372158 - DNA, 25 bp, Homo sapien
ctgagggtgaccaccttggatcttc

SEQ ID NO: 5372159 - DNA, 25 bp, Homo sapien
tgagcctgaatttgctgccatgttt

SEQ ID NO: 5372160 - DNA, 25 bp, Homo sapien
ggacattatccacgctagtctcttt

SEQ ID NO: 5372161 - DNA, 25 bp, Homo sapien
atgttttgaggacattatccacgct

SEQ ID NO: 5372162 - DNA, 25 bp, Homo sapien
tgaggacattatccacgctagtctc

SEQ ID NO: 5372163 - DNA, 25 bp, Homo sapien
ccttgggacatttgggtactgcatc

SEQ ID NO: 5372164 - DNA, 25 bp, Homo sapien
tgtgtttcagcctctaaagtcccct

SEQ ID NO: 5372165 - DNA, 25 bp, Homo sapien
tggaggtgaggcctgttcctaaagc

SEQ ID NO: 5372166 - DNA, 25 bp, Homo sapien
tagcaggcgacatgctcagatgggc

SEQ ID NO: 5372167 - DNA, 25 bp, Homo sapien
gccaggtgatgtccctggccctctc

SEQ ID NO: 5372168 - DNA, 25 bp, Homo sapien
ctccaacctgtggttgaggagctgg

SEQ ID NO: 5372169 - DNA, 25 bp, Homo sapien
ccttttctagtcctccaacctgtgg

SEQ ID NO: 5372170 - DNA, 25 bp, Homo sapien
tagtcctccaacctgtggttgagga

SEQ ID NO: 5372171 - DNA, 25 bp, Homo sapien
gggcagcctgtagtctgttttcagg

SEQ ID NO: 5372172 - DNA, 25 bp, Homo sapien
cttgtggtccggttagataggtttg

SEQ ID NO: 5372173 - DNA, 25 bp, Homo sapien
acccaggtgtaagaacaaagcagca

SEQ ID NO: 5372174 - DNA, 25 bp, Homo sapien
ccttctggttctaggcttgtggtcc

SEQ ID NO: 5372175 - DNA, 25 bp, Homo sapien
tctcctggtgcctaccaaagggaaa

SEQ ID NO: 5372176 - DNA, 25 bp, Homo sapien
tagctcggcaagctgagtcaggacc

SEQ ID NO: 5372177 - DNA, 25 bp, Homo sapien
taatgtaagggctatagcagaatcc

SEQ ID NO: 5372178 - DNA, 25 bp, Homo sapien
tactaactgtggctagctggctgtc

SEQ ID NO: 5372179 - DNA, 25 bp, Homo sapien
tttcccgctgcctcagcaaagaggg

SEQ ID NO: 5372180 - DNA, 25 bp, Homo sapien
tggaataacagaccaggccgaccct

SEQ ID NO: 5372181 - DNA, 25 bp, Homo sapien
tcagcaaagagggtgtttctaggga

SEQ ID NO: 5372182 - DNA, 25 bp, Homo sapien
gtttaataacaccaaccagttcagc

SEQ ID NO: 5372183 - DNA, 25 bp, Homo sapien
atactttgcaagtaaacactttcat

SEQ ID NO: 5372184 - DNA, 25 bp, Homo sapien
tatactttgcaagtaaacactttca

SEQ ID NO: 5372185 - DNA, 25 bp, Homo sapien
atttctttcccgctgcagttaagtc

SEQ ID NO: 5372186 - DNA, 25 bp, Homo sapien
tccattctgaccaagctcatctgtt

SEQ ID NO: 5372187 - DNA, 25 bp, Homo sapien
tgcagttaagtcttctgggtgctct

SEQ ID NO: 5372188 - DNA, 25 bp, Homo sapien
atgacgacaagagctccaggccttg

SEQ ID NO: 5372189 - DNA, 25 bp, Homo sapien
tctgtgctcctagcaagggctgtct

SEQ ID NO: 5372190 - DNA, 25 bp, Homo sapien
ggtcccaatctgtgctcctagcaag

SEQ ID NO: 5372191 - DNA, 25 bp, Homo sapien
caatctgtgctcctagcaagggctg

SEQ ID NO: 5372192 - DNA, 25 bp, Homo sapien
ctgtgaggtcccaatctgtgctcct

SEQ ID NO: 5372193 - DNA, 25 bp, Homo sapien
gcagtaggcggataagcctgcgccc

SEQ ID NO: 5372194 - DNA, 25 bp, Homo sapien
ctccgggcgtctgggcagtaggcgg

SEQ ID NO: 5372195 - DNA, 25 bp, Homo sapien
aggagctcgggctcctgaaactgga

SEQ ID NO: 5372196 - DNA, 25 bp, Homo sapien
cccacgaggtcgtgttcaggagcag

SEQ ID NO: 5372197 - DNA, 25 bp, Homo sapien
tggttggtccacatgaatttcctgc

SEQ ID NO: 5372198 - DNA, 25 bp, Homo sapien
gcaagctcctagcaccctgggctgg

SEQ ID NO: 5372199 - DNA, 25 bp, Homo sapien
tgcaagctcctagcaccctgggctg

SEQ ID NO: 5372200 - DNA, 25 bp, Homo sapien
tgccagagttggttggtccacatga

SEQ ID NO: 5372201 - DNA, 25 bp, Homo sapien
aatgccggggcacgtcgaattgtct

SEQ ID NO: 5372202 - DNA, 25 bp, Homo sapien
gcccgatacataaatggccttattt

SEQ ID NO: 5372203 - DNA, 25 bp, Homo sapien
gaattgtctttctttcgcccgatac

SEQ ID NO: 5372204 - DNA, 25 bp, Homo sapien
tctttcgcccgatacataaatggcc

SEQ ID NO: 5372205 - DNA, 25 bp, Homo sapien
ctgagcccgaaaaggggacccatgg

SEQ ID NO: 5372206 - DNA, 25 bp, Homo sapien
gacccatggtttgaccatgggcaga

SEQ ID NO: 5372207 - DNA, 25 bp, Homo sapien
atattggatgggtactagccaaggc

SEQ ID NO: 5372208 - DNA, 25 bp, Homo sapien
catgggcagaatattggatgggtac

SEQ ID NO: 5372209 - DNA, 25 bp, Homo sapien
tctatggttggctcagtactgtgct

SEQ ID NO: 5372210 - DNA, 25 bp, Homo sapien
gaagccttccatactgtgcctggca

SEQ ID NO: 5372211 - DNA, 25 bp, Homo sapien
cagatgtcatggattcggagtcgcg

SEQ ID NO: 5372212 - DNA, 25 bp, Homo sapien
ggatcgctctatgggctccttggga

SEQ ID NO: 5372213 - DNA, 25 bp, Homo sapien
ccacggccccaaagtgagtttgtcg

SEQ ID NO: 5372214 - DNA, 25 bp, Homo sapien
tctggggcatcagatggtcccttcc

SEQ ID NO: 5372215 - DNA, 25 bp, Homo sapien
tcaacgtgaattaaaggcagaggga

SEQ ID NO: 5372216 - DNA, 25 bp, Homo sapien
tttgtcggctactcagctctgatgt

SEQ ID NO: 5372217 - DNA, 25 bp, Homo sapien
tcatgtggtaatggcaggttgtctt

SEQ ID NO: 5372218 - DNA, 25 bp, Homo sapien
agaagcatcaaggagagaagcccca

SEQ ID NO: 5372219 - DNA, 25 bp, Homo sapien
tattgagtcatgtggtaatggcagg

SEQ ID NO: 5372220 - DNA, 25 bp, Homo sapien
aagcatcaaggagagaagccccaca

SEQ ID NO: 5372221 - DNA, 25 bp, Homo sapien
agagggaccctctatcgctggcttc

SEQ ID NO: 5372222 - DNA, 25 bp, Homo sapien
gccttgggtcccttcagtagctggt

SEQ ID NO: 5372223 - DNA, 25 bp, Homo sapien
gaagcgggtttcctgcgattctgcc

SEQ ID NO: 5372224 - DNA, 25 bp, Homo sapien
caggaagcacatttggcttggcagg

SEQ ID NO: 5372225 - DNA, 25 bp, Homo sapien
tggcctggctgacggcagctgccaa

SEQ ID NO: 5372226 - DNA, 25 bp, Homo sapien
ggatgccgcactgcaggaggacctg

SEQ ID NO: 5372227 - DNA, 25 bp, Homo sapien
ggccctgtggaatgtctgttttaag

SEQ ID NO: 5372228 - DNA, 25 bp, Homo sapien
tgtctgttttaagctccctggggct

SEQ ID NO: 5372229 - DNA, 25 bp, Homo sapien
cattaaattaaccacacagggagtg

SEQ ID NO: 5372230 - DNA, 25 bp, Homo sapien
gagtgtgccgcaatgctggacttgt

SEQ ID NO: 5372231 - DNA, 25 bp, Homo sapien
tttctgagggactcgctccagccct

SEQ ID NO: 5372232 - DNA, 25 bp, Homo sapien
ctgcccctcattaaggagtcttgga

SEQ ID NO: 5372233 - DNA, 25 bp, Homo sapien
acagatggtcaaaggccgtggcagt

SEQ ID NO: 5372234 - DNA, 25 bp, Homo sapien
ctacagatggtcaaaggccgtggca

SEQ ID NO: 5372235 - DNA, 25 bp, Homo sapien
gtcaaaggccgtggcagtggtgggc

SEQ ID NO: 5372236 - DNA, 25 bp, Homo sapien
tggtcaaaggccgtggcagtggtgg

SEQ ID NO: 5372237 - DNA, 25 bp, Homo sapien
cataggcattgccagagtattcact

SEQ ID NO: 5372238 - DNA, 25 bp, Homo sapien
tgtggccataggcattgccagagta

SEQ ID NO: 5372239 - DNA, 25 bp, Homo sapien
gggtgtggccataggcattgccaga

SEQ ID NO: 5372240 - DNA, 25 bp, Homo sapien
ttggggaagcgccaggcctcgctgt

SEQ ID NO: 5372241 - DNA, 25 bp, Homo sapien
ctgttggaggcacacaggggagagg

SEQ ID NO: 5372242 - DNA, 25 bp, Homo sapien
tgttggaggcacacaggggagaggc

SEQ ID NO: 5372243 - DNA, 25 bp, Homo sapien
aggtgaagggcatcaatgcagggct

SEQ ID NO: 5372244 - DNA, 25 bp, Homo sapien
ggtgaagggcatcaatgcagggctg

SEQ ID NO: 5372245 - DNA, 25 bp, Homo sapien
tgaggtgaagggcatcaatgcaggg

SEQ ID NO: 5372246 - DNA, 25 bp, Homo sapien
gcaatgggcaagctcaggaatggtt

SEQ ID NO: 5372247 - DNA, 25 bp, Homo sapien
acagttggagccacggcagggacaa

SEQ ID NO: 5372248 - DNA, 25 bp, Homo sapien
aatggagctcagaaggtccctctgt

SEQ ID NO: 5372249 - DNA, 25 bp, Homo sapien
gcagtgtccttttccgtaggtactg

SEQ ID NO: 5372250 - DNA, 25 bp, Homo sapien
gactaagtctaacgtaaatcaagca

SEQ ID NO: 5372251 - DNA, 25 bp, Homo sapien
gccaactgcctcctgtttaactcag

SEQ ID NO: 5372252 - DNA, 25 bp, Homo sapien
catagggaagtaaagacatttggcc

SEQ ID NO: 5372253 - DNA, 25 bp, Homo sapien
taactcaggtctcccgggtttcagc

SEQ ID NO: 5372254 - DNA, 25 bp, Homo sapien
gtgtggcatcttcccgtcatcagat

SEQ ID NO: 5372255 - DNA, 25 bp, Homo sapien
gtacctcagtcacatggaacctggg

SEQ ID NO: 5372256 - DNA, 25 bp, Homo sapien
cagatgtgcctacctgcttgcagtc

SEQ ID NO: 5372257 - DNA, 25 bp, Homo sapien
tggagctcggtaggtggtacacacc

SEQ ID NO: 5372258 - DNA, 25 bp, Homo sapien
cacacatgatgtacctgctgactta

SEQ ID NO: 5372259 - DNA, 25 bp, Homo sapien
tctaaattgttgaagaaccccaggc

SEQ ID NO: 5372260 - DNA, 25 bp, Homo sapien
tcatgcctttgggtttgtgatgccc

SEQ ID NO: 5372261 - DNA, 25 bp, Homo sapien
gtaggcatctcaatcataacacggc

SEQ ID NO: 5372262 - DNA, 25 bp, Homo sapien
tgcattaagcacatcgccacggtaa

SEQ ID NO: 5372263 - DNA, 25 bp, Homo sapien
ggactttgatgagaggctcaagcct

SEQ ID NO: 5372264 - DNA, 25 bp, Homo sapien
tacctcacaggtcagactctgggcc

SEQ ID NO: 5372265 - DNA, 25 bp, Homo sapien
caatctcatttcacgctccagaaga

SEQ ID NO: 5372266 - DNA, 25 bp, Homo sapien
tctgcatagggtgcccagagtgggt

SEQ ID NO: 5372267 - DNA, 25 bp, Homo sapien
gaacgggtaaactgggattcatcag

SEQ ID NO: 5372268 - DNA, 25 bp, Homo sapien
caaagaaacccaaatgactggcagg

SEQ ID NO: 5372269 - DNA, 25 bp, Homo sapien
cagcactgcttgagggtagggttca

SEQ ID NO: 5372270 - DNA, 25 bp, Homo sapien
agaacccgggtcctatccatgcagg

SEQ ID NO: 5372271 - DNA, 25 bp, Homo sapien
agtgctctccatttatgctcactga

SEQ ID NO: 5372272 - DNA, 25 bp, Homo sapien
tgttttggggcccttagagtgctct

SEQ ID NO: 5372273 - DNA, 25 bp, Homo sapien
gggcccttagagtgctctccattta

SEQ ID NO: 5372274 - DNA, 25 bp, Homo sapien
cttagagtgctctccatttatgctc

SEQ ID NO: 5372275 - DNA, 25 bp, Homo sapien
ccttcaatgccctttgggaagtcta

SEQ ID NO: 5372276 - DNA, 25 bp, Homo sapien
catttacaaggagatgccctctttg

SEQ ID NO: 5372277 - DNA, 25 bp, Homo sapien
actgcactgggacatcgtctccagg

SEQ ID NO: 5372278 - DNA, 25 bp, Homo sapien
gggaagtctatgaatagggcacagt

SEQ ID NO: 5372279 - DNA, 25 bp, Homo sapien
cctctttgcagtgctccccttcctg

SEQ ID NO: 5372280 - DNA, 25 bp, Homo sapien
ggcagaggaggcatagctgccctgt

SEQ ID NO: 5372281 - DNA, 25 bp, Homo sapien
tgccaccatgcctgcgatggcagag

SEQ ID NO: 5372282 - DNA, 25 bp, Homo sapien
atggcagaggaggcatagctgccct

SEQ ID NO: 5372283 - DNA, 25 bp, Homo sapien
gtgggtatccgggcagcgtgggccc

SEQ ID NO: 5372284 - DNA, 25 bp, Homo sapien
ctgacacaaggtcatcaagggaaca

SEQ ID NO: 5372285 - DNA, 25 bp, Homo sapien
acaaggtcatcaagggaacaaatga

SEQ ID NO: 5372286 - DNA, 25 bp, Homo sapien
gacacaaggtcatcaagggaacaaa

SEQ ID NO: 5372287 - DNA, 25 bp, Homo sapien
ggtcatcaagggaacaaatgaaggg

SEQ ID NO: 5372288 - DNA, 25 bp, Homo sapien
catctcctctacacccaaatttctt

SEQ ID NO: 5372289 - DNA, 25 bp, Homo sapien
aacgatcctcgctatgaattccatc

SEQ ID NO: 5372290 - DNA, 25 bp, Homo sapien
tctctgtttttaagactcttcatca

SEQ ID NO: 5372291 - DNA, 25 bp, Homo sapien
tcttcatcataaaacgatcctcgct

SEQ ID NO: 5372292 - DNA, 25 bp, Homo sapien
gtgggcatgtccactaaattaacag

SEQ ID NO: 5372293 - DNA, 25 bp, Homo sapien
gctgccagctgttttgtcccatggg

SEQ ID NO: 5372294 - DNA, 25 bp, Homo sapien
tttgtcccatgggttgggtgacctc

SEQ ID NO: 5372295 - DNA, 25 bp, Homo sapien
gggtgacctctcagtcctgcagttg

SEQ ID NO: 5372296 - DNA, 25 bp, Homo sapien
cgcctccaaaagttgccggaggaat

SEQ ID NO: 5372297 - DNA, 25 bp, Homo sapien
tcatgttggcgcctccaaaagttgc

SEQ ID NO: 5372298 - DNA, 25 bp, Homo sapien
gtgcatccccggcacccctacagca

SEQ ID NO: 5372299 - DNA, 25 bp, Homo sapien
catccgccccttccgagcatgtctt

SEQ ID NO: 5372300 - DNA, 25 bp, Homo sapien
ggagccgacttgctgcagatccaaa

SEQ ID NO: 5372301 - DNA, 25 bp, Homo sapien
tggcccgtgaactgcccgtacacgg

SEQ ID NO: 5372302 - DNA, 25 bp, Homo sapien
gcattgaagggcgggaccccggagc

SEQ ID NO: 5372303 - DNA, 25 bp, Homo sapien
actgcccgtacacggaggcagcatg

SEQ ID NO: 5372304 - DNA, 25 bp, Homo sapien
ctcgggggtttcctgctttatggcg

SEQ ID NO: 5372305 - DNA, 25 bp, Homo sapien
gaggaaggggtggagctagaactgg

SEQ ID NO: 5372306 - DNA, 25 bp, Homo sapien
cacctcgggggtttcctgctttatg

SEQ ID NO: 5372307 - DNA, 25 bp, Homo sapien
ttcctgctttatggcgaagggtgag

SEQ ID NO: 5372308 - DNA, 25 bp, Homo sapien
gccagggaggctccgggcgttgtac

SEQ ID NO: 5372309 - DNA, 25 bp, Homo sapien
tgccagggaggctccgggcgttgta

SEQ ID NO: 5372310 - DNA, 25 bp, Homo sapien
ctgccagggaggctccgggcgttgt

SEQ ID NO: 5372311 - DNA, 25 bp, Homo sapien
cccagtggcgtgttggaaggggtca

SEQ ID NO: 5372312 - DNA, 25 bp, Homo sapien
gggtaggtctggtgagtcgagaggt

SEQ ID NO: 5372313 - DNA, 25 bp, Homo sapien
agtcgagaggttgcgccccagtggc

SEQ ID NO: 5372314 - DNA, 25 bp, Homo sapien
cagggtggccttcccgtcgtccagg

SEQ ID NO: 5372315 - DNA, 25 bp, Homo sapien
tgttgagcaagggcagcgggtagag

SEQ ID NO: 5372316 - DNA, 25 bp, Homo sapien
ctgttgagcaagggcagcgggtaga

SEQ ID NO: 5372317 - DNA, 25 bp, Homo sapien
ttgagcaagggcagcgggtagaggc

SEQ ID NO: 5372318 - DNA, 25 bp, Homo sapien
gttgagcaagggcagcgggtagagg

SEQ ID NO: 5372319 - DNA, 25 bp, Homo sapien
ggggagcaaagagaagtcagcgcac

SEQ ID NO: 5372320 - DNA, 25 bp, Homo sapien
tggggagcaaagagaagtcagcgca

SEQ ID NO: 5372321 - DNA, 25 bp, Homo sapien
ctggggagcaaagagaagtcagcgc

SEQ ID NO: 5372322 - DNA, 25 bp, Homo sapien
gttcatgctcattgtcctcccgcat

SEQ ID NO: 5372323 - DNA, 25 bp, Homo sapien
tgtgtcttaggacttggcagccctc

SEQ ID NO: 5372324 - DNA, 25 bp, Homo sapien
aactccactcggcacgtttcgttca

SEQ ID NO: 5372325 - DNA, 25 bp, Homo sapien
agagacgatccaacaagccgacctt

SEQ ID NO: 5372326 - DNA, 25 bp, Homo sapien
tgttgggacccacagaatgcaggac

SEQ ID NO: 5372327 - DNA, 25 bp, Homo sapien
cccagacgtgggatagagagtctca

SEQ ID NO: 5372328 - DNA, 25 bp, Homo sapien
ccagatgggccaaagataggattca

SEQ ID NO: 5372329 - DNA, 25 bp, Homo sapien
aattcaaggccagctggtagcatgg

SEQ ID NO: 5372330 - DNA, 25 bp, Homo sapien
ggcaccattagcacatagcagcaat

SEQ ID NO: 5372331 - DNA, 25 bp, Homo sapien
tattgactaaatggtgctctggttc

SEQ ID NO: 5372332 - DNA, 25 bp, Homo sapien
tccaagggggcccacttagaggcag

SEQ ID NO: 5372333 - DNA, 25 bp, Homo sapien
gctctggttccatgccttccaaggg

SEQ ID NO: 5372334 - DNA, 25 bp, Homo sapien
gaggctgacgtaagcattacatgaa

SEQ ID NO: 5372335 - DNA, 25 bp, Homo sapien
cagaatcgtgaagagtcagaagcca

SEQ ID NO: 5372336 - DNA, 25 bp, Homo sapien
gatgcccaatgagagttatcacaga

SEQ ID NO: 5372337 - DNA, 25 bp, Homo sapien
gaacttcagcgactctgagccctgg

SEQ ID NO: 5372338 - DNA, 25 bp, Homo sapien
gcagcacagtcagttaccagaggta

SEQ ID NO: 5372339 - DNA, 25 bp, Homo sapien
tggaggtccctgaaagctcaaagac

SEQ ID NO: 5372340 - DNA, 25 bp, Homo sapien
gattccccatgttcatatgccagca

SEQ ID NO: 5372341 - DNA, 25 bp, Homo sapien
tgttacaacctgtcctaaggtcagg

SEQ ID NO: 5372342 - DNA, 25 bp, Homo sapien
cacactgagttttgcaggcttactc

SEQ ID NO: 5372343 - DNA, 25 bp, Homo sapien
gcacactgagttttgcaggcttact

SEQ ID NO: 5372344 - DNA, 25 bp, Homo sapien
ctgcacactgagttttgcaggctta

SEQ ID NO: 5372345 - DNA, 25 bp, Homo sapien
tgcacactgagttttgcaggcttac

SEQ ID NO: 5372346 - DNA, 25 bp, Homo sapien
ctttccttcctggagctgtgtgctg

SEQ ID NO: 5372347 - DNA, 25 bp, Homo sapien
tcacagagtgagcttcctgcaggcc

SEQ ID NO: 5372348 - DNA, 25 bp, Homo sapien
tgtgtgctgactggtgcgtgagcac

SEQ ID NO: 5372349 - DNA, 25 bp, Homo sapien
cctggagctgtgtgctgactggtgc

SEQ ID NO: 5372350 - DNA, 25 bp, Homo sapien
cagctttctctgcacgctcgtggtt

SEQ ID NO: 5372351 - DNA, 25 bp, Homo sapien
cacagtcaacgctgataaaattgct

SEQ ID NO: 5372352 - DNA, 25 bp, Homo sapien
gtgctggcacgggaccagcagccca

SEQ ID NO: 5372353 - DNA, 25 bp, Homo sapien
aaaattgctgatgcagattgcctgc

SEQ ID NO: 5372354 - DNA, 25 bp, Homo sapien
gcttttcacggacaccaacctgtta

SEQ ID NO: 5372355 - DNA, 25 bp, Homo sapien
acctgtcctgagcactagcaagaaa

SEQ ID NO: 5372356 - DNA, 25 bp, Homo sapien
cctacagcaaatgacggcatgggca

SEQ ID NO: 5372357 - DNA, 25 bp, Homo sapien
tgcagagtctttgttggcctcaggg

SEQ ID NO: 5372358 - DNA, 25 bp, Homo sapien
ggctcatttggagaatagaccttct

SEQ ID NO: 5372359 - DNA, 25 bp, Homo sapien
tgagcccattgatgcaacttccagc

SEQ ID NO: 5372360 - DNA, 25 bp, Homo sapien
gctgctttgatggagcacaggctca

SEQ ID NO: 5372361 - DNA, 25 bp, Homo sapien
tcaggcttggagttgcataaggcag

SEQ ID NO: 5372362 - DNA, 25 bp, Homo sapien
ctgaaggcatccgtgcgaaggtgct

SEQ ID NO: 5372363 - DNA, 25 bp, Homo sapien
gcttagtcggcagctatcctgatca

SEQ ID NO: 5372364 - DNA, 25 bp, Homo sapien
gcataggcctctgggtagtgctgcc

SEQ ID NO: 5372365 - DNA, 25 bp, Homo sapien
caaatgggcactcgagcggctcgag

SEQ ID NO: 5372366 - DNA, 25 bp, Homo sapien
cagggaatccgactggggtgactcc

SEQ ID NO: 5372367 - DNA, 25 bp, Homo sapien
cattttcctcttgtcgctgccaggc

SEQ ID NO: 5372368 - DNA, 25 bp, Homo sapien
ctgccaggctgagcgatgcccagga

SEQ ID NO: 5372369 - DNA, 25 bp, Homo sapien
actccgggggagttacagctgagct

SEQ ID NO: 5372370 - DNA, 25 bp, Homo sapien
aggcagcaagccgaaccatggactg

SEQ ID NO: 5372371 - DNA, 25 bp, Homo sapien
caggaggcagcaagccgaaccatgg

SEQ ID NO: 5372372 - DNA, 25 bp, Homo sapien
agcaagccgaaccatggactgagcc

SEQ ID NO: 5372373 - DNA, 25 bp, Homo sapien
agccgaaccatggactgagccctgg

SEQ ID NO: 5372374 - DNA, 25 bp, Homo sapien
gactcagggacttggtggccacgca

SEQ ID NO: 5372375 - DNA, 25 bp, Homo sapien
ctgtccatagggaggttgaatggtt

SEQ ID NO: 5372376 - DNA, 25 bp, Homo sapien
tggttgctgcactttggtccggatg

SEQ ID NO: 5372377 - DNA, 25 bp, Homo sapien
gaatggttgctgcactttggtccgg

SEQ ID NO: 5372378 - DNA, 25 bp, Homo sapien
actccaggccggatgctgccagtct

SEQ ID NO: 5372379 - DNA, 25 bp, Homo sapien
gcttggagccccctatcactccagg

SEQ ID NO: 5372380 - DNA, 25 bp, Homo sapien
tggtagggttctggcgtttgtagtc

SEQ ID NO: 5372381 - DNA, 25 bp, Homo sapien
catggtagggttctggcgtttgtag

SEQ ID NO: 5372382 - DNA, 25 bp, Homo sapien
gctagaatgcaatgggacaagcttg

SEQ ID NO: 5372383 - DNA, 25 bp, Homo sapien
taaatccacctaagggtcagagcag

SEQ ID NO: 5372384 - DNA, 25 bp, Homo sapien
tgctttggcagatcaaccgcctgtg

SEQ ID NO: 5372385 - DNA, 25 bp, Homo sapien
gagccagggcttttcacggttcaaa

SEQ ID NO: 5372386 - DNA, 25 bp, Homo sapien
agaaagctagccgaggtcactggac

SEQ ID NO: 5372387 - DNA, 25 bp, Homo sapien
gagctggcgagagatgtcgcagggc

SEQ ID NO: 5372388 - DNA, 25 bp, Homo sapien
agccatggctgacgcggagctggcg

SEQ ID NO: 5372389 - DNA, 25 bp, Homo sapien
ccaggtctacgatgcgctggcggac

SEQ ID NO: 5372390 - DNA, 25 bp, Homo sapien
ggcggaccacttccggcagaggtct

SEQ ID NO: 5372391 - DNA, 25 bp, Homo sapien
ctaaggagacaatattcccagggac

SEQ ID NO: 5372392 - DNA, 25 bp, Homo sapien
taaggagacaatattcccagggaca

SEQ ID NO: 5372393 - DNA, 25 bp, Homo sapien
aaggagacaatattcccagggacag

SEQ ID NO: 5372394 - DNA, 25 bp, Homo sapien
tatgcctgtccaggcaagtcttcct

SEQ ID NO: 5372395 - DNA, 25 bp, Homo sapien
tgcttctccactagggctggaagag

SEQ ID NO: 5372396 - DNA, 25 bp, Homo sapien
tccactagggctggaagagtgcttg

SEQ ID NO: 5372397 - DNA, 25 bp, Homo sapien
gtcttcctagtgactgcttctccac

SEQ ID NO: 5372398 - DNA, 25 bp, Homo sapien
taagctgagtctctgcaatggaaag

SEQ ID NO: 5372399 - DNA, 25 bp, Homo sapien
aagctgagtctctgcaatggaaaga

SEQ ID NO: 5372400 - DNA, 25 bp, Homo sapien
ttaagctgagtctctgcaatggaaa

SEQ ID NO: 5372401 - DNA, 25 bp, Homo sapien
agctgagtctctgcaatggaaagac

SEQ ID NO: 5372402 - DNA, 25 bp, Homo sapien
ttgaagcctcataagcaaagactct

SEQ ID NO: 5372403 - DNA, 25 bp, Homo sapien
gctttgaggccggaagccaaaaatg

SEQ ID NO: 5372404 - DNA, 25 bp, Homo sapien
gattggcgcccactgtgctgaccac

SEQ ID NO: 5372405 - DNA, 25 bp, Homo sapien
tcaccaccaaatgcccagaggtggg

SEQ ID NO: 5372406 - DNA, 25 bp, Homo sapien
cagggccatggaatcccagtgtcca

SEQ ID NO: 5372407 - DNA, 25 bp, Homo sapien
tctgtgcctccaactgctcctgaag

SEQ ID NO: 5372408 - DNA, 25 bp, Homo sapien
actgctcctgaagaaagtgtcccag

SEQ ID NO: 5372409 - DNA, 25 bp, Homo sapien
tggcttggtgcctttctggagtaaa

SEQ ID NO: 5372410 - DNA, 25 bp, Homo sapien
ccagcacacatgaggttatgggtta

SEQ ID NO: 5372411 - DNA, 25 bp, Homo sapien
cagcacacatgaggttatgggttac

SEQ ID NO: 5372412 - DNA, 25 bp, Homo sapien
tgctgttacccccaacttgctgcat

SEQ ID NO: 5372413 - DNA, 25 bp, Homo sapien
tggacacatgagacccttggactgg

SEQ ID NO: 5372414 - DNA, 25 bp, Homo sapien
gctggaaagcagcatcctgcatctg

SEQ ID NO: 5372415 - DNA, 25 bp, Homo sapien
cccttggactgggtaaaagaggctg

SEQ ID NO: 5372416 - DNA, 25 bp, Homo sapien
gagatttcctcttaggtgataaggg

SEQ ID NO: 5372417 - DNA, 25 bp, Homo sapien
cctcctctagtgttgtcttggttgg

SEQ ID NO: 5372418 - DNA, 25 bp, Homo sapien
gcatcccaggtaaccccagtcaggt

SEQ ID NO: 5372419 - DNA, 25 bp, Homo sapien
ttttcaatttctattggagatttcc

SEQ ID NO: 5372420 - DNA, 25 bp, Homo sapien
tgccaggctcacactgttgagagca

SEQ ID NO: 5372421 - DNA, 25 bp, Homo sapien
cttcaacgtcaacattaaatgcgtg

SEQ ID NO: 5372422 - DNA, 25 bp, Homo sapien
gagcagctttatggttgaatgtggc

SEQ ID NO: 5372423 - DNA, 25 bp, Homo sapien
taaatgcgtgagtgcttgccaggct

SEQ ID NO: 5372424 - DNA, 25 bp, Homo sapien
gcttcctagacacttgcagactcct

SEQ ID NO: 5372425 - DNA, 25 bp, Homo sapien
ggtttactagaggtcattcttccca

SEQ ID NO: 5372426 - DNA, 25 bp, Homo sapien
tctagtcaggggctgcaaatggagc

SEQ ID NO: 5372427 - DNA, 25 bp, Homo sapien
gaaacatgaacttctagtcaggggc

SEQ ID NO: 5372428 - DNA, 25 bp, Homo sapien
gaaggagattatccactctaaaagc

SEQ ID NO: 5372429 - DNA, 25 bp, Homo sapien
tagcaggcaccatggcgaaggagat

SEQ ID NO: 5372430 - DNA, 25 bp, Homo sapien
ctgtcgatagcaggcaccatggcga

SEQ ID NO: 5372431 - DNA, 25 bp, Homo sapien
gattatccactctaaaagctgccct

SEQ ID NO: 5372432 - DNA, 25 bp, Homo sapien
cggctcactgaaaccctgcaacctc

SEQ ID NO: 5372433 - DNA, 25 bp, Homo sapien
tcctgccttcagcttcccaagcagc

SEQ ID NO: 5372434 - DNA, 25 bp, Homo sapien
ctcactgaaaccctgcaacctccgc

SEQ ID NO: 5372435 - DNA, 25 bp, Homo sapien
ctgccttcagcttcccaagcagctg

SEQ ID NO: 5372436 - DNA, 25 bp, Homo sapien
gcggtgttgctcagacccaaagcag

SEQ ID NO: 5372437 - DNA, 25 bp, Homo sapien
cttctgcagcggtgttgctcagacc

SEQ ID NO: 5372438 - DNA, 25 bp, Homo sapien
tctgcagcggtgttgctcagaccca

SEQ ID NO: 5372439 - DNA, 25 bp, Homo sapien
cagcggtgttgctcagacccaaagc

SEQ ID NO: 5372440 - DNA, 25 bp, Homo sapien
aagacaacagcgtcagtaggtatgc

SEQ ID NO: 5372441 - DNA, 25 bp, Homo sapien
ctagctatcacagattattgccatg

SEQ ID NO: 5372442 - DNA, 25 bp, Homo sapien
caacagcgtcagtaggtatgcagct

SEQ ID NO: 5372443 - DNA, 25 bp, Homo sapien
cagcgtcagtaggtatgcagctgtg

SEQ ID NO: 5372444 - DNA, 25 bp, Homo sapien
gcaaagaacgccacaaaacagtgag

SEQ ID NO: 5372445 - DNA, 25 bp, Homo sapien
ggcacccggaagttcatggtgttct

SEQ ID NO: 5372446 - DNA, 25 bp, Homo sapien
gtgttgctaagtccgatcccagatc

SEQ ID NO: 5372447 - DNA, 25 bp, Homo sapien
cagtgagctcaacttcttgaaagtc

SEQ ID NO: 5372448 - DNA, 25 bp, Homo sapien
caagtaactcaagtctggaagctgc

SEQ ID NO: 5372449 - DNA, 25 bp, Homo sapien
caaaaattggactgcaaggcatgcc

SEQ ID NO: 5372450 - DNA, 25 bp, Homo sapien
tggaagctgcgagccacagagatca

SEQ ID NO: 5372451 - DNA, 25 bp, Homo sapien
catgccgtacaaacagagtgctagg

SEQ ID NO: 5372452 - DNA, 25 bp, Homo sapien
tctagacagccccatggccagcagt

SEQ ID NO: 5372453 - DNA, 25 bp, Homo sapien
atgggccatggggaccttcctggta

SEQ ID NO: 5372454 - DNA, 25 bp, Homo sapien
gccatggggaccttcctggtatggg

SEQ ID NO: 5372455 - DNA, 25 bp, Homo sapien
ggccatgggccatggggaccttcct

SEQ ID NO: 5372456 - DNA, 25 bp, Homo sapien
caggaaggtccccaaggctcgaagg

SEQ ID NO: 5372457 - DNA, 25 bp, Homo sapien
gcccaggaaggtccccaaggctcga

SEQ ID NO: 5372458 - DNA, 25 bp, Homo sapien
ccaggaaggtccccaaggctcgaag

SEQ ID NO: 5372459 - DNA, 25 bp, Homo sapien
aagccagatggggtttacctgtcaa

SEQ ID NO: 5372460 - DNA, 25 bp, Homo sapien
actggctctggaacaatgaggagca

SEQ ID NO: 5372461 - DNA, 25 bp, Homo sapien
gggtttacctgtcaacagccacaac

SEQ ID NO: 5372462 - DNA, 25 bp, Homo sapien
gagccccagtgtagaccgtcatgga

SEQ ID NO: 5372463 - DNA, 25 bp, Homo sapien
tataaatcccagagcacaatgtgcg

SEQ ID NO: 5372464 - DNA, 25 bp, Homo sapien
ggatcagccagcttcctaaaattct

SEQ ID NO: 5372465 - DNA, 25 bp, Homo sapien
caaaggttccatgcacctggctatc

SEQ ID NO: 5372466 - DNA, 25 bp, Homo sapien
tgacagccagatatccaagatccgg

SEQ ID NO: 5372467 - DNA, 25 bp, Homo sapien
catccaagctagtgggaaagcgcgc

SEQ ID NO: 5372468 - DNA, 25 bp, Homo sapien
tagagaatttcgtccctgatgcaac

SEQ ID NO: 5372469 - DNA, 25 bp, Homo sapien
ttttaaggaacgttcagcccatcgc

SEQ ID NO: 5372470 - DNA, 25 bp, Homo sapien
gctgatcagaaagacagacggcctc

SEQ ID NO: 5372471 - DNA, 25 bp, Homo sapien
tgaccttagatagtggcctaggagc

SEQ ID NO: 5372472 - DNA, 25 bp, Homo sapien
taagggactaaaacctgatcctgac

SEQ ID NO: 5372473 - DNA, 25 bp, Homo sapien
tatcgtaccacggtttggctaaaga

SEQ ID NO: 5372474 - DNA, 25 bp, Homo sapien
cctaggagcgctcgtggttccagga

SEQ ID NO: 5372475 - DNA, 25 bp, Homo sapien
aatagagatctcagcctcgctgcgc

SEQ ID NO: 5372476 - DNA, 25 bp, Homo sapien
cccgcagtgcgcttggctaaataga

SEQ ID NO: 5372477 - DNA, 25 bp, Homo sapien
cagagcgggacatcatattcgcgga

SEQ ID NO: 5372478 - DNA, 25 bp, Homo sapien
aacaaatgtcccgtttgcagagcgg

SEQ ID NO: 5372479 - DNA, 25 bp, Homo sapien
ttcgccggcccaaatcgatagcgat

SEQ ID NO: 5372480 - DNA, 25 bp, Homo sapien
agcgatgcgccctggccccataaat

SEQ ID NO: 5372481 - DNA, 25 bp, Homo sapien
cataaatcgccttctctgcggccgg

SEQ ID NO: 5372482 - DNA, 25 bp, Homo sapien
caaatcgatagcgatgcgccctggc

SEQ ID NO: 5372483 - DNA, 25 bp, Homo sapien
gcgccgggacggctgcgcccaccag

SEQ ID NO: 5372484 - DNA, 25 bp, Homo sapien
cgcgccgggacggctgcgcccacca

SEQ ID NO: 5372485 - DNA, 25 bp, Homo sapien
tgcgcgccgggacggctgcgcccac

SEQ ID NO: 5372486 - DNA, 25 bp, Homo sapien
gcgcgccgggacggctgcgcccacc

SEQ ID NO: 5372487 - DNA, 25 bp, Homo sapien
ggaaaacaggcatcgcggcctggga

SEQ ID NO: 5372488 - DNA, 25 bp, Homo sapien
ggagctcgagtgtgtttgaaggccc

SEQ ID NO: 5372489 - DNA, 25 bp, Homo sapien
agcggcttagtcctcaccagccgga

SEQ ID NO: 5372490 - DNA, 25 bp, Homo sapien
ttttgactccgcgagcggcttagtc

SEQ ID NO: 5372491 - DNA, 25 bp, Homo sapien
gaccaccggctccattgccgttggc

SEQ ID NO: 5372492 - DNA, 25 bp, Homo sapien
tcacagtccagccaggggagtcact

SEQ ID NO: 5372493 - DNA, 25 bp, Homo sapien
accggctccattgccgttggcttga

SEQ ID NO: 5372494 - DNA, 25 bp, Homo sapien
gctccattgccgttggcttgagaga

SEQ ID NO: 5372495 - DNA, 25 bp, Homo sapien
agcacgaagaatgtccacactaatg

SEQ ID NO: 5372496 - DNA, 25 bp, Homo sapien
gtccacactaatgcgccatgcaagg

SEQ ID NO: 5372497 - DNA, 25 bp, Homo sapien
cgaggaagaggacttagaggtcggg

SEQ ID NO: 5372498 - DNA, 25 bp, Homo sapien
gaagaatgtccacactaatgcgcca

SEQ ID NO: 5372499 - DNA, 25 bp, Homo sapien
gaaaccccctctaactccacagaga

SEQ ID NO: 5372500 - DNA, 25 bp, Homo sapien
ctgggaatggagctcaaaggaaacc

SEQ ID NO: 5372501 - DNA, 25 bp, Homo sapien
aaccccctctaactccacagagatc

SEQ ID NO: 5372502 - DNA, 25 bp, Homo sapien
tggagctcaaaggaaaccccctcta

SEQ ID NO: 5372503 - DNA, 25 bp, Homo sapien
cgatccatgtggtccctcgaaaccg

SEQ ID NO: 5372504 - DNA, 25 bp, Homo sapien
gtgggtcccgcgaatcccgtgctga

SEQ ID NO: 5372505 - DNA, 25 bp, Homo sapien
tgctgacgctctcgagatccaacca

SEQ ID NO: 5372506 - DNA, 25 bp, Homo sapien
ctcgaaaccgggcaagggcggctca

SEQ ID NO: 5372507 - DNA, 25 bp, Homo sapien
cagatctgatggagttgtgaggcat

SEQ ID NO: 5372508 - DNA, 25 bp, Homo sapien
tcccgtaggtccgggccgcgcctgc

SEQ ID NO: 5372509 - DNA, 25 bp, Homo sapien
ctcccgtaggtccgggccgcgcctg

SEQ ID NO: 5372510 - DNA, 25 bp, Homo sapien
tggccggccggctgcaggccctcac

SEQ ID NO: 5372511 - DNA, 25 bp, Homo sapien
ctggccggccggctgcaggccctca

SEQ ID NO: 5372512 - DNA, 25 bp, Homo sapien
gtctggcgaggctcgtaggccgcgg

SEQ ID NO: 5372513 - DNA, 25 bp, Homo sapien
gcgaggctcgtaggccgcggattgg

SEQ ID NO: 5372514 - DNA, 25 bp, Homo sapien
tctgaagtttgttcccatccacccg

SEQ ID NO: 5372515 - DNA, 25 bp, Homo sapien
caccgaccggttttatcccgctgag

SEQ ID NO: 5372516 - DNA, 25 bp, Homo sapien
ccagggaagaatcctgagcagcacc

SEQ ID NO: 5372517 - DNA, 25 bp, Homo sapien
cagggaagaatcctgagcagcacct

SEQ ID NO: 5372518 - DNA, 25 bp, Homo sapien
ttccctctgttctacacagatagcg

SEQ ID NO: 5372519 - DNA, 25 bp, Homo sapien
acagatagcgttcacacccttgcat

SEQ ID NO: 5372520 - DNA, 25 bp, Homo sapien
tccacagcaactcctcgcctctctc

SEQ ID NO: 5372521 - DNA, 25 bp, Homo sapien
ttccacagcaactcctcgcctctct

SEQ ID NO: 5372522 - DNA, 25 bp, Homo sapien
cttagtgatggcaaaagctgccccc

SEQ ID NO: 5372523 - DNA, 25 bp, Homo sapien
caaaagctgccccctccttcctcat

SEQ ID NO: 5372524 - DNA, 25 bp, Homo sapien
tggcaaaagctgccccctccttcct

SEQ ID NO: 5372525 - DNA, 25 bp, Homo sapien
ttagtgatggcaaaagctgccccct

SEQ ID NO: 5372526 - DNA, 25 bp, Homo sapien
gactaggtaatgctcctgctcctga

SEQ ID NO: 5372527 - DNA, 25 bp, Homo sapien
cagtgaccaaggtgtacagaagttt

SEQ ID NO: 5372528 - DNA, 25 bp, Homo sapien
tacagaagtttaggatgcgcgtcct

SEQ ID NO: 5372529 - DNA, 25 bp, Homo sapien
taggatgcgcgtcctgactaggtaa

SEQ ID NO: 5372530 - DNA, 25 bp, Homo sapien
acaggtaaccaggaaataaagagag

SEQ ID NO: 5372531 - DNA, 25 bp, Homo sapien
agggtacacgtcgaccccctgagat

SEQ ID NO: 5372532 - DNA, 25 bp, Homo sapien
gaaataaagagagggtacacgtcga

SEQ ID NO: 5372533 - DNA, 25 bp, Homo sapien
tcgaccccctgagatcctcaagcca

SEQ ID NO: 5372534 - DNA, 25 bp, Homo sapien
cctagaatttgcagcggggcagcaa

SEQ ID NO: 5372535 - DNA, 25 bp, Homo sapien
gctgcctagaatttgcagcggggca

SEQ ID NO: 5372536 - DNA, 25 bp, Homo sapien
aaggtgttatccttggcttcgctgc

SEQ ID NO: 5372537 - DNA, 25 bp, Homo sapien
aaggctccccaaggtgttatccttg

SEQ ID NO: 5372538 - DNA, 25 bp, Homo sapien
tgcctagtggcctggggacaatcac

SEQ ID NO: 5372539 - DNA, 25 bp, Homo sapien
gtctgagggttgagtccccagggct

SEQ ID NO: 5372540 - DNA, 25 bp, Homo sapien
cacacccttaactcctctgggtcag

SEQ ID NO: 5372541 - DNA, 25 bp, Homo sapien
caatgtcagagttgttccaaaggac

SEQ ID NO: 5372542 - DNA, 25 bp, Homo sapien
gagccaggaggttaacggagcgtcg

SEQ ID NO: 5372543 - DNA, 25 bp, Homo sapien
ctgccctctgggactccgcaggcgg

SEQ ID NO: 5372544 - DNA, 25 bp, Homo sapien
ctggagctgtcaggtttccagcccc

SEQ ID NO: 5372545 - DNA, 25 bp, Homo sapien
ggcctccggcgcgaggagaggcgca

SEQ ID NO: 5372546 - DNA, 25 bp, Homo sapien
cattgaggtcaaatcagggatgagc

SEQ ID NO: 5372547 - DNA, 25 bp, Homo sapien
tgatgtttagcgttcggcattgagg

SEQ ID NO: 5372548 - DNA, 25 bp, Homo sapien
tagcgttcggcattgaggtcaaatc

SEQ ID NO: 5372549 - DNA, 25 bp, Homo sapien
ctaaggctgatgtttagcgttcggc

SEQ ID NO: 5372550 - DNA, 25 bp, Homo sapien
gtggctgcctggtcattccccttca

SEQ ID NO: 5372551 - DNA, 25 bp, Homo sapien
cagtgaggaccgcacggctggtgag

SEQ ID NO: 5372552 - DNA, 25 bp, Homo sapien
tggtgagtgatacatggagagcttt

SEQ ID NO: 5372553 - DNA, 25 bp, Homo sapien
gatacatggagagctttgccgcctg

SEQ ID NO: 5372554 - DNA, 25 bp, Homo sapien
agacagtgaggaccgcacggctggt

SEQ ID NO: 5372555 - DNA, 25 bp, Homo sapien
gcaaagagatcagcaagctcatgag

SEQ ID NO: 5372556 - DNA, 25 bp, Homo sapien
caaagaagtgatgttggagtgagct

SEQ ID NO: 5372557 - DNA, 25 bp, Homo sapien
gcaggttcagttctggggtacccag

SEQ ID NO: 5372558 - DNA, 25 bp, Homo sapien
ggtacccagggcagtcttcaccagg

SEQ ID NO: 5372559 - DNA, 25 bp, Homo sapien
tgtgtcccgtccttgtgtgctggct

SEQ ID NO: 5372560 - DNA, 25 bp, Homo sapien
tttggacgagctatgggcctcctgg

SEQ ID NO: 5372561 - DNA, 25 bp, Homo sapien
ggccttctagcctgctctggagggc

SEQ ID NO: 5372562 - DNA, 25 bp, Homo sapien
gccctaacgcctcaactttggacga

SEQ ID NO: 5372563 - DNA, 25 bp, Homo sapien
ggtgtctttgccaacaccgtccaga

SEQ ID NO: 5372564 - DNA, 25 bp, Homo sapien
acaagcctaaaccatggtgtctttg

SEQ ID NO: 5372565 - DNA, 25 bp, Homo sapien
ctgcccagacaagcctaaaccatgg

SEQ ID NO: 5372566 - DNA, 25 bp, Homo sapien
catggtgtctttgccaacaccgtcc

SEQ ID NO: 5372567 - DNA, 25 bp, Homo sapien
gggtccctctagtttgcttctctga

SEQ ID NO: 5372568 - DNA, 25 bp, Homo sapien
acgctgatacctccaaagcctatca

SEQ ID NO: 5372569 - DNA, 25 bp, Homo sapien
gcagcaagaacttcctctgaaagcg

SEQ ID NO: 5372570 - DNA, 25 bp, Homo sapien
tatcaggatggtcagccatcccagc

SEQ ID NO: 5372571 - DNA, 25 bp, Homo sapien
agaacttcctctgaaagcgcctcca

SEQ ID NO: 5372572 - DNA, 25 bp, Homo sapien
ttgtcccggggacaatggccgagca

SEQ ID NO: 5372573 - DNA, 25 bp, Homo sapien
gtggttaataacttcggctggcagc

SEQ ID NO: 5372574 - DNA, 25 bp, Homo sapien
caatggccgagcagcccaataatga

SEQ ID NO: 5372575 - DNA, 25 bp, Homo sapien
ggcagctcccgtggttaataacttc

SEQ ID NO: 5372576 - DNA, 25 bp, Homo sapien
tgccctccggtggctgcatttcccg

SEQ ID NO: 5372577 - DNA, 25 bp, Homo sapien
gtgccctccggtggctgcatttccc

SEQ ID NO: 5372578 - DNA, 25 bp, Homo sapien
gccctccggtggctgcatttcccgg

SEQ ID NO: 5372579 - DNA, 25 bp, Homo sapien
ccctccggtggctgcatttcccggg

SEQ ID NO: 5372580 - DNA, 25 bp, Homo sapien
cttttcatggtcctaggagaaatag

SEQ ID NO: 5372581 - DNA, 25 bp, Homo sapien
caacttttacagtcagctcccagcc

SEQ ID NO: 5372582 - DNA, 25 bp, Homo sapien
ctgcaacttttacagtcagctccca

SEQ ID NO: 5372583 - DNA, 25 bp, Homo sapien
gcttttcatggtcctaggagaaata

SEQ ID NO: 5372584 - DNA, 25 bp, Homo sapien
cccccagggttgctcggccttgcct

SEQ ID NO: 5372585 - DNA, 25 bp, Homo sapien
tcccctctatcgcccccagggttgc

SEQ ID NO: 5372586 - DNA, 25 bp, Homo sapien
cccagggttgctcggccttgcctca

SEQ ID NO: 5372587 - DNA, 25 bp, Homo sapien
agggaggaaaaagcttgctctgttg

SEQ ID NO: 5372588 - DNA, 25 bp, Homo sapien
agatgctctatagggtcaacaatgg

SEQ ID NO: 5372589 - DNA, 25 bp, Homo sapien
cacgtggcatggtgcacactcagac

SEQ ID NO: 5372590 - DNA, 25 bp, Homo sapien
agtaagatctgagtgtagttcctga

SEQ ID NO: 5372591 - DNA, 25 bp, Homo sapien
caggcagcacgtggcatggtgcaca

SEQ ID NO: 5372592 - DNA, 25 bp, Homo sapien
ggaacctctgcttgatctttcagat

SEQ ID NO: 5372593 - DNA, 25 bp, Homo sapien
tattctctggtaaggaacctctgct

SEQ ID NO: 5372594 - DNA, 25 bp, Homo sapien
cttcttattctctggtaaggaacct

SEQ ID NO: 5372595 - DNA, 25 bp, Homo sapien
ctggtaaggaacctctgcttgatct

SEQ ID NO: 5372596 - DNA, 25 bp, Homo sapien
tgctcttactgctcctcttttcagg

SEQ ID NO: 5372597 - DNA, 25 bp, Homo sapien
atgcctgctcttactgctcctcttt

SEQ ID NO: 5372598 - DNA, 25 bp, Homo sapien
gctcttactgctcctcttttcaggc

SEQ ID NO: 5372599 - DNA, 25 bp, Homo sapien
cctgctcttactgctcctcttttca

SEQ ID NO: 5372600 - DNA, 25 bp, Homo sapien
ttggatcaggaacccagacacactc

SEQ ID NO: 5372601 - DNA, 25 bp, Homo sapien
tctgtatgcatctcacacttgcaat

SEQ ID NO: 5372602 - DNA, 25 bp, Homo sapien
gttttgtctactgtgtataaagtga

SEQ ID NO: 5372603 - DNA, 25 bp, Homo sapien
cacttgcaatttgggttttgtctac

SEQ ID NO: 5372604 - DNA, 25 bp, Homo sapien
cagagaatggacaggggatgcaggg

SEQ ID NO: 5372605 - DNA, 25 bp, Homo sapien
ctaggacagagaatggacaggggat

SEQ ID NO: 5372606 - DNA, 25 bp, Homo sapien
taggacagagaatggacaggggatg

SEQ ID NO: 5372607 - DNA, 25 bp, Homo sapien
ggacagagaatggacaggggatgca

SEQ ID NO: 5372608 - DNA, 25 bp, Homo sapien
ttatgatcttatgactgcaggcccc

SEQ ID NO: 5372609 - DNA, 25 bp, Homo sapien
tgatcttatgactgcaggccccctt

SEQ ID NO: 5372610 - DNA, 25 bp, Homo sapien
tatgatcttatgactgcaggccccc

SEQ ID NO: 5372611 - DNA, 25 bp, Homo sapien
atcttatgactgcaggcccccttga

SEQ ID NO: 5372612 - DNA, 25 bp, Homo sapien
tatttccaatggagagatctttctc

SEQ ID NO: 5372613 - DNA, 25 bp, Homo sapien
cagcattctttaaaatttgggtggt

SEQ ID NO: 5372614 - DNA, 25 bp, Homo sapien
ttgggtggtcttatttccaatggag

SEQ ID NO: 5372615 - DNA, 25 bp, Homo sapien
ttctcaggccattgccagcattctt

SEQ ID NO: 5372616 - DNA, 25 bp, Homo sapien
tcttcaaagtcccaagcagggcagg

SEQ ID NO: 5372617 - DNA, 25 bp, Homo sapien
aaatgaatgggccacctcgaatgga

SEQ ID NO: 5372618 - DNA, 25 bp, Homo sapien
tctgagagcggcatagcctgaagtc

SEQ ID NO: 5372619 - DNA, 25 bp, Homo sapien
gacaatgccaatggcaaggagccca

SEQ ID NO: 5372620 - DNA, 25 bp, Homo sapien
ctcccagaaatgcatccacgtgcgc

SEQ ID NO: 5372621 - DNA, 25 bp, Homo sapien
gcgagagcggatggtacttggtttc

SEQ ID NO: 5372622 - DNA, 25 bp, Homo sapien
aacactggatgggagcgagcgagag

SEQ ID NO: 5372623 - DNA, 25 bp, Homo sapien
atgggagcgagcgagagcggatggt

SEQ ID NO: 5372624 - DNA, 25 bp, Homo sapien
tcaaagacgaacttccagccctgga

SEQ ID NO: 5372625 - DNA, 25 bp, Homo sapien
tgtggcgctgaaaagggcagaaacc

SEQ ID NO: 5372626 - DNA, 25 bp, Homo sapien
aaggcacaagcaacagattgggggt

SEQ ID NO: 5372627 - DNA, 25 bp, Homo sapien
gggcagaaacctctagtaaggcaca

SEQ ID NO: 5372628 - DNA, 25 bp, Homo sapien
ttttcatcccaagtattctttagtg

SEQ ID NO: 5372629 - DNA, 25 bp, Homo sapien
tcaaggtgtcatctagcagccagga

SEQ ID NO: 5372630 - DNA, 25 bp, Homo sapien
catcccaagtattctttagtgtctt

SEQ ID NO: 5372631 - DNA, 25 bp, Homo sapien
agtgtcttattccaatggaacgcca

SEQ ID NO: 5372632 - DNA, 25 bp, Homo sapien
acatgtctgtatatgtccaaatccc

SEQ ID NO: 5372633 - DNA, 25 bp, Homo sapien
ggctttcatgaaggcattgccaatg

SEQ ID NO: 5372634 - DNA, 25 bp, Homo sapien
tgccaatgtcatcagacatgtctgt

SEQ ID NO: 5372635 - DNA, 25 bp, Homo sapien
tgtatatgtccaaatcccaaattgt

SEQ ID NO: 5372636 - DNA, 25 bp, Homo sapien
tggcaggacctgcacttgactggtg

SEQ ID NO: 5372637 - DNA, 25 bp, Homo sapien
aagaccacccgctggtgcttccagt

SEQ ID NO: 5372638 - DNA, 25 bp, Homo sapien
cagtgcagagtccaagcctggatca

SEQ ID NO: 5372639 - DNA, 25 bp, Homo sapien
aagtgggaaggaagaccacccgctg

SEQ ID NO: 5372640 - DNA, 25 bp, Homo sapien
ttccctccctgacgatgtctgcatc

SEQ ID NO: 5372641 - DNA, 25 bp, Homo sapien
gtctgcatcctacccccgaaaacat

SEQ ID NO: 5372642 - DNA, 25 bp, Homo sapien
ccattccatatctggggtcttcttt

SEQ ID NO: 5372643 - DNA, 25 bp, Homo sapien
cgaaaacatcccttatccattccat

SEQ ID NO: 5372644 - DNA, 25 bp, Homo sapien
ccaattatcttgggtggtgggtctg

SEQ ID NO: 5372645 - DNA, 25 bp, Homo sapien
gaccgaatttggaggcaccggtgac

SEQ ID NO: 5372646 - DNA, 25 bp, Homo sapien
gagaccaagcctgctggaccgaatt

SEQ ID NO: 5372647 - DNA, 25 bp, Homo sapien
tgggtctgctaatggaggtgggttg

SEQ ID NO: 5372648 - DNA, 25 bp, Homo sapien
tgctagaggctgtgcagtccgagct

SEQ ID NO: 5372649 - DNA, 25 bp, Homo sapien
caaacattcttggactacccatggg

SEQ ID NO: 5372650 - DNA, 25 bp, Homo sapien
cagtctgtaggttcggataatgaca

SEQ ID NO: 5372651 - DNA, 25 bp, Homo sapien
tgtgaatcatagctttgagccttgc

SEQ ID NO: 5372652 - DNA, 25 bp, Homo sapien
gattgccacgataaggggctctctc

SEQ ID NO: 5372653 - DNA, 25 bp, Homo sapien
ctgtcacctctactattgagcaaga

SEQ ID NO: 5372654 - DNA, 25 bp, Homo sapien
ctttgtttgtcccaggattgccacg

SEQ ID NO: 5372655 - DNA, 25 bp, Homo sapien
tctactattgagcaagagtctttgt

SEQ ID NO: 5372656 - DNA, 25 bp, Homo sapien
ggaggctgtgggcacactctgggag

SEQ ID NO: 5372657 - DNA, 25 bp, Homo sapien
tgggagcccaggttcatggttagat

SEQ ID NO: 5372658 - DNA, 25 bp, Homo sapien
tggttagattggagacacgggcttt

SEQ ID NO: 5372659 - DNA, 25 bp, Homo sapien
taatctgaaagccatggcaatagca

SEQ ID NO: 5372660 - DNA, 25 bp, Homo sapien
catcagcttcttactgcctaggagc

SEQ ID NO: 5372661 - DNA, 25 bp, Homo sapien
tgctaaagttaagggcgatttccaa

SEQ ID NO: 5372662 - DNA, 25 bp, Homo sapien
ggagctcactctggtctacgccaag

SEQ ID NO: 5372663 - DNA, 25 bp, Homo sapien
ttccaagcttcttcggcagagaccc

SEQ ID NO: 5372664 - DNA, 25 bp, Homo sapien
gctgacatttaaatggattaaggtg

SEQ ID NO: 5372665 - DNA, 25 bp, Homo sapien
cgcctcgttctagctgacatttaaa

SEQ ID NO: 5372666 - DNA, 25 bp, Homo sapien
aaaacccttcgcctcgttctagctg

SEQ ID NO: 5372667 - DNA, 25 bp, Homo sapien
ccttcgcctcgttctagctgacatt

SEQ ID NO: 5372668 - DNA, 25 bp, Homo sapien
aatgtggtcgggctcctttgcagac

SEQ ID NO: 5372669 - DNA, 25 bp, Homo sapien
tccctttagaaatatagccctgtag

SEQ ID NO: 5372670 - DNA, 25 bp, Homo sapien
ttaccagacagacccgcctgggagt

SEQ ID NO: 5372671 - DNA, 25 bp, Homo sapien
tgcagacttgccctcacttaccaga

SEQ ID NO: 5372672 - DNA, 25 bp, Homo sapien
actaaggctacatggacattttcta

SEQ ID NO: 5372673 - DNA, 25 bp, Homo sapien
tcagcccaaagtgagtcaggtcttg

SEQ ID NO: 5372674 - DNA, 25 bp, Homo sapien
cagcccaaagtgagtcaggtcttgg

SEQ ID NO: 5372675 - DNA, 25 bp, Homo sapien
ctaaactaaggctacatggacattt

SEQ ID NO: 5372676 - DNA, 25 bp, Homo sapien
agaaaccttctcagatcaccccctt

SEQ ID NO: 5372677 - DNA, 25 bp, Homo sapien
cctatgggtccctttgcaggcacat

SEQ ID NO: 5372678 - DNA, 25 bp, Homo sapien
caggcacatcaatctttggtaacat

SEQ ID NO: 5372679 - DNA, 25 bp, Homo sapien
tctttcctatgggtccctttgcagg

SEQ ID NO: 5372680 - DNA, 25 bp, Homo sapien
tctgactctggctgcagcaacttca

SEQ ID NO: 5372681 - DNA, 25 bp, Homo sapien
ccatctgactctggctgcagcaact

SEQ ID NO: 5372682 - DNA, 25 bp, Homo sapien
tgctgtctccatctgactctggctg

SEQ ID NO: 5372683 - DNA, 25 bp, Homo sapien
tgcagcaacttcagtctttccctct

SEQ ID NO: 5372684 - DNA, 25 bp, Homo sapien
tttcctctctattgacaatcctttc

SEQ ID NO: 5372685 - DNA, 25 bp, Homo sapien
acagcttcgagtgcccacagaccaa

SEQ ID NO: 5372686 - DNA, 25 bp, Homo sapien
acctcattggcctggttgcacacag

SEQ ID NO: 5372687 - DNA, 25 bp, Homo sapien
cctcattggcctggttgcacacagc

SEQ ID NO: 5372688 - DNA, 25 bp, Homo sapien
atcccactccatgcagaggcgcaga

SEQ ID NO: 5372689 - DNA, 25 bp, Homo sapien
tgtctacagagcagtttctctggcc

SEQ ID NO: 5372690 - DNA, 25 bp, Homo sapien
aaccagacgggcagctcgtgtcccc

SEQ ID NO: 5372691 - DNA, 25 bp, Homo sapien
gtgtccccaagatggcgggtgccat

SEQ ID NO: 5372692 - DNA, 25 bp, Homo sapien
taagacctgctgattccacactcta

SEQ ID NO: 5372693 - DNA, 25 bp, Homo sapien
tgtgttgccctggtccgacctgaga

SEQ ID NO: 5372694 - DNA, 25 bp, Homo sapien
cattactccctcaagtactcagcag

SEQ ID NO: 5372695 - DNA, 25 bp, Homo sapien
caaataatccccatacgccaatgga

SEQ ID NO: 5372696 - DNA, 25 bp, Homo sapien
tatttccagctttaattttcttgag

SEQ ID NO: 5372697 - DNA, 25 bp, Homo sapien
gaatttacacagtttgcttcattgt

SEQ ID NO: 5372698 - DNA, 25 bp, Homo sapien
tgaagagtggctggaacttagaaac

SEQ ID NO: 5372699 - DNA, 25 bp, Homo sapien
ttagaaacggttgcctctgctgttc

SEQ ID NO: 5372700 - DNA, 25 bp, Homo sapien
gagttacccaacacatagtagcact

SEQ ID NO: 5372701 - DNA, 25 bp, Homo sapien
tctagtgaattaaatctcttcggca

SEQ ID NO: 5372702 - DNA, 25 bp, Homo sapien
ccatagaccctagaagagttaccca

SEQ ID NO: 5372703 - DNA, 25 bp, Homo sapien
gacagtgttcactagtctaccatag

SEQ ID NO: 5372704 - DNA, 25 bp, Homo sapien
gatggctcaaaattactattcttag

SEQ ID NO: 5372705 - DNA, 25 bp, Homo sapien
taagttctactgacattagattttg

SEQ ID NO: 5372706 - DNA, 25 bp, Homo sapien
tagtatttataagttctactgacat

SEQ ID NO: 5372707 - DNA, 25 bp, Homo sapien
gtgatggctcaaaattactattctt

SEQ ID NO: 5372708 - DNA, 25 bp, Homo sapien
gaagaaagattagttattcttgtgc

SEQ ID NO: 5372709 - DNA, 25 bp, Homo sapien
tcactttaataatggattagttttc

SEQ ID NO: 5372710 - DNA, 25 bp, Homo sapien
taatggattagttttctgccttctc

SEQ ID NO: 5372711 - DNA, 25 bp, Homo sapien
tagttattcttgtgcatcagtatct

SEQ ID NO: 5372712 - DNA, 25 bp, Homo sapien
tactttagttacgaattccaatata

SEQ ID NO: 5372713 - DNA, 25 bp, Homo sapien
gcaaatcggtactgtaaaacattta

SEQ ID NO: 5372714 - DNA, 25 bp, Homo sapien
tttacagcatacataaaatgtagca

SEQ ID NO: 5372715 - DNA, 25 bp, Homo sapien
tctactgggtatatttcaagcattt

SEQ ID NO: 5372716 - DNA, 25 bp, Homo sapien
cttttttgggagtggtctacataat

SEQ ID NO: 5372717 - DNA, 25 bp, Homo sapien
aaggttatgactgttattgatgttg

SEQ ID NO: 5372718 - DNA, 25 bp, Homo sapien
tttgggagtggtctacataattaat

SEQ ID NO: 5372719 - DNA, 25 bp, Homo sapien
ccacactaaaggaatggggagttgt

SEQ ID NO: 5372720 - DNA, 25 bp, Homo sapien
tctgcgccttcattagtggccgctt

SEQ ID NO: 5372721 - DNA, 25 bp, Homo sapien
gtctgcggcggcctctgaagatgcc

SEQ ID NO: 5372722 - DNA, 25 bp, Homo sapien
taggaagcgtttcaagcgccaccaa

SEQ ID NO: 5372723 - DNA, 25 bp, Homo sapien
atggcagctttctccggcgtaggaa

SEQ ID NO: 5372724 - DNA, 25 bp, Homo sapien
agaacgcccatcatgaattgctccc

SEQ ID NO: 5372725 - DNA, 25 bp, Homo sapien
gaaaccagacaagaacgcccatcat

SEQ ID NO: 5372726 - DNA, 25 bp, Homo sapien
catcatgaattgctccccacaaaga

SEQ ID NO: 5372727 - DNA, 25 bp, Homo sapien
gacaagaacgcccatcatgaattgc

SEQ ID NO: 5372728 - DNA, 25 bp, Homo sapien
cagcgtccagaagagaccactttta

SEQ ID NO: 5372729 - DNA, 25 bp, Homo sapien
tccgttgtgcgaaaacgtctccagg

SEQ ID NO: 5372730 - DNA, 25 bp, Homo sapien
acttttagcaaatccggcagggctg

SEQ ID NO: 5372731 - DNA, 25 bp, Homo sapien
ggtcctatgtcatgccagcttctcg

SEQ ID NO: 5372732 - DNA, 25 bp, Homo sapien
tgggccgagggtcgcaagcagaggg

SEQ ID NO: 5372733 - DNA, 25 bp, Homo sapien
ggggaccggcggctgccagcaagtc

SEQ ID NO: 5372734 - DNA, 25 bp, Homo sapien
gaacaggtgcaccagggtcccggcg

SEQ ID NO: 5372735 - DNA, 25 bp, Homo sapien
cctctgcgaacgctcgggccggcgg

SEQ ID NO: 5372736 - DNA, 25 bp, Homo sapien
cgtggacttgcgaacaaatctgagc

SEQ ID NO: 5372737 - DNA, 25 bp, Homo sapien
tctgagcaagaaaaccacgtaattt

SEQ ID NO: 5372738 - DNA, 25 bp, Homo sapien
gtaacaccggatttttgcaagactc

SEQ ID NO: 5372739 - DNA, 25 bp, Homo sapien
tgcaagactccctgagtatttctcg

SEQ ID NO: 5372740 - DNA, 25 bp, Homo sapien
tttcttggggttgattttgcaggaa

SEQ ID NO: 5372741 - DNA, 25 bp, Homo sapien
ggatttcttggggttgattttgcag

SEQ ID NO: 5372742 - DNA, 25 bp, Homo sapien
atttcttggggttgattttgcagga

SEQ ID NO: 5372743 - DNA, 25 bp, Homo sapien
gatttcttggggttgattttgcagg

SEQ ID NO: 5372744 - DNA, 25 bp, Homo sapien
atcccctgcaacctgggagccagtg

SEQ ID NO: 5372745 - DNA, 25 bp, Homo sapien
agccacatggcctccttcaatcgga

SEQ ID NO: 5372746 - DNA, 25 bp, Homo sapien
ggagctgctgacatcccctgcaacc

SEQ ID NO: 5372747 - DNA, 25 bp, Homo sapien
ggagccagtgcatgcaatgctccag

SEQ ID NO: 5372748 - DNA, 25 bp, Homo sapien
tgaaaagttcttggaataagtttga

SEQ ID NO: 5372749 - DNA, 25 bp, Homo sapien
aaagttcttggaataagtttgagct

SEQ ID NO: 5372750 - DNA, 25 bp, Homo sapien
tgtgaccctccactcggtaatataa

SEQ ID NO: 5372751 - DNA, 25 bp, Homo sapien
tgaccctccactcggtaatataaat

SEQ ID NO: 5372752 - DNA, 25 bp, Homo sapien
ccctccactcggtaatataaattca

SEQ ID NO: 5372753 - DNA, 25 bp, Homo sapien
catgtgaccctccactcggtaatat

SEQ ID NO: 5372754 - DNA, 25 bp, Homo sapien
attgcaatcagcaaatggatttact

SEQ ID NO: 5372755 - DNA, 25 bp, Homo sapien
tattgcaatcagcaaatggatttac

SEQ ID NO: 5372756 - DNA, 25 bp, Homo sapien
gcgagatgagttagatttttacaca

SEQ ID NO: 5372757 - DNA, 25 bp, Homo sapien
tttggtgaaatgaattagactttta

SEQ ID NO: 5372758 - DNA, 25 bp, Homo sapien
aattcagcgagatgagttagatttt

SEQ ID NO: 5372759 - DNA, 25 bp, Homo sapien
gatgagttagatttttacacaagag

SEQ ID NO: 5372760 - DNA, 25 bp, Homo sapien
atatagcacaccacaatggctccca

SEQ ID NO: 5372761 - DNA, 25 bp, Homo sapien
cccactgctgccgtcatcaatatag

SEQ ID NO: 5372762 - DNA, 25 bp, Homo sapien
gtcatcaatatagcacaccacaatg

SEQ ID NO: 5372763 - DNA, 25 bp, Homo sapien
tggctcccagcctctgtacgtctgg

SEQ ID NO: 5372764 - DNA, 25 bp, Homo sapien
tgttgaaaggaacgcagatacacaa

SEQ ID NO: 5372765 - DNA, 25 bp, Homo sapien
gctgagctctgtgttacgctcacga

SEQ ID NO: 5372766 - DNA, 25 bp, Homo sapien
ctctgtgttacgctcacgaatgatg

SEQ ID NO: 5372767 - DNA, 25 bp, Homo sapien
cacacttgttgaaaggaacgcagat

SEQ ID NO: 5372768 - DNA, 25 bp, Homo sapien
gataagaaccccctggtcgatttca

SEQ ID NO: 5372769 - DNA, 25 bp, Homo sapien
tgttggataagaaccccctggtcga

SEQ ID NO: 5372770 - DNA, 25 bp, Homo sapien
ctgttggataagaaccccctggtcg

SEQ ID NO: 5372771 - DNA, 25 bp, Homo sapien
agaaccccctggtcgatttcagctc

SEQ ID NO: 5372772 - DNA, 25 bp, Homo sapien
attagttttgcccatcaccttctta

SEQ ID NO: 5372773 - DNA, 25 bp, Homo sapien
acagcattcaatattttaggtaggc

SEQ ID NO: 5372774 - DNA, 25 bp, Homo sapien
tcaccttcttatgctggcctcagga

SEQ ID NO: 5372775 - DNA, 25 bp, Homo sapien
ggcctcaggagatttattaacagca

SEQ ID NO: 5372776 - DNA, 25 bp, Homo sapien
agcaaacaactgtggggccctctaa

SEQ ID NO: 5372777 - DNA, 25 bp, Homo sapien
gcaaacaactgtggggccctctaag

SEQ ID NO: 5372778 - DNA, 25 bp, Homo sapien
cagcaaacaactgtggggccctcta

SEQ ID NO: 5372779 - DNA, 25 bp, Homo sapien
catgctgtgctgtagatctcaacaa

SEQ ID NO: 5372780 - DNA, 25 bp, Homo sapien
gcaatacataattcggacaggctga

SEQ ID NO: 5372781 - DNA, 25 bp, Homo sapien
caggctgaaagtaccattgtaacca

SEQ ID NO: 5372782 - DNA, 25 bp, Homo sapien
tggctaaaaagtcccagcaggtttc

SEQ ID NO: 5372783 - DNA, 25 bp, Homo sapien
ctctcttcactcctattttctatgg

SEQ ID NO: 5372784 - DNA, 25 bp, Homo sapien
ggtacatgcaaagaaacctagcaca

SEQ ID NO: 5372785 - DNA, 25 bp, Homo sapien
tagctccagcagaatgaaagggtac

SEQ ID NO: 5372786 - DNA, 25 bp, Homo sapien
cttggctttattcattcactcctgg

SEQ ID NO: 5372787 - DNA, 25 bp, Homo sapien
ggaaagtgtgctgttttggaggagg

SEQ ID NO: 5372788 - DNA, 25 bp, Homo sapien
cggaaagtgtgctgttttggaggag

SEQ ID NO: 5372789 - DNA, 25 bp, Homo sapien
aaagtgtgctgttttggaggaggct

SEQ ID NO: 5372790 - DNA, 25 bp, Homo sapien
gaaagtgtgctgttttggaggaggc

SEQ ID NO: 5372791 - DNA, 25 bp, Homo sapien
agcaggctctgggatcgggcttgtg

SEQ ID NO: 5372792 - DNA, 25 bp, Homo sapien
tgagggcagctcgggcggtctggca

SEQ ID NO: 5372793 - DNA, 25 bp, Homo sapien
cagcggagaaggtgggcgggagaaa

SEQ ID NO: 5372794 - DNA, 25 bp, Homo sapien
aggctctgggatcgggcttgtggga

SEQ ID NO: 5372795 - DNA, 25 bp, Homo sapien
cctgcgcgaccgtcagggccgcacc

SEQ ID NO: 5372796 - DNA, 25 bp, Homo sapien
atccggagcgcgctgtcgtccgtcg

SEQ ID NO: 5372797 - DNA, 25 bp, Homo sapien
agctacccgcccaacttcatccgga

SEQ ID NO: 5372798 - DNA, 25 bp, Homo sapien
ttcggcaggacggccgtcgaggtcg

SEQ ID NO: 5372799 - DNA, 25 bp, Homo sapien
tttgcaatagtctgccagtccccta

SEQ ID NO: 5372800 - DNA, 25 bp, Homo sapien
caatagtctgccagtcccctaagtc

SEQ ID NO: 5372801 - DNA, 25 bp, Homo sapien
tttttgcaatagtctgccagtcccc

SEQ ID NO: 5372802 - DNA, 25 bp, Homo sapien
gccctttttgcaatagtctgccagt

SEQ ID NO: 5372803 - DNA, 25 bp, Homo sapien
tatgcctgcctcaagatgtttctga

SEQ ID NO: 5372804 - DNA, 25 bp, Homo sapien
tacaacacaatgactacaagaatgc

SEQ ID NO: 5372805 - DNA, 25 bp, Homo sapien
gacagatgacagcactatgcctgcc

SEQ ID NO: 5372806 - DNA, 25 bp, Homo sapien
tctgggtgggtacacctaaggcaac

SEQ ID NO: 5372807 - DNA, 25 bp, Homo sapien
gaattgattatgaaatccatggtgg

SEQ ID NO: 5372808 - DNA, 25 bp, Homo sapien
ttaggaattgattatgaaatccatg

SEQ ID NO: 5372809 - DNA, 25 bp, Homo sapien
taggaattgattatgaaatccatgg

SEQ ID NO: 5372810 - DNA, 25 bp, Homo sapien
tatgaaatccatggtggtttgatgc

SEQ ID NO: 5372811 - DNA, 25 bp, Homo sapien
gtaaagagtccgtctctccggcatg

SEQ ID NO: 5372812 - DNA, 25 bp, Homo sapien
tgtgtaaagagtccgtctctccggc

SEQ ID NO: 5372813 - DNA, 25 bp, Homo sapien
aaagagtccgtctctccggcatgtg

SEQ ID NO: 5372814 - DNA, 25 bp, Homo sapien
taaagagtccgtctctccggcatgt

SEQ ID NO: 5372815 - DNA, 25 bp, Homo sapien
catgtgtgtaaagaatccgtctctc

SEQ ID NO: 5372816 - DNA, 25 bp, Homo sapien
ctccggcatgtgtgtaaagaatccg

SEQ ID NO: 5372817 - DNA, 25 bp, Homo sapien
ggcatgtgtgtaaagaatccgtctc

SEQ ID NO: 5372818 - DNA, 25 bp, Homo sapien
agaatccgtctctccggcatgtgtg

SEQ ID NO: 5372819 - DNA, 25 bp, Homo sapien
cttgatgtttggataaccacattca

SEQ ID NO: 5372820 - DNA, 25 bp, Homo sapien
aaatcatataactgcacaattatcc

SEQ ID NO: 5372821 - DNA, 25 bp, Homo sapien
catgtaacaaatcatataactgcac

SEQ ID NO: 5372822 - DNA, 25 bp, Homo sapien
catctggtctccatgtaacaaatca

SEQ ID NO: 5372823 - DNA, 25 bp, Homo sapien
tggtttggtcatatgaaggcttggt

SEQ ID NO: 5372824 - DNA, 25 bp, Homo sapien
gacaggagatgggtattctggcttg

SEQ ID NO: 5372825 - DNA, 25 bp, Homo sapien
ggactcacatgaggtcacagttaca

SEQ ID NO: 5372826 - DNA, 25 bp, Homo sapien
agatggctcaatcccttggctggaa

SEQ ID NO: 5372827 - DNA, 25 bp, Homo sapien
acgactgattattggacagaatggc

SEQ ID NO: 5372828 - DNA, 25 bp, Homo sapien
gattggacgactgattattggacag

SEQ ID NO: 5372829 - DNA, 25 bp, Homo sapien
tggacgactgattattggacagaat

SEQ ID NO: 5372830 - DNA, 25 bp, Homo sapien
agattggacgactgattattggaca

SEQ ID NO: 5372831 - DNA, 25 bp, Homo sapien
tatctgatatggaaggactctgaat

SEQ ID NO: 5372832 - DNA, 25 bp, Homo sapien
aaacataccctgaaggtcgttgtct

SEQ ID NO: 5372833 - DNA, 25 bp, Homo sapien
tagttgatgcttatctgatatggaa

SEQ ID NO: 5372834 - DNA, 25 bp, Homo sapien
ggctcatgaacccatttgggtggtc

SEQ ID NO: 5372835 - DNA, 25 bp, Homo sapien
tccactccagaggagtaattgtacc

SEQ ID NO: 5372836 - DNA, 25 bp, Homo sapien
tcaatgggaatatcagcaagacgcc

SEQ ID NO: 5372837 - DNA, 25 bp, Homo sapien
cacgatgagatccactccagaggag

SEQ ID NO: 5372838 - DNA, 25 bp, Homo sapien
agtccacagtaagggattctgtctg

SEQ ID NO: 5372839 - DNA, 25 bp, Homo sapien
cctacagagggcaggcccttcagct

SEQ ID NO: 5372840 - DNA, 25 bp, Homo sapien
ctacagagggcaggcccttcagctc

SEQ ID NO: 5372841 - DNA, 25 bp, Homo sapien
aggtgctgccccgagaaggatgcat

SEQ ID NO: 5372842 - DNA, 25 bp, Homo sapien
actataggtaagtctgagcaaatct

SEQ ID NO: 5372843 - DNA, 25 bp, Homo sapien
cccgatgctgctgactataggtaag

SEQ ID NO: 5372844 - DNA, 25 bp, Homo sapien
aagtctttcctgacccccgatgctg

SEQ ID NO: 5372845 - DNA, 25 bp, Homo sapien
catggcacacgcatatctatgtatc

SEQ ID NO: 5372846 - DNA, 25 bp, Homo sapien
catatctatgtatccaacctgcaca

SEQ ID NO: 5372847 - DNA, 25 bp, Homo sapien
caatgagagcgcttggacatggggc

SEQ ID NO: 5372848 - DNA, 25 bp, Homo sapien
cacgcatatctatgtatccaacctg

SEQ ID NO: 5372849 - DNA, 25 bp, Homo sapien
gaattacacaataggtgacctgtgt

SEQ ID NO: 5372850 - DNA, 25 bp, Homo sapien
tgttgtgccaacactatctctatgt

SEQ ID NO: 5372851 - DNA, 25 bp, Homo sapien
tcttccacttaacctaatgcttttg

SEQ ID NO: 5372852 - DNA, 25 bp, Homo sapien
cacatggtgccatggatcagctctg

SEQ ID NO: 5372853 - DNA, 25 bp, Homo sapien
ctctgaacacagtcaccgatgggtg

SEQ ID NO: 5372854 - DNA, 25 bp, Homo sapien
gagccctctgggtagacttctagac

SEQ ID NO: 5372855 - DNA, 25 bp, Homo sapien
tatgaaaactggctctggaactccc

SEQ ID NO: 5372856 - DNA, 25 bp, Homo sapien
taaggtctaactcagggcaggtcag

SEQ ID NO: 5372857 - DNA, 25 bp, Homo sapien
ctagcagtgcatttgtgagaagaca

SEQ ID NO: 5372858 - DNA, 25 bp, Homo sapien
aagttgagggtgaaccatctggagg

SEQ ID NO: 5372859 - DNA, 25 bp, Homo sapien
gaaccatctggagggtgaactggct

SEQ ID NO: 5372860 - DNA, 25 bp, Homo sapien
ctgtcagtagattaggtagggaact

SEQ ID NO: 5372861 - DNA, 25 bp, Homo sapien
tcaaggtggcagctggacgggttcc

SEQ ID NO: 5372862 - DNA, 25 bp, Homo sapien
caaggtggcagctggacgggttcct

SEQ ID NO: 5372863 - DNA, 25 bp, Homo sapien
ttcaaggtggcagctggacgggttc

SEQ ID NO: 5372864 - DNA, 25 bp, Homo sapien
caactgctggactttggactgatga

SEQ ID NO: 5372865 - DNA, 25 bp, Homo sapien
cggattccaggagggacaactgctg

SEQ ID NO: 5372866 - DNA, 25 bp, Homo sapien
tgggcatcctgtcttttaatctggc

SEQ ID NO: 5372867 - DNA, 25 bp, Homo sapien
caagagccaaaaatgccggagggaa

SEQ ID NO: 5372868 - DNA, 25 bp, Homo sapien
tgagagacgcaggaaagcgggtcaa

SEQ ID NO: 5372869 - DNA, 25 bp, Homo sapien
ctgagagacgcaggaaagcgggtca

SEQ ID NO: 5372870 - DNA, 25 bp, Homo sapien
gctgagagacgcaggaaagcgggtc

SEQ ID NO: 5372871 - DNA, 25 bp, Homo sapien
aaggcagcgatgggacaaaggacgg

SEQ ID NO: 5372872 - DNA, 25 bp, Homo sapien
ggcagcgatgggacaaaggacggag

SEQ ID NO: 5372873 - DNA, 25 bp, Homo sapien
aggcagcgatgggacaaaggacgga

SEQ ID NO: 5372874 - DNA, 25 bp, Homo sapien
gaaggcagcgatgggacaaaggacg

SEQ ID NO: 5372875 - DNA, 25 bp, Homo sapien
ggagtgagcgtgagttccgtgccca

SEQ ID NO: 5372876 - DNA, 25 bp, Homo sapien
agcgtgagttccgtgcccaggcccg

SEQ ID NO: 5372877 - DNA, 25 bp, Homo sapien
acggatgggagccgtgtgcacgtcg

SEQ ID NO: 5372878 - DNA, 25 bp, Homo sapien
cctgacgctcggaagacaacggatg

SEQ ID NO: 5372879 - DNA, 25 bp, Homo sapien
gtgagcggcggcgttaggacccgga

SEQ ID NO: 5372880 - DNA, 25 bp, Homo sapien
gctcgcgggtgaggaggcgtccggg

SEQ ID NO: 5372881 - DNA, 25 bp, Homo sapien
ccgggagggcggctcgcgggtgagg

SEQ ID NO: 5372882 - DNA, 25 bp, Homo sapien
gtggcggggctaggacccagcggct

SEQ ID NO: 5372883 - DNA, 25 bp, Homo sapien
tgtaactccgggagagaccctggag

SEQ ID NO: 5372884 - DNA, 25 bp, Homo sapien
ttctgggaagcctcgcgcggctctt

SEQ ID NO: 5372885 - DNA, 25 bp, Homo sapien
agcacttcgaaagtataaaccgcgg

SEQ ID NO: 5372886 - DNA, 25 bp, Homo sapien
ccaaagaggcgtgctgtgtctgcat

SEQ ID NO: 5372887 - DNA, 25 bp, Homo sapien
tccaaagtgtgtggtgaagacaaac

SEQ ID NO: 5372888 - DNA, 25 bp, Homo sapien
cactaaataagaggtggtccgtcac

SEQ ID NO: 5372889 - DNA, 25 bp, Homo sapien
gtgttgaccacacactacgggctgg

SEQ ID NO: 5372890 - DNA, 25 bp, Homo sapien
tacgggctggttagtgttagattcc

SEQ ID NO: 5372891 - DNA, 25 bp, Homo sapien
tattgggaataaccacgtctcagca

SEQ ID NO: 5372892 - DNA, 25 bp, Homo sapien
gaaagcctgtatgcaaaggaggaac

SEQ ID NO: 5372893 - DNA, 25 bp, Homo sapien
tattataggcaagtacagatctgga

SEQ ID NO: 5372894 - DNA, 25 bp, Homo sapien
gaaaggatcagattcagagacggca

SEQ ID NO: 5372895 - DNA, 25 bp, Homo sapien
aagcaccttgtagggggtcagaaat

SEQ ID NO: 5372896 - DNA, 25 bp, Homo sapien
gtatggaaagggtgcctggcaggta

SEQ ID NO: 5372897 - DNA, 25 bp, Homo sapien
agaaatgttgcaccttctctgaact

SEQ ID NO: 5372898 - DNA, 25 bp, Homo sapien
ggtcagaaatgttgcaccttctctg

SEQ ID NO: 5372899 - DNA, 25 bp, Homo sapien
gccactcacccccacctgatgagag

SEQ ID NO: 5372900 - DNA, 25 bp, Homo sapien
tgcagaaggtctctggagacatctt

SEQ ID NO: 5372901 - DNA, 25 bp, Homo sapien
caggtgggtgctgccactcaccccc

SEQ ID NO: 5372902 - DNA, 25 bp, Homo sapien
agaaggtctctggagacatcttcag

SEQ ID NO: 5372903 - DNA, 25 bp, Homo sapien
catgtccagcacttagaatggaggc

SEQ ID NO: 5372904 - DNA, 25 bp, Homo sapien
tggaggccaaaaccattccctcgga

SEQ ID NO: 5372905 - DNA, 25 bp, Homo sapien
tgtagacagttgcatgtcccctgcc

SEQ ID NO: 5372906 - DNA, 25 bp, Homo sapien
cctggtacttggcaccttgtagaca

SEQ ID NO: 5372907 - DNA, 25 bp, Homo sapien
tgcttgccccatcagtagccatgtg

SEQ ID NO: 5372908 - DNA, 25 bp, Homo sapien
cagttccccgtctgaatttaggtga

SEQ ID NO: 5372909 - DNA, 25 bp, Homo sapien
tttaggtgacgacactcaggtccag

SEQ ID NO: 5372910 - DNA, 25 bp, Homo sapien
cttcagatagcatgtacaggtggca

SEQ ID NO: 5372911 - DNA, 25 bp, Homo sapien
caaggagcggaaggctggcttgagg

SEQ ID NO: 5372912 - DNA, 25 bp, Homo sapien
tggagaccagcttcaaggagcggaa

SEQ ID NO: 5372913 - DNA, 25 bp, Homo sapien
ggagggggtgacggaaccagcactg

SEQ ID NO: 5372914 - DNA, 25 bp, Homo sapien
catggggggacggctccacccagcc

SEQ ID NO: 5372915 - DNA, 25 bp, Homo sapien
gggtctctaaaaatagtcatgctga

SEQ ID NO: 5372916 - DNA, 25 bp, Homo sapien
aaacgtctcggggtcagtgactgcc

SEQ ID NO: 5372917 - DNA, 25 bp, Homo sapien
ctctaaaaatagtcatgctgagagc

SEQ ID NO: 5372918 - DNA, 25 bp, Homo sapien
tgcaggatgcaaacgtctcggggtc

SEQ ID NO: 5372919 - DNA, 25 bp, Homo sapien
gaactggcaccaagccagggagata

SEQ ID NO: 5372920 - DNA, 25 bp, Homo sapien
aggaactggcaccaagccagggaga

SEQ ID NO: 5372921 - DNA, 25 bp, Homo sapien
ggcaccaagccagggagatagacat

SEQ ID NO: 5372922 - DNA, 25 bp, Homo sapien
ctggcaccaagccagggagatagac

SEQ ID NO: 5372923 - DNA, 25 bp, Homo sapien
ctttataaggccaccgcaagcagca

SEQ ID NO: 5372924 - DNA, 25 bp, Homo sapien
caggaggctttataaggccaccgca

SEQ ID NO: 5372925 - DNA, 25 bp, Homo sapien
gaggctttataaggccaccgcaagc

SEQ ID NO: 5372926 - DNA, 25 bp, Homo sapien
ccaggaggctttataaggccaccgc

SEQ ID NO: 5372927 - DNA, 25 bp, Homo sapien
tgtggtattaagttacatgcagaca

SEQ ID NO: 5372928 - DNA, 25 bp, Homo sapien
acaggggccagaagatgaacaatgg

SEQ ID NO: 5372929 - DNA, 25 bp, Homo sapien
attaagttacatgcagacaacaggg

SEQ ID NO: 5372930 - DNA, 25 bp, Homo sapien
atgcctggttgtggtattaagttac

SEQ ID NO: 5372931 - DNA, 25 bp, Homo sapien
cagatttcagtggtactgcgaaggc

SEQ ID NO: 5372932 - DNA, 25 bp, Homo sapien
gcgctggcgaccactgtaagcaaga

SEQ ID NO: 5372933 - DNA, 25 bp, Homo sapien
gcattcctagacattgccggtggga

SEQ ID NO: 5372934 - DNA, 25 bp, Homo sapien
caccgtaaaggtggagcagcattcc

SEQ ID NO: 5372935 - DNA, 25 bp, Homo sapien
agctggtctatatctcttagaactg

SEQ ID NO: 5372936 - DNA, 25 bp, Homo sapien
tagcacagctggtctatatctctta

SEQ ID NO: 5372937 - DNA, 25 bp, Homo sapien
taacaaatgacaaattgctggagga

SEQ ID NO: 5372938 - DNA, 25 bp, Homo sapien
catactagagaactgaaaaccacaa

SEQ ID NO: 5372939 - DNA, 25 bp, Homo sapien
atccactcagacatcaaaagttgtt

SEQ ID NO: 5372940 - DNA, 25 bp, Homo sapien
ctcctttgctaaccatgatgaggct

SEQ ID NO: 5372941 - DNA, 25 bp, Homo sapien
tccactcagacatcaaaagttgtta

SEQ ID NO: 5372942 - DNA, 25 bp, Homo sapien
tgccatgaagacagcgtactctttc

SEQ ID NO: 5372943 - DNA, 25 bp, Homo sapien
gcctgagaacttgtaatccaatgag

SEQ ID NO: 5372944 - DNA, 25 bp, Homo sapien
taccccatttatggctgtcaacctg

SEQ ID NO: 5372945 - DNA, 25 bp, Homo sapien
tgcaggctacaaccctttatagata

SEQ ID NO: 5372946 - DNA, 25 bp, Homo sapien
tcatttttccgttgacagcattaaa

SEQ ID NO: 5372947 - DNA, 25 bp, Homo sapien
tgttccaccaatatggaactaattc

SEQ ID NO: 5372948 - DNA, 25 bp, Homo sapien
ttccaccaatatggaactaattcta

SEQ ID NO: 5372949 - DNA, 25 bp, Homo sapien
gctctcaatgtgctcaagaatctgc

SEQ ID NO: 5372950 - DNA, 25 bp, Homo sapien
tttcccagttgagtctctcaactcc

SEQ ID NO: 5372951 - DNA, 25 bp, Homo sapien
aaacgccctcatagatatgcccaga

SEQ ID NO: 5372952 - DNA, 25 bp, Homo sapien
acatcatggcagtaaccaccaccac

SEQ ID NO: 5372953 - DNA, 25 bp, Homo sapien
tcatggcagtaaccaccaccacgat

SEQ ID NO: 5372954 - DNA, 25 bp, Homo sapien
aacgccctcatagatatgcccagaa

SEQ ID NO: 5372955 - DNA, 25 bp, Homo sapien
taatccactcaagtagatgtctaaa

SEQ ID NO: 5372956 - DNA, 25 bp, Homo sapien
tagatgtctaaaattaaccgtcaaa

SEQ ID NO: 5372957 - DNA, 25 bp, Homo sapien
tgtgtctctcaatccgatcaagtag

SEQ ID NO: 5372958 - DNA, 25 bp, Homo sapien
cagctatgtgtgtctcttaatccac

SEQ ID NO: 5372959 - DNA, 25 bp, Homo sapien
taagttaacatgatttggataaaac

SEQ ID NO: 5372960 - DNA, 25 bp, Homo sapien
ttcaccaaactcctagaaatatagg

SEQ ID NO: 5372961 - DNA, 25 bp, Homo sapien
gaaatataggaactgatcaaatgtt

SEQ ID NO: 5372962 - DNA, 25 bp, Homo sapien
tgcttgagttctagtcaaataagct

SEQ ID NO: 5372963 - DNA, 25 bp, Homo sapien
ttagccagctggactcagtttaggt

SEQ ID NO: 5372964 - DNA, 25 bp, Homo sapien
cagctggactcagtttaggtgatcc

SEQ ID NO: 5372965 - DNA, 25 bp, Homo sapien
gccagctggactcagtttaggtgat

SEQ ID NO: 5372966 - DNA, 25 bp, Homo sapien
tagccagctggactcagtttaggtg

SEQ ID NO: 5372967 - DNA, 25 bp, Homo sapien
atgccttcttctctttatcaggaca

SEQ ID NO: 5372968 - DNA, 25 bp, Homo sapien
tgccttcttctctttatcaggacaa

SEQ ID NO: 5372969 - DNA, 25 bp, Homo sapien
ccttcttctctttatcaggacaaat

SEQ ID NO: 5372970 - DNA, 25 bp, Homo sapien
tcttctctttatcaggacaaatcag

SEQ ID NO: 5372971 - DNA, 25 bp, Homo sapien
ttgatgatagcatagtggccaagct

SEQ ID NO: 5372972 - DNA, 25 bp, Homo sapien
cttgatgatagcatagtggccaagc

SEQ ID NO: 5372973 - DNA, 25 bp, Homo sapien
tggccaagcttgtttctcctggggg

SEQ ID NO: 5372974 - DNA, 25 bp, Homo sapien
caagcttgtttctcctgggggtgct

SEQ ID NO: 5372975 - DNA, 25 bp, Homo sapien
cttctgaggctatctgggctgcctc

SEQ ID NO: 5372976 - DNA, 25 bp, Homo sapien
ggagtcacagtgtcttgggccgcct

SEQ ID NO: 5372977 - DNA, 25 bp, Homo sapien
tgggccgcctgaaggtgagtgacat

SEQ ID NO: 5372978 - DNA, 25 bp, Homo sapien
ctgaggctatctgggctgcctccgg

SEQ ID NO: 5372979 - DNA, 25 bp, Homo sapien
tcctcttttttgcgtgtggctgcgg

SEQ ID NO: 5372980 - DNA, 25 bp, Homo sapien
gatcctcttttttgcgtgtggctgc

SEQ ID NO: 5372981 - DNA, 25 bp, Homo sapien
cggatcctcttttttgcgtgtggct

SEQ ID NO: 5372982 - DNA, 25 bp, Homo sapien
gcggatcctcttttttgcgtgtggc

SEQ ID NO: 5372983 - DNA, 25 bp, Homo sapien
ggaggagcaggagcttccttcgctt

SEQ ID NO: 5372984 - DNA, 25 bp, Homo sapien
taggaggagcaggagcttccttcgc

SEQ ID NO: 5372985 - DNA, 25 bp, Homo sapien
tttaggaggagcaggagcttccttc

SEQ ID NO: 5372986 - DNA, 25 bp, Homo sapien
gcttcggctttaggaggagcaggag

SEQ ID NO: 5372987 - DNA, 25 bp, Homo sapien
attgtattatgaggaaacacatccc

SEQ ID NO: 5372988 - DNA, 25 bp, Homo sapien
tctgccacactgaggaattgtatta

SEQ ID NO: 5372989 - DNA, 25 bp, Homo sapien
tggcttcctatttttacagagagac

SEQ ID NO: 5372990 - DNA, 25 bp, Homo sapien
atattttggcccgttaataaacatg

SEQ ID NO: 5372991 - DNA, 25 bp, Homo sapien
gtaattgacactgttaactagtcct

SEQ ID NO: 5372992 - DNA, 25 bp, Homo sapien
agtaattgacactgttaactagtcc

SEQ ID NO: 5372993 - DNA, 25 bp, Homo sapien
tatggcacgctatgatgatgagcag

SEQ ID NO: 5372994 - DNA, 25 bp, Homo sapien
gatgagcagccgaagcctcaaggaa

SEQ ID NO: 5372995 - DNA, 25 bp, Homo sapien
catcccaactgtcttgatggtggct

SEQ ID NO: 5372996 - DNA, 25 bp, Homo sapien
aatcttactatatgttatggcacgc

SEQ ID NO: 5372997 - DNA, 25 bp, Homo sapien
ctgaccagtcatgagatgtaaataa

SEQ ID NO: 5372998 - DNA, 25 bp, Homo sapien
cacagtttaagctagcccccactga

SEQ ID NO: 5372999 - DNA, 25 bp, Homo sapien
gctgagtaaaattcaagggttgcct

SEQ ID NO: 5373000 - DNA, 25 bp, Homo sapien
gaaacagcgttctattccgcatgct

SEQ ID NO: 5373001 - DNA, 25 bp, Homo sapien
gcacctttaactctctgtgatttac

SEQ ID NO: 5373002 - DNA, 25 bp, Homo sapien
cctttaactctctgtgatttacagg

SEQ ID NO: 5373003 - DNA, 25 bp, Homo sapien
gggaagcacctttaactctctgtga

SEQ ID NO: 5373004 - DNA, 25 bp, Homo sapien
ttggggaagcacctttaactctctg

SEQ ID NO: 5373005 - DNA, 25 bp, Homo sapien
cagatttaaggtgcaaaaagtcact

SEQ ID NO: 5373006 - DNA, 25 bp, Homo sapien
aggatttcacagatttaaggtgcaa

SEQ ID NO: 5373007 - DNA, 25 bp, Homo sapien
caaaaagtcactgggttctctaaga

SEQ ID NO: 5373008 - DNA, 25 bp, Homo sapien
aaaagtcactgggttctctaagaag

SEQ ID NO: 5373009 - DNA, 25 bp, Homo sapien
tgaagcagaattgtttttactaatc

SEQ ID NO: 5373010 - DNA, 25 bp, Homo sapien
gaattgtttttactaatctgcttat

SEQ ID NO: 5373011 - DNA, 25 bp, Homo sapien
ggaggaggctgttattgaagtgaag

SEQ ID NO: 5373012 - DNA, 25 bp, Homo sapien
aggaggctgttattgaagtgaagca

SEQ ID NO: 5373013 - DNA, 25 bp, Homo sapien
tctgtagtgtggaaacaaattattc

SEQ ID NO: 5373014 - DNA, 25 bp, Homo sapien
attattcatgcacaaggtcctctta

SEQ ID NO: 5373015 - DNA, 25 bp, Homo sapien
attcatgcacaaggtcctcttactg

SEQ ID NO: 5373016 - DNA, 25 bp, Homo sapien
tgtagtgtggaaacaaattattcat

SEQ ID NO: 5373017 - DNA, 25 bp, Homo sapien
atctgggtcacagctatattagagc

SEQ ID NO: 5373018 - DNA, 25 bp, Homo sapien
tgtccaatacgatccttcacagtgt

SEQ ID NO: 5373019 - DNA, 25 bp, Homo sapien
tacgtgctagaaacagaagcatctg

SEQ ID NO: 5373020 - DNA, 25 bp, Homo sapien
aacatcatggatgtaaatgtttgct

SEQ ID NO: 5373021 - DNA, 25 bp, Homo sapien
tttcgctatcaagagcttgggtcaa

SEQ ID NO: 5373022 - DNA, 25 bp, Homo sapien
gggtcaagcaggatagaattccagt

SEQ ID NO: 5373023 - DNA, 25 bp, Homo sapien
ttcactctaccatttaaaacaagag

SEQ ID NO: 5373024 - DNA, 25 bp, Homo sapien
ctctaccatttaaaacaagagctct

SEQ ID NO: 5373025 - DNA, 25 bp, Homo sapien
tctattttgggtgacgtgctccttc

SEQ ID NO: 5373026 - DNA, 25 bp, Homo sapien
tgtcagcttcccagatgtgcgagaa

SEQ ID NO: 5373027 - DNA, 25 bp, Homo sapien
agccagccggtgtgtgtcagctaca

SEQ ID NO: 5373028 - DNA, 25 bp, Homo sapien
gaatcgcaactctttaccacaatcg

SEQ ID NO: 5373029 - DNA, 25 bp, Homo sapien
tatttgctggacaccaacctcctgt

SEQ ID NO: 5373030 - DNA, 25 bp, Homo sapien
taaaacactgcctagcgcaggtgca

SEQ ID NO: 5373031 - DNA, 25 bp, Homo sapien
gggcctccgcatcagtcctagaatt

SEQ ID NO: 5373032 - DNA, 25 bp, Homo sapien
tcaactccttggtgtctcaacgaac

SEQ ID NO: 5373033 - DNA, 25 bp, Homo sapien
tccgcgcaggacgtaaagatgcaaa

SEQ ID NO: 5373034 - DNA, 25 bp, Homo sapien
agatgcaaatctagtcgtaggctct

SEQ ID NO: 5373035 - DNA, 25 bp, Homo sapien
taaagatgcaaatctagtcgtaggc

SEQ ID NO: 5373036 - DNA, 25 bp, Homo sapien
gtgtgtagcagcctccgcgcaggac

SEQ ID NO: 5373037 - DNA, 25 bp, Homo sapien
cttcgttacagcctcgtgaaccttt

SEQ ID NO: 5373038 - DNA, 25 bp, Homo sapien
tacagcctcgtgaacctttcagttc

SEQ ID NO: 5373039 - DNA, 25 bp, Homo sapien
actcttcgttacagcctcgtgaacc

SEQ ID NO: 5373040 - DNA, 25 bp, Homo sapien
gttacagcctcgtgaacctttcagt

SEQ ID NO: 5373041 - DNA, 25 bp, Homo sapien
tgcttcgagttgtcccgcctttccc

SEQ ID NO: 5373042 - DNA, 25 bp, Homo sapien
tacatatattgatgtctcctgtctc

SEQ ID NO: 5373043 - DNA, 25 bp, Homo sapien
gggaaccaacgttcatcttacatat

SEQ ID NO: 5373044 - DNA, 25 bp, Homo sapien
cgagggaaccaacgttcatcttaca

SEQ ID NO: 5373045 - DNA, 25 bp, Homo sapien
aagcccatgcatggggacgtcccct

SEQ ID NO: 5373046 - DNA, 25 bp, Homo sapien
tcacatattcgaggttcacaagccc

SEQ ID NO: 5373047 - DNA, 25 bp, Homo sapien
cacatattcgaggttcacaagccca

SEQ ID NO: 5373048 - DNA, 25 bp, Homo sapien
atattcgaggttcacaagcccatgc

SEQ ID NO: 5373049 - DNA, 25 bp, Homo sapien
tctgccccacaggaacctctcttct

SEQ ID NO: 5373050 - DNA, 25 bp, Homo sapien
ctccacaggcacatgggcggcgtac

SEQ ID NO: 5373051 - DNA, 25 bp, Homo sapien
ttctccacaggcacatgggcggcgt

SEQ ID NO: 5373052 - DNA, 25 bp, Homo sapien
ctcttctccacaggcacatgggcgg

SEQ ID NO: 5373053 - DNA, 25 bp, Homo sapien
ggagaggaccgggttcctctcctga

SEQ ID NO: 5373054 - DNA, 25 bp, Homo sapien
tgtgtggagaggaccgggttcctct

SEQ ID NO: 5373055 - DNA, 25 bp, Homo sapien
gaggaccgggttcctctcctgattc

SEQ ID NO: 5373056 - DNA, 25 bp, Homo sapien
ctgtgtggagaggaccgggttcctc

SEQ ID NO: 5373057 - DNA, 25 bp, Homo sapien
gctcaaatttaccccatcaaagaat

SEQ ID NO: 5373058 - DNA, 25 bp, Homo sapien
taataacgaatgtcgacaagtcgag

SEQ ID NO: 5373059 - DNA, 25 bp, Homo sapien
tcagttaataacgaatgtcgacaag

SEQ ID NO: 5373060 - DNA, 25 bp, Homo sapien
cgacaagtcgagaaaattgctcaaa

SEQ ID NO: 5373061 - DNA, 25 bp, Homo sapien
cctctaggcgggcggcacccgctga

SEQ ID NO: 5373062 - DNA, 25 bp, Homo sapien
ccactccctctaggcgggcggcacc

SEQ ID NO: 5373063 - DNA, 25 bp, Homo sapien
taggcgggcggcacccgctgaagcc

SEQ ID NO: 5373064 - DNA, 25 bp, Homo sapien
cgctccactccctctaggcgggcgg

SEQ ID NO: 5373065 - DNA, 25 bp, Homo sapien
atccgccccggtggctggcttagca

SEQ ID NO: 5373066 - DNA, 25 bp, Homo sapien
ctcggaaccgcacgtgagggcaaat

SEQ ID NO: 5373067 - DNA, 25 bp, Homo sapien
ttcgagagcgcgcagagtccagact

SEQ ID NO: 5373068 - DNA, 25 bp, Homo sapien
ttgcgtagcagctgcgaggacgcgg

SEQ ID NO: 5373069 - DNA, 25 bp, Homo sapien
agactccatatatggagatcccttg

SEQ ID NO: 5373070 - DNA, 25 bp, Homo sapien
agcaagactccatatatggagatcc

SEQ ID NO: 5373071 - DNA, 25 bp, Homo sapien
caagactccatatatggagatccct

SEQ ID NO: 5373072 - DNA, 25 bp, Homo sapien
actccatatatggagatcccttgag

SEQ ID NO: 5373073 - DNA, 25 bp, Homo sapien
taggcccagggtaagattttctcca

SEQ ID NO: 5373074 - DNA, 25 bp, Homo sapien
agatgataggcccagggtaagattt

SEQ ID NO: 5373075 - DNA, 25 bp, Homo sapien
gataggcccagggtaagattttctc

SEQ ID NO: 5373076 - DNA, 25 bp, Homo sapien
ctatagatgataggcccagggtaag

SEQ ID NO: 5373077 - DNA, 25 bp, Homo sapien
agctgccgctgttacggcttctgca

SEQ ID NO: 5373078 - DNA, 25 bp, Homo sapien
cttgccccatacttctacgtgctgg

SEQ ID NO: 5373079 - DNA, 25 bp, Homo sapien
aaaacccctttgtgaccgcagcaca

SEQ ID NO: 5373080 - DNA, 25 bp, Homo sapien
tgcacggggccttgcattttgtatg

SEQ ID NO: 5373081 - DNA, 25 bp, Homo sapien
agggttcctcccaactgccatggca

SEQ ID NO: 5373082 - DNA, 25 bp, Homo sapien
gctgctccatcagtccaggttccag

SEQ ID NO: 5373083 - DNA, 25 bp, Homo sapien
cacctgtcttggtaaccggggcata

SEQ ID NO: 5373084 - DNA, 25 bp, Homo sapien
taggaccaccttgcacttgactcac

SEQ ID NO: 5373085 - DNA, 25 bp, Homo sapien
tttgacttgcacatgcagagatggc

SEQ ID NO: 5373086 - DNA, 25 bp, Homo sapien
ctcctttgacttgcacatgcagaga

SEQ ID NO: 5373087 - DNA, 25 bp, Homo sapien
cacctcctttgacttgcacatgcag

SEQ ID NO: 5373088 - DNA, 25 bp, Homo sapien
tgacttgcacatgcagagatggctc

SEQ ID NO: 5373089 - DNA, 25 bp, Homo sapien
tctgtggtctccatgtcataatggt

SEQ ID NO: 5373090 - DNA, 25 bp, Homo sapien
tccccttcaagacctctatgagctg

SEQ ID NO: 5373091 - DNA, 25 bp, Homo sapien
cactgggtctgttgagaaccaggtc

SEQ ID NO: 5373092 - DNA, 25 bp, Homo sapien
cataatggttctttccgtcggaata

SEQ ID NO: 5373093 - DNA, 25 bp, Homo sapien
gctgccggtggtcggggtggaagtg

SEQ ID NO: 5373094 - DNA, 25 bp, Homo sapien
tgggctgccggtggtcggggtggaa

SEQ ID NO: 5373095 - DNA, 25 bp, Homo sapien
ttttgtggtagatgagggtgtaggt

SEQ ID NO: 5373096 - DNA, 25 bp, Homo sapien
tgtggtagatgagggtgtaggtggg

SEQ ID NO: 5373097 - DNA, 25 bp, Homo sapien
tcgaatcgggggcggtcgagtggtg

SEQ ID NO: 5373098 - DNA, 25 bp, Homo sapien
ggcggtcgagtggtgggaggtggag

SEQ ID NO: 5373099 - DNA, 25 bp, Homo sapien
gaggtggaggggtggccgattgaat

SEQ ID NO: 5373100 - DNA, 25 bp, Homo sapien
ggaggggtggccgattgaatcatac

SEQ ID NO: 5373101 - DNA, 25 bp, Homo sapien
ggcgatccagttcagatagggccag

SEQ ID NO: 5373102 - DNA, 25 bp, Homo sapien
gccaggtggccgtgtagattccggg

SEQ ID NO: 5373103 - DNA, 25 bp, Homo sapien
gcaaagcgttagaaccaatcttgga

SEQ ID NO: 5373104 - DNA, 25 bp, Homo sapien
tctttgcacatgagaggcccgccgc

SEQ ID NO: 5373105 - DNA, 25 bp, Homo sapien
tgaattgtcagggctttccttgcag

SEQ ID NO: 5373106 - DNA, 25 bp, Homo sapien
acgcaagtggttgtagtaaagtttg

SEQ ID NO: 5373107 - DNA, 25 bp, Homo sapien
tcctgctgctgtaaacgcaagtggt

SEQ ID NO: 5373108 - DNA, 25 bp, Homo sapien
ggctctgggaggacaatttccacag

SEQ ID NO: 5373109 - DNA, 25 bp, Homo sapien
tccccactgtgagagtaggtgctag

SEQ ID NO: 5373110 - DNA, 25 bp, Homo sapien
tcatccccactgtgagagtaggtgc

SEQ ID NO: 5373111 - DNA, 25 bp, Homo sapien
gaccggggaagcagtcactagagaa

SEQ ID NO: 5373112 - DNA, 25 bp, Homo sapien
gtcaccgctcatccccactgtgaga

SEQ ID NO: 5373113 - DNA, 25 bp, Homo sapien
ggtcgagttacacaagtccaggtcg

SEQ ID NO: 5373114 - DNA, 25 bp, Homo sapien
ggataccccgcgcacacattggttg

SEQ ID NO: 5373115 - DNA, 25 bp, Homo sapien
tcgatcttgcctacaggataccccg

SEQ ID NO: 5373116 - DNA, 25 bp, Homo sapien
gtccaggtcgatgagatccacacgt

SEQ ID NO: 5373117 - DNA, 25 bp, Homo sapien
gggtcagtaagtccctccccatatg

SEQ ID NO: 5373118 - DNA, 25 bp, Homo sapien
acatctgttccgaggagaccgcagg

SEQ ID NO: 5373119 - DNA, 25 bp, Homo sapien
gctgcggacgggatctgctggagct

SEQ ID NO: 5373120 - DNA, 25 bp, Homo sapien
cccatatgctgcacatctgttccga

SEQ ID NO: 5373121 - DNA, 25 bp, Homo sapien
ttgctccttttcaagggtcccacag

SEQ ID NO: 5373122 - DNA, 25 bp, Homo sapien
gcgcatgcgccagcgttgctccttt

SEQ ID NO: 5373123 - DNA, 25 bp, Homo sapien
gcagcagcacctacaaccctggggg

SEQ ID NO: 5373124 - DNA, 25 bp, Homo sapien
gatgctacggcgcatgcgccagcgt

SEQ ID NO: 5373125 - DNA, 25 bp, Homo sapien
gccactgtagagcagtcatatagac

SEQ ID NO: 5373126 - DNA, 25 bp, Homo sapien
gacatcctcagtgttagacagagct

SEQ ID NO: 5373127 - DNA, 25 bp, Homo sapien
atgagccagaactggatagagaggc

SEQ ID NO: 5373128 - DNA, 25 bp, Homo sapien
tcctcagtgttagacagagcttgtc

SEQ ID NO: 5373129 - DNA, 25 bp, Homo sapien
ggtagagacttttgcaggtactgtg

SEQ ID NO: 5373130 - DNA, 25 bp, Homo sapien
tcatgctgccatgagcaatgcacac

SEQ ID NO: 5373131 - DNA, 25 bp, Homo sapien
tttcatgctgccatgagcaatgcac

SEQ ID NO: 5373132 - DNA, 25 bp, Homo sapien
catgctgccatgagcaatgcacact

SEQ ID NO: 5373133 - DNA, 25 bp, Homo sapien
ttcatgctgccatgagcaatgcaca

SEQ ID NO: 5373134 - DNA, 25 bp, Homo sapien
agctgagactgagccactgcactcc

SEQ ID NO: 5373135 - DNA, 25 bp, Homo sapien
tgagactgagccactgcactccagt

SEQ ID NO: 5373136 - DNA, 25 bp, Homo sapien
gagaattacttgaactgggaggcag

SEQ ID NO: 5373137 - DNA, 25 bp, Homo sapien
aggttgcagtgagctgagactgagc

SEQ ID NO: 5373138 - DNA, 25 bp, Homo sapien
cgcatgcggcatttgttctgagaat

SEQ ID NO: 5373139 - DNA, 25 bp, Homo sapien
caaatttgtggagttgatatctggg

SEQ ID NO: 5373140 - DNA, 25 bp, Homo sapien
tcagaatggcatgccagcatgggcc

SEQ ID NO: 5373141 - DNA, 25 bp, Homo sapien
tatctggggctcctactggaaggag

SEQ ID NO: 5373142 - DNA, 25 bp, Homo sapien
tcctggggataggaaggtaagtcat

SEQ ID NO: 5373143 - DNA, 25 bp, Homo sapien
cctggggataggaaggtaagtcatc

SEQ ID NO: 5373144 - DNA, 25 bp, Homo sapien
ctggggataggaaggtaagtcatca

SEQ ID NO: 5373145 - DNA, 25 bp, Homo sapien
ttcctggggataggaaggtaagtca

SEQ ID NO: 5373146 - DNA, 25 bp, Homo sapien
ataaaacaatgtattcattcggatt

SEQ ID NO: 5373147 - DNA, 25 bp, Homo sapien
aataaaacaatgtattcattcggat

SEQ ID NO: 5373148 - DNA, 25 bp, Homo sapien
cccagcgcctgcctcgctgtgggaa

SEQ ID NO: 5373149 - DNA, 25 bp, Homo sapien
ctgcctcgctgtgggaatgccccat

SEQ ID NO: 5373150 - DNA, 25 bp, Homo sapien
gcgcctgcctcgctgtgggaatgcc

SEQ ID NO: 5373151 - DNA, 25 bp, Homo sapien
gcacccagcgcctgcctcgctgtgg

SEQ ID NO: 5373152 - DNA, 25 bp, Homo sapien
tcccgtccacgtttgattcactgtt

SEQ ID NO: 5373153 - DNA, 25 bp, Homo sapien
tacaaatatacgtcaagttgcctgg

SEQ ID NO: 5373154 - DNA, 25 bp, Homo sapien
ggtatctagtaactgcaaggccagc

SEQ ID NO: 5373155 - DNA, 25 bp, Homo sapien
ggctgatccaagtctgtgcctccat

SEQ ID NO: 5373156 - DNA, 25 bp, Homo sapien
gcctgagcactctccgttgattcct

SEQ ID NO: 5373157 - DNA, 25 bp, Homo sapien
gagcactctccgttgattccttgat

SEQ ID NO: 5373158 - DNA, 25 bp, Homo sapien
agctccctgaatcagaccttctgga

SEQ ID NO: 5373159 - DNA, 25 bp, Homo sapien
cacttgcctgagcactctccgttga

SEQ ID NO: 5373160 - DNA, 25 bp, Homo sapien
tagcaaatagcaaagattcctactg

SEQ ID NO: 5373161 - DNA, 25 bp, Homo sapien
gcaaatagcaaagattcctactgag

SEQ ID NO: 5373162 - DNA, 25 bp, Homo sapien
cattggggaagcaaaattaagatac

SEQ ID NO: 5373163 - DNA, 25 bp, Homo sapien
tcatagcaaatagcaaagattccta

SEQ ID NO: 5373164 - DNA, 25 bp, Homo sapien
tgcttttgtttcctggtaataactg

SEQ ID NO: 5373165 - DNA, 25 bp, Homo sapien
tgtgtccggactcagtgggttctcg

SEQ ID NO: 5373166 - DNA, 25 bp, Homo sapien
taaaacaagctggattagcctggtt

SEQ ID NO: 5373167 - DNA, 25 bp, Homo sapien
gactctaacatcctaatgtgtccgg

SEQ ID NO: 5373168 - DNA, 25 bp, Homo sapien
aatgctttgaaggtgggactctaac

SEQ ID NO: 5373169 - DNA, 25 bp, Homo sapien
caaagctcccacagctcggtaaggg

SEQ ID NO: 5373170 - DNA, 25 bp, Homo sapien
ggagcccacggagctgggaaggctc

SEQ ID NO: 5373171 - DNA, 25 bp, Homo sapien
agctcggtaagggaaccccagcgag

SEQ ID NO: 5373172 - DNA, 25 bp, Homo sapien
ggaaccccagcgagtcgccactggg

SEQ ID NO: 5373173 - DNA, 25 bp, Homo sapien
aatgtgaattttgtcagcagcctag

SEQ ID NO: 5373174 - DNA, 25 bp, Homo sapien
gcatataagggtggtcaggtaattt

SEQ ID NO: 5373175 - DNA, 25 bp, Homo sapien
ttggcaaacccggacacctggtcac

SEQ ID NO: 5373176 - DNA, 25 bp, Homo sapien
agacccttgaaaaatgatgctgtgg

SEQ ID NO: 5373177 - DNA, 25 bp, Homo sapien
agaaatcaaatatttgtataaggac

SEQ ID NO: 5373178 - DNA, 25 bp, Homo sapien
ggaaactagaaatcaaatatttgta

SEQ ID NO: 5373179 - DNA, 25 bp, Homo sapien
aatcaaatatttgtataaggacaga

SEQ ID NO: 5373180 - DNA, 25 bp, Homo sapien
ctagaaatcaaatatttgtataagg

SEQ ID NO: 5373181 - DNA, 25 bp, Homo sapien
aaatcttatatttggttatccacag

SEQ ID NO: 5373182 - DNA, 25 bp, Homo sapien
caaatcttatatttggttatccaca

SEQ ID NO: 5373183 - DNA, 25 bp, Homo sapien
aaaatgcatactataaatagaatat

SEQ ID NO: 5373184 - DNA, 25 bp, Homo sapien
aatcttatatttggttatccacagt

SEQ ID NO: 5373185 - DNA, 25 bp, Homo sapien
gattactcaatacaggcctatcaga

SEQ ID NO: 5373186 - DNA, 25 bp, Homo sapien
cctggtcccatataagaattgttgc

SEQ ID NO: 5373187 - DNA, 25 bp, Homo sapien
tacaaggatttactaggatgactgc

SEQ ID NO: 5373188 - DNA, 25 bp, Homo sapien
agttgcaagacaaaaccagggtagt

SEQ ID NO: 5373189 - DNA, 25 bp, Homo sapien
cagtaaagcagtctagatggctggg

SEQ ID NO: 5373190 - DNA, 25 bp, Homo sapien
caatagtgaacaccctagtgacaac

SEQ ID NO: 5373191 - DNA, 25 bp, Homo sapien
caattgcagtatccaaggaaattcc

SEQ ID NO: 5373192 - DNA, 25 bp, Homo sapien
taaaatactggatagctgggcgcag

SEQ ID NO: 5373193 - DNA, 25 bp, Homo sapien
ttgaacatgcattaggtaaccaggg

SEQ ID NO: 5373194 - DNA, 25 bp, Homo sapien
gactaataaggccagcaactcaggg

SEQ ID NO: 5373195 - DNA, 25 bp, Homo sapien
cagaaggaatccaacgtcagagtta

SEQ ID NO: 5373196 - DNA, 25 bp, Homo sapien
tctctggaactacaaaactacggcc

SEQ ID NO: 5373197 - DNA, 25 bp, Homo sapien
aatgtgtattcaacaaggccttcag

SEQ ID NO: 5373198 - DNA, 25 bp, Homo sapien
gatgctgatgctgtctgaaagccac

SEQ ID NO: 5373199 - DNA, 25 bp, Homo sapien
cccctctcttccaataatgtgtatt

SEQ ID NO: 5373200 - DNA, 25 bp, Homo sapien
ttcaacaaggccttcaggtgatgct

SEQ ID NO: 5373201 - DNA, 25 bp, Homo sapien
gacaaggataggcttcaatgaaatt

SEQ ID NO: 5373202 - DNA, 25 bp, Homo sapien
tagaataattaagacaaggataggc

SEQ ID NO: 5373203 - DNA, 25 bp, Homo sapien
acttaacactatgctactacaaagg

SEQ ID NO: 5373204 - DNA, 25 bp, Homo sapien
cactatgctactacaaagggcaaaa

SEQ ID NO: 5373205 - DNA, 25 bp, Homo sapien
gctgtaatcacaactaggcatagga

SEQ ID NO: 5373206 - DNA, 25 bp, Homo sapien
tccaaggacccactgaaattaatgg

SEQ ID NO: 5373207 - DNA, 25 bp, Homo sapien
tgcctagcatacaacgatctaagtg

SEQ ID NO: 5373208 - DNA, 25 bp, Homo sapien
ttcatctaggtgcttctccatcaaa

SEQ ID NO: 5373209 - DNA, 25 bp, Homo sapien
tatgcacatagagggtactcattac

SEQ ID NO: 5373210 - DNA, 25 bp, Homo sapien
gggacacggcagactattaaaatag

SEQ ID NO: 5373211 - DNA, 25 bp, Homo sapien
tgcaagtctatgtgaaaaatcaacc

SEQ ID NO: 5373212 - DNA, 25 bp, Homo sapien
tagttattgtacaggcaaatgaggc

SEQ ID NO: 5373213 - DNA, 25 bp, Homo sapien
gatgttcacctaacaaagtccctga

SEQ ID NO: 5373214 - DNA, 25 bp, Homo sapien
ccaacatgggtctgacagagaggaa

SEQ ID NO: 5373215 - DNA, 25 bp, Homo sapien
tgctcattgtgatccaagggccttg

SEQ ID NO: 5373216 - DNA, 25 bp, Homo sapien
cagagaggaaggacgtcagcagtta

SEQ ID NO: 5373217 - DNA, 25 bp, Homo sapien
caagcaaagcggcagtgattcatac

SEQ ID NO: 5373218 - DNA, 25 bp, Homo sapien
taacttgcgttattggtggtgccaa

SEQ ID NO: 5373219 - DNA, 25 bp, Homo sapien
gctgaaggtctttgtgaactgtcga

SEQ ID NO: 5373220 - DNA, 25 bp, Homo sapien
taaccaattgaacagtggtgcttcc

SEQ ID NO: 5373221 - DNA, 25 bp, Homo sapien
tataatatagaagttctcagaatga

SEQ ID NO: 5373222 - DNA, 25 bp, Homo sapien
atataatatagaagttctcagaatg

SEQ ID NO: 5373223 - DNA, 25 bp, Homo sapien
gaatcctgggacatacgtttactga

SEQ ID NO: 5373224 - DNA, 25 bp, Homo sapien
ccaggagcagttgcataataagtac

SEQ ID NO: 5373225 - DNA, 25 bp, Homo sapien
tatggtgaatagagtccaggagcag

SEQ ID NO: 5373226 - DNA, 25 bp, Homo sapien
taggaagctaaacactgcaaagaga

SEQ ID NO: 5373227 - DNA, 25 bp, Homo sapien
gacatctagttctagagtaatctgg

SEQ ID NO: 5373228 - DNA, 25 bp, Homo sapien
aatcacttgatacatctacaataca

SEQ ID NO: 5373229 - DNA, 25 bp, Homo sapien
gtaatctggcacattcatatgtgaa

SEQ ID NO: 5373230 - DNA, 25 bp, Homo sapien
tatttaaagaagagacatctagttc

SEQ ID NO: 5373231 - DNA, 25 bp, Homo sapien
aaaatttgccatggtttgtcacaga

SEQ ID NO: 5373232 - DNA, 25 bp, Homo sapien
tcagaaatactggtctatgaacact

SEQ ID NO: 5373233 - DNA, 25 bp, Homo sapien
taatccacacttattacaggtagct

SEQ ID NO: 5373234 - DNA, 25 bp, Homo sapien
tacaaggcacctaatgctataaaag

SEQ ID NO: 5373235 - DNA, 25 bp, Homo sapien
aacttcctataactgtagtgatatg

SEQ ID NO: 5373236 - DNA, 25 bp, Homo sapien
caacagctgaattccttgagatgtg

SEQ ID NO: 5373237 - DNA, 25 bp, Homo sapien
caggttggtcctttggatggactgt

SEQ ID NO: 5373238 - DNA, 25 bp, Homo sapien
tatgtacacagctacatagcaaagt

SEQ ID NO: 5373239 - DNA, 25 bp, Homo sapien
tttttcagactaggcactgaaacat

SEQ ID NO: 5373240 - DNA, 25 bp, Homo sapien
aactgttatttttcagactaggcac

SEQ ID NO: 5373241 - DNA, 25 bp, Homo sapien
tgttatttttcagactaggcactga

SEQ ID NO: 5373242 - DNA, 25 bp, Homo sapien
ttcagactaggcactgaaacatttt

SEQ ID NO: 5373243 - DNA, 25 bp, Homo sapien
agattgtctcttcgctgtatagttc

SEQ ID NO: 5373244 - DNA, 25 bp, Homo sapien
agagattgtctcttcgctgtatagt

SEQ ID NO: 5373245 - DNA, 25 bp, Homo sapien
ttgtctcttcgctgtatagttccat

SEQ ID NO: 5373246 - DNA, 25 bp, Homo sapien
attgtctcttcgctgtatagttcca

SEQ ID NO: 5373247 - DNA, 25 bp, Homo sapien
caggaccagatatctctgtaaggag

SEQ ID NO: 5373248 - DNA, 25 bp, Homo sapien
caggacgaatcctacatagctcagt

SEQ ID NO: 5373249 - DNA, 25 bp, Homo sapien
tcacagttggccaagtgccttttct

SEQ ID NO: 5373250 - DNA, 25 bp, Homo sapien
caaaaagggtagtaacagagaatct

SEQ ID NO: 5373251 - DNA, 25 bp, Homo sapien
gaactggagtccaggctttagcccc

SEQ ID NO: 5373252 - DNA, 25 bp, Homo sapien
gagattaagaaccttgcacagggcc

SEQ ID NO: 5373253 - DNA, 25 bp, Homo sapien
cataagggaggttctactgtaatcc

SEQ ID NO: 5373254 - DNA, 25 bp, Homo sapien
taagaaagctggagcatcaagagat

SEQ ID NO: 5373255 - DNA, 25 bp, Homo sapien
agactctcacactgttcgctgtctt

SEQ ID NO: 5373256 - DNA, 25 bp, Homo sapien
gactctcacactgttcgctgtcttc

SEQ ID NO: 5373257 - DNA, 25 bp, Homo sapien
tttttaaataagagatacggtctca

SEQ ID NO: 5373258 - DNA, 25 bp, Homo sapien
ggactgcaggtatatgccatcatgt

SEQ ID NO: 5373259 - DNA, 25 bp, Homo sapien
tgaggcaatactattctatcatgaa

SEQ ID NO: 5373260 - DNA, 25 bp, Homo sapien
tggcagaaccaacactaggataaaa

SEQ ID NO: 5373261 - DNA, 25 bp, Homo sapien
gcaaatattcttctgattcccacca

SEQ ID NO: 5373262 - DNA, 25 bp, Homo sapien
tgaattcgatgttttctgcatataa

SEQ ID NO: 5373263 - DNA, 25 bp, Homo sapien
ctctgaattcgatgttttctgcata

SEQ ID NO: 5373264 - DNA, 25 bp, Homo sapien
taaaagcaaatattcttctgattcc

SEQ ID NO: 5373265 - DNA, 25 bp, Homo sapien
ccaattattataatggcataggaga

SEQ ID NO: 5373266 - DNA, 25 bp, Homo sapien
aaaaaatacagggatagctcctgca

SEQ ID NO: 5373267 - DNA, 25 bp, Homo sapien
ggatagctcctgcaaaaaataacca

SEQ ID NO: 5373268 - DNA, 25 bp, Homo sapien
tacagggatagctcctgcaaaaaat

SEQ ID NO: 5373269 - DNA, 25 bp, Homo sapien
tagactcagctaaagatcagaaacg

SEQ ID NO: 5373270 - DNA, 25 bp, Homo sapien
tgctgcctagtctcaagtgggtctc

SEQ ID NO: 5373271 - DNA, 25 bp, Homo sapien
tcagaaacgattgtcaaagaagcct

SEQ ID NO: 5373272 - DNA, 25 bp, Homo sapien
taggcattgtacacttagagtagag

SEQ ID NO: 5373273 - DNA, 25 bp, Homo sapien
gattattgcttgtacacattataag

SEQ ID NO: 5373274 - DNA, 25 bp, Homo sapien
tacacattataagcctttgggcctt

SEQ ID NO: 5373275 - DNA, 25 bp, Homo sapien
tgcttgtacacattataagcctttg

SEQ ID NO: 5373276 - DNA, 25 bp, Homo sapien
tgtacacattataagcctttgggcc

SEQ ID NO: 5373277 - DNA, 25 bp, Homo sapien
caatatttatcacaagaatccccac

SEQ ID NO: 5373278 - DNA, 25 bp, Homo sapien
tcacccaagagcactgaataaactc

SEQ ID NO: 5373279 - DNA, 25 bp, Homo sapien
ttctaggctgctggcagaaacatcc

SEQ ID NO: 5373280 - DNA, 25 bp, Homo sapien
gattctcttttctgcggtgttagca

SEQ ID NO: 5373281 - DNA, 25 bp, Homo sapien
ctattatggacagaggtattgtaag

SEQ ID NO: 5373282 - DNA, 25 bp, Homo sapien
attgtaaggcttagtgcaagtgtgc

SEQ ID NO: 5373283 - DNA, 25 bp, Homo sapien
cagaggtattgtaaggcttagtgca

SEQ ID NO: 5373284 - DNA, 25 bp, Homo sapien
tatggacagaggtattgtaaggctt

SEQ ID NO: 5373285 - DNA, 25 bp, Homo sapien
caatgatgaggtaagaaagcagccc

SEQ ID NO: 5373286 - DNA, 25 bp, Homo sapien
atcaatgatgaggtaagaaagcagc

SEQ ID NO: 5373287 - DNA, 25 bp, Homo sapien
tcaatgatgaggtaagaaagcagcc

SEQ ID NO: 5373288 - DNA, 25 bp, Homo sapien
ctatcaatgatgaggtaagaaagca

SEQ ID NO: 5373289 - DNA, 25 bp, Homo sapien
taagaggctaggatggattgaaaca

SEQ ID NO: 5373290 - DNA, 25 bp, Homo sapien
gctattttcaagagctgtttgcaga

SEQ ID NO: 5373291 - DNA, 25 bp, Homo sapien
gatcaggagcaaagataagaggcta

SEQ ID NO: 5373292 - DNA, 25 bp, Homo sapien
taatataggcctgtgagatcaggag

SEQ ID NO: 5373293 - DNA, 25 bp, Homo sapien
cactaaaatcatgtgttactctttt

SEQ ID NO: 5373294 - DNA, 25 bp, Homo sapien
tttattgggaaactcgaagtcctca

SEQ ID NO: 5373295 - DNA, 25 bp, Homo sapien
cctcaaatccagtataatgaagtaa

SEQ ID NO: 5373296 - DNA, 25 bp, Homo sapien
taaggccattaatgataatgcacat

SEQ ID NO: 5373297 - DNA, 25 bp, Homo sapien
tccaataaggccattaatgataatg

SEQ ID NO: 5373298 - DNA, 25 bp, Homo sapien
tggccataagagcagcagattaaac

SEQ ID NO: 5373299 - DNA, 25 bp, Homo sapien
ctggccataagagcagcagattaaa

SEQ ID NO: 5373300 - DNA, 25 bp, Homo sapien
gccataagagcagcagattaaacaa

SEQ ID NO: 5373301 - DNA, 25 bp, Homo sapien
cataagagcagcagattaaacaaac

SEQ ID NO: 5373302 - DNA, 25 bp, Homo sapien
tcagtcctgtgaatagctcaacgcc

SEQ ID NO: 5373303 - DNA, 25 bp, Homo sapien
tgtctgaagcaactggtgatcactc

SEQ ID NO: 5373304 - DNA, 25 bp, Homo sapien
tgtatgggagcaactactatggaat

SEQ ID NO: 5373305 - DNA, 25 bp, Homo sapien
tactgataatatagtgccctagaac

SEQ ID NO: 5373306 - DNA, 25 bp, Homo sapien
tggaagaaggttccaaaggagataa

SEQ ID NO: 5373307 - DNA, 25 bp, Homo sapien
cttgtgctttgcgagcaataatgga

SEQ ID NO: 5373308 - DNA, 25 bp, Homo sapien
ttatgtccaaaacacttgtgctttg

SEQ ID NO: 5373309 - DNA, 25 bp, Homo sapien
ataatggaagaaggttccaaaggag

SEQ ID NO: 5373310 - DNA, 25 bp, Homo sapien
tagacagcatagagcatggctccag

SEQ ID NO: 5373311 - DNA, 25 bp, Homo sapien
gcattgttctattcaataaacctca

SEQ ID NO: 5373312 - DNA, 25 bp, Homo sapien
ctcactgggtagtagctaggaacaa

SEQ ID NO: 5373313 - DNA, 25 bp, Homo sapien
tttatatacacaaagctgctctggg

SEQ ID NO: 5373314 - DNA, 25 bp, Homo sapien
ggtgaggaggttcaaagcacagctc

SEQ ID NO: 5373315 - DNA, 25 bp, Homo sapien
gtttaccagtacaacgcctccaatg

SEQ ID NO: 5373316 - DNA, 25 bp, Homo sapien
tctcttccagcaggtttttcagacc

SEQ ID NO: 5373317 - DNA, 25 bp, Homo sapien
tctgggcatctaatatgggcaaagc

SEQ ID NO: 5373318 - DNA, 25 bp, Homo sapien
tacaggcagttttactccagagtcc

SEQ ID NO: 5373319 - DNA, 25 bp, Homo sapien
tggctaaatatagtgagcacctcct

SEQ ID NO: 5373320 - DNA, 25 bp, Homo sapien
cacatagccgagactgaaatacagg

SEQ ID NO: 5373321 - DNA, 25 bp, Homo sapien
ttatatccatttccttctttatcaa

SEQ ID NO: 5373322 - DNA, 25 bp, Homo sapien
atatccatttccttctttatcaagt

SEQ ID NO: 5373323 - DNA, 25 bp, Homo sapien
aagttcaatattttatatccatttc

SEQ ID NO: 5373324 - DNA, 25 bp, Homo sapien
ttttatatccatttccttctttatc

SEQ ID NO: 5373325 - DNA, 25 bp, Homo sapien
gttggatcaaccagctgcccattgg

SEQ ID NO: 5373326 - DNA, 25 bp, Homo sapien
tatgattgcccaataccagacactt

SEQ ID NO: 5373327 - DNA, 25 bp, Homo sapien
gcaaaaatttgctcggcttaaaaca

SEQ ID NO: 5373328 - DNA, 25 bp, Homo sapien
tattaagagctaccagttttctatg

SEQ ID NO: 5373329 - DNA, 25 bp, Homo sapien
tacaatacaaactaccctggtgcca

SEQ ID NO: 5373330 - DNA, 25 bp, Homo sapien
tacattaagtgtgaacgtcagtcca

SEQ ID NO: 5373331 - DNA, 25 bp, Homo sapien
cctggtgccactatcagaaattgta

SEQ ID NO: 5373332 - DNA, 25 bp, Homo sapien
catcacctgaggcttagacaattag

SEQ ID NO: 5373333 - DNA, 25 bp, Homo sapien
agggtaaatctatctccactgttac

SEQ ID NO: 5373334 - DNA, 25 bp, Homo sapien
aaagggtaaatctatctccactgtt

SEQ ID NO: 5373335 - DNA, 25 bp, Homo sapien
aatactgcagcaaggattaaggtaa

SEQ ID NO: 5373336 - DNA, 25 bp, Homo sapien
aagggtaaatctatctccactgtta

SEQ ID NO: 5373337 - DNA, 25 bp, Homo sapien
ctgaaagtgcttcttgatatgacaa

SEQ ID NO: 5373338 - DNA, 25 bp, Homo sapien
aatattaactatagcaacttgtgtg

SEQ ID NO: 5373339 - DNA, 25 bp, Homo sapien
tgatatgacaaatttgccaaaaacc

SEQ ID NO: 5373340 - DNA, 25 bp, Homo sapien
tatagcaacttgtgtgtctgaaagt

SEQ ID NO: 5373341 - DNA, 25 bp, Homo sapien
ttgtccatacaacgtctcccttcat

SEQ ID NO: 5373342 - DNA, 25 bp, Homo sapien
atagaaattgtccatacaacgtctc

SEQ ID NO: 5373343 - DNA, 25 bp, Homo sapien
aaagaagacccatctcaaccatcct

SEQ ID NO: 5373344 - DNA, 25 bp, Homo sapien
catctcaaccatcctccaatagaaa

SEQ ID NO: 5373345 - DNA, 25 bp, Homo sapien
agtctccatatacattagttcccag

SEQ ID NO: 5373346 - DNA, 25 bp, Homo sapien
tgacattgtctactgattaccatag

SEQ ID NO: 5373347 - DNA, 25 bp, Homo sapien
catcgatagacactcaggttgttcc

SEQ ID NO: 5373348 - DNA, 25 bp, Homo sapien
ggttgttcccgtatcttgtctatga

SEQ ID NO: 5373349 - DNA, 25 bp, Homo sapien
actcaaggatttggtgggccaactg

SEQ ID NO: 5373350 - DNA, 25 bp, Homo sapien
taactactgatagactacaggtgac

SEQ ID NO: 5373351 - DNA, 25 bp, Homo sapien
gttttaaatgagtgtcaggcaggac

SEQ ID NO: 5373352 - DNA, 25 bp, Homo sapien
tatatgctacccagttttcaaagga

SEQ ID NO: 5373353 - DNA, 25 bp, Homo sapien
tacggtggcgccgtatcggctcact

SEQ ID NO: 5373354 - DNA, 25 bp, Homo sapien
caactcatccgtaggcagaaaggca

SEQ ID NO: 5373355 - DNA, 25 bp, Homo sapien
tgtctgttaaaaggaactatctctc

SEQ ID NO: 5373356 - DNA, 25 bp, Homo sapien
tacttcaggtgagcacacaactcat

SEQ ID NO: 5373357 - DNA, 25 bp, Homo sapien
taatcaggctaataacattgacatt

SEQ ID NO: 5373358 - DNA, 25 bp, Homo sapien
ttatctggatatttactagcctttg

SEQ ID NO: 5373359 - DNA, 25 bp, Homo sapien
tagagttctaactcagacaagtctc

SEQ ID NO: 5373360 - DNA, 25 bp, Homo sapien
taatcccagcttagcccaaaataac

SEQ ID NO: 5373361 - DNA, 25 bp, Homo sapien
agtcatgattaaacaacctaattgt

SEQ ID NO: 5373362 - DNA, 25 bp, Homo sapien
tgtctcacacttcaatcctatattg

SEQ ID NO: 5373363 - DNA, 25 bp, Homo sapien
tcctaccggtatcaaatagcagagt

SEQ ID NO: 5373364 - DNA, 25 bp, Homo sapien
tcctatattgttggtatgtatacag

SEQ ID NO: 5373365 - DNA, 25 bp, Homo sapien
tccaatgcatgacttgacggaagct

SEQ ID NO: 5373366 - DNA, 25 bp, Homo sapien
gatattactgaacctcacacgagac

SEQ ID NO: 5373367 - DNA, 25 bp, Homo sapien
tttcacaggatatgacatgcgagac

SEQ ID NO: 5373368 - DNA, 25 bp, Homo sapien
gacggaagctgtcgaatctccatga

SEQ ID NO: 5373369 - DNA, 25 bp, Homo sapien
cttaaaaggaagagcataatatgaa

SEQ ID NO: 5373370 - DNA, 25 bp, Homo sapien
taagttctgaagtggcttgaataaa

SEQ ID NO: 5373371 - DNA, 25 bp, Homo sapien
gttctgaagtggcttgaataaaggt

SEQ ID NO: 5373372 - DNA, 25 bp, Homo sapien
tgaagtggcttgaataaaggtaaac

SEQ ID NO: 5373373 - DNA, 25 bp, Homo sapien
atcactaagttctgaagtggcttga

SEQ ID NO: 5373374 - DNA, 25 bp, Homo sapien
gtatcaatgtttgtgctctcaggtt

SEQ ID NO: 5373375 - DNA, 25 bp, Homo sapien
tttcagtatcaatgtttgtgctctc

SEQ ID NO: 5373376 - DNA, 25 bp, Homo sapien
gatcatggaatttcacaggcacata

SEQ ID NO: 5373377 - DNA, 25 bp, Homo sapien
tttcacaggcacatacagaggttca

SEQ ID NO: 5373378 - DNA, 25 bp, Homo sapien
ttgtatctgttgtgcaagcagcaaa

SEQ ID NO: 5373379 - DNA, 25 bp, Homo sapien
tatctgttgtgcaagcagcaaagta

SEQ ID NO: 5373380 - DNA, 25 bp, Homo sapien
caaagaactattcatagttgtatct

SEQ ID NO: 5373381 - DNA, 25 bp, Homo sapien
ctgttgtgcaagcagcaaagtaacc

SEQ ID NO: 5373382 - DNA, 25 bp, Homo sapien
acatagatgtttttgcaaaggtgct

SEQ ID NO: 5373383 - DNA, 25 bp, Homo sapien
tgtacactgttgtctccatggcttc

SEQ ID NO: 5373384 - DNA, 25 bp, Homo sapien
ttccgcgaagtcctcttgtacactg

SEQ ID NO: 5373385 - DNA, 25 bp, Homo sapien
aagcagcatgctttccgcgaagtcc

SEQ ID NO: 5373386 - DNA, 25 bp, Homo sapien
tcatctaaagtgagacttgcagtca

SEQ ID NO: 5373387 - DNA, 25 bp, Homo sapien
tatgtcatgctggaatgttacagga

SEQ ID NO: 5373388 - DNA, 25 bp, Homo sapien
tgttacaggaagtactcagtacccc

SEQ ID NO: 5373389 - DNA, 25 bp, Homo sapien
aaaaagtgcttgacaccaccggaga

SEQ ID NO: 5373390 - DNA, 25 bp, Homo sapien
aagcaacccatatcacatcaacaag

SEQ ID NO: 5373391 - DNA, 25 bp, Homo sapien
aacaatcccaagagccattcgcctg

SEQ ID NO: 5373392 - DNA, 25 bp, Homo sapien
cgaagtaagttcagaggaagcaacc

SEQ ID NO: 5373393 - DNA, 25 bp, Homo sapien
cattcgcctgcgctgagtgaaacca

SEQ ID NO: 5373394 - DNA, 25 bp, Homo sapien
ttggcagatctcagtctaaaaggag

SEQ ID NO: 5373395 - DNA, 25 bp, Homo sapien
gagcaatgccggaaaacttggcaga

SEQ ID NO: 5373396 - DNA, 25 bp, Homo sapien
taaaaggaggtgaagaactcagcac

SEQ ID NO: 5373397 - DNA, 25 bp, Homo sapien
gatcctcaagagcaatgccggaaaa

SEQ ID NO: 5373398 - DNA, 25 bp, Homo sapien
ctgtccctgatctgctggagtggaa

SEQ ID NO: 5373399 - DNA, 25 bp, Homo sapien
ttcctcaattgccagcggtgggcgc

SEQ ID NO: 5373400 - DNA, 25 bp, Homo sapien
ccaatctcttcaagtggtaaaagaa

SEQ ID NO: 5373401 - DNA, 25 bp, Homo sapien
gggacagcgtctagacactgtttct

SEQ ID NO: 5373402 - DNA, 25 bp, Homo sapien
gctccggtgatgtcggggcccttcc

SEQ ID NO: 5373403 - DNA, 25 bp, Homo sapien
ctggtgggcactccgtcccggtttg

SEQ ID NO: 5373404 - DNA, 25 bp, Homo sapien
ttcacggtttcggtcaaggcgctcc

SEQ ID NO: 5373405 - DNA, 25 bp, Homo sapien
tcccggtttgggctccggtgatgtc

SEQ ID NO: 5373406 - DNA, 25 bp, Homo sapien
ggccttcctgccccgcgatggcgtc

SEQ ID NO: 5373407 - DNA, 25 bp, Homo sapien
cgcgatggcgtcgtggcggcaccat

SEQ ID NO: 5373408 - DNA, 25 bp, Homo sapien
ccgcgatggcgtcgtggcggcacca

SEQ ID NO: 5373409 - DNA, 25 bp, Homo sapien
ttcctgccccgcgatggcgtcgtgg

SEQ ID NO: 5373410 - DNA, 25 bp, Homo sapien
agcggaccggtcaggccccgcagcc

SEQ ID NO: 5373411 - DNA, 25 bp, Homo sapien
gagcggaccggtcaggccccgcagc

SEQ ID NO: 5373412 - DNA, 25 bp, Homo sapien
gcggaccggtcaggccccgcagccg

SEQ ID NO: 5373413 - DNA, 25 bp, Homo sapien
gaagtaatgcgaggctctggtcgcc

SEQ ID NO: 5373414 - DNA, 25 bp, Homo sapien
ctgaagacgcggtgcccctcaggga

SEQ ID NO: 5373415 - DNA, 25 bp, Homo sapien
acagtcagctatggccgcggaggcc

SEQ ID NO: 5373416 - DNA, 25 bp, Homo sapien
gaggcccggagatctgctctggccc

SEQ ID NO: 5373417 - DNA, 25 bp, Homo sapien
gaaactgattccagcccatgtgttc

SEQ ID NO: 5373418 - DNA, 25 bp, Homo sapien
tgccaagaaactgattccagcccat

SEQ ID NO: 5373419 - DNA, 25 bp, Homo sapien
ttaaacttgccaagaaactgattcc

SEQ ID NO: 5373420 - DNA, 25 bp, Homo sapien
ctgattccagcccatgtgttccaca

SEQ ID NO: 5373421 - DNA, 25 bp, Homo sapien
tgtcctccgaggcatttgtacctcc

SEQ ID NO: 5373422 - DNA, 25 bp, Homo sapien
ttgtacctccacctttataactgct

SEQ ID NO: 5373423 - DNA, 25 bp, Homo sapien
ttcttcagggtttggatcaaggaac

SEQ ID NO: 5373424 - DNA, 25 bp, Homo sapien
tcaaggaacaacttctccataaatc

SEQ ID NO: 5373425 - DNA, 25 bp, Homo sapien
tctgggctgcacatgactactgtct

SEQ ID NO: 5373426 - DNA, 25 bp, Homo sapien
tcttagagttctgcaggttgccagt

SEQ ID NO: 5373427 - DNA, 25 bp, Homo sapien
tggtgcggaccctcttctgggctgc

SEQ ID NO: 5373428 - DNA, 25 bp, Homo sapien
catatgccttagcttgggctgctta

SEQ ID NO: 5373429 - DNA, 25 bp, Homo sapien
ggcctggtaagggattgtctgacaa

SEQ ID NO: 5373430 - DNA, 25 bp, Homo sapien
ctttcctcgcgttggagcggcctgg

SEQ ID NO: 5373431 - DNA, 25 bp, Homo sapien
gacaagacctgtgttagtctgcagt

SEQ ID NO: 5373432 - DNA, 25 bp, Homo sapien
tcctcgcgttggagcggcctggtaa

SEQ ID NO: 5373433 - DNA, 25 bp, Homo sapien
ttaaaactgctcagcgtcagtggtg

SEQ ID NO: 5373434 - DNA, 25 bp, Homo sapien
gcgtcagtggtgtcccattcctcag

SEQ ID NO: 5373435 - DNA, 25 bp, Homo sapien
cagcaatacacttctttgtcattaa

SEQ ID NO: 5373436 - DNA, 25 bp, Homo sapien
taacttaaagccaaattccatacta

SEQ ID NO: 5373437 - DNA, 25 bp, Homo sapien
agggaaagaagttcctctcctcagg

SEQ ID NO: 5373438 - DNA, 25 bp, Homo sapien
gagtgccgtgtctcgttgaagagta

SEQ ID NO: 5373439 - DNA, 25 bp, Homo sapien
aactgtgagtttttcaatgcaggga

SEQ ID NO: 5373440 - DNA, 25 bp, Homo sapien
tacgctttttatatcaggatctggc

SEQ ID NO: 5373441 - DNA, 25 bp, Homo sapien
ggtatttcacacctagccttcggga

SEQ ID NO: 5373442 - DNA, 25 bp, Homo sapien
tctgccttggagagacacgaagttg

SEQ ID NO: 5373443 - DNA, 25 bp, Homo sapien
cacgaagttgctaagctaccatggg

SEQ ID NO: 5373444 - DNA, 25 bp, Homo sapien
tacttatttagtgacatcgccagaa

SEQ ID NO: 5373445 - DNA, 25 bp, Homo sapien
ggctagaattactccctcgctcttt

SEQ ID NO: 5373446 - DNA, 25 bp, Homo sapien
gtgttcttgtaaaaacaggctagaa

SEQ ID NO: 5373447 - DNA, 25 bp, Homo sapien
aaaacaggctagaattactccctcg

SEQ ID NO: 5373448 - DNA, 25 bp, Homo sapien
tgtaaaaacaggctagaattactcc

SEQ ID NO: 5373449 - DNA, 25 bp, Homo sapien
ccagtgtgattgattctgggtaaga

SEQ ID NO: 5373450 - DNA, 25 bp, Homo sapien
gtaagatagccagccgtccgcaaaa

SEQ ID NO: 5373451 - DNA, 25 bp, Homo sapien
tctgggtaagatagccagccgtccg

SEQ ID NO: 5373452 - DNA, 25 bp, Homo sapien
gggtaagatagccagccgtccgcaa

SEQ ID NO: 5373453 - DNA, 25 bp, Homo sapien
tgccttggcagatttcgatgtgaga

SEQ ID NO: 5373454 - DNA, 25 bp, Homo sapien
gattctatagtattcactgccttgg

SEQ ID NO: 5373455 - DNA, 25 bp, Homo sapien
tgagattatgcatgactacacccct

SEQ ID NO: 5373456 - DNA, 25 bp, Homo sapien
tagcaagggcatacaaacgcacgga

SEQ ID NO: 5373457 - DNA, 25 bp, Homo sapien
tttgagacaggatccttcttagtca

SEQ ID NO: 5373458 - DNA, 25 bp, Homo sapien
tgagacaggatccttcttagtcacc

SEQ ID NO: 5373459 - DNA, 25 bp, Homo sapien
agacaggatccttcttagtcaccca

SEQ ID NO: 5373460 - DNA, 25 bp, Homo sapien
acaggatccttcttagtcacccagg

SEQ ID NO: 5373461 - DNA, 25 bp, Homo sapien
atggcacatcccacacttgaatgtg

SEQ ID NO: 5373462 - DNA, 25 bp, Homo sapien
tgaggatggcacatcccacacttga

SEQ ID NO: 5373463 - DNA, 25 bp, Homo sapien
gatggcacatcccacacttgaatgt

SEQ ID NO: 5373464 - DNA, 25 bp, Homo sapien
aggatggcacatcccacacttgaat

SEQ ID NO: 5373465 - DNA, 25 bp, Homo sapien
tcaccattactcaggtgcgttctgg

SEQ ID NO: 5373466 - DNA, 25 bp, Homo sapien
acatatgtaactacagcttcacagg

SEQ ID NO: 5373467 - DNA, 25 bp, Homo sapien
tgaaagcaggctgacaaccactgat

SEQ ID NO: 5373468 - DNA, 25 bp, Homo sapien
gagtgtgtccttgtgaatcaccatt

SEQ ID NO: 5373469 - DNA, 25 bp, Homo sapien
gctcggggatgtcctgtgctcaaaa

SEQ ID NO: 5373470 - DNA, 25 bp, Homo sapien
aaaattcctcttgccaactgaatgg

SEQ ID NO: 5373471 - DNA, 25 bp, Homo sapien
caccttccctctgactgttatctta

SEQ ID NO: 5373472 - DNA, 25 bp, Homo sapien
tgactgttatcttattaaaaacctc

SEQ ID NO: 5373473 - DNA, 25 bp, Homo sapien
cttaccgtggtgtatcctttgtaag

SEQ ID NO: 5373474 - DNA, 25 bp, Homo sapien
tcacaaattcatagaaatgtttttt

SEQ ID NO: 5373475 - DNA, 25 bp, Homo sapien
gaagcaaagtataaaactactagga

SEQ ID NO: 5373476 - DNA, 25 bp, Homo sapien
tgtaagagtaatgccaggctaggcc

SEQ ID NO: 5373477 - DNA, 25 bp, Homo sapien
aggattctttgagtccaggaggcag

SEQ ID NO: 5373478 - DNA, 25 bp, Homo sapien
aggtaggaggattctttgagtccag

SEQ ID NO: 5373479 - DNA, 25 bp, Homo sapien
acgctgcagtgagccatgactgcac

SEQ ID NO: 5373480 - DNA, 25 bp, Homo sapien
tgaggtaggaggattctttgagtcc

SEQ ID NO: 5373481 - DNA, 25 bp, Homo sapien
tatgagtgcgtatcattgtatcacc

SEQ ID NO: 5373482 - DNA, 25 bp, Homo sapien
cctggtttatggtcatcttaagtag

SEQ ID NO: 5373483 - DNA, 25 bp, Homo sapien
cctaggctggattacagcggcttga

SEQ ID NO: 5373484 - DNA, 25 bp, Homo sapien
tcttaagtagagacttatgagtgcg

SEQ ID NO: 5373485 - DNA, 25 bp, Homo sapien
tagtgagctaatctctacaaatggc

SEQ ID NO: 5373486 - DNA, 25 bp, Homo sapien
tcagtgtgactaagttgaccagatg

SEQ ID NO: 5373487 - DNA, 25 bp, Homo sapien
gcagctttggccacttactcctcag

SEQ ID NO: 5373488 - DNA, 25 bp, Homo sapien
tacaaatggctcgttatggcctgag

SEQ ID NO: 5373489 - DNA, 25 bp, Homo sapien
ttggaagggctggaaagccaaactg

SEQ ID NO: 5373490 - DNA, 25 bp, Homo sapien
tctaccgtctacctctagaactggg

SEQ ID NO: 5373491 - DNA, 25 bp, Homo sapien
tggagaagtcgtctgaatcaaaggg

SEQ ID NO: 5373492 - DNA, 25 bp, Homo sapien
gctgagttaacagagtcctggagcc

SEQ ID NO: 5373493 - DNA, 25 bp, Homo sapien
cattcctttttggtacacagagggc

SEQ ID NO: 5373494 - DNA, 25 bp, Homo sapien
agtctctataaacagtacattcctt

SEQ ID NO: 5373495 - DNA, 25 bp, Homo sapien
tttgaagtctctataaacagtacat

SEQ ID NO: 5373496 - DNA, 25 bp, Homo sapien
ctctttttcatgatggattataaag

SEQ ID NO: 5373497 - DNA, 25 bp, Homo sapien
ttacattcattatccctccctgggt

SEQ ID NO: 5373498 - DNA, 25 bp, Homo sapien
tataaatccctaaccaccaagcaag

SEQ ID NO: 5373499 - DNA, 25 bp, Homo sapien
caagtatccccttacttaatgttgg

SEQ ID NO: 5373500 - DNA, 25 bp, Homo sapien
cagtttacagtgcaatgtgagtgta

SEQ ID NO: 5373501 - DNA, 25 bp, Homo sapien
gattgagtcagcgttctttaaagat

SEQ ID NO: 5373502 - DNA, 25 bp, Homo sapien
aaaatggtgctcctcctgattgagt

SEQ ID NO: 5373503 - DNA, 25 bp, Homo sapien
gagtcagcgttctttaaagatgttt

SEQ ID NO: 5373504 - DNA, 25 bp, Homo sapien
tcctcctgattgagtcagcgttctt

SEQ ID NO: 5373505 - DNA, 25 bp, Homo sapien
ccttctgggctaagaaagcccctga

SEQ ID NO: 5373506 - DNA, 25 bp, Homo sapien
gaatcacgatttctccgacatcagt

SEQ ID NO: 5373507 - DNA, 25 bp, Homo sapien
gatttacctggccatagtggcactg

SEQ ID NO: 5373508 - DNA, 25 bp, Homo sapien
ccagaagggtgtggcaattcacatc

SEQ ID NO: 5373509 - DNA, 25 bp, Homo sapien
ttcactcataacagtacctgcctag

SEQ ID NO: 5373510 - DNA, 25 bp, Homo sapien
tgcctagacctcgaagcactagttt

SEQ ID NO: 5373511 - DNA, 25 bp, Homo sapien
taactacttccatgacaactgtgca

SEQ ID NO: 5373512 - DNA, 25 bp, Homo sapien
tccaaccctgcttgagttaactact

SEQ ID NO: 5373513 - DNA, 25 bp, Homo sapien
gaggtttgccttcctaggagcacag

SEQ ID NO: 5373514 - DNA, 25 bp, Homo sapien
gattaggccgttttctctcaggcac

SEQ ID NO: 5373515 - DNA, 25 bp, Homo sapien
gcatcagggccacggtgcaagtctt

SEQ ID NO: 5373516 - DNA, 25 bp, Homo sapien
taagaatggatgtatgccgcggacg

SEQ ID NO: 5373517 - DNA, 25 bp, Homo sapien
ggagtatgttcatcttgtggccaca

SEQ ID NO: 5373518 - DNA, 25 bp, Homo sapien
tgtggccacaattcagcaattagtg

SEQ ID NO: 5373519 - DNA, 25 bp, Homo sapien
ccactgcaccggcttaataatgcta

SEQ ID NO: 5373520 - DNA, 25 bp, Homo sapien
tatagccctatggtcaaagtcttgg

SEQ ID NO: 5373521 - DNA, 25 bp, Homo sapien
tctctttcctattgttgtggcctag

SEQ ID NO: 5373522 - DNA, 25 bp, Homo sapien
tactctgccgattgtcaaatgtctg

SEQ ID NO: 5373523 - DNA, 25 bp, Homo sapien
tagtaactctccctaggcagtagga

SEQ ID NO: 5373524 - DNA, 25 bp, Homo sapien
tatatccctaacttaatgagaccag

SEQ ID NO: 5373525 - DNA, 25 bp, Homo sapien
taaacagtatactggaatcaatgct

SEQ ID NO: 5373526 - DNA, 25 bp, Homo sapien
caagtatgatacagatgggtcaaaa

SEQ ID NO: 5373527 - DNA, 25 bp, Homo sapien
tcaggagcgctatagttatgtctgc

SEQ ID NO: 5373528 - DNA, 25 bp, Homo sapien
tatgagagatttttgggacctgaaa

SEQ ID NO: 5373529 - DNA, 25 bp, Homo sapien
ttgtatttctagaggtaaccacttc

SEQ ID NO: 5373530 - DNA, 25 bp, Homo sapien
ttggtctgcgtatcctaacaaaaac

SEQ ID NO: 5373531 - DNA, 25 bp, Homo sapien
tgctgattacctccttagctatgaa

SEQ ID NO: 5373532 - DNA, 25 bp, Homo sapien
catggtttaaaagtcttggtctgcg

SEQ ID NO: 5373533 - DNA, 25 bp, Homo sapien
ccagtgggagttattcaaatggctc

SEQ ID NO: 5373534 - DNA, 25 bp, Homo sapien
tactataagcaagagttttcccttc

SEQ ID NO: 5373535 - DNA, 25 bp, Homo sapien
ggagacactttcagactatcctgtt

SEQ ID NO: 5373536 - DNA, 25 bp, Homo sapien
tttgtagcatatccttcagcttggg

SEQ ID NO: 5373537 - DNA, 25 bp, Homo sapien
aaaaaatagcctcatgagacttggc

SEQ ID NO: 5373538 - DNA, 25 bp, Homo sapien
gcatacacactcgtgggattccagt

SEQ ID NO: 5373539 - DNA, 25 bp, Homo sapien
taagtgtatcaccatgcagatgtag

SEQ ID NO: 5373540 - DNA, 25 bp, Homo sapien
caagagtgttggaccagtattgcag

SEQ ID NO: 5373541 - DNA, 25 bp, Homo sapien
taacacgttaggattggaatacgtc

SEQ ID NO: 5373542 - DNA, 25 bp, Homo sapien
catcattacacagactacttggaat

SEQ ID NO: 5373543 - DNA, 25 bp, Homo sapien
ggctttttactagcagtatcagtga

SEQ ID NO: 5373544 - DNA, 25 bp, Homo sapien
cattctttgagtatgggattgtaaa

SEQ ID NO: 5373545 - DNA, 25 bp, Homo sapien
tgctgccaatctgattcctaatgct

SEQ ID NO: 5373546 - DNA, 25 bp, Homo sapien
tactcctgctccattaagggtgaga

SEQ ID NO: 5373547 - DNA, 25 bp, Homo sapien
ctactcctgctccattaagggtgag

SEQ ID NO: 5373548 - DNA, 25 bp, Homo sapien
tgatgacttgttgctgccaatctga

SEQ ID NO: 5373549 - DNA, 25 bp, Homo sapien
gggccctgatgacaacggagccatc

SEQ ID NO: 5373550 - DNA, 25 bp, Homo sapien
tcctgggttcctctgaccgtgatga

SEQ ID NO: 5373551 - DNA, 25 bp, Homo sapien
tgatgacaacggagccatcctgggt

SEQ ID NO: 5373552 - DNA, 25 bp, Homo sapien
tagatggtggaagattgggccctga

SEQ ID NO: 5373553 - DNA, 25 bp, Homo sapien
acagcctcggttctcagctctgagg

SEQ ID NO: 5373554 - DNA, 25 bp, Homo sapien
tggcagccccacgagcctgcaaacc

SEQ ID NO: 5373555 - DNA, 25 bp, Homo sapien
ccaactggtgggtaaaacgcagaca

SEQ ID NO: 5373556 - DNA, 25 bp, Homo sapien
catctcatcacagcctcggttctca

SEQ ID NO: 5373557 - DNA, 25 bp, Homo sapien
tgtgaggtggtaacgctctctccct

SEQ ID NO: 5373558 - DNA, 25 bp, Homo sapien
tttgctgatgctaaacaatgtctcc

SEQ ID NO: 5373559 - DNA, 25 bp, Homo sapien
cactatcttatgtgtctgctgatgg

SEQ ID NO: 5373560 - DNA, 25 bp, Homo sapien
ttctcccttggaccatgagaaggag

SEQ ID NO: 5373561 - DNA, 25 bp, Homo sapien
ttgtacggggtatggctctcagtca

SEQ ID NO: 5373562 - DNA, 25 bp, Homo sapien
tttgtacggggtatggctctcagtc

SEQ ID NO: 5373563 - DNA, 25 bp, Homo sapien
ttttgtacggggtatggctctcagt

SEQ ID NO: 5373564 - DNA, 25 bp, Homo sapien
tgtacggggtatggctctcagtcac

SEQ ID NO: 5373565 - DNA, 25 bp, Homo sapien
tcttcaggttgtgtttcaagttcca

SEQ ID NO: 5373566 - DNA, 25 bp, Homo sapien
tgttttgcaggaaatgcccatttcc

SEQ ID NO: 5373567 - DNA, 25 bp, Homo sapien
ctgagtctgttttgcaggaaatgcc

SEQ ID NO: 5373568 - DNA, 25 bp, Homo sapien
gtctgttttgcaggaaatgcccatt

SEQ ID NO: 5373569 - DNA, 25 bp, Homo sapien
ggcttgtaggaaattcagtctgaat

SEQ ID NO: 5373570 - DNA, 25 bp, Homo sapien
ttggtactcctgctttcccaagcat

SEQ ID NO: 5373571 - DNA, 25 bp, Homo sapien
tctgctgggcttgtaggaaattcag

SEQ ID NO: 5373572 - DNA, 25 bp, Homo sapien
gaatatcatgatttggtactcctgc

SEQ ID NO: 5373573 - DNA, 25 bp, Homo sapien
gcgggttttgactcaagctcccaga

SEQ ID NO: 5373574 - DNA, 25 bp, Homo sapien
gagcatacctgtgcgctgaggctaa

SEQ ID NO: 5373575 - DNA, 25 bp, Homo sapien
tgtgccctttaaggaccaggaggca

SEQ ID NO: 5373576 - DNA, 25 bp, Homo sapien
ggttagttctcctggaagcctcgag

SEQ ID NO: 5373577 - DNA, 25 bp, Homo sapien
tcagggcataggcagaagggcctct

SEQ ID NO: 5373578 - DNA, 25 bp, Homo sapien
cagcagcatgcccctaagcgctggg

SEQ ID NO: 5373579 - DNA, 25 bp, Homo sapien
gcatgcccctaagcgctggggtcca

SEQ ID NO: 5373580 - DNA, 25 bp, Homo sapien
caccgcagatccagctgcacttgtt

SEQ ID NO: 5373581 - DNA, 25 bp, Homo sapien
gcccagcttgagcaagtggtcaacc

SEQ ID NO: 5373582 - DNA, 25 bp, Homo sapien
ccagcttgagcaagtggtcaaccct

SEQ ID NO: 5373583 - DNA, 25 bp, Homo sapien
tgagcaagtggtcaaccctgctcac

SEQ ID NO: 5373584 - DNA, 25 bp, Homo sapien
gcttgagcaagtggtcaaccctgct

SEQ ID NO: 5373585 - DNA, 25 bp, Homo sapien
ttgggggctagtcccacaaacatgg

SEQ ID NO: 5373586 - DNA, 25 bp, Homo sapien
tttgggggctagtcccacaaacatg

SEQ ID NO: 5373587 - DNA, 25 bp, Homo sapien
tgtttgggggctagtcccacaaaca

SEQ ID NO: 5373588 - DNA, 25 bp, Homo sapien
gctgtttgggggctagtcccacaaa

SEQ ID NO: 5373589 - DNA, 25 bp, Homo sapien
gagacaactctcatagatcaatgtg

SEQ ID NO: 5373590 - DNA, 25 bp, Homo sapien
acaaagggcccatgacactgtgcga

SEQ ID NO: 5373591 - DNA, 25 bp, Homo sapien
aaactgtaaacagggatgacgctgc

SEQ ID NO: 5373592 - DNA, 25 bp, Homo sapien
cctgtcacggaggagcaaggagtac

SEQ ID NO: 5373593 - DNA, 25 bp, Homo sapien
cacattgagtgtggatctctcctcc

SEQ ID NO: 5373594 - DNA, 25 bp, Homo sapien
tcctctcggagcaacgttcctattg

SEQ ID NO: 5373595 - DNA, 25 bp, Homo sapien
tattgacattcggagaggcacgctg

SEQ ID NO: 5373596 - DNA, 25 bp, Homo sapien
cattttcaaacacaggacgtgagca

SEQ ID NO: 5373597 - DNA, 25 bp, Homo sapien
tatagaattagatgcctatcctggc

SEQ ID NO: 5373598 - DNA, 25 bp, Homo sapien
tcctggctacggtcagaggaaagaa

SEQ ID NO: 5373599 - DNA, 25 bp, Homo sapien
ccagaaattaggtttcaggttgtga

SEQ ID NO: 5373600 - DNA, 25 bp, Homo sapien
gtttttccattccacggacaagcta

SEQ ID NO: 5373601 - DNA, 25 bp, Homo sapien
tgtgattctgcacagcgctcctgga

SEQ ID NO: 5373602 - DNA, 25 bp, Homo sapien
gacagtgctggatcctcacgcaggt

SEQ ID NO: 5373603 - DNA, 25 bp, Homo sapien
aagaccttgaggttatctccggaga

SEQ ID NO: 5373604 - DNA, 25 bp, Homo sapien
caggcggttggtcatctcggtgcac

SEQ ID NO: 5373605 - DNA, 25 bp, Homo sapien
cttacagaggtaaaaccgagtagat

SEQ ID NO: 5373606 - DNA, 25 bp, Homo sapien
cagtaacgctgttccctgcattgga

SEQ ID NO: 5373607 - DNA, 25 bp, Homo sapien
acagatacaactttcccgggatggg

SEQ ID NO: 5373608 - DNA, 25 bp, Homo sapien
cttttgagttcaggccttacagagg

SEQ ID NO: 5373609 - DNA, 25 bp, Homo sapien
cggagagggtgggatctgcgggctc

SEQ ID NO: 5373610 - DNA, 25 bp, Homo sapien
ggaatcagaacactggaaaggcttc

SEQ ID NO: 5373611 - DNA, 25 bp, Homo sapien
ccctgggtggcttgatttcgacacc

SEQ ID NO: 5373612 - DNA, 25 bp, Homo sapien
tttctggaatcagaacactggaaag

SEQ ID NO: 5373613 - DNA, 25 bp, Homo sapien
gctgcggatggcaggttctctcctg

SEQ ID NO: 5373614 - DNA, 25 bp, Homo sapien
ggagaagagtgatttacattcctgc

SEQ ID NO: 5373615 - DNA, 25 bp, Homo sapien
gaaccggcttcaactaggaggagga

SEQ ID NO: 5373616 - DNA, 25 bp, Homo sapien
cctgccgaggtgtaaagctgcggat

SEQ ID NO: 5373617 - DNA, 25 bp, Homo sapien
tccgtcacactagatgcatatagct

SEQ ID NO: 5373618 - DNA, 25 bp, Homo sapien
cccgtgatgccgagctgaaaaagac

SEQ ID NO: 5373619 - DNA, 25 bp, Homo sapien
tgaaaaagacagtctccaggtagga

SEQ ID NO: 5373620 - DNA, 25 bp, Homo sapien
catatagcttcatgcaagaagagcg

SEQ ID NO: 5373621 - DNA, 25 bp, Homo sapien
ctttggccgcgatcccgtgacaatg

SEQ ID NO: 5373622 - DNA, 25 bp, Homo sapien
ccaactggcttttgcgaaccgctct

SEQ ID NO: 5373623 - DNA, 25 bp, Homo sapien
tgacaatgccggcatccgggcacca

SEQ ID NO: 5373624 - DNA, 25 bp, Homo sapien
agcccggagccgtttacagtttgag

SEQ ID NO: 5373625 - DNA, 25 bp, Homo sapien
gaggccgttactgtcgcggctgagg

SEQ ID NO: 5373626 - DNA, 25 bp, Homo sapien
gcggctgagggggcgtcccggtgta

SEQ ID NO: 5373627 - DNA, 25 bp, Homo sapien
ctgagggggcgtcccggtgtatccg

SEQ ID NO: 5373628 - DNA, 25 bp, Homo sapien
ggctgagggggcgtcccggtgtatc

SEQ ID NO: 5373629 - DNA, 25 bp, Homo sapien
tgaaggggcgtgtcccggtgtatcc

SEQ ID NO: 5373630 - DNA, 25 bp, Homo sapien
ggccgttactgtcgcggctgaaggg

SEQ ID NO: 5373631 - DNA, 25 bp, Homo sapien
ggctgaaggggcgtgtcccggtgta

SEQ ID NO: 5373632 - DNA, 25 bp, Homo sapien
gaggccgttactgtcgcggctgaag

SEQ ID NO: 5373633 - DNA, 25 bp, Homo sapien
ccgtgcttttcaaacacccgccgtg

SEQ ID NO: 5373634 - DNA, 25 bp, Homo sapien
cgtgcttttcaaacacccgccgtgg

SEQ ID NO: 5373635 - DNA, 25 bp, Homo sapien
acacacggcgataaagagccaggcc

SEQ ID NO: 5373636 - DNA, 25 bp, Homo sapien
ggggacacacggcgataaagagcca

SEQ ID NO: 5373637 - DNA, 25 bp, Homo sapien
cacggcgataaagagccaggccctc

SEQ ID NO: 5373638 - DNA, 25 bp, Homo sapien
ggcggggacacacggcgataaagag

SEQ ID NO: 5373639 - DNA, 25 bp, Homo sapien
gaaagagaactctgttggatggtaa

SEQ ID NO: 5373640 - DNA, 25 bp, Homo sapien
tggatggtaatgtaagaggactctg

SEQ ID NO: 5373641 - DNA, 25 bp, Homo sapien
caaattggatttggaggtgctcagg

SEQ ID NO: 5373642 - DNA, 25 bp, Homo sapien
gataaactcttcattcaaacagggt

SEQ ID NO: 5373643 - DNA, 25 bp, Homo sapien
cctcaaggctctctggagtgtaggc

SEQ ID NO: 5373644 - DNA, 25 bp, Homo sapien
caaggctctctggagtgtaggccaa

SEQ ID NO: 5373645 - DNA, 25 bp, Homo sapien
ctggccagtagactccagcctgatc

SEQ ID NO: 5373646 - DNA, 25 bp, Homo sapien
gctctctggagtgtaggccaaagcc

SEQ ID NO: 5373647 - DNA, 25 bp, Homo sapien
catcagtgccattcagtcgtttgtt

SEQ ID NO: 5373648 - DNA, 25 bp, Homo sapien
cctagaggtgaatacctattatcat

SEQ ID NO: 5373649 - DNA, 25 bp, Homo sapien
gaatacctattatcatcagtgccat

SEQ ID NO: 5373650 - DNA, 25 bp, Homo sapien
tcagtgccattcagtcgtttgttgg

SEQ ID NO: 5373651 - DNA, 25 bp, Homo sapien
ttgctataaatccaccacaggtgtc

SEQ ID NO: 5373652 - DNA, 25 bp, Homo sapien
tgctgtgtttggctccaagcacttc

SEQ ID NO: 5373653 - DNA, 25 bp, Homo sapien
caaaggcgaacgctccaggtgcacc

SEQ ID NO: 5373654 - DNA, 25 bp, Homo sapien
ggaaataagtcacagacgtcctcaa

SEQ ID NO: 5373655 - DNA, 25 bp, Homo sapien
tctctcgtagcagtggaaggtactc

SEQ ID NO: 5373656 - DNA, 25 bp, Homo sapien
gtaatgtaccaagcatctctcgtag

SEQ ID NO: 5373657 - DNA, 25 bp, Homo sapien
caccagcattgtagagcagcattat

SEQ ID NO: 5373658 - DNA, 25 bp, Homo sapien
gagccatagattttagctgccaatg

SEQ ID NO: 5373659 - DNA, 25 bp, Homo sapien
tccatggcaaaaggtagttgcagtg

SEQ ID NO: 5373660 - DNA, 25 bp, Homo sapien
aagccggcttcacctcaagagagga

SEQ ID NO: 5373661 - DNA, 25 bp, Homo sapien
tagaaacaatccctgaaactacagt

SEQ ID NO: 5373662 - DNA, 25 bp, Homo sapien
ggaggagaaggacaatcatccatgg

SEQ ID NO: 5373663 - DNA, 25 bp, Homo sapien
ttatgcaagggtatggaaatttttc

SEQ ID NO: 5373664 - DNA, 25 bp, Homo sapien
tcatttgaaaaggcccaactcagca

SEQ ID NO: 5373665 - DNA, 25 bp, Homo sapien
aagagcccattacaatccagttcgt

SEQ ID NO: 5373666 - DNA, 25 bp, Homo sapien
catttcggaataaacgactccccat

SEQ ID NO: 5373667 - DNA, 25 bp, Homo sapien
gaccgggcttatgcgtgatagtctt

SEQ ID NO: 5373668 - DNA, 25 bp, Homo sapien
gacagatactggaccgggcttatgc

SEQ ID NO: 5373669 - DNA, 25 bp, Homo sapien
tgtaatagacagatactggaccggg

SEQ ID NO: 5373670 - DNA, 25 bp, Homo sapien
cgtgatagtcttttgattgatgttc

SEQ ID NO: 5373671 - DNA, 25 bp, Homo sapien
tcatgaaggcatgcaatggctgatg

SEQ ID NO: 5373672 - DNA, 25 bp, Homo sapien
catgcaatggctgatggtccggctg

SEQ ID NO: 5373673 - DNA, 25 bp, Homo sapien
tgcataagcccgtgttcattttaaa

SEQ ID NO: 5373674 - DNA, 25 bp, Homo sapien
gatggtccggctgcataagcccgtg

SEQ ID NO: 5373675 - DNA, 25 bp, Homo sapien
tcccaaagagtgtctgggccttggt

SEQ ID NO: 5373676 - DNA, 25 bp, Homo sapien
ttttggaaggagactcaggcagcag

SEQ ID NO: 5373677 - DNA, 25 bp, Homo sapien
cagacctgtgcctggtgacctgttg

SEQ ID NO: 5373678 - DNA, 25 bp, Homo sapien
gaggccagctttgcagtcccaaaga

SEQ ID NO: 5373679 - DNA, 25 bp, Homo sapien
gaggagccctcagtgtatactggct

SEQ ID NO: 5373680 - DNA, 25 bp, Homo sapien
gaagctgaacttgagtgcatgtccc

SEQ ID NO: 5373681 - DNA, 25 bp, Homo sapien
ggaaaccccatgtgaactccaagga

SEQ ID NO: 5373682 - DNA, 25 bp, Homo sapien
gcactattgttgtgggaagctgaac

SEQ ID NO: 5373683 - DNA, 25 bp, Homo sapien
cttccttccctctataccctccatt

SEQ ID NO: 5373684 - DNA, 25 bp, Homo sapien
ctggtcagtttcctccaccagctca

SEQ ID NO: 5373685 - DNA, 25 bp, Homo sapien
tggtcagtttcctccaccagctcac

SEQ ID NO: 5373686 - DNA, 25 bp, Homo sapien
tactggtcagtttcctccaccagct

SEQ ID NO: 5373687 - DNA, 25 bp, Homo sapien
ctactggtcagtttcctccaccagc

SEQ ID NO: 5373688 - DNA, 25 bp, Homo sapien
tgtccatttcaagaacactggtgac

SEQ ID NO: 5373689 - DNA, 25 bp, Homo sapien
tcggtgtttctgaagcagtggtctc

SEQ ID NO: 5373690 - DNA, 25 bp, Homo sapien
ccctgctaagggtgcttcttctcgg

SEQ ID NO: 5373691 - DNA, 25 bp, Homo sapien
cactggtgaccctgctaagggtgct

SEQ ID NO: 5373692 - DNA, 25 bp, Homo sapien
tggcccaaggaggacaggtcaagta

SEQ ID NO: 5373693 - DNA, 25 bp, Homo sapien
cagtttcactcttatgacctatacc

SEQ ID NO: 5373694 - DNA, 25 bp, Homo sapien
tcctttgcaggactggaggatgcta

SEQ ID NO: 5373695 - DNA, 25 bp, Homo sapien
tgaggagaagagctaccaatgcctt

SEQ ID NO: 5373696 - DNA, 25 bp, Homo sapien
tgtgatgtcaggactatgagactgc

SEQ ID NO: 5373697 - DNA, 25 bp, Homo sapien
acagactgaaaagggtggtctggca

SEQ ID NO: 5373698 - DNA, 25 bp, Homo sapien
tcccaccacttggactgccagggat

SEQ ID NO: 5373699 - DNA, 25 bp, Homo sapien
gactgccagggattggtcagtttcc

SEQ ID NO: 5373700 - DNA, 25 bp, Homo sapien
ccaattaaccgtagtaattacatct

SEQ ID NO: 5373701 - DNA, 25 bp, Homo sapien
tccactgcgtgctctgaaatgtgga

SEQ ID NO: 5373702 - DNA, 25 bp, Homo sapien
tctgaaatgtggagtgcacgggtat

SEQ ID NO: 5373703 - DNA, 25 bp, Homo sapien
taaccgtagtaattacatctcttcc

SEQ ID NO: 5373704 - DNA, 25 bp, Homo sapien
tcctccaggatcagttgttccttgt

SEQ ID NO: 5373705 - DNA, 25 bp, Homo sapien
ctctttcctccaggatcagttgttc

SEQ ID NO: 5373706 - DNA, 25 bp, Homo sapien
tctggagtccgtatttctgttgcca

SEQ ID NO: 5373707 - DNA, 25 bp, Homo sapien
attttgttggcaaatgtttatccag

SEQ ID NO: 5373708 - DNA, 25 bp, Homo sapien
ttgattactgggctctgcttgcaca

SEQ ID NO: 5373709 - DNA, 25 bp, Homo sapien
gattactgggctctgcttgcacatt

SEQ ID NO: 5373710 - DNA, 25 bp, Homo sapien
ttactgggctctgcttgcacatttc

SEQ ID NO: 5373711 - DNA, 25 bp, Homo sapien
tactgggctctgcttgcacatttcc

SEQ ID NO: 5373712 - DNA, 25 bp, Homo sapien
cagggcatccagtggattggcagtc

SEQ ID NO: 5373713 - DNA, 25 bp, Homo sapien
gggcatccagtggattggcagtctt

SEQ ID NO: 5373714 - DNA, 25 bp, Homo sapien
agaggagcagggcatccagtggatt

SEQ ID NO: 5373715 - DNA, 25 bp, Homo sapien
gagcagggcatccagtggattggca

SEQ ID NO: 5373716 - DNA, 25 bp, Homo sapien
ctttaataagaggcaaacattgact

SEQ ID NO: 5373717 - DNA, 25 bp, Homo sapien
ataagaggcaaacattgacttcctc

SEQ ID NO: 5373718 - DNA, 25 bp, Homo sapien
taataagaggcaaacattgacttcc

SEQ ID NO: 5373719 - DNA, 25 bp, Homo sapien
ttaataagaggcaaacattgacttc

SEQ ID NO: 5373720 - DNA, 25 bp, Homo sapien
tagcatccacctgtggtagtgtctt

SEQ ID NO: 5373721 - DNA, 25 bp, Homo sapien
tttttagcatccacctgtggtagtg

SEQ ID NO: 5373722 - DNA, 25 bp, Homo sapien
tttagcatccacctgtggtagtgtc

SEQ ID NO: 5373723 - DNA, 25 bp, Homo sapien
agcatccacctgtggtagtgtcttc

SEQ ID NO: 5373724 - DNA, 25 bp, Homo sapien
ctccccagtcaagttcttgtctttt

SEQ ID NO: 5373725 - DNA, 25 bp, Homo sapien
aatatgggccgcttttattcctctc

SEQ ID NO: 5373726 - DNA, 25 bp, Homo sapien
tcttgtctttttgggaatatgggcc

SEQ ID NO: 5373727 - DNA, 25 bp, Homo sapien
tgtctttttgggaatatgggccgct

SEQ ID NO: 5373728 - DNA, 25 bp, Homo sapien
tgcagcatgcttgtaccaggatcct

SEQ ID NO: 5373729 - DNA, 25 bp, Homo sapien
caggcactgtggtcaatgcaaagat

SEQ ID NO: 5373730 - DNA, 25 bp, Homo sapien
gatccttgataatccactggctgtc

SEQ ID NO: 5373731 - DNA, 25 bp, Homo sapien
tgtgaagcatctactgtgtcaggca

SEQ ID NO: 5373732 - DNA, 25 bp, Homo sapien
gcttgggtcttgagctatctgcttc

SEQ ID NO: 5373733 - DNA, 25 bp, Homo sapien
atgcttgggtcttgagctatctgct

SEQ ID NO: 5373734 - DNA, 25 bp, Homo sapien
tgggtcttgagctatctgcttctta

SEQ ID NO: 5373735 - DNA, 25 bp, Homo sapien
gtcttgagctatctgcttcttaggg

SEQ ID NO: 5373736 - DNA, 25 bp, Homo sapien
ttaatcatctcccatatcatccatc

SEQ ID NO: 5373737 - DNA, 25 bp, Homo sapien
taatcatctcccatatcatccatca

SEQ ID NO: 5373738 - DNA, 25 bp, Homo sapien
aatcatctcccatatcatccatcac

SEQ ID NO: 5373739 - DNA, 25 bp, Homo sapien
agaagatggtgtttgctcagttccg

SEQ ID NO: 5373740 - DNA, 25 bp, Homo sapien
ttaccatcaaatggcaagcatcgtg

SEQ ID NO: 5373741 - DNA, 25 bp, Homo sapien
catcagctgttaccatcaaatggca

SEQ ID NO: 5373742 - DNA, 25 bp, Homo sapien
cagttccgtaagcatcagctgttac

SEQ ID NO: 5373743 - DNA, 25 bp, Homo sapien
ctagcagatactgctttcggagcat

SEQ ID NO: 5373744 - DNA, 25 bp, Homo sapien
tgacaaaaggactagcagatactgc

SEQ ID NO: 5373745 - DNA, 25 bp, Homo sapien
ctgacaaaaggactagcagatactg

SEQ ID NO: 5373746 - DNA, 25 bp, Homo sapien
tctgacaaaaggactagcagatact

SEQ ID NO: 5373747 - DNA, 25 bp, Homo sapien
acctgaatagaacagcggatgtagc

SEQ ID NO: 5373748 - DNA, 25 bp, Homo sapien
tgtcatcttgaagaacctgaataga

SEQ ID NO: 5373749 - DNA, 25 bp, Homo sapien
ctgaatagaacagcggatgtagccc

SEQ ID NO: 5373750 - DNA, 25 bp, Homo sapien
gtcatcttgaagaacctgaatagaa

SEQ ID NO: 5373751 - DNA, 25 bp, Homo sapien
ggaattatgtcttctacctcttggt

SEQ ID NO: 5373752 - DNA, 25 bp, Homo sapien
tactgggtagatggttgacagccaa

SEQ ID NO: 5373753 - DNA, 25 bp, Homo sapien
agatggttgacagccaataacttcc

SEQ ID NO: 5373754 - DNA, 25 bp, Homo sapien
tgactgtcaattctctgagtaggaa

SEQ ID NO: 5373755 - DNA, 25 bp, Homo sapien
tgagatgcacatctgatccgagcag

SEQ ID NO: 5373756 - DNA, 25 bp, Homo sapien
tctgagatgcacatctgatccgagc

SEQ ID NO: 5373757 - DNA, 25 bp, Homo sapien
atctgatccgagcagcacctccttg

SEQ ID NO: 5373758 - DNA, 25 bp, Homo sapien
tgcacatctgatccgagcagcacct

SEQ ID NO: 5373759 - DNA, 25 bp, Homo sapien
aggtattcttcatctgcggccttca

SEQ ID NO: 5373760 - DNA, 25 bp, Homo sapien
caggtattcttcatctgcggccttc

SEQ ID NO: 5373761 - DNA, 25 bp, Homo sapien
ggtattcttcatctgcggccttcac

SEQ ID NO: 5373762 - DNA, 25 bp, Homo sapien
ttcaggtattcttcatctgcggcct

SEQ ID NO: 5373763 - DNA, 25 bp, Homo sapien
gacctggaccccaaagttatgtgcc

SEQ ID NO: 5373764 - DNA, 25 bp, Homo sapien
ctggaccccaaagttatgtgccctc

SEQ ID NO: 5373765 - DNA, 25 bp, Homo sapien
gagacctggaccccaaagttatgtg

SEQ ID NO: 5373766 - DNA, 25 bp, Homo sapien
cctggaccccaaagttatgtgccct

SEQ ID NO: 5373767 - DNA, 25 bp, Homo sapien
ggcttggattaaatagggaatgctt

SEQ ID NO: 5373768 - DNA, 25 bp, Homo sapien
ctggtacagcctaagtctgaatgag

SEQ ID NO: 5373769 - DNA, 25 bp, Homo sapien
tcagtgtggcttggattaaataggg

SEQ ID NO: 5373770 - DNA, 25 bp, Homo sapien
acagcctaagtctgaatgagctggg

SEQ ID NO: 5373771 - DNA, 25 bp, Homo sapien
tctaccactcgacatggaacgccaa

SEQ ID NO: 5373772 - DNA, 25 bp, Homo sapien
ctgacgtggtggcatgggacgccaa

SEQ ID NO: 5373773 - DNA, 25 bp, Homo sapien
catggaacgccaaggtggctgacgt

SEQ ID NO: 5373774 - DNA, 25 bp, Homo sapien
gggaatcataacgttctctaccact

SEQ ID NO: 5373775 - DNA, 25 bp, Homo sapien
gtttagattcatttgtttctgtcat

SEQ ID NO: 5373776 - DNA, 25 bp, Homo sapien
tctcctttccatctgtacacaaaag

SEQ ID NO: 5373777 - DNA, 25 bp, Homo sapien
ttcacggccaccagacgaggagaga

SEQ ID NO: 5373778 - DNA, 25 bp, Homo sapien
ggtctgtacagctgtaatatccttc

SEQ ID NO: 5373779 - DNA, 25 bp, Homo sapien
aattttctacattcacggccaccag

SEQ ID NO: 5373780 - DNA, 25 bp, Homo sapien
actgtgagttctaggtctccatgca

SEQ ID NO: 5373781 - DNA, 25 bp, Homo sapien
ggtaagctgcaaggtcggctttgcc

SEQ ID NO: 5373782 - DNA, 25 bp, Homo sapien
gccaagctgctgagaactacactgt

SEQ ID NO: 5373783 - DNA, 25 bp, Homo sapien
catgtggggactaaaggccctacct

SEQ ID NO: 5373784 - DNA, 25 bp, Homo sapien
tcatagaccacgatgacctgaactg

SEQ ID NO: 5373785 - DNA, 25 bp, Homo sapien
gaccacgatgacctgaactgttttg

SEQ ID NO: 5373786 - DNA, 25 bp, Homo sapien
gatgacctgaactgttttggatgtc

SEQ ID NO: 5373787 - DNA, 25 bp, Homo sapien
tgttttggatgtcatgacccacggg

SEQ ID NO: 5373788 - DNA, 25 bp, Homo sapien
tcccttggcctgtagtttgagcctc

SEQ ID NO: 5373789 - DNA, 25 bp, Homo sapien
cctccaggtgatatggggcctcatc

SEQ ID NO: 5373790 - DNA, 25 bp, Homo sapien
aacggctcccttggcctgtagtttg

SEQ ID NO: 5373791 - DNA, 25 bp, Homo sapien
ttctaggaacggctcccttggcctg

SEQ ID NO: 5373792 - DNA, 25 bp, Homo sapien
taaacagatcagaatgcctcctgct

SEQ ID NO: 5373793 - DNA, 25 bp, Homo sapien
ggtctatgattccagctgcatggct

SEQ ID NO: 5373794 - DNA, 25 bp, Homo sapien
tcgggcaacctcaatgatccagggt

SEQ ID NO: 5373795 - DNA, 25 bp, Homo sapien
tttgagtggctactcgggcaacctc

SEQ ID NO: 5373796 - DNA, 25 bp, Homo sapien
ggttctgtgtatgaccccaaatcct

SEQ ID NO: 5373797 - DNA, 25 bp, Homo sapien
tatgtcaactctacatcttcgtggg

SEQ ID NO: 5373798 - DNA, 25 bp, Homo sapien
gccagcacagggaccgttgtgaatt

SEQ ID NO: 5373799 - DNA, 25 bp, Homo sapien
aatcctaatgcccacgatgtccgtg

SEQ ID NO: 5373800 - DNA, 25 bp, Homo sapien
catcccctggcgctgtattgtctgg

SEQ ID NO: 5373801 - DNA, 25 bp, Homo sapien
tccagccactgctatttgatacaag

SEQ ID NO: 5373802 - DNA, 25 bp, Homo sapien
ggcctgtagttgtagtgactcctcc

SEQ ID NO: 5373803 - DNA, 25 bp, Homo sapien
caggaggttagcactgtttggccac

SEQ ID NO: 5373804 - DNA, 25 bp, Homo sapien
caactctgaacttgtcacagccgcc

SEQ ID NO: 5373805 - DNA, 25 bp, Homo sapien
cccaactctgaacttgtcacagccg

SEQ ID NO: 5373806 - DNA, 25 bp, Homo sapien
aactctgaacttgtcacagccgcca

SEQ ID NO: 5373807 - DNA, 25 bp, Homo sapien
actctgaacttgtcacagccgccat

SEQ ID NO: 5373808 - DNA, 25 bp, Homo sapien
tcatctatgctcatgaagtacaaaa

SEQ ID NO: 5373809 - DNA, 25 bp, Homo sapien
gggtaatgtgcccattcgagggtgg

SEQ ID NO: 5373810 - DNA, 25 bp, Homo sapien
gtaatgtgcccattcgagggtggca

SEQ ID NO: 5373811 - DNA, 25 bp, Homo sapien
taatgtgcccattcgagggtggcac

SEQ ID NO: 5373812 - DNA, 25 bp, Homo sapien
tggcatctgcactgggtatcatctg

SEQ ID NO: 5373813 - DNA, 25 bp, Homo sapien
gcagctttggcaactacaggagata

SEQ ID NO: 5373814 - DNA, 25 bp, Homo sapien
cagtgctgcagtgcccttaatgctg

SEQ ID NO: 5373815 - DNA, 25 bp, Homo sapien
gcttgcagcaagaggcttcaaccca

SEQ ID NO: 5373816 - DNA, 25 bp, Homo sapien
tataaataagtaagagatctgtaac

SEQ ID NO: 5373817 - DNA, 25 bp, Homo sapien
ctgaaatcactgagattattactct

SEQ ID NO: 5373818 - DNA, 25 bp, Homo sapien
gaaatcactgagattattactctga

SEQ ID NO: 5373819 - DNA, 25 bp, Homo sapien
tgatctgttaaggaagtgtattgat

SEQ ID NO: 5373820 - DNA, 25 bp, Homo sapien
tgaatgctcttgattcagtgccata

SEQ ID NO: 5373821 - DNA, 25 bp, Homo sapien
tccattcaaagtcccacaaatcagc

SEQ ID NO: 5373822 - DNA, 25 bp, Homo sapien
tcaacatagaggaaagtgaatgctc

SEQ ID NO: 5373823 - DNA, 25 bp, Homo sapien
tggtagcctccgataagtccaagtg

SEQ ID NO: 5373824 - DNA, 25 bp, Homo sapien
ccaacctaaacactctctatactgt

SEQ ID NO: 5373825 - DNA, 25 bp, Homo sapien
taaacactctctatactgttgaaga

SEQ ID NO: 5373826 - DNA, 25 bp, Homo sapien
ctttgacgctgaacaccattctgcc

SEQ ID NO: 5373827 - DNA, 25 bp, Homo sapien
gagcatgactttgacgctgaacacc

SEQ ID NO: 5373828 - DNA, 25 bp, Homo sapien
cagccactcattgacgtgcccgttt

SEQ ID NO: 5373829 - DNA, 25 bp, Homo sapien
gcttctccagggcatatggcgattt

SEQ ID NO: 5373830 - DNA, 25 bp, Homo sapien
gcgatttccaagcaggcgactccat

SEQ ID NO: 5373831 - DNA, 25 bp, Homo sapien
ggaaggacgtctatcatgccagcca

SEQ ID NO: 5373832 - DNA, 25 bp, Homo sapien
caaacactggttctgcattccactg

SEQ ID NO: 5373833 - DNA, 25 bp, Homo sapien
tagaatccaggactgaatgactgcc

SEQ ID NO: 5373834 - DNA, 25 bp, Homo sapien
gggcactatctgcagttgaagactg

SEQ ID NO: 5373835 - DNA, 25 bp, Homo sapien
tgaagactgtttaccacagggaaag

SEQ ID NO: 5373836 - DNA, 25 bp, Homo sapien
aaagcatctgtatctagaactgaac

SEQ ID NO: 5373837 - DNA, 25 bp, Homo sapien
gttcatgaaagcatctgtatctaga

SEQ ID NO: 5373838 - DNA, 25 bp, Homo sapien
tgaaagcatctgtatctagaactga

SEQ ID NO: 5373839 - DNA, 25 bp, Homo sapien
agcatctgtatctagaactgaacat

SEQ ID NO: 5373840 - DNA, 25 bp, Homo sapien
cacttttgggggtcttgtttgctga

SEQ ID NO: 5373841 - DNA, 25 bp, Homo sapien
tgctgagttatttgcaactggagaa

SEQ ID NO: 5373842 - DNA, 25 bp, Homo sapien
tttgctgagttatttgcaactggag

SEQ ID NO: 5373843 - DNA, 25 bp, Homo sapien
cttgtttgctgagttatttgcaact

SEQ ID NO: 5373844 - DNA, 25 bp, Homo sapien
aatggtagtgtcaatatctttcttg

SEQ ID NO: 5373845 - DNA, 25 bp, Homo sapien
aaatggtagtgtcaatatctttctt

SEQ ID NO: 5373846 - DNA, 25 bp, Homo sapien
ttgatcagccgtctgcacttaaaag

SEQ ID NO: 5373847 - DNA, 25 bp, Homo sapien
tgctcttcggagacaaatacttgct

SEQ ID NO: 5373848 - DNA, 25 bp, Homo sapien
gcttttcattttgatcagccgtctg

SEQ ID NO: 5373849 - DNA, 25 bp, Homo sapien
aatattttgctggtgtagagggcct

SEQ ID NO: 5373850 - DNA, 25 bp, Homo sapien
gccttttcgaggagcttttctattc

SEQ ID NO: 5373851 - DNA, 25 bp, Homo sapien
actgaaaatggctcatcctattgat

SEQ ID NO: 5373852 - DNA, 25 bp, Homo sapien
tctattgcaatgcatttctatgcct

SEQ ID NO: 5373853 - DNA, 25 bp, Homo sapien
gaaaatggctcatcctattgataca

SEQ ID NO: 5373854 - DNA, 25 bp, Homo sapien
tgcttgttgtcacgttcctgttgag

SEQ ID NO: 5373855 - DNA, 25 bp, Homo sapien
cctcatcaaggatcagggactgctt

SEQ ID NO: 5373856 - DNA, 25 bp, Homo sapien
cctgtgtagatgttgtcctcatcaa

SEQ ID NO: 5373857 - DNA, 25 bp, Homo sapien
taaagatgtgtaaacttcccaggtg

SEQ ID NO: 5373858 - DNA, 25 bp, Homo sapien
ttatggatcagagcaagtgagcagc

SEQ ID NO: 5373859 - DNA, 25 bp, Homo sapien
gcacatcgcattctaccaatttagc

SEQ ID NO: 5373860 - DNA, 25 bp, Homo sapien
atcagagcaagtgagcagcacatcg

SEQ ID NO: 5373861 - DNA, 25 bp, Homo sapien
caagtgagcagcacatcgcattcta

SEQ ID NO: 5373862 - DNA, 25 bp, Homo sapien
tccgtaatgttctgtggtcgtaact

SEQ ID NO: 5373863 - DNA, 25 bp, Homo sapien
taatgttctgtggtcgtaactgttg

SEQ ID NO: 5373864 - DNA, 25 bp, Homo sapien
gttctgtggtcgtaactgttgtcca

SEQ ID NO: 5373865 - DNA, 25 bp, Homo sapien
ctattccgtaatgttctgtggtcgt

SEQ ID NO: 5373866 - DNA, 25 bp, Homo sapien
cggaaagaggaggaacaccttcagc

SEQ ID NO: 5373867 - DNA, 25 bp, Homo sapien
gacggaaagaggaggaacaccttca

SEQ ID NO: 5373868 - DNA, 25 bp, Homo sapien
agaggaggaacaccttcagcaccat

SEQ ID NO: 5373869 - DNA, 25 bp, Homo sapien
ttgaagacggaaagaggaggaacac

SEQ ID NO: 5373870 - DNA, 25 bp, Homo sapien
atgtactggatatccagcagggata

SEQ ID NO: 5373871 - DNA, 25 bp, Homo sapien
tactggatatccagcagggatatga

SEQ ID NO: 5373872 - DNA, 25 bp, Homo sapien
atatccagcagggatatgatcaggg

SEQ ID NO: 5373873 - DNA, 25 bp, Homo sapien
ggatatccagcagggatatgatcag

SEQ ID NO: 5373874 - DNA, 25 bp, Homo sapien
tggtaaaaagttggtatgaggtgta

SEQ ID NO: 5373875 - DNA, 25 bp, Homo sapien
ctctggtaaaaagttggtatgaggt

SEQ ID NO: 5373876 - DNA, 25 bp, Homo sapien
aaagttggtatgaggtgtatgtatc

SEQ ID NO: 5373877 - DNA, 25 bp, Homo sapien
gtaaaaagttggtatgaggtgtatg

SEQ ID NO: 5373878 - DNA, 25 bp, Homo sapien
cagttgagggttaactgtcttctcc

SEQ ID NO: 5373879 - DNA, 25 bp, Homo sapien
ttctcctttcctgcgaatgcttcac

SEQ ID NO: 5373880 - DNA, 25 bp, Homo sapien
aatgcttcacgccgcctcctggtga

SEQ ID NO: 5373881 - DNA, 25 bp, Homo sapien
cctcctggtgaccaaataaagccat

SEQ ID NO: 5373882 - DNA, 25 bp, Homo sapien
cttagtaacctgatgagtacttctc

SEQ ID NO: 5373883 - DNA, 25 bp, Homo sapien
tagtaacctgatgagtacttctcat

SEQ ID NO: 5373884 - DNA, 25 bp, Homo sapien
ttcttcttagtaacctgatgagtac

SEQ ID NO: 5373885 - DNA, 25 bp, Homo sapien
ttcttagtaacctgatgagtacttc

SEQ ID NO: 5373886 - DNA, 25 bp, Homo sapien
ggggtgtaagagatcctatcctgga

SEQ ID NO: 5373887 - DNA, 25 bp, Homo sapien
gggtgtaagagatcctatcctggaa

SEQ ID NO: 5373888 - DNA, 25 bp, Homo sapien
agggggtgtaagagatcctatcctg

SEQ ID NO: 5373889 - DNA, 25 bp, Homo sapien
cctgtgaggtgaatggggtgacgtg

SEQ ID NO: 5373890 - DNA, 25 bp, Homo sapien
caggaggccagaagctaaacaagca

SEQ ID NO: 5373891 - DNA, 25 bp, Homo sapien
aagttggtttgcagcacacttcagg

SEQ ID NO: 5373892 - DNA, 25 bp, Homo sapien
ttaaagttggtttgcagcacacttc

SEQ ID NO: 5373893 - DNA, 25 bp, Homo sapien
taaacaagcaagtgtgagcgttagc

SEQ ID NO: 5373894 - DNA, 25 bp, Homo sapien
tcatctgcctcttgcatgttgcatt

SEQ ID NO: 5373895 - DNA, 25 bp, Homo sapien
ctttcccggtgtccaactgacatta

SEQ ID NO: 5373896 - DNA, 25 bp, Homo sapien
catctgcctcttgcatgttgcattc

SEQ ID NO: 5373897 - DNA, 25 bp, Homo sapien
tgtccaactgacattacaccatctc

SEQ ID NO: 5373898 - DNA, 25 bp, Homo sapien
gcttccaataagagtaaccagaggg

SEQ ID NO: 5373899 - DNA, 25 bp, Homo sapien
ccagaggggtccatagaaagtcaga

SEQ ID NO: 5373900 - DNA, 25 bp, Homo sapien
tcatgggcttccaataagagtaacc

SEQ ID NO: 5373901 - DNA, 25 bp, Homo sapien
gactcatgggcttccaataagagta

SEQ ID NO: 5373902 - DNA, 25 bp, Homo sapien
gtctctgtggtgcttctcggtcttt

SEQ ID NO: 5373903 - DNA, 25 bp, Homo sapien
tttcctgtctctgtggtgcttctcg

SEQ ID NO: 5373904 - DNA, 25 bp, Homo sapien
ctgtggtgcttctcggtctttctct

SEQ ID NO: 5373905 - DNA, 25 bp, Homo sapien
cctgtctctgtggtgcttctcggtc

SEQ ID NO: 5373906 - DNA, 25 bp, Homo sapien
ttccacactacagctgcagttttat

SEQ ID NO: 5373907 - DNA, 25 bp, Homo sapien
tatttggaaaattgatgagggcatt

SEQ ID NO: 5373908 - DNA, 25 bp, Homo sapien
gatgagggcattaagttctgaagtc

SEQ ID NO: 5373909 - DNA, 25 bp, Homo sapien
ctacagctgcagttttatttggaaa

SEQ ID NO: 5373910 - DNA, 25 bp, Homo sapien
aatggtgtcattacttcatagttgg

SEQ ID NO: 5373911 - DNA, 25 bp, Homo sapien
aattaagggttatcttgttgattgg

SEQ ID NO: 5373912 - DNA, 25 bp, Homo sapien
ctaatgcagaccttaaaattaaggg

SEQ ID NO: 5373913 - DNA, 25 bp, Homo sapien
tgggagtgccactaatgcagacctt

SEQ ID NO: 5373914 - DNA, 25 bp, Homo sapien
tttccatattcgtggctagcagtgt

SEQ ID NO: 5373915 - DNA, 25 bp, Homo sapien
ttccatattcgtggctagcagtgtc

SEQ ID NO: 5373916 - DNA, 25 bp, Homo sapien
gctttccatattcgtggctagcagt

SEQ ID NO: 5373917 - DNA, 25 bp, Homo sapien
attgctttccatattcgtggctagc

SEQ ID NO: 5373918 - DNA, 25 bp, Homo sapien
aaggtgaacaataaaattaggctgc

SEQ ID NO: 5373919 - DNA, 25 bp, Homo sapien
aaaaaatctttcagtcagttgagtg

SEQ ID NO: 5373920 - DNA, 25 bp, Homo sapien
tgtccagccatgcttgacttgacat

SEQ ID NO: 5373921 - DNA, 25 bp, Homo sapien
ctcttccatgttaaagtgagtcccc

SEQ ID NO: 5373922 - DNA, 25 bp, Homo sapien
tctgagtatgttccatctgtaaaat

SEQ ID NO: 5373923 - DNA, 25 bp, Homo sapien
gactcaatttgtaagctgctgggaa

SEQ ID NO: 5373924 - DNA, 25 bp, Homo sapien
gaaatatcaggcaagaaatgagaag

SEQ ID NO: 5373925 - DNA, 25 bp, Homo sapien
gctccaggagataacagatgaaata

SEQ ID NO: 5373926 - DNA, 25 bp, Homo sapien
ggactagatgcgctattgagatctg

SEQ ID NO: 5373927 - DNA, 25 bp, Homo sapien
cactggaaagatggactagatgcgc

SEQ ID NO: 5373928 - DNA, 25 bp, Homo sapien
cgctattgagatctgttgtacgata

SEQ ID NO: 5373929 - DNA, 25 bp, Homo sapien
taagtggctttgcactggaaagatg

SEQ ID NO: 5373930 - DNA, 25 bp, Homo sapien
gaccacatgctgtgtaaatgtgccc

SEQ ID NO: 5373931 - DNA, 25 bp, Homo sapien
cgttgatcccagtgaagtactgcat

SEQ ID NO: 5373932 - DNA, 25 bp, Homo sapien
gaagtactgcatcagaccacatgct

SEQ ID NO: 5373933 - DNA, 25 bp, Homo sapien
aatcttcagagggtcgttgatccca

SEQ ID NO: 5373934 - DNA, 25 bp, Homo sapien
gactagaatccatttgtatccaaac

SEQ ID NO: 5373935 - DNA, 25 bp, Homo sapien
acacacggatgcgtctctttgaagg

SEQ ID NO: 5373936 - DNA, 25 bp, Homo sapien
tatccaaacaatttgagaccctcgt

SEQ ID NO: 5373937 - DNA, 25 bp, Homo sapien
ttttcatttggatcagacacacgga

SEQ ID NO: 5373938 - DNA, 25 bp, Homo sapien
gtcgccattccaatattgtccacgg

SEQ ID NO: 5373939 - DNA, 25 bp, Homo sapien
gcagtcgccattccaatattgtcca

SEQ ID NO: 5373940 - DNA, 25 bp, Homo sapien
gagcagtcgccattccaatattgtc

SEQ ID NO: 5373941 - DNA, 25 bp, Homo sapien
cgccattccaatattgtccacggag

SEQ ID NO: 5373942 - DNA, 25 bp, Homo sapien
tgctctcccatttgccacattttgc

SEQ ID NO: 5373943 - DNA, 25 bp, Homo sapien
gagtctggtatgcttcagacaagca

SEQ ID NO: 5373944 - DNA, 25 bp, Homo sapien
cacattttgccggatgagtctggta

SEQ ID NO: 5373945 - DNA, 25 bp, Homo sapien
tgccggatgagtctggtatgcttca

SEQ ID NO: 5373946 - DNA, 25 bp, Homo sapien
ttcacgaaggaaagaggtcggtgga

SEQ ID NO: 5373947 - DNA, 25 bp, Homo sapien
cgaaggaaagaggtcggtggatgga

SEQ ID NO: 5373948 - DNA, 25 bp, Homo sapien
cacgaaggaaagaggtcggtggatg

SEQ ID NO: 5373949 - DNA, 25 bp, Homo sapien
gaaggaaagaggtcggtggatggaa

SEQ ID NO: 5373950 - DNA, 25 bp, Homo sapien
gattcatgtgcgtaggtctgaattc

SEQ ID NO: 5373951 - DNA, 25 bp, Homo sapien
cttcgattcatgtgcgtaggtctga

SEQ ID NO: 5373952 - DNA, 25 bp, Homo sapien
agcaccttcgattcatgtgcgtagg

SEQ ID NO: 5373953 - DNA, 25 bp, Homo sapien
ctgtacagcaccttcgattcatgtg

SEQ ID NO: 5373954 - DNA, 25 bp, Homo sapien
tattcctagcatctgcctggtccac

SEQ ID NO: 5373955 - DNA, 25 bp, Homo sapien
tggtccactggtagtgggtggccat

SEQ ID NO: 5373956 - DNA, 25 bp, Homo sapien
ctggtagtgggtggccattgctctc

SEQ ID NO: 5373957 - DNA, 25 bp, Homo sapien
cagtgggcgatctctattcctagca

SEQ ID NO: 5373958 - DNA, 25 bp, Homo sapien
cactagtgagagctgatgatgacag

SEQ ID NO: 5373959 - DNA, 25 bp, Homo sapien
tctgaaccatgtagcactgaaacac

SEQ ID NO: 5373960 - DNA, 25 bp, Homo sapien
gaaatagataatcaagttctgaacc

SEQ ID NO: 5373961 - DNA, 25 bp, Homo sapien
gcactgaaacactagtgagagctga

SEQ ID NO: 5373962 - DNA, 25 bp, Homo sapien
ggcacaagatgcgacatatccattg

SEQ ID NO: 5373963 - DNA, 25 bp, Homo sapien
gatgcgacatatccattgcaacctg

SEQ ID NO: 5373964 - DNA, 25 bp, Homo sapien
attgtcacctggcacaagatgcgac

SEQ ID NO: 5373965 - DNA, 25 bp, Homo sapien
tgacatttagtagcattgtcacctg

SEQ ID NO: 5373966 - DNA, 25 bp, Homo sapien
acagacagctgatccataagtgggc

SEQ ID NO: 5373967 - DNA, 25 bp, Homo sapien
tagtgttcatgtccgctgcttctcc

SEQ ID NO: 5373968 - DNA, 25 bp, Homo sapien
ccaggacgaaagtggtttgcatgca

SEQ ID NO: 5373969 - DNA, 25 bp, Homo sapien
caggtagatgcttgatccacagaca

SEQ ID NO: 5373970 - DNA, 25 bp, Homo sapien
tgagagggtgctttgaaacacccat

SEQ ID NO: 5373971 - DNA, 25 bp, Homo sapien
ctgagagggtgctttgaaacaccca

SEQ ID NO: 5373972 - DNA, 25 bp, Homo sapien
ttgcagatttgctgagagggtgctt

SEQ ID NO: 5373973 - DNA, 25 bp, Homo sapien
gcatttggagtgacgtcaattttaa

SEQ ID NO: 5373974 - DNA, 25 bp, Homo sapien
agcatttggagtgacgtcaatttta

SEQ ID NO: 5373975 - DNA, 25 bp, Homo sapien
atttggagtgacgtcaattttaatt

SEQ ID NO: 5373976 - DNA, 25 bp, Homo sapien
catttggagtgacgtcaattttaat

SEQ ID NO: 5373977 - DNA, 25 bp, Homo sapien
agccttggctcccttagatccatct

SEQ ID NO: 5373978 - DNA, 25 bp, Homo sapien
gccttggctcccttagatccatctt

SEQ ID NO: 5373979 - DNA, 25 bp, Homo sapien
ttagccttggctcccttagatccat

SEQ ID NO: 5373980 - DNA, 25 bp, Homo sapien
ctttagccttggctcccttagatcc

SEQ ID NO: 5373981 - DNA, 25 bp, Homo sapien
gtttttaagaaagatgcagcggtct

SEQ ID NO: 5373982 - DNA, 25 bp, Homo sapien
tagaaggtcttgagctgtagcctga

SEQ ID NO: 5373983 - DNA, 25 bp, Homo sapien
tgattgaagaatgcgtgcaggtgcc

SEQ ID NO: 5373984 - DNA, 25 bp, Homo sapien
gcagcggtctgtgaaaaggctaaca

SEQ ID NO: 5373985 - DNA, 25 bp, Homo sapien
gggacaaagacctaaagcgcttgtg

SEQ ID NO: 5373986 - DNA, 25 bp, Homo sapien
tcctggaatccttccgcaattctat

SEQ ID NO: 5373987 - DNA, 25 bp, Homo sapien
gcttgtggtaattgtcctggaatcc

SEQ ID NO: 5373988 - DNA, 25 bp, Homo sapien
tgcccaagagccatatactcatgac

SEQ ID NO: 5373989 - DNA, 25 bp, Homo sapien
tggggacctgcccatggaaaatgta

SEQ ID NO: 5373990 - DNA, 25 bp, Homo sapien
ggatcctgtgagcatcccttgatgg

SEQ ID NO: 5373991 - DNA, 25 bp, Homo sapien
actggatcctgtgagcatcccttga

SEQ ID NO: 5373992 - DNA, 25 bp, Homo sapien
ggggacctgcccatggaaaatgtaa

SEQ ID NO: 5373993 - DNA, 25 bp, Homo sapien
tgcctttggcagctgagggtgttca

SEQ ID NO: 5373994 - DNA, 25 bp, Homo sapien
ctgagggtgttcaggtaccagagac

SEQ ID NO: 5373995 - DNA, 25 bp, Homo sapien
caggctgtgcctttggcagctgagg

SEQ ID NO: 5373996 - DNA, 25 bp, Homo sapien
ggcagctgagggtgttcaggtacca

SEQ ID NO: 5373997 - DNA, 25 bp, Homo sapien
tgtggaagtatggaaaccactgcag

SEQ ID NO: 5373998 - DNA, 25 bp, Homo sapien
caaatctgtggaagtatggaaacca

SEQ ID NO: 5373999 - DNA, 25 bp, Homo sapien
gtatggaaaccactgcagacacttc

SEQ ID NO: 5374000 - DNA, 25 bp, Homo sapien
cagccaaatctgtggaagtatggaa

SEQ ID NO: 5374001 - DNA, 25 bp, Homo sapien
tttaaaagatgccattttgttgttg

SEQ ID NO: 5374002 - DNA, 25 bp, Homo sapien
taatcccatgtgcacagcaggatgg

SEQ ID NO: 5374003 - DNA, 25 bp, Homo sapien
catgtgcacagcaggatggttttaa

SEQ ID NO: 5374004 - DNA, 25 bp, Homo sapien
tgcacagcaggatggttttaaaaga

SEQ ID NO: 5374005 - DNA, 25 bp, Homo sapien
gagacagcagtcacacctaagaagt

SEQ ID NO: 5374006 - DNA, 25 bp, Homo sapien
ggccgtatcataccagtgctcagga

SEQ ID NO: 5374007 - DNA, 25 bp, Homo sapien
aactgcagggctattcactgtggcc

SEQ ID NO: 5374008 - DNA, 25 bp, Homo sapien
tgcaggagacattagccattagccc

SEQ ID NO: 5374009 - DNA, 25 bp, Homo sapien
tgttttaccaaccagattcatcatc

SEQ ID NO: 5374010 - DNA, 25 bp, Homo sapien
gaaacttgactaagcaaagttagca

SEQ ID NO: 5374011 - DNA, 25 bp, Homo sapien
caacgagcatcacctgttacctgag

SEQ ID NO: 5374012 - DNA, 25 bp, Homo sapien
tgcttcctgattcggcaacgagcat

SEQ ID NO: 5374013 - DNA, 25 bp, Homo sapien
ccaacacttccaagagtagcatgtt

SEQ ID NO: 5374014 - DNA, 25 bp, Homo sapien
tcactggaacttctaagttgaagtg

SEQ ID NO: 5374015 - DNA, 25 bp, Homo sapien
acatcactggaacttctaagttgaa

SEQ ID NO: 5374016 - DNA, 25 bp, Homo sapien
acttccaagagtagcatgtttccat

SEQ ID NO: 5374017 - DNA, 25 bp, Homo sapien
taagctaaaatgcaccagaaggttc

SEQ ID NO: 5374018 - DNA, 25 bp, Homo sapien
atgcactgggatgcagctatgcagg

SEQ ID NO: 5374019 - DNA, 25 bp, Homo sapien
gaagttagtcattgaagtgtccaag

SEQ ID NO: 5374020 - DNA, 25 bp, Homo sapien
tggaatagcgccttccatgaacaag

SEQ ID NO: 5374021 - DNA, 25 bp, Homo sapien
taaataaatagggacagctcagaag

SEQ ID NO: 5374022 - DNA, 25 bp, Homo sapien
tcagaaggagtgagcatagttcttt

SEQ ID NO: 5374023 - DNA, 25 bp, Homo sapien
taaattatctagatgtttcccaggt

SEQ ID NO: 5374024 - DNA, 25 bp, Homo sapien
aatctttatttagccatcagaccaa

SEQ ID NO: 5374025 - DNA, 25 bp, Homo sapien
acaggatggggacatggaaagccat

SEQ ID NO: 5374026 - DNA, 25 bp, Homo sapien
gcacaggatggggacatggaaagcc

SEQ ID NO: 5374027 - DNA, 25 bp, Homo sapien
ccagcacaggatggggacatggaaa

SEQ ID NO: 5374028 - DNA, 25 bp, Homo sapien
cagcacaggatggggacatggaaag

SEQ ID NO: 5374029 - DNA, 25 bp, Homo sapien
agtagttaagttcacttacactgcc

SEQ ID NO: 5374030 - DNA, 25 bp, Homo sapien
aaagtatcagttttatatgtctgga

SEQ ID NO: 5374031 - DNA, 25 bp, Homo sapien
tgtaattaggtcaacatcaaagtag

SEQ ID NO: 5374032 - DNA, 25 bp, Homo sapien
agtgacaggaaactcaacaggtgtt

SEQ ID NO: 5374033 - DNA, 25 bp, Homo sapien
cagatacagttccatctggaaagcc

SEQ ID NO: 5374034 - DNA, 25 bp, Homo sapien
aaaactctgcagatacagttccatc

SEQ ID NO: 5374035 - DNA, 25 bp, Homo sapien
ttccatctggaaagccatcacatac

SEQ ID NO: 5374036 - DNA, 25 bp, Homo sapien
ttaaaactctgcagatacagttcca

SEQ ID NO: 5374037 - DNA, 25 bp, Homo sapien
ttttggcagatggactgtgattttc

SEQ ID NO: 5374038 - DNA, 25 bp, Homo sapien
tttttggcagatggactgtgatttt

SEQ ID NO: 5374039 - DNA, 25 bp, Homo sapien
ggcagatggactgtgattttctctc

SEQ ID NO: 5374040 - DNA, 25 bp, Homo sapien
catttttggcagatggactgtgatt

SEQ ID NO: 5374041 - DNA, 25 bp, Homo sapien
tgccccttgcacactaagggaaaga

SEQ ID NO: 5374042 - DNA, 25 bp, Homo sapien
gaaagcctccaagtcgagcctgtgt

SEQ ID NO: 5374043 - DNA, 25 bp, Homo sapien
ttgataaactgcttgggacagggcc

SEQ ID NO: 5374044 - DNA, 25 bp, Homo sapien
tcgagcctgtgtcatgcaactggct

SEQ ID NO: 5374045 - DNA, 25 bp, Homo sapien
tgcagtgtattgcaattacgagcct

SEQ ID NO: 5374046 - DNA, 25 bp, Homo sapien
tacttattcatagctgtttgcctca

SEQ ID NO: 5374047 - DNA, 25 bp, Homo sapien
taatatgatcttgctcgaactttga

SEQ ID NO: 5374048 - DNA, 25 bp, Homo sapien
gcaattacgagccttggcgtctgtc

SEQ ID NO: 5374049 - DNA, 25 bp, Homo sapien
tctgcaaagaagacggaatttaagg

SEQ ID NO: 5374050 - DNA, 25 bp, Homo sapien
tataccatttaagggactcttctgc

SEQ ID NO: 5374051 - DNA, 25 bp, Homo sapien
gatacttggtccagataacgggcct

SEQ ID NO: 5374052 - DNA, 25 bp, Homo sapien
ttccaaaggtattcaccactgcgag

SEQ ID NO: 5374053 - DNA, 25 bp, Homo sapien
tggttgactattggtcttgtgccgg

SEQ ID NO: 5374054 - DNA, 25 bp, Homo sapien
tgccggtctttagctttaattggag

SEQ ID NO: 5374055 - DNA, 25 bp, Homo sapien
taccaccaattaactgcactgggct

SEQ ID NO: 5374056 - DNA, 25 bp, Homo sapien
gctgcccagttcaatcctctggaag

SEQ ID NO: 5374057 - DNA, 25 bp, Homo sapien
tgagctacgggaggacattcaaacc

SEQ ID NO: 5374058 - DNA, 25 bp, Homo sapien
aaattactctgagctacgggaggac

SEQ ID NO: 5374059 - DNA, 25 bp, Homo sapien
acagagaagtgcttaaaggagctga

SEQ ID NO: 5374060 - DNA, 25 bp, Homo sapien
ttactctgagctacgggaggacatt

SEQ ID NO: 5374061 - DNA, 25 bp, Homo sapien
tgttgccagcagtattagtagtgtg

SEQ ID NO: 5374062 - DNA, 25 bp, Homo sapien
acaaaccttctactgttgccagcag

SEQ ID NO: 5374063 - DNA, 25 bp, Homo sapien
cagtattagtagtgtggccagacag

SEQ ID NO: 5374064 - DNA, 25 bp, Homo sapien
tcagtactccacaaaccttctactg

SEQ ID NO: 5374065 - DNA, 25 bp, Homo sapien
tcactcccggggaggagccacagct

SEQ ID NO: 5374066 - DNA, 25 bp, Homo sapien
catcactcccggggaggagccacag

SEQ ID NO: 5374067 - DNA, 25 bp, Homo sapien
gctgctgcagcaggacccagtcacc

SEQ ID NO: 5374068 - DNA, 25 bp, Homo sapien
tgctgcagcaggacccagtcaccat

SEQ ID NO: 5374069 - DNA, 25 bp, Homo sapien
aaaagctggcctgtggaacactcat

SEQ ID NO: 5374070 - DNA, 25 bp, Homo sapien
tgttcctaaggatcaacttggtggg

SEQ ID NO: 5374071 - DNA, 25 bp, Homo sapien
tggtttcccagtaagcagactctga

SEQ ID NO: 5374072 - DNA, 25 bp, Homo sapien
agatgcccctttgtcattgttccag

SEQ ID NO: 5374073 - DNA, 25 bp, Homo sapien
ggtaggcttgtctatgtgtatgacc

SEQ ID NO: 5374074 - DNA, 25 bp, Homo sapien
tgtgcacatatccgatatgtgtgtg

SEQ ID NO: 5374075 - DNA, 25 bp, Homo sapien
tcattgcctaagacggcacaggtag

SEQ ID NO: 5374076 - DNA, 25 bp, Homo sapien
tctatgtgtatgaccgatatgtgtg

SEQ ID NO: 5374077 - DNA, 25 bp, Homo sapien
atagaaaacggttgtttcttcatca

SEQ ID NO: 5374078 - DNA, 25 bp, Homo sapien
gggaggtttgcaggaggtgttatag

SEQ ID NO: 5374079 - DNA, 25 bp, Homo sapien
tatagaaaacggttgtttcttcatc

SEQ ID NO: 5374080 - DNA, 25 bp, Homo sapien
caggaggtgttatagaaaacggttg

SEQ ID NO: 5374081 - DNA, 25 bp, Homo sapien
gaaatacttggatgccctctcttcc

SEQ ID NO: 5374082 - DNA, 25 bp, Homo sapien
ccttcagagtaatcatattgtggag

SEQ ID NO: 5374083 - DNA, 25 bp, Homo sapien
tattgtggagagcatggatgaacat

SEQ ID NO: 5374084 - DNA, 25 bp, Homo sapien
gtattgattgcctcagacaccttca

SEQ ID NO: 5374085 - DNA, 25 bp, Homo sapien
taatttgggtgatcccagttcataa

SEQ ID NO: 5374086 - DNA, 25 bp, Homo sapien
tgtagtctcctgctaatagtgaaga

SEQ ID NO: 5374087 - DNA, 25 bp, Homo sapien
gaccattagaacatgtgtagtctcc

SEQ ID NO: 5374088 - DNA, 25 bp, Homo sapien
tagtagaataatgtcctgcagaaga

SEQ ID NO: 5374089 - DNA, 25 bp, Homo sapien
taagtttccagagagccttgttcta

SEQ ID NO: 5374090 - DNA, 25 bp, Homo sapien
ttaagtttccagagagccttgttct

SEQ ID NO: 5374091 - DNA, 25 bp, Homo sapien
agtttccagagagccttgttctatg

SEQ ID NO: 5374092 - DNA, 25 bp, Homo sapien
tttccagagagccttgttctatgct

SEQ ID NO: 5374093 - DNA, 25 bp, Homo sapien
ttctgagaaataatcctcttccgat

SEQ ID NO: 5374094 - DNA, 25 bp, Homo sapien
gacactgttgttacgttcttcctta

SEQ ID NO: 5374095 - DNA, 25 bp, Homo sapien
tcttccgattccacagagactcaga

SEQ ID NO: 5374096 - DNA, 25 bp, Homo sapien
cagagactcagatggttctttctca

SEQ ID NO: 5374097 - DNA, 25 bp, Homo sapien
gccagtattcccaccaggtcacatt

SEQ ID NO: 5374098 - DNA, 25 bp, Homo sapien
tcagcataaagacagagatgttcag

SEQ ID NO: 5374099 - DNA, 25 bp, Homo sapien
taagacagctttacacagagaaatg

SEQ ID NO: 5374100 - DNA, 25 bp, Homo sapien
cccaccaggtcacatttggctaaga

SEQ ID NO: 5374101 - DNA, 25 bp, Homo sapien
cttgttaataacttgttcgactgca

SEQ ID NO: 5374102 - DNA, 25 bp, Homo sapien
tctgaagaagttgaaaagctgtctc

SEQ ID NO: 5374103 - DNA, 25 bp, Homo sapien
aatattttggtatgagatggggtac

SEQ ID NO: 5374104 - DNA, 25 bp, Homo sapien
tgagatggggtacataaatacttgt

SEQ ID NO: 5374105 - DNA, 25 bp, Homo sapien
tggctcactcacttacttgcaagga

SEQ ID NO: 5374106 - DNA, 25 bp, Homo sapien
tgaatcactgtatgatccccatgct

SEQ ID NO: 5374107 - DNA, 25 bp, Homo sapien
tcctgaaacttggaaccgaagcatt

SEQ ID NO: 5374108 - DNA, 25 bp, Homo sapien
catgcttccctctctctaggattgc

SEQ ID NO: 5374109 - DNA, 25 bp, Homo sapien
agggcagtctgattgaagcttattc

SEQ ID NO: 5374110 - DNA, 25 bp, Homo sapien
gcttttgtctctcgccagtgccttc

SEQ ID NO: 5374111 - DNA, 25 bp, Homo sapien
cttgcttttgtctctcgccagtgcc

SEQ ID NO: 5374112 - DNA, 25 bp, Homo sapien
gtctgattgaagcttattcacacat

SEQ ID NO: 5374113 - DNA, 25 bp, Homo sapien
tctgaataatgcagatgccctccct

SEQ ID NO: 5374114 - DNA, 25 bp, Homo sapien
aactcaagcagattgtccgaaatgg

SEQ ID NO: 5374115 - DNA, 25 bp, Homo sapien
taaaaggatatctccctccagcatg

SEQ ID NO: 5374116 - DNA, 25 bp, Homo sapien
cataattactggataagctgcccaa

SEQ ID NO: 5374117 - DNA, 25 bp, Homo sapien
tcgggtcccgacaggtgttgcccgc

SEQ ID NO: 5374118 - DNA, 25 bp, Homo sapien
cccaagcagctggtaggagaatctg

SEQ ID NO: 5374119 - DNA, 25 bp, Homo sapien
ttaggagttccaccgacgtgaccca

SEQ ID NO: 5374120 - DNA, 25 bp, Homo sapien
ctggattcggaaggcgcagctacag

SEQ ID NO: 5374121 - DNA, 25 bp, Homo sapien
caaagccttcggtggtgtcatggta

SEQ ID NO: 5374122 - DNA, 25 bp, Homo sapien
tctgccttccttgccgcttaagtat

SEQ ID NO: 5374123 - DNA, 25 bp, Homo sapien
gattcagctgctggtacaaagcctt

SEQ ID NO: 5374124 - DNA, 25 bp, Homo sapien
tgtcatggtagcacatctgccttcc

SEQ ID NO: 5374125 - DNA, 25 bp, Homo sapien
tattggaatgtaggaaccaggatgt

SEQ ID NO: 5374126 - DNA, 25 bp, Homo sapien
tccacattgcctgttttgcttaaaa

SEQ ID NO: 5374127 - DNA, 25 bp, Homo sapien
tgagtggtaaacttagctccactac

SEQ ID NO: 5374128 - DNA, 25 bp, Homo sapien
ccaggatgtcctgagtggtaaactt

SEQ ID NO: 5374129 - DNA, 25 bp, Homo sapien
catatacctacacatttcttgaggg

SEQ ID NO: 5374130 - DNA, 25 bp, Homo sapien
ccccagcggtcatccaatagaacct

SEQ ID NO: 5374131 - DNA, 25 bp, Homo sapien
cctcaggctttgaaattacctgttt

SEQ ID NO: 5374132 - DNA, 25 bp, Homo sapien
cctccctcaggctttgaaattacct

SEQ ID NO: 5374133 - DNA, 25 bp, Homo sapien
tctctagctcaatcagttcagccat

SEQ ID NO: 5374134 - DNA, 25 bp, Homo sapien
ggcatctctagctcaatcagttcag

SEQ ID NO: 5374135 - DNA, 25 bp, Homo sapien
aggcatctctagctcaatcagttca

SEQ ID NO: 5374136 - DNA, 25 bp, Homo sapien
catctctagctcaatcagttcagcc

SEQ ID NO: 5374137 - DNA, 25 bp, Homo sapien
ttcttactcttctgaacatgtatag

SEQ ID NO: 5374138 - DNA, 25 bp, Homo sapien
catgtatagagttgtcatatagcca

SEQ ID NO: 5374139 - DNA, 25 bp, Homo sapien
tctgaacatgtatagagttgtcata

SEQ ID NO: 5374140 - DNA, 25 bp, Homo sapien
tcttctgaacatgtatagagttgtc

SEQ ID NO: 5374141 - DNA, 25 bp, Homo sapien
tcatttggagctggagaagacctgt

SEQ ID NO: 5374142 - DNA, 25 bp, Homo sapien
catcgccttcatgtgctccttgctt

SEQ ID NO: 5374143 - DNA, 25 bp, Homo sapien
tgctccttgctttccccctggtggt

SEQ ID NO: 5374144 - DNA, 25 bp, Homo sapien
aagacctgttcttttcccatcgcct

SEQ ID NO: 5374145 - DNA, 25 bp, Homo sapien
ctttgccacaccaaatgtgggatgc

SEQ ID NO: 5374146 - DNA, 25 bp, Homo sapien
tttgccacaccaaatgtgggatgca

SEQ ID NO: 5374147 - DNA, 25 bp, Homo sapien
tctgctgatctgtaaattcagtcat

SEQ ID NO: 5374148 - DNA, 25 bp, Homo sapien
ttctctgctgatctgtaaattcagt

SEQ ID NO: 5374149 - DNA, 25 bp, Homo sapien
tgccactttttcagctgtccagttt

SEQ ID NO: 5374150 - DNA, 25 bp, Homo sapien
tcactctctgccactttttcagctg

SEQ ID NO: 5374151 - DNA, 25 bp, Homo sapien
gccttggcatcgtgaggaattccca

SEQ ID NO: 5374152 - DNA, 25 bp, Homo sapien
ggaattcccatttggccttcagcat

SEQ ID NO: 5374153 - DNA, 25 bp, Homo sapien
cgcatggtgaagaaatacggtttag

SEQ ID NO: 5374154 - DNA, 25 bp, Homo sapien
tcagtgaatgttgtatggaacgcat

SEQ ID NO: 5374155 - DNA, 25 bp, Homo sapien
ccctgttggcaggtatttcagaaaa

SEQ ID NO: 5374156 - DNA, 25 bp, Homo sapien
ggtcagtgcggtcaggcccttctgt

SEQ ID NO: 5374157 - DNA, 25 bp, Homo sapien
taaatggttccatctctagggtaca

SEQ ID NO: 5374158 - DNA, 25 bp, Homo sapien
taaccaagggcacaaagactagcaa

SEQ ID NO: 5374159 - DNA, 25 bp, Homo sapien
ctgacaggacattctggggactgct

SEQ ID NO: 5374160 - DNA, 25 bp, Homo sapien
cttttcaaattgtatgagggatggc

SEQ ID NO: 5374161 - DNA, 25 bp, Homo sapien
tttaactaacggtactgacaggaca

SEQ ID NO: 5374162 - DNA, 25 bp, Homo sapien
caaaatgaacttttagagcaaacgt

SEQ ID NO: 5374163 - DNA, 25 bp, Homo sapien
cttgtagaccataaggattgcctgc

SEQ ID NO: 5374164 - DNA, 25 bp, Homo sapien
ggcatcagtggtctgaaccattcag

SEQ ID NO: 5374165 - DNA, 25 bp, Homo sapien
tcagctgtgttgttctctaaggccc

SEQ ID NO: 5374166 - DNA, 25 bp, Homo sapien
cctcagactcatggttaagtggcat

SEQ ID NO: 5374167 - DNA, 25 bp, Homo sapien
ggaagatcggtgttggtcatgccca

SEQ ID NO: 5374168 - DNA, 25 bp, Homo sapien
ggaataatttggactctcacagagg

SEQ ID NO: 5374169 - DNA, 25 bp, Homo sapien
caccatcagtggttggcagtcagag

SEQ ID NO: 5374170 - DNA, 25 bp, Homo sapien
tacaaggcccagtccagtgcttaaa

SEQ ID NO: 5374171 - DNA, 25 bp, Homo sapien
cacagggggtgccatacttagacaa

SEQ ID NO: 5374172 - DNA, 25 bp, Homo sapien
tctcattatcttcaagaagtgttcc

SEQ ID NO: 5374173 - DNA, 25 bp, Homo sapien
cattatcttcaagaagtgttccaga

SEQ ID NO: 5374174 - DNA, 25 bp, Homo sapien
ttagacaactccttatgatttttca

SEQ ID NO: 5374175 - DNA, 25 bp, Homo sapien
caattgtctgtggatacctctgttt

SEQ ID NO: 5374176 - DNA, 25 bp, Homo sapien
gtggatacctctgttttgcacacca

SEQ ID NO: 5374177 - DNA, 25 bp, Homo sapien
ttgtctgtggatacctctgttttgc

SEQ ID NO: 5374178 - DNA, 25 bp, Homo sapien
tggatacctctgttttgcacaccat

SEQ ID NO: 5374179 - DNA, 25 bp, Homo sapien
gcttttagcttcaaacaacatgtta

SEQ ID NO: 5374180 - DNA, 25 bp, Homo sapien
cttgtttctagcaatagaaggctcc

SEQ ID NO: 5374181 - DNA, 25 bp, Homo sapien
gcaatagaaggctccaatggagatg

SEQ ID NO: 5374182 - DNA, 25 bp, Homo sapien
aatccttagcgtgtttctccctctg

SEQ ID NO: 5374183 - DNA, 25 bp, Homo sapien
gccttaacacttgccggaataatta

SEQ ID NO: 5374184 - DNA, 25 bp, Homo sapien
gaaagacagtcgaacaagatgccat

SEQ ID NO: 5374185 - DNA, 25 bp, Homo sapien
gtacagttactctcccttacaacga

SEQ ID NO: 5374186 - DNA, 25 bp, Homo sapien
gaaacctagggatagcatggtctgg

SEQ ID NO: 5374187 - DNA, 25 bp, Homo sapien
tatcagccaatttttcagaatgggc

SEQ ID NO: 5374188 - DNA, 25 bp, Homo sapien
ataaacttcaatggctccaggatga

SEQ ID NO: 5374189 - DNA, 25 bp, Homo sapien
gaataaacttcaatggctccaggat

SEQ ID NO: 5374190 - DNA, 25 bp, Homo sapien
caggaataaacttcaatggctccag

SEQ ID NO: 5374191 - DNA, 25 bp, Homo sapien
ggtagagactagctccacttttagc

SEQ ID NO: 5374192 - DNA, 25 bp, Homo sapien
gccatatgctgttgtgctgctacca

SEQ ID NO: 5374193 - DNA, 25 bp, Homo sapien
tgtgcaccagtctggtagagactag

SEQ ID NO: 5374194 - DNA, 25 bp, Homo sapien
tgaggttcgaagttgggtgtgcacc

SEQ ID NO: 5374195 - DNA, 25 bp, Homo sapien
taagacgttgttaccggaggcacag

SEQ ID NO: 5374196 - DNA, 25 bp, Homo sapien
tcttctggcgtgttgactaagctgc

SEQ ID NO: 5374197 - DNA, 25 bp, Homo sapien
gataattaataaagtgccagactgg

SEQ ID NO: 5374198 - DNA, 25 bp, Homo sapien
tttgtgtgctgcataagcttgaggc

SEQ ID NO: 5374199 - DNA, 25 bp, Homo sapien
caactgcaacgttggaattttctaa

SEQ ID NO: 5374200 - DNA, 25 bp, Homo sapien
cttgagaaaggtgtaacaactgcaa

SEQ ID NO: 5374201 - DNA, 25 bp, Homo sapien
ctgcaacgttggaattttctaatcc

SEQ ID NO: 5374202 - DNA, 25 bp, Homo sapien
ggtgtaacaactgcaacgttggaat

SEQ ID NO: 5374203 - DNA, 25 bp, Homo sapien
gccatatggtgatgtctcgctgacc

SEQ ID NO: 5374204 - DNA, 25 bp, Homo sapien
ccatatggtgatgtctcgctgacca

SEQ ID NO: 5374205 - DNA, 25 bp, Homo sapien
catatggtgatgtctcgctgaccat

SEQ ID NO: 5374206 - DNA, 25 bp, Homo sapien
tatggtgatgtctcgctgaccattc

SEQ ID NO: 5374207 - DNA, 25 bp, Homo sapien
tgtccacagggctacttccatgtcg

SEQ ID NO: 5374208 - DNA, 25 bp, Homo sapien
tctaggtaatccaagggagccaggc

SEQ ID NO: 5374209 - DNA, 25 bp, Homo sapien
tcatgagagggcttaaggcttcccc

SEQ ID NO: 5374210 - DNA, 25 bp, Homo sapien
tacatttcccactcgaaggcttagg

SEQ ID NO: 5374211 - DNA, 25 bp, Homo sapien
ctaattgtgtgccagcagaaacagt

SEQ ID NO: 5374212 - DNA, 25 bp, Homo sapien
caaggtaacgtcagcatttcagagc

SEQ ID NO: 5374213 - DNA, 25 bp, Homo sapien
caagcacccgttctatgcattacac

SEQ ID NO: 5374214 - DNA, 25 bp, Homo sapien
ctaggatgcaaagcttgcacagctt

SEQ ID NO: 5374215 - DNA, 25 bp, Homo sapien
caggtcctgggcttagacgtggcct

SEQ ID NO: 5374216 - DNA, 25 bp, Homo sapien
gggtgagtgattactggagtttcta

SEQ ID NO: 5374217 - DNA, 25 bp, Homo sapien
ggagtttctatattctggcaccaac

SEQ ID NO: 5374218 - DNA, 25 bp, Homo sapien
cttagacgtggcctttgatgcttga

SEQ ID NO: 5374219 - DNA, 25 bp, Homo sapien
agtgttgtccgtggcggcttgttta

SEQ ID NO: 5374220 - DNA, 25 bp, Homo sapien
tcacattgtccccttgatccatgat

SEQ ID NO: 5374221 - DNA, 25 bp, Homo sapien
tgtccccttgatccatgattctctg

SEQ ID NO: 5374222 - DNA, 25 bp, Homo sapien
acctccagggccctctcacattgtc

SEQ ID NO: 5374223 - DNA, 25 bp, Homo sapien
caaggtcaatgcacatgtgccgaaa

SEQ ID NO: 5374224 - DNA, 25 bp, Homo sapien
gagacatcaaggtcaatgcacatgt

SEQ ID NO: 5374225 - DNA, 25 bp, Homo sapien
acatgtgccgaaagccactcacaaa

SEQ ID NO: 5374226 - DNA, 25 bp, Homo sapien
tgcacatgtgccgaaagccactcac

SEQ ID NO: 5374227 - DNA, 25 bp, Homo sapien
ctctatgaggataagcatgctggta

SEQ ID NO: 5374228 - DNA, 25 bp, Homo sapien
tagtgaaatgtggagtgatgagcat

SEQ ID NO: 5374229 - DNA, 25 bp, Homo sapien
catgctggtatctgatctggtcaca

SEQ ID NO: 5374230 - DNA, 25 bp, Homo sapien
tgagcattagaagatgctttttgcc

SEQ ID NO: 5374231 - DNA, 25 bp, Homo sapien
tacagcaagagtcgcacatagctgc

SEQ ID NO: 5374232 - DNA, 25 bp, Homo sapien
cagacattgatcttccaaagcaggt

SEQ ID NO: 5374233 - DNA, 25 bp, Homo sapien
agaggatacctgtggaaccttccta

SEQ ID NO: 5374234 - DNA, 25 bp, Homo sapien
tgaagctcaaatacagcaagagtcg

SEQ ID NO: 5374235 - DNA, 25 bp, Homo sapien
gcacaaaagcataactgctgttgaa

SEQ ID NO: 5374236 - DNA, 25 bp, Homo sapien
ttgcagttacttggttttgaattgg

SEQ ID NO: 5374237 - DNA, 25 bp, Homo sapien
tgtagccaacgattgcagttacttg

SEQ ID NO: 5374238 - DNA, 25 bp, Homo sapien
cctcctctttgtgtagccaacgatt

SEQ ID NO: 5374239 - DNA, 25 bp, Homo sapien
gactttgtacgaatcccttacgctg

SEQ ID NO: 5374240 - DNA, 25 bp, Homo sapien
gcctactacagtacatggtccaaga

SEQ ID NO: 5374241 - DNA, 25 bp, Homo sapien
gatagggataaaagcccacatttag

SEQ ID NO: 5374242 - DNA, 25 bp, Homo sapien
tttttagcacaacacgagtcaatag

SEQ ID NO: 5374243 - DNA, 25 bp, Homo sapien
agttctttagggctacttcctccag

SEQ ID NO: 5374244 - DNA, 25 bp, Homo sapien
gttcttggccttaatgcccttgagt

SEQ ID NO: 5374245 - DNA, 25 bp, Homo sapien
ttttgtctgacatcactactgcctc

SEQ ID NO: 5374246 - DNA, 25 bp, Homo sapien
gcctctccacgatgtaaaatctgca

SEQ ID NO: 5374247 - DNA, 25 bp, Homo sapien
ctcactagaagtcctctttactcct

SEQ ID NO: 5374248 - DNA, 25 bp, Homo sapien
tcactagaagtcctctttactcctc

SEQ ID NO: 5374249 - DNA, 25 bp, Homo sapien
cactagaagtcctctttactcctcc

SEQ ID NO: 5374250 - DNA, 25 bp, Homo sapien
cctcactagaagtcctctttactcc

SEQ ID NO: 5374251 - DNA, 25 bp, Homo sapien
aacatgcagagaattgtagttcttg

SEQ ID NO: 5374252 - DNA, 25 bp, Homo sapien
catgcagagaattgtagttcttgag

SEQ ID NO: 5374253 - DNA, 25 bp, Homo sapien
atgaggttgtcaggtccaaactcca

SEQ ID NO: 5374254 - DNA, 25 bp, Homo sapien
atgcagagaattgtagttcttgagc

SEQ ID NO: 5374255 - DNA, 25 bp, Homo sapien
cttaattgctcaagacactccactg

SEQ ID NO: 5374256 - DNA, 25 bp, Homo sapien
tcaaagttatgttcaacacaatggt

SEQ ID NO: 5374257 - DNA, 25 bp, Homo sapien
tccactgtgacattggctacttcgg

SEQ ID NO: 5374258 - DNA, 25 bp, Homo sapien
ttacggtacgtacaacttgtcactg

SEQ ID NO: 5374259 - DNA, 25 bp, Homo sapien
cagattagtggcgtggagagtccaa

SEQ ID NO: 5374260 - DNA, 25 bp, Homo sapien
atattcacctttgttgccttaacac

SEQ ID NO: 5374261 - DNA, 25 bp, Homo sapien
taggagtcatatggaggattctcaa

SEQ ID NO: 5374262 - DNA, 25 bp, Homo sapien
gagagtccaacccagttggaaagca

SEQ ID NO: 5374263 - DNA, 25 bp, Homo sapien
ttcaagccttccctaaatcccctga

SEQ ID NO: 5374264 - DNA, 25 bp, Homo sapien
tcaagtgatctctcctcttcaagcc

SEQ ID NO: 5374265 - DNA, 25 bp, Homo sapien
agccttccctaaatcccctgacaga

SEQ ID NO: 5374266 - DNA, 25 bp, Homo sapien
cctaaatcccctgacagagagcccc

SEQ ID NO: 5374267 - DNA, 25 bp, Homo sapien
taggcgaactgcttagcaaaggctc

SEQ ID NO: 5374268 - DNA, 25 bp, Homo sapien
gagtatagattgacattcggccacc

SEQ ID NO: 5374269 - DNA, 25 bp, Homo sapien
tacagccctgtgcaagaatatagcc

SEQ ID NO: 5374270 - DNA, 25 bp, Homo sapien
tgggcacttatgtccataggcgaac

SEQ ID NO: 5374271 - DNA, 25 bp, Homo sapien
tgtaattgttacctggactctaaag

SEQ ID NO: 5374272 - DNA, 25 bp, Homo sapien
ctaaactgttcggtatgtaattgtt

SEQ ID NO: 5374273 - DNA, 25 bp, Homo sapien
tatggactaggtgtgatatttcaaa

SEQ ID NO: 5374274 - DNA, 25 bp, Homo sapien
tcaaacctgtgctttttactcatat

SEQ ID NO: 5374275 - DNA, 25 bp, Homo sapien
ttctctagcatacatgtctttgcct

SEQ ID NO: 5374276 - DNA, 25 bp, Homo sapien
gtctttgccttaacatttgcctttc

SEQ ID NO: 5374277 - DNA, 25 bp, Homo sapien
ctttgggttctttctatacacagca

SEQ ID NO: 5374278 - DNA, 25 bp, Homo sapien
ctcttatctctgtgcgttttcccta

SEQ ID NO: 5374279 - DNA, 25 bp, Homo sapien
ttcatatggattctgagtatccagt

SEQ ID NO: 5374280 - DNA, 25 bp, Homo sapien
tacattgaagcagatgtcagtttca

SEQ ID NO: 5374281 - DNA, 25 bp, Homo sapien
tcttctacattgaagcagatgtcag

SEQ ID NO: 5374282 - DNA, 25 bp, Homo sapien
ttgttcttctacattgaagcagatg

SEQ ID NO: 5374283 - DNA, 25 bp, Homo sapien
tcccttcagaaagctgagaattcag

SEQ ID NO: 5374284 - DNA, 25 bp, Homo sapien
taaggaaaacgttgtgcacctgtgt

SEQ ID NO: 5374285 - DNA, 25 bp, Homo sapien
tagtcccggtgtgcatgatctgtgc

SEQ ID NO: 5374286 - DNA, 25 bp, Homo sapien
gcaatatgtgctgagtagtcccggt

SEQ ID NO: 5374287 - DNA, 25 bp, Homo sapien
ttctcattttctctcaaaattgccc

SEQ ID NO: 5374288 - DNA, 25 bp, Homo sapien
agtacagtttcttctcattttctct

SEQ ID NO: 5374289 - DNA, 25 bp, Homo sapien
tcattttctctcaaaattgccctca

SEQ ID NO: 5374290 - DNA, 25 bp, Homo sapien
cattttctctcaaaattgccctcat

SEQ ID NO: 5374291 - DNA, 25 bp, Homo sapien
tgattggcagctctagttctaggaa

SEQ ID NO: 5374292 - DNA, 25 bp, Homo sapien
caaagaaggcattagaacgaaaggt

SEQ ID NO: 5374293 - DNA, 25 bp, Homo sapien
tgtttacgccatccaccaaagaagg

SEQ ID NO: 5374294 - DNA, 25 bp, Homo sapien
tcaatgaggctgaaacaagtcttcc

SEQ ID NO: 5374295 - DNA, 25 bp, Homo sapien
tcatgctataaagagtaaacgtttg

SEQ ID NO: 5374296 - DNA, 25 bp, Homo sapien
cacacgagtgtatgtctcacaatat

SEQ ID NO: 5374297 - DNA, 25 bp, Homo sapien
aagttcagccagttatcagtagata

SEQ ID NO: 5374298 - DNA, 25 bp, Homo sapien
gctgagctgcaatctaacactttac

SEQ ID NO: 5374299 - DNA, 25 bp, Homo sapien
catatatctgtggccaagactgtac

SEQ ID NO: 5374300 - DNA, 25 bp, Homo sapien
tcatatatctgtggccaagactgta

SEQ ID NO: 5374301 - DNA, 25 bp, Homo sapien
cctggtattgtgtgctggtggaata

SEQ ID NO: 5374302 - DNA, 25 bp, Homo sapien
taggaattgtaatggccatttgcac

SEQ ID NO: 5374303 - DNA, 25 bp, Homo sapien
ttcccagcatttggccttcgtagct

SEQ ID NO: 5374304 - DNA, 25 bp, Homo sapien
ttgcactgcctttgaaaggacacag

SEQ ID NO: 5374305 - DNA, 25 bp, Homo sapien
ctggtaggctacatctaagaaaagc

SEQ ID NO: 5374306 - DNA, 25 bp, Homo sapien
cctggtaggctacatctaagaaaag

SEQ ID NO: 5374307 - DNA, 25 bp, Homo sapien
tcctggtaggctacatctaagaaaa

SEQ ID NO: 5374308 - DNA, 25 bp, Homo sapien
cctcctggtaggctacatctaagaa

SEQ ID NO: 5374309 - DNA, 25 bp, Homo sapien
gccacaatgattcagtggaaaagcc

SEQ ID NO: 5374310 - DNA, 25 bp, Homo sapien
cattatcactctcattgattcttct

SEQ ID NO: 5374311 - DNA, 25 bp, Homo sapien
ccacaatgattcagtggaaaagcct

SEQ ID NO: 5374312 - DNA, 25 bp, Homo sapien
cacaatgattcagtggaaaagcctc

SEQ ID NO: 5374313 - DNA, 25 bp, Homo sapien
tccttgacgagagagatcatgagaa

SEQ ID NO: 5374314 - DNA, 25 bp, Homo sapien
ctacgtggacgagcttccttgacga

SEQ ID NO: 5374315 - DNA, 25 bp, Homo sapien
ggacgagcttccttgacgagagaga

SEQ ID NO: 5374316 - DNA, 25 bp, Homo sapien
cgagagagatcatgagaagactgct

SEQ ID NO: 5374317 - DNA, 25 bp, Homo sapien
tattttgaagtaaacaccttcctca

SEQ ID NO: 5374318 - DNA, 25 bp, Homo sapien
cttcctcattttctcgattgttaga

SEQ ID NO: 5374319 - DNA, 25 bp, Homo sapien
cattttctcgattgttagatgagca

SEQ ID NO: 5374320 - DNA, 25 bp, Homo sapien
ttctcgattgttagatgagcaattt

SEQ ID NO: 5374321 - DNA, 25 bp, Homo sapien
ggaagtgtccatgagagaatgcgtt

SEQ ID NO: 5374322 - DNA, 25 bp, Homo sapien
tgtccatgagagaatgcgttggtcc

SEQ ID NO: 5374323 - DNA, 25 bp, Homo sapien
aagtgtccatgagagaatgcgttgg

SEQ ID NO: 5374324 - DNA, 25 bp, Homo sapien
gtgtccatgagagaatgcgttggtc

SEQ ID NO: 5374325 - DNA, 25 bp, Homo sapien
tggaacttgtgaacataagggttta

SEQ ID NO: 5374326 - DNA, 25 bp, Homo sapien
ctggaacttgtgaacataagggttt

SEQ ID NO: 5374327 - DNA, 25 bp, Homo sapien
caaagttggtgaagctcgaggtaaa

SEQ ID NO: 5374328 - DNA, 25 bp, Homo sapien
taacctttgaaatcgtgcttccaaa

SEQ ID NO: 5374329 - DNA, 25 bp, Homo sapien
gcaattgagtttggtaacctttgaa

SEQ ID NO: 5374330 - DNA, 25 bp, Homo sapien
tccctttgcacccacttgttgcaat

SEQ ID NO: 5374331 - DNA, 25 bp, Homo sapien
tatcttcaccagtaccatcctctgg

SEQ ID NO: 5374332 - DNA, 25 bp, Homo sapien
cagtaccatcctctggatctgctaa

SEQ ID NO: 5374333 - DNA, 25 bp, Homo sapien
catcctctggatctgctaactccat

SEQ ID NO: 5374334 - DNA, 25 bp, Homo sapien
tattaatcatatcttcaccagtacc

SEQ ID NO: 5374335 - DNA, 25 bp, Homo sapien
agctgacacagtgagataagaatca

SEQ ID NO: 5374336 - DNA, 25 bp, Homo sapien
gagccactcataggtggactctggc

SEQ ID NO: 5374337 - DNA, 25 bp, Homo sapien
ctcataggtggactctggctggaat

SEQ ID NO: 5374338 - DNA, 25 bp, Homo sapien
tgacacagtgagataagaatcagtc

SEQ ID NO: 5374339 - DNA, 25 bp, Homo sapien
tgatgatttagagtgtccggtgtaa

SEQ ID NO: 5374340 - DNA, 25 bp, Homo sapien
aaacttctaagcgacaaagcattca

SEQ ID NO: 5374341 - DNA, 25 bp, Homo sapien
caacctatgcttagatgtgggagca

SEQ ID NO: 5374342 - DNA, 25 bp, Homo sapien
tagagtgtccggtgtaagaaacttc

SEQ ID NO: 5374343 - DNA, 25 bp, Homo sapien
tctgtggcggtctttgacttccaag

SEQ ID NO: 5374344 - DNA, 25 bp, Homo sapien
tgagaataaaatgcactgggttggt

SEQ ID NO: 5374345 - DNA, 25 bp, Homo sapien
cctaaactagtagatgagttgaagg

SEQ ID NO: 5374346 - DNA, 25 bp, Homo sapien
tgggtcaaccagttctgaagccttc

SEQ ID NO: 5374347 - DNA, 25 bp, Homo sapien
ttggggcacattgaacaaagtgaac

SEQ ID NO: 5374348 - DNA, 25 bp, Homo sapien
tggccaacatttgcagctactaatg

SEQ ID NO: 5374349 - DNA, 25 bp, Homo sapien
tttgcagctactaatgagcttgagg

SEQ ID NO: 5374350 - DNA, 25 bp, Homo sapien
caacaagtgcgtctatctttctaat

SEQ ID NO: 5374351 - DNA, 25 bp, Homo sapien
ccatgtcccctaatgctgtgacctt

SEQ ID NO: 5374352 - DNA, 25 bp, Homo sapien
aatgctgtgacctttataagcacaa

SEQ ID NO: 5374353 - DNA, 25 bp, Homo sapien
tgtcccctaatgctgtgacctttat

SEQ ID NO: 5374354 - DNA, 25 bp, Homo sapien
ccctaatgctgtgacctttataagc

SEQ ID NO: 5374355 - DNA, 25 bp, Homo sapien
gaacctggggtgaattctactacca

SEQ ID NO: 5374356 - DNA, 25 bp, Homo sapien
ctagaacctggggtgaattctacta

SEQ ID NO: 5374357 - DNA, 25 bp, Homo sapien
ggtgaattctagaacctggggtgaa

SEQ ID NO: 5374358 - DNA, 25 bp, Homo sapien
ctggggtgaattctagaacctgggg

SEQ ID NO: 5374359 - DNA, 25 bp, Homo sapien
tacagctataactggctcagactgg

SEQ ID NO: 5374360 - DNA, 25 bp, Homo sapien
tgtttctaaagacctgtgccgcctc

SEQ ID NO: 5374361 - DNA, 25 bp, Homo sapien
aacaaggcctggaacgtcacgtcct

SEQ ID NO: 5374362 - DNA, 25 bp, Homo sapien
cagactggctggctggactatcaga

SEQ ID NO: 5374363 - DNA, 25 bp, Homo sapien
acttgctttgggccatctgggcgta

SEQ ID NO: 5374364 - DNA, 25 bp, Homo sapien
cacttgctttgggccatctgggcgt

SEQ ID NO: 5374365 - DNA, 25 bp, Homo sapien
tcacttgctttgggccatctgggcg

SEQ ID NO: 5374366 - DNA, 25 bp, Homo sapien
aaattagttactggatgggcgcggt

SEQ ID NO: 5374367 - DNA, 25 bp, Homo sapien
tctccctccctgaactgtaagcaag

SEQ ID NO: 5374368 - DNA, 25 bp, Homo sapien
tgttgatgcttcatggcccttcaag

SEQ ID NO: 5374369 - DNA, 25 bp, Homo sapien
tgatcacctttacctagcacccaga

SEQ ID NO: 5374370 - DNA, 25 bp, Homo sapien
ccagtgttgcccaggtatccatggc

SEQ ID NO: 5374371 - DNA, 25 bp, Homo sapien
aataggaaggccttcagggttgagt

SEQ ID NO: 5374372 - DNA, 25 bp, Homo sapien
gggttgagtgggatgaatcgtgagc

SEQ ID NO: 5374373 - DNA, 25 bp, Homo sapien
aaataggaaggccttcagggttgag

SEQ ID NO: 5374374 - DNA, 25 bp, Homo sapien
ggaaccacaactaaatgcaccttac

SEQ ID NO: 5374375 - DNA, 25 bp, Homo sapien
tcctgttgaacggaaccacaactaa

SEQ ID NO: 5374376 - DNA, 25 bp, Homo sapien
tgttgaacggaaccacaactaaatg

SEQ ID NO: 5374377 - DNA, 25 bp, Homo sapien
ctcctgttgaacggaaccacaacta

SEQ ID NO: 5374378 - DNA, 25 bp, Homo sapien
tttccagactctacttgcagccaac

SEQ ID NO: 5374379 - DNA, 25 bp, Homo sapien
gcttcagttttccagactctacttg

SEQ ID NO: 5374380 - DNA, 25 bp, Homo sapien
taaaaatgagttctacatatcgtgg

SEQ ID NO: 5374381 - DNA, 25 bp, Homo sapien
gagttctacatatcgtggttttctt

SEQ ID NO: 5374382 - DNA, 25 bp, Homo sapien
caccaaggctcctagggaagcctgt

SEQ ID NO: 5374383 - DNA, 25 bp, Homo sapien
gaaaccttacttctgcgttgcccat

SEQ ID NO: 5374384 - DNA, 25 bp, Homo sapien
ctcctcctccgaaatcttcatgaaa

SEQ ID NO: 5374385 - DNA, 25 bp, Homo sapien
tcctagggaagcctgttccttccaa

SEQ ID NO: 5374386 - DNA, 25 bp, Homo sapien
cacctgtctctgttggtttgagatg

SEQ ID NO: 5374387 - DNA, 25 bp, Homo sapien
gcacctgtctctgttggtttgagat

SEQ ID NO: 5374388 - DNA, 25 bp, Homo sapien
acctgtctctgttggtttgagatgt

SEQ ID NO: 5374389 - DNA, 25 bp, Homo sapien
ccagatgagtgagtatagagaggct

SEQ ID NO: 5374390 - DNA, 25 bp, Homo sapien
agggctgcctccaacttttctgata

SEQ ID NO: 5374391 - DNA, 25 bp, Homo sapien
aatacatggcttgatctcattctga

SEQ ID NO: 5374392 - DNA, 25 bp, Homo sapien
attctgacgcacataacacccacag

SEQ ID NO: 5374393 - DNA, 25 bp, Homo sapien
ctaacactgtcttgtctactttcat

SEQ ID NO: 5374394 - DNA, 25 bp, Homo sapien
ccactagtcccagaaaagcatgaag

SEQ ID NO: 5374395 - DNA, 25 bp, Homo sapien
actagtcccagaaaagcatgaagca

SEQ ID NO: 5374396 - DNA, 25 bp, Homo sapien
cactagtcccagaaaagcatgaagc

SEQ ID NO: 5374397 - DNA, 25 bp, Homo sapien
tcgttcatacaggtattccacacct

SEQ ID NO: 5374398 - DNA, 25 bp, Homo sapien
caaagtcagatatatgtcgttcata

SEQ ID NO: 5374399 - DNA, 25 bp, Homo sapien
ggtattccacacctccagcttgaga

SEQ ID NO: 5374400 - DNA, 25 bp, Homo sapien
tcagatatatgtcgttcatacaggt

SEQ ID NO: 5374401 - DNA, 25 bp, Homo sapien
gcttgactgcttgactgtgacacta

SEQ ID NO: 5374402 - DNA, 25 bp, Homo sapien
caaaagctgtagatgacgtgcaggt

SEQ ID NO: 5374403 - DNA, 25 bp, Homo sapien
gatgtggtttacttgagacctccca

SEQ ID NO: 5374404 - DNA, 25 bp, Homo sapien
cgtgcaggtctgagcctctagttga

SEQ ID NO: 5374405 - DNA, 25 bp, Homo sapien
tagaatatgcgtgtttcttccttca

SEQ ID NO: 5374406 - DNA, 25 bp, Homo sapien
ccagcattcaaacccaagattagaa

SEQ ID NO: 5374407 - DNA, 25 bp, Homo sapien
tatttcattcgaatcatatccagca

SEQ ID NO: 5374408 - DNA, 25 bp, Homo sapien
gaactcgccatgatttatctacatg

SEQ ID NO: 5374409 - DNA, 25 bp, Homo sapien
acttgtttctacattgctaactcct

SEQ ID NO: 5374410 - DNA, 25 bp, Homo sapien
tgtttctacattgctaactcctttt

SEQ ID NO: 5374411 - DNA, 25 bp, Homo sapien
ctggctacttgtttctacattgcta

SEQ ID NO: 5374412 - DNA, 25 bp, Homo sapien
ttttccctcaaagctcttaacacca

SEQ ID NO: 5374413 - DNA, 25 bp, Homo sapien
tgtctacagcgaatgtgaggtgcaa

SEQ ID NO: 5374414 - DNA, 25 bp, Homo sapien
tgaataacctgtgaagtcccggaat

SEQ ID NO: 5374415 - DNA, 25 bp, Homo sapien
cccggaattctcttaagtggtgctg

SEQ ID NO: 5374416 - DNA, 25 bp, Homo sapien
caatacgacacacgctgaacagctg

SEQ ID NO: 5374417 - DNA, 25 bp, Homo sapien
tggctgcccaaggaggacattcaga

SEQ ID NO: 5374418 - DNA, 25 bp, Homo sapien
tttgcagccctgcatcaacgtgaga

SEQ ID NO: 5374419 - DNA, 25 bp, Homo sapien
acattcagactctgagcgttttgca

SEQ ID NO: 5374420 - DNA, 25 bp, Homo sapien
ttttgcagccctgcatcaacgtgag

SEQ ID NO: 5374421 - DNA, 25 bp, Homo sapien
gaggcaaccaggtctctgatacatt

SEQ ID NO: 5374422 - DNA, 25 bp, Homo sapien
tagtcgtacaatggaacaccaagca

SEQ ID NO: 5374423 - DNA, 25 bp, Homo sapien
taaaccctgactcagaaaagacatg

SEQ ID NO: 5374424 - DNA, 25 bp, Homo sapien
tctactcttagtgacataacctgaa

SEQ ID NO: 5374425 - DNA, 25 bp, Homo sapien
cccctctgaatctgctgtagatgaa

SEQ ID NO: 5374426 - DNA, 25 bp, Homo sapien
aggccttgtcccctctgaatctgct

SEQ ID NO: 5374427 - DNA, 25 bp, Homo sapien
tcgaggaaggccttgtcccctctga

SEQ ID NO: 5374428 - DNA, 25 bp, Homo sapien
ctgtagatgaactcagatttgattc

SEQ ID NO: 5374429 - DNA, 25 bp, Homo sapien
ctgagttccagggtttatgaggaca

SEQ ID NO: 5374430 - DNA, 25 bp, Homo sapien
gcctcacgtgtgaaactgtctctgc

SEQ ID NO: 5374431 - DNA, 25 bp, Homo sapien
tctgctctttgacaccgaattggtt

SEQ ID NO: 5374432 - DNA, 25 bp, Homo sapien
tatgagctggaataagacctagctg

SEQ ID NO: 5374433 - DNA, 25 bp, Homo sapien
tctcgtaccttgaagaagatagctt

SEQ ID NO: 5374434 - DNA, 25 bp, Homo sapien
caagattccatctcgtaccttgaag

SEQ ID NO: 5374435 - DNA, 25 bp, Homo sapien
agaagatagcttttggcttggtgat

SEQ ID NO: 5374436 - DNA, 25 bp, Homo sapien
ttatacatcgttttcagctgactgg

SEQ ID NO: 5374437 - DNA, 25 bp, Homo sapien
tgctcatcactagtttgcagaatca

SEQ ID NO: 5374438 - DNA, 25 bp, Homo sapien
tcatcactagtttgcagaatcagca

SEQ ID NO: 5374439 - DNA, 25 bp, Homo sapien
atgctgctcatcactagtttgcaga

SEQ ID NO: 5374440 - DNA, 25 bp, Homo sapien
tccccatgctgctcatcactagttt

SEQ ID NO: 5374441 - DNA, 25 bp, Homo sapien
aagaacttatcttggactgtgggca

SEQ ID NO: 5374442 - DNA, 25 bp, Homo sapien
aaatgtttaactgggcaatggcctg

SEQ ID NO: 5374443 - DNA, 25 bp, Homo sapien
caaagaacttatcttggactgtggg

SEQ ID NO: 5374444 - DNA, 25 bp, Homo sapien
gaaatgtttaactgggcaatggcct

SEQ ID NO: 5374445 - DNA, 25 bp, Homo sapien
tggccctgcatatggggttggtctc

SEQ ID NO: 5374446 - DNA, 25 bp, Homo sapien
ggccctgcatatggggttggtctca

SEQ ID NO: 5374447 - DNA, 25 bp, Homo sapien
catatggggttggtctcaaagtacg

SEQ ID NO: 5374448 - DNA, 25 bp, Homo sapien
cctgcatatggggttggtctcaaag

SEQ ID NO: 5374449 - DNA, 25 bp, Homo sapien
ttgtaaataactggcttcgatttca

SEQ ID NO: 5374450 - DNA, 25 bp, Homo sapien
tgattccacccgatataattaaagg

SEQ ID NO: 5374451 - DNA, 25 bp, Homo sapien
ttcatgattccacccgatataatta

SEQ ID NO: 5374452 - DNA, 25 bp, Homo sapien
aactggcttcgatttcatgattcca

SEQ ID NO: 5374453 - DNA, 25 bp, Homo sapien
attgaaggtaactgtaattacaata

SEQ ID NO: 5374454 - DNA, 25 bp, Homo sapien
taattacaatattctatctcatcct

SEQ ID NO: 5374455 - DNA, 25 bp, Homo sapien
ttgaaggtaactgtaattacaatat

SEQ ID NO: 5374456 - DNA, 25 bp, Homo sapien
tgtaattacaatattctatctcatc

SEQ ID NO: 5374457 - DNA, 25 bp, Homo sapien
aagcaccggtacagtccttgaaaat

SEQ ID NO: 5374458 - DNA, 25 bp, Homo sapien
gagctgtccaccaaagcaccggtac

SEQ ID NO: 5374459 - DNA, 25 bp, Homo sapien
tgaaaatgtcaaatttactgtatgt

SEQ ID NO: 5374460 - DNA, 25 bp, Homo sapien
tgtccaccaaagcaccggtacagtc

SEQ ID NO: 5374461 - DNA, 25 bp, Homo sapien
ctgagccttgaaaggccagaggcat

SEQ ID NO: 5374462 - DNA, 25 bp, Homo sapien
gcaaatttacaggagtccagctctg

SEQ ID NO: 5374463 - DNA, 25 bp, Homo sapien
cttggcaaatttacaggagtccagc

SEQ ID NO: 5374464 - DNA, 25 bp, Homo sapien
agctctgagccttgaaaggccagag

SEQ ID NO: 5374465 - DNA, 25 bp, Homo sapien
caagtgtttcataggagttggtgct

SEQ ID NO: 5374466 - DNA, 25 bp, Homo sapien
ctagctaattgctgaaaccctggga

SEQ ID NO: 5374467 - DNA, 25 bp, Homo sapien
aatcttgatcaccttgagaaagtgc

SEQ ID NO: 5374468 - DNA, 25 bp, Homo sapien
ggtgctgcgggtaaagaaatcttga

SEQ ID NO: 5374469 - DNA, 25 bp, Homo sapien
gcctttggccataggtcacctgtct

SEQ ID NO: 5374470 - DNA, 25 bp, Homo sapien
ggtccactgactccattgcagcaag

SEQ ID NO: 5374471 - DNA, 25 bp, Homo sapien
tgacaagtcccatcaatggcagcct

SEQ ID NO: 5374472 - DNA, 25 bp, Homo sapien
gatcatacatagacctgcactggct

SEQ ID NO: 5374473 - DNA, 25 bp, Homo sapien
catccttttactagtgttcagtgcg

SEQ ID NO: 5374474 - DNA, 25 bp, Homo sapien
tatgttatcgtggattacatgccac

SEQ ID NO: 5374475 - DNA, 25 bp, Homo sapien
gttcagtgcgataacaatacttgac

SEQ ID NO: 5374476 - DNA, 25 bp, Homo sapien
gagatataggtccaagtgcttaaac

SEQ ID NO: 5374477 - DNA, 25 bp, Homo sapien
acctctttgcccacattatgtagca

SEQ ID NO: 5374478 - DNA, 25 bp, Homo sapien
tggaagcaccaagaagcatgggtct

SEQ ID NO: 5374479 - DNA, 25 bp, Homo sapien
tctttgcccacattatgtagcagca

SEQ ID NO: 5374480 - DNA, 25 bp, Homo sapien
agaagcatgggtctactctgctggg

SEQ ID NO: 5374481 - DNA, 25 bp, Homo sapien
tttagatatgagcactttatcctac

SEQ ID NO: 5374482 - DNA, 25 bp, Homo sapien
tggtttagatatccccttattattg

SEQ ID NO: 5374483 - DNA, 25 bp, Homo sapien
ctaagagtagaattgtcagagcata

SEQ ID NO: 5374484 - DNA, 25 bp, Homo sapien
tagtaattccattaaactccattgc

SEQ ID NO: 5374485 - DNA, 25 bp, Homo sapien
agggacagctctttagagcgtagga

SEQ ID NO: 5374486 - DNA, 25 bp, Homo sapien
ggacagctctttagagcgtaggaaa

SEQ ID NO: 5374487 - DNA, 25 bp, Homo sapien
gacagctctttagagcgtaggaaac

SEQ ID NO: 5374488 - DNA, 25 bp, Homo sapien
cagctctttagagcgtaggaaacaa

SEQ ID NO: 5374489 - DNA, 25 bp, Homo sapien
tctccattctacctattacaccatg

SEQ ID NO: 5374490 - DNA, 25 bp, Homo sapien
tccattctacctattacaccatgtc

SEQ ID NO: 5374491 - DNA, 25 bp, Homo sapien
tcaaaattctccattctacctatta

SEQ ID NO: 5374492 - DNA, 25 bp, Homo sapien
aattctccattctacctattacacc

SEQ ID NO: 5374493 - DNA, 25 bp, Homo sapien
tcaattgaacgcaaaccaagcattt

SEQ ID NO: 5374494 - DNA, 25 bp, Homo sapien
caattgaacgcaaaccaagcatttt

SEQ ID NO: 5374495 - DNA, 25 bp, Homo sapien
cccatgaaaatttagttaacagcta

SEQ ID NO: 5374496 - DNA, 25 bp, Homo sapien
cagctaaacaccctaatcaactggc

SEQ ID NO: 5374497 - DNA, 25 bp, Homo sapien
gctagattggtggaattcaaaccca

SEQ ID NO: 5374498 - DNA, 25 bp, Homo sapien
aacaccctaatcaactggcttcaac

SEQ ID NO: 5374499 - DNA, 25 bp, Homo sapien
gaagccccggcaggatagaagctgc

SEQ ID NO: 5374500 - DNA, 25 bp, Homo sapien
ctgctcctttaaatttgcaactcaa

SEQ ID NO: 5374501 - DNA, 25 bp, Homo sapien
gccccggcaggatagaagctgctcc

SEQ ID NO: 5374502 - DNA, 25 bp, Homo sapien
ttaaatttgcaactcaacatgagaa

SEQ ID NO: 5374503 - DNA, 25 bp, Homo sapien
catcttttgatttacagtctaacgc

SEQ ID NO: 5374504 - DNA, 25 bp, Homo sapien
ccatcttttgatttacagtctaacg

SEQ ID NO: 5374505 - DNA, 25 bp, Homo sapien
gaggccttgacctccatcttttgat

SEQ ID NO: 5374506 - DNA, 25 bp, Homo sapien
gtaaaaggaggccttgacctccatc

SEQ ID NO: 5374507 - DNA, 25 bp, Homo sapien
taataatcatatgcagactttcaac

SEQ ID NO: 5374508 - DNA, 25 bp, Homo sapien
gaagtgaagttctcagtagttaaaa

SEQ ID NO: 5374509 - DNA, 25 bp, Homo sapien
gataattcactaaagagaatatata

SEQ ID NO: 5374510 - DNA, 25 bp, Homo sapien
ttgtcacataattaccagtctgcag

SEQ ID NO: 5374511 - DNA, 25 bp, Homo sapien
ctcttgctgccgaaaactgttccac

SEQ ID NO: 5374512 - DNA, 25 bp, Homo sapien
tgtcactcttgctgccgaaaactgt

SEQ ID NO: 5374513 - DNA, 25 bp, Homo sapien
tggataaatattccccagctgtcac

SEQ ID NO: 5374514 - DNA, 25 bp, Homo sapien
tgcattcacataagacccacatttg

SEQ ID NO: 5374515 - DNA, 25 bp, Homo sapien
tcctacagctacattaacttgggca

SEQ ID NO: 5374516 - DNA, 25 bp, Homo sapien
catgctttcacggtttgcatagcta

SEQ ID NO: 5374517 - DNA, 25 bp, Homo sapien
tacagctacattaacttgggcaggg

SEQ ID NO: 5374518 - DNA, 25 bp, Homo sapien
gcatagctatgatctttctcattac

SEQ ID NO: 5374519 - DNA, 25 bp, Homo sapien
tattctgccccatgtgctgccactt

SEQ ID NO: 5374520 - DNA, 25 bp, Homo sapien
ccctattctgccccatgtgctgcca

SEQ ID NO: 5374521 - DNA, 25 bp, Homo sapien
gctgccacttcctgtttttcttatt

SEQ ID NO: 5374522 - DNA, 25 bp, Homo sapien
tcctgtttttcttattcttggtgtc

SEQ ID NO: 5374523 - DNA, 25 bp, Homo sapien
cagacagcaaggaacatctaaacat

SEQ ID NO: 5374524 - DNA, 25 bp, Homo sapien
ctggtccaggttgaaagacgatgtt

SEQ ID NO: 5374525 - DNA, 25 bp, Homo sapien
ttaagtaaagtaccttctcagacag

SEQ ID NO: 5374526 - DNA, 25 bp, Homo sapien
tccaggttgaaagacgatgttttta

SEQ ID NO: 5374527 - DNA, 25 bp, Homo sapien
cttcctcatggcgttcacgtcactt

SEQ ID NO: 5374528 - DNA, 25 bp, Homo sapien
ccagtgacttgatccttcctcatgg

SEQ ID NO: 5374529 - DNA, 25 bp, Homo sapien
agtgacttgatccttcctcatggcg

SEQ ID NO: 5374530 - DNA, 25 bp, Homo sapien
tcatggcgttcacgtcacttaagac

SEQ ID NO: 5374531 - DNA, 25 bp, Homo sapien
acagcagagtgggagacacgaacac

SEQ ID NO: 5374532 - DNA, 25 bp, Homo sapien
cagaagtattcagcaagttcctgga

SEQ ID NO: 5374533 - DNA, 25 bp, Homo sapien
aggccagagttctttaacaccagaa

SEQ ID NO: 5374534 - DNA, 25 bp, Homo sapien
ggagcaatggcaaaccagaaacgga

SEQ ID NO: 5374535 - DNA, 25 bp, Homo sapien
atgtctcccggcacatgcagttggg

SEQ ID NO: 5374536 - DNA, 25 bp, Homo sapien
gagggcttgtttaatgtctcccggc

SEQ ID NO: 5374537 - DNA, 25 bp, Homo sapien
gacagatgaaggtctctgcgcatga

SEQ ID NO: 5374538 - DNA, 25 bp, Homo sapien
tctgcgcatgagttctgagggcttg

SEQ ID NO: 5374539 - DNA, 25 bp, Homo sapien
ttcttggtcaatctgcatgttttac

SEQ ID NO: 5374540 - DNA, 25 bp, Homo sapien
tttcttggtcaatctgcatgtttta

SEQ ID NO: 5374541 - DNA, 25 bp, Homo sapien
tgatcaaaacgtagttcttacccca

SEQ ID NO: 5374542 - DNA, 25 bp, Homo sapien
agaagatttgctgcccctctgaaca

SEQ ID NO: 5374543 - DNA, 25 bp, Homo sapien
cctcagtgatcaaaacgtagttctt

SEQ ID NO: 5374544 - DNA, 25 bp, Homo sapien
agttctgcccactggtcaagagaag

SEQ ID NO: 5374545 - DNA, 25 bp, Homo sapien
gggactttgaagattgtagccaagg

SEQ ID NO: 5374546 - DNA, 25 bp, Homo sapien
gattgtagccaaggaagcctacgta

SEQ ID NO: 5374547 - DNA, 25 bp, Homo sapien
caatgggactttgaagattgtagcc

SEQ ID NO: 5374548 - DNA, 25 bp, Homo sapien
ttgaagattgtagccaaggaagcct

SEQ ID NO: 5374549 - DNA, 25 bp, Homo sapien
ctctttttggttgaagcatttagcc

SEQ ID NO: 5374550 - DNA, 25 bp, Homo sapien
tactgagatacgtggatttgatcct

SEQ ID NO: 5374551 - DNA, 25 bp, Homo sapien
aaatatcccaccactattgtttggg

SEQ ID NO: 5374552 - DNA, 25 bp, Homo sapien
agagtgtatactctcttggcttggg

SEQ ID NO: 5374553 - DNA, 25 bp, Homo sapien
tatactccagactgactgttaatac

SEQ ID NO: 5374554 - DNA, 25 bp, Homo sapien
tgtgtatactccagactgactgtta

SEQ ID NO: 5374555 - DNA, 25 bp, Homo sapien
ttcttccaatacctaggggcaagga

SEQ ID NO: 5374556 - DNA, 25 bp, Homo sapien
tttccttgtgtatactccagactga

SEQ ID NO: 5374557 - DNA, 25 bp, Homo sapien
tgaatgggatgactcatgactctcc

SEQ ID NO: 5374558 - DNA, 25 bp, Homo sapien
tccaacaagggagtaggcagcatag

SEQ ID NO: 5374559 - DNA, 25 bp, Homo sapien
gaatcctcagcctacagattgtgag

SEQ ID NO: 5374560 - DNA, 25 bp, Homo sapien
tttgaggacacatagtgaaagcacc

SEQ ID NO: 5374561 - DNA, 25 bp, Homo sapien
ttgttaggtcgttacagtcttggtg

SEQ ID NO: 5374562 - DNA, 25 bp, Homo sapien
aggaagttctgtagcattgataaac

SEQ ID NO: 5374563 - DNA, 25 bp, Homo sapien
caggaagttctgtagcattgataaa

SEQ ID NO: 5374564 - DNA, 25 bp, Homo sapien
tatttgttaggtcgttacagtcttg

SEQ ID NO: 5374565 - DNA, 25 bp, Homo sapien
catttgatccttgcctaaccagccg

SEQ ID NO: 5374566 - DNA, 25 bp, Homo sapien
tccactcccagacaaagaagcattt

SEQ ID NO: 5374567 - DNA, 25 bp, Homo sapien
ccgaccatacatttgcttcaaggcc

SEQ ID NO: 5374568 - DNA, 25 bp, Homo sapien
cacaacagaaatcgaagatggatgt

SEQ ID NO: 5374569 - DNA, 25 bp, Homo sapien
tctccaaagactgagacatcggtgt

SEQ ID NO: 5374570 - DNA, 25 bp, Homo sapien
agtggttataacctttgctatggtc

SEQ ID NO: 5374571 - DNA, 25 bp, Homo sapien
gtcttagtctcacgatctatcatat

SEQ ID NO: 5374572 - DNA, 25 bp, Homo sapien
tcaaacctggtgggttctccaaaga

SEQ ID NO: 5374573 - DNA, 25 bp, Homo sapien
tacgaaccttaattagtgtcagcag

SEQ ID NO: 5374574 - DNA, 25 bp, Homo sapien
cacacgtgcttagggtaaggcatgt

SEQ ID NO: 5374575 - DNA, 25 bp, Homo sapien
ttagctgcaatctggcaaatcatct

SEQ ID NO: 5374576 - DNA, 25 bp, Homo sapien
gctgcaatctggcaaatcatctttc

SEQ ID NO: 5374577 - DNA, 25 bp, Homo sapien
cctcagatactgtgaataccaagaa

SEQ ID NO: 5374578 - DNA, 25 bp, Homo sapien
ccttccctcagatactgtgaatacc

SEQ ID NO: 5374579 - DNA, 25 bp, Homo sapien
tccctcagatactgtgaataccaag

SEQ ID NO: 5374580 - DNA, 25 bp, Homo sapien
tgaataccaagaaacacactgtgtt

SEQ ID NO: 5374581 - DNA, 25 bp, Homo sapien
gaagatcggtatcactagagcacac

SEQ ID NO: 5374582 - DNA, 25 bp, Homo sapien
gagcatctacctggtgcattcacag

SEQ ID NO: 5374583 - DNA, 25 bp, Homo sapien
ggacatgcatcaagctaactggagc

SEQ ID NO: 5374584 - DNA, 25 bp, Homo sapien
ctacgttcggacattcatctgctga

SEQ ID NO: 5374585 - DNA, 25 bp, Homo sapien
gtgacttccaaaattcggtccttca

SEQ ID NO: 5374586 - DNA, 25 bp, Homo sapien
ggttcagtaacttgatccctatcag

SEQ ID NO: 5374587 - DNA, 25 bp, Homo sapien
gaactatttacaatgagtgaggcac

SEQ ID NO: 5374588 - DNA, 25 bp, Homo sapien
gggatgagtccctgatatatgttac

SEQ ID NO: 5374589 - DNA, 25 bp, Homo sapien
caaaacctgagttatcttcataccc

SEQ ID NO: 5374590 - DNA, 25 bp, Homo sapien
aaaacctgagttatcttcataccct

SEQ ID NO: 5374591 - DNA, 25 bp, Homo sapien
tcaaaacctgagttatcttcatacc

SEQ ID NO: 5374592 - DNA, 25 bp, Homo sapien
atcttcataccctttttgctcctta

SEQ ID NO: 5374593 - DNA, 25 bp, Homo sapien
ctgcacaccaaataactcagaagtc

SEQ ID NO: 5374594 - DNA, 25 bp, Homo sapien
acaccaaataactcagaagtcaaat

SEQ ID NO: 5374595 - DNA, 25 bp, Homo sapien
gcacaccaaataactcagaagtcaa

SEQ ID NO: 5374596 - DNA, 25 bp, Homo sapien
tgcacaccaaataactcagaagtca

SEQ ID NO: 5374597 - DNA, 25 bp, Homo sapien
tagtcagcaccaaccaggttccgta

SEQ ID NO: 5374598 - DNA, 25 bp, Homo sapien
tatagtcagcaccaaccaggttccg

SEQ ID NO: 5374599 - DNA, 25 bp, Homo sapien
aggagactatagtcagcaccaacca

SEQ ID NO: 5374600 - DNA, 25 bp, Homo sapien
gactatagtcagcaccaaccaggtt

SEQ ID NO: 5374601 - DNA, 25 bp, Homo sapien
tgtcttgggcttgacaacatctcca

SEQ ID NO: 5374602 - DNA, 25 bp, Homo sapien
cagcccatgtcttgggcttgacaac

SEQ ID NO: 5374603 - DNA, 25 bp, Homo sapien
tacatcccactcttgcttcttgttc

SEQ ID NO: 5374604 - DNA, 25 bp, Homo sapien
ccatgtcttgggcttgacaacatct

SEQ ID NO: 5374605 - DNA, 25 bp, Homo sapien
tcacagctcctgactatgggagaca

SEQ ID NO: 5374606 - DNA, 25 bp, Homo sapien
tgagtgactctgacccataccaata

SEQ ID NO: 5374607 - DNA, 25 bp, Homo sapien
aactccatgtttgcctgtctctctg

SEQ ID NO: 5374608 - DNA, 25 bp, Homo sapien
tctctctgtatgaggcacagactct

SEQ ID NO: 5374609 - DNA, 25 bp, Homo sapien
tattttgaagaatgcgggtaatgga

SEQ ID NO: 5374610 - DNA, 25 bp, Homo sapien
tgaagaatgcgggtaatggaataga

SEQ ID NO: 5374611 - DNA, 25 bp, Homo sapien
cgggtaatggaatagatctgagaaa

SEQ ID NO: 5374612 - DNA, 25 bp, Homo sapien
gaatgcgggtaatggaatagatctg

SEQ ID NO: 5374613 - DNA, 25 bp, Homo sapien
gacataaaatcagcctgcatgccca

SEQ ID NO: 5374614 - DNA, 25 bp, Homo sapien
ttaggaacagataatcaaataccac

SEQ ID NO: 5374615 - DNA, 25 bp, Homo sapien
ctcacttgtgtgtggagctaaacgt

SEQ ID NO: 5374616 - DNA, 25 bp, Homo sapien
gtgatgggatctttcatacccctaa

SEQ ID NO: 5374617 - DNA, 25 bp, Homo sapien
acaatgctgggccaaaatgtcagcc

SEQ ID NO: 5374618 - DNA, 25 bp, Homo sapien
tatgtaacaagtagtctattaattt

SEQ ID NO: 5374619 - DNA, 25 bp, Homo sapien
gggccaaaatgtcagcctttataaa

SEQ ID NO: 5374620 - DNA, 25 bp, Homo sapien
aacacattagacctctctgtacttt

SEQ ID NO: 5374621 - DNA, 25 bp, Homo sapien
tcaaacatattatctggatacaaca

SEQ ID NO: 5374622 - DNA, 25 bp, Homo sapien
aaacatattatctggatacaacaga

SEQ ID NO: 5374623 - DNA, 25 bp, Homo sapien
tggatacaacagaagtacccctttc

SEQ ID NO: 5374624 - DNA, 25 bp, Homo sapien
atacaacagaagtacccctttctgt

SEQ ID NO: 5374625 - DNA, 25 bp, Homo sapien
atgttggtaattctggtatgggcat

SEQ ID NO: 5374626 - DNA, 25 bp, Homo sapien
tgttgaaaggaatgttggtaattct

SEQ ID NO: 5374627 - DNA, 25 bp, Homo sapien
tggtaattctggtatgggcattgtt

SEQ ID NO: 5374628 - DNA, 25 bp, Homo sapien
taattctggtatgggcattgtttat

SEQ ID NO: 5374629 - DNA, 25 bp, Homo sapien
tcaaatgtcaaaggcggagaaaact

SEQ ID NO: 5374630 - DNA, 25 bp, Homo sapien
ggcggagaaaactctaacatagtta

SEQ ID NO: 5374631 - DNA, 25 bp, Homo sapien
agatatctgcgtgagtggctaatgc

SEQ ID NO: 5374632 - DNA, 25 bp, Homo sapien
gaaacgcatatgtaagagatatctg

SEQ ID NO: 5374633 - DNA, 25 bp, Homo sapien
cattgtgcacgtcttgtttcaaaac

SEQ ID NO: 5374634 - DNA, 25 bp, Homo sapien
gaggcattgtgcacgtcttgtttca

SEQ ID NO: 5374635 - DNA, 25 bp, Homo sapien
aaaacactgaggcattgtgcacgtc

SEQ ID NO: 5374636 - DNA, 25 bp, Homo sapien
cactgaggcattgtgcacgtcttgt

SEQ ID NO: 5374637 - DNA, 25 bp, Homo sapien
aattagctcagcatgtacttgtctg

SEQ ID NO: 5374638 - DNA, 25 bp, Homo sapien
taatgaggtgtgaggtagtgatcca

SEQ ID NO: 5374639 - DNA, 25 bp, Homo sapien
taagtgagtctgttgaagacgcaaa

SEQ ID NO: 5374640 - DNA, 25 bp, Homo sapien
taggactggtctggtagtgacaaat

SEQ ID NO: 5374641 - DNA, 25 bp, Homo sapien
ttagacttctttgtccataacttcc

SEQ ID NO: 5374642 - DNA, 25 bp, Homo sapien
cttccatgcgtacccaggcactgac

SEQ ID NO: 5374643 - DNA, 25 bp, Homo sapien
caccttcaaacgtgaaggtgggttg

SEQ ID NO: 5374644 - DNA, 25 bp, Homo sapien
tttcccctggaatccatatgcacct

SEQ ID NO: 5374645 - DNA, 25 bp, Homo sapien
tagattccggttaaaggacatattc

SEQ ID NO: 5374646 - DNA, 25 bp, Homo sapien
tatctaatgtcacccatttcccagg

SEQ ID NO: 5374647 - DNA, 25 bp, Homo sapien
gcttgtttgagaacgttcctagaaa

SEQ ID NO: 5374648 - DNA, 25 bp, Homo sapien
ggcctgtgcctgaagtaattttcac

SEQ ID NO: 5374649 - DNA, 25 bp, Homo sapien
aaagctgccagagaaacccacgggc

SEQ ID NO: 5374650 - DNA, 25 bp, Homo sapien
aagctgccagagaaacccacgggcc

SEQ ID NO: 5374651 - DNA, 25 bp, Homo sapien
ccccagaggaaaccaacagatcaat

SEQ ID NO: 5374652 - DNA, 25 bp, Homo sapien
cctttcccctctgaccatggattat

SEQ ID NO: 5374653 - DNA, 25 bp, Homo sapien
ggaaaccaacagatcaatggataca

SEQ ID NO: 5374654 - DNA, 25 bp, Homo sapien
tctgaccatggattattgcttttct

SEQ ID NO: 5374655 - DNA, 25 bp, Homo sapien
cataagagcaatgatttgctgaagg

SEQ ID NO: 5374656 - DNA, 25 bp, Homo sapien
tccatacagctgtctcaggtaaagt

SEQ ID NO: 5374657 - DNA, 25 bp, Homo sapien
tgctgaaggtctgttgcaggcaact

SEQ ID NO: 5374658 - DNA, 25 bp, Homo sapien
gaaggtctgttgcaggcaactgcat

SEQ ID NO: 5374659 - DNA, 25 bp, Homo sapien
catggtgatggtacacagcttgtca

SEQ ID NO: 5374660 - DNA, 25 bp, Homo sapien
catttctggccagcacatgaacaag

SEQ ID NO: 5374661 - DNA, 25 bp, Homo sapien
gatgatgggcataaaggtaagtctc

SEQ ID NO: 5374662 - DNA, 25 bp, Homo sapien
aacaaggtacttgggtgatgatgat

SEQ ID NO: 5374663 - DNA, 25 bp, Homo sapien
cattaaaaacggctggaggagagaa

SEQ ID NO: 5374664 - DNA, 25 bp, Homo sapien
cacagaagattgttattgggactct

SEQ ID NO: 5374665 - DNA, 25 bp, Homo sapien
gttaaggcaatgcaagctgatgtca

SEQ ID NO: 5374666 - DNA, 25 bp, Homo sapien
tcacagtggcctaaaatcttaaagg

SEQ ID NO: 5374667 - DNA, 25 bp, Homo sapien
gaaggcagtgccattgcattgtgct

SEQ ID NO: 5374668 - DNA, 25 bp, Homo sapien
cagtgccattgcattgtgctcctca

SEQ ID NO: 5374669 - DNA, 25 bp, Homo sapien
tcttcggggtgcagcaactccctgg

SEQ ID NO: 5374670 - DNA, 25 bp, Homo sapien
attgcattgtgctcctcatctggct

SEQ ID NO: 5374671 - DNA, 25 bp, Homo sapien
taaggctaccgcataaggaagggag

SEQ ID NO: 5374672 - DNA, 25 bp, Homo sapien
cacattcgtaagtgtttgtggagca

SEQ ID NO: 5374673 - DNA, 25 bp, Homo sapien
caggataaggctaccgcataaggaa

SEQ ID NO: 5374674 - DNA, 25 bp, Homo sapien
ggagctatgttgactgtgcacattc

SEQ ID NO: 5374675 - DNA, 25 bp, Homo sapien
ttgagaatcatctactcgtgtcctt

SEQ ID NO: 5374676 - DNA, 25 bp, Homo sapien
gagaatcatctactcgtgtccttag

SEQ ID NO: 5374677 - DNA, 25 bp, Homo sapien
aatcatctactcgtgtccttagccc

SEQ ID NO: 5374678 - DNA, 25 bp, Homo sapien
gaatcatctactcgtgtccttagcc

SEQ ID NO: 5374679 - DNA, 25 bp, Homo sapien
tatattcaaggacaaagacttgagc

SEQ ID NO: 5374680 - DNA, 25 bp, Homo sapien
gagttgaccgtcactattttatatt

SEQ ID NO: 5374681 - DNA, 25 bp, Homo sapien
tgagcaaatgtgatggtacaattca

SEQ ID NO: 5374682 - DNA, 25 bp, Homo sapien
cagtttttcagagttgaccgtcact

SEQ ID NO: 5374683 - DNA, 25 bp, Homo sapien
tgacatttaggataggccagaggtt

SEQ ID NO: 5374684 - DNA, 25 bp, Homo sapien
ggactttgggtatttgagttcatac

SEQ ID NO: 5374685 - DNA, 25 bp, Homo sapien
tttgcaatgtgagaacgatatgaca

SEQ ID NO: 5374686 - DNA, 25 bp, Homo sapien
cctaatagagttaccacacatgttt

SEQ ID NO: 5374687 - DNA, 25 bp, Homo sapien
taacaaatactaggctaggtctgac

SEQ ID NO: 5374688 - DNA, 25 bp, Homo sapien
tgatatagcatacagtgcataataa

SEQ ID NO: 5374689 - DNA, 25 bp, Homo sapien
tacatcgcctcaagtatttgtcctt

SEQ ID NO: 5374690 - DNA, 25 bp, Homo sapien
gtagttaccttcttgtgctaacaaa

SEQ ID NO: 5374691 - DNA, 25 bp, Homo sapien
agattgtcctttccacactttatgt

SEQ ID NO: 5374692 - DNA, 25 bp, Homo sapien
taacttttagggtacacgcgcacat

SEQ ID NO: 5374693 - DNA, 25 bp, Homo sapien
caggtaatgtgatagctccgggttt

SEQ ID NO: 5374694 - DNA, 25 bp, Homo sapien
tggtcactgttagtgtagagcagag

SEQ ID NO: 5374695 - DNA, 25 bp, Homo sapien
gattggtaccaatggtttgaatttc

SEQ ID NO: 5374696 - DNA, 25 bp, Homo sapien
ggtaccaatggtttgaatttctgat

SEQ ID NO: 5374697 - DNA, 25 bp, Homo sapien
cttgagcttacttggttcttctctc

SEQ ID NO: 5374698 - DNA, 25 bp, Homo sapien
agggtgatacctgtttcatagaatg

SEQ ID NO: 5374699 - DNA, 25 bp, Homo sapien
ctatgttgtgatctatctacaggtc

SEQ ID NO: 5374700 - DNA, 25 bp, Homo sapien
tctatctacaggtcttgcagccact

SEQ ID NO: 5374701 - DNA, 25 bp, Homo sapien
tccaaagagtcctatgttgtgatct

SEQ ID NO: 5374702 - DNA, 25 bp, Homo sapien
ccaaagagtcctatgttgtgatcta

SEQ ID NO: 5374703 - DNA, 25 bp, Homo sapien
gactgtaggtccataactcccagaa

SEQ ID NO: 5374704 - DNA, 25 bp, Homo sapien
ttcctaaggcctatgagagatcaga

SEQ ID NO: 5374705 - DNA, 25 bp, Homo sapien
aagatatgactgtacagcctgggca

SEQ ID NO: 5374706 - DNA, 25 bp, Homo sapien
tacactttggaaagaagatttggcc

SEQ ID NO: 5374707 - DNA, 25 bp, Homo sapien
tcaatagaggatactggagcaatgc

SEQ ID NO: 5374708 - DNA, 25 bp, Homo sapien
tcatcaatcactgagcggactgcct

SEQ ID NO: 5374709 - DNA, 25 bp, Homo sapien
tatgccactggagctagaccctgtg

SEQ ID NO: 5374710 - DNA, 25 bp, Homo sapien
tctaatgtgctgtttgaggagcagc

SEQ ID NO: 5374711 - DNA, 25 bp, Homo sapien
tggccctgaactccataagaaggaa

SEQ ID NO: 5374712 - DNA, 25 bp, Homo sapien
tactgctttagttcaggctcgggct

SEQ ID NO: 5374713 - DNA, 25 bp, Homo sapien
ctataaattctgtaaccgactgtac

SEQ ID NO: 5374714 - DNA, 25 bp, Homo sapien
gaactccataagaaggaatcagacc

SEQ ID NO: 5374715 - DNA, 25 bp, Homo sapien
tgtccaaaaacatgcaagttttctt

SEQ ID NO: 5374716 - DNA, 25 bp, Homo sapien
aaacatgcaagttttcttcaaccat

SEQ ID NO: 5374717 - DNA, 25 bp, Homo sapien
ccaaaaacatgcaagttttcttcaa

SEQ ID NO: 5374718 - DNA, 25 bp, Homo sapien
cttgtccaaaaacatgcaagttttc

SEQ ID NO: 5374719 - DNA, 25 bp, Homo sapien
gatcggccacgcaatttcttctcta

SEQ ID NO: 5374720 - DNA, 25 bp, Homo sapien
gagatagcgttcctggatcggccac

SEQ ID NO: 5374721 - DNA, 25 bp, Homo sapien
gctccaagatgttctgaggactcta

SEQ ID NO: 5374722 - DNA, 25 bp, Homo sapien
gaacccatattaccctagcatttag

SEQ ID NO: 5374723 - DNA, 25 bp, Homo sapien
tgaaattagaattgcaccccctgcc

SEQ ID NO: 5374724 - DNA, 25 bp, Homo sapien
taatcttatcatcatgttaactggt

SEQ ID NO: 5374725 - DNA, 25 bp, Homo sapien
ggtctcttggagacagcatattaat

SEQ ID NO: 5374726 - DNA, 25 bp, Homo sapien
ctttgtccagcttgtcactctgtgc

SEQ ID NO: 5374727 - DNA, 25 bp, Homo sapien
tggctccacgagcaactaggaaaac

SEQ ID NO: 5374728 - DNA, 25 bp, Homo sapien
ctatgcctctatcatggctccacga

SEQ ID NO: 5374729 - DNA, 25 bp, Homo sapien
catggctccacgagcaactaggaaa

SEQ ID NO: 5374730 - DNA, 25 bp, Homo sapien
atggctccacgagcaactaggaaaa

SEQ ID NO: 5374731 - DNA, 25 bp, Homo sapien
aggccagggctacacatggatcgta

SEQ ID NO: 5374732 - DNA, 25 bp, Homo sapien
catggatcgtacatgtgtcagtaac

SEQ ID NO: 5374733 - DNA, 25 bp, Homo sapien
tcgtacatgtgtcagtaacactgac

SEQ ID NO: 5374734 - DNA, 25 bp, Homo sapien
aggccaccctgtttgcaacagcctt

SEQ ID NO: 5374735 - DNA, 25 bp, Homo sapien
ctggaggctccacagaggctgttta

SEQ ID NO: 5374736 - DNA, 25 bp, Homo sapien
ccacagaggctgtttaataagacgt

SEQ ID NO: 5374737 - DNA, 25 bp, Homo sapien
tggaggctccacagaggctgtttaa

SEQ ID NO: 5374738 - DNA, 25 bp, Homo sapien
ttgtttacttccttcctgctacctc

SEQ ID NO: 5374739 - DNA, 25 bp, Homo sapien
ggcaggcaaggagcctgtgacacca

SEQ ID NO: 5374740 - DNA, 25 bp, Homo sapien
ggagcctgtgacaccactggtaatc

SEQ ID NO: 5374741 - DNA, 25 bp, Homo sapien
caaggagcctgtgacaccactggta

SEQ ID NO: 5374742 - DNA, 25 bp, Homo sapien
gacaccactggtaatctgccagcac

SEQ ID NO: 5374743 - DNA, 25 bp, Homo sapien
cacgcatttgtggactgaagggctg

SEQ ID NO: 5374744 - DNA, 25 bp, Homo sapien
tctagcagttaggatctcagttccc

SEQ ID NO: 5374745 - DNA, 25 bp, Homo sapien
cagttccccatacagacaaccaggt

SEQ ID NO: 5374746 - DNA, 25 bp, Homo sapien
tggaagcaattgatagtcccactga

SEQ ID NO: 5374747 - DNA, 25 bp, Homo sapien
caagagaagtggtcctgaagaaaga

SEQ ID NO: 5374748 - DNA, 25 bp, Homo sapien
caactggatggactgacaagagaag

SEQ ID NO: 5374749 - DNA, 25 bp, Homo sapien
tctgccaacaactgcggatagcttt

SEQ ID NO: 5374750 - DNA, 25 bp, Homo sapien
gatgtgagtatctggtgggacttca

SEQ ID NO: 5374751 - DNA, 25 bp, Homo sapien
gggggaaactgagagcaatagggcc

SEQ ID NO: 5374752 - DNA, 25 bp, Homo sapien
agggggaaactgagagcaatagggc

SEQ ID NO: 5374753 - DNA, 25 bp, Homo sapien
cagggggaaactgagagcaataggg

SEQ ID NO: 5374754 - DNA, 25 bp, Homo sapien
ctcctgaattatcagaggagctgcc

SEQ ID NO: 5374755 - DNA, 25 bp, Homo sapien
gccctcctgaattatcagaggagct

SEQ ID NO: 5374756 - DNA, 25 bp, Homo sapien
tgccagtactcccagcccactttct

SEQ ID NO: 5374757 - DNA, 25 bp, Homo sapien
agggagccctcctgaattatcagag

SEQ ID NO: 5374758 - DNA, 25 bp, Homo sapien
ctcttctaatagccatctagaaaaa

SEQ ID NO: 5374759 - DNA, 25 bp, Homo sapien
tcttctaatagccatctagaaaaag

SEQ ID NO: 5374760 - DNA, 25 bp, Homo sapien
ttgctcttctaatagccatctagaa

SEQ ID NO: 5374761 - DNA, 25 bp, Homo sapien
tccaggctcggtagcctcctgagag

SEQ ID NO: 5374762 - DNA, 25 bp, Homo sapien
agttaaactgattacttagatcggc

SEQ ID NO: 5374763 - DNA, 25 bp, Homo sapien
cttagatcggcacaacaaaagtcca

SEQ ID NO: 5374764 - DNA, 25 bp, Homo sapien
ccatattcattccaaagttaaactg

SEQ ID NO: 5374765 - DNA, 25 bp, Homo sapien
tggggccaaacttactccagataaa

SEQ ID NO: 5374766 - DNA, 25 bp, Homo sapien
cagtaaatcttactggaacccagtt

SEQ ID NO: 5374767 - DNA, 25 bp, Homo sapien
tgtgtatgtcagtaaatcttactgg

SEQ ID NO: 5374768 - DNA, 25 bp, Homo sapien
tactccagataaacacttcttcatt

SEQ ID NO: 5374769 - DNA, 25 bp, Homo sapien
taactgaaccaaccaagtttgctgg

SEQ ID NO: 5374770 - DNA, 25 bp, Homo sapien
tctgctgtgttgagccacttcaaga

SEQ ID NO: 5374771 - DNA, 25 bp, Homo sapien
ccacaatgtgtatggtaactgaacc

SEQ ID NO: 5374772 - DNA, 25 bp, Homo sapien
ggaaagatgccacgtgaacaaataa

SEQ ID NO: 5374773 - DNA, 25 bp, Homo sapien
ctggacctatgtagttgcagtcaca

SEQ ID NO: 5374774 - DNA, 25 bp, Homo sapien
tggacctatgtagttgcagtcacac

SEQ ID NO: 5374775 - DNA, 25 bp, Homo sapien
gactgcatcggtctgactgacccat

SEQ ID NO: 5374776 - DNA, 25 bp, Homo sapien
tgttctctgactgcatcggtctgac

SEQ ID NO: 5374777 - DNA, 25 bp, Homo sapien
ctctgactgcatcggtctgactgac

SEQ ID NO: 5374778 - DNA, 25 bp, Homo sapien
gaactactgttctctgactgcatcg

SEQ ID NO: 5374779 - DNA, 25 bp, Homo sapien
cattggcactgctagtggtggcctt

SEQ ID NO: 5374780 - DNA, 25 bp, Homo sapien
gaagcggccgatgctgccaccttgt

SEQ ID NO: 5374781 - DNA, 25 bp, Homo sapien
cctggaggccaagcctagaggcact

SEQ ID NO: 5374782 - DNA, 25 bp, Homo sapien
tcagcagcttcgtgggtgtaaagtg

SEQ ID NO: 5374783 - DNA, 25 bp, Homo sapien
tccgacacaggactggctgtgaagg

SEQ ID NO: 5374784 - DNA, 25 bp, Homo sapien
tgctggaggagtttcctaaggacct

SEQ ID NO: 5374785 - DNA, 25 bp, Homo sapien
gctctcagaggagatccatggctct

SEQ ID NO: 5374786 - DNA, 25 bp, Homo sapien
gacctgtctggttagagatgtaaag

SEQ ID NO: 5374787 - DNA, 25 bp, Homo sapien
gctggttcaatcgagaagagttagc

SEQ ID NO: 5374788 - DNA, 25 bp, Homo sapien
ctttaaggctaggatgtctggtgtc

SEQ ID NO: 5374789 - DNA, 25 bp, Homo sapien
atgccgggaacagacagctccatct

SEQ ID NO: 5374790 - DNA, 25 bp, Homo sapien
tcaaattcccaagcgaagagctggt

SEQ ID NO: 5374791 - DNA, 25 bp, Homo sapien
taaccaaaagtatctcatccttctc

SEQ ID NO: 5374792 - DNA, 25 bp, Homo sapien
tctcctcctcgcaggcactgccagt

SEQ ID NO: 5374793 - DNA, 25 bp, Homo sapien
cgcaggcactgccagtcatactcat

SEQ ID NO: 5374794 - DNA, 25 bp, Homo sapien
tccttctcctcctcgcagctctcct

SEQ ID NO: 5374795 - DNA, 25 bp, Homo sapien
gaacctctcaaagtcgtcttcaatt

SEQ ID NO: 5374796 - DNA, 25 bp, Homo sapien
tcttcttctttggtctgccaggtag

SEQ ID NO: 5374797 - DNA, 25 bp, Homo sapien
ttcccacttcccagttccactttgc

SEQ ID NO: 5374798 - DNA, 25 bp, Homo sapien
gaatgctgccactgctttgaccagc

SEQ ID NO: 5374799 - DNA, 25 bp, Homo sapien
gagattatcctgtccattctcctac

SEQ ID NO: 5374800 - DNA, 25 bp, Homo sapien
gtgagattatcctgtccattctcct

SEQ ID NO: 5374801 - DNA, 25 bp, Homo sapien
agagggcccttgtgagattatcctg

SEQ ID NO: 5374802 - DNA, 25 bp, Homo sapien
cttgtgtatagagggcccttgtgag

SEQ ID NO: 5374803 - DNA, 25 bp, Homo sapien
atcctgttcctttatacaagccaac

SEQ ID NO: 5374804 - DNA, 25 bp, Homo sapien
gattgtccatcctgatcctgttcct

SEQ ID NO: 5374805 - DNA, 25 bp, Homo sapien
tctaatgattgtccatcctgatcct

SEQ ID NO: 5374806 - DNA, 25 bp, Homo sapien
tcctgttcctttatacaagccaaca

SEQ ID NO: 5374807 - DNA, 25 bp, Homo sapien
gggacattgtgccactgacttctca

SEQ ID NO: 5374808 - DNA, 25 bp, Homo sapien
tgatatcttagtacaatgaacacac

SEQ ID NO: 5374809 - DNA, 25 bp, Homo sapien
tcttccaagactgaagtggccagtg

SEQ ID NO: 5374810 - DNA, 25 bp, Homo sapien
gtacaatgaacacactgaattcttc

SEQ ID NO: 5374811 - DNA, 25 bp, Homo sapien
cccagggtacagatataagtagctt

SEQ ID NO: 5374812 - DNA, 25 bp, Homo sapien
gccagtcatagaggtaaatagcagc

SEQ ID NO: 5374813 - DNA, 25 bp, Homo sapien
caggccaataaggaggtcccctgag

SEQ ID NO: 5374814 - DNA, 25 bp, Homo sapien
gaagtcgcctccatatgccagtcat

SEQ ID NO: 5374815 - DNA, 25 bp, Homo sapien
gaggaatgggtctgaggggtcccga

SEQ ID NO: 5374816 - DNA, 25 bp, Homo sapien
aaagagcctacatcaccaagtcaat

SEQ ID NO: 5374817 - DNA, 25 bp, Homo sapien
ccaaaaaagagcctacatcaccaag

SEQ ID NO: 5374818 - DNA, 25 bp, Homo sapien
caaaaaagagcctacatcaccaagt

SEQ ID NO: 5374819 - DNA, 25 bp, Homo sapien
aaaaagagcctacatcaccaagtca

SEQ ID NO: 5374820 - DNA, 25 bp, Homo sapien
taacaggtccaagagcaaacagacg

SEQ ID NO: 5374821 - DNA, 25 bp, Homo sapien
taggctctcaaatatggtcaaaaag

SEQ ID NO: 5374822 - DNA, 25 bp, Homo sapien
caaataatgagtagccagggcagtt

SEQ ID NO: 5374823 - DNA, 25 bp, Homo sapien
ttgagaactggccaaaatcaggctg

SEQ ID NO: 5374824 - DNA, 25 bp, Homo sapien
taatgactcctcctgaaaatgctgc

SEQ ID NO: 5374825 - DNA, 25 bp, Homo sapien
catacaaagaacgatgatgctcctc

SEQ ID NO: 5374826 - DNA, 25 bp, Homo sapien
aattgacttgggttgcaagcactga

SEQ ID NO: 5374827 - DNA, 25 bp, Homo sapien
taaaaggtgacctagtgtactgggc

SEQ ID NO: 5374828 - DNA, 25 bp, Homo sapien
taagtgtgctaacatcgaatataga

SEQ ID NO: 5374829 - DNA, 25 bp, Homo sapien
tgtaaccagcttgtttcataacatg

SEQ ID NO: 5374830 - DNA, 25 bp, Homo sapien
cctggtcggacctgtcctggacttc

SEQ ID NO: 5374831 - DNA, 25 bp, Homo sapien
ctggcttagcttcttgggttcctaa

SEQ ID NO: 5374832 - DNA, 25 bp, Homo sapien
cacaccaggttgagagtgactgagt

SEQ ID NO: 5374833 - DNA, 25 bp, Homo sapien
tgagtgtgtgccatgactttgtcca

SEQ ID NO: 5374834 - DNA, 25 bp, Homo sapien
gttcctgcctattttgcaagcctag

SEQ ID NO: 5374835 - DNA, 25 bp, Homo sapien
gggtttggctaatcacatacatttg

SEQ ID NO: 5374836 - DNA, 25 bp, Homo sapien
tttggaacagagtgtgccaaggcag

SEQ ID NO: 5374837 - DNA, 25 bp, Homo sapien
atttggaacagagtgtgccaaggca

SEQ ID NO: 5374838 - DNA, 25 bp, Homo sapien
tatttggaacagagtgtgccaaggc

SEQ ID NO: 5374839 - DNA, 25 bp, Homo sapien
ttggaacagagtgtgccaaggcagt

SEQ ID NO: 5374840 - DNA, 25 bp, Homo sapien
gcaatgaagcctcctgcccatagtg

SEQ ID NO: 5374841 - DNA, 25 bp, Homo sapien
atgaagcctcctgcccatagtgact

SEQ ID NO: 5374842 - DNA, 25 bp, Homo sapien
gagaggcaagctgcaagaaggccat

SEQ ID NO: 5374843 - DNA, 25 bp, Homo sapien
gcagagcaatgaagcctcctgccca

SEQ ID NO: 5374844 - DNA, 25 bp, Homo sapien
ccaagacttgggtcacatcatttct

SEQ ID NO: 5374845 - DNA, 25 bp, Homo sapien
ctcggtgacagcaaaccaagacttg

SEQ ID NO: 5374846 - DNA, 25 bp, Homo sapien
catcatttctgggtaagtatgcgga

SEQ ID NO: 5374847 - DNA, 25 bp, Homo sapien
ccttctttcttcactcggtgacagc

SEQ ID NO: 5374848 - DNA, 25 bp, Homo sapien
ccgtctgtgtggttaggagcagaat

SEQ ID NO: 5374849 - DNA, 25 bp, Homo sapien
cgtctgtgtggttaggagcagaatg

SEQ ID NO: 5374850 - DNA, 25 bp, Homo sapien
tctgtgtggttaggagcagaatgaa

SEQ ID NO: 5374851 - DNA, 25 bp, Homo sapien
ctgtgtggttaggagcagaatgaag

SEQ ID NO: 5374852 - DNA, 25 bp, Homo sapien
caggtatcctggcagatttaataac

SEQ ID NO: 5374853 - DNA, 25 bp, Homo sapien
tatcctggcagatttaataactctg

SEQ ID NO: 5374854 - DNA, 25 bp, Homo sapien
tcctggcagatttaataactctgac

SEQ ID NO: 5374855 - DNA, 25 bp, Homo sapien
ggtatcctggcagatttaataactc

SEQ ID NO: 5374856 - DNA, 25 bp, Homo sapien
ggtgaggagaaggactaaggcaagg

SEQ ID NO: 5374857 - DNA, 25 bp, Homo sapien
gccttagaaggatcctttgtttctg

SEQ ID NO: 5374858 - DNA, 25 bp, Homo sapien
tgatgggagtagacattctgggtac

SEQ ID NO: 5374859 - DNA, 25 bp, Homo sapien
tgtttctgatgggagtagacattct

SEQ ID NO: 5374860 - DNA, 25 bp, Homo sapien
gaacagccatatccagtgtctggcg

SEQ ID NO: 5374861 - DNA, 25 bp, Homo sapien
tcacatagagcactaaggcaagggc

SEQ ID NO: 5374862 - DNA, 25 bp, Homo sapien
tgtctggcggttttctctgattcct

SEQ ID NO: 5374863 - DNA, 25 bp, Homo sapien
tgtgttgagatgtttaacccttcca

SEQ ID NO: 5374864 - DNA, 25 bp, Homo sapien
gaggcagaagtgcatccctgtgtca

SEQ ID NO: 5374865 - DNA, 25 bp, Homo sapien
gcagatgtagggatcaagaccacct

SEQ ID NO: 5374866 - DNA, 25 bp, Homo sapien
ccctgtgtcagcactcgcttctggg

SEQ ID NO: 5374867 - DNA, 25 bp, Homo sapien
agagacgcttggtgcccagccatat

SEQ ID NO: 5374868 - DNA, 25 bp, Homo sapien
tccctcggaggacttctctgatcct

SEQ ID NO: 5374869 - DNA, 25 bp, Homo sapien
aaagctgcctccctcggaggacttc

SEQ ID NO: 5374870 - DNA, 25 bp, Homo sapien
tgatcctcctcattggaggtgattt

SEQ ID NO: 5374871 - DNA, 25 bp, Homo sapien
cctcctctcgccaagtattcctcca

SEQ ID NO: 5374872 - DNA, 25 bp, Homo sapien
agagcgggacccttgtttcccagtg

SEQ ID NO: 5374873 - DNA, 25 bp, Homo sapien
gtgtcaaaccgtgccaccagcaggt

SEQ ID NO: 5374874 - DNA, 25 bp, Homo sapien
tagaatcgagattacaggaaacccg

SEQ ID NO: 5374875 - DNA, 25 bp, Homo sapien
cccatttcgggtataggtagaatcg

SEQ ID NO: 5374876 - DNA, 25 bp, Homo sapien
gcagatttagagaatcagaattttc

SEQ ID NO: 5374877 - DNA, 25 bp, Homo sapien
tgcacttttgatagacaccgtccag

SEQ ID NO: 5374878 - DNA, 25 bp, Homo sapien
caggctgccgggctgctagatatcc

SEQ ID NO: 5374879 - DNA, 25 bp, Homo sapien
catcctaggcatatgcaggtggaca

SEQ ID NO: 5374880 - DNA, 25 bp, Homo sapien
ttcccagaggcaattcaggctgccg

SEQ ID NO: 5374881 - DNA, 25 bp, Homo sapien
ggagagtgtggtaagacaagccctt

SEQ ID NO: 5374882 - DNA, 25 bp, Homo sapien
acggatgtaaggctggcgtggaaca

SEQ ID NO: 5374883 - DNA, 25 bp, Homo sapien
taagacaagcccttacttttgttgc

SEQ ID NO: 5374884 - DNA, 25 bp, Homo sapien
caagcccttacttttgttgcgcagg

SEQ ID NO: 5374885 - DNA, 25 bp, Homo sapien
tattaagggctacgagctagaacca

SEQ ID NO: 5374886 - DNA, 25 bp, Homo sapien
gggtgggcctacaagctgcttaaca

SEQ ID NO: 5374887 - DNA, 25 bp, Homo sapien
tcatccaacagagacggagcacagg

SEQ ID NO: 5374888 - DNA, 25 bp, Homo sapien
ggcttaaagcagagcagtcccatgt

SEQ ID NO: 5374889 - DNA, 25 bp, Homo sapien
gaccaacactacatgggctgatcat

SEQ ID NO: 5374890 - DNA, 25 bp, Homo sapien
tattgacgtgtcctcagcacaaggt

SEQ ID NO: 5374891 - DNA, 25 bp, Homo sapien
tcaagtgtgctgtatctgcctccct

SEQ ID NO: 5374892 - DNA, 25 bp, Homo sapien
tagcccagttctgcggtcaagtgtg

SEQ ID NO: 5374893 - DNA, 25 bp, Homo sapien
cagaaccatttcatgatcttgtagg

SEQ ID NO: 5374894 - DNA, 25 bp, Homo sapien
gccacgtgtttactgtctgactcca

SEQ ID NO: 5374895 - DNA, 25 bp, Homo sapien
gcatctctctactgtcgctttcaga

SEQ ID NO: 5374896 - DNA, 25 bp, Homo sapien
ccttcataagcgcaatgttactgga

SEQ ID NO: 5374897 - DNA, 25 bp, Homo sapien
agcagcatctcgttcttgcggccct

SEQ ID NO: 5374898 - DNA, 25 bp, Homo sapien
gaggccttcgctttcaccttggaca

SEQ ID NO: 5374899 - DNA, 25 bp, Homo sapien
tcaggaggccttcgctttcaccttg

SEQ ID NO: 5374900 - DNA, 25 bp, Homo sapien
accttggacagcagcatctcgttct

SEQ ID NO: 5374901 - DNA, 25 bp, Homo sapien
tcaacaccaatataactataatgat

SEQ ID NO: 5374902 - DNA, 25 bp, Homo sapien
taactataatgatgctccatttctg

SEQ ID NO: 5374903 - DNA, 25 bp, Homo sapien
caatataactataatgatgctccat

SEQ ID NO: 5374904 - DNA, 25 bp, Homo sapien
actataatgatgctccatttctggg

SEQ ID NO: 5374905 - DNA, 25 bp, Homo sapien
tgacgcaacggaattcaccaatgag

SEQ ID NO: 5374906 - DNA, 25 bp, Homo sapien
taattagacctcaagatgggccaca

SEQ ID NO: 5374907 - DNA, 25 bp, Homo sapien
aacaaatgctgtttccaagtggccc

SEQ ID NO: 5374908 - DNA, 25 bp, Homo sapien
caagtggcccttgatacggactgat

SEQ ID NO: 5374909 - DNA, 25 bp, Homo sapien
ctccaagtactggtcgttcaactgg

SEQ ID NO: 5374910 - DNA, 25 bp, Homo sapien
cagtcttaaagtatagcctctgctt

SEQ ID NO: 5374911 - DNA, 25 bp, Homo sapien
acagtcttaaagtatagcctctgct

SEQ ID NO: 5374912 - DNA, 25 bp, Homo sapien
tactggtcgttcaactggtctcttc

SEQ ID NO: 5374913 - DNA, 25 bp, Homo sapien
tggcaacatccaaaaggcaacagtt

SEQ ID NO: 5374914 - DNA, 25 bp, Homo sapien
atgaaaagacatgttctgcccaagg

SEQ ID NO: 5374915 - DNA, 25 bp, Homo sapien
tgaaaagacatgttctgcccaaggg

SEQ ID NO: 5374916 - DNA, 25 bp, Homo sapien
aagggctactggcaacatccaaaag

SEQ ID NO: 5374917 - DNA, 25 bp, Homo sapien
tatctagcccgaaatgttaactgtg

SEQ ID NO: 5374918 - DNA, 25 bp, Homo sapien
tcatataataaaaccgtgtatcctc

SEQ ID NO: 5374919 - DNA, 25 bp, Homo sapien
caactgcgagaagtgggtgctactg

SEQ ID NO: 5374920 - DNA, 25 bp, Homo sapien
tcttcctgctggtagacaatttagg

SEQ ID NO: 5374921 - DNA, 25 bp, Homo sapien
tactgttccttcgtgggctccaact

SEQ ID NO: 5374922 - DNA, 25 bp, Homo sapien
ctccaactctcaaagcagcagacat

SEQ ID NO: 5374923 - DNA, 25 bp, Homo sapien
gggctccaactctcaaagcagcaga

SEQ ID NO: 5374924 - DNA, 25 bp, Homo sapien
cactactgttccttcgtgggctcca

SEQ ID NO: 5374925 - DNA, 25 bp, Homo sapien
ggtaagtgaatgatccatcacctgg

SEQ ID NO: 5374926 - DNA, 25 bp, Homo sapien
tagaaatagtatgagcttgaggcca

SEQ ID NO: 5374927 - DNA, 25 bp, Homo sapien
tcctagtgaggtagcaatgcgcttg

SEQ ID NO: 5374928 - DNA, 25 bp, Homo sapien
gaatgccaactcactatgagaagca

SEQ ID NO: 5374929 - DNA, 25 bp, Homo sapien
tattcggtcattgttacccagcgct

SEQ ID NO: 5374930 - DNA, 25 bp, Homo sapien
ctattcggtcattgttacccagcgc

SEQ ID NO: 5374931 - DNA, 25 bp, Homo sapien
tatgtaacactctgaacctgctggt

SEQ ID NO: 5374932 - DNA, 25 bp, Homo sapien
acccagcgctggtctactatgtaac

SEQ ID NO: 5374933 - DNA, 25 bp, Homo sapien
gggtgagtgtgcatatataggcaaa

SEQ ID NO: 5374934 - DNA, 25 bp, Homo sapien
tgtgcatatataggcaaacactgac

SEQ ID NO: 5374935 - DNA, 25 bp, Homo sapien
ctatcctggcttgggtgagtgtgca

SEQ ID NO: 5374936 - DNA, 25 bp, Homo sapien
atcctggcttgggtgagtgtgcata

SEQ ID NO: 5374937 - DNA, 25 bp, Homo sapien
tacggctgaatagtcttgagaaatc

SEQ ID NO: 5374938 - DNA, 25 bp, Homo sapien
tttctcctcctttgacatcgtttta

SEQ ID NO: 5374939 - DNA, 25 bp, Homo sapien
gagaaatcgtgcttgttactagtga

SEQ ID NO: 5374940 - DNA, 25 bp, Homo sapien
tatgtcgttctcatttttacggctg

SEQ ID NO: 5374941 - DNA, 25 bp, Homo sapien
caagatcgtaagaggagaaacccaa

SEQ ID NO: 5374942 - DNA, 25 bp, Homo sapien
cactctggcgtgatacatttttaaa

SEQ ID NO: 5374943 - DNA, 25 bp, Homo sapien
caggaccataagcaagagatatttg

SEQ ID NO: 5374944 - DNA, 25 bp, Homo sapien
gaagattttactgccatgtcggaga

SEQ ID NO: 5374945 - DNA, 25 bp, Homo sapien
tggtgggaatacctctgtagaaatg

SEQ ID NO: 5374946 - DNA, 25 bp, Homo sapien
ccctgtcaccactataaaacctggg

SEQ ID NO: 5374947 - DNA, 25 bp, Homo sapien
cttttcaggattgagggcacactcc

SEQ ID NO: 5374948 - DNA, 25 bp, Homo sapien
gacgcatggtgggaatacctctgta

SEQ ID NO: 5374949 - DNA, 25 bp, Homo sapien
tctgttccatctgacgtaaaaactg

SEQ ID NO: 5374950 - DNA, 25 bp, Homo sapien
atctgttccatctgacgtaaaaact

SEQ ID NO: 5374951 - DNA, 25 bp, Homo sapien
gaggcaatcaggtctttgtaacgca

SEQ ID NO: 5374952 - DNA, 25 bp, Homo sapien
gaaatgccaagcagtcagctctgta

SEQ ID NO: 5374953 - DNA, 25 bp, Homo sapien
ttgtaacgcacagtggagccacggg

SEQ ID NO: 5374954 - DNA, 25 bp, Homo sapien
ccagtagagttatgaccggcacaca

SEQ ID NO: 5374955 - DNA, 25 bp, Homo sapien
cagagagattttagtaggtgggtac

SEQ ID NO: 5374956 - DNA, 25 bp, Homo sapien
aatgtgtccgctgtcatctgccaga

SEQ ID NO: 5374957 - DNA, 25 bp, Homo sapien
ggtgggccttgacatctagttttta

SEQ ID NO: 5374958 - DNA, 25 bp, Homo sapien
ggcaaatggacatgcttgagggctt

SEQ ID NO: 5374959 - DNA, 25 bp, Homo sapien
taaacaagatacttagcagaagggc

SEQ ID NO: 5374960 - DNA, 25 bp, Homo sapien
tgaggtgggctgaattcaaagcgca

SEQ ID NO: 5374961 - DNA, 25 bp, Homo sapien
cagaagggctaaaagagtaagaatc

SEQ ID NO: 5374962 - DNA, 25 bp, Homo sapien
cccagtgttaagtcttgcatgtacc

SEQ ID NO: 5374963 - DNA, 25 bp, Homo sapien
catgaattgagttcagcagactaat

SEQ ID NO: 5374964 - DNA, 25 bp, Homo sapien
aagttctcatgaattgagttcagca

SEQ ID NO: 5374965 - DNA, 25 bp, Homo sapien
tgtgagaagttctcatgaattgagt

SEQ ID NO: 5374966 - DNA, 25 bp, Homo sapien
tcatgaattgagttcagcagactaa

SEQ ID NO: 5374967 - DNA, 25 bp, Homo sapien
caaggaacacatgccttgtttatga

SEQ ID NO: 5374968 - DNA, 25 bp, Homo sapien
aactgctgcaagcttgcctgtctcc

SEQ ID NO: 5374969 - DNA, 25 bp, Homo sapien
caactgctgcaagcttgcctgtctc

SEQ ID NO: 5374970 - DNA, 25 bp, Homo sapien
aacacatgccttgtttatgaagatt

SEQ ID NO: 5374971 - DNA, 25 bp, Homo sapien
catccagggtattatataaagtgaa

SEQ ID NO: 5374972 - DNA, 25 bp, Homo sapien
tttttatcatccagggtattatata

SEQ ID NO: 5374973 - DNA, 25 bp, Homo sapien
gaagaactgcttggtttctttgtgc

SEQ ID NO: 5374974 - DNA, 25 bp, Homo sapien
ataaagtgaagaactgcttggtttc

SEQ ID NO: 5374975 - DNA, 25 bp, Homo sapien
cacgaataagaacaggtatcagaac

SEQ ID NO: 5374976 - DNA, 25 bp, Homo sapien
aagaaatcagcacacgaataagaac

SEQ ID NO: 5374977 - DNA, 25 bp, Homo sapien
ggtatcagaacaccctacctgcccc

SEQ ID NO: 5374978 - DNA, 25 bp, Homo sapien
tcagcacacgaataagaacaggtat

SEQ ID NO: 5374979 - DNA, 25 bp, Homo sapien
gagaagaggtggtcacttcttgcct

SEQ ID NO: 5374980 - DNA, 25 bp, Homo sapien
ggacatacaagagtaggagcctgga

SEQ ID NO: 5374981 - DNA, 25 bp, Homo sapien
gagtttcaggtatcatggggacata

SEQ ID NO: 5374982 - DNA, 25 bp, Homo sapien
ggtttacaggatctgaattgggtat

SEQ ID NO: 5374983 - DNA, 25 bp, Homo sapien
tcaactatctgtccacggagagggc

SEQ ID NO: 5374984 - DNA, 25 bp, Homo sapien
caactatctgtccacggagagggca

SEQ ID NO: 5374985 - DNA, 25 bp, Homo sapien
actatctgtccacggagagggcagt

SEQ ID NO: 5374986 - DNA, 25 bp, Homo sapien
tatctgtccacggagagggcagtga

SEQ ID NO: 5374987 - DNA, 25 bp, Homo sapien
gcatgctcccccatgctaaagtgga

SEQ ID NO: 5374988 - DNA, 25 bp, Homo sapien
tgggcctgctgatgaaacggagctt

SEQ ID NO: 5374989 - DNA, 25 bp, Homo sapien
tgctgctcccgggactgccaagtgg

SEQ ID NO: 5374990 - DNA, 25 bp, Homo sapien
tgatgaaacggagctttccggtggt

SEQ ID NO: 5374991 - DNA, 25 bp, Homo sapien
gacttcatcaatcttgcggtgcaaa

SEQ ID NO: 5374992 - DNA, 25 bp, Homo sapien
gcggtgcaaaattgctatttctcga

SEQ ID NO: 5374993 - DNA, 25 bp, Homo sapien
ctggcggtagagttcaataaatctc

SEQ ID NO: 5374994 - DNA, 25 bp, Homo sapien
tctgatactgtattagctcggcacg

SEQ ID NO: 5374995 - DNA, 25 bp, Homo sapien
tctccatattataccgtctgtctag

SEQ ID NO: 5374996 - DNA, 25 bp, Homo sapien
tctttctccatattataccgtctgt

SEQ ID NO: 5374997 - DNA, 25 bp, Homo sapien
ctgtagtaaacgtatcttgtaaagt

SEQ ID NO: 5374998 - DNA, 25 bp, Homo sapien
tattataccgtctgtctaggtcttc

SEQ ID NO: 5374999 - DNA, 25 bp, Homo sapien
tggaagagtgctgaagctcattctc

SEQ ID NO: 5375000 - DNA, 25 bp, Homo sapien
gaggtcaaggtaccaggcggctctc

SEQ ID NO: 5375001 - DNA, 25 bp, Homo sapien
catgagtcattgcagaggtcaaggt

SEQ ID NO: 5375002 - DNA, 25 bp, Homo sapien
taccaggcggctctccactggagag

SEQ ID NO: 5375003 - DNA, 25 bp, Homo sapien
gtcatgagtcattgcagaggtcaag

SEQ ID NO: 5375004 - DNA, 25 bp, Homo sapien
tcttgctgtagtcgtgtcatctcct

SEQ ID NO: 5375005 - DNA, 25 bp, Homo sapien
atttcttgctgtagtcgtgtcatct

SEQ ID NO: 5375006 - DNA, 25 bp, Homo sapien
cttgctgtagtcgtgtcatctcctc

SEQ ID NO: 5375007 - DNA, 25 bp, Homo sapien
ttcttgctgtagtcgtgtcatctcc

SEQ ID NO: 5375008 - DNA, 25 bp, Homo sapien
aagagattcaataagcgtcctggtt

SEQ ID NO: 5375009 - DNA, 25 bp, Homo sapien
gagattcaataagcgtcctggttta

SEQ ID NO: 5375010 - DNA, 25 bp, Homo sapien
caataagcgtcctggtttatttgct

SEQ ID NO: 5375011 - DNA, 25 bp, Homo sapien
gcgtcctggtttatttgctgacacc

SEQ ID NO: 5375012 - DNA, 25 bp, Homo sapien
ttcatggctacaagtgctctcaggt

SEQ ID NO: 5375013 - DNA, 25 bp, Homo sapien
tcattcatggctacaagtgctctca

SEQ ID NO: 5375014 - DNA, 25 bp, Homo sapien
cattcatggctacaagtgctctcag

SEQ ID NO: 5375015 - DNA, 25 bp, Homo sapien
tcatggctacaagtgctctcaggtt

SEQ ID NO: 5375016 - DNA, 25 bp, Homo sapien
cttggatcagctttggattctatct

SEQ ID NO: 5375017 - DNA, 25 bp, Homo sapien
tctatcttctcgagggctgcttgct

SEQ ID NO: 5375018 - DNA, 25 bp, Homo sapien
tggatcagctttggattctatcttc

SEQ ID NO: 5375019 - DNA, 25 bp, Homo sapien
ggattctatcttctcgagggctgct

SEQ ID NO: 5375020 - DNA, 25 bp, Homo sapien
aagtacgaggtagggaccttgcagc

SEQ ID NO: 5375021 - DNA, 25 bp, Homo sapien
cggagacgtctttgaagatcctagc

SEQ ID NO: 5375022 - DNA, 25 bp, Homo sapien
cagcgaggtccttccatagtacggc

SEQ ID NO: 5375023 - DNA, 25 bp, Homo sapien
gatcctagcttccaaatcgtccagg

SEQ ID NO: 5375024 - DNA, 25 bp, Homo sapien
tgtaggctggtgtgacttgctcgca

SEQ ID NO: 5375025 - DNA, 25 bp, Homo sapien
tatctggcttgtaggctggtgtgac

SEQ ID NO: 5375026 - DNA, 25 bp, Homo sapien
ctctgtcagcgttttcttggcttca

SEQ ID NO: 5375027 - DNA, 25 bp, Homo sapien
tcttggcttcattatatctggcttg

SEQ ID NO: 5375028 - DNA, 25 bp, Homo sapien
ggtcttttgcgcaatctgtttgttc

SEQ ID NO: 5375029 - DNA, 25 bp, Homo sapien
agctgggaggttcctaatttttctg

SEQ ID NO: 5375030 - DNA, 25 bp, Homo sapien
atgtttggtcttttgcgcaatctgt

SEQ ID NO: 5375031 - DNA, 25 bp, Homo sapien
aaatgactttccggcgatgtagctg

SEQ ID NO: 5375032 - DNA, 25 bp, Homo sapien
aagaattcttcttgcaggaaaacca

SEQ ID NO: 5375033 - DNA, 25 bp, Homo sapien
tcttcttgcaggaaaaccagcagcc

SEQ ID NO: 5375034 - DNA, 25 bp, Homo sapien
aattcttcttgcaggaaaaccagca

SEQ ID NO: 5375035 - DNA, 25 bp, Homo sapien
ttcttgcaggaaaaccagcagccat

SEQ ID NO: 5375036 - DNA, 25 bp, Homo sapien
gctgctctacaagaaccatattgag

SEQ ID NO: 5375037 - DNA, 25 bp, Homo sapien
gcacactggtacttcttgtagcaca

SEQ ID NO: 5375038 - DNA, 25 bp, Homo sapien
gcagatggagctactcagcctagag

SEQ ID NO: 5375039 - DNA, 25 bp, Homo sapien
tatcccagtgcctgtgaagtttcca

SEQ ID NO: 5375040 - DNA, 25 bp, Homo sapien
tgtaagtctataatgcctgccctgc

SEQ ID NO: 5375041 - DNA, 25 bp, Homo sapien
gctcatgtgacaaggaactgcaggt

SEQ ID NO: 5375042 - DNA, 25 bp, Homo sapien
gagatgccctcccttgctagctttg

SEQ ID NO: 5375043 - DNA, 25 bp, Homo sapien
taagtggcaatgtaggagaggctca

SEQ ID NO: 5375044 - DNA, 25 bp, Homo sapien
caagtgctgatagccggttgtgcat

SEQ ID NO: 5375045 - DNA, 25 bp, Homo sapien
ccagtgtgtttctgactaacgtggc

SEQ ID NO: 5375046 - DNA, 25 bp, Homo sapien
gccggttgtgcatggtaaagcccag

SEQ ID NO: 5375047 - DNA, 25 bp, Homo sapien
gactaacgtggctggtgagttacaa

SEQ ID NO: 5375048 - DNA, 25 bp, Homo sapien
tctgcatactcggacacaatctgct

SEQ ID NO: 5375049 - DNA, 25 bp, Homo sapien
gagtcccacaatctggcccacggag

SEQ ID NO: 5375050 - DNA, 25 bp, Homo sapien
cttctctgcatactcggacacaatc

SEQ ID NO: 5375051 - DNA, 25 bp, Homo sapien
cagcagagcagagtcccacaatctg

SEQ ID NO: 5375052 - DNA, 25 bp, Homo sapien
aacagagcctgcaggggatttggca

SEQ ID NO: 5375053 - DNA, 25 bp, Homo sapien
aaacagagcctgcaggggatttggc

SEQ ID NO: 5375054 - DNA, 25 bp, Homo sapien
tgagagtcaccaaacagagcctgca

SEQ ID NO: 5375055 - DNA, 25 bp, Homo sapien
ctcctgagagtcaccaaacagagcc

SEQ ID NO: 5375056 - DNA, 25 bp, Homo sapien
tcatttgccatagcggtcatcttgg

SEQ ID NO: 5375057 - DNA, 25 bp, Homo sapien
tggtcatcagcgactgaatacgctg

SEQ ID NO: 5375058 - DNA, 25 bp, Homo sapien
ctcctcatttgccatagcggtcatc

SEQ ID NO: 5375059 - DNA, 25 bp, Homo sapien
ccatagcggtcatcttggtcatcag

SEQ ID NO: 5375060 - DNA, 25 bp, Homo sapien
ccctgctggaagtgccgttttcttg

SEQ ID NO: 5375061 - DNA, 25 bp, Homo sapien
cttcctcgtgggcatcagctttttc

SEQ ID NO: 5375062 - DNA, 25 bp, Homo sapien
aagctcatcttcctcgtgggcatca

SEQ ID NO: 5375063 - DNA, 25 bp, Homo sapien
tgctcgaagctcatcttcctcgtgg

SEQ ID NO: 5375064 - DNA, 25 bp, Homo sapien
gcatcctgagagagtggatactcca

SEQ ID NO: 5375065 - DNA, 25 bp, Homo sapien
tggatactccaaacggctgaacctc

SEQ ID NO: 5375066 - DNA, 25 bp, Homo sapien
tgagagagtggatactccaaacggc

SEQ ID NO: 5375067 - DNA, 25 bp, Homo sapien
gcagcagcatcctgagagagtggat

SEQ ID NO: 5375068 - DNA, 25 bp, Homo sapien
ttttgctctggcggctaaatccata

SEQ ID NO: 5375069 - DNA, 25 bp, Homo sapien
gctctggcggctaaatccatatctc

SEQ ID NO: 5375070 - DNA, 25 bp, Homo sapien
cattttgctctggcggctaaatcca

SEQ ID NO: 5375071 - DNA, 25 bp, Homo sapien
ttgctctggcggctaaatccatatc

SEQ ID NO: 5375072 - DNA, 25 bp, Homo sapien
tcttcctgcccattccttgtccaac

SEQ ID NO: 5375073 - DNA, 25 bp, Homo sapien
agaaaacagaacctcctcaggagcc

SEQ ID NO: 5375074 - DNA, 25 bp, Homo sapien
ggagccttataaagcctctcttcca

SEQ ID NO: 5375075 - DNA, 25 bp, Homo sapien
cacatttatcaatggcaggcctctt

SEQ ID NO: 5375076 - DNA, 25 bp, Homo sapien
gaagctagtcaagttaatccaaatg

SEQ ID NO: 5375077 - DNA, 25 bp, Homo sapien
catgcaggacagagtacctcagcct

SEQ ID NO: 5375078 - DNA, 25 bp, Homo sapien
ggcagaaactcaatcgggtagaagc

SEQ ID NO: 5375079 - DNA, 25 bp, Homo sapien
tcatttacctgaagattttaacaaa

SEQ ID NO: 5375080 - DNA, 25 bp, Homo sapien
tctgctccctggtggcgtttgtatt

SEQ ID NO: 5375081 - DNA, 25 bp, Homo sapien
tattccaaaagtgtagcatggattc

SEQ ID NO: 5375082 - DNA, 25 bp, Homo sapien
cctggtggcgtttgtatttccgacg

SEQ ID NO: 5375083 - DNA, 25 bp, Homo sapien
ttcgagattcttcatcaagtagctc

SEQ ID NO: 5375084 - DNA, 25 bp, Homo sapien
aagtggatgagacagccaagttact

SEQ ID NO: 5375085 - DNA, 25 bp, Homo sapien
ctaagtggatgagacagccaagtta

SEQ ID NO: 5375086 - DNA, 25 bp, Homo sapien
gtggatgagacagccaagttactga

SEQ ID NO: 5375087 - DNA, 25 bp, Homo sapien
taagtggatgagacagccaagttac

SEQ ID NO: 5375088 - DNA, 25 bp, Homo sapien
tactacccgggtttactgcatctaa

SEQ ID NO: 5375089 - DNA, 25 bp, Homo sapien
tatgccagcaaggtattcgggctgc

SEQ ID NO: 5375090 - DNA, 25 bp, Homo sapien
gatcagggcctgagatgatgctaaa

SEQ ID NO: 5375091 - DNA, 25 bp, Homo sapien
tagtaatatctgctcaggtctccgg

SEQ ID NO: 5375092 - DNA, 25 bp, Homo sapien
taagttcacattcctcaatgcaggg

SEQ ID NO: 5375093 - DNA, 25 bp, Homo sapien
taatggagcaggcagtgaaacagcc

SEQ ID NO: 5375094 - DNA, 25 bp, Homo sapien
ggcattctacactcaaaagctcctg

SEQ ID NO: 5375095 - DNA, 25 bp, Homo sapien
tgtctgggttacaagtcaggttcac

SEQ ID NO: 5375096 - DNA, 25 bp, Homo sapien
gcacagtacatgagacagaggagct

SEQ ID NO: 5375097 - DNA, 25 bp, Homo sapien
ttcacaggacagacacttcatggct

SEQ ID NO: 5375098 - DNA, 25 bp, Homo sapien
tgatccggtaagttccacagtgcac

SEQ ID NO: 5375099 - DNA, 25 bp, Homo sapien
tatggaagaacacactggactggta

SEQ ID NO: 5375100 - DNA, 25 bp, Homo sapien
cagagatacaaactatagttgaact

SEQ ID NO: 5375101 - DNA, 25 bp, Homo sapien
aactatagttgaactagttccacac

SEQ ID NO: 5375102 - DNA, 25 bp, Homo sapien
gcatggaaagatatcctcaatatac

SEQ ID NO: 5375103 - DNA, 25 bp, Homo sapien
acaattaataatctacagccactaa

SEQ ID NO: 5375104 - DNA, 25 bp, Homo sapien
tgagaggtccacaactgtcttgatg

SEQ ID NO: 5375105 - DNA, 25 bp, Homo sapien
aggtccacaactgtcttgatggcct

SEQ ID NO: 5375106 - DNA, 25 bp, Homo sapien
agaggtccacaactgtcttgatggc

SEQ ID NO: 5375107 - DNA, 25 bp, Homo sapien
gagaggtccacaactgtcttgatgg

SEQ ID NO: 5375108 - DNA, 25 bp, Homo sapien
tagagagtctcttaagtgtgcactc

SEQ ID NO: 5375109 - DNA, 25 bp, Homo sapien
gctagagagtctcttaagtgtgcac

SEQ ID NO: 5375110 - DNA, 25 bp, Homo sapien
ctagagagtctcttaagtgtgcact

SEQ ID NO: 5375111 - DNA, 25 bp, Homo sapien
aactgggatacagagtaggagcgga

SEQ ID NO: 5375112 - DNA, 25 bp, Homo sapien
cttttgtttctatagctcgtttcac

SEQ ID NO: 5375113 - DNA, 25 bp, Homo sapien
ggagcggatatagtcacccatctct

SEQ ID NO: 5375114 - DNA, 25 bp, Homo sapien
gtttctatagctcgtttcaccagcc

SEQ ID NO: 5375115 - DNA, 25 bp, Homo sapien
ctgaacaacaggaaatatgtgaata

SEQ ID NO: 5375116 - DNA, 25 bp, Homo sapien
tggcaggaccgagacaattttttct

SEQ ID NO: 5375117 - DNA, 25 bp, Homo sapien
tggtgtgggcatttcatccttggca

SEQ ID NO: 5375118 - DNA, 25 bp, Homo sapien
ggctccagctggtgtgggcatttca

SEQ ID NO: 5375119 - DNA, 25 bp, Homo sapien
gacaagtttctcctagatgactgca

SEQ ID NO: 5375120 - DNA, 25 bp, Homo sapien
tctgggcagcatcacagacggatct

SEQ ID NO: 5375121 - DNA, 25 bp, Homo sapien
taacaagcaaagagtgaggcatact

SEQ ID NO: 5375122 - DNA, 25 bp, Homo sapien
catgccaggctagtccagaccatga

SEQ ID NO: 5375123 - DNA, 25 bp, Homo sapien
tctcatttccatacagaagagatat

SEQ ID NO: 5375124 - DNA, 25 bp, Homo sapien
tcatttccatacagaagagatattt

SEQ ID NO: 5375125 - DNA, 25 bp, Homo sapien
ctcatttccatacagaagagatatt

SEQ ID NO: 5375126 - DNA, 25 bp, Homo sapien
tttctctaacacctcgcctcagtct

SEQ ID NO: 5375127 - DNA, 25 bp, Homo sapien
ctttctctaacacctcgcctcagtc

SEQ ID NO: 5375128 - DNA, 25 bp, Homo sapien
tctctaacacctcgcctcagtcttc

SEQ ID NO: 5375129 - DNA, 25 bp, Homo sapien
ctaacacctcgcctcagtcttcctc

SEQ ID NO: 5375130 - DNA, 25 bp, Homo sapien
gaagtcttgtccacctttatctttc

SEQ ID NO: 5375131 - DNA, 25 bp, Homo sapien
aagtcttgtccacctttatctttct

SEQ ID NO: 5375132 - DNA, 25 bp, Homo sapien
agtcttgtccacctttatctttctg

SEQ ID NO: 5375133 - DNA, 25 bp, Homo sapien
tgacctatcgtagagttttcttgaa

SEQ ID NO: 5375134 - DNA, 25 bp, Homo sapien
atcaaagttgcaagtggtgatacac

SEQ ID NO: 5375135 - DNA, 25 bp, Homo sapien
tgcaagtggtgatacaccaagtcat

SEQ ID NO: 5375136 - DNA, 25 bp, Homo sapien
gaaagagcaaatcaacatctacatc

SEQ ID NO: 5375137 - DNA, 25 bp, Homo sapien
caaagggtgataagcctttaattct

SEQ ID NO: 5375138 - DNA, 25 bp, Homo sapien
ctgaaatacccagctgcaaccaaga

SEQ ID NO: 5375139 - DNA, 25 bp, Homo sapien
ttgtcaaagggtgataagcctttaa

SEQ ID NO: 5375140 - DNA, 25 bp, Homo sapien
tcaaagggtgataagcctttaattc

SEQ ID NO: 5375141 - DNA, 25 bp, Homo sapien
cctccaagaagagggtcggcgcttc

SEQ ID NO: 5375142 - DNA, 25 bp, Homo sapien
tgctccccgcctccaagaagagggt

SEQ ID NO: 5375143 - DNA, 25 bp, Homo sapien
caagaagagggtcggcgcttccctg

SEQ ID NO: 5375144 - DNA, 25 bp, Homo sapien
cccgcctccaagaagagggtcggcg

SEQ ID NO: 5375145 - DNA, 25 bp, Homo sapien
tgggcaaccccatgatccgaccggg

SEQ ID NO: 5375146 - DNA, 25 bp, Homo sapien
ctgtcgtaaggcgagagcgaagccc

SEQ ID NO: 5375147 - DNA, 25 bp, Homo sapien
agctgtccctgccgcggagctgcta

SEQ ID NO: 5375148 - DNA, 25 bp, Homo sapien
cccgccaagcgtccggaggaagctg

SEQ ID NO: 5375149 - DNA, 25 bp, Homo sapien
gagtacaaagcggaaactccctctg

SEQ ID NO: 5375150 - DNA, 25 bp, Homo sapien
ggtgaatcagacttcggaaaccgcc

SEQ ID NO: 5375151 - DNA, 25 bp, Homo sapien
aaaccgcctcgcttcagggtcagag

SEQ ID NO: 5375152 - DNA, 25 bp, Homo sapien
tctccatatacgacccaggaacgga

SEQ ID NO: 5375153 - DNA, 25 bp, Homo sapien
tagaccttacagacacacgcttgga

SEQ ID NO: 5375154 - DNA, 25 bp, Homo sapien
cacaaggctgaccagtaaggacttc

SEQ ID NO: 5375155 - DNA, 25 bp, Homo sapien
gccaggattaggctttgcagtgcca

SEQ ID NO: 5375156 - DNA, 25 bp, Homo sapien
tgagagagacctaaatcccaaaagg

SEQ ID NO: 5375157 - DNA, 25 bp, Homo sapien
catagaagggcctcaggggaaagca

SEQ ID NO: 5375158 - DNA, 25 bp, Homo sapien
tattttttgctcagtctcccgtggg

SEQ ID NO: 5375159 - DNA, 25 bp, Homo sapien
gttctctccatacttcacttggtga

SEQ ID NO: 5375160 - DNA, 25 bp, Homo sapien
tcccgtgggacttttgacttcacac

SEQ ID NO: 5375161 - DNA, 25 bp, Homo sapien
gctccaatgctgaccgtttctgctg

SEQ ID NO: 5375162 - DNA, 25 bp, Homo sapien
gatagaatgacgaaaggtaatttcg

SEQ ID NO: 5375163 - DNA, 25 bp, Homo sapien
ttcgtaattgcttctgggtaatacc

SEQ ID NO: 5375164 - DNA, 25 bp, Homo sapien
ctgcatttccaaggcgctgaataga

SEQ ID NO: 5375165 - DNA, 25 bp, Homo sapien
aattgtcagttcattgtcagtctgc

SEQ ID NO: 5375166 - DNA, 25 bp, Homo sapien
gaatatgtagctcaaggaaatccat

SEQ ID NO: 5375167 - DNA, 25 bp, Homo sapien
tcagattgccaaaagctgaggtcat

SEQ ID NO: 5375168 - DNA, 25 bp, Homo sapien
tccagagtcaagcaaacagttttgc

SEQ ID NO: 5375169 - DNA, 25 bp, Homo sapien
ctcttgataaaaatgtagggctcca

SEQ ID NO: 5375170 - DNA, 25 bp, Homo sapien
tttgctggccaatgaaatctaaaga

SEQ ID NO: 5375171 - DNA, 25 bp, Homo sapien
tctaaagatctgtggactaccaggt

SEQ ID NO: 5375172 - DNA, 25 bp, Homo sapien
gtagcctttatccatgtacaccaag

SEQ ID NO: 5375173 - DNA, 25 bp, Homo sapien
ccaggtaggcgagtatttctaaaat

SEQ ID NO: 5375174 - DNA, 25 bp, Homo sapien
agtgattacacgcatactgtcttag

SEQ ID NO: 5375175 - DNA, 25 bp, Homo sapien
caaggatcattcaccagcgttccat

SEQ ID NO: 5375176 - DNA, 25 bp, Homo sapien
tagtccaaattcatgagcctgatgt

SEQ ID NO: 5375177 - DNA, 25 bp, Homo sapien
aatacaatccaggtttcaaggatca

SEQ ID NO: 5375178 - DNA, 25 bp, Homo sapien
aacgcgctcctttcggctacgagat

SEQ ID NO: 5375179 - DNA, 25 bp, Homo sapien
cccctcggtgagtgtgcgtgtatca

SEQ ID NO: 5375180 - DNA, 25 bp, Homo sapien
cacgtcttattgacagcaggaaccg

SEQ ID NO: 5375181 - DNA, 25 bp, Homo sapien
gggtctgggcatccgtcattaccta

SEQ ID NO: 5375182 - DNA, 25 bp, Homo sapien
ggaaagcggcctgaggaggagggtg

SEQ ID NO: 5375183 - DNA, 25 bp, Homo sapien
aaccctggtggcaggtgcggggagc

SEQ ID NO: 5375184 - DNA, 25 bp, Homo sapien
gggtctcccggcgaagcgcgggtga

SEQ ID NO: 5375185 - DNA, 25 bp, Homo sapien
cgggtgacgtggtgctgaggaaagc

SEQ ID NO: 5375186 - DNA, 25 bp, Homo sapien
agaggggtccgcaaggtccagaagg

SEQ ID NO: 5375187 - DNA, 25 bp, Homo sapien
tgagaggggtccgcaaggtccagaa

SEQ ID NO: 5375188 - DNA, 25 bp, Homo sapien
ctgagaggggtccgcaaggtccaga

SEQ ID NO: 5375189 - DNA, 25 bp, Homo sapien
gagaggggtccgcaaggtccagaag

SEQ ID NO: 5375190 - DNA, 25 bp, Homo sapien
ctgcgggatcggggagggggtatag

SEQ ID NO: 5375191 - DNA, 25 bp, Homo sapien
cattgggttgaggagtaatactctg

SEQ ID NO: 5375192 - DNA, 25 bp, Homo sapien
ttataatccactaaggagatagggc

SEQ ID NO: 5375193 - DNA, 25 bp, Homo sapien
gaagggcgacccaatggtctgatga

SEQ ID NO: 5375194 - DNA, 25 bp, Homo sapien
cgagctgtcaagcatagagctgcca

SEQ ID NO: 5375195 - DNA, 25 bp, Homo sapien
cactggacccgtttgaattgaacaa

SEQ ID NO: 5375196 - DNA, 25 bp, Homo sapien
gaaatgtgacgctctttccacctga

SEQ ID NO: 5375197 - DNA, 25 bp, Homo sapien
catgctgtggcacggcttcaggtat

SEQ ID NO: 5375198 - DNA, 25 bp, Homo sapien
ttaggcaaatgcgtacagtcacatg

SEQ ID NO: 5375199 - DNA, 25 bp, Homo sapien
tgacaatatgacctacagcctcatt

SEQ ID NO: 5375200 - DNA, 25 bp, Homo sapien
tgtagatttctgttgtgagttttcc

SEQ ID NO: 5375201 - DNA, 25 bp, Homo sapien
tttcctgctttgacaatatgaccta

SEQ ID NO: 5375202 - DNA, 25 bp, Homo sapien
gagttttcctgctttgacaatatga

SEQ ID NO: 5375203 - DNA, 25 bp, Homo sapien
tatgactcgttggtggaatgcctag

SEQ ID NO: 5375204 - DNA, 25 bp, Homo sapien
ggttctgtgaagcaaaccactgtag

SEQ ID NO: 5375205 - DNA, 25 bp, Homo sapien
gcagttgtctgatccacaagggcaa

SEQ ID NO: 5375206 - DNA, 25 bp, Homo sapien
ggcaaccagcacctcttaagtatgg

SEQ ID NO: 5375207 - DNA, 25 bp, Homo sapien
tagaatcaactttgtaagcactata

SEQ ID NO: 5375208 - DNA, 25 bp, Homo sapien
tgtatgccaaactttaatctgcttt

SEQ ID NO: 5375209 - DNA, 25 bp, Homo sapien
taaagcaattactatcagactgaga

SEQ ID NO: 5375210 - DNA, 25 bp, Homo sapien
tataaggtctatgatgtgtttactt

SEQ ID NO: 5375211 - DNA, 25 bp, Homo sapien
gaatgtctgctccaccaaagtatga

SEQ ID NO: 5375212 - DNA, 25 bp, Homo sapien
cattgtgatgagcagttgagtagac

SEQ ID NO: 5375213 - DNA, 25 bp, Homo sapien
cttgcacagaatgtgatcatggacc

SEQ ID NO: 5375214 - DNA, 25 bp, Homo sapien
aacgctttttgaggaaacttgcaca

SEQ ID NO: 5375215 - DNA, 25 bp, Homo sapien
aagtgtaaactttgtgtctaagtct

SEQ ID NO: 5375216 - DNA, 25 bp, Homo sapien
taaactttgtgtctaagtcttggag

SEQ ID NO: 5375217 - DNA, 25 bp, Homo sapien
ctttgtgtctaagtcttggagtggt

SEQ ID NO: 5375218 - DNA, 25 bp, Homo sapien
ttgtgtctaagtcttggagtggtga

SEQ ID NO: 5375219 - DNA, 25 bp, Homo sapien
tgttgacactgatcaggaaagctct

SEQ ID NO: 5375220 - DNA, 25 bp, Homo sapien
ccttggatggtatggacaggaaacc

SEQ ID NO: 5375221 - DNA, 25 bp, Homo sapien
tctgaaaggtgtgggcataggtacc

SEQ ID NO: 5375222 - DNA, 25 bp, Homo sapien
tataagtggctagctttgtgggagc

SEQ ID NO: 5375223 - DNA, 25 bp, Homo sapien
aaaccattaacccatgtcatccagc

SEQ ID NO: 5375224 - DNA, 25 bp, Homo sapien
agttcctgtttcttcacgcatgtag

SEQ ID NO: 5375225 - DNA, 25 bp, Homo sapien
taggcaggagttgctattaaaccat

SEQ ID NO: 5375226 - DNA, 25 bp, Homo sapien
tctcccggcagcttgcttagcagac

SEQ ID NO: 5375227 - DNA, 25 bp, Homo sapien
gaaaatctcgatgtcaaaaagtagc

SEQ ID NO: 5375228 - DNA, 25 bp, Homo sapien
cattgaccattgcaaagaaaatctc

SEQ ID NO: 5375229 - DNA, 25 bp, Homo sapien
taacttcaggctaacttggacttgt

SEQ ID NO: 5375230 - DNA, 25 bp, Homo sapien
gttcttgtgcaaacagcctacgcat

SEQ ID NO: 5375231 - DNA, 25 bp, Homo sapien
cactgctgtcaggtacctaagatta

SEQ ID NO: 5375232 - DNA, 25 bp, Homo sapien
cattttaatagccaagactgagtca

SEQ ID NO: 5375233 - DNA, 25 bp, Homo sapien
ggaggattctagacagccatctgaa

SEQ ID NO: 5375234 - DNA, 25 bp, Homo sapien
tcatttagttgtcagcacactgctg

SEQ ID NO: 5375235 - DNA, 25 bp, Homo sapien
tctttggcagccaattggccttcca

SEQ ID NO: 5375236 - DNA, 25 bp, Homo sapien
gtatggcatacaatcacactgaaga

SEQ ID NO: 5375237 - DNA, 25 bp, Homo sapien
tcctttgaagccaccgcacgtgttg

SEQ ID NO: 5375238 - DNA, 25 bp, Homo sapien
ggccttccatatctcggactccata

SEQ ID NO: 5375239 - DNA, 25 bp, Homo sapien
agatataaactactatttcttgttc

SEQ ID NO: 5375240 - DNA, 25 bp, Homo sapien
catttaaagaatagatataaactac

SEQ ID NO: 5375241 - DNA, 25 bp, Homo sapien
tgcaaaatgaaggtatttccttccc

SEQ ID NO: 5375242 - DNA, 25 bp, Homo sapien
tgttgctttcaactgcatctcttga

SEQ ID NO: 5375243 - DNA, 25 bp, Homo sapien
gcttgggctcgcgcatggtgcgctc

SEQ ID NO: 5375244 - DNA, 25 bp, Homo sapien
tggtgcgctcacccactgacctgca

SEQ ID NO: 5375245 - DNA, 25 bp, Homo sapien
tgggctcgcgcatggtgcgctcacc

SEQ ID NO: 5375246 - DNA, 25 bp, Homo sapien
gcgggatatgatctcgtggtgcacc

SEQ ID NO: 5375247 - DNA, 25 bp, Homo sapien
taagcctctgactctagattttctc

SEQ ID NO: 5375248 - DNA, 25 bp, Homo sapien
tctttcttcctactgaagcccagaa

SEQ ID NO: 5375249 - DNA, 25 bp, Homo sapien
ctagtctaatgcgagttgtccattt

SEQ ID NO: 5375250 - DNA, 25 bp, Homo sapien
ccagaagggacaaagtctcttgggc

SEQ ID NO: 5375251 - DNA, 25 bp, Homo sapien
tgttggagggtggttgccgggcagc

SEQ ID NO: 5375252 - DNA, 25 bp, Homo sapien
tcctgtcctaaactgttggagggtg

SEQ ID NO: 5375253 - DNA, 25 bp, Homo sapien
caattccttttggatcgggtgtcct

SEQ ID NO: 5375254 - DNA, 25 bp, Homo sapien
tttggatcgggtgtccttagcttcc

SEQ ID NO: 5375255 - DNA, 25 bp, Homo sapien
cagcaatgttaaggcagttgttcaa

SEQ ID NO: 5375256 - DNA, 25 bp, Homo sapien
caaatgaagatattgagtttcagca

SEQ ID NO: 5375257 - DNA, 25 bp, Homo sapien
gggtggaaatcaccactctgtttgt

SEQ ID NO: 5375258 - DNA, 25 bp, Homo sapien
tgagagccgactacatgctcgctgc

SEQ ID NO: 5375259 - DNA, 25 bp, Homo sapien
acccatgaacgaggccctgctgtgc

SEQ ID NO: 5375260 - DNA, 25 bp, Homo sapien
tccagggctggtttagccacccatc

SEQ ID NO: 5375261 - DNA, 25 bp, Homo sapien
aatttcagcatggttcccaaatcct

SEQ ID NO: 5375262 - DNA, 25 bp, Homo sapien
gtttgaagaggtcacccatgaacga

SEQ ID NO: 5375263 - DNA, 25 bp, Homo sapien
atagaagcagattggtaaaaccgtt

SEQ ID NO: 5375264 - DNA, 25 bp, Homo sapien
taaagtgacttattgaaatagaagc

SEQ ID NO: 5375265 - DNA, 25 bp, Homo sapien
aaccgtttccctcttatgaactgtg

SEQ ID NO: 5375266 - DNA, 25 bp, Homo sapien
tggaggacacaaaatctctataaag

SEQ ID NO: 5375267 - DNA, 25 bp, Homo sapien
tgctaaaagggaaccacaaatgatc

SEQ ID NO: 5375268 - DNA, 25 bp, Homo sapien
ttcacacaccatagagaggcggcag

SEQ ID NO: 5375269 - DNA, 25 bp, Homo sapien
cagggacagatggtgccttaactct

SEQ ID NO: 5375270 - DNA, 25 bp, Homo sapien
tcatttgttgggtattgccggacac

SEQ ID NO: 5375271 - DNA, 25 bp, Homo sapien
cagagagaagcaccttggaacccaa

SEQ ID NO: 5375272 - DNA, 25 bp, Homo sapien
ccagttggcccagcgtaatcaatca

SEQ ID NO: 5375273 - DNA, 25 bp, Homo sapien
cttggaacccaaactggagcgtgat

SEQ ID NO: 5375274 - DNA, 25 bp, Homo sapien
actggagcgtgatgtgtctgagtcc

SEQ ID NO: 5375275 - DNA, 25 bp, Homo sapien
gagagtcgcagcgaatcagagctga

SEQ ID NO: 5375276 - DNA, 25 bp, Homo sapien
agtcgcagcgaatcagagctgacat

SEQ ID NO: 5375277 - DNA, 25 bp, Homo sapien
aggagagtcgcagcgaatcagagct

SEQ ID NO: 5375278 - DNA, 25 bp, Homo sapien
tgaggagagtcgcagcgaatcagag

SEQ ID NO: 5375279 - DNA, 25 bp, Homo sapien
cactgccttgctcgattgtgttcac

SEQ ID NO: 5375280 - DNA, 25 bp, Homo sapien
ccttgctcgattgtgttcaccagga

SEQ ID NO: 5375281 - DNA, 25 bp, Homo sapien
gcttcactgccttgctcgattgtgt

SEQ ID NO: 5375282 - DNA, 25 bp, Homo sapien
ttgcttcactgccttgctcgattgt

SEQ ID NO: 5375283 - DNA, 25 bp, Homo sapien
aaatgtcaaggcacattgaattgtt

SEQ ID NO: 5375284 - DNA, 25 bp, Homo sapien
ttaaaatgtcaaggcacattgaatt

SEQ ID NO: 5375285 - DNA, 25 bp, Homo sapien
aaaatgtcaaggcacattgaattgt

SEQ ID NO: 5375286 - DNA, 25 bp, Homo sapien
taaaatgtcaaggcacattgaattg

SEQ ID NO: 5375287 - DNA, 25 bp, Homo sapien
catttatggataactgcaatatggc

SEQ ID NO: 5375288 - DNA, 25 bp, Homo sapien
caatatggccttgccgtttggttta

SEQ ID NO: 5375289 - DNA, 25 bp, Homo sapien
gggaggtgactcacagcgggcagtg

SEQ ID NO: 5375290 - DNA, 25 bp, Homo sapien
tataaggagcgattgtaaggcagaa

SEQ ID NO: 5375291 - DNA, 25 bp, Homo sapien
cccggccacgtctgttctatttctg

SEQ ID NO: 5375292 - DNA, 25 bp, Homo sapien
tcagtttcatcagccggcgtttcag

SEQ ID NO: 5375293 - DNA, 25 bp, Homo sapien
ctttcgtgcggttctgcgaggcgct

SEQ ID NO: 5375294 - DNA, 25 bp, Homo sapien
tctatttctgctccggagagatggc

SEQ ID NO: 5375295 - DNA, 25 bp, Homo sapien
agctcgccactttattttctcgttg

SEQ ID NO: 5375296 - DNA, 25 bp, Homo sapien
gtgtcactggccagcgagacttgct

SEQ ID NO: 5375297 - DNA, 25 bp, Homo sapien
ccttccatgggccatgctcctggag

SEQ ID NO: 5375298 - DNA, 25 bp, Homo sapien
tccttctcgtgactggattttggca

SEQ ID NO: 5375299 - DNA, 25 bp, Homo sapien
cacagccgcagcacgcagtccggcg

SEQ ID NO: 5375300 - DNA, 25 bp, Homo sapien
agtccggcgccgcttgggaagcttt

SEQ ID NO: 5375301 - DNA, 25 bp, Homo sapien
ggaagctttggacgggatgctccct

SEQ ID NO: 5375302 - DNA, 25 bp, Homo sapien
gcttgggaagctttggacgggatgc

SEQ ID NO: 5375303 - DNA, 25 bp, Homo sapien
ccgtggctccgtaaatgacacatag

SEQ ID NO: 5375304 - DNA, 25 bp, Homo sapien
tagtccgtggctccgtaaatgacac

SEQ ID NO: 5375305 - DNA, 25 bp, Homo sapien
cacagtcctagtccgtggctccgta

SEQ ID NO: 5375306 - DNA, 25 bp, Homo sapien
tccgtaaatgacacatagacttgca

SEQ ID NO: 5375307 - DNA, 25 bp, Homo sapien
gtgctgcagtgatccaatagcctga

SEQ ID NO: 5375308 - DNA, 25 bp, Homo sapien
gctgcagtgatccaatagcctgaca

SEQ ID NO: 5375309 - DNA, 25 bp, Homo sapien
gggtgctgcagtgatccaatagcct

SEQ ID NO: 5375310 - DNA, 25 bp, Homo sapien
tagcctgacacagggggaagacgaa

SEQ ID NO: 5375311 - DNA, 25 bp, Homo sapien
cactagttcctatgcggtttataaa

SEQ ID NO: 5375312 - DNA, 25 bp, Homo sapien
ctggccaccactagttcctatgcgg

SEQ ID NO: 5375313 - DNA, 25 bp, Homo sapien
cctatgcggtttataaaaattcgag

SEQ ID NO: 5375314 - DNA, 25 bp, Homo sapien
gcggtttataaaaattcgagaggca

SEQ ID NO: 5375315 - DNA, 25 bp, Homo sapien
cagggagtctggctagctgcatgga

SEQ ID NO: 5375316 - DNA, 25 bp, Homo sapien
ggcctgtgcgtagggcgcactccat

SEQ ID NO: 5375317 - DNA, 25 bp, Homo sapien
gatgggctgggctttggccctcatt

SEQ ID NO: 5375318 - DNA, 25 bp, Homo sapien
tcatttgctcccttggttcagggcc

SEQ ID NO: 5375319 - DNA, 25 bp, Homo sapien
ggagtgcaggtacctctctatatac

SEQ ID NO: 5375320 - DNA, 25 bp, Homo sapien
cttaatataatgcattccaatttca

SEQ ID NO: 5375321 - DNA, 25 bp, Homo sapien
ttcatccacggatagacacttaggg

SEQ ID NO: 5375322 - DNA, 25 bp, Homo sapien
tccacggatagacacttagggtgat

SEQ ID NO: 5375323 - DNA, 25 bp, Homo sapien
ttccttatggatatttctgatgtct

SEQ ID NO: 5375324 - DNA, 25 bp, Homo sapien
ccagtctggtctctgattagggcct

SEQ ID NO: 5375325 - DNA, 25 bp, Homo sapien
ctggtctctgattagggcctggaag

SEQ ID NO: 5375326 - DNA, 25 bp, Homo sapien
ccttatggatatttctgatgtctga

SEQ ID NO: 5375327 - DNA, 25 bp, Homo sapien
tagccttgtggatggtaagattcca

SEQ ID NO: 5375328 - DNA, 25 bp, Homo sapien
tgtctcccttgtggtagcactgctg

SEQ ID NO: 5375329 - DNA, 25 bp, Homo sapien
tctgtggacacaggatgtttaggtc

SEQ ID NO: 5375330 - DNA, 25 bp, Homo sapien
taggtccctgtaggtagccttgtgg

SEQ ID NO: 5375331 - DNA, 25 bp, Homo sapien
tcatttggtgtgaggggagttgctg

SEQ ID NO: 5375332 - DNA, 25 bp, Homo sapien
catcagctgtgtgtactggtgccca

SEQ ID NO: 5375333 - DNA, 25 bp, Homo sapien
gtgcccacgtttccaatagtcaaga

SEQ ID NO: 5375334 - DNA, 25 bp, Homo sapien
caagccctggcttagagcagctcat

SEQ ID NO: 5375335 - DNA, 25 bp, Homo sapien
cacgcctggcgtgaaaagaaccaag

SEQ ID NO: 5375336 - DNA, 25 bp, Homo sapien
ttagcaaacgttaccagggagaaca

SEQ ID NO: 5375337 - DNA, 25 bp, Homo sapien
cccgaaatcgagcataggtttagca

SEQ ID NO: 5375338 - DNA, 25 bp, Homo sapien
gaggagtttcgatcccgtctcgggc

SEQ ID NO: 5375339 - DNA, 25 bp, Homo sapien
cagagacaaagtgccttcgccgctg

SEQ ID NO: 5375340 - DNA, 25 bp, Homo sapien
gaggtccccggaaagcagacttagc

SEQ ID NO: 5375341 - DNA, 25 bp, Homo sapien
caacggctcgggtttagtgtgatct

SEQ ID NO: 5375342 - DNA, 25 bp, Homo sapien
aaaacgcttggagaggaccgtgcac

SEQ ID NO: 5375343 - DNA, 25 bp, Homo sapien
taagaagcgtcagacctcggagaag

SEQ ID NO: 5375344 - DNA, 25 bp, Homo sapien
ttagcacttaacggccagtggtctc

SEQ ID NO: 5375345 - DNA, 25 bp, Homo sapien
gcaaggtctgccaatcactaccatt

SEQ ID NO: 5375346 - DNA, 25 bp, Homo sapien
tgtcgccctttgtgttacatacggg

SEQ ID NO: 5375347 - DNA, 25 bp, Homo sapien
attgaggcaacttttaatcccagaa

SEQ ID NO: 5375348 - DNA, 25 bp, Homo sapien
acatgggccttacagtattgaggca

SEQ ID NO: 5375349 - DNA, 25 bp, Homo sapien
gggccttacagtattgaggcaactt

SEQ ID NO: 5375350 - DNA, 25 bp, Homo sapien
gtctatttttgaataccctgtggga

SEQ ID NO: 5375351 - DNA, 25 bp, Homo sapien
gctcaaagtaaatactccatttgga

SEQ ID NO: 5375352 - DNA, 25 bp, Homo sapien
ccctcctctgattttacttatcact

SEQ ID NO: 5375353 - DNA, 25 bp, Homo sapien
cattttaccagctcaaagtaaatac

SEQ ID NO: 5375354 - DNA, 25 bp, Homo sapien
tgaagtccctgggtgagatcagaag

SEQ ID NO: 5375355 - DNA, 25 bp, Homo sapien
catgcaatccggagggaacaacaaa

SEQ ID NO: 5375356 - DNA, 25 bp, Homo sapien
aggctatggtggtcataaggaatga

SEQ ID NO: 5375357 - DNA, 25 bp, Homo sapien
aggcaggctaagacttgcctgtgga

SEQ ID NO: 5375358 - DNA, 25 bp, Homo sapien
gagccccagagtgacagacctaggg

SEQ ID NO: 5375359 - DNA, 25 bp, Homo sapien
cttctgcaggacttctaagaggtat

SEQ ID NO: 5375360 - DNA, 25 bp, Homo sapien
tgcaggacttctaagaggtatgggt

SEQ ID NO: 5375361 - DNA, 25 bp, Homo sapien
tctgcaggacttctaagaggtatgg

SEQ ID NO: 5375362 - DNA, 25 bp, Homo sapien
ttctgcaggacttctaagaggtatg

SEQ ID NO: 5375363 - DNA, 25 bp, Homo sapien
atgttgcaatctctttgagtgaagg

SEQ ID NO: 5375364 - DNA, 25 bp, Homo sapien
tgttgcaatctctttgagtgaaggg

SEQ ID NO: 5375365 - DNA, 25 bp, Homo sapien
ctatgttgcaatctctttgagtgaa

SEQ ID NO: 5375366 - DNA, 25 bp, Homo sapien
tatgttgcaatctctttgagtgaag

SEQ ID NO: 5375367 - DNA, 25 bp, Homo sapien
tctctcagctgcgtcgggagtgacc

SEQ ID NO: 5375368 - DNA, 25 bp, Homo sapien
tgtgctggaacttgggtctgacgcc

SEQ ID NO: 5375369 - DNA, 25 bp, Homo sapien
ggagtgacccggcataggtgctgct

SEQ ID NO: 5375370 - DNA, 25 bp, Homo sapien
gtctgacgcccatgtgttgctctcg

SEQ ID NO: 5375371 - DNA, 25 bp, Homo sapien
ccctactgaggatgtgattgttatg

SEQ ID NO: 5375372 - DNA, 25 bp, Homo sapien
gagtgaagggctgcctggattctat

SEQ ID NO: 5375373 - DNA, 25 bp, Homo sapien
tcttctccctactgaggatgtgatt

SEQ ID NO: 5375374 - DNA, 25 bp, Homo sapien
ttctatccagttatacatgctgctg

SEQ ID NO: 5375375 - DNA, 25 bp, Homo sapien
ctcaaatgtttctcctatcgatcct

SEQ ID NO: 5375376 - DNA, 25 bp, Homo sapien
gaatgctcctcaaatgtttctccta

SEQ ID NO: 5375377 - DNA, 25 bp, Homo sapien
tcactgcacttctgcaaaggcaaag

SEQ ID NO: 5375378 - DNA, 25 bp, Homo sapien
tgcaaaggcaaaggaatgctcctca

SEQ ID NO: 5375379 - DNA, 25 bp, Homo sapien
agcaggctccatcagccaatgctgt

SEQ ID NO: 5375380 - DNA, 25 bp, Homo sapien
caggctccatcagccaatgctgtct

SEQ ID NO: 5375381 - DNA, 25 bp, Homo sapien
tcagcaggctccatcagccaatgct

SEQ ID NO: 5375382 - DNA, 25 bp, Homo sapien
ctcagcaggctccatcagccaatgc

SEQ ID NO: 5375383 - DNA, 25 bp, Homo sapien
cacagcatagatcttcacctttgtt

SEQ ID NO: 5375384 - DNA, 25 bp, Homo sapien
ctgggtcccaacgttcatctttcaa

SEQ ID NO: 5375385 - DNA, 25 bp, Homo sapien
ccacagtacaggagagacgaggtcg

SEQ ID NO: 5375386 - DNA, 25 bp, Homo sapien
cacttcctgttgagtcacagcatag

SEQ ID NO: 5375387 - DNA, 25 bp, Homo sapien
aattcctctttaggggcagcattag

SEQ ID NO: 5375388 - DNA, 25 bp, Homo sapien
tgtgttggatagtagggtaagcaat

SEQ ID NO: 5375389 - DNA, 25 bp, Homo sapien
ttgtcaggggagataatcagcacct

SEQ ID NO: 5375390 - DNA, 25 bp, Homo sapien
cagcaccttatctggtcttttcctc

SEQ ID NO: 5375391 - DNA, 25 bp, Homo sapien
acgcctgaatattgtgtgtcttgca

SEQ ID NO: 5375392 - DNA, 25 bp, Homo sapien
agaaagtggaggcaggtctaacgcc

SEQ ID NO: 5375393 - DNA, 25 bp, Homo sapien
ggagccagcccagttcaagagagaa

SEQ ID NO: 5375394 - DNA, 25 bp, Homo sapien
gcaaggctggtgcaagactgaccct

SEQ ID NO: 5375395 - DNA, 25 bp, Homo sapien
caaatggaggcactcagggaatgag

SEQ ID NO: 5375396 - DNA, 25 bp, Homo sapien
ctgagaccaagcaaatggaggcact

SEQ ID NO: 5375397 - DNA, 25 bp, Homo sapien
atggaggcactcagggaatgagagg

SEQ ID NO: 5375398 - DNA, 25 bp, Homo sapien
tgagaccaagcaaatggaggcactc

SEQ ID NO: 5375399 - DNA, 25 bp, Homo sapien
gcaaacaccagaagcgagcgagagg

SEQ ID NO: 5375400 - DNA, 25 bp, Homo sapien
cttaactagagcttccttagggaga

SEQ ID NO: 5375401 - DNA, 25 bp, Homo sapien
ggaaggccaaaaattgccagcaaac

SEQ ID NO: 5375402 - DNA, 25 bp, Homo sapien
taggaaactaatgaagttcccacca

SEQ ID NO: 5375403 - DNA, 25 bp, Homo sapien
gcacgtcttgctgacgcctgctccc

SEQ ID NO: 5375404 - DNA, 25 bp, Homo sapien
acgtcttgctgacgcctgctcccat

SEQ ID NO: 5375405 - DNA, 25 bp, Homo sapien
tcttgctgacgcctgctcccatttt

SEQ ID NO: 5375406 - DNA, 25 bp, Homo sapien
gcgcacgtcttgctgacgcctgctc

SEQ ID NO: 5375407 - DNA, 25 bp, Homo sapien
tctgccagcacttagatgaagtggc

SEQ ID NO: 5375408 - DNA, 25 bp, Homo sapien
gccagcacttagatgaagtggccat

SEQ ID NO: 5375409 - DNA, 25 bp, Homo sapien
tgccagcacttagatgaagtggcca

SEQ ID NO: 5375410 - DNA, 25 bp, Homo sapien
ctctgccagcacttagatgaagtgg

SEQ ID NO: 5375411 - DNA, 25 bp, Homo sapien
atctgacccgattcaacccatccag

SEQ ID NO: 5375412 - DNA, 25 bp, Homo sapien
ttattttccctcttgccgccaggac

SEQ ID NO: 5375413 - DNA, 25 bp, Homo sapien
gacatgagggcagaatggcagccac

SEQ ID NO: 5375414 - DNA, 25 bp, Homo sapien
ggaaaactctcctcaatctgacccg

SEQ ID NO: 5375415 - DNA, 25 bp, Homo sapien
acagggaacagacacctgagccttc

SEQ ID NO: 5375416 - DNA, 25 bp, Homo sapien
cttagtcaaagaccccagagacagg

SEQ ID NO: 5375417 - DNA, 25 bp, Homo sapien
ccccagagacaggaacagggaacag

SEQ ID NO: 5375418 - DNA, 25 bp, Homo sapien
aacagggaacagacacctgagcctt

SEQ ID NO: 5375419 - DNA, 25 bp, Homo sapien
gatcccatgtcaggcactggagatc

SEQ ID NO: 5375420 - DNA, 25 bp, Homo sapien
gggtgaatagtcacgcagagtgagt

SEQ ID NO: 5375421 - DNA, 25 bp, Homo sapien
ctgcttaggaccagatcccatgtca

SEQ ID NO: 5375422 - DNA, 25 bp, Homo sapien
catgacaagcgccatgggagaggac

SEQ ID NO: 5375423 - DNA, 25 bp, Homo sapien
gaatgtaagaacagtgccttcaaaa

SEQ ID NO: 5375424 - DNA, 25 bp, Homo sapien
tgtgttgcacattaatcctgttaca

SEQ ID NO: 5375425 - DNA, 25 bp, Homo sapien
tatccagaaatctctttacattccg

SEQ ID NO: 5375426 - DNA, 25 bp, Homo sapien
tgcaatttgcctgtctgtgatacaa

SEQ ID NO: 5375427 - DNA, 25 bp, Homo sapien
atcaaagaagtaacaagtggaggga

SEQ ID NO: 5375428 - DNA, 25 bp, Homo sapien
caactgggatctctattgaagcctc

SEQ ID NO: 5375429 - DNA, 25 bp, Homo sapien
cttcccaactgggatctctattgaa

SEQ ID NO: 5375430 - DNA, 25 bp, Homo sapien
tgggatctctattgaagcctctgga

SEQ ID NO: 5375431 - DNA, 25 bp, Homo sapien
gatctctattgaagcctctggagac

SEQ ID NO: 5375432 - DNA, 25 bp, Homo sapien
cttctggagacattactctagttct

SEQ ID NO: 5375433 - DNA, 25 bp, Homo sapien
tagttcttttgttgaaactcggcat

SEQ ID NO: 5375434 - DNA, 25 bp, Homo sapien
ttaagactcattgccccttctggag

SEQ ID NO: 5375435 - DNA, 25 bp, Homo sapien
gttgaaactcggcattgatagtgaa

SEQ ID NO: 5375436 - DNA, 25 bp, Homo sapien
caagttgtgggcatgcaagaaatgt

SEQ ID NO: 5375437 - DNA, 25 bp, Homo sapien
ataccaagttgtgggcatgcaagaa

SEQ ID NO: 5375438 - DNA, 25 bp, Homo sapien
ccaagttgtgggcatgcaagaaatg

SEQ ID NO: 5375439 - DNA, 25 bp, Homo sapien
ataataccaagttgtgggcatgcaa

SEQ ID NO: 5375440 - DNA, 25 bp, Homo sapien
cttcctgatagatgggattttgcct

SEQ ID NO: 5375441 - DNA, 25 bp, Homo sapien
tccagtgtttaattcctccttactg

SEQ ID NO: 5375442 - DNA, 25 bp, Homo sapien
ccagtgtttaattcctccttactgt

SEQ ID NO: 5375443 - DNA, 25 bp, Homo sapien
gattttgccttcaagttgtttccag

SEQ ID NO: 5375444 - DNA, 25 bp, Homo sapien
ggtttggttttacgctttgctgctc

SEQ ID NO: 5375445 - DNA, 25 bp, Homo sapien
cggtttggttttacgctttgctgct

SEQ ID NO: 5375446 - DNA, 25 bp, Homo sapien
tgccatcagaccatacccagtctgt

SEQ ID NO: 5375447 - DNA, 25 bp, Homo sapien
catacccagtctgttgttcttgtgg

SEQ ID NO: 5375448 - DNA, 25 bp, Homo sapien
caaataagctcttctcagcgtatac

SEQ ID NO: 5375449 - DNA, 25 bp, Homo sapien
ttcatccatctgtggaagaaccact

SEQ ID NO: 5375450 - DNA, 25 bp, Homo sapien
aatctgggaccagtatgcttagtgc

SEQ ID NO: 5375451 - DNA, 25 bp, Homo sapien
ttaagtgtctttattgcatccatcc

SEQ ID NO: 5375452 - DNA, 25 bp, Homo sapien
tgccttcacaatagggagtgagaaa

SEQ ID NO: 5375453 - DNA, 25 bp, Homo sapien
acatctttttgtgtccattcacggc

SEQ ID NO: 5375454 - DNA, 25 bp, Homo sapien
cattcacggctgcaaaaatccaagt

SEQ ID NO: 5375455 - DNA, 25 bp, Homo sapien
acttttcattactggtatgattgac

SEQ ID NO: 5375456 - DNA, 25 bp, Homo sapien
gctgtgtttctaggggcccctgaca

SEQ ID NO: 5375457 - DNA, 25 bp, Homo sapien
ctgtgtttctaggggcccctgacag

SEQ ID NO: 5375458 - DNA, 25 bp, Homo sapien
cttgtcctgctagggcgatcaggtg

SEQ ID NO: 5375459 - DNA, 25 bp, Homo sapien
ctagggcgatcaggtgataggtcat

SEQ ID NO: 5375460 - DNA, 25 bp, Homo sapien
acttgtcctgctagggcgatcaggt

SEQ ID NO: 5375461 - DNA, 25 bp, Homo sapien
tcctgctagggcgatcaggtgatag

SEQ ID NO: 5375462 - DNA, 25 bp, Homo sapien
ctaatacgttggtcacttgaggcat

SEQ ID NO: 5375463 - DNA, 25 bp, Homo sapien
agatcttgctcctttcgaaatgcca

SEQ ID NO: 5375464 - DNA, 25 bp, Homo sapien
atccacccttgaggtcgtggcttgg

SEQ ID NO: 5375465 - DNA, 25 bp, Homo sapien
aatgagatggctacttggaagcttt

SEQ ID NO: 5375466 - DNA, 25 bp, Homo sapien
tggctggtccatagcaggctttact

SEQ ID NO: 5375467 - DNA, 25 bp, Homo sapien
gtctagaaagtactctagtttatgt

SEQ ID NO: 5375468 - DNA, 25 bp, Homo sapien
ggagtaaactttgctgatgccagtg

SEQ ID NO: 5375469 - DNA, 25 bp, Homo sapien
tgtagggagtaaactttgctgatgc

SEQ ID NO: 5375470 - DNA, 25 bp, Homo sapien
tttatgtagggagtaaactttgctg

SEQ ID NO: 5375471 - DNA, 25 bp, Homo sapien
caagaagactgggtaattttggagt

SEQ ID NO: 5375472 - DNA, 25 bp, Homo sapien
gctgatgccaaactgaatatcagca

SEQ ID NO: 5375473 - DNA, 25 bp, Homo sapien
agaagactgggtaattttggagtgg

SEQ ID NO: 5375474 - DNA, 25 bp, Homo sapien
atgctgatgccaaactgaatatcag

SEQ ID NO: 5375475 - DNA, 25 bp, Homo sapien
tctggtcacgcctaggagacttatc

SEQ ID NO: 5375476 - DNA, 25 bp, Homo sapien
taacatccctctggtcacgcctagg

SEQ ID NO: 5375477 - DNA, 25 bp, Homo sapien
cctaggagacttatccggccttgtt

SEQ ID NO: 5375478 - DNA, 25 bp, Homo sapien
cttgttttaggtcctggtgccttca

SEQ ID NO: 5375479 - DNA, 25 bp, Homo sapien
gagaccggagattggtccttctcag

SEQ ID NO: 5375480 - DNA, 25 bp, Homo sapien
taatgctccttagtcccgacctcct

SEQ ID NO: 5375481 - DNA, 25 bp, Homo sapien
tgtcctgggccctcggaagtgttga

SEQ ID NO: 5375482 - DNA, 25 bp, Homo sapien
actccacgagcccatcttatcagag

SEQ ID NO: 5375483 - DNA, 25 bp, Homo sapien
ctttgaaatcaggtgagtgacattt

SEQ ID NO: 5375484 - DNA, 25 bp, Homo sapien
ggtgagtgacatttatgcacaaggc

SEQ ID NO: 5375485 - DNA, 25 bp, Homo sapien
tgcacaaggcatcagtactttggct

SEQ ID NO: 5375486 - DNA, 25 bp, Homo sapien
tgtcattgagccatgtgcttaaagt

SEQ ID NO: 5375487 - DNA, 25 bp, Homo sapien
gcattaatgcaaggtgtgccctctg

SEQ ID NO: 5375488 - DNA, 25 bp, Homo sapien
tgggtgtcctcatttgagtgtcgct

SEQ ID NO: 5375489 - DNA, 25 bp, Homo sapien
gggtgtcctcatttgagtgtcgctg

SEQ ID NO: 5375490 - DNA, 25 bp, Homo sapien
atctgcattaatgcaaggtgtgccc

SEQ ID NO: 5375491 - DNA, 25 bp, Homo sapien
tggggagctccggaagggactctgg

SEQ ID NO: 5375492 - DNA, 25 bp, Homo sapien
gggactctggtcccatcggtgcatt

SEQ ID NO: 5375493 - DNA, 25 bp, Homo sapien
actctggtcccatcggtgcattcat

SEQ ID NO: 5375494 - DNA, 25 bp, Homo sapien
ctggggagctccggaagggactctg

SEQ ID NO: 5375495 - DNA, 25 bp, Homo sapien
tgagctgatagctcatcagttgctt

SEQ ID NO: 5375496 - DNA, 25 bp, Homo sapien
tcttagggccagactttcccatgac

SEQ ID NO: 5375497 - DNA, 25 bp, Homo sapien
gggctggacttcctgctggattgac

SEQ ID NO: 5375498 - DNA, 25 bp, Homo sapien
gacctcacaagaggatagacagagg

SEQ ID NO: 5375499 - DNA, 25 bp, Homo sapien
tcagcattcccattggttaaactgt

SEQ ID NO: 5375500 - DNA, 25 bp, Homo sapien
ccattggttaaactgtggcccccag

SEQ ID NO: 5375501 - DNA, 25 bp, Homo sapien
cattcccattggttaaactgtggcc

SEQ ID NO: 5375502 - DNA, 25 bp, Homo sapien
tggttaaactgtggcccccagtctc

SEQ ID NO: 5375503 - DNA, 25 bp, Homo sapien
tcttctgttgtcagctcccatgcac

SEQ ID NO: 5375504 - DNA, 25 bp, Homo sapien
tctcacactcataatcacaatcttc

SEQ ID NO: 5375505 - DNA, 25 bp, Homo sapien
tgtctcacactcataatcacaatct

SEQ ID NO: 5375506 - DNA, 25 bp, Homo sapien
cagtgtctcacactcataatcacaa

SEQ ID NO: 5375507 - DNA, 25 bp, Homo sapien
cagctgcctgctgtctagttcccat

SEQ ID NO: 5375508 - DNA, 25 bp, Homo sapien
aaggcatcaccttctgtccagctgc

SEQ ID NO: 5375509 - DNA, 25 bp, Homo sapien
ctgcctgcgagcctcaggtcccaca

SEQ ID NO: 5375510 - DNA, 25 bp, Homo sapien
aggtcccacactgcaagctggccac

SEQ ID NO: 5375511 - DNA, 25 bp, Homo sapien
ggagtagggctatactctgcaaagc

SEQ ID NO: 5375512 - DNA, 25 bp, Homo sapien
cagccaggagtagggctatactctg

SEQ ID NO: 5375513 - DNA, 25 bp, Homo sapien
gccaggagtagggctatactctgca

SEQ ID NO: 5375514 - DNA, 25 bp, Homo sapien
caggagtagggctatactctgcaaa

SEQ ID NO: 5375515 - DNA, 25 bp, Homo sapien
gacaggacaaaggtcaacaataggc

SEQ ID NO: 5375516 - DNA, 25 bp, Homo sapien
aacaataggcgagcctgcagctgct

SEQ ID NO: 5375517 - DNA, 25 bp, Homo sapien
tgaaggaggcagtcatggtgggcct

SEQ ID NO: 5375518 - DNA, 25 bp, Homo sapien
tgctgccagagttcagtcgcttgtg

SEQ ID NO: 5375519 - DNA, 25 bp, Homo sapien
ttccatgagagaccatagaacctgt

SEQ ID NO: 5375520 - DNA, 25 bp, Homo sapien
taacagttactttcgagtgtttctc

SEQ ID NO: 5375521 - DNA, 25 bp, Homo sapien
tttgtagtctctattccatgagaga

SEQ ID NO: 5375522 - DNA, 25 bp, Homo sapien
tggaatcctagagagcttgcctggg

SEQ ID NO: 5375523 - DNA, 25 bp, Homo sapien
gccagggccagtagaaacagtgtgt

SEQ ID NO: 5375524 - DNA, 25 bp, Homo sapien
gaacatctgaaaagagcatctggta

SEQ ID NO: 5375525 - DNA, 25 bp, Homo sapien
ggaagtcagggaaaatctcccagag

SEQ ID NO: 5375526 - DNA, 25 bp, Homo sapien
tatgtgcggacatgtgtgaagatgc

SEQ ID NO: 5375527 - DNA, 25 bp, Homo sapien
cccatctttaacaaggtcatagagc

SEQ ID NO: 5375528 - DNA, 25 bp, Homo sapien
cagtcttctgtcagagtgcagaggc

SEQ ID NO: 5375529 - DNA, 25 bp, Homo sapien
tttaagcaattacaatgcaaggctg

SEQ ID NO: 5375530 - DNA, 25 bp, Homo sapien
gtaagcaaactaagacatggttccc

SEQ ID NO: 5375531 - DNA, 25 bp, Homo sapien
ccaatgtgacacttaagtttatgac

SEQ ID NO: 5375532 - DNA, 25 bp, Homo sapien
agtttatgacaagacgtagcagtag

SEQ ID NO: 5375533 - DNA, 25 bp, Homo sapien
gacgtagcagtaggagccttcagcc

SEQ ID NO: 5375534 - DNA, 25 bp, Homo sapien
tgcagaggagttaattcttcaatct

SEQ ID NO: 5375535 - DNA, 25 bp, Homo sapien
cccggtgtagccagtagctgatgga

SEQ ID NO: 5375536 - DNA, 25 bp, Homo sapien
tgtagccagtagctgatggagtcct

SEQ ID NO: 5375537 - DNA, 25 bp, Homo sapien
ctgaggacagccctgatgtcggcac

SEQ ID NO: 5375538 - DNA, 25 bp, Homo sapien
tggcctggatattggccacttggtg

SEQ ID NO: 5375539 - DNA, 25 bp, Homo sapien
gctgtcttaagacttgagacccaat

SEQ ID NO: 5375540 - DNA, 25 bp, Homo sapien
ctagcacacctgtgggctgtcttaa

SEQ ID NO: 5375541 - DNA, 25 bp, Homo sapien
tcctactgtcctagcagggcccggg

SEQ ID NO: 5375542 - DNA, 25 bp, Homo sapien
gaaagagattttccactcgcctcat

SEQ ID NO: 5375543 - DNA, 25 bp, Homo sapien
cataggccgattgggtatccaggct

SEQ ID NO: 5375544 - DNA, 25 bp, Homo sapien
gacttagtctttccttcacatgccc

SEQ ID NO: 5375545 - DNA, 25 bp, Homo sapien
aattctcttccgtagggcttgccct

SEQ ID NO: 5375546 - DNA, 25 bp, Homo sapien
gacttctatcccgtaaacatactag

SEQ ID NO: 5375547 - DNA, 25 bp, Homo sapien
ggattagcagggccacgatgaaaca

SEQ ID NO: 5375548 - DNA, 25 bp, Homo sapien
tcagtggattagcagggccacgatg

SEQ ID NO: 5375549 - DNA, 25 bp, Homo sapien
agcttgtgccttctccattctttac

SEQ ID NO: 5375550 - DNA, 25 bp, Homo sapien
gcttgtgccttctccattctttaca

SEQ ID NO: 5375551 - DNA, 25 bp, Homo sapien
cccactatcttttgctccattgaat

SEQ ID NO: 5375552 - DNA, 25 bp, Homo sapien
tttggatttccccactatcttttgc

SEQ ID NO: 5375553 - DNA, 25 bp, Homo sapien
ttccccactatcttttgctccattg

SEQ ID NO: 5375554 - DNA, 25 bp, Homo sapien
actatcttttgctccattgaatcaa

SEQ ID NO: 5375555 - DNA, 25 bp, Homo sapien
tctcaggtagacacgagcacaccat

SEQ ID NO: 5375556 - DNA, 25 bp, Homo sapien
tagcagagttgctcccatttgagag

SEQ ID NO: 5375557 - DNA, 25 bp, Homo sapien
gaagccatggacatgaagggccact

SEQ ID NO: 5375558 - DNA, 25 bp, Homo sapien
tcagagctgctaatacagaactggg

SEQ ID NO: 5375559 - DNA, 25 bp, Homo sapien
tgaattgataaagccagatctggtt

SEQ ID NO: 5375560 - DNA, 25 bp, Homo sapien
gggcaaccggtattctctcctagtc

SEQ ID NO: 5375561 - DNA, 25 bp, Homo sapien
gaaatgggattgagtgtcttatacc

SEQ ID NO: 5375562 - DNA, 25 bp, Homo sapien
caatgcttgacacagagcaggtggt

SEQ ID NO: 5375563 - DNA, 25 bp, Homo sapien
atcttatttccagggaagatttcct

SEQ ID NO: 5375564 - DNA, 25 bp, Homo sapien
cttttatcttatttccagggaagat

SEQ ID NO: 5375565 - DNA, 25 bp, Homo sapien
ttatcttatttccagggaagatttc

SEQ ID NO: 5375566 - DNA, 25 bp, Homo sapien
tatttccagggaagatttcctgcat

SEQ ID NO: 5375567 - DNA, 25 bp, Homo sapien
cccaagatacgacatgttgtaaatg

SEQ ID NO: 5375568 - DNA, 25 bp, Homo sapien
aaggttatgtactcctgaggtctgt

SEQ ID NO: 5375569 - DNA, 25 bp, Homo sapien
tcagccttcaacataaaggttatgt

SEQ ID NO: 5375570 - DNA, 25 bp, Homo sapien
tcaatgtaattatcagccacaacaa

SEQ ID NO: 5375571 - DNA, 25 bp, Homo sapien
ccacaggcccaagaagctccaatag

SEQ ID NO: 5375572 - DNA, 25 bp, Homo sapien
aggatggaaccacgagtgcctcctc

SEQ ID NO: 5375573 - DNA, 25 bp, Homo sapien
agcctgtgaggatggaaccacgagt

SEQ ID NO: 5375574 - DNA, 25 bp, Homo sapien
ccaagaagctccaatagcccaggag

SEQ ID NO: 5375575 - DNA, 25 bp, Homo sapien
tacaaatcatttccgtcaacccaga

SEQ ID NO: 5375576 - DNA, 25 bp, Homo sapien
catgtgctagctaagtctgctccca

SEQ ID NO: 5375577 - DNA, 25 bp, Homo sapien
gacctgatctgttcctagcaccata

SEQ ID NO: 5375578 - DNA, 25 bp, Homo sapien
tcaccattgcttccaagagccaggc

SEQ ID NO: 5375579 - DNA, 25 bp, Homo sapien
cttgtgtctacgaaaggcagctgcc

SEQ ID NO: 5375580 - DNA, 25 bp, Homo sapien
cttccttgtgtctacgaaaggcagc

SEQ ID NO: 5375581 - DNA, 25 bp, Homo sapien
cctccacgcacaggtcccaggagag

SEQ ID NO: 5375582 - DNA, 25 bp, Homo sapien
tgtgtctacgaaaggcagctgcctc

SEQ ID NO: 5375583 - DNA, 25 bp, Homo sapien
cttggctgaagccagagtctccgtt

SEQ ID NO: 5375584 - DNA, 25 bp, Homo sapien
gctttcttggctgaagccagagtct

SEQ ID NO: 5375585 - DNA, 25 bp, Homo sapien
ggctgaagccagagtctccgttaaa

SEQ ID NO: 5375586 - DNA, 25 bp, Homo sapien
tgaagccagagtctccgttaaaaag

SEQ ID NO: 5375587 - DNA, 25 bp, Homo sapien
ataaacccctaagatgaccaaaatg

SEQ ID NO: 5375588 - DNA, 25 bp, Homo sapien
taagatggacacaattcctggtaat

SEQ ID NO: 5375589 - DNA, 25 bp, Homo sapien
ggccaattaaatctaacagcatatg

SEQ ID NO: 5375590 - DNA, 25 bp, Homo sapien
tattaatctgttagagtacctacaa

SEQ ID NO: 5375591 - DNA, 25 bp, Homo sapien
tgactaaggagacccggattccatt

SEQ ID NO: 5375592 - DNA, 25 bp, Homo sapien
catcctgtttgctccaatataagtg

SEQ ID NO: 5375593 - DNA, 25 bp, Homo sapien
gtcatcgcaggaggcataaatcacc

SEQ ID NO: 5375594 - DNA, 25 bp, Homo sapien
agcactattggtactgatgtcatcg

SEQ ID NO: 5375595 - DNA, 25 bp, Homo sapien
caggtggaggagcacctctggttgt

SEQ ID NO: 5375596 - DNA, 25 bp, Homo sapien
tggactacagagctaattggtgctt

SEQ ID NO: 5375597 - DNA, 25 bp, Homo sapien
tgtttgtgctccatgggcgccaggt

SEQ ID NO: 5375598 - DNA, 25 bp, Homo sapien
gcttcctgccttgccgaaggacaca

SEQ ID NO: 5375599 - DNA, 25 bp, Homo sapien
ctccacttctgtgtatggagggaga

SEQ ID NO: 5375600 - DNA, 25 bp, Homo sapien
tgcattatcgaaattcccaggcttt

SEQ ID NO: 5375601 - DNA, 25 bp, Homo sapien
ttattccagccacagttcaggctcc

SEQ ID NO: 5375602 - DNA, 25 bp, Homo sapien
tatggagggagatgcattatcgaaa

SEQ ID NO: 5375603 - DNA, 25 bp, Homo sapien
ttaccaagtaccagaggccctggaa

SEQ ID NO: 5375604 - DNA, 25 bp, Homo sapien
tgccctgctctgttaccaagtacca

SEQ ID NO: 5375605 - DNA, 25 bp, Homo sapien
ctctgttaccaagtaccagaggccc

SEQ ID NO: 5375606 - DNA, 25 bp, Homo sapien
tgttaccaagtaccagaggccctgg

SEQ ID NO: 5375607 - DNA, 25 bp, Homo sapien
catatgggagatggtagagtttatc

SEQ ID NO: 5375608 - DNA, 25 bp, Homo sapien
cagatcaccctgcttaaagctggca

SEQ ID NO: 5375609 - DNA, 25 bp, Homo sapien
cccagatcaccctgcttaaagctgg

SEQ ID NO: 5375610 - DNA, 25 bp, Homo sapien
ggtagagtttatcaaggacatcctt

SEQ ID NO: 5375611 - DNA, 25 bp, Homo sapien
gcaggtcaacaggagatttgtcctt

SEQ ID NO: 5375612 - DNA, 25 bp, Homo sapien
tattgttcggacaagtgactgtcac

SEQ ID NO: 5375613 - DNA, 25 bp, Homo sapien
tttcatggatgggacaacatggcag

SEQ ID NO: 5375614 - DNA, 25 bp, Homo sapien
cttttgagggcacttattgttcgga

SEQ ID NO: 5375615 - DNA, 25 bp, Homo sapien
gcatgcatcggtagacacttattaa

SEQ ID NO: 5375616 - DNA, 25 bp, Homo sapien
ctctattatgtacagaactcttttg

SEQ ID NO: 5375617 - DNA, 25 bp, Homo sapien
tcatatgagctgcataaaacagcca

SEQ ID NO: 5375618 - DNA, 25 bp, Homo sapien
gacaaatttgtactcccactatcta

SEQ ID NO: 5375619 - DNA, 25 bp, Homo sapien
aaatatgtcgcagtgtgtcttccag

SEQ ID NO: 5375620 - DNA, 25 bp, Homo sapien
actccccaaatatgtcgcagtgtgt

SEQ ID NO: 5375621 - DNA, 25 bp, Homo sapien
ccagcaaccatcctgttgctgattt

SEQ ID NO: 5375622 - DNA, 25 bp, Homo sapien
tctccagcaaccatcctgttgctga

SEQ ID NO: 5375623 - DNA, 25 bp, Homo sapien
gagcagccgaaggaccaggaaactt

SEQ ID NO: 5375624 - DNA, 25 bp, Homo sapien
ttcatggagccacatggaggtcttc

SEQ ID NO: 5375625 - DNA, 25 bp, Homo sapien
agatttcattctcccctccgtccta

SEQ ID NO: 5375626 - DNA, 25 bp, Homo sapien
tctggaacacgtctgagcagccgaa

SEQ ID NO: 5375627 - DNA, 25 bp, Homo sapien
gaaggagccaaatgtgtgttgccat

SEQ ID NO: 5375628 - DNA, 25 bp, Homo sapien
gtcacagtgtgctgtgtcaaagaac

SEQ ID NO: 5375629 - DNA, 25 bp, Homo sapien
tgttgccatttgatggtagaatcag

SEQ ID NO: 5375630 - DNA, 25 bp, Homo sapien
gaacagtcaatcaatctccaaagaa

SEQ ID NO: 5375631 - DNA, 25 bp, Homo sapien
tgtatgacagtcaggacagacagca

SEQ ID NO: 5375632 - DNA, 25 bp, Homo sapien
tccgaccagctgtcaacataacctg

SEQ ID NO: 5375633 - DNA, 25 bp, Homo sapien
cataacctgtatcagaggcatgtct

SEQ ID NO: 5375634 - DNA, 25 bp, Homo sapien
acagcgggccatgtctgtatgacag

SEQ ID NO: 5375635 - DNA, 25 bp, Homo sapien
tttacatcacctaaaatgcactgga

SEQ ID NO: 5375636 - DNA, 25 bp, Homo sapien
gacctctgcagtactttccagatgt

SEQ ID NO: 5375637 - DNA, 25 bp, Homo sapien
ctgttggtgcaaagtgttggacaac

SEQ ID NO: 5375638 - DNA, 25 bp, Homo sapien
ttgatggcggatgtagattttacat

SEQ ID NO: 5375639 - DNA, 25 bp, Homo sapien
tgtaccgcaggtcccggagtagaag

SEQ ID NO: 5375640 - DNA, 25 bp, Homo sapien
tgttttccctctgcgtcaatgccca

SEQ ID NO: 5375641 - DNA, 25 bp, Homo sapien
gcagagagtactgcctgtaccgcag

SEQ ID NO: 5375642 - DNA, 25 bp, Homo sapien
aacgtgcttggtgagcaaccactgt

SEQ ID NO: 5375643 - DNA, 25 bp, Homo sapien
aatcaaatccataagctttgttgcc

SEQ ID NO: 5375644 - DNA, 25 bp, Homo sapien
cataatcaaatccataagctttgtt

SEQ ID NO: 5375645 - DNA, 25 bp, Homo sapien
aatccataagctttgttgccaatta

SEQ ID NO: 5375646 - DNA, 25 bp, Homo sapien
caaatccataagctttgttgccaat

SEQ ID NO: 5375647 - DNA, 25 bp, Homo sapien
cactgatttgcaatctgcaagttga

SEQ ID NO: 5375648 - DNA, 25 bp, Homo sapien
cagctgggcgagtgagaagtgactc

SEQ ID NO: 5375649 - DNA, 25 bp, Homo sapien
caaggggttgatgcctgtttgcact

SEQ ID NO: 5375650 - DNA, 25 bp, Homo sapien
agagaacccctcctgatatttacag

SEQ ID NO: 5375651 - DNA, 25 bp, Homo sapien
ccaccaacaggataatcttcggcat

SEQ ID NO: 5375652 - DNA, 25 bp, Homo sapien
taatcttcggcattttgctgattgg

SEQ ID NO: 5375653 - DNA, 25 bp, Homo sapien
caactttcatctacatggtaaagaa

SEQ ID NO: 5375654 - DNA, 25 bp, Homo sapien
tcatctacatggtaaagaatgtgct

SEQ ID NO: 5375655 - DNA, 25 bp, Homo sapien
cacgggaggcttgtgcaaagtacag

SEQ ID NO: 5375656 - DNA, 25 bp, Homo sapien
ctttttgccactgcacgggaggctt

SEQ ID NO: 5375657 - DNA, 25 bp, Homo sapien
tctttttgccactgcacgggaggct

SEQ ID NO: 5375658 - DNA, 25 bp, Homo sapien
ttgtctttttgccactgcacgggag

SEQ ID NO: 5375659 - DNA, 25 bp, Homo sapien
gagagatcgtttgcaattccaggaa

SEQ ID NO: 5375660 - DNA, 25 bp, Homo sapien
caggtgaagcataggtggcccatca

SEQ ID NO: 5375661 - DNA, 25 bp, Homo sapien
tgcttttcatgtgccggaagtgacc

SEQ ID NO: 5375662 - DNA, 25 bp, Homo sapien
tagaaggctgccgaaattcagtgag

SEQ ID NO: 5375663 - DNA, 25 bp, Homo sapien
tattccatcaagttcacttctgcac

SEQ ID NO: 5375664 - DNA, 25 bp, Homo sapien
aggattccaaggatttcctcatcca

SEQ ID NO: 5375665 - DNA, 25 bp, Homo sapien
atcaagttcacttctgcacaccagg

SEQ ID NO: 5375666 - DNA, 25 bp, Homo sapien
gagagtattccatcaagttcacttc

SEQ ID NO: 5375667 - DNA, 25 bp, Homo sapien
tagttgcaaccttactctgtcctca

SEQ ID NO: 5375668 - DNA, 25 bp, Homo sapien
gggcacaatcgtgcccctaatctgt

SEQ ID NO: 5375669 - DNA, 25 bp, Homo sapien
tcagaggctctccatagttgcaacc

SEQ ID NO: 5375670 - DNA, 25 bp, Homo sapien
taatctgttcagaggctctccatag

SEQ ID NO: 5375671 - DNA, 25 bp, Homo sapien
tggctcctgttctagcgcttttcaa

SEQ ID NO: 5375672 - DNA, 25 bp, Homo sapien
ctggctcctgttctagcgcttttca

SEQ ID NO: 5375673 - DNA, 25 bp, Homo sapien
tgcagcaaaaccagccactctgtgg

SEQ ID NO: 5375674 - DNA, 25 bp, Homo sapien
cacactctttgcctcttaataaata

SEQ ID NO: 5375675 - DNA, 25 bp, Homo sapien
gccatctgtgtctaagacgtccaaa

SEQ ID NO: 5375676 - DNA, 25 bp, Homo sapien
aataaatatgagaagctgccagctt

SEQ ID NO: 5375677 - DNA, 25 bp, Homo sapien
cctgaggaggctttcacttagcttc

SEQ ID NO: 5375678 - DNA, 25 bp, Homo sapien
gatatgatgacttgttctactacca

SEQ ID NO: 5375679 - DNA, 25 bp, Homo sapien
tatatctcatgatacacttgtgcag

SEQ ID NO: 5375680 - DNA, 25 bp, Homo sapien
tcatcaacagcagtaccgtcattag

SEQ ID NO: 5375681 - DNA, 25 bp, Homo sapien
gatgccagtgctacaccgtatcgca

SEQ ID NO: 5375682 - DNA, 25 bp, Homo sapien
gtgctacaccgtatcgcagtatggt

SEQ ID NO: 5375683 - DNA, 25 bp, Homo sapien
caccgtatcgcagtatggttgcaga

SEQ ID NO: 5375684 - DNA, 25 bp, Homo sapien
ccatgatgccagtgctacaccgtat

SEQ ID NO: 5375685 - DNA, 25 bp, Homo sapien
gtcaggaagcaagctcccctgaatg

SEQ ID NO: 5375686 - DNA, 25 bp, Homo sapien
ctcccctgaatgactattttctgct

SEQ ID NO: 5375687 - DNA, 25 bp, Homo sapien
caggaagcaagctcccctgaatgac

SEQ ID NO: 5375688 - DNA, 25 bp, Homo sapien
gaagtcaggaagcaagctcccctga

SEQ ID NO: 5375689 - DNA, 25 bp, Homo sapien
gaatctctacactccaggagaaagg

SEQ ID NO: 5375690 - DNA, 25 bp, Homo sapien
gagccccacagtcaatacggagaag

SEQ ID NO: 5375691 - DNA, 25 bp, Homo sapien
tatgcagaataatagacaccccagc

SEQ ID NO: 5375692 - DNA, 25 bp, Homo sapien
gaatttgcttaatgcgccccactat

SEQ ID NO: 5375693 - DNA, 25 bp, Homo sapien
ctctgtggccaaatgttgtaaagaa

SEQ ID NO: 5375694 - DNA, 25 bp, Homo sapien
cagtttgtctagagaaaacagacat

SEQ ID NO: 5375695 - DNA, 25 bp, Homo sapien
tttgtctagagaaaacagacatata

SEQ ID NO: 5375696 - DNA, 25 bp, Homo sapien
gtttgtctagagaaaacagacatat

SEQ ID NO: 5375697 - DNA, 25 bp, Homo sapien
cttttcttggaaagcttccagtttg

SEQ ID NO: 5375698 - DNA, 25 bp, Homo sapien
taagaaagagaggatacggtcccta

SEQ ID NO: 5375699 - DNA, 25 bp, Homo sapien
tgagggtagacttcagggagtccac

SEQ ID NO: 5375700 - DNA, 25 bp, Homo sapien
caaggccaaggtactgaactggaaa

SEQ ID NO: 5375701 - DNA, 25 bp, Homo sapien
tccatgggctttcggggactctgag

SEQ ID NO: 5375702 - DNA, 25 bp, Homo sapien
tgcatgcaaaatcgttaagttcctg

SEQ ID NO: 5375703 - DNA, 25 bp, Homo sapien
caggagttccgaagctagttggggc

SEQ ID NO: 5375704 - DNA, 25 bp, Homo sapien
tcaggagttccgaagctagttgggg

SEQ ID NO: 5375705 - DNA, 25 bp, Homo sapien
ctcaggagttccgaagctagttggg

SEQ ID NO: 5375706 - DNA, 25 bp, Homo sapien
ttgcaccaatgcaggtgtctgtcta

SEQ ID NO: 5375707 - DNA, 25 bp, Homo sapien
cttggcttgcaccaatgcaggtgtc

SEQ ID NO: 5375708 - DNA, 25 bp, Homo sapien
gcttgcaccaatgcaggtgtctgtc

SEQ ID NO: 5375709 - DNA, 25 bp, Homo sapien
tggcttgcaccaatgcaggtgtctg

SEQ ID NO: 5375710 - DNA, 25 bp, Homo sapien
gatccagacatgaaaactgccaagg

SEQ ID NO: 5375711 - DNA, 25 bp, Homo sapien
tgggagtctgaaaccaacacctctg

SEQ ID NO: 5375712 - DNA, 25 bp, Homo sapien
tcccctgagcttggtgatggtacag

SEQ ID NO: 5375713 - DNA, 25 bp, Homo sapien
tgccaagtccagaagtagatccaga

SEQ ID NO: 5375714 - DNA, 25 bp, Homo sapien
tgttcagtagccaacttgatggact

SEQ ID NO: 5375715 - DNA, 25 bp, Homo sapien
tggtgtctgtgtggttcccttcagt

SEQ ID NO: 5375716 - DNA, 25 bp, Homo sapien
gcctcttgccttgttcagtagccaa

SEQ ID NO: 5375717 - DNA, 25 bp, Homo sapien
tggacttcatgtcaaccgccattgg

SEQ ID NO: 5375718 - DNA, 25 bp, Homo sapien
aagcgcctgccgtggactcctttgc

SEQ ID NO: 5375719 - DNA, 25 bp, Homo sapien
gcacagaaaggtagcaagcgcctgc

SEQ ID NO: 5375720 - DNA, 25 bp, Homo sapien
tggtcgctggggtcaagttcttatc

SEQ ID NO: 5375721 - DNA, 25 bp, Homo sapien
ctatagcaatctgactctgctccag

SEQ ID NO: 5375722 - DNA, 25 bp, Homo sapien
tctaggatgaggcattagggctcgc

SEQ ID NO: 5375723 - DNA, 25 bp, Homo sapien
tctgagaagttgacatcaagcagac

SEQ ID NO: 5375724 - DNA, 25 bp, Homo sapien
ctctggtgcggacagtctaggatga

SEQ ID NO: 5375725 - DNA, 25 bp, Homo sapien
gacagcaagacatgatatcttattt

SEQ ID NO: 5375726 - DNA, 25 bp, Homo sapien
taatctttggcaggtaagcagcatt

SEQ ID NO: 5375727 - DNA, 25 bp, Homo sapien
agaactgggtccacagtattatgtc

SEQ ID NO: 5375728 - DNA, 25 bp, Homo sapien
tgcttgccttaaaaagaactgggtc

SEQ ID NO: 5375729 - DNA, 25 bp, Homo sapien
cagtcttccagggtgcttgccttaa

SEQ ID NO: 5375730 - DNA, 25 bp, Homo sapien
tcagacggctaaggcccaggtacag

SEQ ID NO: 5375731 - DNA, 25 bp, Homo sapien
tgcggtttgtcaggagtataagaac

SEQ ID NO: 5375732 - DNA, 25 bp, Homo sapien
tagtggccaccaggcttgcggtttg

SEQ ID NO: 5375733 - DNA, 25 bp, Homo sapien
ttggcatcgcgcagaggcaggtcca

SEQ ID NO: 5375734 - DNA, 25 bp, Homo sapien
tcctgtctgtagaacgcagagtcct

SEQ ID NO: 5375735 - DNA, 25 bp, Homo sapien
tgctgagtgcagagtcctgtctgta

SEQ ID NO: 5375736 - DNA, 25 bp, Homo sapien
tgactgcaaaggactctgttgaggc

SEQ ID NO: 5375737 - DNA, 25 bp, Homo sapien
gaacgcagagtcctgtgttcactgt

SEQ ID NO: 5375738 - DNA, 25 bp, Homo sapien
ggtccatgagcctcgtcagggcctg

SEQ ID NO: 5375739 - DNA, 25 bp, Homo sapien
ctaaaggtccatgagcctcgtcagg

SEQ ID NO: 5375740 - DNA, 25 bp, Homo sapien
aaaggtccatgagcctcgtcagggc

SEQ ID NO: 5375741 - DNA, 25 bp, Homo sapien
aggtccatgagcctcgtcagggcct

SEQ ID NO: 5375742 - DNA, 25 bp, Homo sapien
ggaaggaagtaggaacaggccacac

SEQ ID NO: 5375743 - DNA, 25 bp, Homo sapien
ggagagtgggaaggaagtaggaaca

SEQ ID NO: 5375744 - DNA, 25 bp, Homo sapien
ggaagtaggaacaggccacactcca

SEQ ID NO: 5375745 - DNA, 25 bp, Homo sapien
ctccaggtcctcagctcactcctac

SEQ ID NO: 5375746 - DNA, 25 bp, Homo sapien
cctctgctcttcagctgtgatctgg

SEQ ID NO: 5375747 - DNA, 25 bp, Homo sapien
tttcacatgctgagcttccatgtcg

SEQ ID NO: 5375748 - DNA, 25 bp, Homo sapien
gctgtgatctggacagttggccctc

SEQ ID NO: 5375749 - DNA, 25 bp, Homo sapien
gctgagcttccatgtcggcttccat

SEQ ID NO: 5375750 - DNA, 25 bp, Homo sapien
aaggacatcagatttaggctttacc

SEQ ID NO: 5375751 - DNA, 25 bp, Homo sapien
ctgagaaaggacatcagatttaggc

SEQ ID NO: 5375752 - DNA, 25 bp, Homo sapien
gagaaaggacatcagatttaggctt

SEQ ID NO: 5375753 - DNA, 25 bp, Homo sapien
gaaaggacatcagatttaggcttta

SEQ ID NO: 5375754 - DNA, 25 bp, Homo sapien
gatgtcaggaaggcgtgtcaagctg

SEQ ID NO: 5375755 - DNA, 25 bp, Homo sapien
gaaggcgtgtcaagctgaaagcagg

SEQ ID NO: 5375756 - DNA, 25 bp, Homo sapien
ggaaggcgtgtcaagctgaaagcag

SEQ ID NO: 5375757 - DNA, 25 bp, Homo sapien
atgtcaggaaggcgtgtcaagctga

SEQ ID NO: 5375758 - DNA, 25 bp, Homo sapien
tcagttgcccttccagacttgtcct

SEQ ID NO: 5375759 - DNA, 25 bp, Homo sapien
tccagctctcactggttctgctggt

SEQ ID NO: 5375760 - DNA, 25 bp, Homo sapien
gcccttccagacttgtcctcagaag

SEQ ID NO: 5375761 - DNA, 25 bp, Homo sapien
atttgggaagcatgatgtcacctcc

SEQ ID NO: 5375762 - DNA, 25 bp, Homo sapien
tctgagagccagaggcatccacaag

SEQ ID NO: 5375763 - DNA, 25 bp, Homo sapien
ttgtgacttattacaagtactgcca

SEQ ID NO: 5375764 - DNA, 25 bp, Homo sapien
ttctcctctgctcaaatgtggcttt

SEQ ID NO: 5375765 - DNA, 25 bp, Homo sapien
ggctccgagcaccaagtcctctggt

SEQ ID NO: 5375766 - DNA, 25 bp, Homo sapien
cccagtgctcagggactgtcttttg

SEQ ID NO: 5375767 - DNA, 25 bp, Homo sapien
ccagtgctcagggactgtcttttgt

SEQ ID NO: 5375768 - DNA, 25 bp, Homo sapien
cagtgctcagggactgtcttttgtg

SEQ ID NO: 5375769 - DNA, 25 bp, Homo sapien
gtgctcagggactgtcttttgtgtc

SEQ ID NO: 5375770 - DNA, 25 bp, Homo sapien
atacattctacaatttgtccctggg

SEQ ID NO: 5375771 - DNA, 25 bp, Homo sapien
cagccattatgggacctccatacat

SEQ ID NO: 5375772 - DNA, 25 bp, Homo sapien
ctggaagtcagccattatgggacct

SEQ ID NO: 5375773 - DNA, 25 bp, Homo sapien
cctccatacattctacaatttgtcc

SEQ ID NO: 5375774 - DNA, 25 bp, Homo sapien
ggtgactcgggcagccagatgaccc

SEQ ID NO: 5375775 - DNA, 25 bp, Homo sapien
gcagccagatgacccgtaggccctg

SEQ ID NO: 5375776 - DNA, 25 bp, Homo sapien
agatgacccgtaggccctgtgtccc

SEQ ID NO: 5375777 - DNA, 25 bp, Homo sapien
tcgggcagccagatgacccgtaggc

SEQ ID NO: 5375778 - DNA, 25 bp, Homo sapien
taaatcacaccatgacatctactgg

SEQ ID NO: 5375779 - DNA, 25 bp, Homo sapien
catctactgggcttgtccaacgcta

SEQ ID NO: 5375780 - DNA, 25 bp, Homo sapien
gagtcttaagttgtaggcagcacca

SEQ ID NO: 5375781 - DNA, 25 bp, Homo sapien
cataagtggactcttaagtcgagtc

SEQ ID NO: 5375782 - DNA, 25 bp, Homo sapien
ctgagatctttcaaaacctgagaat

SEQ ID NO: 5375783 - DNA, 25 bp, Homo sapien
cagtgaatacaagagtcccagcact

SEQ ID NO: 5375784 - DNA, 25 bp, Homo sapien
gatctttcaaaacctgagaatacac

SEQ ID NO: 5375785 - DNA, 25 bp, Homo sapien
caactagggtgagtgttaatttgcc

SEQ ID NO: 5375786 - DNA, 25 bp, Homo sapien
gaagattccgtcctccttataatgt

SEQ ID NO: 5375787 - DNA, 25 bp, Homo sapien
gagcagcacttcaccggctgggaga

SEQ ID NO: 5375788 - DNA, 25 bp, Homo sapien
gccattaaagcaaagcgaaaacgtg

SEQ ID NO: 5375789 - DNA, 25 bp, Homo sapien
caggaccacccttaggaagatcatt

SEQ ID NO: 5375790 - DNA, 25 bp, Homo sapien
tggaatggatttgagccagaaccga

SEQ ID NO: 5375791 - DNA, 25 bp, Homo sapien
gaaccgattggcctgagcattcctg

SEQ ID NO: 5375792 - DNA, 25 bp, Homo sapien
gatcattctcgcgaggtctggtgca

SEQ ID NO: 5375793 - DNA, 25 bp, Homo sapien
gataatgagggcaggatgaaaacca

SEQ ID NO: 5375794 - DNA, 25 bp, Homo sapien
ccagaattggaggagctggtcaaac

SEQ ID NO: 5375795 - DNA, 25 bp, Homo sapien
tctttctccaaagagctaggctccc

SEQ ID NO: 5375796 - DNA, 25 bp, Homo sapien
taggctcccaggacatagtgaggac

SEQ ID NO: 5375797 - DNA, 25 bp, Homo sapien
gaagaagaacccattgcctgattcc

SEQ ID NO: 5375798 - DNA, 25 bp, Homo sapien
cagctaccttaacaatgcctggcag

SEQ ID NO: 5375799 - DNA, 25 bp, Homo sapien
tgcctggcagctgtcagaaaggcaa

SEQ ID NO: 5375800 - DNA, 25 bp, Homo sapien
cacaaaagtgtggaaaccctgactc

SEQ ID NO: 5375801 - DNA, 25 bp, Homo sapien
tcaaagccaggttcagcctcaggct

SEQ ID NO: 5375802 - DNA, 25 bp, Homo sapien
aaagccaggttcagcctcaggctca

SEQ ID NO: 5375803 - DNA, 25 bp, Homo sapien
agtcaaagccaggttcagcctcagg

SEQ ID NO: 5375804 - DNA, 25 bp, Homo sapien
gtcaaagccaggttcagcctcaggc

SEQ ID NO: 5375805 - DNA, 25 bp, Homo sapien
agctcttctccaggccactcagctt

SEQ ID NO: 5375806 - DNA, 25 bp, Homo sapien
aaggctcagtaacaaatccagcagg

SEQ ID NO: 5375807 - DNA, 25 bp, Homo sapien
gctcttctccaggccactcagcttc

SEQ ID NO: 5375808 - DNA, 25 bp, Homo sapien
aggctcagtaacaaatccagcaggt

SEQ ID NO: 5375809 - DNA, 25 bp, Homo sapien
aggcagaattaagcagatcagcgtc

SEQ ID NO: 5375810 - DNA, 25 bp, Homo sapien
gaggcagaattaagcagatcagcgt

SEQ ID NO: 5375811 - DNA, 25 bp, Homo sapien
cccatcagcccctagtctcctgcat

SEQ ID NO: 5375812 - DNA, 25 bp, Homo sapien
tcagcccctagtctcctgcatggag

SEQ ID NO: 5375813 - DNA, 25 bp, Homo sapien
gaagggaaaacagaagcggtgagga

SEQ ID NO: 5375814 - DNA, 25 bp, Homo sapien
aaacagaagcggtgaggagaaacgt

SEQ ID NO: 5375815 - DNA, 25 bp, Homo sapien
ctgagggtgactaagcccgagatga

SEQ ID NO: 5375816 - DNA, 25 bp, Homo sapien
ttgctgtcctcgtgaaacctcgctc

SEQ ID NO: 5375817 - DNA, 25 bp, Homo sapien
gaagcccttcctgcaagccttacag

SEQ ID NO: 5375818 - DNA, 25 bp, Homo sapien
taaagggacctgcatggaagcaaac

SEQ ID NO: 5375819 - DNA, 25 bp, Homo sapien
actgcgcttcctagtctgttttgca

SEQ ID NO: 5375820 - DNA, 25 bp, Homo sapien
taaagtcttcgtaatgaggctcccc

SEQ ID NO: 5375821 - DNA, 25 bp, Homo sapien
tggcaagtttagctctgtatgctcc

SEQ ID NO: 5375822 - DNA, 25 bp, Homo sapien
tgcaagcttaataaagtcttcgtaa

SEQ ID NO: 5375823 - DNA, 25 bp, Homo sapien
ctggtcactctcaggaaatgaggtt

SEQ ID NO: 5375824 - DNA, 25 bp, Homo sapien
aaggctggcaaaggcgtcatccact

SEQ ID NO: 5375825 - DNA, 25 bp, Homo sapien
tggcaaaggcgtcatccactcaggg

SEQ ID NO: 5375826 - DNA, 25 bp, Homo sapien
cgtcatccactcaggggtggccaca

SEQ ID NO: 5375827 - DNA, 25 bp, Homo sapien
gtagcaaaattagtgcctccggaga

SEQ ID NO: 5375828 - DNA, 25 bp, Homo sapien
gggaagctgcaagggtagtacctat

SEQ ID NO: 5375829 - DNA, 25 bp, Homo sapien
gatgcggttcatggtatcctctggg

SEQ ID NO: 5375830 - DNA, 25 bp, Homo sapien
agtagcctacgtgttgggaagctgc

SEQ ID NO: 5375831 - DNA, 25 bp, Homo sapien
gccagggttacagtggcctcatgag

SEQ ID NO: 5375832 - DNA, 25 bp, Homo sapien
cgagtgacgtcagggcctggtcaca

SEQ ID NO: 5375833 - DNA, 25 bp, Homo sapien
atgagacaggaccaggatccctcca

SEQ ID NO: 5375834 - DNA, 25 bp, Homo sapien
tttggtaggcgagtgacgtcagggc

SEQ ID NO: 5375835 - DNA, 25 bp, Homo sapien
tgcagccccgaagggtagggaagga

SEQ ID NO: 5375836 - DNA, 25 bp, Homo sapien
gcatcgtgaaggaaaaactctaaaa

SEQ ID NO: 5375837 - DNA, 25 bp, Homo sapien
tggattgacatagactgcagccccg

SEQ ID NO: 5375838 - DNA, 25 bp, Homo sapien
ccaagatctgagcatcgtgaaggaa

SEQ ID NO: 5375839 - DNA, 25 bp, Homo sapien
ccccatccttgaagccacccctcca

SEQ ID NO: 5375840 - DNA, 25 bp, Homo sapien
tccaatcccttcagacctcctacga

SEQ ID NO: 5375841 - DNA, 25 bp, Homo sapien
aatcccttcagacctcctacgatca

SEQ ID NO: 5375842 - DNA, 25 bp, Homo sapien
cctccaatcccttcagacctcctac

SEQ ID NO: 5375843 - DNA, 25 bp, Homo sapien
tggaatcccgtattgaagttgcgtt

SEQ ID NO: 5375844 - DNA, 25 bp, Homo sapien
ctcctgggtttcagttggaatctgg

SEQ ID NO: 5375845 - DNA, 25 bp, Homo sapien
tggaatctggaatcccgtattgaag

SEQ ID NO: 5375846 - DNA, 25 bp, Homo sapien
ttgcgttttacgtttttcttgcatc

SEQ ID NO: 5375847 - DNA, 25 bp, Homo sapien
gtgtgcggccttcggctttcggcca

SEQ ID NO: 5375848 - DNA, 25 bp, Homo sapien
cggctttcggccattctagggttga

SEQ ID NO: 5375849 - DNA, 25 bp, Homo sapien
gtttcagattccagggtgtgcggcc

SEQ ID NO: 5375850 - DNA, 25 bp, Homo sapien
attccagggtgtgcggccttcggct

SEQ ID NO: 5375851 - DNA, 25 bp, Homo sapien
ggaaatccatatgccgccctagcaa

SEQ ID NO: 5375852 - DNA, 25 bp, Homo sapien
aaaaagtggctctccgctgatctcg

SEQ ID NO: 5375853 - DNA, 25 bp, Homo sapien
tgatctcgaatgcaccagcgagcct

SEQ ID NO: 5375854 - DNA, 25 bp, Homo sapien
gagggttctccaatcgcagcaaagg

SEQ ID NO: 5375855 - DNA, 25 bp, Homo sapien
tccaaaggacctggccaacggcgga

SEQ ID NO: 5375856 - DNA, 25 bp, Homo sapien
ggacctggccaacggcggacaacca

SEQ ID NO: 5375857 - DNA, 25 bp, Homo sapien
tgttttcaattaacgagggaatata

SEQ ID NO: 5375858 - DNA, 25 bp, Homo sapien
taacgagggaatataagcaatgcag

SEQ ID NO: 5375859 - DNA, 25 bp, Homo sapien
aggcacattaaggaaagtgccgcat

SEQ ID NO: 5375860 - DNA, 25 bp, Homo sapien
tggtcacagaaatgtcatgattata

SEQ ID NO: 5375861 - DNA, 25 bp, Homo sapien
agctcagcattcctgcccgtcaccc

SEQ ID NO: 5375862 - DNA, 25 bp, Homo sapien
cattaaggaaagtgccgcatcaggg

SEQ ID NO: 5375863 - DNA, 25 bp, Homo sapien
ccaaagccacttcccaataaactgc

SEQ ID NO: 5375864 - DNA, 25 bp, Homo sapien
ctctggtcccactttccaactaaat

SEQ ID NO: 5375865 - DNA, 25 bp, Homo sapien
tctggtcccactttccaactaaatg

SEQ ID NO: 5375866 - DNA, 25 bp, Homo sapien
caataaactgccaacttaagcaaaa

SEQ ID NO: 5375867 - DNA, 25 bp, Homo sapien
aaaagtcgcgcactacctgcgggaa

SEQ ID NO: 5375868 - DNA, 25 bp, Homo sapien
tggtgggccaaatcccatctccggg

SEQ ID NO: 5375869 - DNA, 25 bp, Homo sapien
tgagcagtctcaatggaggcccgag

SEQ ID NO: 5375870 - DNA, 25 bp, Homo sapien
cttgacttgctaggattggtgggcc

SEQ ID NO: 5375871 - DNA, 25 bp, Homo sapien
caagtcaacactcgacttgtcactt

SEQ ID NO: 5375872 - DNA, 25 bp, Homo sapien
actttgcaccacaatgcggtcagcc

SEQ ID NO: 5375873 - DNA, 25 bp, Homo sapien
tcgcagtccccaagtcaacactcga

SEQ ID NO: 5375874 - DNA, 25 bp, Homo sapien
tcactttgcaccacaatgcggtcag

SEQ ID NO: 5375875 - DNA, 25 bp, Homo sapien
cacttgggcggacctgaagttaaga

SEQ ID NO: 5375876 - DNA, 25 bp, Homo sapien
cggggtgaaggccagagctcaatct

SEQ ID NO: 5375877 - DNA, 25 bp, Homo sapien
ggcacttgggcggacctgaagttaa

SEQ ID NO: 5375878 - DNA, 25 bp, Homo sapien
tccctactcccgacagagctgtgag

SEQ ID NO: 5375879 - DNA, 25 bp, Homo sapien
tctctcacaggaggctcccgcccct

SEQ ID NO: 5375880 - DNA, 25 bp, Homo sapien
ggtctcgctgcaggaaatggttgct

SEQ ID NO: 5375881 - DNA, 25 bp, Homo sapien
tgcagtagtcgtggttgaatcagaa

SEQ ID NO: 5375882 - DNA, 25 bp, Homo sapien
tggttgctgtcagggcccgattgct

SEQ ID NO: 5375883 - DNA, 25 bp, Homo sapien
tgtgccagaaccttctacacaggca

SEQ ID NO: 5375884 - DNA, 25 bp, Homo sapien
ctccggtcccaagagctacagctgg

SEQ ID NO: 5375885 - DNA, 25 bp, Homo sapien
ggacaccagtatgtgtattcctggc

SEQ ID NO: 5375886 - DNA, 25 bp, Homo sapien
tattcctggctcatgtatagttgtg

SEQ ID NO: 5375887 - DNA, 25 bp, Homo sapien
ggtgggcagacacgaaaggaaacac

SEQ ID NO: 5375888 - DNA, 25 bp, Homo sapien
tccagcaaatagagatcgctacacg

SEQ ID NO: 5375889 - DNA, 25 bp, Homo sapien
gagttcgcagtttcgtcccttatac

SEQ ID NO: 5375890 - DNA, 25 bp, Homo sapien
tctcaacaagtctccggaaaacgaa

SEQ ID NO: 5375891 - DNA, 25 bp, Homo sapien
cctggaactccgccttgagtctctg

SEQ ID NO: 5375892 - DNA, 25 bp, Homo sapien
tgaacgcggtccgcggccgcttgtc

SEQ ID NO: 5375893 - DNA, 25 bp, Homo sapien
cgtgatgtagcggtttgcctggaac

SEQ ID NO: 5375894 - DNA, 25 bp, Homo sapien
tgctcggccgtgaacgcggtccgcg

SEQ ID NO: 5375895 - DNA, 25 bp, Homo sapien
gagaaaaggccctgatccatcctca

SEQ ID NO: 5375896 - DNA, 25 bp, Homo sapien
tagggtctcagggatgcagggacca

SEQ ID NO: 5375897 - DNA, 25 bp, Homo sapien
agaaaaggccctgatccatcctcat

SEQ ID NO: 5375898 - DNA, 25 bp, Homo sapien
tgccaataagaaagggagggccttc

SEQ ID NO: 5375899 - DNA, 25 bp, Homo sapien
aaaacaagccggattggctttctct

SEQ ID NO: 5375900 - DNA, 25 bp, Homo sapien
tatctcccctttcaactgatgcaat

SEQ ID NO: 5375901 - DNA, 25 bp, Homo sapien
ctgcgtggggcagggtctctcttat

SEQ ID NO: 5375902 - DNA, 25 bp, Homo sapien
gattggctttctctgcctactgatg

SEQ ID NO: 5375903 - DNA, 25 bp, Homo sapien
gagggaagcagggacaatccagaaa

SEQ ID NO: 5375904 - DNA, 25 bp, Homo sapien
gggagggaagcagggacaatccaga

SEQ ID NO: 5375905 - DNA, 25 bp, Homo sapien
agggagggaagcagggacaatccag

SEQ ID NO: 5375906 - DNA, 25 bp, Homo sapien
gggaagcagggacaatccagaaaaa

SEQ ID NO: 5375907 - DNA, 25 bp, Homo sapien
gcttccacacccaagtcttctggca

SEQ ID NO: 5375908 - DNA, 25 bp, Homo sapien
ctgcttccacacccaagtcttctgg

SEQ ID NO: 5375909 - DNA, 25 bp, Homo sapien
cacacccaagtcttctggcatttac

SEQ ID NO: 5375910 - DNA, 25 bp, Homo sapien
gcccacctgcttccacacccaagtc

SEQ ID NO: 5375911 - DNA, 25 bp, Homo sapien
gcctgttcatctctaaaactgtctg

SEQ ID NO: 5375912 - DNA, 25 bp, Homo sapien
gaaagaaggatctttgccggcatct

SEQ ID NO: 5375913 - DNA, 25 bp, Homo sapien
tcctgccttggatatggtagcttgc

SEQ ID NO: 5375914 - DNA, 25 bp, Homo sapien
tgaaccaagttaagtccctgtcagg

SEQ ID NO: 5375915 - DNA, 25 bp, Homo sapien
cccaactgcccaagcaggagaagga

SEQ ID NO: 5375916 - DNA, 25 bp, Homo sapien
gatctgggtcgaggctcatcccctc

SEQ ID NO: 5375917 - DNA, 25 bp, Homo sapien
tgcagcgactcagatctgggtcgag

SEQ ID NO: 5375918 - DNA, 25 bp, Homo sapien
cccccaactgcccaagcaggagaag

SEQ ID NO: 5375919 - DNA, 25 bp, Homo sapien
ccaggcccataagaaggaaagtggc

SEQ ID NO: 5375920 - DNA, 25 bp, Homo sapien
cagaactggggttttgattcgtaat

SEQ ID NO: 5375921 - DNA, 25 bp, Homo sapien
gcagaactggggttttgattcgtaa

SEQ ID NO: 5375922 - DNA, 25 bp, Homo sapien
agcagaactggggttttgattcgta

SEQ ID NO: 5375923 - DNA, 25 bp, Homo sapien
gagagggacggctttcagacgcttt

SEQ ID NO: 5375924 - DNA, 25 bp, Homo sapien
cagaaaatatcgagatggtgtttgt

SEQ ID NO: 5375925 - DNA, 25 bp, Homo sapien
cggtctctccgcagaaaatatcgag

SEQ ID NO: 5375926 - DNA, 25 bp, Homo sapien
gtttatcaatgtaaacggtctctcc

SEQ ID NO: 5375927 - DNA, 25 bp, Homo sapien
gggattcagagttcaaaatcaaaga

SEQ ID NO: 5375928 - DNA, 25 bp, Homo sapien
cctaagaataataaagataagagac

SEQ ID NO: 5375929 - DNA, 25 bp, Homo sapien
gagttcaaaatcaaagaatcgagac

SEQ ID NO: 5375930 - DNA, 25 bp, Homo sapien
gaaggccccagggattcagagttca

SEQ ID NO: 5375931 - DNA, 25 bp, Homo sapien
gtagcttctcgggtggtggccgcag

SEQ ID NO: 5375932 - DNA, 25 bp, Homo sapien
cgcagaggccaggatcgcatagctg

SEQ ID NO: 5375933 - DNA, 25 bp, Homo sapien
cctgtgccacgagctgtagcttctc

SEQ ID NO: 5375934 - DNA, 25 bp, Homo sapien
gatgaacattcggttgtgactggaa

SEQ ID NO: 5375935 - DNA, 25 bp, Homo sapien
tgctccgggtatttggtgccctgcg

SEQ ID NO: 5375936 - DNA, 25 bp, Homo sapien
gaataacgtgtgcagtacacccagg

SEQ ID NO: 5375937 - DNA, 25 bp, Homo sapien
cataagtaggatagccgggttgccg

SEQ ID NO: 5375938 - DNA, 25 bp, Homo sapien
tgcgagtcagttttgaccacgggcc

SEQ ID NO: 5375939 - DNA, 25 bp, Homo sapien
tgccgccgccaccggtgtccgaggg

SEQ ID NO: 5375940 - DNA, 25 bp, Homo sapien
ctgccgccgccaccggtgtccgagg

SEQ ID NO: 5375941 - DNA, 25 bp, Homo sapien
tcgggtgggccacagttcgcgtccg

SEQ ID NO: 5375942 - DNA, 25 bp, Homo sapien
agccgggttcccagctttagacgcg

SEQ ID NO: 5375943 - DNA, 25 bp, Homo sapien
gggcgcacaggagcgaggcagcgcc

SEQ ID NO: 5375944 - DNA, 25 bp, Homo sapien
tgcccaacgggtggacagggtctct

SEQ ID NO: 5375945 - DNA, 25 bp, Homo sapien
ctgcggcagtctggcctctgtcacg

SEQ ID NO: 5375946 - DNA, 25 bp, Homo sapien
gccaccagaagctgcggtggcggct

SEQ ID NO: 5375947 - DNA, 25 bp, Homo sapien
ctcaggatgttgtcgatgaaaaagt

SEQ ID NO: 5375948 - DNA, 25 bp, Homo sapien
tgttgtcgatgaaaaagttggtggt

SEQ ID NO: 5375949 - DNA, 25 bp, Homo sapien
gatgttgtcgatgaaaaagttggtg

SEQ ID NO: 5375950 - DNA, 25 bp, Homo sapien
tgaaaaagttggtggtgcggtgcag

SEQ ID NO: 5375951 - DNA, 25 bp, Homo sapien
tggtgagcaggcgccgcgagatgct

SEQ ID NO: 5375952 - DNA, 25 bp, Homo sapien
cggcaggcaaggcgccgcgggcggc

SEQ ID NO: 5375953 - DNA, 25 bp, Homo sapien
agcaggcgccgcgagatgctgaggc

SEQ ID NO: 5375954 - DNA, 25 bp, Homo sapien
caggcgccgcgagatgctgaggcgg

SEQ ID NO: 5375955 - DNA, 25 bp, Homo sapien
gcgcccggactgaggctcaggctga

SEQ ID NO: 5375956 - DNA, 25 bp, Homo sapien
ggcacgctgtctccatcgctgccgc

SEQ ID NO: 5375957 - DNA, 25 bp, Homo sapien
gcgccgagggccgagtcgcgctgac

SEQ ID NO: 5375958 - DNA, 25 bp, Homo sapien
ctcaggctgaggccgcccggagtcg

SEQ ID NO: 5375959 - DNA, 25 bp, Homo sapien
ttttaggttccggctgctgttcttc

SEQ ID NO: 5375960 - DNA, 25 bp, Homo sapien
gacatccagatatggagacacttgg

SEQ ID NO: 5375961 - DNA, 25 bp, Homo sapien
cgcgcgcgggactttgcggataaat

SEQ ID NO: 5375962 - DNA, 25 bp, Homo sapien
tcaaaccggaagcacgtgagtcagg

SEQ ID NO: 5375963 - DNA, 25 bp, Homo sapien
tctgacagctcggatctttgcacaa

SEQ ID NO: 5375964 - DNA, 25 bp, Homo sapien
gacttgtctccggattcgttttgga

SEQ ID NO: 5375965 - DNA, 25 bp, Homo sapien
tcgttttggaggaccagtatccgac

SEQ ID NO: 5375966 - DNA, 25 bp, Homo sapien
tcatcttagagctccagcggacctc

SEQ ID NO: 5375967 - DNA, 25 bp, Homo sapien
aggcgtcagcaaacgaggccttcgg

SEQ ID NO: 5375968 - DNA, 25 bp, Homo sapien
cgctcggtaccccgcgccgctctgc

SEQ ID NO: 5375969 - DNA, 25 bp, Homo sapien
cggacgctcggtaccccgcgccgct

SEQ ID NO: 5375970 - DNA, 25 bp, Homo sapien
acgctcggtaccccgcgccgctctg

SEQ ID NO: 5375971 - DNA, 25 bp, Homo sapien
ggacgctcggtaccccgcgccgctc

SEQ ID NO: 5375972 - DNA, 25 bp, Homo sapien
ttttgttctagaaatagtgcctctc

SEQ ID NO: 5375973 - DNA, 25 bp, Homo sapien
tctctctctcaagctcagacaaact

SEQ ID NO: 5375974 - DNA, 25 bp, Homo sapien
tcacagcatggaccgttttgttcta

SEQ ID NO: 5375975 - DNA, 25 bp, Homo sapien
tctctcaagctcagacaaactgaga

SEQ ID NO: 5375976 - DNA, 25 bp, Homo sapien
cctcggaatttcaaacctcgctggg

SEQ ID NO: 5375977 - DNA, 25 bp, Homo sapien
cgcgggaaacggtggaaagatatca

SEQ ID NO: 5375978 - DNA, 25 bp, Homo sapien
tttctgtacattgcacccggtggcc

SEQ ID NO: 5375979 - DNA, 25 bp, Homo sapien
tcggattacgggaagaggagccttc

SEQ ID NO: 5375980 - DNA, 25 bp, Homo sapien
ttggcgcgttcggtgtccacacaga

SEQ ID NO: 5375981 - DNA, 25 bp, Homo sapien
tctccaggaggtctgaacccgactt

SEQ ID NO: 5375982 - DNA, 25 bp, Homo sapien
tcaaagctgggaacggaaaacgcca

SEQ ID NO: 5375983 - DNA, 25 bp, Homo sapien
tccacacagactggccttgggcttg

SEQ ID NO: 5375984 - DNA, 25 bp, Homo sapien
gcgtgtccacgtgaatagtctccat

SEQ ID NO: 5375985 - DNA, 25 bp, Homo sapien
ggtgcaagaaaagctccgggttcca

SEQ ID NO: 5375986 - DNA, 25 bp, Homo sapien
cggaaagtctcaagagcctgggagc

SEQ ID NO: 5375987 - DNA, 25 bp, Homo sapien
tgcccgagtgtgcacgcaaaaattg

SEQ ID NO: 5375988 - DNA, 25 bp, Homo sapien
tccctgagaagcgaaactgcccttg

SEQ ID NO: 5375989 - DNA, 25 bp, Homo sapien
gggaggctacagtccagcaagctct

SEQ ID NO: 5375990 - DNA, 25 bp, Homo sapien
ggaggtctcgcatagcattccctga

SEQ ID NO: 5375991 - DNA, 25 bp, Homo sapien
tgccacatcgaactggagaccctct

SEQ ID NO: 5375992 - DNA, 25 bp, Homo sapien
ggacaggagttataaccttccctgc

SEQ ID NO: 5375993 - DNA, 25 bp, Homo sapien
tccccagctcgtaggaagccagatg

SEQ ID NO: 5375994 - DNA, 25 bp, Homo sapien
agttccctcaggagacgctccaagt

SEQ ID NO: 5375995 - DNA, 25 bp, Homo sapien
caagcgggaaacgaagcaccgaata

SEQ ID NO: 5375996 - DNA, 25 bp, Homo sapien
gggtggacatctcagggtcccgggc

SEQ ID NO: 5375997 - DNA, 25 bp, Homo sapien
tgagctcctggggtggacatctcag

SEQ ID NO: 5375998 - DNA, 25 bp, Homo sapien
gtggacatctcagggtcccgggcct

SEQ ID NO: 5375999 - DNA, 25 bp, Homo sapien
cctggggtggacatctcagggtccc

SEQ ID NO: 5376000 - DNA, 25 bp, Homo sapien
gaggcagtcgcctctccgggtcgct

SEQ ID NO: 5376001 - DNA, 25 bp, Homo sapien
cggactccggcagcctgttggcctt

SEQ ID NO: 5376002 - DNA, 25 bp, Homo sapien
ctgggcccctggctcgcaaggaaga

SEQ ID NO: 5376003 - DNA, 25 bp, Homo sapien
tcctgtcaccacctcgcatggagca

SEQ ID NO: 5376004 - DNA, 25 bp, Homo sapien
tctgattcccgaacctgcagctggt

SEQ ID NO: 5376005 - DNA, 25 bp, Homo sapien
tgcactggaggggtttccgttggtc

SEQ ID NO: 5376006 - DNA, 25 bp, Homo sapien
ctgattcccgaacctgcagctggtg

SEQ ID NO: 5376007 - DNA, 25 bp, Homo sapien
cctctgattcccgaacctgcagctg

SEQ ID NO: 5376008 - DNA, 25 bp, Homo sapien
ctgcagcgcagcacctgagacttca

SEQ ID NO: 5376009 - DNA, 25 bp, Homo sapien
gtagtcttccgggaccctagctgcc

SEQ ID NO: 5376010 - DNA, 25 bp, Homo sapien
cagcgcagcacctgagacttcagtt

SEQ ID NO: 5376011 - DNA, 25 bp, Homo sapien
gagagaagcgggttgtcccgggctg

SEQ ID NO: 5376012 - DNA, 25 bp, Homo sapien
tcttggggactcctttgccaccctg

SEQ ID NO: 5376013 - DNA, 25 bp, Homo sapien
gcagtgttcgactgggggacccaaa

SEQ ID NO: 5376014 - DNA, 25 bp, Homo sapien
gactgcttgcccactccattgagag

SEQ ID NO: 5376015 - DNA, 25 bp, Homo sapien
gggactcctttgccaccctgactgt

SEQ ID NO: 5376016 - DNA, 25 bp, Homo sapien
agactataaagagtaagctccctgt

SEQ ID NO: 5376017 - DNA, 25 bp, Homo sapien
tataaagagtaagctccctgtcatc

SEQ ID NO: 5376018 - DNA, 25 bp, Homo sapien
ctgagtgcagtgaagaaagactata

SEQ ID NO: 5376019 - DNA, 25 bp, Homo sapien
agagtaagctccctgtcatcagagg

SEQ ID NO: 5376020 - DNA, 25 bp, Homo sapien
atgattttcaacatcagggggctca

SEQ ID NO: 5376021 - DNA, 25 bp, Homo sapien
gctcagatgactcccaatccttatt

SEQ ID NO: 5376022 - DNA, 25 bp, Homo sapien
agaacgggcaggcttaagctgtcct

SEQ ID NO: 5376023 - DNA, 25 bp, Homo sapien
ggtatctgtagttccatgctggctg

SEQ ID NO: 5376024 - DNA, 25 bp, Homo sapien
gcttctattctgatgtagagagcct

SEQ ID NO: 5376025 - DNA, 25 bp, Homo sapien
ttcgacaggatgtttaggaagtgag

SEQ ID NO: 5376026 - DNA, 25 bp, Homo sapien
ctctttggcactggtgtggggtctg

SEQ ID NO: 5376027 - DNA, 25 bp, Homo sapien
ggctctttggcactggtgtggggtc

SEQ ID NO: 5376028 - DNA, 25 bp, Homo sapien
caaggggccgagtttatatcagaag

SEQ ID NO: 5376029 - DNA, 25 bp, Homo sapien
caggtcccacaatagcacaaggggc

SEQ ID NO: 5376030 - DNA, 25 bp, Homo sapien
ccacaatagcacaaggggccgagtt

SEQ ID NO: 5376031 - DNA, 25 bp, Homo sapien
tttatatcagaagtccatagagtaa

SEQ ID NO: 5376032 - DNA, 25 bp, Homo sapien
tctggactttgacagtccttccagg

SEQ ID NO: 5376033 - DNA, 25 bp, Homo sapien
gactttgacagtccttccaggcatc

SEQ ID NO: 5376034 - DNA, 25 bp, Homo sapien
ggcaacttctccgtgaagtaggact

SEQ ID NO: 5376035 - DNA, 25 bp, Homo sapien
ttctccgtgaagtaggactctggac

SEQ ID NO: 5376036 - DNA, 25 bp, Homo sapien
agtggcaagggtgagctgggactaa

SEQ ID NO: 5376037 - DNA, 25 bp, Homo sapien
agagtggcaagggtgagctgggact

SEQ ID NO: 5376038 - DNA, 25 bp, Homo sapien
gttgctgctgtttaagagtggcaag

SEQ ID NO: 5376039 - DNA, 25 bp, Homo sapien
tggcaagggtgagctgggactaaag

SEQ ID NO: 5376040 - DNA, 25 bp, Homo sapien
ctgccaacttctggttggacttcat

SEQ ID NO: 5376041 - DNA, 25 bp, Homo sapien
tgccaacttctggttggacttcatc

SEQ ID NO: 5376042 - DNA, 25 bp, Homo sapien
gctgccaacttctggttggacttca

SEQ ID NO: 5376043 - DNA, 25 bp, Homo sapien
gccatacagattgtctgctggtgtg

SEQ ID NO: 5376044 - DNA, 25 bp, Homo sapien
ccactacagttgtggactgggcctc

SEQ ID NO: 5376045 - DNA, 25 bp, Homo sapien
ttgactggacccacacaaagccttc

SEQ ID NO: 5376046 - DNA, 25 bp, Homo sapien
tgtttctctggcagtggtgcattga

SEQ ID NO: 5376047 - DNA, 25 bp, Homo sapien
gcagggtagctgctcaacaggttga

SEQ ID NO: 5376048 - DNA, 25 bp, Homo sapien
ctgtagagaaggtcccagcctgtgt

SEQ ID NO: 5376049 - DNA, 25 bp, Homo sapien
ttcttttgtaaatggccgcagggta

SEQ ID NO: 5376050 - DNA, 25 bp, Homo sapien
aataggtgcacctgagctggaccgg

SEQ ID NO: 5376051 - DNA, 25 bp, Homo sapien
ctcctggttgctttctctaagcctc

SEQ ID NO: 5376052 - DNA, 25 bp, Homo sapien
agagagaggcgtttgctcctggttg

SEQ ID NO: 5376053 - DNA, 25 bp, Homo sapien
ttctgagacccaagcgggactgttt

SEQ ID NO: 5376054 - DNA, 25 bp, Homo sapien
atccggtgtagccataagggaagac

SEQ ID NO: 5376055 - DNA, 25 bp, Homo sapien
gacccaagcgggactgttttcagct

SEQ ID NO: 5376056 - DNA, 25 bp, Homo sapien
catgacattcatgaacatcatccgg

SEQ ID NO: 5376057 - DNA, 25 bp, Homo sapien
cgtttcatcaaagggctctctagcc

SEQ ID NO: 5376058 - DNA, 25 bp, Homo sapien
tgggtgcacctcacctcttaagcaa

SEQ ID NO: 5376059 - DNA, 25 bp, Homo sapien
cacgaggaagttggcagacgatttt

SEQ ID NO: 5376060 - DNA, 25 bp, Homo sapien
ggtgcctttacttctgaaaccagca

SEQ ID NO: 5376061 - DNA, 25 bp, Homo sapien
ttctacatattcaatgtttggggcc

SEQ ID NO: 5376062 - DNA, 25 bp, Homo sapien
gttctacatattcaatgtttggggc

SEQ ID NO: 5376063 - DNA, 25 bp, Homo sapien
ctgcagacgtgtggcagagactgag

SEQ ID NO: 5376064 - DNA, 25 bp, Homo sapien
gagaaagttgcacatctgatcgaag

SEQ ID NO: 5376065 - DNA, 25 bp, Homo sapien
aaagttgcacatctgatcgaagcat

SEQ ID NO: 5376066 - DNA, 25 bp, Homo sapien
gctgcagacgtgtggcagagactga

SEQ ID NO: 5376067 - DNA, 25 bp, Homo sapien
cctctaccgcttcctttacaaaatg

SEQ ID NO: 5376068 - DNA, 25 bp, Homo sapien
ttacaaaatggacacgctggcaggc

SEQ ID NO: 5376069 - DNA, 25 bp, Homo sapien
tattataatgtccattgcattgatg

SEQ ID NO: 5376070 - DNA, 25 bp, Homo sapien
attataatgtccattgcattgatgg

SEQ ID NO: 5376071 - DNA, 25 bp, Homo sapien
tgaagtgccaatagggaccccagtt

SEQ ID NO: 5376072 - DNA, 25 bp, Homo sapien
tacatggacccaaacaggccaatcc

SEQ ID NO: 5376073 - DNA, 25 bp, Homo sapien
ggagaatggtgcgataacccttatg

SEQ ID NO: 5376074 - DNA, 25 bp, Homo sapien
tcagctttatcagtacatggaccca

SEQ ID NO: 5376075 - DNA, 25 bp, Homo sapien
taggaccgtccctagttcctggcgc

SEQ ID NO: 5376076 - DNA, 25 bp, Homo sapien
gcagagcatctaggaccgtccctag

SEQ ID NO: 5376077 - DNA, 25 bp, Homo sapien
tggcggcctcgcctttgctcagggc

SEQ ID NO: 5376078 - DNA, 25 bp, Homo sapien
gaggtgggacccagtggaagtggca

SEQ ID NO: 5376079 - DNA, 25 bp, Homo sapien
gaaggctcatctccccgtagtagtt

SEQ ID NO: 5376080 - DNA, 25 bp, Homo sapien
ggtgagccatgacattaagctgaag

SEQ ID NO: 5376081 - DNA, 25 bp, Homo sapien
gacattaagctgaaggctcatctcc

SEQ ID NO: 5376082 - DNA, 25 bp, Homo sapien
gccatgacattaagctgaaggctca

SEQ ID NO: 5376083 - DNA, 25 bp, Homo sapien
tggctttaggcttcctgtcacactc

SEQ ID NO: 5376084 - DNA, 25 bp, Homo sapien
cctggccgtctggtttctcaaggaa

SEQ ID NO: 5376085 - DNA, 25 bp, Homo sapien
tgaaaattagcaatctgtgtctggc

SEQ ID NO: 5376086 - DNA, 25 bp, Homo sapien
gatgtgtctgtttctacctttttga

SEQ ID NO: 5376087 - DNA, 25 bp, Homo sapien
gtcctgcatctattggctggagcag

SEQ ID NO: 5376088 - DNA, 25 bp, Homo sapien
ttcagcagttacataggctagggct

SEQ ID NO: 5376089 - DNA, 25 bp, Homo sapien
catttggttcatccttactgctgtg

SEQ ID NO: 5376090 - DNA, 25 bp, Homo sapien
gagttattaacgcaaagcaagaggc

SEQ ID NO: 5376091 - DNA, 25 bp, Homo sapien
caaagtgcaccttaaagaagcctat

SEQ ID NO: 5376092 - DNA, 25 bp, Homo sapien
tgtccatccctttccgctgtacgaa

SEQ ID NO: 5376093 - DNA, 25 bp, Homo sapien
gactcaggtgtcatgtgtccatccc

SEQ ID NO: 5376094 - DNA, 25 bp, Homo sapien
caagggcggcatctgtgctaaaaga

SEQ ID NO: 5376095 - DNA, 25 bp, Homo sapien
gtgcacaaagtcatcgctgcagtat

SEQ ID NO: 5376096 - DNA, 25 bp, Homo sapien
gcacaaagtcatcgctgcagtatgt

SEQ ID NO: 5376097 - DNA, 25 bp, Homo sapien
aagtcatcgctgcagtatgtgagga

SEQ ID NO: 5376098 - DNA, 25 bp, Homo sapien
caaagtcatcgctgcagtatgtgag

SEQ ID NO: 5376099 - DNA, 25 bp, Homo sapien
ttatagcacgggaggaggacaccct

SEQ ID NO: 5376100 - DNA, 25 bp, Homo sapien
tgctcaatgtccactagtgttatag

SEQ ID NO: 5376101 - DNA, 25 bp, Homo sapien
gcagcccagtgctagggtagagtga

SEQ ID NO: 5376102 - DNA, 25 bp, Homo sapien
gtgaggacacctgctcaatgtccac

SEQ ID NO: 5376103 - DNA, 25 bp, Homo sapien
tggaaggaatatcagcagggtaaac

SEQ ID NO: 5376104 - DNA, 25 bp, Homo sapien
gcatttctcaagcaggggtccctgc

SEQ ID NO: 5376105 - DNA, 25 bp, Homo sapien
acccctagaccattgttcatctggg

SEQ ID NO: 5376106 - DNA, 25 bp, Homo sapien
ctgtgctgccagagctacccctaga

SEQ ID NO: 5376107 - DNA, 25 bp, Homo sapien
cacaaaagcaaacatggttgggcac

SEQ ID NO: 5376108 - DNA, 25 bp, Homo sapien
tgggcacacattcccttgggctcct

SEQ ID NO: 5376109 - DNA, 25 bp, Homo sapien
gtccaaggtaaagcaggcttggtcc

SEQ ID NO: 5376110 - DNA, 25 bp, Homo sapien
caggttgagtggagagcctcgggcc

SEQ ID NO: 5376111 - DNA, 25 bp, Homo sapien
tcaggttgagtggagagcctcgggc

SEQ ID NO: 5376112 - DNA, 25 bp, Homo sapien
tcagctgatgagagcttttctccac

SEQ ID NO: 5376113 - DNA, 25 bp, Homo sapien
gctgatgagagcttttctccacatc

SEQ ID NO: 5376114 - DNA, 25 bp, Homo sapien
tgatgagagcttttctccacatctc

SEQ ID NO: 5376115 - DNA, 25 bp, Homo sapien
cagctgatgagagcttttctccaca

SEQ ID NO: 5376116 - DNA, 25 bp, Homo sapien
gcttggcccccgaggaacctggcaa

SEQ ID NO: 5376117 - DNA, 25 bp, Homo sapien
ggcttgggaagaacgtagcaggtgc

SEQ ID NO: 5376118 - DNA, 25 bp, Homo sapien
ttggtacacacggatgcttggcccc

SEQ ID NO: 5376119 - DNA, 25 bp, Homo sapien
ctggcaaaccctgggcggatgactg

SEQ ID NO: 5376120 - DNA, 25 bp, Homo sapien
cctccaggagccggccggtgtccgc

SEQ ID NO: 5376121 - DNA, 25 bp, Homo sapien
tgcaggccgtgctcagccctccagg

SEQ ID NO: 5376122 - DNA, 25 bp, Homo sapien
tctcccggcacgcggggtcgctgca

SEQ ID NO: 5376123 - DNA, 25 bp, Homo sapien
aggctgcggctccccgctaaggctc

SEQ ID NO: 5376124 - DNA, 25 bp, Homo sapien
gaagacagacgcctctcttcagctg

SEQ ID NO: 5376125 - DNA, 25 bp, Homo sapien
ctcggaagacagacgcctctcttca

SEQ ID NO: 5376126 - DNA, 25 bp, Homo sapien
agacgcctctcttcagctgtaccgg

SEQ ID NO: 5376127 - DNA, 25 bp, Homo sapien
gacagacgcctctcttcagctgtac

SEQ ID NO: 5376128 - DNA, 25 bp, Homo sapien
cagaactggtggtccaaacccaagg

SEQ ID NO: 5376129 - DNA, 25 bp, Homo sapien
gaggtggctactccagcaggtttgc

SEQ ID NO: 5376130 - DNA, 25 bp, Homo sapien
ggccacacagcgagaaggtaagcaa

SEQ ID NO: 5376131 - DNA, 25 bp, Homo sapien
cagtacacttaggtcgcagggaaac

SEQ ID NO: 5376132 - DNA, 25 bp, Homo sapien
ctctgcatgcgggtgtagctggtca

SEQ ID NO: 5376133 - DNA, 25 bp, Homo sapien
cccagacattgtctcttgaaaggga

SEQ ID NO: 5376134 - DNA, 25 bp, Homo sapien
cagacagaagactctgcatgcgggt

SEQ ID NO: 5376135 - DNA, 25 bp, Homo sapien
tcttgaaagggactccaagctccta

SEQ ID NO: 5376136 - DNA, 25 bp, Homo sapien
cctggacgaagagggtaatgaaatg

SEQ ID NO: 5376137 - DNA, 25 bp, Homo sapien
actctgctctcgtggaagcgcagtg

SEQ ID NO: 5376138 - DNA, 25 bp, Homo sapien
gacgaagagggtaatgaaatgtgaa

SEQ ID NO: 5376139 - DNA, 25 bp, Homo sapien
gctctcgtggaagcgcagtggccct

SEQ ID NO: 5376140 - DNA, 25 bp, Homo sapien
tgaaaaactgcccttcagattccag

SEQ ID NO: 5376141 - DNA, 25 bp, Homo sapien
tgccttgaaaaactgcccttcagat

SEQ ID NO: 5376142 - DNA, 25 bp, Homo sapien
actgccttgaaaaactgcccttcag

SEQ ID NO: 5376143 - DNA, 25 bp, Homo sapien
ccttgaaaaactgcccttcagattc

SEQ ID NO: 5376144 - DNA, 25 bp, Homo sapien
gggttcacacaacactttgctgcct

SEQ ID NO: 5376145 - DNA, 25 bp, Homo sapien
tgagagcgtgcagggagtgagacag

SEQ ID NO: 5376146 - DNA, 25 bp, Homo sapien
ctgccaagcggagggtgagagcgtg

SEQ ID NO: 5376147 - DNA, 25 bp, Homo sapien
ctggataaatcgaagagcatcagag

SEQ ID NO: 5376148 - DNA, 25 bp, Homo sapien
actgtgagaagctcgctctccggcg

SEQ ID NO: 5376149 - DNA, 25 bp, Homo sapien
ctgcactgtgagaagctcgctctcc

SEQ ID NO: 5376150 - DNA, 25 bp, Homo sapien
gcactgtgagaagctcgctctccgg

SEQ ID NO: 5376151 - DNA, 25 bp, Homo sapien
gtgagaagctcgctctccggcgctc

SEQ ID NO: 5376152 - DNA, 25 bp, Homo sapien
accctcagctctcggcctgagctcg

SEQ ID NO: 5376153 - DNA, 25 bp, Homo sapien
gccaccctcagctctcggcctgagc

SEQ ID NO: 5376154 - DNA, 25 bp, Homo sapien
ctcagctctcggcctgagctcgcca

SEQ ID NO: 5376155 - DNA, 25 bp, Homo sapien
tcagctctcggcctgagctcgccat

SEQ ID NO: 5376156 - DNA, 25 bp, Homo sapien
caggaagccggtgagttgcttgctt

SEQ ID NO: 5376157 - DNA, 25 bp, Homo sapien
tctcgggcctgtcaatctttcttca

SEQ ID NO: 5376158 - DNA, 25 bp, Homo sapien
gcttttccagaggacagcgctaccc

SEQ ID NO: 5376159 - DNA, 25 bp, Homo sapien
ttgggttccgcctgcattcgcttga

SEQ ID NO: 5376160 - DNA, 25 bp, Homo sapien
cttcccaataggaggctggcctgag

SEQ ID NO: 5376161 - DNA, 25 bp, Homo sapien
cctcaggcccctctgtcccaaccat

SEQ ID NO: 5376162 - DNA, 25 bp, Homo sapien
tgagaacctggccaggccccctctc

SEQ ID NO: 5376163 - DNA, 25 bp, Homo sapien
tggcctgagaacctggccaggcccc

SEQ ID NO: 5376164 - DNA, 25 bp, Homo sapien
tttgtcctcataatttagggcttga

SEQ ID NO: 5376165 - DNA, 25 bp, Homo sapien
ctgccctcagtggatggtggcattt

SEQ ID NO: 5376166 - DNA, 25 bp, Homo sapien
atttctgtaaagggcacagttggcc

SEQ ID NO: 5376167 - DNA, 25 bp, Homo sapien
tgccctcagtggatggtggcatttc

SEQ ID NO: 5376168 - DNA, 25 bp, Homo sapien
catttctgtaaagggcacagttggc

SEQ ID NO: 5376169 - DNA, 25 bp, Homo sapien
gaatgctggatgagaatagaatcca

SEQ ID NO: 5376170 - DNA, 25 bp, Homo sapien
ctgagtaacgccaaagccccatcag

SEQ ID NO: 5376171 - DNA, 25 bp, Homo sapien
atccatcagagtatgggaattaggg

SEQ ID NO: 5376172 - DNA, 25 bp, Homo sapien
gggcaaagcaagagctctagcttta

SEQ ID NO: 5376173 - DNA, 25 bp, Homo sapien
ctctccccggacatggggagcacgt

SEQ ID NO: 5376174 - DNA, 25 bp, Homo sapien
tctccccggacatggggagcacgtg

SEQ ID NO: 5376175 - DNA, 25 bp, Homo sapien
gggagcacgtgggcactcctgtgct

SEQ ID NO: 5376176 - DNA, 25 bp, Homo sapien
gccaaataaaatcaattgtgaagtc

SEQ ID NO: 5376177 - DNA, 25 bp, Homo sapien
ccaaataaaatcaattgtgaagtca

SEQ ID NO: 5376178 - DNA, 25 bp, Homo sapien
ctgccaaataaaatcaattgtgaag

SEQ ID NO: 5376179 - DNA, 25 bp, Homo sapien
caaataaaatcaattgtgaagtcac

SEQ ID NO: 5376180 - DNA, 25 bp, Homo sapien
acttgttccagggacttcatcccac

SEQ ID NO: 5376181 - DNA, 25 bp, Homo sapien
gaaggtcacttgttccagggacttc

SEQ ID NO: 5376182 - DNA, 25 bp, Homo sapien
ttcatcccacttcgcaaacagaaga

SEQ ID NO: 5376183 - DNA, 25 bp, Homo sapien
caaacagaagacgaatctgcagtcc

SEQ ID NO: 5376184 - DNA, 25 bp, Homo sapien
tagatggcaaagaaagtataggaag

SEQ ID NO: 5376185 - DNA, 25 bp, Homo sapien
atagatggcaaagaaagtataggaa

SEQ ID NO: 5376186 - DNA, 25 bp, Homo sapien
cggaagtgtattatccctgaaacag

SEQ ID NO: 5376187 - DNA, 25 bp, Homo sapien
gaagtgtattatccctgaaacaggt

SEQ ID NO: 5376188 - DNA, 25 bp, Homo sapien
tatccctgaaacaggtgtcagtgga

SEQ ID NO: 5376189 - DNA, 25 bp, Homo sapien
gtattatccctgaaacaggtgtcag

SEQ ID NO: 5376190 - DNA, 25 bp, Homo sapien
gctggcccagatacgagctgaaggt

SEQ ID NO: 5376191 - DNA, 25 bp, Homo sapien
agctgaaggttgttggaggtcccca

SEQ ID NO: 5376192 - DNA, 25 bp, Homo sapien
agctggcaggttggtggcccacacc

SEQ ID NO: 5376193 - DNA, 25 bp, Homo sapien
ccattgaaaaccacactccactaag

SEQ ID NO: 5376194 - DNA, 25 bp, Homo sapien
gtagctgttggtcactcagcaccat

SEQ ID NO: 5376195 - DNA, 25 bp, Homo sapien
ctgttggtcactcagcaccatggca

SEQ ID NO: 5376196 - DNA, 25 bp, Homo sapien
tagctgttggtcactcagcaccatg

SEQ ID NO: 5376197 - DNA, 25 bp, Homo sapien
agctgttggtcactcagcaccatgg

SEQ ID NO: 5376198 - DNA, 25 bp, Homo sapien
catttccacatagaggttccctgtg

SEQ ID NO: 5376199 - DNA, 25 bp, Homo sapien
tctcatttccacatagaggttccct

SEQ ID NO: 5376200 - DNA, 25 bp, Homo sapien
ctctttgagtactttatccctggac

SEQ ID NO: 5376201 - DNA, 25 bp, Homo sapien
tagggatccacaatcagcaggagtg

SEQ ID NO: 5376202 - DNA, 25 bp, Homo sapien
cacatttctggatgacacaatcaac

SEQ ID NO: 5376203 - DNA, 25 bp, Homo sapien
tatgcaactgtagatgggcctgact

SEQ ID NO: 5376204 - DNA, 25 bp, Homo sapien
tatgaatcgagagtggcctttgcca

SEQ ID NO: 5376205 - DNA, 25 bp, Homo sapien
taatgcatcgcggtgagtctgagtc

SEQ ID NO: 5376206 - DNA, 25 bp, Homo sapien
tatttcgggtcacaaagaaggacgc

SEQ ID NO: 5376207 - DNA, 25 bp, Homo sapien
tgtccagtctaatcaggtttgcaaa

SEQ ID NO: 5376208 - DNA, 25 bp, Homo sapien
cagcaccacgctgttactggcgtag

SEQ ID NO: 5376209 - DNA, 25 bp, Homo sapien
aagaaagcccgagaacgtgctgtac

SEQ ID NO: 5376210 - DNA, 25 bp, Homo sapien
ttcacatacacttcgtcccctgaat

SEQ ID NO: 5376211 - DNA, 25 bp, Homo sapien
acttgttattattgcctccgtgagc

SEQ ID NO: 5376212 - DNA, 25 bp, Homo sapien
tgtaagggtcgcagatcatgcggca

SEQ ID NO: 5376213 - DNA, 25 bp, Homo sapien
ttcagcacctcatagccttcgtggg

SEQ ID NO: 5376214 - DNA, 25 bp, Homo sapien
gaagaagtagatgccgcgtacctgg

SEQ ID NO: 5376215 - DNA, 25 bp, Homo sapien
tcttgagacccacatagaaggcgat

SEQ ID NO: 5376216 - DNA, 25 bp, Homo sapien
agagtacgccgacggccgccaggca

SEQ ID NO: 5376217 - DNA, 25 bp, Homo sapien
cttgccgcccggggaggtaatggtg

SEQ ID NO: 5376218 - DNA, 25 bp, Homo sapien
ggccaagagtacgccgacggccgcc

SEQ ID NO: 5376219 - DNA, 25 bp, Homo sapien
caagagtacgccgacggccgccagg

SEQ ID NO: 5376220 - DNA, 25 bp, Homo sapien
gctgtgctctctcgctgttcgctgg

SEQ ID NO: 5376221 - DNA, 25 bp, Homo sapien
ggctacccaactacttcagcgagag

SEQ ID NO: 5376222 - DNA, 25 bp, Homo sapien
cgctaccctgacgtaaggagtccgg

SEQ ID NO: 5376223 - DNA, 25 bp, Homo sapien
gctgccatcactcgggagacggagc

SEQ ID NO: 5376224 - DNA, 25 bp, Homo sapien
aaaactcagtcccaccaatgcctgc

SEQ ID NO: 5376225 - DNA, 25 bp, Homo sapien
aggcctttcccggggcgcacctgca

SEQ ID NO: 5376226 - DNA, 25 bp, Homo sapien
gcctttcccggggcgcacctgcagg

SEQ ID NO: 5376227 - DNA, 25 bp, Homo sapien
tcaaaactcagtcccaccaatgcct

SEQ ID NO: 5376228 - DNA, 25 bp, Homo sapien
ctgcaggccacgtgaccccttccct

SEQ ID NO: 5376229 - DNA, 25 bp, Homo sapien
tctctgcaggccacgtgaccccttc

SEQ ID NO: 5376230 - DNA, 25 bp, Homo sapien
caggccacgtgaccccttccctctg

SEQ ID NO: 5376231 - DNA, 25 bp, Homo sapien
ctctctgcaggccacgtgacccctt

SEQ ID NO: 5376232 - DNA, 25 bp, Homo sapien
tccactgggagcattagcaacatca

SEQ ID NO: 5376233 - DNA, 25 bp, Homo sapien
cactgggagcattagcaacatcagg

SEQ ID NO: 5376234 - DNA, 25 bp, Homo sapien
tcagtgggccgaatagcagagatcc

SEQ ID NO: 5376235 - DNA, 25 bp, Homo sapien
ccactgggagcattagcaacatcag

SEQ ID NO: 5376236 - DNA, 25 bp, Homo sapien
ttggtttctcatggaccgtggccag

SEQ ID NO: 5376237 - DNA, 25 bp, Homo sapien
tgtaagttgttctcagaccctacct

SEQ ID NO: 5376238 - DNA, 25 bp, Homo sapien
tcccgttaacatgtaagttgttctc

SEQ ID NO: 5376239 - DNA, 25 bp, Homo sapien
ctcatggaccgtggccaggacttgg

SEQ ID NO: 5376240 - DNA, 25 bp, Homo sapien
aggacctctgggttaaatgacctct

SEQ ID NO: 5376241 - DNA, 25 bp, Homo sapien
caggacctctgggttaaatgacctc

SEQ ID NO: 5376242 - DNA, 25 bp, Homo sapien
ccaggacctctgggttaaatgacct

SEQ ID NO: 5376243 - DNA, 25 bp, Homo sapien
cagagtatccaatgacaggagaagt

SEQ ID NO: 5376244 - DNA, 25 bp, Homo sapien
gtatccaatgacaggagaagtccag

SEQ ID NO: 5376245 - DNA, 25 bp, Homo sapien
gagggctctaccctgaatgttcacc

SEQ ID NO: 5376246 - DNA, 25 bp, Homo sapien
agagggctctaccctgaatgttcac

SEQ ID NO: 5376247 - DNA, 25 bp, Homo sapien
gtgagccccggcatcagcttaggga

SEQ ID NO: 5376248 - DNA, 25 bp, Homo sapien
gaaacagccatatggaggggcttcc

SEQ ID NO: 5376249 - DNA, 25 bp, Homo sapien
tagggagcatcccttcttgcagctc

SEQ ID NO: 5376250 - DNA, 25 bp, Homo sapien
ctaaaggattcgtgttctcaactga

SEQ ID NO: 5376251 - DNA, 25 bp, Homo sapien
gatggctctgagacgatggccttct

SEQ ID NO: 5376252 - DNA, 25 bp, Homo sapien
gatctcaggtagacacaaccagtga

SEQ ID NO: 5376253 - DNA, 25 bp, Homo sapien
tctcagtgacatgcctgatattcca

SEQ ID NO: 5376254 - DNA, 25 bp, Homo sapien
cagcaaacgcctaaagatggctctg

SEQ ID NO: 5376255 - DNA, 25 bp, Homo sapien
aagccatcggcattggaagtgcgga

SEQ ID NO: 5376256 - DNA, 25 bp, Homo sapien
tgaagccatcggcattggaagtgcg

SEQ ID NO: 5376257 - DNA, 25 bp, Homo sapien
ctgcagtgctgtgaagccatcggca

SEQ ID NO: 5376258 - DNA, 25 bp, Homo sapien
tgctgtgaagccatcggcattggaa

SEQ ID NO: 5376259 - DNA, 25 bp, Homo sapien
gactgctgggaagggtcaaaagtct

SEQ ID NO: 5376260 - DNA, 25 bp, Homo sapien
ggactgctgggaagggtcaaaagtc

SEQ ID NO: 5376261 - DNA, 25 bp, Homo sapien
tgctgggaagggtcaaaagtctgcc

SEQ ID NO: 5376262 - DNA, 25 bp, Homo sapien
ctgctgggaagggtcaaaagtctgc

SEQ ID NO: 5376263 - DNA, 25 bp, Homo sapien
tgcaaccgtggctgccacttggcct

SEQ ID NO: 5376264 - DNA, 25 bp, Homo sapien
tgccacttggcctcggttataaaat

SEQ ID NO: 5376265 - DNA, 25 bp, Homo sapien
caaggattcgaggtgctcctcaggt

SEQ ID NO: 5376266 - DNA, 25 bp, Homo sapien
taaaatggacaaggattcgaggtgc

SEQ ID NO: 5376267 - DNA, 25 bp, Homo sapien
ctgctcacttcagccgtgtgccggg

SEQ ID NO: 5376268 - DNA, 25 bp, Homo sapien
gtgccgggcactgcaaatcaggaag

SEQ ID NO: 5376269 - DNA, 25 bp, Homo sapien
gaggaggtcccggagttctgctcac

SEQ ID NO: 5376270 - DNA, 25 bp, Homo sapien
tgttggcgccggctggcgacctccc

SEQ ID NO: 5376271 - DNA, 25 bp, Homo sapien
gaggagggtggttggacgctgccac

SEQ ID NO: 5376272 - DNA, 25 bp, Homo sapien
ggtggttggacgctgccaccgctgc

SEQ ID NO: 5376273 - DNA, 25 bp, Homo sapien
aggagggtggttggacgctgccacc

SEQ ID NO: 5376274 - DNA, 25 bp, Homo sapien
gagggtggttggacgctgccaccgc

SEQ ID NO: 5376275 - DNA, 25 bp, Homo sapien
gatgaccctctggcccttggagatg

SEQ ID NO: 5376276 - DNA, 25 bp, Homo sapien
gaccctctggcccttggagatgtct

SEQ ID NO: 5376277 - DNA, 25 bp, Homo sapien
caggccctctggagatgaccctctg

SEQ ID NO: 5376278 - DNA, 25 bp, Homo sapien
ccctctggcccttggagatgtctct

SEQ ID NO: 5376279 - DNA, 25 bp, Homo sapien
gagttccattggggctgccgcttac

SEQ ID NO: 5376280 - DNA, 25 bp, Homo sapien
gtgagttccattggggctgccgctt

SEQ ID NO: 5376281 - DNA, 25 bp, Homo sapien
ctgtgctggtgtgagttccattggg

SEQ ID NO: 5376282 - DNA, 25 bp, Homo sapien
gtgtgagttccattggggctgccgc

SEQ ID NO: 5376283 - DNA, 25 bp, Homo sapien
ctcccatgacctttaacatctggca

SEQ ID NO: 5376284 - DNA, 25 bp, Homo sapien
cctttaacatctggcatggcttgtg

SEQ ID NO: 5376285 - DNA, 25 bp, Homo sapien
ttaacatctggcatggcttgtgggg

SEQ ID NO: 5376286 - DNA, 25 bp, Homo sapien
catgacctttaacatctggcatggc

SEQ ID NO: 5376287 - DNA, 25 bp, Homo sapien
tgaagcctttgtgggcaccaaatgc

SEQ ID NO: 5376288 - DNA, 25 bp, Homo sapien
cattatcactaagccagtggcagcc

SEQ ID NO: 5376289 - DNA, 25 bp, Homo sapien
tgtgggcaccaaatgctgacagcat

SEQ ID NO: 5376290 - DNA, 25 bp, Homo sapien
tgctgacagcattatcactaagcca

SEQ ID NO: 5376291 - DNA, 25 bp, Homo sapien
tatcagctgcacgttttcatggccc

SEQ ID NO: 5376292 - DNA, 25 bp, Homo sapien
aatatgtatcagctgcacgttttca

SEQ ID NO: 5376293 - DNA, 25 bp, Homo sapien
gaactcgacacctcccagagatctg

SEQ ID NO: 5376294 - DNA, 25 bp, Homo sapien
cagagatctgtactgccttggaaca

SEQ ID NO: 5376295 - DNA, 25 bp, Homo sapien
tgttgaattttgctacttgcgggga

SEQ ID NO: 5376296 - DNA, 25 bp, Homo sapien
gcggggaaggcacttcccaggcaaa

SEQ ID NO: 5376297 - DNA, 25 bp, Homo sapien
ttctgccttgtaaaggcactgggcc

SEQ ID NO: 5376298 - DNA, 25 bp, Homo sapien
ccagaggcagggaaattaattctgc

SEQ ID NO: 5376299 - DNA, 25 bp, Homo sapien
gatgaggcccatccctgattcagca

SEQ ID NO: 5376300 - DNA, 25 bp, Homo sapien
agggatgaggcccatccctgattca

SEQ ID NO: 5376301 - DNA, 25 bp, Homo sapien
gaggcccatccctgattcagcaaat

SEQ ID NO: 5376302 - DNA, 25 bp, Homo sapien
aggagcagggatgaggcccatccct

SEQ ID NO: 5376303 - DNA, 25 bp, Homo sapien
tcgtcagcagcgaattagcaggacc

SEQ ID NO: 5376304 - DNA, 25 bp, Homo sapien
tatttagaaacaggtccccttatca

SEQ ID NO: 5376305 - DNA, 25 bp, Homo sapien
gctttgcactttctcgatgctgtgc

SEQ ID NO: 5376306 - DNA, 25 bp, Homo sapien
gatgctgtgctctttcgatttcgtc

SEQ ID NO: 5376307 - DNA, 25 bp, Homo sapien
tccaaggtcagatgagatgaggtcc

SEQ ID NO: 5376308 - DNA, 25 bp, Homo sapien
aagtttactgtagaccgatggcccg

SEQ ID NO: 5376309 - DNA, 25 bp, Homo sapien
tgtgagcaaccctacagagcaagag

SEQ ID NO: 5376310 - DNA, 25 bp, Homo sapien
taattttcatcgagtgctgccagca

SEQ ID NO: 5376311 - DNA, 25 bp, Homo sapien
atggaattgccgctggaatggcccc

SEQ ID NO: 5376312 - DNA, 25 bp, Homo sapien
gaatttaggtgttgatcggcctgac

SEQ ID NO: 5376313 - DNA, 25 bp, Homo sapien
tcaggagtgctaaggcgcaaaggaa

SEQ ID NO: 5376314 - DNA, 25 bp, Homo sapien
gaggaagccgtgcatatgcccagat

SEQ ID NO: 5376315 - DNA, 25 bp, Homo sapien
tatccggcgtgcatggtttatccac

SEQ ID NO: 5376316 - DNA, 25 bp, Homo sapien
cagatgtcaatatggaggaggcaca

SEQ ID NO: 5376317 - DNA, 25 bp, Homo sapien
catagattacatgccctggctctgc

SEQ ID NO: 5376318 - DNA, 25 bp, Homo sapien
tcttcccacctggagtatccggcgt

SEQ ID NO: 5376319 - DNA, 25 bp, Homo sapien
catccctggagcatgtgagcagcgg

SEQ ID NO: 5376320 - DNA, 25 bp, Homo sapien
ggattgggctgaagctgctccacct

SEQ ID NO: 5376321 - DNA, 25 bp, Homo sapien
aatggatcctcctgtgagagtgacg

SEQ ID NO: 5376322 - DNA, 25 bp, Homo sapien
gaagtcaccatagagcctgcaaatg

SEQ ID NO: 5376323 - DNA, 25 bp, Homo sapien
accaaagctacaaacctaaaatgct

SEQ ID NO: 5376324 - DNA, 25 bp, Homo sapien
gagcaacttttccaccaaagctaca

SEQ ID NO: 5376325 - DNA, 25 bp, Homo sapien
gcaacttttccaccaaagctacaaa

SEQ ID NO: 5376326 - DNA, 25 bp, Homo sapien
ccaccaaagctacaaacctaaaatg

SEQ ID NO: 5376327 - DNA, 25 bp, Homo sapien
aaagagggtgaggtcttcatgagtc

SEQ ID NO: 5376328 - DNA, 25 bp, Homo sapien
gacaaagagggtgaggtcttcatga

SEQ ID NO: 5376329 - DNA, 25 bp, Homo sapien
agagggtgaggtcttcatgagtctc

SEQ ID NO: 5376330 - DNA, 25 bp, Homo sapien
aagacaaagagggtgaggtcttcat

SEQ ID NO: 5376331 - DNA, 25 bp, Homo sapien
gagaagagcccactgcaaggatagc

SEQ ID NO: 5376332 - DNA, 25 bp, Homo sapien
cattaggcacatgaccgatgcaggg

SEQ ID NO: 5376333 - DNA, 25 bp, Homo sapien
cataaattggcactgatggagcatc

SEQ ID NO: 5376334 - DNA, 25 bp, Homo sapien
aaagtgcctcaacgacatgctctgg

SEQ ID NO: 5376335 - DNA, 25 bp, Homo sapien
cacctaggaatgtggttcgaatgcg

SEQ ID NO: 5376336 - DNA, 25 bp, Homo sapien
tgtgcagacctaagggactaaggga

SEQ ID NO: 5376337 - DNA, 25 bp, Homo sapien
gaaatgggcaagatccaggtgacag

SEQ ID NO: 5376338 - DNA, 25 bp, Homo sapien
gaattataatgtgcctgggagtcac

SEQ ID NO: 5376339 - DNA, 25 bp, Homo sapien
tcggtgttacacaggaaaactcatc

SEQ ID NO: 5376340 - DNA, 25 bp, Homo sapien
cggtgttacacaggaaaactcatct

SEQ ID NO: 5376341 - DNA, 25 bp, Homo sapien
tccgttccaagagtttctcttaggc

SEQ ID NO: 5376342 - DNA, 25 bp, Homo sapien
caagagtttctcttaggctgaggtg

SEQ ID NO: 5376343 - DNA, 25 bp, Homo sapien
acctgtaaagcgtccgtctctgccg

SEQ ID NO: 5376344 - DNA, 25 bp, Homo sapien
gcacttcccagtaggtgactccaga

SEQ ID NO: 5376345 - DNA, 25 bp, Homo sapien
gttctctttcgcaggcagagctggc

SEQ ID NO: 5376346 - DNA, 25 bp, Homo sapien
ttctttagccacttgagacgcctgg

SEQ ID NO: 5376347 - DNA, 25 bp, Homo sapien
tctgggatgggagaccttaggcaaa

SEQ ID NO: 5376348 - DNA, 25 bp, Homo sapien
caaattaacctgtctgagcttcagt

SEQ ID NO: 5376349 - DNA, 25 bp, Homo sapien
aatttgaacccgtattctgggatgg

SEQ ID NO: 5376350 - DNA, 25 bp, Homo sapien
ttccaggattgtggcggagatcaga

SEQ ID NO: 5376351 - DNA, 25 bp, Homo sapien
tgacagaaatcacagcagtagtggc

SEQ ID NO: 5376352 - DNA, 25 bp, Homo sapien
tatttgttcgaagacattgaggctc

SEQ ID NO: 5376353 - DNA, 25 bp, Homo sapien
gatttggaccatatacattaccctc

SEQ ID NO: 5376354 - DNA, 25 bp, Homo sapien
tagatttggacgcaactgtgtgtgt

SEQ ID NO: 5376355 - DNA, 25 bp, Homo sapien
cacaattcaattgcacatatggtgg

SEQ ID NO: 5376356 - DNA, 25 bp, Homo sapien
ggagctctacatgcaagtcacaaaa

SEQ ID NO: 5376357 - DNA, 25 bp, Homo sapien
caccctgaactaaaaggtagccatg

SEQ ID NO: 5376358 - DNA, 25 bp, Homo sapien
taaacagtatgatcttagtcttaga

SEQ ID NO: 5376359 - DNA, 25 bp, Homo sapien
ctcaaagagtatagcctgggattaa

SEQ ID NO: 5376360 - DNA, 25 bp, Homo sapien
taaagagcttaatacaggtatgcaa

SEQ ID NO: 5376361 - DNA, 25 bp, Homo sapien
ttcagcagtggaataaagagcttaa

SEQ ID NO: 5376362 - DNA, 25 bp, Homo sapien
tgcaaaaaggaagccctcgagatgt

SEQ ID NO: 5376363 - DNA, 25 bp, Homo sapien
ctttgtagttcttataatcttcttc

SEQ ID NO: 5376364 - DNA, 25 bp, Homo sapien
gatgaaatgggattagctttgtagt

SEQ ID NO: 5376365 - DNA, 25 bp, Homo sapien
tgtagttcttataatcttcttcaca

SEQ ID NO: 5376366 - DNA, 25 bp, Homo sapien
tcaccaggatgaaatgggattagct

SEQ ID NO: 5376367 - DNA, 25 bp, Homo sapien
ttcggagttaggagttcggagggca

SEQ ID NO: 5376368 - DNA, 25 bp, Homo sapien
cagggttgctggcttgccggagttc

SEQ ID NO: 5376369 - DNA, 25 bp, Homo sapien
tgccggagttcggagttaggagttc

SEQ ID NO: 5376370 - DNA, 25 bp, Homo sapien
tcggagggcagtttggagtcctcac

SEQ ID NO: 5376371 - DNA, 25 bp, Homo sapien
gccaagagatcggaatgcacatcat

SEQ ID NO: 5376372 - DNA, 25 bp, Homo sapien
tgtcctcagccaagagatcggaatg

SEQ ID NO: 5376373 - DNA, 25 bp, Homo sapien
gacacctactgtcctcagccaagag

SEQ ID NO: 5376374 - DNA, 25 bp, Homo sapien
tcggaatgcacatcattctcatcct

SEQ ID NO: 5376375 - DNA, 25 bp, Homo sapien
gctttcagagtgctgtcttctttca

SEQ ID NO: 5376376 - DNA, 25 bp, Homo sapien
ctgctttcagagtgctgtcttcttt

SEQ ID NO: 5376377 - DNA, 25 bp, Homo sapien
tgctttcagagtgctgtcttctttc

SEQ ID NO: 5376378 - DNA, 25 bp, Homo sapien
cagcaataatctaagtagattccac

SEQ ID NO: 5376379 - DNA, 25 bp, Homo sapien
ctcaaagacacagagttgtaactct

SEQ ID NO: 5376380 - DNA, 25 bp, Homo sapien
caataatctaagtagattccactgc

SEQ ID NO: 5376381 - DNA, 25 bp, Homo sapien
agagttgtaactctgagcacagcaa

SEQ ID NO: 5376382 - DNA, 25 bp, Homo sapien
gcttgatgaataatctttagtgcat

SEQ ID NO: 5376383 - DNA, 25 bp, Homo sapien
tgcttgatgaataatctttagtgca

SEQ ID NO: 5376384 - DNA, 25 bp, Homo sapien
ataatttctgaatggtggtggcagg

SEQ ID NO: 5376385 - DNA, 25 bp, Homo sapien
gatgaggcgaactgtgatggtcact

SEQ ID NO: 5376386 - DNA, 25 bp, Homo sapien
tgcgatgttcaaaggaacggatgag

SEQ ID NO: 5376387 - DNA, 25 bp, Homo sapien
actccgtgatacactacaggtttga

SEQ ID NO: 5376388 - DNA, 25 bp, Homo sapien
tcctttacagtttggtccaaattca

SEQ ID NO: 5376389 - DNA, 25 bp, Homo sapien
tctgaccagcagaaaactgacagag

SEQ ID NO: 5376390 - DNA, 25 bp, Homo sapien
tgggtgccctatgtccgtgggcccc

SEQ ID NO: 5376391 - DNA, 25 bp, Homo sapien
gacacacgcctattgtgggtgccct

SEQ ID NO: 5376392 - DNA, 25 bp, Homo sapien
tgtgtacgtgtggaaacagagaagc

SEQ ID NO: 5376393 - DNA, 25 bp, Homo sapien
tgcctttaacgcaccagatggagaa

SEQ ID NO: 5376394 - DNA, 25 bp, Homo sapien
cagtcaaagtccctgtgatggccaa

SEQ ID NO: 5376395 - DNA, 25 bp, Homo sapien
ttccaagattgcagggattcacccg

SEQ ID NO: 5376396 - DNA, 25 bp, Homo sapien
taaatgtgcaatacaggcctgacac

SEQ ID NO: 5376397 - DNA, 25 bp, Homo sapien
cagagtttacttgtccagagatgca

SEQ ID NO: 5376398 - DNA, 25 bp, Homo sapien
cggcttcgcctttcgggagaccagt

SEQ ID NO: 5376399 - DNA, 25 bp, Homo sapien
gagatgcaacttccggcctcttcag

SEQ ID NO: 5376400 - DNA, 25 bp, Homo sapien
catcacgctgctcatcagggaccat

SEQ ID NO: 5376401 - DNA, 25 bp, Homo sapien
caaagtctacttctgccagggtgca

SEQ ID NO: 5376402 - DNA, 25 bp, Homo sapien
aaagtctacttctgccagggtgcag

SEQ ID NO: 5376403 - DNA, 25 bp, Homo sapien
tcaaagtctacttctgccagggtgc

SEQ ID NO: 5376404 - DNA, 25 bp, Homo sapien
tacaaacacccgcttccaattctcc

SEQ ID NO: 5376405 - DNA, 25 bp, Homo sapien
aatgggagcagaactgccctttaca

SEQ ID NO: 5376406 - DNA, 25 bp, Homo sapien
caagaatgggagcagaactgccctt

SEQ ID NO: 5376407 - DNA, 25 bp, Homo sapien
cccaagaatgggagcagaactgccc

SEQ ID NO: 5376408 - DNA, 25 bp, Homo sapien
atgcccaggtctgaggtggatccag

SEQ ID NO: 5376409 - DNA, 25 bp, Homo sapien
ctgaggtggatccagggtaaggagg

SEQ ID NO: 5376410 - DNA, 25 bp, Homo sapien
caggtctgaggtggatccagggtaa

SEQ ID NO: 5376411 - DNA, 25 bp, Homo sapien
accatgcccaggtctgaggtggatc

SEQ ID NO: 5376412 - DNA, 25 bp, Homo sapien
ctgttgtgccaatcgttggatgtga

SEQ ID NO: 5376413 - DNA, 25 bp, Homo sapien
tccagggctctgcaactgttgtgcc

SEQ ID NO: 5376414 - DNA, 25 bp, Homo sapien
aagtggacttcgcagcacagggaca

SEQ ID NO: 5376415 - DNA, 25 bp, Homo sapien
gggtaaggccacttcagataggagc

SEQ ID NO: 5376416 - DNA, 25 bp, Homo sapien
tgcattcccccttagatgctgggtg

SEQ ID NO: 5376417 - DNA, 25 bp, Homo sapien
catatttaggaaagatactagttcc

SEQ ID NO: 5376418 - DNA, 25 bp, Homo sapien
tgtttcactcattgcttcaagcaca

SEQ ID NO: 5376419 - DNA, 25 bp, Homo sapien
tttcttcagttgcagggtgaacatc

SEQ ID NO: 5376420 - DNA, 25 bp, Homo sapien
gctggaacaggaatcgaaccctcag

SEQ ID NO: 5376421 - DNA, 25 bp, Homo sapien
catccccttttagggacgcaagtag

SEQ ID NO: 5376422 - DNA, 25 bp, Homo sapien
cgcaagtaggattgccccaaaaagt

SEQ ID NO: 5376423 - DNA, 25 bp, Homo sapien
gaggctccgagacgctaaacaagca

SEQ ID NO: 5376424 - DNA, 25 bp, Homo sapien
ttgcaaacctgggtccggaggaggc

SEQ ID NO: 5376425 - DNA, 25 bp, Homo sapien
tactggtcagtttaccataagggtc

SEQ ID NO: 5376426 - DNA, 25 bp, Homo sapien
tttgtgagaaatgaggcgcgtctgg

SEQ ID NO: 5376427 - DNA, 25 bp, Homo sapien
tgctgccccgccgtgggaggttggg

SEQ ID NO: 5376428 - DNA, 25 bp, Homo sapien
cactcacagtgcaagtgggtcatgg

SEQ ID NO: 5376429 - DNA, 25 bp, Homo sapien
tcatggtgtcccagttgtgcgagga

SEQ ID NO: 5376430 - DNA, 25 bp, Homo sapien
taatgttttggtgcgaattcactgc

SEQ ID NO: 5376431 - DNA, 25 bp, Homo sapien
ggaccctcatcatcacgtgtgtggc

SEQ ID NO: 5376432 - DNA, 25 bp, Homo sapien
tcaaagagcacgtatctagacctgc

SEQ ID NO: 5376433 - DNA, 25 bp, Homo sapien
ggcagagttcaggattccctcagaa

SEQ ID NO: 5376434 - DNA, 25 bp, Homo sapien
gagggcccacctgactgctaataca

SEQ ID NO: 5376435 - DNA, 25 bp, Homo sapien
gagttcttgagcaagctctcccagg

SEQ ID NO: 5376436 - DNA, 25 bp, Homo sapien
cagccttcgcaggacctctcttggt

SEQ ID NO: 5376437 - DNA, 25 bp, Homo sapien
agagcaaacgaaccaaatcccaggc

SEQ ID NO: 5376438 - DNA, 25 bp, Homo sapien
cagtgcctcacatcccttcggaaga

SEQ ID NO: 5376439 - DNA, 25 bp, Homo sapien
tctgtccgtgggtgaccctgctcca

SEQ ID NO: 5376440 - DNA, 25 bp, Homo sapien
gggaactcacggaggtgccattgct

SEQ ID NO: 5376441 - DNA, 25 bp, Homo sapien
ggtgcagtgggaactcacggaggtg

SEQ ID NO: 5376442 - DNA, 25 bp, Homo sapien
tgggaactcacggaggtgccattgc

SEQ ID NO: 5376443 - DNA, 25 bp, Homo sapien
cagtgggaactcacggaggtgccat

SEQ ID NO: 5376444 - DNA, 25 bp, Homo sapien
gcagtagaggacggccaccaccagt

SEQ ID NO: 5376445 - DNA, 25 bp, Homo sapien
agtagaggacggccaccaccagtcc

SEQ ID NO: 5376446 - DNA, 25 bp, Homo sapien
ctccccattgaggaagcagtagagg

SEQ ID NO: 5376447 - DNA, 25 bp, Homo sapien
ccccattgaggaagcagtagaggac

SEQ ID NO: 5376448 - DNA, 25 bp, Homo sapien
gaactccttgcagccaagggtaggc

SEQ ID NO: 5376449 - DNA, 25 bp, Homo sapien
ctggctcatccagcataaactgtga

SEQ ID NO: 5376450 - DNA, 25 bp, Homo sapien
ggaattaggctacctcttgtgggct

SEQ ID NO: 5376451 - DNA, 25 bp, Homo sapien
ggtaggctcccttttgaacacatat

SEQ ID NO: 5376452 - DNA, 25 bp, Homo sapien
gctcgcagtctctatgccctccact

SEQ ID NO: 5376453 - DNA, 25 bp, Homo sapien
ccctgggtctctgccagataaggca

SEQ ID NO: 5376454 - DNA, 25 bp, Homo sapien
tgtagcactgtcaggtccgacccct

SEQ ID NO: 5376455 - DNA, 25 bp, Homo sapien
cagataaggcatctggctcgcagtc

SEQ ID NO: 5376456 - DNA, 25 bp, Homo sapien
ctggatctccatagcgtcctctggg

SEQ ID NO: 5376457 - DNA, 25 bp, Homo sapien
gagccaagggctagttcaaaaaaca

SEQ ID NO: 5376458 - DNA, 25 bp, Homo sapien
gcgaagacgatgtagtggatgccaa

SEQ ID NO: 5376459 - DNA, 25 bp, Homo sapien
tcaaaaaacagctggatctccatag

SEQ ID NO: 5376460 - DNA, 25 bp, Homo sapien
catcaggattcttagaatgtttatg

SEQ ID NO: 5376461 - DNA, 25 bp, Homo sapien
ctcatcaggattcttagaatgttta

SEQ ID NO: 5376462 - DNA, 25 bp, Homo sapien
tctcatcaggattcttagaatgttt

SEQ ID NO: 5376463 - DNA, 25 bp, Homo sapien
tttctcatcaggattcttagaatgt

SEQ ID NO: 5376464 - DNA, 25 bp, Homo sapien
gcccagtgccaacaacattaggaag

SEQ ID NO: 5376465 - DNA, 25 bp, Homo sapien
taggaagttgcccacatggtagcat

SEQ ID NO: 5376466 - DNA, 25 bp, Homo sapien
catgtatgtgcctagttatctgcca

SEQ ID NO: 5376467 - DNA, 25 bp, Homo sapien
gcattgttcacacaagcagcctggg

SEQ ID NO: 5376468 - DNA, 25 bp, Homo sapien
gttgcagtgagtcatgggttgcgcc

SEQ ID NO: 5376469 - DNA, 25 bp, Homo sapien
tgagtcatgggttgcgccactgcgc

SEQ ID NO: 5376470 - DNA, 25 bp, Homo sapien
ctgggctgtccgtgtggatgttact

SEQ ID NO: 5376471 - DNA, 25 bp, Homo sapien
gagatgattcctgtgtgtccccatg

SEQ ID NO: 5376472 - DNA, 25 bp, Homo sapien
gatgttacttccagccaagggactg

SEQ ID NO: 5376473 - DNA, 25 bp, Homo sapien
caagggactgcttccatccatgaga

SEQ ID NO: 5376474 - DNA, 25 bp, Homo sapien
tgcgttggcattgatgtcccagcac

SEQ ID NO: 5376475 - DNA, 25 bp, Homo sapien
caggaccacgaatgatccaccagat

SEQ ID NO: 5376476 - DNA, 25 bp, Homo sapien
gatggagaggatcacaggaccacga

SEQ ID NO: 5376477 - DNA, 25 bp, Homo sapien
gatccaccagatggatgcgttggca

SEQ ID NO: 5376478 - DNA, 25 bp, Homo sapien
gcaatagcccacaaagcaacaaaaa

SEQ ID NO: 5376479 - DNA, 25 bp, Homo sapien
cttccagaaagtgtctggcaatagc

SEQ ID NO: 5376480 - DNA, 25 bp, Homo sapien
ctggcaatagcccacaaagcaacaa

SEQ ID NO: 5376481 - DNA, 25 bp, Homo sapien
cagaaagtgtctggcaatagcccac

SEQ ID NO: 5376482 - DNA, 25 bp, Homo sapien
tgtgtgaaggtagaggccttccacc

SEQ ID NO: 5376483 - DNA, 25 bp, Homo sapien
ccatccgaatgccacaaatccctgg

SEQ ID NO: 5376484 - DNA, 25 bp, Homo sapien
agatggcgaggagtgtgtgaaggta

SEQ ID NO: 5376485 - DNA, 25 bp, Homo sapien
tgatgcagtactggaacagcaccat

SEQ ID NO: 5376486 - DNA, 25 bp, Homo sapien
ttgtccttttctttgcattgggctg

SEQ ID NO: 5376487 - DNA, 25 bp, Homo sapien
tccttttctttgcattgggctgtcc

SEQ ID NO: 5376488 - DNA, 25 bp, Homo sapien
ccttttctttgcattgggctgtccc

SEQ ID NO: 5376489 - DNA, 25 bp, Homo sapien
ctctgccatggtagggcctttgtcc

SEQ ID NO: 5376490 - DNA, 25 bp, Homo sapien
ctgcaaagacaagcccgagaaggag

SEQ ID NO: 5376491 - DNA, 25 bp, Homo sapien
acaagcccgagaaggaggagcgccc

SEQ ID NO: 5376492 - DNA, 25 bp, Homo sapien
cagtggtggttcctgccttatggcc

SEQ ID NO: 5376493 - DNA, 25 bp, Homo sapien
cagctcccgggatagccgtagggct

SEQ ID NO: 5376494 - DNA, 25 bp, Homo sapien
cagaagtagggaaaagaggagtctc

SEQ ID NO: 5376495 - DNA, 25 bp, Homo sapien
accctctccagactgggtcatcttt

SEQ ID NO: 5376496 - DNA, 25 bp, Homo sapien
tatacagacatactggcccatgctc

SEQ ID NO: 5376497 - DNA, 25 bp, Homo sapien
tctaattcctagagtgaccagttca

SEQ ID NO: 5376498 - DNA, 25 bp, Homo sapien
gacagggcacgaaggatgaaggaca

SEQ ID NO: 5376499 - DNA, 25 bp, Homo sapien
tgtagttgcgagtgcagtggagcct

SEQ ID NO: 5376500 - DNA, 25 bp, Homo sapien
gggcatcgcagtaggtgacatcatc

SEQ ID NO: 5376501 - DNA, 25 bp, Homo sapien
agagcacggcgtccttgatgaagtt

SEQ ID NO: 5376502 - DNA, 25 bp, Homo sapien
ccaagggcgaccaggagcatgacca

SEQ ID NO: 5376503 - DNA, 25 bp, Homo sapien
tagcccacggtgtacatgactttca

SEQ ID NO: 5376504 - DNA, 25 bp, Homo sapien
agaggatgccaagggcgaccaggag

SEQ ID NO: 5376505 - DNA, 25 bp, Homo sapien
gaggagctgtagcccacggtgtaca

SEQ ID NO: 5376506 - DNA, 25 bp, Homo sapien
gaggcacgtgtcagccccgccggcc

SEQ ID NO: 5376507 - DNA, 25 bp, Homo sapien
gcacgtgtcagccccgccggccctc

SEQ ID NO: 5376508 - DNA, 25 bp, Homo sapien
tgcagagagaggcacgtgtcagccc

SEQ ID NO: 5376509 - DNA, 25 bp, Homo sapien
ctgcagagagaggcacgtgtcagcc

SEQ ID NO: 5376510 - DNA, 25 bp, Homo sapien
tcctgtgtgcagtttcggaacaagg

SEQ ID NO: 5376511 - DNA, 25 bp, Homo sapien
tgtgtgcagtttcggaacaaggaac

SEQ ID NO: 5376512 - DNA, 25 bp, Homo sapien
cattaacgccacaggccagattagg

SEQ ID NO: 5376513 - DNA, 25 bp, Homo sapien
ccgcttctcgttggaagagtcgttc

SEQ ID NO: 5376514 - DNA, 25 bp, Homo sapien
catgtggcggcgagaagaaactgca

SEQ ID NO: 5376515 - DNA, 25 bp, Homo sapien
tgcaggcccacagcgacaccatgtg

SEQ ID NO: 5376516 - DNA, 25 bp, Homo sapien
ggctgggtatgaacaacgtggcccc

SEQ ID NO: 5376517 - DNA, 25 bp, Homo sapien
agcccagagcccaataggcaggcct

SEQ ID NO: 5376518 - DNA, 25 bp, Homo sapien
catccggcccggcacagaagagggc

SEQ ID NO: 5376519 - DNA, 25 bp, Homo sapien
tgagcatccggaggaatctcgggca

SEQ ID NO: 5376520 - DNA, 25 bp, Homo sapien
aggaatctcgggcattccacctcca

SEQ ID NO: 5376521 - DNA, 25 bp, Homo sapien
catttctgctggtgagcatccggag

SEQ ID NO: 5376522 - DNA, 25 bp, Homo sapien
tcagagccagatgcgtggcccactt

SEQ ID NO: 5376523 - DNA, 25 bp, Homo sapien
taaacaactaagcagcaatgggtct

SEQ ID NO: 5376524 - DNA, 25 bp, Homo sapien
gctgatgctgtttgtcctgggacca

SEQ ID NO: 5376525 - DNA, 25 bp, Homo sapien
ttagaaatagacctagccggcgtgg

SEQ ID NO: 5376526 - DNA, 25 bp, Homo sapien
gaggtcatcgctggggtcaggcttg

SEQ ID NO: 5376527 - DNA, 25 bp, Homo sapien
cttctggaacccgtgccctctgaga

SEQ ID NO: 5376528 - DNA, 25 bp, Homo sapien
tctggaacccgtgccctctgagagg

SEQ ID NO: 5376529 - DNA, 25 bp, Homo sapien
tcatcgctggggtcaggcttggaag

SEQ ID NO: 5376530 - DNA, 25 bp, Homo sapien
ctccaggtgacaccggccccagctg

SEQ ID NO: 5376531 - DNA, 25 bp, Homo sapien
tccaggtgacaccggccccagctgc

SEQ ID NO: 5376532 - DNA, 25 bp, Homo sapien
ccaggtgacaccggccccagctgcc

SEQ ID NO: 5376533 - DNA, 25 bp, Homo sapien
tctccaggtgacaccggccccagct

SEQ ID NO: 5376534 - DNA, 25 bp, Homo sapien
tggacaatgcctggctggttggcca

SEQ ID NO: 5376535 - DNA, 25 bp, Homo sapien
ccagacagatgtggacggtgccagc

SEQ ID NO: 5376536 - DNA, 25 bp, Homo sapien
ttcctaacttgggtcacgtcaggca

SEQ ID NO: 5376537 - DNA, 25 bp, Homo sapien
tgagaggcttcctaacttgggtcac

SEQ ID NO: 5376538 - DNA, 25 bp, Homo sapien
gcctgtgctggatgcacatcagaca

SEQ ID NO: 5376539 - DNA, 25 bp, Homo sapien
aggcctgtgctggatgcacatcaga

SEQ ID NO: 5376540 - DNA, 25 bp, Homo sapien
ggcctgtgctggatgcacatcagac

SEQ ID NO: 5376541 - DNA, 25 bp, Homo sapien
ctgtgctggatgcacatcagacatc

SEQ ID NO: 5376542 - DNA, 25 bp, Homo sapien
tgccggtgtttgctctttcctctgc

SEQ ID NO: 5376543 - DNA, 25 bp, Homo sapien
gcttctgccggtgtttgctctttcc

SEQ ID NO: 5376544 - DNA, 25 bp, Homo sapien
tctgcccgcggaccgccacatccat

SEQ ID NO: 5376545 - DNA, 25 bp, Homo sapien
ctgcttctgccggtgtttgctcttt

SEQ ID NO: 5376546 - DNA, 25 bp, Homo sapien
cacagctcttgcaaagccaggggag

SEQ ID NO: 5376547 - DNA, 25 bp, Homo sapien
accacagctcttgcaaagccagggg

SEQ ID NO: 5376548 - DNA, 25 bp, Homo sapien
tggttcagccgccagggcctggcca

SEQ ID NO: 5376549 - DNA, 25 bp, Homo sapien
ctggccctccttggttcagccgcca

SEQ ID NO: 5376550 - DNA, 25 bp, Homo sapien
gcatgcagaagctgatgataggaaa

SEQ ID NO: 5376551 - DNA, 25 bp, Homo sapien
agcatgcagaagctgatgataggaa

SEQ ID NO: 5376552 - DNA, 25 bp, Homo sapien
ccacagcacttgtagcacgtcacat

SEQ ID NO: 5376553 - DNA, 25 bp, Homo sapien
acttgtagcacgtcacatagtcggg

SEQ ID NO: 5376554 - DNA, 25 bp, Homo sapien
ttcccacagcacttgtagcacgtca

SEQ ID NO: 5376555 - DNA, 25 bp, Homo sapien
cagcacttgtagcacgtcacatagt

SEQ ID NO: 5376556 - DNA, 25 bp, Homo sapien
ttccaacataatggagcagggagag

SEQ ID NO: 5376557 - DNA, 25 bp, Homo sapien
tgctgaagcccatagtctctggaaa

SEQ ID NO: 5376558 - DNA, 25 bp, Homo sapien
caaattggcccaagtaatcaaaagt

SEQ ID NO: 5376559 - DNA, 25 bp, Homo sapien
ccacattccaaattggcccaagtaa

SEQ ID NO: 5376560 - DNA, 25 bp, Homo sapien
tgtcttcttccttgtggggtctcac

SEQ ID NO: 5376561 - DNA, 25 bp, Homo sapien
ctgctcttgtcttcttccttgtggg

SEQ ID NO: 5376562 - DNA, 25 bp, Homo sapien
tgctcttgtcttcttccttgtgggg

SEQ ID NO: 5376563 - DNA, 25 bp, Homo sapien
tcttgtcttcttccttgtggggtct

SEQ ID NO: 5376564 - DNA, 25 bp, Homo sapien
gtggaagagcttgagtggaaaaatc

SEQ ID NO: 5376565 - DNA, 25 bp, Homo sapien
gaagagcttgagtggaaaaatccac

SEQ ID NO: 5376566 - DNA, 25 bp, Homo sapien
tggaagagcttgagtggaaaaatcc

SEQ ID NO: 5376567 - DNA, 25 bp, Homo sapien
gcaccctctggcttctcagtggagg

SEQ ID NO: 5376568 - DNA, 25 bp, Homo sapien
aggcaacgcttgcaggcctttctaa

SEQ ID NO: 5376569 - DNA, 25 bp, Homo sapien
gggcagcgaccaccatgtactgaag

SEQ ID NO: 5376570 - DNA, 25 bp, Homo sapien
gcttctggatccagatgcatgaccg

SEQ ID NO: 5376571 - DNA, 25 bp, Homo sapien
atgcatgaccggacagggcagcgac

SEQ ID NO: 5376572 - DNA, 25 bp, Homo sapien
tgtgccagagcctgtacttggaatt

SEQ ID NO: 5376573 - DNA, 25 bp, Homo sapien
tgttgctctagcgtcttccaaggcc

SEQ ID NO: 5376574 - DNA, 25 bp, Homo sapien
gcatttctccaaattgggagtcaaa

SEQ ID NO: 5376575 - DNA, 25 bp, Homo sapien
gagtgcatgctgttgctctagcgtc

SEQ ID NO: 5376576 - DNA, 25 bp, Homo sapien
gtcaaaactcatgagtgcatgctgt

SEQ ID NO: 5376577 - DNA, 25 bp, Homo sapien
cgagtgcgcggcgcaggcgagcagc

SEQ ID NO: 5376578 - DNA, 25 bp, Homo sapien
gcgagcagcaccggcagtagtagct

SEQ ID NO: 5376579 - DNA, 25 bp, Homo sapien
gtgcgcggcgcaggcgagcagcacc

SEQ ID NO: 5376580 - DNA, 25 bp, Homo sapien
cgagcagcaccggcagtagtagctg

SEQ ID NO: 5376581 - DNA, 25 bp, Homo sapien
gtgcccgcacgttccccgagggcgc

SEQ ID NO: 5376582 - DNA, 25 bp, Homo sapien
agccatggctgagccacccgacctg

SEQ ID NO: 5376583 - DNA, 25 bp, Homo sapien
cattgatcaggacgcggctttgccg

SEQ ID NO: 5376584 - DNA, 25 bp, Homo sapien
cctctgcccgctcgggagctcagcg

SEQ ID NO: 5376585 - DNA, 25 bp, Homo sapien
tcagcttgtcaagggaaacactgct

SEQ ID NO: 5376586 - DNA, 25 bp, Homo sapien
tatgaaagcatctgaccagggtgac

SEQ ID NO: 5376587 - DNA, 25 bp, Homo sapien
tatgtgccccaagcttgaagttgat

SEQ ID NO: 5376588 - DNA, 25 bp, Homo sapien
gagcgagacctcatcactaagaagt

SEQ ID NO: 5376589 - DNA, 25 bp, Homo sapien
tctcaaagagacatcatagctaagg

SEQ ID NO: 5376590 - DNA, 25 bp, Homo sapien
cactgcctgacgttaggaactctgc

SEQ ID NO: 5376591 - DNA, 25 bp, Homo sapien
tatcagaaacctagggcccctgaac

SEQ ID NO: 5376592 - DNA, 25 bp, Homo sapien
tgtgcgcaaactgcaatgaaccttt

SEQ ID NO: 5376593 - DNA, 25 bp, Homo sapien
atgagcacaaggacaccaagcgcac

SEQ ID NO: 5376594 - DNA, 25 bp, Homo sapien
acaaggacaccaagcgcactgtacc

SEQ ID NO: 5376595 - DNA, 25 bp, Homo sapien
gaagcaccttctagcaaagaatgaa

SEQ ID NO: 5376596 - DNA, 25 bp, Homo sapien
ggaagcaccttctagcaaagaatga

SEQ ID NO: 5376597 - DNA, 25 bp, Homo sapien
tggcagtggttgcacacagcgtggc

SEQ ID NO: 5376598 - DNA, 25 bp, Homo sapien
aatatacccttgatgggtggcagtg

SEQ ID NO: 5376599 - DNA, 25 bp, Homo sapien
gtgctcaatatacccttgatgggtg

SEQ ID NO: 5376600 - DNA, 25 bp, Homo sapien
gggtggcagtggttgcacacagcgt

SEQ ID NO: 5376601 - DNA, 25 bp, Homo sapien
tacaggtacgagtccccatgcctga

SEQ ID NO: 5376602 - DNA, 25 bp, Homo sapien
gagagtgtcattgagaggctgccta

SEQ ID NO: 5376603 - DNA, 25 bp, Homo sapien
cctgagctaaagtaaactgggctga

SEQ ID NO: 5376604 - DNA, 25 bp, Homo sapien
acccttcccgacacatgagaacacg

SEQ ID NO: 5376605 - DNA, 25 bp, Homo sapien
catcttctggaaggtacttggcagc

SEQ ID NO: 5376606 - DNA, 25 bp, Homo sapien
tcttctggaaggtacttggcagcag

SEQ ID NO: 5376607 - DNA, 25 bp, Homo sapien
atcttctggaaggtacttggcagca

SEQ ID NO: 5376608 - DNA, 25 bp, Homo sapien
tggtccacttcagggttaagcacag

SEQ ID NO: 5376609 - DNA, 25 bp, Homo sapien
ggaaggcccttctggttccatagct

SEQ ID NO: 5376610 - DNA, 25 bp, Homo sapien
ctggtccacttcagggttaagcaca

SEQ ID NO: 5376611 - DNA, 25 bp, Homo sapien
aaggcccttctggttccatagctgt

SEQ ID NO: 5376612 - DNA, 25 bp, Homo sapien
tggaccatgtcgctgttcaggaagt

SEQ ID NO: 5376613 - DNA, 25 bp, Homo sapien
ccagtactggaccatgtcgctgttc

SEQ ID NO: 5376614 - DNA, 25 bp, Homo sapien
tactggaccatgtcgctgttcagga

SEQ ID NO: 5376615 - DNA, 25 bp, Homo sapien
catgtcgctgttcaggaagtgtttg

SEQ ID NO: 5376616 - DNA, 25 bp, Homo sapien
tcagccaccgatccccaggtccgga

SEQ ID NO: 5376617 - DNA, 25 bp, Homo sapien
ggagaggctgctgcggcaaggcctg

SEQ ID NO: 5376618 - DNA, 25 bp, Homo sapien
tcctgacacctgattgtcctgtgct

SEQ ID NO: 5376619 - DNA, 25 bp, Homo sapien
gagccacgtgcccacgtcctgacac

SEQ ID NO: 5376620 - DNA, 25 bp, Homo sapien
gcttttgttctagcttcactctgtt

SEQ ID NO: 5376621 - DNA, 25 bp, Homo sapien
tagcttcactctgttgttgaaatcc

SEQ ID NO: 5376622 - DNA, 25 bp, Homo sapien
gtgtctggaagcttttgttctagct

SEQ ID NO: 5376623 - DNA, 25 bp, Homo sapien
tgttctagcttcactctgttgttga

SEQ ID NO: 5376624 - DNA, 25 bp, Homo sapien
gacttgacaacccagagagaatgct

SEQ ID NO: 5376625 - DNA, 25 bp, Homo sapien
gccccatggccgatctgctgtagga

SEQ ID NO: 5376626 - DNA, 25 bp, Homo sapien
agcatttccgagacatgagctcatg

SEQ ID NO: 5376627 - DNA, 25 bp, Homo sapien
taaaaatggaagcagccggcaattg

SEQ ID NO: 5376628 - DNA, 25 bp, Homo sapien
agactttacatcaggctttgttcca

SEQ ID NO: 5376629 - DNA, 25 bp, Homo sapien
gagtcgcacccagactttacatcag

SEQ ID NO: 5376630 - DNA, 25 bp, Homo sapien
caggccggtctgagtcgcacccaga

SEQ ID NO: 5376631 - DNA, 25 bp, Homo sapien
cacccagactttacatcaggctttg

SEQ ID NO: 5376632 - DNA, 25 bp, Homo sapien
gcggatgtgcggctccttgcactat

SEQ ID NO: 5376633 - DNA, 25 bp, Homo sapien
tctcagcactgtgcggatgtgcggc

SEQ ID NO: 5376634 - DNA, 25 bp, Homo sapien
cactgtgcggatgtgcggctccttg

SEQ ID NO: 5376635 - DNA, 25 bp, Homo sapien
cggctccttgcactattttgttctg

SEQ ID NO: 5376636 - DNA, 25 bp, Homo sapien
aataatggttgtcctctcagggaaa

SEQ ID NO: 5376637 - DNA, 25 bp, Homo sapien
ccactaataatggttgtcctctcag

SEQ ID NO: 5376638 - DNA, 25 bp, Homo sapien
ctaataatggttgtcctctcaggga

SEQ ID NO: 5376639 - DNA, 25 bp, Homo sapien
aatggttgtcctctcagggaaagca

SEQ ID NO: 5376640 - DNA, 25 bp, Homo sapien
ctggagaaactgggcaccacaggca

SEQ ID NO: 5376641 - DNA, 25 bp, Homo sapien
ggcaccgtgtctgtgggctcaaaag

SEQ ID NO: 5376642 - DNA, 25 bp, Homo sapien
aaggctgacagtttggaaccatctg

SEQ ID NO: 5376643 - DNA, 25 bp, Homo sapien
gtctgtgggctcaaaaggctgacag

SEQ ID NO: 5376644 - DNA, 25 bp, Homo sapien
tataactctctttgatttgtccagc

SEQ ID NO: 5376645 - DNA, 25 bp, Homo sapien
ctttaataacttgggttgcttgcat

SEQ ID NO: 5376646 - DNA, 25 bp, Homo sapien
ggttgcttgcatttttataactctc

SEQ ID NO: 5376647 - DNA, 25 bp, Homo sapien
actctctttgatttgtccagctcca

SEQ ID NO: 5376648 - DNA, 25 bp, Homo sapien
tcggttgctatgctgcggcctagga

SEQ ID NO: 5376649 - DNA, 25 bp, Homo sapien
tgcgacttctccctgcgctagcgag

SEQ ID NO: 5376650 - DNA, 25 bp, Homo sapien
tctgcgctccgactggtgcgacttc

SEQ ID NO: 5376651 - DNA, 25 bp, Homo sapien
tcgcgagatcgcctcctgttgctgc

SEQ ID NO: 5376652 - DNA, 25 bp, Homo sapien
gcgcagtgcgcttttccgctcctcg

SEQ ID NO: 5376653 - DNA, 25 bp, Homo sapien
cagtgcgcttttccgctcctcgcgc

SEQ ID NO: 5376654 - DNA, 25 bp, Homo sapien
ccgcgcagtgcgcttttccgctcct

SEQ ID NO: 5376655 - DNA, 25 bp, Homo sapien
gcagtgcgcttttccgctcctcgcg

SEQ ID NO: 5376656 - DNA, 25 bp, Homo sapien
agaggacgcggctgtgatatacgaa

SEQ ID NO: 5376657 - DNA, 25 bp, Homo sapien
tctcggccctgcacgttgaacggga

SEQ ID NO: 5376658 - DNA, 25 bp, Homo sapien
gatatacgaaggtaagaggttctcc

SEQ ID NO: 5376659 - DNA, 25 bp, Homo sapien
ggaggacgcgcttctcctctgcgcg

SEQ ID NO: 5376660 - DNA, 25 bp, Homo sapien
tcttcctcatcacttactgtaccca

SEQ ID NO: 5376661 - DNA, 25 bp, Homo sapien
atacagtctgccaatatggcatcct

SEQ ID NO: 5376662 - DNA, 25 bp, Homo sapien
cagtctgccaatatggcatcctgtg

SEQ ID NO: 5376663 - DNA, 25 bp, Homo sapien
cttcctcatcacttactgtacccat

SEQ ID NO: 5376664 - DNA, 25 bp, Homo sapien
tcactgcttcccctgggtaattgtc

SEQ ID NO: 5376665 - DNA, 25 bp, Homo sapien
tcccctgggtaattgtctgtcctga

SEQ ID NO: 5376666 - DNA, 25 bp, Homo sapien
gatgtgctctgctgatcataatact

SEQ ID NO: 5376667 - DNA, 25 bp, Homo sapien
gtcctgattcccatgtggattcaag

SEQ ID NO: 5376668 - DNA, 25 bp, Homo sapien
tttgaatcactgtgagatgactttc

SEQ ID NO: 5376669 - DNA, 25 bp, Homo sapien
atcactgtgagatgactttcatttt

SEQ ID NO: 5376670 - DNA, 25 bp, Homo sapien
tgaatcactgtgagatgactttcat

SEQ ID NO: 5376671 - DNA, 25 bp, Homo sapien
gaatcactgtgagatgactttcatt

SEQ ID NO: 5376672 - DNA, 25 bp, Homo sapien
tgctgtggcgacctagctgggtgtg

SEQ ID NO: 5376673 - DNA, 25 bp, Homo sapien
ttccaagttggcagagtgggaaacc

SEQ ID NO: 5376674 - DNA, 25 bp, Homo sapien
cggagcctgcgggagctgggaacag

SEQ ID NO: 5376675 - DNA, 25 bp, Homo sapien
tgtgcgcagggtggtgataacacac

SEQ ID NO: 5376676 - DNA, 25 bp, Homo sapien
tctaatctaaggaagcacgtgtgca

SEQ ID NO: 5376677 - DNA, 25 bp, Homo sapien
actcagaaagataaggaaggctccc

SEQ ID NO: 5376678 - DNA, 25 bp, Homo sapien
gaaggctccctcaggtcacagttta

SEQ ID NO: 5376679 - DNA, 25 bp, Homo sapien
catggccaaccgttttcatggtgga

SEQ ID NO: 5376680 - DNA, 25 bp, Homo sapien
tagtgtagtagtctccaaagaaagg

SEQ ID NO: 5376681 - DNA, 25 bp, Homo sapien
catgtgatagtagagaggtcagaac

SEQ ID NO: 5376682 - DNA, 25 bp, Homo sapien
taagaaaattaacggctgtctccac

SEQ ID NO: 5376683 - DNA, 25 bp, Homo sapien
cattgagtgggtttgcgttatcgta

SEQ ID NO: 5376684 - DNA, 25 bp, Homo sapien
catttactagcttcctccaagggtg

SEQ ID NO: 5376685 - DNA, 25 bp, Homo sapien
catcctcaaggtggtgttctctgtg

SEQ ID NO: 5376686 - DNA, 25 bp, Homo sapien
gaagttagcacccttgagtaatcaa

SEQ ID NO: 5376687 - DNA, 25 bp, Homo sapien
tttcttcaaacgcacataatgtctg

SEQ ID NO: 5376688 - DNA, 25 bp, Homo sapien
gaaagccttgttaagctcataaaag

SEQ ID NO: 5376689 - DNA, 25 bp, Homo sapien
taatccaagctaaatgggcaaccag

SEQ ID NO: 5376690 - DNA, 25 bp, Homo sapien
tctatggacagaaggttgaaactgt

SEQ ID NO: 5376691 - DNA, 25 bp, Homo sapien
tatctgctagggtgcaatccatcag

SEQ ID NO: 5376692 - DNA, 25 bp, Homo sapien
gatgctgcacaagtaagtttaaggg

SEQ ID NO: 5376693 - DNA, 25 bp, Homo sapien
gtcccgacactttatatacatgttg

SEQ ID NO: 5376694 - DNA, 25 bp, Homo sapien
cagtgtaggcttaattttagaaccg

SEQ ID NO: 5376695 - DNA, 25 bp, Homo sapien
tactccttattctctacagtgtagg

SEQ ID NO: 5376696 - DNA, 25 bp, Homo sapien
ctaagtgcagttagatatgctgttt

SEQ ID NO: 5376697 - DNA, 25 bp, Homo sapien
taagtgcagttagatatgctgtttt

SEQ ID NO: 5376698 - DNA, 25 bp, Homo sapien
gaagacatcgttactgacaacagtt

SEQ ID NO: 5376699 - DNA, 25 bp, Homo sapien
tcctgtcttggaacttgaccttggc

SEQ ID NO: 5376700 - DNA, 25 bp, Homo sapien
catcttgttcctgtcttggaacttg

SEQ ID NO: 5376701 - DNA, 25 bp, Homo sapien
gcctctcttcgggccctgcgtttaa

SEQ ID NO: 5376702 - DNA, 25 bp, Homo sapien
cagtagatgatttgatgtagttata

SEQ ID NO: 5376703 - DNA, 25 bp, Homo sapien
cttgtgggcagtagatgatttgatg

SEQ ID NO: 5376704 - DNA, 25 bp, Homo sapien
gggcagtagatgatttgatgtagtt

SEQ ID NO: 5376705 - DNA, 25 bp, Homo sapien
tgtgggcagtagatgatttgatgta

SEQ ID NO: 5376706 - DNA, 25 bp, Homo sapien
tttcacaaaagacttgatgtttgac

SEQ ID NO: 5376707 - DNA, 25 bp, Homo sapien
tggctatcttcttgcctatggcagc

SEQ ID NO: 5376708 - DNA, 25 bp, Homo sapien
ctcttggctatcttcttgcctatgg

SEQ ID NO: 5376709 - DNA, 25 bp, Homo sapien
gcagggatagtggtcaattccagcc

SEQ ID NO: 5376710 - DNA, 25 bp, Homo sapien
ctatcttcttgcctatggcagctgt

SEQ ID NO: 5376711 - DNA, 25 bp, Homo sapien
aggcgatctgaggtgccatcatcaa

SEQ ID NO: 5376712 - DNA, 25 bp, Homo sapien
agaggcgatctgaggtgccatcatc

SEQ ID NO: 5376713 - DNA, 25 bp, Homo sapien
ctgcagaggcgatctgaggtgccat

SEQ ID NO: 5376714 - DNA, 25 bp, Homo sapien
gcagaggcgatctgaggtgccatca

SEQ ID NO: 5376715 - DNA, 25 bp, Homo sapien
cagggtagtgtatggccaggacaaa

SEQ ID NO: 5376716 - DNA, 25 bp, Homo sapien
agggtagtgtatggccaggacaaac

SEQ ID NO: 5376717 - DNA, 25 bp, Homo sapien
tccagggtagtgtatggccaggaca

SEQ ID NO: 5376718 - DNA, 25 bp, Homo sapien
ccagggtagtgtatggccaggacaa

SEQ ID NO: 5376719 - DNA, 25 bp, Homo sapien
cccaggttttcatgaacttgctcat

SEQ ID NO: 5376720 - DNA, 25 bp, Homo sapien
ctttcccaggttttcatgaacttgc

SEQ ID NO: 5376721 - DNA, 25 bp, Homo sapien
ttcccaggttttcatgaacttgctc

SEQ ID NO: 5376722 - DNA, 25 bp, Homo sapien
tcccaggttttcatgaacttgctca

SEQ ID NO: 5376723 - DNA, 25 bp, Homo sapien
attgttctctggcattaacggtgct

SEQ ID NO: 5376724 - DNA, 25 bp, Homo sapien
tctctggcattaacggtgctaagaa

SEQ ID NO: 5376725 - DNA, 25 bp, Homo sapien
taatgtccctaaactgcacattttc

SEQ ID NO: 5376726 - DNA, 25 bp, Homo sapien
gcattaacggtgctaagaataatgt

SEQ ID NO: 5376727 - DNA, 25 bp, Homo sapien
acttgtctacactagttattctagt

SEQ ID NO: 5376728 - DNA, 25 bp, Homo sapien
ttgtgcatgcatcacgtcattctcg

SEQ ID NO: 5376729 - DNA, 25 bp, Homo sapien
gacttgtctacactagttattctag

SEQ ID NO: 5376730 - DNA, 25 bp, Homo sapien
catgcatcacgtcattctcgtgcca

SEQ ID NO: 5376731 - DNA, 25 bp, Homo sapien
tcagtagagtatgctagatgagtaa

SEQ ID NO: 5376732 - DNA, 25 bp, Homo sapien
tccatctacatgactatttgaccag

SEQ ID NO: 5376733 - DNA, 25 bp, Homo sapien
gagatggaaacaagtcaatatccac

SEQ ID NO: 5376734 - DNA, 25 bp, Homo sapien
caattgtctgagatggatatgataa

SEQ ID NO: 5376735 - DNA, 25 bp, Homo sapien
ccaatgcagacatgacgttacttca

SEQ ID NO: 5376736 - DNA, 25 bp, Homo sapien
cctcctgatccagcgtataataaag

SEQ ID NO: 5376737 - DNA, 25 bp, Homo sapien
ggtgggtgaataaccatatgccctt

SEQ ID NO: 5376738 - DNA, 25 bp, Homo sapien
gctggctaatgagaatcccaatgca

SEQ ID NO: 5376739 - DNA, 25 bp, Homo sapien
gcagacgcgcaagtgccttatatga

SEQ ID NO: 5376740 - DNA, 25 bp, Homo sapien
gagataccaaaatccgcagacgcgc

SEQ ID NO: 5376741 - DNA, 25 bp, Homo sapien
ggctgggaggagaagtctactcaaa

SEQ ID NO: 5376742 - DNA, 25 bp, Homo sapien
agaccttgttagtatagtccctcag

SEQ ID NO: 5376743 - DNA, 25 bp, Homo sapien
accactgcgcttcattctgagtgac

SEQ ID NO: 5376744 - DNA, 25 bp, Homo sapien
tgttagccaggagtgcccggctgta

SEQ ID NO: 5376745 - DNA, 25 bp, Homo sapien
gctacagatgaattggatgccttgc

SEQ ID NO: 5376746 - DNA, 25 bp, Homo sapien
gatcacacagttgcacctcaggtaa

SEQ ID NO: 5376747 - DNA, 25 bp, Homo sapien
ggtttccctccatgcagaagtggaa

SEQ ID NO: 5376748 - DNA, 25 bp, Homo sapien
gggataaagcagtttcttgagacaa

SEQ ID NO: 5376749 - DNA, 25 bp, Homo sapien
tgtattaagtatagttgtccctcag

SEQ ID NO: 5376750 - DNA, 25 bp, Homo sapien
tgagagcgtaagaatggcattgaac

SEQ ID NO: 5376751 - DNA, 25 bp, Homo sapien
caaatcacatgtctctataagcctt

SEQ ID NO: 5376752 - DNA, 25 bp, Homo sapien
cattgtttcctatttggacatagac

SEQ ID NO: 5376753 - DNA, 25 bp, Homo sapien
gcactcctccgagcccggtggagaa

SEQ ID NO: 5376754 - DNA, 25 bp, Homo sapien
tgcactcctccgagcccggtggaga

SEQ ID NO: 5376755 - DNA, 25 bp, Homo sapien
tatttggacatagacttcatttcct

SEQ ID NO: 5376756 - DNA, 25 bp, Homo sapien
taatcttgttccaggttaggaactc

SEQ ID NO: 5376757 - DNA, 25 bp, Homo sapien
ggtttgctgctgattcttaatcttg

SEQ ID NO: 5376758 - DNA, 25 bp, Homo sapien
ccaggttaggaactcttgcaaatac

SEQ ID NO: 5376759 - DNA, 25 bp, Homo sapien
taggaactcttgcaaatacggaagc

SEQ ID NO: 5376760 - DNA, 25 bp, Homo sapien
tgccatgcatggaagccctcagctt

SEQ ID NO: 5376761 - DNA, 25 bp, Homo sapien
gacccctggtgaattgttgaacaag

SEQ ID NO: 5376762 - DNA, 25 bp, Homo sapien
gggcagctatcaccaacaactgagg

SEQ ID NO: 5376763 - DNA, 25 bp, Homo sapien
tgggagctcatcttccacaccgtca

SEQ ID NO: 5376764 - DNA, 25 bp, Homo sapien
gtcgtccaagatcctgtcccagagt

SEQ ID NO: 5376765 - DNA, 25 bp, Homo sapien
catgagtggccagtcatatttcagc

SEQ ID NO: 5376766 - DNA, 25 bp, Homo sapien
tactgccggcactgggttaaagcct

SEQ ID NO: 5376767 - DNA, 25 bp, Homo sapien
gaaagggccaggtcaaaatgccagc

SEQ ID NO: 5376768 - DNA, 25 bp, Homo sapien
tacaggacactttgcatgggcaggg

SEQ ID NO: 5376769 - DNA, 25 bp, Homo sapien
tcctgcccggctgaatgacctgtat

SEQ ID NO: 5376770 - DNA, 25 bp, Homo sapien
ttgtggagcagacgtgatcagaccc

SEQ ID NO: 5376771 - DNA, 25 bp, Homo sapien
tctgccatgagaaagaacacggccc

SEQ ID NO: 5376772 - DNA, 25 bp, Homo sapien
tacacctgaaagtgcgaacctggaa

SEQ ID NO: 5376773 - DNA, 25 bp, Homo sapien
aagaaacactgtacctgccgggtgc

SEQ ID NO: 5376774 - DNA, 25 bp, Homo sapien
gaaagcaagtctcttacccaggtac

SEQ ID NO: 5376775 - DNA, 25 bp, Homo sapien
ggcggtgatctcaaacacggcgtga

SEQ ID NO: 5376776 - DNA, 25 bp, Homo sapien
caggcaaaggaacgacatgaggatc

SEQ ID NO: 5376777 - DNA, 25 bp, Homo sapien
gatgttgaccgagcacaggatctcc

SEQ ID NO: 5376778 - DNA, 25 bp, Homo sapien
gaccaggacttcgaacatgagcagc

SEQ ID NO: 5376779 - DNA, 25 bp, Homo sapien
cgatgtaatagaggacgaccaggca

SEQ ID NO: 5376780 - DNA, 25 bp, Homo sapien
ggcctctccctcggtgcggtagcga

SEQ ID NO: 5376781 - DNA, 25 bp, Homo sapien
aggcctctccctcggtgcggtagcg

SEQ ID NO: 5376782 - DNA, 25 bp, Homo sapien
caggcaggtgtagatgagaaactta

SEQ ID NO: 5376783 - DNA, 25 bp, Homo sapien
acggaggcgcctgcgacgactagaa

SEQ ID NO: 5376784 - DNA, 25 bp, Homo sapien
gacgactagaagcttccacagccat

SEQ ID NO: 5376785 - DNA, 25 bp, Homo sapien
aaagacggcccagtagctccattgg

SEQ ID NO: 5376786 - DNA, 25 bp, Homo sapien
caagaaggcacctaatgcgtgtggg

SEQ ID NO: 5376787 - DNA, 25 bp, Homo sapien
cggttacaaactgggcgctgcctcg

SEQ ID NO: 5376788 - DNA, 25 bp, Homo sapien
ttccaggcgactccgggaacatgga

SEQ ID NO: 5376789 - DNA, 25 bp, Homo sapien
accttgggcggacgcttccaggcga

SEQ ID NO: 5376790 - DNA, 25 bp, Homo sapien
cctgaattatggaattaggcaatcc

SEQ ID NO: 5376791 - DNA, 25 bp, Homo sapien
taggcaatccaggtatcaattgtac

SEQ ID NO: 5376792 - DNA, 25 bp, Homo sapien
gatgtgcttcctgcgtcagaaacag

SEQ ID NO: 5376793 - DNA, 25 bp, Homo sapien
ccaagagagtgtgatgtggacaaat

SEQ ID NO: 5376794 - DNA, 25 bp, Homo sapien
caccgaataacgctgaaagagccca

SEQ ID NO: 5376795 - DNA, 25 bp, Homo sapien
tgttcccaaggaccgagcacttttc

SEQ ID NO: 5376796 - DNA, 25 bp, Homo sapien
agactgcctgctagtgcccggtagg

SEQ ID NO: 5376797 - DNA, 25 bp, Homo sapien
cacttttccacgcagttaaggtgca

SEQ ID NO: 5376798 - DNA, 25 bp, Homo sapien
caagtcagaatccttgcgggtgagg

SEQ ID NO: 5376799 - DNA, 25 bp, Homo sapien
aagtcagaatccttgcgggtgaggc

SEQ ID NO: 5376800 - DNA, 25 bp, Homo sapien
acagatacatcagcaaaaggaaact

SEQ ID NO: 5376801 - DNA, 25 bp, Homo sapien
gaagtggtttacgactattgatgcc

SEQ ID NO: 5376802 - DNA, 25 bp, Homo sapien
gaaacttcaggaacaatatggtcgg

SEQ ID NO: 5376803 - DNA, 25 bp, Homo sapien
tattgatgccacaacaacagataca

SEQ ID NO: 5376804 - DNA, 25 bp, Homo sapien
tcagaacgaggggctgtcgggccag

SEQ ID NO: 5376805 - DNA, 25 bp, Homo sapien
cagaacgaggggctgtcgggccagg

SEQ ID NO: 5376806 - DNA, 25 bp, Homo sapien
aagtgcagcccaggtgtctgacaac

SEQ ID NO: 5376807 - DNA, 25 bp, Homo sapien
tgctttcccaggctcgttgcacagg

SEQ ID NO: 5376808 - DNA, 25 bp, Homo sapien
tcgttgcacaggcaagtgcagccca

SEQ ID NO: 5376809 - DNA, 25 bp, Homo sapien
gcagcccaggtgtctgacaactttg

SEQ ID NO: 5376810 - DNA, 25 bp, Homo sapien
ggtgaagatccatggagtgcctgct

SEQ ID NO: 5376811 - DNA, 25 bp, Homo sapien
ggtggccctggctgtaaataatccc

SEQ ID NO: 5376812 - DNA, 25 bp, Homo sapien
tcaggagagaatctagttcacaggg

SEQ ID NO: 5376813 - DNA, 25 bp, Homo sapien
gcctgtttgcctcctaggagccaga

SEQ ID NO: 5376814 - DNA, 25 bp, Homo sapien
ttcctcaggagaagggcacatgcca

SEQ ID NO: 5376815 - DNA, 25 bp, Homo sapien
tcctcaggagaagggcacatgccac

SEQ ID NO: 5376816 - DNA, 25 bp, Homo sapien
ctcaggagaagggcacatgccactg

SEQ ID NO: 5376817 - DNA, 25 bp, Homo sapien
cctcaggagaagggcacatgccact

SEQ ID NO: 5376818 - DNA, 25 bp, Homo sapien
caccccgtggcggcttttatctggt

SEQ ID NO: 5376819 - DNA, 25 bp, Homo sapien
tcaccccgtggcggcttttatctgg

SEQ ID NO: 5376820 - DNA, 25 bp, Homo sapien
cagctgttgttcccgtgcaggttgt

SEQ ID NO: 5376821 - DNA, 25 bp, Homo sapien
tgttgttcccgtgcaggttgtggga

SEQ ID NO: 5376822 - DNA, 25 bp, Homo sapien
gctgttgttcccgtgcaggttgtgg

SEQ ID NO: 5376823 - DNA, 25 bp, Homo sapien
tgttcccgtgcaggttgtgggaagc

SEQ ID NO: 5376824 - DNA, 25 bp, Homo sapien
gatacaaaatcacacgttcctgggc

SEQ ID NO: 5376825 - DNA, 25 bp, Homo sapien
tgactctcatgaggtctgcgtaggg

SEQ ID NO: 5376826 - DNA, 25 bp, Homo sapien
gaaaatccaccgagatgaagctgta

SEQ ID NO: 5376827 - DNA, 25 bp, Homo sapien
cagttgcgatggcttgtgactctca

SEQ ID NO: 5376828 - DNA, 25 bp, Homo sapien
agcactcttcgccacctcgtaattt

SEQ ID NO: 5376829 - DNA, 25 bp, Homo sapien
taatgggatgtcatcagcgaagcga

SEQ ID NO: 5376830 - DNA, 25 bp, Homo sapien
attacttcgtcctagccctggcctg

SEQ ID NO: 5376831 - DNA, 25 bp, Homo sapien
gatcaggtctgtccttcgcttttgc

SEQ ID NO: 5376832 - DNA, 25 bp, Homo sapien
ccctccgtgccgggctgtggccggg

SEQ ID NO: 5376833 - DNA, 25 bp, Homo sapien
ctccctccgtgccgggctgtggccg

SEQ ID NO: 5376834 - DNA, 25 bp, Homo sapien
tccctccgtgccgggctgtggccgg

SEQ ID NO: 5376835 - DNA, 25 bp, Homo sapien
ttgattagtactttcagatagctga

SEQ ID NO: 5376836 - DNA, 25 bp, Homo sapien
ggactctttttagaatgtattggca

SEQ ID NO: 5376837 - DNA, 25 bp, Homo sapien
tgtgaaatgttaccctataccatat

SEQ ID NO: 5376838 - DNA, 25 bp, Homo sapien
tccatagggcttgtcgtatttcctt

SEQ ID NO: 5376839 - DNA, 25 bp, Homo sapien
gcctctagggagtgctttctcagaa

SEQ ID NO: 5376840 - DNA, 25 bp, Homo sapien
tgcatttgtgatgagcatcccaggg

SEQ ID NO: 5376841 - DNA, 25 bp, Homo sapien
tgttgtgacgtaaaatcctgggctc

SEQ ID NO: 5376842 - DNA, 25 bp, Homo sapien
tctgatgtgggcaaactgagaagca

SEQ ID NO: 5376843 - DNA, 25 bp, Homo sapien
gcttagctatgtataaagtgccaca

SEQ ID NO: 5376844 - DNA, 25 bp, Homo sapien
aatatttgtgactctgtggctggca

SEQ ID NO: 5376845 - DNA, 25 bp, Homo sapien
agtgtcaaggtgacggatgaagcca

SEQ ID NO: 5376846 - DNA, 25 bp, Homo sapien
ccatgcaagtggaagggctgctttg

SEQ ID NO: 5376847 - DNA, 25 bp, Homo sapien
tgatcagcatcactgcacacggagg

SEQ ID NO: 5376848 - DNA, 25 bp, Homo sapien
tcccaaagacgtgatgagttaaagt

SEQ ID NO: 5376849 - DNA, 25 bp, Homo sapien
tgagcctcttgctaagtgtcacaca

SEQ ID NO: 5376850 - DNA, 25 bp, Homo sapien
tgaatttgaattgcgccagataggt

SEQ ID NO: 5376851 - DNA, 25 bp, Homo sapien
ctggccctaagggttcattcaccat

SEQ ID NO: 5376852 - DNA, 25 bp, Homo sapien
gtacaaacttatgctccccgccatg

SEQ ID NO: 5376853 - DNA, 25 bp, Homo sapien
tctgcccacctacaggaagaagcct

SEQ ID NO: 5376854 - DNA, 25 bp, Homo sapien
tctgagctctggttatcttgtgtac

SEQ ID NO: 5376855 - DNA, 25 bp, Homo sapien
aagttttccctcctgtgcggtggag

SEQ ID NO: 5376856 - DNA, 25 bp, Homo sapien
ctaacatgcgagttgaagttttccc

SEQ ID NO: 5376857 - DNA, 25 bp, Homo sapien
aacatgcgagttgaagttttccctc

SEQ ID NO: 5376858 - DNA, 25 bp, Homo sapien
gaggtaaagcttatttcccgctggc

SEQ ID NO: 5376859 - DNA, 25 bp, Homo sapien
gatttgagtccaggtccgggtgacc

SEQ ID NO: 5376860 - DNA, 25 bp, Homo sapien
cgggtgacccgggtcctctcagagg

SEQ ID NO: 5376861 - DNA, 25 bp, Homo sapien
aagctcagtgttcgatggttcatcc

SEQ ID NO: 5376862 - DNA, 25 bp, Homo sapien
tcatccaaggagaggtacagggatg

SEQ ID NO: 5376863 - DNA, 25 bp, Homo sapien
taaagaggtgttcgtgtttcagacc

SEQ ID NO: 5376864 - DNA, 25 bp, Homo sapien
cagaccaatgtgagtgcttccgagc

SEQ ID NO: 5376865 - DNA, 25 bp, Homo sapien
aaaacacctctgtctgatgccgcag

SEQ ID NO: 5376866 - DNA, 25 bp, Homo sapien
caaagccgacaggatgtttagccat

SEQ ID NO: 5376867 - DNA, 25 bp, Homo sapien
gctgctcgaaggacactgcaacttt

SEQ ID NO: 5376868 - DNA, 25 bp, Homo sapien
catgggagagatgcccttctcatgc

SEQ ID NO: 5376869 - DNA, 25 bp, Homo sapien
ttccagcagggatgaaacgagccat

SEQ ID NO: 5376870 - DNA, 25 bp, Homo sapien
cctggcatcgctggatctttgctgc

SEQ ID NO: 5376871 - DNA, 25 bp, Homo sapien
ggaggcaaacgttggtggaggcgct

SEQ ID NO: 5376872 - DNA, 25 bp, Homo sapien
cttggacgaggcactgcagccagca

SEQ ID NO: 5376873 - DNA, 25 bp, Homo sapien
aatgagggactccggaggcaaacgt

SEQ ID NO: 5376874 - DNA, 25 bp, Homo sapien
ttggtggaggcgcttggacgaggca

SEQ ID NO: 5376875 - DNA, 25 bp, Homo sapien
tgtctccgccatacccttgctggtg

SEQ ID NO: 5376876 - DNA, 25 bp, Homo sapien
tagaatgtcgttcatctccagcaac

SEQ ID NO: 5376877 - DNA, 25 bp, Homo sapien
cttgctggtggcctagaatgtcgtt

SEQ ID NO: 5376878 - DNA, 25 bp, Homo sapien
tcctctggctcgtgcccattacgtg

SEQ ID NO: 5376879 - DNA, 25 bp, Homo sapien
catcgaaatcctcaatgtcactctg

SEQ ID NO: 5376880 - DNA, 25 bp, Homo sapien
cctggaggggccatcgaaatcctca

SEQ ID NO: 5376881 - DNA, 25 bp, Homo sapien
taagccacataacctttttccatcc

SEQ ID NO: 5376882 - DNA, 25 bp, Homo sapien
ttaagccacataacctttttccatc

SEQ ID NO: 5376883 - DNA, 25 bp, Homo sapien
ggcactgagtgggtaatcaagcccc

SEQ ID NO: 5376884 - DNA, 25 bp, Homo sapien
tcccctctggtggttggccaacatg

SEQ ID NO: 5376885 - DNA, 25 bp, Homo sapien
ttaaataactcgctacaggtggcgc

SEQ ID NO: 5376886 - DNA, 25 bp, Homo sapien
gaagatagcctgtgatctttccacg

SEQ ID NO: 5376887 - DNA, 25 bp, Homo sapien
cccagagggccaggtctccagacag

SEQ ID NO: 5376888 - DNA, 25 bp, Homo sapien
cagagggccaggtctccagacagga

SEQ ID NO: 5376889 - DNA, 25 bp, Homo sapien
agagggccaggtctccagacaggag

SEQ ID NO: 5376890 - DNA, 25 bp, Homo sapien
agggccaggtctccagacaggagct

SEQ ID NO: 5376891 - DNA, 25 bp, Homo sapien
ctgggatgtaaagatagagtagctc

SEQ ID NO: 5376892 - DNA, 25 bp, Homo sapien
gacaagagcgtgtgtagatagaaga

SEQ ID NO: 5376893 - DNA, 25 bp, Homo sapien
aagctcagagtggacaagagcgtgt

SEQ ID NO: 5376894 - DNA, 25 bp, Homo sapien
aaagatagagtagctccttgtctga

SEQ ID NO: 5376895 - DNA, 25 bp, Homo sapien
cagtctggcctttaggaatctgctg

SEQ ID NO: 5376896 - DNA, 25 bp, Homo sapien
actggctgggccctacttcctccag

SEQ ID NO: 5376897 - DNA, 25 bp, Homo sapien
gcctttaggaatctgctgtctggaa

SEQ ID NO: 5376898 - DNA, 25 bp, Homo sapien
agctctcccacaagctcccgttggc

SEQ ID NO: 5376899 - DNA, 25 bp, Homo sapien
ggctctcccgggcaccaagcttgct

SEQ ID NO: 5376900 - DNA, 25 bp, Homo sapien
cttcctggcgcgaggcagtgagggc

SEQ ID NO: 5376901 - DNA, 25 bp, Homo sapien
cttcgcttccgtctcagccaagttg

SEQ ID NO: 5376902 - DNA, 25 bp, Homo sapien
cagtgagggcgaggcgctcaggtgc

SEQ ID NO: 5376903 - DNA, 25 bp, Homo sapien
cagttgtataactgaaaaaggactt

SEQ ID NO: 5376904 - DNA, 25 bp, Homo sapien
ccttgccagttgtataactgaaaaa

SEQ ID NO: 5376905 - DNA, 25 bp, Homo sapien
caggtcatccttgccagttgtataa

SEQ ID NO: 5376906 - DNA, 25 bp, Homo sapien
accttttaagtgaaaatctgaattg

SEQ ID NO: 5376907 - DNA, 25 bp, Homo sapien
tggacgttctgagcagtcccttgag

SEQ ID NO: 5376908 - DNA, 25 bp, Homo sapien
gccatctgagatgaggtggacgttc

SEQ ID NO: 5376909 - DNA, 25 bp, Homo sapien
tggaaccaaagaggccaacagatca

SEQ ID NO: 5376910 - DNA, 25 bp, Homo sapien
aattttattagacggtgaggccatc

SEQ ID NO: 5376911 - DNA, 25 bp, Homo sapien
ctggtgtgaagtaaatatcctcaag

SEQ ID NO: 5376912 - DNA, 25 bp, Homo sapien
tgaagtaaatatcctcaaggcctcc

SEQ ID NO: 5376913 - DNA, 25 bp, Homo sapien
tgtgaagtaaatatcctcaaggcct

SEQ ID NO: 5376914 - DNA, 25 bp, Homo sapien
cctcaaggcctccaccatctcctga

SEQ ID NO: 5376915 - DNA, 25 bp, Homo sapien
ggtggccgcatggccagaaggttgt

SEQ ID NO: 5376916 - DNA, 25 bp, Homo sapien
tggccgcatggccagaaggttgtag

SEQ ID NO: 5376917 - DNA, 25 bp, Homo sapien
ccgcatggccagaaggttgtagccg

SEQ ID NO: 5376918 - DNA, 25 bp, Homo sapien
tcagggctcccattcatctcctgtg

SEQ ID NO: 5376919 - DNA, 25 bp, Homo sapien
caccctgtggtttgggccaaaatgg

SEQ ID NO: 5376920 - DNA, 25 bp, Homo sapien
ggccaaaatggagcgtgagatatac

SEQ ID NO: 5376921 - DNA, 25 bp, Homo sapien
gggccaaaatggagcgtgagatata

SEQ ID NO: 5376922 - DNA, 25 bp, Homo sapien
gacttgacccagaggtcctcgagga

SEQ ID NO: 5376923 - DNA, 25 bp, Homo sapien
cttccacagagggacgatgacaaga

SEQ ID NO: 5376924 - DNA, 25 bp, Homo sapien
actgccattctgaccgggacttgac

SEQ ID NO: 5376925 - DNA, 25 bp, Homo sapien
tgctttaaatgccatgcgcacattt

SEQ ID NO: 5376926 - DNA, 25 bp, Homo sapien
tcatggggttccttgttttgaccca

SEQ ID NO: 5376927 - DNA, 25 bp, Homo sapien
tcctgaagggcctggtcgctggatt

SEQ ID NO: 5376928 - DNA, 25 bp, Homo sapien
ggccccaggttggaagtgggccaca

SEQ ID NO: 5376929 - DNA, 25 bp, Homo sapien
cgtgcaggccccaggttggaagtgg

SEQ ID NO: 5376930 - DNA, 25 bp, Homo sapien
cccaggttggaagtgggccacatac

SEQ ID NO: 5376931 - DNA, 25 bp, Homo sapien
ccgtgcaggccccaggttggaagtg

SEQ ID NO: 5376932 - DNA, 25 bp, Homo sapien
cactgaagtacaggtgacctcagag

SEQ ID NO: 5376933 - DNA, 25 bp, Homo sapien
gaggaggaccaaggtgatccggctg

SEQ ID NO: 5376934 - DNA, 25 bp, Homo sapien
aaggacagcatctgtagcccgcgtg

SEQ ID NO: 5376935 - DNA, 25 bp, Homo sapien
atgggaactgtccactgaagtacag

SEQ ID NO: 5376936 - DNA, 25 bp, Homo sapien
atggccttgctgagggttctctcca

SEQ ID NO: 5376937 - DNA, 25 bp, Homo sapien
ccttgctgagggttctctccatggc

SEQ ID NO: 5376938 - DNA, 25 bp, Homo sapien
agatgccacgcaattcagtatggcc

SEQ ID NO: 5376939 - DNA, 25 bp, Homo sapien
tggccttgctgagggttctctccat

SEQ ID NO: 5376940 - DNA, 25 bp, Homo sapien
tcccacaagctgcccgtagctggag

SEQ ID NO: 5376941 - DNA, 25 bp, Homo sapien
tgcctcccacaagctgcccgtagct

SEQ ID NO: 5376942 - DNA, 25 bp, Homo sapien
ctgcctcccacaagctgcccgtagc

SEQ ID NO: 5376943 - DNA, 25 bp, Homo sapien
cctcccacaagctgcccgtagctgg

SEQ ID NO: 5376944 - DNA, 25 bp, Homo sapien
tgccctcggtctggtggtgtccctg

SEQ ID NO: 5376945 - DNA, 25 bp, Homo sapien
tccctttccctgcacggcttccgtc

SEQ ID NO: 5376946 - DNA, 25 bp, Homo sapien
gggctccttgaagccacgtctgtgg

SEQ ID NO: 5376947 - DNA, 25 bp, Homo sapien
ttccctgcacggcttccgtcccctc

SEQ ID NO: 5376948 - DNA, 25 bp, Homo sapien
gggccctggcagagtcgtccaccag

SEQ ID NO: 5376949 - DNA, 25 bp, Homo sapien
gcagagtcgtccaccaggtgtccat

SEQ ID NO: 5376950 - DNA, 25 bp, Homo sapien
tggcagagtcgtccaccaggtgtcc

SEQ ID NO: 5376951 - DNA, 25 bp, Homo sapien
cctggcagagtcgtccaccaggtgt

SEQ ID NO: 5376952 - DNA, 25 bp, Homo sapien
gacacaatgatcatctggtggactt

SEQ ID NO: 5376953 - DNA, 25 bp, Homo sapien
taggctgtacaccagtgccaggagt

SEQ ID NO: 5376954 - DNA, 25 bp, Homo sapien
tggactttgagtggtggaccaagct

SEQ ID NO: 5376955 - DNA, 25 bp, Homo sapien
caggccatgacacaatgatcatctg

SEQ ID NO: 5376956 - DNA, 25 bp, Homo sapien
ctggccagagggctttcccacgagg

SEQ ID NO: 5376957 - DNA, 25 bp, Homo sapien
gctgggcactgtgcgagcttccatg

SEQ ID NO: 5376958 - DNA, 25 bp, Homo sapien
cactgtgcgagcttccatgtgccgc

SEQ ID NO: 5376959 - DNA, 25 bp, Homo sapien
ggctggccagagggctttcccacga

SEQ ID NO: 5376960 - DNA, 25 bp, Homo sapien
gcgtgataacacagagtgacaccca

SEQ ID NO: 5376961 - DNA, 25 bp, Homo sapien
ggcgtgataacacagagtgacaccc

SEQ ID NO: 5376962 - DNA, 25 bp, Homo sapien
tggcgtgataacacagagtgacacc

SEQ ID NO: 5376963 - DNA, 25 bp, Homo sapien
ctggcgtgataacacagagtgacac

SEQ ID NO: 5376964 - DNA, 25 bp, Homo sapien
ctcagggtaggcacatgacgatacg

SEQ ID NO: 5376965 - DNA, 25 bp, Homo sapien
atgacgatacgtggccaactggaca

SEQ ID NO: 5376966 - DNA, 25 bp, Homo sapien
ggtaggcacatgacgatacgtggcc

SEQ ID NO: 5376967 - DNA, 25 bp, Homo sapien
cacatgacgatacgtggccaactgg

SEQ ID NO: 5376968 - DNA, 25 bp, Homo sapien
cattgaatattagtagtaaaacaaa

SEQ ID NO: 5376969 - DNA, 25 bp, Homo sapien
gccaccattgaatattagtagtaaa

SEQ ID NO: 5376970 - DNA, 25 bp, Homo sapien
tgcagcctgactttgccacatggcc

SEQ ID NO: 5376971 - DNA, 25 bp, Homo sapien
agccgagggtaccaccttctgtggt

SEQ ID NO: 5376972 - DNA, 25 bp, Homo sapien
gagggtctccgcatctctggcataa

SEQ ID NO: 5376973 - DNA, 25 bp, Homo sapien
ggtcactgtgaaccggactctgcag

SEQ ID NO: 5376974 - DNA, 25 bp, Homo sapien
ggtgaccgccggcacaatcaactgc

SEQ ID NO: 5376975 - DNA, 25 bp, Homo sapien
ggcacaatcaactgcccccagtggg

SEQ ID NO: 5376976 - DNA, 25 bp, Homo sapien
tacggtgaccgccggcacaatcaac

SEQ ID NO: 5376977 - DNA, 25 bp, Homo sapien
cttctacggtgaccgccggcacaat

SEQ ID NO: 5376978 - DNA, 25 bp, Homo sapien
ttcttgtctgcagcacgggatatga

SEQ ID NO: 5376979 - DNA, 25 bp, Homo sapien
gggatatgaatatttgccctgcctg

SEQ ID NO: 5376980 - DNA, 25 bp, Homo sapien
gtctgcagcacgggatatgaatatt

SEQ ID NO: 5376981 - DNA, 25 bp, Homo sapien
ttgtctgcagcacgggatatgaata

SEQ ID NO: 5376982 - DNA, 25 bp, Homo sapien
atcagcatcatggccggctctccaa

SEQ ID NO: 5376983 - DNA, 25 bp, Homo sapien
ccctgggcagttggcgtcagccagc

SEQ ID NO: 5376984 - DNA, 25 bp, Homo sapien
tctccaaggtgtccgggccctgggc

SEQ ID NO: 5376985 - DNA, 25 bp, Homo sapien
atggccggctctccaaggtgtccgg

SEQ ID NO: 5376986 - DNA, 25 bp, Homo sapien
ttgacaatgagtcctccagcccgaa

SEQ ID NO: 5376987 - DNA, 25 bp, Homo sapien
attgctgccgcggaacatgcctgcg

SEQ ID NO: 5376988 - DNA, 25 bp, Homo sapien
tgcctgcgcctttcagggccgggtt

SEQ ID NO: 5376989 - DNA, 25 bp, Homo sapien
cagcccgaacagaaaccctttatgg

SEQ ID NO: 5376990 - DNA, 25 bp, Homo sapien
aaggctccagaacccggcaagtgca

SEQ ID NO: 5376991 - DNA, 25 bp, Homo sapien
cgcacgggccccgaaggctccagaa

SEQ ID NO: 5376992 - DNA, 25 bp, Homo sapien
taatcaagatatcaatcacggcgcg

SEQ ID NO: 5376993 - DNA, 25 bp, Homo sapien
gcaagtgcaggtagccggccgcctg

SEQ ID NO: 5376994 - DNA, 25 bp, Homo sapien
tcagaaaggctttgcggagcaaggg

SEQ ID NO: 5376995 - DNA, 25 bp, Homo sapien
cataggggccatggcttaaaacgca

SEQ ID NO: 5376996 - DNA, 25 bp, Homo sapien
catggcttaaaacgcaaaccaggtt

SEQ ID NO: 5376997 - DNA, 25 bp, Homo sapien
gggccatggcttaaaacgcaaacca

SEQ ID NO: 5376998 - DNA, 25 bp, Homo sapien
cccgccaggcgatgggggcagctgt

SEQ ID NO: 5376999 - DNA, 25 bp, Homo sapien
cctgcttttgaccttcaggaagggt

SEQ ID NO: 5377000 - DNA, 25 bp, Homo sapien
gctgtgtggccagcctgcttttgac

SEQ ID NO: 5377001 - DNA, 25 bp, Homo sapien
ccttggacccgccaggcgatggggg

SEQ ID NO: 5377002 - DNA, 25 bp, Homo sapien
ccaccatgcggagggccccagttgt

SEQ ID NO: 5377003 - DNA, 25 bp, Homo sapien
atgcggagggccccagttgtgtttc

SEQ ID NO: 5377004 - DNA, 25 bp, Homo sapien
gcctggccaccatgcggagggcccc

SEQ ID NO: 5377005 - DNA, 25 bp, Homo sapien
gttgtgtttcctgctagagcctgag

SEQ ID NO: 5377006 - DNA, 25 bp, Homo sapien
atgattggtagttccgcccactgca

SEQ ID NO: 5377007 - DNA, 25 bp, Homo sapien
tgattggtagttccgcccactgcat

SEQ ID NO: 5377008 - DNA, 25 bp, Homo sapien
gcatccctgatggagcaggcccgag

SEQ ID NO: 5377009 - DNA, 25 bp, Homo sapien
catgattggtagttccgcccactgc

SEQ ID NO: 5377010 - DNA, 25 bp, Homo sapien
gcggcctatctgactcttggcagca

SEQ ID NO: 5377011 - DNA, 25 bp, Homo sapien
gggagcggcctatctgactcttggc

SEQ ID NO: 5377012 - DNA, 25 bp, Homo sapien
ttggcagcagggacctgaacagtat

SEQ ID NO: 5377013 - DNA, 25 bp, Homo sapien
aacagtatgaggctcccggcctcca

SEQ ID NO: 5377014 - DNA, 25 bp, Homo sapien
gagacaaaggtgacacaatcccaat

SEQ ID NO: 5377015 - DNA, 25 bp, Homo sapien
cctcctttttctagaaggtccagag

SEQ ID NO: 5377016 - DNA, 25 bp, Homo sapien
caagagagtgaagccctgggattcc

SEQ ID NO: 5377017 - DNA, 25 bp, Homo sapien
tgggcatttggagggtccgagggca

SEQ ID NO: 5377018 - DNA, 25 bp, Homo sapien
gagcagttctctaagtaacgccgat

SEQ ID NO: 5377019 - DNA, 25 bp, Homo sapien
tgtttacaacacatgccctgagcag

SEQ ID NO: 5377020 - DNA, 25 bp, Homo sapien
tgttccctgggtcaaggcctgagtc

SEQ ID NO: 5377021 - DNA, 25 bp, Homo sapien
tcctggtcagtcctcacaagggtcc

SEQ ID NO: 5377022 - DNA, 25 bp, Homo sapien
cccctgttcatcctcacgacaggca

SEQ ID NO: 5377023 - DNA, 25 bp, Homo sapien
tgttcatcctcacgacaggcaactc

SEQ ID NO: 5377024 - DNA, 25 bp, Homo sapien
ccttggagccccctgttcatcctca

SEQ ID NO: 5377025 - DNA, 25 bp, Homo sapien
ttggagccccctgttcatcctcacg

SEQ ID NO: 5377026 - DNA, 25 bp, Homo sapien
tctcacggtccgaaggaagggctag

SEQ ID NO: 5377027 - DNA, 25 bp, Homo sapien
caattggaccggtcagggtgacccg

SEQ ID NO: 5377028 - DNA, 25 bp, Homo sapien
gatgaggctcatctcaggaccgtgc

SEQ ID NO: 5377029 - DNA, 25 bp, Homo sapien
tcattcagtcctgcgaagcctcgga

SEQ ID NO: 5377030 - DNA, 25 bp, Homo sapien
agtgaggtggttagaccaggtccct

SEQ ID NO: 5377031 - DNA, 25 bp, Homo sapien
ataaaactgacagccaactcgtggg

SEQ ID NO: 5377032 - DNA, 25 bp, Homo sapien
gcttcccaggaagataccttgtggg

SEQ ID NO: 5377033 - DNA, 25 bp, Homo sapien
gatggtcgtggctcctgtgttcccc

SEQ ID NO: 5377034 - DNA, 25 bp, Homo sapien
tcttgttggactcatcaagagaccc

SEQ ID NO: 5377035 - DNA, 25 bp, Homo sapien
tgtgagatcgggctccatgcccgtc

SEQ ID NO: 5377036 - DNA, 25 bp, Homo sapien
catgcccgtcttgttggactcatca

SEQ ID NO: 5377037 - DNA, 25 bp, Homo sapien
gaatgccaggagctctcttctgtgc

SEQ ID NO: 5377038 - DNA, 25 bp, Homo sapien
cagctaaggaaagaccggaatcgtc

SEQ ID NO: 5377039 - DNA, 25 bp, Homo sapien
gcagctaaggaaagaccggaatcgt

SEQ ID NO: 5377040 - DNA, 25 bp, Homo sapien
agaccggaatcgtccgagccctttg

SEQ ID NO: 5377041 - DNA, 25 bp, Homo sapien
cctgtgggctgctatgatactcatt

SEQ ID NO: 5377042 - DNA, 25 bp, Homo sapien
caatcctgtgggctgctatgatact

SEQ ID NO: 5377043 - DNA, 25 bp, Homo sapien
gcacaatcctgtgggctgctatgat

SEQ ID NO: 5377044 - DNA, 25 bp, Homo sapien
cttgcacaatcctgtgggctgctat

SEQ ID NO: 5377045 - DNA, 25 bp, Homo sapien
cctctggcctctgtcgttactagta

SEQ ID NO: 5377046 - DNA, 25 bp, Homo sapien
gccgtgagagtctcccctctggcct

SEQ ID NO: 5377047 - DNA, 25 bp, Homo sapien
agaactgatgtcagagcccggttgg

SEQ ID NO: 5377048 - DNA, 25 bp, Homo sapien
cgttactagtaagaactgatgtcag

SEQ ID NO: 5377049 - DNA, 25 bp, Homo sapien
ggaagaccctgtgattatgtagtcc

SEQ ID NO: 5377050 - DNA, 25 bp, Homo sapien
gggcacagccattgacagacacatc

SEQ ID NO: 5377051 - DNA, 25 bp, Homo sapien
gacacatcagcacctatatctgagg

SEQ ID NO: 5377052 - DNA, 25 bp, Homo sapien
tatctgagggaaggagtctcaagcc

SEQ ID NO: 5377053 - DNA, 25 bp, Homo sapien
tccacgtgcactgatgtccttcctg

SEQ ID NO: 5377054 - DNA, 25 bp, Homo sapien
ggatccacgtgcactgatgtccttc

SEQ ID NO: 5377055 - DNA, 25 bp, Homo sapien
gatccacgtgcactgatgtccttcc

SEQ ID NO: 5377056 - DNA, 25 bp, Homo sapien
caggatccacgtgcactgatgtcct

SEQ ID NO: 5377057 - DNA, 25 bp, Homo sapien
gccccgctgtcagtcttgcccagat

SEQ ID NO: 5377058 - DNA, 25 bp, Homo sapien
agtgtcagacaataagcggaggagc

SEQ ID NO: 5377059 - DNA, 25 bp, Homo sapien
tcggagcgcgttggccccgctgtca

SEQ ID NO: 5377060 - DNA, 25 bp, Homo sapien
ctttgttgatattgacactcggttg

SEQ ID NO: 5377061 - DNA, 25 bp, Homo sapien
aacgtgccatgacttgatgtgccca

SEQ ID NO: 5377062 - DNA, 25 bp, Homo sapien
gggcacagtcaacagattggcaaat

SEQ ID NO: 5377063 - DNA, 25 bp, Homo sapien
tttaccgctcaatgaataggacttg

SEQ ID NO: 5377064 - DNA, 25 bp, Homo sapien
taggtaacatgtttaccgctcaatg

SEQ ID NO: 5377065 - DNA, 25 bp, Homo sapien
ggggctgcagctccaccatgcccac

SEQ ID NO: 5377066 - DNA, 25 bp, Homo sapien
tgggggctgcagctccaccatgccc

SEQ ID NO: 5377067 - DNA, 25 bp, Homo sapien
cctgggggctgcagctccaccatgc

SEQ ID NO: 5377068 - DNA, 25 bp, Homo sapien
ctgcatggagcctgggggctgcagc

SEQ ID NO: 5377069 - DNA, 25 bp, Homo sapien
caagaagaagcggacacgaatatgc

SEQ ID NO: 5377070 - DNA, 25 bp, Homo sapien
agcggacacgaatatgccaggctcc

SEQ ID NO: 5377071 - DNA, 25 bp, Homo sapien
ggctccgtgtctggcggcaactctg

SEQ ID NO: 5377072 - DNA, 25 bp, Homo sapien
ctgcacaagaagaagcggacacgaa

SEQ ID NO: 5377073 - DNA, 25 bp, Homo sapien
gagctagatgaaaggctcaggtttt

SEQ ID NO: 5377074 - DNA, 25 bp, Homo sapien
gagagctagatgaaaggctcaggtt

SEQ ID NO: 5377075 - DNA, 25 bp, Homo sapien
agagctagatgaaaggctcaggttt

SEQ ID NO: 5377076 - DNA, 25 bp, Homo sapien
gggtccccatgacctgggtgagcag

SEQ ID NO: 5377077 - DNA, 25 bp, Homo sapien
ccatgacctgggtgagcagtgtgct

SEQ ID NO: 5377078 - DNA, 25 bp, Homo sapien
tgtgtccaatgatgctgagaggcag

SEQ ID NO: 5377079 - DNA, 25 bp, Homo sapien
cagtgtgctgatggaatgggccacc

SEQ ID NO: 5377080 - DNA, 25 bp, Homo sapien
aggtcctccaagctgggcctcggca

SEQ ID NO: 5377081 - DNA, 25 bp, Homo sapien
ggtcctccaagctgggcctcggcac

SEQ ID NO: 5377082 - DNA, 25 bp, Homo sapien
tgcagtgcgtgttgctggcatccat

SEQ ID NO: 5377083 - DNA, 25 bp, Homo sapien
gggatgaccccagcccgcttgagct

SEQ ID NO: 5377084 - DNA, 25 bp, Homo sapien
ctggggggatgaccccagcccgctt

SEQ ID NO: 5377085 - DNA, 25 bp, Homo sapien
tttgcagtgcgtgttgctggcatcc

SEQ ID NO: 5377086 - DNA, 25 bp, Homo sapien
ggccagcactgtctgcctctatact

SEQ ID NO: 5377087 - DNA, 25 bp, Homo sapien
tctatactccattccggagcccaga

SEQ ID NO: 5377088 - DNA, 25 bp, Homo sapien
gcactgtctgcctctatactccatt

SEQ ID NO: 5377089 - DNA, 25 bp, Homo sapien
ctctatactccattccggagcccag

SEQ ID NO: 5377090 - DNA, 25 bp, Homo sapien
ctccgctgagccataaccaggaccc

SEQ ID NO: 5377091 - DNA, 25 bp, Homo sapien
cgctgagccataaccaggacccatg

SEQ ID NO: 5377092 - DNA, 25 bp, Homo sapien
gtgaaagcagaccgcccgggacttc

SEQ ID NO: 5377093 - DNA, 25 bp, Homo sapien
tgagccataaccaggacccatgggc

SEQ ID NO: 5377094 - DNA, 25 bp, Homo sapien
taacgctcctgactgtgtgaaaccc

SEQ ID NO: 5377095 - DNA, 25 bp, Homo sapien
tgtgaaaccctttgtcgcggcaccg

SEQ ID NO: 5377096 - DNA, 25 bp, Homo sapien
cgggcaacgcgaaagcatgcatagt

SEQ ID NO: 5377097 - DNA, 25 bp, Homo sapien
caagggcccgagacatttcttggaa

SEQ ID NO: 5377098 - DNA, 25 bp, Homo sapien
cattctggccaaggagttgggtttc

SEQ ID NO: 5377099 - DNA, 25 bp, Homo sapien
ccctggctccgtttgaagttggcat

SEQ ID NO: 5377100 - DNA, 25 bp, Homo sapien
ggtttctcaggctgcgtttgtgaaa

SEQ ID NO: 5377101 - DNA, 25 bp, Homo sapien
caggctgcgtttgtgaaaggtaatt

SEQ ID NO: 5377102 - DNA, 25 bp, Homo sapien
tcccgagagcgggtgatgccttcta

SEQ ID NO: 5377103 - DNA, 25 bp, Homo sapien
gggtgatgccttctaatctccttac

SEQ ID NO: 5377104 - DNA, 25 bp, Homo sapien
agagcgggtgatgccttctaatctc

SEQ ID NO: 5377105 - DNA, 25 bp, Homo sapien
catcctgttcccgagagcgggtgat

SEQ ID NO: 5377106 - DNA, 25 bp, Homo sapien
atgagtctccacgagaaatggctca

SEQ ID NO: 5377107 - DNA, 25 bp, Homo sapien
gtcggagaaccagctttgctgcccc

SEQ ID NO: 5377108 - DNA, 25 bp, Homo sapien
tctgatgagtctccacgagaaatgg

SEQ ID NO: 5377109 - DNA, 25 bp, Homo sapien
tgatgagtctccacgagaaatggct

SEQ ID NO: 5377110 - DNA, 25 bp, Homo sapien
tgtgtgtctgatctttgtggacgca

SEQ ID NO: 5377111 - DNA, 25 bp, Homo sapien
aatgtctccaagagggccagcctct

SEQ ID NO: 5377112 - DNA, 25 bp, Homo sapien
tgtggacgcatgagtttggacagct

SEQ ID NO: 5377113 - DNA, 25 bp, Homo sapien
gactgcgtgcagctgagaccacttc

SEQ ID NO: 5377114 - DNA, 25 bp, Homo sapien
ggccaatagggcaactcatagctgg

SEQ ID NO: 5377115 - DNA, 25 bp, Homo sapien
gcaactcatagctggctgggccaga

SEQ ID NO: 5377116 - DNA, 25 bp, Homo sapien
aatagggcaactcatagctggctgg

SEQ ID NO: 5377117 - DNA, 25 bp, Homo sapien
tagggcaactcatagctggctgggc

SEQ ID NO: 5377118 - DNA, 25 bp, Homo sapien
gctaatattctgagactgcccgtca

SEQ ID NO: 5377119 - DNA, 25 bp, Homo sapien
catggtccagttgggagatctccag

SEQ ID NO: 5377120 - DNA, 25 bp, Homo sapien
aaatcctcggaggtataaggcccag

SEQ ID NO: 5377121 - DNA, 25 bp, Homo sapien
tcgacaaacgttgactgggtaccta

SEQ ID NO: 5377122 - DNA, 25 bp, Homo sapien
ttctcttgtactcagtgaatgtcgc

SEQ ID NO: 5377123 - DNA, 25 bp, Homo sapien
cagtgaatgtcgctgaactctcctg

SEQ ID NO: 5377124 - DNA, 25 bp, Homo sapien
gaatgtcgctgaactctcctgcatc

SEQ ID NO: 5377125 - DNA, 25 bp, Homo sapien
tactcagtgaatgtcgctgaactct

SEQ ID NO: 5377126 - DNA, 25 bp, Homo sapien
tgccggaaatgcaggaatgagtgga

SEQ ID NO: 5377127 - DNA, 25 bp, Homo sapien
tcagaattcacattgccggaaatgc

SEQ ID NO: 5377128 - DNA, 25 bp, Homo sapien
ttgccggaaatgcaggaatgagtgg

SEQ ID NO: 5377129 - DNA, 25 bp, Homo sapien
cgtgtcctcgttggcggcggccgtg

SEQ ID NO: 5377130 - DNA, 25 bp, Homo sapien
cagaaagacagtgcgtgtcctcgtt

SEQ ID NO: 5377131 - DNA, 25 bp, Homo sapien
tgcagaaagacagtgcgtgtcctcg

SEQ ID NO: 5377132 - DNA, 25 bp, Homo sapien
aagacagtgcgtgtcctcgttggcg

SEQ ID NO: 5377133 - DNA, 25 bp, Homo sapien
ggcagggcccaatcctggaatccac

SEQ ID NO: 5377134 - DNA, 25 bp, Homo sapien
gggcccaatcctggaatccacttgt

SEQ ID NO: 5377135 - DNA, 25 bp, Homo sapien
caatcctggaatccacttgtcaatc

SEQ ID NO: 5377136 - DNA, 25 bp, Homo sapien
ggaggcagggcccaatcctggaatc

SEQ ID NO: 5377137 - DNA, 25 bp, Homo sapien
agctgaccaagcaaccatccaaggg

SEQ ID NO: 5377138 - DNA, 25 bp, Homo sapien
catctgtgctaaggagaattccgca

SEQ ID NO: 5377139 - DNA, 25 bp, Homo sapien
gacgtgctcagaatcacacaacagg

SEQ ID NO: 5377140 - DNA, 25 bp, Homo sapien
taaaacccgttatctgtgcagaaac

SEQ ID NO: 5377141 - DNA, 25 bp, Homo sapien
gactgaatggttaagtagctcctcc

SEQ ID NO: 5377142 - DNA, 25 bp, Homo sapien
caaagaggtcagagatttggtccca

SEQ ID NO: 5377143 - DNA, 25 bp, Homo sapien
gattcagaggctagttgtgggccac

SEQ ID NO: 5377144 - DNA, 25 bp, Homo sapien
cagccaatggattctaagaggccga

SEQ ID NO: 5377145 - DNA, 25 bp, Homo sapien
agaaaggtaatagtcccaggtcagg

SEQ ID NO: 5377146 - DNA, 25 bp, Homo sapien
aactgatgaggaaaacgcaaatggc

SEQ ID NO: 5377147 - DNA, 25 bp, Homo sapien
caaatgccgttagcgccatgatcct

SEQ ID NO: 5377148 - DNA, 25 bp, Homo sapien
tttacttcacatgtccacccagcag

SEQ ID NO: 5377149 - DNA, 25 bp, Homo sapien
gccagaaattctgggccgttggcca

SEQ ID NO: 5377150 - DNA, 25 bp, Homo sapien
aaattctgggccgttggccagagtc

SEQ ID NO: 5377151 - DNA, 25 bp, Homo sapien
tgggccgttggccagagtcagacct

SEQ ID NO: 5377152 - DNA, 25 bp, Homo sapien
ggccagagtcagaccttcgtcctct

SEQ ID NO: 5377153 - DNA, 25 bp, Homo sapien
taagagcaaccgactggtgctgggt

SEQ ID NO: 5377154 - DNA, 25 bp, Homo sapien
caaaggctatgctcctgatgtcctc

SEQ ID NO: 5377155 - DNA, 25 bp, Homo sapien
tgatgtcctcacagacgataagagc

SEQ ID NO: 5377156 - DNA, 25 bp, Homo sapien
cccagcaaaggctatgctcctgatg

SEQ ID NO: 5377157 - DNA, 25 bp, Homo sapien
cgtacattaaacaagaggagggcgg

SEQ ID NO: 5377158 - DNA, 25 bp, Homo sapien
cattaaacaagaggagggcgggtca

SEQ ID NO: 5377159 - DNA, 25 bp, Homo sapien
catggacacctcattaattcgccct

SEQ ID NO: 5377160 - DNA, 25 bp, Homo sapien
ctttgccgtacattaaacaagagga

SEQ ID NO: 5377161 - DNA, 25 bp, Homo sapien
attgccatttaaatcattctgccgg

SEQ ID NO: 5377162 - DNA, 25 bp, Homo sapien
catttaaatcattctgccggtggaa

SEQ ID NO: 5377163 - DNA, 25 bp, Homo sapien
tgccatttaaatcattctgccggtg

SEQ ID NO: 5377164 - DNA, 25 bp, Homo sapien
atttaaatcattctgccggtggaag

SEQ ID NO: 5377165 - DNA, 25 bp, Homo sapien
cagaacaactttgcgactttttggg

SEQ ID NO: 5377166 - DNA, 25 bp, Homo sapien
tgtagaggttggaacaatcttcacc

SEQ ID NO: 5377167 - DNA, 25 bp, Homo sapien
cctgcacccacagcgaggaatgtag

SEQ ID NO: 5377168 - DNA, 25 bp, Homo sapien
gcttggagttcacttgctccagaac

SEQ ID NO: 5377169 - DNA, 25 bp, Homo sapien
ctactgatggccctgaaaattcacc

SEQ ID NO: 5377170 - DNA, 25 bp, Homo sapien
agcctgaggcctcgatcacgtgcaa

SEQ ID NO: 5377171 - DNA, 25 bp, Homo sapien
ctcaactgctactgatggccctgaa

SEQ ID NO: 5377172 - DNA, 25 bp, Homo sapien
tcaccattaactgcatggctcagcc

SEQ ID NO: 5377173 - DNA, 25 bp, Homo sapien
caggccaggataactaacaggatac

SEQ ID NO: 5377174 - DNA, 25 bp, Homo sapien
gtaccagatggaacgctcctccagg

SEQ ID NO: 5377175 - DNA, 25 bp, Homo sapien
tttacttatctctgttctgtaccag

SEQ ID NO: 5377176 - DNA, 25 bp, Homo sapien
ggcccacgatggactgtttacttat

SEQ ID NO: 5377177 - DNA, 25 bp, Homo sapien
tgggtgcaggcttggtgctctctgc

SEQ ID NO: 5377178 - DNA, 25 bp, Homo sapien
ggtgcaggcttggtgctctctgccc

SEQ ID NO: 5377179 - DNA, 25 bp, Homo sapien
gggtgcaggcttggtgctctctgcc

SEQ ID NO: 5377180 - DNA, 25 bp, Homo sapien
aagaagcacagatccctggatctat

SEQ ID NO: 5377181 - DNA, 25 bp, Homo sapien
tccccagcattgaggaactgacctg

SEQ ID NO: 5377182 - DNA, 25 bp, Homo sapien
ttagcagcagacatggtaacccatc

SEQ ID NO: 5377183 - DNA, 25 bp, Homo sapien
tggatctatggtaacagttagcagc

SEQ ID NO: 5377184 - DNA, 25 bp, Homo sapien
cctggcaggagccccgtgggaagca

SEQ ID NO: 5377185 - DNA, 25 bp, Homo sapien
ctggcaggagccccgtgggaagcag

SEQ ID NO: 5377186 - DNA, 25 bp, Homo sapien
ggcaggagccccgtgggaagcagca

SEQ ID NO: 5377187 - DNA, 25 bp, Homo sapien
cccctggcaggagccccgtgggaag

SEQ ID NO: 5377188 - DNA, 25 bp, Homo sapien
agagtcttccgtcagccactgtggc

SEQ ID NO: 5377189 - DNA, 25 bp, Homo sapien
tggcctgtgatcagctctttcgaga

SEQ ID NO: 5377190 - DNA, 25 bp, Homo sapien
aatttggaccgagggtggcctgtga

SEQ ID NO: 5377191 - DNA, 25 bp, Homo sapien
gatcagctctttcgagagtcttccg

SEQ ID NO: 5377192 - DNA, 25 bp, Homo sapien
actgcagagctgaaaatggacagca

SEQ ID NO: 5377193 - DNA, 25 bp, Homo sapien
gcagagctgaaaatggacagcatcc

SEQ ID NO: 5377194 - DNA, 25 bp, Homo sapien
cactgcagagctgaaaatggacagc

SEQ ID NO: 5377195 - DNA, 25 bp, Homo sapien
ctgtaggtttcgtcctgtttttgag

SEQ ID NO: 5377196 - DNA, 25 bp, Homo sapien
cagtggcgccggcaccactttggtg

SEQ ID NO: 5377197 - DNA, 25 bp, Homo sapien
taacactgcgcgttaacaccactgg

SEQ ID NO: 5377198 - DNA, 25 bp, Homo sapien
tggtgtcacttttaacactgcgcgt

SEQ ID NO: 5377199 - DNA, 25 bp, Homo sapien
caggcccgggtgttatctcttgcag

SEQ ID NO: 5377200 - DNA, 25 bp, Homo sapien
tgaccgggtaggaggcggatcccac

SEQ ID NO: 5377201 - DNA, 25 bp, Homo sapien
gcaagggcacggccgtgaccgggta

SEQ ID NO: 5377202 - DNA, 25 bp, Homo sapien
tggatcgaggcacgctgtccccgcg

SEQ ID NO: 5377203 - DNA, 25 bp, Homo sapien
gctgagaggcctggatcgaggcacg

SEQ ID NO: 5377204 - DNA, 25 bp, Homo sapien
cctccggggaagagcgaagatcaaa

SEQ ID NO: 5377205 - DNA, 25 bp, Homo sapien
aagagcgaagatcaaagcggcaccc

SEQ ID NO: 5377206 - DNA, 25 bp, Homo sapien
agccactcagcctccggggaagagc

SEQ ID NO: 5377207 - DNA, 25 bp, Homo sapien
tcagcctccggggaagagcgaagat

SEQ ID NO: 5377208 - DNA, 25 bp, Homo sapien
tgagtgcacactgagcctcagccat

SEQ ID NO: 5377209 - DNA, 25 bp, Homo sapien
atgagtgcacactgagcctcagcca

SEQ ID NO: 5377210 - DNA, 25 bp, Homo sapien
ctatgagtgcacactgagcctcagc

SEQ ID NO: 5377211 - DNA, 25 bp, Homo sapien
tatgagtgcacactgagcctcagcc

SEQ ID NO: 5377212 - DNA, 25 bp, Homo sapien
tttgggcaaaagattttgttctctc

SEQ ID NO: 5377213 - DNA, 25 bp, Homo sapien
gtctcttttgattttgccattgttc

SEQ ID NO: 5377214 - DNA, 25 bp, Homo sapien
tttgattttgccattgttctttcca

SEQ ID NO: 5377215 - DNA, 25 bp, Homo sapien
tctctgccccaccaaacacttgtct

SEQ ID NO: 5377216 - DNA, 25 bp, Homo sapien
tgcatccatccagttagcgagtcct

SEQ ID NO: 5377217 - DNA, 25 bp, Homo sapien
tcatgcatccatccagttagcgagt

SEQ ID NO: 5377218 - DNA, 25 bp, Homo sapien
catccagttagcgagtcctgagcat

SEQ ID NO: 5377219 - DNA, 25 bp, Homo sapien
atccatccagttagcgagtcctgag

SEQ ID NO: 5377220 - DNA, 25 bp, Homo sapien
tgcccttaacccctatgcagatggc

SEQ ID NO: 5377221 - DNA, 25 bp, Homo sapien
tctgtgcccttaacccctatgcaga

SEQ ID NO: 5377222 - DNA, 25 bp, Homo sapien
ttaacccctatgcagatggcaagag

SEQ ID NO: 5377223 - DNA, 25 bp, Homo sapien
ccctatgcagatggcaagagagccc

SEQ ID NO: 5377224 - DNA, 25 bp, Homo sapien
tatgtaggcaaaatgaggagaagca

SEQ ID NO: 5377225 - DNA, 25 bp, Homo sapien
agcaagtgtccagcaggcagtagcc

SEQ ID NO: 5377226 - DNA, 25 bp, Homo sapien
tgaggagaagcaagtgtccagcagg

SEQ ID NO: 5377227 - DNA, 25 bp, Homo sapien
ctatgtaggcaaaatgaggagaagc

SEQ ID NO: 5377228 - DNA, 25 bp, Homo sapien
ctcatagcgacagccctgcagacag

SEQ ID NO: 5377229 - DNA, 25 bp, Homo sapien
cctcatagcgacagccctgcagaca

SEQ ID NO: 5377230 - DNA, 25 bp, Homo sapien
acctcatagcgacagccctgcagac

SEQ ID NO: 5377231 - DNA, 25 bp, Homo sapien
ggcaacataggttgggtccttcaga

SEQ ID NO: 5377232 - DNA, 25 bp, Homo sapien
caacataggttgggtccttcagaac

SEQ ID NO: 5377233 - DNA, 25 bp, Homo sapien
gcaacataggttgggtccttcagaa

SEQ ID NO: 5377234 - DNA, 25 bp, Homo sapien
tcccagcccgcttcacctggatctc

SEQ ID NO: 5377235 - DNA, 25 bp, Homo sapien
cagaaaagccgctcccgaggggcct

SEQ ID NO: 5377236 - DNA, 25 bp, Homo sapien
cctctgaggacatggacctccctga

SEQ ID NO: 5377237 - DNA, 25 bp, Homo sapien
tgggctcccagcccgcttcacctgg

SEQ ID NO: 5377238 - DNA, 25 bp, Homo sapien
tctggaattgtgccgccaggccccg

SEQ ID NO: 5377239 - DNA, 25 bp, Homo sapien
cccgcctgccatccgtgcatgcaaa

SEQ ID NO: 5377240 - DNA, 25 bp, Homo sapien
gagctttgccccctgattcctccgg

SEQ ID NO: 5377241 - DNA, 25 bp, Homo sapien
tgccatccgtgcatgcaaagccagg

SEQ ID NO: 5377242 - DNA, 25 bp, Homo sapien
ctgccagtcgcatgacatcacctct

SEQ ID NO: 5377243 - DNA, 25 bp, Homo sapien
ggtccctggctgctaccctcccttc

SEQ ID NO: 5377244 - DNA, 25 bp, Homo sapien
cacatttctcggaactgggggccct

SEQ ID NO: 5377245 - DNA, 25 bp, Homo sapien
ggctatcaggcgttaaggaattctt

SEQ ID NO: 5377246 - DNA, 25 bp, Homo sapien
gaactgggggcccttctggctatca

SEQ ID NO: 5377247 - DNA, 25 bp, Homo sapien
gggcccttctggctatcaggcgtta

SEQ ID NO: 5377248 - DNA, 25 bp, Homo sapien
agggccacaggagcatagcgcctca

SEQ ID NO: 5377249 - DNA, 25 bp, Homo sapien
tgaaagaacggcacgcccagtaggc

SEQ ID NO: 5377250 - DNA, 25 bp, Homo sapien
tcatggagggcttccagtctttggg

SEQ ID NO: 5377251 - DNA, 25 bp, Homo sapien
caggctctgggtcatggagggcttc

SEQ ID NO: 5377252 - DNA, 25 bp, Homo sapien
tagccctgtactgggtcagtgtcag

SEQ ID NO: 5377253 - DNA, 25 bp, Homo sapien
gtgtcagcatccttccacgcgtgct

SEQ ID NO: 5377254 - DNA, 25 bp, Homo sapien
accgcacacccaaagaccgcgcctc

SEQ ID NO: 5377255 - DNA, 25 bp, Homo sapien
gcacacccaaagaccgcgcctctcg

SEQ ID NO: 5377256 - DNA, 25 bp, Homo sapien
gcggaaggcggcgagcgagccaatg

SEQ ID NO: 5377257 - DNA, 25 bp, Homo sapien
gggagggctcgtgagagccaatgag

SEQ ID NO: 5377258 - DNA, 25 bp, Homo sapien
gagccaatgagagcgcggaaggcgg

SEQ ID NO: 5377259 - DNA, 25 bp, Homo sapien
gcgagccaatggacgcggcggtggg

SEQ ID NO: 5377260 - DNA, 25 bp, Homo sapien
agcagattcttgacagcctgcaact

SEQ ID NO: 5377261 - DNA, 25 bp, Homo sapien
cagattcttgacagcctgcaacttc

SEQ ID NO: 5377262 - DNA, 25 bp, Homo sapien
gcagattcttgacagcctgcaactt

SEQ ID NO: 5377263 - DNA, 25 bp, Homo sapien
cagcagattcttgacagcctgcaac

SEQ ID NO: 5377264 - DNA, 25 bp, Homo sapien
gagggcttcccgctctgcctttctt

SEQ ID NO: 5377265 - DNA, 25 bp, Homo sapien
caaccttcccagttttcgacgaatg

SEQ ID NO: 5377266 - DNA, 25 bp, Homo sapien
gttttcgacgaatgccttccgctca

SEQ ID NO: 5377267 - DNA, 25 bp, Homo sapien
gacgaatgccttccgctcacaacag

SEQ ID NO: 5377268 - DNA, 25 bp, Homo sapien
tggccctgccttcacagggtgtcca

SEQ ID NO: 5377269 - DNA, 25 bp, Homo sapien
cttgaccgatggttttcccttgcga

SEQ ID NO: 5377270 - DNA, 25 bp, Homo sapien
cgatggttttcccttgcgacctgtc

SEQ ID NO: 5377271 - DNA, 25 bp, Homo sapien
gttttcccttgcgacctgtctggcc

SEQ ID NO: 5377272 - DNA, 25 bp, Homo sapien
agtcgctgggaccaccaaaaatgtg

SEQ ID NO: 5377273 - DNA, 25 bp, Homo sapien
tcgctgggaccaccaaaaatgtgtg

SEQ ID NO: 5377274 - DNA, 25 bp, Homo sapien
gtcgctgggaccaccaaaaatgtgt

SEQ ID NO: 5377275 - DNA, 25 bp, Homo sapien
tagcacgtacctggtgcgataacat

SEQ ID NO: 5377276 - DNA, 25 bp, Homo sapien
gctgtcgcaggaggtagcacgtacc

SEQ ID NO: 5377277 - DNA, 25 bp, Homo sapien
ggtcttcgtcgccaaaaatctgctg

SEQ ID NO: 5377278 - DNA, 25 bp, Homo sapien
catggagaacaacaatgctggcctt

SEQ ID NO: 5377279 - DNA, 25 bp, Homo sapien
gatacacgaagtgccccctctggca

SEQ ID NO: 5377280 - DNA, 25 bp, Homo sapien
tgtccagctctgggagatacacgaa

SEQ ID NO: 5377281 - DNA, 25 bp, Homo sapien
gcacgtgcgctcctcacagtcctca

SEQ ID NO: 5377282 - DNA, 25 bp, Homo sapien
agcagcgggaaccagaatgcactca

SEQ ID NO: 5377283 - DNA, 25 bp, Homo sapien
gatctggagactagcatgttttatt

SEQ ID NO: 5377284 - DNA, 25 bp, Homo sapien
tctgtcagctccctacgcatccagg

SEQ ID NO: 5377285 - DNA, 25 bp, Homo sapien
tgctgaacaattcagtcacaatcag

SEQ ID NO: 5377286 - DNA, 25 bp, Homo sapien
aatcagtttcttctccgtgatctgg

SEQ ID NO: 5377287 - DNA, 25 bp, Homo sapien
agcatccggtttatctggctcttta

SEQ ID NO: 5377288 - DNA, 25 bp, Homo sapien
tacagctgacgatcaaaacatgggc

SEQ ID NO: 5377289 - DNA, 25 bp, Homo sapien
cttcatatttacagctgacgatcaa

SEQ ID NO: 5377290 - DNA, 25 bp, Homo sapien
ggccagcatccggtttatctggctc

SEQ ID NO: 5377291 - DNA, 25 bp, Homo sapien
gtgaggtgcaagaaccccacgagga

SEQ ID NO: 5377292 - DNA, 25 bp, Homo sapien
tgcagtttgggcacagtaggcagac

SEQ ID NO: 5377293 - DNA, 25 bp, Homo sapien
cccacgaggacttgcaaagaacgca

SEQ ID NO: 5377294 - DNA, 25 bp, Homo sapien
catattcaaaaagcggtttagcggg

SEQ ID NO: 5377295 - DNA, 25 bp, Homo sapien
gcagccatcttggtagggaccacag

SEQ ID NO: 5377296 - DNA, 25 bp, Homo sapien
cagccatcttggtagggaccacagc

SEQ ID NO: 5377297 - DNA, 25 bp, Homo sapien
agcagccatcttggtagggaccaca

SEQ ID NO: 5377298 - DNA, 25 bp, Homo sapien
tctcggctcgctgcgatgtctgctt

SEQ ID NO: 5377299 - DNA, 25 bp, Homo sapien
gtgtgagtcgcggtgcctcgcctct

SEQ ID NO: 5377300 - DNA, 25 bp, Homo sapien
atctcggctcgctgcgatgtctgct

SEQ ID NO: 5377301 - DNA, 25 bp, Homo sapien
agtcgcggtgcctcgcctctttggc

SEQ ID NO: 5377302 - DNA, 25 bp, Homo sapien
ctccagctagaagaagtgcatttcg

SEQ ID NO: 5377303 - DNA, 25 bp, Homo sapien
atttcgggcgcacgcctcgagaagg

SEQ ID NO: 5377304 - DNA, 25 bp, Homo sapien
aagaagtgcatttcgggcgcacgcc

SEQ ID NO: 5377305 - DNA, 25 bp, Homo sapien
tgtggcggcttctcgctgagagagc

SEQ ID NO: 5377306 - DNA, 25 bp, Homo sapien
tgcaatcaacgtgccctcacatatg

SEQ ID NO: 5377307 - DNA, 25 bp, Homo sapien
ctgatggtctgtgcaatcaacgtgc

SEQ ID NO: 5377308 - DNA, 25 bp, Homo sapien
ggtctgtgcaatcaacgtgccctca

SEQ ID NO: 5377309 - DNA, 25 bp, Homo sapien
cacactgatggtctgtgcaatcaac

SEQ ID NO: 5377310 - DNA, 25 bp, Homo sapien
ctagagtttcctttacaaggaattg

SEQ ID NO: 5377311 - DNA, 25 bp, Homo sapien
tttcctttacaaggaattgagttga

SEQ ID NO: 5377312 - DNA, 25 bp, Homo sapien
ttcctttacaaggaattgagttgac

SEQ ID NO: 5377313 - DNA, 25 bp, Homo sapien
agagtttcctttacaaggaattgag

SEQ ID NO: 5377314 - DNA, 25 bp, Homo sapien
agccgggaaaggttatgtgagtgcc

SEQ ID NO: 5377315 - DNA, 25 bp, Homo sapien
ccgggaaaggttatgtgagtgcctg

SEQ ID NO: 5377316 - DNA, 25 bp, Homo sapien
ataagccgggaaaggttatgtgagt

SEQ ID NO: 5377317 - DNA, 25 bp, Homo sapien
aataagccgggaaaggttatgtgag

SEQ ID NO: 5377318 - DNA, 25 bp, Homo sapien
ggctagaaaattcaatgaggagttt

SEQ ID NO: 5377319 - DNA, 25 bp, Homo sapien
catctggcttcagcggctcgagtgg

SEQ ID NO: 5377320 - DNA, 25 bp, Homo sapien
tccatctggcttcagcggctcgagt

SEQ ID NO: 5377321 - DNA, 25 bp, Homo sapien
acacagccccatatacactttggct

SEQ ID NO: 5377322 - DNA, 25 bp, Homo sapien
catcaatgagacttcgaggaggagc

SEQ ID NO: 5377323 - DNA, 25 bp, Homo sapien
ggcagcacggctccgcggacttttt

SEQ ID NO: 5377324 - DNA, 25 bp, Homo sapien
agtccggcggcgctgatggattgca

SEQ ID NO: 5377325 - DNA, 25 bp, Homo sapien
atggattgcagaagtgccggcgctt

SEQ ID NO: 5377326 - DNA, 25 bp, Homo sapien
gatccgcacgtaatcctttgccggg

SEQ ID NO: 5377327 - DNA, 25 bp, Homo sapien
tgagatccgcttgacttcccaaagg

SEQ ID NO: 5377328 - DNA, 25 bp, Homo sapien
tggccagaggtcgatgttgcaccct

SEQ ID NO: 5377329 - DNA, 25 bp, Homo sapien
gccagccacttgagaacttcgaact

SEQ ID NO: 5377330 - DNA, 25 bp, Homo sapien
ggctcctagagttgatcccagctgg

SEQ ID NO: 5377331 - DNA, 25 bp, Homo sapien
gctggaaaagtagacctgtccctac

SEQ ID NO: 5377332 - DNA, 25 bp, Homo sapien
tgttctgtggctcctagagttgatc

SEQ ID NO: 5377333 - DNA, 25 bp, Homo sapien
gatcccagctggaaaagtagacctg

SEQ ID NO: 5377334 - DNA, 25 bp, Homo sapien
gcccgggcatcccgctcggtgcgcg

SEQ ID NO: 5377335 - DNA, 25 bp, Homo sapien
ccgggcatcccgctcggtgcgcgac

SEQ ID NO: 5377336 - DNA, 25 bp, Homo sapien
tgggagtcttgtaggcgtccctctg

SEQ ID NO: 5377337 - DNA, 25 bp, Homo sapien
gtcttgtaggcgtccctctgtcccc

SEQ ID NO: 5377338 - DNA, 25 bp, Homo sapien
cgccgctcttgccgggcgtgtgaag

SEQ ID NO: 5377339 - DNA, 25 bp, Homo sapien
gcgtgtgaaggtttaatcccgacag

SEQ ID NO: 5377340 - DNA, 25 bp, Homo sapien
tggcacgggctttgcagctcggtgg

SEQ ID NO: 5377341 - DNA, 25 bp, Homo sapien
gctcggtggccgcagcggtgtcccg

SEQ ID NO: 5377342 - DNA, 25 bp, Homo sapien
aagtaaacgtttccctcgcaagcag

SEQ ID NO: 5377343 - DNA, 25 bp, Homo sapien
cataggctgtttgcagacgaggctc

SEQ ID NO: 5377344 - DNA, 25 bp, Homo sapien
gtttccctcgcaagcagcataaaat

SEQ ID NO: 5377345 - DNA, 25 bp, Homo sapien
aaaacgctcataggctgtttgcaga

SEQ ID NO: 5377346 - DNA, 25 bp, Homo sapien
aggccaggtggacctcgctgtggac

SEQ ID NO: 5377347 - DNA, 25 bp, Homo sapien
ggccaggtggacctcgctgtggaca

SEQ ID NO: 5377348 - DNA, 25 bp, Homo sapien
ccaggtggacctcgctgtggacagc

SEQ ID NO: 5377349 - DNA, 25 bp, Homo sapien
aggtggacctcgctgtggacagctg

SEQ ID NO: 5377350 - DNA, 25 bp, Homo sapien
tggcgagtcgggaagaaagccaacg

SEQ ID NO: 5377351 - DNA, 25 bp, Homo sapien
gaggggcttccagttgcctttacag

SEQ ID NO: 5377352 - DNA, 25 bp, Homo sapien
tgcagctcccaaacaatggccacat

SEQ ID NO: 5377353 - DNA, 25 bp, Homo sapien
atggccacattgtcgcagccgcaca

SEQ ID NO: 5377354 - DNA, 25 bp, Homo sapien
gaccaaacttttggtggcgtctgaa

SEQ ID NO: 5377355 - DNA, 25 bp, Homo sapien
aagagagaggccccgtgaccaaact

SEQ ID NO: 5377356 - DNA, 25 bp, Homo sapien
caaacttttggtggcgtctgaaact

SEQ ID NO: 5377357 - DNA, 25 bp, Homo sapien
gaagagagaggccccgtgaccaaac

SEQ ID NO: 5377358 - DNA, 25 bp, Homo sapien
agggcggtcctctcttccattcgtc

SEQ ID NO: 5377359 - DNA, 25 bp, Homo sapien
cagacagtaatcactaaggccgcct

SEQ ID NO: 5377360 - DNA, 25 bp, Homo sapien
ttgtccactcccggcgacaggaaag

SEQ ID NO: 5377361 - DNA, 25 bp, Homo sapien
caggaaaggaagggcggtcctctct

SEQ ID NO: 5377362 - DNA, 25 bp, Homo sapien
aggaaggagacagattgtccaatag

SEQ ID NO: 5377363 - DNA, 25 bp, Homo sapien
gatgctgtgtggtggcgtcaggcct

SEQ ID NO: 5377364 - DNA, 25 bp, Homo sapien
tgtccaataggggtgaagttgcaga

SEQ ID NO: 5377365 - DNA, 25 bp, Homo sapien
tggcgtcaggcctgggagctggaag

SEQ ID NO: 5377366 - DNA, 25 bp, Homo sapien
ggatttgctggtctgaagaggctca

SEQ ID NO: 5377367 - DNA, 25 bp, Homo sapien
cctctgggtctctggtgtgcaagac

SEQ ID NO: 5377368 - DNA, 25 bp, Homo sapien
tgcgcaggcagatatgtacagtaga

SEQ ID NO: 5377369 - DNA, 25 bp, Homo sapien
gacctgggtgccacatccttctgca

SEQ ID NO: 5377370 - DNA, 25 bp, Homo sapien
gccgtgggcatcagtaaggcagcct

SEQ ID NO: 5377371 - DNA, 25 bp, Homo sapien
gcagtgagaagcgaagctcccagac

SEQ ID NO: 5377372 - DNA, 25 bp, Homo sapien
tgggcatcagtaaggcagccttgtg

SEQ ID NO: 5377373 - DNA, 25 bp, Homo sapien
tcccagaccagtgcctggccgtggg

SEQ ID NO: 5377374 - DNA, 25 bp, Homo sapien
tccgcataagccagcagggcatcag

SEQ ID NO: 5377375 - DNA, 25 bp, Homo sapien
ggtgctgcacttccgcataagccag

SEQ ID NO: 5377376 - DNA, 25 bp, Homo sapien
acttccgcataagccagcagggcat

SEQ ID NO: 5377377 - DNA, 25 bp, Homo sapien
tgcacttccgcataagccagcaggg

SEQ ID NO: 5377378 - DNA, 25 bp, Homo sapien
agatccctccggaagccaggatggt

SEQ ID NO: 5377379 - DNA, 25 bp, Homo sapien
gaaaaggtacacgtggcctcctgag

SEQ ID NO: 5377380 - DNA, 25 bp, Homo sapien
cccctgtagctactcaatgtgaatt

SEQ ID NO: 5377381 - DNA, 25 bp, Homo sapien
ctgtggagactgttgccggttggaa

SEQ ID NO: 5377382 - DNA, 25 bp, Homo sapien
ctccaagcctgtcccgagaaggttc

SEQ ID NO: 5377383 - DNA, 25 bp, Homo sapien
tcctcttcattaggcatgcttttct

SEQ ID NO: 5377384 - DNA, 25 bp, Homo sapien
ctcctccaagcctgtcccgagaagg

SEQ ID NO: 5377385 - DNA, 25 bp, Homo sapien
ttaattcctcttcattaggcatgct

SEQ ID NO: 5377386 - DNA, 25 bp, Homo sapien
cctgaacgccctcttgcgcaatcct

SEQ ID NO: 5377387 - DNA, 25 bp, Homo sapien
cctcttgcgcaatcctgctgggcag

SEQ ID NO: 5377388 - DNA, 25 bp, Homo sapien
gaacgccctcttgcgcaatcctgct

SEQ ID NO: 5377389 - DNA, 25 bp, Homo sapien
cgccctcttgcgcaatcctgctggg

SEQ ID NO: 5377390 - DNA, 25 bp, Homo sapien
tggcagagctgactggcgggctcgt

SEQ ID NO: 5377391 - DNA, 25 bp, Homo sapien
cacagaagaggtgccagcgaagtgg

SEQ ID NO: 5377392 - DNA, 25 bp, Homo sapien
tgactggcgggctcgtggcgcagcc

SEQ ID NO: 5377393 - DNA, 25 bp, Homo sapien
ttggttctcctgcattgtcacctgg

SEQ ID NO: 5377394 - DNA, 25 bp, Homo sapien
agtgtccgggtcacagctgggtatt

SEQ ID NO: 5377395 - DNA, 25 bp, Homo sapien
gaacagggttgcccagagtttgctt

SEQ ID NO: 5377396 - DNA, 25 bp, Homo sapien
agtgggagtgagtgtccgggtcaca

SEQ ID NO: 5377397 - DNA, 25 bp, Homo sapien
tgtatcccttacttgagtgggagtg

SEQ ID NO: 5377398 - DNA, 25 bp, Homo sapien
ggggaagcccttgagtagaagagta

SEQ ID NO: 5377399 - DNA, 25 bp, Homo sapien
ctggagcattttccgggctggagag

SEQ ID NO: 5377400 - DNA, 25 bp, Homo sapien
cctggagcattttccgggctggaga

SEQ ID NO: 5377401 - DNA, 25 bp, Homo sapien
tgagtagaagagtatggaggctgcc

SEQ ID NO: 5377402 - DNA, 25 bp, Homo sapien
cctccttgctgggagagactaggcc

SEQ ID NO: 5377403 - DNA, 25 bp, Homo sapien
gaggccgggctcttggatgtgctga

SEQ ID NO: 5377404 - DNA, 25 bp, Homo sapien
gccagcactgatcgcttttccaagg

SEQ ID NO: 5377405 - DNA, 25 bp, Homo sapien
ggcccctgtggagattgccgccagc

SEQ ID NO: 5377406 - DNA, 25 bp, Homo sapien
tgatgatcacaggagcccgccttta

SEQ ID NO: 5377407 - DNA, 25 bp, Homo sapien
aaaacttgcatctggcccgctgctg

SEQ ID NO: 5377408 - DNA, 25 bp, Homo sapien
ggacttatccccgtctcagaggaag

SEQ ID NO: 5377409 - DNA, 25 bp, Homo sapien
tcacagctgccctatgcggtgggcg

SEQ ID NO: 5377410 - DNA, 25 bp, Homo sapien
cccgccgccagtgttgactgaatga

SEQ ID NO: 5377411 - DNA, 25 bp, Homo sapien
ctggcactagctcccgccgccagtg

SEQ ID NO: 5377412 - DNA, 25 bp, Homo sapien
gtggtctggcactagctcccgccgc

SEQ ID NO: 5377413 - DNA, 25 bp, Homo sapien
ctcccgccgccagtgttgactgaat

SEQ ID NO: 5377414 - DNA, 25 bp, Homo sapien
agtgttgggcagcaagtactgtccc

SEQ ID NO: 5377415 - DNA, 25 bp, Homo sapien
tgtcccagtccagtgagccctttct

SEQ ID NO: 5377416 - DNA, 25 bp, Homo sapien
ctaaagcgcacaggcccctaacttt

SEQ ID NO: 5377417 - DNA, 25 bp, Homo sapien
gtgccctgtgcatttagttccttct

SEQ ID NO: 5377418 - DNA, 25 bp, Homo sapien
ctgtggctctgtggcagcgaatcag

SEQ ID NO: 5377419 - DNA, 25 bp, Homo sapien
tctgtggcagcgaatcagagacttt

SEQ ID NO: 5377420 - DNA, 25 bp, Homo sapien
ggctctgtggcagcgaatcagagac

SEQ ID NO: 5377421 - DNA, 25 bp, Homo sapien
tggcagcgaatcagagacttttgga

SEQ ID NO: 5377422 - DNA, 25 bp, Homo sapien
cgcgtctgttgcgtgcttgggtaca

SEQ ID NO: 5377423 - DNA, 25 bp, Homo sapien
ggatgataggccctgcgcgtctgtt

SEQ ID NO: 5377424 - DNA, 25 bp, Homo sapien
ctgatgctgtctgcggctgccagct

SEQ ID NO: 5377425 - DNA, 25 bp, Homo sapien
ggcacagtatctgccctcaggtagc

SEQ ID NO: 5377426 - DNA, 25 bp, Homo sapien
agggaagtgattgggccagcagaac

SEQ ID NO: 5377427 - DNA, 25 bp, Homo sapien
aagtgattgggccagcagaactgca

SEQ ID NO: 5377428 - DNA, 25 bp, Homo sapien
tgagggaagtgattgggccagcaga

SEQ ID NO: 5377429 - DNA, 25 bp, Homo sapien
gggtgagggaagtgattgggccagc

SEQ ID NO: 5377430 - DNA, 25 bp, Homo sapien
tggactctggttctccagtccagcc

SEQ ID NO: 5377431 - DNA, 25 bp, Homo sapien
ccctggactctggttctccagtcca

SEQ ID NO: 5377432 - DNA, 25 bp, Homo sapien
ggactctggttctccagtccagccc

SEQ ID NO: 5377433 - DNA, 25 bp, Homo sapien
cctggactctggttctccagtccag

SEQ ID NO: 5377434 - DNA, 25 bp, Homo sapien
tttggagggacagcgatgagtggcc

SEQ ID NO: 5377435 - DNA, 25 bp, Homo sapien
gacttggccattgaggacttgcatc

SEQ ID NO: 5377436 - DNA, 25 bp, Homo sapien
gtcagagtgggagcacggagactca

SEQ ID NO: 5377437 - DNA, 25 bp, Homo sapien
acagcgatgagtggcccagggtctc

SEQ ID NO: 5377438 - DNA, 25 bp, Homo sapien
ggtacagaagttgctgggaggccat

SEQ ID NO: 5377439 - DNA, 25 bp, Homo sapien
acagaagttgctgggaggccatggg

SEQ ID NO: 5377440 - DNA, 25 bp, Homo sapien
ttgctgggaggccatggggggcagg

SEQ ID NO: 5377441 - DNA, 25 bp, Homo sapien
tgggggtacagaagttgctgggagg

SEQ ID NO: 5377442 - DNA, 25 bp, Homo sapien
ggtggcatcaaacacggggttggca

SEQ ID NO: 5377443 - DNA, 25 bp, Homo sapien
gtggcatcaaacacggggttggcag

SEQ ID NO: 5377444 - DNA, 25 bp, Homo sapien
tcaaacacggggttggcagcgtgca

SEQ ID NO: 5377445 - DNA, 25 bp, Homo sapien
gcatcaaacacggggttggcagcgt

SEQ ID NO: 5377446 - DNA, 25 bp, Homo sapien
gggcaggtgatgtggcgcaggactg

SEQ ID NO: 5377447 - DNA, 25 bp, Homo sapien
tgtggcggggcgtgtgaacggtgag

SEQ ID NO: 5377448 - DNA, 25 bp, Homo sapien
ggtgatgtggcgcaggactgtgtgg

SEQ ID NO: 5377449 - DNA, 25 bp, Homo sapien
gatgtggcgcaggactgtgtggcgg

SEQ ID NO: 5377450 - DNA, 25 bp, Homo sapien
gcagggcactcctgttggcttcatt

SEQ ID NO: 5377451 - DNA, 25 bp, Homo sapien
gaaaaagtggtgttctactggccag

SEQ ID NO: 5377452 - DNA, 25 bp, Homo sapien
ctggctgttggttgctggcagactt

SEQ ID NO: 5377453 - DNA, 25 bp, Homo sapien
tgcaaggaaaaagtggtgttctact

SEQ ID NO: 5377454 - DNA, 25 bp, Homo sapien
ccgctgcatcattggcaaaggactg

SEQ ID NO: 5377455 - DNA, 25 bp, Homo sapien
agtgacagccccgctgcatcattgg

SEQ ID NO: 5377456 - DNA, 25 bp, Homo sapien
gtgacagccccgctgcatcattggc

SEQ ID NO: 5377457 - DNA, 25 bp, Homo sapien
agagcccgctttgctcctaggctgc

SEQ ID NO: 5377458 - DNA, 25 bp, Homo sapien
gagtcagagcccgctttgctcctag

SEQ ID NO: 5377459 - DNA, 25 bp, Homo sapien
tcagagcccgctttgctcctaggct

SEQ ID NO: 5377460 - DNA, 25 bp, Homo sapien
agtcagagcccgctttgctcctagg

SEQ ID NO: 5377461 - DNA, 25 bp, Homo sapien
cccttttagctgtcatgaggttaga

SEQ ID NO: 5377462 - DNA, 25 bp, Homo sapien
cgtgagtcggctgcttcccttttag

SEQ ID NO: 5377463 - DNA, 25 bp, Homo sapien
gaatgacgatttcccttaatcaggg

SEQ ID NO: 5377464 - DNA, 25 bp, Homo sapien
tcagggtggcggtgtgctcttcact

SEQ ID NO: 5377465 - DNA, 25 bp, Homo sapien
taaaaataagtctgtgatcaaggca

SEQ ID NO: 5377466 - DNA, 25 bp, Homo sapien
tggcttgttcctccaaatcccgtga

SEQ ID NO: 5377467 - DNA, 25 bp, Homo sapien
tgttgctgcgcaggtgaccacttag

SEQ ID NO: 5377468 - DNA, 25 bp, Homo sapien
gactgagtcgactcccctgttgctg

SEQ ID NO: 5377469 - DNA, 25 bp, Homo sapien
ctgtctggcggaaagggatgattta

SEQ ID NO: 5377470 - DNA, 25 bp, Homo sapien
tggttcccccatggagaaaccagac

SEQ ID NO: 5377471 - DNA, 25 bp, Homo sapien
caccccagttacgatgctgatgtgg

SEQ ID NO: 5377472 - DNA, 25 bp, Homo sapien
gacaccccagttacgatgctgatgt

SEQ ID NO: 5377473 - DNA, 25 bp, Homo sapien
aaccagacaccccagttacgatgct

SEQ ID NO: 5377474 - DNA, 25 bp, Homo sapien
tcctgtttctaaaccccgtgctcca

SEQ ID NO: 5377475 - DNA, 25 bp, Homo sapien
tttcatccccgaggggtggcagtgc

SEQ ID NO: 5377476 - DNA, 25 bp, Homo sapien
gctgcctgaacactggggccttgca

SEQ ID NO: 5377477 - DNA, 25 bp, Homo sapien
cagggcccttggttcaagggccctg

SEQ ID NO: 5377478 - DNA, 25 bp, Homo sapien
tgagctcgcagccaccaggacctga

SEQ ID NO: 5377479 - DNA, 25 bp, Homo sapien
tcagggcccagaacactaagcctgg

SEQ ID NO: 5377480 - DNA, 25 bp, Homo sapien
ggttctctcgagttgcaaaggtgca

SEQ ID NO: 5377481 - DNA, 25 bp, Homo sapien
tccctgactggcagcctgtcttgcg

SEQ ID NO: 5377482 - DNA, 25 bp, Homo sapien
tctgagttggctgatatcgtcatta

SEQ ID NO: 5377483 - DNA, 25 bp, Homo sapien
ccaatccgtaatgctggtgtcccat

SEQ ID NO: 5377484 - DNA, 25 bp, Homo sapien
gactgtgtccaccagggtggctgca

SEQ ID NO: 5377485 - DNA, 25 bp, Homo sapien
ggtgtcccatccgttctccaagtgc

SEQ ID NO: 5377486 - DNA, 25 bp, Homo sapien
ctgggggcactcagagggaagtgca

SEQ ID NO: 5377487 - DNA, 25 bp, Homo sapien
ggggcactcagagggaagtgcaggg

SEQ ID NO: 5377488 - DNA, 25 bp, Homo sapien
aagtgcagggctgagttcatgtaag

SEQ ID NO: 5377489 - DNA, 25 bp, Homo sapien
gtgcagggctgagttcatgtaagtt

SEQ ID NO: 5377490 - DNA, 25 bp, Homo sapien
caagttctggtccctttgagtcagc

SEQ ID NO: 5377491 - DNA, 25 bp, Homo sapien
ctgcaagcaagttctggtccctttg

SEQ ID NO: 5377492 - DNA, 25 bp, Homo sapien
gcaagcaagttctggtccctttgag

SEQ ID NO: 5377493 - DNA, 25 bp, Homo sapien
gcaagttctggtccctttgagtcag

SEQ ID NO: 5377494 - DNA, 25 bp, Homo sapien
gcaattggcaagtgctcctcccaaa

SEQ ID NO: 5377495 - DNA, 25 bp, Homo sapien
aattggcaagtgctcctcccaaaga

SEQ ID NO: 5377496 - DNA, 25 bp, Homo sapien
ctggcaattggcaagtgctcctccc

SEQ ID NO: 5377497 - DNA, 25 bp, Homo sapien
tggcaagtgctcctcccaaagaaaa

SEQ ID NO: 5377498 - DNA, 25 bp, Homo sapien
tgcagggtgctctgctgtgggcacc

SEQ ID NO: 5377499 - DNA, 25 bp, Homo sapien
agggtgctctgctgtgggcaccagg

SEQ ID NO: 5377500 - DNA, 25 bp, Homo sapien
gcagggtgctctgctgtgggcacca

SEQ ID NO: 5377501 - DNA, 25 bp, Homo sapien
agtgcagggtgctctgctgtgggca

SEQ ID NO: 5377502 - DNA, 25 bp, Homo sapien
tgtcaggccagagggcacctgtgtt

SEQ ID NO: 5377503 - DNA, 25 bp, Homo sapien
ggcagctggagcatccactgggatg

SEQ ID NO: 5377504 - DNA, 25 bp, Homo sapien
ccactgggatgctgatgtcaggcca

SEQ ID NO: 5377505 - DNA, 25 bp, Homo sapien
ggagcatccactgggatgctgatgt

SEQ ID NO: 5377506 - DNA, 25 bp, Homo sapien
gagccccggccactgaggacttcat

SEQ ID NO: 5377507 - DNA, 25 bp, Homo sapien
agagccccggccactgaggacttca

SEQ ID NO: 5377508 - DNA, 25 bp, Homo sapien
tctggtcccacaaggagtcagagcc

SEQ ID NO: 5377509 - DNA, 25 bp, Homo sapien
tggcacagggtgcaccatctggtcc

SEQ ID NO: 5377510 - DNA, 25 bp, Homo sapien
tgtgtccccctgcagtgatggctac

SEQ ID NO: 5377511 - DNA, 25 bp, Homo sapien
cagtgatggctaccgtgtcatccaa

SEQ ID NO: 5377512 - DNA, 25 bp, Homo sapien
cccctgcagtgatggctaccgtgtc

SEQ ID NO: 5377513 - DNA, 25 bp, Homo sapien
gatggctaccgtgtcatccaagtca

SEQ ID NO: 5377514 - DNA, 25 bp, Homo sapien
gtctccttctcagacactccgccca

SEQ ID NO: 5377515 - DNA, 25 bp, Homo sapien
ttctcagacactccgcccagttttg

SEQ ID NO: 5377516 - DNA, 25 bp, Homo sapien
actccgcccagttttgggtggcctg

SEQ ID NO: 5377517 - DNA, 25 bp, Homo sapien
agacactccgcccagttttgggtgg

SEQ ID NO: 5377518 - DNA, 25 bp, Homo sapien
cagcccttgtgagcgggccatggtg

SEQ ID NO: 5377519 - DNA, 25 bp, Homo sapien
gccatggtggcggcctccctcagaa

SEQ ID NO: 5377520 - DNA, 25 bp, Homo sapien
ggccatggtggcggcctccctcaga

SEQ ID NO: 5377521 - DNA, 25 bp, Homo sapien
gagcagcccttgtgagcgggccatg

SEQ ID NO: 5377522 - DNA, 25 bp, Homo sapien
gagcaagcactttgaatgcctctgg

SEQ ID NO: 5377523 - DNA, 25 bp, Homo sapien
ctgagcaagcactttgaatgcctct

SEQ ID NO: 5377524 - DNA, 25 bp, Homo sapien
gactccgccgcctggttgcaatagt

SEQ ID NO: 5377525 - DNA, 25 bp, Homo sapien
aacttgagaaggaagctcccgggat

SEQ ID NO: 5377526 - DNA, 25 bp, Homo sapien
ccccagatgatatgtcgtgtccgtg

SEQ ID NO: 5377527 - DNA, 25 bp, Homo sapien
gactgagggacgagtgtgtttctga

SEQ ID NO: 5377528 - DNA, 25 bp, Homo sapien
ccaatgaagtcgaggcaggactgag

SEQ ID NO: 5377529 - DNA, 25 bp, Homo sapien
gacagctggctttccgacaggaccc

SEQ ID NO: 5377530 - DNA, 25 bp, Homo sapien
cagcactcgctgtgcccagtgtgtg

SEQ ID NO: 5377531 - DNA, 25 bp, Homo sapien
gcactcgctgtgcccagtgtgtggc

SEQ ID NO: 5377532 - DNA, 25 bp, Homo sapien
gccagcactcgctgtgcccagtgtg

SEQ ID NO: 5377533 - DNA, 25 bp, Homo sapien
agcactcgctgtgcccagtgtgtgg

SEQ ID NO: 5377534 - DNA, 25 bp, Homo sapien
tcaggagacagtagacgacactgtc

SEQ ID NO: 5377535 - DNA, 25 bp, Homo sapien
ctggccctcgacatgatcgctcagg

SEQ ID NO: 5377536 - DNA, 25 bp, Homo sapien
tcgacatgatcgctcaggagacagt

SEQ ID NO: 5377537 - DNA, 25 bp, Homo sapien
catgatcgctcaggagacagtagac

SEQ ID NO: 5377538 - DNA, 25 bp, Homo sapien
ctgcaaggcgagtgaaggccagcaa

SEQ ID NO: 5377539 - DNA, 25 bp, Homo sapien
tgcaaggcgagtgaaggccagcaag

SEQ ID NO: 5377540 - DNA, 25 bp, Homo sapien
catctgtgtggggtgctgtctgaat

SEQ ID NO: 5377541 - DNA, 25 bp, Homo sapien
ctgtgtggggtgctgtctgaatggc

SEQ ID NO: 5377542 - DNA, 25 bp, Homo sapien
gtgtggggtgctgtctgaatggcat

SEQ ID NO: 5377543 - DNA, 25 bp, Homo sapien
cctggcatctgtgtggggtgctgtc

SEQ ID NO: 5377544 - DNA, 25 bp, Homo sapien
gcatttgcacggtggtggtagtggg

SEQ ID NO: 5377545 - DNA, 25 bp, Homo sapien
gtgcagctggctagggtgggtctag

SEQ ID NO: 5377546 - DNA, 25 bp, Homo sapien
gctagggtgggtctaggggactgca

SEQ ID NO: 5377547 - DNA, 25 bp, Homo sapien
agggtgggtctaggggactgcattt

SEQ ID NO: 5377548 - DNA, 25 bp, Homo sapien
gggctccaggttgggaatcaggcct

SEQ ID NO: 5377549 - DNA, 25 bp, Homo sapien
cctttgttgcaccttctagctcctt

SEQ ID NO: 5377550 - DNA, 25 bp, Homo sapien
ctccaggttgggaatcaggcctccc

SEQ ID NO: 5377551 - DNA, 25 bp, Homo sapien
tgttgcaccttctagctccttcctg

SEQ ID NO: 5377552 - DNA, 25 bp, Homo sapien
acttggctccctttcgagattctgg

SEQ ID NO: 5377553 - DNA, 25 bp, Homo sapien
gggctgcccatgatcaggccagctg

SEQ ID NO: 5377554 - DNA, 25 bp, Homo sapien
gattctgggagcagactacagcagc

SEQ ID NO: 5377555 - DNA, 25 bp, Homo sapien
gtgtccattgcagaagctcagaggg

SEQ ID NO: 5377556 - DNA, 25 bp, Homo sapien
gggcatttcaggcaacggttctggt

SEQ ID NO: 5377557 - DNA, 25 bp, Homo sapien
caacggttctggtgggtcaaaagat

SEQ ID NO: 5377558 - DNA, 25 bp, Homo sapien
gagggacctgggtgtagcctgtttg

SEQ ID NO: 5377559 - DNA, 25 bp, Homo sapien
ggtgtagcctgtttgcctgcaagaa

SEQ ID NO: 5377560 - DNA, 25 bp, Homo sapien
tcacttgtatgtcatggaagggcat

SEQ ID NO: 5377561 - DNA, 25 bp, Homo sapien
tgtgggtcacttgtatgtcatggaa

SEQ ID NO: 5377562 - DNA, 25 bp, Homo sapien
ggtcacttgtatgtcatggaagggc

SEQ ID NO: 5377563 - DNA, 25 bp, Homo sapien
tctctgtgggtcacttgtatgtcat

SEQ ID NO: 5377564 - DNA, 25 bp, Homo sapien
tcttcaaacccctcctcctctaagc

SEQ ID NO: 5377565 - DNA, 25 bp, Homo sapien
caaacccctcctcctctaagcctgg

SEQ ID NO: 5377566 - DNA, 25 bp, Homo sapien
tcaaacccctcctcctctaagcctg

SEQ ID NO: 5377567 - DNA, 25 bp, Homo sapien
tctcgggtagggacgtggagtctga

SEQ ID NO: 5377568 - DNA, 25 bp, Homo sapien
tctagaggcctcagcctgtgcttct

SEQ ID NO: 5377569 - DNA, 25 bp, Homo sapien
tggccacagtcagagggtctcgggt

SEQ ID NO: 5377570 - DNA, 25 bp, Homo sapien
ggatagggtagggctggagcttggc

SEQ ID NO: 5377571 - DNA, 25 bp, Homo sapien
tgtcttgtacttaatggtaatccca

SEQ ID NO: 5377572 - DNA, 25 bp, Homo sapien
tgatgacgacaatagcaatgacccc

SEQ ID NO: 5377573 - DNA, 25 bp, Homo sapien
agtggaatcagcagtccgggcagcc

SEQ ID NO: 5377574 - DNA, 25 bp, Homo sapien
ggtaatcccattgcttaaggtaaga

SEQ ID NO: 5377575 - DNA, 25 bp, Homo sapien
gtgtcccaaagtacttttcacgtgc

SEQ ID NO: 5377576 - DNA, 25 bp, Homo sapien
cagcgggtccgtgagctttggaggt

SEQ ID NO: 5377577 - DNA, 25 bp, Homo sapien
gaggtgctgaggttccagtcttctg

SEQ ID NO: 5377578 - DNA, 25 bp, Homo sapien
tctgtttgattggaactccgtgtcc

SEQ ID NO: 5377579 - DNA, 25 bp, Homo sapien
gaaatcagacaagtaggggatggca

SEQ ID NO: 5377580 - DNA, 25 bp, Homo sapien
agagatctcccttctgcacatcatg

SEQ ID NO: 5377581 - DNA, 25 bp, Homo sapien
acatcatgcagaccgggtcctagag

SEQ ID NO: 5377582 - DNA, 25 bp, Homo sapien
tccaggaggctttccccgatctcat

SEQ ID NO: 5377583 - DNA, 25 bp, Homo sapien
tcctagagggtgaacctttctctgt

SEQ ID NO: 5377584 - DNA, 25 bp, Homo sapien
gctatagcaacaggcagcgtccagt

SEQ ID NO: 5377585 - DNA, 25 bp, Homo sapien
cgtccagtgcccactcggacacaca

SEQ ID NO: 5377586 - DNA, 25 bp, Homo sapien
cggggcagctatagcaacaggcagc

SEQ ID NO: 5377587 - DNA, 25 bp, Homo sapien
gggcagctatagcaacaggcagcgt

SEQ ID NO: 5377588 - DNA, 25 bp, Homo sapien
ggctgggtggatggcggtgcccttg

SEQ ID NO: 5377589 - DNA, 25 bp, Homo sapien
cccaaggaaccccagacgttgctgg

SEQ ID NO: 5377590 - DNA, 25 bp, Homo sapien
ccaaggaaccccagacgttgctggc

SEQ ID NO: 5377591 - DNA, 25 bp, Homo sapien
gtggatggcggtgcccttgctgagg

SEQ ID NO: 5377592 - DNA, 25 bp, Homo sapien
ttcccaagcacacctcagacgctgg

SEQ ID NO: 5377593 - DNA, 25 bp, Homo sapien
tggcccccgatcaatgcctgtggtc

SEQ ID NO: 5377594 - DNA, 25 bp, Homo sapien
gcctggcttcccaagcacacctcag

SEQ ID NO: 5377595 - DNA, 25 bp, Homo sapien
ttcctccgtaggtgccagtgacact

SEQ ID NO: 5377596 - DNA, 25 bp, Homo sapien
agagctatgtatagcccactccccg

SEQ ID NO: 5377597 - DNA, 25 bp, Homo sapien
ctgggctgcgtgttggatttccaaa

SEQ ID NO: 5377598 - DNA, 25 bp, Homo sapien
cagcagagagagctatgtatagccc

SEQ ID NO: 5377599 - DNA, 25 bp, Homo sapien
aaaaggcttgtaatcaacagcagag

SEQ ID NO: 5377600 - DNA, 25 bp, Homo sapien
ggctggtgggttatagcgaggtggg

SEQ ID NO: 5377601 - DNA, 25 bp, Homo sapien
aaagcttggcttcgtgaagctggta

SEQ ID NO: 5377602 - DNA, 25 bp, Homo sapien
gcttggcttcgtgaagctggtaccc

SEQ ID NO: 5377603 - DNA, 25 bp, Homo sapien
gaggctggtgggttatagcgaggtg

SEQ ID NO: 5377604 - DNA, 25 bp, Homo sapien
tcggagtgcagagccatgcttcagg

SEQ ID NO: 5377605 - DNA, 25 bp, Homo sapien
catgcctggattcgcactgaattgg

SEQ ID NO: 5377606 - DNA, 25 bp, Homo sapien
tgggcacagcgttttcggaggattc

SEQ ID NO: 5377607 - DNA, 25 bp, Homo sapien
tatgggctcgacactttacaaagag

SEQ ID NO: 5377608 - DNA, 25 bp, Homo sapien
ctctggtggagaggcggcttccgct

SEQ ID NO: 5377609 - DNA, 25 bp, Homo sapien
gcccatatgacttgaggcctctggt

SEQ ID NO: 5377610 - DNA, 25 bp, Homo sapien
ccgctgggccggtgctgctccgtgg

SEQ ID NO: 5377611 - DNA, 25 bp, Homo sapien
tcccatctgtttggccggcccatat

SEQ ID NO: 5377612 - DNA, 25 bp, Homo sapien
gggcatagctcaggcccgcatctgg

SEQ ID NO: 5377613 - DNA, 25 bp, Homo sapien
ttggggcatagctcaggcccgcatc

SEQ ID NO: 5377614 - DNA, 25 bp, Homo sapien
tgggcttggggcatagctcaggccc

SEQ ID NO: 5377615 - DNA, 25 bp, Homo sapien
gcttggggcatagctcaggcccgca

SEQ ID NO: 5377616 - DNA, 25 bp, Homo sapien
acccttcgcccagatggggctgtgc

SEQ ID NO: 5377617 - DNA, 25 bp, Homo sapien
ctgcgtaggccacccttcgcccaga

SEQ ID NO: 5377618 - DNA, 25 bp, Homo sapien
cccttcgcccagatggggctgtgca

SEQ ID NO: 5377619 - DNA, 25 bp, Homo sapien
gtaggccacccttcgcccagatggg

SEQ ID NO: 5377620 - DNA, 25 bp, Homo sapien
caggtgggtgatgaggcccactcca

SEQ ID NO: 5377621 - DNA, 25 bp, Homo sapien
cccactccacacatcaggcccggag

SEQ ID NO: 5377622 - DNA, 25 bp, Homo sapien
ctccacacatcaggcccggagccca

SEQ ID NO: 5377623 - DNA, 25 bp, Homo sapien
aggtgggtgatgaggcccactccac

SEQ ID NO: 5377624 - DNA, 25 bp, Homo sapien
ctgccttgccgctgatgctctgacc

SEQ ID NO: 5377625 - DNA, 25 bp, Homo sapien
tctcggagtcccagaagactccact

SEQ ID NO: 5377626 - DNA, 25 bp, Homo sapien
ggctctcggagtcccagaagactcc

SEQ ID NO: 5377627 - DNA, 25 bp, Homo sapien
gctctcggagtcccagaagactcca

SEQ ID NO: 5377628 - DNA, 25 bp, Homo sapien
tcctttttcaccacctggtgaaagc

SEQ ID NO: 5377629 - DNA, 25 bp, Homo sapien
cccagcagggggctagactgtcctc

SEQ ID NO: 5377630 - DNA, 25 bp, Homo sapien
ccctcaagggggagccaattgatcc

SEQ ID NO: 5377631 - DNA, 25 bp, Homo sapien
gggctagactgtcctcaggagccct

SEQ ID NO: 5377632 - DNA, 25 bp, Homo sapien
actgcaatcactcttggggacccgg

SEQ ID NO: 5377633 - DNA, 25 bp, Homo sapien
ttaatcagcgcagaaccaagtgggt

SEQ ID NO: 5377634 - DNA, 25 bp, Homo sapien
ttttctgaactgcaatcactcttgg

SEQ ID NO: 5377635 - DNA, 25 bp, Homo sapien
aatcagcgcagaaccaagtgggtgc

SEQ ID NO: 5377636 - DNA, 25 bp, Homo sapien
atggtgtggagggagtatcgtctgc

SEQ ID NO: 5377637 - DNA, 25 bp, Homo sapien
gaggaaatggtgtggagggagtatc

SEQ ID NO: 5377638 - DNA, 25 bp, Homo sapien
tcgctgggctggtcgttgactcaga

SEQ ID NO: 5377639 - DNA, 25 bp, Homo sapien
ccactcgctgggctggtcgttgact

SEQ ID NO: 5377640 - DNA, 25 bp, Homo sapien
ttatttgtcgaagatctcgggagtc

SEQ ID NO: 5377641 - DNA, 25 bp, Homo sapien
tatttgtcgaagatctcgggagtcc

SEQ ID NO: 5377642 - DNA, 25 bp, Homo sapien
tgtcgaagatctcgggagtccacac

SEQ ID NO: 5377643 - DNA, 25 bp, Homo sapien
tttgtcgaagatctcgggagtccac

SEQ ID NO: 5377644 - DNA, 25 bp, Homo sapien
acaagggaggtgctgtcgaccagct

SEQ ID NO: 5377645 - DNA, 25 bp, Homo sapien
acgcagcgggcagcaatccagggca

SEQ ID NO: 5377646 - DNA, 25 bp, Homo sapien
caagcttatcaagaacgcagcgggc

SEQ ID NO: 5377647 - DNA, 25 bp, Homo sapien
cgtgtctgggaacactccaagctta

SEQ ID NO: 5377648 - DNA, 25 bp, Homo sapien
tcagtgccagggcacaattgggcat

SEQ ID NO: 5377649 - DNA, 25 bp, Homo sapien
gttcagtgccagggcacaattgggc

SEQ ID NO: 5377650 - DNA, 25 bp, Homo sapien
ttcactcggttcagtgccagggcac

SEQ ID NO: 5377651 - DNA, 25 bp, Homo sapien
acttcactcggttcagtgccagggc

SEQ ID NO: 5377652 - DNA, 25 bp, Homo sapien
acgcatcttcatgctcctcgtgggc

SEQ ID NO: 5377653 - DNA, 25 bp, Homo sapien
gcagcagtttcttgccagagttgga

SEQ ID NO: 5377654 - DNA, 25 bp, Homo sapien
gggctgtgggacaatccgtgctggt

SEQ ID NO: 5377655 - DNA, 25 bp, Homo sapien
tcaaggcagcgcctattcttcccac

SEQ ID NO: 5377656 - DNA, 25 bp, Homo sapien
cagggcctcagagaaaaggttgtcc

SEQ ID NO: 5377657 - DNA, 25 bp, Homo sapien
ggcctcagagaaaaggttgtccttc

SEQ ID NO: 5377658 - DNA, 25 bp, Homo sapien
gagaaaaggttgtccttccagcact

SEQ ID NO: 5377659 - DNA, 25 bp, Homo sapien
gttgtccttccagcacttggtggct

SEQ ID NO: 5377660 - DNA, 25 bp, Homo sapien
cagcatccggatgccgtaacctggt

SEQ ID NO: 5377661 - DNA, 25 bp, Homo sapien
tatactgccagcaaaacgggacagc

SEQ ID NO: 5377662 - DNA, 25 bp, Homo sapien
atggctctaggtcaacacctccagc

SEQ ID NO: 5377663 - DNA, 25 bp, Homo sapien
ggccgtgccatcacaaatggctcta

SEQ ID NO: 5377664 - DNA, 25 bp, Homo sapien
tcttacaaaggtcagccagccccaa

SEQ ID NO: 5377665 - DNA, 25 bp, Homo sapien
ctgcctccaggagagctcttacaaa

SEQ ID NO: 5377666 - DNA, 25 bp, Homo sapien
acccctctcgacccagcatcttcat

SEQ ID NO: 5377667 - DNA, 25 bp, Homo sapien
caggagagctcttacaaaggtcagc

SEQ ID NO: 5377668 - DNA, 25 bp, Homo sapien
tgatgaatgtggttggagcccggtg

SEQ ID NO: 5377669 - DNA, 25 bp, Homo sapien
caaagcttgtgaggaaaatggcccc

SEQ ID NO: 5377670 - DNA, 25 bp, Homo sapien
agcccatgttgtagctcgcttctcc

SEQ ID NO: 5377671 - DNA, 25 bp, Homo sapien
cccggtggagaatcccgatccatca

SEQ ID NO: 5377672 - DNA, 25 bp, Homo sapien
cacagcatgtccttgggagagttga

SEQ ID NO: 5377673 - DNA, 25 bp, Homo sapien
ctgggtggcagaggccggccacagc

SEQ ID NO: 5377674 - DNA, 25 bp, Homo sapien
ttgctgatttgagaagggggccacg

SEQ ID NO: 5377675 - DNA, 25 bp, Homo sapien
agggggccacggcaggctgggagac

SEQ ID NO: 5377676 - DNA, 25 bp, Homo sapien
tcctccttttggcaaccaggagcag

SEQ ID NO: 5377677 - DNA, 25 bp, Homo sapien
cagcggggagtggtcagatttattt

SEQ ID NO: 5377678 - DNA, 25 bp, Homo sapien
gagtgctgtggtgcggtgtggtggg

SEQ ID NO: 5377679 - DNA, 25 bp, Homo sapien
ccttttggcaaccaggagcagcggg

SEQ ID NO: 5377680 - DNA, 25 bp, Homo sapien
gatcctgagctgtagttggtttgca

SEQ ID NO: 5377681 - DNA, 25 bp, Homo sapien
ctgatggcttcctgcagatctcttg

SEQ ID NO: 5377682 - DNA, 25 bp, Homo sapien
ttgcattggcagtcacggcccaagg

SEQ ID NO: 5377683 - DNA, 25 bp, Homo sapien
tgagctgtagttggtttgcattgca

SEQ ID NO: 5377684 - DNA, 25 bp, Homo sapien
ctgcaaacatgctcgtttcttttca

SEQ ID NO: 5377685 - DNA, 25 bp, Homo sapien
cctctgcaaacatgctcgtttcttt

SEQ ID NO: 5377686 - DNA, 25 bp, Homo sapien
tctgcaaacatgctcgtttcttttc

SEQ ID NO: 5377687 - DNA, 25 bp, Homo sapien
tccctctgcaaacatgctcgtttct

SEQ ID NO: 5377688 - DNA, 25 bp, Homo sapien
ctcttccttaaaaccggctgttgct

SEQ ID NO: 5377689 - DNA, 25 bp, Homo sapien
aaccggctgttgctgaccacttctt

SEQ ID NO: 5377690 - DNA, 25 bp, Homo sapien
ccttaaaaccggctgttgctgacca

SEQ ID NO: 5377691 - DNA, 25 bp, Homo sapien
ggtccaggcgatgtgtcgggcagca

SEQ ID NO: 5377692 - DNA, 25 bp, Homo sapien
atcagaggagcacgctccagccagg

SEQ ID NO: 5377693 - DNA, 25 bp, Homo sapien
gggtcattatttgcataagaattca

SEQ ID NO: 5377694 - DNA, 25 bp, Homo sapien
tatccagatactgcatcagaggagc

SEQ ID NO: 5377695 - DNA, 25 bp, Homo sapien
atgctgtaacagaggggcatacacc

SEQ ID NO: 5377696 - DNA, 25 bp, Homo sapien
gatgcccctgtttgccgtccaggat

SEQ ID NO: 5377697 - DNA, 25 bp, Homo sapien
cccaggatgcccctgtttgccgtcc

SEQ ID NO: 5377698 - DNA, 25 bp, Homo sapien
ggatgcccctgtttgccgtccagga

SEQ ID NO: 5377699 - DNA, 25 bp, Homo sapien
caggatgcccctgtttgccgtccag

SEQ ID NO: 5377700 - DNA, 25 bp, Homo sapien
tggcccctctgtggggtcagagcaa

SEQ ID NO: 5377701 - DNA, 25 bp, Homo sapien
ccctctgtggggtcagagcaagtgg

SEQ ID NO: 5377702 - DNA, 25 bp, Homo sapien
tctgtggggtcagagcaagtgggca

SEQ ID NO: 5377703 - DNA, 25 bp, Homo sapien
ctgtggggtcagagcaagtgggcat

SEQ ID NO: 5377704 - DNA, 25 bp, Homo sapien
caggccactgttccagtccaggtct

SEQ ID NO: 5377705 - DNA, 25 bp, Homo sapien
cccacttcaccccactgcaggccac

SEQ ID NO: 5377706 - DNA, 25 bp, Homo sapien
ggtgtgcagcccccacttcacccca

SEQ ID NO: 5377707 - DNA, 25 bp, Homo sapien
tgcaggccactgttccagtccaggt

SEQ ID NO: 5377708 - DNA, 25 bp, Homo sapien
agtggggggctcagaggctcgtagg

SEQ ID NO: 5377709 - DNA, 25 bp, Homo sapien
acagccttcttggggactggtaggt

SEQ ID NO: 5377710 - DNA, 25 bp, Homo sapien
gggggctcagaggctcgtaggccat

SEQ ID NO: 5377711 - DNA, 25 bp, Homo sapien
tggggggctcagaggctcgtaggcc

SEQ ID NO: 5377712 - DNA, 25 bp, Homo sapien
gctgtggagacataaggaactgcca

SEQ ID NO: 5377713 - DNA, 25 bp, Homo sapien
tgcagctgtggagacataaggaact

SEQ ID NO: 5377714 - DNA, 25 bp, Homo sapien
ggagacataaggaactgccacgtgc

SEQ ID NO: 5377715 - DNA, 25 bp, Homo sapien
agacataaggaactgccacgtgcat

SEQ ID NO: 5377716 - DNA, 25 bp, Homo sapien
taacagcgacctcttttcagggcca

SEQ ID NO: 5377717 - DNA, 25 bp, Homo sapien
cttcgatgaagacaagtgtgcactg

SEQ ID NO: 5377718 - DNA, 25 bp, Homo sapien
tatgagaccaactgccactgggaag

SEQ ID NO: 5377719 - DNA, 25 bp, Homo sapien
cacagaatgcatgggactaacagcg

SEQ ID NO: 5377720 - DNA, 25 bp, Homo sapien
ggatactctgctccggaaagatgag

SEQ ID NO: 5377721 - DNA, 25 bp, Homo sapien
tctactccgtaaagccgagtctggg

SEQ ID NO: 5377722 - DNA, 25 bp, Homo sapien
tcacggctgacattcggctaacgag

SEQ ID NO: 5377723 - DNA, 25 bp, Homo sapien
gctaacgagggattactttggccaa

SEQ ID NO: 5377724 - DNA, 25 bp, Homo sapien
tgacaaagggcattaccattaaggg

SEQ ID NO: 5377725 - DNA, 25 bp, Homo sapien
ccttgatagtttgtaggcaccctgt

SEQ ID NO: 5377726 - DNA, 25 bp, Homo sapien
aaaacagtccctttggtagcagagt

SEQ ID NO: 5377727 - DNA, 25 bp, Homo sapien
tctcagtttccttgagtcctgggcg

SEQ ID NO: 5377728 - DNA, 25 bp, Homo sapien
gcccttgatgtaggcaccaaggtgt

SEQ ID NO: 5377729 - DNA, 25 bp, Homo sapien
cccttgatgtaggcaccaaggtgtt

SEQ ID NO: 5377730 - DNA, 25 bp, Homo sapien
gtgcgtaaggcccagccgcctgtgt

SEQ ID NO: 5377731 - DNA, 25 bp, Homo sapien
aagatgcctgaccacctcctccgtc

SEQ ID NO: 5377732 - DNA, 25 bp, Homo sapien
tccgtctccacaacggggtgcgtaa

SEQ ID NO: 5377733 - DNA, 25 bp, Homo sapien
cagccgcctgtgtgccttcgagtcc

SEQ ID NO: 5377734 - DNA, 25 bp, Homo sapien
tcttcaggttgccagacaattttct

SEQ ID NO: 5377735 - DNA, 25 bp, Homo sapien
tgagtcctcagaacgatctaccttc

SEQ ID NO: 5377736 - DNA, 25 bp, Homo sapien
tctttactgctgtggaggacctcat

SEQ ID NO: 5377737 - DNA, 25 bp, Homo sapien
cacagcccatgggactctttactgc

SEQ ID NO: 5377738 - DNA, 25 bp, Homo sapien
caggcaccagagcagctgtctatct

SEQ ID NO: 5377739 - DNA, 25 bp, Homo sapien
cagagggagtatctgaaaacaccca

SEQ ID NO: 5377740 - DNA, 25 bp, Homo sapien
ccagtacttgacttgtggcagagaa

SEQ ID NO: 5377741 - DNA, 25 bp, Homo sapien
gcccctgcatccagtacttgacttg

SEQ ID NO: 5377742 - DNA, 25 bp, Homo sapien
agggcagtgtcatcgcaaaggtgat

SEQ ID NO: 5377743 - DNA, 25 bp, Homo sapien
taggtgcagatacagagaccagcca

SEQ ID NO: 5377744 - DNA, 25 bp, Homo sapien
gaattgctcaccgataggtgcagat

SEQ ID NO: 5377745 - DNA, 25 bp, Homo sapien
gaagggctcatcctcgggcttggag

SEQ ID NO: 5377746 - DNA, 25 bp, Homo sapien
ctgcagagcagtcacaggggcagca

SEQ ID NO: 5377747 - DNA, 25 bp, Homo sapien
gcagagcagtcacaggggcagcagc

SEQ ID NO: 5377748 - DNA, 25 bp, Homo sapien
tgcagagcagtcacaggggcagcag

SEQ ID NO: 5377749 - DNA, 25 bp, Homo sapien
tgtaaacacctctgcccttggacca

SEQ ID NO: 5377750 - DNA, 25 bp, Homo sapien
cagttagttgtaaacacctctgccc

SEQ ID NO: 5377751 - DNA, 25 bp, Homo sapien
cagtgggagtggaaaaggacaaaga

SEQ ID NO: 5377752 - DNA, 25 bp, Homo sapien
aaacacctctgcccttggaccagcc

SEQ ID NO: 5377753 - DNA, 25 bp, Homo sapien
taaaggcccttgctactgtctggca

SEQ ID NO: 5377754 - DNA, 25 bp, Homo sapien
gaggcagccgcagactctacaaggt

SEQ ID NO: 5377755 - DNA, 25 bp, Homo sapien
tagctgtgcgtacactaaaaaccat

SEQ ID NO: 5377756 - DNA, 25 bp, Homo sapien
caggtccaggtgagatccagaggca

SEQ ID NO: 5377757 - DNA, 25 bp, Homo sapien
cacgaccagttgtccacaggtgggt

SEQ ID NO: 5377758 - DNA, 25 bp, Homo sapien
cgaccagttgtccacaggtgggtca

SEQ ID NO: 5377759 - DNA, 25 bp, Homo sapien
accagttgtccacaggtgggtcaca

SEQ ID NO: 5377760 - DNA, 25 bp, Homo sapien
tcacgaccagttgtccacaggtggg

SEQ ID NO: 5377761 - DNA, 25 bp, Homo sapien
cttgaccacaccagaaacactctct

SEQ ID NO: 5377762 - DNA, 25 bp, Homo sapien
cagaaacactctcttggcttctgag

SEQ ID NO: 5377763 - DNA, 25 bp, Homo sapien
gaaacactctcttggcttctgagtc

SEQ ID NO: 5377764 - DNA, 25 bp, Homo sapien
tgaccacaccagaaacactctcttg

SEQ ID NO: 5377765 - DNA, 25 bp, Homo sapien
tccaactccttatcaaactgtgtct

SEQ ID NO: 5377766 - DNA, 25 bp, Homo sapien
cagacgctgagacggagtgaggggt

SEQ ID NO: 5377767 - DNA, 25 bp, Homo sapien
gcaatagcgtaacggggagcaccac

SEQ ID NO: 5377768 - DNA, 25 bp, Homo sapien
aactccttatcaaactgtgtctcag

SEQ ID NO: 5377769 - DNA, 25 bp, Homo sapien
gagggcgccggagcaaagcgcgccc

SEQ ID NO: 5377770 - DNA, 25 bp, Homo sapien
gcgccggagcaaagcgcgcccgtcc

SEQ ID NO: 5377771 - DNA, 25 bp, Homo sapien
gggcgccggagcaaagcgcgcccgt

SEQ ID NO: 5377772 - DNA, 25 bp, Homo sapien
ccggagcaaagcgcgcccgtcccat

SEQ ID NO: 5377773 - DNA, 25 bp, Homo sapien
gaggcctgtggccgcggaaggggcc

SEQ ID NO: 5377774 - DNA, 25 bp, Homo sapien
tgtggccgcggaaggggccgggatg

SEQ ID NO: 5377775 - DNA, 25 bp, Homo sapien
caggaggcctgtggccgcggaaggg

SEQ ID NO: 5377776 - DNA, 25 bp, Homo sapien
cggaaggggccgggatggggatcat

SEQ ID NO: 5377777 - DNA, 25 bp, Homo sapien
gacacaggatgtggtggagaaggaa

SEQ ID NO: 5377778 - DNA, 25 bp, Homo sapien
ggaatagagcgggtagcacatctct

SEQ ID NO: 5377779 - DNA, 25 bp, Homo sapien
tcaagactttcttacggactctggt

SEQ ID NO: 5377780 - DNA, 25 bp, Homo sapien
tttcctgcatctgttcagtatcact

SEQ ID NO: 5377781 - DNA, 25 bp, Homo sapien
gaagcgaatggtttgtgggtggact

SEQ ID NO: 5377782 - DNA, 25 bp, Homo sapien
gctgaagtgtgagctaccctggtca

SEQ ID NO: 5377783 - DNA, 25 bp, Homo sapien
ggtggctgaagtgtgagctaccctg

SEQ ID NO: 5377784 - DNA, 25 bp, Homo sapien
tgaagtgtgagctaccctggtcatg

SEQ ID NO: 5377785 - DNA, 25 bp, Homo sapien
ctactgcatgatgtaaggcgttaaa

SEQ ID NO: 5377786 - DNA, 25 bp, Homo sapien
tactgcatgatgtaaggcgttaaag

SEQ ID NO: 5377787 - DNA, 25 bp, Homo sapien
caccatgagtcagccggctggagaa

SEQ ID NO: 5377788 - DNA, 25 bp, Homo sapien
gccaccatgagtcagccggctggag

SEQ ID NO: 5377789 - DNA, 25 bp, Homo sapien
ccgccctcctcttagctgccagggc

SEQ ID NO: 5377790 - DNA, 25 bp, Homo sapien
gccctcctcttagctgccagggccc

SEQ ID NO: 5377791 - DNA, 25 bp, Homo sapien
gggtcctttgtctgtgcaaagatcc

SEQ ID NO: 5377792 - DNA, 25 bp, Homo sapien
aggttcactgggcctgcggacagct

SEQ ID NO: 5377793 - DNA, 25 bp, Homo sapien
tcttgctgggagaagcgaggttcac

SEQ ID NO: 5377794 - DNA, 25 bp, Homo sapien
ttaggagcttcaaggtttctgaact

SEQ ID NO: 5377795 - DNA, 25 bp, Homo sapien
ctccaccattgctgcggccaactcc

SEQ ID NO: 5377796 - DNA, 25 bp, Homo sapien
agtcactgccatccactccaccatt

SEQ ID NO: 5377797 - DNA, 25 bp, Homo sapien
ggtggggaccacgtgggcttctctg

SEQ ID NO: 5377798 - DNA, 25 bp, Homo sapien
accattgctgcggccaactcctggt

SEQ ID NO: 5377799 - DNA, 25 bp, Homo sapien
acatctctcaggggctccaccacac

SEQ ID NO: 5377800 - DNA, 25 bp, Homo sapien
cctcacatctctcaggggctccacc

SEQ ID NO: 5377801 - DNA, 25 bp, Homo sapien
atctctcaggggctccaccacaccc

SEQ ID NO: 5377802 - DNA, 25 bp, Homo sapien
tcacatctctcaggggctccaccac

SEQ ID NO: 5377803 - DNA, 25 bp, Homo sapien
ggagctcccagcaagcggcaatgcc

SEQ ID NO: 5377804 - DNA, 25 bp, Homo sapien
cagcaagcggcaatgccatccgtcg

SEQ ID NO: 5377805 - DNA, 25 bp, Homo sapien
aagcggcaatgccatccgtcgtggg

SEQ ID NO: 5377806 - DNA, 25 bp, Homo sapien
agctcccagcaagcggcaatgccat

SEQ ID NO: 5377807 - DNA, 25 bp, Homo sapien
tcagcagccatagtcatcaggctct

SEQ ID NO: 5377808 - DNA, 25 bp, Homo sapien
gcagccatagtcatcaggctctgtg

SEQ ID NO: 5377809 - DNA, 25 bp, Homo sapien
cagccatagtcatcaggctctgtgc

SEQ ID NO: 5377810 - DNA, 25 bp, Homo sapien
cagcagccatagtcatcaggctctg

SEQ ID NO: 5377811 - DNA, 25 bp, Homo sapien
ggtggcccgggcctttagctcattg

SEQ ID NO: 5377812 - DNA, 25 bp, Homo sapien
cctttagctcattgccctgacttat

SEQ ID NO: 5377813 - DNA, 25 bp, Homo sapien
tgccctgacttatgcgctcacattg

SEQ ID NO: 5377814 - DNA, 25 bp, Homo sapien
cttatgcgctcacattggaagggca

SEQ ID NO: 5377815 - DNA, 25 bp, Homo sapien
gaaaggctctcttgtactaaagagc

SEQ ID NO: 5377816 - DNA, 25 bp, Homo sapien
tgctcccaccatgtcactactgttt

SEQ ID NO: 5377817 - DNA, 25 bp, Homo sapien
tgtagtgcacgaggacctgaggacc

SEQ ID NO: 5377818 - DNA, 25 bp, Homo sapien
tgggatcatcttcatgcatcatgat

SEQ ID NO: 5377819 - DNA, 25 bp, Homo sapien
ctgcaagatgcggctccacagcaag

SEQ ID NO: 5377820 - DNA, 25 bp, Homo sapien
tgcggctccacagcaagccctctgt

SEQ ID NO: 5377821 - DNA, 25 bp, Homo sapien
aagatgcggctccacagcaagccct

SEQ ID NO: 5377822 - DNA, 25 bp, Homo sapien
gcaagatgcggctccacagcaagcc

SEQ ID NO: 5377823 - DNA, 25 bp, Homo sapien
cagacagctctgtgcgcgtgcccgt

SEQ ID NO: 5377824 - DNA, 25 bp, Homo sapien
gatcaacaagcttcgggtttcctgg

SEQ ID NO: 5377825 - DNA, 25 bp, Homo sapien
agctgtccctcaagaggcgctggca

SEQ ID NO: 5377826 - DNA, 25 bp, Homo sapien
tggatggagccacatttacccagaa

SEQ ID NO: 5377827 - DNA, 25 bp, Homo sapien
tcctggttgaggtcctgcacgtaca

SEQ ID NO: 5377828 - DNA, 25 bp, Homo sapien
tcttctccaagggacttcgtagtaa

SEQ ID NO: 5377829 - DNA, 25 bp, Homo sapien
caagggacttcgtagtaagtggtca

SEQ ID NO: 5377830 - DNA, 25 bp, Homo sapien
gggacttcgtagtaagtggtcagaa

SEQ ID NO: 5377831 - DNA, 25 bp, Homo sapien
tctccaagggacttcgtagtaagtg

SEQ ID NO: 5377832 - DNA, 25 bp, Homo sapien
gtgaaggtattccactggtctgggg

SEQ ID NO: 5377833 - DNA, 25 bp, Homo sapien
tgtgaaggtattccactggtctggg

SEQ ID NO: 5377834 - DNA, 25 bp, Homo sapien
tgaaggtattccactggtctgggga

SEQ ID NO: 5377835 - DNA, 25 bp, Homo sapien
gaaggtattccactggtctggggac

SEQ ID NO: 5377836 - DNA, 25 bp, Homo sapien
catagcctcggcaaacatcaactga

SEQ ID NO: 5377837 - DNA, 25 bp, Homo sapien
tgctgcacgctaggtgccgactttg

SEQ ID NO: 5377838 - DNA, 25 bp, Homo sapien
cataactctggagggcttaaagacc

SEQ ID NO: 5377839 - DNA, 25 bp, Homo sapien
gtaagactacaacgcttcccaaggc

SEQ ID NO: 5377840 - DNA, 25 bp, Homo sapien
ctcctcgcagctgggggaaatagtg

SEQ ID NO: 5377841 - DNA, 25 bp, Homo sapien
aggcactcactggtaagcacgggcc

SEQ ID NO: 5377842 - DNA, 25 bp, Homo sapien
ctgggcaggagcattgaggtgaatc

SEQ ID NO: 5377843 - DNA, 25 bp, Homo sapien
attgaggtgaatcgggcccaggcct

SEQ ID NO: 5377844 - DNA, 25 bp, Homo sapien
caggagtaggtgtcaaggatggagt

SEQ ID NO: 5377845 - DNA, 25 bp, Homo sapien
gacacagtctctggacaacctgtag

SEQ ID NO: 5377846 - DNA, 25 bp, Homo sapien
ccaaagcaagggagcaggagtaggt

SEQ ID NO: 5377847 - DNA, 25 bp, Homo sapien
aacctgtagatctgcagccagtccc

SEQ ID NO: 5377848 - DNA, 25 bp, Homo sapien
gaggtcagcagggtaccctgaggca

SEQ ID NO: 5377849 - DNA, 25 bp, Homo sapien
agaaggcagcacagtcaaggtggca

SEQ ID NO: 5377850 - DNA, 25 bp, Homo sapien
cccacttgggctcggaggaggtcag

SEQ ID NO: 5377851 - DNA, 25 bp, Homo sapien
ggcaggaacgagagaactgaagaat

SEQ ID NO: 5377852 - DNA, 25 bp, Homo sapien
atcagctggaactctgagtccactt

SEQ ID NO: 5377853 - DNA, 25 bp, Homo sapien
ctagatcagctggaactctgagtcc

SEQ ID NO: 5377854 - DNA, 25 bp, Homo sapien
agatcagctggaactctgagtccac

SEQ ID NO: 5377855 - DNA, 25 bp, Homo sapien
agctggaactctgagtccactttct

SEQ ID NO: 5377856 - DNA, 25 bp, Homo sapien
gaggtggcctgagtattggggcaga

SEQ ID NO: 5377857 - DNA, 25 bp, Homo sapien
ggcctgagtattggggcagaaccct

SEQ ID NO: 5377858 - DNA, 25 bp, Homo sapien
ctgcatctgcaggtacccggggaca

SEQ ID NO: 5377859 - DNA, 25 bp, Homo sapien
tgcaggtacccggggacaggcttcc

SEQ ID NO: 5377860 - DNA, 25 bp, Homo sapien
cagggccagcagaggggacagttgc

SEQ ID NO: 5377861 - DNA, 25 bp, Homo sapien
gggccagcagaggggacagttgcag

SEQ ID NO: 5377862 - DNA, 25 bp, Homo sapien
ctagggcccacattccagagggcag

SEQ ID NO: 5377863 - DNA, 25 bp, Homo sapien
gcccacattccagagggcagcagca

SEQ ID NO: 5377864 - DNA, 25 bp, Homo sapien
ctgtggggaagatgcccatgcaggg

SEQ ID NO: 5377865 - DNA, 25 bp, Homo sapien
tgtggggaagatgcccatgcaggga

SEQ ID NO: 5377866 - DNA, 25 bp, Homo sapien
acaggccccaagggcacagctgggt

SEQ ID NO: 5377867 - DNA, 25 bp, Homo sapien
tttccacaggccccaagggcacagc

SEQ ID NO: 5377868 - DNA, 25 bp, Homo sapien
tccacaggccccaagggcacagctg

SEQ ID NO: 5377869 - DNA, 25 bp, Homo sapien
cctttccacaggccccaagggcaca

SEQ ID NO: 5377870 - DNA, 25 bp, Homo sapien
tgactttcacgggtcttccatgtgg

SEQ ID NO: 5377871 - DNA, 25 bp, Homo sapien
acagccccagtcagcgatgtgggag

SEQ ID NO: 5377872 - DNA, 25 bp, Homo sapien
tgcttcccactggtgactttcacgg

SEQ ID NO: 5377873 - DNA, 25 bp, Homo sapien
agtcagcgatgtgggagccgccaca

SEQ ID NO: 5377874 - DNA, 25 bp, Homo sapien
gctctcgcagtttgaatggaaagga

SEQ ID NO: 5377875 - DNA, 25 bp, Homo sapien
ccgagctctcgcagtttgaatggaa

SEQ ID NO: 5377876 - DNA, 25 bp, Homo sapien
gagctctcgcagtttgaatggaaag

SEQ ID NO: 5377877 - DNA, 25 bp, Homo sapien
ctctcgcagtttgaatggaaaggaa

SEQ ID NO: 5377878 - DNA, 25 bp, Homo sapien
gggtgggaggagcgccatccgtggg

SEQ ID NO: 5377879 - DNA, 25 bp, Homo sapien
tctggggagatcacgggcagcaggc

SEQ ID NO: 5377880 - DNA, 25 bp, Homo sapien
gggagatcacgggcagcaggcatgg

SEQ ID NO: 5377881 - DNA, 25 bp, Homo sapien
tgcggggtgggaggagcgccatccg

SEQ ID NO: 5377882 - DNA, 25 bp, Homo sapien
catacagacttctcgtccgcactat

SEQ ID NO: 5377883 - DNA, 25 bp, Homo sapien
acatacagacttctcgtccgcacta

SEQ ID NO: 5377884 - DNA, 25 bp, Homo sapien
tctaacccaagcacagatcccacat

SEQ ID NO: 5377885 - DNA, 25 bp, Homo sapien
cccaagcacagatcccacatacaga

SEQ ID NO: 5377886 - DNA, 25 bp, Homo sapien
tggacttggaaacttgtgaccctgg

SEQ ID NO: 5377887 - DNA, 25 bp, Homo sapien
gatcatcgagctaccgagggagcct

SEQ ID NO: 5377888 - DNA, 25 bp, Homo sapien
catactgagcgagggtctgggatct

SEQ ID NO: 5377889 - DNA, 25 bp, Homo sapien
tgggagacccgctctagagaccttg

SEQ ID NO: 5377890 - DNA, 25 bp, Homo sapien
catctgacccctgtggaagggatga

SEQ ID NO: 5377891 - DNA, 25 bp, Homo sapien
agcacctccggactcacaggaaaga

SEQ ID NO: 5377892 - DNA, 25 bp, Homo sapien
taagctttaactacaaccacgagaa

SEQ ID NO: 5377893 - DNA, 25 bp, Homo sapien
gagctgtcctgctcaataggccagc

SEQ ID NO: 5377894 - DNA, 25 bp, Homo sapien
ttggacggccctagaaaacattcag

SEQ ID NO: 5377895 - DNA, 25 bp, Homo sapien
tcatatacctgataaaagactggcg

SEQ ID NO: 5377896 - DNA, 25 bp, Homo sapien
catttggccttggtagtgacatcac

SEQ ID NO: 5377897 - DNA, 25 bp, Homo sapien
tataagtccatccaagagggcctgg

SEQ ID NO: 5377898 - DNA, 25 bp, Homo sapien
tgagaaaggccgtgcacatacattg

SEQ ID NO: 5377899 - DNA, 25 bp, Homo sapien
ccaatgcgccagtgcagagacagga

SEQ ID NO: 5377900 - DNA, 25 bp, Homo sapien
tgtggcatctaccatgccaatgcgc

SEQ ID NO: 5377901 - DNA, 25 bp, Homo sapien
taatgtctctgagaaaggccgtgca

SEQ ID NO: 5377902 - DNA, 25 bp, Homo sapien
gatttcagagcagacgtctccactg

SEQ ID NO: 5377903 - DNA, 25 bp, Homo sapien
gatacccaatcagcttccaactaag

SEQ ID NO: 5377904 - DNA, 25 bp, Homo sapien
caaggaaccattcaaaatctggagg

SEQ ID NO: 5377905 - DNA, 25 bp, Homo sapien
tcagaagggaccaatacaggcagca

SEQ ID NO: 5377906 - DNA, 25 bp, Homo sapien
tttcaggatgatgtggtagccatca

SEQ ID NO: 5377907 - DNA, 25 bp, Homo sapien
catttcaggatgatgtggtagccat

SEQ ID NO: 5377908 - DNA, 25 bp, Homo sapien
acatttcaggatgatgtggtagcca

SEQ ID NO: 5377909 - DNA, 25 bp, Homo sapien
ttcaggatgatgtggtagccatcat

SEQ ID NO: 5377910 - DNA, 25 bp, Homo sapien
ctttaattgtgctgaggacaaaaca

SEQ ID NO: 5377911 - DNA, 25 bp, Homo sapien
ttgtgctgaggacaaaacaggattc

SEQ ID NO: 5377912 - DNA, 25 bp, Homo sapien
aggattcatcttggaagttctgcac

SEQ ID NO: 5377913 - DNA, 25 bp, Homo sapien
gaggacaaaacaggattcatcttgg

SEQ ID NO: 5377914 - DNA, 25 bp, Homo sapien
cacgggaatgcggtaaacaccactg

SEQ ID NO: 5377915 - DNA, 25 bp, Homo sapien
gccacagtgtctacgaatgcagcag

SEQ ID NO: 5377916 - DNA, 25 bp, Homo sapien
gtctacgaatgcagcaggaacatgg

SEQ ID NO: 5377917 - DNA, 25 bp, Homo sapien
tgccacggtgtctacacacacggga

SEQ ID NO: 5377918 - DNA, 25 bp, Homo sapien
agtagctgcttgtgctctacactgc

SEQ ID NO: 5377919 - DNA, 25 bp, Homo sapien
gtagctgcttgtgctctacactgcc

SEQ ID NO: 5377920 - DNA, 25 bp, Homo sapien
tagctgcttgtgctctacactgccc

SEQ ID NO: 5377921 - DNA, 25 bp, Homo sapien
agctccaaggtggtcagctcttcca

SEQ ID NO: 5377922 - DNA, 25 bp, Homo sapien
ccctgccggtagactcggtggatgt

SEQ ID NO: 5377923 - DNA, 25 bp, Homo sapien
ggcgatcttctcaatcagctccaag

SEQ ID NO: 5377924 - DNA, 25 bp, Homo sapien
gatgctgtacaggttggcgatcttc

SEQ ID NO: 5377925 - DNA, 25 bp, Homo sapien
tgcaggggcactcgattctgctcca

SEQ ID NO: 5377926 - DNA, 25 bp, Homo sapien
gggcactcgattctgctccagctcc

SEQ ID NO: 5377927 - DNA, 25 bp, Homo sapien
tccagctcctgacagacataaatgg

SEQ ID NO: 5377928 - DNA, 25 bp, Homo sapien
gtctccactgccgtcccgcttctgc

SEQ ID NO: 5377929 - DNA, 25 bp, Homo sapien
catctgcgggaccacagatctggac

SEQ ID NO: 5377930 - DNA, 25 bp, Homo sapien
cctttgatggcgttgaagagccgga

SEQ ID NO: 5377931 - DNA, 25 bp, Homo sapien
gatctggaccaaatcatctcgggac

SEQ ID NO: 5377932 - DNA, 25 bp, Homo sapien
tcgggacatcttcagcaagtcagca

SEQ ID NO: 5377933 - DNA, 25 bp, Homo sapien
ttttttgacatataatctgtatgca

SEQ ID NO: 5377934 - DNA, 25 bp, Homo sapien
catataatctgtatgcatagatgtc

SEQ ID NO: 5377935 - DNA, 25 bp, Homo sapien
tatacagctcgctggatgctgacaa

SEQ ID NO: 5377936 - DNA, 25 bp, Homo sapien
tatgtggaagtatacagctcgctgg

SEQ ID NO: 5377937 - DNA, 25 bp, Homo sapien
tacacaaggtgcgtgtctgccgggt

SEQ ID NO: 5377938 - DNA, 25 bp, Homo sapien
catggaattgaacggtaggcactct

SEQ ID NO: 5377939 - DNA, 25 bp, Homo sapien
tatcagcctcaggtgaaagcctgcc

SEQ ID NO: 5377940 - DNA, 25 bp, Homo sapien
tgtagtcagagtgttcatgcccgtt

SEQ ID NO: 5377941 - DNA, 25 bp, Homo sapien
gcataaggggccctgcatcaccctg

SEQ ID NO: 5377942 - DNA, 25 bp, Homo sapien
ctgcatcaccctgccgggctaaggg

SEQ ID NO: 5377943 - DNA, 25 bp, Homo sapien
gtaggaaaagcataaggggccctgc

SEQ ID NO: 5377944 - DNA, 25 bp, Homo sapien
ggagcagtatttgggtaggaaaagc

SEQ ID NO: 5377945 - DNA, 25 bp, Homo sapien
cggcagaactgcgagaacctgttgc

SEQ ID NO: 5377946 - DNA, 25 bp, Homo sapien
cgagaacctgttgcggtgaagccac

SEQ ID NO: 5377947 - DNA, 25 bp, Homo sapien
gaagctggcaaagagccggcagaac

SEQ ID NO: 5377948 - DNA, 25 bp, Homo sapien
cctgttgcggtgaagccactgctgg

SEQ ID NO: 5377949 - DNA, 25 bp, Homo sapien
ctccaccgggtgggtcggagaggcg

SEQ ID NO: 5377950 - DNA, 25 bp, Homo sapien
gtttggagaaccattgtagcttggg

SEQ ID NO: 5377951 - DNA, 25 bp, Homo sapien
gtagcttggggacggggcgctgttc

SEQ ID NO: 5377952 - DNA, 25 bp, Homo sapien
ccttcgccgaggccaaagctgtttg

SEQ ID NO: 5377953 - DNA, 25 bp, Homo sapien
agctgtttggagaaccattgtagct

SEQ ID NO: 5377954 - DNA, 25 bp, Homo sapien
ggtaggccacgtcgggccatggaga

SEQ ID NO: 5377955 - DNA, 25 bp, Homo sapien
aggccacgtcgggccatggagagca

SEQ ID NO: 5377956 - DNA, 25 bp, Homo sapien
taggccacgtcgggccatggagagc

SEQ ID NO: 5377957 - DNA, 25 bp, Homo sapien
ctggtaggccacgtcgggccatgga

SEQ ID NO: 5377958 - DNA, 25 bp, Homo sapien
catcttctcccggtcagtcttctgt

SEQ ID NO: 5377959 - DNA, 25 bp, Homo sapien
ttcataggacggctggtatttctcc

SEQ ID NO: 5377960 - DNA, 25 bp, Homo sapien
tctgtttccgatcggctcccttcgg

SEQ ID NO: 5377961 - DNA, 25 bp, Homo sapien
gatggtggtttcataggacggctgg

SEQ ID NO: 5377962 - DNA, 25 bp, Homo sapien
ccagctcctgtctctcaggagactc

SEQ ID NO: 5377963 - DNA, 25 bp, Homo sapien
ctgtctctcaggagactcctcctcc

SEQ ID NO: 5377964 - DNA, 25 bp, Homo sapien
tcctgtctctcaggagactcctcct

SEQ ID NO: 5377965 - DNA, 25 bp, Homo sapien
agctcctgtctctcaggagactcct

SEQ ID NO: 5377966 - DNA, 25 bp, Homo sapien
gaactaacatgacatccctggtgag

SEQ ID NO: 5377967 - DNA, 25 bp, Homo sapien
cagaactaacatgacatccctggtg

SEQ ID NO: 5377968 - DNA, 25 bp, Homo sapien
aactaacatgacatccctggtgagg

SEQ ID NO: 5377969 - DNA, 25 bp, Homo sapien
actaacatgacatccctggtgaggg

SEQ ID NO: 5377970 - DNA, 25 bp, Homo sapien
tcttccacaggcccgtgccttcggt

SEQ ID NO: 5377971 - DNA, 25 bp, Homo sapien
tttattcccacatccgttccaagca

SEQ ID NO: 5377972 - DNA, 25 bp, Homo sapien
gttccaagcatgggtcttccacagg

SEQ ID NO: 5377973 - DNA, 25 bp, Homo sapien
gtgggcatttattcccacatccgtt

SEQ ID NO: 5377974 - DNA, 25 bp, Homo sapien
tcgttctgcttaaacgtgtcaatct

SEQ ID NO: 5377975 - DNA, 25 bp, Homo sapien
gcttaaacgtgtcaatctggactcg

SEQ ID NO: 5377976 - DNA, 25 bp, Homo sapien
aatctggactcgaaagggcactccc

SEQ ID NO: 5377977 - DNA, 25 bp, Homo sapien
gtgtactccccattctcgttctgct

SEQ ID NO: 5377978 - DNA, 25 bp, Homo sapien
caaaaactcgactgcattcagctgg

SEQ ID NO: 5377979 - DNA, 25 bp, Homo sapien
caagataccaacagacagtggaata

SEQ ID NO: 5377980 - DNA, 25 bp, Homo sapien
tgcagaagctctcttcgcagggtcc

SEQ ID NO: 5377981 - DNA, 25 bp, Homo sapien
gggtccaagataccaacagacagtg

SEQ ID NO: 5377982 - DNA, 25 bp, Homo sapien
catggaagaccacacggatgatgct

SEQ ID NO: 5377983 - DNA, 25 bp, Homo sapien
ctgcagccggcggtcatggaagacc

SEQ ID NO: 5377984 - DNA, 25 bp, Homo sapien
cgatgtccaggatccggtcccctgg

SEQ ID NO: 5377985 - DNA, 25 bp, Homo sapien
gatgtccaggatccggtcccctggc

SEQ ID NO: 5377986 - DNA, 25 bp, Homo sapien
ccagcttccgattctccagtagtcg

SEQ ID NO: 5377987 - DNA, 25 bp, Homo sapien
gattctccagtagtcggatttcata

SEQ ID NO: 5377988 - DNA, 25 bp, Homo sapien
cagtagtcggatttcataagactga

SEQ ID NO: 5377989 - DNA, 25 bp, Homo sapien
tttgtgttcagatcttgaaagtctc

SEQ ID NO: 5377990 - DNA, 25 bp, Homo sapien
gcacctctacaatgttcaaataaac

SEQ ID NO: 5377991 - DNA, 25 bp, Homo sapien
cgtgtgaccctactagagatagcac

SEQ ID NO: 5377992 - DNA, 25 bp, Homo sapien
tccaggaaaatacagttagcattaa

SEQ ID NO: 5377993 - DNA, 25 bp, Homo sapien
aatacagttagcattaaaatcactg

SEQ ID NO: 5377994 - DNA, 25 bp, Homo sapien
gagcaggtttgaaggaacgaagaag

SEQ ID NO: 5377995 - DNA, 25 bp, Homo sapien
agaagcctgttaaacattgtctcta

SEQ ID NO: 5377996 - DNA, 25 bp, Homo sapien
aagaagcctgttaaacattgtctct

SEQ ID NO: 5377997 - DNA, 25 bp, Homo sapien
gcaggtttgaaggaacgaagaagcc

SEQ ID NO: 5377998 - DNA, 25 bp, Homo sapien
tgaacacaacgtccagtcctgaact

SEQ ID NO: 5377999 - DNA, 25 bp, Homo sapien
gcaaaaacctgctacgggacatcag

SEQ ID NO: 5378000 - DNA, 25 bp, Homo sapien
tgcgtggaccactgaggacgctgca

SEQ ID NO: 5378001 - DNA, 25 bp, Homo sapien
caggagtgggacaactgaacacaac

SEQ ID NO: 5378002 - DNA, 25 bp, Homo sapien
tggagccagggataacatcagctgc

SEQ ID NO: 5378003 - DNA, 25 bp, Homo sapien
taatataacggttcttgaagacgca

SEQ ID NO: 5378004 - DNA, 25 bp, Homo sapien
tacgacaaggccagataagcatctt

SEQ ID NO: 5378005 - DNA, 25 bp, Homo sapien
tattgctggtacataggaattcacc

SEQ ID NO: 5378006 - DNA, 25 bp, Homo sapien
cataccctctccatcataaagacag

SEQ ID NO: 5378007 - DNA, 25 bp, Homo sapien
caacaaataacaagtgctggccggg

SEQ ID NO: 5378008 - DNA, 25 bp, Homo sapien
gatggctgccagtctgttacccata

SEQ ID NO: 5378009 - DNA, 25 bp, Homo sapien
gttccagagtcaccatttgacccag

SEQ ID NO: 5378010 - DNA, 25 bp, Homo sapien
ccctatgatgtacctggcccgttaa

SEQ ID NO: 5378011 - DNA, 25 bp, Homo sapien
caggcacctgcttggtttagaggca

SEQ ID NO: 5378012 - DNA, 25 bp, Homo sapien
taacacttactgagaccctatgatg

SEQ ID NO: 5378013 - DNA, 25 bp, Homo sapien
cagtcacctgggactagcaaggttt

SEQ ID NO: 5378014 - DNA, 25 bp, Homo sapien
gactacaggcatgtgccaccatgcc

SEQ ID NO: 5378015 - DNA, 25 bp, Homo sapien
atctccgcctcccggatacaagcga

SEQ ID NO: 5378016 - DNA, 25 bp, Homo sapien
ggactacaggcatgtgccaccatgc

SEQ ID NO: 5378017 - DNA, 25 bp, Homo sapien
taagttttggcctatagtatctttc

SEQ ID NO: 5378018 - DNA, 25 bp, Homo sapien
taaagtatccctatatggcaaaaaa

SEQ ID NO: 5378019 - DNA, 25 bp, Homo sapien
atggccaaaataaagtatccctata

SEQ ID NO: 5378020 - DNA, 25 bp, Homo sapien
caaaataaagtatccctatatggca

SEQ ID NO: 5378021 - DNA, 25 bp, Homo sapien
aggaatcaaagttcgcggagaggaa

SEQ ID NO: 5378022 - DNA, 25 bp, Homo sapien
ggcccagaagctggcaaattcagca

SEQ ID NO: 5378023 - DNA, 25 bp, Homo sapien
gacaaattgctacgacaccgcagct

SEQ ID NO: 5378024 - DNA, 25 bp, Homo sapien
gagaggaagctacacatgtaagaca

SEQ ID NO: 5378025 - DNA, 25 bp, Homo sapien
gggacgtggcagcacacaacacata

SEQ ID NO: 5378026 - DNA, 25 bp, Homo sapien
cttggttgaggtaggtcagcgtctc

SEQ ID NO: 5378027 - DNA, 25 bp, Homo sapien
agcgtctcttcatgcagcttcacgg

SEQ ID NO: 5378028 - DNA, 25 bp, Homo sapien
acaacacatattgcaggggtggcag

SEQ ID NO: 5378029 - DNA, 25 bp, Homo sapien
cgggctgcgtgtgccagaagagcat

SEQ ID NO: 5378030 - DNA, 25 bp, Homo sapien
tagctgccggagttgtgctggttgt

SEQ ID NO: 5378031 - DNA, 25 bp, Homo sapien
ctggttgtagtgctcgggctgcgtg

SEQ ID NO: 5378032 - DNA, 25 bp, Homo sapien
aggtagctgccggagttgtgctggt

SEQ ID NO: 5378033 - DNA, 25 bp, Homo sapien
accggggcgcggcagcaagcgcaga

SEQ ID NO: 5378034 - DNA, 25 bp, Homo sapien
ttcgcgctccgaacccgcggtgccg

SEQ ID NO: 5378035 - DNA, 25 bp, Homo sapien
gcgcggcagcaagcgcagacgcggg

SEQ ID NO: 5378036 - DNA, 25 bp, Homo sapien
ccagcggcggcttcgcgctccgaac

SEQ ID NO: 5378037 - DNA, 25 bp, Homo sapien
tgatccagagcatcctgaggcgtct

SEQ ID NO: 5378038 - DNA, 25 bp, Homo sapien
tgtcactggatagtggcactcggga

SEQ ID NO: 5378039 - DNA, 25 bp, Homo sapien
gggattctaatccaagtatctgtga

SEQ ID NO: 5378040 - DNA, 25 bp, Homo sapien
cactcgggacgaatcatggaacatg

SEQ ID NO: 5378041 - DNA, 25 bp, Homo sapien
agctcatctcgggattcgaggctga

SEQ ID NO: 5378042 - DNA, 25 bp, Homo sapien
gggagccactgttctcactgatcag

SEQ ID NO: 5378043 - DNA, 25 bp, Homo sapien
ggattctagcccatgcgtctcacct

SEQ ID NO: 5378044 - DNA, 25 bp, Homo sapien
gaaatggagccgatgagggaggccc

SEQ ID NO: 5378045 - DNA, 25 bp, Homo sapien
tttgccatgatacacttgaaagtga

SEQ ID NO: 5378046 - DNA, 25 bp, Homo sapien
aattaagtctcatttattctagggc

SEQ ID NO: 5378047 - DNA, 25 bp, Homo sapien
gcgtgtgaacacagtgccaacataa

SEQ ID NO: 5378048 - DNA, 25 bp, Homo sapien
tatggatgtaacatgaaaaagcccc

SEQ ID NO: 5378049 - DNA, 25 bp, Homo sapien
gcagcagttttcagattgaggccaa

SEQ ID NO: 5378050 - DNA, 25 bp, Homo sapien
tgaggacgtccagcaatgttcgaga

SEQ ID NO: 5378051 - DNA, 25 bp, Homo sapien
taagaatcacgtgctctggcaccca

SEQ ID NO: 5378052 - DNA, 25 bp, Homo sapien
gaaactcatggataacctagcccga

SEQ ID NO: 5378053 - DNA, 25 bp, Homo sapien
cagactccaaacctctagttacttt

SEQ ID NO: 5378054 - DNA, 25 bp, Homo sapien
tgagaccatgttagaactgaacggc

SEQ ID NO: 5378055 - DNA, 25 bp, Homo sapien
acagacattcaaggaactacttcag

SEQ ID NO: 5378056 - DNA, 25 bp, Homo sapien
aattgtgatatccagtctctctagg

SEQ ID NO: 5378057 - DNA, 25 bp, Homo sapien
tcagaactaagatggtaaagatgcc

SEQ ID NO: 5378058 - DNA, 25 bp, Homo sapien
caccgtgtagcccagagatgagggt

SEQ ID NO: 5378059 - DNA, 25 bp, Homo sapien
aacagtgttcccaaggatctcagca

SEQ ID NO: 5378060 - DNA, 25 bp, Homo sapien
gaactgccatctcaggcatccctaa

SEQ ID NO: 5378061 - DNA, 25 bp, Homo sapien
gaaacaagttggtgctcaatctgaa

SEQ ID NO: 5378062 - DNA, 25 bp, Homo sapien
ggtgcactcccaattctacgctgaa

SEQ ID NO: 5378063 - DNA, 25 bp, Homo sapien
tctaccaagtagtggctagagcgct

SEQ ID NO: 5378064 - DNA, 25 bp, Homo sapien
ggcagtcggcctccagtctggatat

SEQ ID NO: 5378065 - DNA, 25 bp, Homo sapien
cagcaggctgtacaagacatgtttc

SEQ ID NO: 5378066 - DNA, 25 bp, Homo sapien
gattgcttctaggtctacacaagag

SEQ ID NO: 5378067 - DNA, 25 bp, Homo sapien
gaggcaccaccgattgcttctaggt

SEQ ID NO: 5378068 - DNA, 25 bp, Homo sapien
gtctacacaagagacaggtactgcc

SEQ ID NO: 5378069 - DNA, 25 bp, Homo sapien
aggtctctgagaggcaccaccgatt

SEQ ID NO: 5378070 - DNA, 25 bp, Homo sapien
gtggagacatcggaggaggagctgc

SEQ ID NO: 5378071 - DNA, 25 bp, Homo sapien
tgttggtggtctgggccctctttat

SEQ ID NO: 5378072 - DNA, 25 bp, Homo sapien
tgcgtggagacatcggaggaggagc

SEQ ID NO: 5378073 - DNA, 25 bp, Homo sapien
ttagctgtgcgtggagacatcggag

SEQ ID NO: 5378074 - DNA, 25 bp, Homo sapien
gcaattacaagaccaccaccaggtg

SEQ ID NO: 5378075 - DNA, 25 bp, Homo sapien
tgcccatccaatgcatctgccaggt

SEQ ID NO: 5378076 - DNA, 25 bp, Homo sapien
tcccaggtgacagtaaggaaacagc

SEQ ID NO: 5378077 - DNA, 25 bp, Homo sapien
caggtgtcacaactaggtgggccgc

SEQ ID NO: 5378078 - DNA, 25 bp, Homo sapien
taacagataagaaatcgccatcagg

SEQ ID NO: 5378079 - DNA, 25 bp, Homo sapien
catgccaagaccgtttaatagggaa

SEQ ID NO: 5378080 - DNA, 25 bp, Homo sapien
cactcctggaccagtcaaataattt

SEQ ID NO: 5378081 - DNA, 25 bp, Homo sapien
caaataattttcaacaagcatgcca

SEQ ID NO: 5378082 - DNA, 25 bp, Homo sapien
atacacctcttccagcctatctgct

SEQ ID NO: 5378083 - DNA, 25 bp, Homo sapien
acctcttccagcctatctgctgatt

SEQ ID NO: 5378084 - DNA, 25 bp, Homo sapien
ctgcctcatacacctcttccagcct

SEQ ID NO: 5378085 - DNA, 25 bp, Homo sapien
cctcatacacctcttccagcctatc

SEQ ID NO: 5378086 - DNA, 25 bp, Homo sapien
gctccctgtgagctgtgcaaggtga

SEQ ID NO: 5378087 - DNA, 25 bp, Homo sapien
gctggccttacgcacactactttcg

SEQ ID NO: 5378088 - DNA, 25 bp, Homo sapien
gtttcaggtcttctccgattacgga

SEQ ID NO: 5378089 - DNA, 25 bp, Homo sapien
attgccactaagcaaaacacgctgg

SEQ ID NO: 5378090 - DNA, 25 bp, Homo sapien
tttgcgatcctctcgacgactttgg

SEQ ID NO: 5378091 - DNA, 25 bp, Homo sapien
gcaagcctgggatgatgtcgacaag

SEQ ID NO: 5378092 - DNA, 25 bp, Homo sapien
tgcagcaatgactcctttgcgatcc

SEQ ID NO: 5378093 - DNA, 25 bp, Homo sapien
ccttgatgcactgctccgggtggat

SEQ ID NO: 5378094 - DNA, 25 bp, Homo sapien
cttgccagccaaagcgtcggactca

SEQ ID NO: 5378095 - DNA, 25 bp, Homo sapien
catggatatgtgcagaaggcttctt

SEQ ID NO: 5378096 - DNA, 25 bp, Homo sapien
catggacggcattgactccatgcat

SEQ ID NO: 5378097 - DNA, 25 bp, Homo sapien
tctttggtgttctgcgggccttcct

SEQ ID NO: 5378098 - DNA, 25 bp, Homo sapien
ggaaggagcctatttgaaggaagcc

SEQ ID NO: 5378099 - DNA, 25 bp, Homo sapien
ctcctgccaaaggtagctctttcca

SEQ ID NO: 5378100 - DNA, 25 bp, Homo sapien
aaactcctgccaaaggtagctcttt

SEQ ID NO: 5378101 - DNA, 25 bp, Homo sapien
aaggagcctatttgaaggaagccca

SEQ ID NO: 5378102 - DNA, 25 bp, Homo sapien
ctccttatgggagtctttgtgggct

SEQ ID NO: 5378103 - DNA, 25 bp, Homo sapien
aactcttaacgccagtgctcgaatt

SEQ ID NO: 5378104 - DNA, 25 bp, Homo sapien
ttaacgccagtgctcgaattgaatg

SEQ ID NO: 5378105 - DNA, 25 bp, Homo sapien
aatcgtcagctcggcgtagttttta

SEQ ID NO: 5378106 - DNA, 25 bp, Homo sapien
tcagctcggcgtagtttttaaatct

SEQ ID NO: 5378107 - DNA, 25 bp, Homo sapien
tctgagtcaccacggcatggcatgc

SEQ ID NO: 5378108 - DNA, 25 bp, Homo sapien
tcaagtgtcccagcatgatgaagct

SEQ ID NO: 5378109 - DNA, 25 bp, Homo sapien
tataaacccagttgcagaccatgca

SEQ ID NO: 5378110 - DNA, 25 bp, Homo sapien
tgtgcagatcacagaccaggcatgt

SEQ ID NO: 5378111 - DNA, 25 bp, Homo sapien
ctttgtctccaagggtctccagcag

SEQ ID NO: 5378112 - DNA, 25 bp, Homo sapien
caccaggtcagaatggtcgatgggc

SEQ ID NO: 5378113 - DNA, 25 bp, Homo sapien
tcttcccgcgtgatcttgagcagct

SEQ ID NO: 5378114 - DNA, 25 bp, Homo sapien
cactcgctcattgtggttggacagc

SEQ ID NO: 5378115 - DNA, 25 bp, Homo sapien
gtgaaacacaccagacatacgtcac

SEQ ID NO: 5378116 - DNA, 25 bp, Homo sapien
ctggtgaaacacaccagacatacgt

SEQ ID NO: 5378117 - DNA, 25 bp, Homo sapien
tggtgaaacacaccagacatacgtc

SEQ ID NO: 5378118 - DNA, 25 bp, Homo sapien
ggtgaaacacaccagacatacgtca

SEQ ID NO: 5378119 - DNA, 25 bp, Homo sapien
tgtcgtcatcgaacacagcctcttt

SEQ ID NO: 5378120 - DNA, 25 bp, Homo sapien
cgtctcgaagctgctccatgtcgtc

SEQ ID NO: 5378121 - DNA, 25 bp, Homo sapien
tgctccatgtcgtcatcgaacacag

SEQ ID NO: 5378122 - DNA, 25 bp, Homo sapien
gaagctgctccatgtcgtcatcgaa

SEQ ID NO: 5378123 - DNA, 25 bp, Homo sapien
atctgagtaggggtacgggttgtag

SEQ ID NO: 5378124 - DNA, 25 bp, Homo sapien
cgtaggtgttgatggcatctgagta

SEQ ID NO: 5378125 - DNA, 25 bp, Homo sapien
tacgggttgtagtctcgcgcccgcg

SEQ ID NO: 5378126 - DNA, 25 bp, Homo sapien
cttgtcgtaggtgttgatggcatct

SEQ ID NO: 5378127 - DNA, 25 bp, Homo sapien
tgttgagtagtgaggtcttgttatc

SEQ ID NO: 5378128 - DNA, 25 bp, Homo sapien
ctgggtgttgagtagtgaggtcttg

SEQ ID NO: 5378129 - DNA, 25 bp, Homo sapien
agctgtccggcctccttctacttca

SEQ ID NO: 5378130 - DNA, 25 bp, Homo sapien
cttgttatccagagctgtccggcct

SEQ ID NO: 5378131 - DNA, 25 bp, Homo sapien
aggggaggcagcgcccccatcgcgg

SEQ ID NO: 5378132 - DNA, 25 bp, Homo sapien
aggcagcgcccccatcgcgggacac

SEQ ID NO: 5378133 - DNA, 25 bp, Homo sapien
cccggccctcagtggcaggggaggc

SEQ ID NO: 5378134 - DNA, 25 bp, Homo sapien
ccggccctcagtggcaggggaggca

SEQ ID NO: 5378135 - DNA, 25 bp, Homo sapien
tggtctagcccctttgtaggtggca

SEQ ID NO: 5378136 - DNA, 25 bp, Homo sapien
catctgactacccaacaacggtgga

SEQ ID NO: 5378137 - DNA, 25 bp, Homo sapien
catggtatcgacaagagcaaatcac

SEQ ID NO: 5378138 - DNA, 25 bp, Homo sapien
ttcaacaaattcaaccgctggccct

SEQ ID NO: 5378139 - DNA, 25 bp, Homo sapien
gctttacgcagcaggaacccggtgt

SEQ ID NO: 5378140 - DNA, 25 bp, Homo sapien
cacgcaggctttacgcagcaggaac

SEQ ID NO: 5378141 - DNA, 25 bp, Homo sapien
gtgtctccacgcaggctttacgcag

SEQ ID NO: 5378142 - DNA, 25 bp, Homo sapien
tctccacgcaggctttacgcagcag

SEQ ID NO: 5378143 - DNA, 25 bp, Homo sapien
tattggcttgtctccctatattggg

SEQ ID NO: 5378144 - DNA, 25 bp, Homo sapien
gatgtactggctcccgagtctttca

SEQ ID NO: 5378145 - DNA, 25 bp, Homo sapien
tgaccgtaaggatgggctttctccc

SEQ ID NO: 5378146 - DNA, 25 bp, Homo sapien
tggcaccaacattacactagatcct

SEQ ID NO: 5378147 - DNA, 25 bp, Homo sapien
tatactgaaacaggacactgggtgc

SEQ ID NO: 5378148 - DNA, 25 bp, Homo sapien
ggaacagccactgctctgacatgca

SEQ ID NO: 5378149 - DNA, 25 bp, Homo sapien
gattttcactgccaccctagctttg

SEQ ID NO: 5378150 - DNA, 25 bp, Homo sapien
tgggtgcccatctacagaacatcat

SEQ ID NO: 5378151 - DNA, 25 bp, Homo sapien
aatacaccctatagtgttaacactg

SEQ ID NO: 5378152 - DNA, 25 bp, Homo sapien
gacagtgtgatattactcttacaaa

SEQ ID NO: 5378153 - DNA, 25 bp, Homo sapien
ctcatgccctatgctcaacagatgg

SEQ ID NO: 5378154 - DNA, 25 bp, Homo sapien
taacactggttatctctagagatgg

SEQ ID NO: 5378155 - DNA, 25 bp, Homo sapien
ttcgaataggaaatcacaccatgcc

SEQ ID NO: 5378156 - DNA, 25 bp, Homo sapien
actagcatttgctcgacagccccag

SEQ ID NO: 5378157 - DNA, 25 bp, Homo sapien
tcaatgactccagtatcaccagggt

SEQ ID NO: 5378158 - DNA, 25 bp, Homo sapien
ccatgcttcagttcagaggtgacat

SEQ ID NO: 5378159 - DNA, 25 bp, Homo sapien
gaaatgaaagcctatcattcacagc

SEQ ID NO: 5378160 - DNA, 25 bp, Homo sapien
ccattactgggaatttatccaaaga

SEQ ID NO: 5378161 - DNA, 25 bp, Homo sapien
gaggtacattaagaccgaaatcata

SEQ ID NO: 5378162 - DNA, 25 bp, Homo sapien
gagatgcctacaccctcatgtttgt

SEQ ID NO: 5378163 - DNA, 25 bp, Homo sapien
tgccatctcgtttaattggctcatt

SEQ ID NO: 5378164 - DNA, 25 bp, Homo sapien
agatcttcttggcttcgaaaactaa

SEQ ID NO: 5378165 - DNA, 25 bp, Homo sapien
cctttttgccatctcgtttaattgg

SEQ ID NO: 5378166 - DNA, 25 bp, Homo sapien
ttttgccatctcgtttaattggctc

SEQ ID NO: 5378167 - DNA, 25 bp, Homo sapien
ggttctctgtatcatagtccagcat

SEQ ID NO: 5378168 - DNA, 25 bp, Homo sapien
agttcaggttctctgtatcatagtc

SEQ ID NO: 5378169 - DNA, 25 bp, Homo sapien
cacgtagagaactatagatttcttc

SEQ ID NO: 5378170 - DNA, 25 bp, Homo sapien
ctgtaactccacgtagagaactata

SEQ ID NO: 5378171 - DNA, 25 bp, Homo sapien
caacagtaaccacgagaatgcagga

SEQ ID NO: 5378172 - DNA, 25 bp, Homo sapien
gactcaaagtcagatccaccctatg

SEQ ID NO: 5378173 - DNA, 25 bp, Homo sapien
caaggctaggttatactcccaggta

SEQ ID NO: 5378174 - DNA, 25 bp, Homo sapien
tttgttagagtaccaccaccggaca

SEQ ID NO: 5378175 - DNA, 25 bp, Homo sapien
gctggtaggttctagagcccaagag

SEQ ID NO: 5378176 - DNA, 25 bp, Homo sapien
gagctgaccacaatctcaaagatgg

SEQ ID NO: 5378177 - DNA, 25 bp, Homo sapien
caagtgttttctagggctggtgctg

SEQ ID NO: 5378178 - DNA, 25 bp, Homo sapien
taaaacccacctttcctgatgaatg

SEQ ID NO: 5378179 - DNA, 25 bp, Homo sapien
gtcggcactccaaccccataaccga

SEQ ID NO: 5378180 - DNA, 25 bp, Homo sapien
tgagagccttgtgggagggagcggt

SEQ ID NO: 5378181 - DNA, 25 bp, Homo sapien
ggtgcttcgctaacccgtcggcact

SEQ ID NO: 5378182 - DNA, 25 bp, Homo sapien
gaggtgggtgcttcgctaacccgtc

SEQ ID NO: 5378183 - DNA, 25 bp, Homo sapien
tattaggtactagtgagtgtttaga

SEQ ID NO: 5378184 - DNA, 25 bp, Homo sapien
ttgtaggtactattaggtactagtg

SEQ ID NO: 5378185 - DNA, 25 bp, Homo sapien
taggtactattaggtactagtgagt

SEQ ID NO: 5378186 - DNA, 25 bp, Homo sapien
ctattaggtactagtgagtgtttag

SEQ ID NO: 5378187 - DNA, 25 bp, Homo sapien
ctgctggtgtgtcgggagggcgtcc

SEQ ID NO: 5378188 - DNA, 25 bp, Homo sapien
tgggaacagttggtgggtgaggtca

SEQ ID NO: 5378189 - DNA, 25 bp, Homo sapien
cttggagacagacccccatgggaac

SEQ ID NO: 5378190 - DNA, 25 bp, Homo sapien
agggcgtccggccaatcgtattgct

SEQ ID NO: 5378191 - DNA, 25 bp, Homo sapien
caagtaacatggtaaattcaggagt

SEQ ID NO: 5378192 - DNA, 25 bp, Homo sapien
cacactggtgttactggaattcttg

SEQ ID NO: 5378193 - DNA, 25 bp, Homo sapien
ggagtattcaattcaaacagagaga

SEQ ID NO: 5378194 - DNA, 25 bp, Homo sapien
acagagagattagcacaatctgtgc

SEQ ID NO: 5378195 - DNA, 25 bp, Homo sapien
taagtaaaatcactaataagagggc

SEQ ID NO: 5378196 - DNA, 25 bp, Homo sapien
gggcattctaggcatcaaaaacaaa

SEQ ID NO: 5378197 - DNA, 25 bp, Homo sapien
taataagagggcattctaggcatca

SEQ ID NO: 5378198 - DNA, 25 bp, Homo sapien
tatgtaatgtacaataggtcatcaa

SEQ ID NO: 5378199 - DNA, 25 bp, Homo sapien
ggaaatcctcacctactcgactacg

SEQ ID NO: 5378200 - DNA, 25 bp, Homo sapien
agagcaggttgaagctgacctagtg

SEQ ID NO: 5378201 - DNA, 25 bp, Homo sapien
gaagctgacctagtggggaaatcct

SEQ ID NO: 5378202 - DNA, 25 bp, Homo sapien
ggggaaatcctcacctactcgacta

SEQ ID NO: 5378203 - DNA, 25 bp, Homo sapien
aatctgttggatccatctgtctggc

SEQ ID NO: 5378204 - DNA, 25 bp, Homo sapien
ggccagagactcaatgtatttcagg

SEQ ID NO: 5378205 - DNA, 25 bp, Homo sapien
gaaacagcaagccttgtctcactag

SEQ ID NO: 5378206 - DNA, 25 bp, Homo sapien
tgtccaggttatgattctagaaaca

SEQ ID NO: 5378207 - DNA, 25 bp, Homo sapien
ttgttgatcaaatggaaaggagtcc

SEQ ID NO: 5378208 - DNA, 25 bp, Homo sapien
gagtttgatccacaataaatctcat

SEQ ID NO: 5378209 - DNA, 25 bp, Homo sapien
cttgaggtttggagtttgagtttga

SEQ ID NO: 5378210 - DNA, 25 bp, Homo sapien
aaatgttaaattgttgatcaaatgg

SEQ ID NO: 5378211 - DNA, 25 bp, Homo sapien
caagtatcctgtaacatcaaaatgg

SEQ ID NO: 5378212 - DNA, 25 bp, Homo sapien
tgtcaacaacagaaagtgagaactg

SEQ ID NO: 5378213 - DNA, 25 bp, Homo sapien
cacaaaagtaatatcaacacaagga

SEQ ID NO: 5378214 - DNA, 25 bp, Homo sapien
tcatggactggtgggacatgtcaac

SEQ ID NO: 5378215 - DNA, 25 bp, Homo sapien
cagatccaagtaaatctgctcccat

SEQ ID NO: 5378216 - DNA, 25 bp, Homo sapien
atccaagtaaatctgctcccatttt

SEQ ID NO: 5378217 - DNA, 25 bp, Homo sapien
gatccaagtaaatctgctcccattt

SEQ ID NO: 5378218 - DNA, 25 bp, Homo sapien
cacagatccaagtaaatctgctccc

SEQ ID NO: 5378219 - DNA, 25 bp, Homo sapien
aaaaagccagtcttgtaaatcatcc

SEQ ID NO: 5378220 - DNA, 25 bp, Homo sapien
catccttatgaattattataaaatc

SEQ ID NO: 5378221 - DNA, 25 bp, Homo sapien
aacaaaaagccagtcttgtaaatca

SEQ ID NO: 5378222 - DNA, 25 bp, Homo sapien
tgtaaatcatccttatgaattatta

SEQ ID NO: 5378223 - DNA, 25 bp, Homo sapien
tccttctttatcctcacattctgct

SEQ ID NO: 5378224 - DNA, 25 bp, Homo sapien
tgtacaagagacttctgatggaaac

SEQ ID NO: 5378225 - DNA, 25 bp, Homo sapien
cacattctgcttctgaatcagcaat

SEQ ID NO: 5378226 - DNA, 25 bp, Homo sapien
tacaagagacttctgatggaaacaa

SEQ ID NO: 5378227 - DNA, 25 bp, Homo sapien
tcttccagcaagacttggaggagcc

SEQ ID NO: 5378228 - DNA, 25 bp, Homo sapien
ggaggagcccatctttactaggaaa

SEQ ID NO: 5378229 - DNA, 25 bp, Homo sapien
gaaagtgttctgtcccatactcatg

SEQ ID NO: 5378230 - DNA, 25 bp, Homo sapien
catctaatagtctctaagggccttc

SEQ ID NO: 5378231 - DNA, 25 bp, Homo sapien
gtcagcaaacatccgagtgaagatc

SEQ ID NO: 5378232 - DNA, 25 bp, Homo sapien
ggtcagcaaacatccgagtgaagat

SEQ ID NO: 5378233 - DNA, 25 bp, Homo sapien
agggtcagcaaacatccgagtgaag

SEQ ID NO: 5378234 - DNA, 25 bp, Homo sapien
gggtcagcaaacatccgagtgaaga

SEQ ID NO: 5378235 - DNA, 25 bp, Homo sapien
acctttagtgcctgttcctgcaagc

SEQ ID NO: 5378236 - DNA, 25 bp, Homo sapien
gtgcctgttcctgcaagcagacctc

SEQ ID NO: 5378237 - DNA, 25 bp, Homo sapien
tttagtgcctgttcctgcaagcaga

SEQ ID NO: 5378238 - DNA, 25 bp, Homo sapien
tagtgcctgttcctgcaagcagacc

SEQ ID NO: 5378239 - DNA, 25 bp, Homo sapien
tgaagagtccaacaggagattcaaa

SEQ ID NO: 5378240 - DNA, 25 bp, Homo sapien
caggagattcaaacttagctcatat

SEQ ID NO: 5378241 - DNA, 25 bp, Homo sapien
aaacttagctcatattcttgctgtg

SEQ ID NO: 5378242 - DNA, 25 bp, Homo sapien
tccaacaggagattcaaacttagct

SEQ ID NO: 5378243 - DNA, 25 bp, Homo sapien
cagtaagttctgcaggcccagaagc

SEQ ID NO: 5378244 - DNA, 25 bp, Homo sapien
ttcagtaagttctgcaggcccagaa

SEQ ID NO: 5378245 - DNA, 25 bp, Homo sapien
tcagtaagttctgcaggcccagaag

SEQ ID NO: 5378246 - DNA, 25 bp, Homo sapien
cagtttgaactagcacagtggttga

SEQ ID NO: 5378247 - DNA, 25 bp, Homo sapien
gtcagaatacatcccatacggctca

SEQ ID NO: 5378248 - DNA, 25 bp, Homo sapien
tgaggcatcactgttggcatcatcg

SEQ ID NO: 5378249 - DNA, 25 bp, Homo sapien
tatgagcgctcagagcaaacacttg

SEQ ID NO: 5378250 - DNA, 25 bp, Homo sapien
agggatgggagtgattgaggaagaa

SEQ ID NO: 5378251 - DNA, 25 bp, Homo sapien
ggatgggagtgattgaggaagaaat

SEQ ID NO: 5378252 - DNA, 25 bp, Homo sapien
gggatgggagtgattgaggaagaaa

SEQ ID NO: 5378253 - DNA, 25 bp, Homo sapien
agagttaagtgtaaaaagacacatg

SEQ ID NO: 5378254 - DNA, 25 bp, Homo sapien
aagagttaagtgtaaaaagacacat

SEQ ID NO: 5378255 - DNA, 25 bp, Homo sapien
cctgtgcttatagattagggaaata

SEQ ID NO: 5378256 - DNA, 25 bp, Homo sapien
tttcctgtgcttatagattagggaa

SEQ ID NO: 5378257 - DNA, 25 bp, Homo sapien
gcagcttcaagatctgtacttgtgc

SEQ ID NO: 5378258 - DNA, 25 bp, Homo sapien
acagcagcttcaagatctgtacttg

SEQ ID NO: 5378259 - DNA, 25 bp, Homo sapien
tctgtacttgtgctcagaactctca

SEQ ID NO: 5378260 - DNA, 25 bp, Homo sapien
tacttgtgctcagaactctcatggc

SEQ ID NO: 5378261 - DNA, 25 bp, Homo sapien
ttcagcagtggagagagcactagtg

SEQ ID NO: 5378262 - DNA, 25 bp, Homo sapien
cagtggagagagcactagtggacct

SEQ ID NO: 5378263 - DNA, 25 bp, Homo sapien
gagcactagtggacctggaatgacg

SEQ ID NO: 5378264 - DNA, 25 bp, Homo sapien
tagtggacctggaatgacgtcgaga

SEQ ID NO: 5378265 - DNA, 25 bp, Homo sapien
ccccgagcagggcttgtatctcggc

SEQ ID NO: 5378266 - DNA, 25 bp, Homo sapien
gggcttgtatctcggctgctctcac

SEQ ID NO: 5378267 - DNA, 25 bp, Homo sapien
tggtatcgcggctgcacccctgact

SEQ ID NO: 5378268 - DNA, 25 bp, Homo sapien
tgctctcacggctggtatcgcggct

SEQ ID NO: 5378269 - DNA, 25 bp, Homo sapien
ggtcgagggatacggctgctccgtg

SEQ ID NO: 5378270 - DNA, 25 bp, Homo sapien
gctgggtcgagggatacggctgctc

SEQ ID NO: 5378271 - DNA, 25 bp, Homo sapien
ctgggtcgagggatacggctgctcc

SEQ ID NO: 5378272 - DNA, 25 bp, Homo sapien
tgggtcgagggatacggctgctccg

SEQ ID NO: 5378273 - DNA, 25 bp, Homo sapien
agaagtcatagagtatgaatttaga

SEQ ID NO: 5378274 - DNA, 25 bp, Homo sapien
gtattatatcacaaagacttctaaa

SEQ ID NO: 5378275 - DNA, 25 bp, Homo sapien
taaagaagtcatagagtatgaattt

SEQ ID NO: 5378276 - DNA, 25 bp, Homo sapien
tttgtattatatcacaaagacttct

SEQ ID NO: 5378277 - DNA, 25 bp, Homo sapien
ctaatcctattcggtttggacttgt

SEQ ID NO: 5378278 - DNA, 25 bp, Homo sapien
tgaagacggtgtcacaggtgggcct

SEQ ID NO: 5378279 - DNA, 25 bp, Homo sapien
cagtaagtccaccataaccacttcc

SEQ ID NO: 5378280 - DNA, 25 bp, Homo sapien
ttgtttcccggctacatccctggct

SEQ ID NO: 5378281 - DNA, 25 bp, Homo sapien
ccagcaggattagcagatctggatc

SEQ ID NO: 5378282 - DNA, 25 bp, Homo sapien
caccagcaggattagcagatctgga

SEQ ID NO: 5378283 - DNA, 25 bp, Homo sapien
accagcaggattagcagatctggat

SEQ ID NO: 5378284 - DNA, 25 bp, Homo sapien
actgcggccccggttatcaggtgta

SEQ ID NO: 5378285 - DNA, 25 bp, Homo sapien
gctttgccgtcttgtgcggatccga

SEQ ID NO: 5378286 - DNA, 25 bp, Homo sapien
tagaggcgacgttggtggcactccc

SEQ ID NO: 5378287 - DNA, 25 bp, Homo sapien
gtgaaaccactttagcgcgactgcg

SEQ ID NO: 5378288 - DNA, 25 bp, Homo sapien
gaaagtgtatctgccaacaggttaa

SEQ ID NO: 5378289 - DNA, 25 bp, Homo sapien
tcttggcaggtaagaatggaatcat

SEQ ID NO: 5378290 - DNA, 25 bp, Homo sapien
tgatcttaacactctaggattctgc

SEQ ID NO: 5378291 - DNA, 25 bp, Homo sapien
aaatagaagcagtgagggtaagcac

SEQ ID NO: 5378292 - DNA, 25 bp, Homo sapien
taaatattatattgctagagcttta

SEQ ID NO: 5378293 - DNA, 25 bp, Homo sapien
gctttcttctactgatcctttgtct

SEQ ID NO: 5378294 - DNA, 25 bp, Homo sapien
ttgtcttctatctgtagtcttaagt

SEQ ID NO: 5378295 - DNA, 25 bp, Homo sapien
gacaatctttctcatttaaccacaa

SEQ ID NO: 5378296 - DNA, 25 bp, Homo sapien
aatcacactttagaggagatacagt

SEQ ID NO: 5378297 - DNA, 25 bp, Homo sapien
caaagctatagtataaaatcagaaa

SEQ ID NO: 5378298 - DNA, 25 bp, Homo sapien
atcagaaacaggacatgaacactga

SEQ ID NO: 5378299 - DNA, 25 bp, Homo sapien
aataatattatgaaaaacgcagcca

SEQ ID NO: 5378300 - DNA, 25 bp, Homo sapien
acctggccttactatgatatgttta

SEQ ID NO: 5378301 - DNA, 25 bp, Homo sapien
cctggccttactatgatatgtttaa

SEQ ID NO: 5378302 - DNA, 25 bp, Homo sapien
caacttgtgtgagtagacagcttag

SEQ ID NO: 5378303 - DNA, 25 bp, Homo sapien
caaggtcttgtgatctgtgtgtcta

SEQ ID NO: 5378304 - DNA, 25 bp, Homo sapien
tgtcaatgctggcttaatgccaact

SEQ ID NO: 5378305 - DNA, 25 bp, Homo sapien
tccaaacaccacaggtgaagtaaat

SEQ ID NO: 5378306 - DNA, 25 bp, Homo sapien
gaaagtgagacacacctcaatcaca

SEQ ID NO: 5378307 - DNA, 25 bp, Homo sapien
ggagaaacagcgtgcaacatctcat

SEQ ID NO: 5378308 - DNA, 25 bp, Homo sapien
tgggtactgggcaacactcggtgag

SEQ ID NO: 5378309 - DNA, 25 bp, Homo sapien
gcaaaaacccaatggcgacagaatg

SEQ ID NO: 5378310 - DNA, 25 bp, Homo sapien
attaaaaagccgaatgttattagct

SEQ ID NO: 5378311 - DNA, 25 bp, Homo sapien
ttaaaaagccgaatgttattagcta

SEQ ID NO: 5378312 - DNA, 25 bp, Homo sapien
gaaattagcttaacatagcataatg

SEQ ID NO: 5378313 - DNA, 25 bp, Homo sapien
tcaacagcaaagcagagtctgaagc

SEQ ID NO: 5378314 - DNA, 25 bp, Homo sapien
aagtgtgccttgtattgaaattagc

SEQ ID NO: 5378315 - DNA, 25 bp, Homo sapien
aataaaacacagacgggcaacccag

SEQ ID NO: 5378316 - DNA, 25 bp, Homo sapien
ggcctatgtactccatgtcttccct

SEQ ID NO: 5378317 - DNA, 25 bp, Homo sapien
tccaggcctatgtactccatgtctt

SEQ ID NO: 5378318 - DNA, 25 bp, Homo sapien
caggcctatgtactccatgtcttcc

SEQ ID NO: 5378319 - DNA, 25 bp, Homo sapien
ctgagtccaggcctatgtactccat

SEQ ID NO: 5378320 - DNA, 25 bp, Homo sapien
agctgaaaggcgtcgtgcccgaaga

SEQ ID NO: 5378321 - DNA, 25 bp, Homo sapien
cgtcgtgcccgaagatgaggagact

SEQ ID NO: 5378322 - DNA, 25 bp, Homo sapien
taaggatgcgtatgaccctggaggc

SEQ ID NO: 5378323 - DNA, 25 bp, Homo sapien
actggctgctgcgttcacatcaata

SEQ ID NO: 5378324 - DNA, 25 bp, Homo sapien
ccagtcgttgacacagatttggtac

SEQ ID NO: 5378325 - DNA, 25 bp, Homo sapien
gggacccagtcgttgacacagattt

SEQ ID NO: 5378326 - DNA, 25 bp, Homo sapien
gacccagtcgttgacacagatttgg

SEQ ID NO: 5378327 - DNA, 25 bp, Homo sapien
gagggacccagtcgttgacacagat

SEQ ID NO: 5378328 - DNA, 25 bp, Homo sapien
tgataaaggaggaaatatgaataag

SEQ ID NO: 5378329 - DNA, 25 bp, Homo sapien
ataaaggaggaaatatgaataagga

SEQ ID NO: 5378330 - DNA, 25 bp, Homo sapien
agtgataaaggaggaaatatgaata

SEQ ID NO: 5378331 - DNA, 25 bp, Homo sapien
ctttagtgataaaggaggaaatatg

SEQ ID NO: 5378332 - DNA, 25 bp, Homo sapien
tacatagaattttgaaaatacattg

SEQ ID NO: 5378333 - DNA, 25 bp, Homo sapien
ctacatagaattttgaaaatacatt

SEQ ID NO: 5378334 - DNA, 25 bp, Homo sapien
ctaaaatctgatgttgttttgcttt

SEQ ID NO: 5378335 - DNA, 25 bp, Homo sapien
taaaatctgatgttgttttgctttc

SEQ ID NO: 5378336 - DNA, 25 bp, Homo sapien
tgaagagagttcaggcaatgccgaa

SEQ ID NO: 5378337 - DNA, 25 bp, Homo sapien
caatgccgaaggaaactacaagtga

SEQ ID NO: 5378338 - DNA, 25 bp, Homo sapien
gaaaaaatgctcacatctagggcgt

SEQ ID NO: 5378339 - DNA, 25 bp, Homo sapien
ggaccatgtttctgcttactacgaa

SEQ ID NO: 5378340 - DNA, 25 bp, Homo sapien
aggccttctccacggctgtcagtct

SEQ ID NO: 5378341 - DNA, 25 bp, Homo sapien
cagagcggagaacaggccttctcca

SEQ ID NO: 5378342 - DNA, 25 bp, Homo sapien
gagcggagaacaggccttctccacg

SEQ ID NO: 5378343 - DNA, 25 bp, Homo sapien
ccttctccacggctgtcagtctcac

SEQ ID NO: 5378344 - DNA, 25 bp, Homo sapien
ccagtaggacttcttttggcagaca

SEQ ID NO: 5378345 - DNA, 25 bp, Homo sapien
tccagtaggacttcttttggcagac

SEQ ID NO: 5378346 - DNA, 25 bp, Homo sapien
actgaggcagagacactatgctgtc

SEQ ID NO: 5378347 - DNA, 25 bp, Homo sapien
gagacactatgctgtctgagttctt

SEQ ID NO: 5378348 - DNA, 25 bp, Homo sapien
gaggcagagacactatgctgtctga

SEQ ID NO: 5378349 - DNA, 25 bp, Homo sapien
ggcagagacactatgctgtctgagt

SEQ ID NO: 5378350 - DNA, 25 bp, Homo sapien
ttcttgcttcggaatcagcatcatg

SEQ ID NO: 5378351 - DNA, 25 bp, Homo sapien
attcttgcttcggaatcagcatcat

SEQ ID NO: 5378352 - DNA, 25 bp, Homo sapien
ctattcttgcttcggaatcagcatc

SEQ ID NO: 5378353 - DNA, 25 bp, Homo sapien
tattgtttcagctaatactgatatg

SEQ ID NO: 5378354 - DNA, 25 bp, Homo sapien
ccattcttgtaaaagcaaatctaaa

SEQ ID NO: 5378355 - DNA, 25 bp, Homo sapien
cgttctagtgaatgtgtctgccatt

SEQ ID NO: 5378356 - DNA, 25 bp, Homo sapien
gccattcttgtaaaagcaaatctaa

SEQ ID NO: 5378357 - DNA, 25 bp, Homo sapien
gttctagtgaatgtgtctgccattc

SEQ ID NO: 5378358 - DNA, 25 bp, Homo sapien
catgcaaaatgtcaggtagatagga

SEQ ID NO: 5378359 - DNA, 25 bp, Homo sapien
tcaagagatcgattgcacatcatag

SEQ ID NO: 5378360 - DNA, 25 bp, Homo sapien
aaaagtcgactcaggcttagtgcag

SEQ ID NO: 5378361 - DNA, 25 bp, Homo sapien
gaggtaccacctctaaagcaaacaa

SEQ ID NO: 5378362 - DNA, 25 bp, Homo sapien
tcacacgtagtttagggcagctcgc

SEQ ID NO: 5378363 - DNA, 25 bp, Homo sapien
gctcgccaggacatataagataggg

SEQ ID NO: 5378364 - DNA, 25 bp, Homo sapien
gaatcccagaaatcgctaacagaag

SEQ ID NO: 5378365 - DNA, 25 bp, Homo sapien
tacgacttgctggaaagagggttca

SEQ ID NO: 5378366 - DNA, 25 bp, Homo sapien
caggtattaacctagggatgtgtgt

SEQ ID NO: 5378367 - DNA, 25 bp, Homo sapien
cgacagacttagaggtacagttgct

SEQ ID NO: 5378368 - DNA, 25 bp, Homo sapien
cttctaactgcgacagacttagagg

SEQ ID NO: 5378369 - DNA, 25 bp, Homo sapien
cagttgcttgttatgacaggtatta

SEQ ID NO: 5378370 - DNA, 25 bp, Homo sapien
taattaacctaacagctacaacacc

SEQ ID NO: 5378371 - DNA, 25 bp, Homo sapien
aagatagttggcataatggcttcag

SEQ ID NO: 5378372 - DNA, 25 bp, Homo sapien
gccataattttggcactgtttggaa

SEQ ID NO: 5378373 - DNA, 25 bp, Homo sapien
ggaattaaattaaagatagttggca

SEQ ID NO: 5378374 - DNA, 25 bp, Homo sapien
gctttgatcactagtacacgtacag

SEQ ID NO: 5378375 - DNA, 25 bp, Homo sapien
tgataaacacgctattgcctgccag

SEQ ID NO: 5378376 - DNA, 25 bp, Homo sapien
tctgaagctctgtggtgacactatt

SEQ ID NO: 5378377 - DNA, 25 bp, Homo sapien
gagacccagctcacatgttcaagga

SEQ ID NO: 5378378 - DNA, 25 bp, Homo sapien
caggtccttagcagagagtttaaag

SEQ ID NO: 5378379 - DNA, 25 bp, Homo sapien
aacgtgatacaagcctcccgcacta

SEQ ID NO: 5378380 - DNA, 25 bp, Homo sapien
gcactacctgagaccgcaggtcctt

SEQ ID NO: 5378381 - DNA, 25 bp, Homo sapien
ggctccatccaaaagacgcaaatgt

SEQ ID NO: 5378382 - DNA, 25 bp, Homo sapien
gattcctcaaggtctcggctggaat

SEQ ID NO: 5378383 - DNA, 25 bp, Homo sapien
caatcatgcttgtcatcagataata

SEQ ID NO: 5378384 - DNA, 25 bp, Homo sapien
tcctcaaggtctcggctggaataaa

SEQ ID NO: 5378385 - DNA, 25 bp, Homo sapien
catttactctctgctcccaatcatg

SEQ ID NO: 5378386 - DNA, 25 bp, Homo sapien
ctgtactacaggtacatcatcaaat

SEQ ID NO: 5378387 - DNA, 25 bp, Homo sapien
gatcccattgagcagataggccctg

SEQ ID NO: 5378388 - DNA, 25 bp, Homo sapien
caatcccaggtagcagtaaatgtgt

SEQ ID NO: 5378389 - DNA, 25 bp, Homo sapien
tatactgaagaggactcaaaggcca

SEQ ID NO: 5378390 - DNA, 25 bp, Homo sapien
tcaaaggccaacaacagtccctgag

SEQ ID NO: 5378391 - DNA, 25 bp, Homo sapien
ccgagaacttggtggagccttggat

SEQ ID NO: 5378392 - DNA, 25 bp, Homo sapien
catccacagaatcttcatcgtcgaa

SEQ ID NO: 5378393 - DNA, 25 bp, Homo sapien
gatgtagaactagcagaggaaggtc

SEQ ID NO: 5378394 - DNA, 25 bp, Homo sapien
tcccattccaacgtttctccgagaa

SEQ ID NO: 5378395 - DNA, 25 bp, Homo sapien
ggaaaatggtacaagtgaaacactc

SEQ ID NO: 5378396 - DNA, 25 bp, Homo sapien
tagtgccaaaattatcagagaggtc

SEQ ID NO: 5378397 - DNA, 25 bp, Homo sapien
cagcagtggatccaatcaatactcc

SEQ ID NO: 5378398 - DNA, 25 bp, Homo sapien
ggtacacactttaaactaacagctg

SEQ ID NO: 5378399 - DNA, 25 bp, Homo sapien
aagagactggtactttaatatccag

SEQ ID NO: 5378400 - DNA, 25 bp, Homo sapien
ccaatgccgagataggtattagtca

SEQ ID NO: 5378401 - DNA, 25 bp, Homo sapien
gataggtattagtcagataatcgcc

SEQ ID NO: 5378402 - DNA, 25 bp, Homo sapien
tattagtcagataatcgccaaatgt

SEQ ID NO: 5378403 - DNA, 25 bp, Homo sapien
ttacagtccaatgccgagataggta

SEQ ID NO: 5378404 - DNA, 25 bp, Homo sapien
cctggccaaatataggcaatagttt

SEQ ID NO: 5378405 - DNA, 25 bp, Homo sapien
ctggccaaatataggcaatagtttc

SEQ ID NO: 5378406 - DNA, 25 bp, Homo sapien
acctggccaaatataggcaatagtt

SEQ ID NO: 5378407 - DNA, 25 bp, Homo sapien
cacctggccaaatataggcaatagt

SEQ ID NO: 5378408 - DNA, 25 bp, Homo sapien
aattctactgcaaggtatacagcca

SEQ ID NO: 5378409 - DNA, 25 bp, Homo sapien
ggaaactcttacaggttgctggtaa

SEQ ID NO: 5378410 - DNA, 25 bp, Homo sapien
agataccactttacagccactatgg

SEQ ID NO: 5378411 - DNA, 25 bp, Homo sapien
tccaagcaaggtatttaaagggcta

SEQ ID NO: 5378412 - DNA, 25 bp, Homo sapien
atttgcagattgtatcatgtttcca

SEQ ID NO: 5378413 - DNA, 25 bp, Homo sapien
tttgcagattgtatcatgtttccag

SEQ ID NO: 5378414 - DNA, 25 bp, Homo sapien
catttgcagattgtatcatgtttcc

SEQ ID NO: 5378415 - DNA, 25 bp, Homo sapien
cctcagcagtgagttgtaacaacac

SEQ ID NO: 5378416 - DNA, 25 bp, Homo sapien
tgaaacccagaggataccaggcaag

SEQ ID NO: 5378417 - DNA, 25 bp, Homo sapien
tactggttcactaggaagactcaca

SEQ ID NO: 5378418 - DNA, 25 bp, Homo sapien
ggcaagcatcctagagactctcctg

SEQ ID NO: 5378419 - DNA, 25 bp, Homo sapien
ttccactaagctgtttattgctgca

SEQ ID NO: 5378420 - DNA, 25 bp, Homo sapien
atctgccctcacacgttctcctaca

SEQ ID NO: 5378421 - DNA, 25 bp, Homo sapien
aatccttttttactgagatctgccc

SEQ ID NO: 5378422 - DNA, 25 bp, Homo sapien
acatgtctgtaaatttccactaagc

SEQ ID NO: 5378423 - DNA, 25 bp, Homo sapien
ggagttcgagttcaggcaagttcaa

SEQ ID NO: 5378424 - DNA, 25 bp, Homo sapien
catgatggcgggaccctaaaattag

SEQ ID NO: 5378425 - DNA, 25 bp, Homo sapien
caagttcaggcgagttcaaggtcag

SEQ ID NO: 5378426 - DNA, 25 bp, Homo sapien
gagagctgggtacacacacagaaga

SEQ ID NO: 5378427 - DNA, 25 bp, Homo sapien
cagcacactgcaccttaatgtggat

SEQ ID NO: 5378428 - DNA, 25 bp, Homo sapien
tcttacattgcgtcaggtagctcaa

SEQ ID NO: 5378429 - DNA, 25 bp, Homo sapien
ccagggctgccaatgtttggtgtaa

SEQ ID NO: 5378430 - DNA, 25 bp, Homo sapien
tgaggctcaagatgcaagtgacccc

SEQ ID NO: 5378431 - DNA, 25 bp, Homo sapien
tatgtgtatagtctactccagggct

SEQ ID NO: 5378432 - DNA, 25 bp, Homo sapien
tctccaagtaagttgcatatatgtg

SEQ ID NO: 5378433 - DNA, 25 bp, Homo sapien
taagttgcatatatgtggcacaatc

SEQ ID NO: 5378434 - DNA, 25 bp, Homo sapien
ggctgtttggatctccaagtaagtt

SEQ ID NO: 5378435 - DNA, 25 bp, Homo sapien
ttagtgttaaagtctgtgctccaga

SEQ ID NO: 5378436 - DNA, 25 bp, Homo sapien
ctgaaaacaaaaggagtgctttctt

SEQ ID NO: 5378437 - DNA, 25 bp, Homo sapien
tgaaaacaaaaggagtgctttcttg

SEQ ID NO: 5378438 - DNA, 25 bp, Homo sapien
gacaacatccaatggctagcaaggg

SEQ ID NO: 5378439 - DNA, 25 bp, Homo sapien
ggtaacagaatcatagcaatcttta

SEQ ID NO: 5378440 - DNA, 25 bp, Homo sapien
gattattcggacattgctggtagga

SEQ ID NO: 5378441 - DNA, 25 bp, Homo sapien
atggcactgaaaaggctaacatatt

SEQ ID NO: 5378442 - DNA, 25 bp, Homo sapien
aaatgtcaggtgcaaactcaagggc

SEQ ID NO: 5378443 - DNA, 25 bp, Homo sapien
aactgtgacacatctataccaagga

SEQ ID NO: 5378444 - DNA, 25 bp, Homo sapien
gcaagtgtactcttgggcagtgatc

SEQ ID NO: 5378445 - DNA, 25 bp, Homo sapien
gtcagggtgcagctacacacagcag

SEQ ID NO: 5378446 - DNA, 25 bp, Homo sapien
agtgttgctataaggcagagacaga

SEQ ID NO: 5378447 - DNA, 25 bp, Homo sapien
gcattgagtgttgctataaggcaga

SEQ ID NO: 5378448 - DNA, 25 bp, Homo sapien
gacagatgccttctcgagtacggaa

SEQ ID NO: 5378449 - DNA, 25 bp, Homo sapien
tctcgagtacggaaattcttgtgtt

SEQ ID NO: 5378450 - DNA, 25 bp, Homo sapien
tcacagagtctttagcatctcctag

SEQ ID NO: 5378451 - DNA, 25 bp, Homo sapien
tagcatctcctagtctgtctattag

SEQ ID NO: 5378452 - DNA, 25 bp, Homo sapien
cctagtctgtctattagacttggca

SEQ ID NO: 5378453 - DNA, 25 bp, Homo sapien
tgctccctcacagagtctttagcat

SEQ ID NO: 5378454 - DNA, 25 bp, Homo sapien
tccgctccacaagtgccgcagctca

SEQ ID NO: 5378455 - DNA, 25 bp, Homo sapien
gtccgctccacaagtgccgcagctc

SEQ ID NO: 5378456 - DNA, 25 bp, Homo sapien
ggtccgctccacaagtgccgcagct

SEQ ID NO: 5378457 - DNA, 25 bp, Homo sapien
ccgctccacaagtgccgcagctcac

SEQ ID NO: 5378458 - DNA, 25 bp, Homo sapien
cgatctgcgccttgaaccgatcctg

SEQ ID NO: 5378459 - DNA, 25 bp, Homo sapien
ctgtgccgatctgcgccttgaaccg

SEQ ID NO: 5378460 - DNA, 25 bp, Homo sapien
tctgcgccttgaaccgatcctgcag

SEQ ID NO: 5378461 - DNA, 25 bp, Homo sapien
cttgaaccgatcctgcagccgggtc

SEQ ID NO: 5378462 - DNA, 25 bp, Homo sapien
gaggcctagacatttccggcccaga

SEQ ID NO: 5378463 - DNA, 25 bp, Homo sapien
gtccgagagtccagacgcatgccga

SEQ ID NO: 5378464 - DNA, 25 bp, Homo sapien
atttccggcccagacgcagtccgag

SEQ ID NO: 5378465 - DNA, 25 bp, Homo sapien
gaaacaccgggagcctgttagcagc

SEQ ID NO: 5378466 - DNA, 25 bp, Homo sapien
gccccggcgagaaaagcgtatgcaa

SEQ ID NO: 5378467 - DNA, 25 bp, Homo sapien
caaagagattagcacgaagaaggat

SEQ ID NO: 5378468 - DNA, 25 bp, Homo sapien
ggcaatacagcgtagccaaacccgg

SEQ ID NO: 5378469 - DNA, 25 bp, Homo sapien
tatgcaaattttcgagcggccgacg

SEQ ID NO: 5378470 - DNA, 25 bp, Homo sapien
tcagcttttccaggatggcagttta

SEQ ID NO: 5378471 - DNA, 25 bp, Homo sapien
gtcagcttttccaggatggcagttt

SEQ ID NO: 5378472 - DNA, 25 bp, Homo sapien
cagcttttccaggatggcagtttac

SEQ ID NO: 5378473 - DNA, 25 bp, Homo sapien
gcagagaaggcctcgctaagccccg

SEQ ID NO: 5378474 - DNA, 25 bp, Homo sapien
tggaaactcccgaagaagactgagt

SEQ ID NO: 5378475 - DNA, 25 bp, Homo sapien
tcaatgcgttgcctagaggaactgg

SEQ ID NO: 5378476 - DNA, 25 bp, Homo sapien
ccccggacagtcaagtttcaatgcg

SEQ ID NO: 5378477 - DNA, 25 bp, Homo sapien
gcagagaatgagagcaagttagaaa

SEQ ID NO: 5378478 - DNA, 25 bp, Homo sapien
taattaaaatcagcacagcaagggc

SEQ ID NO: 5378479 - DNA, 25 bp, Homo sapien
cctgggtacctaattaaaatcagca

SEQ ID NO: 5378480 - DNA, 25 bp, Homo sapien
tgcacccggcctgggtacctaatta

SEQ ID NO: 5378481 - DNA, 25 bp, Homo sapien
tttctcaggcgcaaacagagacccg

SEQ ID NO: 5378482 - DNA, 25 bp, Homo sapien
cagagacccgagagccttagatacc

SEQ ID NO: 5378483 - DNA, 25 bp, Homo sapien
gaaaaagaggtcagactgctgtttt

SEQ ID NO: 5378484 - DNA, 25 bp, Homo sapien
ccatctttgggtttcaagtgcccaa

SEQ ID NO: 5378485 - DNA, 25 bp, Homo sapien
gaatgttatcaatccctgttgctgg

SEQ ID NO: 5378486 - DNA, 25 bp, Homo sapien
tgctaccaaatgactctaggtgtgt

SEQ ID NO: 5378487 - DNA, 25 bp, Homo sapien
caccgggtgctctgtatgcctgcaa

SEQ ID NO: 5378488 - DNA, 25 bp, Homo sapien
tgttcatcagatgtgccagactcct

SEQ ID NO: 5378489 - DNA, 25 bp, Homo sapien
taacctgtgcggaacaaacatgtgc

SEQ ID NO: 5378490 - DNA, 25 bp, Homo sapien
catgacaggctacaacacaactagt

SEQ ID NO: 5378491 - DNA, 25 bp, Homo sapien
caggttgcaacataaaacggatttc

SEQ ID NO: 5378492 - DNA, 25 bp, Homo sapien
tctgactgtgggactaatgtgttcc

SEQ ID NO: 5378493 - DNA, 25 bp, Homo sapien
aaatatagccattgtgtgaagctca

SEQ ID NO: 5378494 - DNA, 25 bp, Homo sapien
cttcacttactgctgagacactggg

SEQ ID NO: 5378495 - DNA, 25 bp, Homo sapien
gaattgatagggtagcctctggctg

SEQ ID NO: 5378496 - DNA, 25 bp, Homo sapien
ggctgtcctgagctggtgtcatata

SEQ ID NO: 5378497 - DNA, 25 bp, Homo sapien
caagttttagttagggaggtggcag

SEQ ID NO: 5378498 - DNA, 25 bp, Homo sapien
cctctctcacagcaagcatgtagtt

SEQ ID NO: 5378499 - DNA, 25 bp, Homo sapien
atcctctctcacagcaagcatgtag

SEQ ID NO: 5378500 - DNA, 25 bp, Homo sapien
tctctcacagcaagcatgtagtttt

SEQ ID NO: 5378501 - DNA, 25 bp, Homo sapien
tctcacagcaagcatgtagttttca

SEQ ID NO: 5378502 - DNA, 25 bp, Homo sapien
aagtctctcttgattgccctcaggg

SEQ ID NO: 5378503 - DNA, 25 bp, Homo sapien
ggaagagatatcgtgtgcctcccga

SEQ ID NO: 5378504 - DNA, 25 bp, Homo sapien
tgaaaactttcaggtagccatcgct

SEQ ID NO: 5378505 - DNA, 25 bp, Homo sapien
tcaatggcttcgattgccctgcgaa

SEQ ID NO: 5378506 - DNA, 25 bp, Homo sapien
tagacagcttagacactgggccggg

SEQ ID NO: 5378507 - DNA, 25 bp, Homo sapien
ctctcaaggacacaagcgggaaaat

SEQ ID NO: 5378508 - DNA, 25 bp, Homo sapien
gaaacgttgtttccaatgatcccag

SEQ ID NO: 5378509 - DNA, 25 bp, Homo sapien
gcagcacggaatgggccttgagaca

SEQ ID NO: 5378510 - DNA, 25 bp, Homo sapien
agaaagctgcgtagcataagtcccc

SEQ ID NO: 5378511 - DNA, 25 bp, Homo sapien
atgacctgagaaagctgcgtagcat

SEQ ID NO: 5378512 - DNA, 25 bp, Homo sapien
tgagaaagctgcgtagcataagtcc

SEQ ID NO: 5378513 - DNA, 25 bp, Homo sapien
ccccaattccctccagttgcatagc

SEQ ID NO: 5378514 - DNA, 25 bp, Homo sapien
atgatgttccatactctgggctcca

SEQ ID NO: 5378515 - DNA, 25 bp, Homo sapien
cactcatggaaccagtatttgttga

SEQ ID NO: 5378516 - DNA, 25 bp, Homo sapien
gggctccagatgtgaacatgcaggc

SEQ ID NO: 5378517 - DNA, 25 bp, Homo sapien
gatgttccatactctgggctccaga

SEQ ID NO: 5378518 - DNA, 25 bp, Homo sapien
tagtgacactatgttaaattctgat

SEQ ID NO: 5378519 - DNA, 25 bp, Homo sapien
gacactatgttaaattctgataact

SEQ ID NO: 5378520 - DNA, 25 bp, Homo sapien
caaaagtgccttctaaagcacagct

SEQ ID NO: 5378521 - DNA, 25 bp, Homo sapien
aagtgccttctaaagcacagcttac

SEQ ID NO: 5378522 - DNA, 25 bp, Homo sapien
tccaaaagtgccttctaaagcacag

SEQ ID NO: 5378523 - DNA, 25 bp, Homo sapien
ctccaaaagtgccttctaaagcaca

SEQ ID NO: 5378524 - DNA, 25 bp, Homo sapien
catggtctggtcatgctcaaggtca

SEQ ID NO: 5378525 - DNA, 25 bp, Homo sapien
gtttgtctgagaaatagtctatcag

SEQ ID NO: 5378526 - DNA, 25 bp, Homo sapien
cacaagtttatctaacatggtctgg

SEQ ID NO: 5378527 - DNA, 25 bp, Homo sapien
tgtaattgctagagttcacccaaga

SEQ ID NO: 5378528 - DNA, 25 bp, Homo sapien
aggcaggactccatgcgaggctcca

SEQ ID NO: 5378529 - DNA, 25 bp, Homo sapien
ggcaggactccatgcgaggctccat

SEQ ID NO: 5378530 - DNA, 25 bp, Homo sapien
ggaattcaaatccagatccagcaaa

SEQ ID NO: 5378531 - DNA, 25 bp, Homo sapien
aattcaaatccagatccagcaaaag

SEQ ID NO: 5378532 - DNA, 25 bp, Homo sapien
agtggaattcaaatccagatccagc

SEQ ID NO: 5378533 - DNA, 25 bp, Homo sapien
tggaattcaaatccagatccagcaa

SEQ ID NO: 5378534 - DNA, 25 bp, Homo sapien
taagagcctgtgtttcaaagatgca

SEQ ID NO: 5378535 - DNA, 25 bp, Homo sapien
tgttcgctgaaggttactaagagcc

SEQ ID NO: 5378536 - DNA, 25 bp, Homo sapien
caatgcaccatgtgtgtctgaagag

SEQ ID NO: 5378537 - DNA, 25 bp, Homo sapien
tctactactgggtctgaaatacttc

SEQ ID NO: 5378538 - DNA, 25 bp, Homo sapien
taggcaagattcatactcctcagta

SEQ ID NO: 5378539 - DNA, 25 bp, Homo sapien
ggcaagattcatactcctcagtatg

SEQ ID NO: 5378540 - DNA, 25 bp, Homo sapien
cttaggcaagattcatactcctcag

SEQ ID NO: 5378541 - DNA, 25 bp, Homo sapien
gcaagattcatactcctcagtatga

SEQ ID NO: 5378542 - DNA, 25 bp, Homo sapien
cttcatgaaggaagaacaacctgag

SEQ ID NO: 5378543 - DNA, 25 bp, Homo sapien
gtaatacccaatgtgagtttcatac

SEQ ID NO: 5378544 - DNA, 25 bp, Homo sapien
catgtaatacccaatgtgagtttca

SEQ ID NO: 5378545 - DNA, 25 bp, Homo sapien
gcatgtaatacccaatgtgagtttc

SEQ ID NO: 5378546 - DNA, 25 bp, Homo sapien
ctgcatgtaatacccaatgtgagtt

SEQ ID NO: 5378547 - DNA, 25 bp, Homo sapien
ttcgttactgttgccgctgcggacc

SEQ ID NO: 5378548 - DNA, 25 bp, Homo sapien
tagagagcgtaaaccgagaccagag

SEQ ID NO: 5378549 - DNA, 25 bp, Homo sapien
taggccccttggaaagttgcgacaa

SEQ ID NO: 5378550 - DNA, 25 bp, Homo sapien
ccgtgttaggcttcgctggcgtaaa

SEQ ID NO: 5378551 - DNA, 25 bp, Homo sapien
agcagggagcgtgataggaagagct

SEQ ID NO: 5378552 - DNA, 25 bp, Homo sapien
agcgtgataggaagagctaaagagg

SEQ ID NO: 5378553 - DNA, 25 bp, Homo sapien
ggagcgtgataggaagagctaaaga

SEQ ID NO: 5378554 - DNA, 25 bp, Homo sapien
cagggagcgtgataggaagagctaa

SEQ ID NO: 5378555 - DNA, 25 bp, Homo sapien
tcgctcctccgtcgcgtgcgtttcc

SEQ ID NO: 5378556 - DNA, 25 bp, Homo sapien
ctccacaaataaacgctccttcgct

SEQ ID NO: 5378557 - DNA, 25 bp, Homo sapien
tccttcgctcctccgtcgcgtgcgt

SEQ ID NO: 5378558 - DNA, 25 bp, Homo sapien
aataaacgctccttcgctcctccgt

SEQ ID NO: 5378559 - DNA, 25 bp, Homo sapien
aatttgactgtgtaccccgtgtaag

SEQ ID NO: 5378560 - DNA, 25 bp, Homo sapien
cattaaacaatttctcattcgccat

SEQ ID NO: 5378561 - DNA, 25 bp, Homo sapien
tttccagctagccttggtaacctcc

SEQ ID NO: 5378562 - DNA, 25 bp, Homo sapien
cccgtgtaagtggtatcatacagta

SEQ ID NO: 5378563 - DNA, 25 bp, Homo sapien
tactgaaatattttcctttgtgctt

SEQ ID NO: 5378564 - DNA, 25 bp, Homo sapien
tttactgaaatattttcctttgtgc

SEQ ID NO: 5378565 - DNA, 25 bp, Homo sapien
actgaaatattttcctttgtgcttc

SEQ ID NO: 5378566 - DNA, 25 bp, Homo sapien
ctttactgaaatattttcctttgtg

SEQ ID NO: 5378567 - DNA, 25 bp, Homo sapien
ggtggtggctgtcaacattacaacc

SEQ ID NO: 5378568 - DNA, 25 bp, Homo sapien
gtggtggctgtcaacattacaaccc

SEQ ID NO: 5378569 - DNA, 25 bp, Homo sapien
cagattggtgccacatctgttgagc

SEQ ID NO: 5378570 - DNA, 25 bp, Homo sapien
ttctgtcttgatggttcctcgaggg

SEQ ID NO: 5378571 - DNA, 25 bp, Homo sapien
ctggatctctccagattggtgccac

SEQ ID NO: 5378572 - DNA, 25 bp, Homo sapien
tatttctgtcttgatggttcctcga

SEQ ID NO: 5378573 - DNA, 25 bp, Homo sapien
ctttgatgatcagggcagaggcaga

SEQ ID NO: 5378574 - DNA, 25 bp, Homo sapien
gatgatcagggcagaggcagaaggc

SEQ ID NO: 5378575 - DNA, 25 bp, Homo sapien
cagggcagaggcagaaggcaccacc

SEQ ID NO: 5378576 - DNA, 25 bp, Homo sapien
atcagggcagaggcagaaggcacca

SEQ ID NO: 5378577 - DNA, 25 bp, Homo sapien
gtcacccgttgtcttggcaatgtcg

SEQ ID NO: 5378578 - DNA, 25 bp, Homo sapien
cgttgtcttggcaatgtcgtcacca

SEQ ID NO: 5378579 - DNA, 25 bp, Homo sapien
cacccgttgtcttggcaatgtcgtc

SEQ ID NO: 5378580 - DNA, 25 bp, Homo sapien
acccgttgtcttggcaatgtcgtca

SEQ ID NO: 5378581 - DNA, 25 bp, Homo sapien
cagcgcagacgtggcaccaacttca

SEQ ID NO: 5378582 - DNA, 25 bp, Homo sapien
cccagggggccaatctgggggccag

SEQ ID NO: 5378583 - DNA, 25 bp, Homo sapien
gggggccaatctgggggccagcgca

SEQ ID NO: 5378584 - DNA, 25 bp, Homo sapien
ctttggggttgaactttggcagcat

SEQ ID NO: 5378585 - DNA, 25 bp, Homo sapien
gtaagtaccacccactgtaggagaa

SEQ ID NO: 5378586 - DNA, 25 bp, Homo sapien
tcgtctttaaacactgtagtagcag

SEQ ID NO: 5378587 - DNA, 25 bp, Homo sapien
tgctgctgctatgctcgtctttaaa

SEQ ID NO: 5378588 - DNA, 25 bp, Homo sapien
catgtgcaaaggtgttatgctgctg

SEQ ID NO: 5378589 - DNA, 25 bp, Homo sapien
gctctgtcacaacctgggagaatat

SEQ ID NO: 5378590 - DNA, 25 bp, Homo sapien
gactctggtagaagtcgggtacagt

SEQ ID NO: 5378591 - DNA, 25 bp, Homo sapien
agggatcaccaagggccagaaaaag

SEQ ID NO: 5378592 - DNA, 25 bp, Homo sapien
gaggtcatcgcaaatggcttttttc

SEQ ID NO: 5378593 - DNA, 25 bp, Homo sapien
aagtgggcagtctaggccgaggctc

SEQ ID NO: 5378594 - DNA, 25 bp, Homo sapien
agtgggcagtctaggccgaggctca

SEQ ID NO: 5378595 - DNA, 25 bp, Homo sapien
gacttgatgatgaacatctccagtg

SEQ ID NO: 5378596 - DNA, 25 bp, Homo sapien
gaagtgggcagtctaggccgaggct

SEQ ID NO: 5378597 - DNA, 25 bp, Homo sapien
gggaaggtgagaggcaccaatgtca

SEQ ID NO: 5378598 - DNA, 25 bp, Homo sapien
aggtgagaggcaccaatgtcagcat

SEQ ID NO: 5378599 - DNA, 25 bp, Homo sapien
gaaggtgagaggcaccaatgtcagc

SEQ ID NO: 5378600 - DNA, 25 bp, Homo sapien
gagggaaggtgagaggcaccaatgt

SEQ ID NO: 5378601 - DNA, 25 bp, Homo sapien
tcatttcacagggaagctaacggtg

SEQ ID NO: 5378602 - DNA, 25 bp, Homo sapien
gccagtatgacccagatttgtccag

SEQ ID NO: 5378603 - DNA, 25 bp, Homo sapien
ccattccttgtgatgcggccagcaa

SEQ ID NO: 5378604 - DNA, 25 bp, Homo sapien
actgtgcctgtctgggttcgggtgc

SEQ ID NO: 5378605 - DNA, 25 bp, Homo sapien
aacatcccccgtgggcttctgagag

SEQ ID NO: 5378606 - DNA, 25 bp, Homo sapien
cctgctctcagcttgctgagacttt

SEQ ID NO: 5378607 - DNA, 25 bp, Homo sapien
aggtgccaaacatcccccgtgggct

SEQ ID NO: 5378608 - DNA, 25 bp, Homo sapien
ccctgctctcagcttgctgagactt

SEQ ID NO: 5378609 - DNA, 25 bp, Homo sapien
ggcgacttaaaacattgtcagaggt

SEQ ID NO: 5378610 - DNA, 25 bp, Homo sapien
actgaatcacagcagccggaagaaa

SEQ ID NO: 5378611 - DNA, 25 bp, Homo sapien
ctatggaactaggtcctttcggtgt

SEQ ID NO: 5378612 - DNA, 25 bp, Homo sapien
ccaagcgtgagattatttccagcct

SEQ ID NO: 5378613 - DNA, 25 bp, Homo sapien
gtatggatttcttcaccggcgcttt

SEQ ID NO: 5378614 - DNA, 25 bp, Homo sapien
ctcgtatggatttcttcaccggcgc

SEQ ID NO: 5378615 - DNA, 25 bp, Homo sapien
tttcttcaccggcgctttttcttca

SEQ ID NO: 5378616 - DNA, 25 bp, Homo sapien
ttcttcaccggcgctttttcttcag

SEQ ID NO: 5378617 - DNA, 25 bp, Homo sapien
tccacgggccgaccgctttccagat

SEQ ID NO: 5378618 - DNA, 25 bp, Homo sapien
ctccacgggccgaccgctttccaga

SEQ ID NO: 5378619 - DNA, 25 bp, Homo sapien
ctttccagatacacttaagagtttc

SEQ ID NO: 5378620 - DNA, 25 bp, Homo sapien
agatacacttaagagtttcacatcc

SEQ ID NO: 5378621 - DNA, 25 bp, Homo sapien
gaatcctttggctgtacagacattt

SEQ ID NO: 5378622 - DNA, 25 bp, Homo sapien
gtgatttcaaagcctccaagggaat

SEQ ID NO: 5378623 - DNA, 25 bp, Homo sapien
tcaaagcctccaagggaatcctttg

SEQ ID NO: 5378624 - DNA, 25 bp, Homo sapien
atttcaaagcctccaagggaatcct

SEQ ID NO: 5378625 - DNA, 25 bp, Homo sapien
aatgtgcaattcatcctttgtacca

SEQ ID NO: 5378626 - DNA, 25 bp, Homo sapien
tgtgcaattcatcctttgtaccagc

SEQ ID NO: 5378627 - DNA, 25 bp, Homo sapien
tgcctctacttcaacaatgtgcaat

SEQ ID NO: 5378628 - DNA, 25 bp, Homo sapien
tgcaattcatcctttgtaccagccc

SEQ ID NO: 5378629 - DNA, 25 bp, Homo sapien
gcagttgattgccaagtgtggggga

SEQ ID NO: 5378630 - DNA, 25 bp, Homo sapien
ttgattgccaagtgtgggggagcag

SEQ ID NO: 5378631 - DNA, 25 bp, Homo sapien
ggtgggcacaaggttgaacgggaca

SEQ ID NO: 5378632 - DNA, 25 bp, Homo sapien
ggcacaaggttgaacgggacacagt

SEQ ID NO: 5378633 - DNA, 25 bp, Homo sapien
tttgtacctcggaaatgctctctga

SEQ ID NO: 5378634 - DNA, 25 bp, Homo sapien
ccagtttttgtacctcggaaatgct

SEQ ID NO: 5378635 - DNA, 25 bp, Homo sapien
tgtacctcggaaatgctctctgatg

SEQ ID NO: 5378636 - DNA, 25 bp, Homo sapien
gtttttgtacctcggaaatgctctc

SEQ ID NO: 5378637 - DNA, 25 bp, Homo sapien
ccttgctcttcgatgtgggaggtgc

SEQ ID NO: 5378638 - DNA, 25 bp, Homo sapien
cttgctcttcgatgtgggaggtgcc

SEQ ID NO: 5378639 - DNA, 25 bp, Homo sapien
aatcagccagggctacaatttccag

SEQ ID NO: 5378640 - DNA, 25 bp, Homo sapien
cacagcttgtgaaatgtcggactcc

SEQ ID NO: 5378641 - DNA, 25 bp, Homo sapien
tagcagtctcataccacaatcagcc

SEQ ID NO: 5378642 - DNA, 25 bp, Homo sapien
catcttatggccaatacacagcttg

SEQ ID NO: 5378643 - DNA, 25 bp, Homo sapien
tcctaggttcagtgatccttttgcc

SEQ ID NO: 5378644 - DNA, 25 bp, Homo sapien
atccttttgcctcagtatcctaagt

SEQ ID NO: 5378645 - DNA, 25 bp, Homo sapien
atggtgcaaccataggtcactgtag

SEQ ID NO: 5378646 - DNA, 25 bp, Homo sapien
cttttgcctcagtatcctaagtagg

SEQ ID NO: 5378647 - DNA, 25 bp, Homo sapien
ttacagaagcaagctaccgtgcctg

SEQ ID NO: 5378648 - DNA, 25 bp, Homo sapien
ttttttgtagaaagaggctctcatc

SEQ ID NO: 5378649 - DNA, 25 bp, Homo sapien
agaaagaggctctcatcatgttgcc

SEQ ID NO: 5378650 - DNA, 25 bp, Homo sapien
gggattacagaagcaagctaccgtg

SEQ ID NO: 5378651 - DNA, 25 bp, Homo sapien
tggcaatgtttttaatgagtctgaa

SEQ ID NO: 5378652 - DNA, 25 bp, Homo sapien
atggcaatgtttttaatgagtctga

SEQ ID NO: 5378653 - DNA, 25 bp, Homo sapien
actcccaagtcctactcgcaaacaa

SEQ ID NO: 5378654 - DNA, 25 bp, Homo sapien
ctcccaagtcctactcgcaaacaaa

SEQ ID NO: 5378655 - DNA, 25 bp, Homo sapien
tatttcagccaagggcaggcaatcc

SEQ ID NO: 5378656 - DNA, 25 bp, Homo sapien
ggtcaactttctatccaggcagagt

SEQ ID NO: 5378657 - DNA, 25 bp, Homo sapien
taattgctggcgacagaaaaggctg

SEQ ID NO: 5378658 - DNA, 25 bp, Homo sapien
tgtccccgacaaaccatgtagatgg

SEQ ID NO: 5378659 - DNA, 25 bp, Homo sapien
tcttcttttacacaggatatgggct

SEQ ID NO: 5378660 - DNA, 25 bp, Homo sapien
gtgaatgtgtaggtgtttgagtctc

SEQ ID NO: 5378661 - DNA, 25 bp, Homo sapien
caataaagatctaccaaatgtcaca

SEQ ID NO: 5378662 - DNA, 25 bp, Homo sapien
tatttttacaagttgtgccccatta

SEQ ID NO: 5378663 - DNA, 25 bp, Homo sapien
catgattatgactttacccaaaaat

SEQ ID NO: 5378664 - DNA, 25 bp, Homo sapien
ccatcttttggtgatactattgcaa

SEQ ID NO: 5378665 - DNA, 25 bp, Homo sapien
agtgtcaagagtacctgaaactttt

SEQ ID NO: 5378666 - DNA, 25 bp, Homo sapien
aggagtgtcaagagtacctgaaact

SEQ ID NO: 5378667 - DNA, 25 bp, Homo sapien
ggagtgtcaagagtacctgaaactt

SEQ ID NO: 5378668 - DNA, 25 bp, Homo sapien
gagtgtcaagagtacctgaaacttt

SEQ ID NO: 5378669 - DNA, 25 bp, Homo sapien
cagctacagtagtcttgaatatgtt

SEQ ID NO: 5378670 - DNA, 25 bp, Homo sapien
ccttctctaatatcttgcatgtaaa

SEQ ID NO: 5378671 - DNA, 25 bp, Homo sapien
tttgaatattgatcagctacagtag

SEQ ID NO: 5378672 - DNA, 25 bp, Homo sapien
gaatatgttttcctacttatccttc

SEQ ID NO: 5378673 - DNA, 25 bp, Homo sapien
gacgtctgacgattagtttttgaaa

SEQ ID NO: 5378674 - DNA, 25 bp, Homo sapien
tggccttttgtagacgtctgacgat

SEQ ID NO: 5378675 - DNA, 25 bp, Homo sapien
ccttttgtagacgtctgacgattag

SEQ ID NO: 5378676 - DNA, 25 bp, Homo sapien
tagacgtctgacgattagtttttga

SEQ ID NO: 5378677 - DNA, 25 bp, Homo sapien
aagaagttagaaattgacactcata

SEQ ID NO: 5378678 - DNA, 25 bp, Homo sapien
taaagaagttagaaattgacactca

SEQ ID NO: 5378679 - DNA, 25 bp, Homo sapien
taataaagaagttagaaattgacac

SEQ ID NO: 5378680 - DNA, 25 bp, Homo sapien
gaagttagaaattgacactcatatc

SEQ ID NO: 5378681 - DNA, 25 bp, Homo sapien
ttagtgtccgattccgattataccg

SEQ ID NO: 5378682 - DNA, 25 bp, Homo sapien
agtgtccgattccgattataccgtt

SEQ ID NO: 5378683 - DNA, 25 bp, Homo sapien
gtccgattccgattataccgtttca

SEQ ID NO: 5378684 - DNA, 25 bp, Homo sapien
tgtccgattccgattataccgtttc

SEQ ID NO: 5378685 - DNA, 25 bp, Homo sapien
atgatggctgcttaaatggaatatt

SEQ ID NO: 5378686 - DNA, 25 bp, Homo sapien
ctgatggatatgatggctgcttaaa

SEQ ID NO: 5378687 - DNA, 25 bp, Homo sapien
ggatatgatggctgcttaaatggaa

SEQ ID NO: 5378688 - DNA, 25 bp, Homo sapien
gatggctgcttaaatggaatattcc

SEQ ID NO: 5378689 - DNA, 25 bp, Homo sapien
ttaatgttaactttagaatctccgc

SEQ ID NO: 5378690 - DNA, 25 bp, Homo sapien
tgttaactttagaatctccgcagtg

SEQ ID NO: 5378691 - DNA, 25 bp, Homo sapien
gttaactttagaatctccgcagtgc

SEQ ID NO: 5378692 - DNA, 25 bp, Homo sapien
aatgttaactttagaatctccgcag

SEQ ID NO: 5378693 - DNA, 25 bp, Homo sapien
aactccacaaatgcatagcctttgc

SEQ ID NO: 5378694 - DNA, 25 bp, Homo sapien
ctccaagagtctttcaccaaacagg

SEQ ID NO: 5378695 - DNA, 25 bp, Homo sapien
gttgttcattgtttcagcaactatt

SEQ ID NO: 5378696 - DNA, 25 bp, Homo sapien
attttggcaacatcctcagactcaa

SEQ ID NO: 5378697 - DNA, 25 bp, Homo sapien
ttttacttctggacagcctgaaccg

SEQ ID NO: 5378698 - DNA, 25 bp, Homo sapien
ggacagcctgaaccgtgtcacagtg

SEQ ID NO: 5378699 - DNA, 25 bp, Homo sapien
ctggacagcctgaaccgtgtcacag

SEQ ID NO: 5378700 - DNA, 25 bp, Homo sapien
gcctgaaccgtgtcacagtgccaaa

SEQ ID NO: 5378701 - DNA, 25 bp, Homo sapien
caagtaggttaggtaggtggcgcac

SEQ ID NO: 5378702 - DNA, 25 bp, Homo sapien
gcgcacatagactactccaggagta

SEQ ID NO: 5378703 - DNA, 25 bp, Homo sapien
atctgggtttcgtcaagtaggttag

SEQ ID NO: 5378704 - DNA, 25 bp, Homo sapien
tatgaaaagatctgggtttcgtcaa

SEQ ID NO: 5378705 - DNA, 25 bp, Homo sapien
tgattcggtcgaatccacttgggag

SEQ ID NO: 5378706 - DNA, 25 bp, Homo sapien
ctttcgtctcggaaaccgtggcctg

SEQ ID NO: 5378707 - DNA, 25 bp, Homo sapien
cgtggcctgcaagcttaagaggtcg

SEQ ID NO: 5378708 - DNA, 25 bp, Homo sapien
taagaggtcggtccctgattcggtc

SEQ ID NO: 5378709 - DNA, 25 bp, Homo sapien
gcgaacctgcgccacctccttttga

SEQ ID NO: 5378710 - DNA, 25 bp, Homo sapien
ttatgcgcttgcgaacctgcgccac

SEQ ID NO: 5378711 - DNA, 25 bp, Homo sapien
ctgggttatgcgcttgcgaacctgc

SEQ ID NO: 5378712 - DNA, 25 bp, Homo sapien
ggttatgcgcttgcgaacctgcgcc

SEQ ID NO: 5378713 - DNA, 25 bp, Homo sapien
ccagccgggccagaaaaagtcgcca

SEQ ID NO: 5378714 - DNA, 25 bp, Homo sapien
gcccagccgggccagaaaaagtcgc

SEQ ID NO: 5378715 - DNA, 25 bp, Homo sapien
cagccgggccagaaaaagtcgccat

SEQ ID NO: 5378716 - DNA, 25 bp, Homo sapien
cgacgctaaccacgcggcgctcccg

SEQ ID NO: 5378717 - DNA, 25 bp, Homo sapien
cgccgacgctaaccacgcggcgctc

SEQ ID NO: 5378718 - DNA, 25 bp, Homo sapien
agccgccgacgctaaccacgcggcg

SEQ ID NO: 5378719 - DNA, 25 bp, Homo sapien
ccaaaagccgccgacgctaaccacg

SEQ ID NO: 5378720 - DNA, 25 bp, Homo sapien
tcctgatcctttaagaagggccaca

SEQ ID NO: 5378721 - DNA, 25 bp, Homo sapien
ctgccagccgaggtcagctctgtgc

SEQ ID NO: 5378722 - DNA, 25 bp, Homo sapien
caagtggactttatcatcctgatcc

SEQ ID NO: 5378723 - DNA, 25 bp, Homo sapien
gggcctttccaagtggactttatca

SEQ ID NO: 5378724 - DNA, 25 bp, Homo sapien
tggtcttggcgtgctggctctggac

SEQ ID NO: 5378725 - DNA, 25 bp, Homo sapien
agtggtcttggcgtgctggctctgg

SEQ ID NO: 5378726 - DNA, 25 bp, Homo sapien
gtggtcttggcgtgctggctctgga

SEQ ID NO: 5378727 - DNA, 25 bp, Homo sapien
gtcctcgtggaacttgttgtccaga

SEQ ID NO: 5378728 - DNA, 25 bp, Homo sapien
tcctcgtggaacttgttgtccagac

SEQ ID NO: 5378729 - DNA, 25 bp, Homo sapien
cctcgtggaacttgttgtccagacc

SEQ ID NO: 5378730 - DNA, 25 bp, Homo sapien
ggtcctcgtggaacttgttgtccag

SEQ ID NO: 5378731 - DNA, 25 bp, Homo sapien
gtttctggcgatgcctgtctgaagg

SEQ ID NO: 5378732 - DNA, 25 bp, Homo sapien
caggttgtttctggcgatgcctgtc

SEQ ID NO: 5378733 - DNA, 25 bp, Homo sapien
gttgtttctggcgatgcctgtctga

SEQ ID NO: 5378734 - DNA, 25 bp, Homo sapien
gcaggttgtttctggcgatgcctgt

SEQ ID NO: 5378735 - DNA, 25 bp, Homo sapien
gcgcctcggttccgaacgcagcgga

SEQ ID NO: 5378736 - DNA, 25 bp, Homo sapien
ctcggttccgaacgcagcggacggc

SEQ ID NO: 5378737 - DNA, 25 bp, Homo sapien
gcgcgcctcggttccgaacgcagcg

SEQ ID NO: 5378738 - DNA, 25 bp, Homo sapien
gcctcggttccgaacgcagcggacg

SEQ ID NO: 5378739 - DNA, 25 bp, Homo sapien
tggccgcccttgctacactggctga

SEQ ID NO: 5378740 - DNA, 25 bp, Homo sapien
gccgttgcgattgattgcgctggtt

SEQ ID NO: 5378741 - DNA, 25 bp, Homo sapien
ctcggaggaccctagcgacggtcgt

SEQ ID NO: 5378742 - DNA, 25 bp, Homo sapien
ttgcctgcggcgtccacttccttgg

SEQ ID NO: 5378743 - DNA, 25 bp, Homo sapien
gtctgtgagcgagatcttcgtggag

SEQ ID NO: 5378744 - DNA, 25 bp, Homo sapien
gcaggacatccgagaggcgagcccc

SEQ ID NO: 5378745 - DNA, 25 bp, Homo sapien
gccgagcaggacatccgagaggcga

SEQ ID NO: 5378746 - DNA, 25 bp, Homo sapien
ctgccgagcaggacatccgagaggc

SEQ ID NO: 5378747 - DNA, 25 bp, Homo sapien
cgagcaggacatccgagaggcgagc

SEQ ID NO: 5378748 - DNA, 25 bp, Homo sapien
ccgactcttgtgttgcatttaactc

SEQ ID NO: 5378749 - DNA, 25 bp, Homo sapien
cattttgcaagttgcgttcacacac

SEQ ID NO: 5378750 - DNA, 25 bp, Homo sapien
tcttcattttgcaagttgcgttcac

SEQ ID NO: 5378751 - DNA, 25 bp, Homo sapien
aagttgcgttcacacacgtcatcca

SEQ ID NO: 5378752 - DNA, 25 bp, Homo sapien
ctgcacctggcccaagggtttgtaa

SEQ ID NO: 5378753 - DNA, 25 bp, Homo sapien
agatgatccgcctggctgggcctct

SEQ ID NO: 5378754 - DNA, 25 bp, Homo sapien
tgcacctggcccaagggtttgtaac

SEQ ID NO: 5378755 - DNA, 25 bp, Homo sapien
ccactgcacctggcccaagggtttg

SEQ ID NO: 5378756 - DNA, 25 bp, Homo sapien
ggatgctcagttgctaaacactgcg

SEQ ID NO: 5378757 - DNA, 25 bp, Homo sapien
cctcttacggtagttaggatgctca

SEQ ID NO: 5378758 - DNA, 25 bp, Homo sapien
aatgagctggattccggttttcgcc

SEQ ID NO: 5378759 - DNA, 25 bp, Homo sapien
tgaggaagcgctacgacggattgaa

SEQ ID NO: 5378760 - DNA, 25 bp, Homo sapien
tatagctgcaggttctctctcactg

SEQ ID NO: 5378761 - DNA, 25 bp, Homo sapien
tctatatgcgagttagccatccaca

SEQ ID NO: 5378762 - DNA, 25 bp, Homo sapien
taaaaagatggttgccaagcaagga

SEQ ID NO: 5378763 - DNA, 25 bp, Homo sapien
cttttgccaagggaattatagctgc

SEQ ID NO: 5378764 - DNA, 25 bp, Homo sapien
catttggaactaacacgtgatgtga

SEQ ID NO: 5378765 - DNA, 25 bp, Homo sapien
tctgggagtataaagccacccacgt

SEQ ID NO: 5378766 - DNA, 25 bp, Homo sapien
tgtgccaggaaactcttgctattga

SEQ ID NO: 5378767 - DNA, 25 bp, Homo sapien
cgtagttattttgcacccactgaaa

SEQ ID NO: 5378768 - DNA, 25 bp, Homo sapien
ggttcttaaaagtgcccatgatggt

SEQ ID NO: 5378769 - DNA, 25 bp, Homo sapien
aagtggagaagcacactctggtctt

SEQ ID NO: 5378770 - DNA, 25 bp, Homo sapien
tgaggaaagcagttgaaatgaggca

SEQ ID NO: 5378771 - DNA, 25 bp, Homo sapien
taaaatgtgcagtaatagcactgcc

SEQ ID NO: 5378772 - DNA, 25 bp, Homo sapien
ttttagaaaatcaagcaggttagag

SEQ ID NO: 5378773 - DNA, 25 bp, Homo sapien
cagagttctatactgtaaagcgcag

SEQ ID NO: 5378774 - DNA, 25 bp, Homo sapien
agagaaccagccatatacacttggg

SEQ ID NO: 5378775 - DNA, 25 bp, Homo sapien
taaagcgcagataacatttgtgtgt

SEQ ID NO: 5378776 - DNA, 25 bp, Homo sapien
tgccacgtccctgctgtcagagctt

SEQ ID NO: 5378777 - DNA, 25 bp, Homo sapien
agaaagatcccccttcagcttcctc

SEQ ID NO: 5378778 - DNA, 25 bp, Homo sapien
ttcctttgaggaaccctttgctcac

SEQ ID NO: 5378779 - DNA, 25 bp, Homo sapien
cctgctgtcagagcttcctttgagg

SEQ ID NO: 5378780 - DNA, 25 bp, Homo sapien
gaagttaagccagataatttttcac

SEQ ID NO: 5378781 - DNA, 25 bp, Homo sapien
acaatggaagttaagccagataatt

SEQ ID NO: 5378782 - DNA, 25 bp, Homo sapien
cacagttgggaagtacaaagggcag

SEQ ID NO: 5378783 - DNA, 25 bp, Homo sapien
taatttttcacagttgggaagtaca

SEQ ID NO: 5378784 - DNA, 25 bp, Homo sapien
gggttgatggcttgtgtctcagaca

SEQ ID NO: 5378785 - DNA, 25 bp, Homo sapien
tgtgactcattctgtgtgactcctg

SEQ ID NO: 5378786 - DNA, 25 bp, Homo sapien
tgaagctgtcgtgtgacccattctg

SEQ ID NO: 5378787 - DNA, 25 bp, Homo sapien
ctgacttttgaagctgtcgtgtgac

SEQ ID NO: 5378788 - DNA, 25 bp, Homo sapien
tcattagcataatggcttccaggct

SEQ ID NO: 5378789 - DNA, 25 bp, Homo sapien
tagccatattgtaacacgtgtcaga

SEQ ID NO: 5378790 - DNA, 25 bp, Homo sapien
tgtgcctgcccttgcaactgaaatt

SEQ ID NO: 5378791 - DNA, 25 bp, Homo sapien
tggctatggcgaatcagactgcact

SEQ ID NO: 5378792 - DNA, 25 bp, Homo sapien
atcatgaagcccgcctttcctgggc

SEQ ID NO: 5378793 - DNA, 25 bp, Homo sapien
tggcatccatcatgaagcccgcctt

SEQ ID NO: 5378794 - DNA, 25 bp, Homo sapien
ctgggcctcggaccatatggcccat

SEQ ID NO: 5378795 - DNA, 25 bp, Homo sapien
tgaagcccgcctttcctgggcctcg

SEQ ID NO: 5378796 - DNA, 25 bp, Homo sapien
gcagctccgaagcttggttcaggat

SEQ ID NO: 5378797 - DNA, 25 bp, Homo sapien
ttcaggattctgtcccaggggcaca

SEQ ID NO: 5378798 - DNA, 25 bp, Homo sapien
aatttcagatttaatcacgcgggaa

SEQ ID NO: 5378799 - DNA, 25 bp, Homo sapien
ttaatcacgcgggaaacagggacca

SEQ ID NO: 5378800 - DNA, 25 bp, Homo sapien
gacagggtctgtaacatccggcaca

SEQ ID NO: 5378801 - DNA, 25 bp, Homo sapien
gaatgatcaagggaggagagccaaa

SEQ ID NO: 5378802 - DNA, 25 bp, Homo sapien
gagccaaaagcctgtgatctgagtt

SEQ ID NO: 5378803 - DNA, 25 bp, Homo sapien
gatctgagttcaggcggcaagcatg

SEQ ID NO: 5378804 - DNA, 25 bp, Homo sapien
tgccgagagggccaaattcaaagtg

SEQ ID NO: 5378805 - DNA, 25 bp, Homo sapien
tcttggcagggatctccagtgcgaa

SEQ ID NO: 5378806 - DNA, 25 bp, Homo sapien
aatgctgtctaattttgaaaatggg

SEQ ID NO: 5378807 - DNA, 25 bp, Homo sapien
tggtggtagcaccttggctttgtgc

SEQ ID NO: 5378808 - DNA, 25 bp, Homo sapien
tgcctgacacattctaggagcacca

SEQ ID NO: 5378809 - DNA, 25 bp, Homo sapien
gcctgacacattctaggagcaccag

SEQ ID NO: 5378810 - DNA, 25 bp, Homo sapien
ctgacacattctaggagcaccagcc

SEQ ID NO: 5378811 - DNA, 25 bp, Homo sapien
gacacattctaggagcaccagccat

SEQ ID NO: 5378812 - DNA, 25 bp, Homo sapien
cctggacaggattcagactgtgttt

SEQ ID NO: 5378813 - DNA, 25 bp, Homo sapien
ttcctggacaggattcagactgtgt

SEQ ID NO: 5378814 - DNA, 25 bp, Homo sapien
ggacaggattcagactgtgtttccc

SEQ ID NO: 5378815 - DNA, 25 bp, Homo sapien
tggacaggattcagactgtgtttcc

SEQ ID NO: 5378816 - DNA, 25 bp, Homo sapien
taacagctttgtcaatgcattcttc

SEQ ID NO: 5378817 - DNA, 25 bp, Homo sapien
tcttacagaaattatgttgatcaaa

SEQ ID NO: 5378818 - DNA, 25 bp, Homo sapien
ataacagctttgtcaatgcattctt

SEQ ID NO: 5378819 - DNA, 25 bp, Homo sapien
aattatgttgatcaaagttgtgcat

SEQ ID NO: 5378820 - DNA, 25 bp, Homo sapien
cctggatttccatgcattccaccat

SEQ ID NO: 5378821 - DNA, 25 bp, Homo sapien
agtacctggatttccatgcattcca

SEQ ID NO: 5378822 - DNA, 25 bp, Homo sapien
caagtacctggatttccatgcattc

SEQ ID NO: 5378823 - DNA, 25 bp, Homo sapien
gttgcaagtacctggatttccatgc

SEQ ID NO: 5378824 - DNA, 25 bp, Homo sapien
ctgggaatcacacagatcccgaaat

SEQ ID NO: 5378825 - DNA, 25 bp, Homo sapien
cacagatcccgaaatacagtcaggg

SEQ ID NO: 5378826 - DNA, 25 bp, Homo sapien
agggctccccatgcgagctgaacac

SEQ ID NO: 5378827 - DNA, 25 bp, Homo sapien
gaaatacagtcagggctccccatgc

SEQ ID NO: 5378828 - DNA, 25 bp, Homo sapien
ctcctccactccctcgagaatcatt

SEQ ID NO: 5378829 - DNA, 25 bp, Homo sapien
tcctccactccctcgagaatcattc

SEQ ID NO: 5378830 - DNA, 25 bp, Homo sapien
ttcatatttcagtgtgagcataagc

SEQ ID NO: 5378831 - DNA, 25 bp, Homo sapien
tcatatttcagtgtgagcataagca

SEQ ID NO: 5378832 - DNA, 25 bp, Homo sapien
gagaaatctatgttaaaggcttgct

SEQ ID NO: 5378833 - DNA, 25 bp, Homo sapien
ccagagaaatctatgttaaaggctt

SEQ ID NO: 5378834 - DNA, 25 bp, Homo sapien
accagagaaatctatgttaaaggct

SEQ ID NO: 5378835 - DNA, 25 bp, Homo sapien
tgtgttttctcgaccagagaaatct

SEQ ID NO: 5378836 - DNA, 25 bp, Homo sapien
tgtagatgtccaaagagaggtgctg

SEQ ID NO: 5378837 - DNA, 25 bp, Homo sapien
tagaacagggacgatttgagtcact

SEQ ID NO: 5378838 - DNA, 25 bp, Homo sapien
attccctcctctgtactctttagaa

SEQ ID NO: 5378839 - DNA, 25 bp, Homo sapien
tatagtaaatctttagccattcatt

SEQ ID NO: 5378840 - DNA, 25 bp, Homo sapien
tgcaggatctccattaggaactggg

SEQ ID NO: 5378841 - DNA, 25 bp, Homo sapien
actgggtctgcatgttctgaactgg

SEQ ID NO: 5378842 - DNA, 25 bp, Homo sapien
tggcctcactgggtctgcatgttct

SEQ ID NO: 5378843 - DNA, 25 bp, Homo sapien
tctgcatctctgatcgtcctcctct

SEQ ID NO: 5378844 - DNA, 25 bp, Homo sapien
ctgctgtggcagaggctgtgatgag

SEQ ID NO: 5378845 - DNA, 25 bp, Homo sapien
cagaggctgtgatgaggggctccca

SEQ ID NO: 5378846 - DNA, 25 bp, Homo sapien
aggctgtgatgaggggctcccagca

SEQ ID NO: 5378847 - DNA, 25 bp, Homo sapien
tgctgtggcagaggctgtgatgagg

SEQ ID NO: 5378848 - DNA, 25 bp, Homo sapien
gtaatgagggtcaccaggtgccagg

SEQ ID NO: 5378849 - DNA, 25 bp, Homo sapien
caacactgtgtagacagtaatatgt

SEQ ID NO: 5378850 - DNA, 25 bp, Homo sapien
gccaggatgggtgccacgattgttc

SEQ ID NO: 5378851 - DNA, 25 bp, Homo sapien
gattgttcaccaatcagccaacttt

SEQ ID NO: 5378852 - DNA, 25 bp, Homo sapien
catggtagacgagaaggagggggac

SEQ ID NO: 5378853 - DNA, 25 bp, Homo sapien
gggacctggggtcaacaggggcatg

SEQ ID NO: 5378854 - DNA, 25 bp, Homo sapien
ggacctggggtcaacaggggcatgc

SEQ ID NO: 5378855 - DNA, 25 bp, Homo sapien
cagtccatggtagacgagaaggagg

SEQ ID NO: 5378856 - DNA, 25 bp, Homo sapien
ctggtatacccagccgcacaaggta

SEQ ID NO: 5378857 - DNA, 25 bp, Homo sapien
cagttttcaccaggtcatgggtgcc

SEQ ID NO: 5378858 - DNA, 25 bp, Homo sapien
taccgttggacgatgctgccacagt

SEQ ID NO: 5378859 - DNA, 25 bp, Homo sapien
caaggtacgatgctaccgttggacg

SEQ ID NO: 5378860 - DNA, 25 bp, Homo sapien
ctggcagctgcttgcctccaaggct

SEQ ID NO: 5378861 - DNA, 25 bp, Homo sapien
gctcgaggctcggaggagctggcag

SEQ ID NO: 5378862 - DNA, 25 bp, Homo sapien
cgaggctcgaggctcggaggagctg

SEQ ID NO: 5378863 - DNA, 25 bp, Homo sapien
tgcctccaaggctttccagaaccct

SEQ ID NO: 5378864 - DNA, 25 bp, Homo sapien
ttgtagagcgtgaatcccagaatag

SEQ ID NO: 5378865 - DNA, 25 bp, Homo sapien
tagagcgtgaatcccagaatagaca

SEQ ID NO: 5378866 - DNA, 25 bp, Homo sapien
gagcgtgaatcccagaatagacact

SEQ ID NO: 5378867 - DNA, 25 bp, Homo sapien
cgtgaatcccagaatagacacttcc

SEQ ID NO: 5378868 - DNA, 25 bp, Homo sapien
cctcgttccccataaagtgcccatc

SEQ ID NO: 5378869 - DNA, 25 bp, Homo sapien
tgcagtctgggaacgcttggctgta

SEQ ID NO: 5378870 - DNA, 25 bp, Homo sapien
tagcttgcgtgcatttctgccctcc

SEQ ID NO: 5378871 - DNA, 25 bp, Homo sapien
tagcgggagtagcttgcgtgcattt

SEQ ID NO: 5378872 - DNA, 25 bp, Homo sapien
tgctttcggtagaacatgctgccca

SEQ ID NO: 5378873 - DNA, 25 bp, Homo sapien
cggtagaacatgctgcccatggaga

SEQ ID NO: 5378874 - DNA, 25 bp, Homo sapien
catgctttcggtagaacatgctgcc

SEQ ID NO: 5378875 - DNA, 25 bp, Homo sapien
tttcggtagaacatgctgcccatgg

SEQ ID NO: 5378876 - DNA, 25 bp, Homo sapien
cctttcaaatggaagttgccaccag

SEQ ID NO: 5378877 - DNA, 25 bp, Homo sapien
tttcaaatggaagttgccaccaggt

SEQ ID NO: 5378878 - DNA, 25 bp, Homo sapien
tcaaatggaagttgccaccaggtgg

SEQ ID NO: 5378879 - DNA, 25 bp, Homo sapien
ttcaaatggaagttgccaccaggtg

SEQ ID NO: 5378880 - DNA, 25 bp, Homo sapien
ggagctgtccttgtctctaccgcta

SEQ ID NO: 5378881 - DNA, 25 bp, Homo sapien
taccgctactgcgattctctgccat

SEQ ID NO: 5378882 - DNA, 25 bp, Homo sapien
ggtgggaccagcgttggagctggtg

SEQ ID NO: 5378883 - DNA, 25 bp, Homo sapien
aggaagttcagggaacacaggagct

SEQ ID NO: 5378884 - DNA, 25 bp, Homo sapien
ggttggggatgtggcttacagtctg

SEQ ID NO: 5378885 - DNA, 25 bp, Homo sapien
tcattttcgcgggtctcagactgtc

SEQ ID NO: 5378886 - DNA, 25 bp, Homo sapien
tgcagcctcattttcgcgggtctca

SEQ ID NO: 5378887 - DNA, 25 bp, Homo sapien
cagcctcattttcgcgggtctcaga

SEQ ID NO: 5378888 - DNA, 25 bp, Homo sapien
gcctcttggaagcacggtagtaacc

SEQ ID NO: 5378889 - DNA, 25 bp, Homo sapien
gagtgtgtccactgagtgacttagg

SEQ ID NO: 5378890 - DNA, 25 bp, Homo sapien
gggcatggcagcgaacccttgttcc

SEQ ID NO: 5378891 - DNA, 25 bp, Homo sapien
ccgtgacatggagttcttgcaggtt

SEQ ID NO: 5378892 - DNA, 25 bp, Homo sapien
tgccgatggtagcatgtggcagata

SEQ ID NO: 5378893 - DNA, 25 bp, Homo sapien
ggtactgggttgagaggtgtgggat

SEQ ID NO: 5378894 - DNA, 25 bp, Homo sapien
ggtagcatgtggcagatagggcagg

SEQ ID NO: 5378895 - DNA, 25 bp, Homo sapien
gtgggagctgccgatggtagcatgt

SEQ ID NO: 5378896 - DNA, 25 bp, Homo sapien
ctggggtaagggcagagtttgacat

SEQ ID NO: 5378897 - DNA, 25 bp, Homo sapien
ctgcctgccagcatcctttttcctt

SEQ ID NO: 5378898 - DNA, 25 bp, Homo sapien
tcctttttccttctcatacaccacc

SEQ ID NO: 5378899 - DNA, 25 bp, Homo sapien
tttttccttctcatacaccaccctc

SEQ ID NO: 5378900 - DNA, 25 bp, Homo sapien
gcctgccagcatcctttttccttct

SEQ ID NO: 5378901 - DNA, 25 bp, Homo sapien
aactccaggtttaaccagctctggt

SEQ ID NO: 5378902 - DNA, 25 bp, Homo sapien
agctctggttgggagcagaatcctt

SEQ ID NO: 5378903 - DNA, 25 bp, Homo sapien
cagctctggttgggagcagaatcct

SEQ ID NO: 5378904 - DNA, 25 bp, Homo sapien
taccaactccaggtttaaccagctc

SEQ ID NO: 5378905 - DNA, 25 bp, Homo sapien
tctccgacggtgatgtagacaggac

SEQ ID NO: 5378906 - DNA, 25 bp, Homo sapien
gcagcggtgtccagtctccgacggt

SEQ ID NO: 5378907 - DNA, 25 bp, Homo sapien
caggacctccgcatcacttctagga

SEQ ID NO: 5378908 - DNA, 25 bp, Homo sapien
cggtgatgtagacaggacctccgca

SEQ ID NO: 5378909 - DNA, 25 bp, Homo sapien
tcacagtgacgatgacactacttcc

SEQ ID NO: 5378910 - DNA, 25 bp, Homo sapien
cttaatcacagtgacgatgacacta

SEQ ID NO: 5378911 - DNA, 25 bp, Homo sapien
gacgatgacactacttcctgttctg

SEQ ID NO: 5378912 - DNA, 25 bp, Homo sapien
gatgacactacttcctgttctgtaa

SEQ ID NO: 5378913 - DNA, 25 bp, Homo sapien
gaccttcgccacgctgcttgttcat

SEQ ID NO: 5378914 - DNA, 25 bp, Homo sapien
ttagaccttcgccacgctgcttgtt

SEQ ID NO: 5378915 - DNA, 25 bp, Homo sapien
agaccttcgccacgctgcttgttca

SEQ ID NO: 5378916 - DNA, 25 bp, Homo sapien
ctttagaccttcgccacgctgcttg

SEQ ID NO: 5378917 - DNA, 25 bp, Homo sapien
ggcagctgggtcatggtaaaataaa

SEQ ID NO: 5378918 - DNA, 25 bp, Homo sapien
agctgggtcatggtaaaataaacac

SEQ ID NO: 5378919 - DNA, 25 bp, Homo sapien
cagctgggtcatggtaaaataaaca

SEQ ID NO: 5378920 - DNA, 25 bp, Homo sapien
gcagctgggtcatggtaaaataaac

SEQ ID NO: 5378921 - DNA, 25 bp, Homo sapien
catctcatagaaacatctagtgtca

SEQ ID NO: 5378922 - DNA, 25 bp, Homo sapien
ggcttgcatacatcagactcttggg

SEQ ID NO: 5378923 - DNA, 25 bp, Homo sapien
gactcttgggtgcaatagctacttg

SEQ ID NO: 5378924 - DNA, 25 bp, Homo sapien
tgtcagagctctcatagcccagcat

SEQ ID NO: 5378925 - DNA, 25 bp, Homo sapien
tcatggctactaatccctgtggata

SEQ ID NO: 5378926 - DNA, 25 bp, Homo sapien
tggctcctggtgattcatggctact

SEQ ID NO: 5378927 - DNA, 25 bp, Homo sapien
tgacatgagcccagtaaagactctg

SEQ ID NO: 5378928 - DNA, 25 bp, Homo sapien
tcttggatatattggatgtgcaggt

SEQ ID NO: 5378929 - DNA, 25 bp, Homo sapien
ccattggtgttgtaacatcaggctc

SEQ ID NO: 5378930 - DNA, 25 bp, Homo sapien
ggcagggccattggtgttgtaacat

SEQ ID NO: 5378931 - DNA, 25 bp, Homo sapien
tggtgttgtaacatcaggctctggg

SEQ ID NO: 5378932 - DNA, 25 bp, Homo sapien
aacatcaggctctgggtccctcttg

SEQ ID NO: 5378933 - DNA, 25 bp, Homo sapien
ctgatagctatgtacgtggaagggc

SEQ ID NO: 5378934 - DNA, 25 bp, Homo sapien
cgagcaaatatgaaagatggtccac

SEQ ID NO: 5378935 - DNA, 25 bp, Homo sapien
tggaggccctcctgatctgtcaagg

SEQ ID NO: 5378936 - DNA, 25 bp, Homo sapien
gatatcggagtcacactgatagcta

SEQ ID NO: 5378937 - DNA, 25 bp, Homo sapien
cattgttgtgtagtgttccattgca

SEQ ID NO: 5378938 - DNA, 25 bp, Homo sapien
ccataaatgttcatgtacaggtgct

SEQ ID NO: 5378939 - DNA, 25 bp, Homo sapien
gccttctgggtctgacattattcac

SEQ ID NO: 5378940 - DNA, 25 bp, Homo sapien
ttctgtagcccctaaagttcttcca

SEQ ID NO: 5378941 - DNA, 25 bp, Homo sapien
tcccttcactgaccatacagatggc

SEQ ID NO: 5378942 - DNA, 25 bp, Homo sapien
ttcactgaccatacagatggctgct

SEQ ID NO: 5378943 - DNA, 25 bp, Homo sapien
cactgaccatacagatggctgctga

SEQ ID NO: 5378944 - DNA, 25 bp, Homo sapien
aggtcccttcactgaccatacagat

SEQ ID NO: 5378945 - DNA, 25 bp, Homo sapien
gaatggtgcacccaaggatgacctt

SEQ ID NO: 5378946 - DNA, 25 bp, Homo sapien
tgaccttggttcaggtgtcagtaag

SEQ ID NO: 5378947 - DNA, 25 bp, Homo sapien
ccttggttcaggtgtcagtaagtta

SEQ ID NO: 5378948 - DNA, 25 bp, Homo sapien
tgaactggtctaaatcccaagaatg

SEQ ID NO: 5378949 - DNA, 25 bp, Homo sapien
aaatagtgtcggcagtaacagggct

SEQ ID NO: 5378950 - DNA, 25 bp, Homo sapien
aaaccaaatagtgtcggcagtaaca

SEQ ID NO: 5378951 - DNA, 25 bp, Homo sapien
accaaatagtgtcggcagtaacagg

SEQ ID NO: 5378952 - DNA, 25 bp, Homo sapien
gaaaaccaaatagtgtcggcagtaa

SEQ ID NO: 5378953 - DNA, 25 bp, Homo sapien
gccaacttcatcgttgacctgcctg

SEQ ID NO: 5378954 - DNA, 25 bp, Homo sapien
ggcatgagcaggtgggccacctgct

SEQ ID NO: 5378955 - DNA, 25 bp, Homo sapien
acttcatcgttgacctgcctgtgtc

SEQ ID NO: 5378956 - DNA, 25 bp, Homo sapien
gcaggtgccaacttcatcgttgacc

SEQ ID NO: 5378957 - DNA, 25 bp, Homo sapien
catttgagaaaatggtaaatgaaca

SEQ ID NO: 5378958 - DNA, 25 bp, Homo sapien
ctgttaaacatttgagaaaatggta

SEQ ID NO: 5378959 - DNA, 25 bp, Homo sapien
cagctgttaaacatttgagaaaatg

SEQ ID NO: 5378960 - DNA, 25 bp, Homo sapien
aacatttgagaaaatggtaaatgaa

SEQ ID NO: 5378961 - DNA, 25 bp, Homo sapien
aagatgaacttcctcggtgtggctc

SEQ ID NO: 5378962 - DNA, 25 bp, Homo sapien
ctgctacactgcatggtctgtggct

SEQ ID NO: 5378963 - DNA, 25 bp, Homo sapien
tgtcttgacagtgtcacttcatctt

SEQ ID NO: 5378964 - DNA, 25 bp, Homo sapien
ggtgtggctcaccaaatccttcctg

SEQ ID NO: 5378965 - DNA, 25 bp, Homo sapien
cacagggtactgagcccgtgtgtct

SEQ ID NO: 5378966 - DNA, 25 bp, Homo sapien
acagggtactgagcccgtgtgtctt

SEQ ID NO: 5378967 - DNA, 25 bp, Homo sapien
actgagcccgtgtgtcttgtgcttc

SEQ ID NO: 5378968 - DNA, 25 bp, Homo sapien
ggtactgagcccgtgtgtcttgtgc

SEQ ID NO: 5378969 - DNA, 25 bp, Homo sapien
ttgatagcatcgtgttgtgtgctgg

SEQ ID NO: 5378970 - DNA, 25 bp, Homo sapien
ctcctgaggattgtggtttagtgga

SEQ ID NO: 5378971 - DNA, 25 bp, Homo sapien
gcctcctgaggattgtggtttagtg

SEQ ID NO: 5378972 - DNA, 25 bp, Homo sapien
ctacttgttgatagcatcgtgttgt

SEQ ID NO: 5378973 - DNA, 25 bp, Homo sapien
tatctcatctatgctgggatgactg

SEQ ID NO: 5378974 - DNA, 25 bp, Homo sapien
tggagaggcgatcccaacttgggtt

SEQ ID NO: 5378975 - DNA, 25 bp, Homo sapien
cgggttggctggttgttatctcatc

SEQ ID NO: 5378976 - DNA, 25 bp, Homo sapien
agcaagctggttgggccacgtcctt

SEQ ID NO: 5378977 - DNA, 25 bp, Homo sapien
tggccactggagcagtcagttttca

SEQ ID NO: 5378978 - DNA, 25 bp, Homo sapien
ggatggctgagtttctcaggatggc

SEQ ID NO: 5378979 - DNA, 25 bp, Homo sapien
gatggctgagtttctcaggatggcc

SEQ ID NO: 5378980 - DNA, 25 bp, Homo sapien
caggggctgtactttctgcctcttt

SEQ ID NO: 5378981 - DNA, 25 bp, Homo sapien
ggcaggggctgtactttctgcctct

SEQ ID NO: 5378982 - DNA, 25 bp, Homo sapien
gcaggggctgtactttctgcctctt

SEQ ID NO: 5378983 - DNA, 25 bp, Homo sapien
ggtttgcttggttgaagtttccata

SEQ ID NO: 5378984 - DNA, 25 bp, Homo sapien
ttccatattcagcttcactcgaggc

SEQ ID NO: 5378985 - DNA, 25 bp, Homo sapien
gttctctgagctgggaatagcctgc

SEQ ID NO: 5378986 - DNA, 25 bp, Homo sapien
ctgggaatagcctgcagggtttgct

SEQ ID NO: 5378987 - DNA, 25 bp, Homo sapien
ttgatccttgcatagatcccaggtg

SEQ ID NO: 5378988 - DNA, 25 bp, Homo sapien
tagggcgtctgcaaactggagtcag

SEQ ID NO: 5378989 - DNA, 25 bp, Homo sapien
tgtcatcatcacaaatagggcgtct

SEQ ID NO: 5378990 - DNA, 25 bp, Homo sapien
gaatctgggatatctcctgagcaca

SEQ ID NO: 5378991 - DNA, 25 bp, Homo sapien
gggatgaatggtgcccactgtgagt

SEQ ID NO: 5378992 - DNA, 25 bp, Homo sapien
tgagttggcagagatgacttcagaa

SEQ ID NO: 5378993 - DNA, 25 bp, Homo sapien
atgaatggtgcccactgtgagttgg

SEQ ID NO: 5378994 - DNA, 25 bp, Homo sapien
tgcccactgtgagttggcagagatg

SEQ ID NO: 5378995 - DNA, 25 bp, Homo sapien
tcaggaggcattagtggccacgatg

SEQ ID NO: 5378996 - DNA, 25 bp, Homo sapien
gctaccaaggcttcccagattttcc

SEQ ID NO: 5378997 - DNA, 25 bp, Homo sapien
gtggccacgatgagtctgaccctgg

SEQ ID NO: 5378998 - DNA, 25 bp, Homo sapien
tctaggtgctaccttgcgggctgct

SEQ ID NO: 5378999 - DNA, 25 bp, Homo sapien
ctgctgcatcccccctctttccttc

SEQ ID NO: 5379000 - DNA, 25 bp, Homo sapien
tgctgcatcccccctctttccttct

SEQ ID NO: 5379001 - DNA, 25 bp, Homo sapien
tctttccttcttcctgagtctcctg

SEQ ID NO: 5379002 - DNA, 25 bp, Homo sapien
ttccttcttcctgagtctcctgcat

SEQ ID NO: 5379003 - DNA, 25 bp, Homo sapien
tggcaaaacctctttcccccatcaa

SEQ ID NO: 5379004 - DNA, 25 bp, Homo sapien
ggtaaggtgcctttgttatctccac

SEQ ID NO: 5379005 - DNA, 25 bp, Homo sapien
acatggcaaaacctctttcccccat

SEQ ID NO: 5379006 - DNA, 25 bp, Homo sapien
catcaaaaagggtaaggtgcctttg

SEQ ID NO: 5379007 - DNA, 25 bp, Homo sapien
ggctgtgtgtggctcatgtgcttat

SEQ ID NO: 5379008 - DNA, 25 bp, Homo sapien
gggctgtgtgtggctcatgtgctta

SEQ ID NO: 5379009 - DNA, 25 bp, Homo sapien
agatgcaggcactgaaagggctgtg

SEQ ID NO: 5379010 - DNA, 25 bp, Homo sapien
cagatgcaggcactgaaagggctgt

SEQ ID NO: 5379011 - DNA, 25 bp, Homo sapien
ctcactgagctctggtgttccgtgg

SEQ ID NO: 5379012 - DNA, 25 bp, Homo sapien
tgagctctggtgttccgtggcaaag

SEQ ID NO: 5379013 - DNA, 25 bp, Homo sapien
ccagggtctggacggtggtactcag

SEQ ID NO: 5379014 - DNA, 25 bp, Homo sapien
tctggtgttccgtggcaaagcctgc

SEQ ID NO: 5379015 - DNA, 25 bp, Homo sapien
gcacaaaaaccatatgcgaagccat

SEQ ID NO: 5379016 - DNA, 25 bp, Homo sapien
tcaataacagataaacggcccacag

SEQ ID NO: 5379017 - DNA, 25 bp, Homo sapien
gacgcaaacatgaggagttgtttcc

SEQ ID NO: 5379018 - DNA, 25 bp, Homo sapien
agctgaccagccgaagaccaatgtg

SEQ ID NO: 5379019 - DNA, 25 bp, Homo sapien
gatgtaatccactcatcaagcactt

SEQ ID NO: 5379020 - DNA, 25 bp, Homo sapien
tccctgatgtaatccactcatcaag

SEQ ID NO: 5379021 - DNA, 25 bp, Homo sapien
agccttccctgatgtaatccactca

SEQ ID NO: 5379022 - DNA, 25 bp, Homo sapien
caagcactttgaattcacttggcat

SEQ ID NO: 5379023 - DNA, 25 bp, Homo sapien
ggattcctggttgcgaagagtagat

SEQ ID NO: 5379024 - DNA, 25 bp, Homo sapien
taaggattcctggttgcgaagagta

SEQ ID NO: 5379025 - DNA, 25 bp, Homo sapien
gcctgtgtttgtaaggattcctggt

SEQ ID NO: 5379026 - DNA, 25 bp, Homo sapien
ttgtaaggattcctggttgcgaaga

SEQ ID NO: 5379027 - DNA, 25 bp, Homo sapien
catgggagcacaccccggagaagga

SEQ ID NO: 5379028 - DNA, 25 bp, Homo sapien
cactgacaccatgtagacaccgcag

SEQ ID NO: 5379029 - DNA, 25 bp, Homo sapien
tccagccttcatggcaagcctgtga

SEQ ID NO: 5379030 - DNA, 25 bp, Homo sapien
tgtagacaccgcagacagggtcaac

SEQ ID NO: 5379031 - DNA, 25 bp, Homo sapien
cagatacagtcctgttcaccagggc

SEQ ID NO: 5379032 - DNA, 25 bp, Homo sapien
ctggggtcagatacagtcctgttca

SEQ ID NO: 5379033 - DNA, 25 bp, Homo sapien
gtcagatacagtcctgttcaccagg

SEQ ID NO: 5379034 - DNA, 25 bp, Homo sapien
gggtcagatacagtcctgttcacca

SEQ ID NO: 5379035 - DNA, 25 bp, Homo sapien
gcccctggaagcgtgagcttcacat

SEQ ID NO: 5379036 - DNA, 25 bp, Homo sapien
tgggcccctggaagcgtgagcttca

SEQ ID NO: 5379037 - DNA, 25 bp, Homo sapien
tggaagcgtgagcttcacattcctc

SEQ ID NO: 5379038 - DNA, 25 bp, Homo sapien
ggaagccacactctggtcccacagc

SEQ ID NO: 5379039 - DNA, 25 bp, Homo sapien
ggggcttctctgaaatcacaatttc

SEQ ID NO: 5379040 - DNA, 25 bp, Homo sapien
ctttgggggcttctctgaaatcaca

SEQ ID NO: 5379041 - DNA, 25 bp, Homo sapien
tgggggcttctctgaaatcacaatt

SEQ ID NO: 5379042 - DNA, 25 bp, Homo sapien
tttgggggcttctctgaaatcacaa

SEQ ID NO: 5379043 - DNA, 25 bp, Homo sapien
gaagggccctctcgtgggtggcgtg

SEQ ID NO: 5379044 - DNA, 25 bp, Homo sapien
ctttgacagagacttgagaggcgtg

SEQ ID NO: 5379045 - DNA, 25 bp, Homo sapien
aattaagcacttgccgctggtgccc

SEQ ID NO: 5379046 - DNA, 25 bp, Homo sapien
tttgaaggtgtctgtaattaagcac

SEQ ID NO: 5379047 - DNA, 25 bp, Homo sapien
gtgggggcatcggcctcgcctggca

SEQ ID NO: 5379048 - DNA, 25 bp, Homo sapien
tgggggcatcggcctcgcctggcag

SEQ ID NO: 5379049 - DNA, 25 bp, Homo sapien
tggcataggactatctgcaggttct

SEQ ID NO: 5379050 - DNA, 25 bp, Homo sapien
gggtggctgggtccgtgaaggcagg

SEQ ID NO: 5379051 - DNA, 25 bp, Homo sapien
ctgaaggcagttagtgcatggcata

SEQ ID NO: 5379052 - DNA, 25 bp, Homo sapien
gctgggtccgtgaaggcaggcccac

SEQ ID NO: 5379053 - DNA, 25 bp, Homo sapien
gctaatttgacgtactgtttttcac

SEQ ID NO: 5379054 - DNA, 25 bp, Homo sapien
cctcagctaatttgacgtactgttt

SEQ ID NO: 5379055 - DNA, 25 bp, Homo sapien
ctcagctaatttgacgtactgtttt

SEQ ID NO: 5379056 - DNA, 25 bp, Homo sapien
cagctaatttgacgtactgtttttc

SEQ ID NO: 5379057 - DNA, 25 bp, Homo sapien
tgcaaaagtaaggagcgccccaagc

SEQ ID NO: 5379058 - DNA, 25 bp, Homo sapien
tctttgagaactaatcataatggta

SEQ ID NO: 5379059 - DNA, 25 bp, Homo sapien
gcatggatacattcggcctccgaca

SEQ ID NO: 5379060 - DNA, 25 bp, Homo sapien
tgggcccagcgccattgcatggata

SEQ ID NO: 5379061 - DNA, 25 bp, Homo sapien
gggatgtacttttgcattgagctgt

SEQ ID NO: 5379062 - DNA, 25 bp, Homo sapien
tacttttgcattgagctgtctctcc

SEQ ID NO: 5379063 - DNA, 25 bp, Homo sapien
tgattttgaagcttttgggggatgt

SEQ ID NO: 5379064 - DNA, 25 bp, Homo sapien
gattttgaagcttttgggggatgta

SEQ ID NO: 5379065 - DNA, 25 bp, Homo sapien
caccgagagccagtatcttgagctg

SEQ ID NO: 5379066 - DNA, 25 bp, Homo sapien
accaccgagagccagtatcttgagc

SEQ ID NO: 5379067 - DNA, 25 bp, Homo sapien
ccaccgagagccagtatcttgagct

SEQ ID NO: 5379068 - DNA, 25 bp, Homo sapien
tctcgtcctccaaaaatcctgacca

SEQ ID NO: 5379069 - DNA, 25 bp, Homo sapien
cttgtaactcccctctcgtcctcca

SEQ ID NO: 5379070 - DNA, 25 bp, Homo sapien
tgtaactcccctctcgtcctccaaa

SEQ ID NO: 5379071 - DNA, 25 bp, Homo sapien
cccctctcgtcctccaaaaatcctg

SEQ ID NO: 5379072 - DNA, 25 bp, Homo sapien
tatcaatctctgtggccgacaacca

SEQ ID NO: 5379073 - DNA, 25 bp, Homo sapien
acttcccatctcttatcaatctctg

SEQ ID NO: 5379074 - DNA, 25 bp, Homo sapien
tggccgacaaccacttgatggaggt

SEQ ID NO: 5379075 - DNA, 25 bp, Homo sapien
gttttgatggtgtttgggtaattca

SEQ ID NO: 5379076 - DNA, 25 bp, Homo sapien
ggcttgctgacccataagacatggt

SEQ ID NO: 5379077 - DNA, 25 bp, Homo sapien
ccagcgcgagtggtacggatctata

SEQ ID NO: 5379078 - DNA, 25 bp, Homo sapien
gaattgtacgactggatggctctga

SEQ ID NO: 5379079 - DNA, 25 bp, Homo sapien
gaactaccggaggagaatctactgt

SEQ ID NO: 5379080 - DNA, 25 bp, Homo sapien
tgtggggtggggactagctttctgg

SEQ ID NO: 5379081 - DNA, 25 bp, Homo sapien
cctgcagagacgtcttttctttgta

SEQ ID NO: 5379082 - DNA, 25 bp, Homo sapien
tacttcctctgagggcgacctgtgt

SEQ ID NO: 5379083 - DNA, 25 bp, Homo sapien
gtggggactagctttctggatgtgg

SEQ ID NO: 5379084 - DNA, 25 bp, Homo sapien
tgctgctgcccactgggttgggaaa

SEQ ID NO: 5379085 - DNA, 25 bp, Homo sapien
agatgtgcttgttgtcatgcggtcc

SEQ ID NO: 5379086 - DNA, 25 bp, Homo sapien
tgcccactgggttgggaaatggcca

SEQ ID NO: 5379087 - DNA, 25 bp, Homo sapien
atgcggtccttcatagctctccagt

SEQ ID NO: 5379088 - DNA, 25 bp, Homo sapien
ctgtgctggatccacagccggtgga

SEQ ID NO: 5379089 - DNA, 25 bp, Homo sapien
tgggttttgtgctgacttctgctgc

SEQ ID NO: 5379090 - DNA, 25 bp, Homo sapien
tggagctccttgtgggttttgtgct

SEQ ID NO: 5379091 - DNA, 25 bp, Homo sapien
gctgctggtgccctctgttgctggt

SEQ ID NO: 5379092 - DNA, 25 bp, Homo sapien
caggaggcagaataatggccctcat

SEQ ID NO: 5379093 - DNA, 25 bp, Homo sapien
tcaggaggcagaataatggccctca

SEQ ID NO: 5379094 - DNA, 25 bp, Homo sapien
tgtcaggaggcagaataatggccct

SEQ ID NO: 5379095 - DNA, 25 bp, Homo sapien
ctgtcaggaggcagaataatggccc

SEQ ID NO: 5379096 - DNA, 25 bp, Homo sapien
tgtgtcataaccttcttcctgaggt

SEQ ID NO: 5379097 - DNA, 25 bp, Homo sapien
ctgtgtcataaccttcttcctgagg

SEQ ID NO: 5379098 - DNA, 25 bp, Homo sapien
gtgtcataaccttcttcctgaggtg

SEQ ID NO: 5379099 - DNA, 25 bp, Homo sapien
cgtgcgcccggtaagaatgtctcaa

SEQ ID NO: 5379100 - DNA, 25 bp, Homo sapien
tgtgacctcactgttattcctgata

SEQ ID NO: 5379101 - DNA, 25 bp, Homo sapien
gctttcaaaagaagagtagttggta

SEQ ID NO: 5379102 - DNA, 25 bp, Homo sapien
tgttgggtgacatggattatgcatc

SEQ ID NO: 5379103 - DNA, 25 bp, Homo sapien
gacttagtggaattgagcactccca

SEQ ID NO: 5379104 - DNA, 25 bp, Homo sapien
caaacctggtgctgtcagatgaccg

SEQ ID NO: 5379105 - DNA, 25 bp, Homo sapien
ctgggtcagtgcaaaatcaatggca

SEQ ID NO: 5379106 - DNA, 25 bp, Homo sapien
atctgctttgatggcgggtcccctc

SEQ ID NO: 5379107 - DNA, 25 bp, Homo sapien
actttctgcccctggtttcctgatg

SEQ ID NO: 5379108 - DNA, 25 bp, Homo sapien
tttctgcccctggtttcctgatgcc

SEQ ID NO: 5379109 - DNA, 25 bp, Homo sapien
tctgcccctggtttcctgatgccat

SEQ ID NO: 5379110 - DNA, 25 bp, Homo sapien
gaactttctgcccctggtttcctga

SEQ ID NO: 5379111 - DNA, 25 bp, Homo sapien
tgagaactggtctaggatcccactg

SEQ ID NO: 5379112 - DNA, 25 bp, Homo sapien
tacagctaatggtgcaataccagtg

SEQ ID NO: 5379113 - DNA, 25 bp, Homo sapien
tctgcttgactgacggcaatggttt

SEQ ID NO: 5379114 - DNA, 25 bp, Homo sapien
tcagcaacataatggaggtcttggc

SEQ ID NO: 5379115 - DNA, 25 bp, Homo sapien
acatgtgtgagtcgccggagcttct

SEQ ID NO: 5379116 - DNA, 25 bp, Homo sapien
gtgagagaggaacactaatgtcccc

SEQ ID NO: 5379117 - DNA, 25 bp, Homo sapien
gcattcccctgcttcacatgtgtga

SEQ ID NO: 5379118 - DNA, 25 bp, Homo sapien
caatttcagacctgtgagatggtgg

SEQ ID NO: 5379119 - DNA, 25 bp, Homo sapien
tgtccaaaccaatttagcgcctctc

SEQ ID NO: 5379120 - DNA, 25 bp, Homo sapien
caaaccaatttagcgcctctctttt

SEQ ID NO: 5379121 - DNA, 25 bp, Homo sapien
ccaatttagcgcctctcttttccat

SEQ ID NO: 5379122 - DNA, 25 bp, Homo sapien
caatttagcgcctctcttttccatg

SEQ ID NO: 5379123 - DNA, 25 bp, Homo sapien
ttctggaatcctaatccagtgctct

SEQ ID NO: 5379124 - DNA, 25 bp, Homo sapien
tctggaatcctaatccagtgctctt

SEQ ID NO: 5379125 - DNA, 25 bp, Homo sapien
cttctggaatcctaatccagtgctc

SEQ ID NO: 5379126 - DNA, 25 bp, Homo sapien
gcttctggaatcctaatccagtgct

SEQ ID NO: 5379127 - DNA, 25 bp, Homo sapien
aaacctgctaaaactgctcattttg

SEQ ID NO: 5379128 - DNA, 25 bp, Homo sapien
tcagcgatcaaacctgctaaaactg

SEQ ID NO: 5379129 - DNA, 25 bp, Homo sapien
ctgcagataaacctcccttttaggg

SEQ ID NO: 5379130 - DNA, 25 bp, Homo sapien
ggttcactctgcagataaacctccc

SEQ ID NO: 5379131 - DNA, 25 bp, Homo sapien
ttagccatcgcgatcaacctggagt

SEQ ID NO: 5379132 - DNA, 25 bp, Homo sapien
catcgcgatcaacctggagtttcaa

SEQ ID NO: 5379133 - DNA, 25 bp, Homo sapien
gccatcgcgatcaacctggagtttc

SEQ ID NO: 5379134 - DNA, 25 bp, Homo sapien
cgcgatcaacctggagtttcaacac

SEQ ID NO: 5379135 - DNA, 25 bp, Homo sapien
tgctcttctcggctgaggacaaggg

SEQ ID NO: 5379136 - DNA, 25 bp, Homo sapien
cctacatttgcaatgttcttactaa

SEQ ID NO: 5379137 - DNA, 25 bp, Homo sapien
gacaaggttgtctctggccacagtt

SEQ ID NO: 5379138 - DNA, 25 bp, Homo sapien
gtgggcccttctctagactctgttt

SEQ ID NO: 5379139 - DNA, 25 bp, Homo sapien
agggaagattcctgtgcacaagtgt

SEQ ID NO: 5379140 - DNA, 25 bp, Homo sapien
caaatgagtggaaggtcgtgaagca

SEQ ID NO: 5379141 - DNA, 25 bp, Homo sapien
cgtggaaagagtcgcagagcaagcc

SEQ ID NO: 5379142 - DNA, 25 bp, Homo sapien
gagcaagccattacatgcacaagag

SEQ ID NO: 5379143 - DNA, 25 bp, Homo sapien
caactgattagggatgcctggcaga

SEQ ID NO: 5379144 - DNA, 25 bp, Homo sapien
gccatagaaactgcgggagcttcac

SEQ ID NO: 5379145 - DNA, 25 bp, Homo sapien
agaaactgcgggagcttcaccagcc

SEQ ID NO: 5379146 - DNA, 25 bp, Homo sapien
catagaaactgcgggagcttcacca

SEQ ID NO: 5379147 - DNA, 25 bp, Homo sapien
cagcatcttcttacaagtgcctgcc

SEQ ID NO: 5379148 - DNA, 25 bp, Homo sapien
gagtacagcatcattctacattcta

SEQ ID NO: 5379149 - DNA, 25 bp, Homo sapien
gcagctttaggtggtggaaggagca

SEQ ID NO: 5379150 - DNA, 25 bp, Homo sapien
ctgtgagtacagcatcattctacat

SEQ ID NO: 5379151 - DNA, 25 bp, Homo sapien
ggagcagctttaggtggtggaagga

SEQ ID NO: 5379152 - DNA, 25 bp, Homo sapien
cttatgtcctacagtgggaccaacc

SEQ ID NO: 5379153 - DNA, 25 bp, Homo sapien
cagaatttcttatgtcctacagtgg

SEQ ID NO: 5379154 - DNA, 25 bp, Homo sapien
gagcagaatttcttatgtcctacag

SEQ ID NO: 5379155 - DNA, 25 bp, Homo sapien
tttcttatgtcctacagtgggacca

SEQ ID NO: 5379156 - DNA, 25 bp, Homo sapien
aggagaaaagggactgacactttag

SEQ ID NO: 5379157 - DNA, 25 bp, Homo sapien
acactttagcattcagccgcttcat

SEQ ID NO: 5379158 - DNA, 25 bp, Homo sapien
gagaaaagggactgacactttagca

SEQ ID NO: 5379159 - DNA, 25 bp, Homo sapien
tgacactttagcattcagccgcttc

SEQ ID NO: 5379160 - DNA, 25 bp, Homo sapien
gctttacagtatagcagcggctgcc

SEQ ID NO: 5379161 - DNA, 25 bp, Homo sapien
catccgttggacctcctggtcataa

SEQ ID NO: 5379162 - DNA, 25 bp, Homo sapien
catgatcgggtaactggtgagttgc

SEQ ID NO: 5379163 - DNA, 25 bp, Homo sapien
cgtgttccagcaccacgactagcgt

SEQ ID NO: 5379164 - DNA, 25 bp, Homo sapien
agttgaaaatgtattggagatgctt

SEQ ID NO: 5379165 - DNA, 25 bp, Homo sapien
tgtattggagatgcttacaacatcc

SEQ ID NO: 5379166 - DNA, 25 bp, Homo sapien
tggagatgcttacaacatccctgtg

SEQ ID NO: 5379167 - DNA, 25 bp, Homo sapien
aaaatgtattggagatgcttacaac

SEQ ID NO: 5379168 - DNA, 25 bp, Homo sapien
agttcctttcgggccctggccagca

SEQ ID NO: 5379169 - DNA, 25 bp, Homo sapien
gacatcacggccatgtgtaggaagt

SEQ ID NO: 5379170 - DNA, 25 bp, Homo sapien
gagacatcacggccatgtgtaggaa

SEQ ID NO: 5379171 - DNA, 25 bp, Homo sapien
gttcctttcgggccctggccagcaa

SEQ ID NO: 5379172 - DNA, 25 bp, Homo sapien
tcaccagacaaagctgccctgcatt

SEQ ID NO: 5379173 - DNA, 25 bp, Homo sapien
tgttgacctcagaccatgggccctg

SEQ ID NO: 5379174 - DNA, 25 bp, Homo sapien
aatccctgctgttgacctcagacca

SEQ ID NO: 5379175 - DNA, 25 bp, Homo sapien
ggccctgccctttgtttggcctatg

SEQ ID NO: 5379176 - DNA, 25 bp, Homo sapien
gaatcactgtggtgatctctcagac

SEQ ID NO: 5379177 - DNA, 25 bp, Homo sapien
cagagggactgtaagttgaacttga

SEQ ID NO: 5379178 - DNA, 25 bp, Homo sapien
cttgaagagtgcctcgttttcgatg

SEQ ID NO: 5379179 - DNA, 25 bp, Homo sapien
tgctgagctctaaatgaatgaggtg

SEQ ID NO: 5379180 - DNA, 25 bp, Homo sapien
ctccaaattgatgtttttgagggca

SEQ ID NO: 5379181 - DNA, 25 bp, Homo sapien
ctgctgctctgtatctttctccaaa

SEQ ID NO: 5379182 - DNA, 25 bp, Homo sapien
ctctgtatctttctccaaattgatg

SEQ ID NO: 5379183 - DNA, 25 bp, Homo sapien
catgctgcactggaacaatctggct

SEQ ID NO: 5379184 - DNA, 25 bp, Homo sapien
catatcctgagtgaaggttggcaaa

SEQ ID NO: 5379185 - DNA, 25 bp, Homo sapien
cacctctttgacaatagaggcatct

SEQ ID NO: 5379186 - DNA, 25 bp, Homo sapien
ctccaaattccagccatatcctgag

SEQ ID NO: 5379187 - DNA, 25 bp, Homo sapien
attcacctctttgacaatagaggca

SEQ ID NO: 5379188 - DNA, 25 bp, Homo sapien
tgtaaggattatataatccaggttt

SEQ ID NO: 5379189 - DNA, 25 bp, Homo sapien
catgaaacttaatctggtaggaggc

SEQ ID NO: 5379190 - DNA, 25 bp, Homo sapien
ccatagcacgtagagagaagattca

SEQ ID NO: 5379191 - DNA, 25 bp, Homo sapien
ggaataccaggctgaagtgcttgta

SEQ ID NO: 5379192 - DNA, 25 bp, Homo sapien
aacatccaatgcagaaaagccacgg

SEQ ID NO: 5379193 - DNA, 25 bp, Homo sapien
tgctttggcagtttatgtcagcaag

SEQ ID NO: 5379194 - DNA, 25 bp, Homo sapien
gtcagcaaggctgtctgtaattgag

SEQ ID NO: 5379195 - DNA, 25 bp, Homo sapien
caaccataatagtaaggagatccat

SEQ ID NO: 5379196 - DNA, 25 bp, Homo sapien
aggctgtctgtaattgagtcaacca

SEQ ID NO: 5379197 - DNA, 25 bp, Homo sapien
gaccatgatggtgggctgggtctgc

SEQ ID NO: 5379198 - DNA, 25 bp, Homo sapien
tgggtctgcttgagtctgtttacac

SEQ ID NO: 5379199 - DNA, 25 bp, Homo sapien
tgcaagtctgggcttgtggaccatg

SEQ ID NO: 5379200 - DNA, 25 bp, Homo sapien
aagtctgggcttgtggaccatgatg

SEQ ID NO: 5379201 - DNA, 25 bp, Homo sapien
ttccaagattccactcaaaccatcc

SEQ ID NO: 5379202 - DNA, 25 bp, Homo sapien
cacaaacatgtcagcggggacggaa

SEQ ID NO: 5379203 - DNA, 25 bp, Homo sapien
gtctgaggcacggagcctgctaaag

SEQ ID NO: 5379204 - DNA, 25 bp, Homo sapien
gacggaagatgagcacggtatgtct

SEQ ID NO: 5379205 - DNA, 25 bp, Homo sapien
gatgagcacggtatgtctgaggcac

SEQ ID NO: 5379206 - DNA, 25 bp, Homo sapien
tagagcacgttccagcagcccataa

SEQ ID NO: 5379207 - DNA, 25 bp, Homo sapien
gataaactccttatagtccacttga

SEQ ID NO: 5379208 - DNA, 25 bp, Homo sapien
ccagcagcccataataaaaggaaag

SEQ ID NO: 5379209 - DNA, 25 bp, Homo sapien
tagtccacttgagaacactggcctg

SEQ ID NO: 5379210 - DNA, 25 bp, Homo sapien
tatctattcatagggcgattgcaaa

SEQ ID NO: 5379211 - DNA, 25 bp, Homo sapien
gtttaaatcctgactctatcaagtg

SEQ ID NO: 5379212 - DNA, 25 bp, Homo sapien
tgtttaacccttcaccacagtgagg

SEQ ID NO: 5379213 - DNA, 25 bp, Homo sapien
gggaagccgtgtaacctctgagcct

SEQ ID NO: 5379214 - DNA, 25 bp, Homo sapien
ctttcttccgaatctctgattgccc

SEQ ID NO: 5379215 - DNA, 25 bp, Homo sapien
ctttgtcaaaggacgccttagttca

SEQ ID NO: 5379216 - DNA, 25 bp, Homo sapien
caaaggacgccttagttcatctttc

SEQ ID NO: 5379217 - DNA, 25 bp, Homo sapien
gattgcccattttcgtgatcacagg

SEQ ID NO: 5379218 - DNA, 25 bp, Homo sapien
attataaatccctgttgaatttatc

SEQ ID NO: 5379219 - DNA, 25 bp, Homo sapien
ctagatacaaagtaggcatgcaatt

SEQ ID NO: 5379220 - DNA, 25 bp, Homo sapien
atacaaagtaggcatgcaattatta

SEQ ID NO: 5379221 - DNA, 25 bp, Homo sapien
aaagtaggcatgcaattattataaa

SEQ ID NO: 5379222 - DNA, 25 bp, Homo sapien
gttgatgagagcaattttcttaatt

SEQ ID NO: 5379223 - DNA, 25 bp, Homo sapien
ttgatgagagcaattttcttaatta

SEQ ID NO: 5379224 - DNA, 25 bp, Homo sapien
tgatgagagcaattttcttaattaa

SEQ ID NO: 5379225 - DNA, 25 bp, Homo sapien
gggcaaaatggatcatctcagcctt

SEQ ID NO: 5379226 - DNA, 25 bp, Homo sapien
tctttgggcaaaatggatcatctca

SEQ ID NO: 5379227 - DNA, 25 bp, Homo sapien
aatctttgggcaaaatggatcatct

SEQ ID NO: 5379228 - DNA, 25 bp, Homo sapien
tttgggcaaaatggatcatctcagc

SEQ ID NO: 5379229 - DNA, 25 bp, Homo sapien
gaatcagttaggaacattctctcac

SEQ ID NO: 5379230 - DNA, 25 bp, Homo sapien
gtgaatcagttaggaacattctctc

SEQ ID NO: 5379231 - DNA, 25 bp, Homo sapien
gctgtgtctgtgaatcagttaggaa

SEQ ID NO: 5379232 - DNA, 25 bp, Homo sapien
gtctgtgaatcagttaggaacattc

SEQ ID NO: 5379233 - DNA, 25 bp, Homo sapien
tagatcccttggtcgcttggtgagc

SEQ ID NO: 5379234 - DNA, 25 bp, Homo sapien
tctgcatactgcatacagtgacttg

SEQ ID NO: 5379235 - DNA, 25 bp, Homo sapien
gggctcttctctgccggttccagtt

SEQ ID NO: 5379236 - DNA, 25 bp, Homo sapien
ggtgagcttcatatcccgcagcaaa

SEQ ID NO: 5379237 - DNA, 25 bp, Homo sapien
gagatttatcactgggcatatatat

SEQ ID NO: 5379238 - DNA, 25 bp, Homo sapien
cttctttagagatttatcactgggc

SEQ ID NO: 5379239 - DNA, 25 bp, Homo sapien
ctttagagatttatcactgggcata

SEQ ID NO: 5379240 - DNA, 25 bp, Homo sapien
gtcttctttagagatttatcactgg

SEQ ID NO: 5379241 - DNA, 25 bp, Homo sapien
cgtattcagcccctaagtcatgaac

SEQ ID NO: 5379242 - DNA, 25 bp, Homo sapien
gcccctaagtcatgaacaagaggct

SEQ ID NO: 5379243 - DNA, 25 bp, Homo sapien
tcagcccctaagtcatgaacaagag

SEQ ID NO: 5379244 - DNA, 25 bp, Homo sapien
gggctcgtattcagcccctaagtca

SEQ ID NO: 5379245 - DNA, 25 bp, Homo sapien
gaaatcctgctgatttgtgtgcact

SEQ ID NO: 5379246 - DNA, 25 bp, Homo sapien
cattgcaagtgtatagaaatcctgc

SEQ ID NO: 5379247 - DNA, 25 bp, Homo sapien
tgatgtgtcctgcagccttgacgaa

SEQ ID NO: 5379248 - DNA, 25 bp, Homo sapien
tattaagtgtgaggtctcttacggg

SEQ ID NO: 5379249 - DNA, 25 bp, Homo sapien
cactgtgttccttggttaaactagc

SEQ ID NO: 5379250 - DNA, 25 bp, Homo sapien
cactggcttcatatcatgcgttggg

SEQ ID NO: 5379251 - DNA, 25 bp, Homo sapien
gaagtgttccgttctactgtttgga

SEQ ID NO: 5379252 - DNA, 25 bp, Homo sapien
ttgatagaaataaccagtgaacctt

SEQ ID NO: 5379253 - DNA, 25 bp, Homo sapien
cagcaacaacaaccagtgtgctcac

SEQ ID NO: 5379254 - DNA, 25 bp, Homo sapien
tgtgctcacataccatgtgagaaca

SEQ ID NO: 5379255 - DNA, 25 bp, Homo sapien
caaccagtgtgctcacataccatgt

SEQ ID NO: 5379256 - DNA, 25 bp, Homo sapien
tcacataccatgtgagaacatccat

SEQ ID NO: 5379257 - DNA, 25 bp, Homo sapien
tccattatcttagcattctgaatcc

SEQ ID NO: 5379258 - DNA, 25 bp, Homo sapien
aatccaactttgcatgaagagatac

SEQ ID NO: 5379259 - DNA, 25 bp, Homo sapien
agagatactccaatgcttctgaaga

SEQ ID NO: 5379260 - DNA, 25 bp, Homo sapien
cattatcttagcattctgaatccaa

SEQ ID NO: 5379261 - DNA, 25 bp, Homo sapien
tcttagtaaaccttccaataacatc

SEQ ID NO: 5379262 - DNA, 25 bp, Homo sapien
ttctacaaacccactagcatgatgg

SEQ ID NO: 5379263 - DNA, 25 bp, Homo sapien
ctggatcccaaatggttgtcattag

SEQ ID NO: 5379264 - DNA, 25 bp, Homo sapien
gatcccaaatggttgtcattagtca

SEQ ID NO: 5379265 - DNA, 25 bp, Homo sapien
ggatcccaaatggttgtcattagtc

SEQ ID NO: 5379266 - DNA, 25 bp, Homo sapien
atcccaaatggttgtcattagtcat

SEQ ID NO: 5379267 - DNA, 25 bp, Homo sapien
tagagatggtcttcaagcactacac

SEQ ID NO: 5379268 - DNA, 25 bp, Homo sapien
ggcagatttgcacctatgattttaa

SEQ ID NO: 5379269 - DNA, 25 bp, Homo sapien
gcactacacattttgaagccttgag

SEQ ID NO: 5379270 - DNA, 25 bp, Homo sapien
taatcactgattgttggaggtggga

SEQ ID NO: 5379271 - DNA, 25 bp, Homo sapien
gactgcagagcacgatttccacctg

SEQ ID NO: 5379272 - DNA, 25 bp, Homo sapien
ttattgagatcaaatgactgcagag

SEQ ID NO: 5379273 - DNA, 25 bp, Homo sapien
tccccactgacaagaaagacctttg

SEQ ID NO: 5379274 - DNA, 25 bp, Homo sapien
gctggttctagtttctccccactga

SEQ ID NO: 5379275 - DNA, 25 bp, Homo sapien
ttgataggccttgaagatgacttag

SEQ ID NO: 5379276 - DNA, 25 bp, Homo sapien
atgacttagttgttgagttcagtac

SEQ ID NO: 5379277 - DNA, 25 bp, Homo sapien
gaagatgacttagttgttgagttca

SEQ ID NO: 5379278 - DNA, 25 bp, Homo sapien
gccttgaagatgacttagttgttga

SEQ ID NO: 5379279 - DNA, 25 bp, Homo sapien
atcatgctcaaggtttggtgtccac

SEQ ID NO: 5379280 - DNA, 25 bp, Homo sapien
ctgtgtctgttctaccgtgcactga

SEQ ID NO: 5379281 - DNA, 25 bp, Homo sapien
cttgtacagaaatcatgctcaaggt

SEQ ID NO: 5379282 - DNA, 25 bp, Homo sapien
tgttctaccgtgcactgaatgttac

SEQ ID NO: 5379283 - DNA, 25 bp, Homo sapien
ctgtaagctactttctggggccctc

SEQ ID NO: 5379284 - DNA, 25 bp, Homo sapien
ctccctcctgctgtaagctactttc

SEQ ID NO: 5379285 - DNA, 25 bp, Homo sapien
ccctcctgctgtaagctactttctg

SEQ ID NO: 5379286 - DNA, 25 bp, Homo sapien
ctcctgctgtaagctactttctggg

SEQ ID NO: 5379287 - DNA, 25 bp, Homo sapien
tgtcagcatgattctgcaactcgga

SEQ ID NO: 5379288 - DNA, 25 bp, Homo sapien
tgcaactcggacttcacaatatcaa

SEQ ID NO: 5379289 - DNA, 25 bp, Homo sapien
ttatgagatgtcagcatgattctgc

SEQ ID NO: 5379290 - DNA, 25 bp, Homo sapien
tcacaatatcaagtgttcgcatatt

SEQ ID NO: 5379291 - DNA, 25 bp, Homo sapien
tctcaactggctcagctagcaggga

SEQ ID NO: 5379292 - DNA, 25 bp, Homo sapien
tctaatgaggcatccggcagagtta

SEQ ID NO: 5379293 - DNA, 25 bp, Homo sapien
cacattgggtaggtctcaggaaggc

SEQ ID NO: 5379294 - DNA, 25 bp, Homo sapien
tggtaggagtcagcatgggcacatt

SEQ ID NO: 5379295 - DNA, 25 bp, Homo sapien
tataaagcatggcaataactaggaa

SEQ ID NO: 5379296 - DNA, 25 bp, Homo sapien
ctctgtataaggcccagtcagaatg

SEQ ID NO: 5379297 - DNA, 25 bp, Homo sapien
tgtataaggcccagtcagaatgcct

SEQ ID NO: 5379298 - DNA, 25 bp, Homo sapien
ataactaggaaatttggaatactgg

SEQ ID NO: 5379299 - DNA, 25 bp, Homo sapien
tagtgagacacggactgaaacagga

SEQ ID NO: 5379300 - DNA, 25 bp, Homo sapien
cgtaatttgaaaaggagctcttgcc

SEQ ID NO: 5379301 - DNA, 25 bp, Homo sapien
aatcaggaccctaatttggctcaag

SEQ ID NO: 5379302 - DNA, 25 bp, Homo sapien
gtgtgaactagaacgatccttggca

SEQ ID NO: 5379303 - DNA, 25 bp, Homo sapien
ggctgggctcgcttgcctgaagcaa

SEQ ID NO: 5379304 - DNA, 25 bp, Homo sapien
aaccctaaaagcacctggctgggct

SEQ ID NO: 5379305 - DNA, 25 bp, Homo sapien
gaagaggcactgagagggccagtga

SEQ ID NO: 5379306 - DNA, 25 bp, Homo sapien
gtgggaggatctcgctccatgaaga

SEQ ID NO: 5379307 - DNA, 25 bp, Homo sapien
tgatgatattcaatctgttacgttc

SEQ ID NO: 5379308 - DNA, 25 bp, Homo sapien
ttcaatctgttacgttctctccacc

SEQ ID NO: 5379309 - DNA, 25 bp, Homo sapien
gcttcgtgctcctattttgatgata

SEQ ID NO: 5379310 - DNA, 25 bp, Homo sapien
tcccagtccccactgtgcttcgtgc

SEQ ID NO: 5379311 - DNA, 25 bp, Homo sapien
gcagttatttgcatgagccgcatca

SEQ ID NO: 5379312 - DNA, 25 bp, Homo sapien
cctgggcattactgaagactcttgg

SEQ ID NO: 5379313 - DNA, 25 bp, Homo sapien
tggtcctttccctgacgaacgatgg

SEQ ID NO: 5379314 - DNA, 25 bp, Homo sapien
cacccaagtgaagggcatgtttgca

SEQ ID NO: 5379315 - DNA, 25 bp, Homo sapien
cgattggtcttcctcgtgctgagaa

SEQ ID NO: 5379316 - DNA, 25 bp, Homo sapien
caaagagcgattggtcttcctcgtg

SEQ ID NO: 5379317 - DNA, 25 bp, Homo sapien
ggtcttcctcgtgctgagaaaaaat

SEQ ID NO: 5379318 - DNA, 25 bp, Homo sapien
gtttcacaaagagcgattggtcttc

SEQ ID NO: 5379319 - DNA, 25 bp, Homo sapien
caccctcatccctggtgacaggcat

SEQ ID NO: 5379320 - DNA, 25 bp, Homo sapien
cagtcctggaatccatggaaaagct

SEQ ID NO: 5379321 - DNA, 25 bp, Homo sapien
gaatccatggaaaagctcaccctca

SEQ ID NO: 5379322 - DNA, 25 bp, Homo sapien
gcatttgcagtcctggaatccatgg

SEQ ID NO: 5379323 - DNA, 25 bp, Homo sapien
agtgctgtatctgtcacactgtacc

SEQ ID NO: 5379324 - DNA, 25 bp, Homo sapien
cactgtaccaatgcagcaaatgttg

SEQ ID NO: 5379325 - DNA, 25 bp, Homo sapien
cagtttgtcagtactcagtgctgta

SEQ ID NO: 5379326 - DNA, 25 bp, Homo sapien
cattaataattatatccccagtttg

SEQ ID NO: 5379327 - DNA, 25 bp, Homo sapien
cggacccggtggcatatgcctgtaa

SEQ ID NO: 5379328 - DNA, 25 bp, Homo sapien
aggagaatctcttaaacccaggagg

SEQ ID NO: 5379329 - DNA, 25 bp, Homo sapien
tgtgccattgcacttcaccctgggt

SEQ ID NO: 5379330 - DNA, 25 bp, Homo sapien
tcccagctacttggaaggctgaggc

SEQ ID NO: 5379331 - DNA, 25 bp, Homo sapien
ctgtgggaaaagctcactggaatcc

SEQ ID NO: 5379332 - DNA, 25 bp, Homo sapien
atgcagggcggcgaggctgaagtgt

SEQ ID NO: 5379333 - DNA, 25 bp, Homo sapien
gcagggcggcgaggctgaagtgtaa

SEQ ID NO: 5379334 - DNA, 25 bp, Homo sapien
agggcggcgaggctgaagtgtaacc

SEQ ID NO: 5379335 - DNA, 25 bp, Homo sapien
tcatgcagggcggcgaggctgaagt

SEQ ID NO: 5379336 - DNA, 25 bp, Homo sapien
tgggaaattgttcagtaggttcctg

SEQ ID NO: 5379337 - DNA, 25 bp, Homo sapien
ttaactgatgcctttggcgcttcca

SEQ ID NO: 5379338 - DNA, 25 bp, Homo sapien
aattgttcagtaggttcctgattac

SEQ ID NO: 5379339 - DNA, 25 bp, Homo sapien
actgatgcctttggcgcttccattt

SEQ ID NO: 5379340 - DNA, 25 bp, Homo sapien
gaaatccaggatcgtcagttggaat

SEQ ID NO: 5379341 - DNA, 25 bp, Homo sapien
caggaaatccaggatcgtcagttgg

SEQ ID NO: 5379342 - DNA, 25 bp, Homo sapien
gatcgtcagttggaattatatcaac

SEQ ID NO: 5379343 - DNA, 25 bp, Homo sapien
tccaggatcgtcagttggaattata

SEQ ID NO: 5379344 - DNA, 25 bp, Homo sapien
aatcccgtgctccatatagcatcct

SEQ ID NO: 5379345 - DNA, 25 bp, Homo sapien
tcaagtccttgtttcgcttcaccat

SEQ ID NO: 5379346 - DNA, 25 bp, Homo sapien
ggttctgccactcatatttcaagtc

SEQ ID NO: 5379347 - DNA, 25 bp, Homo sapien
tttcaagtccttgtttcgcttcacc

SEQ ID NO: 5379348 - DNA, 25 bp, Homo sapien
gccactcatatttcaagtccttgtt

SEQ ID NO: 5379349 - DNA, 25 bp, Homo sapien
tgggtggccgtgacagcactttcat

SEQ ID NO: 5379350 - DNA, 25 bp, Homo sapien
taagtgtggctcctgaacgtggtcc

SEQ ID NO: 5379351 - DNA, 25 bp, Homo sapien
tctttcaaaatgagctttttaagtg

SEQ ID NO: 5379352 - DNA, 25 bp, Homo sapien
atgtgctttctacagactctggacc

SEQ ID NO: 5379353 - DNA, 25 bp, Homo sapien
aactgcacaaagaagggcccatatc

SEQ ID NO: 5379354 - DNA, 25 bp, Homo sapien
gcaggaatcaagtcagtccttgaag

SEQ ID NO: 5379355 - DNA, 25 bp, Homo sapien
tttccaaggcaggaatcaagtcagt

SEQ ID NO: 5379356 - DNA, 25 bp, Homo sapien
caaggcaggaatcaagtcagtcctt

SEQ ID NO: 5379357 - DNA, 25 bp, Homo sapien
tccaaggcaggaatcaagtcagtcc

SEQ ID NO: 5379358 - DNA, 25 bp, Homo sapien
atcagctggaagacacaactttcag

SEQ ID NO: 5379359 - DNA, 25 bp, Homo sapien
cagtgtaaccctgggtttctggttg

SEQ ID NO: 5379360 - DNA, 25 bp, Homo sapien
aatgcagagattcccaagccatcag

SEQ ID NO: 5379361 - DNA, 25 bp, Homo sapien
tgtttgagtggcagccagtgtaacc

SEQ ID NO: 5379362 - DNA, 25 bp, Homo sapien
taagtggacagagttcccgaactcc

SEQ ID NO: 5379363 - DNA, 25 bp, Homo sapien
ttagtgttatttgcctcagtgacca

SEQ ID NO: 5379364 - DNA, 25 bp, Homo sapien
tagggaacttgtaggattgacctaa

SEQ ID NO: 5379365 - DNA, 25 bp, Homo sapien
ctgaaaattgggcttggcgtaaagt

SEQ ID NO: 5379366 - DNA, 25 bp, Homo sapien
tccagtaatcctttctgtgtggttg

SEQ ID NO: 5379367 - DNA, 25 bp, Homo sapien
tggtctgttttacgctctctcctga

SEQ ID NO: 5379368 - DNA, 25 bp, Homo sapien
cctgaagttccacaagggaaagtca

SEQ ID NO: 5379369 - DNA, 25 bp, Homo sapien
gtctgttttacgctctctcctgaag

SEQ ID NO: 5379370 - DNA, 25 bp, Homo sapien
gctctctcctgaagttccacaaggg

SEQ ID NO: 5379371 - DNA, 25 bp, Homo sapien
gctgggattctgctgcctggatcca

SEQ ID NO: 5379372 - DNA, 25 bp, Homo sapien
cattctgtgtaccatggatctttca

SEQ ID NO: 5379373 - DNA, 25 bp, Homo sapien
ctactgcatggagcctatgctggga

SEQ ID NO: 5379374 - DNA, 25 bp, Homo sapien
tgcttctgctactggacattctgtg

SEQ ID NO: 5379375 - DNA, 25 bp, Homo sapien
cccactctgcaacatgctaaagttt

SEQ ID NO: 5379376 - DNA, 25 bp, Homo sapien
ccctgaggcaacaggggcttgtctg

SEQ ID NO: 5379377 - DNA, 25 bp, Homo sapien
tgttggctgccaaggagtggtgcac

SEQ ID NO: 5379378 - DNA, 25 bp, Homo sapien
ctatggaagaaagtcccctgaggca

SEQ ID NO: 5379379 - DNA, 25 bp, Homo sapien
ggtgtgtgttggctgccaaggagtg

SEQ ID NO: 5379380 - DNA, 25 bp, Homo sapien
tagctcttggtgtttcgcaacgccc

SEQ ID NO: 5379381 - DNA, 25 bp, Homo sapien
ttggtgtttcgcaacgccccagagc

SEQ ID NO: 5379382 - DNA, 25 bp, Homo sapien
ggtgtttcgcaacgccccagagcca

SEQ ID NO: 5379383 - DNA, 25 bp, Homo sapien
ctcttggtgtttcgcaacgccccag

SEQ ID NO: 5379384 - DNA, 25 bp, Homo sapien
taatcggtggttagagcctactgag

SEQ ID NO: 5379385 - DNA, 25 bp, Homo sapien
caggccttccaatgggagaagtttc

SEQ ID NO: 5379386 - DNA, 25 bp, Homo sapien
tttctgcaccggtactgacacttgt

SEQ ID NO: 5379387 - DNA, 25 bp, Homo sapien
tctctggtgcagcacatgaatcagg

SEQ ID NO: 5379388 - DNA, 25 bp, Homo sapien
cacagaagttgcaggcaccattcag

SEQ ID NO: 5379389 - DNA, 25 bp, Homo sapien
tccttagggagcatttggtgtcagc

SEQ ID NO: 5379390 - DNA, 25 bp, Homo sapien
gatggcttcactggttgactgctgt

SEQ ID NO: 5379391 - DNA, 25 bp, Homo sapien
tatttgcaagctagaatgccccaaa

SEQ ID NO: 5379392 - DNA, 25 bp, Homo sapien
ttctacatggaggtgagattgggct

SEQ ID NO: 5379393 - DNA, 25 bp, Homo sapien
gtgagattgggctgtctcagattcc

SEQ ID NO: 5379394 - DNA, 25 bp, Homo sapien
gattgggctgtctcagattccttaa

SEQ ID NO: 5379395 - DNA, 25 bp, Homo sapien
gagattgggctgtctcagattcctt

SEQ ID NO: 5379396 - DNA, 25 bp, Homo sapien
gctttttcctgtatacagtggtgta

SEQ ID NO: 5379397 - DNA, 25 bp, Homo sapien
ttcagaaaagcctctaatttgcctt

SEQ ID NO: 5379398 - DNA, 25 bp, Homo sapien
agtttgatatcactgctaccaccac

SEQ ID NO: 5379399 - DNA, 25 bp, Homo sapien
aatttgcctttatcctcttctactt

SEQ ID NO: 5379400 - DNA, 25 bp, Homo sapien
tgcttgccaggtcaagggacttcgg

SEQ ID NO: 5379401 - DNA, 25 bp, Homo sapien
tcacaaaagccttaaagactgcttg

SEQ ID NO: 5379402 - DNA, 25 bp, Homo sapien
tatctcagaggttctgaaggccacc

SEQ ID NO: 5379403 - DNA, 25 bp, Homo sapien
ccaggtcaagggacttcggattatc

SEQ ID NO: 5379404 - DNA, 25 bp, Homo sapien
ctcttggaggatctgattccatagg

SEQ ID NO: 5379405 - DNA, 25 bp, Homo sapien
tctctcttggaggatctgattccat

SEQ ID NO: 5379406 - DNA, 25 bp, Homo sapien
ctctctcttggaggatctgattcca

SEQ ID NO: 5379407 - DNA, 25 bp, Homo sapien
tctcttggaggatctgattccatag

SEQ ID NO: 5379408 - DNA, 25 bp, Homo sapien
ccaaagctgcatcagtgatactttc

SEQ ID NO: 5379409 - DNA, 25 bp, Homo sapien
cagcaaataattctgctctccctca

SEQ ID NO: 5379410 - DNA, 25 bp, Homo sapien
agcaaataattctgctctccctcat

SEQ ID NO: 5379411 - DNA, 25 bp, Homo sapien
tcaatgtgatatagctgggaattca

SEQ ID NO: 5379412 - DNA, 25 bp, Homo sapien
tgggaattcaatgtcagtggtaact

SEQ ID NO: 5379413 - DNA, 25 bp, Homo sapien
ttctggttagcataaaacagaacag

SEQ ID NO: 5379414 - DNA, 25 bp, Homo sapien
gagtaatctatgtattccttgaccc

SEQ ID NO: 5379415 - DNA, 25 bp, Homo sapien
tacaaggattggcatagcttgcttc

SEQ ID NO: 5379416 - DNA, 25 bp, Homo sapien
agacaggaagttgtggccttgtaca

SEQ ID NO: 5379417 - DNA, 25 bp, Homo sapien
ccttgtacaaggattggcatagctt

SEQ ID NO: 5379418 - DNA, 25 bp, Homo sapien
ttgtggccttgtacaaggattggca

SEQ ID NO: 5379419 - DNA, 25 bp, Homo sapien
cagctcccgttcattagacattgtc

SEQ ID NO: 5379420 - DNA, 25 bp, Homo sapien
tcactgagggagattgtttagcttc

SEQ ID NO: 5379421 - DNA, 25 bp, Homo sapien
cttttgggtctagctgatctttccc

SEQ ID NO: 5379422 - DNA, 25 bp, Homo sapien
gatctttccctcgggtcactgaggg

SEQ ID NO: 5379423 - DNA, 25 bp, Homo sapien
aagtggagccgtagttgagacagac

SEQ ID NO: 5379424 - DNA, 25 bp, Homo sapien
cgtagttgagacagactcaatgttc

SEQ ID NO: 5379425 - DNA, 25 bp, Homo sapien
cctggatatccaggagctctttgag

SEQ ID NO: 5379426 - DNA, 25 bp, Homo sapien
tcaaaggaagacaaacgctgtattg

SEQ ID NO: 5379427 - DNA, 25 bp, Homo sapien
cataagtagtaggacccaggtggga

SEQ ID NO: 5379428 - DNA, 25 bp, Homo sapien
tccataagtagtaggacccaggtgg

SEQ ID NO: 5379429 - DNA, 25 bp, Homo sapien
ttccataagtagtaggacccaggtg

SEQ ID NO: 5379430 - DNA, 25 bp, Homo sapien
catttccataagtagtaggacccag

SEQ ID NO: 5379431 - DNA, 25 bp, Homo sapien
tgtgaagaaaccgtatttccttcag

SEQ ID NO: 5379432 - DNA, 25 bp, Homo sapien
tatttccttcaggttagaattggcc

SEQ ID NO: 5379433 - DNA, 25 bp, Homo sapien
tgcaccatccgcaaaattacagcca

SEQ ID NO: 5379434 - DNA, 25 bp, Homo sapien
ctgcaccatccgcaaaattacagcc

SEQ ID NO: 5379435 - DNA, 25 bp, Homo sapien
gcaccatccgcaaaattacagccat

SEQ ID NO: 5379436 - DNA, 25 bp, Homo sapien
ctaatgaggaatccttacaaggacg

SEQ ID NO: 5379437 - DNA, 25 bp, Homo sapien
aatccttacaaggacggtgtcaatc

SEQ ID NO: 5379438 - DNA, 25 bp, Homo sapien
tgaggaatccttacaaggacggtgt

SEQ ID NO: 5379439 - DNA, 25 bp, Homo sapien
ggaatccttacaaggacggtgtcaa

SEQ ID NO: 5379440 - DNA, 25 bp, Homo sapien
aaaatttcagatgcaaggcatctga

SEQ ID NO: 5379441 - DNA, 25 bp, Homo sapien
tctaacatcctgttgcttgctgaca

SEQ ID NO: 5379442 - DNA, 25 bp, Homo sapien
gctgacagcatacacgaaaaatttc

SEQ ID NO: 5379443 - DNA, 25 bp, Homo sapien
tgtgagctcaacaacttgaaattcc

SEQ ID NO: 5379444 - DNA, 25 bp, Homo sapien
tacagcaattacctctcgtctcatt

SEQ ID NO: 5379445 - DNA, 25 bp, Homo sapien
tattgccttctgcaatgccacttgg

SEQ ID NO: 5379446 - DNA, 25 bp, Homo sapien
gcctctgccgttgaggagcctaagg

SEQ ID NO: 5379447 - DNA, 25 bp, Homo sapien
ttgaggagcctaaggcaatagctac

SEQ ID NO: 5379448 - DNA, 25 bp, Homo sapien
tgagactggcggatggagtcaaaca

SEQ ID NO: 5379449 - DNA, 25 bp, Homo sapien
ttgagactggcggatggagtcaaac

SEQ ID NO: 5379450 - DNA, 25 bp, Homo sapien
tttgagtatcggtattgagactggc

SEQ ID NO: 5379451 - DNA, 25 bp, Homo sapien
aggagaattttgagtatcggtattg

SEQ ID NO: 5379452 - DNA, 25 bp, Homo sapien
ctccttcatattaataaaccataat

SEQ ID NO: 5379453 - DNA, 25 bp, Homo sapien
tccttcatattaataaaccataatt

SEQ ID NO: 5379454 - DNA, 25 bp, Homo sapien
tctccttcatattaataaaccataa

SEQ ID NO: 5379455 - DNA, 25 bp, Homo sapien
ttctccttcatattaataaaccata

SEQ ID NO: 5379456 - DNA, 25 bp, Homo sapien
ttctttgtgcttggaagactcctct

SEQ ID NO: 5379457 - DNA, 25 bp, Homo sapien
tttgcatgctattctttgtgcttgg

SEQ ID NO: 5379458 - DNA, 25 bp, Homo sapien
attctttgtgcttggaagactcctc

SEQ ID NO: 5379459 - DNA, 25 bp, Homo sapien
gcatgctattctttgtgcttggaag

SEQ ID NO: 5379460 - DNA, 25 bp, Homo sapien
gaaaggtgctgtaagaagattcttc

SEQ ID NO: 5379461 - DNA, 25 bp, Homo sapien
tgggaaaggtgctgtaagaagattc

SEQ ID NO: 5379462 - DNA, 25 bp, Homo sapien
gccatggagacccactagtcacatt

SEQ ID NO: 5379463 - DNA, 25 bp, Homo sapien
cattcgtataaaatgtgaatgtggg

SEQ ID NO: 5379464 - DNA, 25 bp, Homo sapien
tgtggtatatctttgatggtgatgg

SEQ ID NO: 5379465 - DNA, 25 bp, Homo sapien
gtgtggtatatctttgatggtgatg

SEQ ID NO: 5379466 - DNA, 25 bp, Homo sapien
ttcacgaagaaatggaacacaacag

SEQ ID NO: 5379467 - DNA, 25 bp, Homo sapien
gaagaaaaggactgaagctcacgta

SEQ ID NO: 5379468 - DNA, 25 bp, Homo sapien
ggtgggatcatacttccagaagaaa

SEQ ID NO: 5379469 - DNA, 25 bp, Homo sapien
gctcacgtatgtccaaatagcctgc

SEQ ID NO: 5379470 - DNA, 25 bp, Homo sapien
tgatggggctgcatcaagtctccca

SEQ ID NO: 5379471 - DNA, 25 bp, Homo sapien
cccatcagaaccatagatgtgctgg

SEQ ID NO: 5379472 - DNA, 25 bp, Homo sapien
tcccatttccactttggctaagagt

SEQ ID NO: 5379473 - DNA, 25 bp, Homo sapien
gagtttgtaagtctggctttcccac

SEQ ID NO: 5379474 - DNA, 25 bp, Homo sapien
gccataataaacatctccttgtgga

SEQ ID NO: 5379475 - DNA, 25 bp, Homo sapien
catgaactcagagatccaaagtaaa

SEQ ID NO: 5379476 - DNA, 25 bp, Homo sapien
ttcatcacactcaagcacccatgga

SEQ ID NO: 5379477 - DNA, 25 bp, Homo sapien
catggaaacaattgtccacaacatg

SEQ ID NO: 5379478 - DNA, 25 bp, Homo sapien
aagaagtgacagtgatatgtttgtg

SEQ ID NO: 5379479 - DNA, 25 bp, Homo sapien
agtgacagtgatatgtttgtgtctc

SEQ ID NO: 5379480 - DNA, 25 bp, Homo sapien
gacagtgatatgtttgtgtctcttt

SEQ ID NO: 5379481 - DNA, 25 bp, Homo sapien
gaagtgacagtgatatgtttgtgtc

SEQ ID NO: 5379482 - DNA, 25 bp, Homo sapien
ccaggctccaaatataagggcagtt

SEQ ID NO: 5379483 - DNA, 25 bp, Homo sapien
agtgcctctgctgtactgctgctcc

SEQ ID NO: 5379484 - DNA, 25 bp, Homo sapien
cattgtgagtgtcaagctgcaaaga

SEQ ID NO: 5379485 - DNA, 25 bp, Homo sapien
tgcatttagcaatcatagcatccgc

SEQ ID NO: 5379486 - DNA, 25 bp, Homo sapien
gtttgccctccggtacttctctcag

SEQ ID NO: 5379487 - DNA, 25 bp, Homo sapien
gctttttgtacatcatttgcacctg

SEQ ID NO: 5379488 - DNA, 25 bp, Homo sapien
cagcagcttgatggttgtagcctaa

SEQ ID NO: 5379489 - DNA, 25 bp, Homo sapien
catttgcacctgcacaaagtgtttg

SEQ ID NO: 5379490 - DNA, 25 bp, Homo sapien
taaaaagtgagagaggttaccatgg

SEQ ID NO: 5379491 - DNA, 25 bp, Homo sapien
aaataataatagtgttgatgccggt

SEQ ID NO: 5379492 - DNA, 25 bp, Homo sapien
ccatggagagttaggtacacaattt

SEQ ID NO: 5379493 - DNA, 25 bp, Homo sapien
taataatagtgttgatgccggtggg

SEQ ID NO: 5379494 - DNA, 25 bp, Homo sapien
ggttggaagaagcagctttcataca

SEQ ID NO: 5379495 - DNA, 25 bp, Homo sapien
ggaagaagcagctttcatacaggct

SEQ ID NO: 5379496 - DNA, 25 bp, Homo sapien
tgaggttggaagaagcagctttcat

SEQ ID NO: 5379497 - DNA, 25 bp, Homo sapien
ctgaggttggaagaagcagctttca

SEQ ID NO: 5379498 - DNA, 25 bp, Homo sapien
gaacactttatgtgactctggcagg

SEQ ID NO: 5379499 - DNA, 25 bp, Homo sapien
cacttcaggtggaaagactctacca

SEQ ID NO: 5379500 - DNA, 25 bp, Homo sapien
caggtagaccccacatttttgcagg

SEQ ID NO: 5379501 - DNA, 25 bp, Homo sapien
catgtgggcagttgtctcaggtaga

SEQ ID NO: 5379502 - DNA, 25 bp, Homo sapien
tgcttctaagtataacctgtggaca

SEQ ID NO: 5379503 - DNA, 25 bp, Homo sapien
ggcttgtagatctttctgtgtggcg

SEQ ID NO: 5379504 - DNA, 25 bp, Homo sapien
cagcttctgtggtagtacttggtag

SEQ ID NO: 5379505 - DNA, 25 bp, Homo sapien
gcttctcttgctacagcttggcttg

SEQ ID NO: 5379506 - DNA, 25 bp, Homo sapien
gcatataaagatgttaataaggttt

SEQ ID NO: 5379507 - DNA, 25 bp, Homo sapien
ttttcctccaacaatgcttaatttc

SEQ ID NO: 5379508 - DNA, 25 bp, Homo sapien
tcctccaacaatgcttaatttctgg

SEQ ID NO: 5379509 - DNA, 25 bp, Homo sapien
tgcaatgtcccctaacaccattttt

SEQ ID NO: 5379510 - DNA, 25 bp, Homo sapien
ttctctctgagtcagaactgcaatg

SEQ ID NO: 5379511 - DNA, 25 bp, Homo sapien
gcctgtctgggaaatatcaataaat

SEQ ID NO: 5379512 - DNA, 25 bp, Homo sapien
tgaacatccgatatcctcaatggtt

SEQ ID NO: 5379513 - DNA, 25 bp, Homo sapien
tctagcaagactatctgaacatccg

SEQ ID NO: 5379514 - DNA, 25 bp, Homo sapien
tatgtcataacacagagactaaagg

SEQ ID NO: 5379515 - DNA, 25 bp, Homo sapien
ttactttcatagcaggttggcatgc

SEQ ID NO: 5379516 - DNA, 25 bp, Homo sapien
gttggcatgctattggcttctgcta

SEQ ID NO: 5379517 - DNA, 25 bp, Homo sapien
cttctgctattcttcgcttaatttg

SEQ ID NO: 5379518 - DNA, 25 bp, Homo sapien
gctattcttcgcttaatttgtaaac

SEQ ID NO: 5379519 - DNA, 25 bp, Homo sapien
gtaagtttgacatgcattctcacca

SEQ ID NO: 5379520 - DNA, 25 bp, Homo sapien
tctcaccacttaaactcagaagtct

SEQ ID NO: 5379521 - DNA, 25 bp, Homo sapien
ctagtaagtttgacatgcattctca

SEQ ID NO: 5379522 - DNA, 25 bp, Homo sapien
tgcattctcaccacttaaactcaga

SEQ ID NO: 5379523 - DNA, 25 bp, Homo sapien
ttgtcttcttgcctaggatcctgtc

SEQ ID NO: 5379524 - DNA, 25 bp, Homo sapien
tcactttgtacccagagccacactt

SEQ ID NO: 5379525 - DNA, 25 bp, Homo sapien
ctttgtacccagagccacactttga

SEQ ID NO: 5379526 - DNA, 25 bp, Homo sapien
cttcttgcctaggatcctgtctctg

SEQ ID NO: 5379527 - DNA, 25 bp, Homo sapien
gattctggtgcgtactgaatcacca

SEQ ID NO: 5379528 - DNA, 25 bp, Homo sapien
gcgtactgaatcaccaactgctaac

SEQ ID NO: 5379529 - DNA, 25 bp, Homo sapien
ggtgcgtactgaatcaccaactgct

SEQ ID NO: 5379530 - DNA, 25 bp, Homo sapien
tttcctggattctggtgcgtactga

SEQ ID NO: 5379531 - DNA, 25 bp, Homo sapien
gacagtgctaagttcactgtggtcc

SEQ ID NO: 5379532 - DNA, 25 bp, Homo sapien
ttgatgaggctctcatataagcaaa

SEQ ID NO: 5379533 - DNA, 25 bp, Homo sapien
tcagagcctggccatactactcgaa

SEQ ID NO: 5379534 - DNA, 25 bp, Homo sapien
cactgtggtccgctggaagtctgtg

SEQ ID NO: 5379535 - DNA, 25 bp, Homo sapien
cacttataacttatgcatctgcaaa

SEQ ID NO: 5379536 - DNA, 25 bp, Homo sapien
tataacttatgcatctgcaaatgcc

SEQ ID NO: 5379537 - DNA, 25 bp, Homo sapien
aacccacttataacttatgcatctg

SEQ ID NO: 5379538 - DNA, 25 bp, Homo sapien
cccacttataacttatgcatctgca

SEQ ID NO: 5379539 - DNA, 25 bp, Homo sapien
ttctaaggtcccatttttattgatc

SEQ ID NO: 5379540 - DNA, 25 bp, Homo sapien
ctgaacacatgatcctgtgtttgaa

SEQ ID NO: 5379541 - DNA, 25 bp, Homo sapien
aggaagtagtacccagtccatttgt

SEQ ID NO: 5379542 - DNA, 25 bp, Homo sapien
cctgatagcttttgtgttatatcca

SEQ ID NO: 5379543 - DNA, 25 bp, Homo sapien
gatgtgacttccctaatcgaacctc

SEQ ID NO: 5379544 - DNA, 25 bp, Homo sapien
gggatactagcctgctgccacagga

SEQ ID NO: 5379545 - DNA, 25 bp, Homo sapien
tgccacaggactgcatcaggatgtg

SEQ ID NO: 5379546 - DNA, 25 bp, Homo sapien
ccacaggactgcatcaggatgtgac

SEQ ID NO: 5379547 - DNA, 25 bp, Homo sapien
agtcaagcctataaatcctctctcc

SEQ ID NO: 5379548 - DNA, 25 bp, Homo sapien
caagtcaagcctataaatcctctct

SEQ ID NO: 5379549 - DNA, 25 bp, Homo sapien
aagtcaagcctataaatcctctctc

SEQ ID NO: 5379550 - DNA, 25 bp, Homo sapien
ccaagtcaagcctataaatcctctc

SEQ ID NO: 5379551 - DNA, 25 bp, Homo sapien
gagcagtgagttactgtatctctgg

SEQ ID NO: 5379552 - DNA, 25 bp, Homo sapien
tatgaagtccatttgcaaacatgtg

SEQ ID NO: 5379553 - DNA, 25 bp, Homo sapien
catgtgcatcaaagagacaattacc

SEQ ID NO: 5379554 - DNA, 25 bp, Homo sapien
tcagctggttaagggttttggagca

SEQ ID NO: 5379555 - DNA, 25 bp, Homo sapien
ctttgagatccctttgagggcacat

SEQ ID NO: 5379556 - DNA, 25 bp, Homo sapien
acatctttgagatccctttgagggc

SEQ ID NO: 5379557 - DNA, 25 bp, Homo sapien
cctctctttcaagcctggaatctgg

SEQ ID NO: 5379558 - DNA, 25 bp, Homo sapien
atctatccttatatgttcttgtttt

SEQ ID NO: 5379559 - DNA, 25 bp, Homo sapien
ctgtggactattagagattcctgga

SEQ ID NO: 5379560 - DNA, 25 bp, Homo sapien
tcagtcctcaaccgctgtctgtgga

SEQ ID NO: 5379561 - DNA, 25 bp, Homo sapien
gattcctggaggaggacccattgtt

SEQ ID NO: 5379562 - DNA, 25 bp, Homo sapien
ggacccattgttctacaccagaaac

SEQ ID NO: 5379563 - DNA, 25 bp, Homo sapien
agtgataagccatatcacacaggaa

SEQ ID NO: 5379564 - DNA, 25 bp, Homo sapien
ccctgatgatggctaagacaattca

SEQ ID NO: 5379565 - DNA, 25 bp, Homo sapien
agactggtctgtgccttcctgagca

SEQ ID NO: 5379566 - DNA, 25 bp, Homo sapien
tcctcatgcctcagagactggtctg

SEQ ID NO: 5379567 - DNA, 25 bp, Homo sapien
ggggacagtggaatttcaactccac

SEQ ID NO: 5379568 - DNA, 25 bp, Homo sapien
gggacagtggaatttcaactccaca

SEQ ID NO: 5379569 - DNA, 25 bp, Homo sapien
tgggtcgtggccacctacagatgct

SEQ ID NO: 5379570 - DNA, 25 bp, Homo sapien
gactcggagaagatatgcctggact

SEQ ID NO: 5379571 - DNA, 25 bp, Homo sapien
atatgcctggactgggtcgtggcca

SEQ ID NO: 5379572 - DNA, 25 bp, Homo sapien
ttagactcggagaagatatgcctgg

SEQ ID NO: 5379573 - DNA, 25 bp, Homo sapien
ctgctggacaggtgacatgaagagc

SEQ ID NO: 5379574 - DNA, 25 bp, Homo sapien
gagcgatgggagatccttgtttaga

SEQ ID NO: 5379575 - DNA, 25 bp, Homo sapien
gacaggtgacatgaagagcctttgt

SEQ ID NO: 5379576 - DNA, 25 bp, Homo sapien
agcctttgtcctggcaatgctgagc

SEQ ID NO: 5379577 - DNA, 25 bp, Homo sapien
ttgcaaatagtgctaatctgctccc

SEQ ID NO: 5379578 - DNA, 25 bp, Homo sapien
taatgcttccttgataccaaggcca

SEQ ID NO: 5379579 - DNA, 25 bp, Homo sapien
tatctcttgcaacaggtatatgtgg

SEQ ID NO: 5379580 - DNA, 25 bp, Homo sapien
ggctttccctaattggtcacttgct

SEQ ID NO: 5379581 - DNA, 25 bp, Homo sapien
tcctgtttggccgagcgcgcagctt

SEQ ID NO: 5379582 - DNA, 25 bp, Homo sapien
gtcatcctgtttggccgagcgcgca

SEQ ID NO: 5379583 - DNA, 25 bp, Homo sapien
gatggtcatcctgtttggccgagcg

SEQ ID NO: 5379584 - DNA, 25 bp, Homo sapien
ctgtttggccgagcgcgcagctttg

SEQ ID NO: 5379585 - DNA, 25 bp, Homo sapien
gaagaggtgacatccatagcatgcc

SEQ ID NO: 5379586 - DNA, 25 bp, Homo sapien
gaaagcttagcatcaattccctgac

SEQ ID NO: 5379587 - DNA, 25 bp, Homo sapien
ctggtgaaagcttagcatcaattcc

SEQ ID NO: 5379588 - DNA, 25 bp, Homo sapien
tactggaaagtacatgtaaggaggc

SEQ ID NO: 5379589 - DNA, 25 bp, Homo sapien
tggcaccatgcacgatgtctgacaa

SEQ ID NO: 5379590 - DNA, 25 bp, Homo sapien
tcagttggcaccatgcacgatgtct

SEQ ID NO: 5379591 - DNA, 25 bp, Homo sapien
agttggcaccatgcacgatgtctga

SEQ ID NO: 5379592 - DNA, 25 bp, Homo sapien
ttggcaccatgcacgatgtctgaca

SEQ ID NO: 5379593 - DNA, 25 bp, Homo sapien
gcaagggaaagagtcttgagagact

SEQ ID NO: 5379594 - DNA, 25 bp, Homo sapien
gggaaagagtcttgagagactcctt

SEQ ID NO: 5379595 - DNA, 25 bp, Homo sapien
tggcaagggaaagagtcttgagaga

SEQ ID NO: 5379596 - DNA, 25 bp, Homo sapien
aagggaaagagtcttgagagactcc

SEQ ID NO: 5379597 - DNA, 25 bp, Homo sapien
aagtgaagtgctaaagtcctatacc

SEQ ID NO: 5379598 - DNA, 25 bp, Homo sapien
ggtctatcctagagtatatcccatg

SEQ ID NO: 5379599 - DNA, 25 bp, Homo sapien
taagtgtagctagctcctactgttc

SEQ ID NO: 5379600 - DNA, 25 bp, Homo sapien
tagtattgttacattctcttactga

SEQ ID NO: 5379601 - DNA, 25 bp, Homo sapien
cgaatttgacagtcttactgttcct

SEQ ID NO: 5379602 - DNA, 25 bp, Homo sapien
ctttcaaatccgaatttgacagtct

SEQ ID NO: 5379603 - DNA, 25 bp, Homo sapien
aaatccgaatttgacagtcttactg

SEQ ID NO: 5379604 - DNA, 25 bp, Homo sapien
acagtcttactgttcctttggccat

SEQ ID NO: 5379605 - DNA, 25 bp, Homo sapien
cactgggtaggttcttctattcaaa

SEQ ID NO: 5379606 - DNA, 25 bp, Homo sapien
gttggtgtcactgggtaggttcttc

SEQ ID NO: 5379607 - DNA, 25 bp, Homo sapien
tctctggaagctgggttggtgtcac

SEQ ID NO: 5379608 - DNA, 25 bp, Homo sapien
ttctattcaaatccctgaggcagag

SEQ ID NO: 5379609 - DNA, 25 bp, Homo sapien
tccttttgatagcatctctaaccaa

SEQ ID NO: 5379610 - DNA, 25 bp, Homo sapien
tctaaccaataactttagctccttg

SEQ ID NO: 5379611 - DNA, 25 bp, Homo sapien
gaccaggatccacggctgtttgcca

SEQ ID NO: 5379612 - DNA, 25 bp, Homo sapien
ggctgtttgccacctcgtggacatt

SEQ ID NO: 5379613 - DNA, 25 bp, Homo sapien
tcatgcctttccctctggccaccat

SEQ ID NO: 5379614 - DNA, 25 bp, Homo sapien
ttcttcatgcctttccctctggcca

SEQ ID NO: 5379615 - DNA, 25 bp, Homo sapien
tcttcatgcctttccctctggccac

SEQ ID NO: 5379616 - DNA, 25 bp, Homo sapien
ctttcttcatgcctttccctctggc

SEQ ID NO: 5379617 - DNA, 25 bp, Homo sapien
ctctctctttcttttactttctctt

SEQ ID NO: 5379618 - DNA, 25 bp, Homo sapien
ctttcttctttctctttctttctct

SEQ ID NO: 5379619 - DNA, 25 bp, Homo sapien
ttctctctctttcttttactttctc

SEQ ID NO: 5379620 - DNA, 25 bp, Homo sapien
tctttcttctttctctttctttctc

SEQ ID NO: 5379621 - DNA, 25 bp, Homo sapien
ctttaagacgtcaatgctcagccga

SEQ ID NO: 5379622 - DNA, 25 bp, Homo sapien
agaaattggtcatgggtggaactgc

SEQ ID NO: 5379623 - DNA, 25 bp, Homo sapien
taagtcactccctgaactagccaaa

SEQ ID NO: 5379624 - DNA, 25 bp, Homo sapien
agtcttgctacttgggttgctccag

SEQ ID NO: 5379625 - DNA, 25 bp, Homo sapien
aatatagacaacatggacacattca

SEQ ID NO: 5379626 - DNA, 25 bp, Homo sapien
tccttctgacccatgtaaaatatag

SEQ ID NO: 5379627 - DNA, 25 bp, Homo sapien
cattttgtcttctgcactcaatcct

SEQ ID NO: 5379628 - DNA, 25 bp, Homo sapien
aaatgaccccacttccgattaacat

SEQ ID NO: 5379629 - DNA, 25 bp, Homo sapien
agattcacaaatttgggcctttgcc

SEQ ID NO: 5379630 - DNA, 25 bp, Homo sapien
gttctagcttagtcatcttggtgcc

SEQ ID NO: 5379631 - DNA, 25 bp, Homo sapien
ccatccacatgtgggaacatcataa

SEQ ID NO: 5379632 - DNA, 25 bp, Homo sapien
tattcgtcagctctggattcaccaa

SEQ ID NO: 5379633 - DNA, 25 bp, Homo sapien
aatcctcgggattctgtaattcagt

SEQ ID NO: 5379634 - DNA, 25 bp, Homo sapien
cagaatcctcgggattctgtaattc

SEQ ID NO: 5379635 - DNA, 25 bp, Homo sapien
tacaacaatacagaatcctcgggat

SEQ ID NO: 5379636 - DNA, 25 bp, Homo sapien
caacaatacagaatcctcgggattc

SEQ ID NO: 5379637 - DNA, 25 bp, Homo sapien
aggagaaagtaggtgcaatgccttt

SEQ ID NO: 5379638 - DNA, 25 bp, Homo sapien
agaaagtaggtgcaatgcctttgtc

SEQ ID NO: 5379639 - DNA, 25 bp, Homo sapien
ggagaaagtaggtgcaatgcctttg

SEQ ID NO: 5379640 - DNA, 25 bp, Homo sapien
caaggagaaagtaggtgcaatgcct

SEQ ID NO: 5379641 - DNA, 25 bp, Homo sapien
tagtctggctcttagctaaatcacc

SEQ ID NO: 5379642 - DNA, 25 bp, Homo sapien
cacttggtggtcacagtaattctgg

SEQ ID NO: 5379643 - DNA, 25 bp, Homo sapien
taaatcacctatccacttggtggtc

SEQ ID NO: 5379644 - DNA, 25 bp, Homo sapien
ggctcttagctaaatcacctatcca

SEQ ID NO: 5379645 - DNA, 25 bp, Homo sapien
tctctgcagatcacatagattctgt

SEQ ID NO: 5379646 - DNA, 25 bp, Homo sapien
tagattctgtggtaacttctgaact

SEQ ID NO: 5379647 - DNA, 25 bp, Homo sapien
caagcgattctctgcagatcacata

SEQ ID NO: 5379648 - DNA, 25 bp, Homo sapien
cttcacaattgtggtgcaaaagcag

SEQ ID NO: 5379649 - DNA, 25 bp, Homo sapien
ttcccatttgggaacgagcgcaggg

SEQ ID NO: 5379650 - DNA, 25 bp, Homo sapien
tcctattagcatccttcgacagcgg

SEQ ID NO: 5379651 - DNA, 25 bp, Homo sapien
ccttgaaaccagaaatcccgatcct

SEQ ID NO: 5379652 - DNA, 25 bp, Homo sapien
gagcgcgcacaacgttaaaccttga

SEQ ID NO: 5379653 - DNA, 25 bp, Homo sapien
cggctgaccagcgttttgactttgc

SEQ ID NO: 5379654 - DNA, 25 bp, Homo sapien
gtggcatttaggattaacagcgaca

SEQ ID NO: 5379655 - DNA, 25 bp, Homo sapien
cagcgacaaactgtgagtacgagga

SEQ ID NO: 5379656 - DNA, 25 bp, Homo sapien
tggattctttaccacggctgaccag

SEQ ID NO: 5379657 - DNA, 25 bp, Homo sapien
cataatctgaccgaaacctgggctt

SEQ ID NO: 5379658 - DNA, 25 bp, Homo sapien
ataatctgaccgaaacctgggcttt

SEQ ID NO: 5379659 - DNA, 25 bp, Homo sapien
tcataatctgaccgaaacctgggct

SEQ ID NO: 5379660 - DNA, 25 bp, Homo sapien
catgagagtagcagttagcaccaca

SEQ ID NO: 5379661 - DNA, 25 bp, Homo sapien
aaaacattcactttgacactgtgta

SEQ ID NO: 5379662 - DNA, 25 bp, Homo sapien
tctgtagctctacccatggcaaagg

SEQ ID NO: 5379663 - DNA, 25 bp, Homo sapien
gaaacttgacatgggttctttatgg

SEQ ID NO: 5379664 - DNA, 25 bp, Homo sapien
ctggcttcggaggatcccgttggta

SEQ ID NO: 5379665 - DNA, 25 bp, Homo sapien
tgtacatacctgctttcattgtcag

SEQ ID NO: 5379666 - DNA, 25 bp, Homo sapien
gtgatgggaccctgtccgactggct

SEQ ID NO: 5379667 - DNA, 25 bp, Homo sapien
aaggaccagtgcttgtacatacctg

SEQ ID NO: 5379668 - DNA, 25 bp, Homo sapien
ctttatctgcccagatcttccccat

SEQ ID NO: 5379669 - DNA, 25 bp, Homo sapien
tgtttaagaggtgttgtgaatcccc

SEQ ID NO: 5379670 - DNA, 25 bp, Homo sapien
ttaacctaaatgtgcctgagtggtg

SEQ ID NO: 5379671 - DNA, 25 bp, Homo sapien
gaaattgtgcactcatcactgtgtg

SEQ ID NO: 5379672 - DNA, 25 bp, Homo sapien
cacctgacggagtgagtgtgagctc

SEQ ID NO: 5379673 - DNA, 25 bp, Homo sapien
gttaacgtccctatgatctccttca

SEQ ID NO: 5379674 - DNA, 25 bp, Homo sapien
tttgctttatcactgttaacgtccc

SEQ ID NO: 5379675 - DNA, 25 bp, Homo sapien
tttggtaccacaacaagactctgag

SEQ ID NO: 5379676 - DNA, 25 bp, Homo sapien
tcactttgagaaacgctgatttcag

SEQ ID NO: 5379677 - DNA, 25 bp, Homo sapien
agcctcagggacttgtctactgaga

SEQ ID NO: 5379678 - DNA, 25 bp, Homo sapien
tggttgaaagttgcccgaggcaaga

SEQ ID NO: 5379679 - DNA, 25 bp, Homo sapien
acttccagcagcctggttgaaagtt

SEQ ID NO: 5379680 - DNA, 25 bp, Homo sapien
gtcaatgtcaccactccacttccag

SEQ ID NO: 5379681 - DNA, 25 bp, Homo sapien
tgggggaccgataaaattattcaga

SEQ ID NO: 5379682 - DNA, 25 bp, Homo sapien
aattattcagatgctcatgggcagc

SEQ ID NO: 5379683 - DNA, 25 bp, Homo sapien
taaaattattcagatgctcatgggc

SEQ ID NO: 5379684 - DNA, 25 bp, Homo sapien
cagattgggggaccgataaaattat

SEQ ID NO: 5379685 - DNA, 25 bp, Homo sapien
gcattacggaaaagtcccagcagaa

SEQ ID NO: 5379686 - DNA, 25 bp, Homo sapien
cctttatggacctccttaggtggag

SEQ ID NO: 5379687 - DNA, 25 bp, Homo sapien
tagtcaacagtttgaactacaagta

SEQ ID NO: 5379688 - DNA, 25 bp, Homo sapien
tatttgtgggtatacccgtatgggc

SEQ ID NO: 5379689 - DNA, 25 bp, Homo sapien
gcaagaaatctgacattgggcaggc

SEQ ID NO: 5379690 - DNA, 25 bp, Homo sapien
ctgccagtgggtatacaaagagcaa

SEQ ID NO: 5379691 - DNA, 25 bp, Homo sapien
gggaatacttctaagcgtctttgca

SEQ ID NO: 5379692 - DNA, 25 bp, Homo sapien
ttagtttggaccacatgggaatact

SEQ ID NO: 5379693 - DNA, 25 bp, Homo sapien
tctacacgctgctggatattccagg

SEQ ID NO: 5379694 - DNA, 25 bp, Homo sapien
ttcttctacacgctgctggatattc

SEQ ID NO: 5379695 - DNA, 25 bp, Homo sapien
ttctacacgctgctggatattccag

SEQ ID NO: 5379696 - DNA, 25 bp, Homo sapien
tacacgctgctggatattccaggga

SEQ ID NO: 5379697 - DNA, 25 bp, Homo sapien
tagacatattacataatcacaaatg

SEQ ID NO: 5379698 - DNA, 25 bp, Homo sapien
cactggcttgcattagacatattac

SEQ ID NO: 5379699 - DNA, 25 bp, Homo sapien
taatataagacaatgggattggagc

SEQ ID NO: 5379700 - DNA, 25 bp, Homo sapien
gaacacacggttttcatggaagaag

SEQ ID NO: 5379701 - DNA, 25 bp, Homo sapien
agtgagcagggagtgtacatcgcac

SEQ ID NO: 5379702 - DNA, 25 bp, Homo sapien
tgctaaaggcacaacagcaactggt

SEQ ID NO: 5379703 - DNA, 25 bp, Homo sapien
aaaggcacaacagcaactggtgtgg

SEQ ID NO: 5379704 - DNA, 25 bp, Homo sapien
ctaaattgctaaaggcacaacagca

SEQ ID NO: 5379705 - DNA, 25 bp, Homo sapien
ctggtgtgggggctaaagatttcct

SEQ ID NO: 5379706 - DNA, 25 bp, Homo sapien
atgactgctttgccaggggtcagtg

SEQ ID NO: 5379707 - DNA, 25 bp, Homo sapien
taagagatgactgctttgccagggg

SEQ ID NO: 5379708 - DNA, 25 bp, Homo sapien
ctgataagagatgactgctttgcca

SEQ ID NO: 5379709 - DNA, 25 bp, Homo sapien
tgactgctttgccaggggtcagtgt

SEQ ID NO: 5379710 - DNA, 25 bp, Homo sapien
tggaaccaagccccactgtaaggac

SEQ ID NO: 5379711 - DNA, 25 bp, Homo sapien
cttggaaccaagccccactgtaagg

SEQ ID NO: 5379712 - DNA, 25 bp, Homo sapien
ttggaaccaagccccactgtaagga

SEQ ID NO: 5379713 - DNA, 25 bp, Homo sapien
ttgcaggaatgagctggccctttgt

SEQ ID NO: 5379714 - DNA, 25 bp, Homo sapien
ccaccttgcaggaatgagctggccc

SEQ ID NO: 5379715 - DNA, 25 bp, Homo sapien
caggaatgagctggccctttgtcca

SEQ ID NO: 5379716 - DNA, 25 bp, Homo sapien
gcaccaccttgcaggaatgagctgg

SEQ ID NO: 5379717 - DNA, 25 bp, Homo sapien
cactgactgtagattccatattcaa

SEQ ID NO: 5379718 - DNA, 25 bp, Homo sapien
cttttgtactgagcaccgggattca

SEQ ID NO: 5379719 - DNA, 25 bp, Homo sapien
ctatctggactcatataatcgatga

SEQ ID NO: 5379720 - DNA, 25 bp, Homo sapien
tctgttgttatgtatggactgctcc

SEQ ID NO: 5379721 - DNA, 25 bp, Homo sapien
atgcatatattttggctgtttggcc

SEQ ID NO: 5379722 - DNA, 25 bp, Homo sapien
gaagcactgcacatacattgagctg

SEQ ID NO: 5379723 - DNA, 25 bp, Homo sapien
tgaagcactgcacatacattgagct

SEQ ID NO: 5379724 - DNA, 25 bp, Homo sapien
atgaagcactgcacatacattgagc

SEQ ID NO: 5379725 - DNA, 25 bp, Homo sapien
catgaagcactgcacatacattgag

SEQ ID NO: 5379726 - DNA, 25 bp, Homo sapien
tgcgaaccctgaccaaaaacacaag

SEQ ID NO: 5379727 - DNA, 25 bp, Homo sapien
gacatcagcacacccaaggcagtgg

SEQ ID NO: 5379728 - DNA, 25 bp, Homo sapien
tcctgcttagcatgcttgtgttcct

SEQ ID NO: 5379729 - DNA, 25 bp, Homo sapien
caatttattaggtacagactgaccc

SEQ ID NO: 5379730 - DNA, 25 bp, Homo sapien
tatttccattccgctccatagctcc

SEQ ID NO: 5379731 - DNA, 25 bp, Homo sapien
gatatttccattccgctccatagct

SEQ ID NO: 5379732 - DNA, 25 bp, Homo sapien
agatatttccattccgctccatagc

SEQ ID NO: 5379733 - DNA, 25 bp, Homo sapien
ccattccgctccatagctccttctg

SEQ ID NO: 5379734 - DNA, 25 bp, Homo sapien
ctagttttttacatgtacttggatt

SEQ ID NO: 5379735 - DNA, 25 bp, Homo sapien
ccccatcttcgcagccaccatttcc

SEQ ID NO: 5379736 - DNA, 25 bp, Homo sapien
gtacttggattccccatcttcgcag

SEQ ID NO: 5379737 - DNA, 25 bp, Homo sapien
atgtacttggattccccatcttcgc

SEQ ID NO: 5379738 - DNA, 25 bp, Homo sapien
caagatgtgaacatgtggagaagtc

SEQ ID NO: 5379739 - DNA, 25 bp, Homo sapien
catagatatatcaatgctgttgcga

SEQ ID NO: 5379740 - DNA, 25 bp, Homo sapien
tgtacttgccattgaagagatacca

SEQ ID NO: 5379741 - DNA, 25 bp, Homo sapien
gaacatgtggagaagtcggtggtcg

SEQ ID NO: 5379742 - DNA, 25 bp, Homo sapien
tccccttcctgtgctgattcttcat

SEQ ID NO: 5379743 - DNA, 25 bp, Homo sapien
cctgtgctgattcttcatgcctgaa

SEQ ID NO: 5379744 - DNA, 25 bp, Homo sapien
cttcctgtgctgattcttcatgcct

SEQ ID NO: 5379745 - DNA, 25 bp, Homo sapien
ccccttcctgtgctgattcttcatg

SEQ ID NO: 5379746 - DNA, 25 bp, Homo sapien
gtccttgtggctgaaaatactgagt

SEQ ID NO: 5379747 - DNA, 25 bp, Homo sapien
caaagtttgctatgttctttgcttc

SEQ ID NO: 5379748 - DNA, 25 bp, Homo sapien
ctagtttggtagtccttgtggctga

SEQ ID NO: 5379749 - DNA, 25 bp, Homo sapien
ttggtagtccttgtggctgaaaata

SEQ ID NO: 5379750 - DNA, 25 bp, Homo sapien
ctgagccctgcacaaggttcctctc

SEQ ID NO: 5379751 - DNA, 25 bp, Homo sapien
tgagccctgcacaaggttcctctct

SEQ ID NO: 5379752 - DNA, 25 bp, Homo sapien
actgagccctgcacaaggttcctct

SEQ ID NO: 5379753 - DNA, 25 bp, Homo sapien
cacagttcttcaaatgcaatagaag

SEQ ID NO: 5379754 - DNA, 25 bp, Homo sapien
ccacagttcttcaaatgcaatagaa

SEQ ID NO: 5379755 - DNA, 25 bp, Homo sapien
acaggaataagggtgttataagaga

SEQ ID NO: 5379756 - DNA, 25 bp, Homo sapien
aacaggaataagggtgttataagag

SEQ ID NO: 5379757 - DNA, 25 bp, Homo sapien
caggaataagggtgttataagagat

SEQ ID NO: 5379758 - DNA, 25 bp, Homo sapien
ggagcaggatgctttgtgtcaaact

SEQ ID NO: 5379759 - DNA, 25 bp, Homo sapien
gccctgggatcctagactttctcag

SEQ ID NO: 5379760 - DNA, 25 bp, Homo sapien
tccgtccatgggatgcacaagggca

SEQ ID NO: 5379761 - DNA, 25 bp, Homo sapien
tgtcaaacttgcagatccacatgct

SEQ ID NO: 5379762 - DNA, 25 bp, Homo sapien
gattcactgtcctgtgggggtttct

SEQ ID NO: 5379763 - DNA, 25 bp, Homo sapien
cactgtggctgtctagggtgattca

SEQ ID NO: 5379764 - DNA, 25 bp, Homo sapien
cctggcacttctttgcccgatcaag

SEQ ID NO: 5379765 - DNA, 25 bp, Homo sapien
ttgcccgatcaagtactgcccactg

SEQ ID NO: 5379766 - DNA, 25 bp, Homo sapien
tcaatctgtaacctgatttcgaagc

SEQ ID NO: 5379767 - DNA, 25 bp, Homo sapien
caggcacttatgtcctgccacgtat

SEQ ID NO: 5379768 - DNA, 25 bp, Homo sapien
ctgatttcgaagctgcaggcactta

SEQ ID NO: 5379769 - DNA, 25 bp, Homo sapien
tgtcctgccacgtatttcttactcc

SEQ ID NO: 5379770 - DNA, 25 bp, Homo sapien
tctaagacccatatgtcctctggag

SEQ ID NO: 5379771 - DNA, 25 bp, Homo sapien
catctaatacccaaatactgactga

SEQ ID NO: 5379772 - DNA, 25 bp, Homo sapien
tctggatgcttctccggttgctcat

SEQ ID NO: 5379773 - DNA, 25 bp, Homo sapien
gaggcacaaattgtccacactctgg

SEQ ID NO: 5379774 - DNA, 25 bp, Homo sapien
caggacattttgtgatgcaaaggga

SEQ ID NO: 5379775 - DNA, 25 bp, Homo sapien
cttgcaggacattttgtgatgcaaa

SEQ ID NO: 5379776 - DNA, 25 bp, Homo sapien
gacattttgtgatgcaaagggaaac

SEQ ID NO: 5379777 - DNA, 25 bp, Homo sapien
cattttgtgatgcaaagggaaaccc

SEQ ID NO: 5379778 - DNA, 25 bp, Homo sapien
gtgttggggcatgtttgccaagctc

SEQ ID NO: 5379779 - DNA, 25 bp, Homo sapien
caagctctctttgtgtgctatcaca

SEQ ID NO: 5379780 - DNA, 25 bp, Homo sapien
cctcaaccacagtgttggggcatgt

SEQ ID NO: 5379781 - DNA, 25 bp, Homo sapien
cacaagggttaggttgattctggag

SEQ ID NO: 5379782 - DNA, 25 bp, Homo sapien
tttatgcaggctcgtgtcttcaccc

SEQ ID NO: 5379783 - DNA, 25 bp, Homo sapien
caaatgtagcagatattactgggca

SEQ ID NO: 5379784 - DNA, 25 bp, Homo sapien
gagcactgagggagataacatgttc

SEQ ID NO: 5379785 - DNA, 25 bp, Homo sapien
tactgcttcctattctcattacggg

SEQ ID NO: 5379786 - DNA, 25 bp, Homo sapien
tgcctgcaatcgctgggagagaaca

SEQ ID NO: 5379787 - DNA, 25 bp, Homo sapien
tgcttccagtgagcgacaggagttt

SEQ ID NO: 5379788 - DNA, 25 bp, Homo sapien
gagttttgggacactttgtgcctgc

SEQ ID NO: 5379789 - DNA, 25 bp, Homo sapien
gcttatctgctagtaatgcctgcga

SEQ ID NO: 5379790 - DNA, 25 bp, Homo sapien
tgcccctgttctcccagcagaggaa

SEQ ID NO: 5379791 - DNA, 25 bp, Homo sapien
ccctgttctcccagcagaggaaaca

SEQ ID NO: 5379792 - DNA, 25 bp, Homo sapien
ttcccatcaagtgcccctgttctcc

SEQ ID NO: 5379793 - DNA, 25 bp, Homo sapien
cttcccatcaagtgcccctgttctc

SEQ ID NO: 5379794 - DNA, 25 bp, Homo sapien
agtctgactcccactcgctcaaagg

SEQ ID NO: 5379795 - DNA, 25 bp, Homo sapien
gcagccacagtctgactcccactcg

SEQ ID NO: 5379796 - DNA, 25 bp, Homo sapien
gactcccactcgctcaaaggtcaat

SEQ ID NO: 5379797 - DNA, 25 bp, Homo sapien
ccactcgctcaaaggtcaatagcat

SEQ ID NO: 5379798 - DNA, 25 bp, Homo sapien
caccttcaactctcaactgagttgg

SEQ ID NO: 5379799 - DNA, 25 bp, Homo sapien
tgctgtacatccactaatgaatgta

SEQ ID NO: 5379800 - DNA, 25 bp, Homo sapien
atgtaagatgtgatcttcaccatgc

SEQ ID NO: 5379801 - DNA, 25 bp, Homo sapien
tgccataattatttgggccagcagg

SEQ ID NO: 5379802 - DNA, 25 bp, Homo sapien
gatggtgctacactccgttttcctc

SEQ ID NO: 5379803 - DNA, 25 bp, Homo sapien
gtgctacactccgttttcctctctg

SEQ ID NO: 5379804 - DNA, 25 bp, Homo sapien
agaggaaggatggtgctacactccg

SEQ ID NO: 5379805 - DNA, 25 bp, Homo sapien
ggaaggatggtgctacactccgttt

SEQ ID NO: 5379806 - DNA, 25 bp, Homo sapien
gcttccaggtaggttgtgtgatgct

SEQ ID NO: 5379807 - DNA, 25 bp, Homo sapien
gggttgcaatggctagagggaagat

SEQ ID NO: 5379808 - DNA, 25 bp, Homo sapien
gaagagaaagggttgcaatggctag

SEQ ID NO: 5379809 - DNA, 25 bp, Homo sapien
tgcaatggctagagggaagatgagg

SEQ ID NO: 5379810 - DNA, 25 bp, Homo sapien
gatcgatttttagaatcccttctag

SEQ ID NO: 5379811 - DNA, 25 bp, Homo sapien
agtttggaaattgagcttgtgtttc

SEQ ID NO: 5379812 - DNA, 25 bp, Homo sapien
tctagtttgattcctatatctgaag

SEQ ID NO: 5379813 - DNA, 25 bp, Homo sapien
ctatttagttcttgatcgattttta

SEQ ID NO: 5379814 - DNA, 25 bp, Homo sapien
aacccgctgcgaagttgctcccttt

SEQ ID NO: 5379815 - DNA, 25 bp, Homo sapien
acattcctcggattctggcattttc

SEQ ID NO: 5379816 - DNA, 25 bp, Homo sapien
ataaactcctacaaacccgctgcga

SEQ ID NO: 5379817 - DNA, 25 bp, Homo sapien
taaagtgttcttaacattcctcgga

SEQ ID NO: 5379818 - DNA, 25 bp, Homo sapien
caatgacccgtacatttccacatca

SEQ ID NO: 5379819 - DNA, 25 bp, Homo sapien
attcctgtgccaagaatcacaatga

SEQ ID NO: 5379820 - DNA, 25 bp, Homo sapien
catcacctttcttgcaagaagttta

SEQ ID NO: 5379821 - DNA, 25 bp, Homo sapien
cctttcttgcaagaagtttaacaca

SEQ ID NO: 5379822 - DNA, 25 bp, Homo sapien
gctcatgtgctcttcaaattcacct

SEQ ID NO: 5379823 - DNA, 25 bp, Homo sapien
tatttttgagagtccccagtgattg

SEQ ID NO: 5379824 - DNA, 25 bp, Homo sapien
cgtttcccatgacttctctgactcc

SEQ ID NO: 5379825 - DNA, 25 bp, Homo sapien
gagtccccagtgattgctcatgtgc

SEQ ID NO: 5379826 - DNA, 25 bp, Homo sapien
tctgctggtgtagacgttcatccct

SEQ ID NO: 5379827 - DNA, 25 bp, Homo sapien
ttttctgctggtgtagacgttcatc

SEQ ID NO: 5379828 - DNA, 25 bp, Homo sapien
tcatccctggaagtgatcctggaaa

SEQ ID NO: 5379829 - DNA, 25 bp, Homo sapien
ctgctggtgtagacgttcatccctg

SEQ ID NO: 5379830 - DNA, 25 bp, Homo sapien
ctgcaaccttcacgggtttactgag

SEQ ID NO: 5379831 - DNA, 25 bp, Homo sapien
gggtttactgagtaacttctgctga

SEQ ID NO: 5379832 - DNA, 25 bp, Homo sapien
ccctgcaaccttcacgggtttactg

SEQ ID NO: 5379833 - DNA, 25 bp, Homo sapien
tcacgggtttactgagtaacttctg

SEQ ID NO: 5379834 - DNA, 25 bp, Homo sapien
caactccaacagagtaagagcacag

SEQ ID NO: 5379835 - DNA, 25 bp, Homo sapien
cacaactccaacagagtaagagcac

SEQ ID NO: 5379836 - DNA, 25 bp, Homo sapien
acaactccaacagagtaagagcaca

SEQ ID NO: 5379837 - DNA, 25 bp, Homo sapien
tacacaactccaacagagtaagagc

SEQ ID NO: 5379838 - DNA, 25 bp, Homo sapien
tatcttatgctctgagttcccatca

SEQ ID NO: 5379839 - DNA, 25 bp, Homo sapien
cattcctgaacccattcgtaatgtg

SEQ ID NO: 5379840 - DNA, 25 bp, Homo sapien
tcagcgtctgacgtgacactggaga

SEQ ID NO: 5379841 - DNA, 25 bp, Homo sapien
aagagaatggcagatattgaatctg

SEQ ID NO: 5379842 - DNA, 25 bp, Homo sapien
gcaaaacatccaactaatgagctga

SEQ ID NO: 5379843 - DNA, 25 bp, Homo sapien
ttgaaacgacctcagatgtgcttcc

SEQ ID NO: 5379844 - DNA, 25 bp, Homo sapien
tcctgatgcaaaacatccaactaat

SEQ ID NO: 5379845 - DNA, 25 bp, Homo sapien
tgtaaaagttgaaacgacctcagat

SEQ ID NO: 5379846 - DNA, 25 bp, Homo sapien
acctgtggttctattagagatcctc

SEQ ID NO: 5379847 - DNA, 25 bp, Homo sapien
tgcagtaataaacgcaatgaccact

SEQ ID NO: 5379848 - DNA, 25 bp, Homo sapien
tagacaaggccacagatcacggtgc

SEQ ID NO: 5379849 - DNA, 25 bp, Homo sapien
ggagggttgactgatgacctgtggt

SEQ ID NO: 5379850 - DNA, 25 bp, Homo sapien
ctcagagttcacagcagatgccctg

SEQ ID NO: 5379851 - DNA, 25 bp, Homo sapien
tatctttgtagaactcagagttcac

SEQ ID NO: 5379852 - DNA, 25 bp, Homo sapien
ctggcatggtcttatctttgtagaa

SEQ ID NO: 5379853 - DNA, 25 bp, Homo sapien
tagaactcagagttcacagcagatg

SEQ ID NO: 5379854 - DNA, 25 bp, Homo sapien
ctctactgtctgtgcgtttcctgat

SEQ ID NO: 5379855 - DNA, 25 bp, Homo sapien
cataatcatgatgctgaacaaaagc

SEQ ID NO: 5379856 - DNA, 25 bp, Homo sapien
gatagctccaatattccaaccgagg

SEQ ID NO: 5379857 - DNA, 25 bp, Homo sapien
tccaaccgaggtatcataatcatga

SEQ ID NO: 5379858 - DNA, 25 bp, Homo sapien
ggattgcccacgctcagatatctga

SEQ ID NO: 5379859 - DNA, 25 bp, Homo sapien
tgcccacgctcagatatctgaacat

SEQ ID NO: 5379860 - DNA, 25 bp, Homo sapien
ctttccaggtggattgcccacgctc

SEQ ID NO: 5379861 - DNA, 25 bp, Homo sapien
tccaggtggattgcccacgctcaga

SEQ ID NO: 5379862 - DNA, 25 bp, Homo sapien
gtgggctccatagctcctgaaatca

SEQ ID NO: 5379863 - DNA, 25 bp, Homo sapien
gacatgaagtacactggtgggctcc

SEQ ID NO: 5379864 - DNA, 25 bp, Homo sapien
tatggacttgccattttttccgcag

SEQ ID NO: 5379865 - DNA, 25 bp, Homo sapien
tatcatcacgtctcagtcgcttgac

SEQ ID NO: 5379866 - DNA, 25 bp, Homo sapien
tcattggaagtagagggaatgcctg

SEQ ID NO: 5379867 - DNA, 25 bp, Homo sapien
tgaaggattatagaatgtgatggat

SEQ ID NO: 5379868 - DNA, 25 bp, Homo sapien
tagggaagagcacagatcgtgggct

SEQ ID NO: 5379869 - DNA, 25 bp, Homo sapien
ggaataggtggatcacaatgaagta

SEQ ID NO: 5379870 - DNA, 25 bp, Homo sapien
aatgatccagttctgatggcctgct

SEQ ID NO: 5379871 - DNA, 25 bp, Homo sapien
atgatccagttctgatggcctgctc

SEQ ID NO: 5379872 - DNA, 25 bp, Homo sapien
aaatgatccagttctgatggcctgc

SEQ ID NO: 5379873 - DNA, 25 bp, Homo sapien
ggttttcctgctggtggtcatgaag

SEQ ID NO: 5379874 - DNA, 25 bp, Homo sapien
tctgcctcggttttcctgctggtgg

SEQ ID NO: 5379875 - DNA, 25 bp, Homo sapien
gtaaacacattgctcgggttttgca

SEQ ID NO: 5379876 - DNA, 25 bp, Homo sapien
gctcgggttttgcaagaagatcttg

SEQ ID NO: 5379877 - DNA, 25 bp, Homo sapien
tcagtatccggtgtaggcatcctct

SEQ ID NO: 5379878 - DNA, 25 bp, Homo sapien
tctccatggtgccttgaaagtcccc

SEQ ID NO: 5379879 - DNA, 25 bp, Homo sapien
tccgtcattagggtgtcagtatccg

SEQ ID NO: 5379880 - DNA, 25 bp, Homo sapien
gaaaccctcttcagtaaagctgtga

SEQ ID NO: 5379881 - DNA, 25 bp, Homo sapien
taactgagctgcgattgctttggct

SEQ ID NO: 5379882 - DNA, 25 bp, Homo sapien
ttgctttggctacttcacccgctat

SEQ ID NO: 5379883 - DNA, 25 bp, Homo sapien
ccaattaactgagctgcgattgctt

SEQ ID NO: 5379884 - DNA, 25 bp, Homo sapien
tcacccgctatgttcttgctgcggc

SEQ ID NO: 5379885 - DNA, 25 bp, Homo sapien
ttttgcttcctaagaccagtggatg

SEQ ID NO: 5379886 - DNA, 25 bp, Homo sapien
atttttgcttcctaagaccagtgga

SEQ ID NO: 5379887 - DNA, 25 bp, Homo sapien
atatttttgcttcctaagaccagtg

SEQ ID NO: 5379888 - DNA, 25 bp, Homo sapien
ttgcttcctaagaccagtggatgac

SEQ ID NO: 5379889 - DNA, 25 bp, Homo sapien
tagatagcctctgaggtacacaatc

SEQ ID NO: 5379890 - DNA, 25 bp, Homo sapien
ccctggatgaaaatcccctcggata

SEQ ID NO: 5379891 - DNA, 25 bp, Homo sapien
taaattgcttgtgagccgagacacc

SEQ ID NO: 5379892 - DNA, 25 bp, Homo sapien
ccctcggatacttcttgtaattctg

SEQ ID NO: 5379893 - DNA, 25 bp, Homo sapien
gtttggcgtgtgattagttgggtac

SEQ ID NO: 5379894 - DNA, 25 bp, Homo sapien
ggtttggcgtgtgattagttgggta

SEQ ID NO: 5379895 - DNA, 25 bp, Homo sapien
taggtttggcgtgtgattagttggg

SEQ ID NO: 5379896 - DNA, 25 bp, Homo sapien
ctaggtttggcgtgtgattagttgg

SEQ ID NO: 5379897 - DNA, 25 bp, Homo sapien
gtatgtaagattgggatacctgtta

SEQ ID NO: 5379898 - DNA, 25 bp, Homo sapien
agttgcaacggagagaagggccata

SEQ ID NO: 5379899 - DNA, 25 bp, Homo sapien
tctctcaaatcatggtatgtaagat

SEQ ID NO: 5379900 - DNA, 25 bp, Homo sapien
gccatagtgccactaattctctcca

SEQ ID NO: 5379901 - DNA, 25 bp, Homo sapien
aaggctgattcctgtctagtggcca

SEQ ID NO: 5379902 - DNA, 25 bp, Homo sapien
agtgagaagtagtctttaaatgacc

SEQ ID NO: 5379903 - DNA, 25 bp, Homo sapien
taaatgaccagtgaaaggctgattc

SEQ ID NO: 5379904 - DNA, 25 bp, Homo sapien
gcctctcagtgagaagtagtcttta

SEQ ID NO: 5379905 - DNA, 25 bp, Homo sapien
gcgggcggacatgggaacctggcag

SEQ ID NO: 5379906 - DNA, 25 bp, Homo sapien
gtcatgatctcgctgtcatctccat

SEQ ID NO: 5379907 - DNA, 25 bp, Homo sapien
ctggtgcttctattggcgggcggac

SEQ ID NO: 5379908 - DNA, 25 bp, Homo sapien
tattggcgggcggacatgggaacct

SEQ ID NO: 5379909 - DNA, 25 bp, Homo sapien
cgtgcgctgtgcttcattccacaga

SEQ ID NO: 5379910 - DNA, 25 bp, Homo sapien
ctgtgcagtgggcagtatctagcac

SEQ ID NO: 5379911 - DNA, 25 bp, Homo sapien
ggcaaaactgtgcagtgggcagtat

SEQ ID NO: 5379912 - DNA, 25 bp, Homo sapien
gcgctgtgcttcattccacagaata

SEQ ID NO: 5379913 - DNA, 25 bp, Homo sapien
gattgactttgatgagtgcctgcca

SEQ ID NO: 5379914 - DNA, 25 bp, Homo sapien
gcaagcaggaagacgaagattgact

SEQ ID NO: 5379915 - DNA, 25 bp, Homo sapien
ttaacgatcttgaccagcaagcagg

SEQ ID NO: 5379916 - DNA, 25 bp, Homo sapien
gacatatgttctgaattaacgatct

SEQ ID NO: 5379917 - DNA, 25 bp, Homo sapien
caaattctttctccacggcacactt

SEQ ID NO: 5379918 - DNA, 25 bp, Homo sapien
gtcgaagtcctcctcaacaccaagt

SEQ ID NO: 5379919 - DNA, 25 bp, Homo sapien
tccacggcacactttgtcgaagtcc

SEQ ID NO: 5379920 - DNA, 25 bp, Homo sapien
ctttctccacggcacactttgtcga

SEQ ID NO: 5379921 - DNA, 25 bp, Homo sapien
aactccctaagagctttgtggctgc

SEQ ID NO: 5379922 - DNA, 25 bp, Homo sapien
tggctgttttgtggaagtccttgcg

SEQ ID NO: 5379923 - DNA, 25 bp, Homo sapien
gaggaccttgacaactccctaagag

SEQ ID NO: 5379924 - DNA, 25 bp, Homo sapien
ttgtggctgctactgggagttcctg

SEQ ID NO: 5379925 - DNA, 25 bp, Homo sapien
ctaccttttccatgcacagtgtgtc

SEQ ID NO: 5379926 - DNA, 25 bp, Homo sapien
tcctttaagggtggccttgcttcag

SEQ ID NO: 5379927 - DNA, 25 bp, Homo sapien
gtcaatcctgttagcacatgtctgg

SEQ ID NO: 5379928 - DNA, 25 bp, Homo sapien
tttccatgcacagtgtgtcatcatc

SEQ ID NO: 5379929 - DNA, 25 bp, Homo sapien
ggtctgattctgcactgccacttgc

SEQ ID NO: 5379930 - DNA, 25 bp, Homo sapien
ttaaaagcctgtgggtgcttcggtg

SEQ ID NO: 5379931 - DNA, 25 bp, Homo sapien
tggagtttggagcattttgcaggat

SEQ ID NO: 5379932 - DNA, 25 bp, Homo sapien
gggacagtggtctgattctgcactg

SEQ ID NO: 5379933 - DNA, 25 bp, Homo sapien
tgtctatttggggtactcaacgtgg

SEQ ID NO: 5379934 - DNA, 25 bp, Homo sapien
tgctgtctatttggggtactcaacg

SEQ ID NO: 5379935 - DNA, 25 bp, Homo sapien
tatttggggtactcaacgtggacac

SEQ ID NO: 5379936 - DNA, 25 bp, Homo sapien
cttgctgtctatttggggtactcaa

SEQ ID NO: 5379937 - DNA, 25 bp, Homo sapien
tcttagggggaacgtcatccagaca

SEQ ID NO: 5379938 - DNA, 25 bp, Homo sapien
cattcgctccttacacttgaatgga

SEQ ID NO: 5379939 - DNA, 25 bp, Homo sapien
acacttgaatggacagaaaatggac

SEQ ID NO: 5379940 - DNA, 25 bp, Homo sapien
agaaaggcttcctaggatgcattcg

SEQ ID NO: 5379941 - DNA, 25 bp, Homo sapien
ttgaggaataaagaatcgatattct

SEQ ID NO: 5379942 - DNA, 25 bp, Homo sapien
tcccagtatgtttgttctattaggc

SEQ ID NO: 5379943 - DNA, 25 bp, Homo sapien
tcatttgcagactttgaaatgctgc

SEQ ID NO: 5379944 - DNA, 25 bp, Homo sapien
agaatcgatattcttacagcttgtt

SEQ ID NO: 5379945 - DNA, 25 bp, Homo sapien
ggctgtggccacagacaacttctct

SEQ ID NO: 5379946 - DNA, 25 bp, Homo sapien
ggccacagacaacttctctgagtct

SEQ ID NO: 5379947 - DNA, 25 bp, Homo sapien
acttctctgagtctggacggttgga

SEQ ID NO: 5379948 - DNA, 25 bp, Homo sapien
cttctctgagtctggacggttggag

SEQ ID NO: 5379949 - DNA, 25 bp, Homo sapien
ctatctcccagactttgttttagtt

SEQ ID NO: 5379950 - DNA, 25 bp, Homo sapien
cagactttgttttagttgtttcatt

SEQ ID NO: 5379951 - DNA, 25 bp, Homo sapien
ccagactttgttttagttgtttcat

SEQ ID NO: 5379952 - DNA, 25 bp, Homo sapien
atctcccagactttgttttagttgt

SEQ ID NO: 5379953 - DNA, 25 bp, Homo sapien
gagggcgataaagagtcctcctggt

SEQ ID NO: 5379954 - DNA, 25 bp, Homo sapien
ggttatgagacactgtgacctctag

SEQ ID NO: 5379955 - DNA, 25 bp, Homo sapien
tttcacagtaatgaggttatgagac

SEQ ID NO: 5379956 - DNA, 25 bp, Homo sapien
aatgaggttatgagacactgtgacc

SEQ ID NO: 5379957 - DNA, 25 bp, Homo sapien
agggcttattcggttctctgtgcag

SEQ ID NO: 5379958 - DNA, 25 bp, Homo sapien
agctcagggcttattcggttctctg

SEQ ID NO: 5379959 - DNA, 25 bp, Homo sapien
ctgagctcagggcttattcggttct

SEQ ID NO: 5379960 - DNA, 25 bp, Homo sapien
gcttattcggttctctgtgcagtta

SEQ ID NO: 5379961 - DNA, 25 bp, Homo sapien
taagaaataaggactctgactgtcg

SEQ ID NO: 5379962 - DNA, 25 bp, Homo sapien
tgtccagcaaggaggccttgaatta

SEQ ID NO: 5379963 - DNA, 25 bp, Homo sapien
tttgacctctcgatgttaagaaata

SEQ ID NO: 5379964 - DNA, 25 bp, Homo sapien
tctccactgtaataagtagtttgac

SEQ ID NO: 5379965 - DNA, 25 bp, Homo sapien
agttcaaattcctaacaccagccat

SEQ ID NO: 5379966 - DNA, 25 bp, Homo sapien
cagttcaaattcctaacaccagcca

SEQ ID NO: 5379967 - DNA, 25 bp, Homo sapien
aaattggagagcagataaaggagga

SEQ ID NO: 5379968 - DNA, 25 bp, Homo sapien
tgttcaggctaatatgcaagttctt

SEQ ID NO: 5379969 - DNA, 25 bp, Homo sapien
agttttcctgttcaggctaatatgc

SEQ ID NO: 5379970 - DNA, 25 bp, Homo sapien
ttcctgttcaggctaatatgcaagt

SEQ ID NO: 5379971 - DNA, 25 bp, Homo sapien
gcactcctggcctagcacaatgtgg

SEQ ID NO: 5379972 - DNA, 25 bp, Homo sapien
ctgctatgatctgaattccaggact

SEQ ID NO: 5379973 - DNA, 25 bp, Homo sapien
cccaaagactgcattaagagccctt

SEQ ID NO: 5379974 - DNA, 25 bp, Homo sapien
gaaattgtcacaagcactgttcact

SEQ ID NO: 5379975 - DNA, 25 bp, Homo sapien
ctaacagtgcgttcacaccaagacc

SEQ ID NO: 5379976 - DNA, 25 bp, Homo sapien
taacagtgcgttcacaccaagaccc

SEQ ID NO: 5379977 - DNA, 25 bp, Homo sapien
cctctctgagcagccaagtcagtgc

SEQ ID NO: 5379978 - DNA, 25 bp, Homo sapien
taaatctgatgttttgtcctccagc

SEQ ID NO: 5379979 - DNA, 25 bp, Homo sapien
aagtcatgagatcttctaaatctga

SEQ ID NO: 5379980 - DNA, 25 bp, Homo sapien
cataacccacgtgaactgagacatc

SEQ ID NO: 5379981 - DNA, 25 bp, Homo sapien
ccatcttgaaccctggtgtcacagt

SEQ ID NO: 5379982 - DNA, 25 bp, Homo sapien
atcttgaaccctggtgtcacagtat

SEQ ID NO: 5379983 - DNA, 25 bp, Homo sapien
atgacagacagcagcgcctccatct

SEQ ID NO: 5379984 - DNA, 25 bp, Homo sapien
gcctccatcttgaaccctggtgtca

SEQ ID NO: 5379985 - DNA, 25 bp, Homo sapien
ctagtcatctgcaaatgtggaggag

SEQ ID NO: 5379986 - DNA, 25 bp, Homo sapien
gagatgcaggggctttaagggccat

SEQ ID NO: 5379987 - DNA, 25 bp, Homo sapien
tgtggaggagatgcaggggctttaa

SEQ ID NO: 5379988 - DNA, 25 bp, Homo sapien
gaggagatgcaggggctttaagggc

SEQ ID NO: 5379989 - DNA, 25 bp, Homo sapien
tgttgacaaggtaatgaagtaaaaa

SEQ ID NO: 5379990 - DNA, 25 bp, Homo sapien
tgacaaggtaatgaagtaaaaagga

SEQ ID NO: 5379991 - DNA, 25 bp, Homo sapien
tcaatgttgacaaggtaatgaagta

SEQ ID NO: 5379992 - DNA, 25 bp, Homo sapien
aatgttgacaaggtaatgaagtaaa

SEQ ID NO: 5379993 - DNA, 25 bp, Homo sapien
ctaagagtaatgaactccctgcggc

SEQ ID NO: 5379994 - DNA, 25 bp, Homo sapien
gccttatagggacccctctgaagct

SEQ ID NO: 5379995 - DNA, 25 bp, Homo sapien
agagtaatgaactccctgcggcggc

SEQ ID NO: 5379996 - DNA, 25 bp, Homo sapien
ctgcggcggccttatagggacccct

SEQ ID NO: 5379997 - DNA, 25 bp, Homo sapien
ttagtcctgaagcacaggtttgacc

SEQ ID NO: 5379998 - DNA, 25 bp, Homo sapien
gacctcaatagatggagtacattcc

SEQ ID NO: 5379999 - DNA, 25 bp, Homo sapien
gcacaggtttgacctcaatagatgg

SEQ ID NO: 5380000 - DNA, 25 bp, Homo sapien
aatagatggagtacattccaggaag

SEQ ID NO: 5380001 - DNA, 25 bp, Homo sapien
ggccttcactgtggcgatgtccaca

SEQ ID NO: 5380002 - DNA, 25 bp, Homo sapien
gagagtccagttgggggccttcact

SEQ ID NO: 5380003 - DNA, 25 bp, Homo sapien
ctgtgaggagagtccagttgggggc

SEQ ID NO: 5380004 - DNA, 25 bp, Homo sapien
ttgagaaatccctgtcatcaagaac

SEQ ID NO: 5380005 - DNA, 25 bp, Homo sapien
gatctctcccagccttgaatttttt

SEQ ID NO: 5380006 - DNA, 25 bp, Homo sapien
acagatctctcccagccttgaattt

SEQ ID NO: 5380007 - DNA, 25 bp, Homo sapien
ctcccagccttgaattttttaccat

SEQ ID NO: 5380008 - DNA, 25 bp, Homo sapien
tctctcccagccttgaattttttac

SEQ ID NO: 5380009 - DNA, 25 bp, Homo sapien
ctgcttcgtccacatgggactgcct

SEQ ID NO: 5380010 - DNA, 25 bp, Homo sapien
cttcgtccacatgggactgccttct

SEQ ID NO: 5380011 - DNA, 25 bp, Homo sapien
ttgactgcttcgtccacatgggact

SEQ ID NO: 5380012 - DNA, 25 bp, Homo sapien
gcccttgactgcttcgtccacatgg

SEQ ID NO: 5380013 - DNA, 25 bp, Homo sapien
ttttttctaggccagatacctccag

SEQ ID NO: 5380014 - DNA, 25 bp, Homo sapien
tttctaggccagatacctccagctc

SEQ ID NO: 5380015 - DNA, 25 bp, Homo sapien
agctcccaagccctcacaagatgct

SEQ ID NO: 5380016 - DNA, 25 bp, Homo sapien
gctcccaagccctcacaagatgctg

SEQ ID NO: 5380017 - DNA, 25 bp, Homo sapien
ctgcagcagctgttaactcttctga

SEQ ID NO: 5380018 - DNA, 25 bp, Homo sapien
tcatgattgcaaaactgcagcagct

SEQ ID NO: 5380019 - DNA, 25 bp, Homo sapien
actcttctgaacgaggagagcggga

SEQ ID NO: 5380020 - DNA, 25 bp, Homo sapien
gagagcgggagctaccattctcagg

SEQ ID NO: 5380021 - DNA, 25 bp, Homo sapien
cctgctggtgatttgccttggaaca

SEQ ID NO: 5380022 - DNA, 25 bp, Homo sapien
tagaagttcacggtcatgtggtcac

SEQ ID NO: 5380023 - DNA, 25 bp, Homo sapien
gacgtgccatatccacaggaacctg

SEQ ID NO: 5380024 - DNA, 25 bp, Homo sapien
catgtgcatccaaaaatagaagttc

SEQ ID NO: 5380025 - DNA, 25 bp, Homo sapien
ctttgcagtagctgacatttgtttc

SEQ ID NO: 5380026 - DNA, 25 bp, Homo sapien
tgctgggctttaaggtttgcatacc

SEQ ID NO: 5380027 - DNA, 25 bp, Homo sapien
gcacatttaacatcaaggactcata

SEQ ID NO: 5380028 - DNA, 25 bp, Homo sapien
tcctaagagtagtatcacaatctca

SEQ ID NO: 5380029 - DNA, 25 bp, Homo sapien
gatactgtctgatacacacatttgc

SEQ ID NO: 5380030 - DNA, 25 bp, Homo sapien
ggtccaactctctgagtttggtgag

SEQ ID NO: 5380031 - DNA, 25 bp, Homo sapien
ttttggtccaactctctgagtttgg

SEQ ID NO: 5380032 - DNA, 25 bp, Homo sapien
gtccaactctctgagtttggtgagt

SEQ ID NO: 5380033 - DNA, 25 bp, Homo sapien
ttggtccaactctctgagtttggtg

SEQ ID NO: 5380034 - DNA, 25 bp, Homo sapien
attaattttgtctttgccttctgca

SEQ ID NO: 5380035 - DNA, 25 bp, Homo sapien
gtgggctttttcattttagtgacta

SEQ ID NO: 5380036 - DNA, 25 bp, Homo sapien
tcagctgatgtcacctgtgggcttt

SEQ ID NO: 5380037 - DNA, 25 bp, Homo sapien
cattttagtgactaaattaattttg

SEQ ID NO: 5380038 - DNA, 25 bp, Homo sapien
ataaaagaggcagttgatagtttct

SEQ ID NO: 5380039 - DNA, 25 bp, Homo sapien
tataaaagaggcagttgatagtttc

SEQ ID NO: 5380040 - DNA, 25 bp, Homo sapien
tgggctgcctctcttacgcggtgca

SEQ ID NO: 5380041 - DNA, 25 bp, Homo sapien
gtcattctcaaaaattcaccaactt

SEQ ID NO: 5380042 - DNA, 25 bp, Homo sapien
caggccacgctctggtagcatttga

SEQ ID NO: 5380043 - DNA, 25 bp, Homo sapien
ggtgcacaatgctcgttgctgccag

SEQ ID NO: 5380044 - DNA, 25 bp, Homo sapien
ttctgcaatacccaaatagacagca

SEQ ID NO: 5380045 - DNA, 25 bp, Homo sapien
aatacccaaatagacagcaaatgcc

SEQ ID NO: 5380046 - DNA, 25 bp, Homo sapien
gatgaaagaggacggtagccttttg

SEQ ID NO: 5380047 - DNA, 25 bp, Homo sapien
tttgggacaccgatgaaagaggacg

SEQ ID NO: 5380048 - DNA, 25 bp, Homo sapien
tatactggtaatatctggtctcaca

SEQ ID NO: 5380049 - DNA, 25 bp, Homo sapien
taccctttggaaatgcgatatactg

SEQ ID NO: 5380050 - DNA, 25 bp, Homo sapien
caaggagtgcgtacttggataattc

SEQ ID NO: 5380051 - DNA, 25 bp, Homo sapien
agaagagagtctgccagttttaccc

SEQ ID NO: 5380052 - DNA, 25 bp, Homo sapien
gcatgaagcaccagagtcagccctt

SEQ ID NO: 5380053 - DNA, 25 bp, Homo sapien
agtggaagctattcataacaattgc

SEQ ID NO: 5380054 - DNA, 25 bp, Homo sapien
ctgcagaacatggaaaaggatccaa

SEQ ID NO: 5380055 - DNA, 25 bp, Homo sapien
tagcaactctttgcatgaagcacca

SEQ ID NO: 5380056 - DNA, 25 bp, Homo sapien
ttcctgtctctgaagctgcgctgaa

SEQ ID NO: 5380057 - DNA, 25 bp, Homo sapien
attgtactgtttgcttcttcctgtc

SEQ ID NO: 5380058 - DNA, 25 bp, Homo sapien
cctgtctctgaagctgcgctgaacc

SEQ ID NO: 5380059 - DNA, 25 bp, Homo sapien
tcacattgtactgtttgcttcttcc

SEQ ID NO: 5380060 - DNA, 25 bp, Homo sapien
tcttgattgaagttccaaatttctt

SEQ ID NO: 5380061 - DNA, 25 bp, Homo sapien
aaacattcttgattgaagttccaaa

SEQ ID NO: 5380062 - DNA, 25 bp, Homo sapien
cattcttgattgaagttccaaattt

SEQ ID NO: 5380063 - DNA, 25 bp, Homo sapien
agcaaaacattcttgattgaagttc

SEQ ID NO: 5380064 - DNA, 25 bp, Homo sapien
tgccaatataatgcaaatgatgggc

SEQ ID NO: 5380065 - DNA, 25 bp, Homo sapien
tgtgtattgctggtgacgttagact

SEQ ID NO: 5380066 - DNA, 25 bp, Homo sapien
cagctcctttcttgggccatggaaa

SEQ ID NO: 5380067 - DNA, 25 bp, Homo sapien
tgacgttagacttcttaaatcttgc

SEQ ID NO: 5380068 - DNA, 25 bp, Homo sapien
ggcattgctgacagtagctactgtg

SEQ ID NO: 5380069 - DNA, 25 bp, Homo sapien
aggcacttggttgctttctctggca

SEQ ID NO: 5380070 - DNA, 25 bp, Homo sapien
tttcacaataccttaagaagatcat

SEQ ID NO: 5380071 - DNA, 25 bp, Homo sapien
tacagccaactcagtaggcacttgg

SEQ ID NO: 5380072 - DNA, 25 bp, Homo sapien
ggagcgcaccaaatctgtaggctgc

SEQ ID NO: 5380073 - DNA, 25 bp, Homo sapien
aaacgcctgccgaacactaagctgt

SEQ ID NO: 5380074 - DNA, 25 bp, Homo sapien
tcattgattaaacgcctgccgaaca

SEQ ID NO: 5380075 - DNA, 25 bp, Homo sapien
tctgccacttgttgagaccgtaaag

SEQ ID NO: 5380076 - DNA, 25 bp, Homo sapien
tgtgtactttgtctcaattcggaaa

SEQ ID NO: 5380077 - DNA, 25 bp, Homo sapien
gctgaaagctagcttgtaaaaagcc

SEQ ID NO: 5380078 - DNA, 25 bp, Homo sapien
agttcaatggtgattaccattttgg

SEQ ID NO: 5380079 - DNA, 25 bp, Homo sapien
aaagctagcttgtaaaaagccttca

SEQ ID NO: 5380080 - DNA, 25 bp, Homo sapien
ccaaaaggtggttcaacatgagtga

SEQ ID NO: 5380081 - DNA, 25 bp, Homo sapien
tgacattgcaagtcccaaaaggtgg

SEQ ID NO: 5380082 - DNA, 25 bp, Homo sapien
tcaacatgagtgagaattataatct

SEQ ID NO: 5380083 - DNA, 25 bp, Homo sapien
ccaggaatgactgtataactgacat

SEQ ID NO: 5380084 - DNA, 25 bp, Homo sapien
ttcaagttgaatagggtgaaggtca

SEQ ID NO: 5380085 - DNA, 25 bp, Homo sapien
cattggccaatgctcaagggcagta

SEQ ID NO: 5380086 - DNA, 25 bp, Homo sapien
tagggtgaaggtcattggccaatgc

SEQ ID NO: 5380087 - DNA, 25 bp, Homo sapien
aaggtcattggccaatgctcaaggg

SEQ ID NO: 5380088 - DNA, 25 bp, Homo sapien
tttctgataccctagtccatcagct

SEQ ID NO: 5380089 - DNA, 25 bp, Homo sapien
caattccaagtgctgcaatcagaca

SEQ ID NO: 5380090 - DNA, 25 bp, Homo sapien
aaatatctggtttccactcaagtac

SEQ ID NO: 5380091 - DNA, 25 bp, Homo sapien
caagtacttctatgcaccagattaa

SEQ ID NO: 5380092 - DNA, 25 bp, Homo sapien
tgatctgaattaatctccacaggct

SEQ ID NO: 5380093 - DNA, 25 bp, Homo sapien
atgatctgaattaatctccacaggc

SEQ ID NO: 5380094 - DNA, 25 bp, Homo sapien
tatgatctgaattaatctccacagg

SEQ ID NO: 5380095 - DNA, 25 bp, Homo sapien
aaggctcatagaggccactggttct

SEQ ID NO: 5380096 - DNA, 25 bp, Homo sapien
cagcttgaaaggctcatagaggcca

SEQ ID NO: 5380097 - DNA, 25 bp, Homo sapien
ttccttaagttttgcaagaggacag

SEQ ID NO: 5380098 - DNA, 25 bp, Homo sapien
tcttccttaagttttgcaagaggac

SEQ ID NO: 5380099 - DNA, 25 bp, Homo sapien
tgcattgctgcatcttttcatcatt

SEQ ID NO: 5380100 - DNA, 25 bp, Homo sapien
ctcatttctaatgcattgctgcatc

SEQ ID NO: 5380101 - DNA, 25 bp, Homo sapien
cagaatacttcaccactgcctcatt

SEQ ID NO: 5380102 - DNA, 25 bp, Homo sapien
ttctagtaagttccagatggcagaa

SEQ ID NO: 5380103 - DNA, 25 bp, Homo sapien
agtgacccaatgagagacttttcct

SEQ ID NO: 5380104 - DNA, 25 bp, Homo sapien
actgcaaagttaggagccctggtcc

SEQ ID NO: 5380105 - DNA, 25 bp, Homo sapien
tctgaacaactgtggccactgcaaa

SEQ ID NO: 5380106 - DNA, 25 bp, Homo sapien
cccaatgagagacttttccttccca

SEQ ID NO: 5380107 - DNA, 25 bp, Homo sapien
cagttgtatgtagtaacagctgtcc

SEQ ID NO: 5380108 - DNA, 25 bp, Homo sapien
gttgtatgtagtaacagctgtccag

SEQ ID NO: 5380109 - DNA, 25 bp, Homo sapien
tgtatgtagtaacagctgtccaggt

SEQ ID NO: 5380110 - DNA, 25 bp, Homo sapien
tatgtagtaacagctgtccaggtca

SEQ ID NO: 5380111 - DNA, 25 bp, Homo sapien
ctacgaaggatgagcaggtgaaatt

SEQ ID NO: 5380112 - DNA, 25 bp, Homo sapien
aaggatgagcaggtgaaattatgtg

SEQ ID NO: 5380113 - DNA, 25 bp, Homo sapien
cgaaggatgagcaggtgaaattatg

SEQ ID NO: 5380114 - DNA, 25 bp, Homo sapien
tacgaaggatgagcaggtgaaatta

SEQ ID NO: 5380115 - DNA, 25 bp, Homo sapien
ctattgcaatgcagatctaaggagg

SEQ ID NO: 5380116 - DNA, 25 bp, Homo sapien
gggaatatttctgagggactggtca

SEQ ID NO: 5380117 - DNA, 25 bp, Homo sapien
tattgcaatgcagatctaaggaggg

SEQ ID NO: 5380118 - DNA, 25 bp, Homo sapien
ctggtcagacactctgcttggatta

SEQ ID NO: 5380119 - DNA, 25 bp, Homo sapien
tcttctccacgatggaagaaacgcc

SEQ ID NO: 5380120 - DNA, 25 bp, Homo sapien
tatcctcttctccacgatggaagaa

SEQ ID NO: 5380121 - DNA, 25 bp, Homo sapien
tccacgatggaagaaacgccttatt

SEQ ID NO: 5380122 - DNA, 25 bp, Homo sapien
ttatcctcttctccacgatggaaga

SEQ ID NO: 5380123 - DNA, 25 bp, Homo sapien
gaaccgtctccaggttgtttatagc

SEQ ID NO: 5380124 - DNA, 25 bp, Homo sapien
agctgtagcgattttgctctaggtc

SEQ ID NO: 5380125 - DNA, 25 bp, Homo sapien
ccaggttgtttatagctgtagcgat

SEQ ID NO: 5380126 - DNA, 25 bp, Homo sapien
tcttcaactctgaaccgtctccagg

SEQ ID NO: 5380127 - DNA, 25 bp, Homo sapien
ttcatgtttcactgggtctctttct

SEQ ID NO: 5380128 - DNA, 25 bp, Homo sapien
gatgtactgacctggcacatgaatg

SEQ ID NO: 5380129 - DNA, 25 bp, Homo sapien
tataccaaatagtgtgatcccctat

SEQ ID NO: 5380130 - DNA, 25 bp, Homo sapien
ggactcattgagatgtactgacctg

SEQ ID NO: 5380131 - DNA, 25 bp, Homo sapien
gggtgttatgctggcccaaaacagt

SEQ ID NO: 5380132 - DNA, 25 bp, Homo sapien
aggtgatcttcagtttgacgtgagt

SEQ ID NO: 5380133 - DNA, 25 bp, Homo sapien
cataatgagttgaaaggggacttcc

SEQ ID NO: 5380134 - DNA, 25 bp, Homo sapien
tttgacgtgagtagggtgttatgct

SEQ ID NO: 5380135 - DNA, 25 bp, Homo sapien
tcataaacaatgactgtgctcatgt

SEQ ID NO: 5380136 - DNA, 25 bp, Homo sapien
ggctagaaatgtcatgaaactcata

SEQ ID NO: 5380137 - DNA, 25 bp, Homo sapien
gactgtgctcatgtatggaagaatt

SEQ ID NO: 5380138 - DNA, 25 bp, Homo sapien
gaaactcataaacaatgactgtgct

SEQ ID NO: 5380139 - DNA, 25 bp, Homo sapien
gtctcatgtcgagcggcataaagtg

SEQ ID NO: 5380140 - DNA, 25 bp, Homo sapien
tgtttgtctcatgtcgagcggcata

SEQ ID NO: 5380141 - DNA, 25 bp, Homo sapien
catgtcgagcggcataaagtggttt

SEQ ID NO: 5380142 - DNA, 25 bp, Homo sapien
atactgtttgtctcatgtcgagcgg

SEQ ID NO: 5380143 - DNA, 25 bp, Homo sapien
cagatgatgtctgattgattgtcat

SEQ ID NO: 5380144 - DNA, 25 bp, Homo sapien
tgtaacttcccgaagttcctgagtg

SEQ ID NO: 5380145 - DNA, 25 bp, Homo sapien
aagtaagagaatcataagggggcaa

SEQ ID NO: 5380146 - DNA, 25 bp, Homo sapien
ttagttaaatctaatatgagattag

SEQ ID NO: 5380147 - DNA, 25 bp, Homo sapien
cctaagatggacgataaaaatggca

SEQ ID NO: 5380148 - DNA, 25 bp, Homo sapien
cagagagatacctaagatggacgat

SEQ ID NO: 5380149 - DNA, 25 bp, Homo sapien
gaatcaggggacaatagaggcatca

SEQ ID NO: 5380150 - DNA, 25 bp, Homo sapien
gaggcatcactcttttagctacact

SEQ ID NO: 5380151 - DNA, 25 bp, Homo sapien
atagaggcatcactcttttagctac

SEQ ID NO: 5380152 - DNA, 25 bp, Homo sapien
catcactcttttagctacactgtcc

SEQ ID NO: 5380153 - DNA, 25 bp, Homo sapien
ttatttggctgatagtctggaggct

SEQ ID NO: 5380154 - DNA, 25 bp, Homo sapien
accccatctggtgaggggtttcttg

SEQ ID NO: 5380155 - DNA, 25 bp, Homo sapien
tttatttggctgatagtctggaggc

SEQ ID NO: 5380156 - DNA, 25 bp, Homo sapien
ggcaccccatctggtgaggggtttc

SEQ ID NO: 5380157 - DNA, 25 bp, Homo sapien
aggtaggtttggcagtcgttggttg

SEQ ID NO: 5380158 - DNA, 25 bp, Homo sapien
attccggacccactaaaggtggcat

SEQ ID NO: 5380159 - DNA, 25 bp, Homo sapien
tttcaggtaggtttggcagtcgttg

SEQ ID NO: 5380160 - DNA, 25 bp, Homo sapien
tcaggtaggtttggcagtcgttggt

SEQ ID NO: 5380161 - DNA, 25 bp, Homo sapien
cctttctcggtagggacttccatga

SEQ ID NO: 5380162 - DNA, 25 bp, Homo sapien
cttgtaacggaagatcacagcctca

SEQ ID NO: 5380163 - DNA, 25 bp, Homo sapien
tcttcagaccacagtcttgtaacgg

SEQ ID NO: 5380164 - DNA, 25 bp, Homo sapien
gcagttcttacaaaagtcaggaacc

SEQ ID NO: 5380165 - DNA, 25 bp, Homo sapien
gtaagaagctcagttatcagggaat

SEQ ID NO: 5380166 - DNA, 25 bp, Homo sapien
tcctaggtgagattccaactgtatc

SEQ ID NO: 5380167 - DNA, 25 bp, Homo sapien
cttgccaggaatagagtaagaagct

SEQ ID NO: 5380168 - DNA, 25 bp, Homo sapien
tacattgtgggaacttggcatgccc

SEQ ID NO: 5380169 - DNA, 25 bp, Homo sapien
tgaggaaagtcaaaaccaacaagag

SEQ ID NO: 5380170 - DNA, 25 bp, Homo sapien
accaacaagagtagaaacttcaaag

SEQ ID NO: 5380171 - DNA, 25 bp, Homo sapien
ccaacaagagtagaaacttcaaaga

SEQ ID NO: 5380172 - DNA, 25 bp, Homo sapien
ctgtgatgaggaaagtcaaaaccaa

SEQ ID NO: 5380173 - DNA, 25 bp, Homo sapien
cttctttcttctcacatctgctcat

SEQ ID NO: 5380174 - DNA, 25 bp, Homo sapien
ctcttctttcttctcacatctgctc

SEQ ID NO: 5380175 - DNA, 25 bp, Homo sapien
tgactcttctttcttctcacatctg

SEQ ID NO: 5380176 - DNA, 25 bp, Homo sapien
ctcttgttctgactcttctttcttc

SEQ ID NO: 5380177 - DNA, 25 bp, Homo sapien
cagtcttattgaggtaggtgtttag

SEQ ID NO: 5380178 - DNA, 25 bp, Homo sapien
ccctctgtaggcaatgttataccct

SEQ ID NO: 5380179 - DNA, 25 bp, Homo sapien
tagtcagtggtcaccttggcagccc

SEQ ID NO: 5380180 - DNA, 25 bp, Homo sapien
ggcattacggtatcccaaatgtagt

SEQ ID NO: 5380181 - DNA, 25 bp, Homo sapien
tatctcctggaagtgaagtgtttca

SEQ ID NO: 5380182 - DNA, 25 bp, Homo sapien
gagggcaaacccaataaagagagga

SEQ ID NO: 5380183 - DNA, 25 bp, Homo sapien
caatcactgagctttggttcatcaa

SEQ ID NO: 5380184 - DNA, 25 bp, Homo sapien
ggttcatcaaaggtggtcaatgttc

SEQ ID NO: 5380185 - DNA, 25 bp, Homo sapien
tacactggagtctcagtgagcctgc

SEQ ID NO: 5380186 - DNA, 25 bp, Homo sapien
tacagtgagtcaatatgtgtgcatc

SEQ ID NO: 5380187 - DNA, 25 bp, Homo sapien
tgtgcatctctgttatagctgggtc

SEQ ID NO: 5380188 - DNA, 25 bp, Homo sapien
tggcatctaccttgcagagattgtg

SEQ ID NO: 5380189 - DNA, 25 bp, Homo sapien
gctgggtcatagtaattgctctgtc

SEQ ID NO: 5380190 - DNA, 25 bp, Homo sapien
gaaagtgatgttgacaagacttcgc

SEQ ID NO: 5380191 - DNA, 25 bp, Homo sapien
ccgggctttgccatcagaaagtgat

SEQ ID NO: 5380192 - DNA, 25 bp, Homo sapien
catgtattcaactttaccgggcttt

SEQ ID NO: 5380193 - DNA, 25 bp, Homo sapien
gagagttggaggtgtaccacatgaa

SEQ ID NO: 5380194 - DNA, 25 bp, Homo sapien
ctgagcctttgctggcggaacaaac

SEQ ID NO: 5380195 - DNA, 25 bp, Homo sapien
ttttgaatcctccagaaaaaagctg

SEQ ID NO: 5380196 - DNA, 25 bp, Homo sapien
aaaagctggtgtggttacccgtgag

SEQ ID NO: 5380197 - DNA, 25 bp, Homo sapien
ttacccgtgagctgactcaggacat

SEQ ID NO: 5380198 - DNA, 25 bp, Homo sapien
ggaagatctgggacaaatagatcgt

SEQ ID NO: 5380199 - DNA, 25 bp, Homo sapien
aagatctgggacaaatagatcgtac

SEQ ID NO: 5380200 - DNA, 25 bp, Homo sapien
taaaggaagatctgggacaaataga

SEQ ID NO: 5380201 - DNA, 25 bp, Homo sapien
aaggaagatctgggacaaatagatc

SEQ ID NO: 5380202 - DNA, 25 bp, Homo sapien
tggattggcagagataatgaagcat

SEQ ID NO: 5380203 - DNA, 25 bp, Homo sapien
tggcagactcggaagatgctgagtc

SEQ ID NO: 5380204 - DNA, 25 bp, Homo sapien
tggcagagataatgaagcatgttct

SEQ ID NO: 5380205 - DNA, 25 bp, Homo sapien
tgagtcttgcttgcctctgggtcct

SEQ ID NO: 5380206 - DNA, 25 bp, Homo sapien
cactagactccttaaacatgttaat

SEQ ID NO: 5380207 - DNA, 25 bp, Homo sapien
taatggacttctacattcgctgaat

SEQ ID NO: 5380208 - DNA, 25 bp, Homo sapien
tacattcgctgaatatcctgtgcat

SEQ ID NO: 5380209 - DNA, 25 bp, Homo sapien
taaacatgttaatggacttctacat

SEQ ID NO: 5380210 - DNA, 25 bp, Homo sapien
ttcgttactaccctgggcaatggag

SEQ ID NO: 5380211 - DNA, 25 bp, Homo sapien
tcttctgctctcatgtgttcgttac

SEQ ID NO: 5380212 - DNA, 25 bp, Homo sapien
tagtcagtaggttgccctcttctgc

SEQ ID NO: 5380213 - DNA, 25 bp, Homo sapien
cttccagtgcataaacgctcttagt

SEQ ID NO: 5380214 - DNA, 25 bp, Homo sapien
ctatagacatggaggaagggagcat

SEQ ID NO: 5380215 - DNA, 25 bp, Homo sapien
tatagacatggaggaagggagcata

SEQ ID NO: 5380216 - DNA, 25 bp, Homo sapien
caggagtgggaatcaccctggagag

SEQ ID NO: 5380217 - DNA, 25 bp, Homo sapien
ccaggagtgggaatcaccctggaga

SEQ ID NO: 5380218 - DNA, 25 bp, Homo sapien
acaggtaagcagacagtacccagga

SEQ ID NO: 5380219 - DNA, 25 bp, Homo sapien
agcagacagtacccaggagtgggaa

SEQ ID NO: 5380220 - DNA, 25 bp, Homo sapien
cctggtgttcgaataatctggagct

SEQ ID NO: 5380221 - DNA, 25 bp, Homo sapien
acccaagtttccaacagcaggttct

SEQ ID NO: 5380222 - DNA, 25 bp, Homo sapien
ggttctgtgtaaccttctacccaca

SEQ ID NO: 5380223 - DNA, 25 bp, Homo sapien
ggaaatacaccaggggagtccagac

SEQ ID NO: 5380224 - DNA, 25 bp, Homo sapien
tagagagtcaacgtccttgtcacca

SEQ ID NO: 5380225 - DNA, 25 bp, Homo sapien
cttcttgaatcccaagtagagagtc

SEQ ID NO: 5380226 - DNA, 25 bp, Homo sapien
tcccaagtagagagtcaacgtcctt

SEQ ID NO: 5380227 - DNA, 25 bp, Homo sapien
ttgaatcccaagtagagagtcaacg

SEQ ID NO: 5380228 - DNA, 25 bp, Homo sapien
tcctgttgcttaaactcccaggtcc

SEQ ID NO: 5380229 - DNA, 25 bp, Homo sapien
cctgttgcttaaactcccaggtcct

SEQ ID NO: 5380230 - DNA, 25 bp, Homo sapien
tctcctgttgcttaaactcccaggt

SEQ ID NO: 5380231 - DNA, 25 bp, Homo sapien
ctcctgttgcttaaactcccaggtc

SEQ ID NO: 5380232 - DNA, 25 bp, Homo sapien
caaacactttctccacgttggtggg

SEQ ID NO: 5380233 - DNA, 25 bp, Homo sapien
gggaatgattctttgaatggctgac

SEQ ID NO: 5380234 - DNA, 25 bp, Homo sapien
cccaaacactttctccacgttggtg

SEQ ID NO: 5380235 - DNA, 25 bp, Homo sapien
tgattctttgaatggctgactgctg

SEQ ID NO: 5380236 - DNA, 25 bp, Homo sapien
ctcctgctccacttgtcacactggg

SEQ ID NO: 5380237 - DNA, 25 bp, Homo sapien
ttcattgccgtctctcttccacagg

SEQ ID NO: 5380238 - DNA, 25 bp, Homo sapien
gcattgcctctttggccttgtcgga

SEQ ID NO: 5380239 - DNA, 25 bp, Homo sapien
acaccatacagggtgcctctgctgc

SEQ ID NO: 5380240 - DNA, 25 bp, Homo sapien
ctgaatgaagtactaaacatggaag

SEQ ID NO: 5380241 - DNA, 25 bp, Homo sapien
agggaacaaccggtactagccactg

SEQ ID NO: 5380242 - DNA, 25 bp, Homo sapien
gaatgaagtactaaacatggaaggg

SEQ ID NO: 5380243 - DNA, 25 bp, Homo sapien
aaaatcatgccaaattgtaaagacc

SEQ ID NO: 5380244 - DNA, 25 bp, Homo sapien
gcataaccaccttttacggctgtaa

SEQ ID NO: 5380245 - DNA, 25 bp, Homo sapien
gccatccatatctgataggcaactt

SEQ ID NO: 5380246 - DNA, 25 bp, Homo sapien
aggcaacttcaagacataagatgtt

SEQ ID NO: 5380247 - DNA, 25 bp, Homo sapien
taagatgtttactctgccacgggca

SEQ ID NO: 5380248 - DNA, 25 bp, Homo sapien
agagtcgttagcagcaggtgtagca

SEQ ID NO: 5380249 - DNA, 25 bp, Homo sapien
cagagagtcgttagcagcaggtgta

SEQ ID NO: 5380250 - DNA, 25 bp, Homo sapien
gttagcagcaggtgtagcagacaca

SEQ ID NO: 5380251 - DNA, 25 bp, Homo sapien
tcgttagcagcaggtgtagcagaca

SEQ ID NO: 5380252 - DNA, 25 bp, Homo sapien
gagcaggagcaaagcagtcccactg

SEQ ID NO: 5380253 - DNA, 25 bp, Homo sapien
agagcaggagcaaagcagtcccact

SEQ ID NO: 5380254 - DNA, 25 bp, Homo sapien
gagagcaggagcaaagcagtcccac

SEQ ID NO: 5380255 - DNA, 25 bp, Homo sapien
gccagatcatgtccatgggatcaaa

SEQ ID NO: 5380256 - DNA, 25 bp, Homo sapien
catcagccagatcatgtccatggga

SEQ ID NO: 5380257 - DNA, 25 bp, Homo sapien
ggcatcagccagatcatgtccatgg

SEQ ID NO: 5380258 - DNA, 25 bp, Homo sapien
catgtccatgggatcaaatgcattt

SEQ ID NO: 5380259 - DNA, 25 bp, Homo sapien
taagggctgagcatcaagtgtaagc

SEQ ID NO: 5380260 - DNA, 25 bp, Homo sapien
caagtgtaagcagcatatccaaatg

SEQ ID NO: 5380261 - DNA, 25 bp, Homo sapien
gccagaaagctggttccatcgtaca

SEQ ID NO: 5380262 - DNA, 25 bp, Homo sapien
aaatgtgccgttagagccagaaagc

SEQ ID NO: 5380263 - DNA, 25 bp, Homo sapien
gagagtcctgttcagtgtcttgtac

SEQ ID NO: 5380264 - DNA, 25 bp, Homo sapien
ctccacctttcctgcaaatcgatga

SEQ ID NO: 5380265 - DNA, 25 bp, Homo sapien
ccacctttcctgcaaatcgatgaga

SEQ ID NO: 5380266 - DNA, 25 bp, Homo sapien
atcgatgagagtcctgttcagtgtc

SEQ ID NO: 5380267 - DNA, 25 bp, Homo sapien
cttgccatgataaaaaggagatttc

SEQ ID NO: 5380268 - DNA, 25 bp, Homo sapien
tctttgtatataaggcctttgtcac

SEQ ID NO: 5380269 - DNA, 25 bp, Homo sapien
ctttgtatataaggcctttgtcacc

SEQ ID NO: 5380270 - DNA, 25 bp, Homo sapien
tttgtatataaggcctttgtcacct

SEQ ID NO: 5380271 - DNA, 25 bp, Homo sapien
gacttgacttgctgttgtggaggag

SEQ ID NO: 5380272 - DNA, 25 bp, Homo sapien
cacgacttgacttgctgttgtggag

SEQ ID NO: 5380273 - DNA, 25 bp, Homo sapien
cgacttgacttgctgttgtggagga

SEQ ID NO: 5380274 - DNA, 25 bp, Homo sapien
gaggagggtgggctgatagcagagg

SEQ ID NO: 5380275 - DNA, 25 bp, Homo sapien
gtgaccacagtccaggtgaccagga

SEQ ID NO: 5380276 - DNA, 25 bp, Homo sapien
ggctggatggcctgtagctcacatt

SEQ ID NO: 5380277 - DNA, 25 bp, Homo sapien
gggctggatggcctgtagctcacat

SEQ ID NO: 5380278 - DNA, 25 bp, Homo sapien
tgtgaccacagtccaggtgaccagg

SEQ ID NO: 5380279 - DNA, 25 bp, Homo sapien
agttccagctgggactctcctactt

SEQ ID NO: 5380280 - DNA, 25 bp, Homo sapien
gccttcagtgtctagtgcctttctc

SEQ ID NO: 5380281 - DNA, 25 bp, Homo sapien
tcagtgtctagtgcctttctctgga

SEQ ID NO: 5380282 - DNA, 25 bp, Homo sapien
gaagtgtaaggtggccaacagggtg

SEQ ID NO: 5380283 - DNA, 25 bp, Homo sapien
tgatcatgaattcaaaaggagatat

SEQ ID NO: 5380284 - DNA, 25 bp, Homo sapien
caaagatttgatgatcatgaattca

SEQ ID NO: 5380285 - DNA, 25 bp, Homo sapien
gatcatgaattcaaaaggagatatc

SEQ ID NO: 5380286 - DNA, 25 bp, Homo sapien
catgccttttaagcagcaggaagat

SEQ ID NO: 5380287 - DNA, 25 bp, Homo sapien
gaagatataatttccaaggtccaac

SEQ ID NO: 5380288 - DNA, 25 bp, Homo sapien
ctacatgccttttaagcagcaggaa

SEQ ID NO: 5380289 - DNA, 25 bp, Homo sapien
aggaagatataatttccaaggtcca

SEQ ID NO: 5380290 - DNA, 25 bp, Homo sapien
gactctgctagtggacagccgtcca

SEQ ID NO: 5380291 - DNA, 25 bp, Homo sapien
gtggacagccgtccacactatccat

SEQ ID NO: 5380292 - DNA, 25 bp, Homo sapien
cacaacagactctgctagtggacag

SEQ ID NO: 5380293 - DNA, 25 bp, Homo sapien
aatgaagcatgccacaacagactct

SEQ ID NO: 5380294 - DNA, 25 bp, Homo sapien
aagagctttcagtagggccttggag

SEQ ID NO: 5380295 - DNA, 25 bp, Homo sapien
ttggaggccagttccgatgacccat

SEQ ID NO: 5380296 - DNA, 25 bp, Homo sapien
gacccatgcttactgcagtgcaagg

SEQ ID NO: 5380297 - DNA, 25 bp, Homo sapien
agtcaggcggaacagagctgttgaa

SEQ ID NO: 5380298 - DNA, 25 bp, Homo sapien
catcagtggtgtaagatgtttcatc

SEQ ID NO: 5380299 - DNA, 25 bp, Homo sapien
ctcatcagtggtgtaagatgtttca

SEQ ID NO: 5380300 - DNA, 25 bp, Homo sapien
tcctcatcagtggtgtaagatgttt

SEQ ID NO: 5380301 - DNA, 25 bp, Homo sapien
cctcatcagtggtgtaagatgtttc

SEQ ID NO: 5380302 - DNA, 25 bp, Homo sapien
tggggagtcagcgttgtgttcatcc

SEQ ID NO: 5380303 - DNA, 25 bp, Homo sapien
ggagtcagcgttgtgttcatccatt

SEQ ID NO: 5380304 - DNA, 25 bp, Homo sapien
gggagtcagcgttgtgttcatccat

SEQ ID NO: 5380305 - DNA, 25 bp, Homo sapien
cactggggagtcagcgttgtgttca

SEQ ID NO: 5380306 - DNA, 25 bp, Homo sapien
gttcctctggcagaatgtgagccat

SEQ ID NO: 5380307 - DNA, 25 bp, Homo sapien
gtactacaattgcttgttcctctgg

SEQ ID NO: 5380308 - DNA, 25 bp, Homo sapien
tggtactacaattgcttgttcctct

SEQ ID NO: 5380309 - DNA, 25 bp, Homo sapien
ttgttcctctggcagaatgtgagcc

SEQ ID NO: 5380310 - DNA, 25 bp, Homo sapien
aaaatctatgtcttacagtgccttt

SEQ ID NO: 5380311 - DNA, 25 bp, Homo sapien
tccttccaccagaaaatctatgtct

SEQ ID NO: 5380312 - DNA, 25 bp, Homo sapien
cagccttgactacaactgtctttgc

SEQ ID NO: 5380313 - DNA, 25 bp, Homo sapien
gccttgactacaactgtctttgcaa

SEQ ID NO: 5380314 - DNA, 25 bp, Homo sapien
gctaccatgccaggtgaacttttaa

SEQ ID NO: 5380315 - DNA, 25 bp, Homo sapien
gccactatgcctggaatgcattaag

SEQ ID NO: 5380316 - DNA, 25 bp, Homo sapien
taaatgttttgtccagaccaggtct

SEQ ID NO: 5380317 - DNA, 25 bp, Homo sapien
ggaatgcattaagcttttagaagga

SEQ ID NO: 5380318 - DNA, 25 bp, Homo sapien
cactaaatgcaacagctagggaggc

SEQ ID NO: 5380319 - DNA, 25 bp, Homo sapien
caatgtggtatgaattctgcagggc

SEQ ID NO: 5380320 - DNA, 25 bp, Homo sapien
tggcccaaggtgtggctcaatcttg

SEQ ID NO: 5380321 - DNA, 25 bp, Homo sapien
caatcttgctgctcccaaaggtgta

SEQ ID NO: 5380322 - DNA, 25 bp, Homo sapien
cccattagaatgatccactgatgat

SEQ ID NO: 5380323 - DNA, 25 bp, Homo sapien
cactgatgattcttgactcaagcaa

SEQ ID NO: 5380324 - DNA, 25 bp, Homo sapien
tccacccattagaatgatccactga

SEQ ID NO: 5380325 - DNA, 25 bp, Homo sapien
ttattaccatgatggtggccaaata

SEQ ID NO: 5380326 - DNA, 25 bp, Homo sapien
tgattttatcaagggcataactgga

SEQ ID NO: 5380327 - DNA, 25 bp, Homo sapien
tctttttatctagcatccaatgtgg

SEQ ID NO: 5380328 - DNA, 25 bp, Homo sapien
ccaatgtggtatcttgctcataata

SEQ ID NO: 5380329 - DNA, 25 bp, Homo sapien
tacctcccttgactgtgctgccttt

SEQ ID NO: 5380330 - DNA, 25 bp, Homo sapien
gaatagatgacagaaagtcaaggcc

SEQ ID NO: 5380331 - DNA, 25 bp, Homo sapien
tccaggaaaaggttttgacatttga

SEQ ID NO: 5380332 - DNA, 25 bp, Homo sapien
ttgacatttgaatagatgacagaaa

SEQ ID NO: 5380333 - DNA, 25 bp, Homo sapien
ggttttgacatttgaatagatgaca

SEQ ID NO: 5380334 - DNA, 25 bp, Homo sapien
gatgaatttgttatcatcctgtgcc

SEQ ID NO: 5380335 - DNA, 25 bp, Homo sapien
tgtgccatagtccagcgttgatgct

SEQ ID NO: 5380336 - DNA, 25 bp, Homo sapien
ggcgggtagccattagaaatcagca

SEQ ID NO: 5380337 - DNA, 25 bp, Homo sapien
caatctgattggaactgtgataggc

SEQ ID NO: 5380338 - DNA, 25 bp, Homo sapien
aggctcatgcgacttgcccagagaa

SEQ ID NO: 5380339 - DNA, 25 bp, Homo sapien
ggctcatgcgacttgcccagagaag

SEQ ID NO: 5380340 - DNA, 25 bp, Homo sapien
gaggagaggctcatgcgacttgccc

SEQ ID NO: 5380341 - DNA, 25 bp, Homo sapien
ttgttttagtgggagaacatttgaa

SEQ ID NO: 5380342 - DNA, 25 bp, Homo sapien
ttagtgggagaacatttgaaagaat

SEQ ID NO: 5380343 - DNA, 25 bp, Homo sapien
tttagtgggagaacatttgaaagaa

SEQ ID NO: 5380344 - DNA, 25 bp, Homo sapien
ttaaaaggaacctcagaaggctctc

SEQ ID NO: 5380345 - DNA, 25 bp, Homo sapien
tgttccagagaggatttcgctcccc

SEQ ID NO: 5380346 - DNA, 25 bp, Homo sapien
gtaatccacccaccgaggtcattgg

SEQ ID NO: 5380347 - DNA, 25 bp, Homo sapien
tctttcacggcacttatcttaggtg

SEQ ID NO: 5380348 - DNA, 25 bp, Homo sapien
cctgtggcccgggcaaggtatttgc

SEQ ID NO: 5380349 - DNA, 25 bp, Homo sapien
gctcttgatttcaggctgtacagca

SEQ ID NO: 5380350 - DNA, 25 bp, Homo sapien
tcagtctgattcacattggatgctc

SEQ ID NO: 5380351 - DNA, 25 bp, Homo sapien
agtgtctgctctgtcttctactgag

SEQ ID NO: 5380352 - DNA, 25 bp, Homo sapien
tagcaccttgtattagagtctagta

SEQ ID NO: 5380353 - DNA, 25 bp, Homo sapien
tctcaaggtgctgtgacccccaggg

SEQ ID NO: 5380354 - DNA, 25 bp, Homo sapien
ccatggatctttctgtagcaccttg

SEQ ID NO: 5380355 - DNA, 25 bp, Homo sapien
aaggtgctgtgacccccagggcatg

SEQ ID NO: 5380356 - DNA, 25 bp, Homo sapien
tggctcataacacattcagtacatg

SEQ ID NO: 5380357 - DNA, 25 bp, Homo sapien
ggtattcagataaacttaaactaca

SEQ ID NO: 5380358 - DNA, 25 bp, Homo sapien
caggtactcttctgattacttgggt

SEQ ID NO: 5380359 - DNA, 25 bp, Homo sapien
gagtttagacatgaattatcttggc

SEQ ID NO: 5380360 - DNA, 25 bp, Homo sapien
ttactgggagatgtagaaatctcct

SEQ ID NO: 5380361 - DNA, 25 bp, Homo sapien
tactgggagatgtagaaatctcctt

SEQ ID NO: 5380362 - DNA, 25 bp, Homo sapien
actgggagatgtagaaatctccttc

SEQ ID NO: 5380363 - DNA, 25 bp, Homo sapien
gaattgtgacagctcgtggcttgat

SEQ ID NO: 5380364 - DNA, 25 bp, Homo sapien
attccacagccagatatcccatgat

SEQ ID NO: 5380365 - DNA, 25 bp, Homo sapien
tgtgacagctcgtggcttgatattg

SEQ ID NO: 5380366 - DNA, 25 bp, Homo sapien
ttccattccacagccagatatccca

SEQ ID NO: 5380367 - DNA, 25 bp, Homo sapien
tcctttgaaagtcccataattcaga

SEQ ID NO: 5380368 - DNA, 25 bp, Homo sapien
tataaacaatcctttgaaagtccca

SEQ ID NO: 5380369 - DNA, 25 bp, Homo sapien
aagtcccataattcagatcttctgc

SEQ ID NO: 5380370 - DNA, 25 bp, Homo sapien
ccataattcagatcttctgcatcct

SEQ ID NO: 5380371 - DNA, 25 bp, Homo sapien
gatgtgcacctttgaaccagagagc

SEQ ID NO: 5380372 - DNA, 25 bp, Homo sapien
cagagagccctagaaagagcagaag

SEQ ID NO: 5380373 - DNA, 25 bp, Homo sapien
tactgtaaattgtctatcggtgcca

SEQ ID NO: 5380374 - DNA, 25 bp, Homo sapien
gagcctctgagtacttcccatctga

SEQ ID NO: 5380375 - DNA, 25 bp, Homo sapien
ctgactgtttaacacttgccagtaa

SEQ ID NO: 5380376 - DNA, 25 bp, Homo sapien
tactgactgtttaacacttgccagt

SEQ ID NO: 5380377 - DNA, 25 bp, Homo sapien
cataatttcgatccaccttccacaa

SEQ ID NO: 5380378 - DNA, 25 bp, Homo sapien
tcttcacataatttcgatccacctt

SEQ ID NO: 5380379 - DNA, 25 bp, Homo sapien
actggagcagtatgatgtgatagca

SEQ ID NO: 5380380 - DNA, 25 bp, Homo sapien
gagcagtatgatgtgatagcagatg

SEQ ID NO: 5380381 - DNA, 25 bp, Homo sapien
gaaacacaactggagcagtatgatg

SEQ ID NO: 5380382 - DNA, 25 bp, Homo sapien
agaactgtggagtggatccagaaac

SEQ ID NO: 5380383 - DNA, 25 bp, Homo sapien
cattgatctcctgtggccggtatcc

SEQ ID NO: 5380384 - DNA, 25 bp, Homo sapien
tgtggccggtatccctgaaagcagc

SEQ ID NO: 5380385 - DNA, 25 bp, Homo sapien
ctagtgagaatacccaattcacatt

SEQ ID NO: 5380386 - DNA, 25 bp, Homo sapien
caacacctcttctagtgagaatacc

SEQ ID NO: 5380387 - DNA, 25 bp, Homo sapien
tctccaggatcacatgacaagtaac

SEQ ID NO: 5380388 - DNA, 25 bp, Homo sapien
cctcaatgacatggccattctagta

SEQ ID NO: 5380389 - DNA, 25 bp, Homo sapien
tcagcttggctctgttatggaactc

SEQ ID NO: 5380390 - DNA, 25 bp, Homo sapien
tcacatgacaagtaactagcagagg

SEQ ID NO: 5380391 - DNA, 25 bp, Homo sapien
ttgccgctgggacgcatacactatc

SEQ ID NO: 5380392 - DNA, 25 bp, Homo sapien
ctgcttgccgctgggacgcatacac

SEQ ID NO: 5380393 - DNA, 25 bp, Homo sapien
cgctgggacgcatacactatcccca

SEQ ID NO: 5380394 - DNA, 25 bp, Homo sapien
gctgggacgcatacactatccccat

SEQ ID NO: 5380395 - DNA, 25 bp, Homo sapien
caaagagtaaatgtagtgttgagtg

SEQ ID NO: 5380396 - DNA, 25 bp, Homo sapien
tcaaagagtaaatgtagtgttgagt

SEQ ID NO: 5380397 - DNA, 25 bp, Homo sapien
gttgagtgtggcttcatgaaagctg

SEQ ID NO: 5380398 - DNA, 25 bp, Homo sapien
aaataggagataggctgcgtttggc

SEQ ID NO: 5380399 - DNA, 25 bp, Homo sapien
gctgcgtttggctttgtctggcatt

SEQ ID NO: 5380400 - DNA, 25 bp, Homo sapien
atgaacaaagaggaacatcaagaaa

SEQ ID NO: 5380401 - DNA, 25 bp, Homo sapien
gagataggctgcgtttggctttgtc

SEQ ID NO: 5380402 - DNA, 25 bp, Homo sapien
cttggagctataatgcacgtggctg

SEQ ID NO: 5380403 - DNA, 25 bp, Homo sapien
cacagctggcgctgtcggcttgaag

SEQ ID NO: 5380404 - DNA, 25 bp, Homo sapien
tgatgctgttgtgacgaggcattgt

SEQ ID NO: 5380405 - DNA, 25 bp, Homo sapien
tataatgcacgtggctgccacacag

SEQ ID NO: 5380406 - DNA, 25 bp, Homo sapien
atagttccatggtccacagttccat

SEQ ID NO: 5380407 - DNA, 25 bp, Homo sapien
tagttccatggtccacagttccatg

SEQ ID NO: 5380408 - DNA, 25 bp, Homo sapien
tatagttccatggtccacagttcca

SEQ ID NO: 5380409 - DNA, 25 bp, Homo sapien
atatagttccatggtccacagttcc

SEQ ID NO: 5380410 - DNA, 25 bp, Homo sapien
gaaacatcatcaataatatgaaatt

SEQ ID NO: 5380411 - DNA, 25 bp, Homo sapien
tcatcaataatatgaaattctggcc

SEQ ID NO: 5380412 - DNA, 25 bp, Homo sapien
acagaaacatcatcaataatatgaa

SEQ ID NO: 5380413 - DNA, 25 bp, Homo sapien
taatatgaaattctggcctctcttt

SEQ ID NO: 5380414 - DNA, 25 bp, Homo sapien
tatctgtaggggagaaagatggcac

SEQ ID NO: 5380415 - DNA, 25 bp, Homo sapien
ctatctgtaggggagaaagatggca

SEQ ID NO: 5380416 - DNA, 25 bp, Homo sapien
agggacaaacaagatcccatgaaca

SEQ ID NO: 5380417 - DNA, 25 bp, Homo sapien
caaacaagatcccatgaacaaccag

SEQ ID NO: 5380418 - DNA, 25 bp, Homo sapien
gggacaaacaagatcccatgaacaa

SEQ ID NO: 5380419 - DNA, 25 bp, Homo sapien
gacaaacaagatcccatgaacaacc

SEQ ID NO: 5380420 - DNA, 25 bp, Homo sapien
cagatggaacctcacagaggtgagc

SEQ ID NO: 5380421 - DNA, 25 bp, Homo sapien
ccgcagctagctatagagggaggca

SEQ ID NO: 5380422 - DNA, 25 bp, Homo sapien
tcacagaggtgagcgtgttgccgca

SEQ ID NO: 5380423 - DNA, 25 bp, Homo sapien
gaggcaggatgccacaccagccatc

SEQ ID NO: 5380424 - DNA, 25 bp, Homo sapien
gaacttgcaacttaacagcataagg

SEQ ID NO: 5380425 - DNA, 25 bp, Homo sapien
acttcaggcccaccaatgcagtgct

SEQ ID NO: 5380426 - DNA, 25 bp, Homo sapien
cttaacagcataagggacttgacat

SEQ ID NO: 5380427 - DNA, 25 bp, Homo sapien
ccagaggaacttgcaacttaacagc

SEQ ID NO: 5380428 - DNA, 25 bp, Homo sapien
ctgtgaacaccagcactttattccc

SEQ ID NO: 5380429 - DNA, 25 bp, Homo sapien
ggctctgactcaggagctccccgtg

SEQ ID NO: 5380430 - DNA, 25 bp, Homo sapien
aggctctgactcaggagctccccgt

SEQ ID NO: 5380431 - DNA, 25 bp, Homo sapien
gctctgactcaggagctccccgtgg

SEQ ID NO: 5380432 - DNA, 25 bp, Homo sapien
cacaggatttgcactgggtgttgta

SEQ ID NO: 5380433 - DNA, 25 bp, Homo sapien
tgccgaggacaagattggcaaacag

SEQ ID NO: 5380434 - DNA, 25 bp, Homo sapien
tttgcactgggtgttgtaagagcta

SEQ ID NO: 5380435 - DNA, 25 bp, Homo sapien
gaactggagaccagagcctgccgag

SEQ ID NO: 5380436 - DNA, 25 bp, Homo sapien
gagatagaaaattagcacccagata

SEQ ID NO: 5380437 - DNA, 25 bp, Homo sapien
aatgctctgcggaaaagcaaagcag

SEQ ID NO: 5380438 - DNA, 25 bp, Homo sapien
gctgctttcctagatgtggagatca

SEQ ID NO: 5380439 - DNA, 25 bp, Homo sapien
taaagtactgagcaaagaacctgtg

SEQ ID NO: 5380440 - DNA, 25 bp, Homo sapien
tatttgagattgtgtcagactcagg

SEQ ID NO: 5380441 - DNA, 25 bp, Homo sapien
tggagggatatttgagattgtgtca

SEQ ID NO: 5380442 - DNA, 25 bp, Homo sapien
ggatatttgagattgtgtcagactc

SEQ ID NO: 5380443 - DNA, 25 bp, Homo sapien
agggatatttgagattgtgtcagac

SEQ ID NO: 5380444 - DNA, 25 bp, Homo sapien
gcaggtgtgcctgcaaatgcaggga

SEQ ID NO: 5380445 - DNA, 25 bp, Homo sapien
gccccacatccactgacatataaaa

SEQ ID NO: 5380446 - DNA, 25 bp, Homo sapien
gaaacaccaccccattaatcaaaga

SEQ ID NO: 5380447 - DNA, 25 bp, Homo sapien
ccattaatcaaagatgccccacatc

SEQ ID NO: 5380448 - DNA, 25 bp, Homo sapien
ggtcttggctggctatgacatccca

SEQ ID NO: 5380449 - DNA, 25 bp, Homo sapien
atgatgcctggggtccattctccca

SEQ ID NO: 5380450 - DNA, 25 bp, Homo sapien
aactggtagatgatgcctggggtcc

SEQ ID NO: 5380451 - DNA, 25 bp, Homo sapien
ggctggctatgacatcccaggtctc

SEQ ID NO: 5380452 - DNA, 25 bp, Homo sapien
atgtacgaaatatggctgctgtgag

SEQ ID NO: 5380453 - DNA, 25 bp, Homo sapien
gcgtctctaaatttgacatgatatg

SEQ ID NO: 5380454 - DNA, 25 bp, Homo sapien
tgacatgatatgtacgaaatatggc

SEQ ID NO: 5380455 - DNA, 25 bp, Homo sapien
tgatatgtacgaaatatggctgctg

SEQ ID NO: 5380456 - DNA, 25 bp, Homo sapien
tagaccagtgagtgggtccacagga

SEQ ID NO: 5380457 - DNA, 25 bp, Homo sapien
aagccccgcatcctgtagaccagtg

SEQ ID NO: 5380458 - DNA, 25 bp, Homo sapien
gcattctgtgtgacgtcaagccccg

SEQ ID NO: 5380459 - DNA, 25 bp, Homo sapien
gaaagagccctcatggtagcattct

SEQ ID NO: 5380460 - DNA, 25 bp, Homo sapien
cacaaacacgtattcactaagaggc

SEQ ID NO: 5380461 - DNA, 25 bp, Homo sapien
tcgctgaccacaaacacgtattcac

SEQ ID NO: 5380462 - DNA, 25 bp, Homo sapien
caaacacgtattcactaagaggcat

SEQ ID NO: 5380463 - DNA, 25 bp, Homo sapien
cgctgaccacaaacacgtattcact

SEQ ID NO: 5380464 - DNA, 25 bp, Homo sapien
cgaaggcaggctgtaggagtatcaa

SEQ ID NO: 5380465 - DNA, 25 bp, Homo sapien
cgtcaactaaggagacaattgctgc

SEQ ID NO: 5380466 - DNA, 25 bp, Homo sapien
gatcaaaatcgaaggcaggctgtag

SEQ ID NO: 5380467 - DNA, 25 bp, Homo sapien
tatactaggcacagtagaacatacg

SEQ ID NO: 5380468 - DNA, 25 bp, Homo sapien
cacaatgtaccaaaagtactatgcc

SEQ ID NO: 5380469 - DNA, 25 bp, Homo sapien
caatgtaccaaaagtactatgccaa

SEQ ID NO: 5380470 - DNA, 25 bp, Homo sapien
agccacaatgtaccaaaagtactat

SEQ ID NO: 5380471 - DNA, 25 bp, Homo sapien
gccacaatgtaccaaaagtactatg

SEQ ID NO: 5380472 - DNA, 25 bp, Homo sapien
ttcagcttcgtctccttgggtatcc

SEQ ID NO: 5380473 - DNA, 25 bp, Homo sapien
gcattattagcatgctgtctttgta

SEQ ID NO: 5380474 - DNA, 25 bp, Homo sapien
tcgtctccttgggtatccgatgtcc

SEQ ID NO: 5380475 - DNA, 25 bp, Homo sapien
gggtatccgatgtccacaatgtcaa

SEQ ID NO: 5380476 - DNA, 25 bp, Homo sapien
cagaatctcataatagaacacagaa

SEQ ID NO: 5380477 - DNA, 25 bp, Homo sapien
agaacacagaagttaagggccagac

SEQ ID NO: 5380478 - DNA, 25 bp, Homo sapien
tcatcaaaagcggtctttgcaagac

SEQ ID NO: 5380479 - DNA, 25 bp, Homo sapien
tttgcaagacagcaggctttctctg

SEQ ID NO: 5380480 - DNA, 25 bp, Homo sapien
cagcagtaacctcagtcaagtaacg

SEQ ID NO: 5380481 - DNA, 25 bp, Homo sapien
tcaccagcagtaacctcagtcaagt

SEQ ID NO: 5380482 - DNA, 25 bp, Homo sapien
gcagtaacctcagtcaagtaacggt

SEQ ID NO: 5380483 - DNA, 25 bp, Homo sapien
tcatcaccagcagtaacctcagtca

SEQ ID NO: 5380484 - DNA, 25 bp, Homo sapien
tccgtgactggatgttctgtgtccg

SEQ ID NO: 5380485 - DNA, 25 bp, Homo sapien
tcagcaccttccgttttttgttcaa

SEQ ID NO: 5380486 - DNA, 25 bp, Homo sapien
tccaagatgacttacgggctcctac

SEQ ID NO: 5380487 - DNA, 25 bp, Homo sapien
tccaaaagagacaatacatcattac

SEQ ID NO: 5380488 - DNA, 25 bp, Homo sapien
ctgtggacgaacaggggctcagcag

SEQ ID NO: 5380489 - DNA, 25 bp, Homo sapien
aaggatgcgggtgcggggaagtgag

SEQ ID NO: 5380490 - DNA, 25 bp, Homo sapien
cccaaggatgcgggtgcggggaagt

SEQ ID NO: 5380491 - DNA, 25 bp, Homo sapien
cctccccaaggatgcgggtgcgggg

SEQ ID NO: 5380492 - DNA, 25 bp, Homo sapien
ctccccaaggatgcgggtgcgggga

SEQ ID NO: 5380493 - DNA, 25 bp, Homo sapien
tctgctgccagggtacttgcaggct

SEQ ID NO: 5380494 - DNA, 25 bp, Homo sapien
tttatcattcctactctgctgccag

SEQ ID NO: 5380495 - DNA, 25 bp, Homo sapien
tcctactctgctgccagggtacttg

SEQ ID NO: 5380496 - DNA, 25 bp, Homo sapien
tgttttatcattcctactctgctgc

SEQ ID NO: 5380497 - DNA, 25 bp, Homo sapien
gctactgaccagaaagggattcatc

SEQ ID NO: 5380498 - DNA, 25 bp, Homo sapien
tttgctactgaccagaaagggattc

SEQ ID NO: 5380499 - DNA, 25 bp, Homo sapien
tcatctggtagtgatatccgtttga

SEQ ID NO: 5380500 - DNA, 25 bp, Homo sapien
agtgatatccgtttgaagtcagagc

SEQ ID NO: 5380501 - DNA, 25 bp, Homo sapien
ggccagtcaagcaatgccaatgcta

SEQ ID NO: 5380502 - DNA, 25 bp, Homo sapien
gccaatgctaattccgtaaactcac

SEQ ID NO: 5380503 - DNA, 25 bp, Homo sapien
caatgccaatgctaattccgtaaac

SEQ ID NO: 5380504 - DNA, 25 bp, Homo sapien
ggtccacgacctggccagtcaagca

SEQ ID NO: 5380505 - DNA, 25 bp, Homo sapien
cagccaagcaatagccaatgcttac

SEQ ID NO: 5380506 - DNA, 25 bp, Homo sapien
aaaacaagagccccaaggaagtgca

SEQ ID NO: 5380507 - DNA, 25 bp, Homo sapien
acaaaacaagagccccaaggaagtg

SEQ ID NO: 5380508 - DNA, 25 bp, Homo sapien
ggacctgtgaccaagcaggcatggg

SEQ ID NO: 5380509 - DNA, 25 bp, Homo sapien
tctgattgttgggtgatcatcaccg

SEQ ID NO: 5380510 - DNA, 25 bp, Homo sapien
cgaaggtctgattgttgggtgatca

SEQ ID NO: 5380511 - DNA, 25 bp, Homo sapien
caccctgtcgaaggtctgattgttg

SEQ ID NO: 5380512 - DNA, 25 bp, Homo sapien
ctcaatcagccaccctgtcgaaggt

SEQ ID NO: 5380513 - DNA, 25 bp, Homo sapien
tatggaatgtagcaaaagtagtgct

SEQ ID NO: 5380514 - DNA, 25 bp, Homo sapien
cctgaataacacataggtcaaagaa

SEQ ID NO: 5380515 - DNA, 25 bp, Homo sapien
acttaatattgaagatcacttttgg

SEQ ID NO: 5380516 - DNA, 25 bp, Homo sapien
tgggaaatcccaaaataattgaaga

SEQ ID NO: 5380517 - DNA, 25 bp, Homo sapien
aaatacaggccaacatattttatga

SEQ ID NO: 5380518 - DNA, 25 bp, Homo sapien
gtaatatcaattctctacagtctca

SEQ ID NO: 5380519 - DNA, 25 bp, Homo sapien
ttcaacacatcaacaggctaggaag

SEQ ID NO: 5380520 - DNA, 25 bp, Homo sapien
tattatggatatgcaaggctgattc

SEQ ID NO: 5380521 - DNA, 25 bp, Homo sapien
ctccacagcgccgactgctgtgggg

SEQ ID NO: 5380522 - DNA, 25 bp, Homo sapien
gaaggatggcagttcaacactttga

SEQ ID NO: 5380523 - DNA, 25 bp, Homo sapien
catacgaaggatggcagttcaacac

SEQ ID NO: 5380524 - DNA, 25 bp, Homo sapien
ctcgcatacgaaggatggcagttca

SEQ ID NO: 5380525 - DNA, 25 bp, Homo sapien
gatggcagttcaacactttgacatc

SEQ ID NO: 5380526 - DNA, 25 bp, Homo sapien
ccggcctggccaaaatgaggaaatc

SEQ ID NO: 5380527 - DNA, 25 bp, Homo sapien
ccgaggtgagcagaatacttgaagt

SEQ ID NO: 5380528 - DNA, 25 bp, Homo sapien
agcaggagcgaagccgggcgtgatg

SEQ ID NO: 5380529 - DNA, 25 bp, Homo sapien
tttttgagacatcatggcagaatgc

SEQ ID NO: 5380530 - DNA, 25 bp, Homo sapien
tgtggcctgcctgacattttgtacc

SEQ ID NO: 5380531 - DNA, 25 bp, Homo sapien
gcattcacttcccacactagtggct

SEQ ID NO: 5380532 - DNA, 25 bp, Homo sapien
tcttagagacatccacacttttttg

SEQ ID NO: 5380533 - DNA, 25 bp, Homo sapien
tactgcaagcagagaccttcaaccc

SEQ ID NO: 5380534 - DNA, 25 bp, Homo sapien
tgggaagggagcccaaggagagtga

SEQ ID NO: 5380535 - DNA, 25 bp, Homo sapien
tgaacctctttcggcagctccctgc

SEQ ID NO: 5380536 - DNA, 25 bp, Homo sapien
ctgaacctctttcggcagctccctg

SEQ ID NO: 5380537 - DNA, 25 bp, Homo sapien
aactgaacctctttcggcagctccc

SEQ ID NO: 5380538 - DNA, 25 bp, Homo sapien
tcccaataaggaactagcactgagg

SEQ ID NO: 5380539 - DNA, 25 bp, Homo sapien
ccactcccaataaggaactagcact

SEQ ID NO: 5380540 - DNA, 25 bp, Homo sapien
gaactagcactgaggatttggaagg

SEQ ID NO: 5380541 - DNA, 25 bp, Homo sapien
taaggaactagcactgaggatttgg

SEQ ID NO: 5380542 - DNA, 25 bp, Homo sapien
caagggtgcccgtggttgggcaagt

SEQ ID NO: 5380543 - DNA, 25 bp, Homo sapien
gagtcacatgatgctggtggtcagc

SEQ ID NO: 5380544 - DNA, 25 bp, Homo sapien
agctggacccttccaagggtgcccg

SEQ ID NO: 5380545 - DNA, 25 bp, Homo sapien
attcctccagatgtcactggcactg

SEQ ID NO: 5380546 - DNA, 25 bp, Homo sapien
tcactcaaggtcattgtagccatca

SEQ ID NO: 5380547 - DNA, 25 bp, Homo sapien
tcaaggtcattgtagccatcagacc

SEQ ID NO: 5380548 - DNA, 25 bp, Homo sapien
ggtcattgtagccatcagaccccac

SEQ ID NO: 5380549 - DNA, 25 bp, Homo sapien
actcaaggtcattgtagccatcaga

SEQ ID NO: 5380550 - DNA, 25 bp, Homo sapien
tggaaatacaggcactcggggcttt

SEQ ID NO: 5380551 - DNA, 25 bp, Homo sapien
tgggcccacgagaagagcatcagtt

SEQ ID NO: 5380552 - DNA, 25 bp, Homo sapien
tgcccaggctgctagcgggtaggag

SEQ ID NO: 5380553 - DNA, 25 bp, Homo sapien
gcatcagttcccgttccctgacctt

SEQ ID NO: 5380554 - DNA, 25 bp, Homo sapien
taacctggtagctccagagctcaac

SEQ ID NO: 5380555 - DNA, 25 bp, Homo sapien
gagctcaaccgtggtctcctggagt

SEQ ID NO: 5380556 - DNA, 25 bp, Homo sapien
gtcaatgtgtgtccgtattcttcca

SEQ ID NO: 5380557 - DNA, 25 bp, Homo sapien
tcctggagtccacacttctgctgac

SEQ ID NO: 5380558 - DNA, 25 bp, Homo sapien
tccgtgtgccagtcgagctgccagt

SEQ ID NO: 5380559 - DNA, 25 bp, Homo sapien
gagaaggtgatcacgttcactgagc

SEQ ID NO: 5380560 - DNA, 25 bp, Homo sapien
tgtgccagtcgagctgccagtgtgc

SEQ ID NO: 5380561 - DNA, 25 bp, Homo sapien
ttcactgagccctccgtgtgccagt

SEQ ID NO: 5380562 - DNA, 25 bp, Homo sapien
ccagggtggacggacccttcgtcat

SEQ ID NO: 5380563 - DNA, 25 bp, Homo sapien
ggtggacggacccttcgtcatcaga

SEQ ID NO: 5380564 - DNA, 25 bp, Homo sapien
tcccttcccatcctttgcatccatc

SEQ ID NO: 5380565 - DNA, 25 bp, Homo sapien
cggacccttcgtcatcagaaacatc

SEQ ID NO: 5380566 - DNA, 25 bp, Homo sapien
cgagaaaacgcagacttcttagtct

SEQ ID NO: 5380567 - DNA, 25 bp, Homo sapien
cccgagaaaacgcagacttcttagt

SEQ ID NO: 5380568 - DNA, 25 bp, Homo sapien
ctgtcgtggctgttcgtcactaccc

SEQ ID NO: 5380569 - DNA, 25 bp, Homo sapien
tgttcgtcactacccgagaaaacgc

SEQ ID NO: 5380570 - DNA, 25 bp, Homo sapien
gggagacaccgccaagcaggtgcag

SEQ ID NO: 5380571 - DNA, 25 bp, Homo sapien
tccaattctgtcatcgatgtggtgt

SEQ ID NO: 5380572 - DNA, 25 bp, Homo sapien
gtggtgttttgataccgcagcagca

SEQ ID NO: 5380573 - DNA, 25 bp, Homo sapien
ggcctctacacttccatccagatgg

SEQ ID NO: 5380574 - DNA, 25 bp, Homo sapien
cagataagaccggataagggttagg

SEQ ID NO: 5380575 - DNA, 25 bp, Homo sapien
gctggagcgtagaaggtgctacaaa

SEQ ID NO: 5380576 - DNA, 25 bp, Homo sapien
gttacacagcgtgctcctgatggca

SEQ ID NO: 5380577 - DNA, 25 bp, Homo sapien
catttgtccttgtcggttacacagc

SEQ ID NO: 5380578 - DNA, 25 bp, Homo sapien
ccttaacggtggagcatatggctgg

SEQ ID NO: 5380579 - DNA, 25 bp, Homo sapien
gactgaccaggctacttagacttct

SEQ ID NO: 5380580 - DNA, 25 bp, Homo sapien
tgtgtgctctgcgaccttctttgag

SEQ ID NO: 5380581 - DNA, 25 bp, Homo sapien
ttttgactcacaggaactcaggagc

SEQ ID NO: 5380582 - DNA, 25 bp, Homo sapien
ggctgtgactgcaaactgtgtttga

SEQ ID NO: 5380583 - DNA, 25 bp, Homo sapien
aggactcgcgctacaagaggccact

SEQ ID NO: 5380584 - DNA, 25 bp, Homo sapien
gattcttcccgagatagccacctgg

SEQ ID NO: 5380585 - DNA, 25 bp, Homo sapien
caccttttgctccacggaggtggga

SEQ ID NO: 5380586 - DNA, 25 bp, Homo sapien
tgcgctacatgtaccggcacaaggg

SEQ ID NO: 5380587 - DNA, 25 bp, Homo sapien
gggtgatctcagaggatgtttatcc

SEQ ID NO: 5380588 - DNA, 25 bp, Homo sapien
gacatcagcatatttgaatggcatc

SEQ ID NO: 5380589 - DNA, 25 bp, Homo sapien
taaaggcacttacagcccagcaagc

SEQ ID NO: 5380590 - DNA, 25 bp, Homo sapien
ttcatctccaagttagacgtgggtg

SEQ ID NO: 5380591 - DNA, 25 bp, Homo sapien
tgcaagggttccatcacagaggacc

SEQ ID NO: 5380592 - DNA, 25 bp, Homo sapien
ctgcaagggttccatcacagaggac

SEQ ID NO: 5380593 - DNA, 25 bp, Homo sapien
atgaatgtgcatgttatccgtgcac

SEQ ID NO: 5380594 - DNA, 25 bp, Homo sapien
catgcattgttccaaggcagctgat

SEQ ID NO: 5380595 - DNA, 25 bp, Homo sapien
tgctgagccatggacccaaatgggc

SEQ ID NO: 5380596 - DNA, 25 bp, Homo sapien
gaatcttgggcctgtgcatgtcctg

SEQ ID NO: 5380597 - DNA, 25 bp, Homo sapien
tattaatagctcagcggtcctggca

SEQ ID NO: 5380598 - DNA, 25 bp, Homo sapien
ggattccccgagtctggctgtgaag

SEQ ID NO: 5380599 - DNA, 25 bp, Homo sapien
acattcagtggtccaatgattccct

SEQ ID NO: 5380600 - DNA, 25 bp, Homo sapien
ttcagtggtccaatgattccctggg

SEQ ID NO: 5380601 - DNA, 25 bp, Homo sapien
tgcagatgcctctgcatccatgctc

SEQ ID NO: 5380602 - DNA, 25 bp, Homo sapien
tacacgggggctgcttgttccaata

SEQ ID NO: 5380603 - DNA, 25 bp, Homo sapien
attctgatccatagacattctcttt

SEQ ID NO: 5380604 - DNA, 25 bp, Homo sapien
tctctttttcatcacagcacactcg

SEQ ID NO: 5380605 - DNA, 25 bp, Homo sapien
agcacactcggcaaggcagccaggg

SEQ ID NO: 5380606 - DNA, 25 bp, Homo sapien
ccctgcagacgtggagcacccaggg

SEQ ID NO: 5380607 - DNA, 25 bp, Homo sapien
agggcagacatacggctctgcaggt

SEQ ID NO: 5380608 - DNA, 25 bp, Homo sapien
cccagggcagacatacggctctgca

SEQ ID NO: 5380609 - DNA, 25 bp, Homo sapien
caagaggccctgcagacgtggagca

SEQ ID NO: 5380610 - DNA, 25 bp, Homo sapien
tgtttgtaagagatagaaagctgcc

SEQ ID NO: 5380611 - DNA, 25 bp, Homo sapien
tgtaagagatagaaagctgccatgg

SEQ ID NO: 5380612 - DNA, 25 bp, Homo sapien
cattggtgtttgtaagagatagaaa

SEQ ID NO: 5380613 - DNA, 25 bp, Homo sapien
agagatagaaagctgccatggcacc

SEQ ID NO: 5380614 - DNA, 25 bp, Homo sapien
tgtgccagagtctgtgatgggcact

SEQ ID NO: 5380615 - DNA, 25 bp, Homo sapien
atgtgccagagtctgtgatgggcac

SEQ ID NO: 5380616 - DNA, 25 bp, Homo sapien
tatgtgccagagtctgtgatgggca

SEQ ID NO: 5380617 - DNA, 25 bp, Homo sapien
tgccagagtctgtgatgggcactgg

SEQ ID NO: 5380618 - DNA, 25 bp, Homo sapien
agggcagtcctcctcgccacaatga

SEQ ID NO: 5380619 - DNA, 25 bp, Homo sapien
aagggcagtcctcctcgccacaatg

SEQ ID NO: 5380620 - DNA, 25 bp, Homo sapien
ggcagtcctcctcgccacaatgacc

SEQ ID NO: 5380621 - DNA, 25 bp, Homo sapien
tgaagggcagtcctcctcgccacaa

SEQ ID NO: 5380622 - DNA, 25 bp, Homo sapien
gaccgcatatgccttccatgaatct

SEQ ID NO: 5380623 - DNA, 25 bp, Homo sapien
accgcatatgccttccatgaatctg

SEQ ID NO: 5380624 - DNA, 25 bp, Homo sapien
gcttctcatggattggctccgtgtc

SEQ ID NO: 5380625 - DNA, 25 bp, Homo sapien
catggattggctccgtgtctctgtg

SEQ ID NO: 5380626 - DNA, 25 bp, Homo sapien
gattggctccgtgtctctgtgaatt

SEQ ID NO: 5380627 - DNA, 25 bp, Homo sapien
ctggtcttcccaatgttgtcttcct

SEQ ID NO: 5380628 - DNA, 25 bp, Homo sapien
ctcatactgacagtgttaggggtgg

SEQ ID NO: 5380629 - DNA, 25 bp, Homo sapien
tgccagttagtaaacaggagcccat

SEQ ID NO: 5380630 - DNA, 25 bp, Homo sapien
gggagatgccagttagtaaacagga

SEQ ID NO: 5380631 - DNA, 25 bp, Homo sapien
tcatactgacagtgttaggggtggt

SEQ ID NO: 5380632 - DNA, 25 bp, Homo sapien
tggcagtatgagttgggactgggga

SEQ ID NO: 5380633 - DNA, 25 bp, Homo sapien
cacaatggtgttgctgtccagagtt

SEQ ID NO: 5380634 - DNA, 25 bp, Homo sapien
atggtgttgctgtccagagttccca

SEQ ID NO: 5380635 - DNA, 25 bp, Homo sapien
tgctgctcctcacaatggtgttgct

SEQ ID NO: 5380636 - DNA, 25 bp, Homo sapien
caatggtgttgctgtccagagttcc

SEQ ID NO: 5380637 - DNA, 25 bp, Homo sapien
ctcatgctctcgggtgccatctgga

SEQ ID NO: 5380638 - DNA, 25 bp, Homo sapien
tgctcatgctctcgggtgccatctg

SEQ ID NO: 5380639 - DNA, 25 bp, Homo sapien
ttgctcatgctctcgggtgccatct

SEQ ID NO: 5380640 - DNA, 25 bp, Homo sapien
catgctctcgggtgccatctggaag

SEQ ID NO: 5380641 - DNA, 25 bp, Homo sapien
tggccgtggattctcttgctgtgct

SEQ ID NO: 5380642 - DNA, 25 bp, Homo sapien
cagcaagaaccctctggccgtggat

SEQ ID NO: 5380643 - DNA, 25 bp, Homo sapien
tatagggactcgctgcttgtcagcc

SEQ ID NO: 5380644 - DNA, 25 bp, Homo sapien
caaatgttcacagtctagttttaag

SEQ ID NO: 5380645 - DNA, 25 bp, Homo sapien
ctttccactcatacgtcagggccat

SEQ ID NO: 5380646 - DNA, 25 bp, Homo sapien
gcattggaggacttgagtggcttta

SEQ ID NO: 5380647 - DNA, 25 bp, Homo sapien
cagcattggaggacttgagtggctt

SEQ ID NO: 5380648 - DNA, 25 bp, Homo sapien
tcagcattggaggacttgagtggct

SEQ ID NO: 5380649 - DNA, 25 bp, Homo sapien
attggaggacttgagtggctttaaa

SEQ ID NO: 5380650 - DNA, 25 bp, Homo sapien
tggagtgtgagggaccctgtggggg

SEQ ID NO: 5380651 - DNA, 25 bp, Homo sapien
ctggagtgtgagggaccctgtgggg

SEQ ID NO: 5380652 - DNA, 25 bp, Homo sapien
tgtgagggaccctgtgggggggtca

SEQ ID NO: 5380653 - DNA, 25 bp, Homo sapien
ttagtgtgagtacccccatgtgagc

SEQ ID NO: 5380654 - DNA, 25 bp, Homo sapien
gttctttagtgtgagtacccccatg

SEQ ID NO: 5380655 - DNA, 25 bp, Homo sapien
gagttctttagtgtgagtaccccca

SEQ ID NO: 5380656 - DNA, 25 bp, Homo sapien
tctttagtgtgagtacccccatgtg

SEQ ID NO: 5380657 - DNA, 25 bp, Homo sapien
tcatactggctgacgtgcagctaag

SEQ ID NO: 5380658 - DNA, 25 bp, Homo sapien
gctgacgtgcagctaaggtcttcct

SEQ ID NO: 5380659 - DNA, 25 bp, Homo sapien
tttccacaaccggtccccagcatgt

SEQ ID NO: 5380660 - DNA, 25 bp, Homo sapien
gacgtgcagctaaggtcttcctgct

SEQ ID NO: 5380661 - DNA, 25 bp, Homo sapien
gagggatggaagcagacaattgata

SEQ ID NO: 5380662 - DNA, 25 bp, Homo sapien
gggactgagacccaggagccccgca

SEQ ID NO: 5380663 - DNA, 25 bp, Homo sapien
aattgatagtgcaggatagctttcg

SEQ ID NO: 5380664 - DNA, 25 bp, Homo sapien
tttgggggtttccacaagaggcaga

SEQ ID NO: 5380665 - DNA, 25 bp, Homo sapien
gggatgggttagcagtgtcctcagc

SEQ ID NO: 5380666 - DNA, 25 bp, Homo sapien
gctcaacaagggctactataagcag

SEQ ID NO: 5380667 - DNA, 25 bp, Homo sapien
tggaggaacaccagtttgactaaaa

SEQ ID NO: 5380668 - DNA, 25 bp, Homo sapien
gcagatcacactgagactttttaac

SEQ ID NO: 5380669 - DNA, 25 bp, Homo sapien
ctgtggcgctcatggtcctccaatg

SEQ ID NO: 5380670 - DNA, 25 bp, Homo sapien
ctcatggtcctccaatggacactca

SEQ ID NO: 5380671 - DNA, 25 bp, Homo sapien
gtggcgctcatggtcctccaatgga

SEQ ID NO: 5380672 - DNA, 25 bp, Homo sapien
ggcgctcatggtcctccaatggaca

SEQ ID NO: 5380673 - DNA, 25 bp, Homo sapien
cataacatggaacactcaaaccagg

SEQ ID NO: 5380674 - DNA, 25 bp, Homo sapien
ggagcagagcatagagtgtggatct

SEQ ID NO: 5380675 - DNA, 25 bp, Homo sapien
tggaagcacagcacccataacatgg

SEQ ID NO: 5380676 - DNA, 25 bp, Homo sapien
aaccagggagcagagcatagagtgt

SEQ ID NO: 5380677 - DNA, 25 bp, Homo sapien
tggccttgcaggggttgagcttcat

SEQ ID NO: 5380678 - DNA, 25 bp, Homo sapien
ggcctgcttaattatcaatgggctg

SEQ ID NO: 5380679 - DNA, 25 bp, Homo sapien
gaaggccagcttgggtttgttaata

SEQ ID NO: 5380680 - DNA, 25 bp, Homo sapien
aagacagaatctccagcccagtggg

SEQ ID NO: 5380681 - DNA, 25 bp, Homo sapien
catattgtacaaaatgccgttttcc

SEQ ID NO: 5380682 - DNA, 25 bp, Homo sapien
caaccttctgtgaggtctactttgc

SEQ ID NO: 5380683 - DNA, 25 bp, Homo sapien
ttatctggctgtaggagtaccatgc

SEQ ID NO: 5380684 - DNA, 25 bp, Homo sapien
tgaaggagccttctatagaactcga

SEQ ID NO: 5380685 - DNA, 25 bp, Homo sapien
ggtctactttgctcccaaacaatat

SEQ ID NO: 5380686 - DNA, 25 bp, Homo sapien
caacaataacacaaaggctagcact

SEQ ID NO: 5380687 - DNA, 25 bp, Homo sapien
actgccaacaataacacaaaggcta

SEQ ID NO: 5380688 - DNA, 25 bp, Homo sapien
caataacacaaaggctagcactaat

SEQ ID NO: 5380689 - DNA, 25 bp, Homo sapien
acacaaaggctagcactaatatcat

SEQ ID NO: 5380690 - DNA, 25 bp, Homo sapien
gagccctggagctgcatatgagaag

SEQ ID NO: 5380691 - DNA, 25 bp, Homo sapien
agaagcctggagaataggcttcctt

SEQ ID NO: 5380692 - DNA, 25 bp, Homo sapien
tgttttgggccttggttcgatcaga

SEQ ID NO: 5380693 - DNA, 25 bp, Homo sapien
tgggccttggttcgatcagaccccc

SEQ ID NO: 5380694 - DNA, 25 bp, Homo sapien
ttgggccttggttcgatcagacccc

SEQ ID NO: 5380695 - DNA, 25 bp, Homo sapien
ttttgggccttggttcgatcagacc

SEQ ID NO: 5380696 - DNA, 25 bp, Homo sapien
ttgactctgtgatctccagcagggt

SEQ ID NO: 5380697 - DNA, 25 bp, Homo sapien
ccagcagggtcccttgaaactctgg

SEQ ID NO: 5380698 - DNA, 25 bp, Homo sapien
gagatggcagctgcaaaggcgtcag

SEQ ID NO: 5380699 - DNA, 25 bp, Homo sapien
ctgcaaaggcgtcaggccaggtgtc

SEQ ID NO: 5380700 - DNA, 25 bp, Homo sapien
agtgtccagaacttgttcactgcct

SEQ ID NO: 5380701 - DNA, 25 bp, Homo sapien
aactctctgccaactcccatgcagc

SEQ ID NO: 5380702 - DNA, 25 bp, Homo sapien
aactagcagatgacccccatgccag

SEQ ID NO: 5380703 - DNA, 25 bp, Homo sapien
ttaaactagcagatgacccccatgc

SEQ ID NO: 5380704 - DNA, 25 bp, Homo sapien
tcattgaagcttataatggtggcag

SEQ ID NO: 5380705 - DNA, 25 bp, Homo sapien
aggcttcgtgtcagggaatttcagg

SEQ ID NO: 5380706 - DNA, 25 bp, Homo sapien
cagttctcaggcttcgtgtcaggga

SEQ ID NO: 5380707 - DNA, 25 bp, Homo sapien
cattgaagcttataatggtggcaga

SEQ ID NO: 5380708 - DNA, 25 bp, Homo sapien
tggcccatcccctgagagtcttgtg

SEQ ID NO: 5380709 - DNA, 25 bp, Homo sapien
aggtggcccatcccctgagagtctt

SEQ ID NO: 5380710 - DNA, 25 bp, Homo sapien
catcccctgagagtcttgtggccat

SEQ ID NO: 5380711 - DNA, 25 bp, Homo sapien
tccacctggcagaagacgaagccag

SEQ ID NO: 5380712 - DNA, 25 bp, Homo sapien
agcatctgtgggttcgagaacttag

SEQ ID NO: 5380713 - DNA, 25 bp, Homo sapien
ggaccaaactgtgtaggagcattta

SEQ ID NO: 5380714 - DNA, 25 bp, Homo sapien
gtaggagcatttaggaggagcttcc

SEQ ID NO: 5380715 - DNA, 25 bp, Homo sapien
cttagattcagggaccaaactgtgt

SEQ ID NO: 5380716 - DNA, 25 bp, Homo sapien
tcaggccctcaaactggtcagtgac

SEQ ID NO: 5380717 - DNA, 25 bp, Homo sapien
catgctcaggccctcaaactggtca

SEQ ID NO: 5380718 - DNA, 25 bp, Homo sapien
caaactggtcagtgacacggtcagg

SEQ ID NO: 5380719 - DNA, 25 bp, Homo sapien
gccctcaaactggtcagtgacacgg

SEQ ID NO: 5380720 - DNA, 25 bp, Homo sapien
cacgaggtgcccagacagttgttca

SEQ ID NO: 5380721 - DNA, 25 bp, Homo sapien
taagtacaggcgttctcgcaccaga

SEQ ID NO: 5380722 - DNA, 25 bp, Homo sapien
tacttaaaagcattgatacgggccg

SEQ ID NO: 5380723 - DNA, 25 bp, Homo sapien
aaatgaagcctccatccgggatgca

SEQ ID NO: 5380724 - DNA, 25 bp, Homo sapien
ccgctttcttggtgctcgcccaagg

SEQ ID NO: 5380725 - DNA, 25 bp, Homo sapien
tttcttggtgctcgcccaaggatgg

SEQ ID NO: 5380726 - DNA, 25 bp, Homo sapien
ttggtgctcgcccaaggatggcttc

SEQ ID NO: 5380727 - DNA, 25 bp, Homo sapien
tgctcgcccaaggatggcttcgtgg

SEQ ID NO: 5380728 - DNA, 25 bp, Homo sapien
gatgagaagggaagtgggggcgtca

SEQ ID NO: 5380729 - DNA, 25 bp, Homo sapien
ggatgagaagggaagtgggggcgtc

SEQ ID NO: 5380730 - DNA, 25 bp, Homo sapien
tgagaagggaagtgggggcgtcagg

SEQ ID NO: 5380731 - DNA, 25 bp, Homo sapien
ctgggatgagaagggaagtgggggc

SEQ ID NO: 5380732 - DNA, 25 bp, Homo sapien
agggcagcccctggaaatctgtgct

SEQ ID NO: 5380733 - DNA, 25 bp, Homo sapien
cccttccgcagccttgcaaaccagg

SEQ ID NO: 5380734 - DNA, 25 bp, Homo sapien
ggccccgcgcgttgaacccaggagc

SEQ ID NO: 5380735 - DNA, 25 bp, Homo sapien
atctgtgctggcaagcccttccgca

SEQ ID NO: 5380736 - DNA, 25 bp, Homo sapien
tgatcaggctcacgtggccgaccct

SEQ ID NO: 5380737 - DNA, 25 bp, Homo sapien
caaacgcaccctcgcggcgcttcag

SEQ ID NO: 5380738 - DNA, 25 bp, Homo sapien
gtcgggcccatcacccagagcccca

SEQ ID NO: 5380739 - DNA, 25 bp, Homo sapien
ggccccacaggactgatcaggctca

SEQ ID NO: 5380740 - DNA, 25 bp, Homo sapien
acacatccagagtgcacagcttcat

SEQ ID NO: 5380741 - DNA, 25 bp, Homo sapien
tgaacacatccagagtgcacagctt

SEQ ID NO: 5380742 - DNA, 25 bp, Homo sapien
gaacacatccagagtgcacagcttc

SEQ ID NO: 5380743 - DNA, 25 bp, Homo sapien
ctgaacacatccagagtgcacagct

SEQ ID NO: 5380744 - DNA, 25 bp, Homo sapien
acgacacccagtgccgaaaacagag

SEQ ID NO: 5380745 - DNA, 25 bp, Homo sapien
aagagtcacgacacccagtgccgaa

SEQ ID NO: 5380746 - DNA, 25 bp, Homo sapien
acactctctcgcagagttcctggca

SEQ ID NO: 5380747 - DNA, 25 bp, Homo sapien
tggcagaaagagtcacgacacccag

SEQ ID NO: 5380748 - DNA, 25 bp, Homo sapien
ctgtggctggcaaattttaccgcca

SEQ ID NO: 5380749 - DNA, 25 bp, Homo sapien
cctgtggctggcaaattttaccgcc

SEQ ID NO: 5380750 - DNA, 25 bp, Homo sapien
tgtggctggcaaattttaccgccat

SEQ ID NO: 5380751 - DNA, 25 bp, Homo sapien
ctggaagcctcgggtgtctggggca

SEQ ID NO: 5380752 - DNA, 25 bp, Homo sapien
cactggaagcctcgggtgtctgggg

SEQ ID NO: 5380753 - DNA, 25 bp, Homo sapien
accactggaagcctcgggtgtctgg

SEQ ID NO: 5380754 - DNA, 25 bp, Homo sapien
ccactggaagcctcgggtgtctggg

SEQ ID NO: 5380755 - DNA, 25 bp, Homo sapien
gctgagatgcagaccttgaggatca

SEQ ID NO: 5380756 - DNA, 25 bp, Homo sapien
tggctgagatgcagaccttgaggat

SEQ ID NO: 5380757 - DNA, 25 bp, Homo sapien
ggtgtggctgagatgcagaccttga

SEQ ID NO: 5380758 - DNA, 25 bp, Homo sapien
caggagatcctgcaggtgtggctga

SEQ ID NO: 5380759 - DNA, 25 bp, Homo sapien
ttcaggatgcctggcaaccctgctc

SEQ ID NO: 5380760 - DNA, 25 bp, Homo sapien
ggcaaccctgctcacctccacccag

SEQ ID NO: 5380761 - DNA, 25 bp, Homo sapien
catttgacatcatcttcaggatgcc

SEQ ID NO: 5380762 - DNA, 25 bp, Homo sapien
atcatcttcaggatgcctggcaacc

SEQ ID NO: 5380763 - DNA, 25 bp, Homo sapien
cacagtgcatagatagatattaatt

SEQ ID NO: 5380764 - DNA, 25 bp, Homo sapien
taatggttatctattgggaagaaaa

SEQ ID NO: 5380765 - DNA, 25 bp, Homo sapien
catgggcagataaacccaaaaccaa

SEQ ID NO: 5380766 - DNA, 25 bp, Homo sapien
gggcttagcacctcaacatatcaat

SEQ ID NO: 5380767 - DNA, 25 bp, Homo sapien
taatccatgactgcaagactcgtgg

SEQ ID NO: 5380768 - DNA, 25 bp, Homo sapien
tgatacaggacgacacagggcctgc

SEQ ID NO: 5380769 - DNA, 25 bp, Homo sapien
catggacagtgcgatttaaatccca

SEQ ID NO: 5380770 - DNA, 25 bp, Homo sapien
tcctagtaaaagcagggtgggcctc

SEQ ID NO: 5380771 - DNA, 25 bp, Homo sapien
gatgctcttggcacatgatccgact

SEQ ID NO: 5380772 - DNA, 25 bp, Homo sapien
gctctgcggtagcaacggcacataa

SEQ ID NO: 5380773 - DNA, 25 bp, Homo sapien
tgggaatcttcgcagcagcagaacc

SEQ ID NO: 5380774 - DNA, 25 bp, Homo sapien
tgtactcccgcgaggtccaggattg

SEQ ID NO: 5380775 - DNA, 25 bp, Homo sapien
cccaaattggtgtccgggccatcct

SEQ ID NO: 5380776 - DNA, 25 bp, Homo sapien
cattcggtgatctcacaggactcct

SEQ ID NO: 5380777 - DNA, 25 bp, Homo sapien
tgcctcgaactccacgacatgggag

SEQ ID NO: 5380778 - DNA, 25 bp, Homo sapien
ctgcataggtagagagtccccgcac

SEQ ID NO: 5380779 - DNA, 25 bp, Homo sapien
gcagcgccaacgcactccattttcc

SEQ ID NO: 5380780 - DNA, 25 bp, Homo sapien
tgctcagggctaggcgtgcattgct

SEQ ID NO: 5380781 - DNA, 25 bp, Homo sapien
tcgccatccgggtcctgcctgagca

SEQ ID NO: 5380782 - DNA, 25 bp, Homo sapien
agccagtggcgccgctaccaaggtc

SEQ ID NO: 5380783 - DNA, 25 bp, Homo sapien
aaggtttatcgtgggtggatgctgc

SEQ ID NO: 5380784 - DNA, 25 bp, Homo sapien
gaaaggtttatcgtgggtggatgct

SEQ ID NO: 5380785 - DNA, 25 bp, Homo sapien
aggtttatcgtgggtggatgctgcc

SEQ ID NO: 5380786 - DNA, 25 bp, Homo sapien
cggaaaggtttatcgtgggtggatg

SEQ ID NO: 5380787 - DNA, 25 bp, Homo sapien
gctgatcggctgacgctgcagcttc

SEQ ID NO: 5380788 - DNA, 25 bp, Homo sapien
gattgcgagacgtctttaacccttg

SEQ ID NO: 5380789 - DNA, 25 bp, Homo sapien
tttaacccttgctgatcggctgacg

SEQ ID NO: 5380790 - DNA, 25 bp, Homo sapien
tttcaggattgcgagacgtctttaa

SEQ ID NO: 5380791 - DNA, 25 bp, Homo sapien
ctcattggtcagtgctggagcttga

SEQ ID NO: 5380792 - DNA, 25 bp, Homo sapien
ggagcttgattgtcgctgcctgtgc

SEQ ID NO: 5380793 - DNA, 25 bp, Homo sapien
gctgcccaggagatttctcgaggct

SEQ ID NO: 5380794 - DNA, 25 bp, Homo sapien
ggagatttctcgaggcttggcccat

SEQ ID NO: 5380795 - DNA, 25 bp, Homo sapien
tgtttgctgcccaggagatttctcg

SEQ ID NO: 5380796 - DNA, 25 bp, Homo sapien
cccaggagatttctcgaggcttggc

SEQ ID NO: 5380797 - DNA, 25 bp, Homo sapien
gaggaggcaggccccccttgggctg

SEQ ID NO: 5380798 - DNA, 25 bp, Homo sapien
gccccccttgggctgggcctgtgca

SEQ ID NO: 5380799 - DNA, 25 bp, Homo sapien
gaggcaggccccccttgggctgggc

SEQ ID NO: 5380800 - DNA, 25 bp, Homo sapien
caggccccccttgggctgggcctgt

SEQ ID NO: 5380801 - DNA, 25 bp, Homo sapien
agggatctgggcttgcatgagaaat

SEQ ID NO: 5380802 - DNA, 25 bp, Homo sapien
catgagaaatggaggttattggagg

SEQ ID NO: 5380803 - DNA, 25 bp, Homo sapien
gacaggccattccagacgggggttg

SEQ ID NO: 5380804 - DNA, 25 bp, Homo sapien
agctggttaagggatctgggcttgc

SEQ ID NO: 5380805 - DNA, 25 bp, Homo sapien
gttcccggcctgtgttccacagcgg

SEQ ID NO: 5380806 - DNA, 25 bp, Homo sapien
acagcggcccctctgtggatcccca

SEQ ID NO: 5380807 - DNA, 25 bp, Homo sapien
gcggcccctctgtggatccccaggg

SEQ ID NO: 5380808 - DNA, 25 bp, Homo sapien
gcctgtgttccacagcggcccctct

SEQ ID NO: 5380809 - DNA, 25 bp, Homo sapien
agacacaccgctgtggccgtggctg

SEQ ID NO: 5380810 - DNA, 25 bp, Homo sapien
gaacctcaaacgcaccacccagaca

SEQ ID NO: 5380811 - DNA, 25 bp, Homo sapien
ccagacacaccgctgtggccgtggc

SEQ ID NO: 5380812 - DNA, 25 bp, Homo sapien
tctgtccccggaacctcaaacgcac

SEQ ID NO: 5380813 - DNA, 25 bp, Homo sapien
aactattactaaagagagccgtgag

SEQ ID NO: 5380814 - DNA, 25 bp, Homo sapien
cgatggaactgaagcgcccagagcg

SEQ ID NO: 5380815 - DNA, 25 bp, Homo sapien
tcagacctgtccaagtctgccgatg

SEQ ID NO: 5380816 - DNA, 25 bp, Homo sapien
ctattactaaagagagccgtgagct

SEQ ID NO: 5380817 - DNA, 25 bp, Homo sapien
gccgaagcttcaggcaagcatggtg

SEQ ID NO: 5380818 - DNA, 25 bp, Homo sapien
gaggaggtgttcttcacacgcccgg

SEQ ID NO: 5380819 - DNA, 25 bp, Homo sapien
acactggtgaattccgccggacttg

SEQ ID NO: 5380820 - DNA, 25 bp, Homo sapien
agaaccacacatttttcgggaggag

SEQ ID NO: 5380821 - DNA, 25 bp, Homo sapien
gggaagacgccacggcacttctcca

SEQ ID NO: 5380822 - DNA, 25 bp, Homo sapien
cttcacgcccatgagccagccttca

SEQ ID NO: 5380823 - DNA, 25 bp, Homo sapien
tggttccagtcgctctccttcacgc

SEQ ID NO: 5380824 - DNA, 25 bp, Homo sapien
tcatgggaccctctcagtgaagttc

SEQ ID NO: 5380825 - DNA, 25 bp, Homo sapien
gtctgcttgaaatcctacccagcca

SEQ ID NO: 5380826 - DNA, 25 bp, Homo sapien
caacaagttacaagttctagaggga

SEQ ID NO: 5380827 - DNA, 25 bp, Homo sapien
gtgtcattgtcagcctggtcacaga

SEQ ID NO: 5380828 - DNA, 25 bp, Homo sapien
tgcttcaatcctgacacccgcaggg

SEQ ID NO: 5380829 - DNA, 25 bp, Homo sapien
ccgtgtagtcgtgctgggcctgtac

SEQ ID NO: 5380830 - DNA, 25 bp, Homo sapien
tgtcagtggccgtgtagtcgtgctg

SEQ ID NO: 5380831 - DNA, 25 bp, Homo sapien
ttgagctgcagctcgtctgtgtcag

SEQ ID NO: 5380832 - DNA, 25 bp, Homo sapien
cttgagctgcagctcgtctgtgtca

SEQ ID NO: 5380833 - DNA, 25 bp, Homo sapien
tgccgccctccacggtgccattcac

SEQ ID NO: 5380834 - DNA, 25 bp, Homo sapien
tccacggtgccattcacagttgctg

SEQ ID NO: 5380835 - DNA, 25 bp, Homo sapien
cactgccgccctccacggtgccatt

SEQ ID NO: 5380836 - DNA, 25 bp, Homo sapien
gggcaggtccaagcgcccggcccca

SEQ ID NO: 5380837 - DNA, 25 bp, Homo sapien
ctccaccacgacagcaggaagagag

SEQ ID NO: 5380838 - DNA, 25 bp, Homo sapien
ccaccacgacagcaggaagagagct

SEQ ID NO: 5380839 - DNA, 25 bp, Homo sapien
tccaccacgacagcaggaagagagc

SEQ ID NO: 5380840 - DNA, 25 bp, Homo sapien
ggctccagccgcaggttgggtccca

SEQ ID NO: 5380841 - DNA, 25 bp, Homo sapien
ggctgcttcacttgccgccgtctcc

SEQ ID NO: 5380842 - DNA, 25 bp, Homo sapien
tgggctccagccgcaggttgggtcc

SEQ ID NO: 5380843 - DNA, 25 bp, Homo sapien
cttcacttgccgccgtctcccctgg

SEQ ID NO: 5380844 - DNA, 25 bp, Homo sapien
ggccacttctgagtgctggaaccaa

SEQ ID NO: 5380845 - DNA, 25 bp, Homo sapien
tgagcacaacccagcgcaggtggtg

SEQ ID NO: 5380846 - DNA, 25 bp, Homo sapien
tctaaatgctcctcctgcgctggga

SEQ ID NO: 5380847 - DNA, 25 bp, Homo sapien
acctgggccgacactcagacttggc

SEQ ID NO: 5380848 - DNA, 25 bp, Homo sapien
gggcaggccccggctcggccgtctg

SEQ ID NO: 5380849 - DNA, 25 bp, Homo sapien
tgggcaggccccggctcggccgtct

SEQ ID NO: 5380850 - DNA, 25 bp, Homo sapien
ggcaggccccggctcggccgtctgg

SEQ ID NO: 5380851 - DNA, 25 bp, Homo sapien
gctgggctccccggaaggcaggctg

SEQ ID NO: 5380852 - DNA, 25 bp, Homo sapien
cgctgggctccccggaaggcaggct

SEQ ID NO: 5380853 - DNA, 25 bp, Homo sapien
ctgggctccccggaaggcaggctgc

SEQ ID NO: 5380854 - DNA, 25 bp, Homo sapien
tgggctccccggaaggcaggctgcc

SEQ ID NO: 5380855 - DNA, 25 bp, Homo sapien
gacacatacggaagagtggctcccc

SEQ ID NO: 5380856 - DNA, 25 bp, Homo sapien
caagagaaaatgtcaccagcggctg

SEQ ID NO: 5380857 - DNA, 25 bp, Homo sapien
caatgggcaggatcacaagacaaga

SEQ ID NO: 5380858 - DNA, 25 bp, Homo sapien
tgaccggcccacttctgtctggagg

SEQ ID NO: 5380859 - DNA, 25 bp, Homo sapien
tgccctacaaccaggaggtgatgag

SEQ ID NO: 5380860 - DNA, 25 bp, Homo sapien
ttagcacagaggttagagacagggc

SEQ ID NO: 5380861 - DNA, 25 bp, Homo sapien
gccaggtagactccaagatttgcag

SEQ ID NO: 5380862 - DNA, 25 bp, Homo sapien
caataggcaacatgagcccagggtt

SEQ ID NO: 5380863 - DNA, 25 bp, Homo sapien
ggtgggcccatgggcagtggtgggc

SEQ ID NO: 5380864 - DNA, 25 bp, Homo sapien
gactggcctgctccgagaaaggccc

SEQ ID NO: 5380865 - DNA, 25 bp, Homo sapien
ggtgccttcacagggctcgtcacgg

SEQ ID NO: 5380866 - DNA, 25 bp, Homo sapien
agactggcctgctccgagaaaggcc

SEQ ID NO: 5380867 - DNA, 25 bp, Homo sapien
acagggctcgtcacgggcgggaggg

SEQ ID NO: 5380868 - DNA, 25 bp, Homo sapien
agcagcagcagaggaggaagcagtt

SEQ ID NO: 5380869 - DNA, 25 bp, Homo sapien
agcagcagaggaggaagcagttagt

SEQ ID NO: 5380870 - DNA, 25 bp, Homo sapien
agaggaggaagcagttagtgttaag

SEQ ID NO: 5380871 - DNA, 25 bp, Homo sapien
gcagaggaggaagcagttagtgtta

SEQ ID NO: 5380872 - DNA, 25 bp, Homo sapien
tgggagccctcaccccaggcagaca

SEQ ID NO: 5380873 - DNA, 25 bp, Homo sapien
ctgggagccctcaccccaggcagac

SEQ ID NO: 5380874 - DNA, 25 bp, Homo sapien
catgcagagcaagcgcacatacacg

SEQ ID NO: 5380875 - DNA, 25 bp, Homo sapien
ccacgcatgcagagcaagcgcacat

SEQ ID NO: 5380876 - DNA, 25 bp, Homo sapien
tcacacacgggagcactgcccaaag

SEQ ID NO: 5380877 - DNA, 25 bp, Homo sapien
cacacaccacgcatgcagagcaagc

SEQ ID NO: 5380878 - DNA, 25 bp, Homo sapien
gtgcccgcctcaaactcccagtcat

SEQ ID NO: 5380879 - DNA, 25 bp, Homo sapien
ccagtcataggtccgcccgtggccg

SEQ ID NO: 5380880 - DNA, 25 bp, Homo sapien
aaactcccagtcataggtccgcccg

SEQ ID NO: 5380881 - DNA, 25 bp, Homo sapien
ccagtgcccgcctcaaactcccagt

SEQ ID NO: 5380882 - DNA, 25 bp, Homo sapien
acagggaggtcactctctggcgaca

SEQ ID NO: 5380883 - DNA, 25 bp, Homo sapien
cgtgggcacccgtgtcatggacaaa

SEQ ID NO: 5380884 - DNA, 25 bp, Homo sapien
taagctgggccagactagcatggga

SEQ ID NO: 5380885 - DNA, 25 bp, Homo sapien
tccagtgagcccaggaataggcatg

SEQ ID NO: 5380886 - DNA, 25 bp, Homo sapien
ttccctgacagccacacgtcctcca

SEQ ID NO: 5380887 - DNA, 25 bp, Homo sapien
ctctgccatagcacccactgcgtcg

SEQ ID NO: 5380888 - DNA, 25 bp, Homo sapien
ggagtgtgcacacggcagttctgcc

SEQ ID NO: 5380889 - DNA, 25 bp, Homo sapien
attccaggaccttccaactctccct

SEQ ID NO: 5380890 - DNA, 25 bp, Homo sapien
tcagggacaaacgtgtcctcaaaca

SEQ ID NO: 5380891 - DNA, 25 bp, Homo sapien
cctgcttgacttccttggacggggt

SEQ ID NO: 5380892 - DNA, 25 bp, Homo sapien
agggacaaacgtgtcctcaaacagg

SEQ ID NO: 5380893 - DNA, 25 bp, Homo sapien
cttgacttccttggacggggtgtgt

SEQ ID NO: 5380894 - DNA, 25 bp, Homo sapien
ccagaaacgctgtgtggagagagaa

SEQ ID NO: 5380895 - DNA, 25 bp, Homo sapien
ctgaggcaggcggtccagaaacgct

SEQ ID NO: 5380896 - DNA, 25 bp, Homo sapien
gcaggacgcagcaaatgaagagtca

SEQ ID NO: 5380897 - DNA, 25 bp, Homo sapien
acggttagtcacacctcaggccaca

SEQ ID NO: 5380898 - DNA, 25 bp, Homo sapien
tgggcttcctcatgcatcaggtgat

SEQ ID NO: 5380899 - DNA, 25 bp, Homo sapien
tcagacgagtgtatcccagaggaag

SEQ ID NO: 5380900 - DNA, 25 bp, Homo sapien
cccactggcctggtgagaagactgg

SEQ ID NO: 5380901 - DNA, 25 bp, Homo sapien
aacagtcgttgagagacagccgggc

SEQ ID NO: 5380902 - DNA, 25 bp, Homo sapien
aaagcatcgggtccatagctgccca

SEQ ID NO: 5380903 - DNA, 25 bp, Homo sapien
gggacctgctaccaagacatcactc

SEQ ID NO: 5380904 - DNA, 25 bp, Homo sapien
acagatgcctcccggaagcatgcca

SEQ ID NO: 5380905 - DNA, 25 bp, Homo sapien
actgggcaaagcatcgggtccatag

SEQ ID NO: 5380906 - DNA, 25 bp, Homo sapien
ccggccggctctggctcgtggttga

SEQ ID NO: 5380907 - DNA, 25 bp, Homo sapien
cgccggccggctctggctcgtggtt

SEQ ID NO: 5380908 - DNA, 25 bp, Homo sapien
gccggccggctctggctcgtggttg

SEQ ID NO: 5380909 - DNA, 25 bp, Homo sapien
cggccggctctggctcgtggttgac

SEQ ID NO: 5380910 - DNA, 25 bp, Homo sapien
gttcccttttgcaggcgcgttgtca

SEQ ID NO: 5380911 - DNA, 25 bp, Homo sapien
ccatctggaggcgaagggctcttgt

SEQ ID NO: 5380912 - DNA, 25 bp, Homo sapien
tctggaggcgaagggctcttgttcc

SEQ ID NO: 5380913 - DNA, 25 bp, Homo sapien
gggagccatctggaggcgaagggct

SEQ ID NO: 5380914 - DNA, 25 bp, Homo sapien
cagccacgtcctccattgctaagtg

SEQ ID NO: 5380915 - DNA, 25 bp, Homo sapien
ccattgctaagtgcgctggtggccc

SEQ ID NO: 5380916 - DNA, 25 bp, Homo sapien
accaccagggctagacaagtgtggg

SEQ ID NO: 5380917 - DNA, 25 bp, Homo sapien
gggcgcccagaggaacgtgctaaat

SEQ ID NO: 5380918 - DNA, 25 bp, Homo sapien
gttcttctttctgcgcagccgcgaa

SEQ ID NO: 5380919 - DNA, 25 bp, Homo sapien
tctttctgcgcagccgcgaaaacag

SEQ ID NO: 5380920 - DNA, 25 bp, Homo sapien
gcgcagccgcgaaaacagtttactt

SEQ ID NO: 5380921 - DNA, 25 bp, Homo sapien
ctgcgcagccgcgaaaacagtttac

SEQ ID NO: 5380922 - DNA, 25 bp, Homo sapien
gaaggtgttgctcccgtgttgcttc

SEQ ID NO: 5380923 - DNA, 25 bp, Homo sapien
tgaccgtgaaggtgttgctcccgtg

SEQ ID NO: 5380924 - DNA, 25 bp, Homo sapien
cgtgaaggtgttgctcccgtgttgc

SEQ ID NO: 5380925 - DNA, 25 bp, Homo sapien
gaccgtgaaggtgttgctcccgtgt

SEQ ID NO: 5380926 - DNA, 25 bp, Homo sapien
cgtgttgacgtagaaacctacgcgg

SEQ ID NO: 5380927 - DNA, 25 bp, Homo sapien
cccgcgatgctctggaacgtgttga

SEQ ID NO: 5380928 - DNA, 25 bp, Homo sapien
tccaggcccgcgatgctctggaacg

SEQ ID NO: 5380929 - DNA, 25 bp, Homo sapien
tctggaacgtgttgacgtagaaacc

SEQ ID NO: 5380930 - DNA, 25 bp, Homo sapien
tgttccacagggacggcagctcctc

SEQ ID NO: 5380931 - DNA, 25 bp, Homo sapien
ctgttccacagggacggcagctcct

SEQ ID NO: 5380932 - DNA, 25 bp, Homo sapien
ctggggggcagcacgggtcattccc

SEQ ID NO: 5380933 - DNA, 25 bp, Homo sapien
tggggggcagcacgggtcattcccc

SEQ ID NO: 5380934 - DNA, 25 bp, Homo sapien
ctcttggccagtgcgctgggaccag

SEQ ID NO: 5380935 - DNA, 25 bp, Homo sapien
ccctcttggccagtgcgctgggacc

SEQ ID NO: 5380936 - DNA, 25 bp, Homo sapien
cagggctccgggcaagacagaggct

SEQ ID NO: 5380937 - DNA, 25 bp, Homo sapien
ccatgctggcgacctccccctgcag

SEQ ID NO: 5380938 - DNA, 25 bp, Homo sapien
aggcacctctaggaatgtcaggggg

SEQ ID NO: 5380939 - DNA, 25 bp, Homo sapien
actcaggcacctctaggaatgtcag

SEQ ID NO: 5380940 - DNA, 25 bp, Homo sapien
ctgtccccaccagagggagaccaga

SEQ ID NO: 5380941 - DNA, 25 bp, Homo sapien
tcaggcacctctaggaatgtcaggg

SEQ ID NO: 5380942 - DNA, 25 bp, Homo sapien
caggccctgcatcctccaggcactc

SEQ ID NO: 5380943 - DNA, 25 bp, Homo sapien
agggcaggccctgcatcctccaggc

SEQ ID NO: 5380944 - DNA, 25 bp, Homo sapien
gcaggccctgcatcctccaggcact

SEQ ID NO: 5380945 - DNA, 25 bp, Homo sapien
cccagggcaggccctgcatcctcca

SEQ ID NO: 5380946 - DNA, 25 bp, Homo sapien
tcaggccccatcacacggccacaga

SEQ ID NO: 5380947 - DNA, 25 bp, Homo sapien
caggcagtggtgctcaggccccatc

SEQ ID NO: 5380948 - DNA, 25 bp, Homo sapien
aggccccatcacacggccacagagt

SEQ ID NO: 5380949 - DNA, 25 bp, Homo sapien
ggcagtggtgctcaggccccatcac

SEQ ID NO: 5380950 - DNA, 25 bp, Homo sapien
gtgagtcacagaccctgcccggtgc

SEQ ID NO: 5380951 - DNA, 25 bp, Homo sapien
agtcacagaccctgcccggtgccca

SEQ ID NO: 5380952 - DNA, 25 bp, Homo sapien
tcacagaccctgcccggtgcccagc

SEQ ID NO: 5380953 - DNA, 25 bp, Homo sapien
gagtcacagaccctgcccggtgccc

SEQ ID NO: 5380954 - DNA, 25 bp, Homo sapien
actgtaacccatttggagggcaggg

SEQ ID NO: 5380955 - DNA, 25 bp, Homo sapien
gaaggcgccagcacgtgcaaggtta

SEQ ID NO: 5380956 - DNA, 25 bp, Homo sapien
gcgccagcacgtgcaaggttagaag

SEQ ID NO: 5380957 - DNA, 25 bp, Homo sapien
agcacgtgcaaggttagaagccagt

SEQ ID NO: 5380958 - DNA, 25 bp, Homo sapien
ccagcacgtgcaaggttagaagcca

SEQ ID NO: 5380959 - DNA, 25 bp, Homo sapien
gcggctttctcaagcagcgagacag

SEQ ID NO: 5380960 - DNA, 25 bp, Homo sapien
gagctacgagatgagcctgcagttt

SEQ ID NO: 5380961 - DNA, 25 bp, Homo sapien
gcagtttgccttggcaccactgggg

SEQ ID NO: 5380962 - DNA, 25 bp, Homo sapien
gatttcggagcaggttagtttgagc

SEQ ID NO: 5380963 - DNA, 25 bp, Homo sapien
gaagggactcgtagtggtgccgggc

SEQ ID NO: 5380964 - DNA, 25 bp, Homo sapien
cagtttgaagggactcgtagtggtg

SEQ ID NO: 5380965 - DNA, 25 bp, Homo sapien
ttgcgcccccgcttggcaatgcgtg

SEQ ID NO: 5380966 - DNA, 25 bp, Homo sapien
tgcgcccccgcttggcaatgcgtga

SEQ ID NO: 5380967 - DNA, 25 bp, Homo sapien
ggagggcactaagcggggcctggca

SEQ ID NO: 5380968 - DNA, 25 bp, Homo sapien
ggcagacagaggagggcactaagcg

SEQ ID NO: 5380969 - DNA, 25 bp, Homo sapien
acagaggagggcactaagcggggcc

SEQ ID NO: 5380970 - DNA, 25 bp, Homo sapien
gcagacagaggagggcactaagcgg

SEQ ID NO: 5380971 - DNA, 25 bp, Homo sapien
atgagcccatgtgtccgtgtccacc

SEQ ID NO: 5380972 - DNA, 25 bp, Homo sapien
cactgtgtgaaaccacttccttgca

SEQ ID NO: 5380973 - DNA, 25 bp, Homo sapien
ggtgacgtgtcagccaagtcttttc

SEQ ID NO: 5380974 - DNA, 25 bp, Homo sapien
cctgaggctagcatgagcatgacac

SEQ ID NO: 5380975 - DNA, 25 bp, Homo sapien
gaccactcgcctcggtggataccag

SEQ ID NO: 5380976 - DNA, 25 bp, Homo sapien
aggcttccatgtgcacgttaccggg

SEQ ID NO: 5380977 - DNA, 25 bp, Homo sapien
tggataccagagacactgccagctc

SEQ ID NO: 5380978 - DNA, 25 bp, Homo sapien
ggatctcgtccaacccaatggtcaa

SEQ ID NO: 5380979 - DNA, 25 bp, Homo sapien
accagcttctggtggtaatccatcc

SEQ ID NO: 5380980 - DNA, 25 bp, Homo sapien
gaactggcccaggtacgtgtccatg

SEQ ID NO: 5380981 - DNA, 25 bp, Homo sapien
ggcccaggtacgtgtccatggtcag

SEQ ID NO: 5380982 - DNA, 25 bp, Homo sapien
ttctggtggtaatccatccacagca

SEQ ID NO: 5380983 - DNA, 25 bp, Homo sapien
ctcctgcagacactcattcagcttc

SEQ ID NO: 5380984 - DNA, 25 bp, Homo sapien
tgccgggccaatcgggctcatacac

SEQ ID NO: 5380985 - DNA, 25 bp, Homo sapien
ctctgcgatcttgtttgcctcatcc

SEQ ID NO: 5380986 - DNA, 25 bp, Homo sapien
tcttgtttgcctcatccctgccggg

SEQ ID NO: 5380987 - DNA, 25 bp, Homo sapien
ggtaggtccggagatccttctgcag

SEQ ID NO: 5380988 - DNA, 25 bp, Homo sapien
caggtaggtccggagatccttctgc

SEQ ID NO: 5380989 - DNA, 25 bp, Homo sapien
aggccaggtaggtccggagatcctt

SEQ ID NO: 5380990 - DNA, 25 bp, Homo sapien
ttgacggaggccaggtaggtccgga

SEQ ID NO: 5380991 - DNA, 25 bp, Homo sapien
tggacgcactgctcaaactgctcat

SEQ ID NO: 5380992 - DNA, 25 bp, Homo sapien
gctcaaactgctcatccttggtctc

SEQ ID NO: 5380993 - DNA, 25 bp, Homo sapien
aattctggacgcactgctcaaactg

SEQ ID NO: 5380994 - DNA, 25 bp, Homo sapien
tgttgaaattctggacgcactgctc

SEQ ID NO: 5380995 - DNA, 25 bp, Homo sapien
ttctccgcatgactctattccctgg

SEQ ID NO: 5380996 - DNA, 25 bp, Homo sapien
cccaggcccatgaatgccacaggca

SEQ ID NO: 5380997 - DNA, 25 bp, Homo sapien
catgactctattccctgggcccagg

SEQ ID NO: 5380998 - DNA, 25 bp, Homo sapien
gagccatcccggaacaaggagggca

SEQ ID NO: 5380999 - DNA, 25 bp, Homo sapien
tgccggcccttgcaggtcctgtgct

SEQ ID NO: 5381000 - DNA, 25 bp, Homo sapien
cctgccggcccttgcaggtcctgtg

SEQ ID NO: 5381001 - DNA, 25 bp, Homo sapien
ctgccggcccttgcaggtcctgtgc

SEQ ID NO: 5381002 - DNA, 25 bp, Homo sapien
tccgcatcatctcctccccacctgc

SEQ ID NO: 5381003 - DNA, 25 bp, Homo sapien
cttccgcatcatctcctccccacct

SEQ ID NO: 5381004 - DNA, 25 bp, Homo sapien
ttccgcatcatctcctccccacctg

SEQ ID NO: 5381005 - DNA, 25 bp, Homo sapien
agaagtgagccctgtctcgcccctt

SEQ ID NO: 5381006 - DNA, 25 bp, Homo sapien
gtgccccggcgttctcacaccgagg

SEQ ID NO: 5381007 - DNA, 25 bp, Homo sapien
ggccacggaggcaggatgcacaccc

SEQ ID NO: 5381008 - DNA, 25 bp, Homo sapien
gaagggcgggctgagaagtgagccc

SEQ ID NO: 5381009 - DNA, 25 bp, Homo sapien
cacagtagcctagactttctgagct

SEQ ID NO: 5381010 - DNA, 25 bp, Homo sapien
gctcacagtagcctagactttctga

SEQ ID NO: 5381011 - DNA, 25 bp, Homo sapien
ttctgagcttaaacgatccgcccac

SEQ ID NO: 5381012 - DNA, 25 bp, Homo sapien
ctttctgagcttaaacgatccgccc

SEQ ID NO: 5381013 - DNA, 25 bp, Homo sapien
tgcaaagcatgaccaccagggaatc

SEQ ID NO: 5381014 - DNA, 25 bp, Homo sapien
aaatcgagggtcagggcggtcactc

SEQ ID NO: 5381015 - DNA, 25 bp, Homo sapien
caccctgaggtgatgaccgttggtc

SEQ ID NO: 5381016 - DNA, 25 bp, Homo sapien
taagctccacaaagctcacagtgca

SEQ ID NO: 5381017 - DNA, 25 bp, Homo sapien
gcatcttcatcgttgaaggctcccg

SEQ ID NO: 5381018 - DNA, 25 bp, Homo sapien
cccgtgtcatgtaaaacattgatta

SEQ ID NO: 5381019 - DNA, 25 bp, Homo sapien
tggtccttgcatcttcatcgttgaa

SEQ ID NO: 5381020 - DNA, 25 bp, Homo sapien
tcgttgaaggctcccgtgtcatgta

SEQ ID NO: 5381021 - DNA, 25 bp, Homo sapien
gggtgagatgaaccatctacataag

SEQ ID NO: 5381022 - DNA, 25 bp, Homo sapien
gagatgaaccatctacataagtaac

SEQ ID NO: 5381023 - DNA, 25 bp, Homo sapien
ctacataagtaactcgggtccaggg

SEQ ID NO: 5381024 - DNA, 25 bp, Homo sapien
gaaccatctacataagtaactcggg

SEQ ID NO: 5381025 - DNA, 25 bp, Homo sapien
tactgccccgagaatgacatcaaag

SEQ ID NO: 5381026 - DNA, 25 bp, Homo sapien
gcctactgccccgagaatgacatca

SEQ ID NO: 5381027 - DNA, 25 bp, Homo sapien
acagcccttgcctactgccccgaga

SEQ ID NO: 5381028 - DNA, 25 bp, Homo sapien
cttgcctactgccccgagaatgaca

SEQ ID NO: 5381029 - DNA, 25 bp, Homo sapien
agcaccagatcctggcgaaggacca

SEQ ID NO: 5381030 - DNA, 25 bp, Homo sapien
ccagatcctggcgaaggaccaggcc

SEQ ID NO: 5381031 - DNA, 25 bp, Homo sapien
ccctcgaaagcgctcctctagaggt

SEQ ID NO: 5381032 - DNA, 25 bp, Homo sapien
cgctcctctagaggtgacagcacca

SEQ ID NO: 5381033 - DNA, 25 bp, Homo sapien
ttgctggcgatctttcccgccgtca

SEQ ID NO: 5381034 - DNA, 25 bp, Homo sapien
gcttcttctgcacgttgctggcgat

SEQ ID NO: 5381035 - DNA, 25 bp, Homo sapien
ccgccgtcacccctttactgcccat

SEQ ID NO: 5381036 - DNA, 25 bp, Homo sapien
tgcgcgcgggtgagcttcttctgca

SEQ ID NO: 5381037 - DNA, 25 bp, Homo sapien
acccgacagcggagccaactgacgg

SEQ ID NO: 5381038 - DNA, 25 bp, Homo sapien
gccagcgagctagccagcgagcgac

SEQ ID NO: 5381039 - DNA, 25 bp, Homo sapien
agcgtgcgccggacgggcgagcgag

SEQ ID NO: 5381040 - DNA, 25 bp, Homo sapien
cccctccggacaataagctgccttt

SEQ ID NO: 5381041 - DNA, 25 bp, Homo sapien
cgccgggatcgaggaacgagatctc

SEQ ID NO: 5381042 - DNA, 25 bp, Homo sapien
tgttcctactttacaaccaacgcgc

SEQ ID NO: 5381043 - DNA, 25 bp, Homo sapien
gcattatttcattcggtctccgtgg

SEQ ID NO: 5381044 - DNA, 25 bp, Homo sapien
tctccgtggccctagaggtaggtgc

SEQ ID NO: 5381045 - DNA, 25 bp, Homo sapien
gggctgactgtattcttattctgca

SEQ ID NO: 5381046 - DNA, 25 bp, Homo sapien
cagcaaatgataagcagagattctg

SEQ ID NO: 5381047 - DNA, 25 bp, Homo sapien
gcgccgctgatgtaggtcacacaga

SEQ ID NO: 5381048 - DNA, 25 bp, Homo sapien
tccatggatgcccaacccacagatg

SEQ ID NO: 5381049 - DNA, 25 bp, Homo sapien
tggtcgtttttctaaccattctcta

SEQ ID NO: 5381050 - DNA, 25 bp, Homo sapien
ttctaaccattctctaaaagtgatt

SEQ ID NO: 5381051 - DNA, 25 bp, Homo sapien
tctaaccattctctaaaagtgattt

SEQ ID NO: 5381052 - DNA, 25 bp, Homo sapien
ttttctaaccattctctaaaagtga

SEQ ID NO: 5381053 - DNA, 25 bp, Homo sapien
ctgctgttgtatcccatgagagtcc

SEQ ID NO: 5381054 - DNA, 25 bp, Homo sapien
tgaaatctgatcatgggcccagctg

SEQ ID NO: 5381055 - DNA, 25 bp, Homo sapien
cagctgctgttgtatcccatgagag

SEQ ID NO: 5381056 - DNA, 25 bp, Homo sapien
aaatctgatcatgggcccagctgct

SEQ ID NO: 5381057 - DNA, 25 bp, Homo sapien
cattcgtggaggtcatgaaggcaga

SEQ ID NO: 5381058 - DNA, 25 bp, Homo sapien
gattttgacccattcgtggaggtca

SEQ ID NO: 5381059 - DNA, 25 bp, Homo sapien
cccattcgtggaggtcatgaaggca

SEQ ID NO: 5381060 - DNA, 25 bp, Homo sapien
tgacccattcgtggaggtcatgaag

SEQ ID NO: 5381061 - DNA, 25 bp, Homo sapien
ctggaagcctttcaggttcaccagc

SEQ ID NO: 5381062 - DNA, 25 bp, Homo sapien
cctggaagcctttcaggttcaccag

SEQ ID NO: 5381063 - DNA, 25 bp, Homo sapien
tggaagcctttcaggttcaccagct

SEQ ID NO: 5381064 - DNA, 25 bp, Homo sapien
tgcagaacaggattaagtggcccag

SEQ ID NO: 5381065 - DNA, 25 bp, Homo sapien
gatgagttaccacttgatgtcctag

SEQ ID NO: 5381066 - DNA, 25 bp, Homo sapien
gactgcacaccatgtttgtcattat

SEQ ID NO: 5381067 - DNA, 25 bp, Homo sapien
acctctttatgtctcagagtcccca

SEQ ID NO: 5381068 - DNA, 25 bp, Homo sapien
gtacatcaggttgtccaaaaagagg

SEQ ID NO: 5381069 - DNA, 25 bp, Homo sapien
ctatactgtaaggcagtggttttga

SEQ ID NO: 5381070 - DNA, 25 bp, Homo sapien
gaggcactgcccgtttcttggtaag

SEQ ID NO: 5381071 - DNA, 25 bp, Homo sapien
gctgaccggcagtcataagaagctg

SEQ ID NO: 5381072 - DNA, 25 bp, Homo sapien
caagcagaagtggaccctggatgcc

SEQ ID NO: 5381073 - DNA, 25 bp, Homo sapien
tcttggtaagtttggttggagactc

SEQ ID NO: 5381074 - DNA, 25 bp, Homo sapien
caggcatgatgacaaggcaagagca

SEQ ID NO: 5381075 - DNA, 25 bp, Homo sapien
caggcacacaactgggtgagggttc

SEQ ID NO: 5381076 - DNA, 25 bp, Homo sapien
tgtttcctcttagcaaccggtgagc

SEQ ID NO: 5381077 - DNA, 25 bp, Homo sapien
agagccacacttcacgagagggtca

SEQ ID NO: 5381078 - DNA, 25 bp, Homo sapien
aaatacccactgtgtgtcggcgagc

SEQ ID NO: 5381079 - DNA, 25 bp, Homo sapien
taaatgcacaggatactgccagtca

SEQ ID NO: 5381080 - DNA, 25 bp, Homo sapien
tcggcgagctggtctgctacatcag

SEQ ID NO: 5381081 - DNA, 25 bp, Homo sapien
ttctccacggtgatcagcgaacaca

SEQ ID NO: 5381082 - DNA, 25 bp, Homo sapien
cgtcaggagcccgtgggtttttgca

SEQ ID NO: 5381083 - DNA, 25 bp, Homo sapien
catgaacagcattggtctgagaaga

SEQ ID NO: 5381084 - DNA, 25 bp, Homo sapien
tctgttaacaaatcgcacgtggatg

SEQ ID NO: 5381085 - DNA, 25 bp, Homo sapien
taacaaatcgcacgtggatgggccc

SEQ ID NO: 5381086 - DNA, 25 bp, Homo sapien
tccttggcccgagggaagttctcat

SEQ ID NO: 5381087 - DNA, 25 bp, Homo sapien
cctggtacgatgtggcatagtggca

SEQ ID NO: 5381088 - DNA, 25 bp, Homo sapien
gatcacgacgaggtgaatctccagt

SEQ ID NO: 5381089 - DNA, 25 bp, Homo sapien
agttctgcaattctccgccctatgc

SEQ ID NO: 5381090 - DNA, 25 bp, Homo sapien
aaggggcagaatcactcaagagcag

SEQ ID NO: 5381091 - DNA, 25 bp, Homo sapien
aaaggggcagaatcactcaagagca

SEQ ID NO: 5381092 - DNA, 25 bp, Homo sapien
tcagagactcccagcggtgactggc

SEQ ID NO: 5381093 - DNA, 25 bp, Homo sapien
gactcccagcggtgactggccactt

SEQ ID NO: 5381094 - DNA, 25 bp, Homo sapien
tgagaagaccgtcgagcccttcaga

SEQ ID NO: 5381095 - DNA, 25 bp, Homo sapien
tccacactgcaccccaaatgtcact

SEQ ID NO: 5381096 - DNA, 25 bp, Homo sapien
ccggccgttccctggcagcactgga

SEQ ID NO: 5381097 - DNA, 25 bp, Homo sapien
gatacccgccaataaccaggtcttc

SEQ ID NO: 5381098 - DNA, 25 bp, Homo sapien
gcctttcggaatcagatacccgcca

SEQ ID NO: 5381099 - DNA, 25 bp, Homo sapien
tgggtgacccggccgttccctggca

SEQ ID NO: 5381100 - DNA, 25 bp, Homo sapien
gctgcagttggaacatgcctttccc

SEQ ID NO: 5381101 - DNA, 25 bp, Homo sapien
cttaaggagagctctgaccagcggg

SEQ ID NO: 5381102 - DNA, 25 bp, Homo sapien
cagtccaagacaaggtgaaggacgt

SEQ ID NO: 5381103 - DNA, 25 bp, Homo sapien
gccttgccaggaggtacacagtcca

SEQ ID NO: 5381104 - DNA, 25 bp, Homo sapien
tgcagcgtcagagcctggctaagga

SEQ ID NO: 5381105 - DNA, 25 bp, Homo sapien
tcacgttggcgtagatctcctgcag

SEQ ID NO: 5381106 - DNA, 25 bp, Homo sapien
aggtatgtgagaagtcccccgctca

SEQ ID NO: 5381107 - DNA, 25 bp, Homo sapien
ccagcagcatctcagtcacgttggc

SEQ ID NO: 5381108 - DNA, 25 bp, Homo sapien
aacttgttgtcaacatgaatttggc

SEQ ID NO: 5381109 - DNA, 25 bp, Homo sapien
gtccctcaacttgttgtcaacatga

SEQ ID NO: 5381110 - DNA, 25 bp, Homo sapien
tgtatgtccctcaacttgttgtcaa

SEQ ID NO: 5381111 - DNA, 25 bp, Homo sapien
ttggtactgtatgtccctcaacttg

SEQ ID NO: 5381112 - DNA, 25 bp, Homo sapien
ggcatcctctgctatggtcacccat

SEQ ID NO: 5381113 - DNA, 25 bp, Homo sapien
aggcatcctctgctatggtcaccca

SEQ ID NO: 5381114 - DNA, 25 bp, Homo sapien
gcatcctctgctatggtcacccatt

SEQ ID NO: 5381115 - DNA, 25 bp, Homo sapien
aacacggcaggtcaacctgcttctg

SEQ ID NO: 5381116 - DNA, 25 bp, Homo sapien
acacaacacggcaggtcaacctgct

SEQ ID NO: 5381117 - DNA, 25 bp, Homo sapien
ggatgagagttagacacacaacacg

SEQ ID NO: 5381118 - DNA, 25 bp, Homo sapien
tctgcaaaaggtgctctcaattctt

SEQ ID NO: 5381119 - DNA, 25 bp, Homo sapien
gaatttgaagagtccatcccaggac

SEQ ID NO: 5381120 - DNA, 25 bp, Homo sapien
tgaatttgaagagtccatcccagga

SEQ ID NO: 5381121 - DNA, 25 bp, Homo sapien
tccagggcctcgatgtattccacag

SEQ ID NO: 5381122 - DNA, 25 bp, Homo sapien
tggcgcctgcatacatggaggtctt

SEQ ID NO: 5381123 - DNA, 25 bp, Homo sapien
gaacatgctaaacatgagctccagg

SEQ ID NO: 5381124 - DNA, 25 bp, Homo sapien
tgttttccaggcagcccaaacgact

SEQ ID NO: 5381125 - DNA, 25 bp, Homo sapien
aaatgcaactttcaaacgtggtcca

SEQ ID NO: 5381126 - DNA, 25 bp, Homo sapien
atgaatgaggcatcgtccctctgag

SEQ ID NO: 5381127 - DNA, 25 bp, Homo sapien
ttcatgaatgaggcatcgtccctct

SEQ ID NO: 5381128 - DNA, 25 bp, Homo sapien
caactttcaaacgtggtccaggtgc

SEQ ID NO: 5381129 - DNA, 25 bp, Homo sapien
tgacattggtcacggtttctccatc

SEQ ID NO: 5381130 - DNA, 25 bp, Homo sapien
gcaataacttggttgacttctccag

SEQ ID NO: 5381131 - DNA, 25 bp, Homo sapien
caatacgcttctcatcttgagccac

SEQ ID NO: 5381132 - DNA, 25 bp, Homo sapien
aatggccacatctttcggtttcaga

SEQ ID NO: 5381133 - DNA, 25 bp, Homo sapien
ggctcctgacgggacaactctgcac

SEQ ID NO: 5381134 - DNA, 25 bp, Homo sapien
tgacgggacaactctgcacggagga

SEQ ID NO: 5381135 - DNA, 25 bp, Homo sapien
tcctggctcctgacgggacaactct

SEQ ID NO: 5381136 - DNA, 25 bp, Homo sapien
gacaactctgcacggaggaggagcc

SEQ ID NO: 5381137 - DNA, 25 bp, Homo sapien
ccgcaagtctcggtactcccgccag

SEQ ID NO: 5381138 - DNA, 25 bp, Homo sapien
aagtctcggtactcccgccaggact

SEQ ID NO: 5381139 - DNA, 25 bp, Homo sapien
gccgagatgagcccggtggctctcc

SEQ ID NO: 5381140 - DNA, 25 bp, Homo sapien
ggctctcccccgcaagtctcggtac

SEQ ID NO: 5381141 - DNA, 25 bp, Homo sapien
cctccgcccggagcacctgagccac

SEQ ID NO: 5381142 - DNA, 25 bp, Homo sapien
ccctccgcccggagcacctgagcca

SEQ ID NO: 5381143 - DNA, 25 bp, Homo sapien
cgcggtctgcaatagatactacaaa

SEQ ID NO: 5381144 - DNA, 25 bp, Homo sapien
atcgcggtctgcaatagatactaca

SEQ ID NO: 5381145 - DNA, 25 bp, Homo sapien
tcgcggtctgcaatagatactacaa

SEQ ID NO: 5381146 - DNA, 25 bp, Homo sapien
ttccatattcccgtgtgtgcttctg

SEQ ID NO: 5381147 - DNA, 25 bp, Homo sapien
agatttttccatattcccgtgtgtg

SEQ ID NO: 5381148 - DNA, 25 bp, Homo sapien
tttttccatattcccgtgtgtgctt

SEQ ID NO: 5381149 - DNA, 25 bp, Homo sapien
gatttttccatattcccgtgtgtgc

SEQ ID NO: 5381150 - DNA, 25 bp, Homo sapien
tccccacaagtaccatatttgaggg

SEQ ID NO: 5381151 - DNA, 25 bp, Homo sapien
cccacaagtaccatatttgagggtt

SEQ ID NO: 5381152 - DNA, 25 bp, Homo sapien
tgcaggaaggtgagagtccccacaa

SEQ ID NO: 5381153 - DNA, 25 bp, Homo sapien
caggaaggtgagagtccccacaagt

SEQ ID NO: 5381154 - DNA, 25 bp, Homo sapien
ttaaaattgctcctcgcacgcccgt

SEQ ID NO: 5381155 - DNA, 25 bp, Homo sapien
aattgctcctcgcacgcccgttttt

SEQ ID NO: 5381156 - DNA, 25 bp, Homo sapien
ctcgcacgcccgtttttccattaat

SEQ ID NO: 5381157 - DNA, 25 bp, Homo sapien
aaaattgctcctcgcacgcccgttt

SEQ ID NO: 5381158 - DNA, 25 bp, Homo sapien
agttagaagaggcttcgatggagaa

SEQ ID NO: 5381159 - DNA, 25 bp, Homo sapien
cgatggagaagggtctcgaaagacc

SEQ ID NO: 5381160 - DNA, 25 bp, Homo sapien
actgaatggctgatggaacgaatga

SEQ ID NO: 5381161 - DNA, 25 bp, Homo sapien
cccaggtgggtagttagaagaggct

SEQ ID NO: 5381162 - DNA, 25 bp, Homo sapien
gagaagggggcgttctcggaagaca

SEQ ID NO: 5381163 - DNA, 25 bp, Homo sapien
acgatgggcgaaggcatcggagggc

SEQ ID NO: 5381164 - DNA, 25 bp, Homo sapien
cggacgatgggcgaaggcatcggag

SEQ ID NO: 5381165 - DNA, 25 bp, Homo sapien
tgggcgaaggcatcggagggcgccg

SEQ ID NO: 5381166 - DNA, 25 bp, Homo sapien
gggaggcggacgatgggcgaaggca

SEQ ID NO: 5381167 - DNA, 25 bp, Homo sapien
tgaagccgtccctgcagaagaactc

SEQ ID NO: 5381168 - DNA, 25 bp, Homo sapien
tggatctcgtggatgcggctgaagc

SEQ ID NO: 5381169 - DNA, 25 bp, Homo sapien
gccaggttggcgagggtcctcggcc

SEQ ID NO: 5381170 - DNA, 25 bp, Homo sapien
cctgcagaagaactccgccaggttg

SEQ ID NO: 5381171 - DNA, 25 bp, Homo sapien
tattccgcacaccattggaagcagt

SEQ ID NO: 5381172 - DNA, 25 bp, Homo sapien
gctttcctcgggctcatcgctttta

SEQ ID NO: 5381173 - DNA, 25 bp, Homo sapien
cagtcgtttacgatggctttcctcg

SEQ ID NO: 5381174 - DNA, 25 bp, Homo sapien
gacgggtcctgttgcacaaggcttg

SEQ ID NO: 5381175 - DNA, 25 bp, Homo sapien
gatttcataccgttggtactcatgc

SEQ ID NO: 5381176 - DNA, 25 bp, Homo sapien
aagatttcataccgttggtactcat

SEQ ID NO: 5381177 - DNA, 25 bp, Homo sapien
atttcataccgttggtactcatgca

SEQ ID NO: 5381178 - DNA, 25 bp, Homo sapien
tttcataccgttggtactcatgcat

SEQ ID NO: 5381179 - DNA, 25 bp, Homo sapien
tgaagaaaacaactcaggtctgagt

SEQ ID NO: 5381180 - DNA, 25 bp, Homo sapien
gaaaacaactcaggtctgagtgtac

SEQ ID NO: 5381181 - DNA, 25 bp, Homo sapien
ctcaggtctgagtgtacggtttgca

SEQ ID NO: 5381182 - DNA, 25 bp, Homo sapien
gagtgtacggtttgcagagatgcct

SEQ ID NO: 5381183 - DNA, 25 bp, Homo sapien
gggaacagaagtagaggaattttca

SEQ ID NO: 5381184 - DNA, 25 bp, Homo sapien
gaagtagaggaattttcagaggacg

SEQ ID NO: 5381185 - DNA, 25 bp, Homo sapien
ggaattttcagaggacgatgatgaa

SEQ ID NO: 5381186 - DNA, 25 bp, Homo sapien
tagaggaattttcagaggacgatga

SEQ ID NO: 5381187 - DNA, 25 bp, Homo sapien
tgccaagcgccggtcttgaacgaag

SEQ ID NO: 5381188 - DNA, 25 bp, Homo sapien
ttgaacgaagtaccctgcctaagca

SEQ ID NO: 5381189 - DNA, 25 bp, Homo sapien
tatatacagaaatgaccccactccc

SEQ ID NO: 5381190 - DNA, 25 bp, Homo sapien
acaatttggccaacgctggagggaa

SEQ ID NO: 5381191 - DNA, 25 bp, Homo sapien
gctccgcgatgagtggtactccatg

SEQ ID NO: 5381192 - DNA, 25 bp, Homo sapien
tactccatgtacacagtgtcgtcgg

SEQ ID NO: 5381193 - DNA, 25 bp, Homo sapien
tcatttcctaaagcgcttgaagagc

SEQ ID NO: 5381194 - DNA, 25 bp, Homo sapien
tgtcgtcggccccagacatagaact

SEQ ID NO: 5381195 - DNA, 25 bp, Homo sapien
tgagacaccaccataaggctttgaa

SEQ ID NO: 5381196 - DNA, 25 bp, Homo sapien
tcctgtgaggagaatgaaccaggca

SEQ ID NO: 5381197 - DNA, 25 bp, Homo sapien
agttccttaaaatctcctgagacac

SEQ ID NO: 5381198 - DNA, 25 bp, Homo sapien
ccctgaggcaagtaattaatgtctg

SEQ ID NO: 5381199 - DNA, 25 bp, Homo sapien
ccatgccagcgagtttcgtgatcac

SEQ ID NO: 5381200 - DNA, 25 bp, Homo sapien
tggctggatctggagccaaattccc

SEQ ID NO: 5381201 - DNA, 25 bp, Homo sapien
tgtcgaaaacgccaagtcttcctcc

SEQ ID NO: 5381202 - DNA, 25 bp, Homo sapien
tggctgccaggactttctgtaagag

SEQ ID NO: 5381203 - DNA, 25 bp, Homo sapien
tcaggagccgcctttaacagggagc

SEQ ID NO: 5381204 - DNA, 25 bp, Homo sapien
taatctcctaatgcttggtgcctgc

SEQ ID NO: 5381205 - DNA, 25 bp, Homo sapien
tttgcaatcaagaacctgggagtct

SEQ ID NO: 5381206 - DNA, 25 bp, Homo sapien
taatgatctcaagaccagagggatg

SEQ ID NO: 5381207 - DNA, 25 bp, Homo sapien
aaggcattgtactcttctgcaacca

SEQ ID NO: 5381208 - DNA, 25 bp, Homo sapien
tgtgtcctgggataccagtgagtag

SEQ ID NO: 5381209 - DNA, 25 bp, Homo sapien
ggttgagtaagccatttcctgtgtg

SEQ ID NO: 5381210 - DNA, 25 bp, Homo sapien
tgatctaccaagaatctctgccgct

SEQ ID NO: 5381211 - DNA, 25 bp, Homo sapien
tgcatacagttagccagtttcccca

SEQ ID NO: 5381212 - DNA, 25 bp, Homo sapien
tccagaaaaggcctacagacatcaa

SEQ ID NO: 5381213 - DNA, 25 bp, Homo sapien
tagaatgccaagagctaagggtccc

SEQ ID NO: 5381214 - DNA, 25 bp, Homo sapien
tgttataaccacatgacctggcaat

SEQ ID NO: 5381215 - DNA, 25 bp, Homo sapien
ttccactgtgacccaagaaaatgct

SEQ ID NO: 5381216 - DNA, 25 bp, Homo sapien
actgtgacccaagaaaatgcttggt

SEQ ID NO: 5381217 - DNA, 25 bp, Homo sapien
tccactgtgacccaagaaaatgctt

SEQ ID NO: 5381218 - DNA, 25 bp, Homo sapien
gttcttcctggtactgatttctact

SEQ ID NO: 5381219 - DNA, 25 bp, Homo sapien
gaggctttattcctaacatggtgtc

SEQ ID NO: 5381220 - DNA, 25 bp, Homo sapien
gaacctatgagtcctgttacatgtg

SEQ ID NO: 5381221 - DNA, 25 bp, Homo sapien
aatttgccactccaagtcttttagg

SEQ ID NO: 5381222 - DNA, 25 bp, Homo sapien
caaggttaatattgagacatgaggc

SEQ ID NO: 5381223 - DNA, 25 bp, Homo sapien
tttttagactacagctgaccatgcg

SEQ ID NO: 5381224 - DNA, 25 bp, Homo sapien
tgtggcctgaaagacttgatccttc

SEQ ID NO: 5381225 - DNA, 25 bp, Homo sapien
agtccgtgacaactgagatggctac

SEQ ID NO: 5381226 - DNA, 25 bp, Homo sapien
tattgaccttggaaagtctgacggc

SEQ ID NO: 5381227 - DNA, 25 bp, Homo sapien
cactctgcacaggttatgaatgacg

SEQ ID NO: 5381228 - DNA, 25 bp, Homo sapien
tggtcccagtaagacagacacggcc

SEQ ID NO: 5381229 - DNA, 25 bp, Homo sapien
agacacggccatctcttagcaagag

SEQ ID NO: 5381230 - DNA, 25 bp, Homo sapien
tttaccgcagtaagcaagcacaggg

SEQ ID NO: 5381231 - DNA, 25 bp, Homo sapien
taagaggagtgacctcctgcaacag

SEQ ID NO: 5381232 - DNA, 25 bp, Homo sapien
gtgacctcctgcaacagaagatgaa

SEQ ID NO: 5381233 - DNA, 25 bp, Homo sapien
agtggtttaagaggagtgacctcct

SEQ ID NO: 5381234 - DNA, 25 bp, Homo sapien
gaggagtgacctcctgcaacagaag

SEQ ID NO: 5381235 - DNA, 25 bp, Homo sapien
ctggagccaccatgggatgagatct

SEQ ID NO: 5381236 - DNA, 25 bp, Homo sapien
tgagatctgaatgaggacatttgct

SEQ ID NO: 5381237 - DNA, 25 bp, Homo sapien
tttttagctcgaagcacccgcccta

SEQ ID NO: 5381238 - DNA, 25 bp, Homo sapien
tccggcagatcaaacgaagtgtcac

SEQ ID NO: 5381239 - DNA, 25 bp, Homo sapien
gaagaattaataccaggcatcagtg

SEQ ID NO: 5381240 - DNA, 25 bp, Homo sapien
ccagggtctatctgatgcaggcaga

SEQ ID NO: 5381241 - DNA, 25 bp, Homo sapien
tctgctaagagtcatcctgaagaat

SEQ ID NO: 5381242 - DNA, 25 bp, Homo sapien
gaggtgaagcaataaacctcagaaa

SEQ ID NO: 5381243 - DNA, 25 bp, Homo sapien
gctttgggtctgtcttaatctgaat

SEQ ID NO: 5381244 - DNA, 25 bp, Homo sapien
cagcttctgattgcagagtaaacca

SEQ ID NO: 5381245 - DNA, 25 bp, Homo sapien
cttttgccagagtaggaaatgaact

SEQ ID NO: 5381246 - DNA, 25 bp, Homo sapien
ccgcgcccggttgtaaaatctcatt

SEQ ID NO: 5381247 - DNA, 25 bp, Homo sapien
tccccctgagacgtaggtccgtaga

SEQ ID NO: 5381248 - DNA, 25 bp, Homo sapien
agacgtaggtccgtagatatagggt

SEQ ID NO: 5381249 - DNA, 25 bp, Homo sapien
aattctggagaatttgcatcctttc

SEQ ID NO: 5381250 - DNA, 25 bp, Homo sapien
attctggagaatttgcatcctttcc

SEQ ID NO: 5381251 - DNA, 25 bp, Homo sapien
taggacctggccaaactactgatca

SEQ ID NO: 5381252 - DNA, 25 bp, Homo sapien
tcaagggaaggaaaacgcacagcca

SEQ ID NO: 5381253 - DNA, 25 bp, Homo sapien
gagtaaagacatctgtaaacatgtg

SEQ ID NO: 5381254 - DNA, 25 bp, Homo sapien
ctgatcaagtataaagtcgagtaaa

SEQ ID NO: 5381255 - DNA, 25 bp, Homo sapien
gaaactggcaagctctaaatttgtt

SEQ ID NO: 5381256 - DNA, 25 bp, Homo sapien
atggtgtacagcaagattcgtttct

SEQ ID NO: 5381257 - DNA, 25 bp, Homo sapien
tgattgccacatattcccggtaaaa

SEQ ID NO: 5381258 - DNA, 25 bp, Homo sapien
tcagtcgaatggcatattcctttag

SEQ ID NO: 5381259 - DNA, 25 bp, Homo sapien
ggtgagcacccttcggaacatcttg

SEQ ID NO: 5381260 - DNA, 25 bp, Homo sapien
cacactggactttggcgatgtagcc

SEQ ID NO: 5381261 - DNA, 25 bp, Homo sapien
ccagcttacagtgggcctgcacgat

SEQ ID NO: 5381262 - DNA, 25 bp, Homo sapien
aattttgtcatcttcgcggacgagg

SEQ ID NO: 5381263 - DNA, 25 bp, Homo sapien
taggcaaatgcttcaccatcacttt

SEQ ID NO: 5381264 - DNA, 25 bp, Homo sapien
tctagacaagaatgactaggcaaat

SEQ ID NO: 5381265 - DNA, 25 bp, Homo sapien
caagaatgactaggcaaatgcttca

SEQ ID NO: 5381266 - DNA, 25 bp, Homo sapien
gaatgactaggcaaatgcttcacca

SEQ ID NO: 5381267 - DNA, 25 bp, Homo sapien
tgtccttggcatcggaggtgaaccg

SEQ ID NO: 5381268 - DNA, 25 bp, Homo sapien
tgctaatggcaacggagcagccgat

SEQ ID NO: 5381269 - DNA, 25 bp, Homo sapien
caggaccttttggtggtgtggccca

SEQ ID NO: 5381270 - DNA, 25 bp, Homo sapien
tctggctgtcgtcaatggtggacca

SEQ ID NO: 5381271 - DNA, 25 bp, Homo sapien
atcattccggaagtcatattctgcc

SEQ ID NO: 5381272 - DNA, 25 bp, Homo sapien
tatcagggttgacagaatcattccg

SEQ ID NO: 5381273 - DNA, 25 bp, Homo sapien
gaagaacaatgacccccgaacgtgc

SEQ ID NO: 5381274 - DNA, 25 bp, Homo sapien
cgtttccaaacatctttcgcaagct

SEQ ID NO: 5381275 - DNA, 25 bp, Homo sapien
gcttgacttcaaaagacactgtctg

SEQ ID NO: 5381276 - DNA, 25 bp, Homo sapien
gtcagatttaccctgtggatctgtc

SEQ ID NO: 5381277 - DNA, 25 bp, Homo sapien
cctgtggatctgtcactcgggaagt

SEQ ID NO: 5381278 - DNA, 25 bp, Homo sapien
ctcatagaagtcaaacaggtccatg

SEQ ID NO: 5381279 - DNA, 25 bp, Homo sapien
tgggttaaagacacctgagagaact

SEQ ID NO: 5381280 - DNA, 25 bp, Homo sapien
tgctaggttgtaagtgctgggttaa

SEQ ID NO: 5381281 - DNA, 25 bp, Homo sapien
ttctgctgttatcaagcaatgggtg

SEQ ID NO: 5381282 - DNA, 25 bp, Homo sapien
caagcaatgggtgaagttgtaaagg

SEQ ID NO: 5381283 - DNA, 25 bp, Homo sapien
aagggtggcccaggagtccacatac

SEQ ID NO: 5381284 - DNA, 25 bp, Homo sapien
ccaagggtggcccaggagtccacat

SEQ ID NO: 5381285 - DNA, 25 bp, Homo sapien
caagggtggcccaggagtccacata

SEQ ID NO: 5381286 - DNA, 25 bp, Homo sapien
gattacatcagggtggcaactttca

SEQ ID NO: 5381287 - DNA, 25 bp, Homo sapien
ttaagcggcattctcggatcacggg

SEQ ID NO: 5381288 - DNA, 25 bp, Homo sapien
ggcagatttgcttgtgaaagtctct

SEQ ID NO: 5381289 - DNA, 25 bp, Homo sapien
tggcctccccttcagagtttcttaa

SEQ ID NO: 5381290 - DNA, 25 bp, Homo sapien
gggtctactgaccagcaggtacctc

SEQ ID NO: 5381291 - DNA, 25 bp, Homo sapien
tccactgctcattcaattagatggt

SEQ ID NO: 5381292 - DNA, 25 bp, Homo sapien
gaccagcaggtacctcctggagatt

SEQ ID NO: 5381293 - DNA, 25 bp, Homo sapien
ttcaattagatggtctggaaataca

SEQ ID NO: 5381294 - DNA, 25 bp, Homo sapien
acaggcctgtcatggaatctcttac

SEQ ID NO: 5381295 - DNA, 25 bp, Homo sapien
gagggttgtgactttgaggtcaagt

SEQ ID NO: 5381296 - DNA, 25 bp, Homo sapien
gggacaggcctgtcatggaatctct

SEQ ID NO: 5381297 - DNA, 25 bp, Homo sapien
ctttgaggtcaagtaggcaggggcc

SEQ ID NO: 5381298 - DNA, 25 bp, Homo sapien
cttttccatagctgacagtacacaa

SEQ ID NO: 5381299 - DNA, 25 bp, Homo sapien
acttttccatagctgacagtacaca

SEQ ID NO: 5381300 - DNA, 25 bp, Homo sapien
ctgcaaatacagataacatccaaca

SEQ ID NO: 5381301 - DNA, 25 bp, Homo sapien
gagtatgtgcacagtaattgcggct

SEQ ID NO: 5381302 - DNA, 25 bp, Homo sapien
caacttgcaatcctaaagtggtcag

SEQ ID NO: 5381303 - DNA, 25 bp, Homo sapien
ctttaggaaggaatacagtagaggc

SEQ ID NO: 5381304 - DNA, 25 bp, Homo sapien
catcttgatggcagagaatacagct

SEQ ID NO: 5381305 - DNA, 25 bp, Homo sapien
gcagaagaaacctagcatgttcaac

SEQ ID NO: 5381306 - DNA, 25 bp, Homo sapien
ggcattcacccatctcgcagaagaa

SEQ ID NO: 5381307 - DNA, 25 bp, Homo sapien
gaattcctgtggcactcttctgcca

SEQ ID NO: 5381308 - DNA, 25 bp, Homo sapien
gggcacgctttcacatcacaggaaa

SEQ ID NO: 5381309 - DNA, 25 bp, Homo sapien
gttatgctccccacaggaaatctga

SEQ ID NO: 5381310 - DNA, 25 bp, Homo sapien
taatcatagcggatcacgacctcat

SEQ ID NO: 5381311 - DNA, 25 bp, Homo sapien
caaattctccctggctacaatgggc

SEQ ID NO: 5381312 - DNA, 25 bp, Homo sapien
tgctggatccagagtgtagcggctc

SEQ ID NO: 5381313 - DNA, 25 bp, Homo sapien
cagtcttgctgagcttcctgaggta

SEQ ID NO: 5381314 - DNA, 25 bp, Homo sapien
ccagtcttgctgagcttcctgaggt

SEQ ID NO: 5381315 - DNA, 25 bp, Homo sapien
tccagtcttgctgagcttcctgagg

SEQ ID NO: 5381316 - DNA, 25 bp, Homo sapien
agtcttgctgagcttcctgaggtac

SEQ ID NO: 5381317 - DNA, 25 bp, Homo sapien
cactggtttgcagcccaacgctgac

SEQ ID NO: 5381318 - DNA, 25 bp, Homo sapien
tgatgtcactggtttgcagcccaac

SEQ ID NO: 5381319 - DNA, 25 bp, Homo sapien
gatgtcactggtttgcagcccaacg

SEQ ID NO: 5381320 - DNA, 25 bp, Homo sapien
tgtcactggtttgcagcccaacgct

SEQ ID NO: 5381321 - DNA, 25 bp, Homo sapien
tgcatacaaggagtaggcagttagt

SEQ ID NO: 5381322 - DNA, 25 bp, Homo sapien
actcatgcacatgggttggtcggca

SEQ ID NO: 5381323 - DNA, 25 bp, Homo sapien
tctgcaatagccaccaagaagtctt

SEQ ID NO: 5381324 - DNA, 25 bp, Homo sapien
ccaagaagatatggccatcgggagc

SEQ ID NO: 5381325 - DNA, 25 bp, Homo sapien
ttgccttgggctgttccaacgtgtg

SEQ ID NO: 5381326 - DNA, 25 bp, Homo sapien
cacgtgtgcgcaactgctcgctgtt

SEQ ID NO: 5381327 - DNA, 25 bp, Homo sapien
ttcggcagataaaaggattcactac

SEQ ID NO: 5381328 - DNA, 25 bp, Homo sapien
gatgaaaattctctcccggccagtt

SEQ ID NO: 5381329 - DNA, 25 bp, Homo sapien
catattcatccactttggtgcctga

SEQ ID NO: 5381330 - DNA, 25 bp, Homo sapien
tgtagtccttggctccatattcatc

SEQ ID NO: 5381331 - DNA, 25 bp, Homo sapien
catcctcatagtgccgcttcctgga

SEQ ID NO: 5381332 - DNA, 25 bp, Homo sapien
ggtcgtccttcagcggcatttgcag

SEQ ID NO: 5381333 - DNA, 25 bp, Homo sapien
cctgcatcccgcaggcgttgcgccc

SEQ ID NO: 5381334 - DNA, 25 bp, Homo sapien
aactcctagctaagagccacctgca

SEQ ID NO: 5381335 - DNA, 25 bp, Homo sapien
gcaaactcctagctaagagccacct

SEQ ID NO: 5381336 - DNA, 25 bp, Homo sapien
gccgccgcaaactcctagctaagag

SEQ ID NO: 5381337 - DNA, 25 bp, Homo sapien
aaggcctgtcccaacggggtgcgcg

SEQ ID NO: 5381338 - DNA, 25 bp, Homo sapien
tcgtggctgagcgtgcccgcgcaac

SEQ ID NO: 5381339 - DNA, 25 bp, Homo sapien
aagggcagtcgtggctgagcgtgcc

SEQ ID NO: 5381340 - DNA, 25 bp, Homo sapien
ccctaggccgagttcgctgggctgc

SEQ ID NO: 5381341 - DNA, 25 bp, Homo sapien
cgcggtccgctcggtctcttttgcc

SEQ ID NO: 5381342 - DNA, 25 bp, Homo sapien
gcggtccgctcggtctcttttgccc

SEQ ID NO: 5381343 - DNA, 25 bp, Homo sapien
cggtccgctcggtctcttttgccca

SEQ ID NO: 5381344 - DNA, 25 bp, Homo sapien
agagagaagatgaccccgctcccac

SEQ ID NO: 5381345 - DNA, 25 bp, Homo sapien
ccgctctggggggacttccggctca

SEQ ID NO: 5381346 - DNA, 25 bp, Homo sapien
ggacttccggctcaatccggaagct

SEQ ID NO: 5381347 - DNA, 25 bp, Homo sapien
gagagaagatgaccccgctcccaca

SEQ ID NO: 5381348 - DNA, 25 bp, Homo sapien
tagagtaagcctttgcaccacaatc

SEQ ID NO: 5381349 - DNA, 25 bp, Homo sapien
tactgggatatatacatgtgcctac

SEQ ID NO: 5381350 - DNA, 25 bp, Homo sapien
taaactgcccagcattcaactgaga

SEQ ID NO: 5381351 - DNA, 25 bp, Homo sapien
gaaatgttgcacgtaccacactgta

SEQ ID NO: 5381352 - DNA, 25 bp, Homo sapien
atatagagaatttaatggctacatt

SEQ ID NO: 5381353 - DNA, 25 bp, Homo sapien
aatatagagaatttaatggctacat

SEQ ID NO: 5381354 - DNA, 25 bp, Homo sapien
aatgtacattattatgtcaaagggt

SEQ ID NO: 5381355 - DNA, 25 bp, Homo sapien
gggtaaatttacaaattgataatca

SEQ ID NO: 5381356 - DNA, 25 bp, Homo sapien
caactgcattaagggattctcaact

SEQ ID NO: 5381357 - DNA, 25 bp, Homo sapien
ggtgtattgcaagaatttggcccac

SEQ ID NO: 5381358 - DNA, 25 bp, Homo sapien
taagacactaggaagaaagttcgcc

SEQ ID NO: 5381359 - DNA, 25 bp, Homo sapien
ggcatcctgtccaaaccatggcaga

SEQ ID NO: 5381360 - DNA, 25 bp, Homo sapien
tttgccataggccaaggagtctgca

SEQ ID NO: 5381361 - DNA, 25 bp, Homo sapien
tatatcaagctatcagttcccagac

SEQ ID NO: 5381362 - DNA, 25 bp, Homo sapien
tcaccagaactgttgagtagaggct

SEQ ID NO: 5381363 - DNA, 25 bp, Homo sapien
ggtaaagactctctcaagtgaaagc

SEQ ID NO: 5381364 - DNA, 25 bp, Homo sapien
tcctgaaaagcacatataagactgc

SEQ ID NO: 5381365 - DNA, 25 bp, Homo sapien
tgaatctctcaaggccttaagtaga

SEQ ID NO: 5381366 - DNA, 25 bp, Homo sapien
tcagcaaagaagcattacagtatag

SEQ ID NO: 5381367 - DNA, 25 bp, Homo sapien
tttggtccaagcctaagtcatgcca

SEQ ID NO: 5381368 - DNA, 25 bp, Homo sapien
taattgaactcttcgctcctaaggg

SEQ ID NO: 5381369 - DNA, 25 bp, Homo sapien
cagttgctttaccaaggcagggaca

SEQ ID NO: 5381370 - DNA, 25 bp, Homo sapien
tgctcaagtagaaaagatgccctca

SEQ ID NO: 5381371 - DNA, 25 bp, Homo sapien
gatatgaaggaaaagcccactggtc

SEQ ID NO: 5381372 - DNA, 25 bp, Homo sapien
ctctcagagattcatatcttctatc

SEQ ID NO: 5381373 - DNA, 25 bp, Homo sapien
agattcatatcttctatcaagactc

SEQ ID NO: 5381374 - DNA, 25 bp, Homo sapien
cagagattcatatcttctatcaaga

SEQ ID NO: 5381375 - DNA, 25 bp, Homo sapien
tctcagagattcatatcttctatca

SEQ ID NO: 5381376 - DNA, 25 bp, Homo sapien
gggctcaaccccacaaatgaggata

SEQ ID NO: 5381377 - DNA, 25 bp, Homo sapien
tgtcagtgatagagggaatgactct

SEQ ID NO: 5381378 - DNA, 25 bp, Homo sapien
aaagagtgactatgtactaaagtgc

SEQ ID NO: 5381379 - DNA, 25 bp, Homo sapien
tactgagcaaaaaggttggtagaca

SEQ ID NO: 5381380 - DNA, 25 bp, Homo sapien
tcagtttggcctctacaaaaatccg

SEQ ID NO: 5381381 - DNA, 25 bp, Homo sapien
gttagcatttctaccacagtacatg

SEQ ID NO: 5381382 - DNA, 25 bp, Homo sapien
cccaaggcggcttttcagttagcat

SEQ ID NO: 5381383 - DNA, 25 bp, Homo sapien
caaaaatccgtttgaggaaatctcg

SEQ ID NO: 5381384 - DNA, 25 bp, Homo sapien
tctccactgatgacttcagggctca

SEQ ID NO: 5381385 - DNA, 25 bp, Homo sapien
ggtctgaagccgtttgctggcccca

SEQ ID NO: 5381386 - DNA, 25 bp, Homo sapien
catccagtatggtgtgcccgtgaca

SEQ ID NO: 5381387 - DNA, 25 bp, Homo sapien
gacgttgcctgttgaatctcgcagg

SEQ ID NO: 5381388 - DNA, 25 bp, Homo sapien
tggacaccctccagaatctgacggg

SEQ ID NO: 5381389 - DNA, 25 bp, Homo sapien
tcacattctcagtaagagcgccata

SEQ ID NO: 5381390 - DNA, 25 bp, Homo sapien
gacgggtgtatttcctagtcacatt

SEQ ID NO: 5381391 - DNA, 25 bp, Homo sapien
tctatggacaatcatattactgtgc

SEQ ID NO: 5381392 - DNA, 25 bp, Homo sapien
tttcacactcaagtgcatttacttc

SEQ ID NO: 5381393 - DNA, 25 bp, Homo sapien
gccataatactgaacaattcgctca

SEQ ID NO: 5381394 - DNA, 25 bp, Homo sapien
tcgctcatgtagcaagtttttcagc

SEQ ID NO: 5381395 - DNA, 25 bp, Homo sapien
gggatccctcaaacagccataatac

SEQ ID NO: 5381396 - DNA, 25 bp, Homo sapien
atttagaatggaaggggcttaatgt

SEQ ID NO: 5381397 - DNA, 25 bp, Homo sapien
tatttagaatggaaggggcttaatg

SEQ ID NO: 5381398 - DNA, 25 bp, Homo sapien
atgaataaagtttcttataatgtga

SEQ ID NO: 5381399 - DNA, 25 bp, Homo sapien
aataaagtttcttataatgtgacaa

SEQ ID NO: 5381400 - DNA, 25 bp, Homo sapien
tctccagttggtcggagctcgaggt

SEQ ID NO: 5381401 - DNA, 25 bp, Homo sapien
caacatcataacagaggtagaccct

SEQ ID NO: 5381402 - DNA, 25 bp, Homo sapien
caaaggctccttggccaagcagttt

SEQ ID NO: 5381403 - DNA, 25 bp, Homo sapien
aagcagtttgcccaatctccagttg

SEQ ID NO: 5381404 - DNA, 25 bp, Homo sapien
aaattatgattatccaaattcacag

SEQ ID NO: 5381405 - DNA, 25 bp, Homo sapien
tgcattagtgacatccttcattgaa

SEQ ID NO: 5381406 - DNA, 25 bp, Homo sapien
tggttaataactaaatgagcatact

SEQ ID NO: 5381407 - DNA, 25 bp, Homo sapien
tcttaaagtgaaatatcaaacagca

SEQ ID NO: 5381408 - DNA, 25 bp, Homo sapien
cggtcaaagtaggattgtctatgtc

SEQ ID NO: 5381409 - DNA, 25 bp, Homo sapien
ggtgggctgatgtccattacggtca

SEQ ID NO: 5381410 - DNA, 25 bp, Homo sapien
tattcgactatcatcatactctggg

SEQ ID NO: 5381411 - DNA, 25 bp, Homo sapien
gattgtctatgtcacttccccttct

SEQ ID NO: 5381412 - DNA, 25 bp, Homo sapien
aggagaccgtaagctggtcccctgg

SEQ ID NO: 5381413 - DNA, 25 bp, Homo sapien
tgatgatatgaaacatgataccttc

SEQ ID NO: 5381414 - DNA, 25 bp, Homo sapien
catcattatactcttgatgatgata

SEQ ID NO: 5381415 - DNA, 25 bp, Homo sapien
tccaaatttctcaaagatagggtta

SEQ ID NO: 5381416 - DNA, 25 bp, Homo sapien
gataccttcttggatatgttcctcc

SEQ ID NO: 5381417 - DNA, 25 bp, Homo sapien
cattcgtgattttggatagctctct

SEQ ID NO: 5381418 - DNA, 25 bp, Homo sapien
tgagccctaggcattcgtgattttg

SEQ ID NO: 5381419 - DNA, 25 bp, Homo sapien
ttatctgggtagctctgagccctag

SEQ ID NO: 5381420 - DNA, 25 bp, Homo sapien
ctgaaaattcctgatgattatctgg

SEQ ID NO: 5381421 - DNA, 25 bp, Homo sapien
gactatcaagtgatggacaacttcc

SEQ ID NO: 5381422 - DNA, 25 bp, Homo sapien
gatggacaacttcctgagccagaat

SEQ ID NO: 5381423 - DNA, 25 bp, Homo sapien
caaaggactatcaagtgatggacaa

SEQ ID NO: 5381424 - DNA, 25 bp, Homo sapien
caagtgatggacaacttcctgagcc

SEQ ID NO: 5381425 - DNA, 25 bp, Homo sapien
tgcttaaagataatggatccagcat

SEQ ID NO: 5381426 - DNA, 25 bp, Homo sapien
ctgcttaaagataatggatccagca

SEQ ID NO: 5381427 - DNA, 25 bp, Homo sapien
tgaatgacccattccgggcaacctg

SEQ ID NO: 5381428 - DNA, 25 bp, Homo sapien
caacctggtgtaattcatctggaat

SEQ ID NO: 5381429 - DNA, 25 bp, Homo sapien
gatactagtgaatgacccattccgg

SEQ ID NO: 5381430 - DNA, 25 bp, Homo sapien
ctccttcactgttgatactagtgaa

SEQ ID NO: 5381431 - DNA, 25 bp, Homo sapien
ggagattactaatcctgtaaacttg

SEQ ID NO: 5381432 - DNA, 25 bp, Homo sapien
caagggacgtcaaatattagagtgt

SEQ ID NO: 5381433 - DNA, 25 bp, Homo sapien
tttaaattggagattactaatcctg

SEQ ID NO: 5381434 - DNA, 25 bp, Homo sapien
tgaatttccaagggacgtcaaatat

SEQ ID NO: 5381435 - DNA, 25 bp, Homo sapien
ggtgccacactacattaaaggatgg

SEQ ID NO: 5381436 - DNA, 25 bp, Homo sapien
tgtttaggtgccacactacattaaa

SEQ ID NO: 5381437 - DNA, 25 bp, Homo sapien
ttaggtgccacactacattaaagga

SEQ ID NO: 5381438 - DNA, 25 bp, Homo sapien
tttaggtgccacactacattaaagg

SEQ ID NO: 5381439 - DNA, 25 bp, Homo sapien
atggcaatggttctaaattagtagc

SEQ ID NO: 5381440 - DNA, 25 bp, Homo sapien
ctattatagatagccgttttttcct

SEQ ID NO: 5381441 - DNA, 25 bp, Homo sapien
tatccaaatcttctagtgatggcaa

SEQ ID NO: 5381442 - DNA, 25 bp, Homo sapien
atagatagccgttttttcctctctg

SEQ ID NO: 5381443 - DNA, 25 bp, Homo sapien
tgtgtacttccatttattacaagta

SEQ ID NO: 5381444 - DNA, 25 bp, Homo sapien
tacaagtaatatcttgaggctcttc

SEQ ID NO: 5381445 - DNA, 25 bp, Homo sapien
tgaatactacgatccagcagttcca

SEQ ID NO: 5381446 - DNA, 25 bp, Homo sapien
caagtcatcttgagtagttaatgga

SEQ ID NO: 5381447 - DNA, 25 bp, Homo sapien
aaacaaacataaggaaccatgcagc

SEQ ID NO: 5381448 - DNA, 25 bp, Homo sapien
aaaacaaacataaggaaccatgcag

SEQ ID NO: 5381449 - DNA, 25 bp, Homo sapien
aaaaacaaacataaggaaccatgca

SEQ ID NO: 5381450 - DNA, 25 bp, Homo sapien
tccatgagcatctccactactaagg

SEQ ID NO: 5381451 - DNA, 25 bp, Homo sapien
cattctaccgccactaaaatcttag

SEQ ID NO: 5381452 - DNA, 25 bp, Homo sapien
ctactaaggaattacaaatgtcaaa

SEQ ID NO: 5381453 - DNA, 25 bp, Homo sapien
tgttactatgatgaaagtctgaatg

SEQ ID NO: 5381454 - DNA, 25 bp, Homo sapien
tgtagtgacgcggtatcagctcatt

SEQ ID NO: 5381455 - DNA, 25 bp, Homo sapien
gtagtgacgcggtatcagctcattg

SEQ ID NO: 5381456 - DNA, 25 bp, Homo sapien
gtgtagtgacgcggtatcagctcat

SEQ ID NO: 5381457 - DNA, 25 bp, Homo sapien
atccatagactgtccaaaggcaatt

SEQ ID NO: 5381458 - DNA, 25 bp, Homo sapien
ggcaattttagctttagatctcaga

SEQ ID NO: 5381459 - DNA, 25 bp, Homo sapien
ccagtttaactggtctggggaactg

SEQ ID NO: 5381460 - DNA, 25 bp, Homo sapien
tcgttattggtataatgtagatcca

SEQ ID NO: 5381461 - DNA, 25 bp, Homo sapien
gttcaaatttgactcggacatcatt

SEQ ID NO: 5381462 - DNA, 25 bp, Homo sapien
tctatgttcaaatttgactcggaca

SEQ ID NO: 5381463 - DNA, 25 bp, Homo sapien
tgttcaaatttgactcggacatcat

SEQ ID NO: 5381464 - DNA, 25 bp, Homo sapien
tatgttcaaatttgactcggacatc

SEQ ID NO: 5381465 - DNA, 25 bp, Homo sapien
gtcgactggccttatgaaggacagc

SEQ ID NO: 5381466 - DNA, 25 bp, Homo sapien
tgctggtcgactggccttatgaagg

SEQ ID NO: 5381467 - DNA, 25 bp, Homo sapien
aggataatgctggtcgactggcctt

SEQ ID NO: 5381468 - DNA, 25 bp, Homo sapien
ttatgaaggacagccaaatcttgca

SEQ ID NO: 5381469 - DNA, 25 bp, Homo sapien
gattgagttcaaagcttgctgatca

SEQ ID NO: 5381470 - DNA, 25 bp, Homo sapien
attgagttcaaagcttgctgatcat

SEQ ID NO: 5381471 - DNA, 25 bp, Homo sapien
tgtggatactggcctactgtatttg

SEQ ID NO: 5381472 - DNA, 25 bp, Homo sapien
gatactggcctactgtatttggaaa

SEQ ID NO: 5381473 - DNA, 25 bp, Homo sapien
ctgtggatactggcctactgtattt

SEQ ID NO: 5381474 - DNA, 25 bp, Homo sapien
gtggatactggcctactgtatttgg

SEQ ID NO: 5381475 - DNA, 25 bp, Homo sapien
tcttgatttaggatagggtgggcca

SEQ ID NO: 5381476 - DNA, 25 bp, Homo sapien
ttggaaggacactgaattgagcaca

SEQ ID NO: 5381477 - DNA, 25 bp, Homo sapien
cggcccaatgggtttctgacacatg

SEQ ID NO: 5381478 - DNA, 25 bp, Homo sapien
gaatgttgccctactatagagcagt

SEQ ID NO: 5381479 - DNA, 25 bp, Homo sapien
tgtccctgctgttacgcataaaatg

SEQ ID NO: 5381480 - DNA, 25 bp, Homo sapien
taccacaatatacgaccaagagttg

SEQ ID NO: 5381481 - DNA, 25 bp, Homo sapien
caatccattcccatactttagtgtc

SEQ ID NO: 5381482 - DNA, 25 bp, Homo sapien
caagagttgtataacatattctccc

SEQ ID NO: 5381483 - DNA, 25 bp, Homo sapien
gctcaacaatttgaaaattaggaaa

SEQ ID NO: 5381484 - DNA, 25 bp, Homo sapien
tactttacacatttcgctaggggga

SEQ ID NO: 5381485 - DNA, 25 bp, Homo sapien
tgaaggttgatcatgtaggcacccc

SEQ ID NO: 5381486 - DNA, 25 bp, Homo sapien
ggaggtgttttatattgaaggttga

SEQ ID NO: 5381487 - DNA, 25 bp, Homo sapien
gtttgtacaaaccattatcagttgg

SEQ ID NO: 5381488 - DNA, 25 bp, Homo sapien
gggagcaattacaccaacctttcag

SEQ ID NO: 5381489 - DNA, 25 bp, Homo sapien
taaattcaagaattcaaaagggagc

SEQ ID NO: 5381490 - DNA, 25 bp, Homo sapien
gccctggaccagatcacttcaaaca

SEQ ID NO: 5381491 - DNA, 25 bp, Homo sapien
tcattgtgaagccagtattactcca

SEQ ID NO: 5381492 - DNA, 25 bp, Homo sapien
aacttctgggcacaagcaatccacc

SEQ ID NO: 5381493 - DNA, 25 bp, Homo sapien
gttgcccagtctggtcttgaacttc

SEQ ID NO: 5381494 - DNA, 25 bp, Homo sapien
tttcggtagagacacggttttgcta

SEQ ID NO: 5381495 - DNA, 25 bp, Homo sapien
cttctgggcacaagcaatccacctg

SEQ ID NO: 5381496 - DNA, 25 bp, Homo sapien
taacacaatggatgatcccatcccc

SEQ ID NO: 5381497 - DNA, 25 bp, Homo sapien
tgctacttccgccaagactaacaca

SEQ ID NO: 5381498 - DNA, 25 bp, Homo sapien
ggtgttatattctactacagtaaag

SEQ ID NO: 5381499 - DNA, 25 bp, Homo sapien
tattctactacagtaaaggttagat

SEQ ID NO: 5381500 - DNA, 25 bp, Homo sapien
gtgcaatggcattatggctaaaaac

SEQ ID NO: 5381501 - DNA, 25 bp, Homo sapien
tgcttaaaaacatgtgagcctggct

SEQ ID NO: 5381502 - DNA, 25 bp, Homo sapien
ggcattatggctaaaaactgtatat

SEQ ID NO: 5381503 - DNA, 25 bp, Homo sapien
aattggactatcatatgcagaagaa

SEQ ID NO: 5381504 - DNA, 25 bp, Homo sapien
gacagacgggacttagttgaactaa

SEQ ID NO: 5381505 - DNA, 25 bp, Homo sapien
gacactggtctaggcaaagaatttg

SEQ ID NO: 5381506 - DNA, 25 bp, Homo sapien
tgcaaactatacatccaatggggac

SEQ ID NO: 5381507 - DNA, 25 bp, Homo sapien
caaggaattcagacaacttcacaca

SEQ ID NO: 5381508 - DNA, 25 bp, Homo sapien
tcttttctatacactgtggtacaac

SEQ ID NO: 5381509 - DNA, 25 bp, Homo sapien
gccacagactacgagaaaaaatgta

SEQ ID NO: 5381510 - DNA, 25 bp, Homo sapien
aaaaattatggtgaccttgactttg

SEQ ID NO: 5381511 - DNA, 25 bp, Homo sapien
caacagctggatacctcagctgtca

SEQ ID NO: 5381512 - DNA, 25 bp, Homo sapien
aaaatgctcatgcactactgttgag

SEQ ID NO: 5381513 - DNA, 25 bp, Homo sapien
taaacatactcccatatgaaccagt

SEQ ID NO: 5381514 - DNA, 25 bp, Homo sapien
ggataccgtgcaactaaaatgctca

SEQ ID NO: 5381515 - DNA, 25 bp, Homo sapien
acttggaagcaaggtgttcttaaga

SEQ ID NO: 5381516 - DNA, 25 bp, Homo sapien
tgtcaagcggtacaatcacttcaga

SEQ ID NO: 5381517 - DNA, 25 bp, Homo sapien
caaaggtacgacactaacgcaagat

SEQ ID NO: 5381518 - DNA, 25 bp, Homo sapien
ggtaaacatgcacctactgacatgg

SEQ ID NO: 5381519 - DNA, 25 bp, Homo sapien
gtaagccccaatgctgcagcctggt

SEQ ID NO: 5381520 - DNA, 25 bp, Homo sapien
tatatgaagagacataacagcttgg

SEQ ID NO: 5381521 - DNA, 25 bp, Homo sapien
ttatcaatctaaggctgagcaaccc

SEQ ID NO: 5381522 - DNA, 25 bp, Homo sapien
aatgcagccatgtactgatcacaga

SEQ ID NO: 5381523 - DNA, 25 bp, Homo sapien
aaactgaatcaggagacattaggtc

SEQ ID NO: 5381524 - DNA, 25 bp, Homo sapien
caactgcactatgtgactctgagcc

SEQ ID NO: 5381525 - DNA, 25 bp, Homo sapien
gaaatgggtgaaatctaggactacc

SEQ ID NO: 5381526 - DNA, 25 bp, Homo sapien
tctgcttcctaagatacggtttgaa

SEQ ID NO: 5381527 - DNA, 25 bp, Homo sapien
taggaacctttgctctaactggaag

SEQ ID NO: 5381528 - DNA, 25 bp, Homo sapien
cagaatctatgtggattatgagaga

SEQ ID NO: 5381529 - DNA, 25 bp, Homo sapien
tacctcccaatcacattaaataaga

SEQ ID NO: 5381530 - DNA, 25 bp, Homo sapien
gaatgtatcatttgtattcccctta

SEQ ID NO: 5381531 - DNA, 25 bp, Homo sapien
gaatacttattatatgctaggcacc

SEQ ID NO: 5381532 - DNA, 25 bp, Homo sapien
tacatagttccaggatctagaattc

SEQ ID NO: 5381533 - DNA, 25 bp, Homo sapien
ttgaaatacatagttccaggatcta

SEQ ID NO: 5381534 - DNA, 25 bp, Homo sapien
tagttccaggatctagaattctagt

SEQ ID NO: 5381535 - DNA, 25 bp, Homo sapien
ttattctgcttcatagtgtttttta

SEQ ID NO: 5381536 - DNA, 25 bp, Homo sapien
ttcacttttcattgtgcttcacaga

SEQ ID NO: 5381537 - DNA, 25 bp, Homo sapien
tttcttacaaattgactcactctat

SEQ ID NO: 5381538 - DNA, 25 bp, Homo sapien
tactggcacctcgtcccactaattt

SEQ ID NO: 5381539 - DNA, 25 bp, Homo sapien
tcttctttcagtagaggtatacctt

SEQ ID NO: 5381540 - DNA, 25 bp, Homo sapien
ccgcgtcgctagagaccggagaaga

SEQ ID NO: 5381541 - DNA, 25 bp, Homo sapien
tggtcgttgttttcgtcgccgccgc

SEQ ID NO: 5381542 - DNA, 25 bp, Homo sapien
ctctttcacatgaagcccgggccgg

SEQ ID NO: 5381543 - DNA, 25 bp, Homo sapien
ctgctccgcagggacgtagagagcc

SEQ ID NO: 5381544 - DNA, 25 bp, Homo sapien
gcagcccggcagccactacacacgg

SEQ ID NO: 5381545 - DNA, 25 bp, Homo sapien
agcccggcagccactacacacggac

SEQ ID NO: 5381546 - DNA, 25 bp, Homo sapien
cagcccggcagccactacacacgga

SEQ ID NO: 5381547 - DNA, 25 bp, Homo sapien
acgtcgggcgtagcgcggcgcacgt

SEQ ID NO: 5381548 - DNA, 25 bp, Homo sapien
ccgtgacgtcgggcgtagcgcggcg

SEQ ID NO: 5381549 - DNA, 25 bp, Homo sapien
gtgacgtcgggcgtagcgcggcgca

SEQ ID NO: 5381550 - DNA, 25 bp, Homo sapien
tgacgtcgggcgtagcgcggcgcac

SEQ ID NO: 5381551 - DNA, 25 bp, Homo sapien
gagtagatcccgtgaaaaggtctcc

SEQ ID NO: 5381552 - DNA, 25 bp, Homo sapien
aaaggtctcccacgtgggctgtgga

SEQ ID NO: 5381553 - DNA, 25 bp, Homo sapien
gccagatcccagacatccgagtaga

SEQ ID NO: 5381554 - DNA, 25 bp, Homo sapien
gcaaggagaaaagccgtctgcctct

SEQ ID NO: 5381555 - DNA, 25 bp, Homo sapien
taatcagactagtggtgaggccctc

SEQ ID NO: 5381556 - DNA, 25 bp, Homo sapien
ggttagcccagcaagtattacttct

SEQ ID NO: 5381557 - DNA, 25 bp, Homo sapien
gactggttgtgtacattggttagcc

SEQ ID NO: 5381558 - DNA, 25 bp, Homo sapien
gaggccctccgtggtgtgactaacc

SEQ ID NO: 5381559 - DNA, 25 bp, Homo sapien
cctttcatgcatattccagaccaca

SEQ ID NO: 5381560 - DNA, 25 bp, Homo sapien
tcttcttggtttcttcgtacattct

SEQ ID NO: 5381561 - DNA, 25 bp, Homo sapien
ttcttcgtacattctggatccaccc

SEQ ID NO: 5381562 - DNA, 25 bp, Homo sapien
ttcatgcatattccagaccacattt

SEQ ID NO: 5381563 - DNA, 25 bp, Homo sapien
cctctctgggcggtttggaggatgc

SEQ ID NO: 5381564 - DNA, 25 bp, Homo sapien
cagtgcgatgtagatccttccccaa

SEQ ID NO: 5381565 - DNA, 25 bp, Homo sapien
ggtccatgttgcagaaatgagtgag

SEQ ID NO: 5381566 - DNA, 25 bp, Homo sapien
gatgctaagccctctcagtgcacca

SEQ ID NO: 5381567 - DNA, 25 bp, Homo sapien
tgtgtagccctgggcgagtcacagc

SEQ ID NO: 5381568 - DNA, 25 bp, Homo sapien
taaaaggagtgtgagatcatgttgg

SEQ ID NO: 5381569 - DNA, 25 bp, Homo sapien
gacatcagcctgcttatactgtaaa

SEQ ID NO: 5381570 - DNA, 25 bp, Homo sapien
gaggagacactacagtgaaatctaa

SEQ ID NO: 5381571 - DNA, 25 bp, Homo sapien
gctaaaatgagtaggcaaaaatatg

SEQ ID NO: 5381572 - DNA, 25 bp, Homo sapien
tatggtaataactgttgcagccagg

SEQ ID NO: 5381573 - DNA, 25 bp, Homo sapien
gaaaatcaccatttgctaaaaacta

SEQ ID NO: 5381574 - DNA, 25 bp, Homo sapien
tgcagccaggaatcatcaaccgatg

SEQ ID NO: 5381575 - DNA, 25 bp, Homo sapien
aaatatggttgtatggcaggctgcc

SEQ ID NO: 5381576 - DNA, 25 bp, Homo sapien
cgtgtaggcacatgtccaaaggagg

SEQ ID NO: 5381577 - DNA, 25 bp, Homo sapien
tgtgcaggacacttcgtggctaata

SEQ ID NO: 5381578 - DNA, 25 bp, Homo sapien
ggtaaagcgttcatagactgcatgg

SEQ ID NO: 5381579 - DNA, 25 bp, Homo sapien
cagaatccgctgcatgttgtaaagg

SEQ ID NO: 5381580 - DNA, 25 bp, Homo sapien
tggttactgtagaaagcatgattgt

SEQ ID NO: 5381581 - DNA, 25 bp, Homo sapien
ttgtaaagggtcaacacagctgcca

SEQ ID NO: 5381582 - DNA, 25 bp, Homo sapien
aggagaactgtttttcattgccatg

SEQ ID NO: 5381583 - DNA, 25 bp, Homo sapien
ctttgttcacccacgtgatatttca

SEQ ID NO: 5381584 - DNA, 25 bp, Homo sapien
tttgttcacccacgtgatatttcag

SEQ ID NO: 5381585 - DNA, 25 bp, Homo sapien
tgttcacccacgtgatatttcagtt

SEQ ID NO: 5381586 - DNA, 25 bp, Homo sapien
gttcacccacgtgatatttcagtta

SEQ ID NO: 5381587 - DNA, 25 bp, Homo sapien
cagcagccactattttcaattggtg

SEQ ID NO: 5381588 - DNA, 25 bp, Homo sapien
gaaatgtgcccctactcagtttcaa

SEQ ID NO: 5381589 - DNA, 25 bp, Homo sapien
tgtagtttgccctagctaattcagc

SEQ ID NO: 5381590 - DNA, 25 bp, Homo sapien
ggagcagcacaatcacacaaattca

SEQ ID NO: 5381591 - DNA, 25 bp, Homo sapien
ggcctcagtagtcaccatgctaaaa

SEQ ID NO: 5381592 - DNA, 25 bp, Homo sapien
tcctgtcgttaaaataacatggcca

SEQ ID NO: 5381593 - DNA, 25 bp, Homo sapien
cgggcattgatattgcaacaccatt

SEQ ID NO: 5381594 - DNA, 25 bp, Homo sapien
gccatttgggtcacgcgggcattga

SEQ ID NO: 5381595 - DNA, 25 bp, Homo sapien
gatcagccctaatctgtacaacgga

SEQ ID NO: 5381596 - DNA, 25 bp, Homo sapien
gagaaggaaccttagtcccgtcagc

SEQ ID NO: 5381597 - DNA, 25 bp, Homo sapien
gagaatggagaatgggcaatgccca

SEQ ID NO: 5381598 - DNA, 25 bp, Homo sapien
gagacgttggactgcatccatccca

SEQ ID NO: 5381599 - DNA, 25 bp, Homo sapien
caggtcagaatcagtgtgtggagcc

SEQ ID NO: 5381600 - DNA, 25 bp, Homo sapien
ctgcatagacttgccctggagcggc

SEQ ID NO: 5381601 - DNA, 25 bp, Homo sapien
tttatgcaggtcagaatcagtgtgt

SEQ ID NO: 5381602 - DNA, 25 bp, Homo sapien
gtggagcctgcatagacttgccctg

SEQ ID NO: 5381603 - DNA, 25 bp, Homo sapien
ccttctgtggttgtgcatggggtct

SEQ ID NO: 5381604 - DNA, 25 bp, Homo sapien
gacatacaagctggtgccttctgtg

SEQ ID NO: 5381605 - DNA, 25 bp, Homo sapien
gcagtgatctctgcagacttgcggg

SEQ ID NO: 5381606 - DNA, 25 bp, Homo sapien
aacagggacatacaagctggtgcct

SEQ ID NO: 5381607 - DNA, 25 bp, Homo sapien
caagtcagtgaggagggctttcgca

SEQ ID NO: 5381608 - DNA, 25 bp, Homo sapien
gactccctgtggtcagctaagagca

SEQ ID NO: 5381609 - DNA, 25 bp, Homo sapien
ttggcagaaccccagatcgtgaggg

SEQ ID NO: 5381610 - DNA, 25 bp, Homo sapien
gaagtccctagtcagagcctctggt

SEQ ID NO: 5381611 - DNA, 25 bp, Homo sapien
gagaccttactaatcccagggatca

SEQ ID NO: 5381612 - DNA, 25 bp, Homo sapien
ccacctatgtaaggagacacaggca

SEQ ID NO: 5381613 - DNA, 25 bp, Homo sapien
cctgactcttgccattgggtggtac

SEQ ID NO: 5381614 - DNA, 25 bp, Homo sapien
catgcctattgtaggagctctccaa

SEQ ID NO: 5381615 - DNA, 25 bp, Homo sapien
gaacatgctgtgtgcgggcatcctc

SEQ ID NO: 5381616 - DNA, 25 bp, Homo sapien
tgagtgcagcgaggtcatgagcaac

SEQ ID NO: 5381617 - DNA, 25 bp, Homo sapien
cgtggtcccgcacaatgagtgcagc

SEQ ID NO: 5381618 - DNA, 25 bp, Homo sapien
tgcagagcgcgagctcaatcaggcc

SEQ ID NO: 5381619 - DNA, 25 bp, Homo sapien
gtctcatgctgctttgtgtgcgagt

SEQ ID NO: 5381620 - DNA, 25 bp, Homo sapien
tctcatgctgctttgtgtgcgagtt

SEQ ID NO: 5381621 - DNA, 25 bp, Homo sapien
aaggataacatttggtgaatacaga

SEQ ID NO: 5381622 - DNA, 25 bp, Homo sapien
gaatttaacacttcttgcgaggcag

SEQ ID NO: 5381623 - DNA, 25 bp, Homo sapien
agaatttaacacttcttgcgaggca

SEQ ID NO: 5381624 - DNA, 25 bp, Homo sapien
tctgacctacataatttccctttcc

SEQ ID NO: 5381625 - DNA, 25 bp, Homo sapien
tactgaacaggtgctccaaaccacg

SEQ ID NO: 5381626 - DNA, 25 bp, Homo sapien
tattgcttcttaccaggatgccgct

SEQ ID NO: 5381627 - DNA, 25 bp, Homo sapien
ggtagtacaagattccaagccgcag

SEQ ID NO: 5381628 - DNA, 25 bp, Homo sapien
gaaacacgggtcaagctctattgct

SEQ ID NO: 5381629 - DNA, 25 bp, Homo sapien
gacagtgataagtggcaatcaatcc

SEQ ID NO: 5381630 - DNA, 25 bp, Homo sapien
aaacatcttctctctcgccctgtgg

SEQ ID NO: 5381631 - DNA, 25 bp, Homo sapien
gctgccccagtatggaatggaaaaa

SEQ ID NO: 5381632 - DNA, 25 bp, Homo sapien
gctggctggctgtctagagtgttct

SEQ ID NO: 5381633 - DNA, 25 bp, Homo sapien
gaagtgggcttatcagacgacaggc

SEQ ID NO: 5381634 - DNA, 25 bp, Homo sapien
gacgacaggctgaatgcaacacaat

SEQ ID NO: 5381635 - DNA, 25 bp, Homo sapien
gcaacacaatggtgtggcaagccct

SEQ ID NO: 5381636 - DNA, 25 bp, Homo sapien
gaaggctgctgaccctatgttagca

SEQ ID NO: 5381637 - DNA, 25 bp, Homo sapien
acagaaaaattgatggccggacaag

SEQ ID NO: 5381638 - DNA, 25 bp, Homo sapien
agaaaaattgatggccggacaaggt

SEQ ID NO: 5381639 - DNA, 25 bp, Homo sapien
cagaaaaattgatggccggacaagg

SEQ ID NO: 5381640 - DNA, 25 bp, Homo sapien
aaaaattgatggccggacaaggtgg

SEQ ID NO: 5381641 - DNA, 25 bp, Homo sapien
gagaaaggcgtacagcagtgtgcat

SEQ ID NO: 5381642 - DNA, 25 bp, Homo sapien
tcctataagagagcagaaactgatt

SEQ ID NO: 5381643 - DNA, 25 bp, Homo sapien
aaagggactttatagctacggacag

SEQ ID NO: 5381644 - DNA, 25 bp, Homo sapien
gggcaattacatgctctggcagcgt

SEQ ID NO: 5381645 - DNA, 25 bp, Homo sapien
gccactgagactgaccttgttgctg

SEQ ID NO: 5381646 - DNA, 25 bp, Homo sapien
ggaagagcacaacccagatcaaggg

SEQ ID NO: 5381647 - DNA, 25 bp, Homo sapien
gaaaaggtgacgtctgaacagagag

SEQ ID NO: 5381648 - DNA, 25 bp, Homo sapien
gagaagccaagtgtaaaggccctga

SEQ ID NO: 5381649 - DNA, 25 bp, Homo sapien
gacactactcttggcaggtgagaac

SEQ ID NO: 5381650 - DNA, 25 bp, Homo sapien
ttttagttcacacctagagcccttc

SEQ ID NO: 5381651 - DNA, 25 bp, Homo sapien
tgcctgtggatccagaaagctacca

SEQ ID NO: 5381652 - DNA, 25 bp, Homo sapien
cattccgtctgggtttggatgagaa

SEQ ID NO: 5381653 - DNA, 25 bp, Homo sapien
tatggtagattttctcttgaggctc

SEQ ID NO: 5381654 - DNA, 25 bp, Homo sapien
ctctgcaagtgggcctccgcctggg

SEQ ID NO: 5381655 - DNA, 25 bp, Homo sapien
tatcagactggtccttttcttatgg

SEQ ID NO: 5381656 - DNA, 25 bp, Homo sapien
tgcctccaaccttctatcttcttgg

SEQ ID NO: 5381657 - DNA, 25 bp, Homo sapien
caggatattagctttatcaacatcc

SEQ ID NO: 5381658 - DNA, 25 bp, Homo sapien
tattcaaggtgtgactacactgagc

SEQ ID NO: 5381659 - DNA, 25 bp, Homo sapien
tgttgaatcccatctcctactcagc

SEQ ID NO: 5381660 - DNA, 25 bp, Homo sapien
gactacactgagcagtaacagcaaa

SEQ ID NO: 5381661 - DNA, 25 bp, Homo sapien
aagaaaataacttgagacaatgaaa

SEQ ID NO: 5381662 - DNA, 25 bp, Homo sapien
aaaacaagagctggttcctcagaaa

SEQ ID NO: 5381663 - DNA, 25 bp, Homo sapien
tcaaatgcgaggacattatgaccca

SEQ ID NO: 5381664 - DNA, 25 bp, Homo sapien
cagagataaacataacagagaatac

SEQ ID NO: 5381665 - DNA, 25 bp, Homo sapien
gtacacaaagcactcctacaactca

SEQ ID NO: 5381666 - DNA, 25 bp, Homo sapien
aacacaatcaagagtgaaaaggcaa

SEQ ID NO: 5381667 - DNA, 25 bp, Homo sapien
aatttaaatgtgtgcaacgaagaac

SEQ ID NO: 5381668 - DNA, 25 bp, Homo sapien
cccaatataaaactgggcaaatgac

SEQ ID NO: 5381669 - DNA, 25 bp, Homo sapien
tatagaagtatgactagtattcctt

SEQ ID NO: 5381670 - DNA, 25 bp, Homo sapien
gatacacgctgaaccatttacagac

SEQ ID NO: 5381671 - DNA, 25 bp, Homo sapien
tctttctccaaagagtccattgcgc

SEQ ID NO: 5381672 - DNA, 25 bp, Homo sapien
tataactgagagaaatgtgagtcct

SEQ ID NO: 5381673 - DNA, 25 bp, Homo sapien
tgcgcatttcttagagtagagatgg

SEQ ID NO: 5381674 - DNA, 25 bp, Homo sapien
tacccttcttggaggtcgcctgaaa

SEQ ID NO: 5381675 - DNA, 25 bp, Homo sapien
catctgtttatccagtcgactgata

SEQ ID NO: 5381676 - DNA, 25 bp, Homo sapien
tttccttatatctgtgaactttctc

SEQ ID NO: 5381677 - DNA, 25 bp, Homo sapien
tgctgattttcactgcgtgtgcaga

SEQ ID NO: 5381678 - DNA, 25 bp, Homo sapien
taactgagttagcaaccagaagagc

SEQ ID NO: 5381679 - DNA, 25 bp, Homo sapien
gagctagccgcttgacatgcacttt

SEQ ID NO: 5381680 - DNA, 25 bp, Homo sapien
cctttcgaagaccaaatgtggagct

SEQ ID NO: 5381681 - DNA, 25 bp, Homo sapien
aactgcatgcgtttccctttcgaag

SEQ ID NO: 5381682 - DNA, 25 bp, Homo sapien
cagggtaggtactccttccagaact

SEQ ID NO: 5381683 - DNA, 25 bp, Homo sapien
cacagaggctgagcacatatagtca

SEQ ID NO: 5381684 - DNA, 25 bp, Homo sapien
tgggcaaagcatacccagggtaggt

SEQ ID NO: 5381685 - DNA, 25 bp, Homo sapien
gagatagtgatgtcagatccaagca

SEQ ID NO: 5381686 - DNA, 25 bp, Homo sapien
gagtgaatatgcaaccctgctccac

SEQ ID NO: 5381687 - DNA, 25 bp, Homo sapien
aagcagattggccactaagagtttt

SEQ ID NO: 5381688 - DNA, 25 bp, Homo sapien
cctggacatgtcttttctaatactg

SEQ ID NO: 5381689 - DNA, 25 bp, Homo sapien
cattagcgtctacaatgtggaagca

SEQ ID NO: 5381690 - DNA, 25 bp, Homo sapien
ctcgtgtatatactctggtagggcc

SEQ ID NO: 5381691 - DNA, 25 bp, Homo sapien
cgtgtatatactctggtagggccag

SEQ ID NO: 5381692 - DNA, 25 bp, Homo sapien
tgtatatactctggtagggccaggc

SEQ ID NO: 5381693 - DNA, 25 bp, Homo sapien
ctctcgtgtatatactctggtaggg

SEQ ID NO: 5381694 - DNA, 25 bp, Homo sapien
tctgttctgcaaatcgcctcttatg

SEQ ID NO: 5381695 - DNA, 25 bp, Homo sapien
tgttgccttcaatgctgaacttgac

SEQ ID NO: 5381696 - DNA, 25 bp, Homo sapien
tatgcttttccaatcggcttaggcc

SEQ ID NO: 5381697 - DNA, 25 bp, Homo sapien
gaacttgacagcacgatgcactttg

SEQ ID NO: 5381698 - DNA, 25 bp, Homo sapien
gataatgttgaattaagactgaaga

SEQ ID NO: 5381699 - DNA, 25 bp, Homo sapien
tcagcaataaactttaatcctgggt

SEQ ID NO: 5381700 - DNA, 25 bp, Homo sapien
ttgtggtttggctagataagcgacc

SEQ ID NO: 5381701 - DNA, 25 bp, Homo sapien
gcgaccagaaaacagtcctctctga

SEQ ID NO: 5381702 - DNA, 25 bp, Homo sapien
ctacaagggttattaacacatgaag

SEQ ID NO: 5381703 - DNA, 25 bp, Homo sapien
tgagatccaccttgccgatcctccg

SEQ ID NO: 5381704 - DNA, 25 bp, Homo sapien
cagtaatctgcaggtgagatccacc

SEQ ID NO: 5381705 - DNA, 25 bp, Homo sapien
aagtaaagagtcaaacagtaatctg

SEQ ID NO: 5381706 - DNA, 25 bp, Homo sapien
tgcacgggcacagaatccaggatct

SEQ ID NO: 5381707 - DNA, 25 bp, Homo sapien
tccacattccatttgggcctgacaa

SEQ ID NO: 5381708 - DNA, 25 bp, Homo sapien
tgggcctgacaacatagtccttgtt

SEQ ID NO: 5381709 - DNA, 25 bp, Homo sapien
aaggcattgggacccttgcacgggc

SEQ ID NO: 5381710 - DNA, 25 bp, Homo sapien
cttaaagcagcaaacggaaattctc

SEQ ID NO: 5381711 - DNA, 25 bp, Homo sapien
gattcaaagcccttcaccggtctat

SEQ ID NO: 5381712 - DNA, 25 bp, Homo sapien
ggagtctagcacttagcaaacagca

SEQ ID NO: 5381713 - DNA, 25 bp, Homo sapien
aagtcacctcccacaaatgagagca

SEQ ID NO: 5381714 - DNA, 25 bp, Homo sapien
caggtctcttctgggtgtctgacca

SEQ ID NO: 5381715 - DNA, 25 bp, Homo sapien
tctcttctgggtgtctgaccaccag

SEQ ID NO: 5381716 - DNA, 25 bp, Homo sapien
tccaggtctcttctgggtgtctgac

SEQ ID NO: 5381717 - DNA, 25 bp, Homo sapien
tcctctcctgtcagcaccttttcca

SEQ ID NO: 5381718 - DNA, 25 bp, Homo sapien
taacaggtttccttgtggatgagcc

SEQ ID NO: 5381719 - DNA, 25 bp, Homo sapien
tctggttaggaggacaggaccctca

SEQ ID NO: 5381720 - DNA, 25 bp, Homo sapien
tctcaagtggatggaacaacacaag

SEQ ID NO: 5381721 - DNA, 25 bp, Homo sapien
aatagctcttttacgatggatcagg

SEQ ID NO: 5381722 - DNA, 25 bp, Homo sapien
cattcttcgtcgttgaggcatctgt

SEQ ID NO: 5381723 - DNA, 25 bp, Homo sapien
ccaaatataggcctagaccactcat

SEQ ID NO: 5381724 - DNA, 25 bp, Homo sapien
tcctttgtagtttgaggtaagacca

SEQ ID NO: 5381725 - DNA, 25 bp, Homo sapien
ggcatctgttctagatctctctgct

SEQ ID NO: 5381726 - DNA, 25 bp, Homo sapien
gctgtagtaagtcatggaaaccagt

SEQ ID NO: 5381727 - DNA, 25 bp, Homo sapien
accagtggggatattctgcttttct

SEQ ID NO: 5381728 - DNA, 25 bp, Homo sapien
tgtagtaagtcatggaaaccagtgg

SEQ ID NO: 5381729 - DNA, 25 bp, Homo sapien
aaccagtggggatattctgcttttc

SEQ ID NO: 5381730 - DNA, 25 bp, Homo sapien
gatacatcactgctcgtccaatccc

SEQ ID NO: 5381731 - DNA, 25 bp, Homo sapien
tcccactatgcttcagggtctcctg

SEQ ID NO: 5381732 - DNA, 25 bp, Homo sapien
ccttgttagaccttgactccttggg

SEQ ID NO: 5381733 - DNA, 25 bp, Homo sapien
tgccatgtccttgttagaccttgac

SEQ ID NO: 5381734 - DNA, 25 bp, Homo sapien
cttgagtgcaggcaaactcctatct

SEQ ID NO: 5381735 - DNA, 25 bp, Homo sapien
gtgagagccattctttgatggcaga

SEQ ID NO: 5381736 - DNA, 25 bp, Homo sapien
tcctcccggatcttgagtgcaggca

SEQ ID NO: 5381737 - DNA, 25 bp, Homo sapien
tatctggtagaggtgagagccattc

SEQ ID NO: 5381738 - DNA, 25 bp, Homo sapien
tgtcaatgaatgtttctttaaggtc

SEQ ID NO: 5381739 - DNA, 25 bp, Homo sapien
ctgtcaatgaatgtttctttaaggt

SEQ ID NO: 5381740 - DNA, 25 bp, Homo sapien
tgcttttaaagcgttactcatataa

SEQ ID NO: 5381741 - DNA, 25 bp, Homo sapien
tggttctactgtatcttccgacttt

SEQ ID NO: 5381742 - DNA, 25 bp, Homo sapien
aattctgtgaaccttggttctactg

SEQ ID NO: 5381743 - DNA, 25 bp, Homo sapien
ctggtttcgaaagcagtatgacatt

SEQ ID NO: 5381744 - DNA, 25 bp, Homo sapien
ttcttaaggtgcataactacagcag

SEQ ID NO: 5381745 - DNA, 25 bp, Homo sapien
gcataactacagcaggcagtaaagt

SEQ ID NO: 5381746 - DNA, 25 bp, Homo sapien
aactacagcaggcagtaaagttaat

SEQ ID NO: 5381747 - DNA, 25 bp, Homo sapien
taaggtgcataactacagcaggcag

SEQ ID NO: 5381748 - DNA, 25 bp, Homo sapien
cgatcatggcactcacgacgtcgtc

SEQ ID NO: 5381749 - DNA, 25 bp, Homo sapien
gacgtcgtctgcatcactaataaag

SEQ ID NO: 5381750 - DNA, 25 bp, Homo sapien
taataaaggtgccaccatcgcggtt

SEQ ID NO: 5381751 - DNA, 25 bp, Homo sapien
gcagcttcattcatcttgacgatca

SEQ ID NO: 5381752 - DNA, 25 bp, Homo sapien
aacaaaagcaagtgaaatacaagtt

SEQ ID NO: 5381753 - DNA, 25 bp, Homo sapien
aaagcaagtgaaatacaagttgtct

SEQ ID NO: 5381754 - DNA, 25 bp, Homo sapien
gcaagtgaaatacaagttgtctttt

SEQ ID NO: 5381755 - DNA, 25 bp, Homo sapien
acatttactttcacaacaattaaga

SEQ ID NO: 5381756 - DNA, 25 bp, Homo sapien
atacagtcatgcgccgcataacgat

SEQ ID NO: 5381757 - DNA, 25 bp, Homo sapien
gccgcataacgatgtttcggtcaat

SEQ ID NO: 5381758 - DNA, 25 bp, Homo sapien
tgtttcggtcaatgacggactgcaa

SEQ ID NO: 5381759 - DNA, 25 bp, Homo sapien
tcatgcgccgcataacgatgtttcg

SEQ ID NO: 5381760 - DNA, 25 bp, Homo sapien
tgtaccctaggtgcgataggtttta

SEQ ID NO: 5381761 - DNA, 25 bp, Homo sapien
cgataggttttaccatacagcctag

SEQ ID NO: 5381762 - DNA, 25 bp, Homo sapien
ggtgcgataggttttaccatacagc

SEQ ID NO: 5381763 - DNA, 25 bp, Homo sapien
ccatgtaggtttgtataatactatg

SEQ ID NO: 5381764 - DNA, 25 bp, Homo sapien
tgctaagcgcctcaaacctttatgg

SEQ ID NO: 5381765 - DNA, 25 bp, Homo sapien
cataagagtttacttggtgagccat

SEQ ID NO: 5381766 - DNA, 25 bp, Homo sapien
agtttaattactgcatgccactagg

SEQ ID NO: 5381767 - DNA, 25 bp, Homo sapien
tacacatggaaaactacaggcttgc

SEQ ID NO: 5381768 - DNA, 25 bp, Homo sapien
tctctttatgttatcatcagaatct

SEQ ID NO: 5381769 - DNA, 25 bp, Homo sapien
ctctttatgttatcatcagaatctg

SEQ ID NO: 5381770 - DNA, 25 bp, Homo sapien
tctttatgttatcatcagaatctga

SEQ ID NO: 5381771 - DNA, 25 bp, Homo sapien
tcttccagatcttcttggttaaaac

SEQ ID NO: 5381772 - DNA, 25 bp, Homo sapien
cttcttccagatcttcttggttaaa

SEQ ID NO: 5381773 - DNA, 25 bp, Homo sapien
tcttcttccagatcttcttggttaa

SEQ ID NO: 5381774 - DNA, 25 bp, Homo sapien
tttcttcttccagatcttcttggtt

SEQ ID NO: 5381775 - DNA, 25 bp, Homo sapien
taagtctccaaaacaggtaagtata

SEQ ID NO: 5381776 - DNA, 25 bp, Homo sapien
taaccaagttgatgttaagtctcca

SEQ ID NO: 5381777 - DNA, 25 bp, Homo sapien
actttcttatttcactattgtcctg

SEQ ID NO: 5381778 - DNA, 25 bp, Homo sapien
ggtgcttaactaagtatgagctcca

SEQ ID NO: 5381779 - DNA, 25 bp, Homo sapien
cagggtttaagtttctgagcggcaa

SEQ ID NO: 5381780 - DNA, 25 bp, Homo sapien
gaagactccatgttaacggaatgaa

SEQ ID NO: 5381781 - DNA, 25 bp, Homo sapien
gattatatagagactgttccctggt

SEQ ID NO: 5381782 - DNA, 25 bp, Homo sapien
tcttaggcagaattcagtcttcacc

SEQ ID NO: 5381783 - DNA, 25 bp, Homo sapien
aaattcctatatctagagccctaag

SEQ ID NO: 5381784 - DNA, 25 bp, Homo sapien
tgggactaccagctacttgcaccta

SEQ ID NO: 5381785 - DNA, 25 bp, Homo sapien
caacttcgagaatctatggtttagg

SEQ ID NO: 5381786 - DNA, 25 bp, Homo sapien
tccttgcaatgtgtacaacttcgag

SEQ ID NO: 5381787 - DNA, 25 bp, Homo sapien
gcacaatcaaggaggaaatatttcc

SEQ ID NO: 5381788 - DNA, 25 bp, Homo sapien
ggaaatatttccatcttatacttac

SEQ ID NO: 5381789 - DNA, 25 bp, Homo sapien
ctccaaatatgtctgcaataagatt

SEQ ID NO: 5381790 - DNA, 25 bp, Homo sapien
tctccaaatatgtctgcaataagat

SEQ ID NO: 5381791 - DNA, 25 bp, Homo sapien
tcttcatcaccagattctccaaata

SEQ ID NO: 5381792 - DNA, 25 bp, Homo sapien
tcatcaccagattctccaaatatgt

SEQ ID NO: 5381793 - DNA, 25 bp, Homo sapien
attgcctgactcactgtcactccca

SEQ ID NO: 5381794 - DNA, 25 bp, Homo sapien
tcattgcctgactcactgtcactcc

SEQ ID NO: 5381795 - DNA, 25 bp, Homo sapien
cattgcctgactcactgtcactccc

SEQ ID NO: 5381796 - DNA, 25 bp, Homo sapien
cactcccaaacagatccttctcttc

SEQ ID NO: 5381797 - DNA, 25 bp, Homo sapien
catcagagacaacacgactcttctt

SEQ ID NO: 5381798 - DNA, 25 bp, Homo sapien
atcagagacaacacgactcttcttt

SEQ ID NO: 5381799 - DNA, 25 bp, Homo sapien
tcagagacaacacgactcttctttg

SEQ ID NO: 5381800 - DNA, 25 bp, Homo sapien
tggcttctgtttgtgtctggacgca

SEQ ID NO: 5381801 - DNA, 25 bp, Homo sapien
cattttccgaatcactggcctggtt

SEQ ID NO: 5381802 - DNA, 25 bp, Homo sapien
gatcctcactttccgaatcactgat

SEQ ID NO: 5381803 - DNA, 25 bp, Homo sapien
tattctccctgtcgctgtcatcatc

SEQ ID NO: 5381804 - DNA, 25 bp, Homo sapien
aatctcagaatcactggcgggatgc

SEQ ID NO: 5381805 - DNA, 25 bp, Homo sapien
tcactcattcgaggtttgggaggct

SEQ ID NO: 5381806 - DNA, 25 bp, Homo sapien
agagtcgctcccatgctgattgaca

SEQ ID NO: 5381807 - DNA, 25 bp, Homo sapien
gagtcactgatacgaggtttgggaa

SEQ ID NO: 5381808 - DNA, 25 bp, Homo sapien
tgtatctgggaaaggtgtcacagaa

SEQ ID NO: 5381809 - DNA, 25 bp, Homo sapien
gttcccaaacttcagtatgcttaag

SEQ ID NO: 5381810 - DNA, 25 bp, Homo sapien
catcaaccctatgtgttacaccagc

SEQ ID NO: 5381811 - DNA, 25 bp, Homo sapien
gagtggaaccactaactttgcgcct

SEQ ID NO: 5381812 - DNA, 25 bp, Homo sapien
cttgccaaaaatactcgccccatga

SEQ ID NO: 5381813 - DNA, 25 bp, Homo sapien
acttgccaaaaatactcgccccatg

SEQ ID NO: 5381814 - DNA, 25 bp, Homo sapien
gggcagttctgaggactaaaagcat

SEQ ID NO: 5381815 - DNA, 25 bp, Homo sapien
gccgttagcacagagcctgtgaata

SEQ ID NO: 5381816 - DNA, 25 bp, Homo sapien
aaatacatcctgtgacgtctgctga

SEQ ID NO: 5381817 - DNA, 25 bp, Homo sapien
gaatactatctataccgtagagggc

SEQ ID NO: 5381818 - DNA, 25 bp, Homo sapien
cacacccaaagatcaccatcattta

SEQ ID NO: 5381819 - DNA, 25 bp, Homo sapien
agcttaaaccctgaaaactgagctg

SEQ ID NO: 5381820 - DNA, 25 bp, Homo sapien
tttagtcctttcaatctcttctatg

SEQ ID NO: 5381821 - DNA, 25 bp, Homo sapien
tgcagaaataagacgaatgcaaatc

SEQ ID NO: 5381822 - DNA, 25 bp, Homo sapien
cctgaacttgtaactgcaccatgag

SEQ ID NO: 5381823 - DNA, 25 bp, Homo sapien
gcctgatacacccatagtaagctga

SEQ ID NO: 5381824 - DNA, 25 bp, Homo sapien
catgagatgactaccctactgggct

SEQ ID NO: 5381825 - DNA, 25 bp, Homo sapien
caaagatgcttagggtaacctgaac

SEQ ID NO: 5381826 - DNA, 25 bp, Homo sapien
tgtctgatccggagtgttgctcatt

SEQ ID NO: 5381827 - DNA, 25 bp, Homo sapien
ctctgaatgacgttctacacttcca

SEQ ID NO: 5381828 - DNA, 25 bp, Homo sapien
cttccagtgtctgatccggagtgtt

SEQ ID NO: 5381829 - DNA, 25 bp, Homo sapien
tgacgttctacacttccagtgtctg

SEQ ID NO: 5381830 - DNA, 25 bp, Homo sapien
ccgttcatcctgtactggggtagca

SEQ ID NO: 5381831 - DNA, 25 bp, Homo sapien
ctcaccgtctgaccctgaatcccgt

SEQ ID NO: 5381832 - DNA, 25 bp, Homo sapien
ctgaccctgaatcccgttcatcctg

SEQ ID NO: 5381833 - DNA, 25 bp, Homo sapien
tgtactggggtagcaccaccatcat

SEQ ID NO: 5381834 - DNA, 25 bp, Homo sapien
gacctcaggtgtttgccaccgtgct

SEQ ID NO: 5381835 - DNA, 25 bp, Homo sapien
tgccaccgtgctcggtctacttttt

SEQ ID NO: 5381836 - DNA, 25 bp, Homo sapien
ttctgaaagtatcaggaaagtgttt

SEQ ID NO: 5381837 - DNA, 25 bp, Homo sapien
tctgaaagtatcaggaaagtgtttt

SEQ ID NO: 5381838 - DNA, 25 bp, Homo sapien
atggcgcggctaagtgttcagagac

SEQ ID NO: 5381839 - DNA, 25 bp, Homo sapien
agactgccgcccgaccggagaactt

SEQ ID NO: 5381840 - DNA, 25 bp, Homo sapien
aagcggtagcggcaaaggcgaattc

SEQ ID NO: 5381841 - DNA, 25 bp, Homo sapien
ttccaggcggtgtgaccccggatgg

SEQ ID NO: 5381842 - DNA, 25 bp, Homo sapien
cgggcgggcaggcatgcgagccggc

SEQ ID NO: 5381843 - DNA, 25 bp, Homo sapien
ttcctagaagcaccgctggggccaa

SEQ ID NO: 5381844 - DNA, 25 bp, Homo sapien
gagccggcgttctacttcctagaag

SEQ ID NO: 5381845 - DNA, 25 bp, Homo sapien
tagaagcaccgctggggccaaaatg

SEQ ID NO: 5381846 - DNA, 25 bp, Homo sapien
gatcctggtctgacccccgtggtaa

SEQ ID NO: 5381847 - DNA, 25 bp, Homo sapien
gattctgtgtccgtgccttgtttga

SEQ ID NO: 5381848 - DNA, 25 bp, Homo sapien
gagcttttgagatactcttccgaaa

SEQ ID NO: 5381849 - DNA, 25 bp, Homo sapien
cccgtggtaataacgttatcattga

SEQ ID NO: 5381850 - DNA, 25 bp, Homo sapien
gcaagggcagaacttggggggctgt

SEQ ID NO: 5381851 - DNA, 25 bp, Homo sapien
ctagtcagagcaagggcagaacttg

SEQ ID NO: 5381852 - DNA, 25 bp, Homo sapien
agagcaagggcagaacttggggggc

SEQ ID NO: 5381853 - DNA, 25 bp, Homo sapien
tagtcagagcaagggcagaacttgg

SEQ ID NO: 5381854 - DNA, 25 bp, Homo sapien
ccggatggtcagctgactgtcacca

SEQ ID NO: 5381855 - DNA, 25 bp, Homo sapien
ggcctccgggcagcatgcatcgctg

SEQ ID NO: 5381856 - DNA, 25 bp, Homo sapien
tggtcagctgactgtcaccatggga

SEQ ID NO: 5381857 - DNA, 25 bp, Homo sapien
agctgactgtcaccatgggatctgg

SEQ ID NO: 5381858 - DNA, 25 bp, Homo sapien
aagagcaggtatcatgaggctctgc

SEQ ID NO: 5381859 - DNA, 25 bp, Homo sapien
tcagtccatcgggctgaagggcagc

SEQ ID NO: 5381860 - DNA, 25 bp, Homo sapien
ctccggcattgagtggtcagaggag

SEQ ID NO: 5381861 - DNA, 25 bp, Homo sapien
accactgagagtggggctgccgcca

SEQ ID NO: 5381862 - DNA, 25 bp, Homo sapien
tggggctgccgccactttcagctct

SEQ ID NO: 5381863 - DNA, 25 bp, Homo sapien
actgagcttggcagtgaggctgtgc

SEQ ID NO: 5381864 - DNA, 25 bp, Homo sapien
agtgaggctgtgcagatggtcatca

SEQ ID NO: 5381865 - DNA, 25 bp, Homo sapien
agcttggcagtgaggctgtgcagat

SEQ ID NO: 5381866 - DNA, 25 bp, Homo sapien
cccactgagcttggcagtgaggctg

SEQ ID NO: 5381867 - DNA, 25 bp, Homo sapien
tcccatcctgggtgagcagccgcat

SEQ ID NO: 5381868 - DNA, 25 bp, Homo sapien
cttcctcaggctcccatcctgggtg

SEQ ID NO: 5381869 - DNA, 25 bp, Homo sapien
tcctgggtgggcccactgtgctgcc

SEQ ID NO: 5381870 - DNA, 25 bp, Homo sapien
agcagcgggcctcctgggtgggccc

SEQ ID NO: 5381871 - DNA, 25 bp, Homo sapien
cggtgaacgcccagtaagtgctgct

SEQ ID NO: 5381872 - DNA, 25 bp, Homo sapien
aacttgggtgaagcacagcccgaca

SEQ ID NO: 5381873 - DNA, 25 bp, Homo sapien
caaattcagggtgtttggcccggat

SEQ ID NO: 5381874 - DNA, 25 bp, Homo sapien
gaaataatcatatgtgcctcacggg

SEQ ID NO: 5381875 - DNA, 25 bp, Homo sapien
tccctctgggaatgcgactaactgc

SEQ ID NO: 5381876 - DNA, 25 bp, Homo sapien
tattcctgtgttccggtggccaaga

SEQ ID NO: 5381877 - DNA, 25 bp, Homo sapien
gaataagtctttcagagggcccatg

SEQ ID NO: 5381878 - DNA, 25 bp, Homo sapien
gattagaacccagccggactgtctg

SEQ ID NO: 5381879 - DNA, 25 bp, Homo sapien
tgcaggcttagcctccaaggagaag

SEQ ID NO: 5381880 - DNA, 25 bp, Homo sapien
tcacttagctcctcagattgtcctc

SEQ ID NO: 5381881 - DNA, 25 bp, Homo sapien
gtgtccagccggtcacttagctcct

SEQ ID NO: 5381882 - DNA, 25 bp, Homo sapien
gctgggtgctgcaggcttagcctcc

SEQ ID NO: 5381883 - DNA, 25 bp, Homo sapien
agtccatggcgtggatgacatgatc

SEQ ID NO: 5381884 - DNA, 25 bp, Homo sapien
tcagtccatggcgtggatgacatga

SEQ ID NO: 5381885 - DNA, 25 bp, Homo sapien
caactcagtccatggcgtggatgac

SEQ ID NO: 5381886 - DNA, 25 bp, Homo sapien
ccatggcgtggatgacatgatccac

SEQ ID NO: 5381887 - DNA, 25 bp, Homo sapien
cttggctatttgggattcttccttg

SEQ ID NO: 5381888 - DNA, 25 bp, Homo sapien
gctatttgggattcttccttgttgc

SEQ ID NO: 5381889 - DNA, 25 bp, Homo sapien
tcagtgattcattcctttttaatgc

SEQ ID NO: 5381890 - DNA, 25 bp, Homo sapien
gttgctgcctgcatcagtgattcat

SEQ ID NO: 5381891 - DNA, 25 bp, Homo sapien
cgtttcatgggactatgctggatgc

SEQ ID NO: 5381892 - DNA, 25 bp, Homo sapien
cccagcacgtcactcttcataagaa

SEQ ID NO: 5381893 - DNA, 25 bp, Homo sapien
actgtggatcacatcagaaaacttg

SEQ ID NO: 5381894 - DNA, 25 bp, Homo sapien
atagaatagaaacaccccagcacgt

SEQ ID NO: 5381895 - DNA, 25 bp, Homo sapien
agcatcatctccctcctggacgaag

SEQ ID NO: 5381896 - DNA, 25 bp, Homo sapien
tctccctcctggacgaagaaagccg

SEQ ID NO: 5381897 - DNA, 25 bp, Homo sapien
tacaccgacaatcggcccaccctgg

SEQ ID NO: 5381898 - DNA, 25 bp, Homo sapien
tgctggccctcaagcccatgagcat

SEQ ID NO: 5381899 - DNA, 25 bp, Homo sapien
tgacttcgttactgcagcccctggg

SEQ ID NO: 5381900 - DNA, 25 bp, Homo sapien
gaaaacttggtctactaagcacact

SEQ ID NO: 5381901 - DNA, 25 bp, Homo sapien
catagacacgtcagcagcatgcttc

SEQ ID NO: 5381902 - DNA, 25 bp, Homo sapien
ctgagggtagggacaagccagcaac

SEQ ID NO: 5381903 - DNA, 25 bp, Homo sapien
tattatagtcggtgatggacacagc

SEQ ID NO: 5381904 - DNA, 25 bp, Homo sapien
acaatcctgcaaggcataggctggc

SEQ ID NO: 5381905 - DNA, 25 bp, Homo sapien
gacacagactcggagcaagatgccc

SEQ ID NO: 5381906 - DNA, 25 bp, Homo sapien
tcccaggtagaatagggtggcgcca

SEQ ID NO: 5381907 - DNA, 25 bp, Homo sapien
ggcatcacgcgttgcactggcagct

SEQ ID NO: 5381908 - DNA, 25 bp, Homo sapien
tgcgggccctgagggaagatctctt

SEQ ID NO: 5381909 - DNA, 25 bp, Homo sapien
gacaagaatctacgtatgcgatggc

SEQ ID NO: 5381910 - DNA, 25 bp, Homo sapien
ttgtcatggacgagaactggtggcc

SEQ ID NO: 5381911 - DNA, 25 bp, Homo sapien
ggagaggtccattttcgccatggcc

SEQ ID NO: 5381912 - DNA, 25 bp, Homo sapien
gcagtgtggccatcgctgagctggt

SEQ ID NO: 5381913 - DNA, 25 bp, Homo sapien
cacgatgcatgaggagtacgagttt

SEQ ID NO: 5381914 - DNA, 25 bp, Homo sapien
gagtttgtgtcacccagcagtgtgg

SEQ ID NO: 5381915 - DNA, 25 bp, Homo sapien
gctggctagtgtccccaagatcctg

SEQ ID NO: 5381916 - DNA, 25 bp, Homo sapien
acgaccggtcccagctggctagtgt

SEQ ID NO: 5381917 - DNA, 25 bp, Homo sapien
cggattccacaagtgttcgcgggag

SEQ ID NO: 5381918 - DNA, 25 bp, Homo sapien
tctacaaggcccagttcaacaacga

SEQ ID NO: 5381919 - DNA, 25 bp, Homo sapien
gcttatggcagcctggcctgggata

SEQ ID NO: 5381920 - DNA, 25 bp, Homo sapien
atggcagcctggcctgggatagagg

SEQ ID NO: 5381921 - DNA, 25 bp, Homo sapien
tcaactgcttatggcagcctggcct

SEQ ID NO: 5381922 - DNA, 25 bp, Homo sapien
ttatggcagcctggcctgggataga

SEQ ID NO: 5381923 - DNA, 25 bp, Homo sapien
gctgtggttgtgtgaacaagccttc

SEQ ID NO: 5381924 - DNA, 25 bp, Homo sapien
gtgcctgtctatgtctgtccctctg

SEQ ID NO: 5381925 - DNA, 25 bp, Homo sapien
aagccttcattgtgcaagcgtgagc

SEQ ID NO: 5381926 - DNA, 25 bp, Homo sapien
ccacaaaccacgcaggctgctgtgg

SEQ ID NO: 5381927 - DNA, 25 bp, Homo sapien
gggctcgacacaagccccaaggtcg

SEQ ID NO: 5381928 - DNA, 25 bp, Homo sapien
aggacactgtgccactggttgagtg

SEQ ID NO: 5381929 - DNA, 25 bp, Homo sapien
ccaggaaggccttccgaaggatgga

SEQ ID NO: 5381930 - DNA, 25 bp, Homo sapien
aacaagtcacctctgaccacacctc

SEQ ID NO: 5381931 - DNA, 25 bp, Homo sapien
tggccctgtggctccagcaggctgc

SEQ ID NO: 5381932 - DNA, 25 bp, Homo sapien
ctggccctgtggctccagcaggctg

SEQ ID NO: 5381933 - DNA, 25 bp, Homo sapien
ctgtggctccagcaggctgccctgg

SEQ ID NO: 5381934 - DNA, 25 bp, Homo sapien
gccctgtggctccagcaggctgccc

SEQ ID NO: 5381935 - DNA, 25 bp, Homo sapien
tgggtagcccaggagccacatgcgc

SEQ ID NO: 5381936 - DNA, 25 bp, Homo sapien
ctgtgggtagcccaggagccacatg

SEQ ID NO: 5381937 - DNA, 25 bp, Homo sapien
gtgggtagcccaggagccacatgcg

SEQ ID NO: 5381938 - DNA, 25 bp, Homo sapien
tgtgggtagcccaggagccacatgc

SEQ ID NO: 5381939 - DNA, 25 bp, Homo sapien
ttagtggggccgctctggggcaggg

SEQ ID NO: 5381940 - DNA, 25 bp, Homo sapien
tagtggggccgctctggggcagggg

SEQ ID NO: 5381941 - DNA, 25 bp, Homo sapien
tggggccgctctggggcaggggctc

SEQ ID NO: 5381942 - DNA, 25 bp, Homo sapien
acaggacagcatgagccactgagcc

SEQ ID NO: 5381943 - DNA, 25 bp, Homo sapien
aggacagcatgagccactgagccgc

SEQ ID NO: 5381944 - DNA, 25 bp, Homo sapien
cacaggacagcatgagccactgagc

SEQ ID NO: 5381945 - DNA, 25 bp, Homo sapien
tcacaggacagcatgagccactgag

SEQ ID NO: 5381946 - DNA, 25 bp, Homo sapien
ggcggggagctgtggtgcaatttgc

SEQ ID NO: 5381947 - DNA, 25 bp, Homo sapien
cggggagctgtggtgcaatttgctc

SEQ ID NO: 5381948 - DNA, 25 bp, Homo sapien
gcggggagctgtggtgcaatttgct

SEQ ID NO: 5381949 - DNA, 25 bp, Homo sapien
gggagctgtggtgcaatttgctcct

SEQ ID NO: 5381950 - DNA, 25 bp, Homo sapien
aggtggacatggctgtcagacgtgg

SEQ ID NO: 5381951 - DNA, 25 bp, Homo sapien
ggtggacatggctgtcagacgtggg

SEQ ID NO: 5381952 - DNA, 25 bp, Homo sapien
gcacaggtggacatggctgtcagac

SEQ ID NO: 5381953 - DNA, 25 bp, Homo sapien
acaggtggacatggctgtcagacgt

SEQ ID NO: 5381954 - DNA, 25 bp, Homo sapien
gggagaaggcaatgaggaaagagaa

SEQ ID NO: 5381955 - DNA, 25 bp, Homo sapien
ctcacagacagaagccacggccaag

SEQ ID NO: 5381956 - DNA, 25 bp, Homo sapien
gggcttgcgggaggtcagctccgac

SEQ ID NO: 5381957 - DNA, 25 bp, Homo sapien
tgggcttgcgggaggtcagctccga

SEQ ID NO: 5381958 - DNA, 25 bp, Homo sapien
ctgggcttgcgggaggtcagctccg

SEQ ID NO: 5381959 - DNA, 25 bp, Homo sapien
gctgggcttgcgggaggtcagctcc

SEQ ID NO: 5381960 - DNA, 25 bp, Homo sapien
cagctccagcgggaacttctcgtag

SEQ ID NO: 5381961 - DNA, 25 bp, Homo sapien
cacgggcttcatgtcgaactccaca

SEQ ID NO: 5381962 - DNA, 25 bp, Homo sapien
cgggaacttctcgtagcacctctta

SEQ ID NO: 5381963 - DNA, 25 bp, Homo sapien
gcacctcttacacacgggcttcatg

SEQ ID NO: 5381964 - DNA, 25 bp, Homo sapien
gctcacacaccaggccttgttgagg

SEQ ID NO: 5381965 - DNA, 25 bp, Homo sapien
cacaccaggccttgttgagggccga

SEQ ID NO: 5381966 - DNA, 25 bp, Homo sapien
ccaggccttgttgagggccgacacc

SEQ ID NO: 5381967 - DNA, 25 bp, Homo sapien
gcttgctgttgcaggtggagcagga

SEQ ID NO: 5381968 - DNA, 25 bp, Homo sapien
tgagggaagcgtgggactcagcagg

SEQ ID NO: 5381969 - DNA, 25 bp, Homo sapien
tgtgagggaagcgtgggactcagca

SEQ ID NO: 5381970 - DNA, 25 bp, Homo sapien
gggaagcgtgggactcagcaggcct

SEQ ID NO: 5381971 - DNA, 25 bp, Homo sapien
agggaagcgtgggactcagcaggcc

SEQ ID NO: 5381972 - DNA, 25 bp, Homo sapien
ctgcagttgtagcagacgtccccga

SEQ ID NO: 5381973 - DNA, 25 bp, Homo sapien
catcgccttcaatcacatggctgca

SEQ ID NO: 5381974 - DNA, 25 bp, Homo sapien
tgcagttgtagcagacgtccccgaa

SEQ ID NO: 5381975 - DNA, 25 bp, Homo sapien
agttgtagcagacgtccccgaagag

SEQ ID NO: 5381976 - DNA, 25 bp, Homo sapien
tgtgggccgagcaggctgtcagagt

SEQ ID NO: 5381977 - DNA, 25 bp, Homo sapien
gtgggccgagcaggctgtcagagta

SEQ ID NO: 5381978 - DNA, 25 bp, Homo sapien
tgggccgagcaggctgtcagagtag

SEQ ID NO: 5381979 - DNA, 25 bp, Homo sapien
ctgtgggccgagcaggctgtcagag

SEQ ID NO: 5381980 - DNA, 25 bp, Homo sapien
agcctcccttgctcacggcagctct

SEQ ID NO: 5381981 - DNA, 25 bp, Homo sapien
caggctggggcgttgctccccagaa

SEQ ID NO: 5381982 - DNA, 25 bp, Homo sapien
ccatgagaaccacccttccgggaag

SEQ ID NO: 5381983 - DNA, 25 bp, Homo sapien
ctgggttgagggcacggcaacccat

SEQ ID NO: 5381984 - DNA, 25 bp, Homo sapien
tagtgagtctcgcagtaggccaggc

SEQ ID NO: 5381985 - DNA, 25 bp, Homo sapien
tcttctcatagtgccggtgccccag

SEQ ID NO: 5381986 - DNA, 25 bp, Homo sapien
caggcccttcttctcatagtgccgg

SEQ ID NO: 5381987 - DNA, 25 bp, Homo sapien
gtgagtctcgcagtaggccaggccc

SEQ ID NO: 5381988 - DNA, 25 bp, Homo sapien
actgttcccagtgtacccatgagaa

SEQ ID NO: 5381989 - DNA, 25 bp, Homo sapien
catgcagcgggttctgtcatccaca

SEQ ID NO: 5381990 - DNA, 25 bp, Homo sapien
ggaactcttcagctccgtgtctgca

SEQ ID NO: 5381991 - DNA, 25 bp, Homo sapien
acagctacccaaccgtgtgtgtgca

SEQ ID NO: 5381992 - DNA, 25 bp, Homo sapien
caacctgaggccacgtgtccaccag

SEQ ID NO: 5381993 - DNA, 25 bp, Homo sapien
tgagctggggcaccccccaacctga

SEQ ID NO: 5381994 - DNA, 25 bp, Homo sapien
gcaccccccaacctgaggccacgtg

SEQ ID NO: 5381995 - DNA, 25 bp, Homo sapien
cccccaacctgaggccacgtgtcca

SEQ ID NO: 5381996 - DNA, 25 bp, Homo sapien
cttgcccagcgcgttgaccactcgg

SEQ ID NO: 5381997 - DNA, 25 bp, Homo sapien
tcggccctcgatgggccggcggcag

SEQ ID NO: 5381998 - DNA, 25 bp, Homo sapien
ccgcagatggggacgcccatcttgt

SEQ ID NO: 5381999 - DNA, 25 bp, Homo sapien
agctcgcgggcctcggctgtcagct

SEQ ID NO: 5382000 - DNA, 25 bp, Homo sapien
tctggataggcacggagaggactgg

SEQ ID NO: 5382001 - DNA, 25 bp, Homo sapien
tctcaaccctcgtctgcagtctagg

SEQ ID NO: 5382002 - DNA, 25 bp, Homo sapien
ggcggcagcgccttctgatctctgg

SEQ ID NO: 5382003 - DNA, 25 bp, Homo sapien
actttgaagacttcctgtgccccag

SEQ ID NO: 5382004 - DNA, 25 bp, Homo sapien
ggtcagggtggtaggcgtcgctcct

SEQ ID NO: 5382005 - DNA, 25 bp, Homo sapien
gtgcagttgaagtggtcagggtggt

SEQ ID NO: 5382006 - DNA, 25 bp, Homo sapien
ggtggtaggcgtcgctcctgaacat

SEQ ID NO: 5382007 - DNA, 25 bp, Homo sapien
gggtgcagttgaagtggtcagggtg

SEQ ID NO: 5382008 - DNA, 25 bp, Homo sapien
tcgtcgatgaccaggtggcaccgct

SEQ ID NO: 5382009 - DNA, 25 bp, Homo sapien
gcagatgtacttgcccaggcccttg

SEQ ID NO: 5382010 - DNA, 25 bp, Homo sapien
ttctcacggttgtggcaaggccggc

SEQ ID NO: 5382011 - DNA, 25 bp, Homo sapien
aggcccttggccttctcacggttgt

SEQ ID NO: 5382012 - DNA, 25 bp, Homo sapien
tcagcccagggtatgggaaagcaga

SEQ ID NO: 5382013 - DNA, 25 bp, Homo sapien
agcccagggtatgggaaagcagact

SEQ ID NO: 5382014 - DNA, 25 bp, Homo sapien
gctcagcccagggtatgggaaagca

SEQ ID NO: 5382015 - DNA, 25 bp, Homo sapien
ggctcagcccagggtatgggaaagc

SEQ ID NO: 5382016 - DNA, 25 bp, Homo sapien
tgaagaagggcccaaacacgtacag

SEQ ID NO: 5382017 - DNA, 25 bp, Homo sapien
ccttccttcggggtttgccagatga

SEQ ID NO: 5382018 - DNA, 25 bp, Homo sapien
ccagatgaagaagggcccaaacacg

SEQ ID NO: 5382019 - DNA, 25 bp, Homo sapien
agggcccaaacacgtacaggcgatt

SEQ ID NO: 5382020 - DNA, 25 bp, Homo sapien
tgctactgctgggtgtctggactcc

SEQ ID NO: 5382021 - DNA, 25 bp, Homo sapien
gctactgctgggtgtctggactcca

SEQ ID NO: 5382022 - DNA, 25 bp, Homo sapien
ctgctactgctgggtgtctggactc

SEQ ID NO: 5382023 - DNA, 25 bp, Homo sapien
ctactgctgggtgtctggactccat

SEQ ID NO: 5382024 - DNA, 25 bp, Homo sapien
tgtctcatcatcagctgtgtgcagg

SEQ ID NO: 5382025 - DNA, 25 bp, Homo sapien
tgtgcagggcaaggggcccaaacaa

SEQ ID NO: 5382026 - DNA, 25 bp, Homo sapien
gggtgtctcatcatcagctgtgtgc

SEQ ID NO: 5382027 - DNA, 25 bp, Homo sapien
cctggggtgtctcatcatcagctgt

SEQ ID NO: 5382028 - DNA, 25 bp, Homo sapien
cagcatcagatctaaaggtggcctt

SEQ ID NO: 5382029 - DNA, 25 bp, Homo sapien
cacacacggagcctaagttctggag

SEQ ID NO: 5382030 - DNA, 25 bp, Homo sapien
tgttcactcagtctcagaggcggcc

SEQ ID NO: 5382031 - DNA, 25 bp, Homo sapien
gggcaataatcccagctgcacaggg

SEQ ID NO: 5382032 - DNA, 25 bp, Homo sapien
cgccccattatgaggctcctgcagc

SEQ ID NO: 5382033 - DNA, 25 bp, Homo sapien
agcgccccattatgaggctcctgca

SEQ ID NO: 5382034 - DNA, 25 bp, Homo sapien
ctgttcctcgctccagataaaggcc

SEQ ID NO: 5382035 - DNA, 25 bp, Homo sapien
acagcgccccattatgaggctcctg

SEQ ID NO: 5382036 - DNA, 25 bp, Homo sapien
cctcaccgtggttttagcagtccta

SEQ ID NO: 5382037 - DNA, 25 bp, Homo sapien
ttagcagtcctagggaaagtgccag

SEQ ID NO: 5382038 - DNA, 25 bp, Homo sapien
tcagagtactgtggaacctggattc

SEQ ID NO: 5382039 - DNA, 25 bp, Homo sapien
aaagtgccagccgagaccagccaga

SEQ ID NO: 5382040 - DNA, 25 bp, Homo sapien
tgcatagcggcgaaattccaagccc

SEQ ID NO: 5382041 - DNA, 25 bp, Homo sapien
cggcgaaattccaagccctggttct

SEQ ID NO: 5382042 - DNA, 25 bp, Homo sapien
tgcagctgcatagcggcgaaattcc

SEQ ID NO: 5382043 - DNA, 25 bp, Homo sapien
ggtgcagctgcatagcggcgaaatt

SEQ ID NO: 5382044 - DNA, 25 bp, Homo sapien
acgtgcctctctcacgggcagcaca

SEQ ID NO: 5382045 - DNA, 25 bp, Homo sapien
cacacggacaagagctcggtagtgt

SEQ ID NO: 5382046 - DNA, 25 bp, Homo sapien
agctccgaggacagtgggccggacg

SEQ ID NO: 5382047 - DNA, 25 bp, Homo sapien
acgggcagcacacggacaagagctc

SEQ ID NO: 5382048 - DNA, 25 bp, Homo sapien
gatgagagaccaagggttcgcagaa

SEQ ID NO: 5382049 - DNA, 25 bp, Homo sapien
gagacaaggccacctgctataggga

SEQ ID NO: 5382050 - DNA, 25 bp, Homo sapien
tgaacagggctcacagacagaggcc

SEQ ID NO: 5382051 - DNA, 25 bp, Homo sapien
ggagtacccatgaggtttgtggccc

SEQ ID NO: 5382052 - DNA, 25 bp, Homo sapien
tcacacagctcgcagcggaagcagc

SEQ ID NO: 5382053 - DNA, 25 bp, Homo sapien
gaagcagcccgggtgccagttgttg

SEQ ID NO: 5382054 - DNA, 25 bp, Homo sapien
agcagcccgggtgccagttgttgtt

SEQ ID NO: 5382055 - DNA, 25 bp, Homo sapien
agcccgggtgccagttgttgttcat

SEQ ID NO: 5382056 - DNA, 25 bp, Homo sapien
ctagcactccgcctgctctctgcct

SEQ ID NO: 5382057 - DNA, 25 bp, Homo sapien
ggatgtgtactgtcaccggccttac

SEQ ID NO: 5382058 - DNA, 25 bp, Homo sapien
agcacgtgcctgtcccctcttcgga

SEQ ID NO: 5382059 - DNA, 25 bp, Homo sapien
cccatgggctccctcgtgggatggt

SEQ ID NO: 5382060 - DNA, 25 bp, Homo sapien
aagtcgtgttcgcagtacttccggc

SEQ ID NO: 5382061 - DNA, 25 bp, Homo sapien
cagcatttggaagtcgtgttcgcag

SEQ ID NO: 5382062 - DNA, 25 bp, Homo sapien
caggatccacagcacggagcaaaca

SEQ ID NO: 5382063 - DNA, 25 bp, Homo sapien
gttcgcagtacttccggccttcaaa

SEQ ID NO: 5382064 - DNA, 25 bp, Homo sapien
ggtcgcagagagaggacaagcaaac

SEQ ID NO: 5382065 - DNA, 25 bp, Homo sapien
gaggacaagcaaaccacctatcatc

SEQ ID NO: 5382066 - DNA, 25 bp, Homo sapien
aaccacctatcatccccatgagcag

SEQ ID NO: 5382067 - DNA, 25 bp, Homo sapien
gagagaggacaagcaaaccacctat

SEQ ID NO: 5382068 - DNA, 25 bp, Homo sapien
gtccgtgaggccacctgtcaaaggg

SEQ ID NO: 5382069 - DNA, 25 bp, Homo sapien
actgaggatctggaccctgttggtc

SEQ ID NO: 5382070 - DNA, 25 bp, Homo sapien
ggatgagatccagtctgaagtgtag

SEQ ID NO: 5382071 - DNA, 25 bp, Homo sapien
gaagtgtagtgtcacttggtcctat

SEQ ID NO: 5382072 - DNA, 25 bp, Homo sapien
ctgtgggagtatccagctctctcag

SEQ ID NO: 5382073 - DNA, 25 bp, Homo sapien
agctctctcagaggccatgaagacc

SEQ ID NO: 5382074 - DNA, 25 bp, Homo sapien
gaagacccgggtataggagacagaa

SEQ ID NO: 5382075 - DNA, 25 bp, Homo sapien
tcagaggccatgaagacccgggtat

SEQ ID NO: 5382076 - DNA, 25 bp, Homo sapien
ggatatagccctacccagtgacctg

SEQ ID NO: 5382077 - DNA, 25 bp, Homo sapien
tggtgtgaatattcccgtcatggcc

SEQ ID NO: 5382078 - DNA, 25 bp, Homo sapien
caggaagggcttaaactctttcagc

SEQ ID NO: 5382079 - DNA, 25 bp, Homo sapien
tacacttagacagcattcctcagga

SEQ ID NO: 5382080 - DNA, 25 bp, Homo sapien
ccgctcatagagggcagactccgag

SEQ ID NO: 5382081 - DNA, 25 bp, Homo sapien
agactccgagctgggtctgagaaag

SEQ ID NO: 5382082 - DNA, 25 bp, Homo sapien
tgagaaagccctcagtagtgtcctc

SEQ ID NO: 5382083 - DNA, 25 bp, Homo sapien
tcatagagggcagactccgagctgg

SEQ ID NO: 5382084 - DNA, 25 bp, Homo sapien
cacacacgaagcagtgctcatggta

SEQ ID NO: 5382085 - DNA, 25 bp, Homo sapien
agcgctggcacacggcgttggccaa

SEQ ID NO: 5382086 - DNA, 25 bp, Homo sapien
cggcgttggccaaggcgtccgacat

SEQ ID NO: 5382087 - DNA, 25 bp, Homo sapien
ttgctgttgacaatgcgctcggcgg

SEQ ID NO: 5382088 - DNA, 25 bp, Homo sapien
aaaatcgctctaacccagggtccag

SEQ ID NO: 5382089 - DNA, 25 bp, Homo sapien
taaaaagtgaagacgctctgcagga

SEQ ID NO: 5382090 - DNA, 25 bp, Homo sapien
taatccccagggcaatactgcagct

SEQ ID NO: 5382091 - DNA, 25 bp, Homo sapien
tgctcagtgcttgtagtgcccaccc

SEQ ID NO: 5382092 - DNA, 25 bp, Homo sapien
ggaggacattccagtgcctgcccat

SEQ ID NO: 5382093 - DNA, 25 bp, Homo sapien
ccatgagcgagaccttgggagtctt

SEQ ID NO: 5382094 - DNA, 25 bp, Homo sapien
gaaatcaacaggaaatcccatggct

SEQ ID NO: 5382095 - DNA, 25 bp, Homo sapien
tcagattccgccttaaagccagacc

SEQ ID NO: 5382096 - DNA, 25 bp, Homo sapien
gctctgccggtgctggcgccgccgg

SEQ ID NO: 5382097 - DNA, 25 bp, Homo sapien
gcgccgccggtacagccccgacgcg

SEQ ID NO: 5382098 - DNA, 25 bp, Homo sapien
gtacagccccgacgcggccagcgca

SEQ ID NO: 5382099 - DNA, 25 bp, Homo sapien
gcgggctctgccggtgctggcgccg

SEQ ID NO: 5382100 - DNA, 25 bp, Homo sapien
cgcggggcagccgccttgaggtcgc

SEQ ID NO: 5382101 - DNA, 25 bp, Homo sapien
gcggggcagccgccttgaggtcgcg

SEQ ID NO: 5382102 - DNA, 25 bp, Homo sapien
cctgtgcccgtggacacactgagga

SEQ ID NO: 5382103 - DNA, 25 bp, Homo sapien
tttaggatccctgccaacagttagg

SEQ ID NO: 5382104 - DNA, 25 bp, Homo sapien
tagaaaggatattgttcgcgccgcg

SEQ ID NO: 5382105 - DNA, 25 bp, Homo sapien
ttacgcgctgggatctccaaagggc

SEQ ID NO: 5382106 - DNA, 25 bp, Homo sapien
ggactctcatgcagacccgcagttt

SEQ ID NO: 5382107 - DNA, 25 bp, Homo sapien
actcccgactcagcccatccatgtg

SEQ ID NO: 5382108 - DNA, 25 bp, Homo sapien
cactagaatccaggactctcatgca

SEQ ID NO: 5382109 - DNA, 25 bp, Homo sapien
tgtggaaatcctcaacactagaatc

SEQ ID NO: 5382110 - DNA, 25 bp, Homo sapien
ctgttctcctcgacatccctcctgt

SEQ ID NO: 5382111 - DNA, 25 bp, Homo sapien
tctcctcgacatccctcctgtgcct

SEQ ID NO: 5382112 - DNA, 25 bp, Homo sapien
gttctcctcgacatccctcctgtgc

SEQ ID NO: 5382113 - DNA, 25 bp, Homo sapien
ttcacggctctgttctcctcgacat

SEQ ID NO: 5382114 - DNA, 25 bp, Homo sapien
tgctggggctgctccggaccctgtt

SEQ ID NO: 5382115 - DNA, 25 bp, Homo sapien
cctgttcctgtctctccccactttc

SEQ ID NO: 5382116 - DNA, 25 bp, Homo sapien
tggggctgctccggaccctgttcct

SEQ ID NO: 5382117 - DNA, 25 bp, Homo sapien
gggctgctccggaccctgttcctgt

SEQ ID NO: 5382118 - DNA, 25 bp, Homo sapien
ggccaaggcttagaggtgactccaa

SEQ ID NO: 5382119 - DNA, 25 bp, Homo sapien
tgtgggcctcggatttgagactgca

SEQ ID NO: 5382120 - DNA, 25 bp, Homo sapien
ccttaatggcgatcacagaggcagc

SEQ ID NO: 5382121 - DNA, 25 bp, Homo sapien
ggcaggacttacaaagtgacaagtt

SEQ ID NO: 5382122 - DNA, 25 bp, Homo sapien
ctggtggacctgtgactggcctcct

SEQ ID NO: 5382123 - DNA, 25 bp, Homo sapien
gacactggtggacctgtgactggcc

SEQ ID NO: 5382124 - DNA, 25 bp, Homo sapien
actggccggacactggtggacctgt

SEQ ID NO: 5382125 - DNA, 25 bp, Homo sapien
aaacactggccggacactggtggac

SEQ ID NO: 5382126 - DNA, 25 bp, Homo sapien
tccaacatacccttcaacattttta

SEQ ID NO: 5382127 - DNA, 25 bp, Homo sapien
gggcgcagctctggccaagttccaa

SEQ ID NO: 5382128 - DNA, 25 bp, Homo sapien
cttgggcgcagctctggccaagttc

SEQ ID NO: 5382129 - DNA, 25 bp, Homo sapien
tggccaagttccaacatacccttca

SEQ ID NO: 5382130 - DNA, 25 bp, Homo sapien
ggcacgcaacctttgaaccttttgc

SEQ ID NO: 5382131 - DNA, 25 bp, Homo sapien
ccttttgcccgtggttggtgtctga

SEQ ID NO: 5382132 - DNA, 25 bp, Homo sapien
tgtcccatcttgcagcgggcgggtg

SEQ ID NO: 5382133 - DNA, 25 bp, Homo sapien
tcggttgtgagcagacggctgtccc

SEQ ID NO: 5382134 - DNA, 25 bp, Homo sapien
cccctgccccgacgggcgctgccgc

SEQ ID NO: 5382135 - DNA, 25 bp, Homo sapien
ccctgccccgacgggcgctgccgcc

SEQ ID NO: 5382136 - DNA, 25 bp, Homo sapien
cctgccccgacgggcgctgccgccc

SEQ ID NO: 5382137 - DNA, 25 bp, Homo sapien
ctgcgagaatccgacgcgccagggc

SEQ ID NO: 5382138 - DNA, 25 bp, Homo sapien
ggagcggggatcgtggcgccgcggg

SEQ ID NO: 5382139 - DNA, 25 bp, Homo sapien
ggcggagcggggatcgtggcgccgc

SEQ ID NO: 5382140 - DNA, 25 bp, Homo sapien
gcgccagggcggagcggggatcgtg

SEQ ID NO: 5382141 - DNA, 25 bp, Homo sapien
cggagcagggagacgcccaaaaaag

SEQ ID NO: 5382142 - DNA, 25 bp, Homo sapien
ccaaaaaaggccaagagccgctccg

SEQ ID NO: 5382143 - DNA, 25 bp, Homo sapien
ggcagcgacgccgagccctgggttg

SEQ ID NO: 5382144 - DNA, 25 bp, Homo sapien
aggtgacggtgggaggttgcgggag

SEQ ID NO: 5382145 - DNA, 25 bp, Homo sapien
aattccgatttcatcccccgttgcg

SEQ ID NO: 5382146 - DNA, 25 bp, Homo sapien
gttgcgggccatcgccctaacttgg

SEQ ID NO: 5382147 - DNA, 25 bp, Homo sapien
tcttcagtcgcaaagctgctttccc

SEQ ID NO: 5382148 - DNA, 25 bp, Homo sapien
gaggctaaagccgagaggcgtccct

SEQ ID NO: 5382149 - DNA, 25 bp, Homo sapien
ggccgtgcaccagaaatccactgct

SEQ ID NO: 5382150 - DNA, 25 bp, Homo sapien
cattactgacacagaggtgtaggca

SEQ ID NO: 5382151 - DNA, 25 bp, Homo sapien
aaggctttccaccattactgacaca

SEQ ID NO: 5382152 - DNA, 25 bp, Homo sapien
cactgctggacggttaattgaatat

SEQ ID NO: 5382153 - DNA, 25 bp, Homo sapien
tctgtggctgagatgccgctccgcc

SEQ ID NO: 5382154 - DNA, 25 bp, Homo sapien
cacagccacgtgcaagactgagcag

SEQ ID NO: 5382155 - DNA, 25 bp, Homo sapien
tcgggtgcttccttccctgagcgcc

SEQ ID NO: 5382156 - DNA, 25 bp, Homo sapien
tgagcgccgccagcaacttctctga

SEQ ID NO: 5382157 - DNA, 25 bp, Homo sapien
tgggcaacgcaaagacacttggaac

SEQ ID NO: 5382158 - DNA, 25 bp, Homo sapien
caacgcaaagacacttggaacccat

SEQ ID NO: 5382159 - DNA, 25 bp, Homo sapien
cttctgccagacgtgggcaacgcaa

SEQ ID NO: 5382160 - DNA, 25 bp, Homo sapien
agacgtgggcaacgcaaagacactt

SEQ ID NO: 5382161 - DNA, 25 bp, Homo sapien
gacaggccgttgtctgcccagatta

SEQ ID NO: 5382162 - DNA, 25 bp, Homo sapien
tactgaacatcaggcagcgagggac

SEQ ID NO: 5382163 - DNA, 25 bp, Homo sapien
tgatgaaactatcgtgggccaggaa

SEQ ID NO: 5382164 - DNA, 25 bp, Homo sapien
gacacagatctctagagggttcccc

SEQ ID NO: 5382165 - DNA, 25 bp, Homo sapien
aatgacgttccaggcaaaacctggg

SEQ ID NO: 5382166 - DNA, 25 bp, Homo sapien
caaagctatcccaaatgaatgccat

SEQ ID NO: 5382167 - DNA, 25 bp, Homo sapien
aagacaacaagtgctttcagggacc

SEQ ID NO: 5382168 - DNA, 25 bp, Homo sapien
cattaggactcaatattgggaaggc

SEQ ID NO: 5382169 - DNA, 25 bp, Homo sapien
gccaaacagcaggaagccgttaacc

SEQ ID NO: 5382170 - DNA, 25 bp, Homo sapien
ttaaccttacatccacctagggcag

SEQ ID NO: 5382171 - DNA, 25 bp, Homo sapien
gaatctgacctgtgagaggaaccac

SEQ ID NO: 5382172 - DNA, 25 bp, Homo sapien
attgacctgcgtgcgagccagcttg

SEQ ID NO: 5382173 - DNA, 25 bp, Homo sapien
gagggtgctgggtgtcaacccttcc

SEQ ID NO: 5382174 - DNA, 25 bp, Homo sapien
aggcctgtggccgaaactgagaaca

SEQ ID NO: 5382175 - DNA, 25 bp, Homo sapien
aaccccatggtaaatgatcaggatg

SEQ ID NO: 5382176 - DNA, 25 bp, Homo sapien
caagtgaggtaactaatcagaacgc

SEQ ID NO: 5382177 - DNA, 25 bp, Homo sapien
gctggacttggcacacgctctgaaa

SEQ ID NO: 5382178 - DNA, 25 bp, Homo sapien
aacagcctgcgagtctaatccggga

SEQ ID NO: 5382179 - DNA, 25 bp, Homo sapien
tatttcacgacgaaagcgacggacc

SEQ ID NO: 5382180 - DNA, 25 bp, Homo sapien
taaacaccgaattcagccactggac

SEQ ID NO: 5382181 - DNA, 25 bp, Homo sapien
ggtatgagcctaacattctgatgag

SEQ ID NO: 5382182 - DNA, 25 bp, Homo sapien
tacctgtatctggtggaaaccatgg

SEQ ID NO: 5382183 - DNA, 25 bp, Homo sapien
aaaccatggatttctacaagctcga

SEQ ID NO: 5382184 - DNA, 25 bp, Homo sapien
tgtgtgccagtggtcctcgcgcttg

SEQ ID NO: 5382185 - DNA, 25 bp, Homo sapien
taacagggtgtctgtcgtgccgcag

SEQ ID NO: 5382186 - DNA, 25 bp, Homo sapien
gactgatgccaaaactgaagctgcc

SEQ ID NO: 5382187 - DNA, 25 bp, Homo sapien
catccacactgtaggcttgcaggct

SEQ ID NO: 5382188 - DNA, 25 bp, Homo sapien
tcctaagtaagtcaggtccctaagc

SEQ ID NO: 5382189 - DNA, 25 bp, Homo sapien
gaagctccctcgttggacatccaga

SEQ ID NO: 5382190 - DNA, 25 bp, Homo sapien
gagttagaagtacgccctgccgtaa

SEQ ID NO: 5382191 - DNA, 25 bp, Homo sapien
aagagttcagggctacaatggtgca

SEQ ID NO: 5382192 - DNA, 25 bp, Homo sapien
caaccgtgcattccttggcagatgg

SEQ ID NO: 5382193 - DNA, 25 bp, Homo sapien
ttgggcactctctgagcaggtcctg

SEQ ID NO: 5382194 - DNA, 25 bp, Homo sapien
cgtctaaggagctggaacgcccaga

SEQ ID NO: 5382195 - DNA, 25 bp, Homo sapien
catcgtggtgctctccgtctaagga

SEQ ID NO: 5382196 - DNA, 25 bp, Homo sapien
tcggcgggccagagttcatgttact

SEQ ID NO: 5382197 - DNA, 25 bp, Homo sapien
gagaggtgtgcctctaccctttcct

SEQ ID NO: 5382198 - DNA, 25 bp, Homo sapien
tagcaactgtttgtcagtaactccc

SEQ ID NO: 5382199 - DNA, 25 bp, Homo sapien
gagactggcagtggtattcagcgta

SEQ ID NO: 5382200 - DNA, 25 bp, Homo sapien
tctctgatgacaatggaccagttct

SEQ ID NO: 5382201 - DNA, 25 bp, Homo sapien
acaagcgttcactgggactgtcccg

SEQ ID NO: 5382202 - DNA, 25 bp, Homo sapien
aaaagtgctccaactaggacaagcg

SEQ ID NO: 5382203 - DNA, 25 bp, Homo sapien
ccaccagggtatattgagggaaggt

SEQ ID NO: 5382204 - DNA, 25 bp, Homo sapien
ggttctatcaccgaggcacagctta

SEQ ID NO: 5382205 - DNA, 25 bp, Homo sapien
ttcccggaggcaagtggagtcctgt

SEQ ID NO: 5382206 - DNA, 25 bp, Homo sapien
agatacaggcaaggcctccatcggc

SEQ ID NO: 5382207 - DNA, 25 bp, Homo sapien
ccacatttaggagcatgtgcctctg

SEQ ID NO: 5382208 - DNA, 25 bp, Homo sapien
gatgacagctcgtgtggcactggca

SEQ ID NO: 5382209 - DNA, 25 bp, Homo sapien
tgaccgtcgtgagggggatgatcag

SEQ ID NO: 5382210 - DNA, 25 bp, Homo sapien
ggatgccatgtccatgccttggaga

SEQ ID NO: 5382211 - DNA, 25 bp, Homo sapien
tcagggcggggagtatcacgaaaat

SEQ ID NO: 5382212 - DNA, 25 bp, Homo sapien
agaagaggagcgttctctgctggct

SEQ ID NO: 5382213 - DNA, 25 bp, Homo sapien
ccccgggagacatgagctggaaaga

SEQ ID NO: 5382214 - DNA, 25 bp, Homo sapien
tgctgagatcaagtgctgcggctgc

SEQ ID NO: 5382215 - DNA, 25 bp, Homo sapien
gatagatccctgtaatgtctggcgg

SEQ ID NO: 5382216 - DNA, 25 bp, Homo sapien
ttcactcatgctgaatgcccgccag

SEQ ID NO: 5382217 - DNA, 25 bp, Homo sapien
ttccgccctccttcaaagcgaggga

SEQ ID NO: 5382218 - DNA, 25 bp, Homo sapien
tccttcaaagcgagggaactcgtca

SEQ ID NO: 5382219 - DNA, 25 bp, Homo sapien
gaactcgtcaggagtgggaagtaaa

SEQ ID NO: 5382220 - DNA, 25 bp, Homo sapien
caaagcgagggaactcgtcaggagt

SEQ ID NO: 5382221 - DNA, 25 bp, Homo sapien
ttctcctctggaccaaagtcttcag

SEQ ID NO: 5382222 - DNA, 25 bp, Homo sapien
tcttcaggaccaggaaaaccatccc

SEQ ID NO: 5382223 - DNA, 25 bp, Homo sapien
tgagatctcgtcctcgggccgcttc

SEQ ID NO: 5382224 - DNA, 25 bp, Homo sapien
agcacggccctcatgcctcggcggg

SEQ ID NO: 5382225 - DNA, 25 bp, Homo sapien
aacaccttgccactctaagttcatg

SEQ ID NO: 5382226 - DNA, 25 bp, Homo sapien
gaccagaaggaaacacaccagagtg

SEQ ID NO: 5382227 - DNA, 25 bp, Homo sapien
gatatgagaaagcatgatacaatgt

SEQ ID NO: 5382228 - DNA, 25 bp, Homo sapien
taatcctattaatactatcagaggc

SEQ ID NO: 5382229 - DNA, 25 bp, Homo sapien
tcttcttgcggtaaaggtcctcctc

SEQ ID NO: 5382230 - DNA, 25 bp, Homo sapien
tcaaattcacgtaaccggtggccaa

SEQ ID NO: 5382231 - DNA, 25 bp, Homo sapien
tctctgcgccctcgaaaacgtgggt

SEQ ID NO: 5382232 - DNA, 25 bp, Homo sapien
caaagcgcttgtcagggtggaagtc

SEQ ID NO: 5382233 - DNA, 25 bp, Homo sapien
atggtttggagggccgcgggagtca

SEQ ID NO: 5382234 - DNA, 25 bp, Homo sapien
gcctctctgacatcgggcccatgtg

SEQ ID NO: 5382235 - DNA, 25 bp, Homo sapien
catcgggcccatgtgatggtttgga

SEQ ID NO: 5382236 - DNA, 25 bp, Homo sapien
atgccgcctctctgacatcgggccc

SEQ ID NO: 5382237 - DNA, 25 bp, Homo sapien
taaattcacaaagtcctagggctgt

SEQ ID NO: 5382238 - DNA, 25 bp, Homo sapien
cacacagtgctatgggcttagccaa

SEQ ID NO: 5382239 - DNA, 25 bp, Homo sapien
tctgtgaagggcaatctctgcggtc

SEQ ID NO: 5382240 - DNA, 25 bp, Homo sapien
tctctagttcgctgtgggccacgtt

SEQ ID NO: 5382241 - DNA, 25 bp, Homo sapien
tgctgccctaggcctggtatcaggg

SEQ ID NO: 5382242 - DNA, 25 bp, Homo sapien
ctgctgccctaggcctggtatcagg

SEQ ID NO: 5382243 - DNA, 25 bp, Homo sapien
cctgctgccctaggcctggtatcag

SEQ ID NO: 5382244 - DNA, 25 bp, Homo sapien
tgagagttgaccttttctgaagaaa

SEQ ID NO: 5382245 - DNA, 25 bp, Homo sapien
tgtattttcccaatgtgcccgtgag

SEQ ID NO: 5382246 - DNA, 25 bp, Homo sapien
cagcagtattacttctgtgcagagt

SEQ ID NO: 5382247 - DNA, 25 bp, Homo sapien
tggagccctgggacaattatcagct

SEQ ID NO: 5382248 - DNA, 25 bp, Homo sapien
tcccaaagggccatgaggtccagga

SEQ ID NO: 5382249 - DNA, 25 bp, Homo sapien
gattcaatcccatcagaggtccctg

SEQ ID NO: 5382250 - DNA, 25 bp, Homo sapien
tgcataccttgagtacccggaggcc

SEQ ID NO: 5382251 - DNA, 25 bp, Homo sapien
tcttgaggcgggtggcccataatca

SEQ ID NO: 5382252 - DNA, 25 bp, Homo sapien
ggaggaccttgtggtcccatttgtc

SEQ ID NO: 5382253 - DNA, 25 bp, Homo sapien
ctggggtccaggaggcctaaactgt

SEQ ID NO: 5382254 - DNA, 25 bp, Homo sapien
ttgaaaaccttgaggaatctgagac

SEQ ID NO: 5382255 - DNA, 25 bp, Homo sapien
gctgttgaaaaccttgaggaatctg

SEQ ID NO: 5382256 - DNA, 25 bp, Homo sapien
ttagtatattgtaatgtagccattt

SEQ ID NO: 5382257 - DNA, 25 bp, Homo sapien
tccagaagttgtgggttagtatatt

SEQ ID NO: 5382258 - DNA, 25 bp, Homo sapien
gaagttgtgggttagtatattgtaa

SEQ ID NO: 5382259 - DNA, 25 bp, Homo sapien
cagaagttgtgggttagtatattgt

SEQ ID NO: 5382260 - DNA, 25 bp, Homo sapien
caggaatgggttttgcataaggaac

SEQ ID NO: 5382261 - DNA, 25 bp, Homo sapien
tccattccccaatctaaacctggaa

SEQ ID NO: 5382262 - DNA, 25 bp, Homo sapien
caatctaaacctggaattgtcattt

SEQ ID NO: 5382263 - DNA, 25 bp, Homo sapien
agcaggaatgggttttgcataagga

SEQ ID NO: 5382264 - DNA, 25 bp, Homo sapien
ctgccaggctattaggttcgaggtc

SEQ ID NO: 5382265 - DNA, 25 bp, Homo sapien
gccaggctattaggttcgaggtcat

SEQ ID NO: 5382266 - DNA, 25 bp, Homo sapien
tggaattactgccaggctattaggt

SEQ ID NO: 5382267 - DNA, 25 bp, Homo sapien
ttactgccaggctattaggttcgag

SEQ ID NO: 5382268 - DNA, 25 bp, Homo sapien
atcacctggtcggtttcgagtccag

SEQ ID NO: 5382269 - DNA, 25 bp, Homo sapien
atcgatctcgcattttatcacctgg

SEQ ID NO: 5382270 - DNA, 25 bp, Homo sapien
aaggtttagattatatcgatctcgc

SEQ ID NO: 5382271 - DNA, 25 bp, Homo sapien
caggtaaaaggtttagattatatcg

SEQ ID NO: 5382272 - DNA, 25 bp, Homo sapien
ggtcatacactttggctcacatctg

SEQ ID NO: 5382273 - DNA, 25 bp, Homo sapien
taggcagacccttggtaaacacaac

SEQ ID NO: 5382274 - DNA, 25 bp, Homo sapien
tcagctactcacgaggataaggcgg

SEQ ID NO: 5382275 - DNA, 25 bp, Homo sapien
caaatttaaaatgtgaggtcataca

SEQ ID NO: 5382276 - DNA, 25 bp, Homo sapien
agaatatgcccaagaggatgccaag

SEQ ID NO: 5382277 - DNA, 25 bp, Homo sapien
agtatggtcatttgagcctgagcag

SEQ ID NO: 5382278 - DNA, 25 bp, Homo sapien
atatgcccaagaggatgccaagcca

SEQ ID NO: 5382279 - DNA, 25 bp, Homo sapien
ctagtatggtcatttgagcctgagc

SEQ ID NO: 5382280 - DNA, 25 bp, Homo sapien
tccatcccacccacttccttctcta

SEQ ID NO: 5382281 - DNA, 25 bp, Homo sapien
catcccacccacttccttctctacc

SEQ ID NO: 5382282 - DNA, 25 bp, Homo sapien
ctccatcccacccacttccttctct

SEQ ID NO: 5382283 - DNA, 25 bp, Homo sapien
ccatcccacccacttccttctctac

SEQ ID NO: 5382284 - DNA, 25 bp, Homo sapien
ttcacaaaagttacccagcttctcc

SEQ ID NO: 5382285 - DNA, 25 bp, Homo sapien
ttgttcacaaaagttacccagcttc

SEQ ID NO: 5382286 - DNA, 25 bp, Homo sapien
agagaagatttgttcacaaaagtta

SEQ ID NO: 5382287 - DNA, 25 bp, Homo sapien
gatttgttcacaaaagttacccagc

SEQ ID NO: 5382288 - DNA, 25 bp, Homo sapien
cttccatatccacaaacagaggtac

SEQ ID NO: 5382289 - DNA, 25 bp, Homo sapien
ttccatatccacaaacagaggtaca

SEQ ID NO: 5382290 - DNA, 25 bp, Homo sapien
ccatatccacaaacagaggtacatt

SEQ ID NO: 5382291 - DNA, 25 bp, Homo sapien
tccatatccacaaacagaggtacat

SEQ ID NO: 5382292 - DNA, 25 bp, Homo sapien
tgatataggatatatgaacacttag

SEQ ID NO: 5382293 - DNA, 25 bp, Homo sapien
actgcaagcagtctctgatatagga

SEQ ID NO: 5382294 - DNA, 25 bp, Homo sapien
gctacaaaactatcatgtctgcaca

SEQ ID NO: 5382295 - DNA, 25 bp, Homo sapien
gctctcttcacaaaatacactactt

SEQ ID NO: 5382296 - DNA, 25 bp, Homo sapien
aagaaccatcagaccctccactggc

SEQ ID NO: 5382297 - DNA, 25 bp, Homo sapien
agaccctccactggcaaaaagtcct

SEQ ID NO: 5382298 - DNA, 25 bp, Homo sapien
aaccatcagaccctccactggcaaa

SEQ ID NO: 5382299 - DNA, 25 bp, Homo sapien
catcagaccctccactggcaaaaag

SEQ ID NO: 5382300 - DNA, 25 bp, Homo sapien
acaattatcaggatctgagaatgtt

SEQ ID NO: 5382301 - DNA, 25 bp, Homo sapien
gatctgagaatgttacaggtaacag

SEQ ID NO: 5382302 - DNA, 25 bp, Homo sapien
acatgggaaaagacacaattatcag

SEQ ID NO: 5382303 - DNA, 25 bp, Homo sapien
tttacagagatgatcacgtgatgct

SEQ ID NO: 5382304 - DNA, 25 bp, Homo sapien
tatgacctcggaagacttgaagctc

SEQ ID NO: 5382305 - DNA, 25 bp, Homo sapien
gccattgaggtttaatttcacttcc

SEQ ID NO: 5382306 - DNA, 25 bp, Homo sapien
tgtgagtagccaattgccattgagg

SEQ ID NO: 5382307 - DNA, 25 bp, Homo sapien
cttgggatcccagaacttgattggc

SEQ ID NO: 5382308 - DNA, 25 bp, Homo sapien
ggatgccagtctacacatttcacat

SEQ ID NO: 5382309 - DNA, 25 bp, Homo sapien
tgactatctttacttcctgaaacaa

SEQ ID NO: 5382310 - DNA, 25 bp, Homo sapien
caactaaccctttggttggatgcca

SEQ ID NO: 5382311 - DNA, 25 bp, Homo sapien
tatatgagtacccatggcccatagc

SEQ ID NO: 5382312 - DNA, 25 bp, Homo sapien
cataagtaatctgtgctctggtcaa

SEQ ID NO: 5382313 - DNA, 25 bp, Homo sapien
cagatactccagttggacagaggat

SEQ ID NO: 5382314 - DNA, 25 bp, Homo sapien
taacagatcagtttaagacaaaggg

SEQ ID NO: 5382315 - DNA, 25 bp, Homo sapien
aattcagcagaatggacacttccgg

SEQ ID NO: 5382316 - DNA, 25 bp, Homo sapien
gcaaagtccgctgtaagaaagagta

SEQ ID NO: 5382317 - DNA, 25 bp, Homo sapien
tctgagacgggagataccagtgtcc

SEQ ID NO: 5382318 - DNA, 25 bp, Homo sapien
gaagccatgactgaagcccctggta

SEQ ID NO: 5382319 - DNA, 25 bp, Homo sapien
gaaaggaagtaacaacggcagtgat

SEQ ID NO: 5382320 - DNA, 25 bp, Homo sapien
aaggaagtaacaacggcagtgatga

SEQ ID NO: 5382321 - DNA, 25 bp, Homo sapien
ggaagtaacaacggcagtgatgaaa

SEQ ID NO: 5382322 - DNA, 25 bp, Homo sapien
aaaggaagtaacaacggcagtgatg

SEQ ID NO: 5382323 - DNA, 25 bp, Homo sapien
gaggtgtaatgctccactccttaag

SEQ ID NO: 5382324 - DNA, 25 bp, Homo sapien
gcattcaatatccaaccagtcccgt

SEQ ID NO: 5382325 - DNA, 25 bp, Homo sapien
gagccaggaccaagagtaaatcatg

SEQ ID NO: 5382326 - DNA, 25 bp, Homo sapien
ggtatctatcacatgagccctggca

SEQ ID NO: 5382327 - DNA, 25 bp, Homo sapien
gagagaccaccattacattcactat

SEQ ID NO: 5382328 - DNA, 25 bp, Homo sapien
cagaaaatggctcgatgtgagagca

SEQ ID NO: 5382329 - DNA, 25 bp, Homo sapien
aaatgctgggccaccagcgttggca

SEQ ID NO: 5382330 - DNA, 25 bp, Homo sapien
tgaatgtctgatggttccgtctaca

SEQ ID NO: 5382331 - DNA, 25 bp, Homo sapien
aaaacacccctcagagaaaagagat

SEQ ID NO: 5382332 - DNA, 25 bp, Homo sapien
gataatgaaggacgtaaaaattcag

SEQ ID NO: 5382333 - DNA, 25 bp, Homo sapien
tcaaaccccaaactatgagtcaagt

SEQ ID NO: 5382334 - DNA, 25 bp, Homo sapien
aattttgatttacctcctaagcgct

SEQ ID NO: 5382335 - DNA, 25 bp, Homo sapien
tgtgtaaatgtacgacccagagttt

SEQ ID NO: 5382336 - DNA, 25 bp, Homo sapien
cactgctaacgaagccaggttgcga

SEQ ID NO: 5382337 - DNA, 25 bp, Homo sapien
gattggttagagaatggcactgcta

SEQ ID NO: 5382338 - DNA, 25 bp, Homo sapien
tctttaaaacgcatactgagagcgg

SEQ ID NO: 5382339 - DNA, 25 bp, Homo sapien
gaaagaatgctccaagtctgtagag

SEQ ID NO: 5382340 - DNA, 25 bp, Homo sapien
gaagagaacaactctaatgcagggt

SEQ ID NO: 5382341 - DNA, 25 bp, Homo sapien
taaatgaggacttgtgaagcaacca

SEQ ID NO: 5382342 - DNA, 25 bp, Homo sapien
tagaactcaaaaaacagcacgtcgt

SEQ ID NO: 5382343 - DNA, 25 bp, Homo sapien
aactataattcacagggagggcagc

SEQ ID NO: 5382344 - DNA, 25 bp, Homo sapien
gatcatttcaattggcggcagcaca

SEQ ID NO: 5382345 - DNA, 25 bp, Homo sapien
aggtactttaaacaagggatgcagg

SEQ ID NO: 5382346 - DNA, 25 bp, Homo sapien
taatgtcaagaccatggtaaaatgt

SEQ ID NO: 5382347 - DNA, 25 bp, Homo sapien
taaggctttctccaagcctgcgcgt

SEQ ID NO: 5382348 - DNA, 25 bp, Homo sapien
ccctggaattgaggttggtaagcaa

SEQ ID NO: 5382349 - DNA, 25 bp, Homo sapien
tcacaggtaacaaacatccagggaa

SEQ ID NO: 5382350 - DNA, 25 bp, Homo sapien
gggaagaacatgacacctcaagagt

SEQ ID NO: 5382351 - DNA, 25 bp, Homo sapien
aaagcatgctaagtcaacgtaagga

SEQ ID NO: 5382352 - DNA, 25 bp, Homo sapien
cagctagctgtagtaaaatgggtcc

SEQ ID NO: 5382353 - DNA, 25 bp, Homo sapien
tcttcacatacaaaagagtgcctgg

SEQ ID NO: 5382354 - DNA, 25 bp, Homo sapien
cccatgtgtagtgtgaaccaatagc

SEQ ID NO: 5382355 - DNA, 25 bp, Homo sapien
tttagaggttagactatcctgtccc

SEQ ID NO: 5382356 - DNA, 25 bp, Homo sapien
gatgggaagctcttagatgcataaa

SEQ ID NO: 5382357 - DNA, 25 bp, Homo sapien
tctgagtagagctaagtaagttcac

SEQ ID NO: 5382358 - DNA, 25 bp, Homo sapien
cagaattactgcttgggtggtataa

SEQ ID NO: 5382359 - DNA, 25 bp, Homo sapien
caacataagtgtggcattaggctgg

SEQ ID NO: 5382360 - DNA, 25 bp, Homo sapien
caaagtctctgtctcgttctgaagt

SEQ ID NO: 5382361 - DNA, 25 bp, Homo sapien
gagtaaactccctcaatgtgacagg

SEQ ID NO: 5382362 - DNA, 25 bp, Homo sapien
gattcaaccaagacaacgatctctg

SEQ ID NO: 5382363 - DNA, 25 bp, Homo sapien
acaagcagcaatgccacccgaactt

SEQ ID NO: 5382364 - DNA, 25 bp, Homo sapien
gccatgtagtacaaatgtggtgtac

SEQ ID NO: 5382365 - DNA, 25 bp, Homo sapien
cgaacttagtaacaagccggccatg

SEQ ID NO: 5382366 - DNA, 25 bp, Homo sapien
cactaagaagtgtagctttgatacc

SEQ ID NO: 5382367 - DNA, 25 bp, Homo sapien
tgccaggagaatgacggctatctaa

SEQ ID NO: 5382368 - DNA, 25 bp, Homo sapien
caaaccacagtgtcaatatgttggg

SEQ ID NO: 5382369 - DNA, 25 bp, Homo sapien
tcatattgtaaaaggactgccagga

SEQ ID NO: 5382370 - DNA, 25 bp, Homo sapien
cacagtgtcaatatgttgggaacaa

SEQ ID NO: 5382371 - DNA, 25 bp, Homo sapien
tcaaagataacactggtagtaaaaa

SEQ ID NO: 5382372 - DNA, 25 bp, Homo sapien
gggaggcactcttgtatttaattta

SEQ ID NO: 5382373 - DNA, 25 bp, Homo sapien
gatgcatacagataagcaagtaagg

SEQ ID NO: 5382374 - DNA, 25 bp, Homo sapien
aaaaggaatacagccctaaaagatg

SEQ ID NO: 5382375 - DNA, 25 bp, Homo sapien
tttttgaagagcctgagacggtgtg

SEQ ID NO: 5382376 - DNA, 25 bp, Homo sapien
tgatttaaccacaaatgtcttccct

SEQ ID NO: 5382377 - DNA, 25 bp, Homo sapien
tccaatcagtactgttagtacacgt

SEQ ID NO: 5382378 - DNA, 25 bp, Homo sapien
aaaattgaatggaggtgtaagccag

SEQ ID NO: 5382379 - DNA, 25 bp, Homo sapien
catggcaacgaagaaagtcccagat

SEQ ID NO: 5382380 - DNA, 25 bp, Homo sapien
tcctcatggcaacgaagaaagtccc

SEQ ID NO: 5382381 - DNA, 25 bp, Homo sapien
ctcatggcaacgaagaaagtcccag

SEQ ID NO: 5382382 - DNA, 25 bp, Homo sapien
ctttcctcatggcaacgaagaaagt

SEQ ID NO: 5382383 - DNA, 25 bp, Homo sapien
tcatcagagcatgtagcaaatttat

SEQ ID NO: 5382384 - DNA, 25 bp, Homo sapien
agcaaatttattatccgtgggtgag

SEQ ID NO: 5382385 - DNA, 25 bp, Homo sapien
cagagcatgtagcaaatttattatc

SEQ ID NO: 5382386 - DNA, 25 bp, Homo sapien
catgtagcaaatttattatccgtgg

SEQ ID NO: 5382387 - DNA, 25 bp, Homo sapien
ctgttacatgaagacacacagcagg

SEQ ID NO: 5382388 - DNA, 25 bp, Homo sapien
tgttacatgaagacacacagcaggg

SEQ ID NO: 5382389 - DNA, 25 bp, Homo sapien
taaactcaatgtatgggcatgacac

SEQ ID NO: 5382390 - DNA, 25 bp, Homo sapien
tgtcgtcagctaacataggcatctc

SEQ ID NO: 5382391 - DNA, 25 bp, Homo sapien
cctatgaaggaccagctgtgtaaac

SEQ ID NO: 5382392 - DNA, 25 bp, Homo sapien
tacgaggaaatcacatgaagctgcc

SEQ ID NO: 5382393 - DNA, 25 bp, Homo sapien
tgtaggctttagattttattcagtt

SEQ ID NO: 5382394 - DNA, 25 bp, Homo sapien
gtaggctttagattttattcagttg

SEQ ID NO: 5382395 - DNA, 25 bp, Homo sapien
tgacaatagggactacagaaaatgg

SEQ ID NO: 5382396 - DNA, 25 bp, Homo sapien
taccgggacaacactacttcagaaa

SEQ ID NO: 5382397 - DNA, 25 bp, Homo sapien
caaaatgcggcagacagtacatctc

SEQ ID NO: 5382398 - DNA, 25 bp, Homo sapien
tattgcaaaggctgataccgggaca

SEQ ID NO: 5382399 - DNA, 25 bp, Homo sapien
gacgttgttcatgttcgactgccaa

SEQ ID NO: 5382400 - DNA, 25 bp, Homo sapien
ggtctgctgtcaacatccacatgtc

SEQ ID NO: 5382401 - DNA, 25 bp, Homo sapien
tatttcacatatcctccgtggtctg

SEQ ID NO: 5382402 - DNA, 25 bp, Homo sapien
taatcgcctccttatgtgcctggaa

SEQ ID NO: 5382403 - DNA, 25 bp, Homo sapien
gaagctccagtgaccaagcgtcttc

SEQ ID NO: 5382404 - DNA, 25 bp, Homo sapien
cactagaagctccagtgaccaagcg

SEQ ID NO: 5382405 - DNA, 25 bp, Homo sapien
tccacagggtaaactccccactaga

SEQ ID NO: 5382406 - DNA, 25 bp, Homo sapien
gtaaactccccactagaagctccag

SEQ ID NO: 5382407 - DNA, 25 bp, Homo sapien
gatatggatgctcggattttattct

SEQ ID NO: 5382408 - DNA, 25 bp, Homo sapien
cttataagatatggatgctcggatt

SEQ ID NO: 5382409 - DNA, 25 bp, Homo sapien
gatgctcggattttattcttttcaa

SEQ ID NO: 5382410 - DNA, 25 bp, Homo sapien
taagatatggatgctcggattttat

SEQ ID NO: 5382411 - DNA, 25 bp, Homo sapien
agtgatgtgtctactgcctaaggcc

SEQ ID NO: 5382412 - DNA, 25 bp, Homo sapien
tatttctatggagttcagactgaca

SEQ ID NO: 5382413 - DNA, 25 bp, Homo sapien
tgctctctatcatactcctctgata

SEQ ID NO: 5382414 - DNA, 25 bp, Homo sapien
taaggcctctcaggcaaataagagg

SEQ ID NO: 5382415 - DNA, 25 bp, Homo sapien
caggacactttactttatttgttga

SEQ ID NO: 5382416 - DNA, 25 bp, Homo sapien
tactgcattcataggattattcaac

SEQ ID NO: 5382417 - DNA, 25 bp, Homo sapien
atacaggacactttactttatttgt

SEQ ID NO: 5382418 - DNA, 25 bp, Homo sapien
gttgatgtccgaacaaattttgttg

SEQ ID NO: 5382419 - DNA, 25 bp, Homo sapien
cccgcatatctctctggtctctttg

SEQ ID NO: 5382420 - DNA, 25 bp, Homo sapien
atcattgtaataacctgcatcaggc

SEQ ID NO: 5382421 - DNA, 25 bp, Homo sapien
gaattgcccgcatatctctctggtc

SEQ ID NO: 5382422 - DNA, 25 bp, Homo sapien
gcatcaggctgaattgcccgcatat

SEQ ID NO: 5382423 - DNA, 25 bp, Homo sapien
taaaacagctgtcgaggtgcctggt

SEQ ID NO: 5382424 - DNA, 25 bp, Homo sapien
tagtctatggtttttcggttcacag

SEQ ID NO: 5382425 - DNA, 25 bp, Homo sapien
tgctgttgtgcaaaatcaggtcgct

SEQ ID NO: 5382426 - DNA, 25 bp, Homo sapien
catcaaaagtaagctgttgcattgc

SEQ ID NO: 5382427 - DNA, 25 bp, Homo sapien
ttggcatatggaaaaaacgaggagg

SEQ ID NO: 5382428 - DNA, 25 bp, Homo sapien
aaacgaggaggagaaccaatttctg

SEQ ID NO: 5382429 - DNA, 25 bp, Homo sapien
tggcatatggaaaaaacgaggagga

SEQ ID NO: 5382430 - DNA, 25 bp, Homo sapien
gaggagaaccaatttctgtagccat

SEQ ID NO: 5382431 - DNA, 25 bp, Homo sapien
tgcagcttgaccatgtaggctcagg

SEQ ID NO: 5382432 - DNA, 25 bp, Homo sapien
gaccatgtaggctcaggtcatcttc

SEQ ID NO: 5382433 - DNA, 25 bp, Homo sapien
gcttgaccatgtaggctcaggtcat

SEQ ID NO: 5382434 - DNA, 25 bp, Homo sapien
caccctgcagcttgaccatgtaggc

SEQ ID NO: 5382435 - DNA, 25 bp, Homo sapien
ccttgaatcaacaggttgcctccat

SEQ ID NO: 5382436 - DNA, 25 bp, Homo sapien
ccaggtatgaatgccatagtttgtc

SEQ ID NO: 5382437 - DNA, 25 bp, Homo sapien
tcgttactctatggatgtaccaaac

SEQ ID NO: 5382438 - DNA, 25 bp, Homo sapien
aatatttgtcgtgtacccaggtatg

SEQ ID NO: 5382439 - DNA, 25 bp, Homo sapien
actttagggaggaggcatttctcct

SEQ ID NO: 5382440 - DNA, 25 bp, Homo sapien
cctttactattaagtatgacataac

SEQ ID NO: 5382441 - DNA, 25 bp, Homo sapien
tgccctttatcagactgaagtaaat

SEQ ID NO: 5382442 - DNA, 25 bp, Homo sapien
tgaagtaaatcctttctattactgg

SEQ ID NO: 5382443 - DNA, 25 bp, Homo sapien
aaattatcatgaaagtatactggag

SEQ ID NO: 5382444 - DNA, 25 bp, Homo sapien
atacttattctccatctaaagagat

SEQ ID NO: 5382445 - DNA, 25 bp, Homo sapien
acgcttggcctgtaaaaattatcat

SEQ ID NO: 5382446 - DNA, 25 bp, Homo sapien
tagactaaattatcctgactgattt

SEQ ID NO: 5382447 - DNA, 25 bp, Homo sapien
aatgttaatgagttctgataaccca

SEQ ID NO: 5382448 - DNA, 25 bp, Homo sapien
tgataacccactaccatcggaccag

SEQ ID NO: 5382449 - DNA, 25 bp, Homo sapien
tatcaacttcagtgacactaatgtt

SEQ ID NO: 5382450 - DNA, 25 bp, Homo sapien
cagttgggggttgtatatcaacttc

SEQ ID NO: 5382451 - DNA, 25 bp, Homo sapien
tggagtacagcagcaggatgtcggc

SEQ ID NO: 5382452 - DNA, 25 bp, Homo sapien
tacagcagcaggatgtcggctcact

SEQ ID NO: 5382453 - DNA, 25 bp, Homo sapien
cgcaggccaccaaacccagcatttt

SEQ ID NO: 5382454 - DNA, 25 bp, Homo sapien
agtacagcagcaggatgtcggctca

SEQ ID NO: 5382455 - DNA, 25 bp, Homo sapien
tttgagcagagctcctaaatggcca

SEQ ID NO: 5382456 - DNA, 25 bp, Homo sapien
tcagagccagaaatgtctctcttgt

SEQ ID NO: 5382457 - DNA, 25 bp, Homo sapien
cagcgaagcgttcgccttcagagcc

SEQ ID NO: 5382458 - DNA, 25 bp, Homo sapien
atgggccaccgaacgcacgctctgg

SEQ ID NO: 5382459 - DNA, 25 bp, Homo sapien
gaagttacggataaacgcaacagcc

SEQ ID NO: 5382460 - DNA, 25 bp, Homo sapien
tgcaagaatgtccatagcacgttta

SEQ ID NO: 5382461 - DNA, 25 bp, Homo sapien
gcaacagcctgaacgaatagcagct

SEQ ID NO: 5382462 - DNA, 25 bp, Homo sapien
ccagtatgaatcaggaatcgtacca

SEQ ID NO: 5382463 - DNA, 25 bp, Homo sapien
gtaagtggttataatcaatcaacca

SEQ ID NO: 5382464 - DNA, 25 bp, Homo sapien
ggttataatcaatcaaccagttgta

SEQ ID NO: 5382465 - DNA, 25 bp, Homo sapien
gtggttataatcaatcaaccagttg

SEQ ID NO: 5382466 - DNA, 25 bp, Homo sapien
tataatcaatcaaccagttgtaaac

SEQ ID NO: 5382467 - DNA, 25 bp, Homo sapien
gtattactaaggcaactcatcgatg

SEQ ID NO: 5382468 - DNA, 25 bp, Homo sapien
gctgaagtcccatccagtatgctat

SEQ ID NO: 5382469 - DNA, 25 bp, Homo sapien
ccagaatgactagatgctatggtct

SEQ ID NO: 5382470 - DNA, 25 bp, Homo sapien
catgcctcaggtctaataaatctta

SEQ ID NO: 5382471 - DNA, 25 bp, Homo sapien
ggtgggatgatcgctggagagtggg

SEQ ID NO: 5382472 - DNA, 25 bp, Homo sapien
ggatgatcgctggagagtgggagat

SEQ ID NO: 5382473 - DNA, 25 bp, Homo sapien
tgggatgatcgctggagagtgggag

SEQ ID NO: 5382474 - DNA, 25 bp, Homo sapien
gtggactgctagaggtcagaaattc

SEQ ID NO: 5382475 - DNA, 25 bp, Homo sapien
ggcaccatcttggaccagaaagccg

SEQ ID NO: 5382476 - DNA, 25 bp, Homo sapien
tcttgcagaatagctgaccaggctt

SEQ ID NO: 5382477 - DNA, 25 bp, Homo sapien
tacagcgcaggaacaaactaagaca

SEQ ID NO: 5382478 - DNA, 25 bp, Homo sapien
agacactgaacgtaccagcacctgg

SEQ ID NO: 5382479 - DNA, 25 bp, Homo sapien
gtgcccgccaccacacgtggccaat

SEQ ID NO: 5382480 - DNA, 25 bp, Homo sapien
tgcccgccaccacacgtggccaatt

SEQ ID NO: 5382481 - DNA, 25 bp, Homo sapien
acagggtttcacaacgttggccagg

SEQ ID NO: 5382482 - DNA, 25 bp, Homo sapien
cagggtttcacaacgttggccaggc

SEQ ID NO: 5382483 - DNA, 25 bp, Homo sapien
agttgccatctagcacacgcctgga

SEQ ID NO: 5382484 - DNA, 25 bp, Homo sapien
tcagtattctcaggtagctcacaga

SEQ ID NO: 5382485 - DNA, 25 bp, Homo sapien
tacagagaagacagcatggccactg

SEQ ID NO: 5382486 - DNA, 25 bp, Homo sapien
ccagtaaagatggtagcaccgtgct

SEQ ID NO: 5382487 - DNA, 25 bp, Homo sapien
caattgagaacaccaatgaggctca

SEQ ID NO: 5382488 - DNA, 25 bp, Homo sapien
tttcacaattgagaacaccaatgag

SEQ ID NO: 5382489 - DNA, 25 bp, Homo sapien
caaagaagcgaagttgctcaaggat

SEQ ID NO: 5382490 - DNA, 25 bp, Homo sapien
gataaaaagattggccggtggctca

SEQ ID NO: 5382491 - DNA, 25 bp, Homo sapien
tcatacagagtcaagcaagtgcccc

SEQ ID NO: 5382492 - DNA, 25 bp, Homo sapien
tggctcaagagtggatgactccctc

SEQ ID NO: 5382493 - DNA, 25 bp, Homo sapien
taattagcaggccagaggcttagac

SEQ ID NO: 5382494 - DNA, 25 bp, Homo sapien
tcgtagcaaacataaaaccatcctg

SEQ ID NO: 5382495 - DNA, 25 bp, Homo sapien
ttttctccagagaagtttttcttca

SEQ ID NO: 5382496 - DNA, 25 bp, Homo sapien
ctccagagaagtttttcttcagtcc

SEQ ID NO: 5382497 - DNA, 25 bp, Homo sapien
tctccagagaagtttttcttcagtc

SEQ ID NO: 5382498 - DNA, 25 bp, Homo sapien
tttctccagagaagtttttcttcag

SEQ ID NO: 5382499 - DNA, 25 bp, Homo sapien
ttaacaactccgctccttatatggg

SEQ ID NO: 5382500 - DNA, 25 bp, Homo sapien
gcagcacctgcaggtctacgttggg

SEQ ID NO: 5382501 - DNA, 25 bp, Homo sapien
ctgcaggtctacgttggggtggagg

SEQ ID NO: 5382502 - DNA, 25 bp, Homo sapien
cacctgcaggtctacgttggggtgg

SEQ ID NO: 5382503 - DNA, 25 bp, Homo sapien
agcacctgcaggtctacgttggggt

SEQ ID NO: 5382504 - DNA, 25 bp, Homo sapien
cagtgaacagtgcacacctggttgt

SEQ ID NO: 5382505 - DNA, 25 bp, Homo sapien
tgtggacctctttggcacgaccatt

SEQ ID NO: 5382506 - DNA, 25 bp, Homo sapien
gctgcggcctctacgtttcaaatga

SEQ ID NO: 5382507 - DNA, 25 bp, Homo sapien
tacacaggcgtcaaggatgctcatt

SEQ ID NO: 5382508 - DNA, 25 bp, Homo sapien
gcaaagtagccatctatctcaaggg

SEQ ID NO: 5382509 - DNA, 25 bp, Homo sapien
tggtttctccgagcagcagtgatgt

SEQ ID NO: 5382510 - DNA, 25 bp, Homo sapien
tgggctccacaatacttagcacttg

SEQ ID NO: 5382511 - DNA, 25 bp, Homo sapien
tcgcagaggcacgttcaggaagcca

SEQ ID NO: 5382512 - DNA, 25 bp, Homo sapien
aaagctgcgctttgtctggatatca

SEQ ID NO: 5382513 - DNA, 25 bp, Homo sapien
ctgaaagctgcgctttgtctggata

SEQ ID NO: 5382514 - DNA, 25 bp, Homo sapien
ttaatactgaaagctgcgctttgtc

SEQ ID NO: 5382515 - DNA, 25 bp, Homo sapien
gctgcgctttgtctggatatcatca

SEQ ID NO: 5382516 - DNA, 25 bp, Homo sapien
gaggcgtgctaatctactgcccaca

SEQ ID NO: 5382517 - DNA, 25 bp, Homo sapien
gtgatttggcgactggcaatttccc

SEQ ID NO: 5382518 - DNA, 25 bp, Homo sapien
cgcactcttctttgaggcgtgctaa

SEQ ID NO: 5382519 - DNA, 25 bp, Homo sapien
taacacctttacctttcatctggat

SEQ ID NO: 5382520 - DNA, 25 bp, Homo sapien
gttggccaaacaggccaactcaaac

SEQ ID NO: 5382521 - DNA, 25 bp, Homo sapien
caaacaggccaactcaaacttatga

SEQ ID NO: 5382522 - DNA, 25 bp, Homo sapien
ggttggccaaacaggccaactcaaa

SEQ ID NO: 5382523 - DNA, 25 bp, Homo sapien
ggccaaacaggccaactcaaactta

SEQ ID NO: 5382524 - DNA, 25 bp, Homo sapien
tgggtaatcacttgacgtgaggagt

SEQ ID NO: 5382525 - DNA, 25 bp, Homo sapien
aaaagggatcaaacgtagctagtat

SEQ ID NO: 5382526 - DNA, 25 bp, Homo sapien
ggatcaaacgtagctagtatttaaa

SEQ ID NO: 5382527 - DNA, 25 bp, Homo sapien
caaggtgggtaatcacttgacgtga

SEQ ID NO: 5382528 - DNA, 25 bp, Homo sapien
caggagttcaagacgtcttcagcct

SEQ ID NO: 5382529 - DNA, 25 bp, Homo sapien
agttcaagacgtcttcagcctgggc

SEQ ID NO: 5382530 - DNA, 25 bp, Homo sapien
gaagaggccaggcttagcagctcat

SEQ ID NO: 5382531 - DNA, 25 bp, Homo sapien
ctccaatctgggtgatgaagtgaga

SEQ ID NO: 5382532 - DNA, 25 bp, Homo sapien
tctgagagctcctgttcgtcctctg

SEQ ID NO: 5382533 - DNA, 25 bp, Homo sapien
ctctgtttttgaaacgactgaaacg

SEQ ID NO: 5382534 - DNA, 25 bp, Homo sapien
ctgaaacgggctgtgtagtttaatg

SEQ ID NO: 5382535 - DNA, 25 bp, Homo sapien
cactctcattctgctgctttcgatg

SEQ ID NO: 5382536 - DNA, 25 bp, Homo sapien
ttctgaatttagaagtgtctcagct

SEQ ID NO: 5382537 - DNA, 25 bp, Homo sapien
gaacttctgaatttagaagtgtctc

SEQ ID NO: 5382538 - DNA, 25 bp, Homo sapien
tgaatttagaagtgtctcagctgtt

SEQ ID NO: 5382539 - DNA, 25 bp, Homo sapien
tttagaagtgtctcagctgtttcaa

SEQ ID NO: 5382540 - DNA, 25 bp, Homo sapien
cacttataagaatgtgaggtgcttg

SEQ ID NO: 5382541 - DNA, 25 bp, Homo sapien
catccaagtgataagcatagtactg

SEQ ID NO: 5382542 - DNA, 25 bp, Homo sapien
ggcgaacagactattttgtcatcca

SEQ ID NO: 5382543 - DNA, 25 bp, Homo sapien
ttaattgcttaagtgaatggcctcc

SEQ ID NO: 5382544 - DNA, 25 bp, Homo sapien
tattattttgccaggcaatggctca

SEQ ID NO: 5382545 - DNA, 25 bp, Homo sapien
aggcaatggctcacatcagtaatcc

SEQ ID NO: 5382546 - DNA, 25 bp, Homo sapien
aaatttattattttgccaggcaatg

SEQ ID NO: 5382547 - DNA, 25 bp, Homo sapien
ccaggcaatggctcacatcagtaat

SEQ ID NO: 5382548 - DNA, 25 bp, Homo sapien
ctgagtgtccggctttgtttatctt

SEQ ID NO: 5382549 - DNA, 25 bp, Homo sapien
cacataaaataacccagttgcccag

SEQ ID NO: 5382550 - DNA, 25 bp, Homo sapien
tgtttatctttgacacaggtccccg

SEQ ID NO: 5382551 - DNA, 25 bp, Homo sapien
gtccccggaacttcgcagtttatca

SEQ ID NO: 5382552 - DNA, 25 bp, Homo sapien
gggcttgcccaagccgccgctgagg

SEQ ID NO: 5382553 - DNA, 25 bp, Homo sapien
gcagggccttgggcgaagcgcgcat

SEQ ID NO: 5382554 - DNA, 25 bp, Homo sapien
ggggcttgcccaagccgccgctgag

SEQ ID NO: 5382555 - DNA, 25 bp, Homo sapien
gcttgcccaagccgccgctgaggca

SEQ ID NO: 5382556 - DNA, 25 bp, Homo sapien
tctacgtcgccagcccgcggatcgc

SEQ ID NO: 5382557 - DNA, 25 bp, Homo sapien
gatgagctgtgaggcgtcctcctct

SEQ ID NO: 5382558 - DNA, 25 bp, Homo sapien
gaaagatgagctgtgaggcgtcctc

SEQ ID NO: 5382559 - DNA, 25 bp, Homo sapien
tgtgaggcgtcctcctctacgtcgc

SEQ ID NO: 5382560 - DNA, 25 bp, Homo sapien
cgcgccgcgccgcgcgccaccacca

SEQ ID NO: 5382561 - DNA, 25 bp, Homo sapien
cgccgcgccgcgccgcgcgccacca

SEQ ID NO: 5382562 - DNA, 25 bp, Homo sapien
gccgcgccgcgccgcgcgccaccac

SEQ ID NO: 5382563 - DNA, 25 bp, Homo sapien
cgccgcgccgcgcgccaccaccagc

SEQ ID NO: 5382564 - DNA, 25 bp, Homo sapien
ggtttgatgcttgccggtgttccct

SEQ ID NO: 5382565 - DNA, 25 bp, Homo sapien
cctttcacgtgctcagagaagctga

SEQ ID NO: 5382566 - DNA, 25 bp, Homo sapien
tgaaggttccggagggtttgatgct

SEQ ID NO: 5382567 - DNA, 25 bp, Homo sapien
tgccggtgttcccttgtacacccag

SEQ ID NO: 5382568 - DNA, 25 bp, Homo sapien
cactgaaggccatatagtctcttgc

SEQ ID NO: 5382569 - DNA, 25 bp, Homo sapien
tgtgcaaaatattaacacccaggac

SEQ ID NO: 5382570 - DNA, 25 bp, Homo sapien
caaaaagaacacatagctccctagg

SEQ ID NO: 5382571 - DNA, 25 bp, Homo sapien
tatatagccaagaggcaaccaagtg

SEQ ID NO: 5382572 - DNA, 25 bp, Homo sapien
tgttgaaagggtctctaacatgagt

SEQ ID NO: 5382573 - DNA, 25 bp, Homo sapien
cctttcatgttgaaagggtctctaa

SEQ ID NO: 5382574 - DNA, 25 bp, Homo sapien
gtctcaactacaaacctttcatgtt

SEQ ID NO: 5382575 - DNA, 25 bp, Homo sapien
gaaagggtctctaacatgagttgtt

SEQ ID NO: 5382576 - DNA, 25 bp, Homo sapien
cagctagggatgaaacgaactccga

SEQ ID NO: 5382577 - DNA, 25 bp, Homo sapien
ggttacctactgtccagctcgagca

SEQ ID NO: 5382578 - DNA, 25 bp, Homo sapien
tcctagctgtgggtattatgagaca

SEQ ID NO: 5382579 - DNA, 25 bp, Homo sapien
gaccaaaaggcactcacagctaggg

SEQ ID NO: 5382580 - DNA, 25 bp, Homo sapien
cgtgaccgtacacttctagaccgct

SEQ ID NO: 5382581 - DNA, 25 bp, Homo sapien
tttcatgaggcgaccgtgaccgtac

SEQ ID NO: 5382582 - DNA, 25 bp, Homo sapien
gcttcctgactaggccccgttcagg

SEQ ID NO: 5382583 - DNA, 25 bp, Homo sapien
caggacggatactgacaatgcccat

SEQ ID NO: 5382584 - DNA, 25 bp, Homo sapien
gaacttaggtccagctataggcact

SEQ ID NO: 5382585 - DNA, 25 bp, Homo sapien
taattcccactagtcatggaggagc

SEQ ID NO: 5382586 - DNA, 25 bp, Homo sapien
tgtggcaaataccagacaagggtct

SEQ ID NO: 5382587 - DNA, 25 bp, Homo sapien
aaaatcggcttgaggagcatggcac

SEQ ID NO: 5382588 - DNA, 25 bp, Homo sapien
gtgggactggtcatgcagccgtgtg

SEQ ID NO: 5382589 - DNA, 25 bp, Homo sapien
tgtcatagccattggtggccacggg

SEQ ID NO: 5382590 - DNA, 25 bp, Homo sapien
aatgatgtcatagccattggtggcc

SEQ ID NO: 5382591 - DNA, 25 bp, Homo sapien
cagtaatagaagtaactggaccagg

SEQ ID NO: 5382592 - DNA, 25 bp, Homo sapien
tcaggagtaatgattgtagaggggc

SEQ ID NO: 5382593 - DNA, 25 bp, Homo sapien
caggagtaatgattgtagaggggcg

SEQ ID NO: 5382594 - DNA, 25 bp, Homo sapien
gaagagtgccgttctggaaacagtg

SEQ ID NO: 5382595 - DNA, 25 bp, Homo sapien
cggggcatgaagagtgccgttctgg

SEQ ID NO: 5382596 - DNA, 25 bp, Homo sapien
cgggaagcaatatactctgcgtaac

SEQ ID NO: 5382597 - DNA, 25 bp, Homo sapien
gaagcaatatactctgcgtaactga

SEQ ID NO: 5382598 - DNA, 25 bp, Homo sapien
ctgtcgggaagcaatatactctgcg

SEQ ID NO: 5382599 - DNA, 25 bp, Homo sapien
tatactctgcgtaactgattgtcac

SEQ ID NO: 5382600 - DNA, 25 bp, Homo sapien
agaattcatagcactttggctgtgc

SEQ ID NO: 5382601 - DNA, 25 bp, Homo sapien
tatataggtctcactccccagatga

SEQ ID NO: 5382602 - DNA, 25 bp, Homo sapien
cacagggtcgtcagaacagaattca

SEQ ID NO: 5382603 - DNA, 25 bp, Homo sapien
ccagatgaatatgccatatcacagg

SEQ ID NO: 5382604 - DNA, 25 bp, Homo sapien
ctgagcaaggagtctattgtctgga

SEQ ID NO: 5382605 - DNA, 25 bp, Homo sapien
ttcctgagcaaggagtctattgtct

SEQ ID NO: 5382606 - DNA, 25 bp, Homo sapien
cactggtaattggagctttaaagcc

SEQ ID NO: 5382607 - DNA, 25 bp, Homo sapien
tggtaattggagctttaaagccacc

SEQ ID NO: 5382608 - DNA, 25 bp, Homo sapien
tgtctgccagtcccgtggagactct

SEQ ID NO: 5382609 - DNA, 25 bp, Homo sapien
gtccttcctgtcagatgttacccca

SEQ ID NO: 5382610 - DNA, 25 bp, Homo sapien
tgctcctgcgtccttcctgtcagat

SEQ ID NO: 5382611 - DNA, 25 bp, Homo sapien
tgagacatgagatgatagcccgaca

SEQ ID NO: 5382612 - DNA, 25 bp, Homo sapien
cacccaactagctgttgactgtcag

SEQ ID NO: 5382613 - DNA, 25 bp, Homo sapien
cagccacccaactagctgttgactg

SEQ ID NO: 5382614 - DNA, 25 bp, Homo sapien
acgaggtttcgccaccagactagtc

SEQ ID NO: 5382615 - DNA, 25 bp, Homo sapien
aggtttcgccaccagactagtcttg

SEQ ID NO: 5382616 - DNA, 25 bp, Homo sapien
tctataggaatttgacaggtattaa

SEQ ID NO: 5382617 - DNA, 25 bp, Homo sapien
gctacaattgccactgtagtttaag

SEQ ID NO: 5382618 - DNA, 25 bp, Homo sapien
agaagtgtttgaaatatcaggcgag

SEQ ID NO: 5382619 - DNA, 25 bp, Homo sapien
caggcgagtaagtgaacgatttacc

SEQ ID NO: 5382620 - DNA, 25 bp, Homo sapien
tggctgtgcgtttgacacctttttc

SEQ ID NO: 5382621 - DNA, 25 bp, Homo sapien
gaattcaattcgaatcccatggacc

SEQ ID NO: 5382622 - DNA, 25 bp, Homo sapien
cattaatgaattcaattcgaatccc

SEQ ID NO: 5382623 - DNA, 25 bp, Homo sapien
tgttccttagcaacctcaggtaaat

SEQ ID NO: 5382624 - DNA, 25 bp, Homo sapien
agagttccaaatgcggctgttctca

SEQ ID NO: 5382625 - DNA, 25 bp, Homo sapien
agagatgcagagttccaaatgcggc

SEQ ID NO: 5382626 - DNA, 25 bp, Homo sapien
gcaacgagagatgcagagttccaaa

SEQ ID NO: 5382627 - DNA, 25 bp, Homo sapien
ccgaacccaaatgcaacgagagatg

SEQ ID NO: 5382628 - DNA, 25 bp, Homo sapien
aaagtttaggcagctcctctcgggt

SEQ ID NO: 5382629 - DNA, 25 bp, Homo sapien
aaaagtttaggcagctcctctcggg

SEQ ID NO: 5382630 - DNA, 25 bp, Homo sapien
ttaacgtgtattccctgagtcctga

SEQ ID NO: 5382631 - DNA, 25 bp, Homo sapien
cgaagccgcttgtcccgccctgtct

SEQ ID NO: 5382632 - DNA, 25 bp, Homo sapien
ctggttaacgtgtattccctgagtc

SEQ ID NO: 5382633 - DNA, 25 bp, Homo sapien
gccacgaagccgcttgtcccgccct

SEQ ID NO: 5382634 - DNA, 25 bp, Homo sapien
ttttctgtttctaggccaaagtcac

SEQ ID NO: 5382635 - DNA, 25 bp, Homo sapien
ctttttattagctgagttgccattt

SEQ ID NO: 5382636 - DNA, 25 bp, Homo sapien
ttttattagctgagttgccattttc

SEQ ID NO: 5382637 - DNA, 25 bp, Homo sapien
gttgccattttctgtttctaggcca

SEQ ID NO: 5382638 - DNA, 25 bp, Homo sapien
gattcttagtggtgttggcagttcc

SEQ ID NO: 5382639 - DNA, 25 bp, Homo sapien
cagtagagtacgtcgaagcagtagc

SEQ ID NO: 5382640 - DNA, 25 bp, Homo sapien
caacttgggctcgagtggaggaaca

SEQ ID NO: 5382641 - DNA, 25 bp, Homo sapien
gactgattcccgtgactgtgcgttc

SEQ ID NO: 5382642 - DNA, 25 bp, Homo sapien
cctgattcagtgctcaaggtctgga

SEQ ID NO: 5382643 - DNA, 25 bp, Homo sapien
gaagggtgaggagccagaccttaca

SEQ ID NO: 5382644 - DNA, 25 bp, Homo sapien
cacctagctcactctaatgggagta

SEQ ID NO: 5382645 - DNA, 25 bp, Homo sapien
tataaaggaaagatcatgccacgcc

SEQ ID NO: 5382646 - DNA, 25 bp, Homo sapien
gaacaagcggaaaaacttcatcaac

SEQ ID NO: 5382647 - DNA, 25 bp, Homo sapien
cagaggaggggagctattttgtctc

SEQ ID NO: 5382648 - DNA, 25 bp, Homo sapien
gtttgtattgccagaggaacagcta

SEQ ID NO: 5382649 - DNA, 25 bp, Homo sapien
gaggaacagctacaacagaggaggg

SEQ ID NO: 5382650 - DNA, 25 bp, Homo sapien
cagaaagtttgtattgccagaggaa

SEQ ID NO: 5382651 - DNA, 25 bp, Homo sapien
gagcaaaagttgctctcaggccaga

SEQ ID NO: 5382652 - DNA, 25 bp, Homo sapien
aactctaaatctgaggcagccgtga

SEQ ID NO: 5382653 - DNA, 25 bp, Homo sapien
tgcagtgaacaaacacccaggtagt

SEQ ID NO: 5382654 - DNA, 25 bp, Homo sapien
tattgaactcgagcatgagacgcac

SEQ ID NO: 5382655 - DNA, 25 bp, Homo sapien
gccatcttgctatgccgggaggaga

SEQ ID NO: 5382656 - DNA, 25 bp, Homo sapien
ggtcactgttgctaagggtcatcca

SEQ ID NO: 5382657 - DNA, 25 bp, Homo sapien
gggtcatccatccttagtctcgaag

SEQ ID NO: 5382658 - DNA, 25 bp, Homo sapien
tctcgaagaaatctcttcctgatct

SEQ ID NO: 5382659 - DNA, 25 bp, Homo sapien
gcccagacgcggctggggcggacgg

SEQ ID NO: 5382660 - DNA, 25 bp, Homo sapien
ccagacgcggctggggcggacggga

SEQ ID NO: 5382661 - DNA, 25 bp, Homo sapien
cccagacgcggctggggcggacggg

SEQ ID NO: 5382662 - DNA, 25 bp, Homo sapien
tggcccagacgcggctggggcggac

SEQ ID NO: 5382663 - DNA, 25 bp, Homo sapien
actagaggtattccccgggcggctg

SEQ ID NO: 5382664 - DNA, 25 bp, Homo sapien
gacccgagtcctccggtatcccagc

SEQ ID NO: 5382665 - DNA, 25 bp, Homo sapien
agagaagctggcctgcgggcgggcc

SEQ ID NO: 5382666 - DNA, 25 bp, Homo sapien
ctggaggactgagtcgagccgggac

SEQ ID NO: 5382667 - DNA, 25 bp, Homo sapien
tagatgatcatatggcctagagcca

SEQ ID NO: 5382668 - DNA, 25 bp, Homo sapien
aattagatgatcatatggcctagag

SEQ ID NO: 5382669 - DNA, 25 bp, Homo sapien
gaggacacggttgccagtttctaac

SEQ ID NO: 5382670 - DNA, 25 bp, Homo sapien
ttatctgctgttgaggacacggttg

SEQ ID NO: 5382671 - DNA, 25 bp, Homo sapien
acaccagccataggaagcaaggccc

SEQ ID NO: 5382672 - DNA, 25 bp, Homo sapien
cagccataggaagcaaggcccggga

SEQ ID NO: 5382673 - DNA, 25 bp, Homo sapien
ggacagggcatgtccgcccggagca

SEQ ID NO: 5382674 - DNA, 25 bp, Homo sapien
accaacaccagccataggaagcaag

SEQ ID NO: 5382675 - DNA, 25 bp, Homo sapien
agggagcacaggctgctttgagcag

SEQ ID NO: 5382676 - DNA, 25 bp, Homo sapien
ggagcacaggctgctttgagcagtc

SEQ ID NO: 5382677 - DNA, 25 bp, Homo sapien
gagggagcacaggctgctttgagca

SEQ ID NO: 5382678 - DNA, 25 bp, Homo sapien
agcacaggctgctttgagcagtcat

SEQ ID NO: 5382679 - DNA, 25 bp, Homo sapien
ctgatggcatccagaggcttgaaat

SEQ ID NO: 5382680 - DNA, 25 bp, Homo sapien
atccagaggcttgaaatcattgttg

SEQ ID NO: 5382681 - DNA, 25 bp, Homo sapien
gcatccagaggcttgaaatcattgt

SEQ ID NO: 5382682 - DNA, 25 bp, Homo sapien
cagaggcttgaaatcattgttgaag

SEQ ID NO: 5382683 - DNA, 25 bp, Homo sapien
caggcaggctcggactggcatggtc

SEQ ID NO: 5382684 - DNA, 25 bp, Homo sapien
actggacccattcgtggctccaact

SEQ ID NO: 5382685 - DNA, 25 bp, Homo sapien
ccattcgtggctccaactgtgatgg

SEQ ID NO: 5382686 - DNA, 25 bp, Homo sapien
ccaaggtgacaggcaggctcggact

SEQ ID NO: 5382687 - DNA, 25 bp, Homo sapien
ttatacaaggtatctagaacaggca

SEQ ID NO: 5382688 - DNA, 25 bp, Homo sapien
taaagtcgattagagattaccaggg

SEQ ID NO: 5382689 - DNA, 25 bp, Homo sapien
acatggtgagtataatgattgccac

SEQ ID NO: 5382690 - DNA, 25 bp, Homo sapien
tggatggaccctgaaaaccatctgc

SEQ ID NO: 5382691 - DNA, 25 bp, Homo sapien
actgctgtaaaaggccaacatgggc

SEQ ID NO: 5382692 - DNA, 25 bp, Homo sapien
caacatgggcatttgaaggtcaggc

SEQ ID NO: 5382693 - DNA, 25 bp, Homo sapien
aacttatggtgttgcctgctctgaa

SEQ ID NO: 5382694 - DNA, 25 bp, Homo sapien
tctgacacacgcaagacagacgata

SEQ ID NO: 5382695 - DNA, 25 bp, Homo sapien
tcacacgggaactaaggaacacttc

SEQ ID NO: 5382696 - DNA, 25 bp, Homo sapien
tggacactgatgcatccggagtcac

SEQ ID NO: 5382697 - DNA, 25 bp, Homo sapien
gcaagaaggcagctcactatgtcca

SEQ ID NO: 5382698 - DNA, 25 bp, Homo sapien
aatacagtctataaaccggaaggct

SEQ ID NO: 5382699 - DNA, 25 bp, Homo sapien
gacagtcccgttcttgttaagcagc

SEQ ID NO: 5382700 - DNA, 25 bp, Homo sapien
tgatctaaaaccttaagcatggagt

SEQ ID NO: 5382701 - DNA, 25 bp, Homo sapien
gatccatcacaagtttacacctctg

SEQ ID NO: 5382702 - DNA, 25 bp, Homo sapien
caggacacggtctttatgatctaaa

SEQ ID NO: 5382703 - DNA, 25 bp, Homo sapien
gacattgcatcatcaatcagtgacc

SEQ ID NO: 5382704 - DNA, 25 bp, Homo sapien
gagtgcaggctgaagcacgtatgtt

SEQ ID NO: 5382705 - DNA, 25 bp, Homo sapien
gcatcatcaatcagtgaccatgagg

SEQ ID NO: 5382706 - DNA, 25 bp, Homo sapien
ggagaagtagggctttacagaaagc

SEQ ID NO: 5382707 - DNA, 25 bp, Homo sapien
cctgcaggttagtaagtctttcata

SEQ ID NO: 5382708 - DNA, 25 bp, Homo sapien
cccttcctgcaggttagtaagtctt

SEQ ID NO: 5382709 - DNA, 25 bp, Homo sapien
ggagatcatcatctgttgctgcttt

SEQ ID NO: 5382710 - DNA, 25 bp, Homo sapien
atcagttcgtttattcggtggagat

SEQ ID NO: 5382711 - DNA, 25 bp, Homo sapien
tgcaacacacaaaagggagggtatc

SEQ ID NO: 5382712 - DNA, 25 bp, Homo sapien
ggagggtatcataagctcggaaata

SEQ ID NO: 5382713 - DNA, 25 bp, Homo sapien
tgtttgggtgacaacgtcctttctc

SEQ ID NO: 5382714 - DNA, 25 bp, Homo sapien
caggcaaatgaacccaccttcaatc

SEQ ID NO: 5382715 - DNA, 25 bp, Homo sapien
gccttgagcacgacaggatactcct

SEQ ID NO: 5382716 - DNA, 25 bp, Homo sapien
gcacgacaggatactcctttctgat

SEQ ID NO: 5382717 - DNA, 25 bp, Homo sapien
tttctgattagctatttcctgcagc

SEQ ID NO: 5382718 - DNA, 25 bp, Homo sapien
ttctgattagctatttcctgcagca

SEQ ID NO: 5382719 - DNA, 25 bp, Homo sapien
gcaagccaggaacaccaaagatcgc

SEQ ID NO: 5382720 - DNA, 25 bp, Homo sapien
taaggtgagctgtaaatccaatgac

SEQ ID NO: 5382721 - DNA, 25 bp, Homo sapien
gaagtcatactagattaaggtgagc

SEQ ID NO: 5382722 - DNA, 25 bp, Homo sapien
ttcacagagaacatgatcctatcag

SEQ ID NO: 5382723 - DNA, 25 bp, Homo sapien
ctgggaaatgtagccgcctctgtaa

SEQ ID NO: 5382724 - DNA, 25 bp, Homo sapien
gagcgagtcccaataagcatttaga

SEQ ID NO: 5382725 - DNA, 25 bp, Homo sapien
gaaatgtgaccaattatctagaggc

SEQ ID NO: 5382726 - DNA, 25 bp, Homo sapien
tgagccttcaagaaaacccttagag

SEQ ID NO: 5382727 - DNA, 25 bp, Homo sapien
aaagtggtggtaagcagctttccag

SEQ ID NO: 5382728 - DNA, 25 bp, Homo sapien
tgacccggacgtcactgtacctctg

SEQ ID NO: 5382729 - DNA, 25 bp, Homo sapien
gggttccgatagtgacgaagcaaag

SEQ ID NO: 5382730 - DNA, 25 bp, Homo sapien
tcttggacgcactgggacatatctc

SEQ ID NO: 5382731 - DNA, 25 bp, Homo sapien
gatcacatgctgttgctttcgaggc

SEQ ID NO: 5382732 - DNA, 25 bp, Homo sapien
agacacagtgttggtagccagtgga

SEQ ID NO: 5382733 - DNA, 25 bp, Homo sapien
tcagccttcaccagaagactcttgg

SEQ ID NO: 5382734 - DNA, 25 bp, Homo sapien
tccttgggaggagacttgcgcttct

SEQ ID NO: 5382735 - DNA, 25 bp, Homo sapien
tagacacgtggatttcagacttggg

SEQ ID NO: 5382736 - DNA, 25 bp, Homo sapien
ggcccaagacggaggaaagactgcc

SEQ ID NO: 5382737 - DNA, 25 bp, Homo sapien
cacagtgaccggagtggccatagac

SEQ ID NO: 5382738 - DNA, 25 bp, Homo sapien
cgctccaggaatggttgaaagggca

SEQ ID NO: 5382739 - DNA, 25 bp, Homo sapien
gccaatgcctaatcaaccattcctg

SEQ ID NO: 5382740 - DNA, 25 bp, Homo sapien
gaagcttcatgtcccttctcccagg

SEQ ID NO: 5382741 - DNA, 25 bp, Homo sapien
atagctagcacgtggaaattcctgg

SEQ ID NO: 5382742 - DNA, 25 bp, Homo sapien
gactgaggttgagctgattactaat

SEQ ID NO: 5382743 - DNA, 25 bp, Homo sapien
gggcttgcatttggcgttgaaagtt

SEQ ID NO: 5382744 - DNA, 25 bp, Homo sapien
ggaactagctggtcagaagaacaag

SEQ ID NO: 5382745 - DNA, 25 bp, Homo sapien
cttgcatttggcgttgaaagttggg

SEQ ID NO: 5382746 - DNA, 25 bp, Homo sapien
aaacttatgcatgggaactagctgg

SEQ ID NO: 5382747 - DNA, 25 bp, Homo sapien
cacctggcccaaatgttattttctt

SEQ ID NO: 5382748 - DNA, 25 bp, Homo sapien
tgcacctggcccaaatgttattttc

SEQ ID NO: 5382749 - DNA, 25 bp, Homo sapien
gcacctggcccaaatgttattttct

SEQ ID NO: 5382750 - DNA, 25 bp, Homo sapien
ctgcacctggcccaaatgttatttt

SEQ ID NO: 5382751 - DNA, 25 bp, Homo sapien
gcaagccagctatctttcaacagag

SEQ ID NO: 5382752 - DNA, 25 bp, Homo sapien
tggacgaaccacttgctgtcagagc

SEQ ID NO: 5382753 - DNA, 25 bp, Homo sapien
tatggaccactgatacttcttgacc

SEQ ID NO: 5382754 - DNA, 25 bp, Homo sapien
caactctggcgtgttagctctcagc

SEQ ID NO: 5382755 - DNA, 25 bp, Homo sapien
gccttaggtgatctgtccgcatcgg

SEQ ID NO: 5382756 - DNA, 25 bp, Homo sapien
cctggccttaggtgatctgtccgca

SEQ ID NO: 5382757 - DNA, 25 bp, Homo sapien
tggccttaggtgatctgtccgcatc

SEQ ID NO: 5382758 - DNA, 25 bp, Homo sapien
acaggcggcccccaccatgtccagc

SEQ ID NO: 5382759 - DNA, 25 bp, Homo sapien
tccactcgaggactagcaacatcag

SEQ ID NO: 5382760 - DNA, 25 bp, Homo sapien
ctgcaggcctaggtgacccagacgt

SEQ ID NO: 5382761 - DNA, 25 bp, Homo sapien
gacgtactccgcatagagctttcca

SEQ ID NO: 5382762 - DNA, 25 bp, Homo sapien
gaatgagggttttccgaactgccat

SEQ ID NO: 5382763 - DNA, 25 bp, Homo sapien
ggagaagcattcaagcacctgaggg

SEQ ID NO: 5382764 - DNA, 25 bp, Homo sapien
cgaggctaagcaagaccagttggca

SEQ ID NO: 5382765 - DNA, 25 bp, Homo sapien
taaggaaatgactgcaagtgaccac

SEQ ID NO: 5382766 - DNA, 25 bp, Homo sapien
taagaccttagtgcgtctgcgaggc

SEQ ID NO: 5382767 - DNA, 25 bp, Homo sapien
acccattacctggaggctggatttc

SEQ ID NO: 5382768 - DNA, 25 bp, Homo sapien
ggcctctacatcttccaaggtgctt

SEQ ID NO: 5382769 - DNA, 25 bp, Homo sapien
ctatcttatttcaggaccggttctt

SEQ ID NO: 5382770 - DNA, 25 bp, Homo sapien
tctgaaggcatcacggatactgttt

SEQ ID NO: 5382771 - DNA, 25 bp, Homo sapien
gcacatgacagacgctggcatgcca

SEQ ID NO: 5382772 - DNA, 25 bp, Homo sapien
cagaacgacgcagtttggccagggc

SEQ ID NO: 5382773 - DNA, 25 bp, Homo sapien
caagaggaacgcattggcaaaagac

SEQ ID NO: 5382774 - DNA, 25 bp, Homo sapien
cagaatttgtttgcccacagtgaca

SEQ ID NO: 5382775 - DNA, 25 bp, Homo sapien
tctgcaccacggttgttgctgctgg

SEQ ID NO: 5382776 - DNA, 25 bp, Homo sapien
gagcgttggtgctagcactctggct

SEQ ID NO: 5382777 - DNA, 25 bp, Homo sapien
tatgcttggccgtggcgatgagccc

SEQ ID NO: 5382778 - DNA, 25 bp, Homo sapien
tggcaggtttcttccggagtatgct

SEQ ID NO: 5382779 - DNA, 25 bp, Homo sapien
caaagtgagtagactacttgagccc

SEQ ID NO: 5382780 - DNA, 25 bp, Homo sapien
tacagtgaggtatattatttctaac

SEQ ID NO: 5382781 - DNA, 25 bp, Homo sapien
aactctaagttctaagcaactcata

SEQ ID NO: 5382782 - DNA, 25 bp, Homo sapien
gaagaaaaggcctagagaaattata

SEQ ID NO: 5382783 - DNA, 25 bp, Homo sapien
tttctaacgtttacagtgaccctga

SEQ ID NO: 5382784 - DNA, 25 bp, Homo sapien
tgctgagtacccataggtgcaggct

SEQ ID NO: 5382785 - DNA, 25 bp, Homo sapien
ctgctgagtacccataggtgcaggc

SEQ ID NO: 5382786 - DNA, 25 bp, Homo sapien
tgccaagtggtgcaggctgtatccc

SEQ ID NO: 5382787 - DNA, 25 bp, Homo sapien
ccctgtgtgccaagtggtgcaggct

SEQ ID NO: 5382788 - DNA, 25 bp, Homo sapien
taggtggacggtagacgctacccca

SEQ ID NO: 5382789 - DNA, 25 bp, Homo sapien
tgtcatcaactgcatggggtttagg

SEQ ID NO: 5382790 - DNA, 25 bp, Homo sapien
tcccttgaatatgtcgagcatgcga

SEQ ID NO: 5382791 - DNA, 25 bp, Homo sapien
gagcatgcgatgcatccactgtcat

SEQ ID NO: 5382792 - DNA, 25 bp, Homo sapien
gcagagtttggagcctgagctgaaa

SEQ ID NO: 5382793 - DNA, 25 bp, Homo sapien
gatggcagagtttggagcctgagct

SEQ ID NO: 5382794 - DNA, 25 bp, Homo sapien
tgatggcagagtttggagcctgagc

SEQ ID NO: 5382795 - DNA, 25 bp, Homo sapien
ctgtgatggcagagtttggagcctg

SEQ ID NO: 5382796 - DNA, 25 bp, Homo sapien
tattggaactgaacgggaacagacg

SEQ ID NO: 5382797 - DNA, 25 bp, Homo sapien
gtatgtgccgccagtgggtatgcag

SEQ ID NO: 5382798 - DNA, 25 bp, Homo sapien
tggcaaaaaatattggaactgaacg

SEQ ID NO: 5382799 - DNA, 25 bp, Homo sapien
tactgtcggatagtggacacggaac

SEQ ID NO: 5382800 - DNA, 25 bp, Homo sapien
cccgatgtccggagatgggaatcag

SEQ ID NO: 5382801 - DNA, 25 bp, Homo sapien
atccgaggagaagtgtgcgtgatct

SEQ ID NO: 5382802 - DNA, 25 bp, Homo sapien
ggaatcaggctactcctctcggcag

SEQ ID NO: 5382803 - DNA, 25 bp, Homo sapien
gtcacttcgggtttccatggccaca

SEQ ID NO: 5382804 - DNA, 25 bp, Homo sapien
ggagcttgcgtgtgtgacacagatc

SEQ ID NO: 5382805 - DNA, 25 bp, Homo sapien
gtaacaatggtacttgtgggagctt

SEQ ID NO: 5382806 - DNA, 25 bp, Homo sapien
aatgggagggtactgtcatggtaac

SEQ ID NO: 5382807 - DNA, 25 bp, Homo sapien
gtcacagcagtagcatgggaggaat

SEQ ID NO: 5382808 - DNA, 25 bp, Homo sapien
ttctttaacaagaacttctctgcac

SEQ ID NO: 5382809 - DNA, 25 bp, Homo sapien
aaattctttaacaagaacttctctg

SEQ ID NO: 5382810 - DNA, 25 bp, Homo sapien
ttaacaagaacttctctgcacacgt

SEQ ID NO: 5382811 - DNA, 25 bp, Homo sapien
tttaacaagaacttctctgcacacg

SEQ ID NO: 5382812 - DNA, 25 bp, Homo sapien
aaaaattaacccatcactcttgcct

SEQ ID NO: 5382813 - DNA, 25 bp, Homo sapien
atgaaaaattaacccatcactcttg

SEQ ID NO: 5382814 - DNA, 25 bp, Homo sapien
tgaaaaattaacccatcactcttgc

SEQ ID NO: 5382815 - DNA, 25 bp, Homo sapien
gaaaaattaacccatcactcttgcc

SEQ ID NO: 5382816 - DNA, 25 bp, Homo sapien
ctggcgtgccagtactgaagattgt

SEQ ID NO: 5382817 - DNA, 25 bp, Homo sapien
cagctgtggtcgctgaaggaatggt

SEQ ID NO: 5382818 - DNA, 25 bp, Homo sapien
aaaataggtgctactgtggctgcag

SEQ ID NO: 5382819 - DNA, 25 bp, Homo sapien
gaaggaatggtgttggttgccaaaa

SEQ ID NO: 5382820 - DNA, 25 bp, Homo sapien
atccactgcgtccagggtaaacaca

SEQ ID NO: 5382821 - DNA, 25 bp, Homo sapien
tcaatgccttcggtatcaccaggcc

SEQ ID NO: 5382822 - DNA, 25 bp, Homo sapien
cacaggtggttctccacttttggtt

SEQ ID NO: 5382823 - DNA, 25 bp, Homo sapien
tgagggaaaccccacaacacagtta

SEQ ID NO: 5382824 - DNA, 25 bp, Homo sapien
cgtccctaatgcagggtgagatggt

SEQ ID NO: 5382825 - DNA, 25 bp, Homo sapien
gtagtgtgattcttgttgtgacatc

SEQ ID NO: 5382826 - DNA, 25 bp, Homo sapien
acatctcgtgactgggcaggacgct

SEQ ID NO: 5382827 - DNA, 25 bp, Homo sapien
gctgttttggcgtccctaatgcagg

SEQ ID NO: 5382828 - DNA, 25 bp, Homo sapien
tgcacctagcctaaatccttttcct

SEQ ID NO: 5382829 - DNA, 25 bp, Homo sapien
ttgcatcggtctgctaaaaactcca

SEQ ID NO: 5382830 - DNA, 25 bp, Homo sapien
taagggcctatgtgatctggagacc

SEQ ID NO: 5382831 - DNA, 25 bp, Homo sapien
cagccgagtccatgtccttagtgtg

SEQ ID NO: 5382832 - DNA, 25 bp, Homo sapien
cactggtggtccttataagtggcaa

SEQ ID NO: 5382833 - DNA, 25 bp, Homo sapien
cgctgtcgtagtgatgactggagac

SEQ ID NO: 5382834 - DNA, 25 bp, Homo sapien
cgtagtgatgactggagactgagct

SEQ ID NO: 5382835 - DNA, 25 bp, Homo sapien
ctgaatcagtagcatgcgccgctgt

SEQ ID NO: 5382836 - DNA, 25 bp, Homo sapien
tagcatgcgccgctgtcgtagtgat

SEQ ID NO: 5382837 - DNA, 25 bp, Homo sapien
atggcattggaggtggtcacaggtg

SEQ ID NO: 5382838 - DNA, 25 bp, Homo sapien
gtgcctggcagaatgaataactcca

SEQ ID NO: 5382839 - DNA, 25 bp, Homo sapien
ctagtgcctggcagaatgaataact

SEQ ID NO: 5382840 - DNA, 25 bp, Homo sapien
ggcagaatgaataactccaatgagg

SEQ ID NO: 5382841 - DNA, 25 bp, Homo sapien
gaatgaataactccaatgaggccct

SEQ ID NO: 5382842 - DNA, 25 bp, Homo sapien
gttggtgaatgatgtgctgtactgc

SEQ ID NO: 5382843 - DNA, 25 bp, Homo sapien
cagctgtgaggtcggcctcaggact

SEQ ID NO: 5382844 - DNA, 25 bp, Homo sapien
aggactgtggttactttagaactgg

SEQ ID NO: 5382845 - DNA, 25 bp, Homo sapien
tggttactttagaactggacatcac

SEQ ID NO: 5382846 - DNA, 25 bp, Homo sapien
caggagcattgctgcggatgataga

SEQ ID NO: 5382847 - DNA, 25 bp, Homo sapien
attgctgcggatgatagacatttgc

SEQ ID NO: 5382848 - DNA, 25 bp, Homo sapien
catgatgtgatgcaggttactggga

SEQ ID NO: 5382849 - DNA, 25 bp, Homo sapien
cacatttgtagtcatgatgtgatgc

SEQ ID NO: 5382850 - DNA, 25 bp, Homo sapien
atgtactgctagcattcaataaatc

SEQ ID NO: 5382851 - DNA, 25 bp, Homo sapien
taaatcatgatcaacagtttggcat

SEQ ID NO: 5382852 - DNA, 25 bp, Homo sapien
cgtgactaatgtactgctagcattc

SEQ ID NO: 5382853 - DNA, 25 bp, Homo sapien
ataaatcatgatcaacagtttggca

SEQ ID NO: 5382854 - DNA, 25 bp, Homo sapien
ctgttgtccactgattgttgccaca

SEQ ID NO: 5382855 - DNA, 25 bp, Homo sapien
gagggatgctactctccatggtaac

SEQ ID NO: 5382856 - DNA, 25 bp, Homo sapien
catggtaacggtaacctgccctgga

SEQ ID NO: 5382857 - DNA, 25 bp, Homo sapien
ccacaggaatggctgaagcttgagg

SEQ ID NO: 5382858 - DNA, 25 bp, Homo sapien
ggagcaatgggacggctaggcatgg

SEQ ID NO: 5382859 - DNA, 25 bp, Homo sapien
agcaatgggacggctaggcatggtg

SEQ ID NO: 5382860 - DNA, 25 bp, Homo sapien
agcaggagcaatgggacggctaggc

SEQ ID NO: 5382861 - DNA, 25 bp, Homo sapien
caggagcaatgggacggctaggcat

SEQ ID NO: 5382862 - DNA, 25 bp, Homo sapien
catggtgtgtcgacaacatctgcac

SEQ ID NO: 5382863 - DNA, 25 bp, Homo sapien
cctccgaaaatgaaagtggcactgc

SEQ ID NO: 5382864 - DNA, 25 bp, Homo sapien
gggctgtcactgcaacaggtgtggc

SEQ ID NO: 5382865 - DNA, 25 bp, Homo sapien
cactgctggcgtcaggtgtgctggc

SEQ ID NO: 5382866 - DNA, 25 bp, Homo sapien
tcatgtgctccctggcactgacttc

SEQ ID NO: 5382867 - DNA, 25 bp, Homo sapien
gaatctcgaccagattcatcattga

SEQ ID NO: 5382868 - DNA, 25 bp, Homo sapien
gacttcagaatctcgaccagattca

SEQ ID NO: 5382869 - DNA, 25 bp, Homo sapien
ctggcactgacttcagaatctcgac

SEQ ID NO: 5382870 - DNA, 25 bp, Homo sapien
ggctcctaaccgaggaaactgttga

SEQ ID NO: 5382871 - DNA, 25 bp, Homo sapien
gtttatcaatccagcagaaccactg

SEQ ID NO: 5382872 - DNA, 25 bp, Homo sapien
tgtagcagctgggtttatcaatcca

SEQ ID NO: 5382873 - DNA, 25 bp, Homo sapien
aaccactgtttgcaatctgagaagg

SEQ ID NO: 5382874 - DNA, 25 bp, Homo sapien
ccgcaccgcccgcttctatctcgcc

SEQ ID NO: 5382875 - DNA, 25 bp, Homo sapien
cctgggggtgccgcggagggcccat

SEQ ID NO: 5382876 - DNA, 25 bp, Homo sapien
cccgcttctatctcgccggcctggg

SEQ ID NO: 5382877 - DNA, 25 bp, Homo sapien
gcaccgcccgcttctatctcgccgg

SEQ ID NO: 5382878 - DNA, 25 bp, Homo sapien
gcggcgatgtgctcggcgggcgcgg

SEQ ID NO: 5382879 - DNA, 25 bp, Homo sapien
ggcggcggcgatgtgctcggcgggc

SEQ ID NO: 5382880 - DNA, 25 bp, Homo sapien
cggcgcccggggcccgctgctgtcc

SEQ ID NO: 5382881 - DNA, 25 bp, Homo sapien
gcccgctgctgtccagccccgctgg

SEQ ID NO: 5382882 - DNA, 25 bp, Homo sapien
ccggccgccgctgtgctcgcagtcc

SEQ ID NO: 5382883 - DNA, 25 bp, Homo sapien
ggccgccgctgtgctcgcagtcctc

SEQ ID NO: 5382884 - DNA, 25 bp, Homo sapien
acccggccgccgctgtgctcgcagt

SEQ ID NO: 5382885 - DNA, 25 bp, Homo sapien
ccacccggccgccgctgtgctcgca

SEQ ID NO: 5382886 - DNA, 25 bp, Homo sapien
cccgccaaggcccacgtccgccacg

SEQ ID NO: 5382887 - DNA, 25 bp, Homo sapien
gccaaggcccacgtccgccacgccc

SEQ ID NO: 5382888 - DNA, 25 bp, Homo sapien
gcccacgtccgccacgcccccacgc

SEQ ID NO: 5382889 - DNA, 25 bp, Homo sapien
ccgccaaggcccacgtccgccacgc

SEQ ID NO: 5382890 - DNA, 25 bp, Homo sapien
gccgcgccgccttgagctcgctccc

SEQ ID NO: 5382891 - DNA, 25 bp, Homo sapien
cgccgccttgagctcgctcccgcgc

SEQ ID NO: 5382892 - DNA, 25 bp, Homo sapien
ccgccgcgccgccttgagctcgctc

SEQ ID NO: 5382893 - DNA, 25 bp, Homo sapien
gccgccgcgccgccttgagctcgct

SEQ ID NO: 5382894 - DNA, 25 bp, Homo sapien
gccaccgccggggagctagcactct

SEQ ID NO: 5382895 - DNA, 25 bp, Homo sapien
caccgccggggagctagcactctgc

SEQ ID NO: 5382896 - DNA, 25 bp, Homo sapien
cagccaccgccggggagctagcact

SEQ ID NO: 5382897 - DNA, 25 bp, Homo sapien
cgcagccaccgccggggagctagca

SEQ ID NO: 5382898 - DNA, 25 bp, Homo sapien
ccgagtcagccagtcgccggtggtc

SEQ ID NO: 5382899 - DNA, 25 bp, Homo sapien
gccggtggtcgtgagcgggagagcg

SEQ ID NO: 5382900 - DNA, 25 bp, Homo sapien
gccgtaacgagcctcccgtctattg

SEQ ID NO: 5382901 - DNA, 25 bp, Homo sapien
agcctcccgtctattggctggcgca

SEQ ID NO: 5382902 - DNA, 25 bp, Homo sapien
tatatgttccacactcttccatctc

SEQ ID NO: 5382903 - DNA, 25 bp, Homo sapien
tattacattgatatgcacctctgcc

SEQ ID NO: 5382904 - DNA, 25 bp, Homo sapien
tcccacagccgccatattacattga

SEQ ID NO: 5382905 - DNA, 25 bp, Homo sapien
ttcatatatgttccacactcttcca

SEQ ID NO: 5382906 - DNA, 25 bp, Homo sapien
gtaatgaacatcacctagagagaga

SEQ ID NO: 5382907 - DNA, 25 bp, Homo sapien
taacaggatgttaggcaggacctag

SEQ ID NO: 5382908 - DNA, 25 bp, Homo sapien
gcttcttagggagaatacggcagca

SEQ ID NO: 5382909 - DNA, 25 bp, Homo sapien
taatggcacaaggtctagtaacagg

SEQ ID NO: 5382910 - DNA, 25 bp, Homo sapien
ataagttgagaactatagtgtagag

SEQ ID NO: 5382911 - DNA, 25 bp, Homo sapien
ccccaaaataagttgagaactatag

SEQ ID NO: 5382912 - DNA, 25 bp, Homo sapien
aacctcaagaacagggcgactgagc

SEQ ID NO: 5382913 - DNA, 25 bp, Homo sapien
actatagtgtagagaaaagaaacct

SEQ ID NO: 5382914 - DNA, 25 bp, Homo sapien
tcccagggactggagaaaatgtaaa

SEQ ID NO: 5382915 - DNA, 25 bp, Homo sapien
aaaaaggaaggttggaatccatcag

SEQ ID NO: 5382916 - DNA, 25 bp, Homo sapien
gctcccagggactggagaaaatgta

SEQ ID NO: 5382917 - DNA, 25 bp, Homo sapien
gaatccatcagtgtttttttgctgt

SEQ ID NO: 5382918 - DNA, 25 bp, Homo sapien
gggtctcagctgttggcccaacgaa

SEQ ID NO: 5382919 - DNA, 25 bp, Homo sapien
taagctgccgctgtccgaataagaa

SEQ ID NO: 5382920 - DNA, 25 bp, Homo sapien
caaactggatttcaccgactgactg

SEQ ID NO: 5382921 - DNA, 25 bp, Homo sapien
tactgtgccaccgaaaggctaaagg

SEQ ID NO: 5382922 - DNA, 25 bp, Homo sapien
gactttggagatgaaaatcagagaa

SEQ ID NO: 5382923 - DNA, 25 bp, Homo sapien
catccactttgccagtgaccctaga

SEQ ID NO: 5382924 - DNA, 25 bp, Homo sapien
gtctggatgctgtctgagaggatct

SEQ ID NO: 5382925 - DNA, 25 bp, Homo sapien
atcttgacaggcttggagcggctgc

SEQ ID NO: 5382926 - DNA, 25 bp, Homo sapien
caagcgtagctcgaaaaaggttggc

SEQ ID NO: 5382927 - DNA, 25 bp, Homo sapien
tggtgtagtagaaaaagcggcatca

SEQ ID NO: 5382928 - DNA, 25 bp, Homo sapien
cataacatttttctcggcccacaga

SEQ ID NO: 5382929 - DNA, 25 bp, Homo sapien
tagttgatcctgcacatgagaccac

SEQ ID NO: 5382930 - DNA, 25 bp, Homo sapien
acattgtctgggagcctgttggaaa

SEQ ID NO: 5382931 - DNA, 25 bp, Homo sapien
gaaccataggcaaatgtgtataatc

SEQ ID NO: 5382932 - DNA, 25 bp, Homo sapien
tgacatttactctacgaaccatagg

SEQ ID NO: 5382933 - DNA, 25 bp, Homo sapien
gggattcccgtgtgcattcatgcta

SEQ ID NO: 5382934 - DNA, 25 bp, Homo sapien
gaccttttaggtcgaacagtgtgtg

SEQ ID NO: 5382935 - DNA, 25 bp, Homo sapien
tgaatagagagagacctgattcctt

SEQ ID NO: 5382936 - DNA, 25 bp, Homo sapien
cttctctgcgagaagtgtgatttga

SEQ ID NO: 5382937 - DNA, 25 bp, Homo sapien
cctgtgacctacaatgttgcaatga

SEQ ID NO: 5382938 - DNA, 25 bp, Homo sapien
taaaaaatacgaggagagggtgcag

SEQ ID NO: 5382939 - DNA, 25 bp, Homo sapien
cactggcatagacaggcacgctctg

SEQ ID NO: 5382940 - DNA, 25 bp, Homo sapien
gagtatgttattggcctaagtgggc

SEQ ID NO: 5382941 - DNA, 25 bp, Homo sapien
tctgtcttcatgtcgctgcatcgtg

SEQ ID NO: 5382942 - DNA, 25 bp, Homo sapien
caaatgccccagaaaatgatgttac

SEQ ID NO: 5382943 - DNA, 25 bp, Homo sapien
tttctccaagaaggcatactgtaac

SEQ ID NO: 5382944 - DNA, 25 bp, Homo sapien
tcttgggagagcgaagattacgtgc

SEQ ID NO: 5382945 - DNA, 25 bp, Homo sapien
tgctgaatgttcaaactctggaaac

SEQ ID NO: 5382946 - DNA, 25 bp, Homo sapien
ccgccctccggaagtatatttagat

SEQ ID NO: 5382947 - DNA, 25 bp, Homo sapien
gacagtcagacatcaccctgagagt

SEQ ID NO: 5382948 - DNA, 25 bp, Homo sapien
actatgtccggtcaagccctcgtgt

SEQ ID NO: 5382949 - DNA, 25 bp, Homo sapien
tacctatgtggcctgaacgattaaa

SEQ ID NO: 5382950 - DNA, 25 bp, Homo sapien
gaggcagtagaagcaggaagtcaat

SEQ ID NO: 5382951 - DNA, 25 bp, Homo sapien
aatgcctagaggatacagatttctc

SEQ ID NO: 5382952 - DNA, 25 bp, Homo sapien
aatgagacatcatgaacttcagtgg

SEQ ID NO: 5382953 - DNA, 25 bp, Homo sapien
tccctcaggctgtcattgatcagtg

SEQ ID NO: 5382954 - DNA, 25 bp, Homo sapien
ctgagtctttcccagatacccagca

SEQ ID NO: 5382955 - DNA, 25 bp, Homo sapien
gaatgtattgtatgccttgccttac

SEQ ID NO: 5382956 - DNA, 25 bp, Homo sapien
tctgtggtcggtatttgcaagcgcc

SEQ ID NO: 5382957 - DNA, 25 bp, Homo sapien
ggatttgcaagcaaaaggtcctctc

SEQ ID NO: 5382958 - DNA, 25 bp, Homo sapien
gaaccgtggtagacagatagtagcc

SEQ ID NO: 5382959 - DNA, 25 bp, Homo sapien
cagtgtggtgttaactgctggcttc

SEQ ID NO: 5382960 - DNA, 25 bp, Homo sapien
ccttggagccatggttaagactttg

SEQ ID NO: 5382961 - DNA, 25 bp, Homo sapien
tgctgacccctgacgtagccttgga

SEQ ID NO: 5382962 - DNA, 25 bp, Homo sapien
cggctcggtgcaatctgcgcctcct

SEQ ID NO: 5382963 - DNA, 25 bp, Homo sapien
ctcggtgcaatctgcgcctcctggg

SEQ ID NO: 5382964 - DNA, 25 bp, Homo sapien
cagttttaagaggggcactctggct

SEQ ID NO: 5382965 - DNA, 25 bp, Homo sapien
agttttaagaggggcactctggctg

SEQ ID NO: 5382966 - DNA, 25 bp, Homo sapien
caccatctctagcaaacagtccagg

SEQ ID NO: 5382967 - DNA, 25 bp, Homo sapien
agccagcctgctgcctatatgtcag

SEQ ID NO: 5382968 - DNA, 25 bp, Homo sapien
cagtctgatagaaagttggcccacc

SEQ ID NO: 5382969 - DNA, 25 bp, Homo sapien
caaatggccaggattaatgactgcc

SEQ ID NO: 5382970 - DNA, 25 bp, Homo sapien
cgcacgtggtctattccctgtgcac

SEQ ID NO: 5382971 - DNA, 25 bp, Homo sapien
atcttcccgctgtgtccgcacgtgg

SEQ ID NO: 5382972 - DNA, 25 bp, Homo sapien
ttcccgctgtgtccgcacgtggtct

SEQ ID NO: 5382973 - DNA, 25 bp, Homo sapien
gctgtgtccgcacgtggtctattcc

SEQ ID NO: 5382974 - DNA, 25 bp, Homo sapien
aagtccccattttgcaattttgaga

SEQ ID NO: 5382975 - DNA, 25 bp, Homo sapien
taaatgtacctatcactcagaggtg

SEQ ID NO: 5382976 - DNA, 25 bp, Homo sapien
gataaagttgatgttcccttattcc

SEQ ID NO: 5382977 - DNA, 25 bp, Homo sapien
aattttgagaaaattcctgtcatga

SEQ ID NO: 5382978 - DNA, 25 bp, Homo sapien
agctggcggtcctggcgagaccaat

SEQ ID NO: 5382979 - DNA, 25 bp, Homo sapien
gaccaatgatccctctacaaggtgg

SEQ ID NO: 5382980 - DNA, 25 bp, Homo sapien
ggacgagtggcttaacaggatgtaa

SEQ ID NO: 5382981 - DNA, 25 bp, Homo sapien
tcgcccgagccaagagactagactc

SEQ ID NO: 5382982 - DNA, 25 bp, Homo sapien
gagaacccagcgctgtgtgcaaagg

SEQ ID NO: 5382983 - DNA, 25 bp, Homo sapien
tgaggactgatactggcctgatggc

SEQ ID NO: 5382984 - DNA, 25 bp, Homo sapien
catgtcatgaatacactgtgtgccc

SEQ ID NO: 5382985 - DNA, 25 bp, Homo sapien
tcatctgacaaagcgactcctgcag

SEQ ID NO: 5382986 - DNA, 25 bp, Homo sapien
ccccatgttgagtgtccgagcagat

SEQ ID NO: 5382987 - DNA, 25 bp, Homo sapien
tgaacttaatccgtacgctggtggg

SEQ ID NO: 5382988 - DNA, 25 bp, Homo sapien
agtgtgatgcatccacccagggagg

SEQ ID NO: 5382989 - DNA, 25 bp, Homo sapien
gacaagacccgtgcttccgtgtgag

SEQ ID NO: 5382990 - DNA, 25 bp, Homo sapien
tttttgcgataaatccaaggaggcc

SEQ ID NO: 5382991 - DNA, 25 bp, Homo sapien
ggtctcactcctagtagcccggaca

SEQ ID NO: 5382992 - DNA, 25 bp, Homo sapien
catggcatccttcgagcacgctttc

SEQ ID NO: 5382993 - DNA, 25 bp, Homo sapien
ggactcgagtcttctctgcctcaga

SEQ ID NO: 5382994 - DNA, 25 bp, Homo sapien
gttgtacgggcagtccatgaactcc

SEQ ID NO: 5382995 - DNA, 25 bp, Homo sapien
ttgtactgcatgaagggccggatga

SEQ ID NO: 5382996 - DNA, 25 bp, Homo sapien
tgaacgtccgctcgaacaggtactg

SEQ ID NO: 5382997 - DNA, 25 bp, Homo sapien
atgaactcctgtagcgtgcagcccg

SEQ ID NO: 5382998 - DNA, 25 bp, Homo sapien
cacaaagcgcttcttggtgtccgct

SEQ ID NO: 5382999 - DNA, 25 bp, Homo sapien
cccggggagcacaaagcgcttcttg

SEQ ID NO: 5383000 - DNA, 25 bp, Homo sapien
gctggcaactgcctgatctgaccgc

SEQ ID NO: 5383001 - DNA, 25 bp, Homo sapien
tcttggtgtccgctggcaactgcct

SEQ ID NO: 5383002 - DNA, 25 bp, Homo sapien
gcaccaggcctcgatccagcctgtt

SEQ ID NO: 5383003 - DNA, 25 bp, Homo sapien
cagcctgttcctggacaagggccct

SEQ ID NO: 5383004 - DNA, 25 bp, Homo sapien
tcgatccagcctgttcctggacaag

SEQ ID NO: 5383005 - DNA, 25 bp, Homo sapien
atgcaggcaccaggcctcgatccag

SEQ ID NO: 5383006 - DNA, 25 bp, Homo sapien
cctgctcacagtgggcggctgcagc

SEQ ID NO: 5383007 - DNA, 25 bp, Homo sapien
tgcagccccagaagacgcagcactc

SEQ ID NO: 5383008 - DNA, 25 bp, Homo sapien
agaagacgcagcactcaaagctggg

SEQ ID NO: 5383009 - DNA, 25 bp, Homo sapien
tcaaagctggggttgccacctgcca

SEQ ID NO: 5383010 - DNA, 25 bp, Homo sapien
gcaccgtcacggtctgcaggtagga

SEQ ID NO: 5383011 - DNA, 25 bp, Homo sapien
ggtcagacctctccacctttaagac

SEQ ID NO: 5383012 - DNA, 25 bp, Homo sapien
ggtaggaggacacgggtatatcacc

SEQ ID NO: 5383013 - DNA, 25 bp, Homo sapien
tggaatgccagtgtgagtgaccgcc

SEQ ID NO: 5383014 - DNA, 25 bp, Homo sapien
ctgtccttcctgcgcccatgtccca

SEQ ID NO: 5383015 - DNA, 25 bp, Homo sapien
ccttcctgcgcccatgtcccacata

SEQ ID NO: 5383016 - DNA, 25 bp, Homo sapien
cgcccatgtcccacataacccttct

SEQ ID NO: 5383017 - DNA, 25 bp, Homo sapien
ctgcgcccatgtcccacataaccct

SEQ ID NO: 5383018 - DNA, 25 bp, Homo sapien
aataaaatggcgcaacggacactgc

SEQ ID NO: 5383019 - DNA, 25 bp, Homo sapien
caaagatattagcagtgctggccca

SEQ ID NO: 5383020 - DNA, 25 bp, Homo sapien
cagcggctctgcgtcttgtaataaa

SEQ ID NO: 5383021 - DNA, 25 bp, Homo sapien
ccagggaggcgggtgtgttcaaaga

SEQ ID NO: 5383022 - DNA, 25 bp, Homo sapien
catgcgttgccagacgcatctgctg

SEQ ID NO: 5383023 - DNA, 25 bp, Homo sapien
tccattgcatgcgttgccagacgca

SEQ ID NO: 5383024 - DNA, 25 bp, Homo sapien
gccagacgcatctgctgtttactct

SEQ ID NO: 5383025 - DNA, 25 bp, Homo sapien
tctttcctccattgcatgcgttgcc

SEQ ID NO: 5383026 - DNA, 25 bp, Homo sapien
aggaggacgccaaagctgggagctc

SEQ ID NO: 5383027 - DNA, 25 bp, Homo sapien
gaaatgagaaccttcaggaggacgc

SEQ ID NO: 5383028 - DNA, 25 bp, Homo sapien
caggatggctctctccggaaagcga

SEQ ID NO: 5383029 - DNA, 25 bp, Homo sapien
cagacccatgggacaccacagggta

SEQ ID NO: 5383030 - DNA, 25 bp, Homo sapien
caagcagtccggcttctgcccagtt

SEQ ID NO: 5383031 - DNA, 25 bp, Homo sapien
agcaccaagcagtccggcttctgcc

SEQ ID NO: 5383032 - DNA, 25 bp, Homo sapien
aaagtggaagtctgattttggctcc

SEQ ID NO: 5383033 - DNA, 25 bp, Homo sapien
ggaagccgctgagcgccccacttgg

SEQ ID NO: 5383034 - DNA, 25 bp, Homo sapien
cctgcagctgatgggacctttggca

SEQ ID NO: 5383035 - DNA, 25 bp, Homo sapien
tgtggccctcaagagagaggcttag

SEQ ID NO: 5383036 - DNA, 25 bp, Homo sapien
tacctctagcaaagtgtggcatggg

SEQ ID NO: 5383037 - DNA, 25 bp, Homo sapien
tgctggcctcatgacgctgcttctg

SEQ ID NO: 5383038 - DNA, 25 bp, Homo sapien
gatggttgaaaacgctgcgggtgca

SEQ ID NO: 5383039 - DNA, 25 bp, Homo sapien
cggcccgcggcagatggttgaaaac

SEQ ID NO: 5383040 - DNA, 25 bp, Homo sapien
gccagcgtcctaatggcactgccag

SEQ ID NO: 5383041 - DNA, 25 bp, Homo sapien
ctccgccagcgtcctaatggcactg

SEQ ID NO: 5383042 - DNA, 25 bp, Homo sapien
gaagcctgagcgtgcccagggcgca

SEQ ID NO: 5383043 - DNA, 25 bp, Homo sapien
agctgggcactgcggaggagcagag

SEQ ID NO: 5383044 - DNA, 25 bp, Homo sapien
gcctgagcgtgcccagggcgcacag

SEQ ID NO: 5383045 - DNA, 25 bp, Homo sapien
aagcctgagcgtgcccagggcgcac

SEQ ID NO: 5383046 - DNA, 25 bp, Homo sapien
ctcatcagactgcaggtcaggagct

SEQ ID NO: 5383047 - DNA, 25 bp, Homo sapien
gggcctcatcagactgcaggtcagg

SEQ ID NO: 5383048 - DNA, 25 bp, Homo sapien
catcagactgcaggtcaggagcttg

SEQ ID NO: 5383049 - DNA, 25 bp, Homo sapien
tcagactgcaggtcaggagcttgga

SEQ ID NO: 5383050 - DNA, 25 bp, Homo sapien
catcaaagcttgtgggtacagcctg

SEQ ID NO: 5383051 - DNA, 25 bp, Homo sapien
gggcaaaagagccacatcaaagctt

SEQ ID NO: 5383052 - DNA, 25 bp, Homo sapien
gcattaacacagaagctcatatctg

SEQ ID NO: 5383053 - DNA, 25 bp, Homo sapien
tggcagtagaaaagcacagcccttc

SEQ ID NO: 5383054 - DNA, 25 bp, Homo sapien
tcaccagtaatcagcctttctcggg

SEQ ID NO: 5383055 - DNA, 25 bp, Homo sapien
cacagcaactcatgtcagggtccga

SEQ ID NO: 5383056 - DNA, 25 bp, Homo sapien
tccgaggcaaagtcctggttctcac

SEQ ID NO: 5383057 - DNA, 25 bp, Homo sapien
agcagcctctcaggacatctccaaa

SEQ ID NO: 5383058 - DNA, 25 bp, Homo sapien
ggtacggtcgccactattagatccc

SEQ ID NO: 5383059 - DNA, 25 bp, Homo sapien
gatccttctgcagccaaagtctccc

SEQ ID NO: 5383060 - DNA, 25 bp, Homo sapien
aaagtctcccagataccagaggtgt

SEQ ID NO: 5383061 - DNA, 25 bp, Homo sapien
gcagatgggcaaatggagactcaga

SEQ ID NO: 5383062 - DNA, 25 bp, Homo sapien
tccctgagatgagcagcacgaagct

SEQ ID NO: 5383063 - DNA, 25 bp, Homo sapien
ccacgtgcacggtccctgagatgag

SEQ ID NO: 5383064 - DNA, 25 bp, Homo sapien
agatgagcagcacgaagctcccagg

SEQ ID NO: 5383065 - DNA, 25 bp, Homo sapien
tgcacggtccctgagatgagcagca

SEQ ID NO: 5383066 - DNA, 25 bp, Homo sapien
gaggtcacagcatgacgctcggcat

SEQ ID NO: 5383067 - DNA, 25 bp, Homo sapien
tctccagcttgctaagggatctgcc

SEQ ID NO: 5383068 - DNA, 25 bp, Homo sapien
caaaacaagacaatatgcctcctgg

SEQ ID NO: 5383069 - DNA, 25 bp, Homo sapien
gccctgacgagttccccaaggaatg

SEQ ID NO: 5383070 - DNA, 25 bp, Homo sapien
tggccaaagtgaattgctccccgca

SEQ ID NO: 5383071 - DNA, 25 bp, Homo sapien
ggccaaagtgaattgctccccgcag

SEQ ID NO: 5383072 - DNA, 25 bp, Homo sapien
gcgggccagacctcacggcgcacag

SEQ ID NO: 5383073 - DNA, 25 bp, Homo sapien
gcgtccccaagtccggcgggccaga

SEQ ID NO: 5383074 - DNA, 25 bp, Homo sapien
gacctcacggcgcacagcaggtaag

SEQ ID NO: 5383075 - DNA, 25 bp, Homo sapien
aagtccggcgggccagacctcacgg

SEQ ID NO: 5383076 - DNA, 25 bp, Homo sapien
cagcacgccgggcacgcagttggtg

SEQ ID NO: 5383077 - DNA, 25 bp, Homo sapien
gtgcacttcttctggccgggccggc

SEQ ID NO: 5383078 - DNA, 25 bp, Homo sapien
ttgggccggtagcaggtgcacttct

SEQ ID NO: 5383079 - DNA, 25 bp, Homo sapien
agaagagccaagtctcgcggcggtt

SEQ ID NO: 5383080 - DNA, 25 bp, Homo sapien
tgtgcaggaagacgatcacgtcgtc

SEQ ID NO: 5383081 - DNA, 25 bp, Homo sapien
tcgaggcgtacgttctgcacgaggt

SEQ ID NO: 5383082 - DNA, 25 bp, Homo sapien
atgtcgaagcgcagcgagcgctcca

SEQ ID NO: 5383083 - DNA, 25 bp, Homo sapien
cacgtcgtcgcccttcatgtcgaag

SEQ ID NO: 5383084 - DNA, 25 bp, Homo sapien
tcctgggcccgcgtactggtacaag

SEQ ID NO: 5383085 - DNA, 25 bp, Homo sapien
ccgcgtactggtacaagatgagcat

SEQ ID NO: 5383086 - DNA, 25 bp, Homo sapien
gggcccgcgtactggtacaagatga

SEQ ID NO: 5383087 - DNA, 25 bp, Homo sapien
cagtcctgggcccgcgtactggtac

SEQ ID NO: 5383088 - DNA, 25 bp, Homo sapien
cgaacttgctggcgcgctcaaccat

SEQ ID NO: 5383089 - DNA, 25 bp, Homo sapien
cgccaccaccagcacgaacttgctg

SEQ ID NO: 5383090 - DNA, 25 bp, Homo sapien
acgaacttgctggcgcgctcaacca

SEQ ID NO: 5383091 - DNA, 25 bp, Homo sapien
tgccgccggcgcgccgccgccgcat

SEQ ID NO: 5383092 - DNA, 25 bp, Homo sapien
gtcctgccgccggcgcgccgccgcc

SEQ ID NO: 5383093 - DNA, 25 bp, Homo sapien
ggtcctgccgccggcgcgccgccgc

SEQ ID NO: 5383094 - DNA, 25 bp, Homo sapien
cctgccgccggcgcgccgccgccgc

SEQ ID NO: 5383095 - DNA, 25 bp, Homo sapien
gccagcacagcgctctccgcgcccc

SEQ ID NO: 5383096 - DNA, 25 bp, Homo sapien
cgacgcccgactccgctcccgctcg

SEQ ID NO: 5383097 - DNA, 25 bp, Homo sapien
gaccctccgcggtgccatggctgct

SEQ ID NO: 5383098 - DNA, 25 bp, Homo sapien
gtgtcaccatcgccggggcccgggc

SEQ ID NO: 5383099 - DNA, 25 bp, Homo sapien
tcgccgcccgcgccgatcctcggcc

SEQ ID NO: 5383100 - DNA, 25 bp, Homo sapien
ccccgtggcgtctcttgccgtcgcc

SEQ ID NO: 5383101 - DNA, 25 bp, Homo sapien
cccgtggcgtctcttgccgtcgccg

SEQ ID NO: 5383102 - DNA, 25 bp, Homo sapien
cccccgtggcgtctcttgccgtcgc

SEQ ID NO: 5383103 - DNA, 25 bp, Homo sapien
gagggctcgctccacgttggctcgt

SEQ ID NO: 5383104 - DNA, 25 bp, Homo sapien
gttggttggagagtccagcggcccg

SEQ ID NO: 5383105 - DNA, 25 bp, Homo sapien
ggtggtgcgggctcctcactcgccg

SEQ ID NO: 5383106 - DNA, 25 bp, Homo sapien
ccgggcccaacctggctgcggaggg

SEQ ID NO: 5383107 - DNA, 25 bp, Homo sapien
gtgactgctcgcagcttccggtggc

SEQ ID NO: 5383108 - DNA, 25 bp, Homo sapien
ctgcccagaggggttccgactcggc

SEQ ID NO: 5383109 - DNA, 25 bp, Homo sapien
tcctcccagatggctgtcattcact

SEQ ID NO: 5383110 - DNA, 25 bp, Homo sapien
ttccggtggccagtgggtctcctcc

SEQ ID NO: 5383111 - DNA, 25 bp, Homo sapien
tgtgtggtacaccaggtcgtccacc

SEQ ID NO: 5383112 - DNA, 25 bp, Homo sapien
ggtacaccaggtcgtccacctggct

SEQ ID NO: 5383113 - DNA, 25 bp, Homo sapien
catgggtgtgtggtacaccaggtcg

SEQ ID NO: 5383114 - DNA, 25 bp, Homo sapien
caccaggtcgtccacctggctgaag

SEQ ID NO: 5383115 - DNA, 25 bp, Homo sapien
cacaacccccagacctggctgtcat

SEQ ID NO: 5383116 - DNA, 25 bp, Homo sapien
aacccccagacctggctgtcatggg

SEQ ID NO: 5383117 - DNA, 25 bp, Homo sapien
gacctggctgtcatgggaaaagccc

SEQ ID NO: 5383118 - DNA, 25 bp, Homo sapien
cccagacctggctgtcatgggaaaa

SEQ ID NO: 5383119 - DNA, 25 bp, Homo sapien
ggaatgtgcattgactaccccagcc

SEQ ID NO: 5383120 - DNA, 25 bp, Homo sapien
ggcaacaccactctgctaggcaaga

SEQ ID NO: 5383121 - DNA, 25 bp, Homo sapien
taagtacttcatatggagacacggg

SEQ ID NO: 5383122 - DNA, 25 bp, Homo sapien
gagcaccctgcttggaggaacactg

SEQ ID NO: 5383123 - DNA, 25 bp, Homo sapien
gtatgaggggagccaaggagtcaca

SEQ ID NO: 5383124 - DNA, 25 bp, Homo sapien
cttagtatgaggggagccaaggagt

SEQ ID NO: 5383125 - DNA, 25 bp, Homo sapien
ttagtatgaggggagccaaggagtc

SEQ ID NO: 5383126 - DNA, 25 bp, Homo sapien
tagtatgaggggagccaaggagtca

SEQ ID NO: 5383127 - DNA, 25 bp, Homo sapien
attccgcggctgagcggcgagtccc

SEQ ID NO: 5383128 - DNA, 25 bp, Homo sapien
agtccccgcgaagggtgcacaggaa

SEQ ID NO: 5383129 - DNA, 25 bp, Homo sapien
gtgcacaggaaggtgccaccggccc

SEQ ID NO: 5383130 - DNA, 25 bp, Homo sapien
aggcgctcgttgttcacgctgcggt

SEQ ID NO: 5383131 - DNA, 25 bp, Homo sapien
aggaatgaacgggttgactctgcag

SEQ ID NO: 5383132 - DNA, 25 bp, Homo sapien
ggcgagcatataagacggaccctgc

SEQ ID NO: 5383133 - DNA, 25 bp, Homo sapien
tgggaatcagcctgctcgcggcgct

SEQ ID NO: 5383134 - DNA, 25 bp, Homo sapien
acgttgcccaaaccacgtgttggtg

SEQ ID NO: 5383135 - DNA, 25 bp, Homo sapien
gagcaaagatcctggggcgcagata

SEQ ID NO: 5383136 - DNA, 25 bp, Homo sapien
ccttctgggcgatggcgagtggttt

SEQ ID NO: 5383137 - DNA, 25 bp, Homo sapien
tggcgagtggtttggctttatccca

SEQ ID NO: 5383138 - DNA, 25 bp, Homo sapien
gcgcagataagtgtgggctgcccat

SEQ ID NO: 5383139 - DNA, 25 bp, Homo sapien
gaagtggaggatgagtggaacaagg

SEQ ID NO: 5383140 - DNA, 25 bp, Homo sapien
gagaagtggaggatgagtggaacaa

SEQ ID NO: 5383141 - DNA, 25 bp, Homo sapien
agtagtgagaagtggaggatgagtg

SEQ ID NO: 5383142 - DNA, 25 bp, Homo sapien
gtgagaagtggaggatgagtggaac

SEQ ID NO: 5383143 - DNA, 25 bp, Homo sapien
gtaacaacatcctgccctggactgg

SEQ ID NO: 5383144 - DNA, 25 bp, Homo sapien
gccatgagtgcctggattgtgtgct

SEQ ID NO: 5383145 - DNA, 25 bp, Homo sapien
tgagtgcctggattgtgtgctcccc

SEQ ID NO: 5383146 - DNA, 25 bp, Homo sapien
gggctgcctgcgatgtgtctgccaa

SEQ ID NO: 5383147 - DNA, 25 bp, Homo sapien
aggtttattggcatttagcttcctt

SEQ ID NO: 5383148 - DNA, 25 bp, Homo sapien
aaggtttattggcatttagcttcct

SEQ ID NO: 5383149 - DNA, 25 bp, Homo sapien
cttcctccaaggagagactgctcag

SEQ ID NO: 5383150 - DNA, 25 bp, Homo sapien
tccaaggagagactgctcagaagcc

SEQ ID NO: 5383151 - DNA, 25 bp, Homo sapien
cctccaaggagagactgctcagaag

SEQ ID NO: 5383152 - DNA, 25 bp, Homo sapien
tcctccaaggagagactgctcagaa

SEQ ID NO: 5383153 - DNA, 25 bp, Homo sapien
tgtcagtctgcaaaccaccaggctt

SEQ ID NO: 5383154 - DNA, 25 bp, Homo sapien
ctgtttgactcagtccactcccttc

SEQ ID NO: 5383155 - DNA, 25 bp, Homo sapien
tggaggggcccttgccctgtcagtc

SEQ ID NO: 5383156 - DNA, 25 bp, Homo sapien
tgtttgactcagtccactcccttct

SEQ ID NO: 5383157 - DNA, 25 bp, Homo sapien
atcacagccgatttcaccagaaagc

SEQ ID NO: 5383158 - DNA, 25 bp, Homo sapien
cagaaagcagggcatcctgacaaca

SEQ ID NO: 5383159 - DNA, 25 bp, Homo sapien
ctgctcagcatgcctggcggccgtg

SEQ ID NO: 5383160 - DNA, 25 bp, Homo sapien
ggcactgatgccaatggggagatca

SEQ ID NO: 5383161 - DNA, 25 bp, Homo sapien
cacaggctcgtcctctctccaaccc

SEQ ID NO: 5383162 - DNA, 25 bp, Homo sapien
gcccagctgatggcccgtgcccccg

SEQ ID NO: 5383163 - DNA, 25 bp, Homo sapien
ctgatggcccgtgcccccggggcct

SEQ ID NO: 5383164 - DNA, 25 bp, Homo sapien
gccacaggctcgtcctctctccaac

SEQ ID NO: 5383165 - DNA, 25 bp, Homo sapien
tcagggcgctggttgttccgaaaga

SEQ ID NO: 5383166 - DNA, 25 bp, Homo sapien
tgcgctgggcaaagaagcttgtgct

SEQ ID NO: 5383167 - DNA, 25 bp, Homo sapien
gtgcccgtggtcgatccattgccag

SEQ ID NO: 5383168 - DNA, 25 bp, Homo sapien
ccattgccagcacgcacaaggctga

SEQ ID NO: 5383169 - DNA, 25 bp, Homo sapien
acccatccattagggcctggtcgga

SEQ ID NO: 5383170 - DNA, 25 bp, Homo sapien
atccattagggcctggtcggagcca

SEQ ID NO: 5383171 - DNA, 25 bp, Homo sapien
tttctgacccatccattagggcctg

SEQ ID NO: 5383172 - DNA, 25 bp, Homo sapien
attagggcctggtcggagccaaccg

SEQ ID NO: 5383173 - DNA, 25 bp, Homo sapien
cttcctgccaccattcagaccgtcc

SEQ ID NO: 5383174 - DNA, 25 bp, Homo sapien
ctctgtgggtatcgggtaaggctgt

SEQ ID NO: 5383175 - DNA, 25 bp, Homo sapien
gctgcggtgggaccctgcggtggca

SEQ ID NO: 5383176 - DNA, 25 bp, Homo sapien
agaaggtaaatgagggctgcggtgg

SEQ ID NO: 5383177 - DNA, 25 bp, Homo sapien
tcctgtctgacatccggcagttttt

SEQ ID NO: 5383178 - DNA, 25 bp, Homo sapien
ggctgcacccccagaattgtccttt

SEQ ID NO: 5383179 - DNA, 25 bp, Homo sapien
tggctgcacccccagaattgtcctt

SEQ ID NO: 5383180 - DNA, 25 bp, Homo sapien
ttggctgcacccccagaattgtcct

SEQ ID NO: 5383181 - DNA, 25 bp, Homo sapien
tgggttcttgcagaccccactgctg

SEQ ID NO: 5383182 - DNA, 25 bp, Homo sapien
gggttcttgcagaccccactgctgc

SEQ ID NO: 5383183 - DNA, 25 bp, Homo sapien
gctgggttcttgcagaccccactgc

SEQ ID NO: 5383184 - DNA, 25 bp, Homo sapien
tgctgggttcttgcagaccccactg

SEQ ID NO: 5383185 - DNA, 25 bp, Homo sapien
gattccaggatctaggagttgcacc

SEQ ID NO: 5383186 - DNA, 25 bp, Homo sapien
taagcatgagctctgtaacccgggt

SEQ ID NO: 5383187 - DNA, 25 bp, Homo sapien
cttttacaatgcaagtggtgggacc

SEQ ID NO: 5383188 - DNA, 25 bp, Homo sapien
tgactacttctctcagggccagcga

SEQ ID NO: 5383189 - DNA, 25 bp, Homo sapien
ctttaagcgccgtagaagagcatct

SEQ ID NO: 5383190 - DNA, 25 bp, Homo sapien
tctagggagtccagctttggttcat

SEQ ID NO: 5383191 - DNA, 25 bp, Homo sapien
aactgggtccctgtgcacgttggag

SEQ ID NO: 5383192 - DNA, 25 bp, Homo sapien
tggttcatacactgtcggcgaggct

SEQ ID NO: 5383193 - DNA, 25 bp, Homo sapien
tctggcattcaggttcctccagggt

SEQ ID NO: 5383194 - DNA, 25 bp, Homo sapien
ctggcattcaggttcctccagggtg

SEQ ID NO: 5383195 - DNA, 25 bp, Homo sapien
aagcatccacaaaggaggcgatgat

SEQ ID NO: 5383196 - DNA, 25 bp, Homo sapien
aaggaggcgatgatcccgcctggca

SEQ ID NO: 5383197 - DNA, 25 bp, Homo sapien
gcatgtgtatgggtgtaagtgtgcc

SEQ ID NO: 5383198 - DNA, 25 bp, Homo sapien
tgccctgatgcacacaagcatccac

SEQ ID NO: 5383199 - DNA, 25 bp, Homo sapien
aagtattgggggtgcagcatctgca

SEQ ID NO: 5383200 - DNA, 25 bp, Homo sapien
actgctagtgcctcattgctgctgg

SEQ ID NO: 5383201 - DNA, 25 bp, Homo sapien
aatacttgttcagtgaagtattggg

SEQ ID NO: 5383202 - DNA, 25 bp, Homo sapien
ccccatgagtcctgggatgtgggct

SEQ ID NO: 5383203 - DNA, 25 bp, Homo sapien
tcatcgctccatcccgttggctctg

SEQ ID NO: 5383204 - DNA, 25 bp, Homo sapien
gggtcctcctggttgaactgaacac

SEQ ID NO: 5383205 - DNA, 25 bp, Homo sapien
tccatcccgttggctctgaccagga

SEQ ID NO: 5383206 - DNA, 25 bp, Homo sapien
tcgctccatcccgttggctctgacc

SEQ ID NO: 5383207 - DNA, 25 bp, Homo sapien
tggggctttatagggcatctaccag

SEQ ID NO: 5383208 - DNA, 25 bp, Homo sapien
gggctttatagggcatctaccaggg

SEQ ID NO: 5383209 - DNA, 25 bp, Homo sapien
ccagttcttggagtctggagaacct

SEQ ID NO: 5383210 - DNA, 25 bp, Homo sapien
gagccagttcttggagtctggagaa

SEQ ID NO: 5383211 - DNA, 25 bp, Homo sapien
tcgaagcccctagcaactgtcagtg

SEQ ID NO: 5383212 - DNA, 25 bp, Homo sapien
cccatgaattcaaaatcgaagcccc

SEQ ID NO: 5383213 - DNA, 25 bp, Homo sapien
tgttccaagccacagtggtcctgcc

SEQ ID NO: 5383214 - DNA, 25 bp, Homo sapien
cccaagctggagtagccccatgaat

SEQ ID NO: 5383215 - DNA, 25 bp, Homo sapien
ggtcggcctcaagacagtgcagcgc

SEQ ID NO: 5383216 - DNA, 25 bp, Homo sapien
tcaagacagtgcagcgcagcaagca

SEQ ID NO: 5383217 - DNA, 25 bp, Homo sapien
tgcagaggagactcctggtcggcct

SEQ ID NO: 5383218 - DNA, 25 bp, Homo sapien
ccagtgagcaaggagcgggccccac

SEQ ID NO: 5383219 - DNA, 25 bp, Homo sapien
ggcagccccttggcgggcagctgtg

SEQ ID NO: 5383220 - DNA, 25 bp, Homo sapien
ctgtgcgagttcccagcccttggtg

SEQ ID NO: 5383221 - DNA, 25 bp, Homo sapien
tgtgcgagttcccagcccttggtgc

SEQ ID NO: 5383222 - DNA, 25 bp, Homo sapien
gcagccccttggcgggcagctgtgc

SEQ ID NO: 5383223 - DNA, 25 bp, Homo sapien
catccaaatactaatcaggcacaac

SEQ ID NO: 5383224 - DNA, 25 bp, Homo sapien
tctgagatcacacgagatcaggcat

SEQ ID NO: 5383225 - DNA, 25 bp, Homo sapien
ccaaatactaatcaggcacaaccct

SEQ ID NO: 5383226 - DNA, 25 bp, Homo sapien
taatcaggcacaaccctgtttagct

SEQ ID NO: 5383227 - DNA, 25 bp, Homo sapien
agtcctgggagttcctccagcacag

SEQ ID NO: 5383228 - DNA, 25 bp, Homo sapien
tcctgggagttcctccagcacagaa

SEQ ID NO: 5383229 - DNA, 25 bp, Homo sapien
gtcctgggagttcctccagcacaga

SEQ ID NO: 5383230 - DNA, 25 bp, Homo sapien
cctgggagttcctccagcacagaac

SEQ ID NO: 5383231 - DNA, 25 bp, Homo sapien
cacccagcagtttccccggaagaga

SEQ ID NO: 5383232 - DNA, 25 bp, Homo sapien
gccggcatgggtgcctcagccagca

SEQ ID NO: 5383233 - DNA, 25 bp, Homo sapien
ttccaccctcgggccggcatgggtg

SEQ ID NO: 5383234 - DNA, 25 bp, Homo sapien
gaagctcaatttccctgaggctttg

SEQ ID NO: 5383235 - DNA, 25 bp, Homo sapien
ggctgtgtcctcccctactactctt

SEQ ID NO: 5383236 - DNA, 25 bp, Homo sapien
gctgtgtcctcccctactactcttc

SEQ ID NO: 5383237 - DNA, 25 bp, Homo sapien
gggctgtgtcctcccctactactct

SEQ ID NO: 5383238 - DNA, 25 bp, Homo sapien
caagagctaggagaactgtcaaagt

SEQ ID NO: 5383239 - DNA, 25 bp, Homo sapien
ccctaagggcctgagaagtcaataa

SEQ ID NO: 5383240 - DNA, 25 bp, Homo sapien
catgggacacttacagaaatattgc

SEQ ID NO: 5383241 - DNA, 25 bp, Homo sapien
actgtgcccttaaggctgagaagcc

SEQ ID NO: 5383242 - DNA, 25 bp, Homo sapien
ccccatgaggagtgggggccggcca

SEQ ID NO: 5383243 - DNA, 25 bp, Homo sapien
gctcaaccccatgaggagtgggggc

SEQ ID NO: 5383244 - DNA, 25 bp, Homo sapien
cccatgaggagtgggggccggccat

SEQ ID NO: 5383245 - DNA, 25 bp, Homo sapien
caaccccatgaggagtgggggccgg

SEQ ID NO: 5383246 - DNA, 25 bp, Homo sapien
gcccagagcgggtcctctgccgaag

SEQ ID NO: 5383247 - DNA, 25 bp, Homo sapien
aatttgcgctggcagctcccggagg

SEQ ID NO: 5383248 - DNA, 25 bp, Homo sapien
gcccgcacgcggcagggcaataaag

SEQ ID NO: 5383249 - DNA, 25 bp, Homo sapien
tcctctgccgaaggaatttgcgctg

SEQ ID NO: 5383250 - DNA, 25 bp, Homo sapien
gcagctgcgaccgtctgccctgcca

SEQ ID NO: 5383251 - DNA, 25 bp, Homo sapien
ctacaggcagctgcgaccgtctgcc

SEQ ID NO: 5383252 - DNA, 25 bp, Homo sapien
tgtatacgcactcgcactccatgta

SEQ ID NO: 5383253 - DNA, 25 bp, Homo sapien
ctgtgtatacgcactcgcactccat

SEQ ID NO: 5383254 - DNA, 25 bp, Homo sapien
actcgcactccatgtaaccttcaca

SEQ ID NO: 5383255 - DNA, 25 bp, Homo sapien
tatacgcactcgcactccatgtaac

SEQ ID NO: 5383256 - DNA, 25 bp, Homo sapien
ggacttcgctgcttttgcttgttga

SEQ ID NO: 5383257 - DNA, 25 bp, Homo sapien
cattattccacacccgcatccgttc

SEQ ID NO: 5383258 - DNA, 25 bp, Homo sapien
tgatgtctgggcttagcctgtctgt

SEQ ID NO: 5383259 - DNA, 25 bp, Homo sapien
gcatccgttcagcaggcacaagtgg

SEQ ID NO: 5383260 - DNA, 25 bp, Homo sapien
ggtgagaaatggtgtccccatccct

SEQ ID NO: 5383261 - DNA, 25 bp, Homo sapien
gtgagaaatggtgtccccatccctg

SEQ ID NO: 5383262 - DNA, 25 bp, Homo sapien
ctgccgatagcgggtgagaaatggt

SEQ ID NO: 5383263 - DNA, 25 bp, Homo sapien
gcttctgggcttccgttcacgcaga

SEQ ID NO: 5383264 - DNA, 25 bp, Homo sapien
tcagtctccatctggatgcaggctt

SEQ ID NO: 5383265 - DNA, 25 bp, Homo sapien
gtctccatctggatgcaggcttctg

SEQ ID NO: 5383266 - DNA, 25 bp, Homo sapien
cgttcacgcagagttttgggcagca

SEQ ID NO: 5383267 - DNA, 25 bp, Homo sapien
ccagtcttgccttgcaatgctggga

SEQ ID NO: 5383268 - DNA, 25 bp, Homo sapien
ctgtccagtgcatccggtgactcct

SEQ ID NO: 5383269 - DNA, 25 bp, Homo sapien
cagtgcatccggtgactcctgcttg

SEQ ID NO: 5383270 - DNA, 25 bp, Homo sapien
tggtccagtcttgccttgcaatgct

SEQ ID NO: 5383271 - DNA, 25 bp, Homo sapien
tccttggcgtactggagattaggtt

SEQ ID NO: 5383272 - DNA, 25 bp, Homo sapien
gtgaccttgctcacaaacacagctg

SEQ ID NO: 5383273 - DNA, 25 bp, Homo sapien
gcaacaccctgccattctgatggat

SEQ ID NO: 5383274 - DNA, 25 bp, Homo sapien
agctggagccgccagctccttggcg

SEQ ID NO: 5383275 - DNA, 25 bp, Homo sapien
cttcgtgcaaatatccatttggcat

SEQ ID NO: 5383276 - DNA, 25 bp, Homo sapien
gttctgtgcagggatatgggtgatc

SEQ ID NO: 5383277 - DNA, 25 bp, Homo sapien
tctgtgcagggatatgggtgatcat

SEQ ID NO: 5383278 - DNA, 25 bp, Homo sapien
ttctgtgcagggatatgggtgatca

SEQ ID NO: 5383279 - DNA, 25 bp, Homo sapien
gagggagactgaacctcagcatgca

SEQ ID NO: 5383280 - DNA, 25 bp, Homo sapien
caagaattctctggctgagaggact

SEQ ID NO: 5383281 - DNA, 25 bp, Homo sapien
caatggtgtatgttgggcctggttc

SEQ ID NO: 5383282 - DNA, 25 bp, Homo sapien
ctgagaggactcttggcaatggtgt

SEQ ID NO: 5383283 - DNA, 25 bp, Homo sapien
aagtggatcaacaattatattattg

SEQ ID NO: 5383284 - DNA, 25 bp, Homo sapien
ctcatgagcatttacataaaactac

SEQ ID NO: 5383285 - DNA, 25 bp, Homo sapien
aattataagtggatcaacaattata

SEQ ID NO: 5383286 - DNA, 25 bp, Homo sapien
tataagtggatcaacaattatatta

SEQ ID NO: 5383287 - DNA, 25 bp, Homo sapien
ggataatttgtcttcaacatagcac

SEQ ID NO: 5383288 - DNA, 25 bp, Homo sapien
cctttgatgtttgggttactgaaca

SEQ ID NO: 5383289 - DNA, 25 bp, Homo sapien
cacagccacaagtccctttgatgtt

SEQ ID NO: 5383290 - DNA, 25 bp, Homo sapien
tactgaacacaaactcactggataa

SEQ ID NO: 5383291 - DNA, 25 bp, Homo sapien
ctgtgctttcttttcgatgagcact

SEQ ID NO: 5383292 - DNA, 25 bp, Homo sapien
ttagctgtgctttcttttcgatgag

SEQ ID NO: 5383293 - DNA, 25 bp, Homo sapien
tgctttcttttcgatgagcactctg

SEQ ID NO: 5383294 - DNA, 25 bp, Homo sapien
ctttcttttcgatgagcactctgac

SEQ ID NO: 5383295 - DNA, 25 bp, Homo sapien
ttacagcccctggttcggacaccaa

SEQ ID NO: 5383296 - DNA, 25 bp, Homo sapien
gccattacagcccctggttcggaca

SEQ ID NO: 5383297 - DNA, 25 bp, Homo sapien
attacagcccctggttcggacacca

SEQ ID NO: 5383298 - DNA, 25 bp, Homo sapien
aggccattacagcccctggttcgga

SEQ ID NO: 5383299 - DNA, 25 bp, Homo sapien
aatagcctccaggagggatgacatg

SEQ ID NO: 5383300 - DNA, 25 bp, Homo sapien
tagcctccaggagggatgacatggc

SEQ ID NO: 5383301 - DNA, 25 bp, Homo sapien
caatagcctccaggagggatgacat

SEQ ID NO: 5383302 - DNA, 25 bp, Homo sapien
tcaatagcctccaggagggatgaca

SEQ ID NO: 5383303 - DNA, 25 bp, Homo sapien
gccgatgtgggtgccttctgaaagc

SEQ ID NO: 5383304 - DNA, 25 bp, Homo sapien
ttctgaaagcagatgcggagatcgg

SEQ ID NO: 5383305 - DNA, 25 bp, Homo sapien
tggccgatgtgggtgccttctgaaa

SEQ ID NO: 5383306 - DNA, 25 bp, Homo sapien
tgctggccgatgtgggtgccttctg

SEQ ID NO: 5383307 - DNA, 25 bp, Homo sapien
gagcatgtctcccacagggcgctgg

SEQ ID NO: 5383308 - DNA, 25 bp, Homo sapien
tcctggagcatgtctcccacagggc

SEQ ID NO: 5383309 - DNA, 25 bp, Homo sapien
ctggagcatgtctcccacagggcgc

SEQ ID NO: 5383310 - DNA, 25 bp, Homo sapien
ctttcctggagcatgtctcccacag

SEQ ID NO: 5383311 - DNA, 25 bp, Homo sapien
tcttctagggttcagcaaggaaacc

SEQ ID NO: 5383312 - DNA, 25 bp, Homo sapien
ttgcctttaacatctggacgttatt

SEQ ID NO: 5383313 - DNA, 25 bp, Homo sapien
acatctggacgttattgttgtttct

SEQ ID NO: 5383314 - DNA, 25 bp, Homo sapien
gttgtttcttctagggttcagcaag

SEQ ID NO: 5383315 - DNA, 25 bp, Homo sapien
catgcctggtactcgtcctgtgtag

SEQ ID NO: 5383316 - DNA, 25 bp, Homo sapien
gcagcttagtaagatgccatgcctg

SEQ ID NO: 5383317 - DNA, 25 bp, Homo sapien
ttgactaagtgacaacacaggcagc

SEQ ID NO: 5383318 - DNA, 25 bp, Homo sapien
cctgtgtagtggaatcagcggctcc

SEQ ID NO: 5383319 - DNA, 25 bp, Homo sapien
ccattggcagcggtgagtcgggctc

SEQ ID NO: 5383320 - DNA, 25 bp, Homo sapien
tcttggattcatctaaggagccatt

SEQ ID NO: 5383321 - DNA, 25 bp, Homo sapien
cagctgtaggagctacgggaagctt

SEQ ID NO: 5383322 - DNA, 25 bp, Homo sapien
cttcgagaacccattgcccatgatt

SEQ ID NO: 5383323 - DNA, 25 bp, Homo sapien
caggggtcgtgactcagctggaaat

SEQ ID NO: 5383324 - DNA, 25 bp, Homo sapien
ctagttatgggatctccaacagggg

SEQ ID NO: 5383325 - DNA, 25 bp, Homo sapien
tctccaacaggggtcgtgactcagc

SEQ ID NO: 5383326 - DNA, 25 bp, Homo sapien
tgggatctccaacaggggtcgtgac

SEQ ID NO: 5383327 - DNA, 25 bp, Homo sapien
ggatggctgcattgtgcaagacgca

SEQ ID NO: 5383328 - DNA, 25 bp, Homo sapien
gcctttgcatcttcccttttagagg

SEQ ID NO: 5383329 - DNA, 25 bp, Homo sapien
atttacactgatggtgtgagggatg

SEQ ID NO: 5383330 - DNA, 25 bp, Homo sapien
cccttttagaggaatgattgaattt

SEQ ID NO: 5383331 - DNA, 25 bp, Homo sapien
ttgcctgttggtgactcggcttcac

SEQ ID NO: 5383332 - DNA, 25 bp, Homo sapien
ctgaggtggcaaaggtgtcaattgt

SEQ ID NO: 5383333 - DNA, 25 bp, Homo sapien
ggcaaaggtgtcaattgtgctggat

SEQ ID NO: 5383334 - DNA, 25 bp, Homo sapien
gtgctggattgcctgttggtgactc

SEQ ID NO: 5383335 - DNA, 25 bp, Homo sapien
gcagaagtggtgaagggtcctcttt

SEQ ID NO: 5383336 - DNA, 25 bp, Homo sapien
gaatcctgcgtggaatgagcagaag

SEQ ID NO: 5383337 - DNA, 25 bp, Homo sapien
gtgaagagcagctgcccgggaatcc

SEQ ID NO: 5383338 - DNA, 25 bp, Homo sapien
tctttccctgactgtcgcttagaaa

SEQ ID NO: 5383339 - DNA, 25 bp, Homo sapien
taacgccattggagacagcccatct

SEQ ID NO: 5383340 - DNA, 25 bp, Homo sapien
gggaagcacttcagagtgcctgccg

SEQ ID NO: 5383341 - DNA, 25 bp, Homo sapien
agcaccattactcaagtccaggaaa

SEQ ID NO: 5383342 - DNA, 25 bp, Homo sapien
aagccactagtagcaccattactca

SEQ ID NO: 5383343 - DNA, 25 bp, Homo sapien
agccataatgcaagccttggtgcca

SEQ ID NO: 5383344 - DNA, 25 bp, Homo sapien
cttggtgccaattccaactgctcca

SEQ ID NO: 5383345 - DNA, 25 bp, Homo sapien
actgctccaggcatagtgctgtagt

SEQ ID NO: 5383346 - DNA, 25 bp, Homo sapien
caactgctccaggcatagtgctgta

SEQ ID NO: 5383347 - DNA, 25 bp, Homo sapien
gacttggtttgaagccacctcctct

SEQ ID NO: 5383348 - DNA, 25 bp, Homo sapien
ctggcaaccatgtgggcacctgtca

SEQ ID NO: 5383349 - DNA, 25 bp, Homo sapien
gctgcctgagcagcatacacctgct

SEQ ID NO: 5383350 - DNA, 25 bp, Homo sapien
ccaggtgaggccctttggctgcctg

SEQ ID NO: 5383351 - DNA, 25 bp, Homo sapien
caggctcagaggcacaagctggggc

SEQ ID NO: 5383352 - DNA, 25 bp, Homo sapien
caggtgcaggctcagaggcacaagc

SEQ ID NO: 5383353 - DNA, 25 bp, Homo sapien
tgcaggctcagaggcacaagctggg

SEQ ID NO: 5383354 - DNA, 25 bp, Homo sapien
tggcaggtgcaggctcagaggcaca

SEQ ID NO: 5383355 - DNA, 25 bp, Homo sapien
tatctttagtgtggagaccagtgtc

SEQ ID NO: 5383356 - DNA, 25 bp, Homo sapien
gctccagtgagcgtgcagtactcgc

SEQ ID NO: 5383357 - DNA, 25 bp, Homo sapien
tataaatgtggatgaaagccccgcc

SEQ ID NO: 5383358 - DNA, 25 bp, Homo sapien
aagccccgccttgtctgtaactttg

SEQ ID NO: 5383359 - DNA, 25 bp, Homo sapien
catttctgagtaagagagaacaaaa

SEQ ID NO: 5383360 - DNA, 25 bp, Homo sapien
atttctgagtaagagagaacaaaac

SEQ ID NO: 5383361 - DNA, 25 bp, Homo sapien
cgaggccgccatgcactacgggcaa

SEQ ID NO: 5383362 - DNA, 25 bp, Homo sapien
cgccatgcactacgggcaagtctgg

SEQ ID NO: 5383363 - DNA, 25 bp, Homo sapien
aggccgccatgcactacgggcaagt

SEQ ID NO: 5383364 - DNA, 25 bp, Homo sapien
cagcgaggccgccatgcactacggg

SEQ ID NO: 5383365 - DNA, 25 bp, Homo sapien
gaaggtcccaactggctcctcgcat

SEQ ID NO: 5383366 - DNA, 25 bp, Homo sapien
ggtcccaactggctcctcgcattga

SEQ ID NO: 5383367 - DNA, 25 bp, Homo sapien
aagaggaaggtcccaactggctcct

SEQ ID NO: 5383368 - DNA, 25 bp, Homo sapien
caaagaggaaggtcccaactggctc

SEQ ID NO: 5383369 - DNA, 25 bp, Homo sapien
agcctctgccccggagaaagccagt

SEQ ID NO: 5383370 - DNA, 25 bp, Homo sapien
gcagcctctgccccggagaaagcca

SEQ ID NO: 5383371 - DNA, 25 bp, Homo sapien
ctctgccccggagaaagccagtgca

SEQ ID NO: 5383372 - DNA, 25 bp, Homo sapien
gcctctgccccggagaaagccagtg

SEQ ID NO: 5383373 - DNA, 25 bp, Homo sapien
cttctctctgtgtttggtgtgcaga

SEQ ID NO: 5383374 - DNA, 25 bp, Homo sapien
cttctcttctctctgtgtttggtgt

SEQ ID NO: 5383375 - DNA, 25 bp, Homo sapien
tctcttctctctgtgtttggtgtgc

SEQ ID NO: 5383376 - DNA, 25 bp, Homo sapien
tctctctgtgtttggtgtgcagaac

SEQ ID NO: 5383377 - DNA, 25 bp, Homo sapien
tctgggcaagcagagacgtttctgt

SEQ ID NO: 5383378 - DNA, 25 bp, Homo sapien
gcttccttgaagctgagtgcagctg

SEQ ID NO: 5383379 - DNA, 25 bp, Homo sapien
gaaagctgtaaccacttcccataga

SEQ ID NO: 5383380 - DNA, 25 bp, Homo sapien
cgcctgcatgtcccaacccattcat

SEQ ID NO: 5383381 - DNA, 25 bp, Homo sapien
tgggacggtgtagcctgctcagcaa

SEQ ID NO: 5383382 - DNA, 25 bp, Homo sapien
ctccatgactgaagggaccctctag

SEQ ID NO: 5383383 - DNA, 25 bp, Homo sapien
ggcactgcacaaggacctcaagggc

SEQ ID NO: 5383384 - DNA, 25 bp, Homo sapien
cttcatgaaaagagtgtcgggagcc

SEQ ID NO: 5383385 - DNA, 25 bp, Homo sapien
agaaatactcggcagccattggcct

SEQ ID NO: 5383386 - DNA, 25 bp, Homo sapien
gcaatgtagaaatactcggcagcca

SEQ ID NO: 5383387 - DNA, 25 bp, Homo sapien
tggcctcagtatgaagttcttgcca

SEQ ID NO: 5383388 - DNA, 25 bp, Homo sapien
agccattggcctcagtatgaagttc

SEQ ID NO: 5383389 - DNA, 25 bp, Homo sapien
acggacttctggctcctgctgctca

SEQ ID NO: 5383390 - DNA, 25 bp, Homo sapien
cggacttctggctcctgctgctcac

SEQ ID NO: 5383391 - DNA, 25 bp, Homo sapien
tttagaaagtggcttagctctgggg

SEQ ID NO: 5383392 - DNA, 25 bp, Homo sapien
gatagatgagcagcaggctgatgtc

SEQ ID NO: 5383393 - DNA, 25 bp, Homo sapien
tctggcatgtagttaaagggctgat

SEQ ID NO: 5383394 - DNA, 25 bp, Homo sapien
cagcaggctgatgtctggcatgtag

SEQ ID NO: 5383395 - DNA, 25 bp, Homo sapien
ttagatgccacggagactgctcagc

SEQ ID NO: 5383396 - DNA, 25 bp, Homo sapien
gcctctggagactgatcggcctcta

SEQ ID NO: 5383397 - DNA, 25 bp, Homo sapien
tctagagactgatcgtccacacagt

SEQ ID NO: 5383398 - DNA, 25 bp, Homo sapien
ccacggagactgctcagcctctgga

SEQ ID NO: 5383399 - DNA, 25 bp, Homo sapien
ggctgtttgacgttgatcttggcta

SEQ ID NO: 5383400 - DNA, 25 bp, Homo sapien
aaatcaaacccttatcctacacaat

SEQ ID NO: 5383401 - DNA, 25 bp, Homo sapien
agtggtgctacatcaactaaacagc

SEQ ID NO: 5383402 - DNA, 25 bp, Homo sapien
tacagataagttaactcagaatgga

SEQ ID NO: 5383403 - DNA, 25 bp, Homo sapien
aaagatcatttgcagaccattcaca

SEQ ID NO: 5383404 - DNA, 25 bp, Homo sapien
ttctttgattcacttgtccagattt

SEQ ID NO: 5383405 - DNA, 25 bp, Homo sapien
tttcccataggatgcatcctggttc

SEQ ID NO: 5383406 - DNA, 25 bp, Homo sapien
ataggatgcatcctggttcattccc

SEQ ID NO: 5383407 - DNA, 25 bp, Homo sapien
tctcaccaactcgtgaatttgggcc

SEQ ID NO: 5383408 - DNA, 25 bp, Homo sapien
aatttgggccaagggtgggctctca

SEQ ID NO: 5383409 - DNA, 25 bp, Homo sapien
gctggaagctgattgggcctctcac

SEQ ID NO: 5383410 - DNA, 25 bp, Homo sapien
ggctcccagctcagcgcttcgggct

SEQ ID NO: 5383411 - DNA, 25 bp, Homo sapien
agcagcgggaataggaggataggca

SEQ ID NO: 5383412 - DNA, 25 bp, Homo sapien
tggtgcattgtgctctgaggagcag

SEQ ID NO: 5383413 - DNA, 25 bp, Homo sapien
aaaggaagtggtgcattgtgctctg

SEQ ID NO: 5383414 - DNA, 25 bp, Homo sapien
cagcgggaataggaggataggcagt

SEQ ID NO: 5383415 - DNA, 25 bp, Homo sapien
tgtcagggcaggaccgaagaggagc

SEQ ID NO: 5383416 - DNA, 25 bp, Homo sapien
gtcagggcaggaccgaagaggagcc

SEQ ID NO: 5383417 - DNA, 25 bp, Homo sapien
aaggaccagctgttggcatagggag

SEQ ID NO: 5383418 - DNA, 25 bp, Homo sapien
gctgttggcatagggaggtgggcag

SEQ ID NO: 5383419 - DNA, 25 bp, Homo sapien
ggaccagctgttggcatagggaggt

SEQ ID NO: 5383420 - DNA, 25 bp, Homo sapien
ctgggccacactgctgcttgcaggg

SEQ ID NO: 5383421 - DNA, 25 bp, Homo sapien
ccttgtggcagccacgcctaatggc

SEQ ID NO: 5383422 - DNA, 25 bp, Homo sapien
cttgtggcagccacgcctaatggcc

SEQ ID NO: 5383423 - DNA, 25 bp, Homo sapien
ttgtaagtgcaggcctttcctaacc

SEQ ID NO: 5383424 - DNA, 25 bp, Homo sapien
agtgcaggcctttcctaaccaggtc

SEQ ID NO: 5383425 - DNA, 25 bp, Homo sapien
tgtggacaggacaccgacattagcg

SEQ ID NO: 5383426 - DNA, 25 bp, Homo sapien
ggtgttcctgaggactccaccgggc

SEQ ID NO: 5383427 - DNA, 25 bp, Homo sapien
caacgttgctgtcgccgtgtggaca

SEQ ID NO: 5383428 - DNA, 25 bp, Homo sapien
aaagccgacagcgtcaggacggatc

SEQ ID NO: 5383429 - DNA, 25 bp, Homo sapien
tacggaggacgcatggatgccccat

SEQ ID NO: 5383430 - DNA, 25 bp, Homo sapien
cccggtaggagctccctggaagagt

SEQ ID NO: 5383431 - DNA, 25 bp, Homo sapien
gtaactctgcataaaagttgcaggg

SEQ ID NO: 5383432 - DNA, 25 bp, Homo sapien
tgccttgtgtcgattatgcatgacc

SEQ ID NO: 5383433 - DNA, 25 bp, Homo sapien
tggaaggcaggcatggtgagtgcaa

SEQ ID NO: 5383434 - DNA, 25 bp, Homo sapien
caggcatggtgagtgcaagggcgcc

SEQ ID NO: 5383435 - DNA, 25 bp, Homo sapien
gggcgccctgagagtgtgccaccat

SEQ ID NO: 5383436 - DNA, 25 bp, Homo sapien
tggtgagtgcaagggcgccctgaga

SEQ ID NO: 5383437 - DNA, 25 bp, Homo sapien
tcctggggcgacaaacatgctcagt

SEQ ID NO: 5383438 - DNA, 25 bp, Homo sapien
tgtctgagttgtcctcactcctggg

SEQ ID NO: 5383439 - DNA, 25 bp, Homo sapien
ctcagtgctggtgagtgcgcagaaa

SEQ ID NO: 5383440 - DNA, 25 bp, Homo sapien
gaaagagcgtgccatggttctagct

SEQ ID NO: 5383441 - DNA, 25 bp, Homo sapien
accacagtcggtgatgccggcacca

SEQ ID NO: 5383442 - DNA, 25 bp, Homo sapien
ccaccacagtcggtgatgccggcac

SEQ ID NO: 5383443 - DNA, 25 bp, Homo sapien
acagtcggtgatgccggcaccactg

SEQ ID NO: 5383444 - DNA, 25 bp, Homo sapien
tgaaacacctcccatccattcccac

SEQ ID NO: 5383445 - DNA, 25 bp, Homo sapien
cccagctcctgcgagttccctgtcc

SEQ ID NO: 5383446 - DNA, 25 bp, Homo sapien
gctcctgcgagttccctgtcccgta

SEQ ID NO: 5383447 - DNA, 25 bp, Homo sapien
tgcgagttccctgtcccgtacctcc

SEQ ID NO: 5383448 - DNA, 25 bp, Homo sapien
cctgcgagttccctgtcccgtacct

SEQ ID NO: 5383449 - DNA, 25 bp, Homo sapien
gggcctgtgccaggagggctcagtg

SEQ ID NO: 5383450 - DNA, 25 bp, Homo sapien
gccaggagggctcagtgaatgtttt

SEQ ID NO: 5383451 - DNA, 25 bp, Homo sapien
ctgtgtcgggggcctgtgccaggag

SEQ ID NO: 5383452 - DNA, 25 bp, Homo sapien
cctgtgccaggagggctcagtgaat

SEQ ID NO: 5383453 - DNA, 25 bp, Homo sapien
tgtccttgcggccaatctgggtcct

SEQ ID NO: 5383454 - DNA, 25 bp, Homo sapien
ccttgcggccaatctgggtcctggc

SEQ ID NO: 5383455 - DNA, 25 bp, Homo sapien
ttgcggccaatctgggtcctggcct

SEQ ID NO: 5383456 - DNA, 25 bp, Homo sapien
tccttgcggccaatctgggtcctgg

SEQ ID NO: 5383457 - DNA, 25 bp, Homo sapien
gggaccctggcgctcttgataaatc

SEQ ID NO: 5383458 - DNA, 25 bp, Homo sapien
gatgagtctggatgtctgggcctta

SEQ ID NO: 5383459 - DNA, 25 bp, Homo sapien
cagggctcctgcttgactgtggtga

SEQ ID NO: 5383460 - DNA, 25 bp, Homo sapien
catgaaaccatggtggatcggtgcc

SEQ ID NO: 5383461 - DNA, 25 bp, Homo sapien
acacacagtaaaactgatgaggcca

SEQ ID NO: 5383462 - DNA, 25 bp, Homo sapien
tgaacacacagtaaaactgatgagg

SEQ ID NO: 5383463 - DNA, 25 bp, Homo sapien
tttgtgaacacacagtaaaactgat

SEQ ID NO: 5383464 - DNA, 25 bp, Homo sapien
ctttgtgaacacacagtaaaactga

SEQ ID NO: 5383465 - DNA, 25 bp, Homo sapien
gagccctgctgatcgctgtctgtgg

SEQ ID NO: 5383466 - DNA, 25 bp, Homo sapien
tcgtctttggcactttccaatcaca

SEQ ID NO: 5383467 - DNA, 25 bp, Homo sapien
tgctgtggtgctagaatctgccttc

SEQ ID NO: 5383468 - DNA, 25 bp, Homo sapien
tcatcttcctcgctcgtctttggca

SEQ ID NO: 5383469 - DNA, 25 bp, Homo sapien
gagtccctttgcagatgtacacact

SEQ ID NO: 5383470 - DNA, 25 bp, Homo sapien
gcacaggctgcgaccctctgaggca

SEQ ID NO: 5383471 - DNA, 25 bp, Homo sapien
ttgcagatgtacacactccctgcct

SEQ ID NO: 5383472 - DNA, 25 bp, Homo sapien
ggaaggcacaggctgcgaccctctg

SEQ ID NO: 5383473 - DNA, 25 bp, Homo sapien
gctgttggtgctctgtggaatctcc

SEQ ID NO: 5383474 - DNA, 25 bp, Homo sapien
ctcagtagagggcaacttgctgctg

SEQ ID NO: 5383475 - DNA, 25 bp, Homo sapien
ctgctgctctcagtagagggcaact

SEQ ID NO: 5383476 - DNA, 25 bp, Homo sapien
agggaacctgccacccaacatcttt

SEQ ID NO: 5383477 - DNA, 25 bp, Homo sapien
cgggcacacgctggtttccccttgg

SEQ ID NO: 5383478 - DNA, 25 bp, Homo sapien
gtccacactgaaacgggcacacgct

SEQ ID NO: 5383479 - DNA, 25 bp, Homo sapien
cagggcagtgcacccctcccaggag

SEQ ID NO: 5383480 - DNA, 25 bp, Homo sapien
tcttctgtcctctcgtccacactga

SEQ ID NO: 5383481 - DNA, 25 bp, Homo sapien
cacagtccctcgcaggcaccgtggg

SEQ ID NO: 5383482 - DNA, 25 bp, Homo sapien
gggggttggcgggtgaaactcagca

SEQ ID NO: 5383483 - DNA, 25 bp, Homo sapien
cagtccctcgcaggcaccgtgggtg

SEQ ID NO: 5383484 - DNA, 25 bp, Homo sapien
ggacacagtccctcgcaggcaccgt

SEQ ID NO: 5383485 - DNA, 25 bp, Homo sapien
gcagtagtcccccacaaagtaggga

SEQ ID NO: 5383486 - DNA, 25 bp, Homo sapien
ccccacaaagtagggagcagatccc

SEQ ID NO: 5383487 - DNA, 25 bp, Homo sapien
aactgtggagagatctccacccgca

SEQ ID NO: 5383488 - DNA, 25 bp, Homo sapien
tagggagcagatcccagtgggaact

SEQ ID NO: 5383489 - DNA, 25 bp, Homo sapien
gaaatcctgggcatcaatgcaaggg

SEQ ID NO: 5383490 - DNA, 25 bp, Homo sapien
tgcagctggcccactagattatggc

SEQ ID NO: 5383491 - DNA, 25 bp, Homo sapien
ggatcaggtaggacactgaagcccg

SEQ ID NO: 5383492 - DNA, 25 bp, Homo sapien
cagtagttgtgcctcaagatgtgta

SEQ ID NO: 5383493 - DNA, 25 bp, Homo sapien
tggctatgccacttctgcaagcaca

SEQ ID NO: 5383494 - DNA, 25 bp, Homo sapien
tctgcaagcacagtgggtttttggc

SEQ ID NO: 5383495 - DNA, 25 bp, Homo sapien
ctggggaaccgtattcccagctcca

SEQ ID NO: 5383496 - DNA, 25 bp, Homo sapien
tccagctggctatgccacttctgca

SEQ ID NO: 5383497 - DNA, 25 bp, Homo sapien
gatgtccaggaagcctatctggtcc

SEQ ID NO: 5383498 - DNA, 25 bp, Homo sapien
ggcctgggagtgatcctttcccgag

SEQ ID NO: 5383499 - DNA, 25 bp, Homo sapien
ggaagcctatctggtcctcacggca

SEQ ID NO: 5383500 - DNA, 25 bp, Homo sapien
tggcctgggagtgatcctttcccga

SEQ ID NO: 5383501 - DNA, 25 bp, Homo sapien
ctgagaaggaggcatgaccagtgtg

SEQ ID NO: 5383502 - DNA, 25 bp, Homo sapien
gaaggaggcatgaccagtgtggggc

SEQ ID NO: 5383503 - DNA, 25 bp, Homo sapien
ggaggcatgaccagtgtggggccca

SEQ ID NO: 5383504 - DNA, 25 bp, Homo sapien
gaggcatgaccagtgtggggcccat

SEQ ID NO: 5383505 - DNA, 25 bp, Homo sapien
tcagcgcagacccaaggacacagtc

SEQ ID NO: 5383506 - DNA, 25 bp, Homo sapien
ccacatgtcaggtttacaccaacca

SEQ ID NO: 5383507 - DNA, 25 bp, Homo sapien
tgctggtaggctttgtctcagcgca

SEQ ID NO: 5383508 - DNA, 25 bp, Homo sapien
cagtcggactgtcctcatggcatct

SEQ ID NO: 5383509 - DNA, 25 bp, Homo sapien
ggtgttcgatcttcatccaaagagc

SEQ ID NO: 5383510 - DNA, 25 bp, Homo sapien
tggaaccaaagcaaaggtgttcgat

SEQ ID NO: 5383511 - DNA, 25 bp, Homo sapien
ttagacgggcagtacatgagcaggt

SEQ ID NO: 5383512 - DNA, 25 bp, Homo sapien
gcagcaggaaaccacggtgcgttta

SEQ ID NO: 5383513 - DNA, 25 bp, Homo sapien
cttggccttagtagaaattaatggg

SEQ ID NO: 5383514 - DNA, 25 bp, Homo sapien
cgtggacttggccttagtagaaatt

SEQ ID NO: 5383515 - DNA, 25 bp, Homo sapien
tcagaacctcgtggacttggcctta

SEQ ID NO: 5383516 - DNA, 25 bp, Homo sapien
gaacctcgtggacttggccttagta

SEQ ID NO: 5383517 - DNA, 25 bp, Homo sapien
tcattaagctgatagaggatacgct

SEQ ID NO: 5383518 - DNA, 25 bp, Homo sapien
tagaggatacgctggtccagacgct

SEQ ID NO: 5383519 - DNA, 25 bp, Homo sapien
tgggaatcattaagctgatagagga

SEQ ID NO: 5383520 - DNA, 25 bp, Homo sapien
taagctgatagaggatacgctggtc

SEQ ID NO: 5383521 - DNA, 25 bp, Homo sapien
ggcacagtggatgcctagatctcca

SEQ ID NO: 5383522 - DNA, 25 bp, Homo sapien
gctgctgcttggctctgtccttaca

SEQ ID NO: 5383523 - DNA, 25 bp, Homo sapien
ggctctgtccttacagggcaggaag

SEQ ID NO: 5383524 - DNA, 25 bp, Homo sapien
cccttcttcaagctagagccaggag

SEQ ID NO: 5383525 - DNA, 25 bp, Homo sapien
gtccagcaggacatgagatctgggc

SEQ ID NO: 5383526 - DNA, 25 bp, Homo sapien
tgtccagcaggacatgagatctggg

SEQ ID NO: 5383527 - DNA, 25 bp, Homo sapien
ctgtccagcaggacatgagatctgg

SEQ ID NO: 5383528 - DNA, 25 bp, Homo sapien
tgtctgacatctcaagactgccttc

SEQ ID NO: 5383529 - DNA, 25 bp, Homo sapien
ctccttggccttgataatttccttg

SEQ ID NO: 5383530 - DNA, 25 bp, Homo sapien
ttggccttgataatttccttgtctg

SEQ ID NO: 5383531 - DNA, 25 bp, Homo sapien
gtctgacatctcaagactgccttct

SEQ ID NO: 5383532 - DNA, 25 bp, Homo sapien
ccggtggcatgagcccatgtgggca

SEQ ID NO: 5383533 - DNA, 25 bp, Homo sapien
tggcatgagcccatgtgggcacctg

SEQ ID NO: 5383534 - DNA, 25 bp, Homo sapien
tcactcagctgccggtggcatgagc

SEQ ID NO: 5383535 - DNA, 25 bp, Homo sapien
agctgccggtggcatgagcccatgt

SEQ ID NO: 5383536 - DNA, 25 bp, Homo sapien
aaaatgatgaatcttccagaaatcc

SEQ ID NO: 5383537 - DNA, 25 bp, Homo sapien
tccagaaatcctcgagacttgttca

SEQ ID NO: 5383538 - DNA, 25 bp, Homo sapien
tcaggacaggcagtagtaggaaaat

SEQ ID NO: 5383539 - DNA, 25 bp, Homo sapien
caggacaggcagtagtaggaaaatg

SEQ ID NO: 5383540 - DNA, 25 bp, Homo sapien
tggagctcctcagtactccccatgg

SEQ ID NO: 5383541 - DNA, 25 bp, Homo sapien
tgtaggtgttgtgcataaatccaaa

SEQ ID NO: 5383542 - DNA, 25 bp, Homo sapien
gctgaagaaaagaatctaggcttct

SEQ ID NO: 5383543 - DNA, 25 bp, Homo sapien
tctaggcttctcagcaggatgcaca

SEQ ID NO: 5383544 - DNA, 25 bp, Homo sapien
gagctcgtggtgctctgggcacaac

SEQ ID NO: 5383545 - DNA, 25 bp, Homo sapien
tacaggtgacatccgctggaggagc

SEQ ID NO: 5383546 - DNA, 25 bp, Homo sapien
caggcgcacaggaactacaggtgac

SEQ ID NO: 5383547 - DNA, 25 bp, Homo sapien
gcacaacctcgcctttggtcgtggt

SEQ ID NO: 5383548 - DNA, 25 bp, Homo sapien
gctttctctgcacccggtgacgcca

SEQ ID NO: 5383549 - DNA, 25 bp, Homo sapien
gccaggcgacttttctgcgtggctg

SEQ ID NO: 5383550 - DNA, 25 bp, Homo sapien
gagctcgcccagaacccggactgtg

SEQ ID NO: 5383551 - DNA, 25 bp, Homo sapien
agaacccggactgtgcagcccaggc

SEQ ID NO: 5383552 - DNA, 25 bp, Homo sapien
caggatctgcaagtacacatatgtt

SEQ ID NO: 5383553 - DNA, 25 bp, Homo sapien
gtcaggatctgcaagtacacatatg

SEQ ID NO: 5383554 - DNA, 25 bp, Homo sapien
gatgtcaggatctgcaagtacacat

SEQ ID NO: 5383555 - DNA, 25 bp, Homo sapien
tttgatgtcaggatctgcaagtaca

SEQ ID NO: 5383556 - DNA, 25 bp, Homo sapien
ctgcacccattggcataatgggtgg

SEQ ID NO: 5383557 - DNA, 25 bp, Homo sapien
tctgcacccattggcataatgggtg

SEQ ID NO: 5383558 - DNA, 25 bp, Homo sapien
ctcatctgcacccattggcataatg

SEQ ID NO: 5383559 - DNA, 25 bp, Homo sapien
catctgcacccattggcataatggg

SEQ ID NO: 5383560 - DNA, 25 bp, Homo sapien
ctatattaggtactctgctttgtgc

SEQ ID NO: 5383561 - DNA, 25 bp, Homo sapien
tatattaggtactctgctttgtgct

SEQ ID NO: 5383562 - DNA, 25 bp, Homo sapien
ttgcgtggtaggatgggcatgtctg

SEQ ID NO: 5383563 - DNA, 25 bp, Homo sapien
tgcgtggtaggatgggcatgtctgg

SEQ ID NO: 5383564 - DNA, 25 bp, Homo sapien
cttgcgtggtaggatgggcatgtct

SEQ ID NO: 5383565 - DNA, 25 bp, Homo sapien
cgtggtaggatgggcatgtctgggg

SEQ ID NO: 5383566 - DNA, 25 bp, Homo sapien
ctggatgatgccctgcagcccgtca

SEQ ID NO: 5383567 - DNA, 25 bp, Homo sapien
gctgctgcatctggatgatgccctg

SEQ ID NO: 5383568 - DNA, 25 bp, Homo sapien
atgatgccctgcagcccgtcatgca

SEQ ID NO: 5383569 - DNA, 25 bp, Homo sapien
gccctgcagcccgtcatgcacacac

SEQ ID NO: 5383570 - DNA, 25 bp, Homo sapien
tgtctgcaggaccacgttctgggga

SEQ ID NO: 5383571 - DNA, 25 bp, Homo sapien
gatgcagtcattatccttgtcttca

SEQ ID NO: 5383572 - DNA, 25 bp, Homo sapien
gcagtcattatccttgtcttcagaa

SEQ ID NO: 5383573 - DNA, 25 bp, Homo sapien
gtctgcaggaccacgttctggggag

SEQ ID NO: 5383574 - DNA, 25 bp, Homo sapien
gttgcatccccaagataaaaggcac

SEQ ID NO: 5383575 - DNA, 25 bp, Homo sapien
tgctctctgttgcatccccaagata

SEQ ID NO: 5383576 - DNA, 25 bp, Homo sapien
cactgtataggatttgctgtcagag

SEQ ID NO: 5383577 - DNA, 25 bp, Homo sapien
gctgtcagagctatctaatgaactg

SEQ ID NO: 5383578 - DNA, 25 bp, Homo sapien
ggactcgcagcggttctttccttta

SEQ ID NO: 5383579 - DNA, 25 bp, Homo sapien
gactcgcagcggttctttcctttac

SEQ ID NO: 5383580 - DNA, 25 bp, Homo sapien
aggactcgcagcggttctttccttt

SEQ ID NO: 5383581 - DNA, 25 bp, Homo sapien
ccttaataggggcatggtctggcag

SEQ ID NO: 5383582 - DNA, 25 bp, Homo sapien
cttaataggggcatggtctggcagc

SEQ ID NO: 5383583 - DNA, 25 bp, Homo sapien
aaaggtttctcagtaggtgtggcca

SEQ ID NO: 5383584 - DNA, 25 bp, Homo sapien
aaggtttctcagtaggtgtggccag

SEQ ID NO: 5383585 - DNA, 25 bp, Homo sapien
caaaggtttctcagtaggtgtggcc

SEQ ID NO: 5383586 - DNA, 25 bp, Homo sapien
ccctgagccgtcgtttgtgactctc

SEQ ID NO: 5383587 - DNA, 25 bp, Homo sapien
tgactctcttgctgcactgcgccct

SEQ ID NO: 5383588 - DNA, 25 bp, Homo sapien
gactctcttgctgcactgcgccctc

SEQ ID NO: 5383589 - DNA, 25 bp, Homo sapien
tcaccctgagccgtcgtttgtgact

SEQ ID NO: 5383590 - DNA, 25 bp, Homo sapien
taattaagaggcaaccccagaggct

SEQ ID NO: 5383591 - DNA, 25 bp, Homo sapien
tccatcttctagaataagccaccag

SEQ ID NO: 5383592 - DNA, 25 bp, Homo sapien
ttaattaagaggcaaccccagaggc

SEQ ID NO: 5383593 - DNA, 25 bp, Homo sapien
cctcatctaaagtgtgtttagctgc

SEQ ID NO: 5383594 - DNA, 25 bp, Homo sapien
taaagtgtgtttagctgcacaggtc

SEQ ID NO: 5383595 - DNA, 25 bp, Homo sapien
cctgggagagtcctgcaacagagag

SEQ ID NO: 5383596 - DNA, 25 bp, Homo sapien
gcctgggagagtcctgcaacagaga

SEQ ID NO: 5383597 - DNA, 25 bp, Homo sapien
tcaggactgcctcgaaggccacatg

SEQ ID NO: 5383598 - DNA, 25 bp, Homo sapien
tacgattgatggttatgaccattat

SEQ ID NO: 5383599 - DNA, 25 bp, Homo sapien
actgatgatacgattgatggttatg

SEQ ID NO: 5383600 - DNA, 25 bp, Homo sapien
aaggccacatgctggactgatgata

SEQ ID NO: 5383601 - DNA, 25 bp, Homo sapien
ttgtggtggatctgcttgcttgtct

SEQ ID NO: 5383602 - DNA, 25 bp, Homo sapien
cttgtggtggatctgcttgcttgtc

SEQ ID NO: 5383603 - DNA, 25 bp, Homo sapien
atccccgaagtttccttcactcgtg

SEQ ID NO: 5383604 - DNA, 25 bp, Homo sapien
gaagtttccttcactcgtgtgtcca

SEQ ID NO: 5383605 - DNA, 25 bp, Homo sapien
tggactccgaagctgcctgaagggt

SEQ ID NO: 5383606 - DNA, 25 bp, Homo sapien
ctgtgcaggtggactccgaagctgc

SEQ ID NO: 5383607 - DNA, 25 bp, Homo sapien
gaggccccaacacgaagtctctgaa

SEQ ID NO: 5383608 - DNA, 25 bp, Homo sapien
tggtctttgcactgaggccgcttac

SEQ ID NO: 5383609 - DNA, 25 bp, Homo sapien
gaagacccaactggtggtctttgca

SEQ ID NO: 5383610 - DNA, 25 bp, Homo sapien
caaaggtcccagtgacatgtgtctt

SEQ ID NO: 5383611 - DNA, 25 bp, Homo sapien
cagtgttgtcatgcttctgttgaaa

SEQ ID NO: 5383612 - DNA, 25 bp, Homo sapien
cctggaagaacattgcaagtgggcc

SEQ ID NO: 5383613 - DNA, 25 bp, Homo sapien
gagctgaatgtaaggaatctcctca

SEQ ID NO: 5383614 - DNA, 25 bp, Homo sapien
cacagtgaagcaaaccctggaagaa

SEQ ID NO: 5383615 - DNA, 25 bp, Homo sapien
tgctctctacgcagctccctcagca

SEQ ID NO: 5383616 - DNA, 25 bp, Homo sapien
gctgactatctgcctgctctctacg

SEQ ID NO: 5383617 - DNA, 25 bp, Homo sapien
tgcctttgccatcagccccaccatg

SEQ ID NO: 5383618 - DNA, 25 bp, Homo sapien
gtctcagccccagaatgccccactc

SEQ ID NO: 5383619 - DNA, 25 bp, Homo sapien
gccaggcagaagacatgcgaatggg

SEQ ID NO: 5383620 - DNA, 25 bp, Homo sapien
gggatagagagtaactgggcgtgtt

SEQ ID NO: 5383621 - DNA, 25 bp, Homo sapien
agtgccagccagtgttgccaggcag

SEQ ID NO: 5383622 - DNA, 25 bp, Homo sapien
tagagagtaactgggcgtgttgatc

SEQ ID NO: 5383623 - DNA, 25 bp, Homo sapien
agcaaggtcagatgggagcccctct

SEQ ID NO: 5383624 - DNA, 25 bp, Homo sapien
aaaagcaaggtcagatgggagcccc

SEQ ID NO: 5383625 - DNA, 25 bp, Homo sapien
gggacactgggtagagtgtgaacaa

SEQ ID NO: 5383626 - DNA, 25 bp, Homo sapien
acactgggtagagtgtgaacaagga

SEQ ID NO: 5383627 - DNA, 25 bp, Homo sapien
tcatgtccaagtctgtttcagagac

SEQ ID NO: 5383628 - DNA, 25 bp, Homo sapien
tcagagaccatagactcatggccaa

SEQ ID NO: 5383629 - DNA, 25 bp, Homo sapien
catgtccaagtctgtttcagagacc

SEQ ID NO: 5383630 - DNA, 25 bp, Homo sapien
tgtccaagtctgtttcagagaccat

SEQ ID NO: 5383631 - DNA, 25 bp, Homo sapien
aataacccccactggcgagtgtagg

SEQ ID NO: 5383632 - DNA, 25 bp, Homo sapien
tttcagtcgtttcttggccctgaga

SEQ ID NO: 5383633 - DNA, 25 bp, Homo sapien
ttggccctgagaataacccccactg

SEQ ID NO: 5383634 - DNA, 25 bp, Homo sapien
tctgattttcagtcgtttcttggcc

SEQ ID NO: 5383635 - DNA, 25 bp, Homo sapien
tgcgtcctggctgatcactatgaag

SEQ ID NO: 5383636 - DNA, 25 bp, Homo sapien
acttgaggtaaagctatacccaggg

SEQ ID NO: 5383637 - DNA, 25 bp, Homo sapien
tgtgggctcattgcagacatccaag

SEQ ID NO: 5383638 - DNA, 25 bp, Homo sapien
gatagagctgatcagtgtgggctca

SEQ ID NO: 5383639 - DNA, 25 bp, Homo sapien
atggtgatccggtggcagcaggcct

SEQ ID NO: 5383640 - DNA, 25 bp, Homo sapien
gctagtgcctgagctgagtcagcat

SEQ ID NO: 5383641 - DNA, 25 bp, Homo sapien
ctgagctagtgcctgagctgagtca

SEQ ID NO: 5383642 - DNA, 25 bp, Homo sapien
ggtagtgatggtgatccggtggcag

SEQ ID NO: 5383643 - DNA, 25 bp, Homo sapien
taccgtgtctgtcttgatgagcgat

SEQ ID NO: 5383644 - DNA, 25 bp, Homo sapien
cctctggtggagagcttacaaatca

SEQ ID NO: 5383645 - DNA, 25 bp, Homo sapien
aaagaccggaatgtgtgctgagacc

SEQ ID NO: 5383646 - DNA, 25 bp, Homo sapien
tcataacaatggaggcaagcgacct

SEQ ID NO: 5383647 - DNA, 25 bp, Homo sapien
gggcataaagtgcttgattgctgca

SEQ ID NO: 5383648 - DNA, 25 bp, Homo sapien
ccttggtaggggcataaagtgcttg

SEQ ID NO: 5383649 - DNA, 25 bp, Homo sapien
tcatgaaggcgaggttgtggtgcct

SEQ ID NO: 5383650 - DNA, 25 bp, Homo sapien
tggatggtgttgcttgatgccccca

SEQ ID NO: 5383651 - DNA, 25 bp, Homo sapien
gtctgacagctttaatcctgtctgt

SEQ ID NO: 5383652 - DNA, 25 bp, Homo sapien
tgacttagctctcctgtctgacagc

SEQ ID NO: 5383653 - DNA, 25 bp, Homo sapien
gacagctttaatcctgtctgtatac

SEQ ID NO: 5383654 - DNA, 25 bp, Homo sapien
gacttagctctcctgtctgacagct

SEQ ID NO: 5383655 - DNA, 25 bp, Homo sapien
ggctcctgggacctctttcataaga

SEQ ID NO: 5383656 - DNA, 25 bp, Homo sapien
gagggctcacccacaggatttcatc

SEQ ID NO: 5383657 - DNA, 25 bp, Homo sapien
taagaacagtgccattctcgagggc

SEQ ID NO: 5383658 - DNA, 25 bp, Homo sapien
tttaatcttatggatgatcagcccc

SEQ ID NO: 5383659 - DNA, 25 bp, Homo sapien
gcagacgccagcaggatccagcagc

SEQ ID NO: 5383660 - DNA, 25 bp, Homo sapien
agcagacgccagcaggatccagcag

SEQ ID NO: 5383661 - DNA, 25 bp, Homo sapien
aagcagacgccagcaggatccagca

SEQ ID NO: 5383662 - DNA, 25 bp, Homo sapien
taattatatgctccctgctgaggac

SEQ ID NO: 5383663 - DNA, 25 bp, Homo sapien
taagagtgactggattcccacagga

SEQ ID NO: 5383664 - DNA, 25 bp, Homo sapien
tacaccctagtgatagaagagccgc

SEQ ID NO: 5383665 - DNA, 25 bp, Homo sapien
gagcccttgtgcctgtaaataccta

SEQ ID NO: 5383666 - DNA, 25 bp, Homo sapien
tctgagcttaagtagaactttatgg

SEQ ID NO: 5383667 - DNA, 25 bp, Homo sapien
tacagactctgagtgatttctgagc

SEQ ID NO: 5383668 - DNA, 25 bp, Homo sapien
cttaagtagaactttatgggccagg

SEQ ID NO: 5383669 - DNA, 25 bp, Homo sapien
gagtgatttctgagcttaagtagaa

SEQ ID NO: 5383670 - DNA, 25 bp, Homo sapien
ggtcctggcactctggtggaaactt

SEQ ID NO: 5383671 - DNA, 25 bp, Homo sapien
tgaagctgtgggaagtccttggtag

SEQ ID NO: 5383672 - DNA, 25 bp, Homo sapien
cactctggtggaaacttgtgctcca

SEQ ID NO: 5383673 - DNA, 25 bp, Homo sapien
ttggtagtggccacaccggtggtcc

SEQ ID NO: 5383674 - DNA, 25 bp, Homo sapien
gaaaccatatttctccctgttccca

SEQ ID NO: 5383675 - DNA, 25 bp, Homo sapien
ccattctgtgctccccagagatgct

SEQ ID NO: 5383676 - DNA, 25 bp, Homo sapien
tggtggcatgaacaccttccaggcc

SEQ ID NO: 5383677 - DNA, 25 bp, Homo sapien
cttcaacccagaagacggtggtggc

SEQ ID NO: 5383678 - DNA, 25 bp, Homo sapien
gactggtgacttgtccctcattcca

SEQ ID NO: 5383679 - DNA, 25 bp, Homo sapien
ggagacgtggtcatgactggtgact

SEQ ID NO: 5383680 - DNA, 25 bp, Homo sapien
caagaaggagcaagtgaatggtgcc

SEQ ID NO: 5383681 - DNA, 25 bp, Homo sapien
tcattccaggtcttggaatccaaga

SEQ ID NO: 5383682 - DNA, 25 bp, Homo sapien
caaagcccatcacggcttagttcct

SEQ ID NO: 5383683 - DNA, 25 bp, Homo sapien
tcccaaagcccatcacggcttagtt

SEQ ID NO: 5383684 - DNA, 25 bp, Homo sapien
tcattcccaaagcccatcacggctt

SEQ ID NO: 5383685 - DNA, 25 bp, Homo sapien
agcccatcacggcttagttcctcat

SEQ ID NO: 5383686 - DNA, 25 bp, Homo sapien
catgccatgtcatgcttttcccatg

SEQ ID NO: 5383687 - DNA, 25 bp, Homo sapien
tgccatgtcatgcttttcccatgtg

SEQ ID NO: 5383688 - DNA, 25 bp, Homo sapien
gccatgtcatgcttttcccatgtga

SEQ ID NO: 5383689 - DNA, 25 bp, Homo sapien
catgtcatgcttttcccatgtgacc

SEQ ID NO: 5383690 - DNA, 25 bp, Homo sapien
atgccagagactcccttgtcccatt

SEQ ID NO: 5383691 - DNA, 25 bp, Homo sapien
aggatgccagagactcccttgtccc

SEQ ID NO: 5383692 - DNA, 25 bp, Homo sapien
gatgccagagactcccttgtcccat

SEQ ID NO: 5383693 - DNA, 25 bp, Homo sapien
caaggatgccagagactcccttgtc

SEQ ID NO: 5383694 - DNA, 25 bp, Homo sapien
aaagattaaactctggctccattcc

SEQ ID NO: 5383695 - DNA, 25 bp, Homo sapien
aagattaaactctggctccattcct

SEQ ID NO: 5383696 - DNA, 25 bp, Homo sapien
agattaaactctggctccattcctg

SEQ ID NO: 5383697 - DNA, 25 bp, Homo sapien
aataggtcacaatctcccctgtggg

SEQ ID NO: 5383698 - DNA, 25 bp, Homo sapien
gatgccggcacacagcagtgaatga

SEQ ID NO: 5383699 - DNA, 25 bp, Homo sapien
tatgtcacaattaccccagtgggct

SEQ ID NO: 5383700 - DNA, 25 bp, Homo sapien
gaggcatccacattcatggccccgt

SEQ ID NO: 5383701 - DNA, 25 bp, Homo sapien
ctcattataattcccacatgtgcag

SEQ ID NO: 5383702 - DNA, 25 bp, Homo sapien
tggttcttggtctggatttattttc

SEQ ID NO: 5383703 - DNA, 25 bp, Homo sapien
tataaagagaagtctccttgtcctt

SEQ ID NO: 5383704 - DNA, 25 bp, Homo sapien
tgtgcagatactctggctagttttc

SEQ ID NO: 5383705 - DNA, 25 bp, Homo sapien
taagatccccagctagcaatgtttc

SEQ ID NO: 5383706 - DNA, 25 bp, Homo sapien
ctcttctaatatccctcttcctgct

SEQ ID NO: 5383707 - DNA, 25 bp, Homo sapien
gatccccagctagcaatgtttcagt

SEQ ID NO: 5383708 - DNA, 25 bp, Homo sapien
gtttcagtccagttttcactttctc

SEQ ID NO: 5383709 - DNA, 25 bp, Homo sapien
ggtgggtgcttgaggactggtatca

SEQ ID NO: 5383710 - DNA, 25 bp, Homo sapien
cattggcagagaggccgatgtgcac

SEQ ID NO: 5383711 - DNA, 25 bp, Homo sapien
acagcattggcagagaggccgatgt

SEQ ID NO: 5383712 - DNA, 25 bp, Homo sapien
cagagaggccgatgtgcacaaggcc

SEQ ID NO: 5383713 - DNA, 25 bp, Homo sapien
ttgtctgcccgcacagtcttcagaa

SEQ ID NO: 5383714 - DNA, 25 bp, Homo sapien
gaaactgctgttctcaatgtcacca

SEQ ID NO: 5383715 - DNA, 25 bp, Homo sapien
tcacttgcaaagtcaacagactctt

SEQ ID NO: 5383716 - DNA, 25 bp, Homo sapien
caatcacatggacatcacaaatcac

SEQ ID NO: 5383717 - DNA, 25 bp, Homo sapien
ctaattagaacaatgtacagaagga

SEQ ID NO: 5383718 - DNA, 25 bp, Homo sapien
agaacaatgtacagaaggaaagaag

SEQ ID NO: 5383719 - DNA, 25 bp, Homo sapien
ttagaacaatgtacagaaggaaaga

SEQ ID NO: 5383720 - DNA, 25 bp, Homo sapien
aacaatgtacagaaggaaagaaggt

SEQ ID NO: 5383721 - DNA, 25 bp, Homo sapien
ggcagcagcctcttagtcttcctca

SEQ ID NO: 5383722 - DNA, 25 bp, Homo sapien
tgggatccccatcaacactttctgt

SEQ ID NO: 5383723 - DNA, 25 bp, Homo sapien
tctgttcacttgattccctgttgta

SEQ ID NO: 5383724 - DNA, 25 bp, Homo sapien
tttggcagaatgcagttccttgctg

SEQ ID NO: 5383725 - DNA, 25 bp, Homo sapien
aacacgcctgcagatcccatgaaga

SEQ ID NO: 5383726 - DNA, 25 bp, Homo sapien
gaggtgtacttgtgaggagtttcaa

SEQ ID NO: 5383727 - DNA, 25 bp, Homo sapien
gaggagtttcaacacgcctgcagat

SEQ ID NO: 5383728 - DNA, 25 bp, Homo sapien
tacttgtgaggagtttcaacacgcc

SEQ ID NO: 5383729 - DNA, 25 bp, Homo sapien
taagcccctggtgcacatcaggcac

SEQ ID NO: 5383730 - DNA, 25 bp, Homo sapien
ctaagcccctggtgcacatcaggca

SEQ ID NO: 5383731 - DNA, 25 bp, Homo sapien
tgagcagccctgaaggaagcctcat

SEQ ID NO: 5383732 - DNA, 25 bp, Homo sapien
cattgagcagccctgaaggaagcct

SEQ ID NO: 5383733 - DNA, 25 bp, Homo sapien
ggagtcacgctgttcagcccactca

SEQ ID NO: 5383734 - DNA, 25 bp, Homo sapien
gcccactcaaacaaggcttgcgcct

SEQ ID NO: 5383735 - DNA, 25 bp, Homo sapien
gagccccaaggagtcacgctgttca

SEQ ID NO: 5383736 - DNA, 25 bp, Homo sapien
caaacaaggcttgcgcctgctccat

SEQ ID NO: 5383737 - DNA, 25 bp, Homo sapien
ctttccattgcttgttctggtccat

SEQ ID NO: 5383738 - DNA, 25 bp, Homo sapien
caggtgccacgcagatatctggccc

SEQ ID NO: 5383739 - DNA, 25 bp, Homo sapien
ggtgtgccagtgataaggtcagagc

SEQ ID NO: 5383740 - DNA, 25 bp, Homo sapien
ggtcagagctggctacaggtgccac

SEQ ID NO: 5383741 - DNA, 25 bp, Homo sapien
gctggctacaggtgccacgcagata

SEQ ID NO: 5383742 - DNA, 25 bp, Homo sapien
cagggtaactgggatcttgggccgg

SEQ ID NO: 5383743 - DNA, 25 bp, Homo sapien
tgacgggaatggtggaagtacttac

SEQ ID NO: 5383744 - DNA, 25 bp, Homo sapien
cactgacgggaatggtggaagtact

SEQ ID NO: 5383745 - DNA, 25 bp, Homo sapien
tcactgacgggaatggtggaagtac

SEQ ID NO: 5383746 - DNA, 25 bp, Homo sapien
tgtccagcaggggtgggtgctccaa

SEQ ID NO: 5383747 - DNA, 25 bp, Homo sapien
tcagagttccaaggtggccccccca

SEQ ID NO: 5383748 - DNA, 25 bp, Homo sapien
ccccaggaagggtcttgtccagcag

SEQ ID NO: 5383749 - DNA, 25 bp, Homo sapien
cccccaggaagggtcttgtccagca

SEQ ID NO: 5383750 - DNA, 25 bp, Homo sapien
ggtggcaggaatatgctccatttca

SEQ ID NO: 5383751 - DNA, 25 bp, Homo sapien
ggcaggaatatgctccatttcaata

SEQ ID NO: 5383752 - DNA, 25 bp, Homo sapien
ggaatatgctccatttcaataaggc

SEQ ID NO: 5383753 - DNA, 25 bp, Homo sapien
ctatgggtggcaggaatatgctcca

SEQ ID NO: 5383754 - DNA, 25 bp, Homo sapien
ggaaagttcctcaaataggcagtga

SEQ ID NO: 5383755 - DNA, 25 bp, Homo sapien
gactgaaggtcagtgctgacttaca

SEQ ID NO: 5383756 - DNA, 25 bp, Homo sapien
cagtgctgacttacagaaggaagag

SEQ ID NO: 5383757 - DNA, 25 bp, Homo sapien
cagcatgtgctaagtgtatgtcgca

SEQ ID NO: 5383758 - DNA, 25 bp, Homo sapien
gtggatggcccggtgcccacttacc

SEQ ID NO: 5383759 - DNA, 25 bp, Homo sapien
tcaccaggaaagcagtgatgacagc

SEQ ID NO: 5383760 - DNA, 25 bp, Homo sapien
ccttggagtaaagggtctgcatatc

SEQ ID NO: 5383761 - DNA, 25 bp, Homo sapien
agtgacctgcagagtgtactgcatc

SEQ ID NO: 5383762 - DNA, 25 bp, Homo sapien
catctgacagttgccattcccggca

SEQ ID NO: 5383763 - DNA, 25 bp, Homo sapien
tctgacagttgccattcccggcacc

SEQ ID NO: 5383764 - DNA, 25 bp, Homo sapien
tgacagttgccattcccggcacctg

SEQ ID NO: 5383765 - DNA, 25 bp, Homo sapien
acagttgccattcccggcacctggt

SEQ ID NO: 5383766 - DNA, 25 bp, Homo sapien
caatagtaaatacggctgaggctgt

SEQ ID NO: 5383767 - DNA, 25 bp, Homo sapien
ttcaaacaaccctgctaagaggatg

SEQ ID NO: 5383768 - DNA, 25 bp, Homo sapien
gccacatatgtagcaaaggagtcag

SEQ ID NO: 5383769 - DNA, 25 bp, Homo sapien
tgagcacctgaaacgatgtccagta

SEQ ID NO: 5383770 - DNA, 25 bp, Homo sapien
tgctgaccatggttccgggcatcag

SEQ ID NO: 5383771 - DNA, 25 bp, Homo sapien
agacatcacaactacttccttctgg

SEQ ID NO: 5383772 - DNA, 25 bp, Homo sapien
gttccgggcatcagacatcacaact

SEQ ID NO: 5383773 - DNA, 25 bp, Homo sapien
cagtgccccttgctgaccatggttc

SEQ ID NO: 5383774 - DNA, 25 bp, Homo sapien
tgctcgcgtgcactcaaagcagact

SEQ ID NO: 5383775 - DNA, 25 bp, Homo sapien
gcgtgcactcaaagcagactctctt

SEQ ID NO: 5383776 - DNA, 25 bp, Homo sapien
actcaaagcagactctcttctctgg

SEQ ID NO: 5383777 - DNA, 25 bp, Homo sapien
tcatgctcgcgtgcactcaaagcag

SEQ ID NO: 5383778 - DNA, 25 bp, Homo sapien
tcagtgggcgtatttcacactttcc

SEQ ID NO: 5383779 - DNA, 25 bp, Homo sapien
acactttcctgcttggtctttagaa

SEQ ID NO: 5383780 - DNA, 25 bp, Homo sapien
actacgatcgataaaaggcttttgc

SEQ ID NO: 5383781 - DNA, 25 bp, Homo sapien
tgcatacctctctagtgacttcaca

SEQ ID NO: 5383782 - DNA, 25 bp, Homo sapien
tccctcacattcaggccatgcgagg

SEQ ID NO: 5383783 - DNA, 25 bp, Homo sapien
tgcgtgcgtcaccagtgcatgctgg

SEQ ID NO: 5383784 - DNA, 25 bp, Homo sapien
gcgaggttcattggtgctttggatt

SEQ ID NO: 5383785 - DNA, 25 bp, Homo sapien
tggattttagaatacagagtgactg

SEQ ID NO: 5383786 - DNA, 25 bp, Homo sapien
ggtgtgctacactgacccgtgaatc

SEQ ID NO: 5383787 - DNA, 25 bp, Homo sapien
ttatttgaactccttcttcaatgcc

SEQ ID NO: 5383788 - DNA, 25 bp, Homo sapien
ggtggtcctggtgtgctacactgac

SEQ ID NO: 5383789 - DNA, 25 bp, Homo sapien
ggtcctggtgtgctacactgacccg

SEQ ID NO: 5383790 - DNA, 25 bp, Homo sapien
tgtgggcacgggcagatccagtgcc

SEQ ID NO: 5383791 - DNA, 25 bp, Homo sapien
gctgaactgtcctgatcagacagaa

SEQ ID NO: 5383792 - DNA, 25 bp, Homo sapien
ctgcttctcccctacgctcagtggc

SEQ ID NO: 5383793 - DNA, 25 bp, Homo sapien
aggaggccctggacacttcgtggcc

SEQ ID NO: 5383794 - DNA, 25 bp, Homo sapien
tcccaaggatgttggtgacatcaca

SEQ ID NO: 5383795 - DNA, 25 bp, Homo sapien
cccaaggatgttggtgacatcacac

SEQ ID NO: 5383796 - DNA, 25 bp, Homo sapien
ttcccaaggatgttggtgacatcac

SEQ ID NO: 5383797 - DNA, 25 bp, Homo sapien
ccatcatccctatccggcatcagtg

SEQ ID NO: 5383798 - DNA, 25 bp, Homo sapien
aggcagggccggcaccagagtgagt

SEQ ID NO: 5383799 - DNA, 25 bp, Homo sapien
tccctatccggcatcagtgccatca

SEQ ID NO: 5383800 - DNA, 25 bp, Homo sapien
ctatccggcatcagtgccatcagct

SEQ ID NO: 5383801 - DNA, 25 bp, Homo sapien
cagagtcagtgtagagcatccaaca

SEQ ID NO: 5383802 - DNA, 25 bp, Homo sapien
gagtcagtgtagagcatccaacacc

SEQ ID NO: 5383803 - DNA, 25 bp, Homo sapien
gtcagtgtagagcatccaacaccca

SEQ ID NO: 5383804 - DNA, 25 bp, Homo sapien
ctcagagtcagtgtagagcatccaa

SEQ ID NO: 5383805 - DNA, 25 bp, Homo sapien
tggtgggggtgaccaggtgctcccc

SEQ ID NO: 5383806 - DNA, 25 bp, Homo sapien
ctggtgggggtgaccaggtgctccc

SEQ ID NO: 5383807 - DNA, 25 bp, Homo sapien
ggtgggggtgaccaggtgctcccca

SEQ ID NO: 5383808 - DNA, 25 bp, Homo sapien
gtgggggtgaccaggtgctccccat

SEQ ID NO: 5383809 - DNA, 25 bp, Homo sapien
cgggacaccatggaggaagccgcca

SEQ ID NO: 5383810 - DNA, 25 bp, Homo sapien
ccgggacaccatggaggaagccgcc

SEQ ID NO: 5383811 - DNA, 25 bp, Homo sapien
accatggaggaagccgccatcatac

SEQ ID NO: 5383812 - DNA, 25 bp, Homo sapien
gccgggacaccatggaggaagccgc

SEQ ID NO: 5383813 - DNA, 25 bp, Homo sapien
agaaggtgacccttcactcgactct

SEQ ID NO: 5383814 - DNA, 25 bp, Homo sapien
gagaaggtgacccttcactcgactc

SEQ ID NO: 5383815 - DNA, 25 bp, Homo sapien
gaaggtgacccttcactcgactctt

SEQ ID NO: 5383816 - DNA, 25 bp, Homo sapien
tgagaaggtgacccttcactcgact

SEQ ID NO: 5383817 - DNA, 25 bp, Homo sapien
caaaatggatgtggtccgtgtaccc

SEQ ID NO: 5383818 - DNA, 25 bp, Homo sapien
gaagagttcgcagttttaacagcca

SEQ ID NO: 5383819 - DNA, 25 bp, Homo sapien
tagccatgctacaagggaggaccat

SEQ ID NO: 5383820 - DNA, 25 bp, Homo sapien
tcaatctgcctggagaagagcgctc

SEQ ID NO: 5383821 - DNA, 25 bp, Homo sapien
actggtctggcgagcatggcactgt

SEQ ID NO: 5383822 - DNA, 25 bp, Homo sapien
ggtgatattgagcacgcactgagac

SEQ ID NO: 5383823 - DNA, 25 bp, Homo sapien
gagcacgcactgagacatcacagct

SEQ ID NO: 5383824 - DNA, 25 bp, Homo sapien
tcagtcacaggagcgtgcatggcac

SEQ ID NO: 5383825 - DNA, 25 bp, Homo sapien
tcaacattgccattgacagcgagcc

SEQ ID NO: 5383826 - DNA, 25 bp, Homo sapien
aacattgccattgacagcgagccct

SEQ ID NO: 5383827 - DNA, 25 bp, Homo sapien
cattgccattgacagcgagcccttg

SEQ ID NO: 5383828 - DNA, 25 bp, Homo sapien
caacattgccattgacagcgagccc

SEQ ID NO: 5383829 - DNA, 25 bp, Homo sapien
gcatattggtctttaccaacacttc

SEQ ID NO: 5383830 - DNA, 25 bp, Homo sapien
tattgtcataaatagttgagtgaaa

SEQ ID NO: 5383831 - DNA, 25 bp, Homo sapien
taccaacacttctaatgtaagttcc

SEQ ID NO: 5383832 - DNA, 25 bp, Homo sapien
tgtaagttcctgttattgtcataaa

SEQ ID NO: 5383833 - DNA, 25 bp, Homo sapien
cggctgggccctgcgagccacgctt

SEQ ID NO: 5383834 - DNA, 25 bp, Homo sapien
tcagctcggtgcatgcggctgggcc

SEQ ID NO: 5383835 - DNA, 25 bp, Homo sapien
tcaattactccgttcttgcctgggc

SEQ ID NO: 5383836 - DNA, 25 bp, Homo sapien
tgcgagccacgcttctgcggccccg

SEQ ID NO: 5383837 - DNA, 25 bp, Homo sapien
acatctgaccctaggcaggtggcca

SEQ ID NO: 5383838 - DNA, 25 bp, Homo sapien
tctgctctaacggagtgggcctgac

SEQ ID NO: 5383839 - DNA, 25 bp, Homo sapien
aaagggctcttatcgtccactgtgg

SEQ ID NO: 5383840 - DNA, 25 bp, Homo sapien
agtgttgccctgactacccatggtg

SEQ ID NO: 5383841 - DNA, 25 bp, Homo sapien
tccaggaactctggtttttcctgca

SEQ ID NO: 5383842 - DNA, 25 bp, Homo sapien
ctgtaccactttccaggaactctgg

SEQ ID NO: 5383843 - DNA, 25 bp, Homo sapien
cccaggcttccacatctgccatgtt

SEQ ID NO: 5383844 - DNA, 25 bp, Homo sapien
catctgccatgttcccttctgtacc

SEQ ID NO: 5383845 - DNA, 25 bp, Homo sapien
cttgccgaggatggatgttctatgg

SEQ ID NO: 5383846 - DNA, 25 bp, Homo sapien
tgctacggtgtagctgctgctctct

SEQ ID NO: 5383847 - DNA, 25 bp, Homo sapien
gagatatctaatgctggccccatcc

SEQ ID NO: 5383848 - DNA, 25 bp, Homo sapien
gctgctctcttaggcgattgtaaat

SEQ ID NO: 5383849 - DNA, 25 bp, Homo sapien
tctctcccgaatgtgcccagaataa

SEQ ID NO: 5383850 - DNA, 25 bp, Homo sapien
gctttctctcccgaatgtgcccaga

SEQ ID NO: 5383851 - DNA, 25 bp, Homo sapien
cagaataagtgtcccagacatctgt

SEQ ID NO: 5383852 - DNA, 25 bp, Homo sapien
ctctgctttctctcccgaatgtgcc

SEQ ID NO: 5383853 - DNA, 25 bp, Homo sapien
cttgatgtgcccagcacctgtgcca

SEQ ID NO: 5383854 - DNA, 25 bp, Homo sapien
gtgccacgccggccaacagctgtgg

SEQ ID NO: 5383855 - DNA, 25 bp, Homo sapien
cacagtagatggtggctgcagctga

SEQ ID NO: 5383856 - DNA, 25 bp, Homo sapien
cgatgccattagactcagccttgat

SEQ ID NO: 5383857 - DNA, 25 bp, Homo sapien
ggaccgagcgctcacttttcttatt

SEQ ID NO: 5383858 - DNA, 25 bp, Homo sapien
attggtggttctgcaacccgaggat

SEQ ID NO: 5383859 - DNA, 25 bp, Homo sapien
ctgcaggagccaggaccgagcgctc

SEQ ID NO: 5383860 - DNA, 25 bp, Homo sapien
ccgaggatggcaaccaacttctgca

SEQ ID NO: 5383861 - DNA, 25 bp, Homo sapien
atcatagatgtggaactgcaggagc

SEQ ID NO: 5383862 - DNA, 25 bp, Homo sapien
tcatcatagatgtggaactgcagga

SEQ ID NO: 5383863 - DNA, 25 bp, Homo sapien
caggggcaaggggacccacagtgca

SEQ ID NO: 5383864 - DNA, 25 bp, Homo sapien
tagatgtggaactgcaggagcccag

SEQ ID NO: 5383865 - DNA, 25 bp, Homo sapien
ttctatgtcacctgggtaggagatg

SEQ ID NO: 5383866 - DNA, 25 bp, Homo sapien
agtggcccacaacacgaagggagta

SEQ ID NO: 5383867 - DNA, 25 bp, Homo sapien
acctctgagggataggggctgatca

SEQ ID NO: 5383868 - DNA, 25 bp, Homo sapien
gctgatcatcggcaacggggaccga

SEQ ID NO: 5383869 - DNA, 25 bp, Homo sapien
ggccatgcagtgatatctctggctc

SEQ ID NO: 5383870 - DNA, 25 bp, Homo sapien
ctgtaggggagatggggccatgcag

SEQ ID NO: 5383871 - DNA, 25 bp, Homo sapien
taggggagatggggccatgcagtga

SEQ ID NO: 5383872 - DNA, 25 bp, Homo sapien
gggccatgcagtgatatctctggct

SEQ ID NO: 5383873 - DNA, 25 bp, Homo sapien
gcctggcatgaccagcactgggcac

SEQ ID NO: 5383874 - DNA, 25 bp, Homo sapien
gtgcttgacctcagcacctccgtgc

SEQ ID NO: 5383875 - DNA, 25 bp, Homo sapien
cagggcctggcatgaccagcactgg

SEQ ID NO: 5383876 - DNA, 25 bp, Homo sapien
caggcatggaaagtgcccctgtgtg

SEQ ID NO: 5383877 - DNA, 25 bp, Homo sapien
tttccacccagatggtgcccagtgc

SEQ ID NO: 5383878 - DNA, 25 bp, Homo sapien
gatggtgcccagtgctggtcatgcc

SEQ ID NO: 5383879 - DNA, 25 bp, Homo sapien
ccagatggtgcccagtgctggtcat

SEQ ID NO: 5383880 - DNA, 25 bp, Homo sapien
tgcccagtgctggtcatgccaggcc

SEQ ID NO: 5383881 - DNA, 25 bp, Homo sapien
gtaaagccaccatgtgtgagcaccg

SEQ ID NO: 5383882 - DNA, 25 bp, Homo sapien
tccgtggcctggattggtaaagcca

SEQ ID NO: 5383883 - DNA, 25 bp, Homo sapien
taaaccctgtgtcgtagcacttcca

SEQ ID NO: 5383884 - DNA, 25 bp, Homo sapien
agagggcctgtgagagcatcgacac

SEQ ID NO: 5383885 - DNA, 25 bp, Homo sapien
cagtctagtgggtgtcctgtggcca

SEQ ID NO: 5383886 - DNA, 25 bp, Homo sapien
ctgcaaacactgacagtctagtggg

SEQ ID NO: 5383887 - DNA, 25 bp, Homo sapien
caaacactgacagtctagtgggtgt

SEQ ID NO: 5383888 - DNA, 25 bp, Homo sapien
cactgacagtctagtgggtgtcctg

SEQ ID NO: 5383889 - DNA, 25 bp, Homo sapien
cagccaacaaggctgatacagccat

SEQ ID NO: 5383890 - DNA, 25 bp, Homo sapien
agccatgtgaggttcacctgagtgc

SEQ ID NO: 5383891 - DNA, 25 bp, Homo sapien
gccaacaaggctgatacagccatgt

SEQ ID NO: 5383892 - DNA, 25 bp, Homo sapien
caacaaggctgatacagccatgtga

SEQ ID NO: 5383893 - DNA, 25 bp, Homo sapien
aagggctcgtgttgaattaggtgtc

SEQ ID NO: 5383894 - DNA, 25 bp, Homo sapien
tgaacaccccctgaatggtcctggc

SEQ ID NO: 5383895 - DNA, 25 bp, Homo sapien
aaggagccggcgtatgcaaagaagc

SEQ ID NO: 5383896 - DNA, 25 bp, Homo sapien
cagcagttggtgagaaaaactttag

SEQ ID NO: 5383897 - DNA, 25 bp, Homo sapien
tctctctgtcctcgtgctcgtgcat

SEQ ID NO: 5383898 - DNA, 25 bp, Homo sapien
aagcccggcacacaggctgccttct

SEQ ID NO: 5383899 - DNA, 25 bp, Homo sapien
tctgtcctcgtgctcgtgcatgcct

SEQ ID NO: 5383900 - DNA, 25 bp, Homo sapien
cctccagtgatctggcccctttttt

SEQ ID NO: 5383901 - DNA, 25 bp, Homo sapien
gttctccaacttcagctcagagtag

SEQ ID NO: 5383902 - DNA, 25 bp, Homo sapien
tgtgaggtccagcaagttgcaggaa

SEQ ID NO: 5383903 - DNA, 25 bp, Homo sapien
atgagacaaggctcccatttgcagc

SEQ ID NO: 5383904 - DNA, 25 bp, Homo sapien
aggctggttgccctgggttctccaa

SEQ ID NO: 5383905 - DNA, 25 bp, Homo sapien
aatctctggccaccaacttctgggc

SEQ ID NO: 5383906 - DNA, 25 bp, Homo sapien
gccacacatccagggtgctcctcgg

SEQ ID NO: 5383907 - DNA, 25 bp, Homo sapien
agcaggccacacatccagggtgctc

SEQ ID NO: 5383908 - DNA, 25 bp, Homo sapien
acatccagggtgctcctcggatggg

SEQ ID NO: 5383909 - DNA, 25 bp, Homo sapien
caagtcacagcaatactcggtcctt

SEQ ID NO: 5383910 - DNA, 25 bp, Homo sapien
gcaaagagatgcaacgagtcacact

SEQ ID NO: 5383911 - DNA, 25 bp, Homo sapien
ggacacaagacaccacaagtcacag

SEQ ID NO: 5383912 - DNA, 25 bp, Homo sapien
ctgccgtgccaaaaaccctgcatag

SEQ ID NO: 5383913 - DNA, 25 bp, Homo sapien
ggcctggccacagccaccgggccat

SEQ ID NO: 5383914 - DNA, 25 bp, Homo sapien
ctgcatctggatcagggtgccctgc

SEQ ID NO: 5383915 - DNA, 25 bp, Homo sapien
ctgcccagttgcagggcctggccac

SEQ ID NO: 5383916 - DNA, 25 bp, Homo sapien
tctggatcagggtgccctgcccagt

SEQ ID NO: 5383917 - DNA, 25 bp, Homo sapien
cagctgggagagcattgtggacatc

SEQ ID NO: 5383918 - DNA, 25 bp, Homo sapien
ggagagcattgtggacatcccggcc

SEQ ID NO: 5383919 - DNA, 25 bp, Homo sapien
gagcattgtggacatcccggcctgt

SEQ ID NO: 5383920 - DNA, 25 bp, Homo sapien
cattgtggacatcccggcctgtggc

SEQ ID NO: 5383921 - DNA, 25 bp, Homo sapien
gccacccgccctgggtcaggatgag

SEQ ID NO: 5383922 - DNA, 25 bp, Homo sapien
ctgccacccgccctgggtcaggatg

SEQ ID NO: 5383923 - DNA, 25 bp, Homo sapien
cacccgccctgggtcaggatgaggg

SEQ ID NO: 5383924 - DNA, 25 bp, Homo sapien
tgccacccgccctgggtcaggatga

SEQ ID NO: 5383925 - DNA, 25 bp, Homo sapien
gacttcatagcattccacagcacag

SEQ ID NO: 5383926 - DNA, 25 bp, Homo sapien
taacgatcaactttagccaggccct

SEQ ID NO: 5383927 - DNA, 25 bp, Homo sapien
catgctgacgatctaggcaggatct

SEQ ID NO: 5383928 - DNA, 25 bp, Homo sapien
caatgaagtaaagaacgccttggca

SEQ ID NO: 5383929 - DNA, 25 bp, Homo sapien
tgcaggttatcagcgagcactcagg

SEQ ID NO: 5383930 - DNA, 25 bp, Homo sapien
tatcgcctactaagaagcttcctgg

SEQ ID NO: 5383931 - DNA, 25 bp, Homo sapien
tctgaaggaacagcaagggagcagc

SEQ ID NO: 5383932 - DNA, 25 bp, Homo sapien
caaccaaaattaaggctgccgaggc

SEQ ID NO: 5383933 - DNA, 25 bp, Homo sapien
tgctgtttctgagccgtgtcacttt

SEQ ID NO: 5383934 - DNA, 25 bp, Homo sapien
agccgtgtcactttgcaaactgtca

SEQ ID NO: 5383935 - DNA, 25 bp, Homo sapien
ttgcaaactgtcatcatgaaagctg

SEQ ID NO: 5383936 - DNA, 25 bp, Homo sapien
gcaaactgtcatcatgaaagctgtc

SEQ ID NO: 5383937 - DNA, 25 bp, Homo sapien
gggtcatggccagagcgcacagatt

SEQ ID NO: 5383938 - DNA, 25 bp, Homo sapien
tggccagagcgcacagattgcactg

SEQ ID NO: 5383939 - DNA, 25 bp, Homo sapien
gagcgcacagattgcactgcaccat

SEQ ID NO: 5383940 - DNA, 25 bp, Homo sapien
gtcatggccagagcgcacagattgc

SEQ ID NO: 5383941 - DNA, 25 bp, Homo sapien
cttcagggccgacctcagctggcca

SEQ ID NO: 5383942 - DNA, 25 bp, Homo sapien
tgtccgtccccgtgggcagctcgca

SEQ ID NO: 5383943 - DNA, 25 bp, Homo sapien
acctcagctggccaccgccactcgc

SEQ ID NO: 5383944 - DNA, 25 bp, Homo sapien
gcaggcacacgcgtctgtccgtccc

SEQ ID NO: 5383945 - DNA, 25 bp, Homo sapien
tgtgccatactgcactgatccccct

SEQ ID NO: 5383946 - DNA, 25 bp, Homo sapien
gccatactgcactgatcccccttga

SEQ ID NO: 5383947 - DNA, 25 bp, Homo sapien
tgatcccccttgatgcttctcactc

SEQ ID NO: 5383948 - DNA, 25 bp, Homo sapien
tttgtgccatactgcactgatcccc

SEQ ID NO: 5383949 - DNA, 25 bp, Homo sapien
ttctgctccagctcgttgctgttcc

SEQ ID NO: 5383950 - DNA, 25 bp, Homo sapien
ctgctccagctcgttgctgttcctc

SEQ ID NO: 5383951 - DNA, 25 bp, Homo sapien
tctgctccagctcgttgctgttcct

SEQ ID NO: 5383952 - DNA, 25 bp, Homo sapien
ctgcagaagatgcacctcatagcac

SEQ ID NO: 5383953 - DNA, 25 bp, Homo sapien
tgcagaagatgcacctcatagcacc

SEQ ID NO: 5383954 - DNA, 25 bp, Homo sapien
cacacagccagttgtccactctctg

SEQ ID NO: 5383955 - DNA, 25 bp, Homo sapien
ggacaaaggtgcttgactgaagcca

SEQ ID NO: 5383956 - DNA, 25 bp, Homo sapien
ccttactgcctggagcatcctttcc

SEQ ID NO: 5383957 - DNA, 25 bp, Homo sapien
cccaggaacttgcaagccttactgc

SEQ ID NO: 5383958 - DNA, 25 bp, Homo sapien
ttaaagatgctaggcatggaaggct

SEQ ID NO: 5383959 - DNA, 25 bp, Homo sapien
aagatgctaggcatggaaggctcac

SEQ ID NO: 5383960 - DNA, 25 bp, Homo sapien
gatgggtcaaatgtttaaagatgct

SEQ ID NO: 5383961 - DNA, 25 bp, Homo sapien
aaatgtttaaagatgctaggcatgg

SEQ ID NO: 5383962 - DNA, 25 bp, Homo sapien
tgtcgtcatcagcagtagaagcagg

SEQ ID NO: 5383963 - DNA, 25 bp, Homo sapien
tcatcagcagtagaagcaggcaggt

SEQ ID NO: 5383964 - DNA, 25 bp, Homo sapien
cagtaggacagacatgggcatctgc

SEQ ID NO: 5383965 - DNA, 25 bp, Homo sapien
caggtgtctgggaccatgcatagcc

SEQ ID NO: 5383966 - DNA, 25 bp, Homo sapien
agactctagctcgggggcagaaatg

SEQ ID NO: 5383967 - DNA, 25 bp, Homo sapien
gtagactctagctcgggggcagaaa

SEQ ID NO: 5383968 - DNA, 25 bp, Homo sapien
ggtagactctagctcgggggcagaa

SEQ ID NO: 5383969 - DNA, 25 bp, Homo sapien
tagactctagctcgggggcagaaat

SEQ ID NO: 5383970 - DNA, 25 bp, Homo sapien
caggagcttggcaggtaccaggcat

SEQ ID NO: 5383971 - DNA, 25 bp, Homo sapien
tcacatcaaggcacgagcattttcc

SEQ ID NO: 5383972 - DNA, 25 bp, Homo sapien
tgtcaaaagcccaccacagaacatt

SEQ ID NO: 5383973 - DNA, 25 bp, Homo sapien
tcttttgcttgcagtgataccacca

SEQ ID NO: 5383974 - DNA, 25 bp, Homo sapien
ctgtcccatgagtggtcacacaccg

SEQ ID NO: 5383975 - DNA, 25 bp, Homo sapien
caggaaacggaatcccagaaatgtc

SEQ ID NO: 5383976 - DNA, 25 bp, Homo sapien
tccatccaaaggcaggttcaactcc

SEQ ID NO: 5383977 - DNA, 25 bp, Homo sapien
tccaaaggcaggttcaactcccagg

SEQ ID NO: 5383978 - DNA, 25 bp, Homo sapien
gcatttcaggaaacggaatcccaga

SEQ ID NO: 5383979 - DNA, 25 bp, Homo sapien
gggcctaaccggacacaggcacagg

SEQ ID NO: 5383980 - DNA, 25 bp, Homo sapien
tcatgtcccagacatggtgacatca

SEQ ID NO: 5383981 - DNA, 25 bp, Homo sapien
cctggcctggacacggatttgtaac

SEQ ID NO: 5383982 - DNA, 25 bp, Homo sapien
ccagacatggtgacatcagaccctg

SEQ ID NO: 5383983 - DNA, 25 bp, Homo sapien
ctcgtgtccattcagccatgccagc

SEQ ID NO: 5383984 - DNA, 25 bp, Homo sapien
cgttggttgaacgaataaacaagca

SEQ ID NO: 5383985 - DNA, 25 bp, Homo sapien
cactgcctcctcgttggttgaacga

SEQ ID NO: 5383986 - DNA, 25 bp, Homo sapien
aagcaaagatggttctggcgttggc

SEQ ID NO: 5383987 - DNA, 25 bp, Homo sapien
gtcctcaaagaaaggcaccctccta

SEQ ID NO: 5383988 - DNA, 25 bp, Homo sapien
cttgatgctgggaagcagtcctcaa

SEQ ID NO: 5383989 - DNA, 25 bp, Homo sapien
gctgggaagcagtcctcaaagaaag

SEQ ID NO: 5383990 - DNA, 25 bp, Homo sapien
gggaagcagtcctcaaagaaaggca

SEQ ID NO: 5383991 - DNA, 25 bp, Homo sapien
cttccagccgcctttgggctaggtc

SEQ ID NO: 5383992 - DNA, 25 bp, Homo sapien
ttgggctaggtcatcagcgctctca

SEQ ID NO: 5383993 - DNA, 25 bp, Homo sapien
gccgcctttgggctaggtcatcagc

SEQ ID NO: 5383994 - DNA, 25 bp, Homo sapien
gctaggtcatcagcgctctcaccat

SEQ ID NO: 5383995 - DNA, 25 bp, Homo sapien
gctgagcagccagggtacaaaatcc

SEQ ID NO: 5383996 - DNA, 25 bp, Homo sapien
accatctgcacgagggcatgagcca

SEQ ID NO: 5383997 - DNA, 25 bp, Homo sapien
gagagcctcccacaaaatcatcact

SEQ ID NO: 5383998 - DNA, 25 bp, Homo sapien
gaagacaacggcctttgcctctagg

SEQ ID NO: 5383999 - DNA, 25 bp, Homo sapien
aggtgttcaggtgagcggctcctac

SEQ ID NO: 5384000 - DNA, 25 bp, Homo sapien
ggctcctactccctcggtgtcaagt

SEQ ID NO: 5384001 - DNA, 25 bp, Homo sapien
cctactccctcggtgtcaagtggct

SEQ ID NO: 5384002 - DNA, 25 bp, Homo sapien
ctccctcggtgtcaagtggctggaa

SEQ ID NO: 5384003 - DNA, 25 bp, Homo sapien
tggctggggtctgcggtggacagac

SEQ ID NO: 5384004 - DNA, 25 bp, Homo sapien
cccctggacagcacgcggcatggct

SEQ ID NO: 5384005 - DNA, 25 bp, Homo sapien
cctcccctggacagcacgcggcatg

SEQ ID NO: 5384006 - DNA, 25 bp, Homo sapien
agccctcccctggacagcacgcggc

SEQ ID NO: 5384007 - DNA, 25 bp, Homo sapien
gggccagtgtgaggataactcgggg

SEQ ID NO: 5384008 - DNA, 25 bp, Homo sapien
catggtactgcctgggcagtcacca

SEQ ID NO: 5384009 - DNA, 25 bp, Homo sapien
ctccatggtactgcctgggcagtca

SEQ ID NO: 5384010 - DNA, 25 bp, Homo sapien
tgaggataactcggggatgtctgtc

SEQ ID NO: 5384011 - DNA, 25 bp, Homo sapien
ctggcctgcacatcccactgtccag

SEQ ID NO: 5384012 - DNA, 25 bp, Homo sapien
ccactgtccagagcacagtccccca

SEQ ID NO: 5384013 - DNA, 25 bp, Homo sapien
cactgtccagagcacagtcccccat

SEQ ID NO: 5384014 - DNA, 25 bp, Homo sapien
gcctgcacatcccactgtccagagc

SEQ ID NO: 5384015 - DNA, 25 bp, Homo sapien
aaaacagtagcttttatttcacacg

SEQ ID NO: 5384016 - DNA, 25 bp, Homo sapien
acagtagcttttatttcacacgaag

SEQ ID NO: 5384017 - DNA, 25 bp, Homo sapien
caaaaacagtagcttttatttcaca

SEQ ID NO: 5384018 - DNA, 25 bp, Homo sapien
aacagtagcttttatttcacacgaa

SEQ ID NO: 5384019 - DNA, 25 bp, Homo sapien
gaaggcgagaggacagcgctggcta

SEQ ID NO: 5384020 - DNA, 25 bp, Homo sapien
aggaaggcgagaggacagcgctggc

SEQ ID NO: 5384021 - DNA, 25 bp, Homo sapien
agctgctgggctccagctccggggc

SEQ ID NO: 5384022 - DNA, 25 bp, Homo sapien
cctggcaggtgcaccacctccagct

SEQ ID NO: 5384023 - DNA, 25 bp, Homo sapien
tcagagggtgctgcctggcaggtgc

SEQ ID NO: 5384024 - DNA, 25 bp, Homo sapien
acctccagctgctgggctccagctc

SEQ ID NO: 5384025 - DNA, 25 bp, Homo sapien
agaacagagtgcaaccccatccctg

SEQ ID NO: 5384026 - DNA, 25 bp, Homo sapien
ctgaaagaaagcagcggcctccact

SEQ ID NO: 5384027 - DNA, 25 bp, Homo sapien
gctccagtcgtgagaaggccaatga

SEQ ID NO: 5384028 - DNA, 25 bp, Homo sapien
agatgtcatctagggccggctcttc

SEQ ID NO: 5384029 - DNA, 25 bp, Homo sapien
aggtgatccacggtcttctctacca

SEQ ID NO: 5384030 - DNA, 25 bp, Homo sapien
ggtgatccacggtcttctctaccat

SEQ ID NO: 5384031 - DNA, 25 bp, Homo sapien
gtaatgatgctgaaatgtcctggtg

SEQ ID NO: 5384032 - DNA, 25 bp, Homo sapien
aatgatgctgaaatgtcctggtggg

SEQ ID NO: 5384033 - DNA, 25 bp, Homo sapien
atccagtaatgatgctgaaatgtcc

SEQ ID NO: 5384034 - DNA, 25 bp, Homo sapien
cttcccatccagtaatgatgctgaa

SEQ ID NO: 5384035 - DNA, 25 bp, Homo sapien
ctcctctatgacatctagatggcat

SEQ ID NO: 5384036 - DNA, 25 bp, Homo sapien
tctagatggcattgcatagccatgt

SEQ ID NO: 5384037 - DNA, 25 bp, Homo sapien
tgacatctagatggcattgcatagc

SEQ ID NO: 5384038 - DNA, 25 bp, Homo sapien
tggcattgcatagccatgtgtctgt

SEQ ID NO: 5384039 - DNA, 25 bp, Homo sapien
cacgtagggaggagagctagatgtt

SEQ ID NO: 5384040 - DNA, 25 bp, Homo sapien
tgatagcctctatttactcggtgca

SEQ ID NO: 5384041 - DNA, 25 bp, Homo sapien
tactcggtgcagtaagatggagatc

SEQ ID NO: 5384042 - DNA, 25 bp, Homo sapien
tttcaagaattctatgagtaggttg

SEQ ID NO: 5384043 - DNA, 25 bp, Homo sapien
tccacggagtgcatctgagagaaca

SEQ ID NO: 5384044 - DNA, 25 bp, Homo sapien
gctttggaagtcaggagcaaccaga

SEQ ID NO: 5384045 - DNA, 25 bp, Homo sapien
ctcagaccaggaggacgcagtgtga

SEQ ID NO: 5384046 - DNA, 25 bp, Homo sapien
tggagcagggcctaacattgtactg

SEQ ID NO: 5384047 - DNA, 25 bp, Homo sapien
tttatctctccgttgctctacttct

SEQ ID NO: 5384048 - DNA, 25 bp, Homo sapien
tctcctttatctctccgttgctcta

SEQ ID NO: 5384049 - DNA, 25 bp, Homo sapien
atctctccgttgctctacttctctg

SEQ ID NO: 5384050 - DNA, 25 bp, Homo sapien
tccgttgctctacttctctgccttt

SEQ ID NO: 5384051 - DNA, 25 bp, Homo sapien
ctggctgaaagcagcgcggcttgcg

SEQ ID NO: 5384052 - DNA, 25 bp, Homo sapien
ctgaaagcagcgcggcttgcgaccg

SEQ ID NO: 5384053 - DNA, 25 bp, Homo sapien
ggccaaagcgcccacggcacagagc

SEQ ID NO: 5384054 - DNA, 25 bp, Homo sapien
aagcagcgcggcttgcgaccgcagc

SEQ ID NO: 5384055 - DNA, 25 bp, Homo sapien
ttggtaggcttcttcctattgaata

SEQ ID NO: 5384056 - DNA, 25 bp, Homo sapien
tgtgttggtaggcttcttcctattg

SEQ ID NO: 5384057 - DNA, 25 bp, Homo sapien
ttctgtgactaaatgtttatatcct

SEQ ID NO: 5384058 - DNA, 25 bp, Homo sapien
tattctttttgtgttggtaggcttc

SEQ ID NO: 5384059 - DNA, 25 bp, Homo sapien
tagtgaatccctgtctgaggccaat

SEQ ID NO: 5384060 - DNA, 25 bp, Homo sapien
cagggatcacagaccccttagtgaa

SEQ ID NO: 5384061 - DNA, 25 bp, Homo sapien
aaatgtttggtcatacgtactggga

SEQ ID NO: 5384062 - DNA, 25 bp, Homo sapien
ttggttccggccatgtgaggactga

SEQ ID NO: 5384063 - DNA, 25 bp, Homo sapien
tcattatttctcttcggagaagacc

SEQ ID NO: 5384064 - DNA, 25 bp, Homo sapien
gacacagtcattctgccagggtgag

SEQ ID NO: 5384065 - DNA, 25 bp, Homo sapien
tgttggtaagcagtcaagatggtga

SEQ ID NO: 5384066 - DNA, 25 bp, Homo sapien
tgtagagcaagcttgtggacatcct

SEQ ID NO: 5384067 - DNA, 25 bp, Homo sapien
gatggtacactagtccctgagaacc

SEQ ID NO: 5384068 - DNA, 25 bp, Homo sapien
ttctcatgtgattcggatggctgca

SEQ ID NO: 5384069 - DNA, 25 bp, Homo sapien
gatggctgcatggagtaaaacgcac

SEQ ID NO: 5384070 - DNA, 25 bp, Homo sapien
cagatttaaatcctagcgtggctac

SEQ ID NO: 5384071 - DNA, 25 bp, Homo sapien
cctgggcaaatcactcagtatctct

SEQ ID NO: 5384072 - DNA, 25 bp, Homo sapien
aaatcactcagtatctctccaaatc

SEQ ID NO: 5384073 - DNA, 25 bp, Homo sapien
gtgacctgggcaaatcactcagtat

SEQ ID NO: 5384074 - DNA, 25 bp, Homo sapien
caaatcactcagtatctctccaaat

SEQ ID NO: 5384075 - DNA, 25 bp, Homo sapien
gaatggcttgctacagtctcatctg

SEQ ID NO: 5384076 - DNA, 25 bp, Homo sapien
cacacactcatgataaacacctgct

SEQ ID NO: 5384077 - DNA, 25 bp, Homo sapien
gaatggcagtagctagctcactgag

SEQ ID NO: 5384078 - DNA, 25 bp, Homo sapien
tggaaataagtctcatttggatgac

SEQ ID NO: 5384079 - DNA, 25 bp, Homo sapien
tgcacaagatgagaggacatacttt

SEQ ID NO: 5384080 - DNA, 25 bp, Homo sapien
gagactaacacaggcgaatcacttg

SEQ ID NO: 5384081 - DNA, 25 bp, Homo sapien
tcaatgttctccagattagttcaca

SEQ ID NO: 5384082 - DNA, 25 bp, Homo sapien
tggaaattaatctaacaacgtgtaa

SEQ ID NO: 5384083 - DNA, 25 bp, Homo sapien
tcaactgtaaaacgaggattgcgag

SEQ ID NO: 5384084 - DNA, 25 bp, Homo sapien
aaactagaagccaggctcctagtct

SEQ ID NO: 5384085 - DNA, 25 bp, Homo sapien
tgcgagtcatcagcctaggtcagtc

SEQ ID NO: 5384086 - DNA, 25 bp, Homo sapien
gctcctcaggtggttcaactgtaaa

SEQ ID NO: 5384087 - DNA, 25 bp, Homo sapien
gaagtgtaccaagcatgatcaaaag

SEQ ID NO: 5384088 - DNA, 25 bp, Homo sapien
ggtgagtatgggtgtgtgtctgcgt

SEQ ID NO: 5384089 - DNA, 25 bp, Homo sapien
caggtgtatctgggtgtaggtgggt

SEQ ID NO: 5384090 - DNA, 25 bp, Homo sapien
cgtgtgagtatgtgtttacattgtg

SEQ ID NO: 5384091 - DNA, 25 bp, Homo sapien
aaacagtactttagatttcagctag

SEQ ID NO: 5384092 - DNA, 25 bp, Homo sapien
tcatataaaagtgactgatcttcca

SEQ ID NO: 5384093 - DNA, 25 bp, Homo sapien
tgcttggataatcaaatcaacacct

SEQ ID NO: 5384094 - DNA, 25 bp, Homo sapien
tctggattgtcataagaggtctgag

SEQ ID NO: 5384095 - DNA, 25 bp, Homo sapien
ggatagcagtggagactaagaggat

SEQ ID NO: 5384096 - DNA, 25 bp, Homo sapien
ggaaacacttgccatactcaaaaaa

SEQ ID NO: 5384097 - DNA, 25 bp, Homo sapien
cttgccatactcaaaaaacattgct

SEQ ID NO: 5384098 - DNA, 25 bp, Homo sapien
gagggagggatagcagtggagacta

SEQ ID NO: 5384099 - DNA, 25 bp, Homo sapien
aaaactgtgttgaggcgccctggct

SEQ ID NO: 5384100 - DNA, 25 bp, Homo sapien
cgcgcgtgagagatcccggatacat

SEQ ID NO: 5384101 - DNA, 25 bp, Homo sapien
gatacatctgcggtttgggctccgc

SEQ ID NO: 5384102 - DNA, 25 bp, Homo sapien
tttctgttcaaatgcaaggtgggag

SEQ ID NO: 5384103 - DNA, 25 bp, Homo sapien
cgggaatccgctgaggaaattcaag

SEQ ID NO: 5384104 - DNA, 25 bp, Homo sapien
ttcgggaatccgctgaggaaattca

SEQ ID NO: 5384105 - DNA, 25 bp, Homo sapien
tcgggaatccgctgaggaaattcaa

SEQ ID NO: 5384106 - DNA, 25 bp, Homo sapien
ggagcaaagcgttgcaaagacatct

SEQ ID NO: 5384107 - DNA, 25 bp, Homo sapien
agacatctttgatcaccagattcag

SEQ ID NO: 5384108 - DNA, 25 bp, Homo sapien
cagattcaggtatgacagttttgac

SEQ ID NO: 5384109 - DNA, 25 bp, Homo sapien
cctatcaggcaataattggcattga

SEQ ID NO: 5384110 - DNA, 25 bp, Homo sapien
gcctcattcccaggtacatccgtga

SEQ ID NO: 5384111 - DNA, 25 bp, Homo sapien
tcaggaacgtctccgtagcctcatt

SEQ ID NO: 5384112 - DNA, 25 bp, Homo sapien
tcattccagcaaactacaaagtgga

SEQ ID NO: 5384113 - DNA, 25 bp, Homo sapien
aggatggaacaatcgggcttcggct

SEQ ID NO: 5384114 - DNA, 25 bp, Homo sapien
aacgagtctgctaggtccatttaga

SEQ ID NO: 5384115 - DNA, 25 bp, Homo sapien
cataccacaataacgagtctgctag

SEQ ID NO: 5384116 - DNA, 25 bp, Homo sapien
tccttaaacataccacaataacgag

SEQ ID NO: 5384117 - DNA, 25 bp, Homo sapien
tctttatccttaaacataccacaat

SEQ ID NO: 5384118 - DNA, 25 bp, Homo sapien
aaagggtcgtgccacgtcgctccca

SEQ ID NO: 5384119 - DNA, 25 bp, Homo sapien
ggtcgtgccacgtcgctcccacagt

SEQ ID NO: 5384120 - DNA, 25 bp, Homo sapien
gtcgtgccacgtcgctcccacagtg

SEQ ID NO: 5384121 - DNA, 25 bp, Homo sapien
tgggaaagggtcgtgccacgtcgct

SEQ ID NO: 5384122 - DNA, 25 bp, Homo sapien
tctccactgctaagcccaatctcat

SEQ ID NO: 5384123 - DNA, 25 bp, Homo sapien
tctttgctctccactgctaagccca

SEQ ID NO: 5384124 - DNA, 25 bp, Homo sapien
gctctttgctctccactgctaagcc

SEQ ID NO: 5384125 - DNA, 25 bp, Homo sapien
gagctctttgctctccactgctaag

SEQ ID NO: 5384126 - DNA, 25 bp, Homo sapien
tgatggcaaggcatatgttgtagcc

SEQ ID NO: 5384127 - DNA, 25 bp, Homo sapien
gaagcctaactcttgtatctgatgg

SEQ ID NO: 5384128 - DNA, 25 bp, Homo sapien
cacaggacgtggatatgaagcctaa

SEQ ID NO: 5384129 - DNA, 25 bp, Homo sapien
tgttgtagccacagtgctggcgatg

SEQ ID NO: 5384130 - DNA, 25 bp, Homo sapien
tgcaatgtgtgcaccccaatcactg

SEQ ID NO: 5384131 - DNA, 25 bp, Homo sapien
gcattgagaaagtcgggacacgtac

SEQ ID NO: 5384132 - DNA, 25 bp, Homo sapien
tacatgtataagcaagtcagggcca

SEQ ID NO: 5384133 - DNA, 25 bp, Homo sapien
cagaatgttaattccacaggaaggc

SEQ ID NO: 5384134 - DNA, 25 bp, Homo sapien
tttgtctggtcttctcggatgagga

SEQ ID NO: 5384135 - DNA, 25 bp, Homo sapien
gaattctgaacctggtacaatctca

SEQ ID NO: 5384136 - DNA, 25 bp, Homo sapien
aagtatccagtgcaacctgccaagc

SEQ ID NO: 5384137 - DNA, 25 bp, Homo sapien
tcagtgtctaagctcacaatcattc

SEQ ID NO: 5384138 - DNA, 25 bp, Homo sapien
gaaatcctggggattgacaggttga

SEQ ID NO: 5384139 - DNA, 25 bp, Homo sapien
tatgtctctttaagccaagatatat

SEQ ID NO: 5384140 - DNA, 25 bp, Homo sapien
acaaattttccacaagtaagagatg

SEQ ID NO: 5384141 - DNA, 25 bp, Homo sapien
attttccacaagtaagagatgaaac

SEQ ID NO: 5384142 - DNA, 25 bp, Homo sapien
tttttccgcatttcgcactcaggta

SEQ ID NO: 5384143 - DNA, 25 bp, Homo sapien
tattataacctgacactgagaatgt

SEQ ID NO: 5384144 - DNA, 25 bp, Homo sapien
tgtatccaaattgttctatgtaacc

SEQ ID NO: 5384145 - DNA, 25 bp, Homo sapien
cactcttccggcatctaattgaatt

SEQ ID NO: 5384146 - DNA, 25 bp, Homo sapien
aaaggtcggttttctatttgcattg

SEQ ID NO: 5384147 - DNA, 25 bp, Homo sapien
tgtgctaattcagactgcacttggt

SEQ ID NO: 5384148 - DNA, 25 bp, Homo sapien
ctatttgcattgtgctaattcagac

SEQ ID NO: 5384149 - DNA, 25 bp, Homo sapien
ggtcggttttctatttgcattgtgc

SEQ ID NO: 5384150 - DNA, 25 bp, Homo sapien
acaagcgttatgttccagacagata

SEQ ID NO: 5384151 - DNA, 25 bp, Homo sapien
aaacaagcgttatgttccagacaga

SEQ ID NO: 5384152 - DNA, 25 bp, Homo sapien
caaacaagcgttatgttccagacag

SEQ ID NO: 5384153 - DNA, 25 bp, Homo sapien
aacaagcgttatgttccagacagat

SEQ ID NO: 5384154 - DNA, 25 bp, Homo sapien
gatgtgcaataccatggctatggca

SEQ ID NO: 5384155 - DNA, 25 bp, Homo sapien
cacattaagcagcattcaaggattt

SEQ ID NO: 5384156 - DNA, 25 bp, Homo sapien
tattcctagctgagtatactaaggc

SEQ ID NO: 5384157 - DNA, 25 bp, Homo sapien
ttgcacaaaggattttaccaacctc

SEQ ID NO: 5384158 - DNA, 25 bp, Homo sapien
gcactgctaagaaagatgacaattc

SEQ ID NO: 5384159 - DNA, 25 bp, Homo sapien
caagaactgagttatgagctccaaa

SEQ ID NO: 5384160 - DNA, 25 bp, Homo sapien
tgatgagggtatcttccttcggtag

SEQ ID NO: 5384161 - DNA, 25 bp, Homo sapien
aaatttggacaaactctacattggc

SEQ ID NO: 5384162 - DNA, 25 bp, Homo sapien
tgtcatcattactggatatttaaga

SEQ ID NO: 5384163 - DNA, 25 bp, Homo sapien
cacgagtaagctcccagtaagtgag

SEQ ID NO: 5384164 - DNA, 25 bp, Homo sapien
catcattactggatatttaagattc

SEQ ID NO: 5384165 - DNA, 25 bp, Homo sapien
cctccttagccccacgagtaagctc

SEQ ID NO: 5384166 - DNA, 25 bp, Homo sapien
tgcagtgacattctcaaagccattg

SEQ ID NO: 5384167 - DNA, 25 bp, Homo sapien
catcacatgaggtaagatgtgcgga

SEQ ID NO: 5384168 - DNA, 25 bp, Homo sapien
tatatgggtcagattcagttgtctc

SEQ ID NO: 5384169 - DNA, 25 bp, Homo sapien
gggcctcaatctcccatatgcagtg

SEQ ID NO: 5384170 - DNA, 25 bp, Homo sapien
gctgatggcattccagtactgggtt

SEQ ID NO: 5384171 - DNA, 25 bp, Homo sapien
ggctgatggcattccagtactgggt

SEQ ID NO: 5384172 - DNA, 25 bp, Homo sapien
tggctgatggcattccagtactggg

SEQ ID NO: 5384173 - DNA, 25 bp, Homo sapien
cctgagtattctgctagaggccagt

SEQ ID NO: 5384174 - DNA, 25 bp, Homo sapien
ccacctggaggtgtaagagacattc

SEQ ID NO: 5384175 - DNA, 25 bp, Homo sapien
taaatggtgggacgcatatcagcat

SEQ ID NO: 5384176 - DNA, 25 bp, Homo sapien
tagtcggacctccatgtagcagcca

SEQ ID NO: 5384177 - DNA, 25 bp, Homo sapien
gagactatatatgctcaacctcctg

SEQ ID NO: 5384178 - DNA, 25 bp, Homo sapien
cctaggccctaggtataaatctgat

SEQ ID NO: 5384179 - DNA, 25 bp, Homo sapien
aaaaagcatcaattacctaggccct

SEQ ID NO: 5384180 - DNA, 25 bp, Homo sapien
ccctctgaagagtccccaataggaa

SEQ ID NO: 5384181 - DNA, 25 bp, Homo sapien
attggaatatgaagagctagtggta

SEQ ID NO: 5384182 - DNA, 25 bp, Homo sapien
ttggaatatgaagagctagtggtac

SEQ ID NO: 5384183 - DNA, 25 bp, Homo sapien
cattggaatatgaagagctagtggt

SEQ ID NO: 5384184 - DNA, 25 bp, Homo sapien
ggattgaggttaccagatgtacagt

SEQ ID NO: 5384185 - DNA, 25 bp, Homo sapien
gtacagtggtagactaacactgact

SEQ ID NO: 5384186 - DNA, 25 bp, Homo sapien
cattttgccccggttgcagggattg

SEQ ID NO: 5384187 - DNA, 25 bp, Homo sapien
tacagtggtagactaacactgactt

SEQ ID NO: 5384188 - DNA, 25 bp, Homo sapien
aatggaagaagactagcaaaagggt

SEQ ID NO: 5384189 - DNA, 25 bp, Homo sapien
taggagtgacatattatgaagcaca

SEQ ID NO: 5384190 - DNA, 25 bp, Homo sapien
gaagcacatatgtacgagttcacat

SEQ ID NO: 5384191 - DNA, 25 bp, Homo sapien
taccacatactaacacagccaaatg

SEQ ID NO: 5384192 - DNA, 25 bp, Homo sapien
acttttggcattaaccagagttcaa

SEQ ID NO: 5384193 - DNA, 25 bp, Homo sapien
cattaaccagagttcaattaaagaa

SEQ ID NO: 5384194 - DNA, 25 bp, Homo sapien
ggcattaaccagagttcaattaaag

SEQ ID NO: 5384195 - DNA, 25 bp, Homo sapien
tttggcattaaccagagttcaatta

SEQ ID NO: 5384196 - DNA, 25 bp, Homo sapien
aagctgaatgttaaactactgagta

SEQ ID NO: 5384197 - DNA, 25 bp, Homo sapien
gaaagctgaatgttaaactactgag

SEQ ID NO: 5384198 - DNA, 25 bp, Homo sapien
gctgaatgttaaactactgagtaga

SEQ ID NO: 5384199 - DNA, 25 bp, Homo sapien
gaatgttaaactactgagtagaaag

SEQ ID NO: 5384200 - DNA, 25 bp, Homo sapien
cctacagctagtgggagattgacgg

SEQ ID NO: 5384201 - DNA, 25 bp, Homo sapien
tatcacctggaattggaattaagtc

SEQ ID NO: 5384202 - DNA, 25 bp, Homo sapien
ggagattgacggctgtatcacctgg

SEQ ID NO: 5384203 - DNA, 25 bp, Homo sapien
catcctacagctagtgggagattga

SEQ ID NO: 5384204 - DNA, 25 bp, Homo sapien
tggagtagcttttatggacagaaga

SEQ ID NO: 5384205 - DNA, 25 bp, Homo sapien
tagcttttatggacagaagaaaccc

SEQ ID NO: 5384206 - DNA, 25 bp, Homo sapien
tatggacagaagaaaccctttccca

SEQ ID NO: 5384207 - DNA, 25 bp, Homo sapien
agtagcttttatggacagaagaaac

SEQ ID NO: 5384208 - DNA, 25 bp, Homo sapien
gaattcatgttgaacccagctctgg

SEQ ID NO: 5384209 - DNA, 25 bp, Homo sapien
gctctgccggatcaatgtggacttc

SEQ ID NO: 5384210 - DNA, 25 bp, Homo sapien
gcctcagtgtgagctgtgaacccca

SEQ ID NO: 5384211 - DNA, 25 bp, Homo sapien
acattattgaaaaggcgttgccggc

SEQ ID NO: 5384212 - DNA, 25 bp, Homo sapien
acccagcccggccttcatgaggcgc

SEQ ID NO: 5384213 - DNA, 25 bp, Homo sapien
gcagcttcatgcatgcgaggtcccg

SEQ ID NO: 5384214 - DNA, 25 bp, Homo sapien
ctgcagcttcatgcatgcgaggtcc

SEQ ID NO: 5384215 - DNA, 25 bp, Homo sapien
tctcaaacactagggcgccccgggc

SEQ ID NO: 5384216 - DNA, 25 bp, Homo sapien
cataataactgggacagatattgtt

SEQ ID NO: 5384217 - DNA, 25 bp, Homo sapien
tagagtggcagggctacttgcctca

SEQ ID NO: 5384218 - DNA, 25 bp, Homo sapien
tattgtacataataactgggacaga

SEQ ID NO: 5384219 - DNA, 25 bp, Homo sapien
gtggcagggctacttgcctcatttt

SEQ ID NO: 5384220 - DNA, 25 bp, Homo sapien
cgcaataatgagtcagctacatcca

SEQ ID NO: 5384221 - DNA, 25 bp, Homo sapien
atgagtcagctacatccatttagat

SEQ ID NO: 5384222 - DNA, 25 bp, Homo sapien
gtcagctacatccatttagattatc

SEQ ID NO: 5384223 - DNA, 25 bp, Homo sapien
taatgagtcagctacatccatttag

SEQ ID NO: 5384224 - DNA, 25 bp, Homo sapien
tgggttaatatttgattggctgcac

SEQ ID NO: 5384225 - DNA, 25 bp, Homo sapien
atgggttaatatttgattggctgca

SEQ ID NO: 5384226 - DNA, 25 bp, Homo sapien
aatgggttaatatttgattggctgc

SEQ ID NO: 5384227 - DNA, 25 bp, Homo sapien
gctggtgcgacgttgctccgcacaa

SEQ ID NO: 5384228 - DNA, 25 bp, Homo sapien
aggaaaagctggtgcgacgttgctc

SEQ ID NO: 5384229 - DNA, 25 bp, Homo sapien
aaaagctggtgcgacgttgctccgc

SEQ ID NO: 5384230 - DNA, 25 bp, Homo sapien
tgcgacgttgctccgcacaatggag

SEQ ID NO: 5384231 - DNA, 25 bp, Homo sapien
gggacaatctccaatccgcttggga

SEQ ID NO: 5384232 - DNA, 25 bp, Homo sapien
tctccaatccgcttgggagtgatct

SEQ ID NO: 5384233 - DNA, 25 bp, Homo sapien
attgggacaatctccaatccgcttg

SEQ ID NO: 5384234 - DNA, 25 bp, Homo sapien
aatccgcttgggagtgatctcgtca

SEQ ID NO: 5384235 - DNA, 25 bp, Homo sapien
tgtggtttttagtaggtacagatct

SEQ ID NO: 5384236 - DNA, 25 bp, Homo sapien
tccttttttacatggcagactagct

SEQ ID NO: 5384237 - DNA, 25 bp, Homo sapien
gccacgtagcttcagaagtgtggtt

SEQ ID NO: 5384238 - DNA, 25 bp, Homo sapien
cagatctactaggaactttcattca

SEQ ID NO: 5384239 - DNA, 25 bp, Homo sapien
tgagcctgataagaaaggagtctct

SEQ ID NO: 5384240 - DNA, 25 bp, Homo sapien
tcttgggagagaagcaagcatacac

SEQ ID NO: 5384241 - DNA, 25 bp, Homo sapien
ggccagacagcccatggtcaaagtt

SEQ ID NO: 5384242 - DNA, 25 bp, Homo sapien
tggtaaaaacagcagaatgacaggt

SEQ ID NO: 5384243 - DNA, 25 bp, Homo sapien
agaggatgaacagcgcccatacact

SEQ ID NO: 5384244 - DNA, 25 bp, Homo sapien
agcactcccgatgtctgggtgtttt

SEQ ID NO: 5384245 - DNA, 25 bp, Homo sapien
gcagcactcccgatgtctgggtgtt

SEQ ID NO: 5384246 - DNA, 25 bp, Homo sapien
ttcaggattaggactcttgcatcac

SEQ ID NO: 5384247 - DNA, 25 bp, Homo sapien
agtcatctcgaaaacatagctgact

SEQ ID NO: 5384248 - DNA, 25 bp, Homo sapien
tctcgaaaacatagctgactgtcac

SEQ ID NO: 5384249 - DNA, 25 bp, Homo sapien
tcatctcgaaaacatagctgactgt

SEQ ID NO: 5384250 - DNA, 25 bp, Homo sapien
gaaaacatagctgactgtcactcct

SEQ ID NO: 5384251 - DNA, 25 bp, Homo sapien
ttgatctcaagctccattctacctc

SEQ ID NO: 5384252 - DNA, 25 bp, Homo sapien
tcaagctccattctacctcctgaat

SEQ ID NO: 5384253 - DNA, 25 bp, Homo sapien
gctccattctacctcctgaattaag

SEQ ID NO: 5384254 - DNA, 25 bp, Homo sapien
cagacacttgatctcaagctccatt

SEQ ID NO: 5384255 - DNA, 25 bp, Homo sapien
agcacaagcgcatcaataaagtccg

SEQ ID NO: 5384256 - DNA, 25 bp, Homo sapien
cttgctcagcacaagcgcatcaata

SEQ ID NO: 5384257 - DNA, 25 bp, Homo sapien
aaagtccgaagccttgaatgtggcc

SEQ ID NO: 5384258 - DNA, 25 bp, Homo sapien
ataaagtccgaagccttgaatgtgg

SEQ ID NO: 5384259 - DNA, 25 bp, Homo sapien
cagaagcatcgcccctcaggaatgg

SEQ ID NO: 5384260 - DNA, 25 bp, Homo sapien
gcatcgcccctcaggaatgggtagt

SEQ ID NO: 5384261 - DNA, 25 bp, Homo sapien
aagcatcgcccctcaggaatgggta

SEQ ID NO: 5384262 - DNA, 25 bp, Homo sapien
ctcaggaatgggtagtacaggaagt

SEQ ID NO: 5384263 - DNA, 25 bp, Homo sapien
tgacgccgttacactatgagggtac

SEQ ID NO: 5384264 - DNA, 25 bp, Homo sapien
cgccgttacactatgagggtactga

SEQ ID NO: 5384265 - DNA, 25 bp, Homo sapien
gacgccgttacactatgagggtact

SEQ ID NO: 5384266 - DNA, 25 bp, Homo sapien
ctgacgccgttacactatgagggta

SEQ ID NO: 5384267 - DNA, 25 bp, Homo sapien
tgtttgctggggacctcttgctgtt

SEQ ID NO: 5384268 - DNA, 25 bp, Homo sapien
ttgctggggacctcttgctgttctc

SEQ ID NO: 5384269 - DNA, 25 bp, Homo sapien
ttccaaggccatctgtggatgtttg

SEQ ID NO: 5384270 - DNA, 25 bp, Homo sapien
gatgtttgctggggacctcttgctg

SEQ ID NO: 5384271 - DNA, 25 bp, Homo sapien
aaacaaaggctcactgccacaaatg

SEQ ID NO: 5384272 - DNA, 25 bp, Homo sapien
agcccaacctcagaacaaacaaagg

SEQ ID NO: 5384273 - DNA, 25 bp, Homo sapien
ggaggtttcattccgcacaaagctc

SEQ ID NO: 5384274 - DNA, 25 bp, Homo sapien
gaggaaaggaggtttcattccgcac

SEQ ID NO: 5384275 - DNA, 25 bp, Homo sapien
taggatgtgcaaagggcccctactc

SEQ ID NO: 5384276 - DNA, 25 bp, Homo sapien
aggatgtgcaaagggcccctactcc

SEQ ID NO: 5384277 - DNA, 25 bp, Homo sapien
tggtgtctacattaccatctgtgcc

SEQ ID NO: 5384278 - DNA, 25 bp, Homo sapien
ctgtggtgtctacattaccatctgt

SEQ ID NO: 5384279 - DNA, 25 bp, Homo sapien
ggtcccaagacaccttgttctcagg

SEQ ID NO: 5384280 - DNA, 25 bp, Homo sapien
gataaagtatgctgagctgccagga

SEQ ID NO: 5384281 - DNA, 25 bp, Homo sapien
gctgtcctctggttaaggagtgtgc

SEQ ID NO: 5384282 - DNA, 25 bp, Homo sapien
cattggtggcctggccttatggtcc

SEQ ID NO: 5384283 - DNA, 25 bp, Homo sapien
gtaggccccactgaacaggcaccga

SEQ ID NO: 5384284 - DNA, 25 bp, Homo sapien
tgagtaggccccactgaacaggcac

SEQ ID NO: 5384285 - DNA, 25 bp, Homo sapien
ccccactgaacaggcaccgactact

SEQ ID NO: 5384286 - DNA, 25 bp, Homo sapien
aggcaccgactactcaggtccccgc

SEQ ID NO: 5384287 - DNA, 25 bp, Homo sapien
gccgagtcccctgcgtggcaatcat

SEQ ID NO: 5384288 - DNA, 25 bp, Homo sapien
aggccgagtcccctgcgtggcaatc

SEQ ID NO: 5384289 - DNA, 25 bp, Homo sapien
ggccgagtcccctgcgtggcaatca

SEQ ID NO: 5384290 - DNA, 25 bp, Homo sapien
aaaggccgagtcccctgcgtggcaa

SEQ ID NO: 5384291 - DNA, 25 bp, Homo sapien
gccaaacatggtacatcggttcttc

SEQ ID NO: 5384292 - DNA, 25 bp, Homo sapien
tgccaaacatggtacatcggttctt

SEQ ID NO: 5384293 - DNA, 25 bp, Homo sapien
gctgccaaacatggtacatcggttc

SEQ ID NO: 5384294 - DNA, 25 bp, Homo sapien
ttgctgccaaacatggtacatcggt

SEQ ID NO: 5384295 - DNA, 25 bp, Homo sapien
ggctcagactgggtgatcattctct

SEQ ID NO: 5384296 - DNA, 25 bp, Homo sapien
taaggctcagactgggtgatcattc

SEQ ID NO: 5384297 - DNA, 25 bp, Homo sapien
ggaaataaggctcagactgggtgat

SEQ ID NO: 5384298 - DNA, 25 bp, Homo sapien
gactgggtgatcattctctgccatc

SEQ ID NO: 5384299 - DNA, 25 bp, Homo sapien
tggagccaccgacccacacggagta

SEQ ID NO: 5384300 - DNA, 25 bp, Homo sapien
caggatggagccaccgacccacacg

SEQ ID NO: 5384301 - DNA, 25 bp, Homo sapien
gatggagccaccgacccacacggag

SEQ ID NO: 5384302 - DNA, 25 bp, Homo sapien
aggatggagccaccgacccacacgg

SEQ ID NO: 5384303 - DNA, 25 bp, Homo sapien
cctgatcttcatcatgctaggcgcc

SEQ ID NO: 5384304 - DNA, 25 bp, Homo sapien
cttctgcattctgtgggccatgcca

SEQ ID NO: 5384305 - DNA, 25 bp, Homo sapien
cattctgtgggccatgccagggtac

SEQ ID NO: 5384306 - DNA, 25 bp, Homo sapien
tcatcatgctaggcgccagggcagc

SEQ ID NO: 5384307 - DNA, 25 bp, Homo sapien
gtctttgcggatgtccacatcagac

SEQ ID NO: 5384308 - DNA, 25 bp, Homo sapien
tgttggtgtacaggtctttgcggat

SEQ ID NO: 5384309 - DNA, 25 bp, Homo sapien
gtgttggtgtacaggtctttgcgga

SEQ ID NO: 5384310 - DNA, 25 bp, Homo sapien
ttgcggatgtccacatcagacttca

SEQ ID NO: 5384311 - DNA, 25 bp, Homo sapien
tggaagagcgcctcggggcagcgga

SEQ ID NO: 5384312 - DNA, 25 bp, Homo sapien
gaagcaaggctggaagagcgcctcg

SEQ ID NO: 5384313 - DNA, 25 bp, Homo sapien
gcaaggctggaagagcgcctcgggg

SEQ ID NO: 5384314 - DNA, 25 bp, Homo sapien
aggaagcaaggctggaagagcgcct

SEQ ID NO: 5384315 - DNA, 25 bp, Homo sapien
tggtgaacctatagccatgctcggt

SEQ ID NO: 5384316 - DNA, 25 bp, Homo sapien
tggtggtgaacctatagccatgctc

SEQ ID NO: 5384317 - DNA, 25 bp, Homo sapien
ccatggtggtgaacctatagccatg

SEQ ID NO: 5384318 - DNA, 25 bp, Homo sapien
aggtagtcaggcagttcccgcccag

SEQ ID NO: 5384319 - DNA, 25 bp, Homo sapien
atgggggagggcattcccctcatag

SEQ ID NO: 5384320 - DNA, 25 bp, Homo sapien
tggcatgggggagggcattcccctc

SEQ ID NO: 5384321 - DNA, 25 bp, Homo sapien
gcatgggggagggcattcccctcat

SEQ ID NO: 5384322 - DNA, 25 bp, Homo sapien
ctaggcgcagggtggcatgggggag

SEQ ID NO: 5384323 - DNA, 25 bp, Homo sapien
gatgatgccgtgttccatggggtac

SEQ ID NO: 5384324 - DNA, 25 bp, Homo sapien
agggtggcctcggtcagcaggacgg

SEQ ID NO: 5384325 - DNA, 25 bp, Homo sapien
catcttctcgcggttggccttaggg

SEQ ID NO: 5384326 - DNA, 25 bp, Homo sapien
cgatgccagtagtacggccagaggt

SEQ ID NO: 5384327 - DNA, 25 bp, Homo sapien
tcatgccctgctgcctggggcgccc

SEQ ID NO: 5384328 - DNA, 25 bp, Homo sapien
tgccctgctgcctggggcgccccac

SEQ ID NO: 5384329 - DNA, 25 bp, Homo sapien
gatgcatgccccccatcatgccctg

SEQ ID NO: 5384330 - DNA, 25 bp, Homo sapien
ctgatgcatgccccccatcatgccc

SEQ ID NO: 5384331 - DNA, 25 bp, Homo sapien
acgagcacagcggtatcatcatcca

SEQ ID NO: 5384332 - DNA, 25 bp, Homo sapien
ttgtcaatgacgagcacagcggtat

SEQ ID NO: 5384333 - DNA, 25 bp, Homo sapien
ccgttgtcaatgacgagcacagcgg

SEQ ID NO: 5384334 - DNA, 25 bp, Homo sapien
cgagcacagcggtatcatcatccat

SEQ ID NO: 5384335 - DNA, 25 bp, Homo sapien
tcttagctggctctgatgtttcatt

SEQ ID NO: 5384336 - DNA, 25 bp, Homo sapien
aatcctttatatttccaaaatacag

SEQ ID NO: 5384337 - DNA, 25 bp, Homo sapien
atacacacatataaaaacatttgaa

SEQ ID NO: 5384338 - DNA, 25 bp, Homo sapien
acacacatataaaaacatttgaaaa

SEQ ID NO: 5384339 - DNA, 25 bp, Homo sapien
tatatttccaaaatacagttcttta

SEQ ID NO: 5384340 - DNA, 25 bp, Homo sapien
cattttttcaaccacttctatctgc

SEQ ID NO: 5384341 - DNA, 25 bp, Homo sapien
tgaatcagaatctcatcgtgtaata

SEQ ID NO: 5384342 - DNA, 25 bp, Homo sapien
attgcttctgagtatcattttgttc

SEQ ID NO: 5384343 - DNA, 25 bp, Homo sapien
gtgttctgttcttcacaaaattgct

SEQ ID NO: 5384344 - DNA, 25 bp, Homo sapien
ttttcatgaaatactggagctgtcc

SEQ ID NO: 5384345 - DNA, 25 bp, Homo sapien
tttaattttcatgaaatactggagc

SEQ ID NO: 5384346 - DNA, 25 bp, Homo sapien
attttaattttcatgaaatactgga

SEQ ID NO: 5384347 - DNA, 25 bp, Homo sapien
taattttcatgaaatactggagctg

SEQ ID NO: 5384348 - DNA, 25 bp, Homo sapien
cagtatagtcttactatcggaagca

SEQ ID NO: 5384349 - DNA, 25 bp, Homo sapien
tactatcggaagcaaaaaattccaa

SEQ ID NO: 5384350 - DNA, 25 bp, Homo sapien
ttatttcaaataccgaaggtccata

SEQ ID NO: 5384351 - DNA, 25 bp, Homo sapien
ttcaaataccgaaggtccataatcc

SEQ ID NO: 5384352 - DNA, 25 bp, Homo sapien
gaaattgctggctttcaggtgttct

SEQ ID NO: 5384353 - DNA, 25 bp, Homo sapien
ggaaattgctggctttcaggtgttc

SEQ ID NO: 5384354 - DNA, 25 bp, Homo sapien
ctctctatcaccatccttatttatt

SEQ ID NO: 5384355 - DNA, 25 bp, Homo sapien
ctatcaccatccttatttatttctg

SEQ ID NO: 5384356 - DNA, 25 bp, Homo sapien
tctatcaccatccttatttatttct

SEQ ID NO: 5384357 - DNA, 25 bp, Homo sapien
tctctatcaccatccttatttattt

SEQ ID NO: 5384358 - DNA, 25 bp, Homo sapien
cagatgtaaaaacagaaggttaatt

SEQ ID NO: 5384359 - DNA, 25 bp, Homo sapien
gcagatgtaaaaacagaaggttaat

SEQ ID NO: 5384360 - DNA, 25 bp, Homo sapien
gtcccattctgcaagatatggttct

SEQ ID NO: 5384361 - DNA, 25 bp, Homo sapien
tgggttgcttttatgacctggttcc

SEQ ID NO: 5384362 - DNA, 25 bp, Homo sapien
gttcttgtaataggcagttgggttg

SEQ ID NO: 5384363 - DNA, 25 bp, Homo sapien
ttgcttttatgacctggttccctcc

SEQ ID NO: 5384364 - DNA, 25 bp, Homo sapien
ggctggccattttcactgcctttaa

SEQ ID NO: 5384365 - DNA, 25 bp, Homo sapien
tctggctggccattttcactgcctt

SEQ ID NO: 5384366 - DNA, 25 bp, Homo sapien
gcctttaagcctttgtgactcttcc

SEQ ID NO: 5384367 - DNA, 25 bp, Homo sapien
ctctggctggccattttcactgcct

SEQ ID NO: 5384368 - DNA, 25 bp, Homo sapien
tcttgaccacctaaactgtacatta

SEQ ID NO: 5384369 - DNA, 25 bp, Homo sapien
taatgccagagacagggcacacagg

SEQ ID NO: 5384370 - DNA, 25 bp, Homo sapien
agaaggatgagtgagtagggcactg

SEQ ID NO: 5384371 - DNA, 25 bp, Homo sapien
tagggcactgccagcagttcagtaa

SEQ ID NO: 5384372 - DNA, 25 bp, Homo sapien
tgccagcagttcagtaatgccagag

SEQ ID NO: 5384373 - DNA, 25 bp, Homo sapien
aatactagtgtgcaatctggaaacc

SEQ ID NO: 5384374 - DNA, 25 bp, Homo sapien
tgtgctgccttcatacgctccttgc

SEQ ID NO: 5384375 - DNA, 25 bp, Homo sapien
tctgtcacggacgatgatgcacatg

SEQ ID NO: 5384376 - DNA, 25 bp, Homo sapien
tgaaaaaggcataacgaaggccaac

SEQ ID NO: 5384377 - DNA, 25 bp, Homo sapien
ttttcagaagagtattttggcatct

SEQ ID NO: 5384378 - DNA, 25 bp, Homo sapien
tgttttcagaagagtattttggcat

SEQ ID NO: 5384379 - DNA, 25 bp, Homo sapien
gttttcagaagagtattttggcatc

SEQ ID NO: 5384380 - DNA, 25 bp, Homo sapien
tttcagaagagtattttggcatctg

SEQ ID NO: 5384381 - DNA, 25 bp, Homo sapien
tcactttcgttgtcaggaaattgct

SEQ ID NO: 5384382 - DNA, 25 bp, Homo sapien
ttcactttcgttgtcaggaaattgc

SEQ ID NO: 5384383 - DNA, 25 bp, Homo sapien
cttcactttcgttgtcaggaaattg

SEQ ID NO: 5384384 - DNA, 25 bp, Homo sapien
ctctctatcaccatccttatttatt

SEQ ID NO: 5384385 - DNA, 25 bp, Homo sapien
ttatttctggttcttgagacatttt

SEQ ID NO: 5384386 - DNA, 25 bp, Homo sapien
tctatcaccatccttatttatttct

SEQ ID NO: 5384387 - DNA, 25 bp, Homo sapien
atttatttctggttcttgagacatt

SEQ ID NO: 5384388 - DNA, 25 bp, Homo sapien
ctacaataggaggatgagtgagtag

SEQ ID NO: 5384389 - DNA, 25 bp, Homo sapien
tgccagcagctcagtaatgccagag

SEQ ID NO: 5384390 - DNA, 25 bp, Homo sapien
agcagctcagtaatgccagagaaag

SEQ ID NO: 5384391 - DNA, 25 bp, Homo sapien
gctcagtaatgccagagaaagggca

SEQ ID NO: 5384392 - DNA, 25 bp, Homo sapien
tttctttgtagtcagaaagtaactg

SEQ ID NO: 5384393 - DNA, 25 bp, Homo sapien
gtagtcagaaagtaactggcaaatt

SEQ ID NO: 5384394 - DNA, 25 bp, Homo sapien
tctttgtagtcagaaagtaactggc

SEQ ID NO: 5384395 - DNA, 25 bp, Homo sapien
tttgtagtcagaaagtaactggcaa

SEQ ID NO: 5384396 - DNA, 25 bp, Homo sapien
agccacgctaactttccccgtattg

SEQ ID NO: 5384397 - DNA, 25 bp, Homo sapien
gcagaagccacgctaactttccccg

SEQ ID NO: 5384398 - DNA, 25 bp, Homo sapien
ggaatgcttcaaagatctgtcctgc

SEQ ID NO: 5384399 - DNA, 25 bp, Homo sapien
atgcttcaaagatctgtcctgcctc

SEQ ID NO: 5384400 - DNA, 25 bp, Homo sapien
tataaaggtgcctcacagtacagat

SEQ ID NO: 5384401 - DNA, 25 bp, Homo sapien
tcagggcaaggttcatacgggactt

SEQ ID NO: 5384402 - DNA, 25 bp, Homo sapien
gcccaaggttctatacaggatataa

SEQ ID NO: 5384403 - DNA, 25 bp, Homo sapien
tctactgcccaaggttctatacagg

SEQ ID NO: 5384404 - DNA, 25 bp, Homo sapien
tgtgtgcggataaagtcaggatgcc

SEQ ID NO: 5384405 - DNA, 25 bp, Homo sapien
ttgtgtgcggataaagtcaggatgc

SEQ ID NO: 5384406 - DNA, 25 bp, Homo sapien
tttgtgtgcggataaagtcaggatg

SEQ ID NO: 5384407 - DNA, 25 bp, Homo sapien
gtgtgcggataaagtcaggatgccc

SEQ ID NO: 5384408 - DNA, 25 bp, Homo sapien
cgtctgtccagatagatcttgagaa

SEQ ID NO: 5384409 - DNA, 25 bp, Homo sapien
gatagatcttgagaagatacatcaa

SEQ ID NO: 5384410 - DNA, 25 bp, Homo sapien
acagcatactctctggccgtctgtc

SEQ ID NO: 5384411 - DNA, 25 bp, Homo sapien
tctggccgtctgtccagatagatct

SEQ ID NO: 5384412 - DNA, 25 bp, Homo sapien
ttatgacttgagtgactgctgtcca

SEQ ID NO: 5384413 - DNA, 25 bp, Homo sapien
tttgctcatgtacaccaagtaacag

SEQ ID NO: 5384414 - DNA, 25 bp, Homo sapien
ccaagtaacagtggtgtgaggccat

SEQ ID NO: 5384415 - DNA, 25 bp, Homo sapien
gctcatgtacaccaagtaacagtgg

SEQ ID NO: 5384416 - DNA, 25 bp, Homo sapien
gtttttgctcatgtacaccaagtaa

SEQ ID NO: 5384417 - DNA, 25 bp, Homo sapien
accatctgagcttggagaggtcgag

SEQ ID NO: 5384418 - DNA, 25 bp, Homo sapien
aaaaactgaggttggaggaccatct

SEQ ID NO: 5384419 - DNA, 25 bp, Homo sapien
gcctgagaaacatggcaaaaacctc

SEQ ID NO: 5384420 - DNA, 25 bp, Homo sapien
ttggaggaccatctgagcttggaga

SEQ ID NO: 5384421 - DNA, 25 bp, Homo sapien
ggctagatccgaagagagggcccct

SEQ ID NO: 5384422 - DNA, 25 bp, Homo sapien
aggggccctctcttcggatctagcc

SEQ ID NO: 5384423 - DNA, 25 bp, Homo sapien
tgattcgatatcagcaccatataag

SEQ ID NO: 5384424 - DNA, 25 bp, Homo sapien
ttttttgattcgatatcagcaccat

SEQ ID NO: 5384425 - DNA, 25 bp, Homo sapien
gattcgatatcagcaccatataaga

SEQ ID NO: 5384426 - DNA, 25 bp, Homo sapien
tttgattcgatatcagcaccatata

SEQ ID NO: 5384427 - DNA, 25 bp, Homo sapien
tatagatagcgtagtgcagagtggt

SEQ ID NO: 5384428 - DNA, 25 bp, Homo sapien
tagatagcgtagtgcagagtggtat

SEQ ID NO: 5384429 - DNA, 25 bp, Homo sapien
attatagatagcgtagtgcagagtg

SEQ ID NO: 5384430 - DNA, 25 bp, Homo sapien
tagcgtagtgcagagtggtatttcc

SEQ ID NO: 5384431 - DNA, 25 bp, Homo sapien
ctcatgctgatatagttggctactg

SEQ ID NO: 5384432 - DNA, 25 bp, Homo sapien
ttgacatcgtctgtccagcaggagt

SEQ ID NO: 5384433 - DNA, 25 bp, Homo sapien
tgacatcgtctgtccagcaggagtt

SEQ ID NO: 5384434 - DNA, 25 bp, Homo sapien
ttccacatccagggtggtgtgaggc

SEQ ID NO: 5384435 - DNA, 25 bp, Homo sapien
ctctctgaggtttccacatccaggg

SEQ ID NO: 5384436 - DNA, 25 bp, Homo sapien
gaggtttccacatccagggtggtgt

SEQ ID NO: 5384437 - DNA, 25 bp, Homo sapien
ggtttccacatccagggtggtgtga

SEQ ID NO: 5384438 - DNA, 25 bp, Homo sapien
cttcatagcagagtcgtcgtggtct

SEQ ID NO: 5384439 - DNA, 25 bp, Homo sapien
gcatggaatcaacctcaaccaccat

SEQ ID NO: 5384440 - DNA, 25 bp, Homo sapien
gaagaggcagccggcatggaatcaa

SEQ ID NO: 5384441 - DNA, 25 bp, Homo sapien
gtcctgttaggatgctgtaagcccc

SEQ ID NO: 5384442 - DNA, 25 bp, Homo sapien
tgctgtcctgttaggatgctgtaag

SEQ ID NO: 5384443 - DNA, 25 bp, Homo sapien
cccactccatgaaactgggcctgct

SEQ ID NO: 5384444 - DNA, 25 bp, Homo sapien
ggcctgctgtcctgttaggatgctg

SEQ ID NO: 5384445 - DNA, 25 bp, Homo sapien
tattttcagtttcaacaggtaaggc

SEQ ID NO: 5384446 - DNA, 25 bp, Homo sapien
ggtaaggcgatacctgcttcatcgt

SEQ ID NO: 5384447 - DNA, 25 bp, Homo sapien
catcgtgtgcttttatgtaaatgcc

SEQ ID NO: 5384448 - DNA, 25 bp, Homo sapien
gatcaagtactttatctatcttgag

SEQ ID NO: 5384449 - DNA, 25 bp, Homo sapien
tctgcctctcggcaaagttgttctt

SEQ ID NO: 5384450 - DNA, 25 bp, Homo sapien
ttcagtgcgggcaggatggcacgct

SEQ ID NO: 5384451 - DNA, 25 bp, Homo sapien
ggcgccgtttctgcattgcctgcag

SEQ ID NO: 5384452 - DNA, 25 bp, Homo sapien
aggatggcacgctccgccacaggtg

SEQ ID NO: 5384453 - DNA, 25 bp, Homo sapien
tgtgtggggagtgcggcctgcatgg

SEQ ID NO: 5384454 - DNA, 25 bp, Homo sapien
cgggtagagggactgtcaccgtgag

SEQ ID NO: 5384455 - DNA, 25 bp, Homo sapien
ctgcatggccctcacgggggcacag

SEQ ID NO: 5384456 - DNA, 25 bp, Homo sapien
agagggactgtcaccgtgagcatcc

SEQ ID NO: 5384457 - DNA, 25 bp, Homo sapien
gaccttggggaaatgcgtggcttct

SEQ ID NO: 5384458 - DNA, 25 bp, Homo sapien
ccttggggaaatgcgtggcttcttg

SEQ ID NO: 5384459 - DNA, 25 bp, Homo sapien
accttggggaaatgcgtggcttctt

SEQ ID NO: 5384460 - DNA, 25 bp, Homo sapien
ctgggtgaaggaagagtcagcagtg

SEQ ID NO: 5384461 - DNA, 25 bp, Homo sapien
tgggtgaaggaagagtcagcagtga

SEQ ID NO: 5384462 - DNA, 25 bp, Homo sapien
gggtgaaggaagagtcagcagtgag

SEQ ID NO: 5384463 - DNA, 25 bp, Homo sapien
ggaaagctagcttcctccgggactg

SEQ ID NO: 5384464 - DNA, 25 bp, Homo sapien
ctgggaaagctagcttcctccggga

SEQ ID NO: 5384465 - DNA, 25 bp, Homo sapien
agctagcttcctccgggactgcctg

SEQ ID NO: 5384466 - DNA, 25 bp, Homo sapien
tccaggagggacttgaggtgctgca

SEQ ID NO: 5384467 - DNA, 25 bp, Homo sapien
cttcgcactgcctaagtgtggtggg

SEQ ID NO: 5384468 - DNA, 25 bp, Homo sapien
tggtattccacagctcgcggatgag

SEQ ID NO: 5384469 - DNA, 25 bp, Homo sapien
gcacttcgcactgcctaagtgtggt

SEQ ID NO: 5384470 - DNA, 25 bp, Homo sapien
gcggatgagcacttcgcactgccta

SEQ ID NO: 5384471 - DNA, 25 bp, Homo sapien
tgctggctgttccccatacaggcag

SEQ ID NO: 5384472 - DNA, 25 bp, Homo sapien
ctggctgttccccatacaggcagct

SEQ ID NO: 5384473 - DNA, 25 bp, Homo sapien
tggctgttccccatacaggcagctc

SEQ ID NO: 5384474 - DNA, 25 bp, Homo sapien
gctggctgttccccatacaggcagc

SEQ ID NO: 5384475 - DNA, 25 bp, Homo sapien
tggcctagtgccctccaaaggcagg

SEQ ID NO: 5384476 - DNA, 25 bp, Homo sapien
ttcagtgggtgaccagctagctgcc

SEQ ID NO: 5384477 - DNA, 25 bp, Homo sapien
gactgcagggcgtgagcctagtaaa

SEQ ID NO: 5384478 - DNA, 25 bp, Homo sapien
ccttagggtgcaggcaagacttacc

SEQ ID NO: 5384479 - DNA, 25 bp, Homo sapien
tttgaatcttgcttgttgaaggagc

SEQ ID NO: 5384480 - DNA, 25 bp, Homo sapien
ttttgaatcttgcttgttgaaggag

SEQ ID NO: 5384481 - DNA, 25 bp, Homo sapien
cttttgaatcttgcttgttgaagga

SEQ ID NO: 5384482 - DNA, 25 bp, Homo sapien
acagtcaccgcccaagttttccagg

SEQ ID NO: 5384483 - DNA, 25 bp, Homo sapien
agccagggtacgtcctccctaggcg

SEQ ID NO: 5384484 - DNA, 25 bp, Homo sapien
aaactgcatgagaggcttgggaccc

SEQ ID NO: 5384485 - DNA, 25 bp, Homo sapien
caatcaacatagtggaagctggccc

SEQ ID NO: 5384486 - DNA, 25 bp, Homo sapien
gatggacttgacagactggaagctt

SEQ ID NO: 5384487 - DNA, 25 bp, Homo sapien
gagatggacttgacagactggaagc

SEQ ID NO: 5384488 - DNA, 25 bp, Homo sapien
agagatggacttgacagactggaag

SEQ ID NO: 5384489 - DNA, 25 bp, Homo sapien
ggacttgacagactggaagcttgac

SEQ ID NO: 5384490 - DNA, 25 bp, Homo sapien
tgcaggagagcgcacagtgtcggcg

SEQ ID NO: 5384491 - DNA, 25 bp, Homo sapien
agtgtcggcgctaccgcccgcaaga

SEQ ID NO: 5384492 - DNA, 25 bp, Homo sapien
tctacccacactccgttgatgcaga

SEQ ID NO: 5384493 - DNA, 25 bp, Homo sapien
ttgatgcagacccagcgagcgccca

SEQ ID NO: 5384494 - DNA, 25 bp, Homo sapien
agtgagctcgagaccacaacccaga

SEQ ID NO: 5384495 - DNA, 25 bp, Homo sapien
ctcgagaccacaacccagaatcctg

SEQ ID NO: 5384496 - DNA, 25 bp, Homo sapien
tcgagaccacaacccagaatcctgg

SEQ ID NO: 5384497 - DNA, 25 bp, Homo sapien
gagctcgagaccacaacccagaatc

SEQ ID NO: 5384498 - DNA, 25 bp, Homo sapien
cggctagaggtagcggcatctgtcc

SEQ ID NO: 5384499 - DNA, 25 bp, Homo sapien
tccagccacggctagaggtagcggc

SEQ ID NO: 5384500 - DNA, 25 bp, Homo sapien
gccacggctagaggtagcggcatct

SEQ ID NO: 5384501 - DNA, 25 bp, Homo sapien
tagaggtagcggcatctgtccaggt

SEQ ID NO: 5384502 - DNA, 25 bp, Homo sapien
ctgggtggcaagagcatcccatcag

SEQ ID NO: 5384503 - DNA, 25 bp, Homo sapien
tgggtggcaagagcatcccatcagg

SEQ ID NO: 5384504 - DNA, 25 bp, Homo sapien
gtgatgtctgattcattatgagctt

SEQ ID NO: 5384505 - DNA, 25 bp, Homo sapien
actggctgattgggccctgccccat

SEQ ID NO: 5384506 - DNA, 25 bp, Homo sapien
tgaaagcaagcacacgctctcctca

SEQ ID NO: 5384507 - DNA, 25 bp, Homo sapien
ctgccccatggatcccgctctccac

SEQ ID NO: 5384508 - DNA, 25 bp, Homo sapien
tcctcagcacttgtgaaaccacagc

SEQ ID NO: 5384509 - DNA, 25 bp, Homo sapien
tgggtgtcaggccaggagtggcccc

SEQ ID NO: 5384510 - DNA, 25 bp, Homo sapien
ggtgtcaggccaggagtggcccctg

SEQ ID NO: 5384511 - DNA, 25 bp, Homo sapien
ctttgtcgtgggtgtcaggccagga

SEQ ID NO: 5384512 - DNA, 25 bp, Homo sapien
ttgtcgtgggtgtcaggccaggagt

SEQ ID NO: 5384513 - DNA, 25 bp, Homo sapien
gactggagggcgtccacactgccag

SEQ ID NO: 5384514 - DNA, 25 bp, Homo sapien
gtttttaacagaggtgtgtctgacc

SEQ ID NO: 5384515 - DNA, 25 bp, Homo sapien
aaagtttttaacagaggtgtgtctg

SEQ ID NO: 5384516 - DNA, 25 bp, Homo sapien
ctctataaagtttttaacagaggtg

SEQ ID NO: 5384517 - DNA, 25 bp, Homo sapien
ctataaagtttttaacagaggtgtg

SEQ ID NO: 5384518 - DNA, 25 bp, Homo sapien
ccaggcgtgtgctggagttgatggc

SEQ ID NO: 5384519 - DNA, 25 bp, Homo sapien
tgagcccaggcgtgtgctggagttg

SEQ ID NO: 5384520 - DNA, 25 bp, Homo sapien
ggagcggcagtgttgagtgtgcctg

SEQ ID NO: 5384521 - DNA, 25 bp, Homo sapien
gcgggagcggcagtgttgagtgtgc

SEQ ID NO: 5384522 - DNA, 25 bp, Homo sapien
cttgttttcccgcttcagatgctcg

SEQ ID NO: 5384523 - DNA, 25 bp, Homo sapien
cagatgctcgatctcctcatggagc

SEQ ID NO: 5384524 - DNA, 25 bp, Homo sapien
ccaggttccgtttctgcgggtcgct

SEQ ID NO: 5384525 - DNA, 25 bp, Homo sapien
caggttccgtttctgcgggtcgctc

SEQ ID NO: 5384526 - DNA, 25 bp, Homo sapien
gagagcccggggtcggcgagctggg

SEQ ID NO: 5384527 - DNA, 25 bp, Homo sapien
cgccgagagcccggggtcggcgagc

SEQ ID NO: 5384528 - DNA, 25 bp, Homo sapien
ccgagagcccggggtcggcgagctg

SEQ ID NO: 5384529 - DNA, 25 bp, Homo sapien
cgagagcccggggtcggcgagctgg

SEQ ID NO: 5384530 - DNA, 25 bp, Homo sapien
gcctggcgccccgtcaccatggaaa

SEQ ID NO: 5384531 - DNA, 25 bp, Homo sapien
gcgacggagggcgccaggcgtttgg

SEQ ID NO: 5384532 - DNA, 25 bp, Homo sapien
ccgccctagcctggcgccccgtcac

SEQ ID NO: 5384533 - DNA, 25 bp, Homo sapien
tcaccatggaaaccgggcgacggag

SEQ ID NO: 5384534 - DNA, 25 bp, Homo sapien
gcgtagctgttgagccctggcagct

SEQ ID NO: 5384535 - DNA, 25 bp, Homo sapien
agctgttgagccctggcagctactc

SEQ ID NO: 5384536 - DNA, 25 bp, Homo sapien
gaacgcccctcacagtgaagaatca

SEQ ID NO: 5384537 - DNA, 25 bp, Homo sapien
gaacatgaagaacgcccctcacagt

SEQ ID NO: 5384538 - DNA, 25 bp, Homo sapien
cgggaacacagagccgccatctgtc

SEQ ID NO: 5384539 - DNA, 25 bp, Homo sapien
cagcagcgagaccagcgtccggtaa

SEQ ID NO: 5384540 - DNA, 25 bp, Homo sapien
accagcgtccggtaactgcccagga

SEQ ID NO: 5384541 - DNA, 25 bp, Homo sapien
aagctgccgaggaagtcatcccggg

SEQ ID NO: 5384542 - DNA, 25 bp, Homo sapien
cctaaagagtgtgcggaccaagctg

SEQ ID NO: 5384543 - DNA, 25 bp, Homo sapien
cagcctaaagagtgtgcggaccaag

SEQ ID NO: 5384544 - DNA, 25 bp, Homo sapien
gacgacagcctaaagagtgtgcgga

SEQ ID NO: 5384545 - DNA, 25 bp, Homo sapien
gcagacgacagcctaaagagtgtgc

SEQ ID NO: 5384546 - DNA, 25 bp, Homo sapien
gtaaggatgagtccgtcctcaccca

SEQ ID NO: 5384547 - DNA, 25 bp, Homo sapien
gtgcccaaggcgagtgtgaactgcc

SEQ ID NO: 5384548 - DNA, 25 bp, Homo sapien
actgcctgagctgcgcttcgctgag

SEQ ID NO: 5384549 - DNA, 25 bp, Homo sapien
ccacgatgcagtcggggagttgctt

SEQ ID NO: 5384550 - DNA, 25 bp, Homo sapien
ccaggtattcatctgtcttccggac

SEQ ID NO: 5384551 - DNA, 25 bp, Homo sapien
tctgtcttccggacactgtcttgcc

SEQ ID NO: 5384552 - DNA, 25 bp, Homo sapien
cgggctctccgcacactggtcggag

SEQ ID NO: 5384553 - DNA, 25 bp, Homo sapien
acactggtcggagatggacttggct

SEQ ID NO: 5384554 - DNA, 25 bp, Homo sapien
cctggccctccaggctgtagacgtg

SEQ ID NO: 5384555 - DNA, 25 bp, Homo sapien
tgtgggggccgtgaagagtcggtgc

SEQ ID NO: 5384556 - DNA, 25 bp, Homo sapien
gaggcatcagtgaccgctggtggcc

SEQ ID NO: 5384557 - DNA, 25 bp, Homo sapien
aggcatcagtgaccgctggtggcca

SEQ ID NO: 5384558 - DNA, 25 bp, Homo sapien
gaatgtgggggccgtgaagagtcgg

SEQ ID NO: 5384559 - DNA, 25 bp, Homo sapien
aacacgagttgccagggagaaacag

SEQ ID NO: 5384560 - DNA, 25 bp, Homo sapien
ccaacacgagttgccagggagaaac

SEQ ID NO: 5384561 - DNA, 25 bp, Homo sapien
atccagccggtttcagacctcacca

SEQ ID NO: 5384562 - DNA, 25 bp, Homo sapien
cggccaacacgagttgccagggaga

SEQ ID NO: 5384563 - DNA, 25 bp, Homo sapien
actcggaacaccatgagcgcgtgct

SEQ ID NO: 5384564 - DNA, 25 bp, Homo sapien
ctcggaacaccatgagcgcgtgctt

SEQ ID NO: 5384565 - DNA, 25 bp, Homo sapien
cggaacaccatgagcgcgtgcttgg

SEQ ID NO: 5384566 - DNA, 25 bp, Homo sapien
tcggaacaccatgagcgcgtgcttg

SEQ ID NO: 5384567 - DNA, 25 bp, Homo sapien
tgtcaggcgcgtaccgccacggctg

SEQ ID NO: 5384568 - DNA, 25 bp, Homo sapien
gcttgtcaggcgcgtaccgccacgg

SEQ ID NO: 5384569 - DNA, 25 bp, Homo sapien
ttgtcaggcgcgtaccgccacggct

SEQ ID NO: 5384570 - DNA, 25 bp, Homo sapien
ggcgcgtaccgccacggctgcaggt

SEQ ID NO: 5384571 - DNA, 25 bp, Homo sapien
gccaaatactcggtggcctggagcc

SEQ ID NO: 5384572 - DNA, 25 bp, Homo sapien
tggagcccagataccaggcggcagc

SEQ ID NO: 5384573 - DNA, 25 bp, Homo sapien
ggctccgtggctgggggccaaatac

SEQ ID NO: 5384574 - DNA, 25 bp, Homo sapien
agcccagataccaggcggcagctgg

SEQ ID NO: 5384575 - DNA, 25 bp, Homo sapien
gggcagagtactccctggtcaggta

SEQ ID NO: 5384576 - DNA, 25 bp, Homo sapien
cagagtactccctggtcaggtaagg

SEQ ID NO: 5384577 - DNA, 25 bp, Homo sapien
tttggctcttgctggccctccagaa

SEQ ID NO: 5384578 - DNA, 25 bp, Homo sapien
ggtttggctcttgctggccctccag

SEQ ID NO: 5384579 - DNA, 25 bp, Homo sapien
tctgtgataacacttgctctcctcc

SEQ ID NO: 5384580 - DNA, 25 bp, Homo sapien
gccaaggcctctgtgataacacttg

SEQ ID NO: 5384581 - DNA, 25 bp, Homo sapien
aaggcctctgtgataacacttgctc

SEQ ID NO: 5384582 - DNA, 25 bp, Homo sapien
gcctctgtgataacacttgctctcc

SEQ ID NO: 5384583 - DNA, 25 bp, Homo sapien
caggcacacgtgtgacggggccaac

SEQ ID NO: 5384584 - DNA, 25 bp, Homo sapien
gcacacgtgtgacggggccaacact

SEQ ID NO: 5384585 - DNA, 25 bp, Homo sapien
acacaggcacacgtgtgacggggcc

SEQ ID NO: 5384586 - DNA, 25 bp, Homo sapien
aggacacaggcacacgtgtgacggg

SEQ ID NO: 5384587 - DNA, 25 bp, Homo sapien
gctggacgaacctcgggacagcagc

SEQ ID NO: 5384588 - DNA, 25 bp, Homo sapien
caatgctgcaagaagaggtagagtt

SEQ ID NO: 5384589 - DNA, 25 bp, Homo sapien
agagtttctgctggacgaacctcgg

SEQ ID NO: 5384590 - DNA, 25 bp, Homo sapien
gctctgaacgatgcgtccaggggcc

SEQ ID NO: 5384591 - DNA, 25 bp, Homo sapien
ccatcagtgagggttggctccgccg

SEQ ID NO: 5384592 - DNA, 25 bp, Homo sapien
cacctccgggaggttcagccccatt

SEQ ID NO: 5384593 - DNA, 25 bp, Homo sapien
ggctcccatcagtgagggttggctc

SEQ ID NO: 5384594 - DNA, 25 bp, Homo sapien
actgggcacctccgggaggttcagc

SEQ ID NO: 5384595 - DNA, 25 bp, Homo sapien
gagggtgaggcctgctctggcttca

SEQ ID NO: 5384596 - DNA, 25 bp, Homo sapien
agcagcaggcgcaccaccaacacat

SEQ ID NO: 5384597 - DNA, 25 bp, Homo sapien
tgggcggagggtgaggcctgctctg

SEQ ID NO: 5384598 - DNA, 25 bp, Homo sapien
catgctcctcagtaggcgtgaacga

SEQ ID NO: 5384599 - DNA, 25 bp, Homo sapien
tggtgcctgtcttgatccccagggc

SEQ ID NO: 5384600 - DNA, 25 bp, Homo sapien
gggaggcctcactaagacagacaca

SEQ ID NO: 5384601 - DNA, 25 bp, Homo sapien
tgcagaaagcacatggaacccaggt

SEQ ID NO: 5384602 - DNA, 25 bp, Homo sapien
tctgcacggctgcaaatccgcagcg

SEQ ID NO: 5384603 - DNA, 25 bp, Homo sapien
cagatgagaactcggcccagtagaa

SEQ ID NO: 5384604 - DNA, 25 bp, Homo sapien
acacagccagatgagaactcggccc

SEQ ID NO: 5384605 - DNA, 25 bp, Homo sapien
ccagtagaagccccgggcgtcactt

SEQ ID NO: 5384606 - DNA, 25 bp, Homo sapien
agaactcggcccagtagaagccccg

SEQ ID NO: 5384607 - DNA, 25 bp, Homo sapien
tttgggccgtaacacatctgtgctg

SEQ ID NO: 5384608 - DNA, 25 bp, Homo sapien
aaaccccaagacaaaagcacagtca

SEQ ID NO: 5384609 - DNA, 25 bp, Homo sapien
gcacagtcaagcatattaggccaaa

SEQ ID NO: 5384610 - DNA, 25 bp, Homo sapien
tatcctggtatgctgtagaccccgc

SEQ ID NO: 5384611 - DNA, 25 bp, Homo sapien
tcagctccttcctaagcgccagacc

SEQ ID NO: 5384612 - DNA, 25 bp, Homo sapien
gagacactgagtcggtagtgcagaa

SEQ ID NO: 5384613 - DNA, 25 bp, Homo sapien
gggcgctggagacactgagtcggta

SEQ ID NO: 5384614 - DNA, 25 bp, Homo sapien
ctggagacactgagtcggtagtgca

SEQ ID NO: 5384615 - DNA, 25 bp, Homo sapien
cactgagtcggtagtgcagaacctc

SEQ ID NO: 5384616 - DNA, 25 bp, Homo sapien
agaaaccagcggagcatgttccagg

SEQ ID NO: 5384617 - DNA, 25 bp, Homo sapien
actctcctcgctttgaaggcccggg

SEQ ID NO: 5384618 - DNA, 25 bp, Homo sapien
gtccccaagggtagcacagagacga

SEQ ID NO: 5384619 - DNA, 25 bp, Homo sapien
cactctgcccagaaaacacatgtgg

SEQ ID NO: 5384620 - DNA, 25 bp, Homo sapien
caggaacggcaacagcaggaatgac

SEQ ID NO: 5384621 - DNA, 25 bp, Homo sapien
gaacggcaacagcaggaatgaccca

SEQ ID NO: 5384622 - DNA, 25 bp, Homo sapien
ctccaggaacggcaacagcaggaat

SEQ ID NO: 5384623 - DNA, 25 bp, Homo sapien
acggcaacagcaggaatgacccagg

SEQ ID NO: 5384624 - DNA, 25 bp, Homo sapien
agagagcagggacaggcgaggcgga

SEQ ID NO: 5384625 - DNA, 25 bp, Homo sapien
gcagggacaggcgaggcggagggag

SEQ ID NO: 5384626 - DNA, 25 bp, Homo sapien
agagagagagcagggacaggcgagg

SEQ ID NO: 5384627 - DNA, 25 bp, Homo sapien
gaggaggcaagccaggctgcatgca

SEQ ID NO: 5384628 - DNA, 25 bp, Homo sapien
cactcgccacgagaagggctgcttg

SEQ ID NO: 5384629 - DNA, 25 bp, Homo sapien
ggtgccactcgccacgagaagggct

SEQ ID NO: 5384630 - DNA, 25 bp, Homo sapien
tcgccacgagaagggctgcttgctc

SEQ ID NO: 5384631 - DNA, 25 bp, Homo sapien
acgagaagggctgcttgctcatgct

SEQ ID NO: 5384632 - DNA, 25 bp, Homo sapien
ctccaaggaatagtgatgaagccac

SEQ ID NO: 5384633 - DNA, 25 bp, Homo sapien
ttggcatgaggggactgcatttttt

SEQ ID NO: 5384634 - DNA, 25 bp, Homo sapien
gaggggactgcattttttgatacat

SEQ ID NO: 5384635 - DNA, 25 bp, Homo sapien
attttttgatacatctccaaggaat

SEQ ID NO: 5384636 - DNA, 25 bp, Homo sapien
tctgatgagagatgtgtcgctttag

SEQ ID NO: 5384637 - DNA, 25 bp, Homo sapien
agagatgtgtcgctttaggaggcta

SEQ ID NO: 5384638 - DNA, 25 bp, Homo sapien
gggtctgcattcacagacgtctgat

SEQ ID NO: 5384639 - DNA, 25 bp, Homo sapien
atgtgtcgctttaggaggctagtgt

SEQ ID NO: 5384640 - DNA, 25 bp, Homo sapien
caggcactgtgactatataggataa

SEQ ID NO: 5384641 - DNA, 25 bp, Homo sapien
tagttgcacatcaccatacttggct

SEQ ID NO: 5384642 - DNA, 25 bp, Homo sapien
aacttcctggtgtggttacaggcac

SEQ ID NO: 5384643 - DNA, 25 bp, Homo sapien
cattcgcttctaggaaatacactga

SEQ ID NO: 5384644 - DNA, 25 bp, Homo sapien
ccaggagaatcacttgaagcagaga

SEQ ID NO: 5384645 - DNA, 25 bp, Homo sapien
ccagctacttgggactgagccagga

SEQ ID NO: 5384646 - DNA, 25 bp, Homo sapien
tcccagctacttgggactgagccag

SEQ ID NO: 5384647 - DNA, 25 bp, Homo sapien
ctacttgggactgagccaggagaat

SEQ ID NO: 5384648 - DNA, 25 bp, Homo sapien
tctgtccacacgtgaattgtaggta

SEQ ID NO: 5384649 - DNA, 25 bp, Homo sapien
taggtaaaggcctggcctgccttac

SEQ ID NO: 5384650 - DNA, 25 bp, Homo sapien
ccttacacatgccagcagatctggg

SEQ ID NO: 5384651 - DNA, 25 bp, Homo sapien
gagtcctccacaggatcagcaacat

SEQ ID NO: 5384652 - DNA, 25 bp, Homo sapien
cactgccttcggtgggcaggaacca

SEQ ID NO: 5384653 - DNA, 25 bp, Homo sapien
gtccaccaggatgaaataggcacag

SEQ ID NO: 5384654 - DNA, 25 bp, Homo sapien
tgacaggtacctgtccaccaggatg

SEQ ID NO: 5384655 - DNA, 25 bp, Homo sapien
tgggggcacactgccttcggtgggc

SEQ ID NO: 5384656 - DNA, 25 bp, Homo sapien
aagtacggacgtggagggacacagg

SEQ ID NO: 5384657 - DNA, 25 bp, Homo sapien
gtacggacgtggagggacacaggaa

SEQ ID NO: 5384658 - DNA, 25 bp, Homo sapien
ctgaagtacggacgtggagggacac

SEQ ID NO: 5384659 - DNA, 25 bp, Homo sapien
tgaagtacggacgtggagggacaca

SEQ ID NO: 5384660 - DNA, 25 bp, Homo sapien
ctggaaaaccaagctagttgttagc

SEQ ID NO: 5384661 - DNA, 25 bp, Homo sapien
caaagaagaatatgtaatactcgaa

SEQ ID NO: 5384662 - DNA, 25 bp, Homo sapien
cttctgagtgatgaggctcaaggca

SEQ ID NO: 5384663 - DNA, 25 bp, Homo sapien
aagaatatgtaatactcgaacggat

SEQ ID NO: 5384664 - DNA, 25 bp, Homo sapien
ggctcaaggcaaagaagaatatgta

SEQ ID NO: 5384665 - DNA, 25 bp, Homo sapien
caaggcccccagtaggggtgaactg

SEQ ID NO: 5384666 - DNA, 25 bp, Homo sapien
gaggatgcactcctggatggacgcc

SEQ ID NO: 5384667 - DNA, 25 bp, Homo sapien
gactgtcagggaggatgcactcctg

SEQ ID NO: 5384668 - DNA, 25 bp, Homo sapien
cttgttgtggtacagaggactgtca

SEQ ID NO: 5384669 - DNA, 25 bp, Homo sapien
ttgttgtggtacagaggactgtcag

SEQ ID NO: 5384670 - DNA, 25 bp, Homo sapien
aacttatagtcttcagcttgaagct

SEQ ID NO: 5384671 - DNA, 25 bp, Homo sapien
tcagcttgaagcttataaaccaact

SEQ ID NO: 5384672 - DNA, 25 bp, Homo sapien
tagtcttcagcttgaagcttataaa

SEQ ID NO: 5384673 - DNA, 25 bp, Homo sapien
tcttcagcttgaagcttataaacca

SEQ ID NO: 5384674 - DNA, 25 bp, Homo sapien
gctgtactccacaggattcacgcgc

SEQ ID NO: 5384675 - DNA, 25 bp, Homo sapien
tcacgatgctgtactccacaggatt

SEQ ID NO: 5384676 - DNA, 25 bp, Homo sapien
ccagggtcgagaaattccatcacga

SEQ ID NO: 5384677 - DNA, 25 bp, Homo sapien
gaaattccatcacgatgctgtactc

SEQ ID NO: 5384678 - DNA, 25 bp, Homo sapien
aagcagcggaggttccagccaacga

SEQ ID NO: 5384679 - DNA, 25 bp, Homo sapien
agcagcggaggttccagccaacgag

SEQ ID NO: 5384680 - DNA, 25 bp, Homo sapien
taagcagcggaggttccagccaacg

SEQ ID NO: 5384681 - DNA, 25 bp, Homo sapien
gccaaaaatgctttctaccagccat

SEQ ID NO: 5384682 - DNA, 25 bp, Homo sapien
gccatgggaagatggtgtgcagctc

SEQ ID NO: 5384683 - DNA, 25 bp, Homo sapien
tctaccagccatgggaagatggtgt

SEQ ID NO: 5384684 - DNA, 25 bp, Homo sapien
aaatgctttctaccagccatgggaa

SEQ ID NO: 5384685 - DNA, 25 bp, Homo sapien
caaagggcttatttatagagtcagc

SEQ ID NO: 5384686 - DNA, 25 bp, Homo sapien
tatttatagagtcagctttcaggct

SEQ ID NO: 5384687 - DNA, 25 bp, Homo sapien
ttatttatagagtcagctttcaggc

SEQ ID NO: 5384688 - DNA, 25 bp, Homo sapien
tgtgcaaagggcttatttatagagt

SEQ ID NO: 5384689 - DNA, 25 bp, Homo sapien
ctgggctgctgcaggtgagggaacg

SEQ ID NO: 5384690 - DNA, 25 bp, Homo sapien
cagtagaaagctgggctgctgcagg

SEQ ID NO: 5384691 - DNA, 25 bp, Homo sapien
gctgctgcaggtgagggaacgccat

SEQ ID NO: 5384692 - DNA, 25 bp, Homo sapien
ggctgctgcaggtgagggaacgcca

SEQ ID NO: 5384693 - DNA, 25 bp, Homo sapien
gttgaaaatggccttcttagcaaac

SEQ ID NO: 5384694 - DNA, 25 bp, Homo sapien
cagcctccagtggagagttgaaaat

SEQ ID NO: 5384695 - DNA, 25 bp, Homo sapien
tgaaaatggccttcttagcaaacca

SEQ ID NO: 5384696 - DNA, 25 bp, Homo sapien
agcagcctccagtggagagttgaaa

SEQ ID NO: 5384697 - DNA, 25 bp, Homo sapien
ctgtgcactatgcaatgaacggagg

SEQ ID NO: 5384698 - DNA, 25 bp, Homo sapien
tgtgcactatgcaatgaacggaggg

SEQ ID NO: 5384699 - DNA, 25 bp, Homo sapien
gccaagggagcctttgaataagcca

SEQ ID NO: 5384700 - DNA, 25 bp, Homo sapien
gctctgccaagggagcctttgaata

SEQ ID NO: 5384701 - DNA, 25 bp, Homo sapien
tcaacgaaggttaaccttcagcgaa

SEQ ID NO: 5384702 - DNA, 25 bp, Homo sapien
ttttctgacagcgacagcccttggg

SEQ ID NO: 5384703 - DNA, 25 bp, Homo sapien
gtcacaggtctctgcgtgccatgca

SEQ ID NO: 5384704 - DNA, 25 bp, Homo sapien
agtccacttcatggcgactctccaa

SEQ ID NO: 5384705 - DNA, 25 bp, Homo sapien
ctcgcctcagagatggaagccgcca

SEQ ID NO: 5384706 - DNA, 25 bp, Homo sapien
tgtgggatccatagcgtcgctcgcc

SEQ ID NO: 5384707 - DNA, 25 bp, Homo sapien
attccgccacggcgccgaaagtcgt

SEQ ID NO: 5384708 - DNA, 25 bp, Homo sapien
catagcgtcgctcgcctcagagatg

SEQ ID NO: 5384709 - DNA, 25 bp, Homo sapien
gaaagaggcatttaccgagcgccca

SEQ ID NO: 5384710 - DNA, 25 bp, Homo sapien
atgcagtctatcagggaggcccaga

SEQ ID NO: 5384711 - DNA, 25 bp, Homo sapien
caaggtactttctccccagcaagga

SEQ ID NO: 5384712 - DNA, 25 bp, Homo sapien
tcgaccccgacgtgttcaagtgagc

SEQ ID NO: 5384713 - DNA, 25 bp, Homo sapien
ttgaaagcagccatcctaggggtgg

SEQ ID NO: 5384714 - DNA, 25 bp, Homo sapien
gtatgcttcgccttcttcagcctca

SEQ ID NO: 5384715 - DNA, 25 bp, Homo sapien
agcctcagcttccacggaatccacg

SEQ ID NO: 5384716 - DNA, 25 bp, Homo sapien
tcagtatgcttcgccttcttcagcc

SEQ ID NO: 5384717 - DNA, 25 bp, Homo sapien
tcagcttccacggaatccacgccca

SEQ ID NO: 5384718 - DNA, 25 bp, Homo sapien
tgagatcgaacttatggaccaggcg

SEQ ID NO: 5384719 - DNA, 25 bp, Homo sapien
gtaccagtgcacaaaggcccacttg

SEQ ID NO: 5384720 - DNA, 25 bp, Homo sapien
ggcccacttggcatacatgagatcg

SEQ ID NO: 5384721 - DNA, 25 bp, Homo sapien
caatccttctctagagctgccaggt

SEQ ID NO: 5384722 - DNA, 25 bp, Homo sapien
tggccgtggtgttgctcagcatgca

SEQ ID NO: 5384723 - DNA, 25 bp, Homo sapien
ccgtggtgttgctcagcatgcacac

SEQ ID NO: 5384724 - DNA, 25 bp, Homo sapien
atggccgtggtgttgctcagcatgc

SEQ ID NO: 5384725 - DNA, 25 bp, Homo sapien
ctccgcaatggccgtggtgttgctc

SEQ ID NO: 5384726 - DNA, 25 bp, Homo sapien
tgtggggggctggtagttaatgccc

SEQ ID NO: 5384727 - DNA, 25 bp, Homo sapien
ggcccgctgcaccttggccaggtct

SEQ ID NO: 5384728 - DNA, 25 bp, Homo sapien
gaccactgtggggggctggtagtta

SEQ ID NO: 5384729 - DNA, 25 bp, Homo sapien
caggtctcccccggggaccactgtg

SEQ ID NO: 5384730 - DNA, 25 bp, Homo sapien
tgtccaggttgcgccgacatatgtc

SEQ ID NO: 5384731 - DNA, 25 bp, Homo sapien
ttggtctggaattccgtcaagtcca

SEQ ID NO: 5384732 - DNA, 25 bp, Homo sapien
ctggaattccgtcaagtccacattc

SEQ ID NO: 5384733 - DNA, 25 bp, Homo sapien
gttgcgccgacatatgtcatagatg

SEQ ID NO: 5384734 - DNA, 25 bp, Homo sapien
aacatgcaatacactttgaagcaaa

SEQ ID NO: 5384735 - DNA, 25 bp, Homo sapien
acctccaacaagccagggccgcttc

SEQ ID NO: 5384736 - DNA, 25 bp, Homo sapien
aaagagttgatatggattcaaatca

SEQ ID NO: 5384737 - DNA, 25 bp, Homo sapien
tgatatggattcaaatcatccataa

SEQ ID NO: 5384738 - DNA, 25 bp, Homo sapien
tccggtccaggactaggtcaacaat

SEQ ID NO: 5384739 - DNA, 25 bp, Homo sapien
ggtccaggactaggtcaacaatctc

SEQ ID NO: 5384740 - DNA, 25 bp, Homo sapien
gatccggtccaggactaggtcaaca

SEQ ID NO: 5384741 - DNA, 25 bp, Homo sapien
tccaggactaggtcaacaatctcct

SEQ ID NO: 5384742 - DNA, 25 bp, Homo sapien
ctgcctgtaggtccctgtgcgcact

SEQ ID NO: 5384743 - DNA, 25 bp, Homo sapien
gcctgtaggtccctgtgcgcacttc

SEQ ID NO: 5384744 - DNA, 25 bp, Homo sapien
cctgtaggtccctgtgcgcacttca

SEQ ID NO: 5384745 - DNA, 25 bp, Homo sapien
ctgtaggtccctgtgcgcacttcat

SEQ ID NO: 5384746 - DNA, 25 bp, Homo sapien
gccaccaatggttttatcacttggc

SEQ ID NO: 5384747 - DNA, 25 bp, Homo sapien
ggcatttgaccatcgggctgaattc

SEQ ID NO: 5384748 - DNA, 25 bp, Homo sapien
cgtgttgaaggagtcgtccccgcca

SEQ ID NO: 5384749 - DNA, 25 bp, Homo sapien
catgttcaaggcagtacagttccca

SEQ ID NO: 5384750 - DNA, 25 bp, Homo sapien
tgccccacgtggatagagatacact

SEQ ID NO: 5384751 - DNA, 25 bp, Homo sapien
ccccacgtggatagagatacactcg

SEQ ID NO: 5384752 - DNA, 25 bp, Homo sapien
ctgccccacgtggatagagatacac

SEQ ID NO: 5384753 - DNA, 25 bp, Homo sapien
ccacgtggatagagatacactcgcg

SEQ ID NO: 5384754 - DNA, 25 bp, Homo sapien
gaggccaacttcgtctgcctgggca

SEQ ID NO: 5384755 - DNA, 25 bp, Homo sapien
ggaaacgatcccgtgtcctcctgtc

SEQ ID NO: 5384756 - DNA, 25 bp, Homo sapien
aggcccgcaacaacgtccctctgtc

SEQ ID NO: 5384757 - DNA, 25 bp, Homo sapien
gcactagaccctgcgtccttctctg

SEQ ID NO: 5384758 - DNA, 25 bp, Homo sapien
aactgcaatgacctgcccacgcgcg

SEQ ID NO: 5384759 - DNA, 25 bp, Homo sapien
atgacctgcccacgcgcgccgcaca

SEQ ID NO: 5384760 - DNA, 25 bp, Homo sapien
acgcgcgccgcacaggattggcctg

SEQ ID NO: 5384761 - DNA, 25 bp, Homo sapien
tgcccacgcgcgccgcacaggattg

SEQ ID NO: 5384762 - DNA, 25 bp, Homo sapien
cccagctcatcaccaggatgcagca

SEQ ID NO: 5384763 - DNA, 25 bp, Homo sapien
ccccagctcatcaccaggatgcagc

SEQ ID NO: 5384764 - DNA, 25 bp, Homo sapien
ccagctcatcaccaggatgcagcat

SEQ ID NO: 5384765 - DNA, 25 bp, Homo sapien
catgatactttaatgtgaaccacca

SEQ ID NO: 5384766 - DNA, 25 bp, Homo sapien
gattccatttgagcatacataaggc

SEQ ID NO: 5384767 - DNA, 25 bp, Homo sapien
cacatacaacaagacagtacatcct

SEQ ID NO: 5384768 - DNA, 25 bp, Homo sapien
gagaaagttcctggccagtcatcca

SEQ ID NO: 5384769 - DNA, 25 bp, Homo sapien
tgcactttggggagcgtcaaactaa

SEQ ID NO: 5384770 - DNA, 25 bp, Homo sapien
gttcatgataaatgcagttatgacc

SEQ ID NO: 5384771 - DNA, 25 bp, Homo sapien
ggggagcgtcaaactaaatctacaa

SEQ ID NO: 5384772 - DNA, 25 bp, Homo sapien
aatgcagttatgaccttattacact

SEQ ID NO: 5384773 - DNA, 25 bp, Homo sapien
ttgttccacacatataggtttttct

SEQ ID NO: 5384774 - DNA, 25 bp, Homo sapien
ggttaaagctgaacattccacatag

SEQ ID NO: 5384775 - DNA, 25 bp, Homo sapien
ttctgggttaaagctgaacattcca

SEQ ID NO: 5384776 - DNA, 25 bp, Homo sapien
taaaatggctatgatagcctcatca

SEQ ID NO: 5384777 - DNA, 25 bp, Homo sapien
tttaccaccgagaagcatataagga

SEQ ID NO: 5384778 - DNA, 25 bp, Homo sapien
tcacattttgaaatgaggctggatt

SEQ ID NO: 5384779 - DNA, 25 bp, Homo sapien
tgaggctggatttaccaccgagaag

SEQ ID NO: 5384780 - DNA, 25 bp, Homo sapien
tttgaaatgaggctggatttaccac

SEQ ID NO: 5384781 - DNA, 25 bp, Homo sapien
ttcgttggcatagctcatgagtggg

SEQ ID NO: 5384782 - DNA, 25 bp, Homo sapien
ccgggaaggcttcgttggcatagct

SEQ ID NO: 5384783 - DNA, 25 bp, Homo sapien
aggcttcgttggcatagctcatgag

SEQ ID NO: 5384784 - DNA, 25 bp, Homo sapien
gcacgtactcctccgggaaggcttc

SEQ ID NO: 5384785 - DNA, 25 bp, Homo sapien
cgcgccaggcccgtgagccacgctg

SEQ ID NO: 5384786 - DNA, 25 bp, Homo sapien
cagcgcgccaggcccgtgagccacg

SEQ ID NO: 5384787 - DNA, 25 bp, Homo sapien
agcgcgccaggcccgtgagccacgc

SEQ ID NO: 5384788 - DNA, 25 bp, Homo sapien
gcgcgccaggcccgtgagccacgct

SEQ ID NO: 5384789 - DNA, 25 bp, Homo sapien
gaccgttttgccattggtgccatct

SEQ ID NO: 5384790 - DNA, 25 bp, Homo sapien
gttttgccattggtgccatctctca

SEQ ID NO: 5384791 - DNA, 25 bp, Homo sapien
tggtgaccgttttgccattggtgcc

SEQ ID NO: 5384792 - DNA, 25 bp, Homo sapien
atagctttggtgaccgttttgccat

SEQ ID NO: 5384793 - DNA, 25 bp, Homo sapien
gctggtagcaggaaggaaggcgctg

SEQ ID NO: 5384794 - DNA, 25 bp, Homo sapien
ctgcgccccggggcgaccctgtcgc

SEQ ID NO: 5384795 - DNA, 25 bp, Homo sapien
gcccgggtgtcaggctggtagcagg

SEQ ID NO: 5384796 - DNA, 25 bp, Homo sapien
ggggcccgggtgtcaggctggtagc

SEQ ID NO: 5384797 - DNA, 25 bp, Homo sapien
cccgtcttctgtcgagctggcaaca

SEQ ID NO: 5384798 - DNA, 25 bp, Homo sapien
tctctgcggatcagaggcgaagcca

SEQ ID NO: 5384799 - DNA, 25 bp, Homo sapien
gctggcaacatcagtgcggttccca

SEQ ID NO: 5384800 - DNA, 25 bp, Homo sapien
tgttcgtggcgctggcctggtctct

SEQ ID NO: 5384801 - DNA, 25 bp, Homo sapien
tagcttcgggctttgactctaagtc

SEQ ID NO: 5384802 - DNA, 25 bp, Homo sapien
tcagcgactcggacagctctgagga

SEQ ID NO: 5384803 - DNA, 25 bp, Homo sapien
gacggtggacgagttcctagcttcg

SEQ ID NO: 5384804 - DNA, 25 bp, Homo sapien
gaaggacagagacgccgagttctac

SEQ ID NO: 5384805 - DNA, 25 bp, Homo sapien
aatgcactgcatccgtgccctgacg

SEQ ID NO: 5384806 - DNA, 25 bp, Homo sapien
ggctgtatcaagctcatccccactg

SEQ ID NO: 5384807 - DNA, 25 bp, Homo sapien
tcatcagttccatgcagcggaccct

SEQ ID NO: 5384808 - DNA, 25 bp, Homo sapien
cccgcaagaaggaaacgtctgtgta

SEQ ID NO: 5384809 - DNA, 25 bp, Homo sapien
aatggctgaccccactcatctgaga

SEQ ID NO: 5384810 - DNA, 25 bp, Homo sapien
tattgacatgtatgcactcagggaa

SEQ ID NO: 5384811 - DNA, 25 bp, Homo sapien
cactaatgggtataacaactagaca

SEQ ID NO: 5384812 - DNA, 25 bp, Homo sapien
cagggctgtgacaatagttttggaa

SEQ ID NO: 5384813 - DNA, 25 bp, Homo sapien
tataggaattgaacccatccctgag

SEQ ID NO: 5384814 - DNA, 25 bp, Homo sapien
tccatgctacctatcacaccacgtc

SEQ ID NO: 5384815 - DNA, 25 bp, Homo sapien
tctccatgctacctatcacaccacg

SEQ ID NO: 5384816 - DNA, 25 bp, Homo sapien
ctaggactataggaattgaacccat

SEQ ID NO: 5384817 - DNA, 25 bp, Homo sapien
gactgtaaaattctactctgtatca

SEQ ID NO: 5384818 - DNA, 25 bp, Homo sapien
ttctactctgtatcaattgaacgca

SEQ ID NO: 5384819 - DNA, 25 bp, Homo sapien
ctaaggactgtaaaattctactctg

SEQ ID NO: 5384820 - DNA, 25 bp, Homo sapien
taaaattctactctgtatcaattga

SEQ ID NO: 5384821 - DNA, 25 bp, Homo sapien
agattgatgggacttaaacccacga

SEQ ID NO: 5384822 - DNA, 25 bp, Homo sapien
acccacgaacatttaattaacagat

SEQ ID NO: 5384823 - DNA, 25 bp, Homo sapien
catttaattaacagataaacaccct

SEQ ID NO: 5384824 - DNA, 25 bp, Homo sapien
tagattgatgggacttaaacccacg

SEQ ID NO: 5384825 - DNA, 25 bp, Homo sapien
gccccggcaggattgaagctgcttc

SEQ ID NO: 5384826 - DNA, 25 bp, Homo sapien
attcaacatgaaaatcacctcgggg

SEQ ID NO: 5384827 - DNA, 25 bp, Homo sapien
tgcaattcaacatgaaaatcacctc

SEQ ID NO: 5384828 - DNA, 25 bp, Homo sapien
agccccggcaggattgaagctgctt

SEQ ID NO: 5384829 - DNA, 25 bp, Homo sapien
gtaaaaagaggtcttgatctctgtt

SEQ ID NO: 5384830 - DNA, 25 bp, Homo sapien
aaagaggtcttgatctctgttttta

SEQ ID NO: 5384831 - DNA, 25 bp, Homo sapien
ggtcttgatctctgtttttagatta

SEQ ID NO: 5384832 - DNA, 25 bp, Homo sapien
cttgatctctgtttttagattacag

SEQ ID NO: 5384833 - DNA, 25 bp, Homo sapien
caatcccataacctctgtgaccttc

SEQ ID NO: 5384834 - DNA, 25 bp, Homo sapien
agggaatcgaaccccccacagactg

SEQ ID NO: 5384835 - DNA, 25 bp, Homo sapien
tcccataacctctgtgaccttctca

SEQ ID NO: 5384836 - DNA, 25 bp, Homo sapien
ccccccacagactggtttcaagcca

SEQ ID NO: 5384837 - DNA, 25 bp, Homo sapien
gataagaaaaaccattgtcatattt

SEQ ID NO: 5384838 - DNA, 25 bp, Homo sapien
aaaaaccattgtcatatttcaacta

SEQ ID NO: 5384839 - DNA, 25 bp, Homo sapien
actaatgataagaaaaaccattgtc

SEQ ID NO: 5384840 - DNA, 25 bp, Homo sapien
aaccattgtcatatttcaactataa

SEQ ID NO: 5384841 - DNA, 25 bp, Homo sapien
ctggcgcattgagggcgacagcagt

SEQ ID NO: 5384842 - DNA, 25 bp, Homo sapien
cgcattgagggcgacagcagttgta

SEQ ID NO: 5384843 - DNA, 25 bp, Homo sapien
gcattgagggcgacagcagttgtat

SEQ ID NO: 5384844 - DNA, 25 bp, Homo sapien
gggctggcgcattgagggcgacagc

SEQ ID NO: 5384845 - DNA, 25 bp, Homo sapien
agggcctgtgtttgaagaagttcag

SEQ ID NO: 5384846 - DNA, 25 bp, Homo sapien
taaccatcgcggacatgatctcctg

SEQ ID NO: 5384847 - DNA, 25 bp, Homo sapien
aagaagacgaagagggtaatcagag

SEQ ID NO: 5384848 - DNA, 25 bp, Homo sapien
ggccacagcagtaaccatcgcggac

SEQ ID NO: 5384849 - DNA, 25 bp, Homo sapien
taatcagagaagagtgggcaagagc

SEQ ID NO: 5384850 - DNA, 25 bp, Homo sapien
gttcctcaactccaaccagcatcat

SEQ ID NO: 5384851 - DNA, 25 bp, Homo sapien
aattctactgctaaagtgtctctta

SEQ ID NO: 5384852 - DNA, 25 bp, Homo sapien
tctactgctaaagtgtctcttattt

SEQ ID NO: 5384853 - DNA, 25 bp, Homo sapien
tctgttctttgaccacacccttcca

SEQ ID NO: 5384854 - DNA, 25 bp, Homo sapien
ccatctccatgtggtagctcacaag

SEQ ID NO: 5384855 - DNA, 25 bp, Homo sapien
catgtggtagctcacaaggtcaggg

SEQ ID NO: 5384856 - DNA, 25 bp, Homo sapien
ttgtttgtggcaatagagaagggct

SEQ ID NO: 5384857 - DNA, 25 bp, Homo sapien
tgctggcggcacgtgcagcactgca

SEQ ID NO: 5384858 - DNA, 25 bp, Homo sapien
ccagttgctggctctcgggccacta

SEQ ID NO: 5384859 - DNA, 25 bp, Homo sapien
tctagaaccactcgtccagcaggtg

SEQ ID NO: 5384860 - DNA, 25 bp, Homo sapien
gactgctggtgatctgcgaaggcct

SEQ ID NO: 5384861 - DNA, 25 bp, Homo sapien
gtggagtcccataccacacctgtgc

SEQ ID NO: 5384862 - DNA, 25 bp, Homo sapien
gtggccaggcctgaggagtgcagtc

SEQ ID NO: 5384863 - DNA, 25 bp, Homo sapien
cgcagtggccaggcctgaggagtgc

SEQ ID NO: 5384864 - DNA, 25 bp, Homo sapien
cagtggccaggcctgaggagtgcag

SEQ ID NO: 5384865 - DNA, 25 bp, Homo sapien
ctgagcccgcagtggccaggcctga

SEQ ID NO: 5384866 - DNA, 25 bp, Homo sapien
ctgtgttgcaagccacgtagtccat

SEQ ID NO: 5384867 - DNA, 25 bp, Homo sapien
gtccctcgtccccaaataaagagca

SEQ ID NO: 5384868 - DNA, 25 bp, Homo sapien
cattatcccaccatcgtacagctgg

SEQ ID NO: 5384869 - DNA, 25 bp, Homo sapien
accagcgagcggctggcactgtgca

SEQ ID NO: 5384870 - DNA, 25 bp, Homo sapien
ctggccagctaccagcgagcggctg

SEQ ID NO: 5384871 - DNA, 25 bp, Homo sapien
agcttgcttgggcatcacggacccc

SEQ ID NO: 5384872 - DNA, 25 bp, Homo sapien
gaattgcgttacatgaacgaagatg

SEQ ID NO: 5384873 - DNA, 25 bp, Homo sapien
ttgggcatcacggaccccatgtcca

SEQ ID NO: 5384874 - DNA, 25 bp, Homo sapien
tgtacagcacatagtagggaattgc

SEQ ID NO: 5384875 - DNA, 25 bp, Homo sapien
gccgtagagagtgattgtgttgcca

SEQ ID NO: 5384876 - DNA, 25 bp, Homo sapien
tctcccgccgtaaggtggaatgggc

SEQ ID NO: 5384877 - DNA, 25 bp, Homo sapien
tagagagtgattgtgttgccagcca

SEQ ID NO: 5384878 - DNA, 25 bp, Homo sapien
ctggcagtgcggtctcccgccgtaa

SEQ ID NO: 5384879 - DNA, 25 bp, Homo sapien
cgttgcctgacatggagccactcag

SEQ ID NO: 5384880 - DNA, 25 bp, Homo sapien
ccgcgttgcctgacatggagccact

SEQ ID NO: 5384881 - DNA, 25 bp, Homo sapien
gtgtccgcgttgcctgacatggagc

SEQ ID NO: 5384882 - DNA, 25 bp, Homo sapien
gtccgcgttgcctgacatggagcca

SEQ ID NO: 5384883 - DNA, 25 bp, Homo sapien
atcctaaccgctagaccatatggga

SEQ ID NO: 5384884 - DNA, 25 bp, Homo sapien
accaggaatcctaaccgctagacca

SEQ ID NO: 5384885 - DNA, 25 bp, Homo sapien
gaatcctaaccgctagaccatatgg

SEQ ID NO: 5384886 - DNA, 25 bp, Homo sapien
gccacctgggtgaaaaccaggaatc

SEQ ID NO: 5384887 - DNA, 25 bp, Homo sapien
taaccgacatacagcacgtgggagg

SEQ ID NO: 5384888 - DNA, 25 bp, Homo sapien
tgtgacagctggatacattcaactg

SEQ ID NO: 5384889 - DNA, 25 bp, Homo sapien
tacactgggagttagcaaaacaaaa

SEQ ID NO: 5384890 - DNA, 25 bp, Homo sapien
gactcactggacatttcaactgaaa

SEQ ID NO: 5384891 - DNA, 25 bp, Homo sapien
tactgtagttattcattaagctatt

SEQ ID NO: 5384892 - DNA, 25 bp, Homo sapien
taccatagcttttactgtagttatt

SEQ ID NO: 5384893 - DNA, 25 bp, Homo sapien
tcacgtagccatgtcggagaacagc

SEQ ID NO: 5384894 - DNA, 25 bp, Homo sapien
ggatgtactaagcatgaagcgctac

SEQ ID NO: 5384895 - DNA, 25 bp, Homo sapien
gactaacgtgtacctgcctatgtga

SEQ ID NO: 5384896 - DNA, 25 bp, Homo sapien
tatgggaactcaggccttagaatgg

SEQ ID NO: 5384897 - DNA, 25 bp, Homo sapien
ccagtcaatgcggttctggaggctg

SEQ ID NO: 5384898 - DNA, 25 bp, Homo sapien
ttctcttggagtccccggagctggc

SEQ ID NO: 5384899 - DNA, 25 bp, Homo sapien
gtttctcttggagtccccggagctg

SEQ ID NO: 5384900 - DNA, 25 bp, Homo sapien
ggagctggcttcgaccccagtcaat

SEQ ID NO: 5384901 - DNA, 25 bp, Homo sapien
tgaccacacattggatcactcgctc

SEQ ID NO: 5384902 - DNA, 25 bp, Homo sapien
acacattggatcactcgctccagga

SEQ ID NO: 5384903 - DNA, 25 bp, Homo sapien
gctgaccacacattggatcactcgc

SEQ ID NO: 5384904 - DNA, 25 bp, Homo sapien
tttctctgttagtccacactctgga

SEQ ID NO: 5384905 - DNA, 25 bp, Homo sapien
caaactccagatacatgtgcccaag

SEQ ID NO: 5384906 - DNA, 25 bp, Homo sapien
gcagtgctcaagtgttccctgtgga

SEQ ID NO: 5384907 - DNA, 25 bp, Homo sapien
gatggaggaaaacctgcaaagcctt

SEQ ID NO: 5384908 - DNA, 25 bp, Homo sapien
cagtgctatgcagtggactcccaaa

SEQ ID NO: 5384909 - DNA, 25 bp, Homo sapien
actaggattccaaaccagttcaggg

SEQ ID NO: 5384910 - DNA, 25 bp, Homo sapien
cctgacgtagactgtgaggaactag

SEQ ID NO: 5384911 - DNA, 25 bp, Homo sapien
cttgcttgagcctgacgtagactgt

SEQ ID NO: 5384912 - DNA, 25 bp, Homo sapien
ttagtggggcccttgcgcctccgca

SEQ ID NO: 5384913 - DNA, 25 bp, Homo sapien
tgggatgctctctcttatcgcaaaa

SEQ ID NO: 5384914 - DNA, 25 bp, Homo sapien
cagaccagacatagacgttccaact

SEQ ID NO: 5384915 - DNA, 25 bp, Homo sapien
taagacccactgatgaccctgtttg

SEQ ID NO: 5384916 - DNA, 25 bp, Homo sapien
cattgtacctgaacatgccaacaga

SEQ ID NO: 5384917 - DNA, 25 bp, Homo sapien
cctcctctggggcgtggacaccagc

SEQ ID NO: 5384918 - DNA, 25 bp, Homo sapien
ctcctctggggcgtggacaccagct

SEQ ID NO: 5384919 - DNA, 25 bp, Homo sapien
atggagctttggcagcccgggccta

SEQ ID NO: 5384920 - DNA, 25 bp, Homo sapien
aggatggagctttggcagcccgggc

SEQ ID NO: 5384921 - DNA, 25 bp, Homo sapien
ggaggatggagctttggcagcccgg

SEQ ID NO: 5384922 - DNA, 25 bp, Homo sapien
cagcccgggcctagaacgcgcccgc

SEQ ID NO: 5384923 - DNA, 25 bp, Homo sapien
ggctccatgtgggaagcatactgca

SEQ ID NO: 5384924 - DNA, 25 bp, Homo sapien
tgcaggggccctaccgacttggcgc

SEQ ID NO: 5384925 - DNA, 25 bp, Homo sapien
ctggggctccatgtgggaagcatac

SEQ ID NO: 5384926 - DNA, 25 bp, Homo sapien
actgcaggggccctaccgacttggc

SEQ ID NO: 5384927 - DNA, 25 bp, Homo sapien
gcgtagcgagccttggcgagcgaga

SEQ ID NO: 5384928 - DNA, 25 bp, Homo sapien
gtagcgagccttggcgagcgagagc

SEQ ID NO: 5384929 - DNA, 25 bp, Homo sapien
gcgagccttggcgagcgagagccag

SEQ ID NO: 5384930 - DNA, 25 bp, Homo sapien
gagccttggcgagcgagagccagcc

SEQ ID NO: 5384931 - DNA, 25 bp, Homo sapien
gaaagcggtgagactcagtttacgc

SEQ ID NO: 5384932 - DNA, 25 bp, Homo sapien
ggtgagactcagtttacgcccgtgt

SEQ ID NO: 5384933 - DNA, 25 bp, Homo sapien
cagtttacgcccgtgtaccctcctg

SEQ ID NO: 5384934 - DNA, 25 bp, Homo sapien
gagactcagtttacgcccgtgtacc

SEQ ID NO: 5384935 - DNA, 25 bp, Homo sapien
aatccagctccgctcgcaggtcaag

SEQ ID NO: 5384936 - DNA, 25 bp, Homo sapien
agctgcaggaccagcgaatccagct

SEQ ID NO: 5384937 - DNA, 25 bp, Homo sapien
agcgaatccagctccgctcgcaggt

SEQ ID NO: 5384938 - DNA, 25 bp, Homo sapien
agctccgctcgcaggtcaagcgccg

SEQ ID NO: 5384939 - DNA, 25 bp, Homo sapien
gaatcttagaagtcgcgccactgtt

SEQ ID NO: 5384940 - DNA, 25 bp, Homo sapien
atttggaaaggagccggcaagcaac

SEQ ID NO: 5384941 - DNA, 25 bp, Homo sapien
tgtcaccctccgcagtttggcagga

SEQ ID NO: 5384942 - DNA, 25 bp, Homo sapien
caagcaaccttcagtcggtgtgcgg

SEQ ID NO: 5384943 - DNA, 25 bp, Homo sapien
gtggagtggcgctggcacccttaca

SEQ ID NO: 5384944 - DNA, 25 bp, Homo sapien
cgagtgagcacactcaccactcagt

SEQ ID NO: 5384945 - DNA, 25 bp, Homo sapien
agagagtcttcctgagcaccgagtg

SEQ ID NO: 5384946 - DNA, 25 bp, Homo sapien
cttacaccaataccgcacgcaagag

SEQ ID NO: 5384947 - DNA, 25 bp, Homo sapien
tcatccctaaggtcaacagtttagg

SEQ ID NO: 5384948 - DNA, 25 bp, Homo sapien
gcatttttgcatacaccgggtcatt

SEQ ID NO: 5384949 - DNA, 25 bp, Homo sapien
ccctaacggttggtgatactgagca

SEQ ID NO: 5384950 - DNA, 25 bp, Homo sapien
cagtttagggaagcgattaggtcct

SEQ ID NO: 5384951 - DNA, 25 bp, Homo sapien
tttaacctctgtcacgcactaggtg

SEQ ID NO: 5384952 - DNA, 25 bp, Homo sapien
gggcatcatcagaggttttaacctc

SEQ ID NO: 5384953 - DNA, 25 bp, Homo sapien
gatgcatttgttcacctctagattg

SEQ ID NO: 5384954 - DNA, 25 bp, Homo sapien
tacttactggccttgtgtgttatgt

SEQ ID NO: 5384955 - DNA, 25 bp, Homo sapien
gaataatacgtcttttctgactggc

SEQ ID NO: 5384956 - DNA, 25 bp, Homo sapien
taatagacctttcaccgtctggatg

SEQ ID NO: 5384957 - DNA, 25 bp, Homo sapien
gcctgcctgggagtcgtttttgtga

SEQ ID NO: 5384958 - DNA, 25 bp, Homo sapien
tctttcattaggaatctcagtgcct

SEQ ID NO: 5384959 - DNA, 25 bp, Homo sapien
catttgctgacaataacatggccag

SEQ ID NO: 5384960 - DNA, 25 bp, Homo sapien
atctgtgcaggaccctggccggcat

SEQ ID NO: 5384961 - DNA, 25 bp, Homo sapien
gaccctggccggcatttgctgacaa

SEQ ID NO: 5384962 - DNA, 25 bp, Homo sapien
agacacggccctcatctgtgcagga

SEQ ID NO: 5384963 - DNA, 25 bp, Homo sapien
taagtctcacgtataatccaggctg

SEQ ID NO: 5384964 - DNA, 25 bp, Homo sapien
cgattacccctttccatgctttgtg

SEQ ID NO: 5384965 - DNA, 25 bp, Homo sapien
tcaaatgatcatgctagcgcagcct

SEQ ID NO: 5384966 - DNA, 25 bp, Homo sapien
tgggtttaaacctaccatcttgcta

SEQ ID NO: 5384967 - DNA, 25 bp, Homo sapien
cagttccctgggtatacacctagca

SEQ ID NO: 5384968 - DNA, 25 bp, Homo sapien
attttacgttcccatcagcagagag

SEQ ID NO: 5384969 - DNA, 25 bp, Homo sapien
gacagggatatggtctgcattgtta

SEQ ID NO: 5384970 - DNA, 25 bp, Homo sapien
tatgcagtgtcaatatcaagtgcca

SEQ ID NO: 5384971 - DNA, 25 bp, Homo sapien
cattgacttgccgtttctgacaaaa

SEQ ID NO: 5384972 - DNA, 25 bp, Homo sapien
tcagtaatttgatcatgatctgcct

SEQ ID NO: 5384973 - DNA, 25 bp, Homo sapien
gactttcttggatttgtgggttcat

SEQ ID NO: 5384974 - DNA, 25 bp, Homo sapien
tcatagtttcatcgaatttgggaaa

SEQ ID NO: 5384975 - DNA, 25 bp, Homo sapien
tagactcatgtcttacagcctggtg

SEQ ID NO: 5384976 - DNA, 25 bp, Homo sapien
cagtttctagttgcttacagtggga

SEQ ID NO: 5384977 - DNA, 25 bp, Homo sapien
tggtctctggctcaactcagtggga

SEQ ID NO: 5384978 - DNA, 25 bp, Homo sapien
tccatgcaataagccggagtggtct

SEQ ID NO: 5384979 - DNA, 25 bp, Homo sapien
tctggtgagctgtgggagttttcaa

SEQ ID NO: 5384980 - DNA, 25 bp, Homo sapien
gagctgtgggagttttcaaggaaga

SEQ ID NO: 5384981 - DNA, 25 bp, Homo sapien
gaaaaggtgtgagcggtactgggcc

SEQ ID NO: 5384982 - DNA, 25 bp, Homo sapien
gcagactgggcttttctgcatcact

SEQ ID NO: 5384983 - DNA, 25 bp, Homo sapien
tcaggagtcccgttctgtgtaccag

SEQ ID NO: 5384984 - DNA, 25 bp, Homo sapien
tacagtatatgtcctggccagaccg

SEQ ID NO: 5384985 - DNA, 25 bp, Homo sapien
ccgtggattatgtgaggcagctgct

SEQ ID NO: 5384986 - DNA, 25 bp, Homo sapien
cacatgctcgccatggtggaggaag

SEQ ID NO: 5384987 - DNA, 25 bp, Homo sapien
tgctgaccaaagtcctgccggatct

SEQ ID NO: 5384988 - DNA, 25 bp, Homo sapien
aatacttgtcttggccgcgcccaaa

SEQ ID NO: 5384989 - DNA, 25 bp, Homo sapien
ggcagggttcctggcaatacttgtc

SEQ ID NO: 5384990 - DNA, 25 bp, Homo sapien
taagtcaggtagagcctgggttgct

SEQ ID NO: 5384991 - DNA, 25 bp, Homo sapien
atagaccagtgcagccagagagacc

SEQ ID NO: 5384992 - DNA, 25 bp, Homo sapien
gacagactcctaaccaaccagatgg

SEQ ID NO: 5384993 - DNA, 25 bp, Homo sapien
gccaaagcttcagagatacagtcca

SEQ ID NO: 5384994 - DNA, 25 bp, Homo sapien
gacatctctgctagctggacagcca

SEQ ID NO: 5384995 - DNA, 25 bp, Homo sapien
taaaaggaggacacgtctctgtgca

SEQ ID NO: 5384996 - DNA, 25 bp, Homo sapien
ccttctctgggatagggctggcctt

SEQ ID NO: 5384997 - DNA, 25 bp, Homo sapien
taaatggcccatggtagggttcctg

SEQ ID NO: 5384998 - DNA, 25 bp, Homo sapien
tgtgatatcataccttcgccggccg

SEQ ID NO: 5384999 - DNA, 25 bp, Homo sapien
agctgattggttcacaattaaatgg

SEQ ID NO: 5385000 - DNA, 25 bp, Homo sapien
tctggtgtgctttccgtatcagctc

SEQ ID NO: 5385001 - DNA, 25 bp, Homo sapien
gggattgacaggttgaatgtccttg

SEQ ID NO: 5385002 - DNA, 25 bp, Homo sapien
ttccacaagtaagagatgaaactcc

SEQ ID NO: 5385003 - DNA, 25 bp, Homo sapien
cacactggtataagcgaagtttaga

SEQ ID NO: 5385004 - DNA, 25 bp, Homo sapien
acactggtataagcgaagtttagac

SEQ ID NO: 5385005 - DNA, 25 bp, Homo sapien
taagtgagtagacttatgccctggt

SEQ ID NO: 5385006 - DNA, 25 bp, Homo sapien
tataagtgagtagacttatgccctg

SEQ ID NO: 5385007 - DNA, 25 bp, Homo sapien
cagatataagtgagtagacttatgc

SEQ ID NO: 5385008 - DNA, 25 bp, Homo sapien
gtgagtagacttatgccctggtgcc

SEQ ID NO: 5385009 - DNA, 25 bp, Homo sapien
cctgacacaacatattagtcaagtg

SEQ ID NO: 5385010 - DNA, 25 bp, Homo sapien
taggcaattacaatcatgtctcccc

SEQ ID NO: 5385011 - DNA, 25 bp, Homo sapien
tctctaagtagcagtaaatccggtc

SEQ ID NO: 5385012 - DNA, 25 bp, Homo sapien
cagagggcaatactgttcatgcttc

SEQ ID NO: 5385013 - DNA, 25 bp, Homo sapien
taaaaatgggatcatcacgcatcct

SEQ ID NO: 5385014 - DNA, 25 bp, Homo sapien
tcattactggatatttaagattctc

SEQ ID NO: 5385015 - DNA, 25 bp, Homo sapien
cttcctttattatgctggagtattt

SEQ ID NO: 5385016 - DNA, 25 bp, Homo sapien
cgagtaagctcccagtaagtgaggt

SEQ ID NO: 5385017 - DNA, 25 bp, Homo sapien
gatggcattccagtactgggttgtg

SEQ ID NO: 5385018 - DNA, 25 bp, Homo sapien
tggcattccagtactgggttgtgaa

SEQ ID NO: 5385019 - DNA, 25 bp, Homo sapien
ctgatggcattccagtactgggttg

SEQ ID NO: 5385020 - DNA, 25 bp, Homo sapien
tgatggcattccagtactgggttgt

SEQ ID NO: 5385021 - DNA, 25 bp, Homo sapien
cattttgctccggttgcagggattg

SEQ ID NO: 5385022 - DNA, 25 bp, Homo sapien
gacgtacagtggtagactaacattg

SEQ ID NO: 5385023 - DNA, 25 bp, Homo sapien
tacagtggtagactaacattgactt

SEQ ID NO: 5385024 - DNA, 25 bp, Homo sapien
ggattgaggttaccagacgtacagt

SEQ ID NO: 5385025 - DNA, 25 bp, Homo sapien
atctttgaaagcccacttgagcatc

SEQ ID NO: 5385026 - DNA, 25 bp, Homo sapien
tgaaagcccacttgagcatccacac

SEQ ID NO: 5385027 - DNA, 25 bp, Homo sapien
tttgaaagcccacttgagcatccac

SEQ ID NO: 5385028 - DNA, 25 bp, Homo sapien
tctttgaaagcccacttgagcatcc

SEQ ID NO: 5385029 - DNA, 25 bp, Homo sapien
ccatcctacagctagtgggagactg

SEQ ID NO: 5385030 - DNA, 25 bp, Homo sapien
catcctacagctagtgggagactga

SEQ ID NO: 5385031 - DNA, 25 bp, Homo sapien
ctaagtctgacttcgtcagcctatc

SEQ ID NO: 5385032 - DNA, 25 bp, Homo sapien
cacactaagtctgacttcgtcagcc

SEQ ID NO: 5385033 - DNA, 25 bp, Homo sapien
tcgtcagcctatcctagcttcccag

SEQ ID NO: 5385034 - DNA, 25 bp, Homo sapien
ttcccacactaagtctgacttcgtc

SEQ ID NO: 5385035 - DNA, 25 bp, Homo sapien
caatagtaggcagtaaaagtttaag

SEQ ID NO: 5385036 - DNA, 25 bp, Homo sapien
tcatttcacctcacagatcactgat

SEQ ID NO: 5385037 - DNA, 25 bp, Homo sapien
gctagggtttactaacctacaagca

SEQ ID NO: 5385038 - DNA, 25 bp, Homo sapien
ttctgctagggtttactaacctaca

SEQ ID NO: 5385039 - DNA, 25 bp, Homo sapien
ccaatattggtagttctttcttgta

SEQ ID NO: 5385040 - DNA, 25 bp, Homo sapien
gatgtatacctgctttccatacaca

SEQ ID NO: 5385041 - DNA, 25 bp, Homo sapien
catgcaattataaactgcaggaagg

SEQ ID NO: 5385042 - DNA, 25 bp, Homo sapien
taaagcaaaatccttggcagaacca

SEQ ID NO: 5385043 - DNA, 25 bp, Homo sapien
caagtgaatccatcctgccgtccgt

SEQ ID NO: 5385044 - DNA, 25 bp, Homo sapien
gtcttcccagctccccgccatgtcg

SEQ ID NO: 5385045 - DNA, 25 bp, Homo sapien
tccccgccatgtcgccaagtgaatc

SEQ ID NO: 5385046 - DNA, 25 bp, Homo sapien
gtaccgcaagcgccgcctgcaggag

SEQ ID NO: 5385047 - DNA, 25 bp, Homo sapien
gtctgcgtcctattacccgaacact

SEQ ID NO: 5385048 - DNA, 25 bp, Homo sapien
cacaactacctcaacagcgtgtggg

SEQ ID NO: 5385049 - DNA, 25 bp, Homo sapien
gactccattcggtccacagggctgg

SEQ ID NO: 5385050 - DNA, 25 bp, Homo sapien
tgcgtcctattacccgaacactgca

SEQ ID NO: 5385051 - DNA, 25 bp, Homo sapien
gctaagccagcactaagaattttct

SEQ ID NO: 5385052 - DNA, 25 bp, Homo sapien
tccctatacataccgcaataatgag

SEQ ID NO: 5385053 - DNA, 25 bp, Homo sapien
ttactattcctccactacattacag

SEQ ID NO: 5385054 - DNA, 25 bp, Homo sapien
tttcttactattcctccactacatt

SEQ ID NO: 5385055 - DNA, 25 bp, Homo sapien
ggaaaagctggtgccacgttgctct

SEQ ID NO: 5385056 - DNA, 25 bp, Homo sapien
tgccacgttgctctgcacaatgcag

SEQ ID NO: 5385057 - DNA, 25 bp, Homo sapien
ccacgttgctctgcacaatgcaggg

SEQ ID NO: 5385058 - DNA, 25 bp, Homo sapien
ggtgccacgttgctctgcacaatgc

SEQ ID NO: 5385059 - DNA, 25 bp, Homo sapien
tctccaatccgcttgggagtgatct

SEQ ID NO: 5385060 - DNA, 25 bp, Homo sapien
attgggacaatctccaatccgcttg

SEQ ID NO: 5385061 - DNA, 25 bp, Homo sapien
gggacaatctccaatccgcttggga

SEQ ID NO: 5385062 - DNA, 25 bp, Homo sapien
aatccgcttgggagtgatctcgtca

SEQ ID NO: 5385063 - DNA, 25 bp, Homo sapien
taaagcttagtgagtttccttgtat

SEQ ID NO: 5385064 - DNA, 25 bp, Homo sapien
ataaagcttagtgagtttccttgta

SEQ ID NO: 5385065 - DNA, 25 bp, Homo sapien
gaagtcaagactactgtccaaggtc

SEQ ID NO: 5385066 - DNA, 25 bp, Homo sapien
caatgtgttctatagcaggaagtca

SEQ ID NO: 5385067 - DNA, 25 bp, Homo sapien
tagagtcagctttcaccattcccct

SEQ ID NO: 5385068 - DNA, 25 bp, Homo sapien
caaaaagtacaagtgctagagtcag

SEQ ID NO: 5385069 - DNA, 25 bp, Homo sapien
tccttttttacatggcagactagct

SEQ ID NO: 5385070 - DNA, 25 bp, Homo sapien
cagatctactaggaactttcattca

SEQ ID NO: 5385071 - DNA, 25 bp, Homo sapien
gccacgtagcttcagaagtgtggtt

SEQ ID NO: 5385072 - DNA, 25 bp, Homo sapien
tgtggtttttagtaggtacagatct

SEQ ID NO: 5385073 - DNA, 25 bp, Homo sapien
gacagcccacggtcaaagttgaact

SEQ ID NO: 5385074 - DNA, 25 bp, Homo sapien
tcttgggagagaagcaagcatacac

SEQ ID NO: 5385075 - DNA, 25 bp, Homo sapien
attcatttgagcctgataagaaagt

SEQ ID NO: 5385076 - DNA, 25 bp, Homo sapien
gataagaaagttgtctcttgggaga

SEQ ID NO: 5385077 - DNA, 25 bp, Homo sapien
ttttggtaaaaacagcagaatgaca

SEQ ID NO: 5385078 - DNA, 25 bp, Homo sapien
tggtaaaaacagcagaatgacaggt

SEQ ID NO: 5385079 - DNA, 25 bp, Homo sapien
ctttttggtaaaaacagcagaatga

SEQ ID NO: 5385080 - DNA, 25 bp, Homo sapien
ttggtaaaaacagcagaatgacagg

SEQ ID NO: 5385081 - DNA, 25 bp, Homo sapien
agaggatgaacagcgcccatacact

SEQ ID NO: 5385082 - DNA, 25 bp, Homo sapien
agcactcccgatgtctgggtgtttt

SEQ ID NO: 5385083 - DNA, 25 bp, Homo sapien
gcagcactcccgatgtctgggtgtt

SEQ ID NO: 5385084 - DNA, 25 bp, Homo sapien
ttcaggattaggactcttgcatcac

SEQ ID NO: 5385085 - DNA, 25 bp, Homo sapien
tctcgaaaacatagctgactgtcac

SEQ ID NO: 5385086 - DNA, 25 bp, Homo sapien
tcatctcgaaaacatagctgactgt

SEQ ID NO: 5385087 - DNA, 25 bp, Homo sapien
gaaaacatagctgactgtcactcct

SEQ ID NO: 5385088 - DNA, 25 bp, Homo sapien
agtcatctcgaaaacatagctgact

SEQ ID NO: 5385089 - DNA, 25 bp, Homo sapien
acttgatctcaagctccattctacc

SEQ ID NO: 5385090 - DNA, 25 bp, Homo sapien
cagacacttgatctcaagctccatt

SEQ ID NO: 5385091 - DNA, 25 bp, Homo sapien
cttgatcagacacttgatctcaagc

SEQ ID NO: 5385092 - DNA, 25 bp, Homo sapien
ttgatctcaagctccattctacctc

SEQ ID NO: 5385093 - DNA, 25 bp, Homo sapien
agcacaagcgcatcaatgaagtccg

SEQ ID NO: 5385094 - DNA, 25 bp, Homo sapien
caagcgcatcaatgaagtccgaagc

SEQ ID NO: 5385095 - DNA, 25 bp, Homo sapien
cgcatcaatgaagtccgaagccttg

SEQ ID NO: 5385096 - DNA, 25 bp, Homo sapien
gcgcatcaatgaagtccgaagcctt

SEQ ID NO: 5385097 - DNA, 25 bp, Homo sapien
cgccgttacactatgagggtactga

SEQ ID NO: 5385098 - DNA, 25 bp, Homo sapien
tgacgccgttacactatgagggtac

SEQ ID NO: 5385099 - DNA, 25 bp, Homo sapien
gacgccgttacactatgagggtact

SEQ ID NO: 5385100 - DNA, 25 bp, Homo sapien
ctgacgccgttacactatgagggta

SEQ ID NO: 5385101 - DNA, 25 bp, Homo sapien
gctcttctcctttatgatctgtagg

SEQ ID NO: 5385102 - DNA, 25 bp, Homo sapien
tttgctggggacctcttgctcttct

SEQ ID NO: 5385103 - DNA, 25 bp, Homo sapien
ctcctttatgatctgtagggcaggg

SEQ ID NO: 5385104 - DNA, 25 bp, Homo sapien
aaggtgacttatttccaaggccatc

SEQ ID NO: 5385105 - DNA, 25 bp, Homo sapien
aaacaaaggctcactgccacaaatg

SEQ ID NO: 5385106 - DNA, 25 bp, Homo sapien
tcagaacaaacaaaggctcactgcc

SEQ ID NO: 5385107 - DNA, 25 bp, Homo sapien
ggaggtttcattccgcacaaagctc

SEQ ID NO: 5385108 - DNA, 25 bp, Homo sapien
ggaggaaaggaggtttcattccgca

SEQ ID NO: 5385109 - DNA, 25 bp, Homo sapien
tgctcccaccgaagggttgacgttc

SEQ ID NO: 5385110 - DNA, 25 bp, Homo sapien
cctaggatgtgcaaagggcccctgc

SEQ ID NO: 5385111 - DNA, 25 bp, Homo sapien
aggatgtgcaaagggcccctgctcc

SEQ ID NO: 5385112 - DNA, 25 bp, Homo sapien
ctgcggtgtctacattaccatctgt

SEQ ID NO: 5385113 - DNA, 25 bp, Homo sapien
ctggatgagcatggaaaggctgtac

SEQ ID NO: 5385114 - DNA, 25 bp, Homo sapien
gtttctaccacctagacatccagca

SEQ ID NO: 5385115 - DNA, 25 bp, Homo sapien
tggtttctaccacctagacatccag

SEQ ID NO: 5385116 - DNA, 25 bp, Homo sapien
ggtttctaccacctagacatccagc

SEQ ID NO: 5385117 - DNA, 25 bp, Homo sapien
tttctaccacctagacatccagcag

SEQ ID NO: 5385118 - DNA, 25 bp, Homo sapien
gtctagcaccacacctgaaagggga

SEQ ID NO: 5385119 - DNA, 25 bp, Homo sapien
gggactcccttgtacagcagcccag

SEQ ID NO: 5385120 - DNA, 25 bp, Homo sapien
aaggggactcccttgtacagcagcc

SEQ ID NO: 5385121 - DNA, 25 bp, Homo sapien
ctagcaccacacctgaaaggggact

SEQ ID NO: 5385122 - DNA, 25 bp, Homo sapien
caaagactgaatgagtgtccagcat

SEQ ID NO: 5385123 - DNA, 25 bp, Homo sapien
gaatgagtgtccagcatcaggaact

SEQ ID NO: 5385124 - DNA, 25 bp, Homo sapien
ttaggtctacctagtaccaggcctc

SEQ ID NO: 5385125 - DNA, 25 bp, Homo sapien
taggtctacctagtaccaggcctcc

SEQ ID NO: 5385126 - DNA, 25 bp, Homo sapien
agttcttttaaggtacgatgatggt

SEQ ID NO: 5385127 - DNA, 25 bp, Homo sapien
tgtaagaagttcaaagtcttacctg

SEQ ID NO: 5385128 - DNA, 25 bp, Homo sapien
tacaaggctacggtctcttctgcca

SEQ ID NO: 5385129 - DNA, 25 bp, Homo sapien
ccagcaggccagtattcaaatctca

SEQ ID NO: 5385130 - DNA, 25 bp, Homo sapien
tatggctccatttgtagcactgttg

SEQ ID NO: 5385131 - DNA, 25 bp, Homo sapien
tgctgctcgtttcctctctatggct

SEQ ID NO: 5385132 - DNA, 25 bp, Homo sapien
tcgtttcctctctatggctccattt

SEQ ID NO: 5385133 - DNA, 25 bp, Homo sapien
cactgttgttgcactgaggcttgtg

SEQ ID NO: 5385134 - DNA, 25 bp, Homo sapien
cgcagtgccatatgacgcctgaggc

SEQ ID NO: 5385135 - DNA, 25 bp, Homo sapien
agcccgcagtgccatatgacgcctg

SEQ ID NO: 5385136 - DNA, 25 bp, Homo sapien
cccgcagtgccatatgacgcctgag

SEQ ID NO: 5385137 - DNA, 25 bp, Homo sapien
aagcccgcagtgccatatgacgcct

SEQ ID NO: 5385138 - DNA, 25 bp, Homo sapien
aatctgcacaaaagcaatgctatca

SEQ ID NO: 5385139 - DNA, 25 bp, Homo sapien
ctcctcaagtcagagtacaggtaag

SEQ ID NO: 5385140 - DNA, 25 bp, Homo sapien
tttatccaactctcctcaagtcaga

SEQ ID NO: 5385141 - DNA, 25 bp, Homo sapien
aattttgcattatgtaatctgcaca

SEQ ID NO: 5385142 - DNA, 25 bp, Homo sapien
gccaatctcatgttgttttctgaga

SEQ ID NO: 5385143 - DNA, 25 bp, Homo sapien
agccatgccaatctcatgttgtttt

SEQ ID NO: 5385144 - DNA, 25 bp, Homo sapien
tctgagaagtttggttttgtcaaga

SEQ ID NO: 5385145 - DNA, 25 bp, Homo sapien
aagggtgtaacgcaactaagtcaga

SEQ ID NO: 5385146 - DNA, 25 bp, Homo sapien
aggatggagccaccgacccacacgg

SEQ ID NO: 5385147 - DNA, 25 bp, Homo sapien
tggagccaccgacccacacggagta

SEQ ID NO: 5385148 - DNA, 25 bp, Homo sapien
gatggagccaccgacccacacggag

SEQ ID NO: 5385149 - DNA, 25 bp, Homo sapien
caggatggagccaccgacccacacg

SEQ ID NO: 5385150 - DNA, 25 bp, Homo sapien
cttcaacatgctaggcgccagggca

SEQ ID NO: 5385151 - DNA, 25 bp, Homo sapien
gagcaatgatcctgatcttcaacat

SEQ ID NO: 5385152 - DNA, 25 bp, Homo sapien
ctgatcttcaacatgctaggcgcca

SEQ ID NO: 5385153 - DNA, 25 bp, Homo sapien
cattctgtgggccatgccagggtac

SEQ ID NO: 5385154 - DNA, 25 bp, Homo sapien
ttgcggatgtccacatcagacttca

SEQ ID NO: 5385155 - DNA, 25 bp, Homo sapien
tgttggtgtacaggtctttgcggat

SEQ ID NO: 5385156 - DNA, 25 bp, Homo sapien
gtgttggtgtacaggtctttgcgga

SEQ ID NO: 5385157 - DNA, 25 bp, Homo sapien
gtctttgcggatgtccacatcagac

SEQ ID NO: 5385158 - DNA, 25 bp, Homo sapien
tggaagagcgcctcggggcagcgga

SEQ ID NO: 5385159 - DNA, 25 bp, Homo sapien
gaagcaaggctggaagagcgcctcg

SEQ ID NO: 5385160 - DNA, 25 bp, Homo sapien
gcaaggctggaagagcgcctcgggg

SEQ ID NO: 5385161 - DNA, 25 bp, Homo sapien
aggaagcaaggctggaagagcgcct

SEQ ID NO: 5385162 - DNA, 25 bp, Homo sapien
catggtggtgaacctatagccacgc

SEQ ID NO: 5385163 - DNA, 25 bp, Homo sapien
ccatggtggtgaacctatagccacg

SEQ ID NO: 5385164 - DNA, 25 bp, Homo sapien
atggtggtgaacctatagccacgct

SEQ ID NO: 5385165 - DNA, 25 bp, Homo sapien
ggcacagtgtgggtgaccccgtcac

SEQ ID NO: 5385166 - DNA, 25 bp, Homo sapien
ctaggcgcagggtggcatgggggag

SEQ ID NO: 5385167 - DNA, 25 bp, Homo sapien
tggcatgggggagggcattcccatc

SEQ ID NO: 5385168 - DNA, 25 bp, Homo sapien
atgggggagggcattcccatcatag

SEQ ID NO: 5385169 - DNA, 25 bp, Homo sapien
aggggccacacgcagctcgttgtag

SEQ ID NO: 5385170 - DNA, 25 bp, Homo sapien
tcctcaggggccacacgcagctcgt

SEQ ID NO: 5385171 - DNA, 25 bp, Homo sapien
cagcaggatggggtgctcctcaggg

SEQ ID NO: 5385172 - DNA, 25 bp, Homo sapien
gcctccttgcccacataggactctt

SEQ ID NO: 5385173 - DNA, 25 bp, Homo sapien
gatgcatgccccccatcatgccctg

SEQ ID NO: 5385174 - DNA, 25 bp, Homo sapien
tcatgccctgctgcctggggcgccc

SEQ ID NO: 5385175 - DNA, 25 bp, Homo sapien
ctgatgcatgccccccatcatgccc

SEQ ID NO: 5385176 - DNA, 25 bp, Homo sapien
tgccctgctgcctggggcgccccac

SEQ ID NO: 5385177 - DNA, 25 bp, Homo sapien
agagccgttgtcaatgacgagcacg

SEQ ID NO: 5385178 - DNA, 25 bp, Homo sapien
ttgtcaatgacgagcacggcggtat

SEQ ID NO: 5385179 - DNA, 25 bp, Homo sapien
cgttgtcaatgacgagcacggcggt

SEQ ID NO: 5385180 - DNA, 25 bp, Homo sapien
gccgttgtcaatgacgagcacggcg

SEQ ID NO: 5385181 - DNA, 25 bp, Homo sapien
tcttagctggctctgatgtttcatt

SEQ ID NO: 5385182 - DNA, 25 bp, Homo sapien
tatatttccaaaatacagttcttta

SEQ ID NO: 5385183 - DNA, 25 bp, Homo sapien
atacacacatataaaaacatttgaa

SEQ ID NO: 5385184 - DNA, 25 bp, Homo sapien
acacacatataaaaacatttgaaaa

SEQ ID NO: 5385185 - DNA, 25 bp, Homo sapien
aatcctttatatttccaaaatacag

SEQ ID NO: 5385186 - DNA, 25 bp, Homo sapien
cattttttcaaccacttctatctgc

SEQ ID NO: 5385187 - DNA, 25 bp, Homo sapien
attgcttctgagtatcattttgttc

SEQ ID NO: 5385188 - DNA, 25 bp, Homo sapien
tgaatcagaatctcatcgtgtaata

SEQ ID NO: 5385189 - DNA, 25 bp, Homo sapien
gtgttctgttcttcacaaaattgct

SEQ ID NO: 5385190 - DNA, 25 bp, Homo sapien
ttttcatgaaatactggagctgtcc

SEQ ID NO: 5385191 - DNA, 25 bp, Homo sapien
attttaattttcatgaaatactgga

SEQ ID NO: 5385192 - DNA, 25 bp, Homo sapien
tttaattttcatgaaatactggagc

SEQ ID NO: 5385193 - DNA, 25 bp, Homo sapien
taattttcatgaaatactggagctg

SEQ ID NO: 5385194 - DNA, 25 bp, Homo sapien
cagtatagtcttactatcggaagca

SEQ ID NO: 5385195 - DNA, 25 bp, Homo sapien
tactatcggaagcaaaaaattccaa

SEQ ID NO: 5385196 - DNA, 25 bp, Homo sapien
ttcaaataccgaaggtccataatcc

SEQ ID NO: 5385197 - DNA, 25 bp, Homo sapien
ttatttcaaataccgaaggtccata

SEQ ID NO: 5385198 - DNA, 25 bp, Homo sapien
acacagggaactgctaagtgcagag

SEQ ID NO: 5385199 - DNA, 25 bp, Homo sapien
gaaattgctggctttcaggtgttct

SEQ ID NO: 5385200 - DNA, 25 bp, Homo sapien
ggaaattgctggctttcaggtgttc

SEQ ID NO: 5385201 - DNA, 25 bp, Homo sapien
ctctctatcaccatccttatttatt

SEQ ID NO: 5385202 - DNA, 25 bp, Homo sapien
ctatcaccatccttatttatttctg

SEQ ID NO: 5385203 - DNA, 25 bp, Homo sapien
tctctatcaccatccttatttattt

SEQ ID NO: 5385204 - DNA, 25 bp, Homo sapien
tctatcaccatccttatttatttct

SEQ ID NO: 5385205 - DNA, 25 bp, Homo sapien
ctctggctggccattttcactgcct

SEQ ID NO: 5385206 - DNA, 25 bp, Homo sapien
tctggctggccattttcactgcctt

SEQ ID NO: 5385207 - DNA, 25 bp, Homo sapien
ggctggccattttcactgcctttaa

SEQ ID NO: 5385208 - DNA, 25 bp, Homo sapien
gcctttaagcctttgtgactcttcc

SEQ ID NO: 5385209 - DNA, 25 bp, Homo sapien
agagacagtgcacacagggaaaagg

SEQ ID NO: 5385210 - DNA, 25 bp, Homo sapien
tgccagcagctcagtaatgccagag

SEQ ID NO: 5385211 - DNA, 25 bp, Homo sapien
cagctcagtaatgccagagacagtg

SEQ ID NO: 5385212 - DNA, 25 bp, Homo sapien
aaggatgagtgagtagggcattgcc

SEQ ID NO: 5385213 - DNA, 25 bp, Homo sapien
attatgtcctgctaaaaaattctga

SEQ ID NO: 5385214 - DNA, 25 bp, Homo sapien
ttcattatgtcctgctaaaaaattc

SEQ ID NO: 5385215 - DNA, 25 bp, Homo sapien
ttttcattatgtcctgctaaaaaat

SEQ ID NO: 5385216 - DNA, 25 bp, Homo sapien
cattatgtcctgctaaaaaattctg

SEQ ID NO: 5385217 - DNA, 25 bp, Homo sapien
gttttcagaagagtattttggcatc

SEQ ID NO: 5385218 - DNA, 25 bp, Homo sapien
ttttcagaagagtattttggcatct

SEQ ID NO: 5385219 - DNA, 25 bp, Homo sapien
tttcagaagagtattttggcatctg

SEQ ID NO: 5385220 - DNA, 25 bp, Homo sapien
tgttttcagaagagtattttggcat

SEQ ID NO: 5385221 - DNA, 25 bp, Homo sapien
ttcaaaaatttgtgtggccgcctta

SEQ ID NO: 5385222 - DNA, 25 bp, Homo sapien
tagtgaataaccacaatattgggct

SEQ ID NO: 5385223 - DNA, 25 bp, Homo sapien
ggagaaatgcatgaacccacgttgc

SEQ ID NO: 5385224 - DNA, 25 bp, Homo sapien
ccagtgactgcgcaaaatatagaat

SEQ ID NO: 5385225 - DNA, 25 bp, Homo sapien
cttcactttcgttgtcaggaaattg

SEQ ID NO: 5385226 - DNA, 25 bp, Homo sapien
tcactttcgttgtcaggaaattgct

SEQ ID NO: 5385227 - DNA, 25 bp, Homo sapien
ttcactttcgttgtcaggaaattgc

SEQ ID NO: 5385228 - DNA, 25 bp, Homo sapien
tctatcaccatccttatttatttct

SEQ ID NO: 5385229 - DNA, 25 bp, Homo sapien
ctctctatcaccatccttatttatt

SEQ ID NO: 5385230 - DNA, 25 bp, Homo sapien
atttatttctggttcttgagacatt

SEQ ID NO: 5385231 - DNA, 25 bp, Homo sapien
ttatttctggttcttgagacatttt

SEQ ID NO: 5385232 - DNA, 25 bp, Homo sapien
tattttcactgcctttgaacctttg

SEQ ID NO: 5385233 - DNA, 25 bp, Homo sapien
tggctattttcactgcctttgaacc

SEQ ID NO: 5385234 - DNA, 25 bp, Homo sapien
ttcactgcctttgaacctttgtgac

SEQ ID NO: 5385235 - DNA, 25 bp, Homo sapien
actgcctttgaacctttgtgactct

SEQ ID NO: 5385236 - DNA, 25 bp, Homo sapien
tcttttaaaacaatgctatgagaac

SEQ ID NO: 5385237 - DNA, 25 bp, Homo sapien
caccattggccatgatggtcctgat

SEQ ID NO: 5385238 - DNA, 25 bp, Homo sapien
cattggccatgatggtcctgatctt

SEQ ID NO: 5385239 - DNA, 25 bp, Homo sapien
caccacacttatccttatttttatc

SEQ ID NO: 5385240 - DNA, 25 bp, Homo sapien
tctttgtagtcagaaagtaactggc

SEQ ID NO: 5385241 - DNA, 25 bp, Homo sapien
gtagtcagaaagtaactggcaaatt

SEQ ID NO: 5385242 - DNA, 25 bp, Homo sapien
tttctttgtagtcagaaagtaactg

SEQ ID NO: 5385243 - DNA, 25 bp, Homo sapien
tttgtagtcagaaagtaactggcaa

SEQ ID NO: 5385244 - DNA, 25 bp, Homo sapien
tgcagaagccacgctaactttcccc

SEQ ID NO: 5385245 - DNA, 25 bp, Homo sapien
agccacgctaactttccccgtattg

SEQ ID NO: 5385246 - DNA, 25 bp, Homo sapien
aatgcttcaaagatctgtgctgcct

SEQ ID NO: 5385247 - DNA, 25 bp, Homo sapien
tggaatgcttcaaagatctgtgctg

SEQ ID NO: 5385248 - DNA, 25 bp, Homo sapien
tcaagatgcccagcggccagagcag

SEQ ID NO: 5385249 - DNA, 25 bp, Homo sapien
attaggttctgaatatgtggggaag

SEQ ID NO: 5385250 - DNA, 25 bp, Homo sapien
actttgtgtgcggataaagtcaaga

SEQ ID NO: 5385251 - DNA, 25 bp, Homo sapien
gtgtgcggataaagtcaagatgccc

SEQ ID NO: 5385252 - DNA, 25 bp, Homo sapien
acagcatactctctggccgtctgtc

SEQ ID NO: 5385253 - DNA, 25 bp, Homo sapien
cgtctgtccagatagatcttgagaa

SEQ ID NO: 5385254 - DNA, 25 bp, Homo sapien
gatagatcttgagaagatacatcaa

SEQ ID NO: 5385255 - DNA, 25 bp, Homo sapien
tctggccgtctgtccagatagatct

SEQ ID NO: 5385256 - DNA, 25 bp, Homo sapien
gtttttgctcatgtacaccaagtag

SEQ ID NO: 5385257 - DNA, 25 bp, Homo sapien
ccagcgcatttaaattcgctttttt

SEQ ID NO: 5385258 - DNA, 25 bp, Homo sapien
ctcatgtacaccaagtagcagtggt

SEQ ID NO: 5385259 - DNA, 25 bp, Homo sapien
tttgctcatgtacaccaagtagcag

SEQ ID NO: 5385260 - DNA, 25 bp, Homo sapien
gcctgagaaacatggcaaaaacctc

SEQ ID NO: 5385261 - DNA, 25 bp, Homo sapien
aaaaactgaggttggaggaccatct

SEQ ID NO: 5385262 - DNA, 25 bp, Homo sapien
accatctgagcttggagaggtcgag

SEQ ID NO: 5385263 - DNA, 25 bp, Homo sapien
ttggaggaccatctgagcttggaga

SEQ ID NO: 5385264 - DNA, 25 bp, Homo sapien
tcattgtagatagcgtagtgtagag

SEQ ID NO: 5385265 - DNA, 25 bp, Homo sapien
actcatctggaatgtttggatcagt

SEQ ID NO: 5385266 - DNA, 25 bp, Homo sapien
gattcgatatcagcaccgtataaga

SEQ ID NO: 5385267 - DNA, 25 bp, Homo sapien
ggtatttccatactcatctggaatg

SEQ ID NO: 5385268 - DNA, 25 bp, Homo sapien
ctcatgctgatatagttggctactg

SEQ ID NO: 5385269 - DNA, 25 bp, Homo sapien
tgacatcgtctgtccagcaggagtt

SEQ ID NO: 5385270 - DNA, 25 bp, Homo sapien
ttgacatcgtctgtccagcaggagt

SEQ ID NO: 5385271 - DNA, 25 bp, Homo sapien
tctgaggtttccacaaccagggtgc

SEQ ID NO: 5385272 - DNA, 25 bp, Homo sapien
tgaggtttccacaaccagggtgctg

SEQ ID NO: 5385273 - DNA, 25 bp, Homo sapien
tctctgaggtttccacaaccagggt

SEQ ID NO: 5385274 - DNA, 25 bp, Homo sapien
ctctctgaggtttccacaaccaggg

SEQ ID NO: 5385275 - DNA, 25 bp, Homo sapien
tcgtcgtggtctccagaagtgccca

SEQ ID NO: 5385276 - DNA, 25 bp, Homo sapien
agtcgtcgtggtctccagaagtgcc

SEQ ID NO: 5385277 - DNA, 25 bp, Homo sapien
gagtcgtcgtggtctccagaagtgc

SEQ ID NO: 5385278 - DNA, 25 bp, Homo sapien
gtcgtcgtggtctccagaagtgccc

SEQ ID NO: 5385279 - DNA, 25 bp, Homo sapien
tgtcttcatagtggagtcgtcctgg

SEQ ID NO: 5385280 - DNA, 25 bp, Homo sapien
gcattgaatcaacctcagctaccat

SEQ ID NO: 5385281 - DNA, 25 bp, Homo sapien
ctgcttttaacagcctggggaggcc

SEQ ID NO: 5385282 - DNA, 25 bp, Homo sapien
aacagcctggggaggccggtagtag

SEQ ID NO: 5385283 - DNA, 25 bp, Homo sapien
ctggggaggccggtagtagcgagca

SEQ ID NO: 5385284 - DNA, 25 bp, Homo sapien
gggaggccggtagtagcgagcagat

SEQ ID NO: 5385285 - DNA, 25 bp, Homo sapien
gcgtgcagcatgcgcgtgcaagccg

SEQ ID NO: 5385286 - DNA, 25 bp, Homo sapien
cgcgtgcagcatgcgcgtgcaagcc

SEQ ID NO: 5385287 - DNA, 25 bp, Homo sapien
ccgcgtgcagcatgcgcgtgcaagc

SEQ ID NO: 5385288 - DNA, 25 bp, Homo sapien
cattaactcatggtggatgagtcca

SEQ ID NO: 5385289 - DNA, 25 bp, Homo sapien
gcagtgtaggacagtccatggcaag

SEQ ID NO: 5385290 - DNA, 25 bp, Homo sapien
tgcaacttagccacagggcacaagc

SEQ ID NO: 5385291 - DNA, 25 bp, Homo sapien
tcaggacccaatcgccacttaaaga

SEQ ID NO: 5385292 - DNA, 25 bp, Homo sapien
ctacaagcacctgccaccgcgccca

SEQ ID NO: 5385293 - DNA, 25 bp, Homo sapien
actacaagcacctgccaccgcgccc

SEQ ID NO: 5385294 - DNA, 25 bp, Homo sapien
catgatccgcctgcctcgggctccc

SEQ ID NO: 5385295 - DNA, 25 bp, Homo sapien
atgatccgcctgcctcgggctccca

SEQ ID NO: 5385296 - DNA, 25 bp, Homo sapien
cttgggattctgaggcaaaaacgca

SEQ ID NO: 5385297 - DNA, 25 bp, Homo sapien
tcatggtgcttaccgcttgggattc

SEQ ID NO: 5385298 - DNA, 25 bp, Homo sapien
tctaatacagatttgtgggaacaca

SEQ ID NO: 5385299 - DNA, 25 bp, Homo sapien
cccaaatggaatttaggctggatgg

SEQ ID NO: 5385300 - DNA, 25 bp, Homo sapien
tgcggaggtgatgttctgtccagca

SEQ ID NO: 5385301 - DNA, 25 bp, Homo sapien
gcttgcggaggtgatgttctgtcca

SEQ ID NO: 5385302 - DNA, 25 bp, Homo sapien
cgactgcttgcggaggtgatgttct

SEQ ID NO: 5385303 - DNA, 25 bp, Homo sapien
gagcccgactgcttgcggaggtgat

SEQ ID NO: 5385304 - DNA, 25 bp, Homo sapien
cccactcgggtctgctggccttgac

SEQ ID NO: 5385305 - DNA, 25 bp, Homo sapien
taacggcggtagagaggaagtcacc

SEQ ID NO: 5385306 - DNA, 25 bp, Homo sapien
ggaagtcaccaaggttgccactcag

SEQ ID NO: 5385307 - DNA, 25 bp, Homo sapien
tggacctccagtcatttcggagagg

SEQ ID NO: 5385308 - DNA, 25 bp, Homo sapien
agagggtaagttgcagcgctgccca

SEQ ID NO: 5385309 - DNA, 25 bp, Homo sapien
aaatccaaggagagcattttgttat

SEQ ID NO: 5385310 - DNA, 25 bp, Homo sapien
aatatgtaggataaattcaggataa

SEQ ID NO: 5385311 - DNA, 25 bp, Homo sapien
gataaaatccaaggagagcattttg

SEQ ID NO: 5385312 - DNA, 25 bp, Homo sapien
agaatatgtaggataaattcaggat

SEQ ID NO: 5385313 - DNA, 25 bp, Homo sapien
gagcaaacacacttggctggaggct

SEQ ID NO: 5385314 - DNA, 25 bp, Homo sapien
tgagcaaacacacttggctggaggc

SEQ ID NO: 5385315 - DNA, 25 bp, Homo sapien
ctgagcaaacacacttggctggagg

SEQ ID NO: 5385316 - DNA, 25 bp, Homo sapien
ggccgctactgcgagcatgaccaga

SEQ ID NO: 5385317 - DNA, 25 bp, Homo sapien
gctactgcgagcatgaccagaggcg

SEQ ID NO: 5385318 - DNA, 25 bp, Homo sapien
tactgcgagcatgaccagaggcgca

SEQ ID NO: 5385319 - DNA, 25 bp, Homo sapien
ttcaccggccgctactgcgagcatg

SEQ ID NO: 5385320 - DNA, 25 bp, Homo sapien
ccctggagcacggagcctggaccct

SEQ ID NO: 5385321 - DNA, 25 bp, Homo sapien
tgcggcgccctggagcacggagcct

SEQ ID NO: 5385322 - DNA, 25 bp, Homo sapien
cacggagcctggaccctccgcgcct

SEQ ID NO: 5385323 - DNA, 25 bp, Homo sapien
tggagcacggagcctggaccctccg

SEQ ID NO: 5385324 - DNA, 25 bp, Homo sapien
tggacaggtgtagagtggttcttgc

SEQ ID NO: 5385325 - DNA, 25 bp, Homo sapien
tggcctcccacgctcacgggccgag

SEQ ID NO: 5385326 - DNA, 25 bp, Homo sapien
ctcccacgctcacgggccgagcgcc

SEQ ID NO: 5385327 - DNA, 25 bp, Homo sapien
gcctcccacgctcacgggccgagcg

SEQ ID NO: 5385328 - DNA, 25 bp, Homo sapien
tcctggcctcccacgctcacgggcc

SEQ ID NO: 5385329 - DNA, 25 bp, Homo sapien
tactcttgctgccctgcgcactcct

SEQ ID NO: 5385330 - DNA, 25 bp, Homo sapien
cgggacttgggcatcgcctttaatt

SEQ ID NO: 5385331 - DNA, 25 bp, Homo sapien
gcccgcgcaccctcggtccctggtc

SEQ ID NO: 5385332 - DNA, 25 bp, Homo sapien
tggtcccttccgtcctccagcggga

SEQ ID NO: 5385333 - DNA, 25 bp, Homo sapien
cagaacaacagcgagaaggagccaa

SEQ ID NO: 5385334 - DNA, 25 bp, Homo sapien
ccactgtgaccggtaggtagagaca

SEQ ID NO: 5385335 - DNA, 25 bp, Homo sapien
caggtcgcttcccaatctgaggagg

SEQ ID NO: 5385336 - DNA, 25 bp, Homo sapien
cacttcgggtagaaggcacttgcat

SEQ ID NO: 5385337 - DNA, 25 bp, Homo sapien
tcagtcatcccccacacatcctaga

SEQ ID NO: 5385338 - DNA, 25 bp, Homo sapien
gcagtgtttatagaagctgcccttt

SEQ ID NO: 5385339 - DNA, 25 bp, Homo sapien
ctgcagtgtttatagaagctgccct

SEQ ID NO: 5385340 - DNA, 25 bp, Homo sapien
ggctcagtcatcccccacacatcct

SEQ ID NO: 5385341 - DNA, 25 bp, Homo sapien
cccagcgaatgcctgccggctgagg

SEQ ID NO: 5385342 - DNA, 25 bp, Homo sapien
tagcctagaaccaaatcgactcttc

SEQ ID NO: 5385343 - DNA, 25 bp, Homo sapien
cagcacagggctggtatgttcagcc

SEQ ID NO: 5385344 - DNA, 25 bp, Homo sapien
tgtgagcgttcaaaagcagtctctg

SEQ ID NO: 5385345 - DNA, 25 bp, Homo sapien
catacctttaaagtaacgactggct

SEQ ID NO: 5385346 - DNA, 25 bp, Homo sapien
gagcctcagccgaagatgtgggaat

SEQ ID NO: 5385347 - DNA, 25 bp, Homo sapien
ggctccaaagtccacactgtgacag

SEQ ID NO: 5385348 - DNA, 25 bp, Homo sapien
caactaaagtggacgggctccaaag

SEQ ID NO: 5385349 - DNA, 25 bp, Homo sapien
ctttgtcttaggtcttattactaat

SEQ ID NO: 5385350 - DNA, 25 bp, Homo sapien
ttctttgtcttaggtcttattacta

SEQ ID NO: 5385351 - DNA, 25 bp, Homo sapien
tctttgtcttaggtcttattactaa

SEQ ID NO: 5385352 - DNA, 25 bp, Homo sapien
ttgtcttaggtcttattactaataa

SEQ ID NO: 5385353 - DNA, 25 bp, Homo sapien
ggttccaggcgcagaaacctacagg

SEQ ID NO: 5385354 - DNA, 25 bp, Homo sapien
tagcaaggctcccagtgagtcaacg

SEQ ID NO: 5385355 - DNA, 25 bp, Homo sapien
gacaagttcctaaccacgctgggct

SEQ ID NO: 5385356 - DNA, 25 bp, Homo sapien
gggcttcgggttccagatctataaa

SEQ ID NO: 5385357 - DNA, 25 bp, Homo sapien
aacacgtcaggagtgtgcagagctc

SEQ ID NO: 5385358 - DNA, 25 bp, Homo sapien
tgggcatgcttgtggtaagaggcca

SEQ ID NO: 5385359 - DNA, 25 bp, Homo sapien
cctgaggtgggcatgcttgtggtaa

SEQ ID NO: 5385360 - DNA, 25 bp, Homo sapien
agagatggaaacacgtcaggagtgt

SEQ ID NO: 5385361 - DNA, 25 bp, Homo sapien
agacagggagggacacgcattgttc

SEQ ID NO: 5385362 - DNA, 25 bp, Homo sapien
gacatgggtggtagggaccaagaca

SEQ ID NO: 5385363 - DNA, 25 bp, Homo sapien
gaggggaccttacgcttctccagga

SEQ ID NO: 5385364 - DNA, 25 bp, Homo sapien
gggacacgcattgttcagggcacag

SEQ ID NO: 5385365 - DNA, 25 bp, Homo sapien
tttgcaacagcctcagatgggaacc

SEQ ID NO: 5385366 - DNA, 25 bp, Homo sapien
catgtgcatgtctcatggcaaggca

SEQ ID NO: 5385367 - DNA, 25 bp, Homo sapien
gaatgggaacctatgtgctctgaaa

SEQ ID NO: 5385368 - DNA, 25 bp, Homo sapien
gactggcaacaacagggtgcaacct

SEQ ID NO: 5385369 - DNA, 25 bp, Homo sapien
aaaaggatccgcagacagtgttgtc

SEQ ID NO: 5385370 - DNA, 25 bp, Homo sapien
ctttcctgttatgaggtccccagcg

SEQ ID NO: 5385371 - DNA, 25 bp, Homo sapien
tcctcgtggatggtgtagtcactgc

SEQ ID NO: 5385372 - DNA, 25 bp, Homo sapien
tgttgtccatgacaccgacctctgc

SEQ ID NO: 5385373 - DNA, 25 bp, Homo sapien
cttcacctgcattgcctgccctgca

SEQ ID NO: 5385374 - DNA, 25 bp, Homo sapien
acctgcattgcctgccctgcactgc

SEQ ID NO: 5385375 - DNA, 25 bp, Homo sapien
gcattgcctgccctgcactgctcac

SEQ ID NO: 5385376 - DNA, 25 bp, Homo sapien
cctgcattgcctgccctgcactgct

SEQ ID NO: 5385377 - DNA, 25 bp, Homo sapien
tggtcatacccaagcaggatccggt

SEQ ID NO: 5385378 - DNA, 25 bp, Homo sapien
catgcggtgcaactcgttatagtca

SEQ ID NO: 5385379 - DNA, 25 bp, Homo sapien
ggtgatgtcactccccatgcggtgc

SEQ ID NO: 5385380 - DNA, 25 bp, Homo sapien
gttatagtcagcgtgcaccatgatc

SEQ ID NO: 5385381 - DNA, 25 bp, Homo sapien
ctgaatgctgggccggcaccctcac

SEQ ID NO: 5385382 - DNA, 25 bp, Homo sapien
ctcctctgaatgctgggccggcacc

SEQ ID NO: 5385383 - DNA, 25 bp, Homo sapien
aggctcctctgaatgctgggccggc

SEQ ID NO: 5385384 - DNA, 25 bp, Homo sapien
tgggccggcaccctcaccccggctg

SEQ ID NO: 5385385 - DNA, 25 bp, Homo sapien
gttccccggacagcctgcaatgagc

SEQ ID NO: 5385386 - DNA, 25 bp, Homo sapien
aggtgttccccggacagcctgcaat

SEQ ID NO: 5385387 - DNA, 25 bp, Homo sapien
gagcctccggcaggtgttccccgga

SEQ ID NO: 5385388 - DNA, 25 bp, Homo sapien
gtgttccccggacagcctgcaatga

SEQ ID NO: 5385389 - DNA, 25 bp, Homo sapien
ggcttccctcttgcatgcactccca

SEQ ID NO: 5385390 - DNA, 25 bp, Homo sapien
tgggcttccctcttgcatgcactcc

SEQ ID NO: 5385391 - DNA, 25 bp, Homo sapien
gcttccctcttgcatgcactcccac

SEQ ID NO: 5385392 - DNA, 25 bp, Homo sapien
tttgggcttccctcttgcatgcact

SEQ ID NO: 5385393 - DNA, 25 bp, Homo sapien
ggagggaagatgcatctttggaagc

SEQ ID NO: 5385394 - DNA, 25 bp, Homo sapien
gaggccacccagttgctgtcgatga

SEQ ID NO: 5385395 - DNA, 25 bp, Homo sapien
ccagttgctgtcgatgagggcagct

SEQ ID NO: 5385396 - DNA, 25 bp, Homo sapien
gcagaggccacccagttgctgtcga

SEQ ID NO: 5385397 - DNA, 25 bp, Homo sapien
ctaggtagaggagactggcctgcca

SEQ ID NO: 5385398 - DNA, 25 bp, Homo sapien
ggagactggcctgccatggccaccg

SEQ ID NO: 5385399 - DNA, 25 bp, Homo sapien
aggagactggcctgccatggccacc

SEQ ID NO: 5385400 - DNA, 25 bp, Homo sapien
ggtagaggagactggcctgccatgg

SEQ ID NO: 5385401 - DNA, 25 bp, Homo sapien
acctggatgacccgggagcacacag

SEQ ID NO: 5385402 - DNA, 25 bp, Homo sapien
ggacaagtccaaggctcaggttgaa

SEQ ID NO: 5385403 - DNA, 25 bp, Homo sapien
aaggctcaggttgaagccacgtggc

SEQ ID NO: 5385404 - DNA, 25 bp, Homo sapien
aagtccaaggctcaggttgaagcca

SEQ ID NO: 5385405 - DNA, 25 bp, Homo sapien
gagggaggcggccagtgcgcagtgc

SEQ ID NO: 5385406 - DNA, 25 bp, Homo sapien
aggtggactagacgcgcagcggcag

SEQ ID NO: 5385407 - DNA, 25 bp, Homo sapien
ctgcagagagggacgaggtggacta

SEQ ID NO: 5385408 - DNA, 25 bp, Homo sapien
ggaggcggccagtgcgcagtgcccc

SEQ ID NO: 5385409 - DNA, 25 bp, Homo sapien
ttgtgttgctgacggcatgggcagt

SEQ ID NO: 5385410 - DNA, 25 bp, Homo sapien
gttgctgacggcatgggcagtggga

SEQ ID NO: 5385411 - DNA, 25 bp, Homo sapien
gtgggagatgttgctctctgaggcc

SEQ ID NO: 5385412 - DNA, 25 bp, Homo sapien
tgctgacggcatgggcagtgggaga

SEQ ID NO: 5385413 - DNA, 25 bp, Homo sapien
gggcattggtcaccagagcccttcc

SEQ ID NO: 5385414 - DNA, 25 bp, Homo sapien
ttggtcaccagagcccttccgctga

SEQ ID NO: 5385415 - DNA, 25 bp, Homo sapien
gagaggccgtgagggcattggtcac

SEQ ID NO: 5385416 - DNA, 25 bp, Homo sapien
ccgtgagggcattggtcaccagagc

SEQ ID NO: 5385417 - DNA, 25 bp, Homo sapien
aggggtcgtgcttaggaccagcagc

SEQ ID NO: 5385418 - DNA, 25 bp, Homo sapien
gcaagaggggtcgtgcttaggacca

SEQ ID NO: 5385419 - DNA, 25 bp, Homo sapien
agaggggtcgtgcttaggaccagca

SEQ ID NO: 5385420 - DNA, 25 bp, Homo sapien
gccaggcaagaggggtcgtgcttag

SEQ ID NO: 5385421 - DNA, 25 bp, Homo sapien
cccgctcaggtgtcaggattgcaag

SEQ ID NO: 5385422 - DNA, 25 bp, Homo sapien
taagaaggctgttcacactctgctc

SEQ ID NO: 5385423 - DNA, 25 bp, Homo sapien
acacctcgtgacaaatgctgcctgg

SEQ ID NO: 5385424 - DNA, 25 bp, Homo sapien
tgaagttaccctgggcggctgtagc

SEQ ID NO: 5385425 - DNA, 25 bp, Homo sapien
actgggagccttgctagtgcagaca

SEQ ID NO: 5385426 - DNA, 25 bp, Homo sapien
tggagcagctgcctatcttaagagt

SEQ ID NO: 5385427 - DNA, 25 bp, Homo sapien
caatgcccaccgaaacacagtaggc

SEQ ID NO: 5385428 - DNA, 25 bp, Homo sapien
agctgctaagcccagggaatgcaca

SEQ ID NO: 5385429 - DNA, 25 bp, Homo sapien
tactttaaaggtatggctgtcacag

SEQ ID NO: 5385430 - DNA, 25 bp, Homo sapien
caggtggcctcggtcacttgggtca

SEQ ID NO: 5385431 - DNA, 25 bp, Homo sapien
acatcttcggctgaggctcccatgg

SEQ ID NO: 5385432 - DNA, 25 bp, Homo sapien
cacattacattgagcaaacagggtc

SEQ ID NO: 5385433 - DNA, 25 bp, Homo sapien
tcctggggatccagctagctctgtg

SEQ ID NO: 5385434 - DNA, 25 bp, Homo sapien
gggtccaggtgctggccagatcaat

SEQ ID NO: 5385435 - DNA, 25 bp, Homo sapien
tgtgagtcgagcagctgtaaccatg

SEQ ID NO: 5385436 - DNA, 25 bp, Homo sapien
gccagatcaatgtgagtcgagcagc

SEQ ID NO: 5385437 - DNA, 25 bp, Homo sapien
tcttgagggcacattccgcatggcc

SEQ ID NO: 5385438 - DNA, 25 bp, Homo sapien
gactggttgtggacacgacagcctc

SEQ ID NO: 5385439 - DNA, 25 bp, Homo sapien
tgaactctgcctgcgttgccttgcg

SEQ ID NO: 5385440 - DNA, 25 bp, Homo sapien
caatgcaagtgccttctacccgaag

SEQ ID NO: 5385441 - DNA, 25 bp, Homo sapien
cagtgcttcagcttacggtaaacta

SEQ ID NO: 5385442 - DNA, 25 bp, Homo sapien
tacggtaaactaaacacatctatta

SEQ ID NO: 5385443 - DNA, 25 bp, Homo sapien
cagcttacggtaaactaaacacatc

SEQ ID NO: 5385444 - DNA, 25 bp, Homo sapien
aaaatattcacccagtgcttcagct

SEQ ID NO: 5385445 - DNA, 25 bp, Homo sapien
aaggcgatgcccaagtcccggcctt

SEQ ID NO: 5385446 - DNA, 25 bp, Homo sapien
cagcaagagtagcaggctgggcgcg

SEQ ID NO: 5385447 - DNA, 25 bp, Homo sapien
tcccgctggaggacggaagggacca

SEQ ID NO: 5385448 - DNA, 25 bp, Homo sapien
tgcaggagtgcgcagggcagcaaga

SEQ ID NO: 5385449 - DNA, 25 bp, Homo sapien
taaatgtttgtagaactcggagagc

SEQ ID NO: 5385450 - DNA, 25 bp, Homo sapien
aaatatttctttgacgagggacagc

SEQ ID NO: 5385451 - DNA, 25 bp, Homo sapien
gagtgcaatagaaacgcctgctccc

SEQ ID NO: 5385452 - DNA, 25 bp, Homo sapien
tcatttggcccgtgacctttcaggg

SEQ ID NO: 5385453 - DNA, 25 bp, Homo sapien
gtactgggtccgtgctggccttccc

SEQ ID NO: 5385454 - DNA, 25 bp, Homo sapien
gcagtactgggtccgtgctggcctt

SEQ ID NO: 5385455 - DNA, 25 bp, Homo sapien
cagtactgggtccgtgctggccttc

SEQ ID NO: 5385456 - DNA, 25 bp, Homo sapien
agtactgggtccgtgctggccttcc

SEQ ID NO: 5385457 - DNA, 25 bp, Homo sapien
ggatgttccatctatcatcactgtt

SEQ ID NO: 5385458 - DNA, 25 bp, Homo sapien
ttgtcaaacttcaagtcatcataac

SEQ ID NO: 5385459 - DNA, 25 bp, Homo sapien
gatgttccatctatcatcactgttg

SEQ ID NO: 5385460 - DNA, 25 bp, Homo sapien
tgtcaaacttcaagtcatcataacc

SEQ ID NO: 5385461 - DNA, 25 bp, Homo sapien
cacaaaggtgttactgccctctctg

SEQ ID NO: 5385462 - DNA, 25 bp, Homo sapien
caggatgaatgggtaaaagaacaca

SEQ ID NO: 5385463 - DNA, 25 bp, Homo sapien
tctctgcacctgacagatgactctg

SEQ ID NO: 5385464 - DNA, 25 bp, Homo sapien
tctgaaggatgactgcactattttg

SEQ ID NO: 5385465 - DNA, 25 bp, Homo sapien
ttatcattgtccttggcaaatagca

SEQ ID NO: 5385466 - DNA, 25 bp, Homo sapien
tgtccttggcaaatagcagtcccag

SEQ ID NO: 5385467 - DNA, 25 bp, Homo sapien
tccttggcaaatagcagtcccagca

SEQ ID NO: 5385468 - DNA, 25 bp, Homo sapien
gaatgtaaaatcatgaccagatatc

SEQ ID NO: 5385469 - DNA, 25 bp, Homo sapien
ttaagagtgtcccttgactgctggt

SEQ ID NO: 5385470 - DNA, 25 bp, Homo sapien
taagagtgtcccttgactgctggtc

SEQ ID NO: 5385471 - DNA, 25 bp, Homo sapien
agccgcaatgaaggcgcaaccgcgt

SEQ ID NO: 5385472 - DNA, 25 bp, Homo sapien
gggaccgaatcacagggcctcttac

SEQ ID NO: 5385473 - DNA, 25 bp, Homo sapien
aagatgcactgtggatcggtatgga

SEQ ID NO: 5385474 - DNA, 25 bp, Homo sapien
gatcggtatggagggtgagccgcaa

SEQ ID NO: 5385475 - DNA, 25 bp, Homo sapien
cagcggtcaggcgtctggaggggga

SEQ ID NO: 5385476 - DNA, 25 bp, Homo sapien
acagcggtcaggcgtctggaggggg

SEQ ID NO: 5385477 - DNA, 25 bp, Homo sapien
cacagcggtcaggcgtctggagggg

SEQ ID NO: 5385478 - DNA, 25 bp, Homo sapien
gaggtggcaggcgcggagggtccag

SEQ ID NO: 5385479 - DNA, 25 bp, Homo sapien
ggtggcaggcgcggagggtccaggc

SEQ ID NO: 5385480 - DNA, 25 bp, Homo sapien
ctccgtgctccagggcgccgcattc

SEQ ID NO: 5385481 - DNA, 25 bp, Homo sapien
agaggtggcaggcgcggagggtcca

SEQ ID NO: 5385482 - DNA, 25 bp, Homo sapien
tctggtcatgctcgcagtagcggcc

SEQ ID NO: 5385483 - DNA, 25 bp, Homo sapien
cagtagcggccggtgaagtgggccg

SEQ ID NO: 5385484 - DNA, 25 bp, Homo sapien
cctctggtcatgctcgcagtagcgg

SEQ ID NO: 5385485 - DNA, 25 bp, Homo sapien
tagcggccggtgaagtgggccgggc

SEQ ID NO: 5385486 - DNA, 25 bp, Homo sapien
aggtaccgccgttcctgcagcagcg

SEQ ID NO: 5385487 - DNA, 25 bp, Homo sapien
gcaggtaccgccgttcctgcagcag

SEQ ID NO: 5385488 - DNA, 25 bp, Homo sapien
agcacgcaggtaccgccgttcctgc

SEQ ID NO: 5385489 - DNA, 25 bp, Homo sapien
ctgcccagcacgcaggtaccgccgt

SEQ ID NO: 5385490 - DNA, 25 bp, Homo sapien
gaggcagtaaaatcagcctccagcc

SEQ ID NO: 5385491 - DNA, 25 bp, Homo sapien
tgtgaaacaaactatcaggggtgcg

SEQ ID NO: 5385492 - DNA, 25 bp, Homo sapien
accctgcttgttagggatgtgaaac

SEQ ID NO: 5385493 - DNA, 25 bp, Homo sapien
tgtgtttgctcaggtaaaccctgct

SEQ ID NO: 5385494 - DNA, 25 bp, Homo sapien
gacttcctctctaccgccgttatgt

SEQ ID NO: 5385495 - DNA, 25 bp, Homo sapien
tgactgtcggtgcttctgagtggca

SEQ ID NO: 5385496 - DNA, 25 bp, Homo sapien
ccaggagtatgggagcggctcctcc

SEQ ID NO: 5385497 - DNA, 25 bp, Homo sapien
gtcacctctccgaaatgactggagg

SEQ ID NO: 5385498 - DNA, 25 bp, Homo sapien
ttcccaaattgatgatctgtaatgc

SEQ ID NO: 5385499 - DNA, 25 bp, Homo sapien
taatgccaaactgaccgtaaacaga

SEQ ID NO: 5385500 - DNA, 25 bp, Homo sapien
ctgtaatgccaaactgaccgtaaac

SEQ ID NO: 5385501 - DNA, 25 bp, Homo sapien
cccaaattgatgatctgtaatgcca

SEQ ID NO: 5385502 - DNA, 25 bp, Homo sapien
gaacaattccctctatgagacctgg

SEQ ID NO: 5385503 - DNA, 25 bp, Homo sapien
gcccctccgagcctgaagaacaatt

SEQ ID NO: 5385504 - DNA, 25 bp, Homo sapien
cttcctcagccaggagaaacgggat

SEQ ID NO: 5385505 - DNA, 25 bp, Homo sapien
cagaagatgtggatgttcccttccc

SEQ ID NO: 5385506 - DNA, 25 bp, Homo sapien
tccctagttcacacaggggaggtga

SEQ ID NO: 5385507 - DNA, 25 bp, Homo sapien
aggagaatggcccagtcctctccct

SEQ ID NO: 5385508 - DNA, 25 bp, Homo sapien
cagtcctctccctagttcacacagg

SEQ ID NO: 5385509 - DNA, 25 bp, Homo sapien
gaatggcccagtcctctccctagtt

SEQ ID NO: 5385510 - DNA, 25 bp, Homo sapien
agactcagaatttgtgccaaggcag

SEQ ID NO: 5385511 - DNA, 25 bp, Homo sapien
cagactcagaatttgtgccaaggca

SEQ ID NO: 5385512 - DNA, 25 bp, Homo sapien
caggattaccatccaggggactcgg

SEQ ID NO: 5385513 - DNA, 25 bp, Homo sapien
gccaggattaccatccaggggactc

SEQ ID NO: 5385514 - DNA, 25 bp, Homo sapien
tccagtccaagcctcgagtcgtata

SEQ ID NO: 5385515 - DNA, 25 bp, Homo sapien
gcctcgagtcgtatagcactgtggg

SEQ ID NO: 5385516 - DNA, 25 bp, Homo sapien
ctgcctttggggctccagtccaagc

SEQ ID NO: 5385517 - DNA, 25 bp, Homo sapien
gagtcgtatagcactgtgggcctct

SEQ ID NO: 5385518 - DNA, 25 bp, Homo sapien
tggagcagaggccttaggaaaagca

SEQ ID NO: 5385519 - DNA, 25 bp, Homo sapien
ttggctgccacctaattgctgatgg

SEQ ID NO: 5385520 - DNA, 25 bp, Homo sapien
ttgctgatggagcagaggccttagg

SEQ ID NO: 5385521 - DNA, 25 bp, Homo sapien
gcagaggccttaggaaaagcagatg

SEQ ID NO: 5385522 - DNA, 25 bp, Homo sapien
ggccactagttggtgactggtgcac

SEQ ID NO: 5385523 - DNA, 25 bp, Homo sapien
accatgtccggccactagttggtga

SEQ ID NO: 5385524 - DNA, 25 bp, Homo sapien
tccggccactagttggtgactggtg

SEQ ID NO: 5385525 - DNA, 25 bp, Homo sapien
catgtccggccactagttggtgact

SEQ ID NO: 5385526 - DNA, 25 bp, Homo sapien
tggctggtccgactgctcctggcac

SEQ ID NO: 5385527 - DNA, 25 bp, Homo sapien
tagggtagaagtactgatgggccat

SEQ ID NO: 5385528 - DNA, 25 bp, Homo sapien
ttagggtagaagtactgatgggcca

SEQ ID NO: 5385529 - DNA, 25 bp, Homo sapien
ctttagggtagaagtactgatgggc

SEQ ID NO: 5385530 - DNA, 25 bp, Homo sapien
tttagggtagaagtactgatgggcc

SEQ ID NO: 5385531 - DNA, 25 bp, Homo sapien
ctgcaggcggcgcttgcggtacggg

SEQ ID NO: 5385532 - DNA, 25 bp, Homo sapien
caggcggcgcttgcggtacgggctg

SEQ ID NO: 5385533 - DNA, 25 bp, Homo sapien
gcaggcggcgcttgcggtacgggct

SEQ ID NO: 5385534 - DNA, 25 bp, Homo sapien
tgcaggcggcgcttgcggtacgggc

SEQ ID NO: 5385535 - DNA, 25 bp, Homo sapien
ctgtgaagagccaaggaggcaccag

SEQ ID NO: 5385536 - DNA, 25 bp, Homo sapien
gtctggaacataacccatgtttgtt

SEQ ID NO: 5385537 - DNA, 25 bp, Homo sapien
cttatatctgtttgtctggaacata

SEQ ID NO: 5385538 - DNA, 25 bp, Homo sapien
gcaccagggcataagtctactcact

SEQ ID NO: 5385539 - DNA, 25 bp, Homo sapien
gaactggctgttaaggagtgtgctt

SEQ ID NO: 5385540 - DNA, 25 bp, Homo sapien
aaggagtgtgcttttcttgaggtct

SEQ ID NO: 5385541 - DNA, 25 bp, Homo sapien
ctgttaaggagtgtgcttttcttga

SEQ ID NO: 5385542 - DNA, 25 bp, Homo sapien
cttgaggtctttggctttataactc

SEQ ID NO: 5385543 - DNA, 25 bp, Homo sapien
ctggatgttcactctgtccttgcag

SEQ ID NO: 5385544 - DNA, 25 bp, Homo sapien
tcctctagcccatcgtctacctgga

SEQ ID NO: 5385545 - DNA, 25 bp, Homo sapien
tggatgttcactctgtccttgcaga

SEQ ID NO: 5385546 - DNA, 25 bp, Homo sapien
ctagcccatcgtctacctggatgtt

SEQ ID NO: 5385547 - DNA, 25 bp, Homo sapien
tctgactccccgagccttgacctga

SEQ ID NO: 5385548 - DNA, 25 bp, Homo sapien
cgagccttgacctgacaccacggtg

SEQ ID NO: 5385549 - DNA, 25 bp, Homo sapien
tgacaccacggtgagtaactcctgt

SEQ ID NO: 5385550 - DNA, 25 bp, Homo sapien
gtgagtaactcctgtcctgctgcca

SEQ ID NO: 5385551 - DNA, 25 bp, Homo sapien
tgggggccatagcaacagggtctgc

SEQ ID NO: 5385552 - DNA, 25 bp, Homo sapien
gggggccatagcaacagggtctgca

SEQ ID NO: 5385553 - DNA, 25 bp, Homo sapien
ggggccatagcaacagggtctgcat

SEQ ID NO: 5385554 - DNA, 25 bp, Homo sapien
gttctcctggacgatctgagcttca

SEQ ID NO: 5385555 - DNA, 25 bp, Homo sapien
cagacagttttagagctaggcttca

SEQ ID NO: 5385556 - DNA, 25 bp, Homo sapien
gcagcgtcataccacagctccttga

SEQ ID NO: 5385557 - DNA, 25 bp, Homo sapien
gaatttccagagtcaaagaacctca

SEQ ID NO: 5385558 - DNA, 25 bp, Homo sapien
gatgcggcagttcacaggtctttca

SEQ ID NO: 5385559 - DNA, 25 bp, Homo sapien
gatcaatgcagtgtagccaccgtca

SEQ ID NO: 5385560 - DNA, 25 bp, Homo sapien
tctgaggaaccccatgtaagcaaag

SEQ ID NO: 5385561 - DNA, 25 bp, Homo sapien
ggatttgtctcttcgccgtcaggga

SEQ ID NO: 5385562 - DNA, 25 bp, Homo sapien
aaggaaactggactctacagaaagg

SEQ ID NO: 5385563 - DNA, 25 bp, Homo sapien
gaagcctccaaagcgaaatgcacag

SEQ ID NO: 5385564 - DNA, 25 bp, Homo sapien
aataaaatcaaaggatcaacccagg

SEQ ID NO: 5385565 - DNA, 25 bp, Homo sapien
gaacacttctaacatctgccaggag

SEQ ID NO: 5385566 - DNA, 25 bp, Homo sapien
agaatcagacccagacttcggatca

SEQ ID NO: 5385567 - DNA, 25 bp, Homo sapien
ggaacagatagacgaacaacccttc

SEQ ID NO: 5385568 - DNA, 25 bp, Homo sapien
cttcggatcagacacagaatgtgaa

SEQ ID NO: 5385569 - DNA, 25 bp, Homo sapien
agtgatgccagatgggtagagcccc

SEQ ID NO: 5385570 - DNA, 25 bp, Homo sapien
gatgcgtatggacatgctcagactt

SEQ ID NO: 5385571 - DNA, 25 bp, Homo sapien
caggaaaaggtgtccccactagtgc

SEQ ID NO: 5385572 - DNA, 25 bp, Homo sapien
cagtcatgcagggtgagagcttaac

SEQ ID NO: 5385573 - DNA, 25 bp, Homo sapien
ttagggatccgctcagccagtaggg

SEQ ID NO: 5385574 - DNA, 25 bp, Homo sapien
tggcacagtggatggccgactcatt

SEQ ID NO: 5385575 - DNA, 25 bp, Homo sapien
cagctgacgtgactggcacagtgga

SEQ ID NO: 5385576 - DNA, 25 bp, Homo sapien
ggatggccgactcatttgtgcccac

SEQ ID NO: 5385577 - DNA, 25 bp, Homo sapien
tctgatggtaccccacaaatgcagc

SEQ ID NO: 5385578 - DNA, 25 bp, Homo sapien
gaaccctgggtaagactcgtgacga

SEQ ID NO: 5385579 - DNA, 25 bp, Homo sapien
aataatagagtcaggtcccttctcc

SEQ ID NO: 5385580 - DNA, 25 bp, Homo sapien
tagggcaagtgcctctttcgttctc

SEQ ID NO: 5385581 - DNA, 25 bp, Homo sapien
ccttccgagagtgctgcggtcggca

SEQ ID NO: 5385582 - DNA, 25 bp, Homo sapien
gctcccggaagaggggacagcggcg

SEQ ID NO: 5385583 - DNA, 25 bp, Homo sapien
gtgcgctcccggaagaggggacagc

SEQ ID NO: 5385584 - DNA, 25 bp, Homo sapien
gcgggggcgccgtgcgcacgggggc

SEQ ID NO: 5385585 - DNA, 25 bp, Homo sapien
gggcgccgtgcgcacgggggcgagg

SEQ ID NO: 5385586 - DNA, 25 bp, Homo sapien
gcgcagccgcaaccgggtgggaggc

SEQ ID NO: 5385587 - DNA, 25 bp, Homo sapien
gacggggcgatacgaacagacaaag

SEQ ID NO: 5385588 - DNA, 25 bp, Homo sapien
gacacccagaaacagagacggggcg

SEQ ID NO: 5385589 - DNA, 25 bp, Homo sapien
agacaaagccggctcgagcgcggcc

SEQ ID NO: 5385590 - DNA, 25 bp, Homo sapien
tgcgttggtcctgccccgcggatgt

SEQ ID NO: 5385591 - DNA, 25 bp, Homo sapien
ccccgagaggctgcgttggtcctgc

SEQ ID NO: 5385592 - DNA, 25 bp, Homo sapien
gcggtaagtcgccaaggccccgaga

SEQ ID NO: 5385593 - DNA, 25 bp, Homo sapien
tggtgcattctctggcgcgatggac

SEQ ID NO: 5385594 - DNA, 25 bp, Homo sapien
aatcaagcaccagaatgaatagttg

SEQ ID NO: 5385595 - DNA, 25 bp, Homo sapien
aattttcaatctcgttggggagtgc

SEQ ID NO: 5385596 - DNA, 25 bp, Homo sapien
cgcctactatagttggagtcctgga

SEQ ID NO: 5385597 - DNA, 25 bp, Homo sapien
tcgttggggagtgcaatcaagcacc

SEQ ID NO: 5385598 - DNA, 25 bp, Homo sapien
ggtggggtgtgaaaggcacaccggc

SEQ ID NO: 5385599 - DNA, 25 bp, Homo sapien
gggtgtgaaaggcacaccggctgat

SEQ ID NO: 5385600 - DNA, 25 bp, Homo sapien
tgtgaaaggcacaccggctgatgga

SEQ ID NO: 5385601 - DNA, 25 bp, Homo sapien
tggggtgtgaaaggcacaccggctg

SEQ ID NO: 5385602 - DNA, 25 bp, Homo sapien
gaggatgcactgatagccacagcga

SEQ ID NO: 5385603 - DNA, 25 bp, Homo sapien
tgcactgatagccacagcgagcctg

SEQ ID NO: 5385604 - DNA, 25 bp, Homo sapien
cctgaggatgcactgatagccacag

SEQ ID NO: 5385605 - DNA, 25 bp, Homo sapien
actgatagccacagcgagcctgttt

SEQ ID NO: 5385606 - DNA, 25 bp, Homo sapien
acctttgtcccccgctgttgccaca

SEQ ID NO: 5385607 - DNA, 25 bp, Homo sapien
ttgccacacgggagcccccgaggca

SEQ ID NO: 5385608 - DNA, 25 bp, Homo sapien
ccgctgttgccacacgggagccccc

SEQ ID NO: 5385609 - DNA, 25 bp, Homo sapien
ccacctttgtcccccgctgttgcca

SEQ ID NO: 5385610 - DNA, 25 bp, Homo sapien
gaacagcacaggaacgaacagcact

SEQ ID NO: 5385611 - DNA, 25 bp, Homo sapien
gcagagttgctcttacggatgatcg

SEQ ID NO: 5385612 - DNA, 25 bp, Homo sapien
ttaggtctcgatgttgcagcctgga

SEQ ID NO: 5385613 - DNA, 25 bp, Homo sapien
tacggatgatcgtcatggtatgaac

SEQ ID NO: 5385614 - DNA, 25 bp, Homo sapien
gagttgggtggtgtccagcgggctg

SEQ ID NO: 5385615 - DNA, 25 bp, Homo sapien
agttgggtggtgtccagcgggctgg

SEQ ID NO: 5385616 - DNA, 25 bp, Homo sapien
cagcgggctggggagcctatgccca

SEQ ID NO: 5385617 - DNA, 25 bp, Homo sapien
gctggggagcctatgcccagggcct

SEQ ID NO: 5385618 - DNA, 25 bp, Homo sapien
catgcaaaatacgtggaagccctca

SEQ ID NO: 5385619 - DNA, 25 bp, Homo sapien
gagagtgtacgactggcccagaaac

SEQ ID NO: 5385620 - DNA, 25 bp, Homo sapien
tggaagccctcatggttgggtgact

SEQ ID NO: 5385621 - DNA, 25 bp, Homo sapien
gaaacaatgggcgtccactgcatgc

SEQ ID NO: 5385622 - DNA, 25 bp, Homo sapien
gctgtgttgctctgaggagcagcct

SEQ ID NO: 5385623 - DNA, 25 bp, Homo sapien
tttcttcttcctccggcaccttcag

SEQ ID NO: 5385624 - DNA, 25 bp, Homo sapien
gaggagcagcctccgctccacccca

SEQ ID NO: 5385625 - DNA, 25 bp, Homo sapien
cttcaggcctcagctcagggtgggc

SEQ ID NO: 5385626 - DNA, 25 bp, Homo sapien
agatgaagatgtgtcctcccggctg

SEQ ID NO: 5385627 - DNA, 25 bp, Homo sapien
ccggctggacggtgttcttgggtgt

SEQ ID NO: 5385628 - DNA, 25 bp, Homo sapien
ctgcctatccaaggagatgaagatg

SEQ ID NO: 5385629 - DNA, 25 bp, Homo sapien
tcttgggtgtctgccccgtgaggca

SEQ ID NO: 5385630 - DNA, 25 bp, Homo sapien
cctgcagtccccgcctgcccagcat

SEQ ID NO: 5385631 - DNA, 25 bp, Homo sapien
agtcacaaccacaggctggccctgg

SEQ ID NO: 5385632 - DNA, 25 bp, Homo sapien
gccctgcagtccccgcctgcccagc

SEQ ID NO: 5385633 - DNA, 25 bp, Homo sapien
ccctggccctgcagtccccgcctgc

SEQ ID NO: 5385634 - DNA, 25 bp, Homo sapien
gctccctgagatgcccccgctctgc

SEQ ID NO: 5385635 - DNA, 25 bp, Homo sapien
ctgtgcttgtccttcgtggctcctc

SEQ ID NO: 5385636 - DNA, 25 bp, Homo sapien
taggggataagggtggaggcaaaga

SEQ ID NO: 5385637 - DNA, 25 bp, Homo sapien
cccccgatgacttctctgggtaggg

SEQ ID NO: 5385638 - DNA, 25 bp, Homo sapien
tgccaggaatacactccagtcaggg

SEQ ID NO: 5385639 - DNA, 25 bp, Homo sapien
tcaatgaaagcagcccttgaggcca

SEQ ID NO: 5385640 - DNA, 25 bp, Homo sapien
tgacttgctccagcattaggcagca

SEQ ID NO: 5385641 - DNA, 25 bp, Homo sapien
ccatgacactgaaagccaagggtga

SEQ ID NO: 5385642 - DNA, 25 bp, Homo sapien
attagacgttcctcgctctgctgcc

SEQ ID NO: 5385643 - DNA, 25 bp, Homo sapien
tccacacgggatccccattagacgt

SEQ ID NO: 5385644 - DNA, 25 bp, Homo sapien
ttccagtcaatgtgtccccagcagc

SEQ ID NO: 5385645 - DNA, 25 bp, Homo sapien
tatacagcagagctccctaaaggca

SEQ ID NO: 5385646 - DNA, 25 bp, Homo sapien
acaccccaggtctgcataagagccc

SEQ ID NO: 5385647 - DNA, 25 bp, Homo sapien
caggatcaccagtcagtctgcaagt

SEQ ID NO: 5385648 - DNA, 25 bp, Homo sapien
tggctctggcggctcttaaaggaag

SEQ ID NO: 5385649 - DNA, 25 bp, Homo sapien
tgtgctgccaaaaaatgcctgtgtg

SEQ ID NO: 5385650 - DNA, 25 bp, Homo sapien
tccttatgtcaaggcacaaggtgcc

SEQ ID NO: 5385651 - DNA, 25 bp, Homo sapien
gtcagaggagtccagacaacaatgg

SEQ ID NO: 5385652 - DNA, 25 bp, Homo sapien
tcatgacggttatgctccaacctgg

SEQ ID NO: 5385653 - DNA, 25 bp, Homo sapien
acttctctagggaggctgcgctgtg

SEQ ID NO: 5385654 - DNA, 25 bp, Homo sapien
gatttatttcccctcgagcattgga

SEQ ID NO: 5385655 - DNA, 25 bp, Homo sapien
tacgtgtttagagcagatgatcatg

SEQ ID NO: 5385656 - DNA, 25 bp, Homo sapien
atggcaaccccaccaggcggtcatt

SEQ ID NO: 5385657 - DNA, 25 bp, Homo sapien
aagcacctgtgaggtttaatttctc

SEQ ID NO: 5385658 - DNA, 25 bp, Homo sapien
tcctctcgaatgttaaagatacgtg

SEQ ID NO: 5385659 - DNA, 25 bp, Homo sapien
gacaggggacgcaggatcttcagat

SEQ ID NO: 5385660 - DNA, 25 bp, Homo sapien
gcttctagcacagtcatggaccctg

SEQ ID NO: 5385661 - DNA, 25 bp, Homo sapien
ccaagcttctcgcctggcctggttg

SEQ ID NO: 5385662 - DNA, 25 bp, Homo sapien
caggatcttcagatggccccacagt

SEQ ID NO: 5385663 - DNA, 25 bp, Homo sapien
tgacacgcactgctgaccaggcata

SEQ ID NO: 5385664 - DNA, 25 bp, Homo sapien
cgcactgctgaccaggcatagcgtt

SEQ ID NO: 5385665 - DNA, 25 bp, Homo sapien
cagagacaggttgggtgtacggaaa

SEQ ID NO: 5385666 - DNA, 25 bp, Homo sapien
gtacggaaaatgcacactctgccag

SEQ ID NO: 5385667 - DNA, 25 bp, Homo sapien
aacgctgggcggactgaactctgaa

SEQ ID NO: 5385668 - DNA, 25 bp, Homo sapien
gagctggaggccaagacttcggtcc

SEQ ID NO: 5385669 - DNA, 25 bp, Homo sapien
gaaagttctgggagcttgacaatca

SEQ ID NO: 5385670 - DNA, 25 bp, Homo sapien
caactggtaaacaagaacgctgggc

SEQ ID NO: 5385671 - DNA, 25 bp, Homo sapien
gaagcgctgcgttggagatgtgcaa

SEQ ID NO: 5385672 - DNA, 25 bp, Homo sapien
aatgcgcaagaagcgtgctgctttc

SEQ ID NO: 5385673 - DNA, 25 bp, Homo sapien
gagatgtgcaaatgcgcaagaagcg

SEQ ID NO: 5385674 - DNA, 25 bp, Homo sapien
caggccgaagcgctgcgttggagat

SEQ ID NO: 5385675 - DNA, 25 bp, Homo sapien
ctgtgcgtgcccagtcccgcgggtg

SEQ ID NO: 5385676 - DNA, 25 bp, Homo sapien
tgcccagtcccgcgggtgaccaaag

SEQ ID NO: 5385677 - DNA, 25 bp, Homo sapien
gggcccaagagctcgactgggcggg

SEQ ID NO: 5385678 - DNA, 25 bp, Homo sapien
tgggcgggatgatcccggcggcccc

SEQ ID NO: 5385679 - DNA, 25 bp, Homo sapien
cggctcgtagtgctgcggccgggct

SEQ ID NO: 5385680 - DNA, 25 bp, Homo sapien
tggcgtcggtggagccggctcggcg

SEQ ID NO: 5385681 - DNA, 25 bp, Homo sapien
cttcttcaaggtgagagccggcgtc

SEQ ID NO: 5385682 - DNA, 25 bp, Homo sapien
tcagcgtcgtgcacttcctccggag

SEQ ID NO: 5385683 - DNA, 25 bp, Homo sapien
ggcactcggagcctctgccgcttgg

SEQ ID NO: 5385684 - DNA, 25 bp, Homo sapien
gagccgctgcctggaccggcctggg

SEQ ID NO: 5385685 - DNA, 25 bp, Homo sapien
tgggtacgggagaagtggttgctgt

SEQ ID NO: 5385686 - DNA, 25 bp, Homo sapien
cagtaccagctgttttgggaaggag

SEQ ID NO: 5385687 - DNA, 25 bp, Homo sapien
gtgccccctctctggcccgatttcc

SEQ ID NO: 5385688 - DNA, 25 bp, Homo sapien
ccatccgggacccactcagttggga

SEQ ID NO: 5385689 - DNA, 25 bp, Homo sapien
gggacccactcagttgggacgcctc

SEQ ID NO: 5385690 - DNA, 25 bp, Homo sapien
ttccgggcccgctcaccatccggga

SEQ ID NO: 5385691 - DNA, 25 bp, Homo sapien
cgatgggctcctactccgggagcaa

SEQ ID NO: 5385692 - DNA, 25 bp, Homo sapien
cggttgcgacgctgggtggtgctga

SEQ ID NO: 5385693 - DNA, 25 bp, Homo sapien
tggtgctgagctccgatgggctcct

SEQ ID NO: 5385694 - DNA, 25 bp, Homo sapien
gtggccggccacaggttgccaagcc

SEQ ID NO: 5385695 - DNA, 25 bp, Homo sapien
tgaagacgggaggttgaggtcggag

SEQ ID NO: 5385696 - DNA, 25 bp, Homo sapien
atcttctcccggagttgaagacggg

SEQ ID NO: 5385697 - DNA, 25 bp, Homo sapien
agttgaagacgggaggttgaggtcg

SEQ ID NO: 5385698 - DNA, 25 bp, Homo sapien
cttctcccggagttgaagacgggag

SEQ ID NO: 5385699 - DNA, 25 bp, Homo sapien
tgatagagaacgatgtctgtggcaa

SEQ ID NO: 5385700 - DNA, 25 bp, Homo sapien
gtggcaatattccaagctgttggtg

SEQ ID NO: 5385701 - DNA, 25 bp, Homo sapien
gaaggtcttccgtcatcatctccag

SEQ ID NO: 5385702 - DNA, 25 bp, Homo sapien
catctgtagaatttccaccaacggg

SEQ ID NO: 5385703 - DNA, 25 bp, Homo sapien
ctctatttgttaatattgtccgaga

SEQ ID NO: 5385704 - DNA, 25 bp, Homo sapien
tacaatacacgtatttaacttacca

SEQ ID NO: 5385705 - DNA, 25 bp, Homo sapien
tataatgatctcagaacattttaac

SEQ ID NO: 5385706 - DNA, 25 bp, Homo sapien
tattgtccgagacttacaatacacg

SEQ ID NO: 5385707 - DNA, 25 bp, Homo sapien
gatctgcaggcaataaattctctca

SEQ ID NO: 5385708 - DNA, 25 bp, Homo sapien
caatggatagtcttttcgagaaaca

SEQ ID NO: 5385709 - DNA, 25 bp, Homo sapien
gaaaaacttcgacctaaatctcaca

SEQ ID NO: 5385710 - DNA, 25 bp, Homo sapien
agccattatttaagggtagatctgc

SEQ ID NO: 5385711 - DNA, 25 bp, Homo sapien
gtatcagcaaaatcttgcctcatca

SEQ ID NO: 5385712 - DNA, 25 bp, Homo sapien
gagcaatgtatcagcaaaatcttgc

SEQ ID NO: 5385713 - DNA, 25 bp, Homo sapien
gtagaacagtcagccgtgtgagtct

SEQ ID NO: 5385714 - DNA, 25 bp, Homo sapien
tgggtagaacagtcagccgtgtgag

SEQ ID NO: 5385715 - DNA, 25 bp, Homo sapien
caggattttaccatgttcgccaggc

SEQ ID NO: 5385716 - DNA, 25 bp, Homo sapien
agacaggattttaccatgttcgcca

SEQ ID NO: 5385717 - DNA, 25 bp, Homo sapien
atgccaccacgcctggctaattttt

SEQ ID NO: 5385718 - DNA, 25 bp, Homo sapien
taggattacgggtgcatgccaccac

SEQ ID NO: 5385719 - DNA, 25 bp, Homo sapien
gcaggtgcgctgtactccctggaca

SEQ ID NO: 5385720 - DNA, 25 bp, Homo sapien
gtgatgggtaatgcccctttgccct

SEQ ID NO: 5385721 - DNA, 25 bp, Homo sapien
agcaggtgcgctgtactccctggac

SEQ ID NO: 5385722 - DNA, 25 bp, Homo sapien
ggacacagtgatgggtaatgcccct

SEQ ID NO: 5385723 - DNA, 25 bp, Homo sapien
cagaggacagctgtaggacacagat

SEQ ID NO: 5385724 - DNA, 25 bp, Homo sapien
gatggtgaccccatgcagaagagcc

SEQ ID NO: 5385725 - DNA, 25 bp, Homo sapien
agatggtgaccccatgcagaagagc

SEQ ID NO: 5385726 - DNA, 25 bp, Homo sapien
gggctaagcttgcagccttcagagg

SEQ ID NO: 5385727 - DNA, 25 bp, Homo sapien
gaaatgtcgttcatctggctgtgga

SEQ ID NO: 5385728 - DNA, 25 bp, Homo sapien
cacactgctggtactcagctgaagc

SEQ ID NO: 5385729 - DNA, 25 bp, Homo sapien
gaacacgaaatatagctgacagggt

SEQ ID NO: 5385730 - DNA, 25 bp, Homo sapien
cctttgaggcataatccgaacacga

SEQ ID NO: 5385731 - DNA, 25 bp, Homo sapien
tgattgattgattttgagacggagt

SEQ ID NO: 5385732 - DNA, 25 bp, Homo sapien
ctcctagattaaagcaattctccca

SEQ ID NO: 5385733 - DNA, 25 bp, Homo sapien
tcctagattaaagcaattctcccac

SEQ ID NO: 5385734 - DNA, 25 bp, Homo sapien
tagaagtctaatttgtttgtttgat

SEQ ID NO: 5385735 - DNA, 25 bp, Homo sapien
tgtctggcgcactgataggcatcag

SEQ ID NO: 5385736 - DNA, 25 bp, Homo sapien
agcacgaggtgtctggcgcactgat

SEQ ID NO: 5385737 - DNA, 25 bp, Homo sapien
aggtgtctggcgcactgataggcat

SEQ ID NO: 5385738 - DNA, 25 bp, Homo sapien
tcatggagtgcctaagcccagctcg

SEQ ID NO: 5385739 - DNA, 25 bp, Homo sapien
gatcagagcatacaaagtcactccc

SEQ ID NO: 5385740 - DNA, 25 bp, Homo sapien
gagagatcagagcatacaaagtcac

SEQ ID NO: 5385741 - DNA, 25 bp, Homo sapien
tcagagcatacaaagtcactcccat

SEQ ID NO: 5385742 - DNA, 25 bp, Homo sapien
acagagagatcagagcatacaaagt

SEQ ID NO: 5385743 - DNA, 25 bp, Homo sapien
ggtgtcagtcttcccacgggcagag

SEQ ID NO: 5385744 - DNA, 25 bp, Homo sapien
ttgagtcaggtgtgtggaagacccc

SEQ ID NO: 5385745 - DNA, 25 bp, Homo sapien
tctctgcgagtaaccgaggatgcgg

SEQ ID NO: 5385746 - DNA, 25 bp, Homo sapien
ggctccccggctgcttgtctggaaa

SEQ ID NO: 5385747 - DNA, 25 bp, Homo sapien
aaatcaatatgtatcttacactgac

SEQ ID NO: 5385748 - DNA, 25 bp, Homo sapien
aaatagcatttcaacttgtgatcaa

SEQ ID NO: 5385749 - DNA, 25 bp, Homo sapien
cttgtgatcaactatcattaatgaa

SEQ ID NO: 5385750 - DNA, 25 bp, Homo sapien
aatcaatatgtatcttacactgaca

SEQ ID NO: 5385751 - DNA, 25 bp, Homo sapien
ggagctcagaactcatctactcggg

SEQ ID NO: 5385752 - DNA, 25 bp, Homo sapien
gccaaaagccagcagcgaatgttct

SEQ ID NO: 5385753 - DNA, 25 bp, Homo sapien
ccacggttgggtatgcgaggctcat

SEQ ID NO: 5385754 - DNA, 25 bp, Homo sapien
aagatctcttggtcaggagctcaga

SEQ ID NO: 5385755 - DNA, 25 bp, Homo sapien
tgcaggtgagcctggtggcccagga

SEQ ID NO: 5385756 - DNA, 25 bp, Homo sapien
caggccgggtgctgttgagagcatg

SEQ ID NO: 5385757 - DNA, 25 bp, Homo sapien
aagccctccttgtccacgggtgatc

SEQ ID NO: 5385758 - DNA, 25 bp, Homo sapien
gagagcatgatctttcctgacctgg

SEQ ID NO: 5385759 - DNA, 25 bp, Homo sapien
cactcatggctcagcatgtctgtgg

SEQ ID NO: 5385760 - DNA, 25 bp, Homo sapien
ccactcatggctcagcatgtctgtg

SEQ ID NO: 5385761 - DNA, 25 bp, Homo sapien
tccactcatggctcagcatgtctgt

SEQ ID NO: 5385762 - DNA, 25 bp, Homo sapien
gcagaaggcatgctctgccctcagg

SEQ ID NO: 5385763 - DNA, 25 bp, Homo sapien
cagctggaccaggagacaggttcga

SEQ ID NO: 5385764 - DNA, 25 bp, Homo sapien
aagcagcgctggctcaaggcctttg

SEQ ID NO: 5385765 - DNA, 25 bp, Homo sapien
tccgccgcgacgtgttgtactacaa

SEQ ID NO: 5385766 - DNA, 25 bp, Homo sapien
tgtgagcatcaagaacgccttccgg

SEQ ID NO: 5385767 - DNA, 25 bp, Homo sapien
gggagttgtttcactacacgcgctc

SEQ ID NO: 5385768 - DNA, 25 bp, Homo sapien
tcagccccaaggcatgggtctgctg

SEQ ID NO: 5385769 - DNA, 25 bp, Homo sapien
tgtttcactacacgcgctcacatgt

SEQ ID NO: 5385770 - DNA, 25 bp, Homo sapien
gcttttggggagttgtttcactaca

SEQ ID NO: 5385771 - DNA, 25 bp, Homo sapien
ggagtgggctgtgggtactggcctc

SEQ ID NO: 5385772 - DNA, 25 bp, Homo sapien
tgggctgtgggtactggcctcagaa

SEQ ID NO: 5385773 - DNA, 25 bp, Homo sapien
gggctgtgggtactggcctcagaag

SEQ ID NO: 5385774 - DNA, 25 bp, Homo sapien
cttggagtgggctgtgggtactggc

SEQ ID NO: 5385775 - DNA, 25 bp, Homo sapien
tccctcctgtccacgggcccccaca

SEQ ID NO: 5385776 - DNA, 25 bp, Homo sapien
ccctcctgtccacgggcccccacat

SEQ ID NO: 5385777 - DNA, 25 bp, Homo sapien
tgagtccccagtacatgatgagacc

SEQ ID NO: 5385778 - DNA, 25 bp, Homo sapien
ctcttggtctgggaaggagcctcca

SEQ ID NO: 5385779 - DNA, 25 bp, Homo sapien
tccactgcagtggaaaagacactag

SEQ ID NO: 5385780 - DNA, 25 bp, Homo sapien
agaatgggcaacagtccccgctgtg

SEQ ID NO: 5385781 - DNA, 25 bp, Homo sapien
tcaagacaccgctggctgctggaca

SEQ ID NO: 5385782 - DNA, 25 bp, Homo sapien
tcccagtcgggagtgtggtcagtct

SEQ ID NO: 5385783 - DNA, 25 bp, Homo sapien
tgtgtgtagcggaaaaggacaagac

SEQ ID NO: 5385784 - DNA, 25 bp, Homo sapien
caagacggtgcagtcggctgcatac

SEQ ID NO: 5385785 - DNA, 25 bp, Homo sapien
caattgacacctaactgaactggct

SEQ ID NO: 5385786 - DNA, 25 bp, Homo sapien
ccttggcatggatacgtaagttcaa

SEQ ID NO: 5385787 - DNA, 25 bp, Homo sapien
gaggtgagggatgcctttaacactg

SEQ ID NO: 5385788 - DNA, 25 bp, Homo sapien
gagctcatctcatcagattgcataa

SEQ ID NO: 5385789 - DNA, 25 bp, Homo sapien
gagcacaaacggctggcctgagatc

SEQ ID NO: 5385790 - DNA, 25 bp, Homo sapien
tctgcacagggactcatgggcacag

SEQ ID NO: 5385791 - DNA, 25 bp, Homo sapien
ctgctaggagcacaaacggctggcc

SEQ ID NO: 5385792 - DNA, 25 bp, Homo sapien
aatccatgaggctctctagggcctc

SEQ ID NO: 5385793 - DNA, 25 bp, Homo sapien
gaatgctccaccatatgcttcggga

SEQ ID NO: 5385794 - DNA, 25 bp, Homo sapien
tgtgtgccaagtaccaagcaagcct

SEQ ID NO: 5385795 - DNA, 25 bp, Homo sapien
tgcactctcatggatacaggacggg

SEQ ID NO: 5385796 - DNA, 25 bp, Homo sapien
tcccagaatagcgacaggtaggcct

SEQ ID NO: 5385797 - DNA, 25 bp, Homo sapien
gtcgagagcattaagaagaaagtcc

SEQ ID NO: 5385798 - DNA, 25 bp, Homo sapien
gtggaatccccaataatgtgactgc

SEQ ID NO: 5385799 - DNA, 25 bp, Homo sapien
ggttggaggcgcaaggcctgcagca

SEQ ID NO: 5385800 - DNA, 25 bp, Homo sapien
agtcctggttggaggcgcaaggcct

SEQ ID NO: 5385801 - DNA, 25 bp, Homo sapien
catagctgtaagtgggcgttcctgg

SEQ ID NO: 5385802 - DNA, 25 bp, Homo sapien
ggcccggtacgtgggcacagtgacc

SEQ ID NO: 5385803 - DNA, 25 bp, Homo sapien
ggcgacaggagttggggagtgagca

SEQ ID NO: 5385804 - DNA, 25 bp, Homo sapien
actgagggggcacatagctgtaagt

SEQ ID NO: 5385805 - DNA, 25 bp, Homo sapien
gagcagggtacaccgttgcaggcat

SEQ ID NO: 5385806 - DNA, 25 bp, Homo sapien
ctgacatggccatggtggtcccagc

SEQ ID NO: 5385807 - DNA, 25 bp, Homo sapien
gcaggcatgccgttgggctgcacca

SEQ ID NO: 5385808 - DNA, 25 bp, Homo sapien
atggtgaccccgttgcctctaggag

SEQ ID NO: 5385809 - DNA, 25 bp, Homo sapien
ttcgcacagggtacacggcagtctg

SEQ ID NO: 5385810 - DNA, 25 bp, Homo sapien
gggtaggcacttcgcacagggtaca

SEQ ID NO: 5385811 - DNA, 25 bp, Homo sapien
gcacttcgcacagggtacacggcag

SEQ ID NO: 5385812 - DNA, 25 bp, Homo sapien
gcacagggtacacggcagtctggta

SEQ ID NO: 5385813 - DNA, 25 bp, Homo sapien
ctttgtaaggtgtgccaggagtgta

SEQ ID NO: 5385814 - DNA, 25 bp, Homo sapien
agtacggtggcacagccccgctggt

SEQ ID NO: 5385815 - DNA, 25 bp, Homo sapien
gagtacggtggcacagccccgctgg

SEQ ID NO: 5385816 - DNA, 25 bp, Homo sapien
ggaacaggacactttgtaaggtgtg

SEQ ID NO: 5385817 - DNA, 25 bp, Homo sapien
gagttcacccaagccggtccaggcg

SEQ ID NO: 5385818 - DNA, 25 bp, Homo sapien
gcaatggcctgagttcacccaagcc

SEQ ID NO: 5385819 - DNA, 25 bp, Homo sapien
cagggaggagctaagctgcgtgtca

SEQ ID NO: 5385820 - DNA, 25 bp, Homo sapien
agccccacgcaactcgccagacctg

SEQ ID NO: 5385821 - DNA, 25 bp, Homo sapien
taactgggcaaatgtaaataggagc

SEQ ID NO: 5385822 - DNA, 25 bp, Homo sapien
gagggctacactcaagtccattgga

SEQ ID NO: 5385823 - DNA, 25 bp, Homo sapien
tctaagtgtggacaggcaaaagcac

SEQ ID NO: 5385824 - DNA, 25 bp, Homo sapien
cctcactcatgttagggagggctac

SEQ ID NO: 5385825 - DNA, 25 bp, Homo sapien
tgcccttagaatacattcctagaag

SEQ ID NO: 5385826 - DNA, 25 bp, Homo sapien
taattaaatgcatgtgtacctgtac

SEQ ID NO: 5385827 - DNA, 25 bp, Homo sapien
tccataaacaagtaccaaaaccaga

SEQ ID NO: 5385828 - DNA, 25 bp, Homo sapien
ctagaagtgggtcgaaagggttcat

SEQ ID NO: 5385829 - DNA, 25 bp, Homo sapien
caaccttgtgtgtagagcttattac

SEQ ID NO: 5385830 - DNA, 25 bp, Homo sapien
gggctgaaatcctcccataagaaat

SEQ ID NO: 5385831 - DNA, 25 bp, Homo sapien
tgactctaagtaggaccagaacaga

SEQ ID NO: 5385832 - DNA, 25 bp, Homo sapien
gaggcctcaatgtgctggcccagct

SEQ ID NO: 5385833 - DNA, 25 bp, Homo sapien
cagactccgcatatacagcgttgaa

SEQ ID NO: 5385834 - DNA, 25 bp, Homo sapien
gaagagggctaagaaatacgtggca

SEQ ID NO: 5385835 - DNA, 25 bp, Homo sapien
tgggtgcaaactgaacggcaagatc

SEQ ID NO: 5385836 - DNA, 25 bp, Homo sapien
gttgaaaccacaagtcagcattggg

SEQ ID NO: 5385837 - DNA, 25 bp, Homo sapien
gcaggaagaccaagtcaagaacgtt

SEQ ID NO: 5385838 - DNA, 25 bp, Homo sapien
tgaactacggtctgaacaagggtgg

SEQ ID NO: 5385839 - DNA, 25 bp, Homo sapien
cagtcccaggattaaggccaaacca

SEQ ID NO: 5385840 - DNA, 25 bp, Homo sapien
gagggataaagttgccccagcagtc

SEQ ID NO: 5385841 - DNA, 25 bp, Homo sapien
tctctcccagctgtacgtacaaagc

SEQ ID NO: 5385842 - DNA, 25 bp, Homo sapien
tttctctcccagctgtacgtacaaa

SEQ ID NO: 5385843 - DNA, 25 bp, Homo sapien
ttctctcccagctgtacgtacaaag

SEQ ID NO: 5385844 - DNA, 25 bp, Homo sapien
tctcccagctgtacgtacaaagcat

SEQ ID NO: 5385845 - DNA, 25 bp, Homo sapien
tgctgctgcatagcccatgggaaaa

SEQ ID NO: 5385846 - DNA, 25 bp, Homo sapien
ggtaggattcgctccaggatacatg

SEQ ID NO: 5385847 - DNA, 25 bp, Homo sapien
catgttaggagaataggcaggagct

SEQ ID NO: 5385848 - DNA, 25 bp, Homo sapien
gtttggaaggtaggattcgctccag

SEQ ID NO: 5385849 - DNA, 25 bp, Homo sapien
cccaagagcactatgtgtggccaac

SEQ ID NO: 5385850 - DNA, 25 bp, Homo sapien
aacagcatgtctctagttgtcttct

SEQ ID NO: 5385851 - DNA, 25 bp, Homo sapien
gaattttgataggtaacaattatat

SEQ ID NO: 5385852 - DNA, 25 bp, Homo sapien
gagcactatgtgtggccaacagcat

SEQ ID NO: 5385853 - DNA, 25 bp, Homo sapien
tgctgctaccagtgaacagctaagc

SEQ ID NO: 5385854 - DNA, 25 bp, Homo sapien
taagggtatcacacgctaggtcctg

SEQ ID NO: 5385855 - DNA, 25 bp, Homo sapien
cagctaagcctatgtaaaggtcact

SEQ ID NO: 5385856 - DNA, 25 bp, Homo sapien
caagtctagcttggactcaagggcc

SEQ ID NO: 5385857 - DNA, 25 bp, Homo sapien
cacatcctataatgaaacagcaaac

SEQ ID NO: 5385858 - DNA, 25 bp, Homo sapien
aagatggcatcactagccaccagca

SEQ ID NO: 5385859 - DNA, 25 bp, Homo sapien
cacacgatagtatttaagatggcat

SEQ ID NO: 5385860 - DNA, 25 bp, Homo sapien
ttctaacaagaagttaacacatcct

SEQ ID NO: 5385861 - DNA, 25 bp, Homo sapien
ttggcatttgcatagggaaccccag

SEQ ID NO: 5385862 - DNA, 25 bp, Homo sapien
accccagaagatccaggactataaa

SEQ ID NO: 5385863 - DNA, 25 bp, Homo sapien
ttgcatagggaaccccagaagatcc

SEQ ID NO: 5385864 - DNA, 25 bp, Homo sapien
gaagatccaggactataaacaggat

SEQ ID NO: 5385865 - DNA, 25 bp, Homo sapien
agcccagcacctctatgaatccatt

SEQ ID NO: 5385866 - DNA, 25 bp, Homo sapien
gaaagactaactggttacagcccag

SEQ ID NO: 5385867 - DNA, 25 bp, Homo sapien
gattcccattcagctctctagtaag

SEQ ID NO: 5385868 - DNA, 25 bp, Homo sapien
cagaagtactgttgggaactgattc

SEQ ID NO: 5385869 - DNA, 25 bp, Homo sapien
cttgattaaagggcagcgttaggcc

SEQ ID NO: 5385870 - DNA, 25 bp, Homo sapien
aaacttgattaaagggcagcgttag

SEQ ID NO: 5385871 - DNA, 25 bp, Homo sapien
ttgattaaagggcagcgttaggcca

SEQ ID NO: 5385872 - DNA, 25 bp, Homo sapien
aacttgattaaagggcagcgttagg

SEQ ID NO: 5385873 - DNA, 25 bp, Homo sapien
taaggttatgcactgtactgccgca

SEQ ID NO: 5385874 - DNA, 25 bp, Homo sapien
tctgggacacgactgaatactgggt

SEQ ID NO: 5385875 - DNA, 25 bp, Homo sapien
aacccaaggctggatctagagcgta

SEQ ID NO: 5385876 - DNA, 25 bp, Homo sapien
taatttgctgtggactaagaaaccc

SEQ ID NO: 5385877 - DNA, 25 bp, Homo sapien
aggtgatccgccagtcttggcctcc

SEQ ID NO: 5385878 - DNA, 25 bp, Homo sapien
ggtgatccgccagtcttggcctccc

SEQ ID NO: 5385879 - DNA, 25 bp, Homo sapien
agctcaccgcaacttctgactccca

SEQ ID NO: 5385880 - DNA, 25 bp, Homo sapien
ctgactcccaggttcaagcgattct

SEQ ID NO: 5385881 - DNA, 25 bp, Homo sapien
gcgggcttggccgtggggcgaaaca

SEQ ID NO: 5385882 - DNA, 25 bp, Homo sapien
agtgaccagcgcacgccggcccgcg

SEQ ID NO: 5385883 - DNA, 25 bp, Homo sapien
ccgcggcggcgacctgggcctcagt

SEQ ID NO: 5385884 - DNA, 25 bp, Homo sapien
gggcctcagtgaccagcgcacgccg

SEQ ID NO: 5385885 - DNA, 25 bp, Homo sapien
ccgctcgctcggctccgcttggccc

SEQ ID NO: 5385886 - DNA, 25 bp, Homo sapien
cgctcgctcggctccgcttggcccg

SEQ ID NO: 5385887 - DNA, 25 bp, Homo sapien
gccgcgctcccgctcgctcggctcc

SEQ ID NO: 5385888 - DNA, 25 bp, Homo sapien
gctcgctcggctccgcttggcccgg

SEQ ID NO: 5385889 - DNA, 25 bp, Homo sapien
tgagtaattgagattccaggcgccc

SEQ ID NO: 5385890 - DNA, 25 bp, Homo sapien
cctgagtaattgagattccaggcgc

SEQ ID NO: 5385891 - DNA, 25 bp, Homo sapien
agtaattgagattccaggcgcccgc

SEQ ID NO: 5385892 - DNA, 25 bp, Homo sapien
taattgagattccaggcgcccgcca

SEQ ID NO: 5385893 - DNA, 25 bp, Homo sapien
aataggcagaaaaggctgcaatcca

SEQ ID NO: 5385894 - DNA, 25 bp, Homo sapien
ttcacgtggagtggctctacagccc

SEQ ID NO: 5385895 - DNA, 25 bp, Homo sapien
tcttggaaaggtcgtccccaggcat

SEQ ID NO: 5385896 - DNA, 25 bp, Homo sapien
cggattaccacacccctctggatga

SEQ ID NO: 5385897 - DNA, 25 bp, Homo sapien
tatttatagcagcacgggctctggg

SEQ ID NO: 5385898 - DNA, 25 bp, Homo sapien
ctcagcagtcctccgtcgtggggca

SEQ ID NO: 5385899 - DNA, 25 bp, Homo sapien
tcagcagtcctccgtcgtggggcat

SEQ ID NO: 5385900 - DNA, 25 bp, Homo sapien
ccgctcagcagtcctccgtcgtggg

SEQ ID NO: 5385901 - DNA, 25 bp, Homo sapien
gctcagcagtcctccgtcgtggggc

SEQ ID NO: 5385902 - DNA, 25 bp, Homo sapien
aacgggtttcttgaccatctggcca

SEQ ID NO: 5385903 - DNA, 25 bp, Homo sapien
gaggcaccctgctcttacaggcatg

SEQ ID NO: 5385904 - DNA, 25 bp, Homo sapien
tccagggcctggaaatttacactcc

SEQ ID NO: 5385905 - DNA, 25 bp, Homo sapien
cacccggccaccagtaatgttttca

SEQ ID NO: 5385906 - DNA, 25 bp, Homo sapien
aagactgttcttgtgcaactctcag

SEQ ID NO: 5385907 - DNA, 25 bp, Homo sapien
gcacagcccgcctttgaacaatcat

SEQ ID NO: 5385908 - DNA, 25 bp, Homo sapien
tacttcccgaggctatggtgtgaga

SEQ ID NO: 5385909 - DNA, 25 bp, Homo sapien
gcatacttggagaacatatcccaca

SEQ ID NO: 5385910 - DNA, 25 bp, Homo sapien
gactctgtggctgttcactgagcac

SEQ ID NO: 5385911 - DNA, 25 bp, Homo sapien
ttggaaccccaaaatgtgtgagtct

SEQ ID NO: 5385912 - DNA, 25 bp, Homo sapien
ggagagccttagttagagcgttccc

SEQ ID NO: 5385913 - DNA, 25 bp, Homo sapien
tagctgagcagacttgggttatgga

SEQ ID NO: 5385914 - DNA, 25 bp, Homo sapien
gccaatgttttgatagcctcagttt

SEQ ID NO: 5385915 - DNA, 25 bp, Homo sapien
ctggaacttggctgtcattagtgac

SEQ ID NO: 5385916 - DNA, 25 bp, Homo sapien
gcatactgggtataaggttgctcag

SEQ ID NO: 5385917 - DNA, 25 bp, Homo sapien
gatttttgctgccaaaatgctcttg

SEQ ID NO: 5385918 - DNA, 25 bp, Homo sapien
tatccaggacttaaggtagccatct

SEQ ID NO: 5385919 - DNA, 25 bp, Homo sapien
caacttcagggtcttggatactaaa

SEQ ID NO: 5385920 - DNA, 25 bp, Homo sapien
tctggatcataagaaggtcctgcag

SEQ ID NO: 5385921 - DNA, 25 bp, Homo sapien
gattgctttcccgtctctagtagta

SEQ ID NO: 5385922 - DNA, 25 bp, Homo sapien
ggtgctgagagcctgcccatgccat

SEQ ID NO: 5385923 - DNA, 25 bp, Homo sapien
ccttccctgtgagcggcctataagt

SEQ ID NO: 5385924 - DNA, 25 bp, Homo sapien
ttattgcccctggttgtcctgctcc

SEQ ID NO: 5385925 - DNA, 25 bp, Homo sapien
gagcggcctataagttcctgcctgg

SEQ ID NO: 5385926 - DNA, 25 bp, Homo sapien
cttgtgcgggggtgctcgtaggtga

SEQ ID NO: 5385927 - DNA, 25 bp, Homo sapien
ccgtgggctgcgagggcagagaact

SEQ ID NO: 5385928 - DNA, 25 bp, Homo sapien
cacaccgcgggagcccttgagatgg

SEQ ID NO: 5385929 - DNA, 25 bp, Homo sapien
tggaaagcgatttggggatggcagc

SEQ ID NO: 5385930 - DNA, 25 bp, Homo sapien
atcggtgtccgctgcggccctgcgg

SEQ ID NO: 5385931 - DNA, 25 bp, Homo sapien
gaggctccacgtggacactgcgcag

SEQ ID NO: 5385932 - DNA, 25 bp, Homo sapien
agctggccttgaggcacgcgcgtgc

SEQ ID NO: 5385933 - DNA, 25 bp, Homo sapien
gggctgtccttccctcatcggtgtc

SEQ ID NO: 5385934 - DNA, 25 bp, Homo sapien
catggaaccaagtatataacgctac

SEQ ID NO: 5385935 - DNA, 25 bp, Homo sapien
ggactatacaaaaaggcatggctca

SEQ ID NO: 5385936 - DNA, 25 bp, Homo sapien
tgtacaacagttgctgaagaagagc

SEQ ID NO: 5385937 - DNA, 25 bp, Homo sapien
gaacatcagtctctaaaagttggtg

SEQ ID NO: 5385938 - DNA, 25 bp, Homo sapien
caggatctggctgctttttagttga

SEQ ID NO: 5385939 - DNA, 25 bp, Homo sapien
gctgctttttagttgataatttttc

SEQ ID NO: 5385940 - DNA, 25 bp, Homo sapien
gatctggctgctttttagttgataa

SEQ ID NO: 5385941 - DNA, 25 bp, Homo sapien
ctagcgcatgcccaggatctggctg

SEQ ID NO: 5385942 - DNA, 25 bp, Homo sapien
cagcatgaagcatgaagcaaggacc

SEQ ID NO: 5385943 - DNA, 25 bp, Homo sapien
gagtcacggtatagaatttgcctga

SEQ ID NO: 5385944 - DNA, 25 bp, Homo sapien
tcgtcagagtcacggtatagaattt

SEQ ID NO: 5385945 - DNA, 25 bp, Homo sapien
gaggcattaatgcacctaactcata

SEQ ID NO: 5385946 - DNA, 25 bp, Homo sapien
ctaactcatacagcaaacggcccaa

SEQ ID NO: 5385947 - DNA, 25 bp, Homo sapien
actacagtatgatcaccatcacttc

SEQ ID NO: 5385948 - DNA, 25 bp, Homo sapien
ggctggtttcagatcccgacgcact

SEQ ID NO: 5385949 - DNA, 25 bp, Homo sapien
ttcagatcccgacgcactacagtat

SEQ ID NO: 5385950 - DNA, 25 bp, Homo sapien
ctacagtatgatcaccatcacttcg

SEQ ID NO: 5385951 - DNA, 25 bp, Homo sapien
gggccagagtcaactgagtcgtcac

SEQ ID NO: 5385952 - DNA, 25 bp, Homo sapien
tcagggccagagtcaactgagtcgt

SEQ ID NO: 5385953 - DNA, 25 bp, Homo sapien
ttcagggccagagtcaactgagtcg

SEQ ID NO: 5385954 - DNA, 25 bp, Homo sapien
cagggccagagtcaactgagtcgtc

SEQ ID NO: 5385955 - DNA, 25 bp, Homo sapien
aacaaactcttcatctaagtattgc

SEQ ID NO: 5385956 - DNA, 25 bp, Homo sapien
gaacaaactcttcatctaagtattg

SEQ ID NO: 5385957 - DNA, 25 bp, Homo sapien
tcttgccgtcactcttcctctggat

SEQ ID NO: 5385958 - DNA, 25 bp, Homo sapien
acttcatagttctcagcccgggacg

SEQ ID NO: 5385959 - DNA, 25 bp, Homo sapien
tcagcttctgtcatggagccataat

SEQ ID NO: 5385960 - DNA, 25 bp, Homo sapien
gatcttctggcagcggccacaggag

SEQ ID NO: 5385961 - DNA, 25 bp, Homo sapien
agtcgccagagtcgcgctgcctcat

SEQ ID NO: 5385962 - DNA, 25 bp, Homo sapien
agccagtcgccagagtcgcgctgcc

SEQ ID NO: 5385963 - DNA, 25 bp, Homo sapien
ccagccagtcgccagagtcgcgctg

SEQ ID NO: 5385964 - DNA, 25 bp, Homo sapien
ggccagccagtcgccagagtcgcgc

SEQ ID NO: 5385965 - DNA, 25 bp, Homo sapien
aagttgtgcccccaagtgcagagct

SEQ ID NO: 5385966 - DNA, 25 bp, Homo sapien
tccagggaccgggagctccagggac

SEQ ID NO: 5385967 - DNA, 25 bp, Homo sapien
gcaagttgtgcccccaagtgcagag

SEQ ID NO: 5385968 - DNA, 25 bp, Homo sapien
gctccagggaccgggagctccaggg

SEQ ID NO: 5385969 - DNA, 25 bp, Homo sapien
gagaagcccccgagcagcactgacc

SEQ ID NO: 5385970 - DNA, 25 bp, Homo sapien
tgacagactatataaacgggtttac

SEQ ID NO: 5385971 - DNA, 25 bp, Homo sapien
ctgtatgaccttagggatatgtagc

SEQ ID NO: 5385972 - DNA, 25 bp, Homo sapien
gaaatcctgtagataccatcaaaag

SEQ ID NO: 5385973 - DNA, 25 bp, Homo sapien
gctttacataaaaaagcctcacagt

SEQ ID NO: 5385974 - DNA, 25 bp, Homo sapien
ttgggcaacaacattttttctggca

SEQ ID NO: 5385975 - DNA, 25 bp, Homo sapien
gcactctggcttgggcaacaacatt

SEQ ID NO: 5385976 - DNA, 25 bp, Homo sapien
tgtgcgcccccacgccctactattt

SEQ ID NO: 5385977 - DNA, 25 bp, Homo sapien
cattttttctggcagccgtaatccc

SEQ ID NO: 5385978 - DNA, 25 bp, Homo sapien
ccagggagcattgccttatgggctg

SEQ ID NO: 5385979 - DNA, 25 bp, Homo sapien
ggagcattgccttatgggctgtgac

SEQ ID NO: 5385980 - DNA, 25 bp, Homo sapien
aggccagggagcattgccttatggg

SEQ ID NO: 5385981 - DNA, 25 bp, Homo sapien
gagcattgccttatgggctgtgact

SEQ ID NO: 5385982 - DNA, 25 bp, Homo sapien
tgctttcacataagctttgacagcc

SEQ ID NO: 5385983 - DNA, 25 bp, Homo sapien
gctgctttcacataagctttgacag

SEQ ID NO: 5385984 - DNA, 25 bp, Homo sapien
ctttcacataagctttgacagcctg

SEQ ID NO: 5385985 - DNA, 25 bp, Homo sapien
tcacataagctttgacagcctgccc

SEQ ID NO: 5385986 - DNA, 25 bp, Homo sapien
caggaaggacagggatggctgtcac

SEQ ID NO: 5385987 - DNA, 25 bp, Homo sapien
tgagcaggaaggacagggatggctg

SEQ ID NO: 5385988 - DNA, 25 bp, Homo sapien
agcaggaaggacagggatggctgtc

SEQ ID NO: 5385989 - DNA, 25 bp, Homo sapien
ctgagcaggaaggacagggatggct

SEQ ID NO: 5385990 - DNA, 25 bp, Homo sapien
cagcccctcagccaggtagggtggc

SEQ ID NO: 5385991 - DNA, 25 bp, Homo sapien
agccaggtagggtggccggaggatg

SEQ ID NO: 5385992 - DNA, 25 bp, Homo sapien
agggtggccggaggatgccaggcag

SEQ ID NO: 5385993 - DNA, 25 bp, Homo sapien
gtagggtggccggaggatgccaggc

SEQ ID NO: 5385994 - DNA, 25 bp, Homo sapien
cactgtctggtggggcacggggcca

SEQ ID NO: 5385995 - DNA, 25 bp, Homo sapien
gtctggtggggcacggggccatcca

SEQ ID NO: 5385996 - DNA, 25 bp, Homo sapien
ctcacaggagagttccaccaggatg

SEQ ID NO: 5385997 - DNA, 25 bp, Homo sapien
gtcctcacaggagagttccaccagg

SEQ ID NO: 5385998 - DNA, 25 bp, Homo sapien
ctgtcctcacaggagagttccacca

SEQ ID NO: 5385999 - DNA, 25 bp, Homo sapien
acaggagagttccaccaggatggtg

SEQ ID NO: 5386000 - DNA, 25 bp, Homo sapien
aacattaaaggtcctgccaagcaga

SEQ ID NO: 5386001 - DNA, 25 bp, Homo sapien
ggcaggctgaggcacatactggtca

SEQ ID NO: 5386002 - DNA, 25 bp, Homo sapien
tagggacaccagaaatcaactggct

SEQ ID NO: 5386003 - DNA, 25 bp, Homo sapien
agcacctaacattaaaggtcctgcc

SEQ ID NO: 5386004 - DNA, 25 bp, Homo sapien
tgtctggagagctttacaaacccca

SEQ ID NO: 5386005 - DNA, 25 bp, Homo sapien
cccaatttggagtgagacatgcctg

SEQ ID NO: 5386006 - DNA, 25 bp, Homo sapien
aacgtctgcgtactatctatgagga

SEQ ID NO: 5386007 - DNA, 25 bp, Homo sapien
taatacatggtagtctaagccgcag

SEQ ID NO: 5386008 - DNA, 25 bp, Homo sapien
cccctatgaaatgggtagtctgaaa

SEQ ID NO: 5386009 - DNA, 25 bp, Homo sapien
tgctcccaggtaaacttgtcttcaa

SEQ ID NO: 5386010 - DNA, 25 bp, Homo sapien
tttaaacccactgtatgctcccagg

SEQ ID NO: 5386011 - DNA, 25 bp, Homo sapien
tcattttaggaaaggcaggctattt

SEQ ID NO: 5386012 - DNA, 25 bp, Homo sapien
ccagctttggaagccccagcttggt

SEQ ID NO: 5386013 - DNA, 25 bp, Homo sapien
tttggaagccccagcttggtagaaa

SEQ ID NO: 5386014 - DNA, 25 bp, Homo sapien
gcataataaaaaataggattcccag

SEQ ID NO: 5386015 - DNA, 25 bp, Homo sapien
gaagccccagcttggtagaaaatac

SEQ ID NO: 5386016 - DNA, 25 bp, Homo sapien
gttttcaaagccttgatgtcttctt

SEQ ID NO: 5386017 - DNA, 25 bp, Homo sapien
tgatgtcttctttttcatgtacctg

SEQ ID NO: 5386018 - DNA, 25 bp, Homo sapien
ttttcaaagccttgatgtcttcttt

SEQ ID NO: 5386019 - DNA, 25 bp, Homo sapien
tgtcttctttttcatgtacctgatg

SEQ ID NO: 5386020 - DNA, 25 bp, Homo sapien
cagtctgtcaggtattccaccatct

SEQ ID NO: 5386021 - DNA, 25 bp, Homo sapien
tctgtcaggtattccaccatcttat

SEQ ID NO: 5386022 - DNA, 25 bp, Homo sapien
acccagtctgtcaggtattccacca

SEQ ID NO: 5386023 - DNA, 25 bp, Homo sapien
tttgatgttcccataacccagtctg

SEQ ID NO: 5386024 - DNA, 25 bp, Homo sapien
atcaaattcttagctcaagtacagc

SEQ ID NO: 5386025 - DNA, 25 bp, Homo sapien
tcttagctcaagtacagcagagttt

SEQ ID NO: 5386026 - DNA, 25 bp, Homo sapien
aattcttagctcaagtacagcagag

SEQ ID NO: 5386027 - DNA, 25 bp, Homo sapien
gctcaagtacagcagagttttagaa

SEQ ID NO: 5386028 - DNA, 25 bp, Homo sapien
gttacttcaaccaactgacacagtt

SEQ ID NO: 5386029 - DNA, 25 bp, Homo sapien
tgccatcgttacttcaaccaactga

SEQ ID NO: 5386030 - DNA, 25 bp, Homo sapien
cttgccatcgttacttcaaccaact

SEQ ID NO: 5386031 - DNA, 25 bp, Homo sapien
catcgttacttcaaccaactgacac

SEQ ID NO: 5386032 - DNA, 25 bp, Homo sapien
gtatgattatctagcaagttcttca

SEQ ID NO: 5386033 - DNA, 25 bp, Homo sapien
tgtccttaggagtcaaaaaacttgc

SEQ ID NO: 5386034 - DNA, 25 bp, Homo sapien
aaaacttgctgatgggtcttcttca

SEQ ID NO: 5386035 - DNA, 25 bp, Homo sapien
atagcatcagataaagagcaggact

SEQ ID NO: 5386036 - DNA, 25 bp, Homo sapien
ctgatgggtcttcttcaatttgtta

SEQ ID NO: 5386037 - DNA, 25 bp, Homo sapien
cgacaagagctgatccatatatttg

SEQ ID NO: 5386038 - DNA, 25 bp, Homo sapien
gtccttatcattggtcggtatttga

SEQ ID NO: 5386039 - DNA, 25 bp, Homo sapien
caggtccttatcattggtcggtatt

SEQ ID NO: 5386040 - DNA, 25 bp, Homo sapien
tacacaccattaacgacaagagctg

SEQ ID NO: 5386041 - DNA, 25 bp, Homo sapien
tataggttggcaggccagaattact

SEQ ID NO: 5386042 - DNA, 25 bp, Homo sapien
gaagccagtcatgttgatccatgcc

SEQ ID NO: 5386043 - DNA, 25 bp, Homo sapien
gtgtcagacagatctatgggtcctc

SEQ ID NO: 5386044 - DNA, 25 bp, Homo sapien
agtctgtgtcagacagatctatggg

SEQ ID NO: 5386045 - DNA, 25 bp, Homo sapien
gcctcttaacaatggtcttgtgaag

SEQ ID NO: 5386046 - DNA, 25 bp, Homo sapien
tcgcctcttaacaatggtcttgtga

SEQ ID NO: 5386047 - DNA, 25 bp, Homo sapien
cgcctcttaacaatggtcttgtgaa

SEQ ID NO: 5386048 - DNA, 25 bp, Homo sapien
tcgtgaaagattaccaaagtgaagt

SEQ ID NO: 5386049 - DNA, 25 bp, Homo sapien
tacaaagtacaggtctagacaaacc

SEQ ID NO: 5386050 - DNA, 25 bp, Homo sapien
gttaaatagtcacacgtagctagtg

SEQ ID NO: 5386051 - DNA, 25 bp, Homo sapien
tatgcttattttactgagtgactcg

SEQ ID NO: 5386052 - DNA, 25 bp, Homo sapien
tggccatcttccacttgggcttttg

SEQ ID NO: 5386053 - DNA, 25 bp, Homo sapien
atcttccacttgggcttttggatag

SEQ ID NO: 5386054 - DNA, 25 bp, Homo sapien
gccatcttccacttgggcttttgga

SEQ ID NO: 5386055 - DNA, 25 bp, Homo sapien
ctggccatcttccacttgggctttt

SEQ ID NO: 5386056 - DNA, 25 bp, Homo sapien
gttcccattttgcatgtgtatcttc

SEQ ID NO: 5386057 - DNA, 25 bp, Homo sapien
ggattagttttgttgcttgttccca

SEQ ID NO: 5386058 - DNA, 25 bp, Homo sapien
gttgcttgttcccattttgcatgtg

SEQ ID NO: 5386059 - DNA, 25 bp, Homo sapien
attttgcatgtgtatcttcccaagc

SEQ ID NO: 5386060 - DNA, 25 bp, Homo sapien
gaagacagttatcacttgaaagcaa

SEQ ID NO: 5386061 - DNA, 25 bp, Homo sapien
cagatattgtacttgcgatatgcac

SEQ ID NO: 5386062 - DNA, 25 bp, Homo sapien
gggtgtttctgttgctaagggcaca

SEQ ID NO: 5386063 - DNA, 25 bp, Homo sapien
ttccaaaattgagggtgggcgcctg

SEQ ID NO: 5386064 - DNA, 25 bp, Homo sapien
ccatcactctttctgaagtgctgct

SEQ ID NO: 5386065 - DNA, 25 bp, Homo sapien
gcagtgggatgctcagtgcgcctca

SEQ ID NO: 5386066 - DNA, 25 bp, Homo sapien
cagtgccatcactctttctgaagtg

SEQ ID NO: 5386067 - DNA, 25 bp, Homo sapien
agcagtgccatcactctttctgaag

SEQ ID NO: 5386068 - DNA, 25 bp, Homo sapien
cagaaacatgtacagggccacttct

SEQ ID NO: 5386069 - DNA, 25 bp, Homo sapien
caagacccacggacatttgactggt

SEQ ID NO: 5386070 - DNA, 25 bp, Homo sapien
gagtatgcagtgacacttcaagacc

SEQ ID NO: 5386071 - DNA, 25 bp, Homo sapien
gcagtgacacttcaagacccacgga

SEQ ID NO: 5386072 - DNA, 25 bp, Homo sapien
acttcaagacccacggacatttgac

SEQ ID NO: 5386073 - DNA, 25 bp, Homo sapien
actagttaatttcttgcagatgtaa

SEQ ID NO: 5386074 - DNA, 25 bp, Homo sapien
gactagttaatttcttgcagatgta

SEQ ID NO: 5386075 - DNA, 25 bp, Homo sapien
gctcctggtctccaggtctgtaggt

SEQ ID NO: 5386076 - DNA, 25 bp, Homo sapien
tggtctccaggtctgtaggtttttc

SEQ ID NO: 5386077 - DNA, 25 bp, Homo sapien
tcctggtctccaggtctgtaggttt

SEQ ID NO: 5386078 - DNA, 25 bp, Homo sapien
agctcctggtctccaggtctgtagg

SEQ ID NO: 5386079 - DNA, 25 bp, Homo sapien
gccccgatgaggctgcgggccatcc

SEQ ID NO: 5386080 - DNA, 25 bp, Homo sapien
gatgaggctgcgggccatccctgca

SEQ ID NO: 5386081 - DNA, 25 bp, Homo sapien
ccgatgaggctgcgggccatccctg

SEQ ID NO: 5386082 - DNA, 25 bp, Homo sapien
cccgatgaggctgcgggccatccct

SEQ ID NO: 5386083 - DNA, 25 bp, Homo sapien
cttggaggtcacacagcggtgcact

SEQ ID NO: 5386084 - DNA, 25 bp, Homo sapien
aaccgagtgcttgtctgggagctgt

SEQ ID NO: 5386085 - DNA, 25 bp, Homo sapien
acacagcggtgcactgacctgagga

SEQ ID NO: 5386086 - DNA, 25 bp, Homo sapien
agctgtggccgcttggaggtcacac

SEQ ID NO: 5386087 - DNA, 25 bp, Homo sapien
ctggggctgcggtcgggggttgctt

SEQ ID NO: 5386088 - DNA, 25 bp, Homo sapien
tgcggtcgggggttgctttcctgca

SEQ ID NO: 5386089 - DNA, 25 bp, Homo sapien
gctgcggtcgggggttgctttcctg

SEQ ID NO: 5386090 - DNA, 25 bp, Homo sapien
agagacctggggctgcggtcggggg

SEQ ID NO: 5386091 - DNA, 25 bp, Homo sapien
cccagcttgcagatcaggcagacag

SEQ ID NO: 5386092 - DNA, 25 bp, Homo sapien
atcaggcagacagtgccattgttgc

SEQ ID NO: 5386093 - DNA, 25 bp, Homo sapien
gctgctcatcgtcctcaagcctgtg

SEQ ID NO: 5386094 - DNA, 25 bp, Homo sapien
aggtttatcatgcacttgggctcca

SEQ ID NO: 5386095 - DNA, 25 bp, Homo sapien
ggatgtacgtgatgggtgggctgtg

SEQ ID NO: 5386096 - DNA, 25 bp, Homo sapien
gcccagctggatgtacgtgatgggt

SEQ ID NO: 5386097 - DNA, 25 bp, Homo sapien
gctggatgtacgtgatgggtgggct

SEQ ID NO: 5386098 - DNA, 25 bp, Homo sapien
cgtgatgggtgggctgtggatggca

SEQ ID NO: 5386099 - DNA, 25 bp, Homo sapien
aacagcaccgccaggagtgtcctgg

SEQ ID NO: 5386100 - DNA, 25 bp, Homo sapien
cttgctgatggcctcgtgttctggg

SEQ ID NO: 5386101 - DNA, 25 bp, Homo sapien
cctgggctcggtgggcgtcttgtgc

SEQ ID NO: 5386102 - DNA, 25 bp, Homo sapien
tggctgcaatcctgtggccccaaat

SEQ ID NO: 5386103 - DNA, 25 bp, Homo sapien
catggcttctgcataaggaggcagc

SEQ ID NO: 5386104 - DNA, 25 bp, Homo sapien
tgcagtcactggaaggtcatttgac

SEQ ID NO: 5386105 - DNA, 25 bp, Homo sapien
catgtaagatggtctatgagatgac

SEQ ID NO: 5386106 - DNA, 25 bp, Homo sapien
atgggtgccacccaaatattgaaat

SEQ ID NO: 5386107 - DNA, 25 bp, Homo sapien
tgccttaataatattagatagtcca

SEQ ID NO: 5386108 - DNA, 25 bp, Homo sapien
ccagccagaggcatggaaactttta

SEQ ID NO: 5386109 - DNA, 25 bp, Homo sapien
taaaggcagtgaaaatggccagcca

SEQ ID NO: 5386110 - DNA, 25 bp, Homo sapien
cagactaggctttgagaatcagtag

SEQ ID NO: 5386111 - DNA, 25 bp, Homo sapien
gctggtccggttgctcctggcaaac

SEQ ID NO: 5386112 - DNA, 25 bp, Homo sapien
tggctggtccggttgctcctggcaa

SEQ ID NO: 5386113 - DNA, 25 bp, Homo sapien
tggtccggttgctcctggcaaaccc

SEQ ID NO: 5386114 - DNA, 25 bp, Homo sapien
tccggttgctcctggcaaacccttg

SEQ ID NO: 5386115 - DNA, 25 bp, Homo sapien
cagaccttggacagtagtcttgact

SEQ ID NO: 5386116 - DNA, 25 bp, Homo sapien
aggagatatcaaaggaggtcagacc

SEQ ID NO: 5386117 - DNA, 25 bp, Homo sapien
cttcctgctatagaacacattgtta

SEQ ID NO: 5386118 - DNA, 25 bp, Homo sapien
aaaaggaaaggtggcgtgtgccctg

SEQ ID NO: 5386119 - DNA, 25 bp, Homo sapien
caggcggcgcttgcggtacgggctg

SEQ ID NO: 5386120 - DNA, 25 bp, Homo sapien
ctgcaggcggcgcttgcggtacggg

SEQ ID NO: 5386121 - DNA, 25 bp, Homo sapien
tgcaggcggcgcttgcggtacgggc

SEQ ID NO: 5386122 - DNA, 25 bp, Homo sapien
gcaggcggcgcttgcggtacgggct

SEQ ID NO: 5386123 - DNA, 25 bp, Homo sapien
gaactggctgttaaggagtgtgctt

SEQ ID NO: 5386124 - DNA, 25 bp, Homo sapien
ctgttaaggagtgtgcttttcttga

SEQ ID NO: 5386125 - DNA, 25 bp, Homo sapien
cttgaggtctttggctttataactc

SEQ ID NO: 5386126 - DNA, 25 bp, Homo sapien
aaggagtgtgcttttcttgaggtct

SEQ ID NO: 5386127 - DNA, 25 bp, Homo sapien
agatactgccatccactaaatagta

SEQ ID NO: 5386128 - DNA, 25 bp, Homo sapien
aagatactgccatccactaaatagt

SEQ ID NO: 5386129 - DNA, 25 bp, Homo sapien
gaagatactgccatccactaaatag

SEQ ID NO: 5386130 - DNA, 25 bp, Homo sapien
ttaaccatcctggttccactgatgg

SEQ ID NO: 5386131 - DNA, 25 bp, Homo sapien
aaccatcctggttccactgatgggt

SEQ ID NO: 5386132 - DNA, 25 bp, Homo sapien
taaccatcctggttccactgatggg

SEQ ID NO: 5386133 - DNA, 25 bp, Homo sapien
ggctttggcttggtgcccagaagaa

SEQ ID NO: 5386134 - DNA, 25 bp, Homo sapien
acaggagtacatggctttggcttgg

SEQ ID NO: 5386135 - DNA, 25 bp, Homo sapien
ttacaggagtacatggctttggctt

SEQ ID NO: 5386136 - DNA, 25 bp, Homo sapien
agtacatggctttggcttggtgccc

SEQ ID NO: 5386137 - DNA, 25 bp, Homo sapien
agctattgcttgcagtggtgtctag

SEQ ID NO: 5386138 - DNA, 25 bp, Homo sapien
cgctgatagctattgcttgcagtgg

SEQ ID NO: 5386139 - DNA, 25 bp, Homo sapien
cagtacgctgatagctattgcttgc

SEQ ID NO: 5386140 - DNA, 25 bp, Homo sapien
gatagctattgcttgcagtggtgtc

SEQ ID NO: 5386141 - DNA, 25 bp, Homo sapien
gctgactttgtagtgctattttgtt

SEQ ID NO: 5386142 - DNA, 25 bp, Homo sapien
tgcaatccaaggaatccctccagat

SEQ ID NO: 5386143 - DNA, 25 bp, Homo sapien
gggttgcaatccaaggaatccctcc

SEQ ID NO: 5386144 - DNA, 25 bp, Homo sapien
aagctgactttgtagtgctattttg

SEQ ID NO: 5386145 - DNA, 25 bp, Homo sapien
ctgtagagaggcagattgctcgtgt

SEQ ID NO: 5386146 - DNA, 25 bp, Homo sapien
tgtagagaggcagattgctcgtgtc

SEQ ID NO: 5386147 - DNA, 25 bp, Homo sapien
tgaaaaatcgtttcatcgtgctctg

SEQ ID NO: 5386148 - DNA, 25 bp, Homo sapien
caagccagagtttcctattagcgtc

SEQ ID NO: 5386149 - DNA, 25 bp, Homo sapien
aactacttgtatgtcgaagcagaag

SEQ ID NO: 5386150 - DNA, 25 bp, Homo sapien
aatcatttccttcccatccatggct

SEQ ID NO: 5386151 - DNA, 25 bp, Homo sapien
gcagaagtggttgtcaattgaatct

SEQ ID NO: 5386152 - DNA, 25 bp, Homo sapien
catgtaaaaccaagcggtcgtttct

SEQ ID NO: 5386153 - DNA, 25 bp, Homo sapien
ctagtaacaaggctgtttaatccat

SEQ ID NO: 5386154 - DNA, 25 bp, Homo sapien
tagtaacaaggctgtttaatccatg

SEQ ID NO: 5386155 - DNA, 25 bp, Homo sapien
ttaatccatgtaaaaccaagcggtc

SEQ ID NO: 5386156 - DNA, 25 bp, Homo sapien
gccttccatcgtccactggctgggt

SEQ ID NO: 5386157 - DNA, 25 bp, Homo sapien
tagccttccatcgtccactggctgg

SEQ ID NO: 5386158 - DNA, 25 bp, Homo sapien
gatagccttccatcgtccactggct

SEQ ID NO: 5386159 - DNA, 25 bp, Homo sapien
ccttccatcgtccactggctgggtg

SEQ ID NO: 5386160 - DNA, 25 bp, Homo sapien
gcagctgttgcttatgcggtgcaaa

SEQ ID NO: 5386161 - DNA, 25 bp, Homo sapien
tgcaagttgaactgcagctgttgct

SEQ ID NO: 5386162 - DNA, 25 bp, Homo sapien
gctgttgcttatgcggtgcaaattc

SEQ ID NO: 5386163 - DNA, 25 bp, Homo sapien
tattccttgtattctgcaagttgaa

SEQ ID NO: 5386164 - DNA, 25 bp, Homo sapien
gcaagttcatatccctcgtggtaaa

SEQ ID NO: 5386165 - DNA, 25 bp, Homo sapien
ctgggcaagttcatatccctcgtgg

SEQ ID NO: 5386166 - DNA, 25 bp, Homo sapien
ggcaagttcatatccctcgtggtaa

SEQ ID NO: 5386167 - DNA, 25 bp, Homo sapien
tcatatccctcgtggtaaaaaagta

SEQ ID NO: 5386168 - DNA, 25 bp, Homo sapien
tcttctgctgcaatgagtagtcttg

SEQ ID NO: 5386169 - DNA, 25 bp, Homo sapien
ttcttcttctgctgcaatgagtagt

SEQ ID NO: 5386170 - DNA, 25 bp, Homo sapien
cttgcaaattcttttagtgactgac

SEQ ID NO: 5386171 - DNA, 25 bp, Homo sapien
gctgcaatgagtagtcttgcaaatt

SEQ ID NO: 5386172 - DNA, 25 bp, Homo sapien
tcatcatctgtttcagcattatcaa

SEQ ID NO: 5386173 - DNA, 25 bp, Homo sapien
catctgtttcagcattatcaataca

SEQ ID NO: 5386174 - DNA, 25 bp, Homo sapien
tggaaatcttgtaatgactgggaaa

SEQ ID NO: 5386175 - DNA, 25 bp, Homo sapien
catcatctgtttcagcattatcaat

SEQ ID NO: 5386176 - DNA, 25 bp, Homo sapien
agatccccaacctgggtagaggtgt

SEQ ID NO: 5386177 - DNA, 25 bp, Homo sapien
ccaacctgggtagaggtgtgttcct

SEQ ID NO: 5386178 - DNA, 25 bp, Homo sapien
gaactgggtaggcaatcaacattac

SEQ ID NO: 5386179 - DNA, 25 bp, Homo sapien
ggtaagggaactgggtaggcaatca

SEQ ID NO: 5386180 - DNA, 25 bp, Homo sapien
tgtcctcaacgccccagtgagcgga

SEQ ID NO: 5386181 - DNA, 25 bp, Homo sapien
aacgccccagtgagcggagagccct

SEQ ID NO: 5386182 - DNA, 25 bp, Homo sapien
agtgagcggagagccctccttaatg

SEQ ID NO: 5386183 - DNA, 25 bp, Homo sapien
cccagtgagcggagagccctcctta

SEQ ID NO: 5386184 - DNA, 25 bp, Homo sapien
ttcaatctcctgacactgcaagcgc

SEQ ID NO: 5386185 - DNA, 25 bp, Homo sapien
gtaggaatcgctgaactccagagta

SEQ ID NO: 5386186 - DNA, 25 bp, Homo sapien
gttggttcgctccagttcaatctcc

SEQ ID NO: 5386187 - DNA, 25 bp, Homo sapien
gaatcgctgaactccagagtaggca

SEQ ID NO: 5386188 - DNA, 25 bp, Homo sapien
cctgaagcacatcgatgaagttgtt

SEQ ID NO: 5386189 - DNA, 25 bp, Homo sapien
tcaaatggtaacctgaagcacatcg

SEQ ID NO: 5386190 - DNA, 25 bp, Homo sapien
aatggtaacctgaagcacatcgatg

SEQ ID NO: 5386191 - DNA, 25 bp, Homo sapien
ggtaacctgaagcacatcgatgaag

SEQ ID NO: 5386192 - DNA, 25 bp, Homo sapien
gaccctaacaatccgttcatgtggt

SEQ ID NO: 5386193 - DNA, 25 bp, Homo sapien
ctgaccctaacaatccgttcatgtg

SEQ ID NO: 5386194 - DNA, 25 bp, Homo sapien
cctaacaatccgttcatgtggtgtg

SEQ ID NO: 5386195 - DNA, 25 bp, Homo sapien
taacaatccgttcatgtggtgtggc

SEQ ID NO: 5386196 - DNA, 25 bp, Homo sapien
gaattgcgtggtggtctcatgccgc

SEQ ID NO: 5386197 - DNA, 25 bp, Homo sapien
catgggggggccgagggaattgcgt

SEQ ID NO: 5386198 - DNA, 25 bp, Homo sapien
tggtggtctcatgccgctgccataa

SEQ ID NO: 5386199 - DNA, 25 bp, Homo sapien
ggcccatgttaatcccgggcatggg

SEQ ID NO: 5386200 - DNA, 25 bp, Homo sapien
tgtgggttgggacccatgggcccca

SEQ ID NO: 5386201 - DNA, 25 bp, Homo sapien
agggttcattctctgcattgatcct

SEQ ID NO: 5386202 - DNA, 25 bp, Homo sapien
ggtggccttgttgtgcgggatccat

SEQ ID NO: 5386203 - DNA, 25 bp, Homo sapien
cttgttgtgcgggatccatggaatt

SEQ ID NO: 5386204 - DNA, 25 bp, Homo sapien
tgggggtggccttgttgtgcgggat

SEQ ID NO: 5386205 - DNA, 25 bp, Homo sapien
ggccttgttgtgcgggatccatgga

SEQ ID NO: 5386206 - DNA, 25 bp, Homo sapien
tgtttttttcccagcgaatctccga

SEQ ID NO: 5386207 - DNA, 25 bp, Homo sapien
tctgtgcagatttctgtgctcctac

SEQ ID NO: 5386208 - DNA, 25 bp, Homo sapien
ccaggcggttctcccaacgcgatgt

SEQ ID NO: 5386209 - DNA, 25 bp, Homo sapien
gcgaatctccgataagaaggtctgt

SEQ ID NO: 5386210 - DNA, 25 bp, Homo sapien
taaagctaacttttccccagcctgc

SEQ ID NO: 5386211 - DNA, 25 bp, Homo sapien
ctgcagtaaatattcgtagacgtat

SEQ ID NO: 5386212 - DNA, 25 bp, Homo sapien
gggcaccaaggagcctttgcctttg

SEQ ID NO: 5386213 - DNA, 25 bp, Homo sapien
ctgcccgtccgagggcaccaaggag

SEQ ID NO: 5386214 - DNA, 25 bp, Homo sapien
aaaatctggactatgaacacacttc

SEQ ID NO: 5386215 - DNA, 25 bp, Homo sapien
tattaaacatagcatagcattgtgt

SEQ ID NO: 5386216 - DNA, 25 bp, Homo sapien
tcactgctttgaagaactccaagcc

SEQ ID NO: 5386217 - DNA, 25 bp, Homo sapien
taatgcctaatattggtaatcaggg

SEQ ID NO: 5386218 - DNA, 25 bp, Homo sapien
tagatatcgttatttctgctaattc

SEQ ID NO: 5386219 - DNA, 25 bp, Homo sapien
taagctttagatatcgttatttctg

SEQ ID NO: 5386220 - DNA, 25 bp, Homo sapien
gatatcgttatttctgctaattcag

SEQ ID NO: 5386221 - DNA, 25 bp, Homo sapien
gctttagatatcgttatttctgcta

SEQ ID NO: 5386222 - DNA, 25 bp, Homo sapien
cactggaatacgctgaaatagtttg

SEQ ID NO: 5386223 - DNA, 25 bp, Homo sapien
tataaataatgaagacgctgacttt

SEQ ID NO: 5386224 - DNA, 25 bp, Homo sapien
tttttgtgcttgtcaagctaataga

SEQ ID NO: 5386225 - DNA, 25 bp, Homo sapien
tggaatacgctgaaatagtttggct

SEQ ID NO: 5386226 - DNA, 25 bp, Homo sapien
ggaaaaggttcaagccaatattcac

SEQ ID NO: 5386227 - DNA, 25 bp, Homo sapien
gaaaaggttcaagccaatattcaca

SEQ ID NO: 5386228 - DNA, 25 bp, Homo sapien
gggcttctgaggaagggttgaagat

SEQ ID NO: 5386229 - DNA, 25 bp, Homo sapien
ttgaagatgacatgggagagtagca

SEQ ID NO: 5386230 - DNA, 25 bp, Homo sapien
tcaatgaaagagtaagggggcttct

SEQ ID NO: 5386231 - DNA, 25 bp, Homo sapien
agtcaatgaaagagtaagggggctt

SEQ ID NO: 5386232 - DNA, 25 bp, Homo sapien
ctgttctgacatcatcaatccactt

SEQ ID NO: 5386233 - DNA, 25 bp, Homo sapien
cctgtgtgctttccattcccggcaa

SEQ ID NO: 5386234 - DNA, 25 bp, Homo sapien
gctttacattgtatccagcttttgc

SEQ ID NO: 5386235 - DNA, 25 bp, Homo sapien
aagctgctgctacacgtcgaaagag

SEQ ID NO: 5386236 - DNA, 25 bp, Homo sapien
gcccgattgttccatcctccaagta

SEQ ID NO: 5386237 - DNA, 25 bp, Homo sapien
agccgaagcccgattgttccatcct

SEQ ID NO: 5386238 - DNA, 25 bp, Homo sapien
atcccacagccgaagcccgattgtt

SEQ ID NO: 5386239 - DNA, 25 bp, Homo sapien
gccgtatcccacagccgaagcccga

SEQ ID NO: 5386240 - DNA, 25 bp, Homo sapien
ccccaggaacaccagcttgaatttc

SEQ ID NO: 5386241 - DNA, 25 bp, Homo sapien
cttgaatttcctcagcggattcccg

SEQ ID NO: 5386242 - DNA, 25 bp, Homo sapien
aggaacaccagcttgaatttcctca

SEQ ID NO: 5386243 - DNA, 25 bp, Homo sapien
ttcctcagcggattcccgaagtctc

SEQ ID NO: 5386244 - DNA, 25 bp, Homo sapien
gcgggcgccgagctctctgcgcccc

SEQ ID NO: 5386245 - DNA, 25 bp, Homo sapien
gggcgccgagctctctgcgcccctg

SEQ ID NO: 5386246 - DNA, 25 bp, Homo sapien
gccgagctctctgcgcccctgcaag

SEQ ID NO: 5386247 - DNA, 25 bp, Homo sapien
ctctctgcgcccctgcaagggccgg

SEQ ID NO: 5386248 - DNA, 25 bp, Homo sapien
gctccaagacctgcgggagaaaggc

SEQ ID NO: 5386249 - DNA, 25 bp, Homo sapien
ggctccaagacctgcgggagaaagg

SEQ ID NO: 5386250 - DNA, 25 bp, Homo sapien
ctccaagacctgcgggagaaaggcg

SEQ ID NO: 5386251 - DNA, 25 bp, Homo sapien
cggctccaagacctgcgggagaaag

SEQ ID NO: 5386252 - DNA, 25 bp, Homo sapien
agcccaacctgctgagtgcgcgagc

SEQ ID NO: 5386253 - DNA, 25 bp, Homo sapien
gcgcggcgcttcggcttccccagcc

SEQ ID NO: 5386254 - DNA, 25 bp, Homo sapien
gccgcagcccaacctgctgagtgcg

SEQ ID NO: 5386255 - DNA, 25 bp, Homo sapien
ggcgcttcggcttccccagccgccg

SEQ ID NO: 5386256 - DNA, 25 bp, Homo sapien
agcattgctcccgaagccaggaagc

SEQ ID NO: 5386257 - DNA, 25 bp, Homo sapien
tccagcattgctcccgaagccagga

SEQ ID NO: 5386258 - DNA, 25 bp, Homo sapien
ctccagcattgctcccgaagccagg

SEQ ID NO: 5386259 - DNA, 25 bp, Homo sapien
gctccagcattgctcccgaagccag

SEQ ID NO: 5386260 - DNA, 25 bp, Homo sapien
acaggactggaaggcccagcctggc

SEQ ID NO: 5386261 - DNA, 25 bp, Homo sapien
tggctccaggttggccttgctgacc

SEQ ID NO: 5386262 - DNA, 25 bp, Homo sapien
cctggcctgtggctccaggttggcc

SEQ ID NO: 5386263 - DNA, 25 bp, Homo sapien
aggactggaaggcccagcctggcct

SEQ ID NO: 5386264 - DNA, 25 bp, Homo sapien
tggcccaggggttctattctcccca

SEQ ID NO: 5386265 - DNA, 25 bp, Homo sapien
ccacttgactagtggcccaggggtt

SEQ ID NO: 5386266 - DNA, 25 bp, Homo sapien
gggttctattctccccagcaggacc

SEQ ID NO: 5386267 - DNA, 25 bp, Homo sapien
caggggttctattctccccagcagg

SEQ ID NO: 5386268 - DNA, 25 bp, Homo sapien
gtcattcatagattgtcctggtttg

SEQ ID NO: 5386269 - DNA, 25 bp, Homo sapien
ttcatagattgtcctggtttgccat

SEQ ID NO: 5386270 - DNA, 25 bp, Homo sapien
ctggtcattcatagattgtcctggt

SEQ ID NO: 5386271 - DNA, 25 bp, Homo sapien
acagtcacccttagcactgtcctgg

SEQ ID NO: 5386272 - DNA, 25 bp, Homo sapien
tcctaagaccaacagatagctctta

SEQ ID NO: 5386273 - DNA, 25 bp, Homo sapien
agaccaacagatagctcttatcctc

SEQ ID NO: 5386274 - DNA, 25 bp, Homo sapien
caacagatagctcttatcctctaaa

SEQ ID NO: 5386275 - DNA, 25 bp, Homo sapien
acagatagctcttatcctctaaaag

SEQ ID NO: 5386276 - DNA, 25 bp, Homo sapien
ggcatgagtcagcagttcttgcaca

SEQ ID NO: 5386277 - DNA, 25 bp, Homo sapien
gggcatgagtcagcagttcttgcac

SEQ ID NO: 5386278 - DNA, 25 bp, Homo sapien
gagtcagcagttcttgcacactttc

SEQ ID NO: 5386279 - DNA, 25 bp, Homo sapien
catgagtcagcagttcttgcacact

SEQ ID NO: 5386280 - DNA, 25 bp, Homo sapien
tggtaaataagaagaagcagacttc

SEQ ID NO: 5386281 - DNA, 25 bp, Homo sapien
ttagatccacaatctcacgttttga

SEQ ID NO: 5386282 - DNA, 25 bp, Homo sapien
aatctcacgttttgattaaactgta

SEQ ID NO: 5386283 - DNA, 25 bp, Homo sapien
taagaagaagcagacttctattatt

SEQ ID NO: 5386284 - DNA, 25 bp, Homo sapien
ctatcataactaacgagtcaaaatc

SEQ ID NO: 5386285 - DNA, 25 bp, Homo sapien
catgttctatcataactaacgagtc

SEQ ID NO: 5386286 - DNA, 25 bp, Homo sapien
taaacatgttctatcataactaacg

SEQ ID NO: 5386287 - DNA, 25 bp, Homo sapien
tcataactaacgagtcaaaatcatt

SEQ ID NO: 5386288 - DNA, 25 bp, Homo sapien
tctttttcagatactatcgaaacta

SEQ ID NO: 5386289 - DNA, 25 bp, Homo sapien
actctttttcagatactatcgaaac

SEQ ID NO: 5386290 - DNA, 25 bp, Homo sapien
gataagggccacagcagattggagc

SEQ ID NO: 5386291 - DNA, 25 bp, Homo sapien
agaggtatgatttctctcgatcttt

SEQ ID NO: 5386292 - DNA, 25 bp, Homo sapien
tatgatttctctcgatctttaactt

SEQ ID NO: 5386293 - DNA, 25 bp, Homo sapien
ggtatgatttctctcgatctttaac

SEQ ID NO: 5386294 - DNA, 25 bp, Homo sapien
gaggtatgatttctctcgatcttta

SEQ ID NO: 5386295 - DNA, 25 bp, Homo sapien
gcatctatggtgctattgttggtca

SEQ ID NO: 5386296 - DNA, 25 bp, Homo sapien
ttgttggtcagttttgttgagtatt

SEQ ID NO: 5386297 - DNA, 25 bp, Homo sapien
attgttggtcagttttgttgagtat

SEQ ID NO: 5386298 - DNA, 25 bp, Homo sapien
atctatggtgctattgttggtcagt

SEQ ID NO: 5386299 - DNA, 25 bp, Homo sapien
ttaagatatatacggcttaaactat

SEQ ID NO: 5386300 - DNA, 25 bp, Homo sapien
agatatatacggcttaaactataac

SEQ ID NO: 5386301 - DNA, 25 bp, Homo sapien
acaaagttatgaaataatttcacta

SEQ ID NO: 5386302 - DNA, 25 bp, Homo sapien
tatatacggcttaaactataactta

SEQ ID NO: 5386303 - DNA, 25 bp, Homo sapien
attgagaaggtcatagaggttatgg

SEQ ID NO: 5386304 - DNA, 25 bp, Homo sapien
agaaggtcatagaggttatgggatt

SEQ ID NO: 5386305 - DNA, 25 bp, Homo sapien
aggtcatagaggttatgggattggc

SEQ ID NO: 5386306 - DNA, 25 bp, Homo sapien
catagaggttatgggattggcttga

SEQ ID NO: 5386307 - DNA, 25 bp, Homo sapien
cttcagtataatgtactggctaaga

SEQ ID NO: 5386308 - DNA, 25 bp, Homo sapien
atgtactggctaagagctttgaagg

SEQ ID NO: 5386309 - DNA, 25 bp, Homo sapien
cagtataatgtactggctaagagct

SEQ ID NO: 5386310 - DNA, 25 bp, Homo sapien
gcagaacttcagtataatgtactgg

SEQ ID NO: 5386311 - DNA, 25 bp, Homo sapien
ttagtacaggaaggatgtaaccaac

SEQ ID NO: 5386312 - DNA, 25 bp, Homo sapien
caacatttttggggtatgggcctga

SEQ ID NO: 5386313 - DNA, 25 bp, Homo sapien
tttttggggtatgggcctgacagct

SEQ ID NO: 5386314 - DNA, 25 bp, Homo sapien
acatttttggggtatgggcctgaca

SEQ ID NO: 5386315 - DNA, 25 bp, Homo sapien
aatatgaggattttaacctctgttg

SEQ ID NO: 5386316 - DNA, 25 bp, Homo sapien
gaaatatgaggattttaacctctgt

SEQ ID NO: 5386317 - DNA, 25 bp, Homo sapien
ctgttgtttactctgtcaaagtaat

SEQ ID NO: 5386318 - DNA, 25 bp, Homo sapien
ctagaaatatgaggattttaacctc

SEQ ID NO: 5386319 - DNA, 25 bp, Homo sapien
gttggaaagtagggccctggagctg

SEQ ID NO: 5386320 - DNA, 25 bp, Homo sapien
acctggctcaccctggatccttgga

SEQ ID NO: 5386321 - DNA, 25 bp, Homo sapien
tggagatcctgaatgtcctggctcc

SEQ ID NO: 5386322 - DNA, 25 bp, Homo sapien
tggatccttggagatcctgaatgtc

SEQ ID NO: 5386323 - DNA, 25 bp, Homo sapien
atccttggagatcctgaatgtcctg

SEQ ID NO: 5386324 - DNA, 25 bp, Homo sapien
tgtctccccagtcaaaattggcaga

SEQ ID NO: 5386325 - DNA, 25 bp, Homo sapien
agtcaaaattggcagaaaaccaact

SEQ ID NO: 5386326 - DNA, 25 bp, Homo sapien
cattcttttatgtctccccagtcaa

SEQ ID NO: 5386327 - DNA, 25 bp, Homo sapien
aaattggcagaaaaccaactttcat

SEQ ID NO: 5386328 - DNA, 25 bp, Homo sapien
tgtccattcacccccttcccagtga

SEQ ID NO: 5386329 - DNA, 25 bp, Homo sapien
ttgtccattcacccccttcccagtg

SEQ ID NO: 5386330 - DNA, 25 bp, Homo sapien
gtccattcacccccttcccagtgac

SEQ ID NO: 5386331 - DNA, 25 bp, Homo sapien
ccaatgcctcctggggcgctttgtg

SEQ ID NO: 5386332 - DNA, 25 bp, Homo sapien
ccagggggactcaggttcccaatgc

SEQ ID NO: 5386333 - DNA, 25 bp, Homo sapien
tcccaatgcctcctggggcgctttg

SEQ ID NO: 5386334 - DNA, 25 bp, Homo sapien
tctctccagggggactcaggttccc

SEQ ID NO: 5386335 - DNA, 25 bp, Homo sapien
tggaggccttcgcccccgatgttcc

SEQ ID NO: 5386336 - DNA, 25 bp, Homo sapien
tcgaggacccggctgaccctgtgga

SEQ ID NO: 5386337 - DNA, 25 bp, Homo sapien
cgaggacccggctgaccctgtggac

SEQ ID NO: 5386338 - DNA, 25 bp, Homo sapien
cccactgactccaggaaagccagga

SEQ ID NO: 5386339 - DNA, 25 bp, Homo sapien
cccagcttcctcaggctccgttctc

SEQ ID NO: 5386340 - DNA, 25 bp, Homo sapien
tcaggctccgttctccccactgact

SEQ ID NO: 5386341 - DNA, 25 bp, Homo sapien
tccaggaaagccaggaaatcccagg

SEQ ID NO: 5386342 - DNA, 25 bp, Homo sapien
agttcctggcatccggggtagccag

SEQ ID NO: 5386343 - DNA, 25 bp, Homo sapien
cctgagttcctggcatccggggtag

SEQ ID NO: 5386344 - DNA, 25 bp, Homo sapien
ctgagttcctggcatccggggtagc

SEQ ID NO: 5386345 - DNA, 25 bp, Homo sapien
tgagttcctggcatccggggtagcc

SEQ ID NO: 5386346 - DNA, 25 bp, Homo sapien
ggagaggtgagtttggaggcctggg

SEQ ID NO: 5386347 - DNA, 25 bp, Homo sapien
ccttcagaccccgatttccatctgc

SEQ ID NO: 5386348 - DNA, 25 bp, Homo sapien
gcccttcagaccccgatttccatct

SEQ ID NO: 5386349 - DNA, 25 bp, Homo sapien
tcagaccccgatttccatctgcacc

SEQ ID NO: 5386350 - DNA, 25 bp, Homo sapien
ttcagaccccgatttccatctgcac

SEQ ID NO: 5386351 - DNA, 25 bp, Homo sapien
cctggaggtcctgggtatcctagag

SEQ ID NO: 5386352 - DNA, 25 bp, Homo sapien
gaggtcctgggtatcctagagggcc

SEQ ID NO: 5386353 - DNA, 25 bp, Homo sapien
cttgacacctggaggtcctgggtat

SEQ ID NO: 5386354 - DNA, 25 bp, Homo sapien
gacacctggaggtcctgggtatcct

SEQ ID NO: 5386355 - DNA, 25 bp, Homo sapien
ttaagggtcccagggtgtcactgag

SEQ ID NO: 5386356 - DNA, 25 bp, Homo sapien
ctggaagaaaaaggcatttgttaag

SEQ ID NO: 5386357 - DNA, 25 bp, Homo sapien
gttaagggtcccagggtgtcactga

SEQ ID NO: 5386358 - DNA, 25 bp, Homo sapien
tgttaagggtcccagggtgtcactg

SEQ ID NO: 5386359 - DNA, 25 bp, Homo sapien
tgggccaagagtggccctgtcccac

SEQ ID NO: 5386360 - DNA, 25 bp, Homo sapien
tgcagcctgggccaagagtggccct

SEQ ID NO: 5386361 - DNA, 25 bp, Homo sapien
agcctgggccaagagtggccctgtc

SEQ ID NO: 5386362 - DNA, 25 bp, Homo sapien
ctgggccaagagtggccctgtccca

SEQ ID NO: 5386363 - DNA, 25 bp, Homo sapien
aacctggacagtgcgccttgtccaa

SEQ ID NO: 5386364 - DNA, 25 bp, Homo sapien
tgaaggagcatagaacatcctcact

SEQ ID NO: 5386365 - DNA, 25 bp, Homo sapien
gcggttgatgtccttgaaggagcat

SEQ ID NO: 5386366 - DNA, 25 bp, Homo sapien
gaacctggacagtgcgccttgtcca

SEQ ID NO: 5386367 - DNA, 25 bp, Homo sapien
gcccccgtgtccacagtgcacggcc

SEQ ID NO: 5386368 - DNA, 25 bp, Homo sapien
aagcccccgtgtccacagtgcacgg

SEQ ID NO: 5386369 - DNA, 25 bp, Homo sapien
gaagcccccgtgtccacagtgcacg

SEQ ID NO: 5386370 - DNA, 25 bp, Homo sapien
ccccgtgtccacagtgcacggccgg

SEQ ID NO: 5386371 - DNA, 25 bp, Homo sapien
caggtcatcatccttctgggcagcc

SEQ ID NO: 5386372 - DNA, 25 bp, Homo sapien
ccatgtggcccccatcgccatagcc

SEQ ID NO: 5386373 - DNA, 25 bp, Homo sapien
cccatcgccatagccccaggtgcca

SEQ ID NO: 5386374 - DNA, 25 bp, Homo sapien
gccatctccagagtgccttgcccag

SEQ ID NO: 5386375 - DNA, 25 bp, Homo sapien
gtgctgctgcgtggtcagcggcgcc

SEQ ID NO: 5386376 - DNA, 25 bp, Homo sapien
tcaggattccgagcagatgcgggcc

SEQ ID NO: 5386377 - DNA, 25 bp, Homo sapien
cagatgcgggccaggccggcttcca

SEQ ID NO: 5386378 - DNA, 25 bp, Homo sapien
gccaggggcactcggggcgtgggca

SEQ ID NO: 5386379 - DNA, 25 bp, Homo sapien
tccagggcgatctcaggcttccaca

SEQ ID NO: 5386380 - DNA, 25 bp, Homo sapien
agggcgatctcaggcttccacaggg

SEQ ID NO: 5386381 - DNA, 25 bp, Homo sapien
caggtcatgcttgcgtttctccagg

SEQ ID NO: 5386382 - DNA, 25 bp, Homo sapien
ggtcatgcttgcgtttctccagggc

SEQ ID NO: 5386383 - DNA, 25 bp, Homo sapien
gagcggactgtcagagcgtccagaa

SEQ ID NO: 5386384 - DNA, 25 bp, Homo sapien
gagagcggactgtcagagcgtccag

SEQ ID NO: 5386385 - DNA, 25 bp, Homo sapien
ctgagagcggactgtcagagcgtcc

SEQ ID NO: 5386386 - DNA, 25 bp, Homo sapien
cggactgtcagagcgtccagaaggc

SEQ ID NO: 5386387 - DNA, 25 bp, Homo sapien
cttgggcagcggctttagcttgtcc

SEQ ID NO: 5386388 - DNA, 25 bp, Homo sapien
tcttggttcccgtggatcccgttgc

SEQ ID NO: 5386389 - DNA, 25 bp, Homo sapien
tggatcccgttgctcaggcggcgca

SEQ ID NO: 5386390 - DNA, 25 bp, Homo sapien
cggctttagcttgtccaggcactgc

SEQ ID NO: 5386391 - DNA, 25 bp, Homo sapien
tcatgagtgagccgcgtttcattgc

SEQ ID NO: 5386392 - DNA, 25 bp, Homo sapien
cgtttcattgcattggtggctgctg

SEQ ID NO: 5386393 - DNA, 25 bp, Homo sapien
tgagtgagccgcgtttcattgcatt

SEQ ID NO: 5386394 - DNA, 25 bp, Homo sapien
catgagtgagccgcgtttcattgca

SEQ ID NO: 5386395 - DNA, 25 bp, Homo sapien
ccagtgaggaatataacagagtcca

SEQ ID NO: 5386396 - DNA, 25 bp, Homo sapien
tccaggatgtgatactgcagggaca

SEQ ID NO: 5386397 - DNA, 25 bp, Homo sapien
gaggaatataacagagtccaggatg

SEQ ID NO: 5386398 - DNA, 25 bp, Homo sapien
agtccaggatgtgatactgcaggga

SEQ ID NO: 5386399 - DNA, 25 bp, Homo sapien
ggcatgaggacattgggctcgtggt

SEQ ID NO: 5386400 - DNA, 25 bp, Homo sapien
gcatgaggacattgggctcgtggtg

SEQ ID NO: 5386401 - DNA, 25 bp, Homo sapien
ctttcctccttagaagcattatatt

SEQ ID NO: 5386402 - DNA, 25 bp, Homo sapien
tcaaaaatcccctctcatcacaaaa

SEQ ID NO: 5386403 - DNA, 25 bp, Homo sapien
caaaaatccttctgcagaccgtaaa

SEQ ID NO: 5386404 - DNA, 25 bp, Homo sapien
ttaaacattcattccactggctttc

SEQ ID NO: 5386405 - DNA, 25 bp, Homo sapien
cttcttgtcccgaattgttctctgc

SEQ ID NO: 5386406 - DNA, 25 bp, Homo sapien
ctacgtctggtgcaccctgctgttt

SEQ ID NO: 5386407 - DNA, 25 bp, Homo sapien
gtctggtgcaccctgctgttttctt

SEQ ID NO: 5386408 - DNA, 25 bp, Homo sapien
acgtctggtgcaccctgctgttttc

SEQ ID NO: 5386409 - DNA, 25 bp, Homo sapien
aataggcctgctagttaatctacca

SEQ ID NO: 5386410 - DNA, 25 bp, Homo sapien
tttaaaataggcctgctagttaatc

SEQ ID NO: 5386411 - DNA, 25 bp, Homo sapien
taaaataggcctgctagttaatcta

SEQ ID NO: 5386412 - DNA, 25 bp, Homo sapien
aaataggcctgctagttaatctacc

SEQ ID NO: 5386413 - DNA, 25 bp, Homo sapien
taagcatcaacaataggaggccagt

SEQ ID NO: 5386414 - DNA, 25 bp, Homo sapien
caggcctccattacctaagcatcaa

SEQ ID NO: 5386415 - DNA, 25 bp, Homo sapien
gaaatggctgcttgccttggtatgc

SEQ ID NO: 5386416 - DNA, 25 bp, Homo sapien
tctgtaaggcatagtagaaacttcc

SEQ ID NO: 5386417 - DNA, 25 bp, Homo sapien
gcagtggtctctagctgttaaaaca

SEQ ID NO: 5386418 - DNA, 25 bp, Homo sapien
gatcacaatagcttctaaaactgcc

SEQ ID NO: 5386419 - DNA, 25 bp, Homo sapien
taagaacgccctttcaggcaagcag

SEQ ID NO: 5386420 - DNA, 25 bp, Homo sapien
ggccatcagagaggtaatactaaac

SEQ ID NO: 5386421 - DNA, 25 bp, Homo sapien
tatggatgctgcaatatcaagagag

SEQ ID NO: 5386422 - DNA, 25 bp, Homo sapien
gagcatttgtaattgcactatacct

SEQ ID NO: 5386423 - DNA, 25 bp, Homo sapien
tatccctagtcagaaataaactgac

SEQ ID NO: 5386424 - DNA, 25 bp, Homo sapien
tgtttgtataaaagctccgactgat

SEQ ID NO: 5386425 - DNA, 25 bp, Homo sapien
tatctttgtgagtgcatgactgaga

SEQ ID NO: 5386426 - DNA, 25 bp, Homo sapien
ttatctttgtgagtgcatgactgag

SEQ ID NO: 5386427 - DNA, 25 bp, Homo sapien
atctttgtgagtgcatgactgagaa

SEQ ID NO: 5386428 - DNA, 25 bp, Homo sapien
caaactctgtggacacgctcacaca

SEQ ID NO: 5386429 - DNA, 25 bp, Homo sapien
cagtccctcttgtgtatcttcaata

SEQ ID NO: 5386430 - DNA, 25 bp, Homo sapien
cacagagtccaggacggcaataaat

SEQ ID NO: 5386431 - DNA, 25 bp, Homo sapien
tgggactgtacttcagcatcctctg

SEQ ID NO: 5386432 - DNA, 25 bp, Homo sapien
ctagaccagattgtaatccttcagg

SEQ ID NO: 5386433 - DNA, 25 bp, Homo sapien
tagaccagattgtaatccttcaggt

SEQ ID NO: 5386434 - DNA, 25 bp, Homo sapien
aggatggtgtccttgacggcagcaa

SEQ ID NO: 5386435 - DNA, 25 bp, Homo sapien
ggatggtgtccttgacggcagcaaa

SEQ ID NO: 5386436 - DNA, 25 bp, Homo sapien
acaaagcggatattctcggtgtctg

SEQ ID NO: 5386437 - DNA, 25 bp, Homo sapien
ggatattctcggtgtctgtggcgca

SEQ ID NO: 5386438 - DNA, 25 bp, Homo sapien
gggatacgtgataattgtactaaag

SEQ ID NO: 5386439 - DNA, 25 bp, Homo sapien
gaaccagggatacgtgataattgta

SEQ ID NO: 5386440 - DNA, 25 bp, Homo sapien
ccagggatacgtgataattgtacta

SEQ ID NO: 5386441 - DNA, 25 bp, Homo sapien
gatacgtgataattgtactaaagag

SEQ ID NO: 5386442 - DNA, 25 bp, Homo sapien
tgacactttgtaagtcaaaggggta

SEQ ID NO: 5386443 - DNA, 25 bp, Homo sapien
actctaagcacatcttgttgcgtag

SEQ ID NO: 5386444 - DNA, 25 bp, Homo sapien
tgtggtggggactcgaactctaagc

SEQ ID NO: 5386445 - DNA, 25 bp, Homo sapien
gggactcgaactctaagcacatctt

SEQ ID NO: 5386446 - DNA, 25 bp, Homo sapien
cgtcgtctatcatagcattcctgga

SEQ ID NO: 5386447 - DNA, 25 bp, Homo sapien
gagtcagataattgatattctcgtc

SEQ ID NO: 5386448 - DNA, 25 bp, Homo sapien
actctttattgcatctacatatgga

SEQ ID NO: 5386449 - DNA, 25 bp, Homo sapien
caggatcattccataaactctttat

SEQ ID NO: 5386450 - DNA, 25 bp, Homo sapien
cttgagtgagtctatggctctgatc

SEQ ID NO: 5386451 - DNA, 25 bp, Homo sapien
ctatggctctgatcatggcctgcat

SEQ ID NO: 5386452 - DNA, 25 bp, Homo sapien
tgagtctatggctctgatcatggcc

SEQ ID NO: 5386453 - DNA, 25 bp, Homo sapien
ttgtatgggatcttgagtgagtcta

SEQ ID NO: 5386454 - DNA, 25 bp, Homo sapien
tatcctgacccatggatgattctca

SEQ ID NO: 5386455 - DNA, 25 bp, Homo sapien
cagagtatcctgacccatggatgat

SEQ ID NO: 5386456 - DNA, 25 bp, Homo sapien
cttcatcagagtatcctgacccatg

SEQ ID NO: 5386457 - DNA, 25 bp, Homo sapien
catcagagtatcctgacccatggat

SEQ ID NO: 5386458 - DNA, 25 bp, Homo sapien
tcccgcttgtccctgcggagctgcc

SEQ ID NO: 5386459 - DNA, 25 bp, Homo sapien
gccgctcgatctcgtcgttgatccg

SEQ ID NO: 5386460 - DNA, 25 bp, Homo sapien
atctcgtcgttgatccgccgggctt

SEQ ID NO: 5386461 - DNA, 25 bp, Homo sapien
agctgccgctcgatctcgtcgttga

SEQ ID NO: 5386462 - DNA, 25 bp, Homo sapien
atcgcgcacacacgccttcccgcca

SEQ ID NO: 5386463 - DNA, 25 bp, Homo sapien
gcacacacgccttcccgccatcgct

SEQ ID NO: 5386464 - DNA, 25 bp, Homo sapien
ctgctcacatcgcgcacacacgcct

SEQ ID NO: 5386465 - DNA, 25 bp, Homo sapien
gctcacatcgcgcacacacgccttc

SEQ ID NO: 5386466 - DNA, 25 bp, Homo sapien
tgtggcatggtccacgttcaggaga

SEQ ID NO: 5386467 - DNA, 25 bp, Homo sapien
actcaacaaagatggcagtggtgtg

SEQ ID NO: 5386468 - DNA, 25 bp, Homo sapien
gcagtggtgtggcatggtccacgtt

SEQ ID NO: 5386469 - DNA, 25 bp, Homo sapien
ctcaacaaagatggcagtggtgtgg

SEQ ID NO: 5386470 - DNA, 25 bp, Homo sapien
tggagctgacttcaacagccatgcc

SEQ ID NO: 5386471 - DNA, 25 bp, Homo sapien
ctcagtaggtttggccgttcatgct

SEQ ID NO: 5386472 - DNA, 25 bp, Homo sapien
cgtggagctgacttcaacagccatg

SEQ ID NO: 5386473 - DNA, 25 bp, Homo sapien
cccgtggagctgacttcaacagcca

SEQ ID NO: 5386474 - DNA, 25 bp, Homo sapien
gagctgtagatcctccagctcatcc

SEQ ID NO: 5386475 - DNA, 25 bp, Homo sapien
ctgagagctgtagatcctccagctc

SEQ ID NO: 5386476 - DNA, 25 bp, Homo sapien
cctctgagagctgtagatcctccag

SEQ ID NO: 5386477 - DNA, 25 bp, Homo sapien
agagctgtagatcctccagctcatc

SEQ ID NO: 5386478 - DNA, 25 bp, Homo sapien
tgggtctccatcctccgagttgctg

SEQ ID NO: 5386479 - DNA, 25 bp, Homo sapien
ctgggtctccatcctccgagttgct

SEQ ID NO: 5386480 - DNA, 25 bp, Homo sapien
cctcctcctcgtcctctttatcctc

SEQ ID NO: 5386481 - DNA, 25 bp, Homo sapien
tcctcctcgtcctctttatcctctt

SEQ ID NO: 5386482 - DNA, 25 bp, Homo sapien
tcctcgtcctctttatcctcttcca

SEQ ID NO: 5386483 - DNA, 25 bp, Homo sapien
ctcgtcctctttatcctcttccacc

SEQ ID NO: 5386484 - DNA, 25 bp, Homo sapien
aagaggtctttaaattgcttcctgt

SEQ ID NO: 5386485 - DNA, 25 bp, Homo sapien
aaagaggtctttaaattgcttcctg

SEQ ID NO: 5386486 - DNA, 25 bp, Homo sapien
ccagtggctgtagtacaaggtcagg

SEQ ID NO: 5386487 - DNA, 25 bp, Homo sapien
cagctccgggaagccgatgcagtgt

SEQ ID NO: 5386488 - DNA, 25 bp, Homo sapien
tactccagggtgaggtcgtacagct

SEQ ID NO: 5386489 - DNA, 25 bp, Homo sapien
agggcacggatgcagtgcattcgca

SEQ ID NO: 5386490 - DNA, 25 bp, Homo sapien
agagcagcgtcagggcacggatgca

SEQ ID NO: 5386491 - DNA, 25 bp, Homo sapien
tacacagacgtttccttcttgcggg

SEQ ID NO: 5386492 - DNA, 25 bp, Homo sapien
cagacgtttccttcttgcgggtggt

SEQ ID NO: 5386493 - DNA, 25 bp, Homo sapien
cgtttccttcttgcgggtggtcatg

SEQ ID NO: 5386494 - DNA, 25 bp, Homo sapien
cagttgtacacagacgtttccttct

SEQ ID NO: 5386495 - DNA, 25 bp, Homo sapien
gtgtccttcttgtgccggcagactc

SEQ ID NO: 5386496 - DNA, 25 bp, Homo sapien
ccaggcgaggtgaacttgcagttcc

SEQ ID NO: 5386497 - DNA, 25 bp, Homo sapien
gcaccaggcgaggtgaacttgcagt

SEQ ID NO: 5386498 - DNA, 25 bp, Homo sapien
gccaaggaaagtgtccttcttgtgc

SEQ ID NO: 5386499 - DNA, 25 bp, Homo sapien
tcttaagcagcatacggcactgctt

SEQ ID NO: 5386500 - DNA, 25 bp, Homo sapien
ctcttaagcagcatacggcactgct

SEQ ID NO: 5386501 - DNA, 25 bp, Homo sapien
tctcttaagcagcatacggcactgc

SEQ ID NO: 5386502 - DNA, 25 bp, Homo sapien
gaatttgttggcctcagcactttcc

SEQ ID NO: 5386503 - DNA, 25 bp, Homo sapien
tggaatttgttggcctcagcacttt

SEQ ID NO: 5386504 - DNA, 25 bp, Homo sapien
ggaatttgttggcctcagcactttc

SEQ ID NO: 5386505 - DNA, 25 bp, Homo sapien
ctggaatttgttggcctcagcactt

SEQ ID NO: 5386506 - DNA, 25 bp, Homo sapien
aggtgttgctttgctgcctgcttcc

SEQ ID NO: 5386507 - DNA, 25 bp, Homo sapien
gttgctttgctgcctgcttccatct

SEQ ID NO: 5386508 - DNA, 25 bp, Homo sapien
ctttggagtgaggtgttgctttgct

SEQ ID NO: 5386509 - DNA, 25 bp, Homo sapien
ggtgttgctttgctgcctgcttcca

SEQ ID NO: 5386510 - DNA, 25 bp, Homo sapien
gggtcacaggaacacaattcttccc

SEQ ID NO: 5386511 - DNA, 25 bp, Homo sapien
ggcgagggtcacaggaacacaattc

SEQ ID NO: 5386512 - DNA, 25 bp, Homo sapien
cccttcagccctctggggactctgt

SEQ ID NO: 5386513 - DNA, 25 bp, Homo sapien
tcacaggaacacaattcttcccctt

SEQ ID NO: 5386514 - DNA, 25 bp, Homo sapien
gggagttgaacggctcctcttcctc

SEQ ID NO: 5386515 - DNA, 25 bp, Homo sapien
ctggcagggagttgaacggctcctc

SEQ ID NO: 5386516 - DNA, 25 bp, Homo sapien
tggcagggagttgaacggctcctct

SEQ ID NO: 5386517 - DNA, 25 bp, Homo sapien
cagggagttgaacggctcctcttcc

SEQ ID NO: 5386518 - DNA, 25 bp, Homo sapien
gtctctgtccttcagccgagagagc

SEQ ID NO: 5386519 - DNA, 25 bp, Homo sapien
tctctgtccttcagccgagagagct

SEQ ID NO: 5386520 - DNA, 25 bp, Homo sapien
ctctgtccttcagccgagagagctg

SEQ ID NO: 5386521 - DNA, 25 bp, Homo sapien
agtattcggacttagagtcaaagcc

SEQ ID NO: 5386522 - DNA, 25 bp, Homo sapien
cccgcgtctccgcttctggagagta

SEQ ID NO: 5386523 - DNA, 25 bp, Homo sapien
cttctggagagtattcggacttaga

SEQ ID NO: 5386524 - DNA, 25 bp, Homo sapien
gtgcctcccgcgtctccgcttctgg

SEQ ID NO: 5386525 - DNA, 25 bp, Homo sapien
gtccaccgtcagctccgccaggcgc

SEQ ID NO: 5386526 - DNA, 25 bp, Homo sapien
cgtccaccgtcagctccgccaggcg

SEQ ID NO: 5386527 - DNA, 25 bp, Homo sapien
tcgtccaccgtcagctccgccaggc

SEQ ID NO: 5386528 - DNA, 25 bp, Homo sapien
ctcctgcggcgccgcgctcctgcca

SEQ ID NO: 5386529 - DNA, 25 bp, Homo sapien
tcctgcggcgccgcgctcctgccat

SEQ ID NO: 5386530 - DNA, 25 bp, Homo sapien
cttccagcttcagtgcttgtgtttc

SEQ ID NO: 5386531 - DNA, 25 bp, Homo sapien
aaatgaaaacaatcacgaaggcagg

SEQ ID NO: 5386532 - DNA, 25 bp, Homo sapien
aatgaaaacaatcacgaaggcaggg

SEQ ID NO: 5386533 - DNA, 25 bp, Homo sapien
aaaatgaaaacaatcacgaaggcag

SEQ ID NO: 5386534 - DNA, 25 bp, Homo sapien
gatttgtgaaaacaagtacttctga

SEQ ID NO: 5386535 - DNA, 25 bp, Homo sapien
ttagatcttccccaaaggacttgta

SEQ ID NO: 5386536 - DNA, 25 bp, Homo sapien
ggacttgtaagagagcaagacctta

SEQ ID NO: 5386537 - DNA, 25 bp, Homo sapien
aaagtttcagaaatacaccgcaggg

SEQ ID NO: 5386538 - DNA, 25 bp, Homo sapien
tacaggcaagccaccgtagtcggct

SEQ ID NO: 5386539 - DNA, 25 bp, Homo sapien
aactgcttgagaacaaatcccaggc

SEQ ID NO: 5386540 - DNA, 25 bp, Homo sapien
aagagccctgaacttgagcatgtac

SEQ ID NO: 5386541 - DNA, 25 bp, Homo sapien
aacgtatcactgcatccgatgtgga

SEQ ID NO: 5386542 - DNA, 25 bp, Homo sapien
ggtcatacaaaagtccagtcaatac

SEQ ID NO: 5386543 - DNA, 25 bp, Homo sapien
cagtcaataccatcgctgaaatatc

SEQ ID NO: 5386544 - DNA, 25 bp, Homo sapien
cagatctcctgccacatcatgtcag

SEQ ID NO: 5386545 - DNA, 25 bp, Homo sapien
gcatctggctaaacagcatcctctt

SEQ ID NO: 5386546 - DNA, 25 bp, Homo sapien
ggcttgggatttcaatgtctctgaa

SEQ ID NO: 5386547 - DNA, 25 bp, Homo sapien
tggcttgggatttcaatgtctctga

SEQ ID NO: 5386548 - DNA, 25 bp, Homo sapien
gcatgtcctccttctcctgccacac

SEQ ID NO: 5386549 - DNA, 25 bp, Homo sapien
tgcatgtcctccttctcctgccaca

SEQ ID NO: 5386550 - DNA, 25 bp, Homo sapien
tgtcctccttctcctgccacaccat

SEQ ID NO: 5386551 - DNA, 25 bp, Homo sapien
cttgtgcatgtcctccttctcctgc

SEQ ID NO: 5386552 - DNA, 25 bp, Homo sapien
ccccgtagctgctgtgtgaaatctt

SEQ ID NO: 5386553 - DNA, 25 bp, Homo sapien
ccgtagctgctgtgtgaaatcttgt

SEQ ID NO: 5386554 - DNA, 25 bp, Homo sapien
cccccgtagctgctgtgtgaaatct

SEQ ID NO: 5386555 - DNA, 25 bp, Homo sapien
cccgtagctgctgtgtgaaatcttg

SEQ ID NO: 5386556 - DNA, 25 bp, Homo sapien
tgatcaggacataatcaaaaactgc

SEQ ID NO: 5386557 - DNA, 25 bp, Homo sapien
gactaccttatcctttgatcaggac

SEQ ID NO: 5386558 - DNA, 25 bp, Homo sapien
gaattactgtgacgggctataatgt

SEQ ID NO: 5386559 - DNA, 25 bp, Homo sapien
tcttcagagaattactgtgacgggc

SEQ ID NO: 5386560 - DNA, 25 bp, Homo sapien
gactgcccaggttgtaagagtttct

SEQ ID NO: 5386561 - DNA, 25 bp, Homo sapien
tcactgggaactggttgtgctgaca

SEQ ID NO: 5386562 - DNA, 25 bp, Homo sapien
tatgtacctgcgtaggagtgccaga

SEQ ID NO: 5386563 - DNA, 25 bp, Homo sapien
tgcagaagtcacactgacctggtga

SEQ ID NO: 5386564 - DNA, 25 bp, Homo sapien
gaggtaacatgtagcctttgctggg

SEQ ID NO: 5386565 - DNA, 25 bp, Homo sapien
tgaaggaggtaacatgtagcctttg

SEQ ID NO: 5386566 - DNA, 25 bp, Homo sapien
aggaggtaacatgtagcctttgctg

SEQ ID NO: 5386567 - DNA, 25 bp, Homo sapien
gaaggaggtaacatgtagcctttgc

SEQ ID NO: 5386568 - DNA, 25 bp, Homo sapien
gatccctcgtggttgctgcgttccg

SEQ ID NO: 5386569 - DNA, 25 bp, Homo sapien
gctggatccctcgtggttgctgcgt

SEQ ID NO: 5386570 - DNA, 25 bp, Homo sapien
tggatccctcgtggttgctgcgttc

SEQ ID NO: 5386571 - DNA, 25 bp, Homo sapien
atccctcgtggttgctgcgttccgc

SEQ ID NO: 5386572 - DNA, 25 bp, Homo sapien
attaggaatggacgcgccccataaa

SEQ ID NO: 5386573 - DNA, 25 bp, Homo sapien
tgattaggaatggacgcgccccata

SEQ ID NO: 5386574 - DNA, 25 bp, Homo sapien
gaatggacgcgccccataaatgcag

SEQ ID NO: 5386575 - DNA, 25 bp, Homo sapien
tggacgcgccccataaatgcagcac

SEQ ID NO: 5386576 - DNA, 25 bp, Homo sapien
gtgagggttacagcggtgtcatgct

SEQ ID NO: 5386577 - DNA, 25 bp, Homo sapien
tggagtcagggttgccctgagccaa

SEQ ID NO: 5386578 - DNA, 25 bp, Homo sapien
tgggtgatgattggccacctcagcc

SEQ ID NO: 5386579 - DNA, 25 bp, Homo sapien
tggtggtgagggttacagcggtgtc

SEQ ID NO: 5386580 - DNA, 25 bp, Homo sapien
tgcagtggggaaaccagctttgctt

SEQ ID NO: 5386581 - DNA, 25 bp, Homo sapien
ccagaatagaatggcctgcagtgcc

SEQ ID NO: 5386582 - DNA, 25 bp, Homo sapien
tcctcactttatgaaggatgagaag

SEQ ID NO: 5386583 - DNA, 25 bp, Homo sapien
cagacgggctagacagtgggattga

SEQ ID NO: 5386584 - DNA, 25 bp, Homo sapien
tgcacaattagctcaaatactttaa

SEQ ID NO: 5386585 - DNA, 25 bp, Homo sapien
cataagatgttgcattcacctttgt

SEQ ID NO: 5386586 - DNA, 25 bp, Homo sapien
taattaatctaaaatatccaacgta

SEQ ID NO: 5386587 - DNA, 25 bp, Homo sapien
taaaatatccaacgtattatttcaa

SEQ ID NO: 5386588 - DNA, 25 bp, Homo sapien
cccctggagaggggctctttacact

SEQ ID NO: 5386589 - DNA, 25 bp, Homo sapien
cctggagaggggctctttacactca

SEQ ID NO: 5386590 - DNA, 25 bp, Homo sapien
ctggagaggggctctttacactcac

SEQ ID NO: 5386591 - DNA, 25 bp, Homo sapien
ccctggagaggggctctttacactc

SEQ ID NO: 5386592 - DNA, 25 bp, Homo sapien
gtctctaataaaccgagtcagaaat

SEQ ID NO: 5386593 - DNA, 25 bp, Homo sapien
gatgccagcccgactgtggggtcta

SEQ ID NO: 5386594 - DNA, 25 bp, Homo sapien
atgtctctaataaaccgagtcagaa

SEQ ID NO: 5386595 - DNA, 25 bp, Homo sapien
gactgtggggtctagagactgccac

SEQ ID NO: 5386596 - DNA, 25 bp, Homo sapien
gaagagcaccaacccccagagataa

SEQ ID NO: 5386597 - DNA, 25 bp, Homo sapien
gccatgcagtttccatgaaaacaag

SEQ ID NO: 5386598 - DNA, 25 bp, Homo sapien
cttggggccatgcagtttccatgaa

SEQ ID NO: 5386599 - DNA, 25 bp, Homo sapien
ccagagataagccaataaacgcaac

SEQ ID NO: 5386600 - DNA, 25 bp, Homo sapien
ctgggctgtggagcataaccagaga

SEQ ID NO: 5386601 - DNA, 25 bp, Homo sapien
agctgggctgtggagcataaccaga

SEQ ID NO: 5386602 - DNA, 25 bp, Homo sapien
gctgggctgtggagcataaccagag

SEQ ID NO: 5386603 - DNA, 25 bp, Homo sapien
ctcctaaggctggcagcgaagccca

SEQ ID NO: 5386604 - DNA, 25 bp, Homo sapien
cctaaggctggcagcgaagcccagg

SEQ ID NO: 5386605 - DNA, 25 bp, Homo sapien
cagagcccacggatgggccctgcag

SEQ ID NO: 5386606 - DNA, 25 bp, Homo sapien
tgcctcctaaggctggcagcgaagc

SEQ ID NO: 5386607 - DNA, 25 bp, Homo sapien
gtctcgggcacgctcgacgtgggca

SEQ ID NO: 5386608 - DNA, 25 bp, Homo sapien
gggtctcgggcacgctcgacgtggg

SEQ ID NO: 5386609 - DNA, 25 bp, Homo sapien
ctcgggcacgctcgacgtgggcaga

SEQ ID NO: 5386610 - DNA, 25 bp, Homo sapien
cgggtctcgggcacgctcgacgtgg

SEQ ID NO: 5386611 - DNA, 25 bp, Homo sapien
agacggcgaggggggccacgttcag

SEQ ID NO: 5386612 - DNA, 25 bp, Homo sapien
gacggcgaggggggccacgttcagc

SEQ ID NO: 5386613 - DNA, 25 bp, Homo sapien
gggccgggcgtacccggagagcaga

SEQ ID NO: 5386614 - DNA, 25 bp, Homo sapien
ctcctcccgaccagcgggccgggcg

SEQ ID NO: 5386615 - DNA, 25 bp, Homo sapien
cctccctgaagaccggacaaggacg

SEQ ID NO: 5386616 - DNA, 25 bp, Homo sapien
gtgtctggcgagcatgcggccccca

SEQ ID NO: 5386617 - DNA, 25 bp, Homo sapien
gcccgccgcctgagccagctcgtac

SEQ ID NO: 5386618 - DNA, 25 bp, Homo sapien
ttgaacacgtcggggtcgataccgc

SEQ ID NO: 5386619 - DNA, 25 bp, Homo sapien
ccgcctgagccagctcgtacagctc

SEQ ID NO: 5386620 - DNA, 25 bp, Homo sapien
tgaacacgtcggggtcgataccgcc

SEQ ID NO: 5386621 - DNA, 25 bp, Homo sapien
gcaccttcttgcgccgcagcgccag

SEQ ID NO: 5386622 - DNA, 25 bp, Homo sapien
ctcctcggtgctcagcaccttcttg

SEQ ID NO: 5386623 - DNA, 25 bp, Homo sapien
ctcagcaccttcttgcgccgcagcg

SEQ ID NO: 5386624 - DNA, 25 bp, Homo sapien
cagcaccttcttgcgccgcagcgcc

SEQ ID NO: 5386625 - DNA, 25 bp, Homo sapien
agctgcttggcggtcagggcgtccc

SEQ ID NO: 5386626 - DNA, 25 bp, Homo sapien
cgcgctaggcgtcgggagtggcatg

SEQ ID NO: 5386627 - DNA, 25 bp, Homo sapien
atccgcgaggcccgccgaaaggtgc

SEQ ID NO: 5386628 - DNA, 25 bp, Homo sapien
gggcgtccctgatagacttgcattg

SEQ ID NO: 5386629 - DNA, 25 bp, Homo sapien
cagcttgatgacgacgttttggcgc

SEQ ID NO: 5386630 - DNA, 25 bp, Homo sapien
ttccacctctgaagcgggcgacgct

SEQ ID NO: 5386631 - DNA, 25 bp, Homo sapien
aagcgggcgacgctatgggtcccac

SEQ ID NO: 5386632 - DNA, 25 bp, Homo sapien
gggacgcgcgcgtgagacggtccga

SEQ ID NO: 5386633 - DNA, 25 bp, Homo sapien
tctgaaaactccagggaagaagctg

SEQ ID NO: 5386634 - DNA, 25 bp, Homo sapien
atccagttccttggagttgtagaac

SEQ ID NO: 5386635 - DNA, 25 bp, Homo sapien
aaaactccagggaagaagctgcttc

SEQ ID NO: 5386636 - DNA, 25 bp, Homo sapien
ctggggactactctgtaacttaagg

SEQ ID NO: 5386637 - DNA, 25 bp, Homo sapien
cctcactggctatcaggcgtcgcgt

SEQ ID NO: 5386638 - DNA, 25 bp, Homo sapien
ctggagctgcgttccaaacacatga

SEQ ID NO: 5386639 - DNA, 25 bp, Homo sapien
gtatcgccttacctgttgaaactga

SEQ ID NO: 5386640 - DNA, 25 bp, Homo sapien
cagcccagtcttgcgcatcctggga

SEQ ID NO: 5386641 - DNA, 25 bp, Homo sapien
gttggcattaatctcagcctcttcc

SEQ ID NO: 5386642 - DNA, 25 bp, Homo sapien
ttcgttggcattaatctcagcctct

SEQ ID NO: 5386643 - DNA, 25 bp, Homo sapien
cacttcgttggcattaatctcagcc

SEQ ID NO: 5386644 - DNA, 25 bp, Homo sapien
ccacttcgttggcattaatctcagc

SEQ ID NO: 5386645 - DNA, 25 bp, Homo sapien
aatgggacagtgtgtcagaaaggac

SEQ ID NO: 5386646 - DNA, 25 bp, Homo sapien
gacagtgtgtcagaaaggacagccc

SEQ ID NO: 5386647 - DNA, 25 bp, Homo sapien
ctggggatgaaccaggccaaggaat

SEQ ID NO: 5386648 - DNA, 25 bp, Homo sapien
caggccaaggaatgggacagtgtgt

SEQ ID NO: 5386649 - DNA, 25 bp, Homo sapien
cccagtttcatggagtgggggacac

SEQ ID NO: 5386650 - DNA, 25 bp, Homo sapien
gcccagtttcatggagtgggggaca

SEQ ID NO: 5386651 - DNA, 25 bp, Homo sapien
gggacacggccctcacacgagtgac

SEQ ID NO: 5386652 - DNA, 25 bp, Homo sapien
cggccctcacacgagtgacacaggg

SEQ ID NO: 5386653 - DNA, 25 bp, Homo sapien
cgtagtgttctgaggacgcgggtcc

SEQ ID NO: 5386654 - DNA, 25 bp, Homo sapien
agtgttctgaggacgcgggtccaga

SEQ ID NO: 5386655 - DNA, 25 bp, Homo sapien
aggccacggcgagcagcccgctcca

SEQ ID NO: 5386656 - DNA, 25 bp, Homo sapien
gaccctggacaggccacggcgagca

SEQ ID NO: 5386657 - DNA, 25 bp, Homo sapien
ccctggacaggccacggcgagcagc

SEQ ID NO: 5386658 - DNA, 25 bp, Homo sapien
acaggccacggcgagcagcccgctc

SEQ ID NO: 5386659 - DNA, 25 bp, Homo sapien
gtaaccgagtgcttttccaggctgt

SEQ ID NO: 5386660 - DNA, 25 bp, Homo sapien
aggtggtaaccgagtgcttttccag

SEQ ID NO: 5386661 - DNA, 25 bp, Homo sapien
acgcagtggtgcaccgacctgagga

SEQ ID NO: 5386662 - DNA, 25 bp, Homo sapien
tcctggctaagcagccgagaggcag

SEQ ID NO: 5386663 - DNA, 25 bp, Homo sapien
gcctgccggcacgtgaacacaggat

SEQ ID NO: 5386664 - DNA, 25 bp, Homo sapien
tgacctgcatcgatgggtgcccaga

SEQ ID NO: 5386665 - DNA, 25 bp, Homo sapien
ggcccagtgtatgtgaagacagagc

SEQ ID NO: 5386666 - DNA, 25 bp, Homo sapien
cggatttccaaacctgaagccagag

SEQ ID NO: 5386667 - DNA, 25 bp, Homo sapien
gctgctcatcgtcctcaagcctgtg

SEQ ID NO: 5386668 - DNA, 25 bp, Homo sapien
gacggtgccattgttgctgcagtga

SEQ ID NO: 5386669 - DNA, 25 bp, Homo sapien
caagcctgtgcttccgggtgcatac

SEQ ID NO: 5386670 - DNA, 25 bp, Homo sapien
aggtttatcatgcacttgggctcca

SEQ ID NO: 5386671 - DNA, 25 bp, Homo sapien
gggccaggcagccaccctccgcgaa

SEQ ID NO: 5386672 - DNA, 25 bp, Homo sapien
caggcagccaccctccgcgaagccc

SEQ ID NO: 5386673 - DNA, 25 bp, Homo sapien
gccaggcagccaccctccgcgaagc

SEQ ID NO: 5386674 - DNA, 25 bp, Homo sapien
ggccaggcagccaccctccgcgaag

SEQ ID NO: 5386675 - DNA, 25 bp, Homo sapien
gcaggatgggcacggtcagcagcat

SEQ ID NO: 5386676 - DNA, 25 bp, Homo sapien
ggtactgctgttgggtcggtggcac

SEQ ID NO: 5386677 - DNA, 25 bp, Homo sapien
aggagcagctggcataggtactgct

SEQ ID NO: 5386678 - DNA, 25 bp, Homo sapien
ttgaagagggtgagcggatgttggc

SEQ ID NO: 5386679 - DNA, 25 bp, Homo sapien
aggcgaaccacagtggagcggctcc

SEQ ID NO: 5386680 - DNA, 25 bp, Homo sapien
ttgcagcgaggcgaaccacagtgga

SEQ ID NO: 5386681 - DNA, 25 bp, Homo sapien
cgaggcgaaccacagtggagcggct

SEQ ID NO: 5386682 - DNA, 25 bp, Homo sapien
accagttgcagcgaggcgaaccaca

SEQ ID NO: 5386683 - DNA, 25 bp, Homo sapien
gtggcattttgactttggatgtatc

SEQ ID NO: 5386684 - DNA, 25 bp, Homo sapien
ctggacacagcggtctgcaccttga

SEQ ID NO: 5386685 - DNA, 25 bp, Homo sapien
tcatgccggcctggacacagcggtc

SEQ ID NO: 5386686 - DNA, 25 bp, Homo sapien
ctgatggcctcatgttctgttctgg

SEQ ID NO: 5386687 - DNA, 25 bp, Homo sapien
accctattgcatgccagtggagcag

SEQ ID NO: 5386688 - DNA, 25 bp, Homo sapien
caagacttaagcacgtgggttgcac

SEQ ID NO: 5386689 - DNA, 25 bp, Homo sapien
cccacaaagtttgccgggaacacag

SEQ ID NO: 5386690 - DNA, 25 bp, Homo sapien
gggttgcacgcatcggccagtgtct

SEQ ID NO: 5386691 - DNA, 25 bp, Homo sapien
gcataaccgtcagactggcctgtaa

SEQ ID NO: 5386692 - DNA, 25 bp, Homo sapien
aatttagcacttgataatggtgatg

SEQ ID NO: 5386693 - DNA, 25 bp, Homo sapien
aaaaagatggattgttcataattca

SEQ ID NO: 5386694 - DNA, 25 bp, Homo sapien
ttggagaaaactagctagattttta

SEQ ID NO: 5386695 - DNA, 25 bp, Homo sapien
cacaaattgtttactaacagctgaa

SEQ ID NO: 5386696 - DNA, 25 bp, Homo sapien
gcaaggccacgctggctgaaggagc

SEQ ID NO: 5386697 - DNA, 25 bp, Homo sapien
ccaggcaaggccacgctggctgaag

SEQ ID NO: 5386698 - DNA, 25 bp, Homo sapien
caagggtgcgcctggaggaggtgga

SEQ ID NO: 5386699 - DNA, 25 bp, Homo sapien
acctctgcaagggtgcgcctggagg

SEQ ID NO: 5386700 - DNA, 25 bp, Homo sapien
ctcacgcagtcaaggaagtggatgg

SEQ ID NO: 5386701 - DNA, 25 bp, Homo sapien
gtggatggccaggttcccacagccc

SEQ ID NO: 5386702 - DNA, 25 bp, Homo sapien
cacgcagtcaaggaagtggatggcc

SEQ ID NO: 5386703 - DNA, 25 bp, Homo sapien
agcccacgtggctgccacctgatgg

SEQ ID NO: 5386704 - DNA, 25 bp, Homo sapien
tccaccagcttctcgcacacccttg

SEQ ID NO: 5386705 - DNA, 25 bp, Homo sapien
tctttgagccctgttagccttgccc

SEQ ID NO: 5386706 - DNA, 25 bp, Homo sapien
ccatgtcctgtagcgagtgagattg

SEQ ID NO: 5386707 - DNA, 25 bp, Homo sapien
tgttccatgtcctgtagcgagtgag

SEQ ID NO: 5386708 - DNA, 25 bp, Homo sapien
caccagcggtttatgggcggatggc

SEQ ID NO: 5386709 - DNA, 25 bp, Homo sapien
gtgtcaggcagcttgacgtcgttgc

SEQ ID NO: 5386710 - DNA, 25 bp, Homo sapien
ttatgggcggatggcgtccctgcgg

SEQ ID NO: 5386711 - DNA, 25 bp, Homo sapien
tgtcaggcagcttgacgtcgttgct

SEQ ID NO: 5386712 - DNA, 25 bp, Homo sapien
ccatcacgccaaagactttccgaaa

SEQ ID NO: 5386713 - DNA, 25 bp, Homo sapien
gggaggccaatccgcgggtgccgtg

SEQ ID NO: 5386714 - DNA, 25 bp, Homo sapien
tggaggtacctgagccgggcgtggg

SEQ ID NO: 5386715 - DNA, 25 bp, Homo sapien
cgctggaggtacctgagccgggcgt

SEQ ID NO: 5386716 - DNA, 25 bp, Homo sapien
cgggtgccgtgcgcccggtgccggt

SEQ ID NO: 5386717 - DNA, 25 bp, Homo sapien
aggggctcctccatctccaccgtgt

SEQ ID NO: 5386718 - DNA, 25 bp, Homo sapien
ctgcggacgcccaggggctcctcca

SEQ ID NO: 5386719 - DNA, 25 bp, Homo sapien
gctcctccatctccaccgtgttctc

SEQ ID NO: 5386720 - DNA, 25 bp, Homo sapien
gggctcctccatctccaccgtgttc

SEQ ID NO: 5386721 - DNA, 25 bp, Homo sapien
cgggctgaagcccaaagtcccacat

SEQ ID NO: 5386722 - DNA, 25 bp, Homo sapien
tcgggctgaagcccaaagtcccaca

SEQ ID NO: 5386723 - DNA, 25 bp, Homo sapien
ctcgggctgaagcccaaagtcccac

SEQ ID NO: 5386724 - DNA, 25 bp, Homo sapien
gcagtaaggctggatcctcccgtgc

SEQ ID NO: 5386725 - DNA, 25 bp, Homo sapien
aaggctggatcctcccgtgccataa

SEQ ID NO: 5386726 - DNA, 25 bp, Homo sapien
cagagcgcagtaaggctggatcctc

SEQ ID NO: 5386727 - DNA, 25 bp, Homo sapien
gagtccagagcgcagtaaggctgga

SEQ ID NO: 5386728 - DNA, 25 bp, Homo sapien
tgatagtctagtgcctgagtccgca

SEQ ID NO: 5386729 - DNA, 25 bp, Homo sapien
tgtgatagtctagtgcctgagtccg

SEQ ID NO: 5386730 - DNA, 25 bp, Homo sapien
gtgatagtctagtgcctgagtccgc

SEQ ID NO: 5386731 - DNA, 25 bp, Homo sapien
ggacctctgaggagtctggttcctg

SEQ ID NO: 5386732 - DNA, 25 bp, Homo sapien
aggacctctgaggagtctggttcct

SEQ ID NO: 5386733 - DNA, 25 bp, Homo sapien
tgttctgctatgctgtagtgcagga

SEQ ID NO: 5386734 - DNA, 25 bp, Homo sapien
ggctgttctgctatgctgtagtgca

SEQ ID NO: 5386735 - DNA, 25 bp, Homo sapien
gacggctgttctgctatgctgtagt

SEQ ID NO: 5386736 - DNA, 25 bp, Homo sapien
cggctgttctgctatgctgtagtgc

SEQ ID NO: 5386737 - DNA, 25 bp, Homo sapien
cacggcaaggtgtggatcctctgtg

SEQ ID NO: 5386738 - DNA, 25 bp, Homo sapien
atcggggtccctccgtgctgtagtc

SEQ ID NO: 5386739 - DNA, 25 bp, Homo sapien
tcttggtctagggcccagcgggact

SEQ ID NO: 5386740 - DNA, 25 bp, Homo sapien
cgagtcctccagtggcggagtccag

SEQ ID NO: 5386741 - DNA, 25 bp, Homo sapien
ttaagagctaaatgttttttcatgg

SEQ ID NO: 5386742 - DNA, 25 bp, Homo sapien
aagagctaaatgttttttcatggtc

SEQ ID NO: 5386743 - DNA, 25 bp, Homo sapien
agagctaaatgttttttcatggtca

SEQ ID NO: 5386744 - DNA, 25 bp, Homo sapien
gagctaaatgttttttcatggtcac

SEQ ID NO: 5386745 - DNA, 25 bp, Homo sapien
ttttcttaccaggtaagaggcatag

SEQ ID NO: 5386746 - DNA, 25 bp, Homo sapien
gggaaagtcttgacatataccagga

SEQ ID NO: 5386747 - DNA, 25 bp, Homo sapien
ggaaagtcttgacatataccaggat

SEQ ID NO: 5386748 - DNA, 25 bp, Homo sapien
gaaagtcttgacatataccaggatt

SEQ ID NO: 5386749 - DNA, 25 bp, Homo sapien
agttaccagcccttccttgatgacc

SEQ ID NO: 5386750 - DNA, 25 bp, Homo sapien
ctgtggttgaaagttaccagccctt

SEQ ID NO: 5386751 - DNA, 25 bp, Homo sapien
ttgaaagttaccagcccttccttga

SEQ ID NO: 5386752 - DNA, 25 bp, Homo sapien
tgtggttgaaagttaccagcccttc

SEQ ID NO: 5386753 - DNA, 25 bp, Homo sapien
gcagggtcggagtttgccacagctg

SEQ ID NO: 5386754 - DNA, 25 bp, Homo sapien
ggcagggtcggagtttgccacagct

SEQ ID NO: 5386755 - DNA, 25 bp, Homo sapien
tggcagggtcggagtttgccacagc

SEQ ID NO: 5386756 - DNA, 25 bp, Homo sapien
tggagttgccatcaagtctgctccg

SEQ ID NO: 5386757 - DNA, 25 bp, Homo sapien
gagttgccatcaagtctgctccgcg

SEQ ID NO: 5386758 - DNA, 25 bp, Homo sapien
ggagttgccatcaagtctgctccgc

SEQ ID NO: 5386759 - DNA, 25 bp, Homo sapien
ggcaaggcgtttccgaggcagcctc

SEQ ID NO: 5386760 - DNA, 25 bp, Homo sapien
ggctggcaaggcgtttccgaggcag

SEQ ID NO: 5386761 - DNA, 25 bp, Homo sapien
caaggcgtttccgaggcagcctcag

SEQ ID NO: 5386762 - DNA, 25 bp, Homo sapien
agaggctggcaaggcgtttccgagg

SEQ ID NO: 5386763 - DNA, 25 bp, Homo sapien
agacagagtttctcgaactcccgat

SEQ ID NO: 5386764 - DNA, 25 bp, Homo sapien
gaaatggaccttatgcatcgtatac

SEQ ID NO: 5386765 - DNA, 25 bp, Homo sapien
ttagaaatggaccttatgcatcgta

SEQ ID NO: 5386766 - DNA, 25 bp, Homo sapien
aaatggaccttatgcatcgtatact

SEQ ID NO: 5386767 - DNA, 25 bp, Homo sapien
atgcatcgtatacttcataagagct

SEQ ID NO: 5386768 - DNA, 25 bp, Homo sapien
tctctctatgtaggccattttctgc

SEQ ID NO: 5386769 - DNA, 25 bp, Homo sapien
gagccaggtgtctctcgctgtctgt

SEQ ID NO: 5386770 - DNA, 25 bp, Homo sapien
tctgccacagccagaattcattctg

SEQ ID NO: 5386771 - DNA, 25 bp, Homo sapien
catgctgttcttggctgctaaggaa

SEQ ID NO: 5386772 - DNA, 25 bp, Homo sapien
tcaaacgttacatttgtcttctctg

SEQ ID NO: 5386773 - DNA, 25 bp, Homo sapien
gttacatttgtcttctctgaagttc

SEQ ID NO: 5386774 - DNA, 25 bp, Homo sapien
tgtcttctctgaagttcttgttttt

SEQ ID NO: 5386775 - DNA, 25 bp, Homo sapien
aacgttacatttgtcttctctgaag

SEQ ID NO: 5386776 - DNA, 25 bp, Homo sapien
cacagtactgcagggttataagatt

SEQ ID NO: 5386777 - DNA, 25 bp, Homo sapien
acagtactgcagggttataagatta

SEQ ID NO: 5386778 - DNA, 25 bp, Homo sapien
cagtactgcagggttataagattat

SEQ ID NO: 5386779 - DNA, 25 bp, Homo sapien
taattgttaggtttatatgaatgag

SEQ ID NO: 5386780 - DNA, 25 bp, Homo sapien
gagtataacatgatagttaggagca

SEQ ID NO: 5386781 - DNA, 25 bp, Homo sapien
tttcttcctggataacagcgaatgc

SEQ ID NO: 5386782 - DNA, 25 bp, Homo sapien
cattcagatttggtgttgttgtcct

SEQ ID NO: 5386783 - DNA, 25 bp, Homo sapien
gcattcattgttgtaatttctggca

SEQ ID NO: 5386784 - DNA, 25 bp, Homo sapien
ggcagcatgtccaatttacttctac

SEQ ID NO: 5386785 - DNA, 25 bp, Homo sapien
ggtgcttgtttgttgtacttatgaa

SEQ ID NO: 5386786 - DNA, 25 bp, Homo sapien
acttctactgttaggtgcttgtttg

SEQ ID NO: 5386787 - DNA, 25 bp, Homo sapien
aacttgccttaacctcatttccttg

SEQ ID NO: 5386788 - DNA, 25 bp, Homo sapien
gcaaatgctgtcttatcactcatca

SEQ ID NO: 5386789 - DNA, 25 bp, Homo sapien
acctgataacgggatactatttgca

SEQ ID NO: 5386790 - DNA, 25 bp, Homo sapien
aacgggatactatttgcataagcaa

SEQ ID NO: 5386791 - DNA, 25 bp, Homo sapien
cagggatggggaagtgattcaggaa

SEQ ID NO: 5386792 - DNA, 25 bp, Homo sapien
agcttcttctccaacgtggcacaca

SEQ ID NO: 5386793 - DNA, 25 bp, Homo sapien
tcaggaaggccccaagggccagtgt

SEQ ID NO: 5386794 - DNA, 25 bp, Homo sapien
ggatggggaagtgattcaggaaggc

SEQ ID NO: 5386795 - DNA, 25 bp, Homo sapien
aggtccagctggtacccgaaggaga

SEQ ID NO: 5386796 - DNA, 25 bp, Homo sapien
tacccgaaggagacgctggtgtcct

SEQ ID NO: 5386797 - DNA, 25 bp, Homo sapien
ccacagagcctttggccttgggcag

SEQ ID NO: 5386798 - DNA, 25 bp, Homo sapien
tgcatccttgtgctggcctcaaact

SEQ ID NO: 5386799 - DNA, 25 bp, Homo sapien
tgcagctggtcactggctttgtggt

SEQ ID NO: 5386800 - DNA, 25 bp, Homo sapien
gctggtcactggctttgtggtagta

SEQ ID NO: 5386801 - DNA, 25 bp, Homo sapien
ctttgtggtagtatgttgcgtgcat

SEQ ID NO: 5386802 - DNA, 25 bp, Homo sapien
tcactggctttgtggtagtatgttg

SEQ ID NO: 5386803 - DNA, 25 bp, Homo sapien
ccaaccagttgttcaatgtgtattt

SEQ ID NO: 5386804 - DNA, 25 bp, Homo sapien
ccagttgttcaatgtgtatttccca

SEQ ID NO: 5386805 - DNA, 25 bp, Homo sapien
caacgttaccgttgccaaccagttg

SEQ ID NO: 5386806 - DNA, 25 bp, Homo sapien
gcctggcccaacgttaccgttgcca

SEQ ID NO: 5386807 - DNA, 25 bp, Homo sapien
aggctgctggtggtagaccagcatt

SEQ ID NO: 5386808 - DNA, 25 bp, Homo sapien
ctccccaggctgctggtggtagacc

SEQ ID NO: 5386809 - DNA, 25 bp, Homo sapien
ccaggctgctggtggtagaccagca

SEQ ID NO: 5386810 - DNA, 25 bp, Homo sapien
ccccaggctgctggtggtagaccag

SEQ ID NO: 5386811 - DNA, 25 bp, Homo sapien
tgatgctctggaggtagtgggctac

SEQ ID NO: 5386812 - DNA, 25 bp, Homo sapien
ggaggtagtgggctacgaggattcc

SEQ ID NO: 5386813 - DNA, 25 bp, Homo sapien
ccagggccaggcaaggcgtgatgct

SEQ ID NO: 5386814 - DNA, 25 bp, Homo sapien
agtgggctacgaggattcctgaacc

SEQ ID NO: 5386815 - DNA, 25 bp, Homo sapien
ctgtgagtcagagccccgatactcc

SEQ ID NO: 5386816 - DNA, 25 bp, Homo sapien
ggctgctgtgagtcagagccccgat

SEQ ID NO: 5386817 - DNA, 25 bp, Homo sapien
cacaaacttcgactgctgggtctgg

SEQ ID NO: 5386818 - DNA, 25 bp, Homo sapien
cctgccagttcacaaacttcgactg

SEQ ID NO: 5386819 - DNA, 25 bp, Homo sapien
caccaatacaaggaacgcctctgtg

SEQ ID NO: 5386820 - DNA, 25 bp, Homo sapien
cggcggcagcgtgaagcccggcggc

SEQ ID NO: 5386821 - DNA, 25 bp, Homo sapien
cggcagcgtgaagcccggcggcgag

SEQ ID NO: 5386822 - DNA, 25 bp, Homo sapien
gcggcagcgtgaagcccggcggcga

SEQ ID NO: 5386823 - DNA, 25 bp, Homo sapien
ctcccggcctgggctccgctcccac

SEQ ID NO: 5386824 - DNA, 25 bp, Homo sapien
cctgctcccggcctgggctccgctc

SEQ ID NO: 5386825 - DNA, 25 bp, Homo sapien
tgctcccggcctgggctccgctccc

SEQ ID NO: 5386826 - DNA, 25 bp, Homo sapien
ggtctctggcagaggcgcctgctcc

SEQ ID NO: 5386827 - DNA, 25 bp, Homo sapien
cgtgcgtcacgcgcaaccgaacccg

SEQ ID NO: 5386828 - DNA, 25 bp, Homo sapien
ccgtgcgtcacgcgcaaccgaaccc

SEQ ID NO: 5386829 - DNA, 25 bp, Homo sapien
cccgtgcgtcacgcgcaaccgaacc

SEQ ID NO: 5386830 - DNA, 25 bp, Homo sapien
aacttctgacgtcagttgatctgcg

SEQ ID NO: 5386831 - DNA, 25 bp, Homo sapien
cttctgacgtcagttgatctgcgca

SEQ ID NO: 5386832 - DNA, 25 bp, Homo sapien
tctgacgtcagttgatctgcgcacc

SEQ ID NO: 5386833 - DNA, 25 bp, Homo sapien
caaacttctgacgtcagttgatctg

SEQ ID NO: 5386834 - DNA, 25 bp, Homo sapien
gatcattaatagtcctgtcagcata

SEQ ID NO: 5386835 - DNA, 25 bp, Homo sapien
aatggacaactggtatcttatggtg

SEQ ID NO: 5386836 - DNA, 25 bp, Homo sapien
tttacaatcgatggagaaacagtga

SEQ ID NO: 5386837 - DNA, 25 bp, Homo sapien
taagtggtacatgatcagcattgtc

SEQ ID NO: 5386838 - DNA, 25 bp, Homo sapien
ctgatgtctacctggggtcttgtat

SEQ ID NO: 5386839 - DNA, 25 bp, Homo sapien
ggctccggtgttcactggagcctga

SEQ ID NO: 5386840 - DNA, 25 bp, Homo sapien
ctgggctccggtgttcactggagcc

SEQ ID NO: 5386841 - DNA, 25 bp, Homo sapien
ctccggtgttcactggagcctgatg

SEQ ID NO: 5386842 - DNA, 25 bp, Homo sapien
gggtctgccttaggcttaagtgtac

SEQ ID NO: 5386843 - DNA, 25 bp, Homo sapien
taggcttaagtgtacatctgtggcc

SEQ ID NO: 5386844 - DNA, 25 bp, Homo sapien
tctgccttaggcttaagtgtacatc

SEQ ID NO: 5386845 - DNA, 25 bp, Homo sapien
ccttaggcttaagtgtacatctgtg

SEQ ID NO: 5386846 - DNA, 25 bp, Homo sapien
tgggtatcaacctgaggacttggtg

SEQ ID NO: 5386847 - DNA, 25 bp, Homo sapien
gggcttgagtgtcaaccttaggtct

SEQ ID NO: 5386848 - DNA, 25 bp, Homo sapien
catctttgacctggtgtccaccggg

SEQ ID NO: 5386849 - DNA, 25 bp, Homo sapien
tgtccaattgaggtgtcatgaccac

SEQ ID NO: 5386850 - DNA, 25 bp, Homo sapien
gctgtgtactgggtctccacctggg

SEQ ID NO: 5386851 - DNA, 25 bp, Homo sapien
aaatactggagcctgatttacagct

SEQ ID NO: 5386852 - DNA, 25 bp, Homo sapien
taactggggcctgatgaaatactgg

SEQ ID NO: 5386853 - DNA, 25 bp, Homo sapien
cctgcagccagatatccacctggca

SEQ ID NO: 5386854 - DNA, 25 bp, Homo sapien
caggtgaatatcaagccctaggtgg

SEQ ID NO: 5386855 - DNA, 25 bp, Homo sapien
gataccaggatcctggtagacatca

SEQ ID NO: 5386856 - DNA, 25 bp, Homo sapien
cccaagaggacactagaacccagga

SEQ ID NO: 5386857 - DNA, 25 bp, Homo sapien
acattaagccacattagcatgaagg

SEQ ID NO: 5386858 - DNA, 25 bp, Homo sapien
tctggtgaacatcaggtgcaggtgt

SEQ ID NO: 5386859 - DNA, 25 bp, Homo sapien
caagtggattcctaggtctctggtg

SEQ ID NO: 5386860 - DNA, 25 bp, Homo sapien
cagggtaacattaggcccctgtagg

SEQ ID NO: 5386861 - DNA, 25 bp, Homo sapien
ccaatctgcagggtaacattaggcc

SEQ ID NO: 5386862 - DNA, 25 bp, Homo sapien
tgcagaaatacagcgatttccagtg

SEQ ID NO: 5386863 - DNA, 25 bp, Homo sapien
aatacagcgatttccagtgccagct

SEQ ID NO: 5386864 - DNA, 25 bp, Homo sapien
caggtgcagaaatacagcgatttcc

SEQ ID NO: 5386865 - DNA, 25 bp, Homo sapien
cttcaggtgcagaaatacagcgatt

SEQ ID NO: 5386866 - DNA, 25 bp, Homo sapien
agcccagtgaggagctgcctgactt

SEQ ID NO: 5386867 - DNA, 25 bp, Homo sapien
ctgcccaggaccagcccagtgagga

SEQ ID NO: 5386868 - DNA, 25 bp, Homo sapien
ccagtgaggagctgcctgacttcat

SEQ ID NO: 5386869 - DNA, 25 bp, Homo sapien
tgcccaggaccagcccagtgaggag

SEQ ID NO: 5386870 - DNA, 25 bp, Homo sapien
tcctcctcctgtatctgccagagga

SEQ ID NO: 5386871 - DNA, 25 bp, Homo sapien
ctcctcctgtatctgccagaggaag

SEQ ID NO: 5386872 - DNA, 25 bp, Homo sapien
cctcctcctgtatctgccagaggaa

SEQ ID NO: 5386873 - DNA, 25 bp, Homo sapien
gatgggccaatgcagtcgagatggc

SEQ ID NO: 5386874 - DNA, 25 bp, Homo sapien
cagatgggccaatgcagtcgagatg

SEQ ID NO: 5386875 - DNA, 25 bp, Homo sapien
acagatgggccaatgcagtcgagat

SEQ ID NO: 5386876 - DNA, 25 bp, Homo sapien
tgggccaatgcagtcgagatggcag

SEQ ID NO: 5386877 - DNA, 25 bp, Homo sapien
agggtctgacaagagactgagtccc

SEQ ID NO: 5386878 - DNA, 25 bp, Homo sapien
ctcgcccaaggtgaggattctccat

SEQ ID NO: 5386879 - DNA, 25 bp, Homo sapien
ggtctgacaagagactgagtcccag

SEQ ID NO: 5386880 - DNA, 25 bp, Homo sapien
cgcccaaggtgaggattctccatgg

SEQ ID NO: 5386881 - DNA, 25 bp, Homo sapien
cagcctccttagtacaggtgagtgc

SEQ ID NO: 5386882 - DNA, 25 bp, Homo sapien
gcccagcctccttagtacaggtgag

SEQ ID NO: 5386883 - DNA, 25 bp, Homo sapien
cagcccagcctccttagtacaggtg

SEQ ID NO: 5386884 - DNA, 25 bp, Homo sapien
gcctccttagtacaggtgagtgcca

SEQ ID NO: 5386885 - DNA, 25 bp, Homo sapien
ctggatacgtcttctgctgcactca

SEQ ID NO: 5386886 - DNA, 25 bp, Homo sapien
tgcactcatcctcttgaatgcccag

SEQ ID NO: 5386887 - DNA, 25 bp, Homo sapien
catctctggtaacgttttggcttga

SEQ ID NO: 5386888 - DNA, 25 bp, Homo sapien
ttggcttgatttgcagctcatacag

SEQ ID NO: 5386889 - DNA, 25 bp, Homo sapien
tcaccccctgtccgcctgtcaagag

SEQ ID NO: 5386890 - DNA, 25 bp, Homo sapien
caccccctgtccgcctgtcaagagg

SEQ ID NO: 5386891 - DNA, 25 bp, Homo sapien
ccccctgtccgcctgtcaagaggag

SEQ ID NO: 5386892 - DNA, 25 bp, Homo sapien
accccctgtccgcctgtcaagagga

SEQ ID NO: 5386893 - DNA, 25 bp, Homo sapien
ggacctgctggaacccctgctcaca

SEQ ID NO: 5386894 - DNA, 25 bp, Homo sapien
gcagtagcagcaggcccttcagcag

SEQ ID NO: 5386895 - DNA, 25 bp, Homo sapien
tgcaggcaggcaaacagccccagca

SEQ ID NO: 5386896 - DNA, 25 bp, Homo sapien
ctgcaggcaggcaaacagccccagc

SEQ ID NO: 5386897 - DNA, 25 bp, Homo sapien
gcagcagtagcagcaggcccttcag

SEQ ID NO: 5386898 - DNA, 25 bp, Homo sapien
ctccatagcttccactgtgcccagg

SEQ ID NO: 5386899 - DNA, 25 bp, Homo sapien
actggaaatcgctgtatttctgcac

SEQ ID NO: 5386900 - DNA, 25 bp, Homo sapien
ggcactggaaatcgctgtatttctg

SEQ ID NO: 5386901 - DNA, 25 bp, Homo sapien
ctggaggggaatctgcccctggtgc

SEQ ID NO: 5386902 - DNA, 25 bp, Homo sapien
cagctggcactggaaatcgctgtat

SEQ ID NO: 5386903 - DNA, 25 bp, Homo sapien
catgtgcctgtgtctcaatgagctc

SEQ ID NO: 5386904 - DNA, 25 bp, Homo sapien
gatgtggccctggtgggatcactgg

SEQ ID NO: 5386905 - DNA, 25 bp, Homo sapien
gtgcctgtgtctcaatgagctccag

SEQ ID NO: 5386906 - DNA, 25 bp, Homo sapien
cggggggcttctgccaaatggccag

SEQ ID NO: 5386907 - DNA, 25 bp, Homo sapien
gggcggggggcttctgccaaatggc

SEQ ID NO: 5386908 - DNA, 25 bp, Homo sapien
gcttctgccaaatggccagaggcat

SEQ ID NO: 5386909 - DNA, 25 bp, Homo sapien
ctgggcggggggcttctgccaaatg

SEQ ID NO: 5386910 - DNA, 25 bp, Homo sapien
tgtacatctgggaccttggtgtcta

SEQ ID NO: 5386911 - DNA, 25 bp, Homo sapien
tacatctgggaccttggtgtctatc

SEQ ID NO: 5386912 - DNA, 25 bp, Homo sapien
gctgtacatctgggaccttggtgtc

SEQ ID NO: 5386913 - DNA, 25 bp, Homo sapien
catctgggaccttggtgtctatctg

SEQ ID NO: 5386914 - DNA, 25 bp, Homo sapien
catcattttcaaggtggacacccag

SEQ ID NO: 5386915 - DNA, 25 bp, Homo sapien
caggcccaatgtgcatgcctagtct

SEQ ID NO: 5386916 - DNA, 25 bp, Homo sapien
aggtggaccccaggcccaatgtgca

SEQ ID NO: 5386917 - DNA, 25 bp, Homo sapien
gcctagtctcttggaatacatcatt

SEQ ID NO: 5386918 - DNA, 25 bp, Homo sapien
aaggtggatggataccttgacccca

SEQ ID NO: 5386919 - DNA, 25 bp, Homo sapien
tggatggataccttgaccccagggg

SEQ ID NO: 5386920 - DNA, 25 bp, Homo sapien
ggtggatggataccttgaccccagg

SEQ ID NO: 5386921 - DNA, 25 bp, Homo sapien
gtggatggataccttgaccccaggg

SEQ ID NO: 5386922 - DNA, 25 bp, Homo sapien
ctccactctcaggcctgacaaacat

SEQ ID NO: 5386923 - DNA, 25 bp, Homo sapien
tagtgtctctggcccctgctctcca

SEQ ID NO: 5386924 - DNA, 25 bp, Homo sapien
gtctctggcccctgctctccactct

SEQ ID NO: 5386925 - DNA, 25 bp, Homo sapien
tgctctccactctcaggcctgacaa

SEQ ID NO: 5386926 - DNA, 25 bp, Homo sapien
tcacacatgtgtcttcctgaaggcg

SEQ ID NO: 5386927 - DNA, 25 bp, Homo sapien
gttgggaccgctggcacagaagtca

SEQ ID NO: 5386928 - DNA, 25 bp, Homo sapien
cagcttagctacatgtgtgtcccag

SEQ ID NO: 5386929 - DNA, 25 bp, Homo sapien
taatcaatggagcagtgaacccgct

SEQ ID NO: 5386930 - DNA, 25 bp, Homo sapien
agctgccgccaggtctgtgcgcggg

SEQ ID NO: 5386931 - DNA, 25 bp, Homo sapien
gagcgcgtacgagggagccgaggct

SEQ ID NO: 5386932 - DNA, 25 bp, Homo sapien
tccctggagacccatgcagcgggtc

SEQ ID NO: 5386933 - DNA, 25 bp, Homo sapien
tggcccctgtcctcggacggctccg

SEQ ID NO: 5386934 - DNA, 25 bp, Homo sapien
gagggaccgcggctgagacaggctg

SEQ ID NO: 5386935 - DNA, 25 bp, Homo sapien
caggcggccctggaccgccgcttcc

SEQ ID NO: 5386936 - DNA, 25 bp, Homo sapien
accgcggctgagacaggctgctgca

SEQ ID NO: 5386937 - DNA, 25 bp, Homo sapien
ctggagggaccgcggctgagacagg

SEQ ID NO: 5386938 - DNA, 25 bp, Homo sapien
gttgcaggccggcgccacagcctga

SEQ ID NO: 5386939 - DNA, 25 bp, Homo sapien
gggttgcaggccggcgccacagcct

SEQ ID NO: 5386940 - DNA, 25 bp, Homo sapien
gggagcatcgccctcctccgccggg

SEQ ID NO: 5386941 - DNA, 25 bp, Homo sapien
ccagggagcatcgccctcctccgcc

SEQ ID NO: 5386942 - DNA, 25 bp, Homo sapien
agctgcagacgcgccgccaggctcc

SEQ ID NO: 5386943 - DNA, 25 bp, Homo sapien
gcgggagggcggtgcccagtcccca

SEQ ID NO: 5386944 - DNA, 25 bp, Homo sapien
gggagggcggtgcccagtccccagc

SEQ ID NO: 5386945 - DNA, 25 bp, Homo sapien
gccgcgggagggcggtgcccagtcc

SEQ ID NO: 5386946 - DNA, 25 bp, Homo sapien
tggacctgcagctggagtgccttac

SEQ ID NO: 5386947 - DNA, 25 bp, Homo sapien
cttgggggagcgggcgtggacctgc

SEQ ID NO: 5386948 - DNA, 25 bp, Homo sapien
ggggagcgggcgtggacctgcagct

SEQ ID NO: 5386949 - DNA, 25 bp, Homo sapien
ctggagtgccttactagtgaaaaag

SEQ ID NO: 5386950 - DNA, 25 bp, Homo sapien
catccatcttgtgcgcatagctttc

SEQ ID NO: 5386951 - DNA, 25 bp, Homo sapien
tccatccatcttgtgcgcatagctt

SEQ ID NO: 5386952 - DNA, 25 bp, Homo sapien
cttgtgcgcatagctttctgctcca

SEQ ID NO: 5386953 - DNA, 25 bp, Homo sapien
catcttgtgcgcatagctttctgct

SEQ ID NO: 5386954 - DNA, 25 bp, Homo sapien
tggtctccttggcagaaatgaccat

SEQ ID NO: 5386955 - DNA, 25 bp, Homo sapien
tttcatgagtttggtctccttggca

SEQ ID NO: 5386956 - DNA, 25 bp, Homo sapien
gtttggtctccttggcagaaatgac

SEQ ID NO: 5386957 - DNA, 25 bp, Homo sapien
tcatgagtttggtctccttggcaga

SEQ ID NO: 5386958 - DNA, 25 bp, Homo sapien
cagcgctgtgagttcggttgagatt

SEQ ID NO: 5386959 - DNA, 25 bp, Homo sapien
ttcagcgctgtgagttcggttgaga

SEQ ID NO: 5386960 - DNA, 25 bp, Homo sapien
taattgatgcgctgttcagcgctgt

SEQ ID NO: 5386961 - DNA, 25 bp, Homo sapien
gatgcgctgttcagcgctgtgagtt

SEQ ID NO: 5386962 - DNA, 25 bp, Homo sapien
cctcgcagacattctcgctgcactg

SEQ ID NO: 5386963 - DNA, 25 bp, Homo sapien
tccccctcgcagacattctcgctgc

SEQ ID NO: 5386964 - DNA, 25 bp, Homo sapien
tcgcagacattctcgctgcactggg

SEQ ID NO: 5386965 - DNA, 25 bp, Homo sapien
cccctcgcagacattctcgctgcac

SEQ ID NO: 5386966 - DNA, 25 bp, Homo sapien
ctgggtgatttctgctcatagtcga

SEQ ID NO: 5386967 - DNA, 25 bp, Homo sapien
ctcatagtcgactctgaagaaatgg

SEQ ID NO: 5386968 - DNA, 25 bp, Homo sapien
gataaggtgtttggacagctgcctg

SEQ ID NO: 5386969 - DNA, 25 bp, Homo sapien
agataaggtgtttggacagctgcct

SEQ ID NO: 5386970 - DNA, 25 bp, Homo sapien
aggaggatggcagttaggcagctca

SEQ ID NO: 5386971 - DNA, 25 bp, Homo sapien
ggaggatggcagttaggcagctcat

SEQ ID NO: 5386972 - DNA, 25 bp, Homo sapien
gaggaggatggcagttaggcagctc

SEQ ID NO: 5386973 - DNA, 25 bp, Homo sapien
ggtgtcaaccactgctcctagcctt

SEQ ID NO: 5386974 - DNA, 25 bp, Homo sapien
gagtgattctggtgggacaaacccc

SEQ ID NO: 5386975 - DNA, 25 bp, Homo sapien
tccagatatgagctagtaacctagg

SEQ ID NO: 5386976 - DNA, 25 bp, Homo sapien
ggaaccacatcactctacgcttgag

SEQ ID NO: 5386977 - DNA, 25 bp, Homo sapien
cagacataggatactgtataaagat

SEQ ID NO: 5386978 - DNA, 25 bp, Homo sapien
gcggcttgccagctcgcgtatgtag

SEQ ID NO: 5386979 - DNA, 25 bp, Homo sapien
ataaagatactggaaaacgtgggtg

SEQ ID NO: 5386980 - DNA, 25 bp, Homo sapien
gagcaggaagctctgccggctcgta

SEQ ID NO: 5386981 - DNA, 25 bp, Homo sapien
ccaggggcgctgcgtgtgtcgccag

SEQ ID NO: 5386982 - DNA, 25 bp, Homo sapien
tgcccaggggcgctgcgtgtgtcgc

SEQ ID NO: 5386983 - DNA, 25 bp, Homo sapien
ggggcgctgcgtgtgtcgccagctc

SEQ ID NO: 5386984 - DNA, 25 bp, Homo sapien
ggcgctgcgtgtgtcgccagctcac

SEQ ID NO: 5386985 - DNA, 25 bp, Homo sapien
ccaggaagagcacgctgcgcctgcg

SEQ ID NO: 5386986 - DNA, 25 bp, Homo sapien
tgggacactgtcaaggcaaaactgc

SEQ ID NO: 5386987 - DNA, 25 bp, Homo sapien
catgggcgagaaggcgcggtgcact

SEQ ID NO: 5386988 - DNA, 25 bp, Homo sapien
agaaggcgcggtgcactgggacact

SEQ ID NO: 5386989 - DNA, 25 bp, Homo sapien
gcactgggacactgtcaaggcaaaa

SEQ ID NO: 5386990 - DNA, 25 bp, Homo sapien
ctgtgtgccagcagcgcgcactgga

SEQ ID NO: 5386991 - DNA, 25 bp, Homo sapien
gaacatggtctctgtgtgccagcag

SEQ ID NO: 5386992 - DNA, 25 bp, Homo sapien
ttgaacatggtctctgtgtgccagc

SEQ ID NO: 5386993 - DNA, 25 bp, Homo sapien
ctctgtgtgccagcagcgcgcactg

SEQ ID NO: 5386994 - DNA, 25 bp, Homo sapien
gcccgcgggccgcgagtccagcagt

SEQ ID NO: 5386995 - DNA, 25 bp, Homo sapien
ccaggcagtgggttgtgggctctga

SEQ ID NO: 5386996 - DNA, 25 bp, Homo sapien
aggcagtgggttgtgggctctgagg

SEQ ID NO: 5386997 - DNA, 25 bp, Homo sapien
ggcccaggcagtgggttgtgggctc

SEQ ID NO: 5386998 - DNA, 25 bp, Homo sapien
cccaggcagtgggttgtgggctctg

SEQ ID NO: 5386999 - DNA, 25 bp, Homo sapien
ggctggcagtgggtcgcaagtcgat

SEQ ID NO: 5387000 - DNA, 25 bp, Homo sapien
caggtccttgatgagctcgtacagc

SEQ ID NO: 5387001 - DNA, 25 bp, Homo sapien
atgagctcgtacagctgctctagga

SEQ ID NO: 5387002 - DNA, 25 bp, Homo sapien
gctcgtacagctgctctaggatccg

SEQ ID NO: 5387003 - DNA, 25 bp, Homo sapien
tgagctcgtacagctgctctaggat

SEQ ID NO: 5387004 - DNA, 25 bp, Homo sapien
ccgtcgggggccgcatggggaagtg

SEQ ID NO: 5387005 - DNA, 25 bp, Homo sapien
gcagcccccgggcaactcccaggcc

SEQ ID NO: 5387006 - DNA, 25 bp, Homo sapien
gcatggggaagtggccgcgtgcagc

SEQ ID NO: 5387007 - DNA, 25 bp, Homo sapien
gccgcatggggaagtggccgcgtgc

SEQ ID NO: 5387008 - DNA, 25 bp, Homo sapien
cagtggggcatagcgtctgggcgag

SEQ ID NO: 5387009 - DNA, 25 bp, Homo sapien
ggggcatagcgtctgggcgaggtgg

SEQ ID NO: 5387010 - DNA, 25 bp, Homo sapien
ggacagtggggcatagcgtctgggc

SEQ ID NO: 5387011 - DNA, 25 bp, Homo sapien
tggggcatagcgtctgggcgaggtg

SEQ ID NO: 5387012 - DNA, 25 bp, Homo sapien
aggttctcatagctgcggccacggc

SEQ ID NO: 5387013 - DNA, 25 bp, Homo sapien
gcggccacggcccaactggtctccg

SEQ ID NO: 5387014 - DNA, 25 bp, Homo sapien
gcaggttctcatagctgcggccacg

SEQ ID NO: 5387015 - DNA, 25 bp, Homo sapien
cccaactggtctccgcacggcccgg

SEQ ID NO: 5387016 - DNA, 25 bp, Homo sapien
gtcacgctcacggtattttccgaag

SEQ ID NO: 5387017 - DNA, 25 bp, Homo sapien
aggacgtcacgctcacggtattttc

SEQ ID NO: 5387018 - DNA, 25 bp, Homo sapien
gctcacggtattttccgaagtcctc

SEQ ID NO: 5387019 - DNA, 25 bp, Homo sapien
gacgtcacgctcacggtattttccg

SEQ ID NO: 5387020 - DNA, 25 bp, Homo sapien
cgggcccgcaggaccgtgagcccca

SEQ ID NO: 5387021 - DNA, 25 bp, Homo sapien
acccgcgggtggctcgggaggtgcg

SEQ ID NO: 5387022 - DNA, 25 bp, Homo sapien
gcacaggggcgcgatgtggcctggg

SEQ ID NO: 5387023 - DNA, 25 bp, Homo sapien
ggggcgcgatgtggcctgggccgcc

SEQ ID NO: 5387024 - DNA, 25 bp, Homo sapien
cggcggcgcacaggggcgcgatgtg

SEQ ID NO: 5387025 - DNA, 25 bp, Homo sapien
tgggcctcccgccctcggcggggca

SEQ ID NO: 5387026 - DNA, 25 bp, Homo sapien
gcctcccgccctcggcggggcaaca

SEQ ID NO: 5387027 - DNA, 25 bp, Homo sapien
gcagtggcgcttgttgaaaggcgcg

SEQ ID NO: 5387028 - DNA, 25 bp, Homo sapien
gggtcgccaccttgatgtcctggta

SEQ ID NO: 5387029 - DNA, 25 bp, Homo sapien
cttgttgaaaggcgcgggctcagca

SEQ ID NO: 5387030 - DNA, 25 bp, Homo sapien
cctggtacacggtcgacaccagcag

SEQ ID NO: 5387031 - DNA, 25 bp, Homo sapien
cgcttcctccatgccggagtcagaa

SEQ ID NO: 5387032 - DNA, 25 bp, Homo sapien
gcgggcgcttcctccatgccggagt

SEQ ID NO: 5387033 - DNA, 25 bp, Homo sapien
cgggcctgggccgagaaagcgggcg

SEQ ID NO: 5387034 - DNA, 25 bp, Homo sapien
cgagaaagcgggcgcttcctccatg

SEQ ID NO: 5387035 - DNA, 25 bp, Homo sapien
ttcctttgccgacaccttttctgac

SEQ ID NO: 5387036 - DNA, 25 bp, Homo sapien
ctttcctttgccgacaccttttctg

SEQ ID NO: 5387037 - DNA, 25 bp, Homo sapien
ttgccgacaccttttctgaccccaa

SEQ ID NO: 5387038 - DNA, 25 bp, Homo sapien
tgggtggttgaaacaaggccccagc

SEQ ID NO: 5387039 - DNA, 25 bp, Homo sapien
ctgagctgcgcagcaggcccagaag

SEQ ID NO: 5387040 - DNA, 25 bp, Homo sapien
acggcagtcccaaaccatcgagcca

SEQ ID NO: 5387041 - DNA, 25 bp, Homo sapien
ctagggtttgcacggcagtcccaaa

SEQ ID NO: 5387042 - DNA, 25 bp, Homo sapien
atcgagccacgagctcgtggcagcc

SEQ ID NO: 5387043 - DNA, 25 bp, Homo sapien
ctacccccaggtcgactcctccttg

SEQ ID NO: 5387044 - DNA, 25 bp, Homo sapien
cccggcaccagcagaagtttccagg

SEQ ID NO: 5387045 - DNA, 25 bp, Homo sapien
ttccaggcagcagcgcgggtcctga

SEQ ID NO: 5387046 - DNA, 25 bp, Homo sapien
gctgtacttaaaggggccacaccca

SEQ ID NO: 5387047 - DNA, 25 bp, Homo sapien
cgctggctccaatttggggatgtgc

SEQ ID NO: 5387048 - DNA, 25 bp, Homo sapien
gtgagctgcgctggctccaatttgg

SEQ ID NO: 5387049 - DNA, 25 bp, Homo sapien
tcgtgagctgcgctggctccaattt

SEQ ID NO: 5387050 - DNA, 25 bp, Homo sapien
gggatcgtgagctgcgctggctcca

SEQ ID NO: 5387051 - DNA, 25 bp, Homo sapien
cagacctcagtgtctaagcaggagt

SEQ ID NO: 5387052 - DNA, 25 bp, Homo sapien
acacagacctcagtgtctaagcagg

SEQ ID NO: 5387053 - DNA, 25 bp, Homo sapien
agacctcagtgtctaagcaggagtc

SEQ ID NO: 5387054 - DNA, 25 bp, Homo sapien
acagacctcagtgtctaagcaggag

SEQ ID NO: 5387055 - DNA, 25 bp, Homo sapien
ggctcctaagcttgctgtgggccac

SEQ ID NO: 5387056 - DNA, 25 bp, Homo sapien
ctcctaagcttgctgtgggccacag

SEQ ID NO: 5387057 - DNA, 25 bp, Homo sapien
ggccaggctcctaagcttgctgtgg

SEQ ID NO: 5387058 - DNA, 25 bp, Homo sapien
caggctcctaagcttgctgtgggcc

SEQ ID NO: 5387059 - DNA, 25 bp, Homo sapien
agggactgcagtgattgccccacac

SEQ ID NO: 5387060 - DNA, 25 bp, Homo sapien
ttctcatggcaacagtagctgtggg

SEQ ID NO: 5387061 - DNA, 25 bp, Homo sapien
ccgccctgcagggttctcatggcaa

SEQ ID NO: 5387062 - DNA, 25 bp, Homo sapien
ctccccttcactggcacgctcttcc

SEQ ID NO: 5387063 - DNA, 25 bp, Homo sapien
ccccttcactggcacgctcttcctg

SEQ ID NO: 5387064 - DNA, 25 bp, Homo sapien
ctcagaagtgcacacagcagccgcc

SEQ ID NO: 5387065 - DNA, 25 bp, Homo sapien
acagcagccgccaagcgtggcaaag

SEQ ID NO: 5387066 - DNA, 25 bp, Homo sapien
agctcagaagtgcacacagcagccg

SEQ ID NO: 5387067 - DNA, 25 bp, Homo sapien
acacagcagccgccaagcgtggcaa

SEQ ID NO: 5387068 - DNA, 25 bp, Homo sapien
tctgcgctgggaggactcgtcttac

SEQ ID NO: 5387069 - DNA, 25 bp, Homo sapien
ctctgcgctgggaggactcgtctta

SEQ ID NO: 5387070 - DNA, 25 bp, Homo sapien
cgctctcaaagtcggggtcatccat

SEQ ID NO: 5387071 - DNA, 25 bp, Homo sapien
cctcgctctcaaagtcggggtcatc

SEQ ID NO: 5387072 - DNA, 25 bp, Homo sapien
tcggggtcatccatgacgaaggaca

SEQ ID NO: 5387073 - DNA, 25 bp, Homo sapien
catccatgacgaaggacagcatttg

SEQ ID NO: 5387074 - DNA, 25 bp, Homo sapien
ctcaatctcagcagggggcctggtg

SEQ ID NO: 5387075 - DNA, 25 bp, Homo sapien
cctggtgctgctgcacttctccaga

SEQ ID NO: 5387076 - DNA, 25 bp, Homo sapien
ctggtgctgctgcacttctccagac

SEQ ID NO: 5387077 - DNA, 25 bp, Homo sapien
acccttccctggctcaatctcagca

SEQ ID NO: 5387078 - DNA, 25 bp, Homo sapien
gcagggccttttgggggatccgcca

SEQ ID NO: 5387079 - DNA, 25 bp, Homo sapien
cttcctcctcacttgaaagagtgat

SEQ ID NO: 5387080 - DNA, 25 bp, Homo sapien
tgggggatccgccacttctgcttcc

SEQ ID NO: 5387081 - DNA, 25 bp, Homo sapien
ttgaaagagtgatgtcttgactggg

SEQ ID NO: 5387082 - DNA, 25 bp, Homo sapien
gtggctggtcttcgaggtccacgtc

SEQ ID NO: 5387083 - DNA, 25 bp, Homo sapien
ggtcttcgaggtccacgtcgtcctg

SEQ ID NO: 5387084 - DNA, 25 bp, Homo sapien
tgccacaatcgggttgccgcccagg

SEQ ID NO: 5387085 - DNA, 25 bp, Homo sapien
tcctggaaccctgccacaatcgggt

SEQ ID NO: 5387086 - DNA, 25 bp, Homo sapien
ttccaggcaccctggtacccagcac

SEQ ID NO: 5387087 - DNA, 25 bp, Homo sapien
tggttccaggcaccctggtacccag

SEQ ID NO: 5387088 - DNA, 25 bp, Homo sapien
aggccttggttccaggcaccctggt

SEQ ID NO: 5387089 - DNA, 25 bp, Homo sapien
gccttggttccaggcaccctggtac

SEQ ID NO: 5387090 - DNA, 25 bp, Homo sapien
aggccccctcatggccgtcacaggg

SEQ ID NO: 5387091 - DNA, 25 bp, Homo sapien
gtgttgtagtggagaggccccctca

SEQ ID NO: 5387092 - DNA, 25 bp, Homo sapien
ggtgctgtgttgtagtggagaggcc

SEQ ID NO: 5387093 - DNA, 25 bp, Homo sapien
ccccaggtgctgtgttgtagtggag

SEQ ID NO: 5387094 - DNA, 25 bp, Homo sapien
cctgctgggcagccttggcccccac

SEQ ID NO: 5387095 - DNA, 25 bp, Homo sapien
ccctccccgtgtcgctgtcctgctg

SEQ ID NO: 5387096 - DNA, 25 bp, Homo sapien
tcctgctgggcagccttggccccca

SEQ ID NO: 5387097 - DNA, 25 bp, Homo sapien
tccccgtgtcgctgtcctgctgggc

SEQ ID NO: 5387098 - DNA, 25 bp, Homo sapien
caggcggtcattggcaacgaagtcc

SEQ ID NO: 5387099 - DNA, 25 bp, Homo sapien
ggtccaggcggtcattggcaacgaa

SEQ ID NO: 5387100 - DNA, 25 bp, Homo sapien
tccaggcggtcattggcaacgaagt

SEQ ID NO: 5387101 - DNA, 25 bp, Homo sapien
ccaggcggtcattggcaacgaagtc

SEQ ID NO: 5387102 - DNA, 25 bp, Homo sapien
gcaccggaaccctcactgcacccaa

SEQ ID NO: 5387103 - DNA, 25 bp, Homo sapien
ctgtgaacagtgacgctgggtcctc

SEQ ID NO: 5387104 - DNA, 25 bp, Homo sapien
gaacagtgacgctgggtcctcttca

SEQ ID NO: 5387105 - DNA, 25 bp, Homo sapien
gggtcctcttcactcggcaccggaa

SEQ ID NO: 5387106 - DNA, 25 bp, Homo sapien
agaagaagtgcggagcgctccgaaa

SEQ ID NO: 5387107 - DNA, 25 bp, Homo sapien
gactgggacaagcaagaagaagtgc

SEQ ID NO: 5387108 - DNA, 25 bp, Homo sapien
agcaagaagaagtgcggagcgctcc

SEQ ID NO: 5387109 - DNA, 25 bp, Homo sapien
acaagcaagaagaagtgcggagcgc

SEQ ID NO: 5387110 - DNA, 25 bp, Homo sapien
gtgacgtcccaaacagcctagagat

SEQ ID NO: 5387111 - DNA, 25 bp, Homo sapien
ggcaggtgacgtcccaaacagccta

SEQ ID NO: 5387112 - DNA, 25 bp, Homo sapien
gacgtcccaaacagcctagagatga

SEQ ID NO: 5387113 - DNA, 25 bp, Homo sapien
aggtgacgtcccaaacagcctagag

SEQ ID NO: 5387114 - DNA, 25 bp, Homo sapien
cagggcctctgagggtggtacaggg

SEQ ID NO: 5387115 - DNA, 25 bp, Homo sapien
cacagaggatggtggggcggcattg

SEQ ID NO: 5387116 - DNA, 25 bp, Homo sapien
ctctgagggtggtacagggggcaca

SEQ ID NO: 5387117 - DNA, 25 bp, Homo sapien
tacgccatggggcgggggctgaggg

SEQ ID NO: 5387118 - DNA, 25 bp, Homo sapien
acgactgtgagcctccatcatatcc

SEQ ID NO: 5387119 - DNA, 25 bp, Homo sapien
gacgcctggccacgactgtgagcct

SEQ ID NO: 5387120 - DNA, 25 bp, Homo sapien
gactgggagcctgaggatgggctct

SEQ ID NO: 5387121 - DNA, 25 bp, Homo sapien
cctgaggatgggctctgccccttgg

SEQ ID NO: 5387122 - DNA, 25 bp, Homo sapien
tgcaatctctcccaccacaaacctg

SEQ ID NO: 5387123 - DNA, 25 bp, Homo sapien
aatctctcccaccacaaacctggac

SEQ ID NO: 5387124 - DNA, 25 bp, Homo sapien
caatctctcccaccacaaacctgga

SEQ ID NO: 5387125 - DNA, 25 bp, Homo sapien
tctctcccaccacaaacctggacca

SEQ ID NO: 5387126 - DNA, 25 bp, Homo sapien
agtgaggaatctggacgtgatctgt

SEQ ID NO: 5387127 - DNA, 25 bp, Homo sapien
gacgtgatctgtgatgccctctccc

SEQ ID NO: 5387128 - DNA, 25 bp, Homo sapien
acgtgatctgtgatgccctctcccc

SEQ ID NO: 5387129 - DNA, 25 bp, Homo sapien
gaatctggacgtgatctgtgatgcc

SEQ ID NO: 5387130 - DNA, 25 bp, Homo sapien
gggccctcctgggcaaatcgccagt

SEQ ID NO: 5387131 - DNA, 25 bp, Homo sapien
ccctcctgggcaaatcgccagtgtg

SEQ ID NO: 5387132 - DNA, 25 bp, Homo sapien
tcctgggcaaatcgccagtgtgggt

SEQ ID NO: 5387133 - DNA, 25 bp, Homo sapien
ggccctcctgggcaaatcgccagtg

SEQ ID NO: 5387134 - DNA, 25 bp, Homo sapien
cattgaggactatcacagatttgaa

SEQ ID NO: 5387135 - DNA, 25 bp, Homo sapien
tccaagctgcaggtaattgtccaga

SEQ ID NO: 5387136 - DNA, 25 bp, Homo sapien
gatcatctccgtaatgactccaagc

SEQ ID NO: 5387137 - DNA, 25 bp, Homo sapien
cagagcagtgagtgtaacccgtgag

SEQ ID NO: 5387138 - DNA, 25 bp, Homo sapien
gccagttccttgacgatcatctccg

SEQ ID NO: 5387139 - DNA, 25 bp, Homo sapien
ctgaaagactcatgagagtcttccc

SEQ ID NO: 5387140 - DNA, 25 bp, Homo sapien
catgagagtcttccccaaagttttg

SEQ ID NO: 5387141 - DNA, 25 bp, Homo sapien
ccccaaagttttgcattttagccat

SEQ ID NO: 5387142 - DNA, 25 bp, Homo sapien
aagactcatgagagtcttccccaaa

SEQ ID NO: 5387143 - DNA, 25 bp, Homo sapien
gcaatccccgtttagttcaatgtac

SEQ ID NO: 5387144 - DNA, 25 bp, Homo sapien
gcttgaggcaataaacgaactctgg

SEQ ID NO: 5387145 - DNA, 25 bp, Homo sapien
ctgggaaactataaatgctggcacg

SEQ ID NO: 5387146 - DNA, 25 bp, Homo sapien
aacatcatgacaggtgacaacgtgc

SEQ ID NO: 5387147 - DNA, 25 bp, Homo sapien
ccagaaagaagaaacccaggacaca

SEQ ID NO: 5387148 - DNA, 25 bp, Homo sapien
agaccatgagcccaccagaaagaag

SEQ ID NO: 5387149 - DNA, 25 bp, Homo sapien
atgagcccaccagaaagaagaaacc

SEQ ID NO: 5387150 - DNA, 25 bp, Homo sapien
agcccaccagaaagaagaaacccag

SEQ ID NO: 5387151 - DNA, 25 bp, Homo sapien
tggtggaaagcaaaggagaagcaaa

SEQ ID NO: 5387152 - DNA, 25 bp, Homo sapien
ggagaagcaaacacgtcttacatgg

SEQ ID NO: 5387153 - DNA, 25 bp, Homo sapien
aaagcaaaggagaagcaaacacgtc

SEQ ID NO: 5387154 - DNA, 25 bp, Homo sapien
caaaggagaagcaaacacgtcttac

SEQ ID NO: 5387155 - DNA, 25 bp, Homo sapien
taaagaaagactagtgttccacaaa

SEQ ID NO: 5387156 - DNA, 25 bp, Homo sapien
taaaaaatatatggttatccatttc

SEQ ID NO: 5387157 - DNA, 25 bp, Homo sapien
tattccatccatatgtggaaaagat

SEQ ID NO: 5387158 - DNA, 25 bp, Homo sapien
tccattaactgatgagtgtgtaaat

SEQ ID NO: 5387159 - DNA, 25 bp, Homo sapien
gccaacaacagctcactttcaaaat

SEQ ID NO: 5387160 - DNA, 25 bp, Homo sapien
tcatatgtctcaagttcagttaaca

SEQ ID NO: 5387161 - DNA, 25 bp, Homo sapien
tcttatagtggccagagtccctctt

SEQ ID NO: 5387162 - DNA, 25 bp, Homo sapien
aatttttgctatgtgcgagttgttc

SEQ ID NO: 5387163 - DNA, 25 bp, Homo sapien
tattcaagaataggaaaggccagct

SEQ ID NO: 5387164 - DNA, 25 bp, Homo sapien
ccccaaggcttgatctattcatgag

SEQ ID NO: 5387165 - DNA, 25 bp, Homo sapien
gctagtttagcacacttagacatga

SEQ ID NO: 5387166 - DNA, 25 bp, Homo sapien
taagcttcgggatgcattatggcaa

SEQ ID NO: 5387167 - DNA, 25 bp, Homo sapien
cattgctattgttgtcaatattgct

SEQ ID NO: 5387168 - DNA, 25 bp, Homo sapien
ctcagaggtttcatcattgctattg

SEQ ID NO: 5387169 - DNA, 25 bp, Homo sapien
tcatcattgctattgttgtcaatat

SEQ ID NO: 5387170 - DNA, 25 bp, Homo sapien
tgttgtcaatattgctgtttattaa

SEQ ID NO: 5387171 - DNA, 25 bp, Homo sapien
tggacctaaagtaatggatttgccc

SEQ ID NO: 5387172 - DNA, 25 bp, Homo sapien
aaatggacctaaagtaatggatttg

SEQ ID NO: 5387173 - DNA, 25 bp, Homo sapien
aatggacctaaagtaatggatttgc

SEQ ID NO: 5387174 - DNA, 25 bp, Homo sapien
gacctaaagtaatggatttgcccat

SEQ ID NO: 5387175 - DNA, 25 bp, Homo sapien
aaaaagctgccgcagcggtgacgaa

SEQ ID NO: 5387176 - DNA, 25 bp, Homo sapien
gcaaaaaaccgcggcgccaagggca

SEQ ID NO: 5387177 - DNA, 25 bp, Homo sapien
cgccgcagtggggataaaaagctgc

SEQ ID NO: 5387178 - DNA, 25 bp, Homo sapien
cggcaggagcaaaaagccgccgcag

SEQ ID NO: 5387179 - DNA, 25 bp, Homo sapien
cacgtctgggttatacggtatagcc

SEQ ID NO: 5387180 - DNA, 25 bp, Homo sapien
gattgtacagcctaccacgtctggg

SEQ ID NO: 5387181 - DNA, 25 bp, Homo sapien
catcattttgcaaacgtcagagaga

SEQ ID NO: 5387182 - DNA, 25 bp, Homo sapien
tgcaggcaataagaacacagcggta

SEQ ID NO: 5387183 - DNA, 25 bp, Homo sapien
gttttatgtaagcggaacacattta

SEQ ID NO: 5387184 - DNA, 25 bp, Homo sapien
atgtaagcggaacacatttaactga

SEQ ID NO: 5387185 - DNA, 25 bp, Homo sapien
tttatgtaagcggaacacatttaac

SEQ ID NO: 5387186 - DNA, 25 bp, Homo sapien
tatgtaagcggaacacatttaactg

SEQ ID NO: 5387187 - DNA, 25 bp, Homo sapien
aaaaatatgtcctttgagacagcat

SEQ ID NO: 5387188 - DNA, 25 bp, Homo sapien
gcaccttgtataaattcaatgccaa

SEQ ID NO: 5387189 - DNA, 25 bp, Homo sapien
cacccctaccaaatgctaacaagaa

SEQ ID NO: 5387190 - DNA, 25 bp, Homo sapien
cagcattaaagaaagagcaccttgt

SEQ ID NO: 5387191 - DNA, 25 bp, Homo sapien
tgacttagttccagcagccacttgg

SEQ ID NO: 5387192 - DNA, 25 bp, Homo sapien
ggagggaagccagtcctttaaagca

SEQ ID NO: 5387193 - DNA, 25 bp, Homo sapien
ttgggtttctctgggttttctctgc

SEQ ID NO: 5387194 - DNA, 25 bp, Homo sapien
gagggaagccagtcctttaaagcaa

SEQ ID NO: 5387195 - DNA, 25 bp, Homo sapien
agcccgtgcaggctgccgatggaga

SEQ ID NO: 5387196 - DNA, 25 bp, Homo sapien
tgcgcagcccgtgcaggctgccgat

SEQ ID NO: 5387197 - DNA, 25 bp, Homo sapien
atggagatgccgatgagcttctgta

SEQ ID NO: 5387198 - DNA, 25 bp, Homo sapien
gtgcaggctgccgatggagatgccg

SEQ ID NO: 5387199 - DNA, 25 bp, Homo sapien
tagcagaagcaatccgtaaagtttt

SEQ ID NO: 5387200 - DNA, 25 bp, Homo sapien
aaactttagtaagttagcagaagca

SEQ ID NO: 5387201 - DNA, 25 bp, Homo sapien
tgttgtaaaatgcagcgttggtgtc

SEQ ID NO: 5387202 - DNA, 25 bp, Homo sapien
ttgtttgttgtaaaatgcagcgttg

SEQ ID NO: 5387203 - DNA, 25 bp, Homo sapien
aatgtacagaaaacccataggagac

SEQ ID NO: 5387204 - DNA, 25 bp, Homo sapien
taatctgtacataagagctgagctc

SEQ ID NO: 5387205 - DNA, 25 bp, Homo sapien
tccagtgacctgctatgtttatgtg

SEQ ID NO: 5387206 - DNA, 25 bp, Homo sapien
cctaagacctagctaatcagaacag

SEQ ID NO: 5387207 - DNA, 25 bp, Homo sapien
gtttatcccaactgtgtatgcatca

SEQ ID NO: 5387208 - DNA, 25 bp, Homo sapien
taatggatgcaccattattggccac

SEQ ID NO: 5387209 - DNA, 25 bp, Homo sapien
cacaatgcttgctgtgtaatggatg

SEQ ID NO: 5387210 - DNA, 25 bp, Homo sapien
aatcgattctgtatatggagaggac

SEQ ID NO: 5387211 - DNA, 25 bp, Homo sapien
aattaaaaattgtgacctgcacagc

SEQ ID NO: 5387212 - DNA, 25 bp, Homo sapien
cagaagaggaaaactcgaccgctac

SEQ ID NO: 5387213 - DNA, 25 bp, Homo sapien
cttcaaactttaccacaagctacgg

SEQ ID NO: 5387214 - DNA, 25 bp, Homo sapien
catacacccctattgaacagaagag

SEQ ID NO: 5387215 - DNA, 25 bp, Homo sapien
cactttattttcagtcgtcttttca

SEQ ID NO: 5387216 - DNA, 25 bp, Homo sapien
cagtcactttattttcagtcgtctt

SEQ ID NO: 5387217 - DNA, 25 bp, Homo sapien
attttcagtcgtcttttcaaagcca

SEQ ID NO: 5387218 - DNA, 25 bp, Homo sapien
tttcagtcgtcttttcaaagccact

SEQ ID NO: 5387219 - DNA, 25 bp, Homo sapien
agcttcatagttgacatcattatat

SEQ ID NO: 5387220 - DNA, 25 bp, Homo sapien
aagcttcatagttgacatcattata

SEQ ID NO: 5387221 - DNA, 25 bp, Homo sapien
ctagtaagcttcatagttgacatca

SEQ ID NO: 5387222 - DNA, 25 bp, Homo sapien
gtgcaagaagtaggctcccatagtc

SEQ ID NO: 5387223 - DNA, 25 bp, Homo sapien
gatgaggatgctccttttccaaata

SEQ ID NO: 5387224 - DNA, 25 bp, Homo sapien
ggatgctccttttccaaataggaga

SEQ ID NO: 5387225 - DNA, 25 bp, Homo sapien
cacactggtgcaagaagtaggctcc

SEQ ID NO: 5387226 - DNA, 25 bp, Homo sapien
tattttgtatattcggagagtgagt

SEQ ID NO: 5387227 - DNA, 25 bp, Homo sapien
atattttgtatattcggagagtgag

SEQ ID NO: 5387228 - DNA, 25 bp, Homo sapien
catattttgtatattcggagagtga

SEQ ID NO: 5387229 - DNA, 25 bp, Homo sapien
aggttatgcataggtaccttatgac

SEQ ID NO: 5387230 - DNA, 25 bp, Homo sapien
cactgagtagatatgagcatagatt

SEQ ID NO: 5387231 - DNA, 25 bp, Homo sapien
caaagagttatacctaataccaaat

SEQ ID NO: 5387232 - DNA, 25 bp, Homo sapien
gcatagattaattcgccatcatgaa

SEQ ID NO: 5387233 - DNA, 25 bp, Homo sapien
tattacttgaaggtggattgtgatg

SEQ ID NO: 5387234 - DNA, 25 bp, Homo sapien
gcttgtgcgcaatctgaaaacttat

SEQ ID NO: 5387235 - DNA, 25 bp, Homo sapien
tggtgtgtcccatgactgtttgcac

SEQ ID NO: 5387236 - DNA, 25 bp, Homo sapien
tattcccagggttttgtcaatggct

SEQ ID NO: 5387237 - DNA, 25 bp, Homo sapien
tctgcctcatggataagctcattga

SEQ ID NO: 5387238 - DNA, 25 bp, Homo sapien
tataaataagtgtcgtcccatcctg

SEQ ID NO: 5387239 - DNA, 25 bp, Homo sapien
gggagtttctcctaagtctggtcag

SEQ ID NO: 5387240 - DNA, 25 bp, Homo sapien
ggatcccctattaggaaaactgctg

SEQ ID NO: 5387241 - DNA, 25 bp, Homo sapien
tgaggccactcacaagtaactggat

SEQ ID NO: 5387242 - DNA, 25 bp, Homo sapien
cagttacagagcaggtgtctaagga

SEQ ID NO: 5387243 - DNA, 25 bp, Homo sapien
acttctatggaagagtggtcttgca

SEQ ID NO: 5387244 - DNA, 25 bp, Homo sapien
atagggttggactgcacactctaag

SEQ ID NO: 5387245 - DNA, 25 bp, Homo sapien
tctaaggatgactaaggacagagca

SEQ ID NO: 5387246 - DNA, 25 bp, Homo sapien
ggcaaggaggcataacgaacgagga

SEQ ID NO: 5387247 - DNA, 25 bp, Homo sapien
caaggaggcataacgaacgaggaag

SEQ ID NO: 5387248 - DNA, 25 bp, Homo sapien
aggaggcataacgaacgaggaagtt

SEQ ID NO: 5387249 - DNA, 25 bp, Homo sapien
gaggcataacgaacgaggaagttaa

SEQ ID NO: 5387250 - DNA, 25 bp, Homo sapien
tcagccgtgtcaggtgttctttccg

SEQ ID NO: 5387251 - DNA, 25 bp, Homo sapien
tcactgtatcctattcatcaggtgt

SEQ ID NO: 5387252 - DNA, 25 bp, Homo sapien
ctgtatcctattcatcaggtgttct

SEQ ID NO: 5387253 - DNA, 25 bp, Homo sapien
cgtgtcaggtgttctttccgccaag

SEQ ID NO: 5387254 - DNA, 25 bp, Homo sapien
acctggaaaacttctactcattcag

SEQ ID NO: 5387255 - DNA, 25 bp, Homo sapien
cctggaaaacttctactcattcagc

SEQ ID NO: 5387256 - DNA, 25 bp, Homo sapien
ttacctggaaaacttctactcattc

SEQ ID NO: 5387257 - DNA, 25 bp, Homo sapien
tctttacctggaaaacttctactca

SEQ ID NO: 5387258 - DNA, 25 bp, Homo sapien
ttgtttatattccaaaagttgttga

SEQ ID NO: 5387259 - DNA, 25 bp, Homo sapien
atattccaaaagttgttgatgaacg

SEQ ID NO: 5387260 - DNA, 25 bp, Homo sapien
tgagaatttttagatatcttttgtt

SEQ ID NO: 5387261 - DNA, 25 bp, Homo sapien
gtttatattccaaaagttgttgatg

SEQ ID NO: 5387262 - DNA, 25 bp, Homo sapien
aaatcactattttaacattgatata

SEQ ID NO: 5387263 - DNA, 25 bp, Homo sapien
tcactattttaacattgatataaaa

SEQ ID NO: 5387264 - DNA, 25 bp, Homo sapien
aataaaatcactattttaacattga

SEQ ID NO: 5387265 - DNA, 25 bp, Homo sapien
taaaatcactattttaacattgata

SEQ ID NO: 5387266 - DNA, 25 bp, Homo sapien
gtagcttgacatgtggaaaatgtcc

SEQ ID NO: 5387267 - DNA, 25 bp, Homo sapien
ctcatgaagtgagggcagtataact

SEQ ID NO: 5387268 - DNA, 25 bp, Homo sapien
gaacaagttgcttctcttagactca

SEQ ID NO: 5387269 - DNA, 25 bp, Homo sapien
gaataagtcctagcatggctaccaa

SEQ ID NO: 5387270 - DNA, 25 bp, Homo sapien
agctagttagaaagtagtaaaatgt

SEQ ID NO: 5387271 - DNA, 25 bp, Homo sapien
gctagttagaaagtagtaaaatgtc

SEQ ID NO: 5387272 - DNA, 25 bp, Homo sapien
gctgatcttctcaacgttgttttaa

SEQ ID NO: 5387273 - DNA, 25 bp, Homo sapien
agatttctatgtcatctttgtgcgg

SEQ ID NO: 5387274 - DNA, 25 bp, Homo sapien
caccttacagatttctatgtcatct

SEQ ID NO: 5387275 - DNA, 25 bp, Homo sapien
aagaaatatgcaacaccttacagat

SEQ ID NO: 5387276 - DNA, 25 bp, Homo sapien
tataaagggccagggatatagatct

SEQ ID NO: 5387277 - DNA, 25 bp, Homo sapien
tgagaccgtccactgcctacaaaat

SEQ ID NO: 5387278 - DNA, 25 bp, Homo sapien
tacaaaatggtgctacacaggatat

SEQ ID NO: 5387279 - DNA, 25 bp, Homo sapien
cagggatatagatctggtaacaaag

SEQ ID NO: 5387280 - DNA, 25 bp, Homo sapien
attttgctgaagaagcttgccaact

SEQ ID NO: 5387281 - DNA, 25 bp, Homo sapien
aagcttgccaactatctctgatgat

SEQ ID NO: 5387282 - DNA, 25 bp, Homo sapien
taacgttctgcaatcattccacatg

SEQ ID NO: 5387283 - DNA, 25 bp, Homo sapien
tgtagcttcagcacagatgtcaaca

SEQ ID NO: 5387284 - DNA, 25 bp, Homo sapien
taaacttatcaactgcatttgcatt

SEQ ID NO: 5387285 - DNA, 25 bp, Homo sapien
tttaaacttatcaactgcatttgca

SEQ ID NO: 5387286 - DNA, 25 bp, Homo sapien
catttaaacttatcaactgcatttg

SEQ ID NO: 5387287 - DNA, 25 bp, Homo sapien
aaacttatcaactgcatttgcattt

SEQ ID NO: 5387288 - DNA, 25 bp, Homo sapien
cttttccttatggccagtaaaagtg

SEQ ID NO: 5387289 - DNA, 25 bp, Homo sapien
cacttcttttccttatggccagtaa

SEQ ID NO: 5387290 - DNA, 25 bp, Homo sapien
tttcctcacttcttttccttatggc

SEQ ID NO: 5387291 - DNA, 25 bp, Homo sapien
tccttatggccagtaaaagtggtgt

SEQ ID NO: 5387292 - DNA, 25 bp, Homo sapien
gattccaaatgccaatgtcaggcac

SEQ ID NO: 5387293 - DNA, 25 bp, Homo sapien
tcctaggatcctaatgcatatctac

SEQ ID NO: 5387294 - DNA, 25 bp, Homo sapien
tttaagggacaattctgtggagaaa

SEQ ID NO: 5387295 - DNA, 25 bp, Homo sapien
gaaagttctaactcatgtatgtggc

SEQ ID NO: 5387296 - DNA, 25 bp, Homo sapien
tatgtggcttagcaaaatagaagcc

SEQ ID NO: 5387297 - DNA, 25 bp, Homo sapien
tctcactgttaacagcataatggac

SEQ ID NO: 5387298 - DNA, 25 bp, Homo sapien
cactgttaacagcataatggacagc

SEQ ID NO: 5387299 - DNA, 25 bp, Homo sapien
cttgttcttcacttcgatgtctgca

SEQ ID NO: 5387300 - DNA, 25 bp, Homo sapien
cgatgtctgcaccacaggacagcaa

SEQ ID NO: 5387301 - DNA, 25 bp, Homo sapien
tgacactttctatctaccagaagtg

SEQ ID NO: 5387302 - DNA, 25 bp, Homo sapien
catcagaatggtcctgttttcacca

SEQ ID NO: 5387303 - DNA, 25 bp, Homo sapien
cgtcaagctgacactttctatctac

SEQ ID NO: 5387304 - DNA, 25 bp, Homo sapien
catcaaggacgtcaagctgacactt

SEQ ID NO: 5387305 - DNA, 25 bp, Homo sapien
gggcccaggacggccgccccgctgc

SEQ ID NO: 5387306 - DNA, 25 bp, Homo sapien
ccaggccccactctgaaggggcgat

SEQ ID NO: 5387307 - DNA, 25 bp, Homo sapien
acggccgccccgctgcccgccactc

SEQ ID NO: 5387308 - DNA, 25 bp, Homo sapien
caggccccactctgaaggggcgatc

SEQ ID NO: 5387309 - DNA, 25 bp, Homo sapien
ctgagatccccatggtgaatcacgt

SEQ ID NO: 5387310 - DNA, 25 bp, Homo sapien
gatccccatggtgaatcacgtaaga

SEQ ID NO: 5387311 - DNA, 25 bp, Homo sapien
ttcaggtccattgtcgtcttcttca

SEQ ID NO: 5387312 - DNA, 25 bp, Homo sapien
aggtccattgtcgtcttcttcatca

SEQ ID NO: 5387313 - DNA, 25 bp, Homo sapien
aaatggctgcgcaaaaccgttaggc

SEQ ID NO: 5387314 - DNA, 25 bp, Homo sapien
gcatccgccctgacaagactagaaa

SEQ ID NO: 5387315 - DNA, 25 bp, Homo sapien
tctcccgggagaaaatggctgcgca

SEQ ID NO: 5387316 - DNA, 25 bp, Homo sapien
tcagtcgggccaagcttttggacac

SEQ ID NO: 5387317 - DNA, 25 bp, Homo sapien
gggccaacattgagtggtcttaagg

SEQ ID NO: 5387318 - DNA, 25 bp, Homo sapien
cattgagtggtcttaaggaagtcaa

SEQ ID NO: 5387319 - DNA, 25 bp, Homo sapien
caacattgagtggtcttaaggaagt

SEQ ID NO: 5387320 - DNA, 25 bp, Homo sapien
agtggtcttaaggaagtcaaggtag

SEQ ID NO: 5387321 - DNA, 25 bp, Homo sapien
gaccctttgacagcacagggaaaga

SEQ ID NO: 5387322 - DNA, 25 bp, Homo sapien
aatagactttcagaaggaagggcct

SEQ ID NO: 5387323 - DNA, 25 bp, Homo sapien
tcaggaatccagtcataggcaaatc

SEQ ID NO: 5387324 - DNA, 25 bp, Homo sapien
aagggccttccataacaaggaatgc

SEQ ID NO: 5387325 - DNA, 25 bp, Homo sapien
cttcacataaacaccagacagaagc

SEQ ID NO: 5387326 - DNA, 25 bp, Homo sapien
tcacataaacaccagacagaagcat

SEQ ID NO: 5387327 - DNA, 25 bp, Homo sapien
acataaacaccagacagaagcattc

SEQ ID NO: 5387328 - DNA, 25 bp, Homo sapien
tatcttcacataaacaccagacaga

SEQ ID NO: 5387329 - DNA, 25 bp, Homo sapien
cctccgtccagcagccaccccgtct

SEQ ID NO: 5387330 - DNA, 25 bp, Homo sapien
agcccctccgtccagcagccacccc

SEQ ID NO: 5387331 - DNA, 25 bp, Homo sapien
gtgaggaaaccctctgcctggcaac

SEQ ID NO: 5387332 - DNA, 25 bp, Homo sapien
gagaagtgaggaaaccctctgcctg

SEQ ID NO: 5387333 - DNA, 25 bp, Homo sapien
ttttcaagtggatatttttactgct

SEQ ID NO: 5387334 - DNA, 25 bp, Homo sapien
aattttcaagtggatatttttactg

SEQ ID NO: 5387335 - DNA, 25 bp, Homo sapien
ttcaagtggatatttttactgcttt

SEQ ID NO: 5387336 - DNA, 25 bp, Homo sapien
attttcaagtggatatttttactgc

SEQ ID NO: 5387337 - DNA, 25 bp, Homo sapien
aatctgcaagtggattcttggagcg

SEQ ID NO: 5387338 - DNA, 25 bp, Homo sapien
aagtggattcttggagcgctttgag

SEQ ID NO: 5387339 - DNA, 25 bp, Homo sapien
actagacagaggaattctgagaaac

SEQ ID NO: 5387340 - DNA, 25 bp, Homo sapien
taaaaactagacagaggaattctga

SEQ ID NO: 5387341 - DNA, 25 bp, Homo sapien
ggatgcatgcgtttatctcacagag

SEQ ID NO: 5387342 - DNA, 25 bp, Homo sapien
gaagcttctttggatgcatgcgttt

SEQ ID NO: 5387343 - DNA, 25 bp, Homo sapien
tattttcacatcaaaacgacacaga

SEQ ID NO: 5387344 - DNA, 25 bp, Homo sapien
gaagaattcggagaagcttctttgg

SEQ ID NO: 5387345 - DNA, 25 bp, Homo sapien
ctactttgtgatgggtgtactcaac

SEQ ID NO: 5387346 - DNA, 25 bp, Homo sapien
caagtggatattagggcagcattga

SEQ ID NO: 5387347 - DNA, 25 bp, Homo sapien
tgggtgtactcaactcacagttaaa

SEQ ID NO: 5387348 - DNA, 25 bp, Homo sapien
cgctggaaacgggtatgtcttcaca

SEQ ID NO: 5387349 - DNA, 25 bp, Homo sapien
ctgccccgacatggaagctccggat

SEQ ID NO: 5387350 - DNA, 25 bp, Homo sapien
gggacgggtccgaggatgcagcggt

SEQ ID NO: 5387351 - DNA, 25 bp, Homo sapien
ggcacacgatggtggacgacaccac

SEQ ID NO: 5387352 - DNA, 25 bp, Homo sapien
accaccaggggcaagcgaaccacgg

SEQ ID NO: 5387353 - DNA, 25 bp, Homo sapien
ttgcagttcacattaattctcccag

SEQ ID NO: 5387354 - DNA, 25 bp, Homo sapien
cgaagagtcgatgatcaacgtgtct

SEQ ID NO: 5387355 - DNA, 25 bp, Homo sapien
tgcattcgaagagtcgatgatcaac

SEQ ID NO: 5387356 - DNA, 25 bp, Homo sapien
gatgatcaacgtgtcttgcagttca

SEQ ID NO: 5387357 - DNA, 25 bp, Homo sapien
acccagcgggctgatccgagggcct

SEQ ID NO: 5387358 - DNA, 25 bp, Homo sapien
cagcgggctgatccgagggcctcac

SEQ ID NO: 5387359 - DNA, 25 bp, Homo sapien
caggagtagcgactgcagtgtgtac

SEQ ID NO: 5387360 - DNA, 25 bp, Homo sapien
catccaatcaggagtagcgactgca

SEQ ID NO: 5387361 - DNA, 25 bp, Homo sapien
caccatcgccaatgaggttcaacag

SEQ ID NO: 5387362 - DNA, 25 bp, Homo sapien
aatccctgatcaccatcgccaatga

SEQ ID NO: 5387363 - DNA, 25 bp, Homo sapien
cctgatcaccatcgccaatgaggtt

SEQ ID NO: 5387364 - DNA, 25 bp, Homo sapien
tcaccatcgccaatgaggttcaaca

SEQ ID NO: 5387365 - DNA, 25 bp, Homo sapien
gggatgccgaccgctccagggtcac

SEQ ID NO: 5387366 - DNA, 25 bp, Homo sapien
gatgccgaccgctccagggtcacat

SEQ ID NO: 5387367 - DNA, 25 bp, Homo sapien
ttgggggatgccgaccgctccaggg

SEQ ID NO: 5387368 - DNA, 25 bp, Homo sapien
tgccgaccgctccagggtcacataa

SEQ ID NO: 5387369 - DNA, 25 bp, Homo sapien
tcggaattacaacggtatctgatcg

SEQ ID NO: 5387370 - DNA, 25 bp, Homo sapien
cgccacatcgccagttggcatcgtt

SEQ ID NO: 5387371 - DNA, 25 bp, Homo sapien
gaataacaccgccacatcgccagtt

SEQ ID NO: 5387372 - DNA, 25 bp, Homo sapien
tatggtcggaattacaacggtatct

SEQ ID NO: 5387373 - DNA, 25 bp, Homo sapien
gaaaacattcttggcaaatgctttc

SEQ ID NO: 5387374 - DNA, 25 bp, Homo sapien
aacattcttggcaaatgctttcgct

SEQ ID NO: 5387375 - DNA, 25 bp, Homo sapien
aaacattcttggcaaatgctttcgc

SEQ ID NO: 5387376 - DNA, 25 bp, Homo sapien
atgaaaacattcttggcaaatgctt

SEQ ID NO: 5387377 - DNA, 25 bp, Homo sapien
gcgattggcccgaggttatccagaa

SEQ ID NO: 5387378 - DNA, 25 bp, Homo sapien
aagtaagtgcttcgggccacaggac

SEQ ID NO: 5387379 - DNA, 25 bp, Homo sapien
acattcgaatgggtcatcgctgcca
